United States Patent Application Publication US 2018/0305689 A1 - sequence listing, part 7

SEQ ID NO: 13074 - RNA, 19 nt, Artificial Sequence
  Description of Artificial Sequence: Synthetic oligonucleotide
  Sense strand starting at position 3510 of SEQ ID NO: 123
gucauuauucuuuaaaggu

SEQ ID NO: 13075 - RNA, 19 nt, Artificial Sequence
  Description of Artificial Sequence: Synthetic oligonucleotide
  Antisense strand to SEQ ID NO: 13074
accuuuaaagaauaaugac

SEQ ID NO: 13076 - RNA, 19 nt, Artificial Sequence
  Description of Artificial Sequence: Synthetic oligonucleotide
  Sense strand starting at position 3533 of SEQ ID NO: 123
gucuguuagauguaggaag

SEQ ID NO: 13077 - RNA, 19 nt, Artificial Sequence
  Description of Artificial Sequence: Synthetic oligonucleotide
  Antisense strand to SEQ ID NO: 13076
cuuccuacaucuaacagac

SEQ ID NO: 13078 - RNA, 19 nt, Artificial Sequence
  Description of Artificial Sequence: Synthetic oligonucleotide
  Sense strand starting at position 3664 of SEQ ID NO: 123
gugaaauugacauguauug

SEQ ID NO: 13079 - RNA, 19 nt, Artificial Sequence
  Description of Artificial Sequence: Synthetic oligonucleotide
  Antisense strand to SEQ ID NO: 13078
caauacaugucaauuucac

SEQ ID NO: 13080 - RNA, 19 nt, Artificial Sequence
  Description of Artificial Sequence: Synthetic oligonucleotide
  Sense strand starting at position 3697 of SEQ ID NO: 123
ggaagaaaugucuagcuuc

SEQ ID NO: 13081 - RNA, 19 nt, Artificial Sequence
  Description of Artificial Sequence: Synthetic oligonucleotide
  Antisense strand to SEQ ID NO: 13080
gaagcuagacauuucuucc

SEQ ID NO: 13082 - RNA, 19 nt, Artificial Sequence
  Description of Artificial Sequence: Synthetic oligonucleotide
  Sense strand starting at position 3945 of SEQ ID NO: 123
ggguauauccaagauggcu

SEQ ID NO: 13083 - RNA, 19 nt, Artificial Sequence
  Description of Artificial Sequence: Synthetic oligonucleotide
  Antisense strand to SEQ ID NO: 13082
agccaucuuggauauaccc

SEQ ID NO: 13084 - RNA, 19 nt, Artificial Sequence
  Description of Artificial Sequence: Synthetic oligonucleotide
  Sense strand starting at position 3867 of SEQ ID NO: 124
uuauaucauccaugugugu

SEQ ID NO: 13085 - RNA, 19 nt, Artificial Sequence
  Description of Artificial Sequence: Synthetic oligonucleotide
  Antisense strand to SEQ ID NO: 13084
acacacauggaugauauaa

SEQ ID NO: 13086 - RNA, 19 nt, Artificial Sequence
  Description of Artificial Sequence: Synthetic oligonucleotide
  Sense strand starting at position 3863 of SEQ ID NO: 124
ucuguuauaucauccaugu

SEQ ID NO: 13087 - RNA, 19 nt, Artificial Sequence
  Description of Artificial Sequence: Synthetic oligonucleotide
  Antisense strand to SEQ ID NO: 13086
acauggaugauauaacaga

SEQ ID NO: 13088 - RNA, 19 nt, Artificial Sequence
  Description of Artificial Sequence: Synthetic oligonucleotide
  Sense strand starting at position 3645 of SEQ ID NO: 124
ggaaauaccagcugcugau

SEQ ID NO: 13089 - RNA, 19 nt, Artificial Sequence
  Description of Artificial Sequence: Synthetic oligonucleotide
  Antisense strand to SEQ ID NO: 13088
aucagcagcugguauuucc

SEQ ID NO: 13090 - RNA, 19 nt, Artificial Sequence
  Description of Artificial Sequence: Synthetic oligonucleotide
  Sense strand starting at position 3633 of SEQ ID NO: 124
ucgcuacauguaggaaaua

SEQ ID NO: 13091 - RNA, 19 nt, Artificial Sequence
  Description of Artificial Sequence: Synthetic oligonucleotide
  Antisense strand to SEQ ID NO: 13090
uauuuccuacauguagcga

SEQ ID NO: 13092 - RNA, 19 nt, Artificial Sequence
  Description of Artificial Sequence: Synthetic oligonucleotide
  Sense strand starting at position 3631 of SEQ ID NO: 124
auucgcuacauguaggaaa

SEQ ID NO: 13093 - RNA, 19 nt, Artificial Sequence
  Description of Artificial Sequence: Synthetic oligonucleotide
  Antisense strand to SEQ ID NO: 13092
uuuccuacauguagcgaau

SEQ ID NO: 13094 - RNA, 19 nt, Artificial Sequence
  Description of Artificial Sequence: Synthetic oligonucleotide
  Sense strand starting at position 3534 of SEQ ID NO: 124
acaucugugugacuaguaa

SEQ ID NO: 13095 - RNA, 19 nt, Artificial Sequence
  Description of Artificial Sequence: Synthetic oligonucleotide
  Antisense strand to SEQ ID NO: 13094
uuacuagucacacagaugu

SEQ ID NO: 13096 - RNA, 19 nt, Artificial Sequence
  Description of Artificial Sequence: Synthetic oligonucleotide
  Sense strand starting at position 3531 of SEQ ID NO: 124
ggcacaucugugugacuag

SEQ ID NO: 13097 - RNA, 19 nt, Artificial Sequence
  Description of Artificial Sequence: Synthetic oligonucleotide
  Antisense strand to SEQ ID NO: 13096
cuagucacacagaugugcc

SEQ ID NO: 13098 - RNA, 19 nt, Artificial Sequence
  Description of Artificial Sequence: Synthetic oligonucleotide
  Sense strand starting at position 3530 of SEQ ID NO: 124
gggcacaucugugugacua

SEQ ID NO: 13099 - RNA, 19 nt, Artificial Sequence
  Description of Artificial Sequence: Synthetic oligonucleotide
  Antisense strand to SEQ ID NO: 13098
uagucacacagaugugccc

SEQ ID NO: 13100 - RNA, 19 nt, Artificial Sequence
  Description of Artificial Sequence: Synthetic oligonucleotide
  Sense strand starting at position 3529 of SEQ ID NO: 124
ugggcacaucugugugacu

SEQ ID NO: 13101 - RNA, 19 nt, Artificial Sequence
  Description of Artificial Sequence: Synthetic oligonucleotide
  Antisense strand to SEQ ID NO: 13100
agucacacagaugugccca

SEQ ID NO: 13102 - RNA, 19 nt, Artificial Sequence
  Description of Artificial Sequence: Synthetic oligonucleotide
  Sense strand starting at position 3483 of SEQ ID NO: 124
ggcuaccauuaugauuuau

SEQ ID NO: 13103 - RNA, 19 nt, Artificial Sequence
  Description of Artificial Sequence: Synthetic oligonucleotide
  Antisense strand to SEQ ID NO: 13102
auaaaucauaaugguagcc

SEQ ID NO: 13104 - RNA, 19 nt, Artificial Sequence
  Description of Artificial Sequence: Synthetic oligonucleotide
  Sense strand starting at position 3474 of SEQ ID NO: 124
guucuugagggcuaccauu

SEQ ID NO: 13105 - RNA, 19 nt, Artificial Sequence
  Description of Artificial Sequence: Synthetic oligonucleotide
  Antisense strand to SEQ ID NO: 13104
aaugguagcccucaagaac

SEQ ID NO: 13106 - RNA, 19 nt, Artificial Sequence
  Description of Artificial Sequence: Synthetic oligonucleotide
  Sense strand starting at position 3411 of SEQ ID NO: 124
auguucuaguagguggaaa

SEQ ID NO: 13107 - RNA, 19 nt, Artificial Sequence
  Description of Artificial Sequence: Synthetic oligonucleotide
  Antisense strand to SEQ ID NO: 13106
uuuccaccuacuagaacau

SEQ ID NO: 13108 - RNA, 19 nt, Artificial Sequence
  Description of Artificial Sequence: Synthetic oligonucleotide
  Sense strand starting at position 3403 of SEQ ID NO: 124
uagagcuuauguucuagua

SEQ ID NO: 13109 - RNA, 19 nt, Artificial Sequence
  Description of Artificial Sequence: Synthetic oligonucleotide
  Antisense strand to SEQ ID NO: 13108
uacuagaacauaagcucua

SEQ ID NO: 13110 - RNA, 19 nt, Artificial Sequence
  Description of Artificial Sequence: Synthetic oligonucleotide
  Sense strand starting at position 3352 of SEQ ID NO: 124
cgucuagacacuggagaaa

SEQ ID NO: 13111 - RNA, 19 nt, Artificial Sequence
  Description of Artificial Sequence: Synthetic oligonucleotide
  Antisense strand to SEQ ID NO: 13110
uuucuccagugucuagacg

SEQ ID NO: 13112 - RNA, 19 nt, Artificial Sequence
  Description of Artificial Sequence: Synthetic oligonucleotide
  Sense strand starting at position 3341 of SEQ ID NO: 124
caaagaaucuacgucuaga

SEQ ID NO: 13113 - RNA, 19 nt, Artificial Sequence
  Description of Artificial Sequence: Synthetic oligonucleotide
  Antisense strand to SEQ ID NO: 13112
ucuagacguagauucuuug

SEQ ID NO: 13114 - RNA, 19 nt, Artificial Sequence
  Description of Artificial Sequence: Synthetic oligonucleotide
  Sense strand starting at position 3169 of SEQ ID NO: 124
ucacauagguuagagaaua

SEQ ID NO: 13115 - RNA, 19 nt, Artificial Sequence
  Description of Artificial Sequence: Synthetic oligonucleotide
  Antisense strand to SEQ ID NO: 13114
uauucucuaaccuauguga

SEQ ID NO: 13116 - RNA, 19 nt, Artificial Sequence
  Description of Artificial Sequence: Synthetic oligonucleotide
  Sense strand starting at position 3164 of SEQ ID NO: 124
gagugucacauagguuaga

SEQ ID NO: 13117 - RNA, 19 nt, Artificial Sequence
  Description of Artificial Sequence: Synthetic oligonucleotide
  Antisense strand to SEQ ID NO: 13116
ucuaaccuaugugacacuc

SEQ ID NO: 13118 - RNA, 19 nt, Artificial Sequence
  Description of Artificial Sequence: Synthetic oligonucleotide
  Sense strand starting at position 3162 of SEQ ID NO: 124
ccgagugucacauagguua

SEQ ID NO: 13119 - RNA, 19 nt, Artificial Sequence
  Description of Artificial Sequence: Synthetic oligonucleotide
  Antisense strand to SEQ ID NO: 13118
uaaccuaugugacacucgg

SEQ ID NO: 13120 - RNA, 19 nt, Artificial Sequence
  Description of Artificial Sequence: Synthetic oligonucleotide
  Sense strand starting at position 3134 of SEQ ID NO: 124
cauauugagugcuuguacu

SEQ ID NO: 13121 - RNA, 19 nt, Artificial Sequence
  Description of Artificial Sequence: Synthetic oligonucleotide
  Antisense strand to SEQ ID NO: 13120
aguacaagcacucaauaug

SEQ ID NO: 13122 - RNA, 19 nt, Artificial Sequence
  Description of Artificial Sequence: Synthetic oligonucleotide
  Sense strand starting at position 2556 of SEQ ID NO: 124
uaguaaagacuugguuucu

SEQ ID NO: 13123 - RNA, 19 nt, Artificial Sequence
  Description of Artificial Sequence: Synthetic oligonucleotide
  Antisense strand to SEQ ID NO: 13122
agaaaccaagucuuuacua

SEQ ID NO: 13124 - RNA, 19 nt, Artificial Sequence
  Description of Artificial Sequence: Synthetic oligonucleotide
  Sense strand starting at position 2300 of SEQ ID NO: 124
aagucagcucugcaaagua

SEQ ID NO: 13125 - RNA, 19 nt, Artificial Sequence
  Description of Artificial Sequence: Synthetic oligonucleotide
  Antisense strand to SEQ ID NO: 13124
uacuuugcagagcugacuu

SEQ ID NO: 13126 - RNA, 19 nt, Artificial Sequence
  Description of Artificial Sequence: Synthetic oligonucleotide
  Sense strand starting at position 2299 of SEQ ID NO: 124
gaagucagcucugcaaagu

SEQ ID NO: 13127 - RNA, 19 nt, Artificial Sequence
  Description of Artificial Sequence: Synthetic oligonucleotide
  Antisense strand to SEQ ID NO: 13126
acuuugcagagcugacuuc

SEQ ID NO: 13128 - RNA, 19 nt, Artificial Sequence
  Description of Artificial Sequence: Synthetic oligonucleotide
  Sense strand starting at position 2298 of SEQ ID NO: 124
ugaagucagcucugcaaag

SEQ ID NO: 13129 - RNA, 19 nt, Artificial Sequence
  Description of Artificial Sequence: Synthetic oligonucleotide
  Antisense strand to SEQ ID NO: 13128
cuuugcagagcugacuuca

SEQ ID NO: 13130 - RNA, 19 nt, Artificial Sequence
  Description of Artificial Sequence: Synthetic oligonucleotide
  Sense strand starting at position 2111 of SEQ ID NO: 124
guguguaggcuaggaaaca

SEQ ID NO: 13131 - RNA, 19 nt, Artificial Sequence
  Description of Artificial Sequence: Synthetic oligonucleotide
  Antisense strand to SEQ ID NO: 13130
uguuuccuagccuacacac

SEQ ID NO: 13132 - RNA, 19 nt, Artificial Sequence
  Description of Artificial Sequence: Synthetic oligonucleotide
  Sense strand starting at position 2109 of SEQ ID NO: 124
acguguguaggcuaggaaa

SEQ ID NO: 13133 - RNA, 19 nt, Artificial Sequence
  Description of Artificial Sequence: Synthetic oligonucleotide
  Antisense strand to SEQ ID NO: 13132
uuuccuagccuacacacgu

SEQ ID NO: 13134 - RNA, 19 nt, Artificial Sequence
  Description of Artificial Sequence: Synthetic oligonucleotide
  Sense strand starting at position 2032 of SEQ ID NO: 124
gccugccuccagcaaagau

SEQ ID NO: 13135 - RNA, 19 nt, Artificial Sequence
  Description of Artificial Sequence: Synthetic oligonucleotide
  Antisense strand to SEQ ID NO: 13134
aucuuugcuggaggcaggc

SEQ ID NO: 13136 - RNA, 19 nt, Artificial Sequence
  Description of Artificial Sequence: Synthetic oligonucleotide
  Sense strand starting at position 1829 of SEQ ID NO: 124
cuuuccuucccgcagugau

SEQ ID NO: 13137 - RNA, 19 nt, Artificial Sequence
  Description of Artificial Sequence: Synthetic oligonucleotide
  Antisense strand to SEQ ID NO: 13136
aucacugcgggaaggaaag

SEQ ID NO: 13138 - RNA, 19 nt, Artificial Sequence
  Description of Artificial Sequence: Synthetic oligonucleotide
  Sense strand starting at position 1468 of SEQ ID NO: 124
auggaagaguuccaucaaa

SEQ ID NO: 13139 - RNA, 19 nt, Artificial Sequence
  Description of Artificial Sequence: Synthetic oligonucleotide
  Antisense strand to SEQ ID NO: 13138
uuugauggaacucuuccau

SEQ ID NO: 13140 - RNA, 19 nt, Artificial Sequence
  Description of Artificial Sequence: Synthetic oligonucleotide
  Sense strand starting at position 950 of SEQ ID NO: 124
ggauaauguccacgaguca

SEQ ID NO: 13141 - RNA, 19 nt, Artificial Sequence
  Description of Artificial Sequence: Synthetic oligonucleotide
  Antisense strand to SEQ ID NO: 13140
ugacucguggacauuaucc

SEQ ID NO: 13142 - RNA, 19 nt, Artificial Sequence
  Description of Artificial Sequence: Synthetic oligonucleotide
  Sense strand starting at position 855 of SEQ ID NO: 124
caagcauuagugugaggaa

SEQ ID NO: 13143 - RNA, 19 nt, Artificial Sequence
  Description of Artificial Sequence: Synthetic oligonucleotide
  Antisense strand to SEQ ID NO: 13142
uuccucacacuaaugcuug

SEQ ID NO: 13144 - RNA, 19 nt, Artificial Sequence
  Description of Artificial Sequence: Synthetic oligonucleotide
  Sense strand starting at position 847 of SEQ ID NO: 124
aggugagccaagcauuagu

SEQ ID NO: 13145 - RNA, 19 nt, Artificial Sequence
  Description of Artificial Sequence: Synthetic oligonucleotide
  Antisense strand to SEQ ID NO: 13144
acuaaugcuuggcucaccu

SEQ ID NO: 13146 - RNA, 19 nt, Artificial Sequence
  Description of Artificial Sequence: Synthetic oligonucleotide
  Sense strand starting at position 292 of SEQ ID NO: 124
uuaagugacuuagcaaagu

SEQ ID NO: 13147 - RNA, 19 nt, Artificial Sequence
  Description of Artificial Sequence: Synthetic oligonucleotide
  Antisense strand to SEQ ID NO: 13146
acuuugcuaagucacuuaa

SEQ ID NO: 13148 - RNA, 19 nt, Artificial Sequence
  Description of Artificial Sequence: Synthetic oligonucleotide
  Sense strand starting at position 288 of SEQ ID NO: 124
gauguuaagugacuuagca

SEQ ID NO: 13149 - RNA, 19 nt, Artificial Sequence
  Description of Artificial Sequence: Synthetic oligonucleotide
  Antisense strand to SEQ ID NO: 13148
ugcuaagucacuuaacauc

SEQ ID NO: 13150 - RNA, 19 nt, Artificial Sequence
  Description of Artificial Sequence: Synthetic oligonucleotide
  Sense strand starting at position 284 of SEQ ID NO: 124
uacagauguuaagugacuu

SEQ ID NO: 13151 - RNA, 19 nt, Artificial Sequence
  Description of Artificial Sequence: Synthetic oligonucleotide
  Antisense strand to SEQ ID NO: 13150
aagucacuuaacaucugua

SEQ ID NO: 13152 - RNA, 19 nt, Artificial Sequence
  Description of Artificial Sequence: Synthetic oligonucleotide
  Sense strand starting at position 278 of SEQ ID NO: 124
agauguuacagauguuaag

SEQ ID NO: 13153 - RNA, 19 nt, Artificial Sequence
  Description of Artificial Sequence: Synthetic oligonucleotide
  Antisense strand to SEQ ID NO: 13152
cuuaacaucuguaacaucu

SEQ ID NO: 13154 - RNA, 19 nt, Artificial Sequence
  Description of Artificial Sequence: Synthetic oligonucleotide
  Sense strand starting at position 269 of SEQ ID NO: 124
ugaggcuccagauguuaca

SEQ ID NO: 13155 - RNA, 19 nt, Artificial Sequence
  Description of Artificial Sequence: Synthetic oligonucleotide
  Antisense strand to SEQ ID NO: 13154
uguaacaucuggagccuca

SEQ ID NO: 13156 - RNA, 19 nt, Artificial Sequence
  Description of Artificial Sequence: Synthetic oligonucleotide
  Sense strand starting at position 239 of SEQ ID NO: 124
guguaauucucaucacaca

SEQ ID NO: 13157 - RNA, 19 nt, Artificial Sequence
  Description of Artificial Sequence: Synthetic oligonucleotide
  Antisense strand to SEQ ID NO: 13156
ugugugaugagaauuacac

SEQ ID NO: 13158 - RNA, 19 nt, Artificial Sequence
  Description of Artificial Sequence: Synthetic oligonucleotide
  Sense strand starting at position 225 of SEQ ID NO: 124
ucuuaaggcagauagugua

SEQ ID NO: 13159 - RNA, 19 nt, Artificial Sequence
  Description of Artificial Sequence: Synthetic oligonucleotide
  Antisense strand to SEQ ID NO: 13158
uacacuaucugccuuaaga

SEQ ID NO: 13160 - RNA, 19 nt, Artificial Sequence
  Description of Artificial Sequence: Synthetic oligonucleotide
  Sense strand starting at position 184 of SEQ ID NO: 124
aggcauugucaccagacaa

SEQ ID NO: 13161 - RNA, 19 nt, Artificial Sequence
  Description of Artificial Sequence: Synthetic oligonucleotide
  Antisense strand to SEQ ID NO: 13160
uugucuggugacaaugccu

SEQ ID NO: 13162 - RNA, 19 nt, Artificial Sequence
  Description of Artificial Sequence: Synthetic oligonucleotide
  Sense strand starting at position 183 of SEQ ID NO: 124
caggcauugucaccagaca

SEQ ID NO: 13163 - RNA, 19 nt, Artificial Sequence
  Description of Artificial Sequence: Synthetic oligonucleotide
  Antisense strand to SEQ ID NO: 13162
ugucuggugacaaugccug

SEQ ID NO: 13164 - RNA, 19 nt, Artificial Sequence
  Description of Artificial Sequence: Synthetic oligonucleotide
  Sense strand starting at position 3833 of SEQ ID NO: 126
gaguguaugucagauacau

SEQ ID NO: 13165 - RNA, 19 nt, Artificial Sequence
  Description of Artificial Sequence: Synthetic oligonucleotide
  Antisense strand to SEQ ID NO: 13164
auguaucugacauacacuc

SEQ ID NO: 13166 - RNA, 19 nt, Artificial Sequence
  Description of Artificial Sequence: Synthetic oligonucleotide
  Sense strand starting at position 3831 of SEQ ID NO: 126
aagaguguaugucagauac

SEQ ID NO: 13167 - RNA, 19 nt, Artificial Sequence
  Description of Artificial Sequence: Synthetic oligonucleotide
  Antisense strand to SEQ ID NO: 13166
guaucugacauacacucuu

SEQ ID NO: 13168 - RNA, 19 nt, Artificial Sequence
  Description of Artificial Sequence: Synthetic oligonucleotide
  Sense strand starting at position 3829 of SEQ ID NO: 126
gaaagaguguaugucagau

SEQ ID NO: 13169 - RNA, 19 nt, Artificial Sequence
  Description of Artificial Sequence: Synthetic oligonucleotide
  Antisense strand to SEQ ID NO: 13168
aucugacauacacucuuuc

SEQ ID NO: 13170 - RNA, 19 nt, Artificial Sequence
  Description of Artificial Sequence: Synthetic oligonucleotide
  Sense strand starting at position 3312 of SEQ ID NO: 126
gggccaugugcggacauuu

SEQ ID NO: 13171 - RNA, 19 nt, Artificial Sequence
  Description of Artificial Sequence: Synthetic oligonucleotide
  Antisense strand to SEQ ID NO: 13170
aaauguccgcacauggccc

SEQ ID NO: 13172 - RNA, 19 nt, Artificial Sequence
  Description of Artificial Sequence: Synthetic oligonucleotide
  Sense strand starting at position 3224 of SEQ ID NO: 126
cucagauacucuuggaaag

SEQ ID NO: 13173 - RNA, 19 nt, Artificial Sequence
  Description of Artificial Sequence: Synthetic oligonucleotide
  Antisense strand to SEQ ID NO: 13172
cuuuccaagaguaucugag

SEQ ID NO: 13174 - RNA, 19 nt, Artificial Sequence
  Description of Artificial Sequence: Synthetic oligonucleotide
  Sense strand starting at position 3149 of SEQ ID NO: 126
uccgaaaucucaccucugu

SEQ ID NO: 13175 - RNA, 19 nt, Artificial Sequence
  Description of Artificial Sequence: Synthetic oligonucleotide
  Antisense strand to SEQ ID NO: 13174
acagaggugagauuucgga

SEQ ID NO: 13176 - RNA, 19 nt, Artificial Sequence
  Description of Artificial Sequence: Synthetic oligonucleotide
  Sense strand starting at position 2872 of SEQ ID NO: 126
uguggaggucgggaaucaa

SEQ ID NO: 13177 - RNA, 19 nt, Artificial Sequence
  Description of Artificial Sequence: Synthetic oligonucleotide
  Antisense strand to SEQ ID NO: 13176
uugauucccgaccuccaca

SEQ ID NO: 13178 - RNA, 19 nt, Artificial Sequence
  Description of Artificial Sequence: Synthetic oligonucleotide
  Sense strand starting at position 2667 of SEQ ID NO: 126
uggccuuuaagcugagauc

SEQ ID NO: 13179 - RNA, 19 nt, Artificial Sequence
  Description of Artificial Sequence: Synthetic oligonucleotide
  Antisense strand to SEQ ID NO: 13178
gaucucagcuuaaaggcca

SEQ ID NO: 13180 - RNA, 19 nt, Artificial Sequence
  Description of Artificial Sequence: Synthetic oligonucleotide
  Sense strand starting at position 2647 of SEQ ID NO: 126
cacaguggucucuaaugag

SEQ ID NO: 13181 - RNA, 19 nt, Artificial Sequence
  Description of Artificial Sequence: Synthetic oligonucleotide
  Antisense strand to SEQ ID NO: 13180
cucauuagagaccacugug

SEQ ID NO: 13182 - RNA, 19 nt, Artificial Sequence
  Description of Artificial Sequence: Synthetic oligonucleotide
  Sense strand starting at position 2643 of SEQ ID NO: 126
aggucacaguggucucuaa

SEQ ID NO: 13183 - RNA, 19 nt, Artificial Sequence
  Description of Artificial Sequence: Synthetic oligonucleotide
  Antisense strand to SEQ ID NO: 13182
uuagagaccacugugaccu

SEQ ID NO: 13184 - RNA, 19 nt, Artificial Sequence
  Description of Artificial Sequence: Synthetic oligonucleotide
  Sense strand starting at position 2203 of SEQ ID NO: 126
uggcguauuuggagacuga

SEQ ID NO: 13185 - RNA, 19 nt, Artificial Sequence
  Description of Artificial Sequence: Synthetic oligonucleotide
  Antisense strand to SEQ ID NO: 13184
ucagucuccaaauacgcca

SEQ ID NO: 13186 - RNA, 19 nt, Artificial Sequence
  Description of Artificial Sequence: Synthetic oligonucleotide
  Sense strand starting at position 2160 of SEQ ID NO: 126
ugagucuuccgcgaagaca

SEQ ID NO: 13187 - RNA, 19 nt, Artificial Sequence
  Description of Artificial Sequence: Synthetic oligonucleotide
  Antisense strand to SEQ ID NO: 13186
ugucuucgcggaagacuca

SEQ ID NO: 13188 - RNA, 19 nt, Artificial Sequence
  Description of Artificial Sequence: Synthetic oligonucleotide
  Sense strand starting at position 2159 of SEQ ID NO: 126
gugagucuuccgcgaagac

SEQ ID NO: 13189 - RNA, 19 nt, Artificial Sequence
  Description of Artificial Sequence: Synthetic oligonucleotide
  Antisense strand to SEQ ID NO: 13188
gucuucgcggaagacucac

SEQ ID NO: 13190 - RNA, 19 nt, Artificial Sequence
  Description of Artificial Sequence: Synthetic oligonucleotide
  Sense strand starting at position 2155 of SEQ ID NO: 126
gccugugagucuuccgcga

SEQ ID NO: 13191 - RNA, 19 nt, Artificial Sequence
  Description of Artificial Sequence: Synthetic oligonucleotide
  Antisense strand to SEQ ID NO: 13190
ucgcggaagacucacaggc

SEQ ID NO: 13192 - RNA, 19 nt, Artificial Sequence
  Description of Artificial Sequence: Synthetic oligonucleotide
  Sense strand starting at position 1205 of SEQ ID NO: 126
acgcauuccguucagcaga

SEQ ID NO: 13193 - RNA, 19 nt, Artificial Sequence
  Description of Artificial Sequence: Synthetic oligonucleotide
  Antisense strand to SEQ ID NO: 13192
ucugcugaacggaaugcgu

SEQ ID NO: 13194 - RNA, 19 nt, Artificial Sequence
  Description of Artificial Sequence: Synthetic oligonucleotide
  Sense strand starting at position 932 of SEQ ID NO: 126
caggcugugcuccgagaga

SEQ ID NO: 13195 - RNA, 19 nt, Artificial Sequence
  Description of Artificial Sequence: Synthetic oligonucleotide
  Antisense strand to SEQ ID NO: 13194
ucucucggagcacagccug

SEQ ID NO: 13196 - RNA, 19 nt, Artificial Sequence
  Description of Artificial Sequence: Synthetic oligonucleotide
  Sense strand starting at position 857 of SEQ ID NO: 126
gugccgucggaaugguuau

SEQ ID NO: 13197 - RNA, 19 nt, Artificial Sequence
  Description of Artificial Sequence: Synthetic oligonucleotide
  Antisense strand to SEQ ID NO: 13196
auaaccauuccgacggcac

SEQ ID NO: 13198 - RNA, 19 nt, Artificial Sequence
  Description of Artificial Sequence: Synthetic oligonucleotide
  Sense strand starting at position 801 of SEQ ID NO: 126
gcucaauuccugcaaagca

SEQ ID NO: 13199 - RNA, 19 nt, Artificial Sequence
  Description of Artificial Sequence: Synthetic oligonucleotide
  Antisense strand to SEQ ID NO: 13198
ugcuuugcaggaauugagc

SEQ ID NO: 13200 - RNA, 19 nt, Artificial Sequence
  Description of Artificial Sequence: Synthetic oligonucleotide
  Sense strand starting at position 791 of SEQ ID NO: 126
gugcauuucugcucaauuc

SEQ ID NO: 13201 - RNA, 19 nt, Artificial Sequence
  Description of Artificial Sequence: Synthetic oligonucleotide
  Antisense strand to SEQ ID NO: 13200
gaauugagcagaaaugcac

SEQ ID NO: 13202 - RNA, 19 nt, Artificial Sequence
  Description of Artificial Sequence: Synthetic oligonucleotide
  Sense strand starting at position 789 of SEQ ID NO: 126
gagugcauuucugcucaau

SEQ ID NO: 13203 - RNA, 19 nt, Artificial Sequence
  Description of Artificial Sequence: Synthetic oligonucleotide
  Antisense strand to SEQ ID NO: 13202
auugagcagaaaugcacuc

SEQ ID NO: 13204 - RNA, 19 nt, Artificial Sequence
  Description of Artificial Sequence: Synthetic oligonucleotide
  Sense strand starting at position 780 of SEQ ID NO: 126
cgcgauuccgagugcauuu

SEQ ID NO: 13205 - RNA, 19 nt, Artificial Sequence
  Description of Artificial Sequence: Synthetic oligonucleotide
  Antisense strand to SEQ ID NO: 13204
aaaugcacucggaaucgcg

SEQ ID NO: 13206 - RNA, 19 nt, Artificial Sequence
  Description of Artificial Sequence: Synthetic oligonucleotide
  Sense strand starting at position 779 of SEQ ID NO: 126
ccgcgauuccgagugcauu

SEQ ID NO: 13207 - RNA, 19 nt, Artificial Sequence
  Description of Artificial Sequence: Synthetic oligonucleotide
  Antisense strand to SEQ ID NO: 13206
aaugcacucggaaucgcgg

SEQ ID NO: 13208 - RNA, 19 nt, Artificial Sequence
  Description of Artificial Sequence: Synthetic oligonucleotide
  Sense strand starting at position 508 of SEQ ID NO: 126
cguguuagacaauggcuaa

SEQ ID NO: 13209 - RNA, 19 nt, Artificial Sequence
  Description of Artificial Sequence: Synthetic oligonucleotide
  Antisense strand to SEQ ID NO: 13208
uuagccauugucuaacacg

SEQ ID NO: 13210 - RNA, 19 nt, Artificial Sequence
  Description of Artificial Sequence: Synthetic oligonucleotide
  Sense strand starting at position 501 of SEQ ID NO: 126
ggucacacguguuagacaa

SEQ ID NO: 13211 - RNA, 19 nt, Artificial Sequence
  Description of Artificial Sequence: Synthetic oligonucleotide
  Antisense strand to SEQ ID NO: 13210
uugucuaacacgugugacc

SEQ ID NO: 13212 - RNA, 19 nt, Artificial Sequence
  Description of Artificial Sequence: Synthetic oligonucleotide
  Sense strand starting at position 498 of SEQ ID NO: 126
ugcggucacacguguuaga

SEQ ID NO: 13213 - RNA, 19 nt, Artificial Sequence
  Description of Artificial Sequence: Synthetic oligonucleotide
  Antisense strand to SEQ ID NO: 13212
ucuaacacgugugaccgca

SEQ ID NO: 13214 - RNA, 19 nt, Artificial Sequence
  Description of Artificial Sequence: Synthetic oligonucleotide
  Sense strand starting at position 452 of SEQ ID NO: 126
cuaggcagugcuggugaaa

SEQ ID NO: 13215 - RNA, 19 nt, Artificial Sequence
  Description of Artificial Sequence: Synthetic oligonucleotide
  Antisense strand to SEQ ID NO: 13214
uuucaccagcacugccuag

SEQ ID NO: 13216 - RNA, 19 nt, Artificial Sequence
  Description of Artificial Sequence: Synthetic oligonucleotide
  Sense strand starting at position 358 of SEQ ID NO: 126
ugagaugugugacuaacau

SEQ ID NO: 13217 - RNA, 19 nt, Artificial Sequence
  Description of Artificial Sequence: Synthetic oligonucleotide
  Antisense strand to SEQ ID NO: 13216
auguuagucacacaucuca

SEQ ID NO: 13218 - RNA, 19 nt, Artificial Sequence
  Description of Artificial Sequence: Synthetic oligonucleotide
  Sense strand starting at position 355 of SEQ ID NO: 126
caaugagaugugugacuaa

SEQ ID NO: 13219 - RNA, 19 nt, Artificial Sequence
  Description of Artificial Sequence: Synthetic oligonucleotide
  Antisense strand to SEQ ID NO: 13218
uuagucacacaucucauug

SEQ ID NO: 13220 - RNA, 19 nt, Artificial Sequence
  Description of Artificial Sequence: Synthetic oligonucleotide
  Sense strand starting at position 353 of SEQ ID NO: 126
uccaaugagaugugugacu

SEQ ID NO: 13221 - RNA, 19 nt, Artificial Sequence
  Description of Artificial Sequence: Synthetic oligonucleotide
  Antisense strand to SEQ ID NO: 13220
agucacacaucucauugga

SEQ ID NO: 13222 - RNA, 19 nt, Artificial Sequence
  Description of Artificial Sequence: Synthetic oligonucleotide
  Sense strand starting at position 351 of SEQ ID NO: 126
uguccaaugagauguguga

SEQ ID NO: 13223 - RNA, 19 nt, Artificial Sequence
  Description of Artificial Sequence: Synthetic oligonucleotide
  Antisense strand to SEQ ID NO: 13222
ucacacaucucauuggaca

SEQ ID NO: 13224 - RNA, 19 nt, Artificial Sequence
  Description of Artificial Sequence: Synthetic oligonucleotide
  Sense strand starting at position 342 of SEQ ID NO: 126
cuaacaauguguccaauga

SEQ ID NO: 13225 - RNA, 19 nt, Artificial Sequence
  Description of Artificial Sequence: Synthetic oligonucleotide
  Antisense strand to SEQ ID NO: 13224
ucauuggacacauuguuag

SEQ ID NO: 13226 - RNA, 19 nt, Artificial Sequence
  Description of Artificial Sequence: Synthetic oligonucleotide
  Sense strand starting at position 294 of SEQ ID NO: 126
acagcuauucuccagucua

SEQ ID NO: 13227 - RNA, 19 nt, Artificial Sequence
  Description of Artificial Sequence: Synthetic oligonucleotide
  Antisense strand to SEQ ID NO: 13226
uagacuggagaauagcugu

SEQ ID NO: 13228 - RNA, 19 nt, Artificial Sequence
  Description of Artificial Sequence: Synthetic oligonucleotide
  Sense strand starting at position 246 of SEQ ID NO: 126
ugcagugauuuggauuuau

SEQ ID NO: 13229 - RNA, 19 nt, Artificial Sequence
  Description of Artificial Sequence: Synthetic oligonucleotide
  Antisense strand to SEQ ID NO: 13228
auaaauccaaaucacugca

SEQ ID NO: 13230 - RNA, 19 nt, Artificial Sequence
  Description of Artificial Sequence: Synthetic oligonucleotide
  Sense strand starting at position 150 of SEQ ID NO: 126
gugugacucagcuguuguc

SEQ ID NO: 13231 - RNA, 19 nt, Artificial Sequence
  Description of Artificial Sequence: Synthetic oligonucleotide
  Antisense strand to SEQ ID NO: 13230
gacaacagcugagucacac

SEQ ID NO: 13232 - RNA, 19 nt, Artificial Sequence
  Description of Artificial Sequence: Synthetic oligonucleotide
  Sense strand starting at position 141 of SEQ ID NO: 126
acagucauugugugacuca

SEQ ID NO: 13233 - RNA, 19 nt, Artificial Sequence
  Description of Artificial Sequence: Synthetic oligonucleotide
  Antisense strand to SEQ ID NO: 13232
ugagucacacaaugacugu

SEQ ID NO: 13234 - RNA, 19 nt, Artificial Sequence
  Description of Artificial Sequence: Synthetic oligonucleotide
  Sense strand starting at position 137 of SEQ ID NO: 126
acucacagucauuguguga

SEQ ID NO: 13235 - RNA, 19 nt, Artificial Sequence
  Description of Artificial Sequence: Synthetic oligonucleotide
  Antisense strand to SEQ ID NO: 13234
ucacacaaugacugugagu

SEQ ID NO: 13236 - RNA, 19 nt, Artificial Sequence
  Description of Artificial Sequence: Synthetic oligonucleotide
  Sense strand starting at position 32 of SEQ ID NO: 126
gucugaauguccucuccau

SEQ ID NO: 13237 - RNA, 19 nt, Artificial Sequence
  Description of Artificial Sequence: Synthetic oligonucleotide
  Antisense strand to SEQ ID NO: 13236
auggagaggacauucagac

SEQ ID NO: 13238 - RNA, 19 nt, Artificial Sequence
  Description of Artificial Sequence: Synthetic oligonucleotide
  Sense strand starting at position 23 of SEQ ID NO: 126
guugaagaugucugaaugu

SEQ ID NO: 13239 - RNA, 19 nt, Artificial Sequence
  Description of Artificial Sequence: Synthetic oligonucleotide
  Antisense strand to SEQ ID NO: 13238
acauucagacaucuucaac

SEQ ID NO: 13240 - RNA, 19 nt, Artificial Sequence
  Description of Artificial Sequence: Synthetic oligonucleotide
  Sense strand starting at position 22 of SEQ ID NO: 126
aguugaagaugucugaaug

SEQ ID NO: 13241 - RNA, 19 nt, Artificial Sequence
  Description of Artificial Sequence: Synthetic oligonucleotide
  Antisense strand to SEQ ID NO: 13240
cauucagacaucuucaacu

SEQ ID NO: 13242 - RNA, 19 nt, Artificial Sequence
  Description of Artificial Sequence: Synthetic oligonucleotide
  Sense strand starting at position 19 of SEQ ID NO: 126
agcaguugaagaugucuga

SEQ ID NO: 13243 - RNA, 19 nt, Artificial Sequence
  Description of Artificial Sequence: Synthetic oligonucleotide
  Antisense strand to SEQ ID NO: 13242
ucagacaucuucaacugcu

SEQ ID NO: 13244 - RNA, 19 nt, Artificial Sequence
  Description of Artificial Sequence: Synthetic oligonucleotide
  Sense strand starting at position 3802 of SEQ ID NO: 125
gggccaugugcggacauuu

SEQ ID NO: 13245 - RNA, 19 nt, Artificial Sequence
  Description of Artificial Sequence: Synthetic oligonucleotide
  Antisense strand to SEQ ID NO: 13244
aaauguccgcacauggccc

SEQ ID NO: 13246 - RNA, 19 nt, Artificial Sequence
  Description of Artificial Sequence: Synthetic oligonucleotide
  Sense strand starting at position 3639 of SEQ ID NO: 125
uccgaaaucucaccucugu

SEQ ID NO: 13247 - RNA, 19 nt, Artificial Sequence
  Description of Artificial Sequence: Synthetic oligonucleotide
  Antisense strand to SEQ ID NO: 13246
acagaggugagauuucgga

SEQ ID NO: 13248 - RNA, 19 nt, Artificial Sequence
  Description of Artificial Sequence: Synthetic oligonucleotide
  Sense strand starting at position 3362 of SEQ ID NO: 125
uguggaggucgggaaucaa

SEQ ID NO: 13249 - RNA, 19 nt, Artificial Sequence
  Description of Artificial Sequence: Synthetic oligonucleotide
  Antisense strand to SEQ ID NO: 13248
uugauucccgaccuccaca

SEQ ID NO: 13250 - RNA, 19 nt, Artificial Sequence
  Description of Artificial Sequence: Synthetic oligonucleotide
  Sense strand starting at position 3157 of SEQ ID NO: 125
uggccuuuaagcugagauc

SEQ ID NO: 13251 - RNA, 19 nt, Artificial Sequence
  Description of Artificial Sequence: Synthetic oligonucleotide
  Antisense strand to SEQ ID NO: 13250
gaucucagcuuaaaggcca

SEQ ID NO: 13252 - RNA, 19 nt, Artificial Sequence
  Description of Artificial Sequence: Synthetic oligonucleotide
  Sense strand starting at position 3137 of SEQ ID NO: 125
cacaguggucucuaaugag

SEQ ID NO: 13253 - RNA, 19 nt, Artificial Sequence
  Description of Artificial Sequence: Synthetic oligonucleotide
  Antisense strand to SEQ ID NO: 13252
cucauuagagaccacugug

SEQ ID NO: 13254 - RNA, 19 nt, Artificial Sequence
  Description of Artificial Sequence: Synthetic oligonucleotide
  Sense strand starting at position 3133 of SEQ ID NO: 125
aggucacaguggucucuaa

SEQ ID NO: 13255 - RNA, 19 nt, Artificial Sequence
  Description of Artificial Sequence: Synthetic oligonucleotide
  Antisense strand to SEQ ID NO: 13254
uuagagaccacugugaccu

SEQ ID NO: 13256 - RNA, 19 nt, Artificial Sequence
  Description of Artificial Sequence: Synthetic oligonucleotide
  Sense strand starting at position 2693 of SEQ ID NO: 125
uggcguauuuggagacuga

SEQ ID NO: 13257 - RNA, 19 nt, Artificial Sequence
  Description of Artificial Sequence: Synthetic oligonucleotide
  Antisense strand to SEQ ID NO: 13256
ucagucuccaaauacgcca

SEQ ID NO: 13258 - RNA, 19 nt, Artificial Sequence
  Description of Artificial Sequence: Synthetic oligonucleotide
  Sense strand starting at position 2650 of SEQ ID NO: 125
ugagucuuccgcgaagaca

SEQ ID NO: 13259 - RNA, 19 nt, Artificial Sequence
  Description of Artificial Sequence: Synthetic oligonucleotide
  Antisense strand to SEQ ID NO: 13258
ugucuucgcggaagacuca

SEQ ID NO: 13260 - RNA, 19 nt, Artificial Sequence
  Description of Artificial Sequence: Synthetic oligonucleotide
  Sense strand starting at position 1695 of SEQ ID NO: 125
acgcauuccguucagcaga

SEQ ID NO: 13261 - RNA, 19 nt, Artificial Sequence
  Description of Artificial Sequence: Synthetic oligonucleotide
  Antisense strand to SEQ ID NO: 13260
ucugcugaacggaaugcgu

SEQ ID NO: 13262 - RNA, 19 nt, Artificial Sequence
  Description of Artificial Sequence: Synthetic oligonucleotide
  Sense strand starting at position 1422 of SEQ ID NO: 125
caggcugugcuccgagaga

SEQ ID NO: 13263 - RNA, 19 nt, Artificial Sequence
  Description of Artificial Sequence: Synthetic oligonucleotide
  Antisense strand to SEQ ID NO: 13262
ucucucggagcacagccug

SEQ ID NO: 13264 - RNA, 19 nt, Artificial Sequence
  Description of Artificial Sequence: Synthetic oligonucleotide
  Sense strand starting at position 1291 of SEQ ID NO: 125
gcucaauuccugcaaagca

SEQ ID NO: 13265 - RNA, 19 nt, Artificial Sequence
  Description of Artificial Sequence: Synthetic oligonucleotide
  Antisense strand to SEQ ID NO: 13264
ugcuuugcaggaauugagc

SEQ ID NO: 13266 - RNA, 19 nt, Artificial Sequence
  Description of Artificial Sequence: Synthetic oligonucleotide
  Sense strand starting at position 1281 of SEQ ID NO: 125
gugcauuucugcucaauuc

SEQ ID NO: 13267 - RNA, 19 nt, Artificial Sequence
  Description of Artificial Sequence: Synthetic oligonucleotide
  Antisense strand to SEQ ID NO: 13266
gaauugagcagaaaugcac

SEQ ID NO: 13268 - RNA, 19 nt, Artificial Sequence
  Description of Artificial Sequence: Synthetic oligonucleotide
  Sense strand starting at position 1279 of SEQ ID NO: 125
gagugcauuucugcucaau

SEQ ID NO: 13269 - RNA, 19 nt, Artificial Sequence
  Description of Artificial Sequence: Synthetic oligonucleotide
  Antisense strand to SEQ ID NO: 13268
auugagcagaaaugcacuc

SEQ ID NO: 13270 - RNA, 19 nt, Artificial Sequence
  Description of Artificial Sequence: Synthetic oligonucleotide
  Sense strand starting at position 1270 of SEQ ID NO: 125
cgcgauuccgagugcauuu

SEQ ID NO: 13271 - RNA, 19 nt, Artificial Sequence
  Description of Artificial Sequence: Synthetic oligonucleotide
  Antisense strand to SEQ ID NO: 13270
aaaugcacucggaaucgcg

SEQ ID NO: 13272 - RNA, 19 nt, Artificial Sequence
  Description of Artificial Sequence: Synthetic oligonucleotide
  Sense strand starting at position 1269 of SEQ ID NO: 125
ccgcgauuccgagugcauu

SEQ ID NO: 13273 - RNA, 19 nt, Artificial Sequence
  Description of Artificial Sequence: Synthetic oligonucleotide
  Antisense strand to SEQ ID NO: 13272
aaugcacucggaaucgcgg

SEQ ID NO: 13274 - RNA, 19 nt, Artificial Sequence
  Description of Artificial Sequence: Synthetic oligonucleotide
  Sense strand starting at position 998 of SEQ ID NO: 125
cguguuagacaauggcuaa

SEQ ID NO: 13275 - RNA, 19 nt, Artificial Sequence
  Description of Artificial Sequence: Synthetic oligonucleotide
  Antisense strand to SEQ ID NO: 13274
uuagccauugucuaacacg

SEQ ID NO: 13276 - RNA, 19 nt, Artificial Sequence
  Description of Artificial Sequence: Synthetic oligonucleotide
  Sense strand starting at position 942 of SEQ ID NO: 125
cuaggcagugcuggugaaa

SEQ ID NO: 13277 - RNA, 19 nt, Artificial Sequence
  Description of Artificial Sequence: Synthetic oligonucleotide
  Antisense strand to SEQ ID NO: 13276
uuucaccagcacugccuag

SEQ ID NO: 13278 - RNA, 19 nt, Artificial Sequence
  Description of Artificial Sequence: Synthetic oligonucleotide
  Sense strand starting at position 848 of SEQ ID NO: 125
ugagaugugugacuaacau

SEQ ID NO: 13279 - RNA, 19 nt, Artificial Sequence
  Description of Artificial Sequence: Synthetic oligonucleotide
  Antisense strand to SEQ ID NO: 13278
auguuagucacacaucuca

SEQ ID NO: 13280 - RNA, 19 nt, Artificial Sequence
  Description of Artificial Sequence: Synthetic oligonucleotide
  Sense strand starting at position 845 of SEQ ID NO: 125
caaugagaugugugacuaa

SEQ ID NO: 13281 - RNA, 19 nt, Artificial Sequence
  Description of Artificial Sequence: Synthetic oligonucleotide
  Antisense strand to SEQ ID NO: 13280
uuagucacacaucucauug

SEQ ID NO: 13282 - RNA, 19 nt, Artificial Sequence
  Description of Artificial Sequence: Synthetic oligonucleotide
  Sense strand starting at position 843 of SEQ ID NO: 125
uccaaugagaugugugacu

SEQ ID NO: 13283 - RNA, 19 nt, Artificial Sequence
  Description of Artificial Sequence: Synthetic oligonucleotide
  Antisense strand to SEQ ID NO: 13282
agucacacaucucauugga

SEQ ID NO: 13284 - RNA, 19 nt, Artificial Sequence
  Description of Artificial Sequence: Synthetic oligonucleotide
  Sense strand starting at position 841 of SEQ ID NO: 125
uguccaaugagauguguga

SEQ ID NO: 13285 - RNA, 19 nt, Artificial Sequence
  Description of Artificial Sequence: Synthetic oligonucleotide
  Antisense strand to SEQ ID NO: 13284
ucacacaucucauuggaca

SEQ ID NO: 13286 - RNA, 19 nt, Artificial Sequence
  Description of Artificial Sequence: Synthetic oligonucleotide
  Sense strand starting at position 832 of SEQ ID NO: 125
cuaacaauguguccaauga

SEQ ID NO: 13287 - RNA, 19 nt, Artificial Sequence
  Description of Artificial Sequence: Synthetic oligonucleotide
  Antisense strand to SEQ ID NO: 13286
ucauuggacacauuguuag

SEQ ID NO: 13288 - RNA, 19 nt, Artificial Sequence
  Description of Artificial Sequence: Synthetic oligonucleotide
  Sense strand starting at position 784 of SEQ ID NO: 125
acagcuauucuccagucua

SEQ ID NO: 13289 - RNA, 19 nt, Artificial Sequence
  Description of Artificial Sequence: Synthetic oligonucleotide
  Antisense strand to SEQ ID NO: 13288
uagacuggagaauagcugu

SEQ ID NO: 13290 - RNA, 19 nt, Artificial Sequence
  Description of Artificial Sequence: Synthetic oligonucleotide
  Sense strand starting at position 736 of SEQ ID NO: 125
ugcagugauuuggauuuau

SEQ ID NO: 13291 - RNA, 19 nt, Artificial Sequence
  Description of Artificial Sequence: Synthetic oligonucleotide
  Antisense strand to SEQ ID NO: 13290
auaaauccaaaucacugca

SEQ ID NO: 13292 - RNA, 19 nt, Artificial Sequence
  Description of Artificial Sequence: Synthetic oligonucleotide
  Sense strand starting at position 631 of SEQ ID NO: 125
acagucauugugugacuca

SEQ ID NO: 13293 - RNA, 19 nt, Artificial Sequence
  Description of Artificial Sequence: Synthetic oligonucleotide
  Antisense strand to SEQ ID NO: 13292
ugagucacacaaugacugu

SEQ ID NO: 13294 - RNA, 19 nt, Artificial Sequence
  Description of Artificial Sequence: Synthetic oligonucleotide
  Sense strand starting at position 627 of SEQ ID NO: 125
acucacagucauuguguga

SEQ ID NO: 13295 - RNA, 19 nt, Artificial Sequence
  Description of Artificial Sequence: Synthetic oligonucleotide
  Antisense strand to SEQ ID NO: 13294
ucacacaaugacugugagu

SEQ ID NO: 13296 - RNA, 19 nt, Artificial Sequence
  Description of Artificial Sequence: Synthetic oligonucleotide
  Sense strand starting at position 522 of SEQ ID NO: 125
gucugaauguccucuccau

SEQ ID NO: 13297 - RNA, 19 nt, Artificial Sequence
  Description of Artificial Sequence: Synthetic oligonucleotide
  Antisense strand to SEQ ID NO: 13296
auggagaggacauucagac

SEQ ID NO: 13298 - RNA, 19 nt, Artificial Sequence
  Description of Artificial Sequence: Synthetic oligonucleotide
  Sense strand starting at position 513 of SEQ ID NO: 125
guugaagaugucugaaugu

SEQ ID NO: 13299 - RNA, 19 nt, Artificial Sequence
  Description of Artificial Sequence: Synthetic oligonucleotide
  Antisense strand to SEQ ID NO: 13298
acauucagacaucuucaac

SEQ ID NO: 13300 - RNA, 19 nt, Artificial Sequence
  Description of Artificial Sequence: Synthetic oligonucleotide
  Sense strand starting at position 512 of SEQ ID NO: 125
aguugaagaugucugaaug

SEQ ID NO: 13301 - RNA, 19 nt, Artificial Sequence
  Description of Artificial Sequence: Synthetic oligonucleotide
  Antisense strand to SEQ ID NO: 13300
cauucagacaucuucaacu

SEQ ID NO: 13302 - RNA, 19 nt, Artificial Sequence
  Description of Artificial Sequence: Synthetic oligonucleotide
  Sense strand starting at position 509 of SEQ ID NO: 125
agcaguugaagaugucuga

SEQ ID NO: 13303 - RNA, 19 nt, Artificial Sequence
  Description of Artificial Sequence: Synthetic oligonucleotide
  Antisense strand to SEQ ID NO: 13302
ucagacaucuucaacugcu

SEQ ID NO: 13304 - RNA, 19 nt, Artificial Sequence
  Description of Artificial Sequence: Synthetic oligonucleotide
  Sense strand starting at position 413 of SEQ ID NO: 125
gcugacaguccauauuaaa

SEQ ID NO: 13305 - RNA, 19 nt, Artificial Sequence
  Description of Artificial Sequence: Synthetic oligonucleotide
  Antisense strand to SEQ ID NO: 13304
uuuaauauggacugucagc

SEQ ID NO: 13306 - RNA, 19 nt, Artificial Sequence
  Description of Artificial Sequence: Synthetic oligonucleotide
  Sense strand starting at position 387 of SEQ ID NO: 125
ggucuacuuccaugaucac

SEQ ID NO: 13307 - RNA, 19 nt, Artificial Sequence
  Description of Artificial Sequence: Synthetic oligonucleotide
  Antisense strand to SEQ ID NO: 13306
gugaucauggaaguagacc

SEQ ID NO: 13308 - RNA, 19 nt, Artificial Sequence
  Description of Artificial Sequence: Synthetic oligonucleotide
  Sense strand starting at position 358 of SEQ ID NO: 125
ugugaacuugcacaaguuu

SEQ ID NO: 13309 - RNA, 19 nt, Artificial Sequence
  Description of Artificial Sequence: Synthetic oligonucleotide
  Antisense strand to SEQ ID NO: 13308
aaacuugugcaaguucaca

SEQ ID NO: 13310 - RNA, 19 nt, Artificial Sequence
  Description of Artificial Sequence: Synthetic oligonucleotide
  Sense strand starting at position 348 of SEQ ID NO: 125
cuacuccacgugugaacuu

SEQ ID NO: 13311 - RNA, 19 nt, Artificial Sequence
  Description of Artificial Sequence: Synthetic oligonucleotide
  Antisense strand to SEQ ID NO: 13310
aaguucacacguggaguag

SEQ ID NO: 13312 - RNA, 19 nt, Artificial Sequence
  Description of Artificial Sequence: Synthetic oligonucleotide
  Sense strand starting at position 344 of SEQ ID NO: 125
uauacuacuccacguguga

SEQ ID NO: 13313 - RNA, 19 nt, Artificial Sequence
  Description of Artificial Sequence: Synthetic oligonucleotide
  Antisense strand to SEQ ID NO: 13312
ucacacguggaguaguaua

SEQ ID NO: 13314 - RNA, 19 nt, Artificial Sequence
  Description of Artificial Sequence: Synthetic oligonucleotide
  Sense strand starting at position 329 of SEQ ID NO: 125
cugaaaccauggucauaua

SEQ ID NO: 13315 - RNA, 19 nt, Artificial Sequence
  Description of Artificial Sequence: Synthetic oligonucleotide
  Antisense strand to SEQ ID NO: 13314
uauaugaccaugguuucag

SEQ ID NO: 13316 - RNA, 19 nt, Artificial Sequence
  Description of Artificial Sequence: Synthetic oligonucleotide
  Sense strand starting at position 327 of SEQ ID NO: 125
cucugaaaccauggucaua

SEQ ID NO: 13317 - RNA, 19 nt, Artificial Sequence
  Description of Artificial Sequence: Synthetic oligonucleotide
  Antisense strand to SEQ ID NO: 13316
uaugaccaugguuucagag

SEQ ID NO: 13318 - RNA, 19 nt, Artificial Sequence
  Description of Artificial Sequence: Synthetic oligonucleotide
  Sense strand starting at position 256 of SEQ ID NO: 125
ugaguaacagcagguuuaa

SEQ ID NO: 13319 - RNA, 19 nt, Artificial Sequence
  Description of Artificial Sequence: Synthetic oligonucleotide
  Antisense strand to SEQ ID NO: 13318
uuaaaccugcuguuacuca

SEQ ID NO: 13320 - RNA, 19 nt, Artificial Sequence
  Description of Artificial Sequence: Synthetic oligonucleotide
  Sense strand starting at position 244 of SEQ ID NO: 125
gagccuggccugugaguaa

SEQ ID NO: 13321 - RNA, 19 nt, Artificial Sequence
  Description of Artificial Sequence: Synthetic oligonucleotide
  Antisense strand to SEQ ID NO: 13320
uuacucacaggccaggcuc

SEQ ID NO: 13322 - RNA, 19 nt, Artificial Sequence
  Description of Artificial Sequence: Synthetic oligonucleotide
  Sense strand starting at position 187 of SEQ ID NO: 125
ccucuugcucaggagaaug

SEQ ID NO: 13323 - RNA, 19 nt, Artificial Sequence
  Description of Artificial Sequence: Synthetic oligonucleotide
  Antisense strand to SEQ ID NO: 13322
cauucuccugagcaagagg

SEQ ID NO: 13324 - RNA, 19 nt, Artificial Sequence
  Description of Artificial Sequence: Synthetic oligonucleotide
  Sense strand starting at position 27 of SEQ ID NO: 127
cuuccauuguauguuguaa

SEQ ID NO: 13325 - RNA, 19 nt, Artificial Sequence
  Description of Artificial Sequence: Synthetic oligonucleotide
  Antisense strand to SEQ ID NO: 13324
uuacaacauacaauggaag

SEQ ID NO: 13326 - RNA, 19 nt, Artificial Sequence
  Description of Artificial Sequence: Synthetic oligonucleotide
  Sense strand starting at position 40 of SEQ ID NO: 127
uuguaaaucuaaguguugu

SEQ ID NO: 13327 - RNA, 19 nt, Artificial Sequence
  Description of Artificial Sequence: Synthetic oligonucleotide
  Antisense strand to SEQ ID NO: 13326
acaacacuuagauuuacaa

SEQ ID NO: 13328 - RNA, 19 nt, Artificial Sequence
  Description of Artificial Sequence: Synthetic oligonucleotide
  Sense strand starting at position 41 of SEQ ID NO: 127
uguaaaucuaaguguugug

SEQ ID NO: 13329 - RNA, 19 nt, Artificial Sequence
  Description of Artificial Sequence: Synthetic oligonucleotide
  Antisense strand to SEQ ID NO: 13328
cacaacacuuagauuuaca

SEQ ID NO: 13330 - RNA, 19 nt, Artificial Sequence
  Description of Artificial Sequence: Synthetic oligonucleotide
  Sense strand starting at position 50 of SEQ ID NO: 127
aaguguugugugcauuaga

SEQ ID NO: 13331 - RNA, 19 nt, Artificial Sequence
  Description of Artificial Sequence: Synthetic oligonucleotide
  Antisense strand to SEQ ID NO: 13330
ucuaaugcacacaacacuu

SEQ ID NO: 13332 - RNA, 19 nt, Artificial Sequence
  Description of Artificial Sequence: Synthetic oligonucleotide
  Sense strand starting at position 59 of SEQ ID NO: 127
gugcauuagaaauguagac

SEQ ID NO: 13333 - RNA, 19 nt, Artificial Sequence
  Description of Artificial Sequence: Synthetic oligonucleotide
  Antisense strand to SEQ ID NO: 13332
gucuacauuucuaaugcac

SEQ ID NO: 13334 - RNA, 19 nt, Artificial Sequence
  Description of Artificial Sequence: Synthetic oligonucleotide
  Sense strand starting at position 182 of SEQ ID NO: 127
uaggcucucuaauugaagu

SEQ ID NO: 13335 - RNA, 19 nt, Artificial Sequence
  Description of Artificial Sequence: Synthetic oligonucleotide
  Antisense strand to SEQ ID NO: 13334
acuucaauuagagagccua

SEQ ID NO: 13336 - RNA, 19 nt, Artificial Sequence
  Description of Artificial Sequence: Synthetic oligonucleotide
  Sense strand starting at position 244 of SEQ ID NO: 127
accauuucuucuugaggaa

SEQ ID NO: 13337 - RNA, 19 nt, Artificial Sequence
  Description of Artificial Sequence: Synthetic oligonucleotide
  Antisense strand to SEQ ID NO: 13336
uuccucaagaagaaauggu

SEQ ID NO: 13338 - RNA, 19 nt, Artificial Sequence
  Description of Artificial Sequence: Synthetic oligonucleotide
  Sense strand starting at position 314 of SEQ ID NO: 127
gcaagaaucuacuuugaga

SEQ ID NO: 13339 - RNA, 19 nt, Artificial Sequence
  Description of Artificial Sequence: Synthetic oligonucleotide
  Antisense strand to SEQ ID NO: 13338
ucucaaaguagauucuugc

SEQ ID NO: 13340 - RNA, 19 nt, Artificial Sequence
  Description of Artificial Sequence: Synthetic oligonucleotide
  Sense strand starting at position 343 of SEQ ID NO: 127
auuagaugagcucauccua

SEQ ID NO: 13341 - RNA, 19 nt, Artificial Sequence
  Description of Artificial Sequence: Synthetic oligonucleotide
  Antisense strand to SEQ ID NO: 13340
uaggaugagcucaucuaau

SEQ ID NO: 13342 - RNA, 19 nt, Artificial Sequence
  Description of Artificial Sequence: Synthetic oligonucleotide
  Sense strand starting at position 622 of SEQ ID NO: 127
agagcaaguuccucaucca

SEQ ID NO: 13343 - RNA, 19 nt, Artificial Sequence
  Description of Artificial Sequence: Synthetic oligonucleotide
  Antisense strand to SEQ ID NO: 13342
uggaugaggaacuugcucu

SEQ ID NO: 13344 - RNA, 19 nt, Artificial Sequence
  Description of Artificial Sequence: Synthetic oligonucleotide
  Sense strand starting at position 625 of SEQ ID NO: 127
gcaaguuccucauccaaga

SEQ ID NO: 13345 - RNA, 19 nt, Artificial Sequence
  Description of Artificial Sequence: Synthetic oligonucleotide
  Antisense strand to SEQ ID NO: 13344
ucuuggaugaggaacuugc

SEQ ID NO: 13346 - RNA, 19 nt, Artificial Sequence
  Description of Artificial Sequence: Synthetic oligonucleotide
  Sense strand starting at position 691 of SEQ ID NO: 127
ggugguaacgacggacaaa

SEQ ID NO: 13347 - RNA, 19 nt, Artificial Sequence
  Description of Artificial Sequence: Synthetic oligonucleotide
  Antisense strand to SEQ ID NO: 13346
uuuguccgucguuaccacc

SEQ ID NO: 13348 - RNA, 19 nt, Artificial Sequence
  Description of Artificial Sequence: Synthetic oligonucleotide
  Sense strand starting at position 777 of SEQ ID NO: 127
cugccauuagcagguaaua

SEQ ID NO: 13349 - RNA, 19 nt, Artificial Sequence
  Description of Artificial Sequence: Synthetic oligonucleotide
  Antisense strand to SEQ ID NO: 13348
uauuaccugcuaauggcag

SEQ ID NO: 13350 - RNA, 19 nt, Artificial Sequence
  Description of Artificial Sequence: Synthetic oligonucleotide
  Sense strand starting at position 790 of SEQ ID NO: 127
guaauauccugcccuccga

SEQ ID NO: 13351 - RNA, 19 nt, Artificial Sequence
  Description of Artificial Sequence: Synthetic oligonucleotide
  Antisense strand to SEQ ID NO: 13350
ucggagggcaggauauuac

SEQ ID NO: 13352 - RNA, 19 nt, Artificial Sequence
  Description of Artificial Sequence: Synthetic oligonucleotide
  Sense strand starting at position 820 of SEQ ID NO: 127
gccaauacccucugagaaa

SEQ ID NO: 13353 - RNA, 19 nt, Artificial Sequence
  Description of Artificial Sequence: Synthetic oligonucleotide
  Antisense strand to SEQ ID NO: 13352
uuucucagaggguauuggc

SEQ ID NO: 13354 - RNA, 19 nt, Artificial Sequence
  Description of Artificial Sequence: Synthetic oligonucleotide
  Sense strand starting at position 821 of SEQ ID NO: 127
ccaauacccucugagaaag

SEQ ID NO: 13355 - RNA, 19 nt, Artificial Sequence
  Description of Artificial Sequence: Synthetic oligonucleotide
  Antisense strand to SEQ ID NO: 13354
cuuucucagaggguauugg

SEQ ID NO: 13356 - RNA, 19 nt, Artificial Sequence
  Description of Artificial Sequence: Synthetic oligonucleotide
  Sense strand starting at position 1266 of SEQ ID NO: 127
ccgugugaaccgagucgaa

SEQ ID NO: 13357 - RNA, 19 nt, Artificial Sequence
  Description of Artificial Sequence: Synthetic oligonucleotide
  Antisense strand to SEQ ID NO: 13356
uucgacucgguucacacgg

SEQ ID NO: 13358 - RNA, 19 nt, Artificial Sequence
  Description of Artificial Sequence: Synthetic oligonucleotide
  Sense strand starting at position 1273 of SEQ ID NO: 127
aaccgagucgaacaaucau

SEQ ID NO: 13359 - RNA, 19 nt, Artificial Sequence
  Description of Artificial Sequence: Synthetic oligonucleotide
  Antisense strand to SEQ ID NO: 13358
augauuguucgacucgguu

SEQ ID NO: 13360 - RNA, 19 nt, Artificial Sequence
  Description of Artificial Sequence: Synthetic oligonucleotide
  Sense strand starting at position 1281 of SEQ ID NO: 127
cgaacaaucauggaguguu

SEQ ID NO: 13361 - RNA, 19 nt, Artificial Sequence
  Description of Artificial Sequence: Synthetic oligonucleotide
  Antisense strand to SEQ ID NO: 13360
aacacuccaugauuguucg

SEQ ID NO: 13362 - RNA, 19 nt, Artificial Sequence
  Description of Artificial Sequence: Synthetic oligonucleotide
  Sense strand starting at position 1366 of SEQ ID NO: 127
gugugcuaacuuuaauuac

SEQ ID NO: 13363 - RNA, 19 nt, Artificial Sequence
  Description of Artificial Sequence: Synthetic oligonucleotide
  Antisense strand to SEQ ID NO: 13362
guaauuaaaguuagcacac

SEQ ID NO: 13364 - RNA, 19 nt, Artificial Sequence
  Description of Artificial Sequence: Synthetic oligonucleotide
  Sense strand starting at position 1369 of SEQ ID NO: 127
ugcuaacuuuaauuacgau

SEQ ID NO: 13365 - RNA, 19 nt, Artificial Sequence
  Description of Artificial Sequence: Synthetic oligonucleotide
  Antisense strand to SEQ ID NO: 13364
aucguaauuaaaguuagca

SEQ ID NO: 13366 - RNA, 19 nt, Artificial Sequence
  Description of Artificial Sequence: Synthetic oligonucleotide
  Sense strand starting at position 2103 of SEQ ID NO: 127
gcggcuaauggccagauga

SEQ ID NO: 13367 - RNA, 19 nt, Artificial Sequence
  Description of Artificial Sequence: Synthetic oligonucleotide
  Antisense strand to SEQ ID NO: 13366
ucaucuggccauuagccgc

SEQ ID NO: 13368 - RNA, 19 nt, Artificial Sequence
  Description of Artificial Sequence: Synthetic oligonucleotide
  Sense strand starting at position 2124 of SEQ ID NO: 127
agcuacauuucuuaugaga

SEQ ID NO: 13369 - RNA, 19 nt, Artificial Sequence
  Description of Artificial Sequence: Synthetic oligonucleotide
  Antisense strand to SEQ ID NO: 13368
ucucauaagaaauguagcu

SEQ ID NO: 13370 - RNA, 19 nt, Artificial Sequence
  Description of Artificial Sequence: Synthetic oligonucleotide
  Sense strand starting at position 2199 of SEQ ID NO: 127
gcgccacacgucugaauga

SEQ ID NO: 13371 - RNA, 19 nt, Artificial Sequence
  Description of Artificial Sequence: Synthetic oligonucleotide
  Antisense strand to SEQ ID NO: 13370
ucauucagacguguggcgc

SEQ ID NO: 13372 - RNA, 19 nt, Artificial Sequence
  Description of Artificial Sequence: Synthetic oligonucleotide
  Sense strand starting at position 2260 of SEQ ID NO: 127
gcccucuauggaggguaau

SEQ ID NO: 13373 - RNA, 19 nt, Artificial Sequence
  Description of Artificial Sequence: Synthetic oligonucleotide
  Antisense strand to SEQ ID NO: 13372
auuacccuccauagagggc

SEQ ID NO: 13374 - RNA, 19 nt, Artificial Sequence
  Description of Artificial Sequence: Synthetic oligonucleotide
  Sense strand starting at position 2261 of SEQ ID NO: 127
cccucuauggaggguaaua

SEQ ID NO: 13375 - RNA, 19 nt, Artificial Sequence
  Description of Artificial Sequence: Synthetic oligonucleotide
  Antisense strand to SEQ ID NO: 13374
uauuacccuccauagaggg

SEQ ID NO: 13376 - RNA, 19 nt, Artificial Sequence
  Description of Artificial Sequence: Synthetic oligonucleotide
  Sense strand starting at position 2263 of SEQ ID NO: 127
cucuauggaggguaauagu

SEQ ID NO: 13377 - RNA, 19 nt, Artificial Sequence
  Description of Artificial Sequence: Synthetic oligonucleotide
  Antisense strand to SEQ ID NO: 13376
acuauuacccuccauagag

SEQ ID NO: 13378 - RNA, 19 nt, Artificial Sequence
  Description of Artificial Sequence: Synthetic oligonucleotide
  Sense strand starting at position 2272 of SEQ ID NO: 127
ggguaauaguuuccacuua

SEQ ID NO: 13379 - RNA, 19 nt, Artificial Sequence
  Description of Artificial Sequence: Synthetic oligonucleotide
  Antisense strand to SEQ ID NO: 13378
uaaguggaaacuauuaccc

SEQ ID NO: 13380 - RNA, 19 nt, Artificial Sequence
  Description of Artificial Sequence: Synthetic oligonucleotide
  Sense strand starting at position 2360 of SEQ ID NO: 127
agucuaauggcgugaucuc

SEQ ID NO: 13381 - RNA, 19 nt, Artificial Sequence
  Description of Artificial Sequence: Synthetic oligonucleotide
  Antisense strand to SEQ ID NO: 13380
gagaucacgccauuagacu

SEQ ID NO: 13382 - RNA, 19 nt, Artificial Sequence
  Description of Artificial Sequence: Synthetic oligonucleotide
  Sense strand starting at position 2715 of SEQ ID NO: 127
gcacauagucccuauauca

SEQ ID NO: 13383 - RNA, 19 nt, Artificial Sequence
  Description of Artificial Sequence: Synthetic oligonucleotide
  Antisense strand to SEQ ID NO: 13382
ugauauagggacuaugugc

SEQ ID NO: 13384 - RNA, 19 nt, Artificial Sequence
  Description of Artificial Sequence: Synthetic oligonucleotide
  Sense strand starting at position 2763 of SEQ ID NO: 127
uaccucagugcuggaacau

SEQ ID NO: 13385 - RNA, 19 nt, Artificial Sequence
  Description of Artificial Sequence: Synthetic oligonucleotide
  Antisense strand to SEQ ID NO: 13384
auguuccagcacugaggua

SEQ ID NO: 13386 - RNA, 19 nt, Artificial Sequence
  Description of Artificial Sequence: Synthetic oligonucleotide
  Sense strand starting at position 2764 of SEQ ID NO: 127
accucagugcuggaacauu

SEQ ID NO: 13387 - RNA, 19 nt, Artificial Sequence
  Description of Artificial Sequence: Synthetic oligonucleotide
  Antisense strand to SEQ ID NO: 13386
aauguuccagcacugaggu

SEQ ID NO: 13388 - RNA, 19 nt, Artificial Sequence
  Description of Artificial Sequence: Synthetic oligonucleotide
  Sense strand starting at position 3266 of SEQ ID NO: 127
ggacucaacuuacacagau

SEQ ID NO: 13389 - RNA, 19 nt, Artificial Sequence
  Description of Artificial Sequence: Synthetic oligonucleotide
  Antisense strand to SEQ ID NO: 13388
aucuguguaaguugagucc

SEQ ID NO: 13390 - RNA, 19 nt, Artificial Sequence
  Description of Artificial Sequence: Synthetic oligonucleotide
  Sense strand starting at position 3407 of SEQ ID NO: 127
agccaaugaugccugaacu

SEQ ID NO: 13391 - RNA, 19 nt, Artificial Sequence
  Description of Artificial Sequence: Synthetic oligonucleotide
  Antisense strand to SEQ ID NO: 13390
aguucaggcaucauuggcu

SEQ ID NO: 13392 - RNA, 19 nt, Artificial Sequence
  Description of Artificial Sequence: Synthetic oligonucleotide
  Sense strand starting at position 3408 of SEQ ID NO: 127
gccaaugaugccugaacug

SEQ ID NO: 13393 - RNA, 19 nt, Artificial Sequence
  Description of Artificial Sequence: Synthetic oligonucleotide
  Antisense strand to SEQ ID NO: 13392
caguucaggcaucauuggc

SEQ ID NO: 13394 - RNA, 19 nt, Artificial Sequence
  Description of Artificial Sequence: Synthetic oligonucleotide
  Sense strand starting at position 3616 of SEQ ID NO: 127
aggacuguguugcugacua

SEQ ID NO: 13395 - RNA, 19 nt, Artificial Sequence
  Description of Artificial Sequence: Synthetic oligonucleotide
  Antisense strand to SEQ ID NO: 13394
uagucagcaacacaguccu

SEQ ID NO: 13396 - RNA, 19 nt, Artificial Sequence
  Description of Artificial Sequence: Synthetic oligonucleotide
  Sense strand starting at position 3618 of SEQ ID NO: 127
gacuguguugcugacuaaa

SEQ ID NO: 13397 - RNA, 19 nt, Artificial Sequence
  Description of Artificial Sequence: Synthetic oligonucleotide
  Antisense strand to SEQ ID NO: 13396
uuuagucagcaacacaguc

SEQ ID NO: 13398 - RNA, 19 nt, Artificial Sequence
  Description of Artificial Sequence: Synthetic oligonucleotide
  Sense strand starting at position 3643 of SEQ ID NO: 127
cuggaagcaucacugacaa

SEQ ID NO: 13399 - RNA, 19 nt, Artificial Sequence
  Description of Artificial Sequence: Synthetic oligonucleotide
  Antisense strand to SEQ ID NO: 13398
uugucagugaugcuuccag

SEQ ID NO: 13400 - RNA, 19 nt, Artificial Sequence
  Description of Artificial Sequence: Synthetic oligonucleotide
  Sense strand starting at position 3932 of SEQ ID NO: 127
gagacuacccaccgauaga

SEQ ID NO: 13401 - RNA, 19 nt, Artificial Sequence
  Description of Artificial Sequence: Synthetic oligonucleotide
  Antisense strand to SEQ ID NO: 13400
ucuaucgguggguagucuc

SEQ ID NO: 13402 - RNA, 19 nt, Artificial Sequence
  Description of Artificial Sequence: Synthetic oligonucleotide
  Sense strand starting at position 3963 of SEQ ID NO: 127
ggucauuucucacaugcaa

SEQ ID NO: 13403 - RNA, 19 nt, Artificial Sequence
  Description of Artificial Sequence: Synthetic oligonucleotide
  Antisense strand to SEQ ID NO: 13402
uugcaugugagaaaugacc

SEQ ID NO: 13404 - RNA, 19 nt, Artificial Sequence
  Description of Artificial Sequence: Synthetic oligonucleotide
  Sense strand starting at position 239 of SEQ ID NO: 128
cucauaauccuuggcuaag

SEQ ID NO: 13405 - RNA, 19 nt, Artificial Sequence
  Description of Artificial Sequence: Synthetic oligonucleotide
  Antisense strand to SEQ ID NO: 13404
cuuagccaaggauuaugag

SEQ ID NO: 13406 - RNA, 19 nt, Artificial Sequence
  Description of Artificial Sequence: Synthetic oligonucleotide
  Sense strand starting at position 240 of SEQ ID NO: 128
ucauaauccuuggcuaaga

SEQ ID NO: 13407 - RNA, 19 nt, Artificial Sequence
  Description of Artificial Sequence: Synthetic oligonucleotide
  Antisense strand to SEQ ID NO: 13406
ucuuagccaaggauuauga

SEQ ID NO: 13408 - RNA, 19 nt, Artificial Sequence
  Description of Artificial Sequence: Synthetic oligonucleotide
  Sense strand starting at position 245 of SEQ ID NO: 128
auccuuggcuaagaaucau

SEQ ID NO: 13409 - RNA, 19 nt, Artificial Sequence
  Description of Artificial Sequence: Synthetic oligonucleotide
  Antisense strand to SEQ ID NO: 13408
augauucuuagccaaggau

SEQ ID NO: 13410 - RNA, 19 nt, Artificial Sequence
  Description of Artificial Sequence: Synthetic oligonucleotide
  Sense strand starting at position 274 of SEQ ID NO: 128
aggagucccuuagaaagga

SEQ ID NO: 13411 - RNA, 19 nt, Artificial Sequence
  Description of Artificial Sequence: Synthetic oligonucleotide
  Antisense strand to SEQ ID NO: 13410
uccuuucuaagggacuccu

SEQ ID NO: 13412 - RNA, 19 nt, Artificial Sequence
  Description of Artificial Sequence: Synthetic oligonucleotide
  Sense strand starting at position 278 of SEQ ID NO: 128
gucccuuagaaaggaguaa

SEQ ID NO: 13413 - RNA, 19 nt, Artificial Sequence
  Description of Artificial Sequence: Synthetic oligonucleotide
  Antisense strand to SEQ ID NO: 13412
uuacuccuuucuaagggac

SEQ ID NO: 13414 - RNA, 19 nt, Artificial Sequence
  Description of Artificial Sequence: Synthetic oligonucleotide
  Sense strand starting at position 291 of SEQ ID NO: 128
gaguaagcccugcacugau

SEQ ID NO: 13415 - RNA, 19 nt, Artificial Sequence
  Description of Artificial Sequence: Synthetic oligonucleotide
  Antisense strand to SEQ ID NO: 13414
aucagugcagggcuuacuc

SEQ ID NO: 13416 - RNA, 19 nt, Artificial Sequence
  Description of Artificial Sequence: Synthetic oligonucleotide
  Sense strand starting at position 395 of SEQ ID NO: 128
ugggcuuucccuuaaccaa

SEQ ID NO: 13417 - RNA, 19 nt, Artificial Sequence
  Description of Artificial Sequence: Synthetic oligonucleotide
  Antisense strand to SEQ ID NO: 13416
uugguuaagggaaagccca

SEQ ID NO: 13418 - RNA, 19 nt, Artificial Sequence
  Description of Artificial Sequence: Synthetic oligonucleotide
  Sense strand starting at position 746 of SEQ ID NO: 128
cguugugaaccugauauug

SEQ ID NO: 13419 - RNA, 19 nt, Artificial Sequence
  Description of Artificial Sequence: Synthetic oligonucleotide
  Antisense strand to SEQ ID NO: 13418
caauaucagguucacaacg

SEQ ID NO: 13420 - RNA, 19 nt, Artificial Sequence
  Description of Artificial Sequence: Synthetic oligonucleotide
  Sense strand starting at position 757 of SEQ ID NO: 128
ugauauugucccugguccu

SEQ ID NO: 13421 - RNA, 19 nt, Artificial Sequence
  Description of Artificial Sequence: Synthetic oligonucleotide
  Antisense strand to SEQ ID NO: 13420
aggaccagggacaauauca

SEQ ID NO: 13422 - RNA, 19 nt, Artificial Sequence
  Description of Artificial Sequence: Synthetic oligonucleotide
  Sense strand starting at position 758 of SEQ ID NO: 128
gauauugucccugguccuu

SEQ ID NO: 13423 - RNA, 19 nt, Artificial Sequence
  Description of Artificial Sequence: Synthetic oligonucleotide
  Antisense strand to SEQ ID NO: 13422
aaggaccagggacaauauc

SEQ ID NO: 13424 - RNA, 19 nt, Artificial Sequence
  Description of Artificial Sequence: Synthetic oligonucleotide
  Sense strand starting at position 1083 of SEQ ID NO: 128
guguucuccagccaggaaa

SEQ ID NO: 13425 - RNA, 19 nt, Artificial Sequence
  Description of Artificial Sequence: Synthetic oligonucleotide
  Antisense strand to SEQ ID NO: 13424
uuuccuggcuggagaacac

SEQ ID NO: 13426 - RNA, 19 nt, Artificial Sequence
  Description of Artificial Sequence: Synthetic oligonucleotide
  Sense strand starting at position 1415 of SEQ ID NO: 128
uacaguucucuugaauggu

SEQ ID NO: 13427 - RNA, 19 nt, Artificial Sequence
  Description of Artificial Sequence: Synthetic oligonucleotide
  Antisense strand to SEQ ID NO: 13426
accauucaagagaacugua

SEQ ID NO: 13428 - RNA, 19 nt, Artificial Sequence
  Description of Artificial Sequence: Synthetic oligonucleotide
  Sense strand starting at position 1633 of SEQ ID NO: 128
uuccuuucugccgagacuu

SEQ ID NO: 13429 - RNA, 19 nt, Artificial Sequence
  Description of Artificial Sequence: Synthetic oligonucleotide
  Antisense strand to SEQ ID NO: 13428
aagucucggcagaaaggaa

SEQ ID NO: 13430 - RNA, 19 nt, Artificial Sequence
  Description of Artificial Sequence: Synthetic oligonucleotide
  Sense strand starting at position 1839 of SEQ ID NO: 128
cacggaaguggcuguugaa

SEQ ID NO: 13431 - RNA, 19 nt, Artificial Sequence
  Description of Artificial Sequence: Synthetic oligonucleotide
  Antisense strand to SEQ ID NO: 13430
uucaacagccacuuccgug

SEQ ID NO: 13432 - RNA, 19 nt, Artificial Sequence
  Description of Artificial Sequence: Synthetic oligonucleotide
  Sense strand starting at position 1879 of SEQ ID NO: 128
gcaagaaauuguguccugu

SEQ ID NO: 13433 - RNA, 19 nt, Artificial Sequence
  Description of Artificial Sequence: Synthetic oligonucleotide
  Antisense strand to SEQ ID NO: 13432
acaggacacaauuucuugc

SEQ ID NO: 13434 - RNA, 19 nt, Artificial Sequence
  Description of Artificial Sequence: Synthetic oligonucleotide
  Sense strand starting at position 1881 of SEQ ID NO: 128
aagaaauuguguccugugu

SEQ ID NO: 13435 - RNA, 19 nt, Artificial Sequence
  Description of Artificial Sequence: Synthetic oligonucleotide
  Antisense strand to SEQ ID NO: 13434
acacaggacacaauuucuu

SEQ ID NO: 13436 - RNA, 19 nt, Artificial Sequence
  Description of Artificial Sequence: Synthetic oligonucleotide
  Sense strand starting at position 1985 of SEQ ID NO: 128
guuagagcaucuuugcaac

SEQ ID NO: 13437 - RNA, 19 nt, Artificial Sequence
  Description of Artificial Sequence: Synthetic oligonucleotide
  Antisense strand to SEQ ID NO: 13436
guugcaaagaugcucuaac

SEQ ID NO: 13438 - RNA, 19 nt, Artificial Sequence
  Description of Artificial Sequence: Synthetic oligonucleotide
  Sense strand starting at position 2151 of SEQ ID NO: 128
accagaauucuugggucca

SEQ ID NO: 13439 - RNA, 19 nt, Artificial Sequence
  Description of Artificial Sequence: Synthetic oligonucleotide
  Antisense strand to SEQ ID NO: 13438
uggacccaagaauucuggu

SEQ ID NO: 13440 - RNA, 19 nt, Artificial Sequence
  Description of Artificial Sequence: Synthetic oligonucleotide
  Sense strand starting at position 2153 of SEQ ID NO: 128
cagaauucuuggguccaag

SEQ ID NO: 13441 - RNA, 19 nt, Artificial Sequence
  Description of Artificial Sequence: Synthetic oligonucleotide
  Antisense strand to SEQ ID NO: 13440
cuuggacccaagaauucug

SEQ ID NO: 13442 - RNA, 19 nt, Artificial Sequence
  Description of Artificial Sequence: Synthetic oligonucleotide
  Sense strand starting at position 2156 of SEQ ID NO: 128
aauucuuggguccaaggua

SEQ ID NO: 13443 - RNA, 19 nt, Artificial Sequence
  Description of Artificial Sequence: Synthetic oligonucleotide
  Antisense strand to SEQ ID NO: 13442
uaccuuggacccaagaauu

SEQ ID NO: 13444 - RNA, 19 nt, Artificial Sequence
  Description of Artificial Sequence: Synthetic oligonucleotide
  Sense strand starting at position 2246 of SEQ ID NO: 128
ggguucugccucugaugga

SEQ ID NO: 13445 - RNA, 19 nt, Artificial Sequence
  Description of Artificial Sequence: Synthetic oligonucleotide
  Antisense strand to SEQ ID NO: 13444
uccaucagaggcagaaccc

SEQ ID NO: 13446 - RNA, 19 nt, Artificial Sequence
  Description of Artificial Sequence: Synthetic oligonucleotide
  Sense strand starting at position 2454 of SEQ ID NO: 128
uugagucuccaguacaaua

SEQ ID NO: 13447 - RNA, 19 nt, Artificial Sequence
  Description of Artificial Sequence: Synthetic oligonucleotide
  Antisense strand to SEQ ID NO: 13446
uauuguacuggagacucaa

SEQ ID NO: 13448 - RNA, 19 nt, Artificial Sequence
  Description of Artificial Sequence: Synthetic oligonucleotide
  Sense strand starting at position 2820 of SEQ ID NO: 128
ucgaaaggguucuuagcuu

SEQ ID NO: 13449 - RNA, 19 nt, Artificial Sequence
  Description of Artificial Sequence: Synthetic oligonucleotide
  Antisense strand to SEQ ID NO: 13448
aagcuaagaacccuuucga

SEQ ID NO: 13450 - RNA, 19 nt, Artificial Sequence
  Description of Artificial Sequence: Synthetic oligonucleotide
  Sense strand starting at position 2970 of SEQ ID NO: 128
gagaguaugugacucagag

SEQ ID NO: 13451 - RNA, 19 nt, Artificial Sequence
  Description of Artificial Sequence: Synthetic oligonucleotide
  Antisense strand to SEQ ID NO: 13450
cucugagucacauacucuc

SEQ ID NO: 13452 - RNA, 19 nt, Artificial Sequence
  Description of Artificial Sequence: Synthetic oligonucleotide
  Sense strand starting at position 2972 of SEQ ID NO: 128
gaguaugugacucagagcu

SEQ ID NO: 13453 - RNA, 19 nt, Artificial Sequence
  Description of Artificial Sequence: Synthetic oligonucleotide
  Antisense strand to SEQ ID NO: 13452
agcucugagucacauacuc

SEQ ID NO: 13454 - RNA, 19 nt, Artificial Sequence
  Description of Artificial Sequence: Synthetic oligonucleotide
  Sense strand starting at position 3102 of SEQ ID NO: 128
auguuaggaucuuagaucu

SEQ ID NO: 13455 - RNA, 19 nt, Artificial Sequence
  Description of Artificial Sequence: Synthetic oligonucleotide
  Antisense strand to SEQ ID NO: 13454
agaucuaagauccuaacau

SEQ ID NO: 13456 - RNA, 19 nt, Artificial Sequence
  Description of Artificial Sequence: Synthetic oligonucleotide
  Sense strand starting at position 3174 of SEQ ID NO: 128
ucucccuuaggccagaaau

SEQ ID NO: 13457 - RNA, 19 nt, Artificial Sequence
  Description of Artificial Sequence: Synthetic oligonucleotide
  Antisense strand to SEQ ID NO: 13456
auuucuggccuaagggaga

SEQ ID NO: 13458 - RNA, 19 nt, Artificial Sequence
  Description of Artificial Sequence: Synthetic oligonucleotide
  Sense strand starting at position 3211 of SEQ ID NO: 128
agaagaguuuggguacuaa

SEQ ID NO: 13459 - RNA, 19 nt, Artificial Sequence
  Description of Artificial Sequence: Synthetic oligonucleotide
  Antisense strand to SEQ ID NO: 13458
uuaguacccaaacucuucu

SEQ ID NO: 13460 - RNA, 19 nt, Artificial Sequence
  Description of Artificial Sequence: Synthetic oligonucleotide
  Sense strand starting at position 3223 of SEQ ID NO: 128
guacuaaaucuagguauuc

SEQ ID NO: 13461 - RNA, 19 nt, Artificial Sequence
  Description of Artificial Sequence: Synthetic oligonucleotide
  Antisense strand to SEQ ID NO: 13460
gaauaccuagauuuaguac

SEQ ID NO: 13462 - RNA, 19 nt, Artificial Sequence
  Description of Artificial Sequence: Synthetic oligonucleotide
  Sense strand starting at position 3233 of SEQ ID NO: 128
uagguauucuggcugagug

SEQ ID NO: 13463 - RNA, 19 nt, Artificial Sequence
  Description of Artificial Sequence: Synthetic oligonucleotide
  Antisense strand to SEQ ID NO: 13462
cacucagccagaauaccua

SEQ ID NO: 13464 - RNA, 19 nt, Artificial Sequence
  Description of Artificial Sequence: Synthetic oligonucleotide
  Sense strand starting at position 3234 of SEQ ID NO: 128
agguauucuggcugagugu

SEQ ID NO: 13465 - RNA, 19 nt, Artificial Sequence
  Description of Artificial Sequence: Synthetic oligonucleotide
  Antisense strand to SEQ ID NO: 13464
acacucagccagaauaccu

SEQ ID NO: 13466 - RNA, 19 nt, Artificial Sequence
  Description of Artificial Sequence: Synthetic oligonucleotide
  Sense strand starting at position 3235 of SEQ ID NO: 128
gguauucuggcugagugua

SEQ ID NO: 13467 - RNA, 19 nt, Artificial Sequence
  Description of Artificial Sequence: Synthetic oligonucleotide
  Antisense strand to SEQ ID NO: 13466
uacacucagccagaauacc

SEQ ID NO: 13468 - RNA, 19 nt, Artificial Sequence
  Description of Artificial Sequence: Synthetic oligonucleotide
  Sense strand starting at position 3314 of SEQ ID NO: 128
ccagaagagccuugaauua

SEQ ID NO: 13469 - RNA, 19 nt, Artificial Sequence
  Description of Artificial Sequence: Synthetic oligonucleotide
  Antisense strand to SEQ ID NO: 13468
uaauucaaggcucuucugg

SEQ ID NO: 13470 - RNA, 19 nt, Artificial Sequence
  Description of Artificial Sequence: Synthetic oligonucleotide
  Sense strand starting at position 3319 of SEQ ID NO: 128
agagccuugaauuagugau

SEQ ID NO: 13471 - RNA, 19 nt, Artificial Sequence
  Description of Artificial Sequence: Synthetic oligonucleotide
  Antisense strand to SEQ ID NO: 13470
aucacuaauucaaggcucu

SEQ ID NO: 13472 - RNA, 19 nt, Artificial Sequence
  Description of Artificial Sequence: Synthetic oligonucleotide
  Sense strand starting at position 3400 of SEQ ID NO: 128
ccuacucucucggucuaua

SEQ ID NO: 13473 - RNA, 19 nt, Artificial Sequence
  Description of Artificial Sequence: Synthetic oligonucleotide
  Antisense strand to SEQ ID NO: 13472
uauagaccgagagaguagg

SEQ ID NO: 13474 - RNA, 19 nt, Artificial Sequence
  Description of Artificial Sequence: Synthetic oligonucleotide
  Sense strand starting at position 3602 of SEQ ID NO: 128
gcaugaagaugccuuggaa

SEQ ID NO: 13475 - RNA, 19 nt, Artificial Sequence
  Description of Artificial Sequence: Synthetic oligonucleotide
  Antisense strand to SEQ ID NO: 13474
uuccaaggcaucuucaugc

SEQ ID NO: 13476 - RNA, 19 nt, Artificial Sequence
  Description of Artificial Sequence: Synthetic oligonucleotide
  Sense strand starting at position 3605 of SEQ ID NO: 128
ugaagaugccuuggaagua

SEQ ID NO: 13477 - RNA, 19 nt, Artificial Sequence
  Description of Artificial Sequence: Synthetic oligonucleotide
  Antisense strand to SEQ ID NO: 13476
uacuuccaaggcaucuuca

SEQ ID NO: 13478 - RNA, 19 nt, Artificial Sequence
  Description of Artificial Sequence: Synthetic oligonucleotide
  Sense strand starting at position 3688 of SEQ ID NO: 128
aguaguaaacauuggauaa

SEQ ID NO: 13479 - RNA, 19 nt, Artificial Sequence
  Description of Artificial Sequence: Synthetic oligonucleotide
  Antisense strand to SEQ ID NO: 13478
uuauccaauguuuacuacu

SEQ ID NO: 13480 - RNA, 19 nt, Artificial Sequence
  Description of Artificial Sequence: Synthetic oligonucleotide
  Sense strand starting at position 3956 of SEQ ID NO: 128
ggagcaguauuccugcaag

SEQ ID NO: 13481 - RNA, 19 nt, Artificial Sequence
  Description of Artificial Sequence: Synthetic oligonucleotide
  Antisense strand to SEQ ID NO: 13480
cuugcaggaauacugcucc

SEQ ID NO: 13482 - RNA, 19 nt, Artificial Sequence
  Description of Artificial Sequence: Synthetic oligonucleotide
  Sense strand starting at position 3959 of SEQ ID NO: 128
gcaguauuccugcaagaag

SEQ ID NO: 13483 - RNA, 19 nt, Artificial Sequence
  Description of Artificial Sequence: Synthetic oligonucleotide
  Antisense strand to SEQ ID NO: 13482
cuucuugcaggaauacugc

SEQ ID NO: 13484 - RNA, 19 nt, Artificial Sequence
  Description of Artificial Sequence: Synthetic oligonucleotide
  Sense strand starting at position 3871 of SEQ ID NO: 129
ggcugcuuuggucucgauu

SEQ ID NO: 13485 - RNA, 19 nt, Artificial Sequence
  Description of Artificial Sequence: Synthetic oligonucleotide
  Antisense strand to SEQ ID NO: 13484
aaucgagaccaaagcagcc

SEQ ID NO: 13486 - RNA, 19 nt, Artificial Sequence
  Description of Artificial Sequence: Synthetic oligonucleotide
  Sense strand starting at position 3721 of SEQ ID NO: 129
ccuaaaucucagugaugau

SEQ ID NO: 13487 - RNA, 19 nt, Artificial Sequence
  Description of Artificial Sequence: Synthetic oligonucleotide
  Antisense strand to SEQ ID NO: 13486
aucaucacugagauuuagg

SEQ ID NO: 13488 - RNA, 19 nt, Artificial Sequence
  Description of Artificial Sequence: Synthetic oligonucleotide
  Sense strand starting at position 3720 of SEQ ID NO: 129
accuaaaucucagugauga

SEQ ID NO: 13489 - RNA, 19 nt, Artificial Sequence
  Description of Artificial Sequence: Synthetic oligonucleotide
  Antisense strand to SEQ ID NO: 13488
ucaucacugagauuuaggu

SEQ ID NO: 13490 - RNA, 19 nt, Artificial Sequence
  Description of Artificial Sequence: Synthetic oligonucleotide
  Sense strand starting at position 3644 of SEQ ID NO: 129
cuugcauaucugcagauau

SEQ ID NO: 13491 - RNA, 19 nt, Artificial Sequence
  Description of Artificial Sequence: Synthetic oligonucleotide
  Antisense strand to SEQ ID NO: 13490
auaucugcagauaugcaag

SEQ ID NO: 13492 - RNA, 19 nt, Artificial Sequence
  Description of Artificial Sequence: Synthetic oligonucleotide
  Sense strand starting at position 3643 of SEQ ID NO: 129
acuugcauaucugcagaua

SEQ ID NO: 13493 - RNA, 19 nt, Artificial Sequence
  Description of Artificial Sequence: Synthetic oligonucleotide
  Antisense strand to SEQ ID NO: 13492
uaucugcagauaugcaagu

SEQ ID NO: 13494 - RNA, 19 nt, Artificial Sequence
  Description of Artificial Sequence: Synthetic oligonucleotide
  Sense strand starting at position 3594 of SEQ ID NO: 129
guuacugacuucucaagaa

SEQ ID NO: 13495 - RNA, 19 nt, Artificial Sequence
  Description of Artificial Sequence: Synthetic oligonucleotide
  Antisense strand to SEQ ID NO: 13494
uucuugagaagucaguaac

SEQ ID NO: 13496 - RNA, 19 nt, Artificial Sequence
  Description of Artificial Sequence: Synthetic oligonucleotide
  Sense strand starting at position 3586 of SEQ ID NO: 129
agaugacuguuacugacuu

SEQ ID NO: 13497 - RNA, 19 nt, Artificial Sequence
  Description of Artificial Sequence: Synthetic oligonucleotide
  Antisense strand to SEQ ID NO: 13496
aagucaguaacagucaucu

SEQ ID NO: 13498 - RNA, 19 nt, Artificial Sequence
  Description of Artificial Sequence: Synthetic oligonucleotide
  Sense strand starting at position 3584 of SEQ ID NO: 129
agagaugacuguuacugac

SEQ ID NO: 13499 - RNA, 19 nt, Artificial Sequence
  Description of Artificial Sequence: Synthetic oligonucleotide
  Antisense strand to SEQ ID NO: 13498
gucaguaacagucaucucu

SEQ ID NO: 13500 - RNA, 19 nt, Artificial Sequence
  Description of Artificial Sequence: Synthetic oligonucleotide
  Sense strand starting at position 3145 of SEQ ID NO: 129
uggagucugugcuuagaag

SEQ ID NO: 13501 - RNA, 19 nt, Artificial Sequence
  Description of Artificial Sequence: Synthetic oligonucleotide
  Antisense strand to SEQ ID NO: 13500
cuucuaagcacagacucca

SEQ ID NO: 13502 - RNA, 19 nt, Artificial Sequence
  Description of Artificial Sequence: Synthetic oligonucleotide
  Sense strand starting at position 3143 of SEQ ID NO: 129
ucuggagucugugcuuaga

SEQ ID NO: 13503 - RNA, 19 nt, Artificial Sequence
  Description of Artificial Sequence: Synthetic oligonucleotide
  Antisense strand to SEQ ID NO: 13502
ucuaagcacagacuccaga

SEQ ID NO: 13504 - RNA, 19 nt, Artificial Sequence
  Description of Artificial Sequence: Synthetic oligonucleotide
  Sense strand starting at position 3067 of SEQ ID NO: 129
gaccaagaaugguuaagua

SEQ ID NO: 13505 - RNA, 19 nt, Artificial Sequence
  Description of Artificial Sequence: Synthetic oligonucleotide
  Antisense strand to SEQ ID NO: 13504
uacuuaaccauucuugguc

SEQ ID NO: 13506 - RNA, 19 nt, Artificial Sequence
  Description of Artificial Sequence: Synthetic oligonucleotide
  Sense strand starting at position 2953 of SEQ ID NO: 129
uggcaauauuaguaacagu

SEQ ID NO: 13507 - RNA, 19 nt, Artificial Sequence
  Description of Artificial Sequence: Synthetic oligonucleotide
  Antisense strand to SEQ ID NO: 13506
acuguuacuaauauugcca

SEQ ID NO: 13508 - RNA, 19 nt, Artificial Sequence
  Description of Artificial Sequence: Synthetic oligonucleotide
  Sense strand starting at position 2947 of SEQ ID NO: 129
gguuaauggcaauauuagu

SEQ ID NO: 13509 - RNA, 19 nt, Artificial Sequence
  Description of Artificial Sequence: Synthetic oligonucleotide
  Antisense strand to SEQ ID NO: 13508
acuaauauugccauuaacc

SEQ ID NO: 13510 - RNA, 19 nt, Artificial Sequence
  Description of Artificial Sequence: Synthetic oligonucleotide
  Sense strand starting at position 2944 of SEQ ID NO: 129
gcagguuaauggcaauauu

SEQ ID NO: 13511 - RNA, 19 nt, Artificial Sequence
  Description of Artificial Sequence: Synthetic oligonucleotide
  Antisense strand to SEQ ID NO: 13510
aauauugccauuaaccugc

SEQ ID NO: 13512 - RNA, 19 nt, Artificial Sequence
  Description of Artificial Sequence: Synthetic oligonucleotide
  Sense strand starting at position 2787 of SEQ ID NO: 129
cuagacaucuuguggagga

SEQ ID NO: 13513 - RNA, 19 nt, Artificial Sequence
  Description of Artificial Sequence: Synthetic oligonucleotide
  Antisense strand to SEQ ID NO: 13512
uccuccacaagaugucuag

SEQ ID NO: 13514 - RNA, 19 nt, Artificial Sequence
  Description of Artificial Sequence: Synthetic oligonucleotide
  Sense strand starting at position 2547 of SEQ ID NO: 129
gcacaugggugugaggaaa

SEQ ID NO: 13515 - RNA, 19 nt, Artificial Sequence
  Description of Artificial Sequence: Synthetic oligonucleotide
  Antisense strand to SEQ ID NO: 13514
uuuccucacacccaugugc

SEQ ID NO: 13516 - RNA, 19 nt, Artificial Sequence
  Description of Artificial Sequence: Synthetic oligonucleotide
  Sense strand starting at position 2291 of SEQ ID NO: 129
uggcuuacaggugaaaucu

SEQ ID NO: 13517 - RNA, 19 nt, Artificial Sequence
  Description of Artificial Sequence: Synthetic oligonucleotide
  Antisense strand to SEQ ID NO: 13516
agauuucaccuguaagcca

SEQ ID NO: 13518 - RNA, 19 nt, Artificial Sequence
  Description of Artificial Sequence: Synthetic oligonucleotide
  Sense strand starting at position 2290 of SEQ ID NO: 129
cuggcuuacaggugaaauc

SEQ ID NO: 13519 - RNA, 19 nt, Artificial Sequence
  Description of Artificial Sequence: Synthetic oligonucleotide
  Antisense strand to SEQ ID NO: 13518
gauuucaccuguaagccag

SEQ ID NO: 13520 - RNA, 19 nt, Artificial Sequence
  Description of Artificial Sequence: Synthetic oligonucleotide
  Sense strand starting at position 2061 of SEQ ID NO: 129
gagacaagucacuggcuca

SEQ ID NO: 13521 - RNA, 19 nt, Artificial Sequence
  Description of Artificial Sequence: Synthetic oligonucleotide
  Antisense strand to SEQ ID NO: 13520
ugagccagugacuugucuc

SEQ ID NO: 13522 - RNA, 19 nt, Artificial Sequence
  Description of Artificial Sequence: Synthetic oligonucleotide
  Sense strand starting at position 1734 of SEQ ID NO: 129
gcagaaaguuacuucuauu

SEQ ID NO: 13523 - RNA, 19 nt, Artificial Sequence
  Description of Artificial Sequence: Synthetic oligonucleotide
  Antisense strand to SEQ ID NO: 13522
aauagaaguaacuuucugc

SEQ ID NO: 13524 - RNA, 19 nt, Artificial Sequence
  Description of Artificial Sequence: Synthetic oligonucleotide
  Sense strand starting at position 1733 of SEQ ID NO: 129
agcagaaaguuacuucuau

SEQ ID NO: 13525 - RNA, 19 nt, Artificial Sequence
  Description of Artificial Sequence: Synthetic oligonucleotide
  Antisense strand to SEQ ID NO: 13524
auagaaguaacuuucugcu

SEQ ID NO: 13526 - RNA, 19 nt, Artificial Sequence
  Description of Artificial Sequence: Synthetic oligonucleotide
  Sense strand starting at position 1677 of SEQ ID NO: 129
ggcggaucucagggagaca

SEQ ID NO: 13527 - RNA, 19 nt, Artificial Sequence
  Description of Artificial Sequence: Synthetic oligonucleotide
  Antisense strand to SEQ ID NO: 13526
ugucucccugagauccgcc

SEQ ID NO: 13528 - RNA, 19 nt, Artificial Sequence
  Description of Artificial Sequence: Synthetic oligonucleotide
  Sense strand starting at position 1120 of SEQ ID NO: 129
gugccaggguugccaaaua

SEQ ID NO: 13529 - RNA, 19 nt, Artificial Sequence
  Description of Artificial Sequence: Synthetic oligonucleotide
  Antisense strand to SEQ ID NO: 13528
uauuuggcaacccuggcac

SEQ ID NO: 13530 - RNA, 19 nt, Artificial Sequence
  Description of Artificial Sequence: Synthetic oligonucleotide
  Sense strand starting at position 1038 of SEQ ID NO: 129
agcugcugccugggugaaa

SEQ ID NO: 13531 - RNA, 19 nt, Artificial Sequence
  Description of Artificial Sequence: Synthetic oligonucleotide
  Antisense strand to SEQ ID NO: 13530
uuucacccaggcagcagcu

SEQ ID NO: 13532 - RNA, 19 nt, Artificial Sequence
  Description of Artificial Sequence: Synthetic oligonucleotide
  Sense strand starting at position 1011 of SEQ ID NO: 129
cucucauagugauacaaga

SEQ ID NO: 13533 - RNA, 19 nt, Artificial Sequence
  Description of Artificial Sequence: Synthetic oligonucleotide
  Antisense strand to SEQ ID NO: 13532
ucuuguaucacuaugagag

SEQ ID NO: 13534 - RNA, 19 nt, Artificial Sequence
  Description of Artificial Sequence: Synthetic oligonucleotide
  Sense strand starting at position 972 of SEQ ID NO: 129
ggacaaagcccucacucau

SEQ ID NO: 13535 - RNA, 19 nt, Artificial Sequence
  Description of Artificial Sequence: Synthetic oligonucleotide
  Antisense strand to SEQ ID NO: 13534
augagugagggcuuugucc

SEQ ID NO: 13536 - RNA, 19 nt, Artificial Sequence
  Description of Artificial Sequence: Synthetic oligonucleotide
  Sense strand starting at position 873 of SEQ ID NO: 129
guuuacugaugaugaaacu

SEQ ID NO: 13537 - RNA, 19 nt, Artificial Sequence
  Description of Artificial Sequence: Synthetic oligonucleotide
  Antisense strand to SEQ ID NO: 13536
aguuucaucaucaguaaac

SEQ ID NO: 13538 - RNA, 19 nt, Artificial Sequence
  Description of Artificial Sequence: Synthetic oligonucleotide
  Sense strand starting at position 870 of SEQ ID NO: 129
cauguuuacugaugaugaa

SEQ ID NO: 13539 - RNA, 19 nt, Artificial Sequence
  Description of Artificial Sequence: Synthetic oligonucleotide
  Antisense strand to SEQ ID NO: 13538
uucaucaucaguaaacaug

SEQ ID NO: 13540 - RNA, 19 nt, Artificial Sequence
  Description of Artificial Sequence: Synthetic oligonucleotide
  Sense strand starting at position 758 of SEQ ID NO: 129
gcugacacccacgaugaua

SEQ ID NO: 13541 - RNA, 19 nt, Artificial Sequence
  Description of Artificial Sequence: Synthetic oligonucleotide
  Antisense strand to SEQ ID NO: 13540
uaucaucgugggugucagc

SEQ ID NO: 13542 - RNA, 19 nt, Artificial Sequence
  Description of Artificial Sequence: Synthetic oligonucleotide
  Sense strand starting at position 746 of SEQ ID NO: 129
gcugucuguccugcugaca

SEQ ID NO: 13543 - RNA, 19 nt, Artificial Sequence
  Description of Artificial Sequence: Synthetic oligonucleotide
  Antisense strand to SEQ ID NO: 13542
ugucagcaggacagacagc

SEQ ID NO: 13544 - RNA, 19 nt, Artificial Sequence
  Description of Artificial Sequence: Synthetic oligonucleotide
  Sense strand starting at position 560 of SEQ ID NO: 129
agacccgguccuugugaga

SEQ ID NO: 13545 - RNA, 19 nt, Artificial Sequence
  Description of Artificial Sequence: Synthetic oligonucleotide
  Antisense strand to SEQ ID NO: 13544
ucucacaaggaccgggucu

SEQ ID NO: 13546 - RNA, 19 nt, Artificial Sequence
  Description of Artificial Sequence: Synthetic oligonucleotide
  Sense strand starting at position 544 of SEQ ID NO: 129
ucugauguuccuggacaga

SEQ ID NO: 13547 - RNA, 19 nt, Artificial Sequence
  Description of Artificial Sequence: Synthetic oligonucleotide
  Antisense strand to SEQ ID NO: 13546
ucuguccaggaacaucaga

SEQ ID NO: 13548 - RNA, 19 nt, Artificial Sequence
  Description of Artificial Sequence: Synthetic oligonucleotide
  Sense strand starting at position 522 of SEQ ID NO: 129
gccagagcuggucacucau

SEQ ID NO: 13549 - RNA, 19 nt, Artificial Sequence
  Description of Artificial Sequence: Synthetic oligonucleotide
  Antisense strand to SEQ ID NO: 13548
augagugaccagcucuggc

SEQ ID NO: 13550 - RNA, 19 nt, Artificial Sequence
  Description of Artificial Sequence: Synthetic oligonucleotide
  Sense strand starting at position 430 of SEQ ID NO: 129
ugcuccuuaucagaaggaa

SEQ ID NO: 13551 - RNA, 19 nt, Artificial Sequence
  Description of Artificial Sequence: Synthetic oligonucleotide
  Antisense strand to SEQ ID NO: 13550
uuccuucugauaaggagca

SEQ ID NO: 13552 - RNA, 19 nt, Artificial Sequence
  Description of Artificial Sequence: Synthetic oligonucleotide
  Sense strand starting at position 425 of SEQ ID NO: 129
ggcauugcuccuuaucaga

SEQ ID NO: 13553 - RNA, 19 nt, Artificial Sequence
  Description of Artificial Sequence: Synthetic oligonucleotide
  Antisense strand to SEQ ID NO: 13552
ucugauaaggagcaaugcc

SEQ ID NO: 13554 - RNA, 19 nt, Artificial Sequence
  Description of Artificial Sequence: Synthetic oligonucleotide
  Sense strand starting at position 198 of SEQ ID NO: 129
auguuugcugaacagaaca

SEQ ID NO: 13555 - RNA, 19 nt, Artificial Sequence
  Description of Artificial Sequence: Synthetic oligonucleotide
  Antisense strand to SEQ ID NO: 13554
uguucuguucagcaaacau

SEQ ID NO: 13556 - RNA, 19 nt, Artificial Sequence
  Description of Artificial Sequence: Synthetic oligonucleotide
  Sense strand starting at position 193 of SEQ ID NO: 129
gucaaauguuugcugaaca

SEQ ID NO: 13557 - RNA, 19 nt, Artificial Sequence
  Description of Artificial Sequence: Synthetic oligonucleotide
  Antisense strand to SEQ ID NO: 13556
uguucagcaaacauuugac

SEQ ID NO: 13558 - RNA, 19 nt, Artificial Sequence
  Description of Artificial Sequence: Synthetic oligonucleotide
  Sense strand starting at position 192 of SEQ ID NO: 129
ugucaaauguuugcugaac

SEQ ID NO: 13559 - RNA, 19 nt, Artificial Sequence
  Description of Artificial Sequence: Synthetic oligonucleotide
  Antisense strand to SEQ ID NO: 13558
guucagcaaacauuugaca

SEQ ID NO: 13560 - RNA, 19 nt, Artificial Sequence
  Description of Artificial Sequence: Synthetic oligonucleotide
  Sense strand starting at position 151 of SEQ ID NO: 129
acuagccagcaauauuaga

SEQ ID NO: 13561 - RNA, 19 nt, Artificial Sequence
  Description of Artificial Sequence: Synthetic oligonucleotide
  Antisense strand to SEQ ID NO: 13560
ucuaauauugcuggcuagu

SEQ ID NO: 13562 - RNA, 19 nt, Artificial Sequence
  Description of Artificial Sequence: Synthetic oligonucleotide
  Sense strand starting at position 144 of SEQ ID NO: 129
agaugauacuagccagcaa

SEQ ID NO: 13563 - RNA, 19 nt, Artificial Sequence
  Description of Artificial Sequence: Synthetic oligonucleotide
  Antisense strand to SEQ ID NO: 13562
uugcuggcuaguaucaucu

SEQ ID NO: 13564 - RNA, 19 nt, Artificial Sequence
  Description of Artificial Sequence: Synthetic oligonucleotide
  Sense strand starting at position 3908 of SEQ ID NO: 130
gugccuauauugccaggua

SEQ ID NO: 13565 - RNA, 19 nt, Artificial Sequence
  Description of Artificial Sequence: Synthetic oligonucleotide
  Antisense strand to SEQ ID NO: 13564
uaccuggcaauauaggcac

SEQ ID NO: 13566 - RNA, 19 nt, Artificial Sequence
  Description of Artificial Sequence: Synthetic oligonucleotide
  Sense strand starting at position 3623 of SEQ ID NO: 130
ggcauuaagcuuuggacca

SEQ ID NO: 13567 - RNA, 19 nt, Artificial Sequence
  Description of Artificial Sequence: Synthetic oligonucleotide
  Antisense strand to SEQ ID NO: 13566
ugguccaaagcuuaaugcc

SEQ ID NO: 13568 - RNA, 19 nt, Artificial Sequence
  Description of Artificial Sequence: Synthetic oligonucleotide
  Sense strand starting at position 3616 of SEQ ID NO: 130
ggcucauggcauuaagcuu

SEQ ID NO: 13569 - RNA, 19 nt, Artificial Sequence
  Description of Artificial Sequence: Synthetic oligonucleotide
  Antisense strand to SEQ ID NO: 13568
aagcuuaaugccaugagcc

SEQ ID NO: 13570 - RNA, 19 nt, Artificial Sequence
  Description of Artificial Sequence: Synthetic oligonucleotide
  Sense strand starting at position 3592 of SEQ ID NO: 130
ucagauguccauugaguga

SEQ ID NO: 13571 - RNA, 19 nt, Artificial Sequence
  Description of Artificial Sequence: Synthetic oligonucleotide
  Antisense strand to SEQ ID NO: 13570
ucacucaauggacaucuga

SEQ ID NO: 13572 - RNA, 19 nt, Artificial Sequence
  Description of Artificial Sequence: Synthetic oligonucleotide
  Sense strand starting at position 3517 of SEQ ID NO: 130
cccugcugugaauaaauga

SEQ ID NO: 13573 - RNA, 19 nt, Artificial Sequence
  Description of Artificial Sequence: Synthetic oligonucleotide
  Antisense strand to SEQ ID NO: 13572
ucauuuauucacagcaggg

SEQ ID NO: 13574 - RNA, 19 nt, Artificial Sequence
  Description of Artificial Sequence: Synthetic oligonucleotide
  Sense strand starting at position 3513 of SEQ ID NO: 130
ccugcccugcugugaauaa

SEQ ID NO: 13575 - RNA, 19 nt, Artificial Sequence
  Description of Artificial Sequence: Synthetic oligonucleotide
  Antisense strand to SEQ ID NO: 13574
uuauucacagcagggcagg

SEQ ID NO: 13576 - RNA, 19 nt, Artificial Sequence
  Description of Artificial Sequence: Synthetic oligonucleotide
  Sense strand starting at position 3455 of SEQ ID NO: 130
uguuccagacaucguucua

SEQ ID NO: 13577 - RNA, 19 nt, Artificial Sequence
  Description of Artificial Sequence: Synthetic oligonucleotide
  Antisense strand to SEQ ID NO: 13576
uagaacgaugucuggaaca

SEQ ID NO: 13578 - RNA, 19 nt, Artificial Sequence
  Description of Artificial Sequence: Synthetic oligonucleotide
  Sense strand starting at position 3429 of SEQ ID NO: 130
gagauauucuuugagcauu

SEQ ID NO: 13579 - RNA, 19 nt, Artificial Sequence
  Description of Artificial Sequence: Synthetic oligonucleotide
  Antisense strand to SEQ ID NO: 13578
aaugcucaaagaauaucuc

SEQ ID NO: 13580 - RNA, 19 nt, Artificial Sequence
  Description of Artificial Sequence: Synthetic oligonucleotide
  Sense strand starting at position 3428 of SEQ ID NO: 130
ggagauauucuuugagcau

SEQ ID NO: 13581 - RNA, 19 nt, Artificial Sequence
  Description of Artificial Sequence: Synthetic oligonucleotide
  Antisense strand to SEQ ID NO: 13580
augcucaaagaauaucucc

SEQ ID NO: 13582 - RNA, 19 nt, Artificial Sequence
  Description of Artificial Sequence: Synthetic oligonucleotide
  Sense strand starting at position 3427 of SEQ ID NO: 130
aggagauauucuuugagca

SEQ ID NO: 13583 - RNA, 19 nt, Artificial Sequence
  Description of Artificial Sequence: Synthetic oligonucleotide
  Antisense strand to SEQ ID NO: 13582
ugcucaaagaauaucuccu

SEQ ID NO: 13584 - RNA, 19 nt, Artificial Sequence
  Description of Artificial Sequence: Synthetic oligonucleotide
  Sense strand starting at position 3399 of SEQ ID NO: 130
gcaacacuggcucauaguu

SEQ ID NO: 13585 - RNA, 19 nt, Artificial Sequence
  Description of Artificial Sequence: Synthetic oligonucleotide
  Antisense strand to SEQ ID NO: 13584
aacuaugagccaguguugc

SEQ ID NO: 13586 - RNA, 19 nt, Artificial Sequence
  Description of Artificial Sequence: Synthetic oligonucleotide
  Sense strand starting at position 3334 of SEQ ID NO: 130
uguuuauugucccucucga

SEQ ID NO: 13587 - RNA, 19 nt, Artificial Sequence
  Description of Artificial Sequence: Synthetic oligonucleotide
  Antisense strand to SEQ ID NO: 13586
ucgagagggacaauaaaca

SEQ ID NO: 13588 - RNA, 19 nt, Artificial Sequence
  Description of Artificial Sequence: Synthetic oligonucleotide
  Sense strand starting at position 3227 of SEQ ID NO: 130
agcucauaggcuuaggaga

SEQ ID NO: 13589 - RNA, 19 nt, Artificial Sequence
  Description of Artificial Sequence: Synthetic oligonucleotide
  Antisense strand to SEQ ID NO: 13588
ucuccuaagccuaugagcu

SEQ ID NO: 13590 - RNA, 19 nt, Artificial Sequence
  Description of Artificial Sequence: Synthetic oligonucleotide
  Sense strand starting at position 3150 of SEQ ID NO: 130
cccuauuugucaggcacca

SEQ ID NO: 13591 - RNA, 19 nt, Artificial Sequence
  Description of Artificial Sequence: Synthetic oligonucleotide
  Antisense strand to SEQ ID NO: 13590
uggugccugacaaauaggg

SEQ ID NO: 13592 - RNA, 19 nt, Artificial Sequence
  Description of Artificial Sequence: Synthetic oligonucleotide
  Sense strand starting at position 3030 of SEQ ID NO: 130
augauaaguucugcagccu

SEQ ID NO: 13593 - RNA, 19 nt, Artificial Sequence
  Description of Artificial Sequence: Synthetic oligonucleotide
  Antisense strand to SEQ ID NO: 13592
aggcugcagaacuuaucau

SEQ ID NO: 13594 - RNA, 19 nt, Artificial Sequence
  Description of Artificial Sequence: Synthetic oligonucleotide
  Sense strand starting at position 3022 of SEQ ID NO: 130
gguugauaaugauaaguuc

SEQ ID NO: 13595 - RNA, 19 nt, Artificial Sequence
  Description of Artificial Sequence: Synthetic oligonucleotide
  Antisense strand to SEQ ID NO: 13594
gaacuuaucauuaucaacc

SEQ ID NO: 13596 - RNA, 19 nt, Artificial Sequence
  Description of Artificial Sequence: Synthetic oligonucleotide
  Sense strand starting at position 3019 of SEQ ID NO: 130
cuggguugauaaugauaag

SEQ ID NO: 13597 - RNA, 19 nt, Artificial Sequence
  Description of Artificial Sequence: Synthetic oligonucleotide
  Antisense strand to SEQ ID NO: 13596
cuuaucauuaucaacccag

SEQ ID NO: 13598 - RNA, 19 nt, Artificial Sequence
  Description of Artificial Sequence: Synthetic oligonucleotide
  Sense strand starting at position 3013 of SEQ ID NO: 130
uuacuccuggguugauaau

SEQ ID NO: 13599 - RNA, 19 nt, Artificial Sequence
  Description of Artificial Sequence: Synthetic oligonucleotide
  Antisense strand to SEQ ID NO: 13598
auuaucaacccaggaguaa

SEQ ID NO: 13600 - RNA, 19 nt, Artificial Sequence
  Description of Artificial Sequence: Synthetic oligonucleotide
  Sense strand starting at position 3011 of SEQ ID NO: 130
aauuacuccuggguugaua

SEQ ID NO: 13601 - RNA, 19 nt, Artificial Sequence
  Description of Artificial Sequence: Synthetic oligonucleotide
  Antisense strand to SEQ ID NO: 13600
uaucaacccaggaguaauu

SEQ ID NO: 13602 - RNA, 19 nt, Artificial Sequence
  Description of Artificial Sequence: Synthetic oligonucleotide
  Sense strand starting at position 3010 of SEQ ID NO: 130
caauuacuccuggguugau

SEQ ID NO: 13603 - RNA, 19 nt, Artificial Sequence
  Description of Artificial Sequence: Synthetic oligonucleotide
  Antisense strand to SEQ ID NO: 13602
aucaacccaggaguaauug

SEQ ID NO: 13604 - RNA, 19 nt, Artificial Sequence
  Description of Artificial Sequence: Synthetic oligonucleotide
  Sense strand starting at position 3009 of SEQ ID NO: 130
gcaauuacuccuggguuga

SEQ ID NO: 13605 - RNA, 19 nt, Artificial Sequence
  Description of Artificial Sequence: Synthetic oligonucleotide
  Antisense strand to SEQ ID NO: 13604
ucaacccaggaguaauugc

SEQ ID NO: 13606 - RNA, 19 nt, Artificial Sequence
  Description of Artificial Sequence: Synthetic oligonucleotide
  Sense strand starting at position 2997 of SEQ ID NO: 130
gcgggcuuaucagcaauua

SEQ ID NO: 13607 - RNA, 19 nt, Artificial Sequence
  Description of Artificial Sequence: Synthetic oligonucleotide
  Antisense strand to SEQ ID NO: 13606
uaauugcugauaagcccgc

SEQ ID NO: 13608 - RNA, 19 nt, Artificial Sequence
  Description of Artificial Sequence: Synthetic oligonucleotide
  Sense strand starting at position 2934 of SEQ ID NO: 130
agauuauccgcguuguugu

SEQ ID NO: 13609 - RNA, 19 nt, Artificial Sequence
  Description of Artificial Sequence: Synthetic oligonucleotide
  Antisense strand to SEQ ID NO: 13608
acaacaacgcggauaaucu

SEQ ID NO: 13610 - RNA, 19 nt, Artificial Sequence
  Description of Artificial Sequence: Synthetic oligonucleotide
  Sense strand starting at position 2932 of SEQ ID NO: 130
uaagauuauccgcguuguu

SEQ ID NO: 13611 - RNA, 19 nt, Artificial Sequence
  Description of Artificial Sequence: Synthetic oligonucleotide
  Antisense strand to SEQ ID NO: 13610
aacaacgcggauaaucuua

SEQ ID NO: 13612 - RNA, 19 nt, Artificial Sequence
  Description of Artificial Sequence: Synthetic oligonucleotide
  Sense strand starting at position 2931 of SEQ ID NO: 130
uuaagauuauccgcguugu

SEQ ID NO: 13613 - RNA, 19 nt, Artificial Sequence
  Description of Artificial Sequence: Synthetic oligonucleotide
  Antisense strand to SEQ ID NO: 13612
acaacgcggauaaucuuaa

SEQ ID NO: 13614 - RNA, 19 nt, Artificial Sequence
  Description of Artificial Sequence: Synthetic oligonucleotide
  Sense strand starting at position 2929 of SEQ ID NO: 130
aauuaagauuauccgcguu

SEQ ID NO: 13615 - RNA, 19 nt, Artificial Sequence
  Description of Artificial Sequence: Synthetic oligonucleotide
  Antisense strand to SEQ ID NO: 13614
aacgcggauaaucuuaauu

SEQ ID NO: 13616 - RNA, 19 nt, Artificial Sequence
  Description of Artificial Sequence: Synthetic oligonucleotide
  Sense strand starting at position 2919 of SEQ ID NO: 130
ucaggucauuaauuaagau

SEQ ID NO: 13617 - RNA, 19 nt, Artificial Sequence
  Description of Artificial Sequence: Synthetic oligonucleotide
  Antisense strand to SEQ ID NO: 13616
aucuuaauuaaugaccuga

SEQ ID NO: 13618 - RNA, 19 nt, Artificial Sequence
  Description of Artificial Sequence: Synthetic oligonucleotide
  Sense strand starting at position 2915 of SEQ ID NO: 130
guuaucaggucauuaauua

SEQ ID NO: 13619 - RNA, 19 nt, Artificial Sequence
  Description of Artificial Sequence: Synthetic oligonucleotide
  Antisense strand to SEQ ID NO: 13618
uaauuaaugaccugauaac

SEQ ID NO: 13620 - RNA, 19 nt, Artificial Sequence
  Description of Artificial Sequence: Synthetic oligonucleotide
  Sense strand starting at position 2799 of SEQ ID NO: 130
ugcugagacugagauccua

SEQ ID NO: 13621 - RNA, 19 nt, Artificial Sequence
  Description of Artificial Sequence: Synthetic oligonucleotide
  Antisense strand to SEQ ID NO: 13620
uaggaucucagucucagca

SEQ ID NO: 13622 - RNA, 19 nt, Artificial Sequence
  Description of Artificial Sequence: Synthetic oligonucleotide
  Sense strand starting at position 2175 of SEQ ID NO: 130
ggcugaggucaccgcuuaa

SEQ ID NO: 13623 - RNA, 19 nt, Artificial Sequence
  Description of Artificial Sequence: Synthetic oligonucleotide
  Antisense strand to SEQ ID NO: 13622
uuaagcggugaccucagcc

SEQ ID NO: 13624 - RNA, 19 nt, Artificial Sequence
  Description of Artificial Sequence: Synthetic oligonucleotide
  Sense strand starting at position 1657 of SEQ ID NO: 130
ccagaacuccagugacaca

SEQ ID NO: 13625 - RNA, 19 nt, Artificial Sequence
  Description of Artificial Sequence: Synthetic oligonucleotide
  Antisense strand to SEQ ID NO: 13624
ugugucacuggaguucugg

SEQ ID NO: 13626 - RNA, 19 nt, Artificial Sequence
  Description of Artificial Sequence: Synthetic oligonucleotide
  Sense strand starting at position 1292 of SEQ ID NO: 130
uagggcccucccugacaua

SEQ ID NO: 13627 - RNA, 19 nt, Artificial Sequence
  Description of Artificial Sequence: Synthetic oligonucleotide
  Antisense strand to SEQ ID NO: 13626
uaugucagggagggcccua

SEQ ID NO: 13628 - RNA, 19 nt, Artificial Sequence
  Description of Artificial Sequence: Synthetic oligonucleotide
  Sense strand starting at position 1009 of SEQ ID NO: 130
cguggcuucccaguagcau

SEQ ID NO: 13629 - RNA, 19 nt, Artificial Sequence
  Description of Artificial Sequence: Synthetic oligonucleotide
  Antisense strand to SEQ ID NO: 13628
augcuacugggaagccacg

SEQ ID NO: 13630 - RNA, 19 nt, Artificial Sequence
  Description of Artificial Sequence: Synthetic oligonucleotide
  Sense strand starting at position 919 of SEQ ID NO: 130
ggaagagcuaugcauucua

SEQ ID NO: 13631 - RNA, 19 nt, Artificial Sequence
  Description of Artificial Sequence: Synthetic oligonucleotide
  Antisense strand to SEQ ID NO: 13630
uagaaugcauagcucuucc

SEQ ID NO: 13632 - RNA, 19 nt, Artificial Sequence
  Description of Artificial Sequence: Synthetic oligonucleotide
  Sense strand starting at position 622 of SEQ ID NO: 130
gacccacuuccuggauaga

SEQ ID NO: 13633 - RNA, 19 nt, Artificial Sequence
  Description of Artificial Sequence: Synthetic oligonucleotide
  Antisense strand to SEQ ID NO: 13632
ucuauccaggaaguggguc

SEQ ID NO: 13634 - RNA, 19 nt, Artificial Sequence
  Description of Artificial Sequence: Synthetic oligonucleotide
  Sense strand starting at position 584 of SEQ ID NO: 130
guagcucccgagugagaaa

SEQ ID NO: 13635 - RNA, 19 nt, Artificial Sequence
  Description of Artificial Sequence: Synthetic oligonucleotide
  Antisense strand to SEQ ID NO: 13634
uuucucacucgggagcuac

SEQ ID NO: 13636 - RNA, 19 nt, Artificial Sequence
  Description of Artificial Sequence: Synthetic oligonucleotide
  Sense strand starting at position 462 of SEQ ID NO: 130
agcugugaucaaggacaga

SEQ ID NO: 13637 - RNA, 19 nt, Artificial Sequence
  Description of Artificial Sequence: Synthetic oligonucleotide
  Antisense strand to SEQ ID NO: 13636
ucuguccuugaucacagcu

SEQ ID NO: 13638 - RNA, 19 nt, Artificial Sequence
  Description of Artificial Sequence: Synthetic oligonucleotide
  Sense strand starting at position 455 of SEQ ID NO: 130
uguucugagcugugaucaa

SEQ ID NO: 13639 - RNA, 19 nt, Artificial Sequence
  Description of Artificial Sequence: Synthetic oligonucleotide
  Antisense strand to SEQ ID NO: 13638
uugaucacagcucagaaca

SEQ ID NO: 13640 - RNA, 19 nt, Artificial Sequence
  Description of Artificial Sequence: Synthetic oligonucleotide
  Sense strand starting at position 453 of SEQ ID NO: 130
acuguucugagcugugauc

SEQ ID NO: 13641 - RNA, 19 nt, Artificial Sequence
  Description of Artificial Sequence: Synthetic oligonucleotide
  Antisense strand to SEQ ID NO: 13640
gaucacagcucagaacagu

SEQ ID NO: 13642 - RNA, 19 nt, Artificial Sequence
  Description of Artificial Sequence: Synthetic oligonucleotide
  Sense strand starting at position 346 of SEQ ID NO: 130
cccagacuacuccagaguu

SEQ ID NO: 13643 - RNA, 19 nt, Artificial Sequence
  Description of Artificial Sequence: Synthetic oligonucleotide
  Antisense strand to SEQ ID NO: 13642
aacucuggaguagucuggg

SEQ ID NO: 13644 - RNA, 19 nt, Artificial Sequence
  Description of Artificial Sequence: Synthetic oligonucleotide
  Sense strand starting at position 49 of SEQ ID NO: 131
uaccaaucauuuggaggua

SEQ ID NO: 13645 - RNA, 19 nt, Artificial Sequence
  Description of Artificial Sequence: Synthetic oligonucleotide
  Antisense strand to SEQ ID NO: 13644
uaccuccaaaugauuggua

SEQ ID NO: 13646 - RNA, 19 nt, Artificial Sequence
  Description of Artificial Sequence: Synthetic oligonucleotide
  Sense strand starting at position 50 of SEQ ID NO: 131
accaaucauuuggagguaa

SEQ ID NO: 13647 - RNA, 19 nt, Artificial Sequence
  Description of Artificial Sequence: Synthetic oligonucleotide
  Antisense strand to SEQ ID NO: 13646
uuaccuccaaaugauuggu

SEQ ID NO: 13648 - RNA, 19 nt, Artificial Sequence
  Description of Artificial Sequence: Synthetic oligonucleotide
  Sense strand starting at position 133 of SEQ ID NO: 131
ggugucauguguucagacu

SEQ ID NO: 13649 - RNA, 19 nt, Artificial Sequence
  Description of Artificial Sequence: Synthetic oligonucleotide
  Antisense strand to SEQ ID NO: 13648
agucugaacacaugacacc

SEQ ID NO: 13650 - RNA, 19 nt, Artificial Sequence
  Description of Artificial Sequence: Synthetic oligonucleotide
  Sense strand starting at position 134 of SEQ ID NO: 131
gugucauguguucagacuc

SEQ ID NO: 13651 - RNA, 19 nt, Artificial Sequence
  Description of Artificial Sequence: Synthetic oligonucleotide
  Antisense strand to SEQ ID NO: 13650
gagucugaacacaugacac

SEQ ID NO: 13652 - RNA, 19 nt, Artificial Sequence
  Description of Artificial Sequence: Synthetic oligonucleotide
  Sense strand starting at position 235 of SEQ ID NO: 131
cagagucaagcuuauuaag

SEQ ID NO: 13653 - RNA, 19 nt, Artificial Sequence
  Description of Artificial Sequence: Synthetic oligonucleotide
  Antisense strand to SEQ ID NO: 13652
cuuaauaagcuugacucug

SEQ ID NO: 13654 - RNA, 19 nt, Artificial Sequence
  Description of Artificial Sequence: Synthetic oligonucleotide
  Sense strand starting at position 251 of SEQ ID NO: 131
aagaacagcuuggaagauu

SEQ ID NO: 13655 - RNA, 19 nt, Artificial Sequence
  Description of Artificial Sequence: Synthetic oligonucleotide
  Antisense strand to SEQ ID NO: 13654
aaucuuccaagcuguucuu

SEQ ID NO: 13656 - RNA, 19 nt, Artificial Sequence
  Description of Artificial Sequence: Synthetic oligonucleotide
  Sense strand starting at position 402 of SEQ ID NO: 131
aaggauguuucugucccau

SEQ ID NO: 13657 - RNA, 19 nt, Artificial Sequence
  Description of Artificial Sequence: Synthetic oligonucleotide
  Antisense strand to SEQ ID NO: 13656
augggacagaaacauccuu

SEQ ID NO: 13658 - RNA, 19 nt, Artificial Sequence
  Description of Artificial Sequence: Synthetic oligonucleotide
  Sense strand starting at position 886 of SEQ ID NO: 131
uccuuuagucaauguugaa

SEQ ID NO: 13659 - RNA, 19 nt, Artificial Sequence
  Description of Artificial Sequence: Synthetic oligonucleotide
  Antisense strand to SEQ ID NO: 13658
uucaacauugacuaaagga

SEQ ID NO: 13660 - RNA, 19 nt, Artificial Sequence
  Description of Artificial Sequence: Synthetic oligonucleotide
  Sense strand starting at position 983 of SEQ ID NO: 131
uccagaauccuguagcuuu

SEQ ID NO: 13661 - RNA, 19 nt, Artificial Sequence
  Description of Artificial Sequence: Synthetic oligonucleotide
  Antisense strand to SEQ ID NO: 13660
aaagcuacaggauucugga

SEQ ID NO: 13662 - RNA, 19 nt, Artificial Sequence
  Description of Artificial Sequence: Synthetic oligonucleotide
  Sense strand starting at position 1001 of SEQ ID NO: 131
uggugucuugaucaggauu

SEQ ID NO: 13663 - RNA, 19 nt, Artificial Sequence
  Description of Artificial Sequence: Synthetic oligonucleotide
  Antisense strand to SEQ ID NO: 13662
aauccugaucaagacacca

SEQ ID NO: 13664 - RNA, 19 nt, Artificial Sequence
  Description of Artificial Sequence: Synthetic oligonucleotide
  Sense strand starting at position 1014 of SEQ ID NO: 131
aggauugaaucgcuugcaa

SEQ ID NO: 13665 - RNA, 19 nt, Artificial Sequence
  Description of Artificial Sequence: Synthetic oligonucleotide
  Antisense strand to SEQ ID NO: 13664
uugcaagcgauucaauccu

SEQ ID NO: 13666 - RNA, 19 nt, Artificial Sequence
  Description of Artificial Sequence: Synthetic oligonucleotide
  Sense strand starting at position 1016 of SEQ ID NO: 131
gauugaaucgcuugcaauu

SEQ ID NO: 13667 - RNA, 19 nt, Artificial Sequence
  Description of Artificial Sequence: Synthetic oligonucleotide
  Antisense strand to SEQ ID NO: 13666
aauugcaagcgauucaauc

SEQ ID NO: 13668 - RNA, 19 nt, Artificial Sequence
  Description of Artificial Sequence: Synthetic oligonucleotide
  Sense strand starting at position 1390 of SEQ ID NO: 131
uguccuucuguuggcaaga

SEQ ID NO: 13669 - RNA, 19 nt, Artificial Sequence
  Description of Artificial Sequence: Synthetic oligonucleotide
  Antisense strand to SEQ ID NO: 13668
ucuugccaacagaaggaca

SEQ ID NO: 13670 - RNA, 19 nt, Artificial Sequence
  Description of Artificial Sequence: Synthetic oligonucleotide
  Sense strand starting at position 1760 of SEQ ID NO: 131
uaccuuuaagaugguagua

SEQ ID NO: 13671 - RNA, 19 nt, Artificial Sequence
  Description of Artificial Sequence: Synthetic oligonucleotide
  Antisense strand to SEQ ID NO: 13670
uacuaccaucuuaaaggua

SEQ ID NO: 13672 - RNA, 19 nt, Artificial Sequence
  Description of Artificial Sequence: Synthetic oligonucleotide
  Sense strand starting at position 1944 of SEQ ID NO: 131
acauccaggcuccgaaauu

SEQ ID NO: 13673 - RNA, 19 nt, Artificial Sequence
  Description of Artificial Sequence: Synthetic oligonucleotide
  Antisense strand to SEQ ID NO: 13672
aauuucggagccuggaugu

SEQ ID NO: 13674 - RNA, 19 nt, Artificial Sequence
  Description of Artificial Sequence: Synthetic oligonucleotide
  Sense strand starting at position 1969 of SEQ ID NO: 131
ugccucagccuccaugaaa

SEQ ID NO: 13675 - RNA, 19 nt, Artificial Sequence
  Description of Artificial Sequence: Synthetic oligonucleotide
  Antisense strand to SEQ ID NO: 13674
uuucauggaggcugaggca

SEQ ID NO: 13676 - RNA, 19 nt, Artificial Sequence
  Description of Artificial Sequence: Synthetic oligonucleotide
  Sense strand starting at position 1977 of SEQ ID NO: 131
ccuccaugaaacggagauu

SEQ ID NO: 13677 - RNA, 19 nt, Artificial Sequence
  Description of Artificial Sequence: Synthetic oligonucleotide
  Antisense strand to SEQ ID NO: 13676
aaucuccguuucauggagg

SEQ ID NO: 13678 - RNA, 19 nt, Artificial Sequence
  Description of Artificial Sequence: Synthetic oligonucleotide
  Sense strand starting at position 2058 of SEQ ID NO: 131
uuauuauucguucggauua

SEQ ID NO: 13679 - RNA, 19 nt, Artificial Sequence
  Description of Artificial Sequence: Synthetic oligonucleotide
  Antisense strand to SEQ ID NO: 13678
uaauccgaacgaauaauaa

SEQ ID NO: 13680 - RNA, 19 nt, Artificial Sequence
  Description of Artificial Sequence: Synthetic oligonucleotide
  Sense strand starting at position 2063 of SEQ ID NO: 131
auucguucggauuauuauu

SEQ ID NO: 13681 - RNA, 19 nt, Artificial Sequence
  Description of Artificial Sequence: Synthetic oligonucleotide
  Antisense strand to SEQ ID NO: 13680
aauaauaauccgaacgaau

SEQ ID NO: 13682 - RNA, 19 nt, Artificial Sequence
  Description of Artificial Sequence: Synthetic oligonucleotide
  Sense strand starting at position 2068 of SEQ ID NO: 131
uucggauuauuauugugga

SEQ ID NO: 13683 - RNA, 19 nt, Artificial Sequence
  Description of Artificial Sequence: Synthetic oligonucleotide
  Antisense strand to SEQ ID NO: 13682
uccacaauaauaauccgaa

SEQ ID NO: 13684 - RNA, 19 nt, Artificial Sequence
  Description of Artificial Sequence: Synthetic oligonucleotide
  Sense strand starting at position 2071 of SEQ ID NO: 131
ggauuauuauuguggauuu

SEQ ID NO: 13685 - RNA, 19 nt, Artificial Sequence
  Description of Artificial Sequence: Synthetic oligonucleotide
  Antisense strand to SEQ ID NO: 13684
aaauccacaauaauaaucc

SEQ ID NO: 13686 - RNA, 19 nt, Artificial Sequence
  Description of Artificial Sequence: Synthetic oligonucleotide
  Sense strand starting at position 2072 of SEQ ID NO: 131
gauuauuauuguggauuug

SEQ ID NO: 13687 - RNA, 19 nt, Artificial Sequence
  Description of Artificial Sequence: Synthetic oligonucleotide
  Antisense strand to SEQ ID NO: 13686
caaauccacaauaauaauc

SEQ ID NO: 13688 - RNA, 19 nt, Artificial Sequence
  Description of Artificial Sequence: Synthetic oligonucleotide
  Sense strand starting at position 2088 of SEQ ID NO: 131
uugaguucgagguggguuu

SEQ ID NO: 13689 - RNA, 19 nt, Artificial Sequence
  Description of Artificial Sequence: Synthetic oligonucleotide
  Antisense strand to SEQ ID NO: 13688
aaacccaccucgaacucaa

SEQ ID NO: 13690 - RNA, 19 nt, Artificial Sequence
  Description of Artificial Sequence: Synthetic oligonucleotide
  Sense strand starting at position 3203 of SEQ ID NO: 131
ggaagacccuucgcuguuu

SEQ ID NO: 13691 - RNA, 19 nt, Artificial Sequence
  Description of Artificial Sequence: Synthetic oligonucleotide
  Antisense strand to SEQ ID NO: 13690
aaacagcgaagggucuucc

SEQ ID NO: 13692 - RNA, 19 nt, Artificial Sequence
  Description of Artificial Sequence: Synthetic oligonucleotide
  Sense strand starting at position 3259 of SEQ ID NO: 131
ugugaagugucuuugaacu

SEQ ID NO: 13693 - RNA, 19 nt, Artificial Sequence
  Description of Artificial Sequence: Synthetic oligonucleotide
  Antisense strand to SEQ ID NO: 13692
aguucaaagacacuucaca

SEQ ID NO: 13694 - RNA, 19 nt, Artificial Sequence
  Description of Artificial Sequence: Synthetic oligonucleotide
  Sense strand starting at position 3285 of SEQ ID NO: 131
agagccuuuccagagcaau

SEQ ID NO: 13695 - RNA, 19 nt, Artificial Sequence
  Description of Artificial Sequence: Synthetic oligonucleotide
  Antisense strand to SEQ ID NO: 13694
auugcucuggaaaggcucu

SEQ ID NO: 13696 - RNA, 19 nt, Artificial Sequence
  Description of Artificial Sequence: Synthetic oligonucleotide
  Sense strand starting at position 3361 of SEQ ID NO: 131
ugacauuugucagaaggug

SEQ ID NO: 13697 - RNA, 19 nt, Artificial Sequence
  Description of Artificial Sequence: Synthetic oligonucleotide
  Antisense strand to SEQ ID NO: 13696
caccuucugacaaauguca

SEQ ID NO: 13698 - RNA, 19 nt, Artificial Sequence
  Description of Artificial Sequence: Synthetic oligonucleotide
  Sense strand starting at position 3720 of SEQ ID NO: 131
ugccuucuugccuagguaa

SEQ ID NO: 13699 - RNA, 19 nt, Artificial Sequence
  Description of Artificial Sequence: Synthetic oligonucleotide
  Antisense strand to SEQ ID NO: 13698
uuaccuaggcaagaaggca

SEQ ID NO: 13700 - RNA, 19 nt, Artificial Sequence
  Description of Artificial Sequence: Synthetic oligonucleotide
  Sense strand starting at position 3722 of SEQ ID NO: 131
ccuucuugccuagguaaau

SEQ ID NO: 13701 - RNA, 19 nt, Artificial Sequence
  Description of Artificial Sequence: Synthetic oligonucleotide
  Antisense strand to SEQ ID NO: 13700
auuuaccuaggcaagaagg

SEQ ID NO: 13702 - RNA, 19 nt, Artificial Sequence
  Description of Artificial Sequence: Synthetic oligonucleotide
  Sense strand starting at position 3822 of SEQ ID NO: 131
gguggauauguauauguaa

SEQ ID NO: 13703 - RNA, 19 nt, Artificial Sequence
  Description of Artificial Sequence: Synthetic oligonucleotide
  Antisense strand to SEQ ID NO: 13702
uuacauauacauauccacc

SEQ ID NO: 13704 - RNA, 19 nt, Artificial Sequence
  Description of Artificial Sequence: Synthetic oligonucleotide
  Sense strand starting at position 3868 of SEQ ID NO: 131
gagugaccucaccaguguu

SEQ ID NO: 13705 - RNA, 19 nt, Artificial Sequence
  Description of Artificial Sequence: Synthetic oligonucleotide
  Antisense strand to SEQ ID NO: 13704
aacacuggugaggucacuc

SEQ ID NO: 13706 - RNA, 19 nt, Artificial Sequence
  Description of Artificial Sequence: Synthetic oligonucleotide
  Sense strand starting at position 3871 of SEQ ID NO: 131
ugaccucaccaguguuaga

SEQ ID NO: 13707 - RNA, 19 nt, Artificial Sequence
  Description of Artificial Sequence: Synthetic oligonucleotide
  Antisense strand to SEQ ID NO: 13706
ucuaacacuggugagguca

SEQ ID NO: 13708 - RNA, 19 nt, Artificial Sequence
  Description of Artificial Sequence: Synthetic oligonucleotide
  Sense strand starting at position 3880 of SEQ ID NO: 131
caguguuagaagugguaga

SEQ ID NO: 13709 - RNA, 19 nt, Artificial Sequence
  Description of Artificial Sequence: Synthetic oligonucleotide
  Antisense strand to SEQ ID NO: 13708
ucuaccacuucuaacacug

SEQ ID NO: 13710 - RNA, 19 nt, Artificial Sequence
  Description of Artificial Sequence: Synthetic oligonucleotide
  Sense strand starting at position 3881 of SEQ ID NO: 131
aguguuagaagugguagau

SEQ ID NO: 13711 - RNA, 19 nt, Artificial Sequence
  Description of Artificial Sequence: Synthetic oligonucleotide
  Antisense strand to SEQ ID NO: 13710
aucuaccacuucuaacacu

SEQ ID NO: 13712 - RNA, 19 nt, Artificial Sequence
  Description of Artificial Sequence: Synthetic oligonucleotide
  Sense strand starting at position 3890 of SEQ ID NO: 131
agugguagauaugcaaauu

SEQ ID NO: 13713 - RNA, 19 nt, Artificial Sequence
  Description of Artificial Sequence: Synthetic oligonucleotide
  Antisense strand to SEQ ID NO: 13712
aauuugcauaucuaccacu

SEQ ID NO: 13714 - RNA, 19 nt, Artificial Sequence
  Description of Artificial Sequence: Synthetic oligonucleotide
  Sense strand starting at position 3891 of SEQ ID NO: 131
gugguagauaugcaaauug

SEQ ID NO: 13715 - RNA, 19 nt, Artificial Sequence
  Description of Artificial Sequence: Synthetic oligonucleotide
  Antisense strand to SEQ ID NO: 13714
caauuugcauaucuaccac

SEQ ID NO: 13716 - RNA, 19 nt, Artificial Sequence
  Description of Artificial Sequence: Synthetic oligonucleotide
  Sense strand starting at position 3925 of SEQ ID NO: 131
acgaauaagcaucaguuga

SEQ ID NO: 13717 - RNA, 19 nt, Artificial Sequence
  Description of Artificial Sequence: Synthetic oligonucleotide
  Antisense strand to SEQ ID NO: 13716
ucaacugaugcuuauucgu

SEQ ID NO: 13718 - RNA, 19 nt, Artificial Sequence
  Description of Artificial Sequence: Synthetic oligonucleotide
  Sense strand starting at position 3927 of SEQ ID NO: 131
gaauaagcaucaguugaag

SEQ ID NO: 13719 - RNA, 19 nt, Artificial Sequence
  Description of Artificial Sequence: Synthetic oligonucleotide
  Antisense strand to SEQ ID NO: 13718
cuucaacugaugcuuauuc

SEQ ID NO: 13720 - RNA, 19 nt, Artificial Sequence
  Description of Artificial Sequence: Synthetic oligonucleotide
  Sense strand starting at position 3976 of SEQ ID NO: 131
auguauaucagguauaggu

SEQ ID NO: 13721 - RNA, 19 nt, Artificial Sequence
  Description of Artificial Sequence: Synthetic oligonucleotide
  Antisense strand to SEQ ID NO: 13720
accuauaccugauauacau

SEQ ID NO: 13722 - RNA, 19 nt, Artificial Sequence
  Description of Artificial Sequence: Synthetic oligonucleotide
  Sense strand starting at position 3983 of SEQ ID NO: 131
ucagguauagguuggcaaa

SEQ ID NO: 13723 - RNA, 19 nt, Artificial Sequence
  Description of Artificial Sequence: Synthetic oligonucleotide
  Antisense strand to SEQ ID NO: 13722
uuugccaaccuauaccuga

SEQ ID NO: 13724 - RNA, 19 nt, Artificial Sequence
  Description of Artificial Sequence: Synthetic oligonucleotide
  Sense strand starting at position 3679 of SEQ ID NO: 132
ucaccucugcuguaaauga

SEQ ID NO: 13725 - RNA, 19 nt, Artificial Sequence
  Description of Artificial Sequence: Synthetic oligonucleotide
  Antisense strand to SEQ ID NO: 13724
ucauuuacagcagagguga

SEQ ID NO: 13726 - RNA, 19 nt, Artificial Sequence
  Description of Artificial Sequence: Synthetic oligonucleotide
  Sense strand starting at position 3677 of SEQ ID NO: 132
ugucaccucugcuguaaau

SEQ ID NO: 13727 - RNA, 19 nt, Artificial Sequence
  Description of Artificial Sequence: Synthetic oligonucleotide
  Antisense strand to SEQ ID NO: 13726
auuuacagcagaggugaca

SEQ ID NO: 13728 - RNA, 19 nt, Artificial Sequence
  Description of Artificial Sequence: Synthetic oligonucleotide
  Sense strand starting at position 3675 of SEQ ID NO: 132
ucugucaccucugcuguaa

SEQ ID NO: 13729 - RNA, 19 nt, Artificial Sequence
  Description of Artificial Sequence: Synthetic oligonucleotide
  Antisense strand to SEQ ID NO: 13728
uuacagcagaggugacaga

SEQ ID NO: 13730 - RNA, 19 nt, Artificial Sequence
  Description of Artificial Sequence: Synthetic oligonucleotide
  Sense strand starting at position 3487 of SEQ ID NO: 132
aguagcugccuccaaguua

SEQ ID NO: 13731 - RNA, 19 nt, Artificial Sequence
  Description of Artificial Sequence: Synthetic oligonucleotide
  Antisense strand to SEQ ID NO: 13730
uaacuuggaggcagcuacu

SEQ ID NO: 13732 - RNA, 19 nt, Artificial Sequence
  Description of Artificial Sequence: Synthetic oligonucleotide
  Sense strand starting at position 2987 of SEQ ID NO: 132
ucaggugucauagguagag

SEQ ID NO: 13733 - RNA, 19 nt, Artificial Sequence
  Description of Artificial Sequence: Synthetic oligonucleotide
  Antisense strand to SEQ ID NO: 13732
cucuaccuaugacaccuga

SEQ ID NO: 13734 - RNA, 19 nt, Artificial Sequence
  Description of Artificial Sequence: Synthetic oligonucleotide
  Sense strand starting at position 2540 of SEQ ID NO: 132
ugggaacccgugugaaagu

SEQ ID NO: 13735 - RNA, 19 nt, Artificial Sequence
  Description of Artificial Sequence: Synthetic oligonucleotide
  Antisense strand to SEQ ID NO: 13734
acuuucacacggguuccca

SEQ ID NO: 13736 - RNA, 19 nt, Artificial Sequence
  Description of Artificial Sequence: Synthetic oligonucleotide
  Sense strand starting at position 2417 of SEQ ID NO: 132
gugguugagucgcggucau

SEQ ID NO: 13737 - RNA, 19 nt, Artificial Sequence
  Description of Artificial Sequence: Synthetic oligonucleotide
  Antisense strand to SEQ ID NO: 13736
augaccgcgacucaaccac

SEQ ID NO: 13738 - RNA, 19 nt, Artificial Sequence
  Description of Artificial Sequence: Synthetic oligonucleotide
  Sense strand starting at position 2318 of SEQ ID NO: 132
cgauguuugcuguagaaag

SEQ ID NO: 13739 - RNA, 19 nt, Artificial Sequence
  Description of Artificial Sequence: Synthetic oligonucleotide
  Antisense strand to SEQ ID NO: 13738
cuuucuacagcaaacaucg

SEQ ID NO: 13740 - RNA, 19 nt, Artificial Sequence
  Description of Artificial Sequence: Synthetic oligonucleotide
  Sense strand starting at position 2316 of SEQ ID NO: 132
accgauguuugcuguagaa

SEQ ID NO: 13741 - RNA, 19 nt, Artificial Sequence
  Description of Artificial Sequence: Synthetic oligonucleotide
  Antisense strand to SEQ ID NO: 13740
uucuacagcaaacaucggu

SEQ ID NO: 13742 - RNA, 19 nt, Artificial Sequence
  Description of Artificial Sequence: Synthetic oligonucleotide
  Sense strand starting at position 2315 of SEQ ID NO: 132
gaccgauguuugcuguaga

SEQ ID NO: 13743 - RNA, 19 nt, Artificial Sequence
  Description of Artificial Sequence: Synthetic oligonucleotide
  Antisense strand to SEQ ID NO: 13742
ucuacagcaaacaucgguc

SEQ ID NO: 13744 - RNA, 19 nt, Artificial Sequence
  Description of Artificial Sequence: Synthetic oligonucleotide
  Sense strand starting at position 972 of SEQ ID NO: 132
ggccuugauucaggucaga

SEQ ID NO: 13745 - RNA, 19 nt, Artificial Sequence
  Description of Artificial Sequence: Synthetic oligonucleotide
  Antisense strand to SEQ ID NO: 13744
ucugaccugaaucaaggcc

SEQ ID NO: 13746 - RNA, 19 nt, Artificial Sequence
  Description of Artificial Sequence: Synthetic oligonucleotide
  Sense strand starting at position 701 of SEQ ID NO: 132
gggucaacaucuucuaacu

SEQ ID NO: 13747 - RNA, 19 nt, Artificial Sequence
  Description of Artificial Sequence: Synthetic oligonucleotide
  Antisense strand to SEQ ID NO: 13746
aguuagaagauguugaccc

SEQ ID NO: 13748 - RNA, 19 nt, Artificial Sequence
  Description of Artificial Sequence: Synthetic oligonucleotide
  Sense strand starting at position 691 of SEQ ID NO: 132
gcacacuugugggucaaca

SEQ ID NO: 13749 - RNA, 19 nt, Artificial Sequence
  Description of Artificial Sequence: Synthetic oligonucleotide
  Antisense strand to SEQ ID NO: 13748
uguugacccacaagugugc

SEQ ID NO: 13750 - RNA, 19 nt, Artificial Sequence
  Description of Artificial Sequence: Synthetic oligonucleotide
  Sense strand starting at position 520 of SEQ ID NO: 132
ugacuuacuucuuccagga

SEQ ID NO: 13751 - RNA, 19 nt, Artificial Sequence
  Description of Artificial Sequence: Synthetic oligonucleotide
  Antisense strand to SEQ ID NO: 13750
uccuggaagaaguaaguca

SEQ ID NO: 13752 - RNA, 19 nt, Artificial Sequence
  Description of Artificial Sequence: Synthetic oligonucleotide
  Sense strand starting at position 506 of SEQ ID NO: 132
gacuuugguccaggugacu

SEQ ID NO: 13753 - RNA, 19 nt, Artificial Sequence
  Description of Artificial Sequence: Synthetic oligonucleotide
  Antisense strand to SEQ ID NO: 13752
agucaccuggaccaaaguc

SEQ ID NO: 13754 - RNA, 19 nt, Artificial Sequence
  Description of Artificial Sequence: Synthetic oligonucleotide
  Sense strand starting at position 504 of SEQ ID NO: 132
gugacuuugguccagguga

SEQ ID NO: 13755 - RNA, 19 nt, Artificial Sequence
  Description of Artificial Sequence: Synthetic oligonucleotide
  Antisense strand to SEQ ID NO: 13754
ucaccuggaccaaagucac

SEQ ID NO: 13756 - RNA, 19 nt, Artificial Sequence
  Description of Artificial Sequence: Synthetic oligonucleotide
  Sense strand starting at position 393 of SEQ ID NO: 132
gguccugugggucagagau

SEQ ID NO: 13757 - RNA, 19 nt, Artificial Sequence
  Description of Artificial Sequence: Synthetic oligonucleotide
  Antisense strand to SEQ ID NO: 13756
aucucugacccacaggacc

SEQ ID NO: 13758 - RNA, 19 nt, Artificial Sequence
  Description of Artificial Sequence: Synthetic oligonucleotide
  Sense strand starting at position 371 of SEQ ID NO: 132
gaaagugcuucccacauag

SEQ ID NO: 13759 - RNA, 19 nt, Artificial Sequence
  Description of Artificial Sequence: Synthetic oligonucleotide
  Antisense strand to SEQ ID NO: 13758
cuaugugggaagcacuuuc

SEQ ID NO: 13760 - RNA, 19 nt, Artificial Sequence
  Description of Artificial Sequence: Synthetic oligonucleotide
  Sense strand starting at position 358 of SEQ ID NO: 132
ucauguguagguggaaagu

SEQ ID NO: 13761 - RNA, 19 nt, Artificial Sequence
  Description of Artificial Sequence: Synthetic oligonucleotide
  Antisense strand to SEQ ID NO: 13760
acuuuccaccuacacauga

SEQ ID NO: 13762 - RNA, 19 nt, Artificial Sequence
  Description of Artificial Sequence: Synthetic oligonucleotide
  Sense strand starting at position 356 of SEQ ID NO: 132
ccucauguguagguggaaa

SEQ ID NO: 13763 - RNA, 19 nt, Artificial Sequence
  Description of Artificial Sequence: Synthetic oligonucleotide
  Antisense strand to SEQ ID NO: 13762
uuuccaccuacacaugagg

SEQ ID NO: 13764 - RNA, 19 nt, Artificial Sequence
  Description of Artificial Sequence: Synthetic oligonucleotide
  Sense strand starting at position 147 of SEQ ID NO: 133
cuggguauuccaggaagac

SEQ ID NO: 13765 - RNA, 19 nt, Artificial Sequence
  Description of Artificial Sequence: Synthetic oligonucleotide
  Antisense strand to SEQ ID NO: 13764
gucuuccuggaauacccag

SEQ ID NO: 13766 - RNA, 19 nt, Artificial Sequence
  Description of Artificial Sequence: Synthetic oligonucleotide
  Sense strand starting at position 198 of SEQ ID NO: 133
ggcugaaauacauagugca

SEQ ID NO: 13767 - RNA, 19 nt, Artificial Sequence
  Description of Artificial Sequence: Synthetic oligonucleotide
  Antisense strand to SEQ ID NO: 13766
ugcacuauguauuucagcc

SEQ ID NO: 13768 - RNA, 19 nt, Artificial Sequence
  Description of Artificial Sequence: Synthetic oligonucleotide
  Sense strand starting at position 227 of SEQ ID NO: 133
aagccuuggccugaacagu

SEQ ID NO: 13769 - RNA, 19 nt, Artificial Sequence
  Description of Artificial Sequence: Synthetic oligonucleotide
  Antisense strand to SEQ ID NO: 13768
acuguucaggccaaggcuu

SEQ ID NO: 13770 - RNA, 19 nt, Artificial Sequence
  Description of Artificial Sequence: Synthetic oligonucleotide
  Sense strand starting at position 249 of SEQ ID NO: 133
agugucagucacuauugga

SEQ ID NO: 13771 - RNA, 19 nt, Artificial Sequence
  Description of Artificial Sequence: Synthetic oligonucleotide
  Antisense strand to SEQ ID NO: 13770
uccaauagugacugacacu

SEQ ID NO: 13772 - RNA, 19 nt, Artificial Sequence
  Description of Artificial Sequence: Synthetic oligonucleotide
  Sense strand starting at position 294 of SEQ ID NO: 133
gagagauggcugggucuau

SEQ ID NO: 13773 - RNA, 19 nt, Artificial Sequence
  Description of Artificial Sequence: Synthetic oligonucleotide
  Antisense strand to SEQ ID NO: 13772
auagacccagccaucucuc

SEQ ID NO: 13774 - RNA, 19 nt, Artificial Sequence
  Description of Artificial Sequence: Synthetic oligonucleotide
  Sense strand starting at position 521 of SEQ ID NO: 133
cggcaaauaggauaguauu

SEQ ID NO: 13775 - RNA, 19 nt, Artificial Sequence
  Description of Artificial Sequence: Synthetic oligonucleotide
  Antisense strand to SEQ ID NO: 13774
aauacuauccuauuugccg

SEQ ID NO: 13776 - RNA, 19 nt, Artificial Sequence
  Description of Artificial Sequence: Synthetic oligonucleotide
  Sense strand starting at position 547 of SEQ ID NO: 133
ucaucagucuuucucuaga

SEQ ID NO: 13777 - RNA, 19 nt, Artificial Sequence
  Description of Artificial Sequence: Synthetic oligonucleotide
  Antisense strand to SEQ ID NO: 13776
ucuagagaaagacugauga

SEQ ID NO: 13778 - RNA, 19 nt, Artificial Sequence
  Description of Artificial Sequence: Synthetic oligonucleotide
  Sense strand starting at position 549 of SEQ ID NO: 133
aucagucuuucucuagaca

SEQ ID NO: 13779 - RNA, 19 nt, Artificial Sequence
  Description of Artificial Sequence: Synthetic oligonucleotide
  Antisense strand to SEQ ID NO: 13778
ugucuagagaaagacugau

SEQ ID NO: 13780 - RNA, 19 nt, Artificial Sequence
  Description of Artificial Sequence: Synthetic oligonucleotide
  Sense strand starting at position 550 of SEQ ID NO: 133
ucagucuuucucuagacag

SEQ ID NO: 13781 - RNA, 19 nt, Artificial Sequence
  Description of Artificial Sequence: Synthetic oligonucleotide
  Antisense strand to SEQ ID NO: 13780
cugucuagagaaagacuga

SEQ ID NO: 13782 - RNA, 19 nt, Artificial Sequence
  Description of Artificial Sequence: Synthetic oligonucleotide
  Sense strand starting at position 674 of SEQ ID NO: 133
ucucuuucucugcaggaau

SEQ ID NO: 13783 - RNA, 19 nt, Artificial Sequence
  Description of Artificial Sequence: Synthetic oligonucleotide
  Antisense strand to SEQ ID NO: 13782
auuccugcagagaaagaga

SEQ ID NO: 13784 - RNA, 19 nt, Artificial Sequence
  Description of Artificial Sequence: Synthetic oligonucleotide
  Sense strand starting at position 676 of SEQ ID NO: 133
ucuuucucugcaggaauca

SEQ ID NO: 13785 - RNA, 19 nt, Artificial Sequence
  Description of Artificial Sequence: Synthetic oligonucleotide
  Antisense strand to SEQ ID NO: 13784
ugauuccugcagagaaaga

SEQ ID NO: 13786 - RNA, 19 nt, Artificial Sequence
  Description of Artificial Sequence: Synthetic oligonucleotide
  Sense strand starting at position 691 of SEQ ID NO: 133
aucagaaguccucgacaca

SEQ ID NO: 13787 - RNA, 19 nt, Artificial Sequence
  Description of Artificial Sequence: Synthetic oligonucleotide
  Antisense strand to SEQ ID NO: 13786
ugugucgaggacuucugau

SEQ ID NO: 13788 - RNA, 19 nt, Artificial Sequence
  Description of Artificial Sequence: Synthetic oligonucleotide
  Sense strand starting at position 911 of SEQ ID NO: 133
aggagaaggcuaggugaau

SEQ ID NO: 13789 - RNA, 19 nt, Artificial Sequence
  Description of Artificial Sequence: Synthetic oligonucleotide
  Antisense strand to SEQ ID NO: 13788
auucaccuagccuucuccu

SEQ ID NO: 13790 - RNA, 19 nt, Artificial Sequence
  Description of Artificial Sequence: Synthetic oligonucleotide
  Sense strand starting at position 1128 of SEQ ID NO: 133
agggacaagcuguguucau

SEQ ID NO: 13791 - RNA, 19 nt, Artificial Sequence
  Description of Artificial Sequence: Synthetic oligonucleotide
  Antisense strand to SEQ ID NO: 13790
augaacacagcuugucccu

SEQ ID NO: 13792 - RNA, 19 nt, Artificial Sequence
  Description of Artificial Sequence: Synthetic oligonucleotide
  Sense strand starting at position 1129 of SEQ ID NO: 133
gggacaagcuguguucaua

SEQ ID NO: 13793 - RNA, 19 nt, Artificial Sequence
  Description of Artificial Sequence: Synthetic oligonucleotide
  Antisense strand to SEQ ID NO: 13792
uaugaacacagcuuguccc

SEQ ID NO: 13794 - RNA, 19 nt, Artificial Sequence
  Description of Artificial Sequence: Synthetic oligonucleotide
  Sense strand starting at position 1375 of SEQ ID NO: 133
aucccuuggccucaguauu

SEQ ID NO: 13795 - RNA, 19 nt, Artificial Sequence
  Description of Artificial Sequence: Synthetic oligonucleotide
  Antisense strand to SEQ ID NO: 13794
aauacugaggccaagggau

SEQ ID NO: 13796 - RNA, 19 nt, Artificial Sequence
  Description of Artificial Sequence: Synthetic oligonucleotide
  Sense strand starting at position 1389 of SEQ ID NO: 133
guauucccaucuguaaagu

SEQ ID NO: 13797 - RNA, 19 nt, Artificial Sequence
  Description of Artificial Sequence: Synthetic oligonucleotide
  Antisense strand to SEQ ID NO: 13796
acuuuacagaugggaauac

SEQ ID NO: 13798 - RNA, 19 nt, Artificial Sequence
  Description of Artificial Sequence: Synthetic oligonucleotide
  Sense strand starting at position 1398 of SEQ ID NO: 133
ucuguaaaguggcuccuaa

SEQ ID NO: 13799 - RNA, 19 nt, Artificial Sequence
  Description of Artificial Sequence: Synthetic oligonucleotide
  Antisense strand to SEQ ID NO: 13798
uuaggagccacuuuacaga

SEQ ID NO: 13800 - RNA, 19 nt, Artificial Sequence
  Description of Artificial Sequence: Synthetic oligonucleotide
  Sense strand starting at position 1463 of SEQ ID NO: 133
cauaaaugucucugggcca

SEQ ID NO: 13801 - RNA, 19 nt, Artificial Sequence
  Description of Artificial Sequence: Synthetic oligonucleotide
  Antisense strand to SEQ ID NO: 13800
uggcccagagacauuuaug

SEQ ID NO: 13802 - RNA, 19 nt, Artificial Sequence
  Description of Artificial Sequence: Synthetic oligonucleotide
  Sense strand starting at position 1466 of SEQ ID NO: 133
aaaugucucugggccaaga

SEQ ID NO: 13803 - RNA, 19 nt, Artificial Sequence
  Description of Artificial Sequence: Synthetic oligonucleotide
  Antisense strand to SEQ ID NO: 13802
ucuuggcccagagacauuu

SEQ ID NO: 13804 - RNA, 19 nt, Artificial Sequence
  Description of Artificial Sequence: Synthetic oligonucleotide
  Sense strand starting at position 1519 of SEQ ID NO: 133
gggugcugcuaauuacaga

SEQ ID NO: 13805 - RNA, 19 nt, Artificial Sequence
  Description of Artificial Sequence: Synthetic oligonucleotide
  Antisense strand to SEQ ID NO: 13804
ucuguaauuagcagcaccc

SEQ ID NO: 13806 - RNA, 19 nt, Artificial Sequence
  Description of Artificial Sequence: Synthetic oligonucleotide
  Sense strand starting at position 1520 of SEQ ID NO: 133
ggugcugcuaauuacagaa

SEQ ID NO: 13807 - RNA, 19 nt, Artificial Sequence
  Description of Artificial Sequence: Synthetic oligonucleotide
  Antisense strand to SEQ ID NO: 13806
uucuguaauuagcagcacc

SEQ ID NO: 13808 - RNA, 19 nt, Artificial Sequence
  Description of Artificial Sequence: Synthetic oligonucleotide
  Sense strand starting at position 1601 of SEQ ID NO: 133
guguuucuggccuccugua

SEQ ID NO: 13809 - RNA, 19 nt, Artificial Sequence
  Description of Artificial Sequence: Synthetic oligonucleotide
  Antisense strand to SEQ ID NO: 13808
uacaggaggccagaaacac

SEQ ID NO: 13810 - RNA, 19 nt, Artificial Sequence
  Description of Artificial Sequence: Synthetic oligonucleotide
  Sense strand starting at position 1692 of SEQ ID NO: 133
cucucugcccuuuaaggaa

SEQ ID NO: 13811 - RNA, 19 nt, Artificial Sequence
  Description of Artificial Sequence: Synthetic oligonucleotide
  Antisense strand to SEQ ID NO: 13810
uuccuuaaagggcagagag

SEQ ID NO: 13812 - RNA, 19 nt, Artificial Sequence
  Description of Artificial Sequence: Synthetic oligonucleotide
  Sense strand starting at position 1720 of SEQ ID NO: 133
gugggaagucauggcugga

SEQ ID NO: 13813 - RNA, 19 nt, Artificial Sequence
  Description of Artificial Sequence: Synthetic oligonucleotide
  Antisense strand to SEQ ID NO: 13812
uccagccaugacuucccac

SEQ ID NO: 13814 - RNA, 19 nt, Artificial Sequence
  Description of Artificial Sequence: Synthetic oligonucleotide
  Sense strand starting at position 1723 of SEQ ID NO: 133
ggaagucauggcuggaaag

SEQ ID NO: 13815 - RNA, 19 nt, Artificial Sequence
  Description of Artificial Sequence: Synthetic oligonucleotide
  Antisense strand to SEQ ID NO: 13814
cuuuccagccaugacuucc

SEQ ID NO: 13816 - RNA, 19 nt, Artificial Sequence
  Description of Artificial Sequence: Synthetic oligonucleotide
  Sense strand starting at position 1724 of SEQ ID NO: 133
gaagucauggcuggaaagu

SEQ ID NO: 13817 - RNA, 19 nt, Artificial Sequence
  Description of Artificial Sequence: Synthetic oligonucleotide
  Antisense strand to SEQ ID NO: 13816
acuuuccagccaugacuuc

SEQ ID NO: 13818 - RNA, 19 nt, Artificial Sequence
  Description of Artificial Sequence: Synthetic oligonucleotide
  Sense strand starting at position 2180 of SEQ ID NO: 133
augggaguccuaugcccaa

SEQ ID NO: 13819 - RNA, 19 nt, Artificial Sequence
  Description of Artificial Sequence: Synthetic oligonucleotide
  Antisense strand to SEQ ID NO: 13818
uugggcauaggacucccau

SEQ ID NO: 13820 - RNA, 19 nt, Artificial Sequence
  Description of Artificial Sequence: Synthetic oligonucleotide
  Sense strand starting at position 2184 of SEQ ID NO: 133
gaguccuaugcccaaguga

SEQ ID NO: 13821 - RNA, 19 nt, Artificial Sequence
  Description of Artificial Sequence: Synthetic oligonucleotide
  Antisense strand to SEQ ID NO: 13820
ucacuugggcauaggacuc

SEQ ID NO: 13822 - RNA, 19 nt, Artificial Sequence
  Description of Artificial Sequence: Synthetic oligonucleotide
  Sense strand starting at position 2472 of SEQ ID NO: 133
aguccugaaaguugaugau

SEQ ID NO: 13823 - RNA, 19 nt, Artificial Sequence
  Description of Artificial Sequence: Synthetic oligonucleotide
  Antisense strand to SEQ ID NO: 13822
aucaucaacuuucaggacu

SEQ ID NO: 13824 - RNA, 19 nt, Artificial Sequence
  Description of Artificial Sequence: Synthetic oligonucleotide
  Sense strand starting at position 2485 of SEQ ID NO: 133
gaugaugugacauguggca

SEQ ID NO: 13825 - RNA, 19 nt, Artificial Sequence
  Description of Artificial Sequence: Synthetic oligonucleotide
  Antisense strand to SEQ ID NO: 13824
ugccacaugucacaucauc

SEQ ID NO: 13826 - RNA, 19 nt, Artificial Sequence
  Description of Artificial Sequence: Synthetic oligonucleotide
  Sense strand starting at position 2808 of SEQ ID NO: 133
uauuaauaugcagaugugu

SEQ ID NO: 13827 - RNA, 19 nt, Artificial Sequence
  Description of Artificial Sequence: Synthetic oligonucleotide
  Antisense strand to SEQ ID NO: 13826
acacaucugcauauuaaua

SEQ ID NO: 13828 - RNA, 19 nt, Artificial Sequence
  Description of Artificial Sequence: Synthetic oligonucleotide
  Sense strand starting at position 2823 of SEQ ID NO: 133
guguacacagacuaauagu

SEQ ID NO: 13829 - RNA, 19 nt, Artificial Sequence
  Description of Artificial Sequence: Synthetic oligonucleotide
  Antisense strand to SEQ ID NO: 13828
acuauuagucuguguacac

SEQ ID NO: 13830 - RNA, 19 nt, Artificial Sequence
  Description of Artificial Sequence: Synthetic oligonucleotide
  Sense strand starting at position 2833 of SEQ ID NO: 133
acuaauagucaugaagcua

SEQ ID NO: 13831 - RNA, 19 nt, Artificial Sequence
  Description of Artificial Sequence: Synthetic oligonucleotide
  Antisense strand to SEQ ID NO: 13830
uagcuucaugacuauuagu

SEQ ID NO: 13832 - RNA, 19 nt, Artificial Sequence
  Description of Artificial Sequence: Synthetic oligonucleotide
  Sense strand starting at position 2953 of SEQ ID NO: 133
cacuuaucaggugaguaca

SEQ ID NO: 13833 - RNA, 19 nt, Artificial Sequence
  Description of Artificial Sequence: Synthetic oligonucleotide
  Antisense strand to SEQ ID NO: 13832
uguacucaccugauaagug

SEQ ID NO: 13834 - RNA, 19 nt, Artificial Sequence
  Description of Artificial Sequence: Synthetic oligonucleotide
  Sense strand starting at position 2975 of SEQ ID NO: 133
gucccuugguacccagaau

SEQ ID NO: 13835 - RNA, 19 nt, Artificial Sequence
  Description of Artificial Sequence: Synthetic oligonucleotide
  Antisense strand to SEQ ID NO: 13834
auucuggguaccaagggac

SEQ ID NO: 13836 - RNA, 19 nt, Artificial Sequence
  Description of Artificial Sequence: Synthetic oligonucleotide
  Sense strand starting at position 3083 of SEQ ID NO: 133
cuuuguacauccuccagua

SEQ ID NO: 13837 - RNA, 19 nt, Artificial Sequence
  Description of Artificial Sequence: Synthetic oligonucleotide
  Antisense strand to SEQ ID NO: 13836
uacuggaggauguacaaag

SEQ ID NO: 13838 - RNA, 19 nt, Artificial Sequence
  Description of Artificial Sequence: Synthetic oligonucleotide
  Sense strand starting at position 3085 of SEQ ID NO: 133
uuguacauccuccaguaaa

SEQ ID NO: 13839 - RNA, 19 nt, Artificial Sequence
  Description of Artificial Sequence: Synthetic oligonucleotide
  Antisense strand to SEQ ID NO: 13838
uuuacuggaggauguacaa

SEQ ID NO: 13840 - RNA, 19 nt, Artificial Sequence
  Description of Artificial Sequence: Synthetic oligonucleotide
  Sense strand starting at position 3786 of SEQ ID NO: 133
uccaguacaguuuaaauca

SEQ ID NO: 13841 - RNA, 19 nt, Artificial Sequence
  Description of Artificial Sequence: Synthetic oligonucleotide
  Antisense strand to SEQ ID NO: 13840
ugauuuaaacuguacugga

SEQ ID NO: 13842 - RNA, 19 nt, Artificial Sequence
  Description of Artificial Sequence: Synthetic oligonucleotide
  Sense strand starting at position 3945 of SEQ ID NO: 133
guugguugaacccaaggau

SEQ ID NO: 13843 - RNA, 19 nt, Artificial Sequence
  Description of Artificial Sequence: Synthetic oligonucleotide
  Antisense strand to SEQ ID NO: 13842
auccuuggguucaaccaac

SEQ ID NO: 13844 - RNA, 19 nt, Artificial Sequence
  Description of Artificial Sequence: Synthetic oligonucleotide
  Sense strand starting at position 137 of SEQ ID NO: 134
gaaccaaauuucugcgguu

SEQ ID NO: 13845 - RNA, 19 nt, Artificial Sequence
  Description of Artificial Sequence: Synthetic oligonucleotide
  Antisense strand to SEQ ID NO: 13844
aaccgcagaaauuugguuc

SEQ ID NO: 13846 - RNA, 19 nt, Artificial Sequence
  Description of Artificial Sequence: Synthetic oligonucleotide
  Sense strand starting at position 138 of SEQ ID NO: 134
aaccaaauuucugcgguuu

SEQ ID NO: 13847 - RNA, 19 nt, Artificial Sequence
  Description of Artificial Sequence: Synthetic oligonucleotide
  Antisense strand to SEQ ID NO: 13846
aaaccgcagaaauuugguu

SEQ ID NO: 13848 - RNA, 19 nt, Artificial Sequence
  Description of Artificial Sequence: Synthetic oligonucleotide
  Sense strand starting at position 349 of SEQ ID NO: 134
cccaguugcuuuccagaua

SEQ ID NO: 13849 - RNA, 19 nt, Artificial Sequence
  Description of Artificial Sequence: Synthetic oligonucleotide
  Antisense strand to SEQ ID NO: 13848
uaucuggaaagcaacuggg

SEQ ID NO: 13850 - RNA, 19 nt, Artificial Sequence
  Description of Artificial Sequence: Synthetic oligonucleotide
  Sense strand starting at position 450 of SEQ ID NO: 134
cucugucucucccaguuua

SEQ ID NO: 13851 - RNA, 19 nt, Artificial Sequence
  Description of Artificial Sequence: Synthetic oligonucleotide
  Antisense strand to SEQ ID NO: 13850
uaaacugggagagacagag

SEQ ID NO: 13852 - RNA, 19 nt, Artificial Sequence
  Description of Artificial Sequence: Synthetic oligonucleotide
  Sense strand starting at position 461 of SEQ ID NO: 134
ccaguuuagcaucaagaca

SEQ ID NO: 13853 - RNA, 19 nt, Artificial Sequence
  Description of Artificial Sequence: Synthetic oligonucleotide
  Antisense strand to SEQ ID NO: 13852
ugucuugaugcuaaacugg

SEQ ID NO: 13854 - RNA, 19 nt, Artificial Sequence
  Description of Artificial Sequence: Synthetic oligonucleotide
  Sense strand starting at position 568 of SEQ ID NO: 134
gaaguuggugaucagcaua

SEQ ID NO: 13855 - RNA, 19 nt, Artificial Sequence
  Description of Artificial Sequence: Synthetic oligonucleotide
  Antisense strand to SEQ ID NO: 13854
uaugcugaucaccaacuuc

SEQ ID NO: 13856 - RNA, 19 nt, Artificial Sequence
  Description of Artificial Sequence: Synthetic oligonucleotide
  Sense strand starting at position 881 of SEQ ID NO: 134
gggaggcguguggauaauu

SEQ ID NO: 13857 - RNA, 19 nt, Artificial Sequence
  Description of Artificial Sequence: Synthetic oligonucleotide
  Antisense strand to SEQ ID NO: 13856
aauuauccacacgccuccc

SEQ ID NO: 13858 - RNA, 19 nt, Artificial Sequence
  Description of Artificial Sequence: Synthetic oligonucleotide
  Sense strand starting at position 886 of SEQ ID NO: 134
gcguguggauaauuauaca

SEQ ID NO: 13859 - RNA, 19 nt, Artificial Sequence
  Description of Artificial Sequence: Synthetic oligonucleotide
  Antisense strand to SEQ ID NO: 13858
uguauaauuauccacacgc

SEQ ID NO: 13860 - RNA, 19 nt, Artificial Sequence
  Description of Artificial Sequence: Synthetic oligonucleotide
  Sense strand starting at position 913 of SEQ ID NO: 134
caugaaaugcuaggugaag

SEQ ID NO: 13861 - RNA, 19 nt, Artificial Sequence
  Description of Artificial Sequence: Synthetic oligonucleotide
  Antisense strand to SEQ ID NO: 13860
cuucaccuagcauuucaug

SEQ ID NO: 13862 - RNA, 19 nt, Artificial Sequence
  Description of Artificial Sequence: Synthetic oligonucleotide
  Sense strand starting at position 1013 of SEQ ID NO: 134
gugugucagccuaaggguu

SEQ ID NO: 13863 - RNA, 19 nt, Artificial Sequence
  Description of Artificial Sequence: Synthetic oligonucleotide
  Antisense strand to SEQ ID NO: 13862
aacccuuaggcugacacac

SEQ ID NO: 13864 - RNA, 19 nt, Artificial Sequence
  Description of Artificial Sequence: Synthetic oligonucleotide
  Sense strand starting at position 1026 of SEQ ID NO: 134
aggguuucagguugggaga

SEQ ID NO: 13865 - RNA, 19 nt, Artificial Sequence
  Description of Artificial Sequence: Synthetic oligonucleotide
  Antisense strand to SEQ ID NO: 13864
ucucccaaccugaaacccu

SEQ ID NO: 13866 - RNA, 19 nt, Artificial Sequence
  Description of Artificial Sequence: Synthetic oligonucleotide
  Sense strand starting at position 1027 of SEQ ID NO: 134
ggguuucagguugggagaa

SEQ ID NO: 13867 - RNA, 19 nt, Artificial Sequence
  Description of Artificial Sequence: Synthetic oligonucleotide
  Antisense strand to SEQ ID NO: 13866
uucucccaaccugaaaccc

SEQ ID NO: 13868 - RNA, 19 nt, Artificial Sequence
  Description of Artificial Sequence: Synthetic oligonucleotide
  Sense strand starting at position 1086 of SEQ ID NO: 134
cccuauguuccaggcagaa

SEQ ID NO: 13869 - RNA, 19 nt, Artificial Sequence
  Description of Artificial Sequence: Synthetic oligonucleotide
  Antisense strand to SEQ ID NO: 13868
uucugccuggaacauaggg

SEQ ID NO: 13870 - RNA, 19 nt, Artificial Sequence
  Description of Artificial Sequence: Synthetic oligonucleotide
  Sense strand starting at position 1240 of SEQ ID NO: 134
ugaaucacagcuggaaagu

SEQ ID NO: 13871 - RNA, 19 nt, Artificial Sequence
  Description of Artificial Sequence: Synthetic oligonucleotide
  Antisense strand to SEQ ID NO: 13870
acuuuccagcugugauuca

SEQ ID NO: 13872 - RNA, 19 nt, Artificial Sequence
  Description of Artificial Sequence: Synthetic oligonucleotide
  Sense strand starting at position 1863 of SEQ ID NO: 134
agggauucgauccgagaca

SEQ ID NO: 13873 - RNA, 19 nt, Artificial Sequence
  Description of Artificial Sequence: Synthetic oligonucleotide
  Antisense strand to SEQ ID NO: 13872
ugucucggaucgaaucccu

SEQ ID NO: 13874 - RNA, 19 nt, Artificial Sequence
  Description of Artificial Sequence: Synthetic oligonucleotide
  Sense strand starting at position 1864 of SEQ ID NO: 134
gggauucgauccgagacau

SEQ ID NO: 13875 - RNA, 19 nt, Artificial Sequence
  Description of Artificial Sequence: Synthetic oligonucleotide
  Antisense strand to SEQ ID NO: 13874
augucucggaucgaauccc

SEQ ID NO: 13876 - RNA, 19 nt, Artificial Sequence
  Description of Artificial Sequence: Synthetic oligonucleotide
  Sense strand starting at position 1868 of SEQ ID NO: 134
uucgauccgagacauaauc

SEQ ID NO: 13877 - RNA, 19 nt, Artificial Sequence
  Description of Artificial Sequence: Synthetic oligonucleotide
  Antisense strand to SEQ ID NO: 13876
gauuaugucucggaucgaa

SEQ ID NO: 13878 - RNA, 19 nt, Artificial Sequence
  Description of Artificial Sequence: Synthetic oligonucleotide
  Sense strand starting at position 2157 of SEQ ID NO: 134
gguccuaggacagguuuga

SEQ ID NO: 13879 - RNA, 19 nt, Artificial Sequence
  Description of Artificial Sequence: Synthetic oligonucleotide
  Antisense strand to SEQ ID NO: 13878
ucaaaccuguccuaggacc

SEQ ID NO: 13880 - RNA, 19 nt, Artificial Sequence
  Description of Artificial Sequence: Synthetic oligonucleotide
  Sense strand starting at position 2360 of SEQ ID NO: 134
ugcguuaccucagucuuua

SEQ ID NO: 13881 - RNA, 19 nt, Artificial Sequence
  Description of Artificial Sequence: Synthetic oligonucleotide
  Antisense strand to SEQ ID NO: 13880
uaaagacugagguaacgca

SEQ ID NO: 13882 - RNA, 19 nt, Artificial Sequence
  Description of Artificial Sequence: Synthetic oligonucleotide
  Sense strand starting at position 2538 of SEQ ID NO: 134
gaacuaaacgcuggaucuu

SEQ ID NO: 13883 - RNA, 19 nt, Artificial Sequence
  Description of Artificial Sequence: Synthetic oligonucleotide
  Antisense strand to SEQ ID NO: 13882
aagauccagcguuuaguuc

SEQ ID NO: 13884 - RNA, 19 nt, Artificial Sequence
  Description of Artificial Sequence: Synthetic oligonucleotide
  Sense strand starting at position 2608 of SEQ ID NO: 134
agagaauucucccacaugc

SEQ ID NO: 13885 - RNA, 19 nt, Artificial Sequence
  Description of Artificial Sequence: Synthetic oligonucleotide
  Antisense strand to SEQ ID NO: 13884
gcaugugggagaauucucu

SEQ ID NO: 13886 - RNA, 19 nt, Artificial Sequence
  Description of Artificial Sequence: Synthetic oligonucleotide
  Sense strand starting at position 2749 of SEQ ID NO: 134
ugcaguucucucuguugca

SEQ ID NO: 13887 - RNA, 19 nt, Artificial Sequence
  Description of Artificial Sequence: Synthetic oligonucleotide
  Antisense strand to SEQ ID NO: 13886
ugcaacagagagaacugca

SEQ ID NO: 13888 - RNA, 19 nt, Artificial Sequence
  Description of Artificial Sequence: Synthetic oligonucleotide
  Sense strand starting at position 2750 of SEQ ID NO: 134
gcaguucucucuguugcaa

SEQ ID NO: 13889 - RNA, 19 nt, Artificial Sequence
  Description of Artificial Sequence: Synthetic oligonucleotide
  Antisense strand to SEQ ID NO: 13888
uugcaacagagagaacugc

SEQ ID NO: 13890 - RNA, 19 nt, Artificial Sequence
  Description of Artificial Sequence: Synthetic oligonucleotide
  Sense strand starting at position 2752 of SEQ ID NO: 134
aguucucucuguugcaagu

SEQ ID NO: 13891 - RNA, 19 nt, Artificial Sequence
  Description of Artificial Sequence: Synthetic oligonucleotide
  Antisense strand to SEQ ID NO: 13890
acuugcaacagagagaacu

SEQ ID NO: 13892 - RNA, 19 nt, Artificial Sequence
  Description of Artificial Sequence: Synthetic oligonucleotide
  Sense strand starting at position 2754 of SEQ ID NO: 134
uucucucuguugcaaguua

SEQ ID NO: 13893 - RNA, 19 nt, Artificial Sequence
  Description of Artificial Sequence: Synthetic oligonucleotide
  Antisense strand to SEQ ID NO: 13892
uaacuugcaacagagagaa

SEQ ID NO: 13894 - RNA, 19 nt, Artificial Sequence
  Description of Artificial Sequence: Synthetic oligonucleotide
  Sense strand starting at position 2766 of SEQ ID NO: 134
caaguuaagccggaacuga

SEQ ID NO: 13895 - RNA, 19 nt, Artificial Sequence
  Description of Artificial Sequence: Synthetic oligonucleotide
  Antisense strand to SEQ ID NO: 13894
ucaguuccggcuuaacuug

SEQ ID NO: 13896 - RNA, 19 nt, Artificial Sequence
  Description of Artificial Sequence: Synthetic oligonucleotide
  Sense strand starting at position 2900 of SEQ ID NO: 134
ccagccuuugggugaguuu

SEQ ID NO: 13897 - RNA, 19 nt, Artificial Sequence
  Description of Artificial Sequence: Synthetic oligonucleotide
  Antisense strand to SEQ ID NO: 13896
aaacucacccaaaggcugg

SEQ ID NO: 13898 - RNA, 19 nt, Artificial Sequence
  Description of Artificial Sequence: Synthetic oligonucleotide
  Sense strand starting at position 2907 of SEQ ID NO: 134
uugggugaguuuccugcua

SEQ ID NO: 13899 - RNA, 19 nt, Artificial Sequence
  Description of Artificial Sequence: Synthetic oligonucleotide
  Antisense strand to SEQ ID NO: 13898
uagcaggaaacucacccaa

SEQ ID NO: 13900 - RNA, 19 nt, Artificial Sequence
  Description of Artificial Sequence: Synthetic oligonucleotide
  Sense strand starting at position 2909 of SEQ ID NO: 134
gggugaguuuccugcuauu

SEQ ID NO: 13901 - RNA, 19 nt, Artificial Sequence
  Description of Artificial Sequence: Synthetic oligonucleotide
  Antisense strand to SEQ ID NO: 13900
aauagcaggaaacucaccc

SEQ ID NO: 13902 - RNA, 19 nt, Artificial Sequence
  Description of Artificial Sequence: Synthetic oligonucleotide
  Sense strand starting at position 2915 of SEQ ID NO: 134
guuuccugcuauugggaaa

SEQ ID NO: 13903 - RNA, 19 nt, Artificial Sequence
  Description of Artificial Sequence: Synthetic oligonucleotide
  Antisense strand to SEQ ID NO: 13902
uuucccaauagcaggaaac

SEQ ID NO: 13904 - RNA, 19 nt, Artificial Sequence
  Description of Artificial Sequence: Synthetic oligonucleotide
  Sense strand starting at position 2995 of SEQ ID NO: 134
ucccauuucucuggagaaa

SEQ ID NO: 13905 - RNA, 19 nt, Artificial Sequence
  Description of Artificial Sequence: Synthetic oligonucleotide
  Antisense strand to SEQ ID NO: 13904
uuucuccagagaaauggga

SEQ ID NO: 13906 - RNA, 19 nt, Artificial Sequence
  Description of Artificial Sequence: Synthetic oligonucleotide
  Sense strand starting at position 3597 of SEQ ID NO: 134
ucaggaauguacuaaauuu

SEQ ID NO: 13907 - RNA, 19 nt, Artificial Sequence
  Description of Artificial Sequence: Synthetic oligonucleotide
  Antisense strand to SEQ ID NO: 13906
aaauuuaguacauuccuga

SEQ ID NO: 13908 - RNA, 19 nt, Artificial Sequence
  Description of Artificial Sequence: Synthetic oligonucleotide
  Sense strand starting at position 3634 of SEQ ID NO: 134
gcuagaaucuuggccucaa

SEQ ID NO: 13909 - RNA, 19 nt, Artificial Sequence
  Description of Artificial Sequence: Synthetic oligonucleotide
  Antisense strand to SEQ ID NO: 13908
uugaggccaagauucuagc

SEQ ID NO: 13910 - RNA, 19 nt, Artificial Sequence
  Description of Artificial Sequence: Synthetic oligonucleotide
  Sense strand starting at position 3635 of SEQ ID NO: 134
cuagaaucuuggccucaag

SEQ ID NO: 13911 - RNA, 19 nt, Artificial Sequence
  Description of Artificial Sequence: Synthetic oligonucleotide
  Antisense strand to SEQ ID NO: 13910
cuugaggccaagauucuag

SEQ ID NO: 13912 - RNA, 19 nt, Artificial Sequence
  Description of Artificial Sequence: Synthetic oligonucleotide
  Sense strand starting at position 3638 of SEQ ID NO: 134
gaaucuuggccucaagguu

SEQ ID NO: 13913 - RNA, 19 nt, Artificial Sequence
  Description of Artificial Sequence: Synthetic oligonucleotide
  Antisense strand to SEQ ID NO: 13912
aaccuugaggccaagauuc

SEQ ID NO: 13914 - RNA, 19 nt, Artificial Sequence
  Description of Artificial Sequence: Synthetic oligonucleotide
  Sense strand starting at position 3731 of SEQ ID NO: 134
gcugcaagcuauggauaga

SEQ ID NO: 13915 - RNA, 19 nt, Artificial Sequence
  Description of Artificial Sequence: Synthetic oligonucleotide
  Antisense strand to SEQ ID NO: 13914
ucuauccauagcuugcagc

SEQ ID NO: 13916 - RNA, 19 nt, Artificial Sequence
  Description of Artificial Sequence: Synthetic oligonucleotide
  Sense strand starting at position 3734 of SEQ ID NO: 134
gcaagcuauggauagaauc

SEQ ID NO: 13917 - RNA, 19 nt, Artificial Sequence
  Description of Artificial Sequence: Synthetic oligonucleotide
  Antisense strand to SEQ ID NO: 13916
gauucuauccauagcuugc

SEQ ID NO: 13918 - RNA, 19 nt, Artificial Sequence
  Description of Artificial Sequence: Synthetic oligonucleotide
  Sense strand starting at position 3843 of SEQ ID NO: 134
cuaagaaggucucuaugaa

SEQ ID NO: 13919 - RNA, 19 nt, Artificial Sequence
  Description of Artificial Sequence: Synthetic oligonucleotide
  Antisense strand to SEQ ID NO: 13918
uucauagagaccuucuuag

SEQ ID NO: 13920 - RNA, 19 nt, Artificial Sequence
  Description of Artificial Sequence: Synthetic oligonucleotide
  Sense strand starting at position 3847 of SEQ ID NO: 134
gaaggucucuaugaaagaa

SEQ ID NO: 13921 - RNA, 19 nt, Artificial Sequence
  Description of Artificial Sequence: Synthetic oligonucleotide
  Antisense strand to SEQ ID NO: 13920
uucuuucauagagaccuuc

SEQ ID NO: 13922 - RNA, 19 nt, Artificial Sequence
  Description of Artificial Sequence: Synthetic oligonucleotide
  Sense strand starting at position 3976 of SEQ ID NO: 134
ggagaugaauaacaaggaa

SEQ ID NO: 13923 - RNA, 19 nt, Artificial Sequence
  Description of Artificial Sequence: Synthetic oligonucleotide
  Antisense strand to SEQ ID NO: 13922
uuccuuguuauucaucucc

SEQ ID NO: 13924 - RNA, 19 nt, Artificial Sequence
  Description of Artificial Sequence: Synthetic oligonucleotide
  Sense strand starting at position 106 of SEQ ID NO: 135
caggguuuguuggcuaaga

SEQ ID NO: 13925 - RNA, 19 nt, Artificial Sequence
  Description of Artificial Sequence: Synthetic oligonucleotide
  Antisense strand to SEQ ID NO: 13924
ucuuagccaacaaacccug

SEQ ID NO: 13926 - RNA, 19 nt, Artificial Sequence
  Description of Artificial Sequence: Synthetic oligonucleotide
  Sense strand starting at position 107 of SEQ ID NO: 135
aggguuuguuggcuaagaa

SEQ ID NO: 13927 - RNA, 19 nt, Artificial Sequence
  Description of Artificial Sequence: Synthetic oligonucleotide
  Antisense strand to SEQ ID NO: 13926
uucuuagccaacaaacccu

SEQ ID NO: 13928 - RNA, 19 nt, Artificial Sequence
  Description of Artificial Sequence: Synthetic oligonucleotide
  Sense strand starting at position 108 of SEQ ID NO: 135
ggguuuguuggcuaagaac

SEQ ID NO: 13929 - RNA, 19 nt, Artificial Sequence
  Description of Artificial Sequence: Synthetic oligonucleotide
  Antisense strand to SEQ ID NO: 13928
guucuuagccaacaaaccc

SEQ ID NO: 13930 - RNA, 19 nt, Artificial Sequence
  Description of Artificial Sequence: Synthetic oligonucleotide
  Sense strand starting at position 507 of SEQ ID NO: 135
gaaccaaauuucugcgguu

SEQ ID NO: 13931 - RNA, 19 nt, Artificial Sequence
  Description of Artificial Sequence: Synthetic oligonucleotide
  Antisense strand to SEQ ID NO: 13930
aaccgcagaaauuugguuc

SEQ ID NO: 13932 - RNA, 19 nt, Artificial Sequence
  Description of Artificial Sequence: Synthetic oligonucleotide
  Sense strand starting at position 508 of SEQ ID NO: 135
aaccaaauuucugcgguuu

SEQ ID NO: 13933 - RNA, 19 nt, Artificial Sequence
  Description of Artificial Sequence: Synthetic oligonucleotide
  Antisense strand to SEQ ID NO: 13932
aaaccgcagaaauuugguu

SEQ ID NO: 13934 - RNA, 19 nt, Artificial Sequence
  Description of Artificial Sequence: Synthetic oligonucleotide
  Sense strand starting at position 719 of SEQ ID NO: 135
cccaguugcuuuccagaua

SEQ ID NO: 13935 - RNA, 19 nt, Artificial Sequence
  Description of Artificial Sequence: Synthetic oligonucleotide
  Antisense strand to SEQ ID NO: 13934
uaucuggaaagcaacuggg

SEQ ID NO: 13936 - RNA, 19 nt, Artificial Sequence
  Description of Artificial Sequence: Synthetic oligonucleotide
  Sense strand starting at position 820 of SEQ ID NO: 135
cucugucucucccaguuua

SEQ ID NO: 13937 - RNA, 19 nt, Artificial Sequence
  Description of Artificial Sequence: Synthetic oligonucleotide
  Antisense strand to SEQ ID NO: 13936
uaaacugggagagacagag

SEQ ID NO: 13938 - RNA, 19 nt, Artificial Sequence
  Description of Artificial Sequence: Synthetic oligonucleotide
  Sense strand starting at position 831 of SEQ ID NO: 135
ccaguuuagcaucaagaca

SEQ ID NO: 13939 - RNA, 19 nt, Artificial Sequence
  Description of Artificial Sequence: Synthetic oligonucleotide
  Antisense strand to SEQ ID NO: 13938
ugucuugaugcuaaacugg

SEQ ID NO: 13940 - RNA, 19 nt, Artificial Sequence
  Description of Artificial Sequence: Synthetic oligonucleotide
  Sense strand starting at position 938 of SEQ ID NO: 135
gaaguuggugaucagcaua

SEQ ID NO: 13941 - RNA, 19 nt, Artificial Sequence
  Description of Artificial Sequence: Synthetic oligonucleotide
  Antisense strand to SEQ ID NO: 13940
uaugcugaucaccaacuuc

SEQ ID NO: 13942 - RNA, 19 nt, Artificial Sequence
  Description of Artificial Sequence: Synthetic oligonucleotide
  Sense strand starting at position 1251 of SEQ ID NO: 135
gggaggcguguggauaauu

SEQ ID NO: 13943 - RNA, 19 nt, Artificial Sequence
  Description of Artificial Sequence: Synthetic oligonucleotide
  Antisense strand to SEQ ID NO: 13942
aauuauccacacgccuccc

SEQ ID NO: 13944 - RNA, 19 nt, Artificial Sequence
  Description of Artificial Sequence: Synthetic oligonucleotide
  Sense strand starting at position 1256 of SEQ ID NO: 135
gcguguggauaauuauaca

SEQ ID NO: 13945 - RNA, 19 nt, Artificial Sequence
  Description of Artificial Sequence: Synthetic oligonucleotide
  Antisense strand to SEQ ID NO: 13944
uguauaauuauccacacgc

SEQ ID NO: 13946 - RNA, 19 nt, Artificial Sequence
  Description of Artificial Sequence: Synthetic oligonucleotide
  Sense strand starting at position 1283 of SEQ ID NO: 135
caugaaaugcuaggugaag

SEQ ID NO: 13947 - RNA, 19 nt, Artificial Sequence
  Description of Artificial Sequence: Synthetic oligonucleotide
  Antisense strand to SEQ ID NO: 13946
cuucaccuagcauuucaug

SEQ ID NO: 13948 - RNA, 19 nt, Artificial Sequence
  Description of Artificial Sequence: Synthetic oligonucleotide
  Sense strand starting at position 1383 of SEQ ID NO: 135
gugugucagccuaaggguu

SEQ ID NO: 13949 - RNA, 19 nt, Artificial Sequence
  Description of Artificial Sequence: Synthetic oligonucleotide
  Antisense strand to SEQ ID NO: 13948
aacccuuaggcugacacac

SEQ ID NO: 13950 - RNA, 19 nt, Artificial Sequence
  Description of Artificial Sequence: Synthetic oligonucleotide
  Sense strand starting at position 1396 of SEQ ID NO: 135
aggguuucagguugggaga

SEQ ID NO: 13951 - RNA, 19 nt, Artificial Sequence
  Description of Artificial Sequence: Synthetic oligonucleotide
  Antisense strand to SEQ ID NO: 13950
ucucccaaccugaaacccu

SEQ ID NO: 13952 - RNA, 19 nt, Artificial Sequence
  Description of Artificial Sequence: Synthetic oligonucleotide
  Sense strand starting at position 1397 of SEQ ID NO: 135
ggguuucagguugggagaa

SEQ ID NO: 13953 - RNA, 19 nt, Artificial Sequence
  Description of Artificial Sequence: Synthetic oligonucleotide
  Antisense strand to SEQ ID NO: 13952
uucucccaaccugaaaccc

SEQ ID NO: 13954 - RNA, 19 nt, Artificial Sequence
  Description of Artificial Sequence: Synthetic oligonucleotide
  Sense strand starting at position 1456 of SEQ ID NO: 135
cccuauguuccaggcagaa

SEQ ID NO: 13955 - RNA, 19 nt, Artificial Sequence
  Description of Artificial Sequence: Synthetic oligonucleotide
  Antisense strand to SEQ ID NO: 13954
uucugccuggaacauaggg

SEQ ID NO: 13956 - RNA, 19 nt, Artificial Sequence
  Description of Artificial Sequence: Synthetic oligonucleotide
  Sense strand starting at position 1610 of SEQ ID NO: 135
ugaaucacagcuggaaagu

SEQ ID NO: 13957 - RNA, 19 nt, Artificial Sequence
  Description of Artificial Sequence: Synthetic oligonucleotide
  Antisense strand to SEQ ID NO: 13956
acuuuccagcugugauuca

SEQ ID NO: 13958 - RNA, 19 nt, Artificial Sequence
  Description of Artificial Sequence: Synthetic oligonucleotide
  Sense strand starting at position 2233 of SEQ ID NO: 135
agggauucgauccgagaca

SEQ ID NO: 13959 - RNA, 19 nt, Artificial Sequence
  Description of Artificial Sequence: Synthetic oligonucleotide
  Antisense strand to SEQ ID NO: 13958
ugucucggaucgaaucccu

SEQ ID NO: 13960 - RNA, 19 nt, Artificial Sequence
  Description of Artificial Sequence: Synthetic oligonucleotide
  Sense strand starting at position 2234 of SEQ ID NO: 135
gggauucgauccgagacau

SEQ ID NO: 13961 - RNA, 19 nt, Artificial Sequence
  Description of Artificial Sequence: Synthetic oligonucleotide
  Antisense strand to SEQ ID NO: 13960
augucucggaucgaauccc

SEQ ID NO: 13962 - RNA, 19 nt, Artificial Sequence
  Description of Artificial Sequence: Synthetic oligonucleotide
  Sense strand starting at position 2238 of SEQ ID NO: 135
uucgauccgagacauaauc

SEQ ID NO: 13963 - RNA, 19 nt, Artificial Sequence
  Description of Artificial Sequence: Synthetic oligonucleotide
  Antisense strand to SEQ ID NO: 13962
gauuaugucucggaucgaa

SEQ ID NO: 13964 - RNA, 19 nt, Artificial Sequence
  Description of Artificial Sequence: Synthetic oligonucleotide
  Sense strand starting at position 2527 of SEQ ID NO: 135
gguccuaggacagguuuga

SEQ ID NO: 13965 - RNA, 19 nt, Artificial Sequence
  Description of Artificial Sequence: Synthetic oligonucleotide
  Antisense strand to SEQ ID NO: 13964
ucaaaccuguccuaggacc

SEQ ID NO: 13966 - RNA, 19 nt, Artificial Sequence
  Description of Artificial Sequence: Synthetic oligonucleotide
  Sense strand starting at position 2730 of SEQ ID NO: 135
ugcguuaccucagucuuua

SEQ ID NO: 13967 - RNA, 19 nt, Artificial Sequence
  Description of Artificial Sequence: Synthetic oligonucleotide
  Antisense strand to SEQ ID NO: 13966
uaaagacugagguaacgca

SEQ ID NO: 13968 - RNA, 19 nt, Artificial Sequence
  Description of Artificial Sequence: Synthetic oligonucleotide
  Sense strand starting at position 2908 of SEQ ID NO: 135
gaacuaaacgcuggaucuu

SEQ ID NO: 13969 - RNA, 19 nt, Artificial Sequence
  Description of Artificial Sequence: Synthetic oligonucleotide
  Antisense strand to SEQ ID NO: 13968
aagauccagcguuuaguuc

SEQ ID NO: 13970 - RNA, 19 nt, Artificial Sequence
  Description of Artificial Sequence: Synthetic oligonucleotide
  Sense strand starting at position 2978 of SEQ ID NO: 135
agagaauucucccacaugc

SEQ ID NO: 13971 - RNA, 19 nt, Artificial Sequence
  Description of Artificial Sequence: Synthetic oligonucleotide
  Antisense strand to SEQ ID NO: 13970
gcaugugggagaauucucu

SEQ ID NO: 13972 - RNA, 19 nt, Artificial Sequence
  Description of Artificial Sequence: Synthetic oligonucleotide
  Sense strand starting at position 3119 of SEQ ID NO: 135
ugcaguucucucuguugca

SEQ ID NO: 13973 - RNA, 19 nt, Artificial Sequence
  Description of Artificial Sequence: Synthetic oligonucleotide
  Antisense strand to SEQ ID NO: 13972
ugcaacagagagaacugca

SEQ ID NO: 13974 - RNA, 19 nt, Artificial Sequence
  Description of Artificial Sequence: Synthetic oligonucleotide
  Sense strand starting at position 3120 of SEQ ID NO: 135
gcaguucucucuguugcaa

SEQ ID NO: 13975 - RNA, 19 nt, Artificial Sequence
  Description of Artificial Sequence: Synthetic oligonucleotide
  Antisense strand to SEQ ID NO: 13974
uugcaacagagagaacugc

SEQ ID NO: 13976 - RNA, 19 nt, Artificial Sequence
  Description of Artificial Sequence: Synthetic oligonucleotide
  Sense strand starting at position 3122 of SEQ ID NO: 135
aguucucucuguugcaagu

SEQ ID NO: 13977 - RNA, 19 nt, Artificial Sequence
  Description of Artificial Sequence: Synthetic oligonucleotide
  Antisense strand to SEQ ID NO: 13976
acuugcaacagagagaacu

SEQ ID NO: 13978 - RNA, 19 nt, Artificial Sequence
  Description of Artificial Sequence: Synthetic oligonucleotide
  Sense strand starting at position 3124 of SEQ ID NO: 135
uucucucuguugcaaguua

SEQ ID NO: 13979 - RNA, 19 nt, Artificial Sequence
  Description of Artificial Sequence: Synthetic oligonucleotide
  Antisense strand to SEQ ID NO: 13978
uaacuugcaacagagagaa

SEQ ID NO: 13980 - RNA, 19 nt, Artificial Sequence
  Description of Artificial Sequence: Synthetic oligonucleotide
  Sense strand starting at position 3136 of SEQ ID NO: 135
caaguuaagccggaacuga

SEQ ID NO: 13981 - RNA, 19 nt, Artificial Sequence
  Description of Artificial Sequence: Synthetic oligonucleotide
  Antisense strand to SEQ ID NO: 13980
ucaguuccggcuuaacuug

SEQ ID NO: 13982 - RNA, 19 nt, Artificial Sequence
  Description of Artificial Sequence: Synthetic oligonucleotide
  Sense strand starting at position 3270 of SEQ ID NO: 135
ccagccuuugggugaguuu

SEQ ID NO: 13983 - RNA, 19 nt, Artificial Sequence
  Description of Artificial Sequence: Synthetic oligonucleotide
  Antisense strand to SEQ ID NO: 13982
aaacucacccaaaggcugg

SEQ ID NO: 13984 - RNA, 19 nt, Artificial Sequence
  Description of Artificial Sequence: Synthetic oligonucleotide
  Sense strand starting at position 3277 of SEQ ID NO: 135
uugggugaguuuccugcua

SEQ ID NO: 13985 - RNA, 19 nt, Artificial Sequence
  Description of Artificial Sequence: Synthetic oligonucleotide
  Antisense strand to SEQ ID NO: 13984
uagcaggaaacucacccaa

SEQ ID NO: 13986 - RNA, 19 nt, Artificial Sequence
  Description of Artificial Sequence: Synthetic oligonucleotide
  Sense strand starting at position 3279 of SEQ ID NO: 135
gggugaguuuccugcuauu

SEQ ID NO: 13987 - RNA, 19 nt, Artificial Sequence
  Description of Artificial Sequence: Synthetic oligonucleotide
  Antisense strand to SEQ ID NO: 13986
aauagcaggaaacucaccc

SEQ ID NO: 13988 - RNA, 19 nt, Artificial Sequence
  Description of Artificial Sequence: Synthetic oligonucleotide
  Sense strand starting at position 3285 of SEQ ID NO: 135
guuuccugcuauugggaaa

SEQ ID NO: 13989 - RNA, 19 nt, Artificial Sequence
  Description of Artificial Sequence: Synthetic oligonucleotide
  Antisense strand to SEQ ID NO: 13988
uuucccaauagcaggaaac

SEQ ID NO: 13990 - RNA, 19 nt, Artificial Sequence
  Description of Artificial Sequence: Synthetic oligonucleotide
  Sense strand starting at position 3365 of SEQ ID NO: 135
ucccauuucucuggagaaa

SEQ ID NO: 13991 - RNA, 19 nt, Artificial Sequence
  Description of Artificial Sequence: Synthetic oligonucleotide
  Antisense strand to SEQ ID NO: 13990
uuucuccagagaaauggga

SEQ ID NO: 13992 - RNA, 19 nt, Artificial Sequence
  Description of Artificial Sequence: Synthetic oligonucleotide
  Sense strand starting at position 3967 of SEQ ID NO: 135
ucaggaauguacuaaauuu

SEQ ID NO: 13993 - RNA, 19 nt, Artificial Sequence
  Description of Artificial Sequence: Synthetic oligonucleotide
  Antisense strand to SEQ ID NO: 13992
aaauuuaguacauuccuga

SEQ ID NO: 13994 - RNA, 19 nt, Artificial Sequence
  Description of Artificial Sequence: Synthetic oligonucleotide
  Sense strand starting at position 3886 of SEQ ID NO: 136
aucuaagagugaugagauu

SEQ ID NO: 13995 - RNA, 19 nt, Artificial Sequence
  Description of Artificial Sequence: Synthetic oligonucleotide
  Antisense strand to SEQ ID NO: 13994
aaucucaucacucuuagau

SEQ ID NO: 13996 - RNA, 19 nt, Artificial Sequence
  Description of Artificial Sequence: Synthetic oligonucleotide
  Sense strand starting at position 3880 of SEQ ID NO: 136
cuguuaaucuaagagugau

SEQ ID NO: 13997 - RNA, 19 nt, Artificial Sequence
  Description of Artificial Sequence: Synthetic oligonucleotide
  Antisense strand to SEQ ID NO: 13996
aucacucuuagauuaacag

SEQ ID NO: 13998 - RNA, 19 nt, Artificial Sequence
  Description of Artificial Sequence: Synthetic oligonucleotide
  Sense strand starting at position 3791 of SEQ ID NO: 136
ccuggucacuaugaauaau

SEQ ID NO: 13999 - RNA, 19 nt, Artificial Sequence
  Description of Artificial Sequence: Synthetic oligonucleotide
  Antisense strand to SEQ ID NO: 13998
auuauucauagugaccagg

SEQ ID NO: 14000 - RNA, 19 nt, Artificial Sequence
  Description of Artificial Sequence: Synthetic oligonucleotide
  Sense strand starting at position 3788 of SEQ ID NO: 136
gucccuggucacuaugaau

SEQ ID NO: 14001 - RNA, 19 nt, Artificial Sequence
  Description of Artificial Sequence: Synthetic oligonucleotide
  Antisense strand to SEQ ID NO: 14000
auucauagugaccagggac

SEQ ID NO: 14002 - RNA, 19 nt, Artificial Sequence
  Description of Artificial Sequence: Synthetic oligonucleotide
  Sense strand starting at position 3782 of SEQ ID NO: 136
ggcaaugucccuggucacu

SEQ ID NO: 14003 - RNA, 19 nt, Artificial Sequence
  Description of Artificial Sequence: Synthetic oligonucleotide
  Antisense strand to SEQ ID NO: 14002
agugaccagggacauugcc

SEQ ID NO: 14004 - RNA, 19 nt, Artificial Sequence
  Description of Artificial Sequence: Synthetic oligonucleotide
  Sense strand starting at position 3751 of SEQ ID NO: 136
uaucuuagauuaugcagga

SEQ ID NO: 14005 - RNA, 19 nt, Artificial Sequence
  Description of Artificial Sequence: Synthetic oligonucleotide
  Antisense strand to SEQ ID NO: 14004
uccugcauaaucuaagaua

SEQ ID NO: 14006 - RNA, 19 nt, Artificial Sequence
  Description of Artificial Sequence: Synthetic oligonucleotide
  Sense strand starting at position 3746 of SEQ ID NO: 136
agcauuaucuuagauuaug

SEQ ID NO: 14007 - RNA, 19 nt, Artificial Sequence
  Description of Artificial Sequence: Synthetic oligonucleotide
  Antisense strand to SEQ ID NO: 14006
cauaaucuaagauaaugcu

SEQ ID NO: 14008 - RNA, 19 nt, Artificial Sequence
  Description of Artificial Sequence: Synthetic oligonucleotide
  Sense strand starting at position 3744 of SEQ ID NO: 136
ggagcauuaucuuagauua

SEQ ID NO: 14009 - RNA, 19 nt, Artificial Sequence
  Description of Artificial Sequence: Synthetic oligonucleotide
  Antisense strand to SEQ ID NO: 14008
uaaucuaagauaaugcucc

SEQ ID NO: 14010 - RNA, 19 nt, Artificial Sequence
  Description of Artificial Sequence: Synthetic oligonucleotide
  Sense strand starting at position 3741 of SEQ ID NO: 136
acaggagcauuaucuuaga

SEQ ID NO: 14011 - RNA, 19 nt, Artificial Sequence
  Description of Artificial Sequence: Synthetic oligonucleotide
  Antisense strand to SEQ ID NO: 14010
ucuaagauaaugcuccugu

SEQ ID NO: 14012 - RNA, 19 nt, Artificial Sequence
  Description of Artificial Sequence: Synthetic oligonucleotide
  Sense strand starting at position 3673 of SEQ ID NO: 136
aggccaguguuccuagaca

SEQ ID NO: 14013 - RNA, 19 nt, Artificial Sequence
  Description of Artificial Sequence: Synthetic oligonucleotide
  Antisense strand to SEQ ID NO: 14012
ugucuaggaacacuggccu

SEQ ID NO: 14014 - RNA, 19 nt, Artificial Sequence
  Description of Artificial Sequence: Synthetic oligonucleotide
  Sense strand starting at position 3588 of SEQ ID NO: 136
uuggaauguucugauauga

SEQ ID NO: 14015 - RNA, 19 nt, Artificial Sequence
  Description of Artificial Sequence: Synthetic oligonucleotide
  Antisense strand to SEQ ID NO: 14014
ucauaucagaacauuccaa

SEQ ID NO: 14016 - RNA, 19 nt, Artificial Sequence
  Description of Artificial Sequence: Synthetic oligonucleotide
  Sense strand starting at position 3587 of SEQ ID NO: 136
cuuggaauguucugauaug

SEQ ID NO: 14017 - RNA, 19 nt, Artificial Sequence
  Description of Artificial Sequence: Synthetic oligonucleotide
  Antisense strand to SEQ ID NO: 14016
cauaucagaacauuccaag

SEQ ID NO: 14018 - RNA, 19 nt, Artificial Sequence
  Description of Artificial Sequence: Synthetic oligonucleotide
  Sense strand starting at position 3525 of SEQ ID NO: 136
guguucuccugaucuacag

SEQ ID NO: 14019 - RNA, 19 nt, Artificial Sequence
  Description of Artificial Sequence: Synthetic oligonucleotide
  Antisense strand to SEQ ID NO: 14018
cuguagaucaggagaacac

SEQ ID NO: 14020 - RNA, 19 nt, Artificial Sequence
  Description of Artificial Sequence: Synthetic oligonucleotide
  Sense strand starting at position 3519 of SEQ ID NO: 136
gcuccaguguucuccugau

SEQ ID NO: 14021 - RNA, 19 nt, Artificial Sequence
  Description of Artificial Sequence: Synthetic oligonucleotide
  Antisense strand to SEQ ID NO: 14020
aucaggagaacacuggagc

SEQ ID NO: 14022 - RNA, 19 nt, Artificial Sequence
  Description of Artificial Sequence: Synthetic oligonucleotide
  Sense strand starting at position 3511 of SEQ ID NO: 136
cacagaaagcuccaguguu

SEQ ID NO: 14023 - RNA, 19 nt, Artificial Sequence
  Description of Artificial Sequence: Synthetic oligonucleotide
  Antisense strand to SEQ ID NO: 14022
aacacuggagcuuucugug

SEQ ID NO: 14024 - RNA, 19 nt, Artificial Sequence
  Description of Artificial Sequence: Synthetic oligonucleotide
  Sense strand starting at position 3481 of SEQ ID NO: 136
aggccagguuuaucugaaa

SEQ ID NO: 14025 - RNA, 19 nt, Artificial Sequence
  Description of Artificial Sequence: Synthetic oligonucleotide
  Antisense strand to SEQ ID NO: 14024
uuucagauaaaccuggccu

SEQ ID NO: 14026 - RNA, 19 nt, Artificial Sequence
  Description of Artificial Sequence: Synthetic oligonucleotide
  Sense strand starting at position 3475 of SEQ ID NO: 136
gguagaaggccagguuuau

SEQ ID NO: 14027 - RNA, 19 nt, Artificial Sequence
  Description of Artificial Sequence: Synthetic oligonucleotide
  Antisense strand to SEQ ID NO: 14026
auaaaccuggccuucuacc

SEQ ID NO: 14028 - RNA, 19 nt, Artificial Sequence
  Description of Artificial Sequence: Synthetic oligonucleotide
  Sense strand starting at position 3415 of SEQ ID NO: 136
cguaaagauuguuuaaagu

SEQ ID NO: 14029 - RNA, 19 nt, Artificial Sequence
  Description of Artificial Sequence: Synthetic oligonucleotide
  Antisense strand to SEQ ID NO: 14028
acuuuaaacaaucuuuacg

SEQ ID NO: 14030 - RNA, 19 nt, Artificial Sequence
  Description of Artificial Sequence: Synthetic oligonucleotide
  Sense strand starting at position 3414 of SEQ ID NO: 136
gcguaaagauuguuuaaag

SEQ ID NO: 14031 - RNA, 19 nt, Artificial Sequence
  Description of Artificial Sequence: Synthetic oligonucleotide
  Antisense strand to SEQ ID NO: 14030
cuuuaaacaaucuuuacgc

SEQ ID NO: 14032 - RNA, 19 nt, Artificial Sequence
  Description of Artificial Sequence: Synthetic oligonucleotide
  Sense strand starting at position 3412 of SEQ ID NO: 136
uagcguaaagauuguuuaa

SEQ ID NO: 14033 - RNA, 19 nt, Artificial Sequence
  Description of Artificial Sequence: Synthetic oligonucleotide
  Antisense strand to SEQ ID NO: 14032
uuaaacaaucuuuacgcua

SEQ ID NO: 14034 - RNA, 19 nt, Artificial Sequence
  Description of Artificial Sequence: Synthetic oligonucleotide
  Sense strand starting at position 3405 of SEQ ID NO: 136
uauccuguagcguaaagau

SEQ ID NO: 14035 - RNA, 19 nt, Artificial Sequence
  Description of Artificial Sequence: Synthetic oligonucleotide
  Antisense strand to SEQ ID NO: 14034
aucuuuacgcuacaggaua

SEQ ID NO: 14036 - RNA, 19 nt, Artificial Sequence
  Description of Artificial Sequence: Synthetic oligonucleotide
  Sense strand starting at position 3382 of SEQ ID NO: 136
ggaugcuugucagauuugu

SEQ ID NO: 14037 - RNA, 19 nt, Artificial Sequence
  Description of Artificial Sequence: Synthetic oligonucleotide
  Antisense strand to SEQ ID NO: 14036
acaaaucugacaagcaucc

SEQ ID NO: 14038 - RNA, 19 nt, Artificial Sequence
  Description of Artificial Sequence: Synthetic oligonucleotide
  Sense strand starting at position 3380 of SEQ ID NO: 136
auggaugcuugucagauuu

SEQ ID NO: 14039 - RNA, 19 nt, Artificial Sequence
  Description of Artificial Sequence: Synthetic oligonucleotide
  Antisense strand to SEQ ID NO: 14038
aaaucugacaagcauccau

SEQ ID NO: 14040 - RNA, 19 nt, Artificial Sequence
  Description of Artificial Sequence: Synthetic oligonucleotide
  Sense strand starting at position 3379 of SEQ ID NO: 136
aauggaugcuugucagauu

SEQ ID NO: 14041 - RNA, 19 nt, Artificial Sequence
  Description of Artificial Sequence: Synthetic oligonucleotide
  Antisense strand to SEQ ID NO: 14040
aaucugacaagcauccauu

SEQ ID NO: 14042 - RNA, 19 nt, Artificial Sequence
  Description of Artificial Sequence: Synthetic oligonucleotide
  Sense strand starting at position 3279 of SEQ ID NO: 136
gcaggaaccugaguguuca

SEQ ID NO: 14043 - RNA, 19 nt, Artificial Sequence
  Description of Artificial Sequence: Synthetic oligonucleotide
  Antisense strand to SEQ ID NO: 14042
ugaacacucagguuccugc

SEQ ID NO: 14044 - RNA, 19 nt, Artificial Sequence
  Description of Artificial Sequence: Synthetic oligonucleotide
  Sense strand starting at position 3125 of SEQ ID NO: 136
gcuuuaggagcauagaaca

SEQ ID NO: 14045 - RNA, 19 nt, Artificial Sequence
  Description of Artificial Sequence: Synthetic oligonucleotide
  Antisense strand to SEQ ID NO: 14044
uguucuaugcuccuaaagc

SEQ ID NO: 14046 - RNA, 19 nt, Artificial Sequence
  Description of Artificial Sequence: Synthetic oligonucleotide
  Sense strand starting at position 3123 of SEQ ID NO: 136
uugcuuuaggagcauagaa

SEQ ID NO: 14047 - RNA, 19 nt, Artificial Sequence
  Description of Artificial Sequence: Synthetic oligonucleotide
  Antisense strand to SEQ ID NO: 14046
uucuaugcuccuaaagcaa

SEQ ID NO: 14048 - RNA, 19 nt, Artificial Sequence
  Description of Artificial Sequence: Synthetic oligonucleotide
  Sense strand starting at position 3115 of SEQ ID NO: 136
cacugaaguugcuuuagga

SEQ ID NO: 14049 - RNA, 19 nt, Artificial Sequence
  Description of Artificial Sequence: Synthetic oligonucleotide
  Antisense strand to SEQ ID NO: 14048
uccuaaagcaacuucagug

SEQ ID NO: 14050 - RNA, 19 nt, Artificial Sequence
  Description of Artificial Sequence: Synthetic oligonucleotide
  Sense strand starting at position 3019 of SEQ ID NO: 136
aaaucaaguugugagcaca

SEQ ID NO: 14051 - RNA, 19 nt, Artificial Sequence
  Description of Artificial Sequence: Synthetic oligonucleotide
  Antisense strand to SEQ ID NO: 14050
ugugcucacaacuugauuu

SEQ ID NO: 14052 - RNA, 19 nt, Artificial Sequence
  Description of Artificial Sequence: Synthetic oligonucleotide
  Sense strand starting at position 2993 of SEQ ID NO: 136
cggucuacuugccuuuaaa

SEQ ID NO: 14053 - RNA, 19 nt, Artificial Sequence
  Description of Artificial Sequence: Synthetic oligonucleotide
  Antisense strand to SEQ ID NO: 14052
uuuaaaggcaaguagaccg

SEQ ID NO: 14054 - RNA, 19 nt, Artificial Sequence
  Description of Artificial Sequence: Synthetic oligonucleotide
  Sense strand starting at position 2992 of SEQ ID NO: 136
ucggucuacuugccuuuaa

SEQ ID NO: 14055 - RNA, 19 nt, Artificial Sequence
  Description of Artificial Sequence: Synthetic oligonucleotide
  Antisense strand to SEQ ID NO: 14054
uuaaaggcaaguagaccga

SEQ ID NO: 14056 - RNA, 19 nt, Artificial Sequence
  Description of Artificial Sequence: Synthetic oligonucleotide
  Sense strand starting at position 2917 of SEQ ID NO: 136
ggaacugccugucacuuaa

SEQ ID NO: 14057 - RNA, 19 nt, Artificial Sequence
  Description of Artificial Sequence: Synthetic oligonucleotide
  Antisense strand to SEQ ID NO: 14056
uuaagugacaggcaguucc

SEQ ID NO: 14058 - RNA, 19 nt, Artificial Sequence
  Description of Artificial Sequence: Synthetic oligonucleotide
  Sense strand starting at position 2914 of SEQ ID NO: 136
gagggaacugccugucacu

SEQ ID NO: 14059 - RNA, 19 nt, Artificial Sequence
  Description of Artificial Sequence: Synthetic oligonucleotide
  Antisense strand to SEQ ID NO: 14058
agugacaggcaguucccuc

SEQ ID NO: 14060 - RNA, 19 nt, Artificial Sequence
  Description of Artificial Sequence: Synthetic oligonucleotide
  Sense strand starting at position 2868 of SEQ ID NO: 136
gcaugagguccggauuauc

SEQ ID NO: 14061 - RNA, 19 nt, Artificial Sequence
  Description of Artificial Sequence: Synthetic oligonucleotide
  Antisense strand to SEQ ID NO: 14060
gauaauccggaccucaugc

SEQ ID NO: 14062 - RNA, 19 nt, Artificial Sequence
  Description of Artificial Sequence: Synthetic oligonucleotide
  Sense strand starting at position 2866 of SEQ ID NO: 136
gggcaugagguccggauua

SEQ ID NO: 14063 - RNA, 19 nt, Artificial Sequence
  Description of Artificial Sequence: Synthetic oligonucleotide
  Antisense strand to SEQ ID NO: 14062
uaauccggaccucaugccc

SEQ ID NO: 14064 - RNA, 19 nt, Artificial Sequence
  Description of Artificial Sequence: Synthetic oligonucleotide
  Sense strand starting at position 2789 of SEQ ID NO: 136
aagaaugacugaucauugu

SEQ ID NO: 14065 - RNA, 19 nt, Artificial Sequence
  Description of Artificial Sequence: Synthetic oligonucleotide
  Antisense strand to SEQ ID NO: 14064
acaaugaucagucauucuu

SEQ ID NO: 14066 - RNA, 19 nt, Artificial Sequence
  Description of Artificial Sequence: Synthetic oligonucleotide
  Sense strand starting at position 2476 of SEQ ID NO: 136
gccgaaggcuucggagaaa

SEQ ID NO: 14067 - RNA, 19 nt, Artificial Sequence
  Description of Artificial Sequence: Synthetic oligonucleotide
  Antisense strand to SEQ ID NO: 14066
uuucuccgaagccuucggc

SEQ ID NO: 14068 - RNA, 19 nt, Artificial Sequence
  Description of Artificial Sequence: Synthetic oligonucleotide
  Sense strand starting at position 2475 of SEQ ID NO: 136
cgccgaaggcuucggagaa

SEQ ID NO: 14069 - RNA, 19 nt, Artificial Sequence
  Description of Artificial Sequence: Synthetic oligonucleotide
  Antisense strand to SEQ ID NO: 14068
uucuccgaagccuucggcg

SEQ ID NO: 14070 - RNA, 19 nt, Artificial Sequence
  Description of Artificial Sequence: Synthetic oligonucleotide
  Sense strand starting at position 1995 of SEQ ID NO: 136
cuuucugcugccggagaaa

SEQ ID NO: 14071 - RNA, 19 nt, Artificial Sequence
  Description of Artificial Sequence: Synthetic oligonucleotide
  Antisense strand to SEQ ID NO: 14070
uuucuccggcagcagaaag

SEQ ID NO: 14072 - RNA, 19 nt, Artificial Sequence
  Description of Artificial Sequence: Synthetic oligonucleotide
  Sense strand starting at position 1994 of SEQ ID NO: 136
gcuuucugcugccggagaa

SEQ ID NO: 14073 - RNA, 19 nt, Artificial Sequence
  Description of Artificial Sequence: Synthetic oligonucleotide
  Antisense strand to SEQ ID NO: 14072
uucuccggcagcagaaagc

SEQ ID NO: 14074 - RNA, 19 nt, Artificial Sequence
  Description of Artificial Sequence: Synthetic oligonucleotide
  Sense strand starting at position 123 of SEQ ID NO: 137
auauacgaguuaccuaaua

SEQ ID NO: 14075 - RNA, 19 nt, Artificial Sequence
  Description of Artificial Sequence: Synthetic oligonucleotide
  Antisense strand to SEQ ID NO: 14074
uauuagguaacucguauau

SEQ ID NO: 14076 - RNA, 19 nt, Artificial Sequence
  Description of Artificial Sequence: Synthetic oligonucleotide
  Sense strand starting at position 169 of SEQ ID NO: 137
ggugaugagaguuauagcu

SEQ ID NO: 14077 - RNA, 19 nt, Artificial Sequence
  Description of Artificial Sequence: Synthetic oligonucleotide
  Antisense strand to SEQ ID NO: 14076
agcuauaacucucaucacc

SEQ ID NO: 14078 - RNA, 19 nt, Artificial Sequence
  Description of Artificial Sequence: Synthetic oligonucleotide
  Sense strand starting at position 178 of SEQ ID NO: 137
aguuauagcuaggauuugu

SEQ ID NO: 14079 - RNA, 19 nt, Artificial Sequence
  Description of Artificial Sequence: Synthetic oligonucleotide
  Antisense strand to SEQ ID NO: 14078
acaaauccuagcuauaacu

SEQ ID NO: 14080 - RNA, 19 nt, Artificial Sequence
  Description of Artificial Sequence: Synthetic oligonucleotide
  Sense strand starting at position 218 of SEQ ID NO: 137
ccugaaacaugucuaugcu

SEQ ID NO: 14081 - RNA, 19 nt, Artificial Sequence
  Description of Artificial Sequence: Synthetic oligonucleotide
  Antisense strand to SEQ ID NO: 14080
agcauagacauguuucagg

SEQ ID NO: 14082 - RNA, 19 nt, Artificial Sequence
  Description of Artificial Sequence: Synthetic oligonucleotide
  Sense strand starting at position 219 of SEQ ID NO: 137
cugaaacaugucuaugcuu

SEQ ID NO: 14083 - RNA, 19 nt, Artificial Sequence
  Description of Artificial Sequence: Synthetic oligonucleotide
  Antisense strand to SEQ ID NO: 14082
aagcauagacauguuucag

SEQ ID NO: 14084 - RNA, 19 nt, Artificial Sequence
  Description of Artificial Sequence: Synthetic oligonucleotide
  Sense strand starting at position 323 of SEQ ID NO: 137
cuuaauuacucuguauagu

SEQ ID NO: 14085 - RNA, 19 nt, Artificial Sequence
  Description of Artificial Sequence: Synthetic oligonucleotide
  Antisense strand to SEQ ID NO: 14084
acuauacagaguaauuaag

SEQ ID NO: 14086 - RNA, 19 nt, Artificial Sequence
  Description of Artificial Sequence: Synthetic oligonucleotide
  Sense strand starting at position 429 of SEQ ID NO: 137
ucuugauucugaggacaag

SEQ ID NO: 14087 - RNA, 19 nt, Artificial Sequence
  Description of Artificial Sequence: Synthetic oligonucleotide
  Antisense strand to SEQ ID NO: 14086
cuuguccucagaaucaaga

SEQ ID NO: 14088 - RNA, 19 nt, Artificial Sequence
  Description of Artificial Sequence: Synthetic oligonucleotide
  Sense strand starting at position 486 of SEQ ID NO: 137
aguagacaacguugauauu

SEQ ID NO: 14089 - RNA, 19 nt, Artificial Sequence
  Description of Artificial Sequence: Synthetic oligonucleotide
  Antisense strand to SEQ ID NO: 14088
aauaucaacguugucuacu

SEQ ID NO: 14090 - RNA, 19 nt, Artificial Sequence
  Description of Artificial Sequence: Synthetic oligonucleotide
  Sense strand starting at position 519 of SEQ ID NO: 137
guugcauuucuacacuugu

SEQ ID NO: 14091 - RNA, 19 nt, Artificial Sequence
  Description of Artificial Sequence: Synthetic oligonucleotide
  Antisense strand to SEQ ID NO: 14090
acaaguguagaaaugcaac

SEQ ID NO: 14092 - RNA, 19 nt, Artificial Sequence
  Description of Artificial Sequence: Synthetic oligonucleotide
  Sense strand starting at position 564 of SEQ ID NO: 137
cugaauuuguaauggauga

SEQ ID NO: 14093 - RNA, 19 nt, Artificial Sequence
  Description of Artificial Sequence: Synthetic oligonucleotide
  Antisense strand to SEQ ID NO: 14092
ucauccauuacaaauucag

SEQ ID NO: 14094 - RNA, 19 nt, Artificial Sequence
  Description of Artificial Sequence: Synthetic oligonucleotide
  Sense strand starting at position 589 of SEQ ID NO: 137
acaagcuagugucuaaguu

SEQ ID NO: 14095 - RNA, 19 nt, Artificial Sequence
  Description of Artificial Sequence: Synthetic oligonucleotide
  Antisense strand to SEQ ID NO: 14094
aacuuagacacuagcuugu

SEQ ID NO: 14096 - RNA, 19 nt, Artificial Sequence
  Description of Artificial Sequence: Synthetic oligonucleotide
  Sense strand starting at position 648 of SEQ ID NO: 137
auucuagcauguguuuaaa

SEQ ID NO: 14097 - RNA, 19 nt, Artificial Sequence
  Description of Artificial Sequence: Synthetic oligonucleotide
  Antisense strand to SEQ ID NO: 14096
uuuaaacacaugcuagaau

SEQ ID NO: 14098 - RNA, 19 nt, Artificial Sequence
  Description of Artificial Sequence: Synthetic oligonucleotide
  Sense strand starting at position 1102 of SEQ ID NO: 137
aguuucuagggucagauua

SEQ ID NO: 14099 - RNA, 19 nt, Artificial Sequence
  Description of Artificial Sequence: Synthetic oligonucleotide
  Antisense strand to SEQ ID NO: 14098
uaaucugacccuagaaacu

SEQ ID NO: 14100 - RNA, 19 nt, Artificial Sequence
  Description of Artificial Sequence: Synthetic oligonucleotide
  Sense strand starting at position 1110 of SEQ ID NO: 137
gggucagauuaccugacuu

SEQ ID NO: 14101 - RNA, 19 nt, Artificial Sequence
  Description of Artificial Sequence: Synthetic oligonucleotide
  Antisense strand to SEQ ID NO: 14100
aagucagguaaucugaccc

SEQ ID NO: 14102 - RNA, 19 nt, Artificial Sequence
  Description of Artificial Sequence: Synthetic oligonucleotide
  Sense strand starting at position 1164 of SEQ ID NO: 137
ugccguuauuccucucauu

SEQ ID NO: 14103 - RNA, 19 nt, Artificial Sequence
  Description of Artificial Sequence: Synthetic oligonucleotide
  Antisense strand to SEQ ID NO: 14102
aaugagaggaauaacggca

SEQ ID NO: 14104 - RNA, 19 nt, Artificial Sequence
  Description of Artificial Sequence: Synthetic oligonucleotide
  Sense strand starting at position 1443 of SEQ ID NO: 137
ggaccaagguauccucuaa

SEQ ID NO: 14105 - RNA, 19 nt, Artificial Sequence
  Description of Artificial Sequence: Synthetic oligonucleotide
  Antisense strand to SEQ ID NO: 14104
uuagaggauaccuuggucc

SEQ ID NO: 14106 - RNA, 19 nt, Artificial Sequence
  Description of Artificial Sequence: Synthetic oligonucleotide
  Sense strand starting at position 1714 of SEQ ID NO: 137
gaguuucccgucuacgaca

SEQ ID NO: 14107 - RNA, 19 nt, Artificial Sequence
  Description of Artificial Sequence: Synthetic oligonucleotide
  Antisense strand to SEQ ID NO: 14106
ugucguagacgggaaacuc

SEQ ID NO: 14108 - RNA, 19 nt, Artificial Sequence
  Description of Artificial Sequence: Synthetic oligonucleotide
  Sense strand starting at position 1737 of SEQ ID NO: 137
cgccauuucugucagagaa

SEQ ID NO: 14109 - RNA, 19 nt, Artificial Sequence
  Description of Artificial Sequence: Synthetic oligonucleotide
  Antisense strand to SEQ ID NO: 14108
uucucugacagaaauggcg

SEQ ID NO: 14110 - RNA, 19 nt, Artificial Sequence
  Description of Artificial Sequence: Synthetic oligonucleotide
  Sense strand starting at position 2793 of SEQ ID NO: 137
cgaccuuggauugguuaaa

SEQ ID NO: 14111 - RNA, 19 nt, Artificial Sequence
  Description of Artificial Sequence: Synthetic oligonucleotide
  Antisense strand to SEQ ID NO: 14110
uuuaaccaauccaaggucg

SEQ ID NO: 14112 - RNA, 19 nt, Artificial Sequence
  Description of Artificial Sequence: Synthetic oligonucleotide
  Sense strand starting at position 2804 of SEQ ID NO: 137
ugguuaaaguucuuuagaa

SEQ ID NO: 14113 - RNA, 19 nt, Artificial Sequence
  Description of Artificial Sequence: Synthetic oligonucleotide
  Antisense strand to SEQ ID NO: 14112
uucuaaagaacuuuaacca

SEQ ID NO: 14114 - RNA, 19 nt, Artificial Sequence
  Description of Artificial Sequence: Synthetic oligonucleotide
  Sense strand starting at position 2805 of SEQ ID NO: 137
gguuaaaguucuuuagaac

SEQ ID NO: 14115 - RNA, 19 nt, Artificial Sequence
  Description of Artificial Sequence: Synthetic oligonucleotide
  Antisense strand to SEQ ID NO: 14114
guucuaaagaacuuuaacc

SEQ ID NO: 14116 - RNA, 19 nt, Artificial Sequence
  Description of Artificial Sequence: Synthetic oligonucleotide
  Sense strand starting at position 2839 of SEQ ID NO: 137
uccuauuggucccuggaua

SEQ ID NO: 14117 - RNA, 19 nt, Artificial Sequence
  Description of Artificial Sequence: Synthetic oligonucleotide
  Antisense strand to SEQ ID NO: 14116
uauccagggaccaauagga

SEQ ID NO: 14118 - RNA, 19 nt, Artificial Sequence
  Description of Artificial Sequence: Synthetic oligonucleotide
  Sense strand starting at position 2840 of SEQ ID NO: 137
ccuauuggucccuggauac

SEQ ID NO: 14119 - RNA, 19 nt, Artificial Sequence
  Description of Artificial Sequence: Synthetic oligonucleotide
  Antisense strand to SEQ ID NO: 14118
guauccagggaccaauagg

SEQ ID NO: 14120 - RNA, 19 nt, Artificial Sequence
  Description of Artificial Sequence: Synthetic oligonucleotide
  Sense strand starting at position 2878 of SEQ ID NO: 137
ccaccaguucuauggaaac

SEQ ID NO: 14121 - RNA, 19 nt, Artificial Sequence
  Description of Artificial Sequence: Synthetic oligonucleotide
  Antisense strand to SEQ ID NO: 14120
guuuccauagaacuggugg

SEQ ID NO: 14122 - RNA, 19 nt, Artificial Sequence
  Description of Artificial Sequence: Synthetic oligonucleotide
  Sense strand starting at position 2908 of SEQ ID NO: 137
ccucaaggcuuucugggaa

SEQ ID NO: 14123 - RNA, 19 nt, Artificial Sequence
  Description of Artificial Sequence: Synthetic oligonucleotide
  Antisense strand to SEQ ID NO: 14122
uucccagaaagccuugagg

SEQ ID NO: 14124 - RNA, 19 nt, Artificial Sequence
  Description of Artificial Sequence: Synthetic oligonucleotide
  Sense strand starting at position 2911 of SEQ ID NO: 137
caaggcuuucugggaaaua

SEQ ID NO: 14125 - RNA, 19 nt, Artificial Sequence
  Description of Artificial Sequence: Synthetic oligonucleotide
  Antisense strand to SEQ ID NO: 14124
uauuucccagaaagccuug

SEQ ID NO: 14126 - RNA, 19 nt, Artificial Sequence
  Description of Artificial Sequence: Synthetic oligonucleotide
  Sense strand starting at position 2912 of SEQ ID NO: 137
aaggcuuucugggaaauaa

SEQ ID NO: 14127 - RNA, 19 nt, Artificial Sequence
  Description of Artificial Sequence: Synthetic oligonucleotide
  Antisense strand to SEQ ID NO: 14126
uuauuucccagaaagccuu

SEQ ID NO: 14128 - RNA, 19 nt, Artificial Sequence
  Description of Artificial Sequence: Synthetic oligonucleotide
  Sense strand starting at position 3398 of SEQ ID NO: 137
gcugaaccggauuguguau

SEQ ID NO: 14129 - RNA, 19 nt, Artificial Sequence
  Description of Artificial Sequence: Synthetic oligonucleotide
  Antisense strand to SEQ ID NO: 14128
auacacaauccgguucagc

SEQ ID NO: 14130 - RNA, 19 nt, Artificial Sequence
  Description of Artificial Sequence: Synthetic oligonucleotide
  Sense strand starting at position 3404 of SEQ ID NO: 137
ccggauuguguaugaauuu

SEQ ID NO: 14131 - RNA, 19 nt, Artificial Sequence
  Description of Artificial Sequence: Synthetic oligonucleotide
  Antisense strand to SEQ ID NO: 14130
aaauucauacacaauccgg

SEQ ID NO: 14132 - RNA, 19 nt, Artificial Sequence
  Description of Artificial Sequence: Synthetic oligonucleotide
  Sense strand starting at position 3589 of SEQ ID NO: 137
cggccucgaagugauugaa

SEQ ID NO: 14133 - RNA, 19 nt, Artificial Sequence
  Description of Artificial Sequence: Synthetic oligonucleotide
  Antisense strand to SEQ ID NO: 14132
uucaaucacuucgaggccg

SEQ ID NO: 14134 - RNA, 19 nt, Artificial Sequence
  Description of Artificial Sequence: Synthetic oligonucleotide
  Sense strand starting at position 3592 of SEQ ID NO: 137
ccucgaagugauugaaauu

SEQ ID NO: 14135 - RNA, 19 nt, Artificial Sequence
  Description of Artificial Sequence: Synthetic oligonucleotide
  Antisense strand to SEQ ID NO: 14134
aauuucaaucacuucgagg

SEQ ID NO: 14136 - RNA, 19 nt, Artificial Sequence
  Description of Artificial Sequence: Synthetic oligonucleotide
  Sense strand starting at position 3593 of SEQ ID NO: 137
cucgaagugauugaaauuc

SEQ ID NO: 14137 - RNA, 19 nt, Artificial Sequence
  Description of Artificial Sequence: Synthetic oligonucleotide
  Antisense strand to SEQ ID NO: 14136
gaauuucaaucacuucgag

SEQ ID NO: 14138 - RNA, 19 nt, Artificial Sequence
  Description of Artificial Sequence: Synthetic oligonucleotide
  Sense strand starting at position 3646 of SEQ ID NO: 137
cgucuuucucccggaguau

SEQ ID NO: 14139 - RNA, 19 nt, Artificial Sequence
  Description of Artificial Sequence: Synthetic oligonucleotide
  Antisense strand to SEQ ID NO: 14138
auacuccgggagaaagacg

SEQ ID NO: 14140 - RNA, 19 nt, Artificial Sequence
  Description of Artificial Sequence: Synthetic oligonucleotide
  Sense strand starting at position 3647 of SEQ ID NO: 137
gucuuucucccggaguaug

SEQ ID NO: 14141 - RNA, 19 nt, Artificial Sequence
  Description of Artificial Sequence: Synthetic oligonucleotide
  Antisense strand to SEQ ID NO: 14140
cauacuccgggagaaagac

SEQ ID NO: 14142 - RNA, 19 nt, Artificial Sequence
  Description of Artificial Sequence: Synthetic oligonucleotide
  Sense strand starting at position 3650 of SEQ ID NO: 137
uuucucccggaguaugaau

SEQ ID NO: 14143 - RNA, 19 nt, Artificial Sequence
  Description of Artificial Sequence: Synthetic oligonucleotide
  Antisense strand to SEQ ID NO: 14142
auucauacuccgggagaaa

SEQ ID NO: 14144 - RNA, 19 nt, Artificial Sequence
  Description of Artificial Sequence: Synthetic oligonucleotide
  Sense strand starting at position 3694 of SEQ ID NO: 137
uuuguaugucucuggccau

SEQ ID NO: 14145 - RNA, 19 nt, Artificial Sequence
  Description of Artificial Sequence: Synthetic oligonucleotide
  Antisense strand to SEQ ID NO: 14144
auggccagagacauacaaa

SEQ ID NO: 14146 - RNA, 19 nt, Artificial Sequence
  Description of Artificial Sequence: Synthetic oligonucleotide
  Sense strand starting at position 3761 of SEQ ID NO: 137
acuucuuagacgcaagguu

SEQ ID NO: 14147 - RNA, 19 nt, Artificial Sequence
  Description of Artificial Sequence: Synthetic oligonucleotide
  Antisense strand to SEQ ID NO: 14146
aaccuugcgucuaagaagu

SEQ ID NO: 14148 - RNA, 19 nt, Artificial Sequence
  Description of Artificial Sequence: Synthetic oligonucleotide
  Sense strand starting at position 3795 of SEQ ID NO: 137
aucgucuaacgcguuagaa

SEQ ID NO: 14149 - RNA, 19 nt, Artificial Sequence
  Description of Artificial Sequence: Synthetic oligonucleotide
  Antisense strand to SEQ ID NO: 14148
uucuaacgcguuagacgau

SEQ ID NO: 14150 - RNA, 19 nt, Artificial Sequence
  Description of Artificial Sequence: Synthetic oligonucleotide
  Sense strand starting at position 3796 of SEQ ID NO: 137
ucgucuaacgcguuagaag

SEQ ID NO: 14151 - RNA, 19 nt, Artificial Sequence
  Description of Artificial Sequence: Synthetic oligonucleotide
  Antisense strand to SEQ ID NO: 14150
cuucuaacgcguuagacga

SEQ ID NO: 14152 - RNA, 19 nt, Artificial Sequence
  Description of Artificial Sequence: Synthetic oligonucleotide
  Sense strand starting at position 3946 of SEQ ID NO: 137
aggagaguuccacggugau

SEQ ID NO: 14153 - RNA, 19 nt, Artificial Sequence
  Description of Artificial Sequence: Synthetic oligonucleotide
  Antisense strand to SEQ ID NO: 14152
aucaccguggaacucuccu

SEQ ID NO: 14154 - RNA, 19 nt, Artificial Sequence
  Description of Artificial Sequence: Synthetic oligonucleotide
  Sense strand starting at position 372 of SEQ ID NO: 138
aguuucuagggucagauua

SEQ ID NO: 14155 - RNA, 19 nt, Artificial Sequence
  Description of Artificial Sequence: Synthetic oligonucleotide
  Antisense strand to SEQ ID NO: 14154
uaaucugacccuagaaacu

SEQ ID NO: 14156 - RNA, 19 nt, Artificial Sequence
  Description of Artificial Sequence: Synthetic oligonucleotide
  Sense strand starting at position 380 of SEQ ID NO: 138
gggucagauuaccugacuu

SEQ ID NO: 14157 - RNA, 19 nt, Artificial Sequence
  Description of Artificial Sequence: Synthetic oligonucleotide
  Antisense strand to SEQ ID NO: 14156
aagucagguaaucugaccc

SEQ ID NO: 14158 - RNA, 19 nt, Artificial Sequence
  Description of Artificial Sequence: Synthetic oligonucleotide
  Sense strand starting at position 713 of SEQ ID NO: 138
ggaccaagguauccucuaa

SEQ ID NO: 14159 - RNA, 19 nt, Artificial Sequence
  Description of Artificial Sequence: Synthetic oligonucleotide
  Antisense strand to SEQ ID NO: 14158
uuagaggauaccuuggucc

SEQ ID NO: 14160 - RNA, 19 nt, Artificial Sequence
  Description of Artificial Sequence: Synthetic oligonucleotide
  Sense strand starting at position 984 of SEQ ID NO: 138
gaguuucccgucuacgaca

SEQ ID NO: 14161 - RNA, 19 nt, Artificial Sequence
  Description of Artificial Sequence: Synthetic oligonucleotide
  Antisense strand to SEQ ID NO: 14160
ugucguagacgggaaacuc

SEQ ID NO: 14162 - RNA, 19 nt, Artificial Sequence
  Description of Artificial Sequence: Synthetic oligonucleotide
  Sense strand starting at position 2063 of SEQ ID NO: 138
cgaccuuggauugguuaaa

SEQ ID NO: 14163 - RNA, 19 nt, Artificial Sequence
  Description of Artificial Sequence: Synthetic oligonucleotide
  Antisense strand to SEQ ID NO: 14162
uuuaaccaauccaaggucg

SEQ ID NO: 14164 - RNA, 19 nt, Artificial Sequence
  Description of Artificial Sequence: Synthetic oligonucleotide
  Sense strand starting at position 2074 of SEQ ID NO: 138
ugguuaaaguucuuuagaa

SEQ ID NO: 14165 - RNA, 19 nt, Artificial Sequence
  Description of Artificial Sequence: Synthetic oligonucleotide
  Antisense strand to SEQ ID NO: 14164
uucuaaagaacuuuaacca

SEQ ID NO: 14166 - RNA, 19 nt, Artificial Sequence
  Description of Artificial Sequence: Synthetic oligonucleotide
  Sense strand starting at position 2075 of SEQ ID NO: 138
gguuaaaguucuuuagaac

SEQ ID NO: 14167 - RNA, 19 nt, Artificial Sequence
  Description of Artificial Sequence: Synthetic oligonucleotide
  Antisense strand to SEQ ID NO: 14166
guucuaaagaacuuuaacc

SEQ ID NO: 14168 - RNA, 19 nt, Artificial Sequence
  Description of Artificial Sequence: Synthetic oligonucleotide
  Sense strand starting at position 2109 of SEQ ID NO: 138
uccuauuggucccuggaua

SEQ ID NO: 14169 - RNA, 19 nt, Artificial Sequence
  Description of Artificial Sequence: Synthetic oligonucleotide
  Antisense strand to SEQ ID NO: 14168
uauccagggaccaauagga

SEQ ID NO: 14170 - RNA, 19 nt, Artificial Sequence
  Description of Artificial Sequence: Synthetic oligonucleotide
  Sense strand starting at position 2110 of SEQ ID NO: 138
ccuauuggucccuggauac

SEQ ID NO: 14171 - RNA, 19 nt, Artificial Sequence
  Description of Artificial Sequence: Synthetic oligonucleotide
  Antisense strand to SEQ ID NO: 14170
guauccagggaccaauagg

SEQ ID NO: 14172 - RNA, 19 nt, Artificial Sequence
  Description of Artificial Sequence: Synthetic oligonucleotide
  Sense strand starting at position 2148 of SEQ ID NO: 138
ccaccaguucuauggaaac

SEQ ID NO: 14173 - RNA, 19 nt, Artificial Sequence
  Description of Artificial Sequence: Synthetic oligonucleotide
  Antisense strand to SEQ ID NO: 14172
guuuccauagaacuggugg

SEQ ID NO: 14174 - RNA, 19 nt, Artificial Sequence
  Description of Artificial Sequence: Synthetic oligonucleotide
  Sense strand starting at position 2178 of SEQ ID NO: 138
ccucaaggcuuucugggaa

SEQ ID NO: 14175 - RNA, 19 nt, Artificial Sequence
  Description of Artificial Sequence: Synthetic oligonucleotide
  Antisense strand to SEQ ID NO: 14174
uucccagaaagccuugagg

SEQ ID NO: 14176 - RNA, 19 nt, Artificial Sequence
  Description of Artificial Sequence: Synthetic oligonucleotide
  Sense strand starting at position 2181 of SEQ ID NO: 138
caaggcuuucugggaaaua

SEQ ID NO: 14177 - RNA, 19 nt, Artificial Sequence
  Description of Artificial Sequence: Synthetic oligonucleotide
  Antisense strand to SEQ ID NO: 14176
uauuucccagaaagccuug

SEQ ID NO: 14178 - RNA, 19 nt, Artificial Sequence
  Description of Artificial Sequence: Synthetic oligonucleotide
  Sense strand starting at position 2674 of SEQ ID NO: 138
ccggauuguguaugaauuu

SEQ ID NO: 14179 - RNA, 19 nt, Artificial Sequence
  Description of Artificial Sequence: Synthetic oligonucleotide
  Antisense strand to SEQ ID NO: 14178
aaauucauacacaauccgg

SEQ ID NO: 14180 - RNA, 19 nt, Artificial Sequence
  Description of Artificial Sequence: Synthetic oligonucleotide
  Sense strand starting at position 2859 of SEQ ID NO: 138
cggccucgaagugauugaa

SEQ ID NO: 14181 - RNA, 19 nt, Artificial Sequence
  Description of Artificial Sequence: Synthetic oligonucleotide
  Antisense strand to SEQ ID NO: 14180
uucaaucacuucgaggccg

SEQ ID NO: 14182 - RNA, 19 nt, Artificial Sequence
  Description of Artificial Sequence: Synthetic oligonucleotide
  Sense strand starting at position 2862 of SEQ ID NO: 138
ccucgaagugauugaaauu

SEQ ID NO: 14183 - RNA, 19 nt, Artificial Sequence
  Description of Artificial Sequence: Synthetic oligonucleotide
  Antisense strand to SEQ ID NO: 14182
aauuucaaucacuucgagg

SEQ ID NO: 14184 - RNA, 19 nt, Artificial Sequence
  Description of Artificial Sequence: Synthetic oligonucleotide
  Sense strand starting at position 2863 of SEQ ID NO: 138
cucgaagugauugaaauuc

SEQ ID NO: 14185 - RNA, 19 nt, Artificial Sequence
  Description of Artificial Sequence: Synthetic oligonucleotide
  Antisense strand to SEQ ID NO: 14184
gaauuucaaucacuucgag

SEQ ID NO: 14186 - RNA, 19 nt, Artificial Sequence
  Description of Artificial Sequence: Synthetic oligonucleotide
  Sense strand starting at position 2917 of SEQ ID NO: 138
gucuuucucccggaguaug

SEQ ID NO: 14187 - RNA, 19 nt, Artificial Sequence
  Description of Artificial Sequence: Synthetic oligonucleotide
  Antisense strand to SEQ ID NO: 14186
cauacuccgggagaaagac

SEQ ID NO: 14188 - RNA, 19 nt, Artificial Sequence
  Description of Artificial Sequence: Synthetic oligonucleotide
  Sense strand starting at position 2920 of SEQ ID NO: 138
uuucucccggaguaugaau

SEQ ID NO: 14189 - RNA, 19 nt, Artificial Sequence
  Description of Artificial Sequence: Synthetic oligonucleotide
  Antisense strand to SEQ ID NO: 14188
auucauacuccgggagaaa

SEQ ID NO: 14190 - RNA, 19 nt, Artificial Sequence
  Description of Artificial Sequence: Synthetic oligonucleotide
  Sense strand starting at position 3031 of SEQ ID NO: 138
acuucuuagacgcaagguu

SEQ ID NO: 14191 - RNA, 19 nt, Artificial Sequence
  Description of Artificial Sequence: Synthetic oligonucleotide
  Antisense strand to SEQ ID NO: 14190
aaccuugcgucuaagaagu

SEQ ID NO: 14192 - RNA, 19 nt, Artificial Sequence
  Description of Artificial Sequence: Synthetic oligonucleotide
  Sense strand starting at position 3065 of SEQ ID NO: 138
aucgucuaacgcguuagaa

SEQ ID NO: 14193 - RNA, 19 nt, Artificial Sequence
  Description of Artificial Sequence: Synthetic oligonucleotide
  Antisense strand to SEQ ID NO: 14192
uucuaacgcguuagacgau

SEQ ID NO: 14194 - RNA, 19 nt, Artificial Sequence
  Description of Artificial Sequence: Synthetic oligonucleotide
  Sense strand starting at position 3066 of SEQ ID NO: 138
ucgucuaacgcguuagaag

SEQ ID NO: 14195 - RNA, 19 nt, Artificial Sequence
  Description of Artificial Sequence: Synthetic oligonucleotide
  Antisense strand to SEQ ID NO: 14194
cuucuaacgcguuagacga

SEQ ID NO: 14196 - RNA, 19 nt, Artificial Sequence
  Description of Artificial Sequence: Synthetic oligonucleotide
  Sense strand starting at position 3216 of SEQ ID NO: 138
aggagaguuccacggugau

SEQ ID NO: 14197 - RNA, 19 nt, Artificial Sequence
  Description of Artificial Sequence: Synthetic oligonucleotide
  Antisense strand to SEQ ID NO: 14196
aucaccguggaacucuccu

SEQ ID NO: 14198 - RNA, 19 nt, Artificial Sequence
  Description of Artificial Sequence: Synthetic oligonucleotide
  Sense strand starting at position 3275 of SEQ ID NO: 138
aaggguuucugagcaagug

SEQ ID NO: 14199 - RNA, 19 nt, Artificial Sequence
  Description of Artificial Sequence: Synthetic oligonucleotide
  Antisense strand to SEQ ID NO: 14198
cacuugcucagaaacccuu

SEQ ID NO: 14200 - RNA, 19 nt, Artificial Sequence
  Description of Artificial Sequence: Synthetic oligonucleotide
  Sense strand starting at position 3276 of SEQ ID NO: 138
aggguuucugagcaaguga

SEQ ID NO: 14201 - RNA, 19 nt, Artificial Sequence
  Description of Artificial Sequence: Synthetic oligonucleotide
  Antisense strand to SEQ ID NO: 14200
ucacuugcucagaaacccu

SEQ ID NO: 14202 - RNA, 19 nt, Artificial Sequence
  Description of Artificial Sequence: Synthetic oligonucleotide
  Sense strand starting at position 3317 of SEQ ID NO: 138
gcuagcaggaguuaacuaa

SEQ ID NO: 14203 - RNA, 19 nt, Artificial Sequence
  Description of Artificial Sequence: Synthetic oligonucleotide
  Antisense strand to SEQ ID NO: 14202
uuaguuaacuccugcuagc

SEQ ID NO: 14204 - RNA, 19 nt, Artificial Sequence
  Description of Artificial Sequence: Synthetic oligonucleotide
  Sense strand starting at position 3468 of SEQ ID NO: 138
aggcuuuguaaaggaguuu

SEQ ID NO: 14205 - RNA, 19 nt, Artificial Sequence
  Description of Artificial Sequence: Synthetic oligonucleotide
  Antisense strand to SEQ ID NO: 14204
aaacuccuuuacaaagccu

SEQ ID NO: 14206 - RNA, 19 nt, Artificial Sequence
  Description of Artificial Sequence: Synthetic oligonucleotide
  Sense strand starting at position 3495 of SEQ ID NO: 138
uccuaauagcaaugggaua

SEQ ID NO: 14207 - RNA, 19 nt, Artificial Sequence
  Description of Artificial Sequence: Synthetic oligonucleotide
  Antisense strand to SEQ ID NO: 14206
uaucccauugcuauuagga

SEQ ID NO: 14208 - RNA, 19 nt, Artificial Sequence
  Description of Artificial Sequence: Synthetic oligonucleotide
  Sense strand starting at position 3549 of SEQ ID NO: 138
cuccgauuggaaugucauc

SEQ ID NO: 14209 - RNA, 19 nt, Artificial Sequence
  Description of Artificial Sequence: Synthetic oligonucleotide
  Antisense strand to SEQ ID NO: 14208
gaugacauuccaaucggag

SEQ ID NO: 14210 - RNA, 19 nt, Artificial Sequence
  Description of Artificial Sequence: Synthetic oligonucleotide
  Sense strand starting at position 3558 of SEQ ID NO: 138
gaaugucaucccuggcuga

SEQ ID NO: 14211 - RNA, 19 nt, Artificial Sequence
  Description of Artificial Sequence: Synthetic oligonucleotide
  Antisense strand to SEQ ID NO: 14210
ucagccagggaugacauuc

SEQ ID NO: 14212 - RNA, 19 nt, Artificial Sequence
  Description of Artificial Sequence: Synthetic oligonucleotide
  Sense strand starting at position 3559 of SEQ ID NO: 138
aaugucaucccuggcugaa

SEQ ID NO: 14213 - RNA, 19 nt, Artificial Sequence
  Description of Artificial Sequence: Synthetic oligonucleotide
  Antisense strand to SEQ ID NO: 14212
uucagccagggaugacauu

SEQ ID NO: 14214 - RNA, 19 nt, Artificial Sequence
  Description of Artificial Sequence: Synthetic oligonucleotide
  Sense strand starting at position 3671 of SEQ ID NO: 138
aauggagcguuuguauuaa

SEQ ID NO: 14215 - RNA, 19 nt, Artificial Sequence
  Description of Artificial Sequence: Synthetic oligonucleotide
  Antisense strand to SEQ ID NO: 14214
uuaauacaaacgcuccauu

SEQ ID NO: 14216 - RNA, 19 nt, Artificial Sequence
  Description of Artificial Sequence: Synthetic oligonucleotide
  Sense strand starting at position 3753 of SEQ ID NO: 138
ucagacucucacugaggua

SEQ ID NO: 14217 - RNA, 19 nt, Artificial Sequence
  Description of Artificial Sequence: Synthetic oligonucleotide
  Antisense strand to SEQ ID NO: 14216
uaccucagugagagucuga

SEQ ID NO: 14218 - RNA, 19 nt, Artificial Sequence
  Description of Artificial Sequence: Synthetic oligonucleotide
  Sense strand starting at position 3843 of SEQ ID NO: 138
uaacuuuaguaugugauag

SEQ ID NO: 14219 - RNA, 19 nt, Artificial Sequence
  Description of Artificial Sequence: Synthetic oligonucleotide
  Antisense strand to SEQ ID NO: 14218
cuaucacauacuaaaguua

SEQ ID NO: 14220 - RNA, 19 nt, Artificial Sequence
  Description of Artificial Sequence: Synthetic oligonucleotide
  Sense strand starting at position 3851 of SEQ ID NO: 138
guaugugauagcugaaauu

SEQ ID NO: 14221 - RNA, 19 nt, Artificial Sequence
  Description of Artificial Sequence: Synthetic oligonucleotide
  Antisense strand to SEQ ID NO: 14220
aauuucagcuaucacauac

SEQ ID NO: 14222 - RNA, 19 nt, Artificial Sequence
  Description of Artificial Sequence: Synthetic oligonucleotide
  Sense strand starting at position 3867 of SEQ ID NO: 138
auuuccagcugugauaaau

SEQ ID NO: 14223 - RNA, 19 nt, Artificial Sequence
  Description of Artificial Sequence: Synthetic oligonucleotide
  Antisense strand to SEQ ID NO: 14222
auuuaucacagcuggaaau

SEQ ID NO: 14224 - RNA, 19 nt, Artificial Sequence
  Description of Artificial Sequence: Synthetic oligonucleotide
  Sense strand starting at position 3887 of SEQ ID NO: 138
gggaaauccuuugauuuaa

SEQ ID NO: 14225 - RNA, 19 nt, Artificial Sequence
  Description of Artificial Sequence: Synthetic oligonucleotide
  Antisense strand to SEQ ID NO: 14224
uuaaaucaaaggauuuccc

SEQ ID NO: 14226 - RNA, 19 nt, Artificial Sequence
  Description of Artificial Sequence: Synthetic oligonucleotide
  Sense strand starting at position 3935 of SEQ ID NO: 138
guauaugccacggugugua

SEQ ID NO: 14227 - RNA, 19 nt, Artificial Sequence
  Description of Artificial Sequence: Synthetic oligonucleotide
  Antisense strand to SEQ ID NO: 14226
uacacaccguggcauauac

SEQ ID NO: 14228 - RNA, 19 nt, Artificial Sequence
  Description of Artificial Sequence: Synthetic oligonucleotide
  Sense strand starting at position 3948 of SEQ ID NO: 138
uguguagaauccuuuagac

SEQ ID NO: 14229 - RNA, 19 nt, Artificial Sequence
  Description of Artificial Sequence: Synthetic oligonucleotide
  Antisense strand to SEQ ID NO: 14228
gucuaaaggauucuacaca

SEQ ID NO: 14230 - RNA, 19 nt, Artificial Sequence
  Description of Artificial Sequence: Synthetic oligonucleotide
  Sense strand starting at position 3950 of SEQ ID NO: 138
uguagaauccuuuagacuc

SEQ ID NO: 14231 - RNA, 19 nt, Artificial Sequence
  Description of Artificial Sequence: Synthetic oligonucleotide
  Antisense strand to SEQ ID NO: 14230
gagucuaaaggauucuaca

SEQ ID NO: 14232 - RNA, 19 nt, Artificial Sequence
  Description of Artificial Sequence: Synthetic oligonucleotide
  Sense strand starting at position 3961 of SEQ ID NO: 138
uuagacucuuaagaagaca

SEQ ID NO: 14233 - RNA, 19 nt, Artificial Sequence
  Description of Artificial Sequence: Synthetic oligonucleotide
  Antisense strand to SEQ ID NO: 14232
ugucuucuuaagagucuaa

SEQ ID NO: 14234 - RNA, 19 nt, Artificial Sequence
  Description of Artificial Sequence: Synthetic oligonucleotide
  Sense strand starting at position 2 of SEQ ID NO: 139
uggauaugaugcuggucua

SEQ ID NO: 14235 - RNA, 19 nt, Artificial Sequence
  Description of Artificial Sequence: Synthetic oligonucleotide
  Antisense strand to SEQ ID NO: 14234
uagaccagcaucauaucca

SEQ ID NO: 14236 - RNA, 19 nt, Artificial Sequence
  Description of Artificial Sequence: Synthetic oligonucleotide
  Sense strand starting at position 3 of SEQ ID NO: 139
ggauaugaugcuggucuag

SEQ ID NO: 14237 - RNA, 19 nt, Artificial Sequence
  Description of Artificial Sequence: Synthetic oligonucleotide
  Antisense strand to SEQ ID NO: 14236
cuagaccagcaucauaucc

SEQ ID NO: 14238 - RNA, 19 nt, Artificial Sequence
  Description of Artificial Sequence: Synthetic oligonucleotide
  Sense strand starting at position 5 of SEQ ID NO: 139
auaugaugcuggucuagag

SEQ ID NO: 14239 - RNA, 19 nt, Artificial Sequence
  Description of Artificial Sequence: Synthetic oligonucleotide
  Antisense strand to SEQ ID NO: 14238
cucuagaccagcaucauau

SEQ ID NO: 14240 - RNA, 19 nt, Artificial Sequence
  Description of Artificial Sequence: Synthetic oligonucleotide
  Sense strand starting at position 204 of SEQ ID NO: 139
aggucagaguccagguguu

SEQ ID NO: 14241 - RNA, 19 nt, Artificial Sequence
  Description of Artificial Sequence: Synthetic oligonucleotide
  Antisense strand to SEQ ID NO: 14240
aacaccuggacucugaccu

SEQ ID NO: 14242 - RNA, 19 nt, Artificial Sequence
  Description of Artificial Sequence: Synthetic oligonucleotide
  Sense strand starting at position 223 of SEQ ID NO: 139
augugccugcucugggaau

SEQ ID NO: 14243 - RNA, 19 nt, Artificial Sequence
  Description of Artificial Sequence: Synthetic oligonucleotide
  Antisense strand to SEQ ID NO: 14242
auucccagagcaggcacau

SEQ ID NO: 14244 - RNA, 19 nt, Artificial Sequence
  Description of Artificial Sequence: Synthetic oligonucleotide
  Sense strand starting at position 250 of SEQ ID NO: 139
cuaagucaaugccaaguuu

SEQ ID NO: 14245 - RNA, 19 nt, Artificial Sequence
  Description of Artificial Sequence: Synthetic oligonucleotide
  Antisense strand to SEQ ID NO: 14244
aaacuuggcauugacuuag

SEQ ID NO: 14246 - RNA, 19 nt, Artificial Sequence
  Description of Artificial Sequence: Synthetic oligonucleotide
  Sense strand starting at position 354 of SEQ ID NO: 139
gcagcauuggccugaagau

SEQ ID NO: 14247 - RNA, 19 nt, Artificial Sequence
  Description of Artificial Sequence: Synthetic oligonucleotide
  Antisense strand to SEQ ID NO: 14246
aucuucaggccaaugcugc

SEQ ID NO: 14248 - RNA, 19 nt, Artificial Sequence
  Description of Artificial Sequence: Synthetic oligonucleotide
  Sense strand starting at position 355 of SEQ ID NO: 139
cagcauuggccugaagauc

SEQ ID NO: 14249 - RNA, 19 nt, Artificial Sequence
  Description of Artificial Sequence: Synthetic oligonucleotide
  Antisense strand to SEQ ID NO: 14248
gaucuucaggccaaugcug

SEQ ID NO: 14250 - RNA, 19 nt, Artificial Sequence
  Description of Artificial Sequence: Synthetic oligonucleotide
  Sense strand starting at position 366 of SEQ ID NO: 139
ugaagauccugcccuguca

SEQ ID NO: 14251 - RNA, 19 nt, Artificial Sequence
  Description of Artificial Sequence: Synthetic oligonucleotide
  Antisense strand to SEQ ID NO: 14250
ugacagggcaggaucuuca

SEQ ID NO: 14252 - RNA, 19 nt, Artificial Sequence
  Description of Artificial Sequence: Synthetic oligonucleotide
  Sense strand starting at position 398 of SEQ ID NO: 139
gagacacugggucgagaaa

SEQ ID NO: 14253 - RNA, 19 nt, Artificial Sequence
  Description of Artificial Sequence: Synthetic oligonucleotide
  Antisense strand to SEQ ID NO: 14252
uuucucgacccagugucuc

SEQ ID NO: 14254 - RNA, 19 nt, Artificial Sequence
  Description of Artificial Sequence: Synthetic oligonucleotide
  Sense strand starting at position 650 of SEQ ID NO: 139
ugaccuaucucaucaguau

SEQ ID NO: 14255 - RNA, 19 nt, Artificial Sequence
  Description of Artificial Sequence: Synthetic oligonucleotide
  Antisense strand to SEQ ID NO: 14254
auacugaugagauagguca

SEQ ID NO: 14256 - RNA, 19 nt, Artificial Sequence
  Description of Artificial Sequence: Synthetic oligonucleotide
  Sense strand starting at position 659 of SEQ ID NO: 139
ucaucaguaucuuugguua

SEQ ID NO: 14257 - RNA, 19 nt, Artificial Sequence
  Description of Artificial Sequence: Synthetic oligonucleotide
  Antisense strand to SEQ ID NO: 14256
uaaccaaagauacugauga

SEQ ID NO: 14258 - RNA, 19 nt, Artificial Sequence
  Description of Artificial Sequence: Synthetic oligonucleotide
  Sense strand starting at position 661 of SEQ ID NO: 139
aucaguaucuuugguuacu

SEQ ID NO: 14259 - RNA, 19 nt, Artificial Sequence
  Description of Artificial Sequence: Synthetic oligonucleotide
  Antisense strand to SEQ ID NO: 14258
aguaaccaaagauacugau

SEQ ID NO: 14260 - RNA, 19 nt, Artificial Sequence
  Description of Artificial Sequence: Synthetic oligonucleotide
  Sense strand starting at position 662 of SEQ ID NO: 139
ucaguaucuuugguuacua

SEQ ID NO: 14261 - RNA, 19 nt, Artificial Sequence
  Description of Artificial Sequence: Synthetic oligonucleotide
  Antisense strand to SEQ ID NO: 14260
uaguaaccaaagauacuga

SEQ ID NO: 14262 - RNA, 19 nt, Artificial Sequence
  Description of Artificial Sequence: Synthetic oligonucleotide
  Sense strand starting at position 688 of SEQ ID NO: 139
aacucacaguugugggaaa

SEQ ID NO: 14263 - RNA, 19 nt, Artificial Sequence
  Description of Artificial Sequence: Synthetic oligonucleotide
  Antisense strand to SEQ ID NO: 14262
uuucccacaacugugaguu

SEQ ID NO: 14264 - RNA, 19 nt, Artificial Sequence
  Description of Artificial Sequence: Synthetic oligonucleotide
  Sense strand starting at position 1121 of SEQ ID NO: 139
gggaggagucugggcuuga

SEQ ID NO: 14265 - RNA, 19 nt, Artificial Sequence
  Description of Artificial Sequence: Synthetic oligonucleotide
  Antisense strand to SEQ ID NO: 14264
ucaagcccagacuccuccc

SEQ ID NO: 14266 - RNA, 19 nt, Artificial Sequence
  Description of Artificial Sequence: Synthetic oligonucleotide
  Sense strand starting at position 1122 of SEQ ID NO: 139
ggaggagucugggcuugag

SEQ ID NO: 14267 - RNA, 19 nt, Artificial Sequence
  Description of Artificial Sequence: Synthetic oligonucleotide
  Antisense strand to SEQ ID NO: 14266
cucaagcccagacuccucc

SEQ ID NO: 14268 - RNA, 19 nt, Artificial Sequence
  Description of Artificial Sequence: Synthetic oligonucleotide
  Sense strand starting at position 1706 of SEQ ID NO: 139
ccgcgaucacguugacgaa

SEQ ID NO: 14269 - RNA, 19 nt, Artificial Sequence
  Description of Artificial Sequence: Synthetic oligonucleotide
  Antisense strand to SEQ ID NO: 14268
uucgucaacgugaucgcgg

SEQ ID NO: 14270 - RNA, 19 nt, Artificial Sequence
  Description of Artificial Sequence: Synthetic oligonucleotide
  Sense strand starting at position 1811 of SEQ ID NO: 139
uguugaacaaagcgaucau

SEQ ID NO: 14271 - RNA, 19 nt, Artificial Sequence
  Description of Artificial Sequence: Synthetic oligonucleotide
  Antisense strand to SEQ ID NO: 14270
augaucgcuuuguucaaca

SEQ ID NO: 14272 - RNA, 19 nt, Artificial Sequence
  Description of Artificial Sequence: Synthetic oligonucleotide
  Sense strand starting at position 2213 of SEQ ID NO: 139
ucgagaggcgcuugggaaa

SEQ ID NO: 14273 - RNA, 19 nt, Artificial Sequence
  Description of Artificial Sequence: Synthetic oligonucleotide
  Antisense strand to SEQ ID NO: 14272
uuucccaagcgccucucga

SEQ ID NO: 14274 - RNA, 19 nt, Artificial Sequence
  Description of Artificial Sequence: Synthetic oligonucleotide
  Sense strand starting at position 2439 of SEQ ID NO: 139
acccuugccucugagcauu

SEQ ID NO: 14275 - RNA, 19 nt, Artificial Sequence
  Description of Artificial Sequence: Synthetic oligonucleotide
  Antisense strand to SEQ ID NO: 14274
aaugcucagaggcaagggu

SEQ ID NO: 14276 - RNA, 19 nt, Artificial Sequence
  Description of Artificial Sequence: Synthetic oligonucleotide
  Sense strand starting at position 2447 of SEQ ID NO: 139
cucugagcauuccugggua

SEQ ID NO: 14277 - RNA, 19 nt, Artificial Sequence
  Description of Artificial Sequence: Synthetic oligonucleotide
  Antisense strand to SEQ ID NO: 14276
uacccaggaaugcucagag

SEQ ID NO: 14278 - RNA, 19 nt, Artificial Sequence
  Description of Artificial Sequence: Synthetic oligonucleotide
  Sense strand starting at position 2449 of SEQ ID NO: 139
cugagcauuccuggguaca

SEQ ID NO: 14279 - RNA, 19 nt, Artificial Sequence
  Description of Artificial Sequence: Synthetic oligonucleotide
  Antisense strand to SEQ ID NO: 14278
uguacccaggaaugcucag

SEQ ID NO: 14280 - RNA, 19 nt, Artificial Sequence
  Description of Artificial Sequence: Synthetic oligonucleotide
  Sense strand starting at position 2450 of SEQ ID NO: 139
ugagcauuccuggguacag

SEQ ID NO: 14281 - RNA, 19 nt, Artificial Sequence
  Description of Artificial Sequence: Synthetic oligonucleotide
  Antisense strand to SEQ ID NO: 14280
cuguacccaggaaugcuca

SEQ ID NO: 14282 - RNA, 19 nt, Artificial Sequence
  Description of Artificial Sequence: Synthetic oligonucleotide
  Sense strand starting at position 2451 of SEQ ID NO: 139
gagcauuccuggguacagu

SEQ ID NO: 14283 - RNA, 19 nt, Artificial Sequence
  Description of Artificial Sequence: Synthetic oligonucleotide
  Antisense strand to SEQ ID NO: 14282
acuguacccaggaaugcuc

SEQ ID NO: 14284 - RNA, 19 nt, Artificial Sequence
  Description of Artificial Sequence: Synthetic oligonucleotide
  Sense strand starting at position 2602 of SEQ ID NO: 139
gcuugaacuugcuccggau

SEQ ID NO: 14285 - RNA, 19 nt, Artificial Sequence
  Description of Artificial Sequence: Synthetic oligonucleotide
  Antisense strand to SEQ ID NO: 14284
auccggagcaaguucaagc

SEQ ID NO: 14286 - RNA, 19 nt, Artificial Sequence
  Description of Artificial Sequence: Synthetic oligonucleotide
  Sense strand starting at position 2678 of SEQ ID NO: 139
ugaggaacgucugugacaa

SEQ ID NO: 14287 - RNA, 19 nt, Artificial Sequence
  Description of Artificial Sequence: Synthetic oligonucleotide
  Antisense strand to SEQ ID NO: 14286
uugucacagacguuccuca

SEQ ID NO: 14288 - RNA, 19 nt, Artificial Sequence
  Description of Artificial Sequence: Synthetic oligonucleotide
  Sense strand starting at position 2679 of SEQ ID NO: 139
gaggaacgucugugacaaa

SEQ ID NO: 14289 - RNA, 19 nt, Artificial Sequence
  Description of Artificial Sequence: Synthetic oligonucleotide
  Antisense strand to SEQ ID NO: 14288
uuugucacagacguuccuc

SEQ ID NO: 14290 - RNA, 19 nt, Artificial Sequence
  Description of Artificial Sequence: Synthetic oligonucleotide
  Sense strand starting at position 2682 of SEQ ID NO: 139
gaacgucugugacaaagga

SEQ ID NO: 14291 - RNA, 19 nt, Artificial Sequence
  Description of Artificial Sequence: Synthetic oligonucleotide
  Antisense strand to SEQ ID NO: 14290
uccuuugucacagacguuc

SEQ ID NO: 14292 - RNA, 19 nt, Artificial Sequence
  Description of Artificial Sequence: Synthetic oligonucleotide
  Sense strand starting at position 2944 of SEQ ID NO: 139
agucauauguagucuauug

SEQ ID NO: 14293 - RNA, 19 nt, Artificial Sequence
  Description of Artificial Sequence: Synthetic oligonucleotide
  Antisense strand to SEQ ID NO: 14292
caauagacuacauaugacu

SEQ ID NO: 14294 - RNA, 19 nt, Artificial Sequence
  Description of Artificial Sequence: Synthetic oligonucleotide
  Sense strand starting at position 2946 of SEQ ID NO: 139
ucauauguagucuauuguu

SEQ ID NO: 14295 - RNA, 19 nt, Artificial Sequence
  Description of Artificial Sequence: Synthetic oligonucleotide
  Antisense strand to SEQ ID NO: 14294
aacaauagacuacauauga

SEQ ID NO: 14296 - RNA, 19 nt, Artificial Sequence
  Description of Artificial Sequence: Synthetic oligonucleotide
  Sense strand starting at position 2976 of SEQ ID NO: 139
uggguaaacuaucaauauc

SEQ ID NO: 14297 - RNA, 19 nt, Artificial Sequence
  Description of Artificial Sequence: Synthetic oligonucleotide
  Antisense strand to SEQ ID NO: 14296
gauauugauaguuuaccca

SEQ ID NO: 14298 - RNA, 19 nt, Artificial Sequence
  Description of Artificial Sequence: Synthetic oligonucleotide
  Sense strand starting at position 3055 of SEQ ID NO: 139
guagaagaaucacaagguu

SEQ ID NO: 14299 - RNA, 19 nt, Artificial Sequence
  Description of Artificial Sequence: Synthetic oligonucleotide
  Antisense strand to SEQ ID NO: 14298
aaccuugugauucuucuac

SEQ ID NO: 14300 - RNA, 19 nt, Artificial Sequence
  Description of Artificial Sequence: Synthetic oligonucleotide
  Sense strand starting at position 3067 of SEQ ID NO: 139
caagguuucggcuagcaua

SEQ ID NO: 14301 - RNA, 19 nt, Artificial Sequence
  Description of Artificial Sequence: Synthetic oligonucleotide
  Antisense strand to SEQ ID NO: 14300
uaugcuagccgaaaccuug

SEQ ID NO: 14302 - RNA, 19 nt, Artificial Sequence
  Description of Artificial Sequence: Synthetic oligonucleotide
  Sense strand starting at position 3378 of SEQ ID NO: 139
ggccaauauucugguuuau

SEQ ID NO: 14303 - RNA, 19 nt, Artificial Sequence
  Description of Artificial Sequence: Synthetic oligonucleotide
  Antisense strand to SEQ ID NO: 14302
auaaaccagaauauuggcc

SEQ ID NO: 14304 - RNA, 19 nt, Artificial Sequence
  Description of Artificial Sequence: Synthetic oligonucleotide
  Sense strand starting at position 3455 of SEQ ID NO: 139
aggcuauggacugaauguu

SEQ ID NO: 14305 - RNA, 19 nt, Artificial Sequence
  Description of Artificial Sequence: Synthetic oligonucleotide
  Antisense strand to SEQ ID NO: 14304
aacauucaguccauagccu

SEQ ID NO: 14306 - RNA, 19 nt, Artificial Sequence
  Description of Artificial Sequence: Synthetic oligonucleotide
  Sense strand starting at position 3500 of SEQ ID NO: 139
aguccuaaucccuaaagug

SEQ ID NO: 14307 - RNA, 19 nt, Artificial Sequence
  Description of Artificial Sequence: Synthetic oligonucleotide
  Antisense strand to SEQ ID NO: 14306
cacuuuagggauuaggacu

SEQ ID NO: 14308 - RNA, 19 nt, Artificial Sequence
  Description of Artificial Sequence: Synthetic oligonucleotide
  Sense strand starting at position 3521 of SEQ ID NO: 139
gguauuaggaggugauuaa

SEQ ID NO: 14309 - RNA, 19 nt, Artificial Sequence
  Description of Artificial Sequence: Synthetic oligonucleotide
  Antisense strand to SEQ ID NO: 14308
uuaaucaccuccuaauacc

SEQ ID NO: 14310 - RNA, 19 nt, Artificial Sequence
  Description of Artificial Sequence: Synthetic oligonucleotide
  Sense strand starting at position 3625 of SEQ ID NO: 139
gaaagaaggcucugccuaa

SEQ ID NO: 14311 - RNA, 19 nt, Artificial Sequence
  Description of Artificial Sequence: Synthetic oligonucleotide
  Antisense strand to SEQ ID NO: 14310
uuaggcagagccuucuuuc

SEQ ID NO: 14312 - RNA, 19 nt, Artificial Sequence
  Description of Artificial Sequence: Synthetic oligonucleotide
  Sense strand starting at position 3666 of SEQ ID NO: 139
gggucuugauccuagacuu

SEQ ID NO: 14313 - RNA, 19 nt, Artificial Sequence
  Description of Artificial Sequence: Synthetic oligonucleotide
  Antisense strand to SEQ ID NO: 14312
aagucuaggaucaagaccc

SEQ ID NO: 14314 - RNA, 19 nt, Artificial Sequence
  Description of Artificial Sequence: Synthetic oligonucleotide
  Sense strand starting at position 114 of SEQ ID NO: 140
agcugauauugaucagcuu

SEQ ID NO: 14315 - RNA, 19 nt, Artificial Sequence
  Description of Artificial Sequence: Synthetic oligonucleotide
  Antisense strand to SEQ ID NO: 14314
aagcugaucaauaucagcu

SEQ ID NO: 14316 - RNA, 19 nt, Artificial Sequence
  Description of Artificial Sequence: Synthetic oligonucleotide
  Sense strand starting at position 115 of SEQ ID NO: 140
gcugauauugaucagcuua

SEQ ID NO: 14317 - RNA, 19 nt, Artificial Sequence
  Description of Artificial Sequence: Synthetic oligonucleotide
  Antisense strand to SEQ ID NO: 14316
uaagcugaucaauaucagc

SEQ ID NO: 14318 - RNA, 19 nt, Artificial Sequence
  Description of Artificial Sequence: Synthetic oligonucleotide
  Sense strand starting at position 117 of SEQ ID NO: 140
ugauauugaucagcuuaug

SEQ ID NO: 14319 - RNA, 19 nt, Artificial Sequence
  Description of Artificial Sequence: Synthetic oligonucleotide
  Antisense strand to SEQ ID NO: 14318
cauaagcugaucaauauca

SEQ ID NO: 14320 - RNA, 19 nt, Artificial Sequence
  Description of Artificial Sequence: Synthetic oligonucleotide
  Sense strand starting at position 142 of SEQ ID NO: 140
uggucaagaggcugucauu

SEQ ID NO: 14321 - RNA, 19 nt, Artificial Sequence
  Description of Artificial Sequence: Synthetic oligonucleotide
  Antisense strand to SEQ ID NO: 14320
aaugacagccucuugacca

SEQ ID NO: 14322 - RNA, 19 nt, Artificial Sequence
  Description of Artificial Sequence: Synthetic oligonucleotide
  Sense strand starting at position 274 of SEQ ID NO: 140
agagaaaugcuuugcaauu

SEQ ID NO: 14323 - RNA, 19 nt, Artificial Sequence
  Description of Artificial Sequence: Synthetic oligonucleotide
  Antisense strand to SEQ ID NO: 14322
aauugcaaagcauuucucu

SEQ ID NO: 14324 - RNA, 19 nt, Artificial Sequence
  Description of Artificial Sequence: Synthetic oligonucleotide
  Sense strand starting at position 371 of SEQ ID NO: 140
guuauauuacuacaagguc

SEQ ID NO: 14325 - RNA, 19 nt, Artificial Sequence
  Description of Artificial Sequence: Synthetic oligonucleotide
  Antisense strand to SEQ ID NO: 14324
gaccuuguaguaauauaac

SEQ ID NO: 14326 - RNA, 19 nt, Artificial Sequence
  Description of Artificial Sequence: Synthetic oligonucleotide
  Sense strand starting at position 383 of SEQ ID NO: 140
caaggucagguuugacaua

SEQ ID NO: 14327 - RNA, 19 nt, Artificial Sequence
  Description of Artificial Sequence: Synthetic oligonucleotide
  Antisense strand to SEQ ID NO: 14326
uaugucaaaccugaccuug

SEQ ID NO: 14328 - RNA, 19 nt, Artificial Sequence
  Description of Artificial Sequence: Synthetic oligonucleotide
  Sense strand starting at position 912 of SEQ ID NO: 140
auuugaagaucugaucucu

SEQ ID NO: 14329 - RNA, 19 nt, Artificial Sequence
  Description of Artificial Sequence: Synthetic oligonucleotide
  Antisense strand to SEQ ID NO: 14328
agagaucagaucuucaaau

SEQ ID NO: 14330 - RNA, 19 nt, Artificial Sequence
  Description of Artificial Sequence: Synthetic oligonucleotide
  Sense strand starting at position 1010 of SEQ ID NO: 140
ugagaaaugguguggaauc

SEQ ID NO: 14331 - RNA, 19 nt, Artificial Sequence
  Description of Artificial Sequence: Synthetic oligonucleotide
  Antisense strand to SEQ ID NO: 14330
gauuccacaccauuucuca

SEQ ID NO: 14332 - RNA, 19 nt, Artificial Sequence
  Description of Artificial Sequence: Synthetic oligonucleotide
  Sense strand starting at position 1049 of SEQ ID NO: 140
ggaaauugccucgacguag

SEQ ID NO: 14333 - RNA, 19 nt, Artificial Sequence
  Description of Artificial Sequence: Synthetic oligonucleotide
  Antisense strand to SEQ ID NO: 14332
cuacgucgaggcaauuucc

SEQ ID NO: 14334 - RNA, 19 nt, Artificial Sequence
  Description of Artificial Sequence: Synthetic oligonucleotide
  Sense strand starting at position 1103 of SEQ ID NO: 140
aagaccuguccggaaccau

SEQ ID NO: 14335 - RNA, 19 nt, Artificial Sequence
  Description of Artificial Sequence: Synthetic oligonucleotide
  Antisense strand to SEQ ID NO: 14334
augguuccggacaggucuu

SEQ ID NO: 14336 - RNA, 19 nt, Artificial Sequence
  Description of Artificial Sequence: Synthetic oligonucleotide
  Sense strand starting at position 1253 of SEQ ID NO: 140
agaaacgucguauauauca

SEQ ID NO: 14337 - RNA, 19 nt, Artificial Sequence
  Description of Artificial Sequence: Synthetic oligonucleotide
  Antisense strand to SEQ ID NO: 14336
ugauauauacgacguuucu

SEQ ID NO: 14338 - RNA, 19 nt, Artificial Sequence
  Description of Artificial Sequence: Synthetic oligonucleotide
  Sense strand starting at position 1353 of SEQ ID NO: 140
ugguccaggguuuaugaau

SEQ ID NO: 14339 - RNA, 19 nt, Artificial Sequence
  Description of Artificial Sequence: Synthetic oligonucleotide
  Antisense strand to SEQ ID NO: 14338
auucauaaacccuggacca

SEQ ID NO: 14340 - RNA, 19 nt, Artificial Sequence
  Description of Artificial Sequence: Synthetic oligonucleotide
  Sense strand starting at position 1578 of SEQ ID NO: 140
uuggguauacucgagucua

SEQ ID NO: 14341 - RNA, 19 nt, Artificial Sequence
  Description of Artificial Sequence: Synthetic oligonucleotide
  Antisense strand to SEQ ID NO: 14340
uagacucgaguauacccaa

SEQ ID NO: 14342 - RNA, 19 nt, Artificial Sequence
  Description of Artificial Sequence: Synthetic oligonucleotide
  Sense strand starting at position 2157 of SEQ ID NO: 140
guaagaggucaaugaccga

SEQ ID NO: 14343 - RNA, 19 nt, Artificial Sequence
  Description of Artificial Sequence: Synthetic oligonucleotide
  Antisense strand to SEQ ID NO: 14342
ucggucauugaccucuuac

SEQ ID NO: 14344 - RNA, 19 nt, Artificial Sequence
  Description of Artificial Sequence: Synthetic oligonucleotide
  Sense strand starting at position 2161 of SEQ ID NO: 140
gaggucaaugaccgaguaa

SEQ ID NO: 14345 - RNA, 19 nt, Artificial Sequence
  Description of Artificial Sequence: Synthetic oligonucleotide
  Antisense strand to SEQ ID NO: 14344
uuacucggucauugaccuc

SEQ ID NO: 14346 - RNA, 19 nt, Artificial Sequence
  Description of Artificial Sequence: Synthetic oligonucleotide
  Sense strand starting at position 2173 of SEQ ID NO: 140
cgaguaacgucauugaaau

SEQ ID NO: 14347 - RNA, 19 nt, Artificial Sequence
  Description of Artificial Sequence: Synthetic oligonucleotide
  Antisense strand to SEQ ID NO: 14346
auuucaaugacguuacucg

SEQ ID NO: 14348 - RNA, 19 nt, Artificial Sequence
  Description of Artificial Sequence: Synthetic oligonucleotide
  Sense strand starting at position 2174 of SEQ ID NO: 140
gaguaacgucauugaaaug

SEQ ID NO: 14349 - RNA, 19 nt, Artificial Sequence
  Description of Artificial Sequence: Synthetic oligonucleotide
  Antisense strand to SEQ ID NO: 14348
cauuucaaugacguuacuc

SEQ ID NO: 14350 - RNA, 19 nt, Artificial Sequence
  Description of Artificial Sequence: Synthetic oligonucleotide
  Sense strand starting at position 2540 of SEQ ID NO: 140
uggauucgucugagugguu

SEQ ID NO: 14351 - RNA, 19 nt, Artificial Sequence
  Description of Artificial Sequence: Synthetic oligonucleotide
  Antisense strand to SEQ ID NO: 14350
aaccacucagacgaaucca

SEQ ID NO: 14352 - RNA, 19 nt, Artificial Sequence
  Description of Artificial Sequence: Synthetic oligonucleotide
  Sense strand starting at position 2550 of SEQ ID NO: 140
ugagugguugccgugcaga

SEQ ID NO: 14353 - RNA, 19 nt, Artificial Sequence
  Description of Artificial Sequence: Synthetic oligonucleotide
  Antisense strand to SEQ ID NO: 14352
ucugcacggcaaccacuca

SEQ ID NO: 14354 - RNA, 19 nt, Artificial Sequence
  Description of Artificial Sequence: Synthetic oligonucleotide
  Sense strand starting at position 2552 of SEQ ID NO: 140
agugguugccgugcagaca

SEQ ID NO: 14355 - RNA, 19 nt, Artificial Sequence
  Description of Artificial Sequence: Synthetic oligonucleotide
  Antisense strand to SEQ ID NO: 14354
ugucugcacggcaaccacu

SEQ ID NO: 14356 - RNA, 19 nt, Artificial Sequence
  Description of Artificial Sequence: Synthetic oligonucleotide
  Sense strand starting at position 2579 of SEQ ID NO: 140
uguaaauccucuuuaggug

SEQ ID NO: 14357 - RNA, 19 nt, Artificial Sequence
  Description of Artificial Sequence: Synthetic oligonucleotide
  Antisense strand to SEQ ID NO: 14356
caccuaaagaggauuuaca

SEQ ID NO: 14358 - RNA, 19 nt, Artificial Sequence
  Description of Artificial Sequence: Synthetic oligonucleotide
  Sense strand starting at position 2619 of SEQ ID NO: 140
cauggugauuuguaauccu

SEQ ID NO: 14359 - RNA, 19 nt, Artificial Sequence
  Description of Artificial Sequence: Synthetic oligonucleotide
  Antisense strand to SEQ ID NO: 14358
aggauuacaaaucaccaug

SEQ ID NO: 14360 - RNA, 19 nt, Artificial Sequence
  Description of Artificial Sequence: Synthetic oligonucleotide
  Sense strand starting at position 2628 of SEQ ID NO: 140
uuguaauccuuuccaguuu

SEQ ID NO: 14361 - RNA, 19 nt, Artificial Sequence
  Description of Artificial Sequence: Synthetic oligonucleotide
  Antisense strand to SEQ ID NO: 14360
aaacuggaaaggauuacaa

SEQ ID NO: 14362 - RNA, 19 nt, Artificial Sequence
  Description of Artificial Sequence: Synthetic oligonucleotide
  Sense strand starting at position 2746 of SEQ ID NO: 140
aacgguuugguaugggaga

SEQ ID NO: 14363 - RNA, 19 nt, Artificial Sequence
  Description of Artificial Sequence: Synthetic oligonucleotide
  Antisense strand to SEQ ID NO: 14362
ucucccauaccaaaccguu

SEQ ID NO: 14364 - RNA, 19 nt, Artificial Sequence
  Description of Artificial Sequence: Synthetic oligonucleotide
  Sense strand starting at position 2748 of SEQ ID NO: 140
cgguuugguaugggagaua

SEQ ID NO: 14365 - RNA, 19 nt, Artificial Sequence
  Description of Artificial Sequence: Synthetic oligonucleotide
  Antisense strand to SEQ ID NO: 14364
uaucucccauaccaaaccg

SEQ ID NO: 14366 - RNA, 19 nt, Artificial Sequence
  Description of Artificial Sequence: Synthetic oligonucleotide
  Sense strand starting at position 2809 of SEQ ID NO: 140
gagaauggguaacuucuuu

SEQ ID NO: 14367 - RNA, 19 nt, Artificial Sequence
  Description of Artificial Sequence: Synthetic oligonucleotide
  Antisense strand to SEQ ID NO: 14366
aaagaaguuacccauucuc

SEQ ID NO: 14368 - RNA, 19 nt, Artificial Sequence
  Description of Artificial Sequence: Synthetic oligonucleotide
  Sense strand starting at position 2814 of SEQ ID NO: 140
uggguaacuucuuugguca

SEQ ID NO: 14369 - RNA, 19 nt, Artificial Sequence
  Description of Artificial Sequence: Synthetic oligonucleotide
  Antisense strand to SEQ ID NO: 14368
ugaccaaagaaguuaccca

SEQ ID NO: 14370 - RNA, 19 nt, Artificial Sequence
  Description of Artificial Sequence: Synthetic oligonucleotide
  Sense strand starting at position 2815 of SEQ ID NO: 140
ggguaacuucuuuggucag

SEQ ID NO: 14371 - RNA, 19 nt, Artificial Sequence
  Description of Artificial Sequence: Synthetic oligonucleotide
  Antisense strand to SEQ ID NO: 14370
cugaccaaagaaguuaccc

SEQ ID NO: 14372 - RNA, 19 nt, Artificial Sequence
  Description of Artificial Sequence: Synthetic oligonucleotide
  Sense strand starting at position 2818 of SEQ ID NO: 140
uaacuucuuuggucaguga

SEQ ID NO: 14373 - RNA, 19 nt, Artificial Sequence
  Description of Artificial Sequence: Synthetic oligonucleotide
  Antisense strand to SEQ ID NO: 14372
ucacugaccaaagaaguua

SEQ ID NO: 14374 - RNA, 19 nt, Artificial Sequence
  Description of Artificial Sequence: Synthetic oligonucleotide
  Sense strand starting at position 3186 of SEQ ID NO: 140
agaugauggcugugcagau

SEQ ID NO: 14375 - RNA, 19 nt, Artificial Sequence
  Description of Artificial Sequence: Synthetic oligonucleotide
  Antisense strand to SEQ ID NO: 14374
aucugcacagccaucaucu

SEQ ID NO: 14376 - RNA, 19 nt, Artificial Sequence
  Description of Artificial Sequence: Synthetic oligonucleotide
  Sense strand starting at position 3187 of SEQ ID NO: 140
gaugauggcugugcagauu

SEQ ID NO: 14377 - RNA, 19 nt, Artificial Sequence
  Description of Artificial Sequence: Synthetic oligonucleotide
  Antisense strand to SEQ ID NO: 14376
aaucugcacagccaucauc

SEQ ID NO: 14378 - RNA, 19 nt, Artificial Sequence
  Description of Artificial Sequence: Synthetic oligonucleotide
  Sense strand starting at position 3398 of SEQ ID NO: 140
auaggaagcauugagcuau

SEQ ID NO: 14379 - RNA, 19 nt, Artificial Sequence
  Description of Artificial Sequence: Synthetic oligonucleotide
  Antisense strand to SEQ ID NO: 14378
auagcucaaugcuuccuau

SEQ ID NO: 14380 - RNA, 19 nt, Artificial Sequence
  Description of Artificial Sequence: Synthetic oligonucleotide
  Sense strand starting at position 3559 of SEQ ID NO: 140
guaaguaaugugggaggca

SEQ ID NO: 14381 - RNA, 19 nt, Artificial Sequence
  Description of Artificial Sequence: Synthetic oligonucleotide
  Antisense strand to SEQ ID NO: 14380
ugccucccacauuacuuac

SEQ ID NO: 14382 - RNA, 19 nt, Artificial Sequence
  Description of Artificial Sequence: Synthetic oligonucleotide
  Sense strand starting at position 3579 of SEQ ID NO: 140
acuaaaggagucugacacu

SEQ ID NO: 14383 - RNA, 19 nt, Artificial Sequence
  Description of Artificial Sequence: Synthetic oligonucleotide
  Antisense strand to SEQ ID NO: 14382
agugucagacuccuuuagu

SEQ ID NO: 14384 - RNA, 19 nt, Artificial Sequence
  Description of Artificial Sequence: Synthetic oligonucleotide
  Sense strand starting at position 3739 of SEQ ID NO: 140
agcuuugcauucuuagaag

SEQ ID NO: 14385 - RNA, 19 nt, Artificial Sequence
  Description of Artificial Sequence: Synthetic oligonucleotide
  Antisense strand to SEQ ID NO: 14384
cuucuaagaaugcaaagcu

SEQ ID NO: 14386 - RNA, 19 nt, Artificial Sequence
  Description of Artificial Sequence: Synthetic oligonucleotide
  Sense strand starting at position 3751 of SEQ ID NO: 140
uuagaaguuguauauguac

SEQ ID NO: 14387 - RNA, 19 nt, Artificial Sequence
  Description of Artificial Sequence: Synthetic oligonucleotide
  Antisense strand to SEQ ID NO: 14386
guacauauacaacuucuaa

SEQ ID NO: 14388 - RNA, 19 nt, Artificial Sequence
  Description of Artificial Sequence: Synthetic oligonucleotide
  Sense strand starting at position 3762 of SEQ ID NO: 140
auauguacugcgcagauua

SEQ ID NO: 14389 - RNA, 19 nt, Artificial Sequence
  Description of Artificial Sequence: Synthetic oligonucleotide
  Antisense strand to SEQ ID NO: 14388
uaaucugcgcaguacauau

SEQ ID NO: 14390 - RNA, 19 nt, Artificial Sequence
  Description of Artificial Sequence: Synthetic oligonucleotide
  Sense strand starting at position 3772 of SEQ ID NO: 140
cgcagauuacauugaucca

SEQ ID NO: 14391 - RNA, 19 nt, Artificial Sequence
  Description of Artificial Sequence: Synthetic oligonucleotide
  Antisense strand to SEQ ID NO: 14390
uggaucaauguaaucugcg

SEQ ID NO: 14392 - RNA, 19 nt, Artificial Sequence
  Description of Artificial Sequence: Synthetic oligonucleotide
  Sense strand starting at position 3795 of SEQ ID NO: 140
uuuaguuuacugcaaaggu

SEQ ID NO: 14393 - RNA, 19 nt, Artificial Sequence
  Description of Artificial Sequence: Synthetic oligonucleotide
  Antisense strand to SEQ ID NO: 14392
accuuugcaguaaacuaaa

SEQ ID NO: 14394 - RNA, 19 nt, Artificial Sequence
  Description of Artificial Sequence: Synthetic oligonucleotide
  Sense strand starting at position 291 of SEQ ID NO: 141
gcaugccugauguagauua

SEQ ID NO: 14395 - RNA, 19 nt, Artificial Sequence
  Description of Artificial Sequence: Synthetic oligonucleotide
  Antisense strand to SEQ ID NO: 14394
uaaucuacaucaggcaugc

SEQ ID NO: 14396 - RNA, 19 nt, Artificial Sequence
  Description of Artificial Sequence: Synthetic oligonucleotide
  Sense strand starting at position 298 of SEQ ID NO: 141
ugauguagauuagcucauu

SEQ ID NO: 14397 - RNA, 19 nt, Artificial Sequence
  Description of Artificial Sequence: Synthetic oligonucleotide
  Antisense strand to SEQ ID NO: 14396
aaugagcuaaucuacauca

SEQ ID NO: 14398 - RNA, 19 nt, Artificial Sequence
  Description of Artificial Sequence: Synthetic oligonucleotide
  Sense strand starting at position 363 of SEQ ID NO: 141
acagcuaauuaauugugaa

SEQ ID NO: 14399 - RNA, 19 nt, Artificial Sequence
  Description of Artificial Sequence: Synthetic oligonucleotide
  Antisense strand to SEQ ID NO: 14398
uucacaauuaauuagcugu

SEQ ID NO: 14400 - RNA, 19 nt, Artificial Sequence
  Description of Artificial Sequence: Synthetic oligonucleotide
  Sense strand starting at position 386 of SEQ ID NO: 141
guggcaaagcacuaucuau

SEQ ID NO: 14401 - RNA, 19 nt, Artificial Sequence
  Description of Artificial Sequence: Synthetic oligonucleotide
  Antisense strand to SEQ ID NO: 14400
auagauagugcuuugccac

SEQ ID NO: 14402 - RNA, 19 nt, Artificial Sequence
  Description of Artificial Sequence: Synthetic oligonucleotide
  Sense strand starting at position 408 of SEQ ID NO: 141
uugauaaaugucuaaugcu

SEQ ID NO: 14403 - RNA, 19 nt, Artificial Sequence
  Description of Artificial Sequence: Synthetic oligonucleotide
  Antisense strand to SEQ ID NO: 14402
agcauuagacauuuaucaa

SEQ ID NO: 14404 - RNA, 19 nt, Artificial Sequence
  Description of Artificial Sequence: Synthetic oligonucleotide
  Sense strand starting at position 448 of SEQ ID NO: 141
aggauauuguugccauuaa

SEQ ID NO: 14405 - RNA, 19 nt, Artificial Sequence
  Description of Artificial Sequence: Synthetic oligonucleotide
  Antisense strand to SEQ ID NO: 14404
uuaauggcaacaauauccu

SEQ ID NO: 14406 - RNA, 19 nt, Artificial Sequence
  Description of Artificial Sequence: Synthetic oligonucleotide
  Sense strand starting at position 508 of SEQ ID NO: 141
uugagagucuuccuuauga

SEQ ID NO: 14407 - RNA, 19 nt, Artificial Sequence
  Description of Artificial Sequence: Synthetic oligonucleotide
  Antisense strand to SEQ ID NO: 14406
ucauaaggaagacucucaa

SEQ ID NO: 14408 - RNA, 19 nt, Artificial Sequence
  Description of Artificial Sequence: Synthetic oligonucleotide
  Sense strand starting at position 640 of SEQ ID NO: 141
cgaagccaaaguuaugaau

SEQ ID NO: 14409 - RNA, 19 nt, Artificial Sequence
  Description of Artificial Sequence: Synthetic oligonucleotide
  Antisense strand to SEQ ID NO: 14408
auucauaacuuuggcuucg

SEQ ID NO: 14410 - RNA, 19 nt, Artificial Sequence
  Description of Artificial Sequence: Synthetic oligonucleotide
  Sense strand starting at position 682 of SEQ ID NO: 141
ccgggaacugacugccaua

SEQ ID NO: 14411 - RNA, 19 nt, Artificial Sequence
  Description of Artificial Sequence: Synthetic oligonucleotide
  Antisense strand to SEQ ID NO: 14410
uauggcagucaguucccgg

SEQ ID NO: 14412 - RNA, 19 nt, Artificial Sequence
  Description of Artificial Sequence: Synthetic oligonucleotide
  Sense strand starting at position 738 of SEQ ID NO: 141
augauucugcuuuauacga

SEQ ID NO: 14413 - RNA, 19 nt, Artificial Sequence
  Description of Artificial Sequence: Synthetic oligonucleotide
  Antisense strand to SEQ ID NO: 14412
ucguauaaagcagaaucau

SEQ ID NO: 14414 - RNA, 19 nt, Artificial Sequence
  Description of Artificial Sequence: Synthetic oligonucleotide
  Sense strand starting at position 746 of SEQ ID NO: 141
gcuuuauacgaaugacuca

SEQ ID NO: 14415 - RNA, 19 nt, Artificial Sequence
  Description of Artificial Sequence: Synthetic oligonucleotide
  Antisense strand to SEQ ID NO: 14414
ugagucauucguauaaagc

SEQ ID NO: 14416 - RNA, 19 nt, Artificial Sequence
  Description of Artificial Sequence: Synthetic oligonucleotide
  Sense strand starting at position 753 of SEQ ID NO: 141
acgaaugacucaucuucua

SEQ ID NO: 14417 - RNA, 19 nt, Artificial Sequence
  Description of Artificial Sequence: Synthetic oligonucleotide
  Antisense strand to SEQ ID NO: 14416
uagaagaugagucauucgu

SEQ ID NO: 14418 - RNA, 19 nt, Artificial Sequence
  Description of Artificial Sequence: Synthetic oligonucleotide
  Sense strand starting at position 1558 of SEQ ID NO: 141
cggugaaugcaaggauauu

SEQ ID NO: 14419 - RNA, 19 nt, Artificial Sequence
  Description of Artificial Sequence: Synthetic oligonucleotide
  Antisense strand to SEQ ID NO: 14418
aauauccuugcauucaccg

SEQ ID NO: 14420 - RNA, 19 nt, Artificial Sequence
  Description of Artificial Sequence: Synthetic oligonucleotide
  Sense strand starting at position 1733 of SEQ ID NO: 141
gcggcaaaggccucuucuu

SEQ ID NO: 14421 - RNA, 19 nt, Artificial Sequence
  Description of Artificial Sequence: Synthetic oligonucleotide
  Antisense strand to SEQ ID NO: 14420
aagaagaggccuuugccgc

SEQ ID NO: 14422 - RNA, 19 nt, Artificial Sequence
  Description of Artificial Sequence: Synthetic oligonucleotide
  Sense strand starting at position 2079 of SEQ ID NO: 141
aagcgauuggucguccgau

SEQ ID NO: 14423 - RNA, 19 nt, Artificial Sequence
  Description of Artificial Sequence: Synthetic oligonucleotide
  Antisense strand to SEQ ID NO: 14422
aucggacgaccaaucgcuu

SEQ ID NO: 14424 - RNA, 19 nt, Artificial Sequence
  Description of Artificial Sequence: Synthetic oligonucleotide
  Sense strand starting at position 2081 of SEQ ID NO: 141
gcgauuggucguccgauug

SEQ ID NO: 14425 - RNA, 19 nt, Artificial Sequence
  Description of Artificial Sequence: Synthetic oligonucleotide
  Antisense strand to SEQ ID NO: 14424
caaucggacgaccaaucgc

SEQ ID NO: 14426 - RNA, 19 nt, Artificial Sequence
  Description of Artificial Sequence: Synthetic oligonucleotide
  Sense strand starting at position 2550 of SEQ ID NO: 141
accugaacucgguaucaaa

SEQ ID NO: 14427 - RNA, 19 nt, Artificial Sequence
  Description of Artificial Sequence: Synthetic oligonucleotide
  Antisense strand to SEQ ID NO: 14426
uuugauaccgaguucaggu

SEQ ID NO: 14428 - RNA, 19 nt, Artificial Sequence
  Description of Artificial Sequence: Synthetic oligonucleotide
  Sense strand starting at position 2677 of SEQ ID NO: 141
ggucguuuggagcaagaau

SEQ ID NO: 14429 - RNA, 19 nt, Artificial Sequence
  Description of Artificial Sequence: Synthetic oligonucleotide
  Antisense strand to SEQ ID NO: 14428
auucuugcuccaaacgacc

SEQ ID NO: 14430 - RNA, 19 nt, Artificial Sequence
  Description of Artificial Sequence: Synthetic oligonucleotide
  Sense strand starting at position 2686 of SEQ ID NO: 141
gagcaagaaugcucgaaag

SEQ ID NO: 14431 - RNA, 19 nt, Artificial Sequence
  Description of Artificial Sequence: Synthetic oligonucleotide
  Antisense strand to SEQ ID NO: 14430
cuuucgagcauucuugcuc

SEQ ID NO: 14432 - RNA, 19 nt, Artificial Sequence
  Description of Artificial Sequence: Synthetic oligonucleotide
  Sense strand starting at position 2797 of SEQ ID NO: 141
ugagauuuauaugauucca

SEQ ID NO: 14433 - RNA, 19 nt, Artificial Sequence
  Description of Artificial Sequence: Synthetic oligonucleotide
  Antisense strand to SEQ ID NO: 14432
uggaaucauauaaaucuca

SEQ ID NO: 14434 - RNA, 19 nt, Artificial Sequence
  Description of Artificial Sequence: Synthetic oligonucleotide
  Sense strand starting at position 2907 of SEQ ID NO: 141
uguguauuacacugaagaa

SEQ ID NO: 14435 - RNA, 19 nt, Artificial Sequence
  Description of Artificial Sequence: Synthetic oligonucleotide
  Antisense strand to SEQ ID NO: 14434
uucuucaguguaauacaca

SEQ ID NO: 14436 - RNA, 19 nt, Artificial Sequence
  Description of Artificial Sequence: Synthetic oligonucleotide
  Sense strand starting at position 3119 of SEQ ID NO: 141
acucauaauguuugaacga

SEQ ID NO: 14437 - RNA, 19 nt, Artificial Sequence
  Description of Artificial Sequence: Synthetic oligonucleotide
  Antisense strand to SEQ ID NO: 14436
ucguucaaacauuaugagu

SEQ ID NO: 14438 - RNA, 19 nt, Artificial Sequence
  Description of Artificial Sequence: Synthetic oligonucleotide
  Sense strand starting at position 3126 of SEQ ID NO: 141
auguuugaacgagacaugu

SEQ ID NO: 14439 - RNA, 19 nt, Artificial Sequence
  Description of Artificial Sequence: Synthetic oligonucleotide
  Antisense strand to SEQ ID NO: 14438
acaugucucguucaaacau

SEQ ID NO: 14440 - RNA, 19 nt, Artificial Sequence
  Description of Artificial Sequence: Synthetic oligonucleotide
  Sense strand starting at position 3128 of SEQ ID NO: 141
guuugaacgagacauguca

SEQ ID NO: 14441 - RNA, 19 nt, Artificial Sequence
  Description of Artificial Sequence: Synthetic oligonucleotide
  Antisense strand to SEQ ID NO: 14440
ugacaugucucguucaaac

SEQ ID NO: 14442 - RNA, 19 nt, Artificial Sequence
  Description of Artificial Sequence: Synthetic oligonucleotide
  Sense strand starting at position 3158 of SEQ ID NO: 141
gucucagauuccucaucac

SEQ ID NO: 14443 - RNA, 19 nt, Artificial Sequence
  Description of Artificial Sequence: Synthetic oligonucleotide
  Antisense strand to SEQ ID NO: 14442
gugaugaggaaucugagac

SEQ ID NO: 14444 - RNA, 19 nt, Artificial Sequence
  Description of Artificial Sequence: Synthetic oligonucleotide
  Sense strand starting at position 3186 of SEQ ID NO: 141
gcuaauaaugugcacuuua

SEQ ID NO: 14445 - RNA, 19 nt, Artificial Sequence
  Description of Artificial Sequence: Synthetic oligonucleotide
  Antisense strand to SEQ ID NO: 14444
uaaagugcacauuauuagc

SEQ ID NO: 14446 - RNA, 19 nt, Artificial Sequence
  Description of Artificial Sequence: Synthetic oligonucleotide
  Sense strand starting at position 3196 of SEQ ID NO: 141
ugcacuuuacaagauuguu

SEQ ID NO: 14447 - RNA, 19 nt, Artificial Sequence
  Description of Artificial Sequence: Synthetic oligonucleotide
  Antisense strand to SEQ ID NO: 14446
aacaaucuuguaaagugca

SEQ ID NO: 14448 - RNA, 19 nt, Artificial Sequence
  Description of Artificial Sequence: Synthetic oligonucleotide
  Sense strand starting at position 3204 of SEQ ID NO: 141
acaagauuguucuuaggau

SEQ ID NO: 14449 - RNA, 19 nt, Artificial Sequence
  Description of Artificial Sequence: Synthetic oligonucleotide
  Antisense strand to SEQ ID NO: 14448
auccuaagaacaaucuugu

SEQ ID NO: 14450 - RNA, 19 nt, Artificial Sequence
  Description of Artificial Sequence: Synthetic oligonucleotide
  Sense strand starting at position 3301 of SEQ ID NO: 141
ggacuagucuuauaaauuu

SEQ ID NO: 14451 - RNA, 19 nt, Artificial Sequence
  Description of Artificial Sequence: Synthetic oligonucleotide
  Antisense strand to SEQ ID NO: 14450
aaauuuauaagacuagucc

SEQ ID NO: 14452 - RNA, 19 nt, Artificial Sequence
  Description of Artificial Sequence: Synthetic oligonucleotide
  Sense strand starting at position 3431 of SEQ ID NO: 141
gcagaagggacucgauaca

SEQ ID NO: 14453 - RNA, 19 nt, Artificial Sequence
  Description of Artificial Sequence: Synthetic oligonucleotide
  Antisense strand to SEQ ID NO: 14452
uguaucgagucccuucugc

SEQ ID NO: 14454 - RNA, 19 nt, Artificial Sequence
  Description of Artificial Sequence: Synthetic oligonucleotide
  Sense strand starting at position 3438 of SEQ ID NO: 141
ggacucgauacaugcuuga

SEQ ID NO: 14455 - RNA, 19 nt, Artificial Sequence
  Description of Artificial Sequence: Synthetic oligonucleotide
  Antisense strand to SEQ ID NO: 14454
ucaagcauguaucgagucc

SEQ ID NO: 14456 - RNA, 19 nt, Artificial Sequence
  Description of Artificial Sequence: Synthetic oligonucleotide
  Sense strand starting at position 3442 of SEQ ID NO: 141
ucgauacaugcuugaugaa

SEQ ID NO: 14457 - RNA, 19 nt, Artificial Sequence
  Description of Artificial Sequence: Synthetic oligonucleotide
  Antisense strand to SEQ ID NO: 14456
uucaucaagcauguaucga

SEQ ID NO: 14458 - RNA, 19 nt, Artificial Sequence
  Description of Artificial Sequence: Synthetic oligonucleotide
  Sense strand starting at position 3443 of SEQ ID NO: 141
cgauacaugcuugaugaau

SEQ ID NO: 14459 - RNA, 19 nt, Artificial Sequence
  Description of Artificial Sequence: Synthetic oligonucleotide
  Antisense strand to SEQ ID NO: 14458
auucaucaagcauguaucg

SEQ ID NO: 14460 - RNA, 19 nt, Artificial Sequence
  Description of Artificial Sequence: Synthetic oligonucleotide
  Sense strand starting at position 3470 of SEQ ID NO: 141
ugugaaagaccguacaguu

SEQ ID NO: 14461 - RNA, 19 nt, Artificial Sequence
  Description of Artificial Sequence: Synthetic oligonucleotide
  Antisense strand to SEQ ID NO: 14460
aacuguacggucuuucaca

SEQ ID NO: 14462 - RNA, 19 nt, Artificial Sequence
  Description of Artificial Sequence: Synthetic oligonucleotide
  Sense strand starting at position 3477 of SEQ ID NO: 141
gaccguacaguuugagaau

SEQ ID NO: 14463 - RNA, 19 nt, Artificial Sequence
  Description of Artificial Sequence: Synthetic oligonucleotide
  Antisense strand to SEQ ID NO: 14462
auucucaaacuguacgguc

SEQ ID NO: 14464 - RNA, 19 nt, Artificial Sequence
  Description of Artificial Sequence: Synthetic oligonucleotide
  Sense strand starting at position 3618 of SEQ ID NO: 141
guguauauuuaucuaugca

SEQ ID NO: 14465 - RNA, 19 nt, Artificial Sequence
  Description of Artificial Sequence: Synthetic oligonucleotide
  Antisense strand to SEQ ID NO: 14464
ugcauagauaaauauacac

SEQ ID NO: 14466 - RNA, 19 nt, Artificial Sequence
  Description of Artificial Sequence: Synthetic oligonucleotide
  Sense strand starting at position 3759 of SEQ ID NO: 141
ucauuuaggugauagaagu

SEQ ID NO: 14467 - RNA, 19 nt, Artificial Sequence
  Description of Artificial Sequence: Synthetic oligonucleotide
  Antisense strand to SEQ ID NO: 14466
acuucuaucaccuaaauga

SEQ ID NO: 14468 - RNA, 19 nt, Artificial Sequence
  Description of Artificial Sequence: Synthetic oligonucleotide
  Sense strand starting at position 3925 of SEQ ID NO: 141
ggugaauggcguuauauaa

SEQ ID NO: 14469 - RNA, 19 nt, Artificial Sequence
  Description of Artificial Sequence: Synthetic oligonucleotide
  Antisense strand to SEQ ID NO: 14468
uuauauaacgccauucacc

SEQ ID NO: 14470 - RNA, 19 nt, Artificial Sequence
  Description of Artificial Sequence: Synthetic oligonucleotide
  Sense strand starting at position 3932 of SEQ ID NO: 141
ggcguuauauaacuuagaa

SEQ ID NO: 14471 - RNA, 19 nt, Artificial Sequence
  Description of Artificial Sequence: Synthetic oligonucleotide
  Antisense strand to SEQ ID NO: 14470
uucuaaguuauauaacgcc

SEQ ID NO: 14472 - RNA, 19 nt, Artificial Sequence
  Description of Artificial Sequence: Synthetic oligonucleotide
  Sense strand starting at position 3983 of SEQ ID NO: 141
cuuugcuaacuuuaguaga

SEQ ID NO: 14473 - RNA, 19 nt, Artificial Sequence
  Description of Artificial Sequence: Synthetic oligonucleotide
  Antisense strand to SEQ ID NO: 14472
ucuacuaaaguuagcaaag

SEQ ID NO: 14474 - RNA, 19 nt, Artificial Sequence
  Description of Artificial Sequence: Synthetic oligonucleotide
  Sense strand starting at position 3955 of SEQ ID NO: 142
ugaaaccucuggucucaaa

SEQ ID NO: 14475 - RNA, 19 nt, Artificial Sequence
  Description of Artificial Sequence: Synthetic oligonucleotide
  Antisense strand to SEQ ID NO: 14474
uuugagaccagagguuuca

SEQ ID NO: 14476 - RNA, 19 nt, Artificial Sequence
  Description of Artificial Sequence: Synthetic oligonucleotide
  Sense strand starting at position 3941 of SEQ ID NO: 142
cuaagagugugcccugaaa

SEQ ID NO: 14477 - RNA, 19 nt, Artificial Sequence
  Description of Artificial Sequence: Synthetic oligonucleotide
  Antisense strand to SEQ ID NO: 14476
uuucagggcacacucuuag

SEQ ID NO: 14478 - RNA, 19 nt, Artificial Sequence
  Description of Artificial Sequence: Synthetic oligonucleotide
  Sense strand starting at position 3930 of SEQ ID NO: 142
cucugucuccucuaagagu

SEQ ID NO: 14479 - RNA, 19 nt, Artificial Sequence
  Description of Artificial Sequence: Synthetic oligonucleotide
  Antisense strand to SEQ ID NO: 14478
acucuuagaggagacagag

SEQ ID NO: 14480 - RNA, 19 nt, Artificial Sequence
  Description of Artificial Sequence: Synthetic oligonucleotide
  Sense strand starting at position 3928 of SEQ ID NO: 142
gccucugucuccucuaaga

SEQ ID NO: 14481 - RNA, 19 nt, Artificial Sequence
  Description of Artificial Sequence: Synthetic oligonucleotide
  Antisense strand to SEQ ID NO: 14480
ucuuagaggagacagaggc

SEQ ID NO: 14482 - RNA, 19 nt, Artificial Sequence
  Description of Artificial Sequence: Synthetic oligonucleotide
  Sense strand starting at position 3859 of SEQ ID NO: 142
aggaauaucuguccuucca

SEQ ID NO: 14483 - RNA, 19 nt, Artificial Sequence
  Description of Artificial Sequence: Synthetic oligonucleotide
  Antisense strand to SEQ ID NO: 14482
uggaaggacagauauuccu

SEQ ID NO: 14484 - RNA, 19 nt, Artificial Sequence
  Description of Artificial Sequence: Synthetic oligonucleotide
  Sense strand starting at position 3857 of SEQ ID NO: 142
gcaggaauaucuguccuuc

SEQ ID NO: 14485 - RNA, 19 nt, Artificial Sequence
  Description of Artificial Sequence: Synthetic oligonucleotide
  Antisense strand to SEQ ID NO: 14484
gaaggacagauauuccugc

SEQ ID NO: 14486 - RNA, 19 nt, Artificial Sequence
  Description of Artificial Sequence: Synthetic oligonucleotide
  Sense strand starting at position 3659 of SEQ ID NO: 142
uuaagaaggcgacgugaua

SEQ ID NO: 14487 - RNA, 19 nt, Artificial Sequence
  Description of Artificial Sequence: Synthetic oligonucleotide
  Antisense strand to SEQ ID NO: 14486
uaucacgucgccuucuuaa

SEQ ID NO: 14488 - RNA, 19 nt, Artificial Sequence
  Description of Artificial Sequence: Synthetic oligonucleotide
  Sense strand starting at position 3587 of SEQ ID NO: 142
gacagucuggucuguccau

SEQ ID NO: 14489 - RNA, 19 nt, Artificial Sequence
  Description of Artificial Sequence: Synthetic oligonucleotide
  Antisense strand to SEQ ID NO: 14488
auggacagaccagacuguc

SEQ ID NO: 14490 - RNA, 19 nt, Artificial Sequence
  Description of Artificial Sequence: Synthetic oligonucleotide
  Sense strand starting at position 3252 of SEQ ID NO: 142
ggaacaugugcaugguagu

SEQ ID NO: 14491 - RNA, 19 nt, Artificial Sequence
  Description of Artificial Sequence: Synthetic oligonucleotide
  Antisense strand to SEQ ID NO: 14490
acuaccaugcacauguucc

SEQ ID NO: 14492 - RNA, 19 nt, Artificial Sequence
  Description of Artificial Sequence: Synthetic oligonucleotide
  Sense strand starting at position 3116 of SEQ ID NO: 142
ggagcagucugcucuguca

SEQ ID NO: 14493 - RNA, 19 nt, Artificial Sequence
  Description of Artificial Sequence: Synthetic oligonucleotide
  Antisense strand to SEQ ID NO: 14492
ugacagagcagacugcucc

SEQ ID NO: 14494 - RNA, 19 nt, Artificial Sequence
  Description of Artificial Sequence: Synthetic oligonucleotide
  Sense strand starting at position 3016 of SEQ ID NO: 142
gguggugaggacuagaagu

SEQ ID NO: 14495 - RNA, 19 nt, Artificial Sequence
  Description of Artificial Sequence: Synthetic oligonucleotide
  Antisense strand to SEQ ID NO: 14494
acuucuaguccucaccacc

SEQ ID NO: 14496 - RNA, 19 nt, Artificial Sequence
  Description of Artificial Sequence: Synthetic oligonucleotide
  Sense strand starting at position 2916 of SEQ ID NO: 142
agacuuucaggguggacau

SEQ ID NO: 14497 - RNA, 19 nt, Artificial Sequence
  Description of Artificial Sequence: Synthetic oligonucleotide
  Antisense strand to SEQ ID NO: 14496
auguccacccugaaagucu

SEQ ID NO: 14498 - RNA, 19 nt, Artificial Sequence
  Description of Artificial Sequence: Synthetic oligonucleotide
  Sense strand starting at position 2796 of SEQ ID NO: 142
uguggucagggaugagagu

SEQ ID NO: 14499 - RNA, 19 nt, Artificial Sequence
  Description of Artificial Sequence: Synthetic oligonucleotide
  Antisense strand to SEQ ID NO: 14498
acucucaucccugaccaca

SEQ ID NO: 14500 - RNA, 19 nt, Artificial Sequence
  Description of Artificial Sequence: Synthetic oligonucleotide
  Sense strand starting at position 2790 of SEQ ID NO: 142
ggaagcuguggucagggau

SEQ ID NO: 14501 - RNA, 19 nt, Artificial Sequence
  Description of Artificial Sequence: Synthetic oligonucleotide
  Antisense strand to SEQ ID NO: 14500
aucccugaccacagcuucc

SEQ ID NO: 14502 - RNA, 19 nt, Artificial Sequence
  Description of Artificial Sequence: Synthetic oligonucleotide
  Sense strand starting at position 2673 of SEQ ID NO: 142
gccuguggauuauccaagu

SEQ ID NO: 14503 - RNA, 19 nt, Artificial Sequence
  Description of Artificial Sequence: Synthetic oligonucleotide
  Antisense strand to SEQ ID NO: 14502
acuuggauaauccacaggc

SEQ ID NO: 14504 - RNA, 19 nt, Artificial Sequence
  Description of Artificial Sequence: Synthetic oligonucleotide
  Sense strand starting at position 2671 of SEQ ID NO: 142
gggccuguggauuauccaa

SEQ ID NO: 14505 - RNA, 19 nt, Artificial Sequence
  Description of Artificial Sequence: Synthetic oligonucleotide
  Antisense strand to SEQ ID NO: 14504
uuggauaauccacaggccc

SEQ ID NO: 14506 - RNA, 19 nt, Artificial Sequence
  Description of Artificial Sequence: Synthetic oligonucleotide
  Sense strand starting at position 2637 of SEQ ID NO: 142
ucaugaguucgguguugga

SEQ ID NO: 14507 - RNA, 19 nt, Artificial Sequence
  Description of Artificial Sequence: Synthetic oligonucleotide
  Antisense strand to SEQ ID NO: 14506
uccaacaccgaacucauga

SEQ ID NO: 14508 - RNA, 19 nt, Artificial Sequence
  Description of Artificial Sequence: Synthetic oligonucleotide
  Sense strand starting at position 2523 of SEQ ID NO: 142
auuagugccugacuggaua

SEQ ID NO: 14509 - RNA, 19 nt, Artificial Sequence
  Description of Artificial Sequence: Synthetic oligonucleotide
  Antisense strand to SEQ ID NO: 14508
uauccagucaggcacuaau

SEQ ID NO: 14510 - RNA, 19 nt, Artificial Sequence
  Description of Artificial Sequence: Synthetic oligonucleotide
  Sense strand starting at position 2443 of SEQ ID NO: 142
gaggaugaggucugaugca

SEQ ID NO: 14511 - RNA, 19 nt, Artificial Sequence
  Description of Artificial Sequence: Synthetic oligonucleotide
  Antisense strand to SEQ ID NO: 14510
ugcaucagaccucauccuc

SEQ ID NO: 14512 - RNA, 19 nt, Artificial Sequence
  Description of Artificial Sequence: Synthetic oligonucleotide
  Sense strand starting at position 2383 of SEQ ID NO: 142
ugacucuggcuguaguaaa

SEQ ID NO: 14513 - RNA, 19 nt, Artificial Sequence
  Description of Artificial Sequence: Synthetic oligonucleotide
  Antisense strand to SEQ ID NO: 14512
uuuacuacagccagaguca

SEQ ID NO: 14514 - RNA, 19 nt, Artificial Sequence
  Description of Artificial Sequence: Synthetic oligonucleotide
  Sense strand starting at position 2381 of SEQ ID NO: 142
gaugacucuggcuguagua

SEQ ID NO: 14515 - RNA, 19 nt, Artificial Sequence
  Description of Artificial Sequence: Synthetic oligonucleotide
  Antisense strand to SEQ ID NO: 14514
uacuacagccagagucauc

SEQ ID NO: 14516 - RNA, 19 nt, Artificial Sequence
  Description of Artificial Sequence: Synthetic oligonucleotide
  Sense strand starting at position 2380 of SEQ ID NO: 142
ggaugacucuggcuguagu

SEQ ID NO: 14517 - RNA, 19 nt, Artificial Sequence
  Description of Artificial Sequence: Synthetic oligonucleotide
  Antisense strand to SEQ ID NO: 14516
acuacagccagagucaucc

SEQ ID NO: 14518 - RNA, 19 nt, Artificial Sequence
  Description of Artificial Sequence: Synthetic oligonucleotide
  Sense strand starting at position 2354 of SEQ ID NO: 142
gguguaaucagacaggcau

SEQ ID NO: 14519 - RNA, 19 nt, Artificial Sequence
  Description of Artificial Sequence: Synthetic oligonucleotide
  Antisense strand to SEQ ID NO: 14518
augccugucugauuacacc

SEQ ID NO: 14520 - RNA, 19 nt, Artificial Sequence
  Description of Artificial Sequence: Synthetic oligonucleotide
  Sense strand starting at position 2346 of SEQ ID NO: 142
agcagaaugguguaaucag

SEQ ID NO: 14521 - RNA, 19 nt, Artificial Sequence
  Description of Artificial Sequence: Synthetic oligonucleotide
  Antisense strand to SEQ ID NO: 14520
cugauuacaccauucugcu

SEQ ID NO: 14522 - RNA, 19 nt, Artificial Sequence
  Description of Artificial Sequence: Synthetic oligonucleotide
  Sense strand starting at position 2306 of SEQ ID NO: 142
auggaaagauccuaacacu

SEQ ID NO: 14523 - RNA, 19 nt, Artificial Sequence
  Description of Artificial Sequence: Synthetic oligonucleotide
  Antisense strand to SEQ ID NO: 14522
aguguuaggaucuuuccau

SEQ ID NO: 14524 - RNA, 19 nt, Artificial Sequence
  Description of Artificial Sequence: Synthetic oligonucleotide
  Sense strand starting at position 2254 of SEQ ID NO: 142
gccuaauuauggcaauuug

SEQ ID NO: 14525 - RNA, 19 nt, Artificial Sequence
  Description of Artificial Sequence: Synthetic oligonucleotide
  Antisense strand to SEQ ID NO: 14524
caaauugccauaauuaggc

SEQ ID NO: 14526 - RNA, 19 nt, Artificial Sequence
  Description of Artificial Sequence: Synthetic oligonucleotide
  Sense strand starting at position 2200 of SEQ ID NO: 142
aggaacaucugagcugagu

SEQ ID NO: 14527 - RNA, 19 nt, Artificial Sequence
  Description of Artificial Sequence: Synthetic oligonucleotide
  Antisense strand to SEQ ID NO: 14526
acucagcucagauguuccu

SEQ ID NO: 14528 - RNA, 19 nt, Artificial Sequence
  Description of Artificial Sequence: Synthetic oligonucleotide
  Sense strand starting at position 2198 of SEQ ID NO: 142
ggaggaacaucugagcuga

SEQ ID NO: 14529 - RNA, 19 nt, Artificial Sequence
  Description of Artificial Sequence: Synthetic oligonucleotide
  Antisense strand to SEQ ID NO: 14528
ucagcucagauguuccucc

SEQ ID NO: 14530 - RNA, 19 nt, Artificial Sequence
  Description of Artificial Sequence: Synthetic oligonucleotide
  Sense strand starting at position 2087 of SEQ ID NO: 142
cugcuuagggcuuggagua

SEQ ID NO: 14531 - RNA, 19 nt, Artificial Sequence
  Description of Artificial Sequence: Synthetic oligonucleotide
  Antisense strand to SEQ ID NO: 14530
uacuccaagcccuaagcag

SEQ ID NO: 14532 - RNA, 19 nt, Artificial Sequence
  Description of Artificial Sequence: Synthetic oligonucleotide
  Sense strand starting at position 883 of SEQ ID NO: 142
acuguuguccgugauggag

SEQ ID NO: 14533 - RNA, 19 nt, Artificial Sequence
  Description of Artificial Sequence: Synthetic oligonucleotide
  Antisense strand to SEQ ID NO: 14532
cuccaucacggacaacagu

SEQ ID NO: 14534 - RNA, 19 nt, Artificial Sequence
  Description of Artificial Sequence: Synthetic oligonucleotide
  Sense strand starting at position 882 of SEQ ID NO: 142
gacuguuguccgugaugga

SEQ ID NO: 14535 - RNA, 19 nt, Artificial Sequence
  Description of Artificial Sequence: Synthetic oligonucleotide
  Antisense strand to SEQ ID NO: 14534
uccaucacggacaacaguc

SEQ ID NO: 14536 - RNA, 19 nt, Artificial Sequence
  Description of Artificial Sequence: Synthetic oligonucleotide
  Sense strand starting at position 698 of SEQ ID NO: 142
cuucguaaguccucauuag

SEQ ID NO: 14537 - RNA, 19 nt, Artificial Sequence
  Description of Artificial Sequence: Synthetic oligonucleotide
  Antisense strand to SEQ ID NO: 14536
cuaaugaggacuuacgaag

SEQ ID NO: 14538 - RNA, 19 nt, Artificial Sequence
  Description of Artificial Sequence: Synthetic oligonucleotide
  Sense strand starting at position 300 of SEQ ID NO: 142
auaggugucccucgaugac

SEQ ID NO: 14539 - RNA, 19 nt, Artificial Sequence
  Description of Artificial Sequence: Synthetic oligonucleotide
  Antisense strand to SEQ ID NO: 14538
gucaucgagggacaccuau

SEQ ID NO: 14540 - RNA, 19 nt, Artificial Sequence
  Description of Artificial Sequence: Synthetic oligonucleotide
  Sense strand starting at position 283 of SEQ ID NO: 142
aguucucuccucugacuau

SEQ ID NO: 14541 - RNA, 19 nt, Artificial Sequence
  Description of Artificial Sequence: Synthetic oligonucleotide
  Antisense strand to SEQ ID NO: 14540
auagucagaggagagaacu

SEQ ID NO: 14542 - RNA, 19 nt, Artificial Sequence
  Description of Artificial Sequence: Synthetic oligonucleotide
  Sense strand starting at position 281 of SEQ ID NO: 142
ugaguucucuccucugacu

SEQ ID NO: 14543 - RNA, 19 nt, Artificial Sequence
  Description of Artificial Sequence: Synthetic oligonucleotide
  Antisense strand to SEQ ID NO: 14542
agucagaggagagaacuca

SEQ ID NO: 14544 - RNA, 19 nt, Artificial Sequence
  Description of Artificial Sequence: Synthetic oligonucleotide
  Sense strand starting at position 172 of SEQ ID NO: 142
cucuaagaguuaucuaaug

SEQ ID NO: 14545 - RNA, 19 nt, Artificial Sequence
  Description of Artificial Sequence: Synthetic oligonucleotide
  Antisense strand to SEQ ID NO: 14544
cauuagauaacucuuagag

SEQ ID NO: 14546 - RNA, 19 nt, Artificial Sequence
  Description of Artificial Sequence: Synthetic oligonucleotide
  Sense strand starting at position 73 of SEQ ID NO: 142
gaguuauagcuggacacac

SEQ ID NO: 14547 - RNA, 19 nt, Artificial Sequence
  Description of Artificial Sequence: Synthetic oligonucleotide
  Antisense strand to SEQ ID NO: 14546
guguguccagcuauaacuc

SEQ ID NO: 14548 - RNA, 19 nt, Artificial Sequence
  Description of Artificial Sequence: Synthetic oligonucleotide
  Sense strand starting at position 72 of SEQ ID NO: 142
ggaguuauagcuggacaca

SEQ ID NO: 14549 - RNA, 19 nt, Artificial Sequence
  Description of Artificial Sequence: Synthetic oligonucleotide
  Antisense strand to SEQ ID NO: 14548
uguguccagcuauaacucc

SEQ ID NO: 14550 - RNA, 19 nt, Artificial Sequence
  Description of Artificial Sequence: Synthetic oligonucleotide
  Sense strand starting at position 71 of SEQ ID NO: 142
aggaguuauagcuggacac

SEQ ID NO: 14551 - RNA, 19 nt, Artificial Sequence
  Description of Artificial Sequence: Synthetic oligonucleotide
  Antisense strand to SEQ ID NO: 14550
guguccagcuauaacuccu

SEQ ID NO: 14552 - RNA, 19 nt, Artificial Sequence
  Description of Artificial Sequence: Synthetic oligonucleotide
  Sense strand starting at position 65 of SEQ ID NO: 142
gcuggaaggaguuauagcu

SEQ ID NO: 14553 - RNA, 19 nt, Artificial Sequence
  Description of Artificial Sequence: Synthetic oligonucleotide
  Antisense strand to SEQ ID NO: 14552
agcuauaacuccuuccagc

SEQ ID NO: 14554 - RNA, 19 nt, Artificial Sequence
  Description of Artificial Sequence: Synthetic oligonucleotide
  Sense strand starting at position 3964 of SEQ ID NO: 143
auugucaucuucuugagau

SEQ ID NO: 14555 - RNA, 19 nt, Artificial Sequence
  Description of Artificial Sequence: Synthetic oligonucleotide
  Antisense strand to SEQ ID NO: 14554
aucucaagaagaugacaau

SEQ ID NO: 14556 - RNA, 19 nt, Artificial Sequence
  Description of Artificial Sequence: Synthetic oligonucleotide
  Sense strand starting at position 3879 of SEQ ID NO: 143
aguauauuagucuaucaga

SEQ ID NO: 14557 - RNA, 19 nt, Artificial Sequence
  Description of Artificial Sequence: Synthetic oligonucleotide
  Antisense strand to SEQ ID NO: 14556
ucugauagacuaauauacu

SEQ ID NO: 14558 - RNA, 19 nt, Artificial Sequence
  Description of Artificial Sequence: Synthetic oligonucleotide
  Sense strand starting at position 3877 of SEQ ID NO: 143
cuaguauauuagucuauca

SEQ ID NO: 14559 - RNA, 19 nt, Artificial Sequence
  Description of Artificial Sequence: Synthetic oligonucleotide
  Antisense strand to SEQ ID NO: 14558
ugauagacuaauauacuag

SEQ ID NO: 14560 - RNA, 19 nt, Artificial Sequence
  Description of Artificial Sequence: Synthetic oligonucleotide
  Sense strand starting at position 3866 of SEQ ID NO: 143
ggucuaugagccuaguaua

SEQ ID NO: 14561 - RNA, 19 nt, Artificial Sequence
  Description of Artificial Sequence: Synthetic oligonucleotide
  Antisense strand to SEQ ID NO: 14560
uauacuaggcucauagacc

SEQ ID NO: 14562 - RNA, 19 nt, Artificial Sequence
  Description of Artificial Sequence: Synthetic oligonucleotide
  Sense strand starting at position 3806 of SEQ ID NO: 143
agaaguagccgacauauau

SEQ ID NO: 14563 - RNA, 19 nt, Artificial Sequence
  Description of Artificial Sequence: Synthetic oligonucleotide
  Antisense strand to SEQ ID NO: 14562
auauaugucggcuacuucu

SEQ ID NO: 14564 - RNA, 19 nt, Artificial Sequence
  Description of Artificial Sequence: Synthetic oligonucleotide
  Sense strand starting at position 3804 of SEQ ID NO: 143
ugagaaguagccgacauau

SEQ ID NO: 14565 - RNA, 19 nt, Artificial Sequence
  Description of Artificial Sequence: Synthetic oligonucleotide
  Antisense strand to SEQ ID NO: 14564
auaugucggcuacuucuca

SEQ ID NO: 14566 - RNA, 19 nt, Artificial Sequence
  Description of Artificial Sequence: Synthetic oligonucleotide
  Sense strand starting at position 3803 of SEQ ID NO: 143
augagaaguagccgacaua

SEQ ID NO: 14567 - RNA, 19 nt, Artificial Sequence
  Description of Artificial Sequence: Synthetic oligonucleotide
  Antisense strand to SEQ ID NO: 14566
uaugucggcuacuucucau

SEQ ID NO: 14568 - RNA, 19 nt, Artificial Sequence
  Description of Artificial Sequence: Synthetic oligonucleotide
  Sense strand starting at position 3788 of SEQ ID NO: 143
ggugcugugagggaaauga

SEQ ID NO: 14569 - RNA, 19 nt, Artificial Sequence
  Description of Artificial Sequence: Synthetic oligonucleotide
  Antisense strand to SEQ ID NO: 14568
ucauuucccucacagcacc

SEQ ID NO: 14570 - RNA, 19 nt, Artificial Sequence
  Description of Artificial Sequence: Synthetic oligonucleotide
  Sense strand starting at position 3688 of SEQ ID NO: 143
uguaucucugagcaaguga

SEQ ID NO: 14571 - RNA, 19 nt, Artificial Sequence
  Description of Artificial Sequence: Synthetic oligonucleotide
  Antisense strand to SEQ ID NO: 14570
ucacuugcucagagauaca

SEQ ID NO: 14572 - RNA, 19 nt, Artificial Sequence
  Description of Artificial Sequence: Synthetic oligonucleotide
  Sense strand starting at position 3611 of SEQ ID NO: 143
gcugguaacggcguaagua

SEQ ID NO: 14573 - RNA, 19 nt, Artificial Sequence
  Description of Artificial Sequence: Synthetic oligonucleotide
  Antisense strand to SEQ ID NO: 14572
uacuuacgccguuaccagc

SEQ ID NO: 14574 - RNA, 19 nt, Artificial Sequence
  Description of Artificial Sequence: Synthetic oligonucleotide
  Sense strand starting at position 3569 of SEQ ID NO: 143
cacugagagguuugugacu

SEQ ID NO: 14575 - RNA, 19 nt, Artificial Sequence
  Description of Artificial Sequence: Synthetic oligonucleotide
  Antisense strand to SEQ ID NO: 14574
agucacaaaccucucagug

SEQ ID NO: 14576 - RNA, 19 nt, Artificial Sequence
  Description of Artificial Sequence: Synthetic oligonucleotide
  Sense strand starting at position 3561 of SEQ ID NO: 143
gugucacucacugagaggu

SEQ ID NO: 14577 - RNA, 19 nt, Artificial Sequence
  Description of Artificial Sequence: Synthetic oligonucleotide
  Antisense strand to SEQ ID NO: 14576
accucucagugagugacac

SEQ ID NO: 14578 - RNA, 19 nt, Artificial Sequence
  Description of Artificial Sequence: Synthetic oligonucleotide
  Sense strand starting at position 3557 of SEQ ID NO: 143
ggaagugucacucacugag

SEQ ID NO: 14579 - RNA, 19 nt, Artificial Sequence
  Description of Artificial Sequence: Synthetic oligonucleotide
  Antisense strand to SEQ ID NO: 14578
cucagugagugacacuucc

SEQ ID NO: 14580 - RNA, 19 nt, Artificial Sequence
  Description of Artificial Sequence: Synthetic oligonucleotide
  Sense strand starting at position 3555 of SEQ ID NO: 143
gaggaagugucacucacug

SEQ ID NO: 14581 - RNA, 19 nt, Artificial Sequence
  Description of Artificial Sequence: Synthetic oligonucleotide
  Antisense strand to SEQ ID NO: 14580
cagugagugacacuuccuc

SEQ ID NO: 14582 - RNA, 19 nt, Artificial Sequence
  Description of Artificial Sequence: Synthetic oligonucleotide
  Sense strand starting at position 3504 of SEQ ID NO: 143
acgucaagauuagcacaau

SEQ ID NO: 14583 - RNA, 19 nt, Artificial Sequence
  Description of Artificial Sequence: Synthetic oligonucleotide
  Antisense strand to SEQ ID NO: 14582
auugugcuaaucuugacgu

SEQ ID NO: 14584 - RNA, 19 nt, Artificial Sequence
  Description of Artificial Sequence: Synthetic oligonucleotide
  Sense strand starting at position 3223 of SEQ ID NO: 143
gcgcuauuggcuucaguuu

SEQ ID NO: 14585 - RNA, 19 nt, Artificial Sequence
  Description of Artificial Sequence: Synthetic oligonucleotide
  Antisense strand to SEQ ID NO: 14584
aaacugaagccaauagcgc

SEQ ID NO: 14586 - RNA, 19 nt, Artificial Sequence
  Description of Artificial Sequence: Synthetic oligonucleotide
  Sense strand starting at position 3222 of SEQ ID NO: 143
ggcgcuauuggcuucaguu

SEQ ID NO: 14587 - RNA, 19 nt, Artificial Sequence
  Description of Artificial Sequence: Synthetic oligonucleotide
  Antisense strand to SEQ ID NO: 14586
aacugaagccaauagcgcc

SEQ ID NO: 14588 - RNA, 19 nt, Artificial Sequence
  Description of Artificial Sequence: Synthetic oligonucleotide
  Sense strand starting at position 3089 of SEQ ID NO: 143
cuuccaguuguuuaagauc

SEQ ID NO: 14589 - RNA, 19 nt, Artificial Sequence
  Description of Artificial Sequence: Synthetic oligonucleotide
  Antisense strand to SEQ ID NO: 14588
gaucuuaaacaacuggaag

SEQ ID NO: 14590 - RNA, 19 nt, Artificial Sequence
  Description of Artificial Sequence: Synthetic oligonucleotide
  Sense strand starting at position 2959 of SEQ ID NO: 143
acaucuuaggccuggaaau

SEQ ID NO: 14591 - RNA, 19 nt, Artificial Sequence
  Description of Artificial Sequence: Synthetic oligonucleotide
  Antisense strand to SEQ ID NO: 14590
auuuccaggccuaagaugu

SEQ ID NO: 14592 - RNA, 19 nt, Artificial Sequence
  Description of Artificial Sequence: Synthetic oligonucleotide
  Sense strand starting at position 2001 of SEQ ID NO: 143
gauucuguggaggguaaga

SEQ ID NO: 14593 - RNA, 19 nt, Artificial Sequence
  Description of Artificial Sequence: Synthetic oligonucleotide
  Antisense strand to SEQ ID NO: 14592
ucuuacccuccacagaauc

SEQ ID NO: 14594 - RNA, 19 nt, Artificial Sequence
  Description of Artificial Sequence: Synthetic oligonucleotide
  Sense strand starting at position 1998 of SEQ ID NO: 143
uccgauucuguggagggua

SEQ ID NO: 14595 - RNA, 19 nt, Artificial Sequence
  Description of Artificial Sequence: Synthetic oligonucleotide
  Antisense strand to SEQ ID NO: 14594
uacccuccacagaaucgga

SEQ ID NO: 14596 - RNA, 19 nt, Artificial Sequence
  Description of Artificial Sequence: Synthetic oligonucleotide
  Sense strand starting at position 1702 of SEQ ID NO: 143
cgaacuaaagacuguauca

SEQ ID NO: 14597 - RNA, 19 nt, Artificial Sequence
  Description of Artificial Sequence: Synthetic oligonucleotide
  Antisense strand to SEQ ID NO: 14596
ugauacagucuuuaguucg

SEQ ID NO: 14598 - RNA, 19 nt, Artificial Sequence
  Description of Artificial Sequence: Synthetic oligonucleotide
  Sense strand starting at position 1647 of SEQ ID NO: 143
guucucuaucaguacagau

SEQ ID NO: 14599 - RNA, 19 nt, Artificial Sequence
  Description of Artificial Sequence: Synthetic oligonucleotide
  Antisense strand to SEQ ID NO: 14598
aucuguacugauagagaac

SEQ ID NO: 14600 - RNA, 19 nt, Artificial Sequence
  Description of Artificial Sequence: Synthetic oligonucleotide
  Sense strand starting at position 1646 of SEQ ID NO: 143
aguucucuaucaguacaga

SEQ ID NO: 14601 - RNA, 19 nt, Artificial Sequence
  Description of Artificial Sequence: Synthetic oligonucleotide
  Antisense strand to SEQ ID NO: 14600
ucuguacugauagagaacu

SEQ ID NO: 14602 - RNA, 19 nt, Artificial Sequence
  Description of Artificial Sequence: Synthetic oligonucleotide
  Sense strand starting at position 1456 of SEQ ID NO: 143
cucucugucaaagggagaa

SEQ ID NO: 14603 - RNA, 19 nt, Artificial Sequence
  Description of Artificial Sequence: Synthetic oligonucleotide
  Antisense strand to SEQ ID NO: 14602
uucucccuuugacagagag

SEQ ID NO: 14604 - RNA, 19 nt, Artificial Sequence
  Description of Artificial Sequence: Synthetic oligonucleotide
  Sense strand starting at position 1355 of SEQ ID NO: 143
cuuuguacaccguagacau

SEQ ID NO: 14605 - RNA, 19 nt, Artificial Sequence
  Description of Artificial Sequence: Synthetic oligonucleotide
  Antisense strand to SEQ ID NO: 14604
augucuacgguguacaaag

SEQ ID NO: 14606 - RNA, 19 nt, Artificial Sequence
  Description of Artificial Sequence: Synthetic oligonucleotide
  Sense strand starting at position 1282 of SEQ ID NO: 143
cuacgaacaccuugaaaug

SEQ ID NO: 14607 - RNA, 19 nt, Artificial Sequence
  Description of Artificial Sequence: Synthetic oligonucleotide
  Antisense strand to SEQ ID NO: 14606
cauuucaagguguucguag

SEQ ID NO: 14608 - RNA, 19 nt, Artificial Sequence
  Description of Artificial Sequence: Synthetic oligonucleotide
  Sense strand starting at position 1273 of SEQ ID NO: 143
caagguauucuacgaacac

SEQ ID NO: 14609 - RNA, 19 nt, Artificial Sequence
  Description of Artificial Sequence: Synthetic oligonucleotide
  Antisense strand to SEQ ID NO: 14608
guguucguagaauaccuug

SEQ ID NO: 14610 - RNA, 19 nt, Artificial Sequence
  Description of Artificial Sequence: Synthetic oligonucleotide
  Sense strand starting at position 1236 of SEQ ID NO: 143
gggccuuaacucugagaug

SEQ ID NO: 14611 - RNA, 19 nt, Artificial Sequence
  Description of Artificial Sequence: Synthetic oligonucleotide
  Antisense strand to SEQ ID NO: 14610
caucucagaguuaaggccc

SEQ ID NO: 14612 - RNA, 19 nt, Artificial Sequence
  Description of Artificial Sequence: Synthetic oligonucleotide
  Sense strand starting at position 1001 of SEQ ID NO: 143
ucuuguauauuacuacaga

SEQ ID NO: 14613 - RNA, 19 nt, Artificial Sequence
  Description of Artificial Sequence: Synthetic oligonucleotide
  Antisense strand to SEQ ID NO: 14612
ucuguaguaauauacaaga

SEQ ID NO: 14614 - RNA, 19 nt, Artificial Sequence
  Description of Artificial Sequence: Synthetic oligonucleotide
  Sense strand starting at position 932 of SEQ ID NO: 143
ugagguuguaugcaucaga

SEQ ID NO: 14615 - RNA, 19 nt, Artificial Sequence
  Description of Artificial Sequence: Synthetic oligonucleotide
  Antisense strand to SEQ ID NO: 14614
ucugaugcauacaaccuca

SEQ ID NO: 14616 - RNA, 19 nt, Artificial Sequence
  Description of Artificial Sequence: Synthetic oligonucleotide
  Sense strand starting at position 872 of SEQ ID NO: 143
uuuaacaaggguugacauu

SEQ ID NO: 14617 - RNA, 19 nt, Artificial Sequence
  Description of Artificial Sequence: Synthetic oligonucleotide
  Antisense strand to SEQ ID NO: 14616
aaugucaacccuuguuaaa

SEQ ID NO: 14618 - RNA, 19 nt, Artificial Sequence
  Description of Artificial Sequence: Synthetic oligonucleotide
  Sense strand starting at position 790 of SEQ ID NO: 143
gagguuaaucgucacaaau

SEQ ID NO: 14619 - RNA, 19 nt, Artificial Sequence
  Description of Artificial Sequence: Synthetic oligonucleotide
  Antisense strand to SEQ ID NO: 14618
auuugugacgauuaaccuc

SEQ ID NO: 14620 - RNA, 19 nt, Artificial Sequence
  Description of Artificial Sequence: Synthetic oligonucleotide
  Sense strand starting at position 789 of SEQ ID NO: 143
ugagguuaaucgucacaaa

SEQ ID NO: 14621 - RNA, 19 nt, Artificial Sequence
  Description of Artificial Sequence: Synthetic oligonucleotide
  Antisense strand to SEQ ID NO: 14620
uuugugacgauuaaccuca

SEQ ID NO: 14622 - RNA, 19 nt, Artificial Sequence
  Description of Artificial Sequence: Synthetic oligonucleotide
  Sense strand starting at position 783 of SEQ ID NO: 143
ccuauaugagguuaaucgu

SEQ ID NO: 14623 - RNA, 19 nt, Artificial Sequence
  Description of Artificial Sequence: Synthetic oligonucleotide
  Antisense strand to SEQ ID NO: 14622
acgauuaaccucauauagg

SEQ ID NO: 14624 - RNA, 19 nt, Artificial Sequence
  Description of Artificial Sequence: Synthetic oligonucleotide
  Sense strand starting at position 752 of SEQ ID NO: 143
ccgaaauaagauugccaga

SEQ ID NO: 14625 - RNA, 19 nt, Artificial Sequence
  Description of Artificial Sequence: Synthetic oligonucleotide
  Antisense strand to SEQ ID NO: 14624
ucuggcaaucuuauuucgg

SEQ ID NO: 14626 - RNA, 19 nt, Artificial Sequence
  Description of Artificial Sequence: Synthetic oligonucleotide
  Sense strand starting at position 136 of SEQ ID NO: 143
augaaaugcgggugggaau

SEQ ID NO: 14627 - RNA, 19 nt, Artificial Sequence
  Description of Artificial Sequence: Synthetic oligonucleotide
  Antisense strand to SEQ ID NO: 14626
auucccacccgcauuucau

SEQ ID NO: 14628 - RNA, 19 nt, Artificial Sequence
  Description of Artificial Sequence: Synthetic oligonucleotide
  Sense strand starting at position 101 of SEQ ID NO: 143
aguggaaguggugaucuua

SEQ ID NO: 14629 - RNA, 19 nt, Artificial Sequence
  Description of Artificial Sequence: Synthetic oligonucleotide
  Antisense strand to SEQ ID NO: 14628
uaagaucaccacuuccacu

SEQ ID NO: 14630 - RNA, 19 nt, Artificial Sequence
  Description of Artificial Sequence: Synthetic oligonucleotide
  Sense strand starting at position 62 of SEQ ID NO: 143
gcugaucauuaacugagaa

SEQ ID NO: 14631 - RNA, 19 nt, Artificial Sequence
  Description of Artificial Sequence: Synthetic oligonucleotide
  Antisense strand to SEQ ID NO: 14630
uucucaguuaaugaucagc

SEQ ID NO: 14632 - RNA, 19 nt, Artificial Sequence
  Description of Artificial Sequence: Synthetic oligonucleotide
  Sense strand starting at position 59 of SEQ ID NO: 143
gcugcugaucauuaacuga

SEQ ID NO: 14633 - RNA, 19 nt, Artificial Sequence
  Description of Artificial Sequence: Synthetic oligonucleotide
  Antisense strand to SEQ ID NO: 14632
ucaguuaaugaucagcagc

SEQ ID NO: 14634 - RNA, 19 nt, Artificial Sequence
  Description of Artificial Sequence: Synthetic oligonucleotide
  Sense strand starting at position 298 of SEQ ID NO: 144
ucaugugagguacacauua

SEQ ID NO: 14635 - RNA, 19 nt, Artificial Sequence
  Description of Artificial Sequence: Synthetic oligonucleotide
  Antisense strand to SEQ ID NO: 14634
uaauguguaccucacauga

SEQ ID NO: 14636 - RNA, 19 nt, Artificial Sequence
  Description of Artificial Sequence: Synthetic oligonucleotide
  Sense strand starting at position 735 of SEQ ID NO: 144
agucgaugcuccuuccaca

SEQ ID NO: 14637 - RNA, 19 nt, Artificial Sequence
  Description of Artificial Sequence: Synthetic oligonucleotide
  Antisense strand to SEQ ID NO: 14636
uguggaaggagcaucgacu

SEQ ID NO: 14638 - RNA, 19 nt, Artificial Sequence
  Description of Artificial Sequence: Synthetic oligonucleotide
  Sense strand starting at position 801 of SEQ ID NO: 144
gggucacccugacaagaga

SEQ ID NO: 14639 - RNA, 19 nt, Artificial Sequence
  Description of Artificial Sequence: Synthetic oligonucleotide
  Antisense strand to SEQ ID NO: 14638
ucucuugucagggugaccc

SEQ ID NO: 14640 - RNA, 19 nt, Artificial Sequence
  Description of Artificial Sequence: Synthetic oligonucleotide
  Sense strand starting at position 861 of SEQ ID NO: 144
acuacugagcuuuguaucu

SEQ ID NO: 14641 - RNA, 19 nt, Artificial Sequence
  Description of Artificial Sequence: Synthetic oligonucleotide
  Antisense strand to SEQ ID NO: 14640
agauacaaagcucaguagu

SEQ ID NO: 14642 - RNA, 19 nt, Artificial Sequence
  Description of Artificial Sequence: Synthetic oligonucleotide
  Sense strand starting at position 995 of SEQ ID NO: 144
cacauuauucuccguugga

SEQ ID NO: 14643 - RNA, 19 nt, Artificial Sequence
  Description of Artificial Sequence: Synthetic oligonucleotide
  Antisense strand to SEQ ID NO: 14642
uccaacggagaauaaugug

SEQ ID NO: 14644 - RNA, 19 nt, Artificial Sequence
  Description of Artificial Sequence: Synthetic oligonucleotide
  Sense strand starting at position 996 of SEQ ID NO: 144
acauuauucuccguuggac

SEQ ID NO: 14645 - RNA, 19 nt, Artificial Sequence
  Description of Artificial Sequence: Synthetic oligonucleotide
  Antisense strand to SEQ ID NO: 14644
guccaacggagaauaaugu

SEQ ID NO: 14646 - RNA, 19 nt, Artificial Sequence
  Description of Artificial Sequence: Synthetic oligonucleotide
  Sense strand starting at position 998 of SEQ ID NO: 144
auuauucuccguuggacca

SEQ ID NO: 14647 - RNA, 19 nt, Artificial Sequence
  Description of Artificial Sequence: Synthetic oligonucleotide
  Antisense strand to SEQ ID NO: 14646
ugguccaacggagaauaau

SEQ ID NO: 14648 - RNA, 19 nt, Artificial Sequence
  Description of Artificial Sequence: Synthetic oligonucleotide
  Sense strand starting at position 1027 of SEQ ID NO: 144
gugucuguccuagaauauu

SEQ ID NO: 14649 - RNA, 19 nt, Artificial Sequence
  Description of Artificial Sequence: Synthetic oligonucleotide
  Antisense strand to SEQ ID NO: 14648
aauauucuaggacagacac

SEQ ID NO: 14650 - RNA, 19 nt, Artificial Sequence
  Description of Artificial Sequence: Synthetic oligonucleotide
  Sense strand starting at position 1035 of SEQ ID NO: 144
ccuagaauauucuuugcag

SEQ ID NO: 14651 - RNA, 19 nt, Artificial Sequence
  Description of Artificial Sequence: Synthetic oligonucleotide
  Antisense strand to SEQ ID NO: 14650
cugcaaagaauauucuagg

SEQ ID NO: 14652 - RNA, 19 nt, Artificial Sequence
  Description of Artificial Sequence: Synthetic oligonucleotide
  Sense strand starting at position 1036 of SEQ ID NO: 144
cuagaauauucuuugcaga

SEQ ID NO: 14653 - RNA, 19 nt, Artificial Sequence
  Description of Artificial Sequence: Synthetic oligonucleotide
  Antisense strand to SEQ ID NO: 14652
ucugcaaagaauauucuag

SEQ ID NO: 14654 - RNA, 19 nt, Artificial Sequence
  Description of Artificial Sequence: Synthetic oligonucleotide
  Sense strand starting at position 1038 of SEQ ID NO: 144
agaauauucuuugcagagg

SEQ ID NO: 14655 - RNA, 19 nt, Artificial Sequence
  Description of Artificial Sequence: Synthetic oligonucleotide
  Antisense strand to SEQ ID NO: 14654
ccucugcaaagaauauucu

SEQ ID NO: 14656 - RNA, 19 nt, Artificial Sequence
  Description of Artificial Sequence: Synthetic oligonucleotide
  Sense strand starting at position 1039 of SEQ ID NO: 144
gaauauucuuugcagagga

SEQ ID NO: 14657 - RNA, 19 nt, Artificial Sequence
  Description of Artificial Sequence: Synthetic oligonucleotide
  Antisense strand to SEQ ID NO: 14656
uccucugcaaagaauauuc

SEQ ID NO: 14658 - RNA, 19 nt, Artificial Sequence
  Description of Artificial Sequence: Synthetic oligonucleotide
  Sense strand starting at position 1071 of SEQ ID NO: 144
gcagcagguucagagaaga

SEQ ID NO: 14659 - RNA, 19 nt, Artificial Sequence
  Description of Artificial Sequence: Synthetic oligonucleotide
  Antisense strand to SEQ ID NO: 14658
ucuucucugaaccugcugc

SEQ ID NO: 14660 - RNA, 19 nt, Artificial Sequence
  Description of Artificial Sequence: Synthetic oligonucleotide
  Sense strand starting at position 1161 of SEQ ID NO: 144
gacgcuuugcugggaaaga

SEQ ID NO: 14661 - RNA, 19 nt, Artificial Sequence
  Description of Artificial Sequence: Synthetic oligonucleotide
  Antisense strand to SEQ ID NO: 14660
ucuuucccagcaaagcguc

SEQ ID NO: 14662 - RNA, 19 nt, Artificial Sequence
  Description of Artificial Sequence: Synthetic oligonucleotide
  Sense strand starting at position 1286 of SEQ ID NO: 144
gggccaaaucuccgaacca

SEQ ID NO: 14663 - RNA, 19 nt, Artificial Sequence
  Description of Artificial Sequence: Synthetic oligonucleotide
  Antisense strand to SEQ ID NO: 14662
ugguucggagauuuggccc

SEQ ID NO: 14664 - RNA, 19 nt, Artificial Sequence
  Description of Artificial Sequence: Synthetic oligonucleotide
  Sense strand starting at position 1454 of SEQ ID NO: 144
ggcaaacacauaugugaug

SEQ ID NO: 14665 - RNA, 19 nt, Artificial Sequence
  Description of Artificial Sequence: Synthetic oligonucleotide
  Antisense strand to SEQ ID NO: 14664
caucacauauguguuugcc

SEQ ID NO: 14666 - RNA, 19 nt, Artificial Sequence
  Description of Artificial Sequence: Synthetic oligonucleotide
  Sense strand starting at position 1514 of SEQ ID NO: 144
uggaguuugucaucgaaga

SEQ ID NO: 14667 - RNA, 19 nt, Artificial Sequence
  Description of Artificial Sequence: Synthetic oligonucleotide
  Antisense strand to SEQ ID NO: 14666
ucuucgaugacaaacucca

SEQ ID NO: 14668 - RNA, 19 nt, Artificial Sequence
  Description of Artificial Sequence: Synthetic oligonucleotide
  Sense strand starting at position 1515 of SEQ ID NO: 144
ggaguuugucaucgaagag

SEQ ID NO: 14669 - RNA, 19 nt, Artificial Sequence
  Description of Artificial Sequence: Synthetic oligonucleotide
  Antisense strand to SEQ ID NO: 14668
cucuucgaugacaaacucc

SEQ ID NO: 14670 - RNA, 19 nt, Artificial Sequence
  Description of Artificial Sequence: Synthetic oligonucleotide
  Sense strand starting at position 1516 of SEQ ID NO: 144
gaguuugucaucgaagaga

SEQ ID NO: 14671 - RNA, 19 nt, Artificial Sequence
  Description of Artificial Sequence: Synthetic oligonucleotide
  Antisense strand to SEQ ID NO: 14670
ucucuucgaugacaaacuc

SEQ ID NO: 14672 - RNA, 19 nt, Artificial Sequence
  Description of Artificial Sequence: Synthetic oligonucleotide
  Sense strand starting at position 2265 of SEQ ID NO: 144
gggcucugucccguuucau

SEQ ID NO: 14673 - RNA, 19 nt, Artificial Sequence
  Description of Artificial Sequence: Synthetic oligonucleotide
  Antisense strand to SEQ ID NO: 14672
augaaacgggacagagccc

SEQ ID NO: 14674 - RNA, 19 nt, Artificial Sequence
  Description of Artificial Sequence: Synthetic oligonucleotide
  Sense strand starting at position 2286 of SEQ ID NO: 144
cgcucugggucuuccaaau

SEQ ID NO: 14675 - RNA, 19 nt, Artificial Sequence
  Description of Artificial Sequence: Synthetic oligonucleotide
  Antisense strand to SEQ ID NO: 14674
auuuggaagacccagagcg

SEQ ID NO: 14676 - RNA, 19 nt, Artificial Sequence
  Description of Artificial Sequence: Synthetic oligonucleotide
  Sense strand starting at position 2381 of SEQ ID NO: 144
ugcugauucguuccgaguu

SEQ ID NO: 14677 - RNA, 19 nt, Artificial Sequence
  Description of Artificial Sequence: Synthetic oligonucleotide
  Antisense strand to SEQ ID NO: 14676
aacucggaacgaaucagca

SEQ ID NO: 14678 - RNA, 19 nt, Artificial Sequence
  Description of Artificial Sequence: Synthetic oligonucleotide
  Sense strand starting at position 2685 of SEQ ID NO: 144
gccugaugcccgcuugauu

SEQ ID NO: 14679 - RNA, 19 nt, Artificial Sequence
  Description of Artificial Sequence: Synthetic oligonucleotide
  Antisense strand to SEQ ID NO: 14678
aaucaagcgggcaucaggc

SEQ ID NO: 14680 - RNA, 19 nt, Artificial Sequence
  Description of Artificial Sequence: Synthetic oligonucleotide
  Sense strand starting at position 2732 of SEQ ID NO: 144
guguacuaguucccucuua

SEQ ID NO: 14681 - RNA, 19 nt, Artificial Sequence
  Description of Artificial Sequence: Synthetic oligonucleotide
  Antisense strand to SEQ ID NO: 14680
uaagagggaacuaguacac

SEQ ID NO: 14682 - RNA, 19 nt, Artificial Sequence
  Description of Artificial Sequence: Synthetic oligonucleotide
  Sense strand starting at position 2745 of SEQ ID NO: 144
cucuuacccgaccauagau

SEQ ID NO: 14683 - RNA, 19 nt, Artificial Sequence
  Description of Artificial Sequence: Synthetic oligonucleotide
  Antisense strand to SEQ ID NO: 14682
aucuauggucggguaagag

SEQ ID NO: 14684 - RNA, 19 nt, Artificial Sequence
  Description of Artificial Sequence: Synthetic oligonucleotide
  Sense strand starting at position 2982 of SEQ ID NO: 144
cuugguuacuuuggauaaa

SEQ ID NO: 14685 - RNA, 19 nt, Artificial Sequence
  Description of Artificial Sequence: Synthetic oligonucleotide
  Antisense strand to SEQ ID NO: 14684
uuuauccaaaguaaccaag

SEQ ID NO: 14686 - RNA, 19 nt, Artificial Sequence
  Description of Artificial Sequence: Synthetic oligonucleotide
  Sense strand starting at position 2983 of SEQ ID NO: 144
uugguuacuuuggauaaau

SEQ ID NO: 14687 - RNA, 19 nt, Artificial Sequence
  Description of Artificial Sequence: Synthetic oligonucleotide
  Antisense strand to SEQ ID NO: 14686
auuuauccaaaguaaccaa

SEQ ID NO: 14688 - RNA, 19 nt, Artificial Sequence
  Description of Artificial Sequence: Synthetic oligonucleotide
  Sense strand starting at position 2994 of SEQ ID NO: 144
ggauaaauugcuugcuucu

SEQ ID NO: 14689 - RNA, 19 nt, Artificial Sequence
  Description of Artificial Sequence: Synthetic oligonucleotide
  Antisense strand to SEQ ID NO: 14688
agaagcaagcaauuuaucc

SEQ ID NO: 14690 - RNA, 19 nt, Artificial Sequence
  Description of Artificial Sequence: Synthetic oligonucleotide
  Sense strand starting at position 3068 of SEQ ID NO: 144
cggcgauugagagaaucuu

SEQ ID NO: 14691 - RNA, 19 nt, Artificial Sequence
  Description of Artificial Sequence: Synthetic oligonucleotide
  Antisense strand to SEQ ID NO: 14690
aagauucucucaaucgccg

SEQ ID NO: 14692 - RNA, 19 nt, Artificial Sequence
  Description of Artificial Sequence: Synthetic oligonucleotide
  Sense strand starting at position 3124 of SEQ ID NO: 144
uccggaaagauaugcacua

SEQ ID NO: 14693 - RNA, 19 nt, Artificial Sequence
  Description of Artificial Sequence: Synthetic oligonucleotide
  Antisense strand to SEQ ID NO: 14692
uagugcauaucuuuccgga

SEQ ID NO: 14694 - RNA, 19 nt, Artificial Sequence
  Description of Artificial Sequence: Synthetic oligonucleotide
  Sense strand starting at position 3125 of SEQ ID NO: 144
ccggaaagauaugcacuaa

SEQ ID NO: 14695 - RNA, 19 nt, Artificial Sequence
  Description of Artificial Sequence: Synthetic oligonucleotide
  Antisense strand to SEQ ID NO: 14694
uuagugcauaucuuuccgg

SEQ ID NO: 14696 - RNA, 19 nt, Artificial Sequence
  Description of Artificial Sequence: Synthetic oligonucleotide
  Sense strand starting at position 3181 of SEQ ID NO: 144
acagauaugcacuagcuga

SEQ ID NO: 14697 - RNA, 19 nt, Artificial Sequence
  Description of Artificial Sequence: Synthetic oligonucleotide
  Antisense strand to SEQ ID NO: 14696
ucagcuagugcauaucugu

SEQ ID NO: 14698 - RNA, 19 nt, Artificial Sequence
  Description of Artificial Sequence: Synthetic oligonucleotide
  Sense strand starting at position 3189 of SEQ ID NO: 144
gcacuagcugaagacauua

SEQ ID NO: 14699 - RNA, 19 nt, Artificial Sequence
  Description of Artificial Sequence: Synthetic oligonucleotide
  Antisense strand to SEQ ID NO: 14698
uaaugucuucagcuagugc

SEQ ID NO: 14700 - RNA, 19 nt, Artificial Sequence
  Description of Artificial Sequence: Synthetic oligonucleotide
  Sense strand starting at position 3226 of SEQ ID NO: 144
uuuggugaaucuguauauc

SEQ ID NO: 14701 - RNA, 19 nt, Artificial Sequence
  Description of Artificial Sequence: Synthetic oligonucleotide
  Antisense strand to SEQ ID NO: 14700
gauauacagauucaccaaa

SEQ ID NO: 14702 - RNA, 19 nt, Artificial Sequence
  Description of Artificial Sequence: Synthetic oligonucleotide
  Sense strand starting at position 3229 of SEQ ID NO: 144
ggugaaucuguauauccua

SEQ ID NO: 14703 - RNA, 19 nt, Artificial Sequence
  Description of Artificial Sequence: Synthetic oligonucleotide
  Antisense strand to SEQ ID NO: 14702
uaggauauacagauucacc

SEQ ID NO: 14704 - RNA, 19 nt, Artificial Sequence
  Description of Artificial Sequence: Synthetic oligonucleotide
  Sense strand starting at position 3269 of SEQ ID NO: 144
acuacuguguaauagaauu

SEQ ID NO: 14705 - RNA, 19 nt, Artificial Sequence
  Description of Artificial Sequence: Synthetic oligonucleotide
  Antisense strand to SEQ ID NO: 14704
aauucuauuacacaguagu

SEQ ID NO: 14706 - RNA, 19 nt, Artificial Sequence
  Description of Artificial Sequence: Synthetic oligonucleotide
  Sense strand starting at position 3633 of SEQ ID NO: 144
uguguaccaucugauagag

SEQ ID NO: 14707 - RNA, 19 nt, Artificial Sequence
  Description of Artificial Sequence: Synthetic oligonucleotide
  Antisense strand to SEQ ID NO: 14706
cucuaucagaugguacaca

SEQ ID NO: 14708 - RNA, 19 nt, Artificial Sequence
  Description of Artificial Sequence: Synthetic oligonucleotide
  Sense strand starting at position 3653 of SEQ ID NO: 144
cgacaacuauuccaagagu

SEQ ID NO: 14709 - RNA, 19 nt, Artificial Sequence
  Description of Artificial Sequence: Synthetic oligonucleotide
  Antisense strand to SEQ ID NO: 14708
acucuuggaauaguugucg

SEQ ID NO: 14710 - RNA, 19 nt, Artificial Sequence
  Description of Artificial Sequence: Synthetic oligonucleotide
  Sense strand starting at position 3839 of SEQ ID NO: 144
aggagcaucugacaauguu

SEQ ID NO: 14711 - RNA, 19 nt, Artificial Sequence
  Description of Artificial Sequence: Synthetic oligonucleotide
  Antisense strand to SEQ ID NO: 14710
aacauugucagaugcuccu

SEQ ID NO: 14712 - RNA, 19 nt, Artificial Sequence
  Description of Artificial Sequence: Synthetic oligonucleotide
  Sense strand starting at position 3890 of SEQ ID NO: 144
ccugaauccuaggagaacu

SEQ ID NO: 14713 - RNA, 19 nt, Artificial Sequence
  Description of Artificial Sequence: Synthetic oligonucleotide
  Antisense strand to SEQ ID NO: 14712
aguucuccuaggauucagg

SEQ ID NO: 14714 - RNA, 19 nt, Artificial Sequence
  Description of Artificial Sequence: Synthetic oligonucleotide
  Sense strand starting at position 14 of SEQ ID NO: 145
cuucuagaauuguuuaaga

SEQ ID NO: 14715 - RNA, 19 nt, Artificial Sequence
  Description of Artificial Sequence: Synthetic oligonucleotide
  Antisense strand to SEQ ID NO: 14714
ucuuaaacaauucuagaag

SEQ ID NO: 14716 - RNA, 19 nt, Artificial Sequence
  Description of Artificial Sequence: Synthetic oligonucleotide
  Sense strand starting at position 117 of SEQ ID NO: 145
augauucugagaggucuaa

SEQ ID NO: 14717 - RNA, 19 nt, Artificial Sequence
  Description of Artificial Sequence: Synthetic oligonucleotide
  Antisense strand to SEQ ID NO: 14716
uuagaccucucagaaucau

SEQ ID NO: 14718 - RNA, 19 nt, Artificial Sequence
  Description of Artificial Sequence: Synthetic oligonucleotide
  Sense strand starting at position 121 of SEQ ID NO: 145
uucugagaggucuaaguga

SEQ ID NO: 14719 - RNA, 19 nt, Artificial Sequence
  Description of Artificial Sequence: Synthetic oligonucleotide
  Antisense strand to SEQ ID NO: 14718
ucacuuagaccucucagaa

SEQ ID NO: 14720 - RNA, 19 nt, Artificial Sequence
  Description of Artificial Sequence: Synthetic oligonucleotide
  Sense strand starting at position 183 of SEQ ID NO: 145
ggaugcaucuaaguugaaa

SEQ ID NO: 14721 - RNA, 19 nt, Artificial Sequence
  Description of Artificial Sequence: Synthetic oligonucleotide
  Antisense strand to SEQ ID NO: 14720
uuucaacuuagaugcaucc

SEQ ID NO: 14722 - RNA, 19 nt, Artificial Sequence
  Description of Artificial Sequence: Synthetic oligonucleotide
  Sense strand starting at position 436 of SEQ ID NO: 145
ugcugaucucugcuguagu

SEQ ID NO: 14723 - RNA, 19 nt, Artificial Sequence
  Description of Artificial Sequence: Synthetic oligonucleotide
  Antisense strand to SEQ ID NO: 14722
acuacagcagagaucagca

SEQ ID NO: 14724 - RNA, 19 nt, Artificial Sequence
  Description of Artificial Sequence: Synthetic oligonucleotide
  Sense strand starting at position 561 of SEQ ID NO: 145
aaugaaauccagugguucu

SEQ ID NO: 14725 - RNA, 19 nt, Artificial Sequence
  Description of Artificial Sequence: Synthetic oligonucleotide
  Antisense strand to SEQ ID NO: 14724
agaaccacuggauuucauu

SEQ ID NO: 14726 - RNA, 19 nt, Artificial Sequence
  Description of Artificial Sequence: Synthetic oligonucleotide
  Sense strand starting at position 614 of SEQ ID NO: 145
cugcuuuaggcagaaucua

SEQ ID NO: 14727 - RNA, 19 nt, Artificial Sequence
  Description of Artificial Sequence: Synthetic oligonucleotide
  Antisense strand to SEQ ID NO: 14726
uagauucugccuaaagcag

SEQ ID NO: 14728 - RNA, 19 nt, Artificial Sequence
  Description of Artificial Sequence: Synthetic oligonucleotide
  Sense strand starting at position 629 of SEQ ID NO: 145
ucuaaauugguuuagucuu

SEQ ID NO: 14729 - RNA, 19 nt, Artificial Sequence
  Description of Artificial Sequence: Synthetic oligonucleotide
  Antisense strand to SEQ ID NO: 14728
aagacuaaaccaauuuaga

SEQ ID NO: 14730 - RNA, 19 nt, Artificial Sequence
  Description of Artificial Sequence: Synthetic oligonucleotide
  Sense strand starting at position 636 of SEQ ID NO: 145
ugguuuagucuuuaacuga

SEQ ID NO: 14731 - RNA, 19 nt, Artificial Sequence
  Description of Artificial Sequence: Synthetic oligonucleotide
  Antisense strand to SEQ ID NO: 14730
ucaguuaaagacuaaacca

SEQ ID NO: 14732 - RNA, 19 nt, Artificial Sequence
  Description of Artificial Sequence: Synthetic oligonucleotide
  Sense strand starting at position 860 of SEQ ID NO: 145
gaggauacauuggagauuu

SEQ ID NO: 14733 - RNA, 19 nt, Artificial Sequence
  Description of Artificial Sequence: Synthetic oligonucleotide
  Antisense strand to SEQ ID NO: 14732
aaaucuccaauguauccuc

SEQ ID NO: 14734 - RNA, 19 nt, Artificial Sequence
  Description of Artificial Sequence: Synthetic oligonucleotide
  Sense strand starting at position 884 of SEQ ID NO: 145
ucauaagauccucaguagu

SEQ ID NO: 14735 - RNA, 19 nt, Artificial Sequence
  Description of Artificial Sequence: Synthetic oligonucleotide
  Antisense strand to SEQ ID NO: 14734
acuacugaggaucuuauga

SEQ ID NO: 14736 - RNA, 19 nt, Artificial Sequence
  Description of Artificial Sequence: Synthetic oligonucleotide
  Sense strand starting at position 886 of SEQ ID NO: 145
auaagauccucaguaguau

SEQ ID NO: 14737 - RNA, 19 nt, Artificial Sequence
  Description of Artificial Sequence: Synthetic oligonucleotide
  Antisense strand to SEQ ID NO: 14736
auacuacugaggaucuuau

SEQ ID NO: 14738 - RNA, 19 nt, Artificial Sequence
  Description of Artificial Sequence: Synthetic oligonucleotide
  Sense strand starting at position 887 of SEQ ID NO: 145
uaagauccucaguaguaug

SEQ ID NO: 14739 - RNA, 19 nt, Artificial Sequence
  Description of Artificial Sequence: Synthetic oligonucleotide
  Antisense strand to SEQ ID NO: 14738
cauacuacugaggaucuua

SEQ ID NO: 14740 - RNA, 19 nt, Artificial Sequence
  Description of Artificial Sequence: Synthetic oligonucleotide
  Sense strand starting at position 911 of SEQ ID NO: 145
gguagauugacaugugaac

SEQ ID NO: 14741 - RNA, 19 nt, Artificial Sequence
  Description of Artificial Sequence: Synthetic oligonucleotide
  Antisense strand to SEQ ID NO: 14740
guucacaugucaaucuacc

SEQ ID NO: 14742 - RNA, 19 nt, Artificial Sequence
  Description of Artificial Sequence: Synthetic oligonucleotide
  Sense strand starting at position 945 of SEQ ID NO: 145
uucuauuaucgauagcauc

SEQ ID NO: 14743 - RNA, 19 nt, Artificial Sequence
  Description of Artificial Sequence: Synthetic oligonucleotide
  Antisense strand to SEQ ID NO: 14742
gaugcuaucgauaauagaa

SEQ ID NO: 14744 - RNA, 19 nt, Artificial Sequence
  Description of Artificial Sequence: Synthetic oligonucleotide
  Sense strand starting at position 1037 of SEQ ID NO: 145
gggaacuauuguguuuaau

SEQ ID NO: 14745 - RNA, 19 nt, Artificial Sequence
  Description of Artificial Sequence: Synthetic oligonucleotide
  Antisense strand to SEQ ID NO: 14744
auuaaacacaauaguuccc

SEQ ID NO: 14746 - RNA, 19 nt, Artificial Sequence
  Description of Artificial Sequence: Synthetic oligonucleotide
  Sense strand starting at position 1055 of SEQ ID NO: 145
uaaguauuacuaugugaag

SEQ ID NO: 14747 - RNA, 19 nt, Artificial Sequence
  Description of Artificial Sequence: Synthetic oligonucleotide
  Antisense strand to SEQ ID NO: 14746
cuucacauaguaauacuua

SEQ ID NO: 14748 - RNA, 19 nt, Artificial Sequence
  Description of Artificial Sequence: Synthetic oligonucleotide
  Sense strand starting at position 1056 of SEQ ID NO: 145
aaguauuacuaugugaaga

SEQ ID NO: 14749 - RNA, 19 nt, Artificial Sequence
  Description of Artificial Sequence: Synthetic oligonucleotide
  Antisense strand to SEQ ID NO: 14748
ucuucacauaguaauacuu

SEQ ID NO: 14750 - RNA, 19 nt, Artificial Sequence
  Description of Artificial Sequence: Synthetic oligonucleotide
  Sense strand starting at position 1061 of SEQ ID NO: 145
uuacuaugugaagaugugu

SEQ ID NO: 14751 - RNA, 19 nt, Artificial Sequence
  Description of Artificial Sequence: Synthetic oligonucleotide
  Antisense strand to SEQ ID NO: 14750
acacaucuucacauaguaa

SEQ ID NO: 14752 - RNA, 19 nt, Artificial Sequence
  Description of Artificial Sequence: Synthetic oligonucleotide
  Sense strand starting at position 1134 of SEQ ID NO: 145
accauaggauucgcagaaa

SEQ ID NO: 14753 - RNA, 19 nt, Artificial Sequence
  Description of Artificial Sequence: Synthetic oligonucleotide
  Antisense strand to SEQ ID NO: 14752
uuucugcgaauccuauggu

SEQ ID NO: 14754 - RNA, 19 nt, Artificial Sequence
  Description of Artificial Sequence: Synthetic oligonucleotide
  Sense strand starting at position 1329 of SEQ ID NO: 145
ucaagcaauuaggugagaa

SEQ ID NO: 14755 - RNA, 19 nt, Artificial Sequence
  Description of Artificial Sequence: Synthetic oligonucleotide
  Antisense strand to SEQ ID NO: 14754
uucucaccuaauugcuuga

SEQ ID NO: 14756 - RNA, 19 nt, Artificial Sequence
  Description of Artificial Sequence: Synthetic oligonucleotide
  Sense strand starting at position 1339 of SEQ ID NO: 145
aggugagaauuccuuacuu

SEQ ID NO: 14757 - RNA, 19 nt, Artificial Sequence
  Description of Artificial Sequence: Synthetic oligonucleotide
  Antisense strand to SEQ ID NO: 14756
aaguaaggaauucucaccu

SEQ ID NO: 14758 - RNA, 19 nt, Artificial Sequence
  Description of Artificial Sequence: Synthetic oligonucleotide
  Sense strand starting at position 1423 of SEQ ID NO: 145
uuucuuguucuauagugaa

SEQ ID NO: 14759 - RNA, 19 nt, Artificial Sequence
  Description of Artificial Sequence: Synthetic oligonucleotide
  Antisense strand to SEQ ID NO: 14758
uucacuauagaacaagaaa

SEQ ID NO: 14760 - RNA, 19 nt, Artificial Sequence
  Description of Artificial Sequence: Synthetic oligonucleotide
  Sense strand starting at position 1806 of SEQ ID NO: 145
auauauugcuucuuggaca

SEQ ID NO: 14761 - RNA, 19 nt, Artificial Sequence
  Description of Artificial Sequence: Synthetic oligonucleotide
  Antisense strand to SEQ ID NO: 14760
uguccaagaagcaauauau

SEQ ID NO: 14762 - RNA, 19 nt, Artificial Sequence
  Description of Artificial Sequence: Synthetic oligonucleotide
  Sense strand starting at position 1869 of SEQ ID NO: 145
auagcagcacuguagaaau

SEQ ID NO: 14763 - RNA, 19 nt, Artificial Sequence
  Description of Artificial Sequence: Synthetic oligonucleotide
  Antisense strand to SEQ ID NO: 14762
auuucuacagugcugcuau

SEQ ID NO: 14764 - RNA, 19 nt, Artificial Sequence
  Description of Artificial Sequence: Synthetic oligonucleotide
  Sense strand starting at position 1871 of SEQ ID NO: 145
agcagcacuguagaaauaa

SEQ ID NO: 14765 - RNA, 19 nt, Artificial Sequence
  Description of Artificial Sequence: Synthetic oligonucleotide
  Antisense strand to SEQ ID NO: 14764
uuauuucuacagugcugcu

SEQ ID NO: 14766 - RNA, 19 nt, Artificial Sequence
  Description of Artificial Sequence: Synthetic oligonucleotide
  Sense strand starting at position 1906 of SEQ ID NO: 145
acuguaauccuccaguuac

SEQ ID NO: 14767 - RNA, 19 nt, Artificial Sequence
  Description of Artificial Sequence: Synthetic oligonucleotide
  Antisense strand to SEQ ID NO: 14766
guaacuggaggauuacagu

SEQ ID NO: 14768 - RNA, 19 nt, Artificial Sequence
  Description of Artificial Sequence: Synthetic oligonucleotide
  Sense strand starting at position 1944 of SEQ ID NO: 145
ggcuuuacuccacaaacag

SEQ ID NO: 14769 - RNA, 19 nt, Artificial Sequence
  Description of Artificial Sequence: Synthetic oligonucleotide
  Antisense strand to SEQ ID NO: 14768
cuguuuguggaguaaagcc

SEQ ID NO: 14770 - RNA, 19 nt, Artificial Sequence
  Description of Artificial Sequence: Synthetic oligonucleotide
  Sense strand starting at position 2030 of SEQ ID NO: 145
gguggagauuccuccacaa

SEQ ID NO: 14771 - RNA, 19 nt, Artificial Sequence
  Description of Artificial Sequence: Synthetic oligonucleotide
  Antisense strand to SEQ ID NO: 14770
uuguggaggaaucuccacc

SEQ ID NO: 14772 - RNA, 19 nt, Artificial Sequence
  Description of Artificial Sequence: Synthetic oligonucleotide
  Sense strand starting at position 2051 of SEQ ID NO: 145
gguagaggucaccagcaua

SEQ ID NO: 14773 - RNA, 19 nt, Artificial Sequence
  Description of Artificial Sequence: Synthetic oligonucleotide
  Antisense strand to SEQ ID NO: 14772
uaugcuggugaccucuacc

SEQ ID NO: 14774 - RNA, 19 nt, Artificial Sequence
  Description of Artificial Sequence: Synthetic oligonucleotide
  Sense strand starting at position 2078 of SEQ ID NO: 145
gggauauuguauguaacug

SEQ ID NO: 14775 - RNA, 19 nt, Artificial Sequence
  Description of Artificial Sequence: Synthetic oligonucleotide
  Antisense strand to SEQ ID NO: 14774
caguuacauacaauauccc

SEQ ID NO: 14776 - RNA, 19 nt, Artificial Sequence
  Description of Artificial Sequence: Synthetic oligonucleotide
  Sense strand starting at position 2133 of SEQ ID NO: 145
auacgugaaagcuaagaua

SEQ ID NO: 14777 - RNA, 19 nt, Artificial Sequence
  Description of Artificial Sequence: Synthetic oligonucleotide
  Antisense strand to SEQ ID NO: 14776
uaucuuagcuuucacguau

SEQ ID NO: 14778 - RNA, 19 nt, Artificial Sequence
  Description of Artificial Sequence: Synthetic oligonucleotide
  Sense strand starting at position 2281 of SEQ ID NO: 145
gcagacaaugauugcuaga

SEQ ID NO: 14779 - RNA, 19 nt, Artificial Sequence
  Description of Artificial Sequence: Synthetic oligonucleotide
  Antisense strand to SEQ ID NO: 14778
ucuagcaaucauugucugc

SEQ ID NO: 14780 - RNA, 19 nt, Artificial Sequence
  Description of Artificial Sequence: Synthetic oligonucleotide
  Sense strand starting at position 2283 of SEQ ID NO: 145
agacaaugauugcuagagu

SEQ ID NO: 14781 - RNA, 19 nt, Artificial Sequence
  Description of Artificial Sequence: Synthetic oligonucleotide
  Antisense strand to SEQ ID NO: 14780
acucuagcaaucauugucu

SEQ ID NO: 14782 - RNA, 19 nt, Artificial Sequence
  Description of Artificial Sequence: Synthetic oligonucleotide
  Sense strand starting at position 2378 of SEQ ID NO: 145
cuaucuuguaguugaggaa

SEQ ID NO: 14783 - RNA, 19 nt, Artificial Sequence
  Description of Artificial Sequence: Synthetic oligonucleotide
  Antisense strand to SEQ ID NO: 14782
uuccucaacuacaagauag

SEQ ID NO: 14784 - RNA, 19 nt, Artificial Sequence
  Description of Artificial Sequence: Synthetic oligonucleotide
  Sense strand starting at position 2715 of SEQ ID NO: 145
gcuuacauagguuaaguaa

SEQ ID NO: 14785 - RNA, 19 nt, Artificial Sequence
  Description of Artificial Sequence: Synthetic oligonucleotide
  Antisense strand to SEQ ID NO: 14784
uuacuuaaccuauguaagc

SEQ ID NO: 14786 - RNA, 19 nt, Artificial Sequence
  Description of Artificial Sequence: Synthetic oligonucleotide
  Sense strand starting at position 3383 of SEQ ID NO: 145
aaaucaugugaaugauguc

SEQ ID NO: 14787 - RNA, 19 nt, Artificial Sequence
  Description of Artificial Sequence: Synthetic oligonucleotide
  Antisense strand to SEQ ID NO: 14786
gacaucauucacaugauuu

SEQ ID NO: 14788 - RNA, 19 nt, Artificial Sequence
  Description of Artificial Sequence: Synthetic oligonucleotide
  Sense strand starting at position 3396 of SEQ ID NO: 145
gaugucucuuuaguaagaa

SEQ ID NO: 14789 - RNA, 19 nt, Artificial Sequence
  Description of Artificial Sequence: Synthetic oligonucleotide
  Antisense strand to SEQ ID NO: 14788
uucuuacuaaagagacauc

SEQ ID NO: 14790 - RNA, 19 nt, Artificial Sequence
  Description of Artificial Sequence: Synthetic oligonucleotide
  Sense strand starting at position 3890 of SEQ ID NO: 145
accuuuguaugaccauaua

SEQ ID NO: 14791 - RNA, 19 nt, Artificial Sequence
  Description of Artificial Sequence: Synthetic oligonucleotide
  Antisense strand to SEQ ID NO: 14790
uauauggucauacaaaggu

SEQ ID NO: 14792 - RNA, 19 nt, Artificial Sequence
  Description of Artificial Sequence: Synthetic oligonucleotide
  Sense strand starting at position 3941 of SEQ ID NO: 145
uuacauauccgguacuauu

SEQ ID NO: 14793 - RNA, 19 nt, Artificial Sequence
  Description of Artificial Sequence: Synthetic oligonucleotide
  Antisense strand to SEQ ID NO: 14792
aauaguaccggauauguaa

SEQ ID NO: 14794 - RNA, 19 nt, Artificial Sequence
  Description of Artificial Sequence: Synthetic oligonucleotide
  Sense strand starting at position 132 of SEQ ID NO: 146
ugaggauagccacgguaau

SEQ ID NO: 14795 - RNA, 19 nt, Artificial Sequence
  Description of Artificial Sequence: Synthetic oligonucleotide
  Antisense strand to SEQ ID NO: 14794
auuaccguggcuauccuca

SEQ ID NO: 14796 - RNA, 19 nt, Artificial Sequence
  Description of Artificial Sequence: Synthetic oligonucleotide
  Sense strand starting at position 133 of SEQ ID NO: 146
gaggauagccacgguaauc

SEQ ID NO: 14797 - RNA, 19 nt, Artificial Sequence
  Description of Artificial Sequence: Synthetic oligonucleotide
  Antisense strand to SEQ ID NO: 14796
gauuaccguggcuauccuc

SEQ ID NO: 14798 - RNA, 19 nt, Artificial Sequence
  Description of Artificial Sequence: Synthetic oligonucleotide
  Sense strand starting at position 221 of SEQ ID NO: 146
uggugaaacccgcauucua

SEQ ID NO: 14799 - RNA, 19 nt, Artificial Sequence
  Description of Artificial Sequence: Synthetic oligonucleotide
  Antisense strand to SEQ ID NO: 14798
uagaaugcggguuucacca

SEQ ID NO: 14800 - RNA, 19 nt, Artificial Sequence
  Description of Artificial Sequence: Synthetic oligonucleotide
  Sense strand starting at position 346 of SEQ ID NO: 146
gugagcagggauugaauca

SEQ ID NO: 14801 - RNA, 19 nt, Artificial Sequence
  Description of Artificial Sequence: Synthetic oligonucleotide
  Antisense strand to SEQ ID NO: 14800
ugauucaaucccugcucac

SEQ ID NO: 14802 - RNA, 19 nt, Artificial Sequence
  Description of Artificial Sequence: Synthetic oligonucleotide
  Sense strand starting at position 353 of SEQ ID NO: 146
gggauugaaucacugcacu

SEQ ID NO: 14803 - RNA, 19 nt, Artificial Sequence
  Description of Artificial Sequence: Synthetic oligonucleotide
  Antisense strand to SEQ ID NO: 14802
agugcagugauucaauccc

SEQ ID NO: 14804 - RNA, 19 nt, Artificial Sequence
  Description of Artificial Sequence: Synthetic oligonucleotide
  Sense strand starting at position 430 of SEQ ID NO: 146
cauugaacgccugagcuaa

SEQ ID NO: 14805 - RNA, 19 nt, Artificial Sequence
  Description of Artificial Sequence: Synthetic oligonucleotide
  Antisense strand to SEQ ID NO: 14804
uuagcucaggcguucaaug

SEQ ID NO: 14806 - RNA, 19 nt, Artificial Sequence
  Description of Artificial Sequence: Synthetic oligonucleotide
  Sense strand starting at position 460 of SEQ ID NO: 146
cuuaaaugugcugagcuaa

SEQ ID NO: 14807 - RNA, 19 nt, Artificial Sequence
  Description of Artificial Sequence: Synthetic oligonucleotide
  Antisense strand to SEQ ID NO: 14806
uuagcucagcacauuuaag

SEQ ID NO: 14808 - RNA, 19 nt, Artificial Sequence
  Description of Artificial Sequence: Synthetic oligonucleotide
  Sense strand starting at position 875 of SEQ ID NO: 146
gguuccuuucucgaggagu

SEQ ID NO: 14809 - RNA, 19 nt, Artificial Sequence
  Description of Artificial Sequence: Synthetic oligonucleotide
  Antisense strand to SEQ ID NO: 14808
acuccucgagaaaggaacc

SEQ ID NO: 14810 - RNA, 19 nt, Artificial Sequence
  Description of Artificial Sequence: Synthetic oligonucleotide
  Sense strand starting at position 877 of SEQ ID NO: 146
uuccuuucucgaggaguaa

SEQ ID NO: 14811 - RNA, 19 nt, Artificial Sequence
  Description of Artificial Sequence: Synthetic oligonucleotide
  Antisense strand to SEQ ID NO: 14810
uuacuccucgagaaaggaa

SEQ ID NO: 14812 - RNA, 19 nt, Artificial Sequence
  Description of Artificial Sequence: Synthetic oligonucleotide
  Sense strand starting at position 878 of SEQ ID NO: 146
uccuuucucgaggaguaag

SEQ ID NO: 14813 - RNA, 19 nt, Artificial Sequence
  Description of Artificial Sequence: Synthetic oligonucleotide
  Antisense strand to SEQ ID NO: 14812
cuuacuccucgagaaagga

SEQ ID NO: 14814 - RNA, 19 nt, Artificial Sequence
  Description of Artificial Sequence: Synthetic oligonucleotide
  Sense strand starting at position 905 of SEQ ID NO: 146
caaagaagucgcuaguauc

SEQ ID NO: 14815 - RNA, 19 nt, Artificial Sequence
  Description of Artificial Sequence: Synthetic oligonucleotide
  Antisense strand to SEQ ID NO: 14814
gauacuagcgacuucuuug

SEQ ID NO: 14816 - RNA, 19 nt, Artificial Sequence
  Description of Artificial Sequence: Synthetic oligonucleotide
  Sense strand starting at position 2175 of SEQ ID NO: 146
gagccaucgcccuagacaa

SEQ ID NO: 14817 - RNA, 19 nt, Artificial Sequence
  Description of Artificial Sequence: Synthetic oligonucleotide
  Antisense strand to SEQ ID NO: 14816
uugucuagggcgauggcuc

SEQ ID NO: 14818 - RNA, 19 nt, Artificial Sequence
  Description of Artificial Sequence: Synthetic oligonucleotide
  Sense strand starting at position 2215 of SEQ ID NO: 146
cggugcacgccuucucaga

SEQ ID NO: 14819 - RNA, 19 nt, Artificial Sequence
  Description of Artificial Sequence: Synthetic oligonucleotide
  Antisense strand to SEQ ID NO: 14818
ucugagaaggcgugcaccg

SEQ ID NO: 14820 - RNA, 19 nt, Artificial Sequence
  Description of Artificial Sequence: Synthetic oligonucleotide
  Sense strand starting at position 2495 of SEQ ID NO: 146
cgggaacauuucuaaagaa

SEQ ID NO: 14821 - RNA, 19 nt, Artificial Sequence
  Description of Artificial Sequence: Synthetic oligonucleotide
  Antisense strand to SEQ ID NO: 14820
uucuuuagaaauguucccg

SEQ ID NO: 14822 - RNA, 19 nt, Artificial Sequence
  Description of Artificial Sequence: Synthetic oligonucleotide
  Sense strand starting at position 2526 of SEQ ID NO: 146
gugaacauaucaguuagga

SEQ ID NO: 14823 - RNA, 19 nt, Artificial Sequence
  Description of Artificial Sequence: Synthetic oligonucleotide
  Antisense strand to SEQ ID NO: 14822
uccuaacugauauguucac

SEQ ID NO: 14824 - RNA, 19 nt, Artificial Sequence
  Description of Artificial Sequence: Synthetic oligonucleotide
  Sense strand starting at position 2557 of SEQ ID NO: 146
augggcuucuuuguaucau

SEQ ID NO: 14825 - RNA, 19 nt, Artificial Sequence
  Description of Artificial Sequence: Synthetic oligonucleotide
  Antisense strand to SEQ ID NO: 14824
augauacaaagaagcccau

SEQ ID NO: 14826 - RNA, 19 nt, Artificial Sequence
  Description of Artificial Sequence: Synthetic oligonucleotide
  Sense strand starting at position 2588 of SEQ ID NO: 146
acgggauuguaagccucau

SEQ ID NO: 14827 - RNA, 19 nt, Artificial Sequence
  Description of Artificial Sequence: Synthetic oligonucleotide
  Antisense strand to SEQ ID NO: 14826
augaggcuuacaaucccgu

SEQ ID NO: 14828 - RNA, 19 nt, Artificial Sequence
  Description of Artificial Sequence: Synthetic oligonucleotide
  Sense strand starting at position 2633 of SEQ ID NO: 146
ggcacagaucuggguuaaa

SEQ ID NO: 14829 - RNA, 19 nt, Artificial Sequence
  Description of Artificial Sequence: Synthetic oligonucleotide
  Antisense strand to SEQ ID NO: 14828
uuuaacccagaucugugcc

SEQ ID NO: 14830 - RNA, 19 nt, Artificial Sequence
  Description of Artificial Sequence: Synthetic oligonucleotide
  Sense strand starting at position 2656 of SEQ ID NO: 146
uguguccacuccuuaauag

SEQ ID NO: 14831 - RNA, 19 nt, Artificial Sequence
  Description of Artificial Sequence: Synthetic oligonucleotide
  Antisense strand to SEQ ID NO: 14830
cuauuaaggaguggacaca

SEQ ID NO: 14832 - RNA, 19 nt, Artificial Sequence
  Description of Artificial Sequence: Synthetic oligonucleotide
  Sense strand starting at position 2657 of SEQ ID NO: 146
guguccacuccuuaauagu

SEQ ID NO: 14833 - RNA, 19 nt, Artificial Sequence
  Description of Artificial Sequence: Synthetic oligonucleotide
  Antisense strand to SEQ ID NO: 14832
acuauuaaggaguggacac

SEQ ID NO: 14834 - RNA, 19 nt, Artificial Sequence
  Description of Artificial Sequence: Synthetic oligonucleotide
  Sense strand starting at position 2664 of SEQ ID NO: 146
cuccuuaauagucggguga

SEQ ID NO: 14835 - RNA, 19 nt, Artificial Sequence
  Description of Artificial Sequence: Synthetic oligonucleotide
  Antisense strand to SEQ ID NO: 14834
ucacccgacuauuaaggag

SEQ ID NO: 14836 - RNA, 19 nt, Artificial Sequence
  Description of Artificial Sequence: Synthetic oligonucleotide
  Sense strand starting at position 2668 of SEQ ID NO: 146
uuaauagucgggugaccac

SEQ ID NO: 14837 - RNA, 19 nt, Artificial Sequence
  Description of Artificial Sequence: Synthetic oligonucleotide
  Antisense strand to SEQ ID NO: 14836
guggucacccgacuauuaa

SEQ ID NO: 14838 - RNA, 19 nt, Artificial Sequence
  Description of Artificial Sequence: Synthetic oligonucleotide
  Sense strand starting at position 2823 of SEQ ID NO: 146
uuugucaugucccuugaga

SEQ ID NO: 14839 - RNA, 19 nt, Artificial Sequence
  Description of Artificial Sequence: Synthetic oligonucleotide
  Antisense strand to SEQ ID NO: 14838
ucucaagggacaugacaaa

SEQ ID NO: 14840 - RNA, 19 nt, Artificial Sequence
  Description of Artificial Sequence: Synthetic oligonucleotide
  Sense strand starting at position 2825 of SEQ ID NO: 146
ugucaugucccuugagacu

SEQ ID NO: 14841 - RNA, 19 nt, Artificial Sequence
  Description of Artificial Sequence: Synthetic oligonucleotide
  Antisense strand to SEQ ID NO: 14840
agucucaagggacaugaca

SEQ ID NO: 14842 - RNA, 19 nt, Artificial Sequence
  Description of Artificial Sequence: Synthetic oligonucleotide
  Sense strand starting at position 2876 of SEQ ID NO: 146
gggucuuacaucuagaagc

SEQ ID NO: 14843 - RNA, 19 nt, Artificial Sequence
  Description of Artificial Sequence: Synthetic oligonucleotide
  Antisense strand to SEQ ID NO: 14842
gcuucuagauguaagaccc

SEQ ID NO: 14844 - RNA, 19 nt, Artificial Sequence
  Description of Artificial Sequence: Synthetic oligonucleotide
  Sense strand starting at position 2900 of SEQ ID NO: 146
ugagacugcuuauuggauu

SEQ ID NO: 14845 - RNA, 19 nt, Artificial Sequence
  Description of Artificial Sequence: Synthetic oligonucleotide
  Antisense strand to SEQ ID NO: 14844
aauccaauaagcagucuca

SEQ ID NO: 14846 - RNA, 19 nt, Artificial Sequence
  Description of Artificial Sequence: Synthetic oligonucleotide
  Sense strand starting at position 2966 of SEQ ID NO: 146
aggaaugccucuuugauaa

SEQ ID NO: 14847 - RNA, 19 nt, Artificial Sequence
  Description of Artificial Sequence: Synthetic oligonucleotide
  Antisense strand to SEQ ID NO: 14846
uuaucaaagaggcauuccu

SEQ ID NO: 14848 - RNA, 19 nt, Artificial Sequence
  Description of Artificial Sequence: Synthetic oligonucleotide
  Sense strand starting at position 3058 of SEQ ID NO: 146
gucccuguggucugggaua

SEQ ID NO: 14849 - RNA, 19 nt, Artificial Sequence
  Description of Artificial Sequence: Synthetic oligonucleotide
  Antisense strand to SEQ ID NO: 14848
uaucccagaccacagggac

SEQ ID NO: 14850 - RNA, 19 nt, Artificial Sequence
  Description of Artificial Sequence: Synthetic oligonucleotide
  Sense strand starting at position 3060 of SEQ ID NO: 146
cccuguggucugggauaca

SEQ ID NO: 14851 - RNA, 19 nt, Artificial Sequence
  Description of Artificial Sequence: Synthetic oligonucleotide
  Antisense strand to SEQ ID NO: 14850
uguaucccagaccacaggg

SEQ ID NO: 14852 - RNA, 19 nt, Artificial Sequence
  Description of Artificial Sequence: Synthetic oligonucleotide
  Sense strand starting at position 3171 of SEQ ID NO: 146
aguauuagaugcuccacaa

SEQ ID NO: 14853 - RNA, 19 nt, Artificial Sequence
  Description of Artificial Sequence: Synthetic oligonucleotide
  Antisense strand to SEQ ID NO: 14852
uuguggagcaucuaauacu

SEQ ID NO: 14854 - RNA, 19 nt, Artificial Sequence
  Description of Artificial Sequence: Synthetic oligonucleotide
  Sense strand starting at position 3229 of SEQ ID NO: 146
uggguuugucaggguggga

SEQ ID NO: 14855 - RNA, 19 nt, Artificial Sequence
  Description of Artificial Sequence: Synthetic oligonucleotide
  Antisense strand to SEQ ID NO: 14854
ucccacccugacaaaccca

SEQ ID NO: 14856 - RNA, 19 nt, Artificial Sequence
  Description of Artificial Sequence: Synthetic oligonucleotide
  Sense strand starting at position 3291 of SEQ ID NO: 146
ucagaaauaauuggugugu

SEQ ID NO: 14857 - RNA, 19 nt, Artificial Sequence
  Description of Artificial Sequence: Synthetic oligonucleotide
  Antisense strand to SEQ ID NO: 14856
acacaccaauuauuucuga

SEQ ID NO: 14858 - RNA, 19 nt, Artificial Sequence
  Description of Artificial Sequence: Synthetic oligonucleotide
  Sense strand starting at position 3336 of SEQ ID NO: 146
auugcaugugguuaucaga

SEQ ID NO: 14859 - RNA, 19 nt, Artificial Sequence
  Description of Artificial Sequence: Synthetic oligonucleotide
  Antisense strand to SEQ ID NO: 14858
ucugauaaccacaugcaau

SEQ ID NO: 14860 - RNA, 19 nt, Artificial Sequence
  Description of Artificial Sequence: Synthetic oligonucleotide
  Sense strand starting at position 3416 of SEQ ID NO: 146
ugucuacaguguuccauaa

SEQ ID NO: 14861 - RNA, 19 nt, Artificial Sequence
  Description of Artificial Sequence: Synthetic oligonucleotide
  Antisense strand to SEQ ID NO: 14860
uuauggaacacuguagaca

SEQ ID NO: 14862 - RNA, 19 nt, Artificial Sequence
  Description of Artificial Sequence: Synthetic oligonucleotide
  Sense strand starting at position 3497 of SEQ ID NO: 146
ggacuuagcgagugaguga

SEQ ID NO: 14863 - RNA, 19 nt, Artificial Sequence
  Description of Artificial Sequence: Synthetic oligonucleotide
  Antisense strand to SEQ ID NO: 14862
ucacucacucgcuaagucc

SEQ ID NO: 14864 - RNA, 19 nt, Artificial Sequence
  Description of Artificial Sequence: Synthetic oligonucleotide
  Sense strand starting at position 3613 of SEQ ID NO: 146
ucagauucccgagaauguc

SEQ ID NO: 14865 - RNA, 19 nt, Artificial Sequence
  Description of Artificial Sequence: Synthetic oligonucleotide
  Antisense strand to SEQ ID NO: 14864
gacauucucgggaaucuga

SEQ ID NO: 14866 - RNA, 19 nt, Artificial Sequence
  Description of Artificial Sequence: Synthetic oligonucleotide
  Sense strand starting at position 3621 of SEQ ID NO: 146
ccgagaaugucuccuucug

SEQ ID NO: 14867 - RNA, 19 nt, Artificial Sequence
  Description of Artificial Sequence: Synthetic oligonucleotide
  Antisense strand to SEQ ID NO: 14866
cagaaggagacauucucgg

SEQ ID NO: 14868 - RNA, 19 nt, Artificial Sequence
  Description of Artificial Sequence: Synthetic oligonucleotide
  Sense strand starting at position 3623 of SEQ ID NO: 146
gagaaugucuccuucugca

SEQ ID NO: 14869 - RNA, 19 nt, Artificial Sequence
  Description of Artificial Sequence: Synthetic oligonucleotide
  Antisense strand to SEQ ID NO: 14868
ugcagaaggagacauucuc

SEQ ID NO: 14870 - RNA, 19 nt, Artificial Sequence
  Description of Artificial Sequence: Synthetic oligonucleotide
  Sense strand starting at position 3689 of SEQ ID NO: 146
agcuuuguccuccacacua

SEQ ID NO: 14871 - RNA, 19 nt, Artificial Sequence
  Description of Artificial Sequence: Synthetic oligonucleotide
  Antisense strand to SEQ ID NO: 14870
uaguguggaggacaaagcu

SEQ ID NO: 14872 - RNA, 19 nt, Artificial Sequence
  Description of Artificial Sequence: Synthetic oligonucleotide
  Sense strand starting at position 3730 of SEQ ID NO: 146
caaugauucuaagcgucau

SEQ ID NO: 14873 - RNA, 19 nt, Artificial Sequence
  Description of Artificial Sequence: Synthetic oligonucleotide
  Antisense strand to SEQ ID NO: 14872
augacgcuuagaaucauug

SEQ ID NO: 14874 - RNA, 19 nt, Artificial Sequence
  Description of Artificial Sequence: Synthetic oligonucleotide
  Sense strand starting at position 85 of SEQ ID NO: 147
cuugauuauccucacgcca

SEQ ID NO: 14875 - RNA, 19 nt, Artificial Sequence
  Description of Artificial Sequence: Synthetic oligonucleotide
  Antisense strand to SEQ ID NO: 14874
uggcgugaggauaaucaag

SEQ ID NO: 14876 - RNA, 19 nt, Artificial Sequence
  Description of Artificial Sequence: Synthetic oligonucleotide
  Sense strand starting at position 87 of SEQ ID NO: 147
ugauuauccucacgccaag

SEQ ID NO: 14877 - RNA, 19 nt, Artificial Sequence
  Description of Artificial Sequence: Synthetic oligonucleotide
  Antisense strand to SEQ ID NO: 14876
cuuggcgugaggauaauca

SEQ ID NO: 14878 - RNA, 19 nt, Artificial Sequence
  Description of Artificial Sequence: Synthetic oligonucleotide
  Sense strand starting at position 306 of SEQ ID NO: 147
uaauauagucauggauaug

SEQ ID NO: 14879 - RNA, 19 nt, Artificial Sequence
  Description of Artificial Sequence: Synthetic oligonucleotide
  Antisense strand to SEQ ID NO: 14878
cauauccaugacuauauua

SEQ ID NO: 14880 - RNA, 19 nt, Artificial Sequence
  Description of Artificial Sequence: Synthetic oligonucleotide
  Sense strand starting at position 309 of SEQ ID NO: 147
uauagucauggauaugcau

SEQ ID NO: 14881 - RNA, 19 nt, Artificial Sequence
  Description of Artificial Sequence: Synthetic oligonucleotide
  Antisense strand to SEQ ID NO: 14880
augcauauccaugacuaua

SEQ ID NO: 14882 - RNA, 19 nt, Artificial Sequence
  Description of Artificial Sequence: Synthetic oligonucleotide
  Sense strand starting at position 724 of SEQ ID NO: 147
ucuuuacaacuuuguagua

SEQ ID NO: 14883 - RNA, 19 nt, Artificial Sequence
  Description of Artificial Sequence: Synthetic oligonucleotide
  Antisense strand to SEQ ID NO: 14882
uacuacaaaguuguaaaga

SEQ ID NO: 14884 - RNA, 19 nt, Artificial Sequence
  Description of Artificial Sequence: Synthetic oligonucleotide
  Sense strand starting at position 725 of SEQ ID NO: 147
cuuuacaacuuuguaguaa

SEQ ID NO: 14885 - RNA, 19 nt, Artificial Sequence
  Description of Artificial Sequence: Synthetic oligonucleotide
  Antisense strand to SEQ ID NO: 14884
uuacuacaaaguuguaaag

SEQ ID NO: 14886 - RNA, 19 nt, Artificial Sequence
  Description of Artificial Sequence: Synthetic oligonucleotide
  Sense strand starting at position 729 of SEQ ID NO: 147
acaacuuuguaguaaugau

SEQ ID NO: 14887 - RNA, 19 nt, Artificial Sequence
  Description of Artificial Sequence: Synthetic oligonucleotide
  Antisense strand to SEQ ID NO: 14886
aucauuacuacaaaguugu

SEQ ID NO: 14888 - RNA, 19 nt, Artificial Sequence
  Description of Artificial Sequence: Synthetic oligonucleotide
  Sense strand starting at position 739 of SEQ ID NO: 147
aguaaugauucuguuaaag

SEQ ID NO: 14889 - RNA, 19 nt, Artificial Sequence
  Description of Artificial Sequence: Synthetic oligonucleotide
  Antisense strand to SEQ ID NO: 14888
cuuuaacagaaucauuacu

SEQ ID NO: 14890 - RNA, 19 nt, Artificial Sequence
  Description of Artificial Sequence: Synthetic oligonucleotide
  Sense strand starting at position 3421 of SEQ ID NO: 147
gguuucuguggcuacugaa

SEQ ID NO: 14891 - RNA, 19 nt, Artificial Sequence
  Description of Artificial Sequence: Synthetic oligonucleotide
  Antisense strand to SEQ ID NO: 14890
uucaguagccacagaaacc

SEQ ID NO: 14892 - RNA, 19 nt, Artificial Sequence
  Description of Artificial Sequence: Synthetic oligonucleotide
  Sense strand starting at position 3424 of SEQ ID NO: 147
uucuguggcuacugaauau

SEQ ID NO: 14893 - RNA, 19 nt, Artificial Sequence
  Description of Artificial Sequence: Synthetic oligonucleotide
  Antisense strand to SEQ ID NO: 14892
auauucaguagccacagaa

SEQ ID NO: 14894 - RNA, 19 nt, Artificial Sequence
  Description of Artificial Sequence: Synthetic oligonucleotide
  Sense strand starting at position 3455 of SEQ ID NO: 147
acacuugacugauauuuga

SEQ ID NO: 14895 - RNA, 19 nt, Artificial Sequence
  Description of Artificial Sequence: Synthetic oligonucleotide
  Antisense strand to SEQ ID NO: 14894
ucaaauaucagucaagugu

SEQ ID NO: 14896 - RNA, 19 nt, Artificial Sequence
  Description of Artificial Sequence: Synthetic oligonucleotide
  Sense strand starting at position 3485 of SEQ ID NO: 147
agcagaaauacggacgauu

SEQ ID NO: 14897 - RNA, 19 nt, Artificial Sequence
  Description of Artificial Sequence: Synthetic oligonucleotide
  Antisense strand to SEQ ID NO: 14896
aaucguccguauuucugcu

SEQ ID NO: 14898 - RNA, 19 nt, Artificial Sequence
  Description of Artificial Sequence: Synthetic oligonucleotide
  Sense strand starting at position 3487 of SEQ ID NO: 147
cagaaauacggacgauuaa

SEQ ID NO: 14899 - RNA, 19 nt, Artificial Sequence
  Description of Artificial Sequence: Synthetic oligonucleotide
  Antisense strand to SEQ ID NO: 14898
uuaaucguccguauuucug

SEQ ID NO: 14900 - RNA, 19 nt, Artificial Sequence
  Description of Artificial Sequence: Synthetic oligonucleotide
  Sense strand starting at position 3526 of SEQ ID NO: 147
guuuacuugaucuaguagu

SEQ ID NO: 14901 - RNA, 19 nt, Artificial Sequence
  Description of Artificial Sequence: Synthetic oligonucleotide
  Antisense strand to SEQ ID NO: 14900
acuacuagaucaaguaaac

SEQ ID NO: 14902 - RNA, 19 nt, Artificial Sequence
  Description of Artificial Sequence: Synthetic oligonucleotide
  Sense strand starting at position 29 of SEQ ID NO: 148
agucuaaugccagaguuug

SEQ ID NO: 14903 - RNA, 19 nt, Artificial Sequence
  Description of Artificial Sequence: Synthetic oligonucleotide
  Antisense strand to SEQ ID NO: 14902
caaacucuggcauuagacu

SEQ ID NO: 14904 - RNA, 19 nt, Artificial Sequence
  Description of Artificial Sequence: Synthetic oligonucleotide
  Sense strand starting at position 294 of SEQ ID NO: 148
ugaaguauuauguggauag

SEQ ID NO: 14905 - RNA, 19 nt, Artificial Sequence
  Description of Artificial Sequence: Synthetic oligonucleotide
  Antisense strand to SEQ ID NO: 14904
cuauccacauaauacuuca

SEQ ID NO: 14906 - RNA, 19 nt, Artificial Sequence
  Description of Artificial Sequence: Synthetic oligonucleotide
  Sense strand starting at position 381 of SEQ ID NO: 148
uagguucugaaguguagau

SEQ ID NO: 14907 - RNA, 19 nt, Artificial Sequence
  Description of Artificial Sequence: Synthetic oligonucleotide
  Antisense strand to SEQ ID NO: 14906
aucuacacuucagaaccua

SEQ ID NO: 14908 - RNA, 19 nt, Artificial Sequence
  Description of Artificial Sequence: Synthetic oligonucleotide
  Sense strand starting at position 383 of SEQ ID NO: 148
gguucugaaguguagauag

SEQ ID NO: 14909 - RNA, 19 nt, Artificial Sequence
  Description of Artificial Sequence: Synthetic oligonucleotide
  Antisense strand to SEQ ID NO: 14908
cuaucuacacuucagaacc

SEQ ID NO: 14910 - RNA, 19 nt, Artificial Sequence
  Description of Artificial Sequence: Synthetic oligonucleotide
  Sense strand starting at position 457 of SEQ ID NO: 148
ugccuaaugaagugguuau

SEQ ID NO: 14911 - RNA, 19 nt, Artificial Sequence
  Description of Artificial Sequence: Synthetic oligonucleotide
  Antisense strand to SEQ ID NO: 14910
auaaccacuucauuaggca

SEQ ID NO: 14912 - RNA, 19 nt, Artificial Sequence
  Description of Artificial Sequence: Synthetic oligonucleotide
  Sense strand starting at position 467 of SEQ ID NO: 148
agugguuauuagccuacua

SEQ ID NO: 14913 - RNA, 19 nt, Artificial Sequence
  Description of Artificial Sequence: Synthetic oligonucleotide
  Antisense strand to SEQ ID NO: 14912
uaguaggcuaauaaccacu

SEQ ID NO: 14914 - RNA, 19 nt, Artificial Sequence
  Description of Artificial Sequence: Synthetic oligonucleotide
  Sense strand starting at position 469 of SEQ ID NO: 148
ugguuauuagccuacuagu

SEQ ID NO: 14915 - RNA, 19 nt, Artificial Sequence
  Description of Artificial Sequence: Synthetic oligonucleotide
  Antisense strand to SEQ ID NO: 14914
acuaguaggcuaauaacca

SEQ ID NO: 14916 - RNA, 19 nt, Artificial Sequence
  Description of Artificial Sequence: Synthetic oligonucleotide
  Sense strand starting at position 572 of SEQ ID NO: 148
uucuccagucuuuggugaa

SEQ ID NO: 14917 - RNA, 19 nt, Artificial Sequence
  Description of Artificial Sequence: Synthetic oligonucleotide
  Antisense strand to SEQ ID NO: 14916
uucaccaaagacuggagaa

SEQ ID NO: 14918 - RNA, 19 nt, Artificial Sequence
  Description of Artificial Sequence: Synthetic oligonucleotide
  Sense strand starting at position 725 of SEQ ID NO: 148
auacuaaagugugcauaca

SEQ ID NO: 14919 - RNA, 19 nt, Artificial Sequence
  Description of Artificial Sequence: Synthetic oligonucleotide
  Antisense strand to SEQ ID NO: 14918
uguaugcacacuuuaguau

SEQ ID NO: 14920 - RNA, 19 nt, Artificial Sequence
  Description of Artificial Sequence: Synthetic oligonucleotide
  Sense strand starting at position 844 of SEQ ID NO: 148
accaguuaccucgacucua

SEQ ID NO: 14921 - RNA, 19 nt, Artificial Sequence
  Description of Artificial Sequence: Synthetic oligonucleotide
  Antisense strand to SEQ ID NO: 14920
uagagucgagguaacuggu

SEQ ID NO: 14922 - RNA, 19 nt, Artificial Sequence
  Description of Artificial Sequence: Synthetic oligonucleotide
  Sense strand starting at position 855 of SEQ ID NO: 148
cgacucuaaggguacauau

SEQ ID NO: 14923 - RNA, 19 nt, Artificial Sequence
  Description of Artificial Sequence: Synthetic oligonucleotide
  Antisense strand to SEQ ID NO: 14922
auauguacccuuagagucg

SEQ ID NO: 14924 - RNA, 19 nt, Artificial Sequence
  Description of Artificial Sequence: Synthetic oligonucleotide
  Sense strand starting at position 885 of SEQ ID NO: 148
ugcauauuaagauggcuga

SEQ ID NO: 14925 - RNA, 19 nt, Artificial Sequence
  Description of Artificial Sequence: Synthetic oligonucleotide
  Antisense strand to SEQ ID NO: 14924
ucagccaucuuaauaugca

SEQ ID NO: 14926 - RNA, 19 nt, Artificial Sequence
  Description of Artificial Sequence: Synthetic oligonucleotide
  Sense strand starting at position 886 of SEQ ID NO: 148
gcauauuaagauggcugau

SEQ ID NO: 14927 - RNA, 19 nt, Artificial Sequence
  Description of Artificial Sequence: Synthetic oligonucleotide
  Antisense strand to SEQ ID NO: 14926
aucagccaucuuaauaugc

SEQ ID NO: 14928 - RNA, 19 nt, Artificial Sequence
  Description of Artificial Sequence: Synthetic oligonucleotide
  Sense strand starting at position 889 of SEQ ID NO: 148
uauuaagauggcugauaga

SEQ ID NO: 14929 - RNA, 19 nt, Artificial Sequence
  Description of Artificial Sequence: Synthetic oligonucleotide
  Antisense strand to SEQ ID NO: 14928
ucuaucagccaucuuaaua

SEQ ID NO: 14930 - RNA, 19 nt, Artificial Sequence
  Description of Artificial Sequence: Synthetic oligonucleotide
  Sense strand starting at position 892 of SEQ ID NO: 148
uaagauggcugauagaaau

SEQ ID NO: 14931 - RNA, 19 nt, Artificial Sequence
  Description of Artificial Sequence: Synthetic oligonucleotide
  Antisense strand to SEQ ID NO: 14930
auuucuaucagccaucuua

SEQ ID NO: 14932 - RNA, 19 nt, Artificial Sequence
  Description of Artificial Sequence: Synthetic oligonucleotide
  Sense strand starting at position 1015 of SEQ ID NO: 148
acgccuuaagucuaguaaa

SEQ ID NO: 14933 - RNA, 19 nt, Artificial Sequence
  Description of Artificial Sequence: Synthetic oligonucleotide
  Antisense strand to SEQ ID NO: 14932
uuuacuagacuuaaggcgu

SEQ ID NO: 14934 - RNA, 19 nt, Artificial Sequence
  Description of Artificial Sequence: Synthetic oligonucleotide
  Sense strand starting at position 1039 of SEQ ID NO: 148
uugucaauuuaacagagaa

SEQ ID NO: 14935 - RNA, 19 nt, Artificial Sequence
  Description of Artificial Sequence: Synthetic oligonucleotide
  Antisense strand to SEQ ID NO: 14934
uucucuguuaaauugacaa

SEQ ID NO: 14936 - RNA, 19 nt, Artificial Sequence
  Description of Artificial Sequence: Synthetic oligonucleotide
  Sense strand starting at position 1118 of SEQ ID NO: 148
caaguuagcgucuauccua

SEQ ID NO: 14937 - RNA, 19 nt, Artificial Sequence
  Description of Artificial Sequence: Synthetic oligonucleotide
  Antisense strand to SEQ ID NO: 14936
uaggauagacgcuaacuug

SEQ ID NO: 14938 - RNA, 19 nt, Artificial Sequence
  Description of Artificial Sequence: Synthetic oligonucleotide
  Sense strand starting at position 1299 of SEQ ID NO: 148
acaguuauugagugaaagg

SEQ ID NO: 14939 - RNA, 19 nt, Artificial Sequence
  Description of Artificial Sequence: Synthetic oligonucleotide
  Antisense strand to SEQ ID NO: 14938
ccuuucacucaauaacugu

SEQ ID NO: 14940 - RNA, 19 nt, Artificial Sequence
  Description of Artificial Sequence: Synthetic oligonucleotide
  Sense strand starting at position 1323 of SEQ ID NO: 148
gacuuuauucucuaagggu

SEQ ID NO: 14941 - RNA, 19 nt, Artificial Sequence
  Description of Artificial Sequence: Synthetic oligonucleotide
  Antisense strand to SEQ ID NO: 14940
acccuuagagaauaaaguc

SEQ ID NO: 14942 - RNA, 19 nt, Artificial Sequence
  Description of Artificial Sequence: Synthetic oligonucleotide
  Sense strand starting at position 1608 of SEQ ID NO: 148
ugcagaaguggcugagaga

SEQ ID NO: 14943 - RNA, 19 nt, Artificial Sequence
  Description of Artificial Sequence: Synthetic oligonucleotide
  Antisense strand to SEQ ID NO: 14942
ucucucagccacuucugca

SEQ ID NO: 14944 - RNA, 19 nt, Artificial Sequence
  Description of Artificial Sequence: Synthetic oligonucleotide
  Sense strand starting at position 2071 of SEQ ID NO: 148
ggcggcgcuucauuugaau

SEQ ID NO: 14945 - RNA, 19 nt, Artificial Sequence
  Description of Artificial Sequence: Synthetic oligonucleotide
  Antisense strand to SEQ ID NO: 14944
auucaaaugaagcgccgcc

SEQ ID NO: 14946 - RNA, 19 nt, Artificial Sequence
  Description of Artificial Sequence: Synthetic oligonucleotide
  Sense strand starting at position 2198 of SEQ ID NO: 148
uuugguugugcugaaggga

SEQ ID NO: 14947 - RNA, 19 nt, Artificial Sequence
  Description of Artificial Sequence: Synthetic oligonucleotide
  Antisense strand to SEQ ID NO: 14946
ucccuucagcacaaccaaa

SEQ ID NO: 14948 - RNA, 19 nt, Artificial Sequence
  Description of Artificial Sequence: Synthetic oligonucleotide
  Sense strand starting at position 2256 of SEQ ID NO: 148
ugcgguuuccaggaacaau

SEQ ID NO: 14949 - RNA, 19 nt, Artificial Sequence
  Description of Artificial Sequence: Synthetic oligonucleotide
  Antisense strand to SEQ ID NO: 14948
auuguuccuggaaaccgca

SEQ ID NO: 14950 - RNA, 19 nt, Artificial Sequence
  Description of Artificial Sequence: Synthetic oligonucleotide
  Sense strand starting at position 2376 of SEQ ID NO: 148
ggcugaaugguagagaugu

SEQ ID NO: 14951 - RNA, 19 nt, Artificial Sequence
  Description of Artificial Sequence: Synthetic oligonucleotide
  Antisense strand to SEQ ID NO: 14950
acaucucuaccauucagcc

SEQ ID NO: 14952 - RNA, 19 nt, Artificial Sequence
  Description of Artificial Sequence: Synthetic oligonucleotide
  Sense strand starting at position 2464 of SEQ ID NO: 148
gcuguuaauuaccucggga

SEQ ID NO: 14953 - RNA, 19 nt, Artificial Sequence
  Description of Artificial Sequence: Synthetic oligonucleotide
  Antisense strand to SEQ ID NO: 14952
ucccgagguaauuaacagc

SEQ ID NO: 14954 - RNA, 19 nt, Artificial Sequence
  Description of Artificial Sequence: Synthetic oligonucleotide
  Sense strand starting at position 2620 of SEQ ID NO: 148
gcuuacauauuagggauuu

SEQ ID NO: 14955 - RNA, 19 nt, Artificial Sequence
  Description of Artificial Sequence: Synthetic oligonucleotide
  Antisense strand to SEQ ID NO: 14954
aaaucccuaauauguaagc

SEQ ID NO: 14956 - RNA, 19 nt, Artificial Sequence
  Description of Artificial Sequence: Synthetic oligonucleotide
  Sense strand starting at position 2994 of SEQ ID NO: 148
gccuuaaaccuacgaggua

SEQ ID NO: 14957 - RNA, 19 nt, Artificial Sequence
  Description of Artificial Sequence: Synthetic oligonucleotide
  Antisense strand to SEQ ID NO: 14956
uaccucguagguuuaaggc

SEQ ID NO: 14958 - RNA, 19 nt, Artificial Sequence
  Description of Artificial Sequence: Synthetic oligonucleotide
  Sense strand starting at position 3036 of SEQ ID NO: 148
auuuguaucuuacagauga

SEQ ID NO: 14959 - RNA, 19 nt, Artificial Sequence
  Description of Artificial Sequence: Synthetic oligonucleotide
  Antisense strand to SEQ ID NO: 14958
ucaucuguaagauacaaau

SEQ ID NO: 14960 - RNA, 19 nt, Artificial Sequence
  Description of Artificial Sequence: Synthetic oligonucleotide
  Sense strand starting at position 3211 of SEQ ID NO: 148
auguauguaugguuacaca

SEQ ID NO: 14961 - RNA, 19 nt, Artificial Sequence
  Description of Artificial Sequence: Synthetic oligonucleotide
  Antisense strand to SEQ ID NO: 14960
uguguaaccauacauacau

SEQ ID NO: 14962 - RNA, 19 nt, Artificial Sequence
  Description of Artificial Sequence: Synthetic oligonucleotide
  Sense strand starting at position 3244 of SEQ ID NO: 148
agaagucaaugggaaauca

SEQ ID NO: 14963 - RNA, 19 nt, Artificial Sequence
  Description of Artificial Sequence: Synthetic oligonucleotide
  Antisense strand to SEQ ID NO: 14962
ugauuucccauugacuucu

SEQ ID NO: 14964 - RNA, 19 nt, Artificial Sequence
  Description of Artificial Sequence: Synthetic oligonucleotide
  Sense strand starting at position 3451 of SEQ ID NO: 148
gcgaaaugccgucuccacu

SEQ ID NO: 14965 - RNA, 19 nt, Artificial Sequence
  Description of Artificial Sequence: Synthetic oligonucleotide
  Antisense strand to SEQ ID NO: 14964
aguggagacggcauuucgc

SEQ ID NO: 14966 - RNA, 19 nt, Artificial Sequence
  Description of Artificial Sequence: Synthetic oligonucleotide
  Sense strand starting at position 3762 of SEQ ID NO: 148
cgaccucuccauuagcuua

SEQ ID NO: 14967 - RNA, 19 nt, Artificial Sequence
  Description of Artificial Sequence: Synthetic oligonucleotide
  Antisense strand to SEQ ID NO: 14966
uaagcuaauggagaggucg

SEQ ID NO: 14968 - RNA, 19 nt, Artificial Sequence
  Description of Artificial Sequence: Synthetic oligonucleotide
  Sense strand starting at position 3809 of SEQ ID NO: 148
ggaggagagugcaagauau

SEQ ID NO: 14969 - RNA, 19 nt, Artificial Sequence
  Description of Artificial Sequence: Synthetic oligonucleotide
  Antisense strand to SEQ ID NO: 14968
auaucuugcacucuccucc

SEQ ID NO: 14970 - RNA, 19 nt, Artificial Sequence
  Description of Artificial Sequence: Synthetic oligonucleotide
  Sense strand starting at position 3888 of SEQ ID NO: 148
guggaauguaaugguguua

SEQ ID NO: 14971 - RNA, 19 nt, Artificial Sequence
  Description of Artificial Sequence: Synthetic oligonucleotide
  Antisense strand to SEQ ID NO: 14970
uaacaccauuacauuccac

SEQ ID NO: 14972 - RNA, 19 nt, Artificial Sequence
  Description of Artificial Sequence: Synthetic oligonucleotide
  Sense strand starting at position 3913 of SEQ ID NO: 148
gaggacaaaucauaaggaa

SEQ ID NO: 14973 - RNA, 19 nt, Artificial Sequence
  Description of Artificial Sequence: Synthetic oligonucleotide
  Antisense strand to SEQ ID NO: 14972
uuccuuaugauuuguccuc

SEQ ID NO: 14974 - RNA, 19 nt, Artificial Sequence
  Description of Artificial Sequence: Synthetic oligonucleotide
  Sense strand starting at position 3941 of SEQ ID NO: 148
caaauuuauugucaugggu

SEQ ID NO: 14975 - RNA, 19 nt, Artificial Sequence
  Description of Artificial Sequence: Synthetic oligonucleotide
  Antisense strand to SEQ ID NO: 14974
acccaugacaauaaauuug

SEQ ID NO: 14976 - RNA, 19 nt, Artificial Sequence
  Description of Artificial Sequence: Synthetic oligonucleotide
  Sense strand starting at position 3944 of SEQ ID NO: 148
auuuauugucaugggugca

SEQ ID NO: 14977 - RNA, 19 nt, Artificial Sequence
  Description of Artificial Sequence: Synthetic oligonucleotide
  Antisense strand to SEQ ID NO: 14976
ugcacccaugacaauaaau

SEQ ID NO: 14978 - RNA, 19 nt, Artificial Sequence
  Description of Artificial Sequence: Synthetic oligonucleotide
  Sense strand starting at position 3957 of SEQ ID NO: 148
ggugcacuuuacccauuua

SEQ ID NO: 14979 - RNA, 19 nt, Artificial Sequence
  Description of Artificial Sequence: Synthetic oligonucleotide
  Antisense strand to SEQ ID NO: 14978
uaaauggguaaagugcacc

SEQ ID NO: 14980 - RNA, 19 nt, Artificial Sequence
  Description of Artificial Sequence: Synthetic oligonucleotide
  Sense strand starting at position 3978 of SEQ ID NO: 148
uaauacaauguccgaagua

SEQ ID NO: 14981 - RNA, 19 nt, Artificial Sequence
  Description of Artificial Sequence: Synthetic oligonucleotide
  Antisense strand to SEQ ID NO: 14980
uacuucggacauuguauua

SEQ ID NO: 14982 - RNA, 19 nt, Artificial Sequence
  Description of Artificial Sequence: Synthetic oligonucleotide
  Sense strand starting at position 196 of SEQ ID NO: 149
gagcaagagggauguguua

SEQ ID NO: 14983 - RNA, 19 nt, Artificial Sequence
  Description of Artificial Sequence: Synthetic oligonucleotide
  Antisense strand to SEQ ID NO: 14982
uaacacaucccucuugcuc

SEQ ID NO: 14984 - RNA, 19 nt, Artificial Sequence
  Description of Artificial Sequence: Synthetic oligonucleotide
  Sense strand starting at position 198 of SEQ ID NO: 149
gcaagagggauguguuaga

SEQ ID NO: 14985 - RNA, 19 nt, Artificial Sequence
  Description of Artificial Sequence: Synthetic oligonucleotide
  Antisense strand to SEQ ID NO: 14984
ucuaacacaucccucuugc

SEQ ID NO: 14986 - RNA, 19 nt, Artificial Sequence
  Description of Artificial Sequence: Synthetic oligonucleotide
  Sense strand starting at position 211 of SEQ ID NO: 149
guuagaauuccacaugugg

SEQ ID NO: 14987 - RNA, 19 nt, Artificial Sequence
  Description of Artificial Sequence: Synthetic oligonucleotide
  Antisense strand to SEQ ID NO: 14986
ccacauguggaauucuaac

SEQ ID NO: 14988 - RNA, 19 nt, Artificial Sequence
  Description of Artificial Sequence: Synthetic oligonucleotide
  Sense strand starting at position 401 of SEQ ID NO: 149
uuggcaacaucacuaaaga

SEQ ID NO: 14989 - RNA, 19 nt, Artificial Sequence
  Description of Artificial Sequence: Synthetic oligonucleotide
  Antisense strand to SEQ ID NO: 14988
ucuuuagugauguugccaa

SEQ ID NO: 14990 - RNA, 19 nt, Artificial Sequence
  Description of Artificial Sequence: Synthetic oligonucleotide
  Sense strand starting at position 571 of SEQ ID NO: 149
cagggaugauuugaaguaa

SEQ ID NO: 14991 - RNA, 19 nt, Artificial Sequence
  Description of Artificial Sequence: Synthetic oligonucleotide
  Antisense strand to SEQ ID NO: 14990
uuacuucaaaucaucccug

SEQ ID NO: 14992 - RNA, 19 nt, Artificial Sequence
  Description of Artificial Sequence: Synthetic oligonucleotide
  Sense strand starting at position 713 of SEQ ID NO: 149
cuagaaaggucauucugug

SEQ ID NO: 14993 - RNA, 19 nt, Artificial Sequence
  Description of Artificial Sequence: Synthetic oligonucleotide
  Antisense strand to SEQ ID NO: 14992
cacagaaugaccuuucuag

SEQ ID NO: 14994 - RNA, 19 nt, Artificial Sequence
  Description of Artificial Sequence: Synthetic oligonucleotide
  Sense strand starting at position 795 of SEQ ID NO: 149
acuacaguuguauaauauc

SEQ ID NO: 14995 - RNA, 19 nt, Artificial Sequence
  Description of Artificial Sequence: Synthetic oligonucleotide
  Antisense strand to SEQ ID NO: 14994
gauauuauacaacuguagu

SEQ ID NO: 14996 - RNA, 19 nt, Artificial Sequence
  Description of Artificial Sequence: Synthetic oligonucleotide
  Sense strand starting at position 864 of SEQ ID NO: 149
gguugugacaucuaagcau

SEQ ID NO: 14997 - RNA, 19 nt, Artificial Sequence
  Description of Artificial Sequence: Synthetic oligonucleotide
  Antisense strand to SEQ ID NO: 14996
augcuuagaugucacaacc

SEQ ID NO: 14998 - RNA, 19 nt, Artificial Sequence
  Description of Artificial Sequence: Synthetic oligonucleotide
  Sense strand starting at position 871 of SEQ ID NO: 149
acaucuaagcauggaggua

SEQ ID NO: 14999 - RNA, 19 nt, Artificial Sequence
  Description of Artificial Sequence: Synthetic oligonucleotide
  Antisense strand to SEQ ID NO: 14998
uaccuccaugcuuagaugu

SEQ ID NO: 15000 - RNA, 19 nt, Artificial Sequence
  Description of Artificial Sequence: Synthetic oligonucleotide
  Sense strand starting at position 922 of SEQ ID NO: 149
aaacuugaguguuuggaag

SEQ ID NO: 15001 - RNA, 19 nt, Artificial Sequence
  Description of Artificial Sequence: Synthetic oligonucleotide
  Antisense strand to SEQ ID NO: 15000
cuuccaaacacucaaguuu

SEQ ID NO: 15002 - RNA, 19 nt, Artificial Sequence
  Description of Artificial Sequence: Synthetic oligonucleotide
  Sense strand starting at position 970 of SEQ ID NO: 149
aagggcucuccaugaauga

SEQ ID NO: 15003 - RNA, 19 nt, Artificial Sequence
  Description of Artificial Sequence: Synthetic oligonucleotide
  Antisense strand to SEQ ID NO: 15002
ucauucauggagagcccuu

SEQ ID NO: 15004 - RNA, 19 nt, Artificial Sequence
  Description of Artificial Sequence: Synthetic oligonucleotide
  Sense strand starting at position 1076 of SEQ ID NO: 149
ggguauccagagugaguga

SEQ ID NO: 15005 - RNA, 19 nt, Artificial Sequence
  Description of Artificial Sequence: Synthetic oligonucleotide
  Antisense strand to SEQ ID NO: 15004
ucacucacucuggauaccc

SEQ ID NO: 15006 - RNA, 19 nt, Artificial Sequence
  Description of Artificial Sequence: Synthetic oligonucleotide
  Sense strand starting at position 1553 of SEQ ID NO: 149
agucguugcgcaccgagaa

SEQ ID NO: 15007 - RNA, 19 nt, Artificial Sequence
  Description of Artificial Sequence: Synthetic oligonucleotide
  Antisense strand to SEQ ID NO: 15006
uucucggugcgcaacgacu

SEQ ID NO: 15008 - RNA, 19 nt, Artificial Sequence
  Description of Artificial Sequence: Synthetic oligonucleotide
  Sense strand starting at position 1940 of SEQ ID NO: 149
aagcucugaugucuggaga

SEQ ID NO: 15009 - RNA, 19 nt, Artificial Sequence
  Description of Artificial Sequence: Synthetic oligonucleotide
  Antisense strand to SEQ ID NO: 15008
ucuccagacaucagagcuu

SEQ ID NO: 15010 - RNA, 19 nt, Artificial Sequence
  Description of Artificial Sequence: Synthetic oligonucleotide
  Sense strand starting at position 2491 of SEQ ID NO: 149
acugguuuagauggaugga

SEQ ID NO: 15011 - RNA, 19 nt, Artificial Sequence
  Description of Artificial Sequence: Synthetic oligonucleotide
  Antisense strand to SEQ ID NO: 15010
uccauccaucuaaaccagu

SEQ ID NO: 15012 - RNA, 19 nt, Artificial Sequence
  Description of Artificial Sequence: Synthetic oligonucleotide
  Sense strand starting at position 2525 of SEQ ID NO: 149
gaguaaggugcacaguuaa

SEQ ID NO: 15013 - RNA, 19 nt, Artificial Sequence
  Description of Artificial Sequence: Synthetic oligonucleotide
  Antisense strand to SEQ ID NO: 15012
uuaacugugcaccuuacuc

SEQ ID NO: 15014 - RNA, 19 nt, Artificial Sequence
  Description of Artificial Sequence: Synthetic oligonucleotide
  Sense strand starting at position 2639 of SEQ ID NO: 149
ggaauauuauagcugauag

SEQ ID NO: 15015 - RNA, 19 nt, Artificial Sequence
  Description of Artificial Sequence: Synthetic oligonucleotide
  Antisense strand to SEQ ID NO: 15014
cuaucagcuauaauauucc

SEQ ID NO: 15016 - RNA, 19 nt, Artificial Sequence
  Description of Artificial Sequence: Synthetic oligonucleotide
  Sense strand starting at position 2662 of SEQ ID NO: 149
aaaguaggguuagcucaaa

SEQ ID NO: 15017 - RNA, 19 nt, Artificial Sequence
  Description of Artificial Sequence: Synthetic oligonucleotide
  Antisense strand to SEQ ID NO: 15016
uuugagcuaacccuacuuu

SEQ ID NO: 15018 - RNA, 19 nt, Artificial Sequence
  Description of Artificial Sequence: Synthetic oligonucleotide
  Sense strand starting at position 2791 of SEQ ID NO: 149
aaagaauauccuuggguau

SEQ ID NO: 15019 - RNA, 19 nt, Artificial Sequence
  Description of Artificial Sequence: Synthetic oligonucleotide
  Antisense strand to SEQ ID NO: 15018
auacccaaggauauucuuu

SEQ ID NO: 15020 - RNA, 19 nt, Artificial Sequence
  Description of Artificial Sequence: Synthetic oligonucleotide
  Sense strand starting at position 2792 of SEQ ID NO: 149
aagaauauccuuggguaug

SEQ ID NO: 15021 - RNA, 19 nt, Artificial Sequence
  Description of Artificial Sequence: Synthetic oligonucleotide
  Antisense strand to SEQ ID NO: 15020
cauacccaaggauauucuu

SEQ ID NO: 15022 - RNA, 19 nt, Artificial Sequence
  Description of Artificial Sequence: Synthetic oligonucleotide
  Sense strand starting at position 2802 of SEQ ID NO: 149
uuggguaugagcuaaguca

SEQ ID NO: 15023 - RNA, 19 nt, Artificial Sequence
  Description of Artificial Sequence: Synthetic oligonucleotide
  Antisense strand to SEQ ID NO: 15022
ugacuuagcucauacccaa

SEQ ID NO: 15024 - RNA, 19 nt, Artificial Sequence
  Description of Artificial Sequence: Synthetic oligonucleotide
  Sense strand starting at position 2974 of SEQ ID NO: 149
ugcaauaaacagugguaga

SEQ ID NO: 15025 - RNA, 19 nt, Artificial Sequence
  Description of Artificial Sequence: Synthetic oligonucleotide
  Antisense strand to SEQ ID NO: 15024
ucuaccacuguuuauugca

SEQ ID NO: 15026 - RNA, 19 nt, Artificial Sequence
  Description of Artificial Sequence: Synthetic oligonucleotide
  Sense strand starting at position 2975 of SEQ ID NO: 149
gcaauaaacagugguagaa

SEQ ID NO: 15027 - RNA, 19 nt, Artificial Sequence
  Description of Artificial Sequence: Synthetic oligonucleotide
  Antisense strand to SEQ ID NO: 15026
uucuaccacuguuuauugc

SEQ ID NO: 15028 - RNA, 19 nt, Artificial Sequence
  Description of Artificial Sequence: Synthetic oligonucleotide
  Sense strand starting at position 2998 of SEQ ID NO: 149
gacauuguguauucugaaa

SEQ ID NO: 15029 - RNA, 19 nt, Artificial Sequence
  Description of Artificial Sequence: Synthetic oligonucleotide
  Antisense strand to SEQ ID NO: 15028
uuucagaauacacaauguc

SEQ ID NO: 15030 - RNA, 19 nt, Artificial Sequence
  Description of Artificial Sequence: Synthetic oligonucleotide
  Sense strand starting at position 3230 of SEQ ID NO: 149
aguuuauuggcauauguga

SEQ ID NO: 15031 - RNA, 19 nt, Artificial Sequence
  Description of Artificial Sequence: Synthetic oligonucleotide
  Antisense strand to SEQ ID NO: 15030
ucacauaugccaauaaacu

SEQ ID NO: 15032 - RNA, 19 nt, Artificial Sequence
  Description of Artificial Sequence: Synthetic oligonucleotide
  Sense strand starting at position 3341 of SEQ ID NO: 149
uguuuaaguagugaaagau

SEQ ID NO: 15033 - RNA, 19 nt, Artificial Sequence
  Description of Artificial Sequence: Synthetic oligonucleotide
  Antisense strand to SEQ ID NO: 15032
aucuuucacuacuuaaaca

SEQ ID NO: 15034 - RNA, 19 nt, Artificial Sequence
  Description of Artificial Sequence: Synthetic oligonucleotide
  Sense strand starting at position 3417 of SEQ ID NO: 149
auauguaacuuaucuggga

SEQ ID NO: 15035 - RNA, 19 nt, Artificial Sequence
  Description of Artificial Sequence: Synthetic oligonucleotide
  Antisense strand to SEQ ID NO: 15034
ucccagauaaguuacauau

SEQ ID NO: 15036 - RNA, 19 nt, Artificial Sequence
  Description of Artificial Sequence: Synthetic oligonucleotide
  Sense strand starting at position 3418 of SEQ ID NO: 149
uauguaacuuaucugggaa

SEQ ID NO: 15037 - RNA, 19 nt, Artificial Sequence
  Description of Artificial Sequence: Synthetic oligonucleotide
  Antisense strand to SEQ ID NO: 15036
uucccagauaaguuacaua

SEQ ID NO: 15038 - RNA, 19 nt, Artificial Sequence
  Description of Artificial Sequence: Synthetic oligonucleotide
  Sense strand starting at position 3652 of SEQ ID NO: 149
gccauugaauaauuauagu

SEQ ID NO: 15039 - RNA, 19 nt, Artificial Sequence
  Description of Artificial Sequence: Synthetic oligonucleotide
  Antisense strand to SEQ ID NO: 15038
acuauaauuauucaauggc

SEQ ID NO: 15040 - RNA, 19 nt, Artificial Sequence
  Description of Artificial Sequence: Synthetic oligonucleotide
  Sense strand starting at position 3679 of SEQ ID NO: 149
ggaacacacccuugauacu

SEQ ID NO: 15041 - RNA, 19 nt, Artificial Sequence
  Description of Artificial Sequence: Synthetic oligonucleotide
  Antisense strand to SEQ ID NO: 15040
aguaucaaggguguguucc

SEQ ID NO: 15042 - RNA, 19 nt, Artificial Sequence
  Description of Artificial Sequence: Synthetic oligonucleotide
  Sense strand starting at position 3704 of SEQ ID NO: 149
ugagaaauggcauguaagu

SEQ ID NO: 15043 - RNA, 19 nt, Artificial Sequence
  Description of Artificial Sequence: Synthetic oligonucleotide
  Antisense strand to SEQ ID NO: 15042
acuuacaugccauuucuca

SEQ ID NO: 15044 - RNA, 19 nt, Artificial Sequence
  Description of Artificial Sequence: Synthetic oligonucleotide
  Sense strand starting at position 3715 of SEQ ID NO: 149
auguaaguaccugaucaug

SEQ ID NO: 15045 - RNA, 19 nt, Artificial Sequence
  Description of Artificial Sequence: Synthetic oligonucleotide
  Antisense strand to SEQ ID NO: 15044
caugaucagguacuuacau

SEQ ID NO: 15046 - RNA, 19 nt, Artificial Sequence
  Description of Artificial Sequence: Synthetic oligonucleotide
  Sense strand starting at position 3775 of SEQ ID NO: 149
cccauuaaagagugaucua

SEQ ID NO: 15047 - RNA, 19 nt, Artificial Sequence
  Description of Artificial Sequence: Synthetic oligonucleotide
  Antisense strand to SEQ ID NO: 15046
uagaucacucuuuaauggg

SEQ ID NO: 15048 - RNA, 19 nt, Artificial Sequence
  Description of Artificial Sequence: Synthetic oligonucleotide
  Sense strand starting at position 3778 of SEQ ID NO: 149
auuaaagagugaucuaucu

SEQ ID NO: 15049 - RNA, 19 nt, Artificial Sequence
  Description of Artificial Sequence: Synthetic oligonucleotide
  Antisense strand to SEQ ID NO: 15048
agauagaucacucuuuaau

SEQ ID NO: 15050 - RNA, 19 nt, Artificial Sequence
  Description of Artificial Sequence: Synthetic oligonucleotide
  Sense strand starting at position 3845 of SEQ ID NO: 149
ccacuauaugguuauggua

SEQ ID NO: 15051 - RNA, 19 nt, Artificial Sequence
  Description of Artificial Sequence: Synthetic oligonucleotide
  Antisense strand to SEQ ID NO: 15050
uaccauaaccauauagugg

SEQ ID NO: 15052 - RNA, 19 nt, Artificial Sequence
  Description of Artificial Sequence: Synthetic oligonucleotide
  Sense strand starting at position 3869 of SEQ ID NO: 149
gggugcacccauggauaau

SEQ ID NO: 15053 - RNA, 19 nt, Artificial Sequence
  Description of Artificial Sequence: Synthetic oligonucleotide
  Antisense strand to SEQ ID NO: 15052
auuauccaugggugcaccc

SEQ ID NO: 15054 - RNA, 19 nt, Artificial Sequence
  Description of Artificial Sequence: Synthetic oligonucleotide
  Sense strand starting at position 3879 of SEQ ID NO: 149
auggauaaucacugggcuu

SEQ ID NO: 15055 - RNA, 19 nt, Artificial Sequence
  Description of Artificial Sequence: Synthetic oligonucleotide
  Antisense strand to SEQ ID NO: 15054
aagcccagugauuauccau

SEQ ID NO: 15056 - RNA, 19 nt, Artificial Sequence
  Description of Artificial Sequence: Synthetic oligonucleotide
  Sense strand starting at position 3880 of SEQ ID NO: 149
uggauaaucacugggcuuu

SEQ ID NO: 15057 - RNA, 19 nt, Artificial Sequence
  Description of Artificial Sequence: Synthetic oligonucleotide
  Antisense strand to SEQ ID NO: 15056
aaagcccagugauuaucca

SEQ ID NO: 15058 - RNA, 19 nt, Artificial Sequence
  Description of Artificial Sequence: Synthetic oligonucleotide
  Sense strand starting at position 3881 of SEQ ID NO: 149
ggauaaucacugggcuuua

SEQ ID NO: 15059 - RNA, 19 nt, Artificial Sequence
  Description of Artificial Sequence: Synthetic oligonucleotide
  Antisense strand to SEQ ID NO: 15058
uaaagcccagugauuaucc

SEQ ID NO: 15060 - RNA, 19 nt, Artificial Sequence
  Description of Artificial Sequence: Synthetic oligonucleotide
  Sense strand starting at position 3893 of SEQ ID NO: 149
ggcuuuauggaccacagua

SEQ ID NO: 15061 - RNA, 19 nt, Artificial Sequence
  Description of Artificial Sequence: Synthetic oligonucleotide
  Antisense strand to SEQ ID NO: 15060
uacugugguccauaaagcc

SEQ ID NO: 15062 - RNA, 19 nt, Artificial Sequence
  Description of Artificial Sequence: Synthetic oligonucleotide
  Sense strand starting at position 3610 of SEQ ID NO: 151
gcacgacuccaucgccaaa

SEQ ID NO: 15063 - RNA, 19 nt, Artificial Sequence
  Description of Artificial Sequence: Synthetic oligonucleotide
  Antisense strand to SEQ ID NO: 15062
uuuggcgauggagucgugc

SEQ ID NO: 15064 - RNA, 19 nt, Artificial Sequence
  Description of Artificial Sequence: Synthetic oligonucleotide
  Sense strand starting at position 3306 of SEQ ID NO: 151
ugagucagacucugucaaa

SEQ ID NO: 15065 - RNA, 19 nt, Artificial Sequence
  Description of Artificial Sequence: Synthetic oligonucleotide
  Antisense strand to SEQ ID NO: 15064
uuugacagagucugacuca

SEQ ID NO: 15066 - RNA, 19 nt, Artificial Sequence
  Description of Artificial Sequence: Synthetic oligonucleotide
  Sense strand starting at position 3227 of SEQ ID NO: 151
cuucuuuggcggcacagaa

SEQ ID NO: 15067 - RNA, 19 nt, Artificial Sequence
  Description of Artificial Sequence: Synthetic oligonucleotide
  Antisense strand to SEQ ID NO: 15066
uucugugccgccaaagaag

SEQ ID NO: 15068 - RNA, 19 nt, Artificial Sequence
  Description of Artificial Sequence: Synthetic oligonucleotide
  Sense strand starting at position 3154 of SEQ ID NO: 151
ugcuccaucuaugagaugu

SEQ ID NO: 15069 - RNA, 19 nt, Artificial Sequence
  Description of Artificial Sequence: Synthetic oligonucleotide
  Antisense strand to SEQ ID NO: 15068
acaucucauagauggagca

SEQ ID NO: 15070 - RNA, 19 nt, Artificial Sequence
  Description of Artificial Sequence: Synthetic oligonucleotide
  Sense strand starting at position 3153 of SEQ ID NO: 151
uugcuccaucuaugagaug

SEQ ID NO: 15071 - RNA, 19 nt, Artificial Sequence
  Description of Artificial Sequence: Synthetic oligonucleotide
  Antisense strand to SEQ ID NO: 15070
caucucauagauggagcaa

SEQ ID NO: 15072 - RNA, 19 nt, Artificial Sequence
  Description of Artificial Sequence: Synthetic oligonucleotide
  Sense strand starting at position 3147 of SEQ ID NO: 151
ucgccauugcuccaucuau

SEQ ID NO: 15073 - RNA, 19 nt, Artificial Sequence
  Description of Artificial Sequence: Synthetic oligonucleotide
  Antisense strand to SEQ ID NO: 15072
auagauggagcaauggcga

SEQ ID NO: 15074 - RNA, 19 nt, Artificial Sequence
  Description of Artificial Sequence: Synthetic oligonucleotide
  Sense strand starting at position 3040 of SEQ ID NO: 151
acuaguuuagacugugcau

SEQ ID NO: 15075 - RNA, 19 nt, Artificial Sequence
  Description of Artificial Sequence: Synthetic oligonucleotide
  Antisense strand to SEQ ID NO: 15074
augcacagucuaaacuagu

SEQ ID NO: 15076 - RNA, 19 nt, Artificial Sequence
  Description of Artificial Sequence: Synthetic oligonucleotide
  Sense strand starting at position 3030 of SEQ ID NO: 151
gccaaugggcacuaguuua

SEQ ID NO: 15077 - RNA, 19 nt, Artificial Sequence
  Description of Artificial Sequence: Synthetic oligonucleotide
  Antisense strand to SEQ ID NO: 15076
uaaacuagugcccauuggc

SEQ ID NO: 15078 - RNA, 19 nt, Artificial Sequence
  Description of Artificial Sequence: Synthetic oligonucleotide
  Sense strand starting at position 2947 of SEQ ID NO: 151
uuaguuaccugucccauaa

SEQ ID NO: 15079 - RNA, 19 nt, Artificial Sequence
  Description of Artificial Sequence: Synthetic oligonucleotide
  Antisense strand to SEQ ID NO: 15078
uuaugggacagguaacuaa

SEQ ID NO: 15080 - RNA, 19 nt, Artificial Sequence
  Description of Artificial Sequence: Synthetic oligonucleotide
  Sense strand starting at position 2897 of SEQ ID NO: 151
ccugcuccguccuaacuaa

SEQ ID NO: 15081 - RNA, 19 nt, Artificial Sequence
  Description of Artificial Sequence: Synthetic oligonucleotide
  Antisense strand to SEQ ID NO: 15080
uuaguuaggacggagcagg

SEQ ID NO: 15082 - RNA, 19 nt, Artificial Sequence
  Description of Artificial Sequence: Synthetic oligonucleotide
  Sense strand starting at position 2867 of SEQ ID NO: 151
gucaguaguugacaucugu

SEQ ID NO: 15083 - RNA, 19 nt, Artificial Sequence
  Description of Artificial Sequence: Synthetic oligonucleotide
  Antisense strand to SEQ ID NO: 15082
acagaugucaacuacugac

SEQ ID NO: 15084 - RNA, 19 nt, Artificial Sequence
  Description of Artificial Sequence: Synthetic oligonucleotide
  Sense strand starting at position 2863 of SEQ ID NO: 151
ucuagucaguaguugacau

SEQ ID NO: 15085 - RNA, 19 nt, Artificial Sequence
  Description of Artificial Sequence: Synthetic oligonucleotide
  Antisense strand to SEQ ID NO: 15084
augucaacuacugacuaga

SEQ ID NO: 15086 - RNA, 19 nt, Artificial Sequence
  Description of Artificial Sequence: Synthetic oligonucleotide
  Sense strand starting at position 2860 of SEQ ID NO: 151
aguucuagucaguaguuga

SEQ ID NO: 15087 - RNA, 19 nt, Artificial Sequence
  Description of Artificial Sequence: Synthetic oligonucleotide
  Antisense strand to SEQ ID NO: 15086
ucaacuacugacuagaacu

SEQ ID NO: 15088 - RNA, 19 nt, Artificial Sequence
  Description of Artificial Sequence: Synthetic oligonucleotide
  Sense strand starting at position 2857 of SEQ ID NO: 151
accaguucuagucaguagu

SEQ ID NO: 15089 - RNA, 19 nt, Artificial Sequence
  Description of Artificial Sequence: Synthetic oligonucleotide
  Antisense strand to SEQ ID NO: 15088
acuacugacuagaacuggu

SEQ ID NO: 15090 - RNA, 19 nt, Artificial Sequence
  Description of Artificial Sequence: Synthetic oligonucleotide
  Sense strand starting at position 2778 of SEQ ID NO: 151
ucaguauaucaguauguuc

SEQ ID NO: 15091 - RNA, 19 nt, Artificial Sequence
  Description of Artificial Sequence: Synthetic oligonucleotide
  Antisense strand to SEQ ID NO: 15090
gaacauacugauauacuga

SEQ ID NO: 15092 - RNA, 19 nt, Artificial Sequence
  Description of Artificial Sequence: Synthetic oligonucleotide
  Sense strand starting at position 2777 of SEQ ID NO: 151
aucaguauaucaguauguu

SEQ ID NO: 15093 - RNA, 19 nt, Artificial Sequence
  Description of Artificial Sequence: Synthetic oligonucleotide
  Antisense strand to SEQ ID NO: 15092
aacauacugauauacugau

SEQ ID NO: 15094 - RNA, 19 nt, Artificial Sequence
  Description of Artificial Sequence: Synthetic oligonucleotide
  Sense strand starting at position 2731 of SEQ ID NO: 151
ccugaauaauguuagauac

SEQ ID NO: 15095 - RNA, 19 nt, Artificial Sequence
  Description of Artificial Sequence: Synthetic oligonucleotide
  Antisense strand to SEQ ID NO: 15094
guaucuaacauuauucagg

SEQ ID NO: 15096 - RNA, 19 nt, Artificial Sequence
  Description of Artificial Sequence: Synthetic oligonucleotide
  Sense strand starting at position 2685 of SEQ ID NO: 151
gaauauauggagugacuuu

SEQ ID NO: 15097 - RNA, 19 nt, Artificial Sequence
  Description of Artificial Sequence: Synthetic oligonucleotide
  Antisense strand to SEQ ID NO: 15096
aaagucacuccauauauuc

SEQ ID NO: 15098 - RNA, 19 nt, Artificial Sequence
  Description of Artificial Sequence: Synthetic oligonucleotide
  Sense strand starting at position 2672 of SEQ ID NO: 151
gguugacuucacggaauau

SEQ ID NO: 15099 - RNA, 19 nt, Artificial Sequence
  Description of Artificial Sequence: Synthetic oligonucleotide
  Antisense strand to SEQ ID NO: 15098
auauuccgugaagucaacc

SEQ ID NO: 15100 - RNA, 19 nt, Artificial Sequence
  Description of Artificial Sequence: Synthetic oligonucleotide
  Sense strand starting at position 2669 of SEQ ID NO: 151
acugguugacuucacggaa

SEQ ID NO: 15101 - RNA, 19 nt, Artificial Sequence
  Description of Artificial Sequence: Synthetic oligonucleotide
  Antisense strand to SEQ ID NO: 15100
uuccgugaagucaaccagu

SEQ ID NO: 15102 - RNA, 19 nt, Artificial Sequence
  Description of Artificial Sequence: Synthetic oligonucleotide
  Sense strand starting at position 2659 of SEQ ID NO: 151
ccuugauggaacugguuga

SEQ ID NO: 15103 - RNA, 19 nt, Artificial Sequence
  Description of Artificial Sequence: Synthetic oligonucleotide
  Antisense strand to SEQ ID NO: 15102
ucaaccaguuccaucaagg

SEQ ID NO: 15104 - RNA, 19 nt, Artificial Sequence
  Description of Artificial Sequence: Synthetic oligonucleotide
  Sense strand starting at position 2418 of SEQ ID NO: 151
gagcccuuccgcgaugagu

SEQ ID NO: 15105 - RNA, 19 nt, Artificial Sequence
  Description of Artificial Sequence: Synthetic oligonucleotide
  Antisense strand to SEQ ID NO: 15104
acucaucgcggaagggcuc

SEQ ID NO: 15106 - RNA, 19 nt, Artificial Sequence
  Description of Artificial Sequence: Synthetic oligonucleotide
  Sense strand starting at position 2365 of SEQ ID NO: 151
agaagagucucgcgggaac

SEQ ID NO: 15107 - RNA, 19 nt, Artificial Sequence
  Description of Artificial Sequence: Synthetic oligonucleotide
  Antisense strand to SEQ ID NO: 15106
guucccgcgagacucuucu

SEQ ID NO: 15108 - RNA, 19 nt, Artificial Sequence
  Description of Artificial Sequence: Synthetic oligonucleotide
  Sense strand starting at position 964 of SEQ ID NO: 151
uccuaaccugaugguuaaa

SEQ ID NO: 15109 - RNA, 19 nt, Artificial Sequence
  Description of Artificial Sequence: Synthetic oligonucleotide
  Antisense strand to SEQ ID NO: 15108
uuuaaccaucagguuagga

SEQ ID NO: 15110 - RNA, 19 nt, Artificial Sequence
  Description of Artificial Sequence: Synthetic oligonucleotide
  Sense strand starting at position 963 of SEQ ID NO: 151
auccuaaccugaugguuaa

SEQ ID NO: 15111 - RNA, 19 nt, Artificial Sequence
  Description of Artificial Sequence: Synthetic oligonucleotide
  Antisense strand to SEQ ID NO: 15110
uuaaccaucagguuaggau

SEQ ID NO: 15112 - RNA, 19 nt, Artificial Sequence
  Description of Artificial Sequence: Synthetic oligonucleotide
  Sense strand starting at position 460 of SEQ ID NO: 151
ggagaaaccucucucaccu

SEQ ID NO: 15113 - RNA, 19 nt, Artificial Sequence
  Description of Artificial Sequence: Synthetic oligonucleotide
  Antisense strand to SEQ ID NO: 15112
aggugagagagguuucucc

SEQ ID NO: 15114 - RNA, 19 nt, Artificial Sequence
  Description of Artificial Sequence: Synthetic oligonucleotide
  Sense strand starting at position 448 of SEQ ID NO: 151
gcagucaacucuggagaaa

SEQ ID NO: 15115 - RNA, 19 nt, Artificial Sequence
  Description of Artificial Sequence: Synthetic oligonucleotide
  Antisense strand to SEQ ID NO: 15114
uuucuccagaguugacugc

SEQ ID NO: 15116 - RNA, 19 nt, Artificial Sequence
  Description of Artificial Sequence: Synthetic oligonucleotide
  Sense strand starting at position 447 of SEQ ID NO: 151
ggcagucaacucuggagaa

SEQ ID NO: 15117 - RNA, 19 nt, Artificial Sequence
  Description of Artificial Sequence: Synthetic oligonucleotide
  Antisense strand to SEQ ID NO: 15116
uucuccagaguugacugcc

SEQ ID NO: 15118 - RNA, 19 nt, Artificial Sequence
  Description of Artificial Sequence: Synthetic oligonucleotide
  Sense strand starting at position 3693 of SEQ ID NO: 150
ugagucagacucugucaaa

SEQ ID NO: 15119 - RNA, 19 nt, Artificial Sequence
  Description of Artificial Sequence: Synthetic oligonucleotide
  Antisense strand to SEQ ID NO: 15118
uuugacagagucugacuca

SEQ ID NO: 15120 - RNA, 19 nt, Artificial Sequence
  Description of Artificial Sequence: Synthetic oligonucleotide
  Sense strand starting at position 3614 of SEQ ID NO: 150
cuucuuuggcggcacagaa

SEQ ID NO: 15121 - RNA, 19 nt, Artificial Sequence
  Description of Artificial Sequence: Synthetic oligonucleotide
  Antisense strand to SEQ ID NO: 15120
uucugugccgccaaagaag

SEQ ID NO: 15122 - RNA, 19 nt, Artificial Sequence
  Description of Artificial Sequence: Synthetic oligonucleotide
  Sense strand starting at position 3541 of SEQ ID NO: 150
ugcuccaucuaugagaugu

SEQ ID NO: 15123 - RNA, 19 nt, Artificial Sequence
  Description of Artificial Sequence: Synthetic oligonucleotide
  Antisense strand to SEQ ID NO: 15122
acaucucauagauggagca

SEQ ID NO: 15124 - RNA, 19 nt, Artificial Sequence
  Description of Artificial Sequence: Synthetic oligonucleotide
  Sense strand starting at position 3540 of SEQ ID NO: 150
uugcuccaucuaugagaug

SEQ ID NO: 15125 - RNA, 19 nt, Artificial Sequence
  Description of Artificial Sequence: Synthetic oligonucleotide
  Antisense strand to SEQ ID NO: 15124
caucucauagauggagcaa

SEQ ID NO: 15126 - RNA, 19 nt, Artificial Sequence
  Description of Artificial Sequence: Synthetic oligonucleotide
  Sense strand starting at position 3534 of SEQ ID NO: 150
ucgccauugcuccaucuau

SEQ ID NO: 15127 - RNA, 19 nt, Artificial Sequence
  Description of Artificial Sequence: Synthetic oligonucleotide
  Antisense strand to SEQ ID NO: 15126
auagauggagcaauggcga

SEQ ID NO: 15128 - RNA, 19 nt, Artificial Sequence
  Description of Artificial Sequence: Synthetic oligonucleotide
  Sense strand starting at position 3427 of SEQ ID NO: 150
acuaguuuagacugugcau

SEQ ID NO: 15129 - RNA, 19 nt, Artificial Sequence
  Description of Artificial Sequence: Synthetic oligonucleotide
  Antisense strand to SEQ ID NO: 15128
augcacagucuaaacuagu

SEQ ID NO: 15130 - RNA, 19 nt, Artificial Sequence
  Description of Artificial Sequence: Synthetic oligonucleotide
  Sense strand starting at position 3417 of SEQ ID NO: 150
gccaaugggcacuaguuua

SEQ ID NO: 15131 - RNA, 19 nt, Artificial Sequence
  Description of Artificial Sequence: Synthetic oligonucleotide
  Antisense strand to SEQ ID NO: 15130
uaaacuagugcccauuggc

SEQ ID NO: 15132 - RNA, 19 nt, Artificial Sequence
  Description of Artificial Sequence: Synthetic oligonucleotide
  Sense strand starting at position 3334 of SEQ ID NO: 150
uuaguuaccugucccauaa

SEQ ID NO: 15133 - RNA, 19 nt, Artificial Sequence
  Description of Artificial Sequence: Synthetic oligonucleotide
  Antisense strand to SEQ ID NO: 15132
uuaugggacagguaacuaa

SEQ ID NO: 15134 - RNA, 19 nt, Artificial Sequence
  Description of Artificial Sequence: Synthetic oligonucleotide
  Sense strand starting at position 3284 of SEQ ID NO: 150
ccugcuccguccuaacuaa

SEQ ID NO: 15135 - RNA, 19 nt, Artificial Sequence
  Description of Artificial Sequence: Synthetic oligonucleotide
  Antisense strand to SEQ ID NO: 15134
uuaguuaggacggagcagg

SEQ ID NO: 15136 - RNA, 19 nt, Artificial Sequence
  Description of Artificial Sequence: Synthetic oligonucleotide
  Sense strand starting at position 3254 of SEQ ID NO: 150
gucaguaguugacaucugu

SEQ ID NO: 15137 - RNA, 19 nt, Artificial Sequence
  Description of Artificial Sequence: Synthetic oligonucleotide
  Antisense strand to SEQ ID NO: 15136
acagaugucaacuacugac

SEQ ID NO: 15138 - RNA, 19 nt, Artificial Sequence
  Description of Artificial Sequence: Synthetic oligonucleotide
  Sense strand starting at position 3250 of SEQ ID NO: 150
ucuagucaguaguugacau

SEQ ID NO: 15139 - RNA, 19 nt, Artificial Sequence
  Description of Artificial Sequence: Synthetic oligonucleotide
  Antisense strand to SEQ ID NO: 15138
augucaacuacugacuaga

SEQ ID NO: 15140 - RNA, 19 nt, Artificial Sequence
  Description of Artificial Sequence: Synthetic oligonucleotide
  Sense strand starting at position 3247 of SEQ ID NO: 150
aguucuagucaguaguuga

SEQ ID NO: 15141 - RNA, 19 nt, Artificial Sequence
  Description of Artificial Sequence: Synthetic oligonucleotide
  Antisense strand to SEQ ID NO: 15140
ucaacuacugacuagaacu

SEQ ID NO: 15142 - RNA, 19 nt, Artificial Sequence
  Description of Artificial Sequence: Synthetic oligonucleotide
  Sense strand starting at position 3244 of SEQ ID NO: 150
accaguucuagucaguagu

SEQ ID NO: 15143 - RNA, 19 nt, Artificial Sequence
  Description of Artificial Sequence: Synthetic oligonucleotide
  Antisense strand to SEQ ID NO: 15142
acuacugacuagaacuggu

SEQ ID NO: 15144 - RNA, 19 nt, Artificial Sequence
  Description of Artificial Sequence: Synthetic oligonucleotide
  Sense strand starting at position 3165 of SEQ ID NO: 150
ucaguauaucaguauguuc

SEQ ID NO: 15145 - RNA, 19 nt, Artificial Sequence
  Description of Artificial Sequence: Synthetic oligonucleotide
  Antisense strand to SEQ ID NO: 15144
gaacauacugauauacuga

SEQ ID NO: 15146 - RNA, 19 nt, Artificial Sequence
  Description of Artificial Sequence: Synthetic oligonucleotide
  Sense strand starting at position 3164 of SEQ ID NO: 150
aucaguauaucaguauguu

SEQ ID NO: 15147 - RNA, 19 nt, Artificial Sequence
  Description of Artificial Sequence: Synthetic oligonucleotide
  Antisense strand to SEQ ID NO: 15146
aacauacugauauacugau

SEQ ID NO: 15148 - RNA, 19 nt, Artificial Sequence
  Description of Artificial Sequence: Synthetic oligonucleotide
  Sense strand starting at position 3118 of SEQ ID NO: 150
ccugaauaauguuagauac

SEQ ID NO: 15149 - RNA, 19 nt, Artificial Sequence
  Description of Artificial Sequence: Synthetic oligonucleotide
  Antisense strand to SEQ ID NO: 15148
guaucuaacauuauucagg

SEQ ID NO: 15150 - RNA, 19 nt, Artificial Sequence
  Description of Artificial Sequence: Synthetic oligonucleotide
  Sense strand starting at position 3072 of SEQ ID NO: 150
gaauauauggagugacuuu

SEQ ID NO: 15151 - RNA, 19 nt, Artificial Sequence
  Description of Artificial Sequence: Synthetic oligonucleotide
  Antisense strand to SEQ ID NO: 15150
aaagucacuccauauauuc

SEQ ID NO: 15152 - RNA, 19 nt, Artificial Sequence
  Description of Artificial Sequence: Synthetic oligonucleotide
  Sense strand starting at position 3059 of SEQ ID NO: 150
gguugacuucacggaauau

SEQ ID NO: 15153 - RNA, 19 nt, Artificial Sequence
  Description of Artificial Sequence: Synthetic oligonucleotide
  Antisense strand to SEQ ID NO: 15152
auauuccgugaagucaacc

SEQ ID NO: 15154 - RNA, 19 nt, Artificial Sequence
  Description of Artificial Sequence: Synthetic oligonucleotide
  Sense strand starting at position 3056 of SEQ ID NO: 150
acugguugacuucacggaa

SEQ ID NO: 15155 - RNA, 19 nt, Artificial Sequence
  Description of Artificial Sequence: Synthetic oligonucleotide
  Antisense strand to SEQ ID NO: 15154
uuccgugaagucaaccagu

SEQ ID NO: 15156 - RNA, 19 nt, Artificial Sequence
  Description of Artificial Sequence: Synthetic oligonucleotide
  Sense strand starting at position 3046 of SEQ ID NO: 150
ccuugauggaacugguuga

SEQ ID NO: 15157 - RNA, 19 nt, Artificial Sequence
  Description of Artificial Sequence: Synthetic oligonucleotide
  Antisense strand to SEQ ID NO: 15156
ucaaccaguuccaucaagg

SEQ ID NO: 15158 - RNA, 19 nt, Artificial Sequence
  Description of Artificial Sequence: Synthetic oligonucleotide
  Sense strand starting at position 2805 of SEQ ID NO: 150
gagcccuuccgcgaugagu

SEQ ID NO: 15159 - RNA, 19 nt, Artificial Sequence
  Description of Artificial Sequence: Synthetic oligonucleotide
  Antisense strand to SEQ ID NO: 15158
acucaucgcggaagggcuc

SEQ ID NO: 15160 - RNA, 19 nt, Artificial Sequence
  Description of Artificial Sequence: Synthetic oligonucleotide
  Sense strand starting at position 2752 of SEQ ID NO: 150
agaagagucucgcgggaac

SEQ ID NO: 15161 - RNA, 19 nt, Artificial Sequence
  Description of Artificial Sequence: Synthetic oligonucleotide
  Antisense strand to SEQ ID NO: 15160
guucccgcgagacucuucu

SEQ ID NO: 15162 - RNA, 19 nt, Artificial Sequence
  Description of Artificial Sequence: Synthetic oligonucleotide
  Sense strand starting at position 1351 of SEQ ID NO: 150
uccuaaccugaugguuaaa

SEQ ID NO: 15163 - RNA, 19 nt, Artificial Sequence
  Description of Artificial Sequence: Synthetic oligonucleotide
  Antisense strand to SEQ ID NO: 15162
uuuaaccaucagguuagga

SEQ ID NO: 15164 - RNA, 19 nt, Artificial Sequence
  Description of Artificial Sequence: Synthetic oligonucleotide
  Sense strand starting at position 1350 of SEQ ID NO: 150
auccuaaccugaugguuaa

SEQ ID NO: 15165 - RNA, 19 nt, Artificial Sequence
  Description of Artificial Sequence: Synthetic oligonucleotide
  Antisense strand to SEQ ID NO: 15164
uuaaccaucagguuaggau

SEQ ID NO: 15166 - RNA, 19 nt, Artificial Sequence
  Description of Artificial Sequence: Synthetic oligonucleotide
  Sense strand starting at position 847 of SEQ ID NO: 150
ggagaaaccucucucaccu

SEQ ID NO: 15167 - RNA, 19 nt, Artificial Sequence
  Description of Artificial Sequence: Synthetic oligonucleotide
  Antisense strand to SEQ ID NO: 15166
aggugagagagguuucucc

SEQ ID NO: 15168 - RNA, 19 nt, Artificial Sequence
  Description of Artificial Sequence: Synthetic oligonucleotide
  Sense strand starting at position 835 of SEQ ID NO: 150
gcagucaacucuggagaaa

SEQ ID NO: 15169 - RNA, 19 nt, Artificial Sequence
  Description of Artificial Sequence: Synthetic oligonucleotide
  Antisense strand to SEQ ID NO: 15168
uuucuccagaguugacugc

SEQ ID NO: 15170 - RNA, 19 nt, Artificial Sequence
  Description of Artificial Sequence: Synthetic oligonucleotide
  Sense strand starting at position 834 of SEQ ID NO: 150
ggcagucaacucuggagaa

SEQ ID NO: 15171 - RNA, 19 nt, Artificial Sequence
  Description of Artificial Sequence: Synthetic oligonucleotide
  Antisense strand to SEQ ID NO: 15170
uucuccagaguugacugcc

SEQ ID NO: 15172 - RNA, 19 nt, Artificial Sequence
  Description of Artificial Sequence: Synthetic oligonucleotide
  Sense strand starting at position 387 of SEQ ID NO: 150
uuauuagagugagaacaau

SEQ ID NO: 15173 - RNA, 19 nt, Artificial Sequence
  Description of Artificial Sequence: Synthetic oligonucleotide
  Antisense strand to SEQ ID NO: 15172
auuguucucacucuaauaa

SEQ ID NO: 15174 - RNA, 19 nt, Artificial Sequence
  Description of Artificial Sequence: Synthetic oligonucleotide
  Sense strand starting at position 384 of SEQ ID NO: 150
cgguuauuagagugagaac

SEQ ID NO: 15175 - RNA, 19 nt, Artificial Sequence
  Description of Artificial Sequence: Synthetic oligonucleotide
  Antisense strand to SEQ ID NO: 15174
guucucacucuaauaaccg

SEQ ID NO: 15176 - RNA, 19 nt, Artificial Sequence
  Description of Artificial Sequence: Synthetic oligonucleotide
  Sense strand starting at position 378 of SEQ ID NO: 150
gccucucgguuauuagagu

SEQ ID NO: 15177 - RNA, 19 nt, Artificial Sequence
  Description of Artificial Sequence: Synthetic oligonucleotide
  Antisense strand to SEQ ID NO: 15176
acucuaauaaccgagaggc

SEQ ID NO: 15178 - RNA, 19 nt, Artificial Sequence
  Description of Artificial Sequence: Synthetic oligonucleotide
  Sense strand starting at position 3583 of SEQ ID NO: 152
gugucaugugcaucugugu

SEQ ID NO: 15179 - RNA, 19 nt, Artificial Sequence
  Description of Artificial Sequence: Synthetic oligonucleotide
  Antisense strand to SEQ ID NO: 15178
acacagaugcacaugacac

SEQ ID NO: 15180 - RNA, 19 nt, Artificial Sequence
  Description of Artificial Sequence: Synthetic oligonucleotide
  Sense strand starting at position 3577 of SEQ ID NO: 152
aacccugugucaugugcau

SEQ ID NO: 15181 - RNA, 19 nt, Artificial Sequence
  Description of Artificial Sequence: Synthetic oligonucleotide
  Antisense strand to SEQ ID NO: 15180
augcacaugacacaggguu

SEQ ID NO: 15182 - RNA, 19 nt, Artificial Sequence
  Description of Artificial Sequence: Synthetic oligonucleotide
  Sense strand starting at position 3572 of SEQ ID NO: 152
gcuugaacccugugucaug

SEQ ID NO: 15183 - RNA, 19 nt, Artificial Sequence
  Description of Artificial Sequence: Synthetic oligonucleotide
  Antisense strand to SEQ ID NO: 15182
caugacacaggguucaagc

SEQ ID NO: 15184 - RNA, 19 nt, Artificial Sequence
  Description of Artificial Sequence: Synthetic oligonucleotide
  Sense strand starting at position 3570 of SEQ ID NO: 152
uugcuugaacccuguguca

SEQ ID NO: 15185 - RNA, 19 nt, Artificial Sequence
  Description of Artificial Sequence: Synthetic oligonucleotide
  Antisense strand to SEQ ID NO: 15184
ugacacaggguucaagcaa

SEQ ID NO: 15186 - RNA, 19 nt, Artificial Sequence
  Description of Artificial Sequence: Synthetic oligonucleotide
  Sense strand starting at position 3247 of SEQ ID NO: 152
cuucuuugguggcacagaa

SEQ ID NO: 15187 - RNA, 19 nt, Artificial Sequence
  Description of Artificial Sequence: Synthetic oligonucleotide
  Antisense strand to SEQ ID NO: 15186
uucugugccaccaaagaag

SEQ ID NO: 15188 - RNA, 19 nt, Artificial Sequence
  Description of Artificial Sequence: Synthetic oligonucleotide
  Sense strand starting at position 3065 of SEQ ID NO: 152
acuuuagacugcggucuaa

SEQ ID NO: 15189 - RNA, 19 nt, Artificial Sequence
  Description of Artificial Sequence: Synthetic oligonucleotide
  Antisense strand to SEQ ID NO: 15188
uuagaccgcagucuaaagu

SEQ ID NO: 15190 - RNA, 19 nt, Artificial Sequence
  Description of Artificial Sequence: Synthetic oligonucleotide
  Sense strand starting at position 3052 of SEQ ID NO: 152
gccaaugggcauuacuuua

SEQ ID NO: 15191 - RNA, 19 nt, Artificial Sequence
  Description of Artificial Sequence: Synthetic oligonucleotide
  Antisense strand to SEQ ID NO: 15190
uaaaguaaugcccauuggc

SEQ ID NO: 15192 - RNA, 19 nt, Artificial Sequence
  Description of Artificial Sequence: Synthetic oligonucleotide
  Sense strand starting at position 2813 of SEQ ID NO: 152
guggaaugccaucaccuaa

SEQ ID NO: 15193 - RNA, 19 nt, Artificial Sequence
  Description of Artificial Sequence: Synthetic oligonucleotide
  Antisense strand to SEQ ID NO: 15192
uuaggugauggcauuccac

SEQ ID NO: 15194 - RNA, 19 nt, Artificial Sequence
  Description of Artificial Sequence: Synthetic oligonucleotide
  Sense strand starting at position 2767 of SEQ ID NO: 152
gcuucugagccaggaaguu

SEQ ID NO: 15195 - RNA, 19 nt, Artificial Sequence
  Description of Artificial Sequence: Synthetic oligonucleotide
  Antisense strand to SEQ ID NO: 15194
aacuuccuggcucagaagc

SEQ ID NO: 15196 - RNA, 19 nt, Artificial Sequence
  Description of Artificial Sequence: Synthetic oligonucleotide
  Sense strand starting at position 2629 of SEQ ID NO: 152
cgggcugagucccaagagu

SEQ ID NO: 15197 - RNA, 19 nt, Artificial Sequence
  Description of Artificial Sequence: Synthetic oligonucleotide
  Antisense strand to SEQ ID NO: 15196
acucuugggacucagcccg

SEQ ID NO: 15198 - RNA, 19 nt, Artificial Sequence
  Description of Artificial Sequence: Synthetic oligonucleotide
  Sense strand starting at position 2555 of SEQ ID NO: 152
gugcguccauguaaagagu

SEQ ID NO: 15199 - RNA, 19 nt, Artificial Sequence
  Description of Artificial Sequence: Synthetic oligonucleotide
  Antisense strand to SEQ ID NO: 15198
acucuuuacauggacgcac

SEQ ID NO: 15200 - RNA, 19 nt, Artificial Sequence
  Description of Artificial Sequence: Synthetic oligonucleotide
  Sense strand starting at position 2549 of SEQ ID NO: 152
ugucaugugcguccaugua

SEQ ID NO: 15201 - RNA, 19 nt, Artificial Sequence
  Description of Artificial Sequence: Synthetic oligonucleotide
  Antisense strand to SEQ ID NO: 15200
uacauggacgcacaugaca

SEQ ID NO: 15202 - RNA, 19 nt, Artificial Sequence
  Description of Artificial Sequence: Synthetic oligonucleotide
  Sense strand starting at position 2489 of SEQ ID NO: 152
gucuaacuuccucgcaguu

SEQ ID NO: 15203 - RNA, 19 nt, Artificial Sequence
  Description of Artificial Sequence: Synthetic oligonucleotide
  Antisense strand to SEQ ID NO: 15202
aacugcgaggaaguuagac

SEQ ID NO: 15204 - RNA, 19 nt, Artificial Sequence
  Description of Artificial Sequence: Synthetic oligonucleotide
  Sense strand starting at position 2488 of SEQ ID NO: 152
agucuaacuuccucgcagu

SEQ ID NO: 15205 - RNA, 19 nt, Artificial Sequence
  Description of Artificial Sequence: Synthetic oligonucleotide
  Antisense strand to SEQ ID NO: 15204
acugcgaggaaguuagacu

SEQ ID NO: 15206 - RNA, 19 nt, Artificial Sequence
  Description of Artificial Sequence: Synthetic oligonucleotide
  Sense strand starting at position 2448 of SEQ ID NO: 152
ccgguaugucaguauguuc

SEQ ID NO: 15207 - RNA, 19 nt, Artificial Sequence
  Description of Artificial Sequence: Synthetic oligonucleotide
  Antisense strand to SEQ ID NO: 15206
gaacauacugacauaccgg

SEQ ID NO: 15208 - RNA, 19 nt, Artificial Sequence
  Description of Artificial Sequence: Synthetic oligonucleotide
  Sense strand starting at position 2447 of SEQ ID NO: 152
accgguaugucaguauguu

SEQ ID NO: 15209 - RNA, 19 nt, Artificial Sequence
  Description of Artificial Sequence: Synthetic oligonucleotide
  Antisense strand to SEQ ID NO: 15208
aacauacugacauaccggu

SEQ ID NO: 15210 - RNA, 19 nt, Artificial Sequence
  Description of Artificial Sequence: Synthetic oligonucleotide
  Sense strand starting at position 2362 of SEQ ID NO: 152
uggagugacucgucccacu

SEQ ID NO: 15211 - RNA, 19 nt, Artificial Sequence
  Description of Artificial Sequence: Synthetic oligonucleotide
  Antisense strand to SEQ ID NO: 15210
agugggacgagucacucca

SEQ ID NO: 15212 - RNA, 19 nt, Artificial Sequence
  Description of Artificial Sequence: Synthetic oligonucleotide
  Sense strand starting at position 2351 of SEQ ID NO: 152
acagaauuauauggaguga

SEQ ID NO: 15213 - RNA, 19 nt, Artificial Sequence
  Description of Artificial Sequence: Synthetic oligonucleotide
  Antisense strand to SEQ ID NO: 15212
ucacuccauauaauucugu

SEQ ID NO: 15214 - RNA, 19 nt, Artificial Sequence
  Description of Artificial Sequence: Synthetic oligonucleotide
  Sense strand starting at position 2328 of SEQ ID NO: 152
ccuugauaggaaugguuga

SEQ ID NO: 15215 - RNA, 19 nt, Artificial Sequence
  Description of Artificial Sequence: Synthetic oligonucleotide
  Antisense strand to SEQ ID NO: 15214
ucaaccauuccuaucaagg

SEQ ID NO: 15216 - RNA, 19 nt, Artificial Sequence
  Description of Artificial Sequence: Synthetic oligonucleotide
  Sense strand starting at position 2322 of SEQ ID NO: 152
cucucuccuugauaggaau

SEQ ID NO: 15217 - RNA, 19 nt, Artificial Sequence
  Description of Artificial Sequence: Synthetic oligonucleotide
  Antisense strand to SEQ ID NO: 15216
auuccuaucaaggagagag

SEQ ID NO: 15218 - RNA, 19 nt, Artificial Sequence
  Description of Artificial Sequence: Synthetic oligonucleotide
  Sense strand starting at position 2041 of SEQ ID NO: 152
gacggaaaugcguaaggga

SEQ ID NO: 15219 - RNA, 19 nt, Artificial Sequence
  Description of Artificial Sequence: Synthetic oligonucleotide
  Antisense strand to SEQ ID NO: 15218
ucccuuacgcauuuccguc

SEQ ID NO: 15220 - RNA, 19 nt, Artificial Sequence
  Description of Artificial Sequence: Synthetic oligonucleotide
  Sense strand starting at position 1048 of SEQ ID NO: 152
cgugcuacaaaucguuaaa

SEQ ID NO: 15221 - RNA, 19 nt, Artificial Sequence
  Description of Artificial Sequence: Synthetic oligonucleotide
  Antisense strand to SEQ ID NO: 15220
uuuaacgauuuguagcacg

SEQ ID NO: 15222 - RNA, 19 nt, Artificial Sequence
  Description of Artificial Sequence: Synthetic oligonucleotide
  Sense strand starting at position 1041 of SEQ ID NO: 152
acugcaucgugcuacaaau

SEQ ID NO: 15223 - RNA, 19 nt, Artificial Sequence
  Description of Artificial Sequence: Synthetic oligonucleotide
  Antisense strand to SEQ ID NO: 15222
auuuguagcacgaugcagu

SEQ ID NO: 15224 - RNA, 19 nt, Artificial Sequence
  Description of Artificial Sequence: Synthetic oligonucleotide
  Sense strand starting at position 1018 of SEQ ID NO: 152
guuccagacuccuagccau

SEQ ID NO: 15225 - RNA, 19 nt, Artificial Sequence
  Description of Artificial Sequence: Synthetic oligonucleotide
  Antisense strand to SEQ ID NO: 15224
auggcuaggagucuggaac

SEQ ID NO: 15226 - RNA, 19 nt, Artificial Sequence
  Description of Artificial Sequence: Synthetic oligonucleotide
  Sense strand starting at position 976 of SEQ ID NO: 152
ugagaaccacuguauucuu

SEQ ID NO: 15227 - RNA, 19 nt, Artificial Sequence
  Description of Artificial Sequence: Synthetic oligonucleotide
  Antisense strand to SEQ ID NO: 15226
aagaauacagugguucuca

SEQ ID NO: 15228 - RNA, 19 nt, Artificial Sequence
  Description of Artificial Sequence: Synthetic oligonucleotide
  Sense strand starting at position 960 of SEQ ID NO: 152
cggcuuaaacaagaguuga

SEQ ID NO: 15229 - RNA, 19 nt, Artificial Sequence
  Description of Artificial Sequence: Synthetic oligonucleotide
  Antisense strand to SEQ ID NO: 15228
ucaacucuuguuuaagccg

SEQ ID NO: 15230 - RNA, 19 nt, Artificial Sequence
  Description of Artificial Sequence: Synthetic oligonucleotide
  Sense strand starting at position 917 of SEQ ID NO: 152
gggcgauacugugucucaa

SEQ ID NO: 15231 - RNA, 19 nt, Artificial Sequence
  Description of Artificial Sequence: Synthetic oligonucleotide
  Antisense strand to SEQ ID NO: 15230
uugagacacaguaucgccc

SEQ ID NO: 15232 - RNA, 19 nt, Artificial Sequence
  Description of Artificial Sequence: Synthetic oligonucleotide
  Sense strand starting at position 204 of SEQ ID NO: 152
gcgguuugcagugagacaa

SEQ ID NO: 15233 - RNA, 19 nt, Artificial Sequence
  Description of Artificial Sequence: Synthetic oligonucleotide
  Antisense strand to SEQ ID NO: 15232
uugucucacugcaaaccgc

SEQ ID NO: 15234 - RNA, 19 nt, Artificial Sequence
  Description of Artificial Sequence: Synthetic oligonucleotide
  Sense strand starting at position 203 of SEQ ID NO: 152
ugcgguuugcagugagaca

SEQ ID NO: 15235 - RNA, 19 nt, Artificial Sequence
  Description of Artificial Sequence: Synthetic oligonucleotide
  Antisense strand to SEQ ID NO: 15234
ugucucacugcaaaccgca

SEQ ID NO: 15236 - RNA, 19 nt, Artificial Sequence
  Description of Artificial Sequence: Synthetic oligonucleotide
  Sense strand starting at position 179 of SEQ ID NO: 152
gcagaauucuuugaaccag

SEQ ID NO: 15237 - RNA, 19 nt, Artificial Sequence
  Description of Artificial Sequence: Synthetic oligonucleotide
  Antisense strand to SEQ ID NO: 15236
cugguucaaagaauucugc

SEQ ID NO: 15238 - RNA, 19 nt, Artificial Sequence
  Description of Artificial Sequence: Synthetic oligonucleotide
  Sense strand starting at position 178 of SEQ ID NO: 152
agcagaauucuuugaacca

SEQ ID NO: 15239 - RNA, 19 nt, Artificial Sequence
  Description of Artificial Sequence: Synthetic oligonucleotide
  Antisense strand to SEQ ID NO: 15238
ugguucaaagaauucugcu

SEQ ID NO: 15240 - RNA, 19 nt, Artificial Sequence
  Description of Artificial Sequence: Synthetic oligonucleotide
  Sense strand starting at position 176 of SEQ ID NO: 152
gcagcagaauucuuugaac

SEQ ID NO: 15241 - RNA, 19 nt, Artificial Sequence
  Description of Artificial Sequence: Synthetic oligonucleotide
  Antisense strand to SEQ ID NO: 15240
guucaaagaauucugcugc

SEQ ID NO: 15242 - RNA, 19 nt, Artificial Sequence
  Description of Artificial Sequence: Synthetic oligonucleotide
  Sense strand starting at position 3970 of SEQ ID NO: 153
aaguuaucaucguaggcca

SEQ ID NO: 15243 - RNA, 19 nt, Artificial Sequence
  Description of Artificial Sequence: Synthetic oligonucleotide
  Antisense strand to SEQ ID NO: 15242
uggccuacgaugauaacuu

SEQ ID NO: 15244 - RNA, 19 nt, Artificial Sequence
  Description of Artificial Sequence: Synthetic oligonucleotide
  Sense strand starting at position 3965 of SEQ ID NO: 153
gcuauaaguuaucaucgua

SEQ ID NO: 15245 - RNA, 19 nt, Artificial Sequence
  Description of Artificial Sequence: Synthetic oligonucleotide
  Antisense strand to SEQ ID NO: 15244
uacgaugauaacuuauagc

SEQ ID NO: 15246 - RNA, 19 nt, Artificial Sequence
  Description of Artificial Sequence: Synthetic oligonucleotide
  Sense strand starting at position 3964 of SEQ ID NO: 153
ugcuauaaguuaucaucgu

SEQ ID NO: 15247 - RNA, 19 nt, Artificial Sequence
  Description of Artificial Sequence: Synthetic oligonucleotide
  Antisense strand to SEQ ID NO: 15246
acgaugauaacuuauagca

SEQ ID NO: 15248 - RNA, 19 nt, Artificial Sequence
  Description of Artificial Sequence: Synthetic oligonucleotide
  Sense strand starting at position 3853 of SEQ ID NO: 153
ugaaguggcuuauacauua

SEQ ID NO: 15249 - RNA, 19 nt, Artificial Sequence
  Description of Artificial Sequence: Synthetic oligonucleotide
  Antisense strand to SEQ ID NO: 15248
uaauguauaagccacuuca

SEQ ID NO: 15250 - RNA, 19 nt, Artificial Sequence
  Description of Artificial Sequence: Synthetic oligonucleotide
  Sense strand starting at position 3851 of SEQ ID NO: 153
ccugaaguggcuuauacau

SEQ ID NO: 15251 - RNA, 19 nt, Artificial Sequence
  Description of Artificial Sequence: Synthetic oligonucleotide
  Antisense strand to SEQ ID NO: 15250
auguauaagccacuucagg

SEQ ID NO: 15252 - RNA, 19 nt, Artificial Sequence
  Description of Artificial Sequence: Synthetic oligonucleotide
  Sense strand starting at position 3483 of SEQ ID NO: 153
gccucaaaguacuuacaga

SEQ ID NO: 15253 - RNA, 19 nt, Artificial Sequence
  Description of Artificial Sequence: Synthetic oligonucleotide
  Antisense strand to SEQ ID NO: 15252
ucuguaaguacuuugaggc

SEQ ID NO: 15254 - RNA, 19 nt, Artificial Sequence
  Description of Artificial Sequence: Synthetic oligonucleotide
  Sense strand starting at position 3381 of SEQ ID NO: 153
guaagaccuccgugucaaa

SEQ ID NO: 15255 - RNA, 19 nt, Artificial Sequence
  Description of Artificial Sequence: Synthetic oligonucleotide
  Antisense strand to SEQ ID NO: 15254
uuugacacggaggucuuac

SEQ ID NO: 15256 - RNA, 19 nt, Artificial Sequence
  Description of Artificial Sequence: Synthetic oligonucleotide
  Sense strand starting at position 3379 of SEQ ID NO: 153
gaguaagaccuccguguca

SEQ ID NO: 15257 - RNA, 19 nt, Artificial Sequence
  Description of Artificial Sequence: Synthetic oligonucleotide
  Antisense strand to SEQ ID NO: 15256
ugacacggaggucuuacuc

SEQ ID NO: 15258 - RNA, 19 nt, Artificial Sequence
  Description of Artificial Sequence: Synthetic oligonucleotide
  Sense strand starting at position 3054 of SEQ ID NO: 153
aucaguaacuaacaggaaa

SEQ ID NO: 15259 - RNA, 19 nt, Artificial Sequence
  Description of Artificial Sequence: Synthetic oligonucleotide
  Antisense strand to SEQ ID NO: 15258
uuuccuguuaguuacugau

SEQ ID NO: 15260 - RNA, 19 nt, Artificial Sequence
  Description of Artificial Sequence: Synthetic oligonucleotide
  Sense strand starting at position 3043 of SEQ ID NO: 153
cacaauggguaaucaguaa

SEQ ID NO: 15261 - RNA, 19 nt, Artificial Sequence
  Description of Artificial Sequence: Synthetic oligonucleotide
  Antisense strand to SEQ ID NO: 15260
uuacugauuacccauugug

SEQ ID NO: 15262 - RNA, 19 nt, Artificial Sequence
  Description of Artificial Sequence: Synthetic oligonucleotide
  Sense strand starting at position 2951 of SEQ ID NO: 153
uccuuaaugugguaaccca

SEQ ID NO: 15263 - RNA, 19 nt, Artificial Sequence
  Description of Artificial Sequence: Synthetic oligonucleotide
  Antisense strand to SEQ ID NO: 15262
uggguuaccacauuaagga

SEQ ID NO: 15264 - RNA, 19 nt, Artificial Sequence
  Description of Artificial Sequence: Synthetic oligonucleotide
  Sense strand starting at position 2692 of SEQ ID NO: 153
aggagaucauccugguuaa

SEQ ID NO: 15265 - RNA, 19 nt, Artificial Sequence
  Description of Artificial Sequence: Synthetic oligonucleotide
  Antisense strand to SEQ ID NO: 15264
uuaaccaggaugaucuccu

SEQ ID NO: 15266 - RNA, 19 nt, Artificial Sequence
  Description of Artificial Sequence: Synthetic oligonucleotide
  Sense strand starting at position 2233 of SEQ ID NO: 153
aagagauucuaagagaaag

SEQ ID NO: 15267 - RNA, 19 nt, Artificial Sequence
  Description of Artificial Sequence: Synthetic oligonucleotide
  Antisense strand to SEQ ID NO: 15266
cuuucucuuagaaucucuu

SEQ ID NO: 15268 - RNA, 19 nt, Artificial Sequence
  Description of Artificial Sequence: Synthetic oligonucleotide
  Sense strand starting at position 2225 of SEQ ID NO: 153
gccuguagaagagauucua

SEQ ID NO: 15269 - RNA, 19 nt, Artificial Sequence
  Description of Artificial Sequence: Synthetic oligonucleotide
  Antisense strand to SEQ ID NO: 15268
uagaaucucuucuacaggc

SEQ ID NO: 15270 - RNA, 19 nt, Artificial Sequence
  Description of Artificial Sequence: Synthetic oligonucleotide
  Sense strand starting at position 2139 of SEQ ID NO: 153
cgaggauccucuugggcaa

SEQ ID NO: 15271 - RNA, 19 nt, Artificial Sequence
  Description of Artificial Sequence: Synthetic oligonucleotide
  Antisense strand to SEQ ID NO: 15270
uugcccaagaggauccucg

SEQ ID NO: 15272 - RNA, 19 nt, Artificial Sequence
  Description of Artificial Sequence: Synthetic oligonucleotide
  Sense strand starting at position 2072 of SEQ ID NO: 153
aagggccugcgacauaauu

SEQ ID NO: 15273 - RNA, 19 nt, Artificial Sequence
  Description of Artificial Sequence: Synthetic oligonucleotide
  Antisense strand to SEQ ID NO: 15272
aauuaugucgcaggcccuu

SEQ ID NO: 15274 - RNA, 19 nt, Artificial Sequence
  Description of Artificial Sequence: Synthetic oligonucleotide
  Sense strand starting at position 2028 of SEQ ID NO: 153
ccagaaucuuacccgaaua

SEQ ID NO: 15275 - RNA, 19 nt, Artificial Sequence
  Description of Artificial Sequence: Synthetic oligonucleotide
  Antisense strand to SEQ ID NO: 15274
uauucggguaagauucugg

SEQ ID NO: 15276 - RNA, 19 nt, Artificial Sequence
  Description of Artificial Sequence: Synthetic oligonucleotide
  Sense strand starting at position 2027 of SEQ ID NO: 153
cccagaaucuuacccgaau

SEQ ID NO: 15277 - RNA, 19 nt, Artificial Sequence
  Description of Artificial Sequence: Synthetic oligonucleotide
  Antisense strand to SEQ ID NO: 15276
auucggguaagauucuggg

SEQ ID NO: 15278 - RNA, 19 nt, Artificial Sequence
  Description of Artificial Sequence: Synthetic oligonucleotide
  Sense strand starting at position 1985 of SEQ ID NO: 153
gggaguuaaucaugaaggg

SEQ ID NO: 15279 - RNA, 19 nt, Artificial Sequence
  Description of Artificial Sequence: Synthetic oligonucleotide
  Antisense strand to SEQ ID NO: 15278
cccuucaugauuaacuccc

SEQ ID NO: 15280 - RNA, 19 nt, Artificial Sequence
  Description of Artificial Sequence: Synthetic oligonucleotide
  Sense strand starting at position 19 of SEQ ID NO: 153
cugugagcucaggacugaa

SEQ ID NO: 15281 - RNA, 19 nt, Artificial Sequence
  Description of Artificial Sequence: Synthetic oligonucleotide
  Antisense strand to SEQ ID NO: 15280
uucaguccugagcucacag

SEQ ID NO: 15282 - RNA, 19 nt, Artificial Sequence
  Description of Artificial Sequence: Synthetic oligonucleotide
  Sense strand starting at position 3604 of SEQ ID NO: 154
uuacuacuauguuaugaca

SEQ ID NO: 15283 - RNA, 19 nt, Artificial Sequence
  Description of Artificial Sequence: Synthetic oligonucleotide
  Antisense strand to SEQ ID NO: 15282
ugucauaacauaguaguaa

SEQ ID NO: 15284 - RNA, 19 nt, Artificial Sequence
  Description of Artificial Sequence: Synthetic oligonucleotide
  Sense strand starting at position 3134 of SEQ ID NO: 154
gguaguauagcccacuaca

SEQ ID NO: 15285 - RNA, 19 nt, Artificial Sequence
  Description of Artificial Sequence: Synthetic oligonucleotide
  Antisense strand to SEQ ID NO: 15284
uguagugggcuauacuacc

SEQ ID NO: 15286 - RNA, 19 nt, Artificial Sequence
  Description of Artificial Sequence: Synthetic oligonucleotide
  Sense strand starting at position 3056 of SEQ ID NO: 154
agaauauguucucagaaau

SEQ ID NO: 15287 - RNA, 19 nt, Artificial Sequence
  Description of Artificial Sequence: Synthetic oligonucleotide
  Antisense strand to SEQ ID NO: 15286
auuucugagaacauauucu

SEQ ID NO: 15288 - RNA, 19 nt, Artificial Sequence
  Description of Artificial Sequence: Synthetic oligonucleotide
  Sense strand starting at position 3053 of SEQ ID NO: 154
gcaagaauauguucucaga

SEQ ID NO: 15289 - RNA, 19 nt, Artificial Sequence
  Description of Artificial Sequence: Synthetic oligonucleotide
  Antisense strand to SEQ ID NO: 15288
ucugagaacauauucuugc

SEQ ID NO: 15290 - RNA, 19 nt, Artificial Sequence
  Description of Artificial Sequence: Synthetic oligonucleotide
  Sense strand starting at position 3042 of SEQ ID NO: 154
gucacuuaacagcaagaau

SEQ ID NO: 15291 - RNA, 19 nt, Artificial Sequence
  Description of Artificial Sequence: Synthetic oligonucleotide
  Antisense strand to SEQ ID NO: 15290
auucuugcuguuaagugac

SEQ ID NO: 15292 - RNA, 19 nt, Artificial Sequence
  Description of Artificial Sequence: Synthetic oligonucleotide
  Sense strand starting at position 3034 of SEQ ID NO: 154
agucauucgucacuuaaca

SEQ ID NO: 15293 - RNA, 19 nt, Artificial Sequence
  Description of Artificial Sequence: Synthetic oligonucleotide
  Antisense strand to SEQ ID NO: 15292
uguuaagugacgaaugacu

SEQ ID NO: 15294 - RNA, 19 nt, Artificial Sequence
  Description of Artificial Sequence: Synthetic oligonucleotide
  Sense strand starting at position 3025 of SEQ ID NO: 154
gucauauacagucauucgu

SEQ ID NO: 15295 - RNA, 19 nt, Artificial Sequence
  Description of Artificial Sequence: Synthetic oligonucleotide
  Antisense strand to SEQ ID NO: 15294
acgaaugacuguauaugac

SEQ ID NO: 15296 - RNA, 19 nt, Artificial Sequence
  Description of Artificial Sequence: Synthetic oligonucleotide
  Sense strand starting at position 2884 of SEQ ID NO: 154
aguaucuaccauuaucgua

SEQ ID NO: 15297 - RNA, 19 nt, Artificial Sequence
  Description of Artificial Sequence: Synthetic oligonucleotide
  Antisense strand to SEQ ID NO: 15296
uacgauaaugguagauacu

SEQ ID NO: 15298 - RNA, 19 nt, Artificial Sequence
  Description of Artificial Sequence: Synthetic oligonucleotide
  Sense strand starting at position 2759 of SEQ ID NO: 154
cuggcacguuuguuacaau

SEQ ID NO: 15299 - RNA, 19 nt, Artificial Sequence
  Description of Artificial Sequence: Synthetic oligonucleotide
  Antisense strand to SEQ ID NO: 15298
auuguaacaaacgugccag

SEQ ID NO: 15300 - RNA, 19 nt, Artificial Sequence
  Description of Artificial Sequence: Synthetic oligonucleotide
  Sense strand starting at position 2631 of SEQ ID NO: 154
acaucaacuuuauugugua

SEQ ID NO: 15301 - RNA, 19 nt, Artificial Sequence
  Description of Artificial Sequence: Synthetic oligonucleotide
  Antisense strand to SEQ ID NO: 15300
uacacaauaaaguugaugu

SEQ ID NO: 15302 - RNA, 19 nt, Artificial Sequence
  Description of Artificial Sequence: Synthetic oligonucleotide
  Sense strand starting at position 2595 of SEQ ID NO: 154
acagaaagguguuaccaca

SEQ ID NO: 15303 - RNA, 19 nt, Artificial Sequence
  Description of Artificial Sequence: Synthetic oligonucleotide
  Antisense strand to SEQ ID NO: 15302
ugugguaacaccuuucugu

SEQ ID NO: 15304 - RNA, 19 nt, Artificial Sequence
  Description of Artificial Sequence: Synthetic oligonucleotide
  Sense strand starting at position 2483 of SEQ ID NO: 154
ucuauaaaguuagagaaac

SEQ ID NO: 15305 - RNA, 19 nt, Artificial Sequence
  Description of Artificial Sequence: Synthetic oligonucleotide
  Antisense strand to SEQ ID NO: 15304
guuucucuaacuuuauaga

SEQ ID NO: 15306 - RNA, 19 nt, Artificial Sequence
  Description of Artificial Sequence: Synthetic oligonucleotide
  Sense strand starting at position 2415 of SEQ ID NO: 154
uggauuagauucuuuacau

SEQ ID NO: 15307 - RNA, 19 nt, Artificial Sequence
  Description of Artificial Sequence: Synthetic oligonucleotide
  Antisense strand to SEQ ID NO: 15306
auguaaagaaucuaaucca

SEQ ID NO: 15308 - RNA, 19 nt, Artificial Sequence
  Description of Artificial Sequence: Synthetic oligonucleotide
  Sense strand starting at position 2344 of SEQ ID NO: 154
agauaagaaucacagucau

SEQ ID NO: 15309 - RNA, 19 nt, Artificial Sequence
  Description of Artificial Sequence: Synthetic oligonucleotide
  Antisense strand to SEQ ID NO: 15308
augacugugauucuuaucu

SEQ ID NO: 15310 - RNA, 19 nt, Artificial Sequence
  Description of Artificial Sequence: Synthetic oligonucleotide
  Sense strand starting at position 2259 of SEQ ID NO: 154
uuccuuuccuaguagaaga

SEQ ID NO: 15311 - RNA, 19 nt, Artificial Sequence
  Description of Artificial Sequence: Synthetic oligonucleotide
  Antisense strand to SEQ ID NO: 15310
ucuucuacuaggaaaggaa

SEQ ID NO: 15312 - RNA, 19 nt, Artificial Sequence
  Description of Artificial Sequence: Synthetic oligonucleotide
  Sense strand starting at position 2256 of SEQ ID NO: 154
agauuccuuuccuaguaga

SEQ ID NO: 15313 - RNA, 19 nt, Artificial Sequence
  Description of Artificial Sequence: Synthetic oligonucleotide
  Antisense strand to SEQ ID NO: 15312
ucuacuaggaaaggaaucu

SEQ ID NO: 15314 - RNA, 19 nt, Artificial Sequence
  Description of Artificial Sequence: Synthetic oligonucleotide
  Sense strand starting at position 2254 of SEQ ID NO: 154
acagauuccuuuccuagua

SEQ ID NO: 15315 - RNA, 19 nt, Artificial Sequence
  Description of Artificial Sequence: Synthetic oligonucleotide
  Antisense strand to SEQ ID NO: 15314
uacuaggaaaggaaucugu

SEQ ID NO: 15316 - RNA, 19 nt, Artificial Sequence
  Description of Artificial Sequence: Synthetic oligonucleotide
  Sense strand starting at position 2181 of SEQ ID NO: 154
gcaugucuggccuucugua

SEQ ID NO: 15317 - RNA, 19 nt, Artificial Sequence
  Description of Artificial Sequence: Synthetic oligonucleotide
  Antisense strand to SEQ ID NO: 15316
uacagaaggccagacaugc

SEQ ID NO: 15318 - RNA, 19 nt, Artificial Sequence
  Description of Artificial Sequence: Synthetic oligonucleotide
  Sense strand starting at position 2048 of SEQ ID NO: 154
gucauaucauaggugacua

SEQ ID NO: 15319 - RNA, 19 nt, Artificial Sequence
  Description of Artificial Sequence: Synthetic oligonucleotide
  Antisense strand to SEQ ID NO: 15318
uagucaccuaugauaugac

SEQ ID NO: 15320 - RNA, 19 nt, Artificial Sequence
  Description of Artificial Sequence: Synthetic oligonucleotide
  Sense strand starting at position 2045 of SEQ ID NO: 154
gaugucauaucauagguga

SEQ ID NO: 15321 - RNA, 19 nt, Artificial Sequence
  Description of Artificial Sequence: Synthetic oligonucleotide
  Antisense strand to SEQ ID NO: 15320
ucaccuaugauaugacauc

SEQ ID NO: 15322 - RNA, 19 nt, Artificial Sequence
  Description of Artificial Sequence: Synthetic oligonucleotide
  Sense strand starting at position 2024 of SEQ ID NO: 154
uacuauauugaguggccau

SEQ ID NO: 15323 - RNA, 19 nt, Artificial Sequence
  Description of Artificial Sequence: Synthetic oligonucleotide
  Antisense strand to SEQ ID NO: 15322
auggccacucaauauagua

SEQ ID NO: 15324 - RNA, 19 nt, Artificial Sequence
  Description of Artificial Sequence: Synthetic oligonucleotide
  Sense strand starting at position 1560 of SEQ ID NO: 154
ggucgucccacagguguua

SEQ ID NO: 15325 - RNA, 19 nt, Artificial Sequence
  Description of Artificial Sequence: Synthetic oligonucleotide
  Antisense strand to SEQ ID NO: 15324
uaacaccugugggacgacc

SEQ ID NO: 15326 - RNA, 19 nt, Artificial Sequence
  Description of Artificial Sequence: Synthetic oligonucleotide
  Sense strand starting at position 1505 of SEQ ID NO: 154
cgguuucauccuggaugag

SEQ ID NO: 15327 - RNA, 19 nt, Artificial Sequence
  Description of Artificial Sequence: Synthetic oligonucleotide
  Antisense strand to SEQ ID NO: 15326
cucauccaggaugaaaccg

SEQ ID NO: 15328 - RNA, 19 nt, Artificial Sequence
  Description of Artificial Sequence: Synthetic oligonucleotide
  Sense strand starting at position 1448 of SEQ ID NO: 154
augaguaaucaaugcccua

SEQ ID NO: 15329 - RNA, 19 nt, Artificial Sequence
  Description of Artificial Sequence: Synthetic oligonucleotide
  Antisense strand to SEQ ID NO: 15328
uagggcauugauuacucau

SEQ ID NO: 15330 - RNA, 19 nt, Artificial Sequence
  Description of Artificial Sequence: Synthetic oligonucleotide
  Sense strand starting at position 1435 of SEQ ID NO: 154
auggcuucccauuaugagu

SEQ ID NO: 15331 - RNA, 19 nt, Artificial Sequence
  Description of Artificial Sequence: Synthetic oligonucleotide
  Antisense strand to SEQ ID NO: 15330
acucauaaugggaagccau

SEQ ID NO: 15332 - RNA, 19 nt, Artificial Sequence
  Description of Artificial Sequence: Synthetic oligonucleotide
  Sense strand starting at position 1326 of SEQ ID NO: 154
uguuacacugcugauacaa

SEQ ID NO: 15333 - RNA, 19 nt, Artificial Sequence
  Description of Artificial Sequence: Synthetic oligonucleotide
  Antisense strand to SEQ ID NO: 15332
uuguaucagcaguguaaca

SEQ ID NO: 15334 - RNA, 19 nt, Artificial Sequence
  Description of Artificial Sequence: Synthetic oligonucleotide
  Sense strand starting at position 854 of SEQ ID NO: 154
uccacauugugccucugaa

SEQ ID NO: 15335 - RNA, 19 nt, Artificial Sequence
  Description of Artificial Sequence: Synthetic oligonucleotide
  Antisense strand to SEQ ID NO: 15334
uucagaggcacaaugugga

SEQ ID NO: 15336 - RNA, 19 nt, Artificial Sequence
  Description of Artificial Sequence: Synthetic oligonucleotide
  Sense strand starting at position 750 of SEQ ID NO: 154
ccucuaugcccuggucaca

SEQ ID NO: 15337 - RNA, 19 nt, Artificial Sequence
  Description of Artificial Sequence: Synthetic oligonucleotide
  Antisense strand to SEQ ID NO: 15336
ugugaccagggcauagagg

SEQ ID NO: 15338 - RNA, 19 nt, Artificial Sequence
  Description of Artificial Sequence: Synthetic oligonucleotide
  Sense strand starting at position 461 of SEQ ID NO: 154
uuuacuuucccaggaagug

SEQ ID NO: 15339 - RNA, 19 nt, Artificial Sequence
  Description of Artificial Sequence: Synthetic oligonucleotide
  Antisense strand to SEQ ID NO: 15338
cacuuccugggaaaguaaa

SEQ ID NO: 15340 - RNA, 19 nt, Artificial Sequence
  Description of Artificial Sequence: Synthetic oligonucleotide
  Sense strand starting at position 436 of SEQ ID NO: 154
ugauccauuacucgccgua

SEQ ID NO: 15341 - RNA, 19 nt, Artificial Sequence
  Description of Artificial Sequence: Synthetic oligonucleotide
  Antisense strand to SEQ ID NO: 15340
uacggcgaguaauggauca

SEQ ID NO: 15342 - RNA, 19 nt, Artificial Sequence
  Description of Artificial Sequence: Synthetic oligonucleotide
  Sense strand starting at position 420 of SEQ ID NO: 154
ggucacuguucaguuguga

SEQ ID NO: 15343 - RNA, 19 nt, Artificial Sequence
  Description of Artificial Sequence: Synthetic oligonucleotide
  Antisense strand to SEQ ID NO: 15342
ucacaacugaacagugacc

SEQ ID NO: 15344 - RNA, 19 nt, Artificial Sequence
  Description of Artificial Sequence: Synthetic oligonucleotide
  Sense strand starting at position 381 of SEQ ID NO: 154
gugacuuucccucagagau

SEQ ID NO: 15345 - RNA, 19 nt, Artificial Sequence
  Description of Artificial Sequence: Synthetic oligonucleotide
  Antisense strand to SEQ ID NO: 15344
aucucugagggaaagucac

SEQ ID NO: 15346 - RNA, 19 nt, Artificial Sequence
  Description of Artificial Sequence: Synthetic oligonucleotide
  Sense strand starting at position 371 of SEQ ID NO: 154
uagggaaucugugacuuuc

SEQ ID NO: 15347 - RNA, 19 nt, Artificial Sequence
  Description of Artificial Sequence: Synthetic oligonucleotide
  Antisense strand to SEQ ID NO: 15346
gaaagucacagauucccua

SEQ ID NO: 15348 - RNA, 19 nt, Artificial Sequence
  Description of Artificial Sequence: Synthetic oligonucleotide
  Sense strand starting at position 361 of SEQ ID NO: 154
agacuuucucuagggaauc

SEQ ID NO: 15349 - RNA, 19 nt, Artificial Sequence
  Description of Artificial Sequence: Synthetic oligonucleotide
  Antisense strand to SEQ ID NO: 15348
gauucccuagagaaagucu

SEQ ID NO: 15350 - RNA, 19 nt, Artificial Sequence
  Description of Artificial Sequence: Synthetic oligonucleotide
  Sense strand starting at position 326 of SEQ ID NO: 154
uaaucuguuuaugugaaga

SEQ ID NO: 15351 - RNA, 19 nt, Artificial Sequence
  Description of Artificial Sequence: Synthetic oligonucleotide
  Antisense strand to SEQ ID NO: 15350
ucuucacauaaacagauua

SEQ ID NO: 15352 - RNA, 19 nt, Artificial Sequence
  Description of Artificial Sequence: Synthetic oligonucleotide
  Sense strand starting at position 323 of SEQ ID NO: 154
gguuaaucuguuuauguga

SEQ ID NO: 15353 - RNA, 19 nt, Artificial Sequence
  Description of Artificial Sequence: Synthetic oligonucleotide
  Antisense strand to SEQ ID NO: 15352
ucacauaaacagauuaacc

SEQ ID NO: 15354 - RNA, 19 nt, Artificial Sequence
  Description of Artificial Sequence: Synthetic oligonucleotide
  Sense strand starting at position 322 of SEQ ID NO: 154
agguuaaucuguuuaugug

SEQ ID NO: 15355 - RNA, 19 nt, Artificial Sequence
  Description of Artificial Sequence: Synthetic oligonucleotide
  Antisense strand to SEQ ID NO: 15354
cacauaaacagauuaaccu

SEQ ID NO: 15356 - RNA, 19 nt, Artificial Sequence
  Description of Artificial Sequence: Synthetic oligonucleotide
  Sense strand starting at position 320 of SEQ ID NO: 154
cuagguuaaucuguuuaug

SEQ ID NO: 15357 - RNA, 19 nt, Artificial Sequence
  Description of Artificial Sequence: Synthetic oligonucleotide
  Antisense strand to SEQ ID NO: 15356
cauaaacagauuaaccuag

SEQ ID NO: 15358 - RNA, 19 nt, Artificial Sequence
  Description of Artificial Sequence: Synthetic oligonucleotide
  Sense strand starting at position 271 of SEQ ID NO: 154
uucgcuuucgcugcaacau

SEQ ID NO: 15359 - RNA, 19 nt, Artificial Sequence
  Description of Artificial Sequence: Synthetic oligonucleotide
  Antisense strand to SEQ ID NO: 15358
auguugcagcgaaagcgaa

SEQ ID NO: 15360 - RNA, 19 nt, Artificial Sequence
  Description of Artificial Sequence: Synthetic oligonucleotide
  Sense strand starting at position 66 of SEQ ID NO: 154
guuaaugucagaugaguca

SEQ ID NO: 15361 - RNA, 19 nt, Artificial Sequence
  Description of Artificial Sequence: Synthetic oligonucleotide
  Antisense strand to SEQ ID NO: 15360
ugacucaucugacauuaac

SEQ ID NO: 15362 - RNA, 19 nt, Artificial Sequence
  Description of Artificial Sequence: Synthetic oligonucleotide
  Sense strand starting at position 3966 of SEQ ID NO: 156
cucuuucugcugugaaaca

SEQ ID NO: 15363 - RNA, 19 nt, Artificial Sequence
  Description of Artificial Sequence: Synthetic oligonucleotide
  Antisense strand to SEQ ID NO: 15362
uguuucacagcagaaagag

SEQ ID NO: 15364 - RNA, 19 nt, Artificial Sequence
  Description of Artificial Sequence: Synthetic oligonucleotide
  Sense strand starting at position 3943 of SEQ ID NO: 156
gggagaacacgugaagcuu

SEQ ID NO: 15365 - RNA, 19 nt, Artificial Sequence
  Description of Artificial Sequence: Synthetic oligonucleotide
  Antisense strand to SEQ ID NO: 15364
aagcuucacguguucuccc

SEQ ID NO: 15366 - RNA, 19 nt, Artificial Sequence
  Description of Artificial Sequence: Synthetic oligonucleotide
  Sense strand starting at position 3888 of SEQ ID NO: 156
cuuauagauuguucuggaa

SEQ ID NO: 15367 - RNA, 19 nt, Artificial Sequence
  Description of Artificial Sequence: Synthetic oligonucleotide
  Antisense strand to SEQ ID NO: 15366
uuccagaacaaucuauaag

SEQ ID NO: 15368 - RNA, 19 nt, Artificial Sequence
  Description of Artificial Sequence: Synthetic oligonucleotide
  Sense strand starting at position 3887 of SEQ ID NO: 156
acuuauagauuguucugga

SEQ ID NO: 15369 - RNA, 19 nt, Artificial Sequence
  Description of Artificial Sequence: Synthetic oligonucleotide
  Antisense strand to SEQ ID NO: 15368
uccagaacaaucuauaagu

SEQ ID NO: 15370 - RNA, 19 nt, Artificial Sequence
  Description of Artificial Sequence: Synthetic oligonucleotide
  Sense strand starting at position 3860 of SEQ ID NO: 156
uguuaucucuacuuagcua

SEQ ID NO: 15371 - RNA, 19 nt, Artificial Sequence
  Description of Artificial Sequence: Synthetic oligonucleotide
  Antisense strand to SEQ ID NO: 15370
uagcuaaguagagauaaca

SEQ ID NO: 15372 - RNA, 19 nt, Artificial Sequence
  Description of Artificial Sequence: Synthetic oligonucleotide
  Sense strand starting at position 3854 of SEQ ID NO: 156
guuauuuguuaucucuacu

SEQ ID NO: 15373 - RNA, 19 nt, Artificial Sequence
  Description of Artificial Sequence: Synthetic oligonucleotide
  Antisense strand to SEQ ID NO: 15372
aguagagauaacaaauaac

SEQ ID NO: 15374 - RNA, 19 nt, Artificial Sequence
  Description of Artificial Sequence: Synthetic oligonucleotide
  Sense strand starting at position 3835 of SEQ ID NO: 156
guguuugcauuugaaugaa

SEQ ID NO: 15375 - RNA, 19 nt, Artificial Sequence
  Description of Artificial Sequence: Synthetic oligonucleotide
  Antisense strand to SEQ ID NO: 15374
uucauucaaaugcaaacac

SEQ ID NO: 15376 - RNA, 19 nt, Artificial Sequence
  Description of Artificial Sequence: Synthetic oligonucleotide
  Sense strand starting at position 3374 of SEQ ID NO: 156
gucacaguuugguaauuug

SEQ ID NO: 15377 - RNA, 19 nt, Artificial Sequence
  Description of Artificial Sequence: Synthetic oligonucleotide
  Antisense strand to SEQ ID NO: 15376
caaauuaccaaacugugac

SEQ ID NO: 15378 - RNA, 19 nt, Artificial Sequence
  Description of Artificial Sequence: Synthetic oligonucleotide
  Sense strand starting at position 3371 of SEQ ID NO: 156
aaggucacaguuugguaau

SEQ ID NO: 15379 - RNA, 19 nt, Artificial Sequence
  Description of Artificial Sequence: Synthetic oligonucleotide
  Antisense strand to SEQ ID NO: 15378
auuaccaaacugugaccuu

SEQ ID NO: 15380 - RNA, 19 nt, Artificial Sequence
  Description of Artificial Sequence: Synthetic oligonucleotide
  Sense strand starting at position 3144 of SEQ ID NO: 156
acgauuuccugguucuuau

SEQ ID NO: 15381 - RNA, 19 nt, Artificial Sequence
  Description of Artificial Sequence: Synthetic oligonucleotide
  Antisense strand to SEQ ID NO: 15380
auaagaaccaggaaaucgu

SEQ ID NO: 15382 - RNA, 19 nt, Artificial Sequence
  Description of Artificial Sequence: Synthetic oligonucleotide
  Sense strand starting at position 2958 of SEQ ID NO: 156
guguucuucugcucccaga

SEQ ID NO: 15383 - RNA, 19 nt, Artificial Sequence
  Description of Artificial Sequence: Synthetic oligonucleotide
  Antisense strand to SEQ ID NO: 15382
ucugggagcagaagaacac

SEQ ID NO: 15384 - RNA, 19 nt, Artificial Sequence
  Description of Artificial Sequence: Synthetic oligonucleotide
  Sense strand starting at position 2748 of SEQ ID NO: 156
agaacaugucagugaaacc

SEQ ID NO: 15385 - RNA, 19 nt, Artificial Sequence
  Description of Artificial Sequence: Synthetic oligonucleotide
  Antisense strand to SEQ ID NO: 15384
gguuucacugacauguucu

SEQ ID NO: 15386 - RNA, 19 nt, Artificial Sequence
  Description of Artificial Sequence: Synthetic oligonucleotide
  Sense strand starting at position 2745 of SEQ ID NO: 156
acaagaacaugucagugaa

SEQ ID NO: 15387 - RNA, 19 nt, Artificial Sequence
  Description of Artificial Sequence: Synthetic oligonucleotide
  Antisense strand to SEQ ID NO: 15386
uucacugacauguucuugu

SEQ ID NO: 15388 - RNA, 19 nt, Artificial Sequence
  Description of Artificial Sequence: Synthetic oligonucleotide
  Sense strand starting at position 2734 of SEQ ID NO: 156
guuugaaauugacaagaac

SEQ ID NO: 15389 - RNA, 19 nt, Artificial Sequence
  Description of Artificial Sequence: Synthetic oligonucleotide
  Antisense strand to SEQ ID NO: 15388
guucuugucaauuucaaac

SEQ ID NO: 15390 - RNA, 19 nt, Artificial Sequence
  Description of Artificial Sequence: Synthetic oligonucleotide
  Sense strand starting at position 2732 of SEQ ID NO: 156
gcguuugaaauugacaaga

SEQ ID NO: 15391 - RNA, 19 nt, Artificial Sequence
  Description of Artificial Sequence: Synthetic oligonucleotide
  Antisense strand to SEQ ID NO: 15390
ucuugucaauuucaaacgc

SEQ ID NO: 15392 - RNA, 19 nt, Artificial Sequence
  Description of Artificial Sequence: Synthetic oligonucleotide
  Sense strand starting at position 2731 of SEQ ID NO: 156
agcguuugaaauugacaag

SEQ ID NO: 15393 - RNA, 19 nt, Artificial Sequence
  Description of Artificial Sequence: Synthetic oligonucleotide
  Antisense strand to SEQ ID NO: 15392
cuugucaauuucaaacgcu

SEQ ID NO: 15394 - RNA, 19 nt, Artificial Sequence
  Description of Artificial Sequence: Synthetic oligonucleotide
  Sense strand starting at position 2725 of SEQ ID NO: 156
ucacaaagcguuugaaauu

SEQ ID NO: 15395 - RNA, 19 nt, Artificial Sequence
  Description of Artificial Sequence: Synthetic oligonucleotide
  Antisense strand to SEQ ID NO: 15394
aauuucaaacgcuuuguga

SEQ ID NO: 15396 - RNA, 19 nt, Artificial Sequence
  Description of Artificial Sequence: Synthetic oligonucleotide
  Sense strand starting at position 2504 of SEQ ID NO: 156
cgguguauccacgccguua

SEQ ID NO: 15397 - RNA, 19 nt, Artificial Sequence
  Description of Artificial Sequence: Synthetic oligonucleotide
  Antisense strand to SEQ ID NO: 15396
uaacggcguggauacaccg

SEQ ID NO: 15398 - RNA, 19 nt, Artificial Sequence
  Description of Artificial Sequence: Synthetic oligonucleotide
  Sense strand starting at position 2455 of SEQ ID NO: 156
ggcagaagcguuagucugu

SEQ ID NO: 15399 - RNA, 19 nt, Artificial Sequence
  Description of Artificial Sequence: Synthetic oligonucleotide
  Antisense strand to SEQ ID NO: 15398
acagacuaacgcuucugcc

SEQ ID NO: 15400 - RNA, 19 nt, Artificial Sequence
  Description of Artificial Sequence: Synthetic oligonucleotide
  Sense strand starting at position 1548 of SEQ ID NO: 156
aaguuuaagccagaguuau

SEQ ID NO: 15401 - RNA, 19 nt, Artificial Sequence
  Description of Artificial Sequence: Synthetic oligonucleotide
  Antisense strand to SEQ ID NO: 15400
auaacucuggcuuaaacuu

SEQ ID NO: 15402 - RNA, 19 nt, Artificial Sequence
  Description of Artificial Sequence: Synthetic oligonucleotide
  Sense strand starting at position 1535 of SEQ ID NO: 156
gguggcuuagaagaaguuu

SEQ ID NO: 15403 - RNA, 19 nt, Artificial Sequence
  Description of Artificial Sequence: Synthetic oligonucleotide
  Antisense strand to SEQ ID NO: 15402
aaacuucuucuaagccacc

SEQ ID NO: 15404 - RNA, 19 nt, Artificial Sequence
  Description of Artificial Sequence: Synthetic oligonucleotide
  Sense strand starting at position 1495 of SEQ ID NO: 156
uucgcuuugcgggaaacuu

SEQ ID NO: 15405 - RNA, 19 nt, Artificial Sequence
  Description of Artificial Sequence: Synthetic oligonucleotide
  Antisense strand to SEQ ID NO: 15404
aaguuucccgcaaagcgaa

SEQ ID NO: 15406 - RNA, 19 nt, Artificial Sequence
  Description of Artificial Sequence: Synthetic oligonucleotide
  Sense strand starting at position 1483 of SEQ ID NO: 156
aaaguuaguucuuucgcuu

SEQ ID NO: 15407 - RNA, 19 nt, Artificial Sequence
  Description of Artificial Sequence: Synthetic oligonucleotide
  Antisense strand to SEQ ID NO: 15406
aagcgaaagaacuaacuuu

SEQ ID NO: 15408 - RNA, 19 nt, Artificial Sequence
  Description of Artificial Sequence: Synthetic oligonucleotide
  Sense strand starting at position 1482 of SEQ ID NO: 156
gaaaguuaguucuuucgcu

SEQ ID NO: 15409 - RNA, 19 nt, Artificial Sequence
  Description of Artificial Sequence: Synthetic oligonucleotide
  Antisense strand to SEQ ID NO: 15408
agcgaaagaacuaacuuuc

SEQ ID NO: 15410 - RNA, 19 nt, Artificial Sequence
  Description of Artificial Sequence: Synthetic oligonucleotide
  Sense strand starting at position 1479 of SEQ ID NO: 156
agagaaaguuaguucuuuc

SEQ ID NO: 15411 - RNA, 19 nt, Artificial Sequence
  Description of Artificial Sequence: Synthetic oligonucleotide
  Antisense strand to SEQ ID NO: 15410
gaaagaacuaacuuucucu

SEQ ID NO: 15412 - RNA, 19 nt, Artificial Sequence
  Description of Artificial Sequence: Synthetic oligonucleotide
  Sense strand starting at position 1478 of SEQ ID NO: 156
aagagaaaguuaguucuuu

SEQ ID NO: 15413 - RNA, 19 nt, Artificial Sequence
  Description of Artificial Sequence: Synthetic oligonucleotide
  Antisense strand to SEQ ID NO: 15412
aaagaacuaacuuucucuu

SEQ ID NO: 15414 - RNA, 19 nt, Artificial Sequence
  Description of Artificial Sequence: Synthetic oligonucleotide
  Sense strand starting at position 937 of SEQ ID NO: 156
gugagagucccaggugugu

SEQ ID NO: 15415 - RNA, 19 nt, Artificial Sequence
  Description of Artificial Sequence: Synthetic oligonucleotide
  Antisense strand to SEQ ID NO: 15414
acacaccugggacucucac

SEQ ID NO: 15416 - RNA, 19 nt, Artificial Sequence
  Description of Artificial Sequence: Synthetic oligonucleotide
  Sense strand starting at position 807 of SEQ ID NO: 156
caguguaagcgcucagagu

SEQ ID NO: 15417 - RNA, 19 nt, Artificial Sequence
  Description of Artificial Sequence: Synthetic oligonucleotide
  Antisense strand to SEQ ID NO: 15416
acucugagcgcuuacacug

SEQ ID NO: 15418 - RNA, 19 nt, Artificial Sequence
  Description of Artificial Sequence: Synthetic oligonucleotide
  Sense strand starting at position 693 of SEQ ID NO: 156
guaguuaucugguccaacc

SEQ ID NO: 15419 - RNA, 19 nt, Artificial Sequence
  Description of Artificial Sequence: Synthetic oligonucleotide
  Antisense strand to SEQ ID NO: 15418
gguuggaccagauaacuac

SEQ ID NO: 15420 - RNA, 19 nt, Artificial Sequence
  Description of Artificial Sequence: Synthetic oligonucleotide
  Sense strand starting at position 690 of SEQ ID NO: 156
uuaguaguuaucuggucca

SEQ ID NO: 15421 - RNA, 19 nt, Artificial Sequence
  Description of Artificial Sequence: Synthetic oligonucleotide
  Antisense strand to SEQ ID NO: 15420
uggaccagauaacuacuaa

SEQ ID NO: 15422 - RNA, 19 nt, Artificial Sequence
  Description of Artificial Sequence: Synthetic oligonucleotide
  Sense strand starting at position 580 of SEQ ID NO: 156
acuggugaaugacauuaga

SEQ ID NO: 15423 - RNA, 19 nt, Artificial Sequence
  Description of Artificial Sequence: Synthetic oligonucleotide
  Antisense strand to SEQ ID NO: 15422
ucuaaugucauucaccagu

SEQ ID NO: 15424 - RNA, 19 nt, Artificial Sequence
  Description of Artificial Sequence: Synthetic oligonucleotide
  Sense strand starting at position 577 of SEQ ID NO: 156
gacacuggugaaugacauu

SEQ ID NO: 15425 - RNA, 19 nt, Artificial Sequence
  Description of Artificial Sequence: Synthetic oligonucleotide
  Antisense strand to SEQ ID NO: 15424
aaugucauucaccaguguc

SEQ ID NO: 15426 - RNA, 19 nt, Artificial Sequence
  Description of Artificial Sequence: Synthetic oligonucleotide
  Sense strand starting at position 455 of SEQ ID NO: 156
ggaaguagaugagaaauga

SEQ ID NO: 15427 - RNA, 19 nt, Artificial Sequence
  Description of Artificial Sequence: Synthetic oligonucleotide
  Antisense strand to SEQ ID NO: 15426
ucauuucucaucuacuucc

SEQ ID NO: 15428 - RNA, 19 nt, Artificial Sequence
  Description of Artificial Sequence: Synthetic oligonucleotide
  Sense strand starting at position 409 of SEQ ID NO: 156
ugaccuaugcaaugaaauu

SEQ ID NO: 15429 - RNA, 19 nt, Artificial Sequence
  Description of Artificial Sequence: Synthetic oligonucleotide
  Antisense strand to SEQ ID NO: 15428
aauuucauugcauagguca

SEQ ID NO: 15430 - RNA, 19 nt, Artificial Sequence
  Description of Artificial Sequence: Synthetic oligonucleotide
  Sense strand starting at position 404 of SEQ ID NO: 156
auaugugaccuaugcaaug

SEQ ID NO: 15431 - RNA, 19 nt, Artificial Sequence
  Description of Artificial Sequence: Synthetic oligonucleotide
  Antisense strand to SEQ ID NO: 15430
cauugcauaggucacauau

SEQ ID NO: 15432 - RNA, 19 nt, Artificial Sequence
  Description of Artificial Sequence: Synthetic oligonucleotide
  Sense strand starting at position 292 of SEQ ID NO: 156
gacugucaccuacaacgaa

SEQ ID NO: 15433 - RNA, 19 nt, Artificial Sequence
  Description of Artificial Sequence: Synthetic oligonucleotide
  Antisense strand to SEQ ID NO: 15432
uucguuguaggugacaguc

SEQ ID NO: 15434 - RNA, 19 nt, Artificial Sequence
  Description of Artificial Sequence: Synthetic oligonucleotide
  Sense strand starting at position 267 of SEQ ID NO: 156
gacagaaacuucgaacaga

SEQ ID NO: 15435 - RNA, 19 nt, Artificial Sequence
  Description of Artificial Sequence: Synthetic oligonucleotide
  Antisense strand to SEQ ID NO: 15434
ucuguucgaaguuucuguc

SEQ ID NO: 15436 - RNA, 19 nt, Artificial Sequence
  Description of Artificial Sequence: Synthetic oligonucleotide
  Sense strand starting at position 181 of SEQ ID NO: 156
guuguagcauuauucuaca

SEQ ID NO: 15437 - RNA, 19 nt, Artificial Sequence
  Description of Artificial Sequence: Synthetic oligonucleotide
  Antisense strand to SEQ ID NO: 15436
uguagaauaaugcuacaac

SEQ ID NO: 15438 - RNA, 19 nt, Artificial Sequence
  Description of Artificial Sequence: Synthetic oligonucleotide
  Sense strand starting at position 140 of SEQ ID NO: 156
cccaucuuugcccaggaua

SEQ ID NO: 15439 - RNA, 19 nt, Artificial Sequence
  Description of Artificial Sequence: Synthetic oligonucleotide
  Antisense strand to SEQ ID NO: 15438
uauccugggcaaagauggg

SEQ ID NO: 15440 - RNA, 19 nt, Artificial Sequence
  Description of Artificial Sequence: Synthetic oligonucleotide
  Sense strand starting at position 87 of SEQ ID NO: 156
cuucuuugcugucucugaa

SEQ ID NO: 15441 - RNA, 19 nt, Artificial Sequence
  Description of Artificial Sequence: Synthetic oligonucleotide
  Antisense strand to SEQ ID NO: 15440
uucagagacagcaaagaag

SEQ ID NO: 15442 - RNA, 19 nt, Artificial Sequence
  Description of Artificial Sequence: Synthetic oligonucleotide
  Sense strand starting at position 3947 of SEQ ID NO: 155
acuccauuauguguuauca

SEQ ID NO: 15443 - RNA, 19 nt, Artificial Sequence
  Description of Artificial Sequence: Synthetic oligonucleotide
  Antisense strand to SEQ ID NO: 15442
ugauaacacauaauggagu

SEQ ID NO: 15444 - RNA, 19 nt, Artificial Sequence
  Description of Artificial Sequence: Synthetic oligonucleotide
  Sense strand starting at position 3885 of SEQ ID NO: 155
ugggucucuuauccacaaa

SEQ ID NO: 15445 - RNA, 19 nt, Artificial Sequence
  Description of Artificial Sequence: Synthetic oligonucleotide
  Antisense strand to SEQ ID NO: 15444
uuuguggauaagagaccca

SEQ ID NO: 15446 - RNA, 19 nt, Artificial Sequence
  Description of Artificial Sequence: Synthetic oligonucleotide
  Sense strand starting at position 3884 of SEQ ID NO: 155
gugggucucuuauccacaa

SEQ ID NO: 15447 - RNA, 19 nt, Artificial Sequence
  Description of Artificial Sequence: Synthetic oligonucleotide
  Antisense strand to SEQ ID NO: 15446
uuguggauaagagacccac

SEQ ID NO: 15448 - RNA, 19 nt, Artificial Sequence
  Description of Artificial Sequence: Synthetic oligonucleotide
  Sense strand starting at position 3797 of SEQ ID NO: 155
acugaacucuguuuaauga

SEQ ID NO: 15449 - RNA, 19 nt, Artificial Sequence
  Description of Artificial Sequence: Synthetic oligonucleotide
  Antisense strand to SEQ ID NO: 15448
ucauuaaacagaguucagu

SEQ ID NO: 15450 - RNA, 19 nt, Artificial Sequence
  Description of Artificial Sequence: Synthetic oligonucleotide
  Sense strand starting at position 3778 of SEQ ID NO: 155
uaaagauuccucgggauaa

SEQ ID NO: 15451 - RNA, 19 nt, Artificial Sequence
  Description of Artificial Sequence: Synthetic oligonucleotide
  Antisense strand to SEQ ID NO: 15450
uuaucccgaggaaucuuua

SEQ ID NO: 15452 - RNA, 19 nt, Artificial Sequence
  Description of Artificial Sequence: Synthetic oligonucleotide
  Sense strand starting at position 3776 of SEQ ID NO: 155
aguaaagauuccucgggau

SEQ ID NO: 15453 - RNA, 19 nt, Artificial Sequence
  Description of Artificial Sequence: Synthetic oligonucleotide
  Antisense strand to SEQ ID NO: 15452
aucccgaggaaucuuuacu

SEQ ID NO: 15454 - RNA, 19 nt, Artificial Sequence
  Description of Artificial Sequence: Synthetic oligonucleotide
  Sense strand starting at position 3585 of SEQ ID NO: 155
uuaguuuggcuccaggauu

SEQ ID NO: 15455 - RNA, 19 nt, Artificial Sequence
  Description of Artificial Sequence: Synthetic oligonucleotide
  Antisense strand to SEQ ID NO: 15454
aauccuggagccaaacuaa

SEQ ID NO: 15456 - RNA, 19 nt, Artificial Sequence
  Description of Artificial Sequence: Synthetic oligonucleotide
  Sense strand starting at position 3577 of SEQ ID NO: 155
gaauuaaguuaguuuggcu

SEQ ID NO: 15457 - RNA, 19 nt, Artificial Sequence
  Description of Artificial Sequence: Synthetic oligonucleotide
  Antisense strand to SEQ ID NO: 15456
agccaaacuaacuuaauuc

SEQ ID NO: 15458 - RNA, 19 nt, Artificial Sequence
  Description of Artificial Sequence: Synthetic oligonucleotide
  Sense strand starting at position 3564 of SEQ ID NO: 155
gcaucaggauuuggaauua

SEQ ID NO: 15459 - RNA, 19 nt, Artificial Sequence
  Description of Artificial Sequence: Synthetic oligonucleotide
  Antisense strand to SEQ ID NO: 15458
uaauuccaaauccugaugc

SEQ ID NO: 15460 - RNA, 19 nt, Artificial Sequence
  Description of Artificial Sequence: Synthetic oligonucleotide
  Sense strand starting at position 3526 of SEQ ID NO: 155
aagucauuugcccgaauuc

SEQ ID NO: 15461 - RNA, 19 nt, Artificial Sequence
  Description of Artificial Sequence: Synthetic oligonucleotide
  Antisense strand to SEQ ID NO: 15460
gaauucgggcaaaugacuu

SEQ ID NO: 15462 - RNA, 19 nt, Artificial Sequence
  Description of Artificial Sequence: Synthetic oligonucleotide
  Sense strand starting at position 3525 of SEQ ID NO: 155
uaagucauuugcccgaauu

SEQ ID NO: 15463 - RNA, 19 nt, Artificial Sequence
  Description of Artificial Sequence: Synthetic oligonucleotide
  Antisense strand to SEQ ID NO: 15462
aauucgggcaaaugacuua

SEQ ID NO: 15464 - RNA, 19 nt, Artificial Sequence
  Description of Artificial Sequence: Synthetic oligonucleotide
  Sense strand starting at position 3524 of SEQ ID NO: 155
cuaagucauuugcccgaau

SEQ ID NO: 15465 - RNA, 19 nt, Artificial Sequence
  Description of Artificial Sequence: Synthetic oligonucleotide
  Antisense strand to SEQ ID NO: 15464
auucgggcaaaugacuuag

SEQ ID NO: 15466 - RNA, 19 nt, Artificial Sequence
  Description of Artificial Sequence: Synthetic oligonucleotide
  Sense strand starting at position 3460 of SEQ ID NO: 155
cgagaacccagugaguuaa

SEQ ID NO: 15467 - RNA, 19 nt, Artificial Sequence
  Description of Artificial Sequence: Synthetic oligonucleotide
  Antisense strand to SEQ ID NO: 15466
uuaacucacuggguucucg

SEQ ID NO: 15468 - RNA, 19 nt, Artificial Sequence
  Description of Artificial Sequence: Synthetic oligonucleotide
  Sense strand starting at position 3459 of SEQ ID NO: 155
acgagaacccagugaguua

SEQ ID NO: 15469 - RNA, 19 nt, Artificial Sequence
  Description of Artificial Sequence: Synthetic oligonucleotide
  Antisense strand to SEQ ID NO: 15468
uaacucacuggguucucgu

SEQ ID NO: 15470 - RNA, 19 nt, Artificial Sequence
  Description of Artificial Sequence: Synthetic oligonucleotide
  Sense strand starting at position 3448 of SEQ ID NO: 155
auuuaauccucacgagaac

SEQ ID NO: 15471 - RNA, 19 nt, Artificial Sequence
  Description of Artificial Sequence: Synthetic oligonucleotide
  Antisense strand to SEQ ID NO: 15470
guucucgugaggauuaaau

SEQ ID NO: 15472 - RNA, 19 nt, Artificial Sequence
  Description of Artificial Sequence: Synthetic oligonucleotide
  Sense strand starting at position 3384 of SEQ ID NO: 155
cuggcaagucucgaacauu

SEQ ID NO: 15473 - RNA, 19 nt, Artificial Sequence
  Description of Artificial Sequence: Synthetic oligonucleotide
  Antisense strand to SEQ ID NO: 15472
aauguucgagacuugccag

SEQ ID NO: 15474 - RNA, 19 nt, Artificial Sequence
  Description of Artificial Sequence: Synthetic oligonucleotide
  Sense strand starting at position 3343 of SEQ ID NO: 155
aucuguggucauuagcaca

SEQ ID NO: 15475 - RNA, 19 nt, Artificial Sequence
  Description of Artificial Sequence: Synthetic oligonucleotide
  Antisense strand to SEQ ID NO: 15474
ugugcuaaugaccacagau

SEQ ID NO: 15476 - RNA, 19 nt, Artificial Sequence
  Description of Artificial Sequence: Synthetic oligonucleotide
  Sense strand starting at position 3287 of SEQ ID NO: 155
ugaguauagggaugagugu

SEQ ID NO: 15477 - RNA, 19 nt, Artificial Sequence
  Description of Artificial Sequence: Synthetic oligonucleotide
  Antisense strand to SEQ ID NO: 15476
acacucaucccuauacuca

SEQ ID NO: 15478 - RNA, 19 nt, Artificial Sequence
  Description of Artificial Sequence: Synthetic oligonucleotide
  Sense strand starting at position 3268 of SEQ ID NO: 155
guugguucccaagggacaa

SEQ ID NO: 15479 - RNA, 19 nt, Artificial Sequence
  Description of Artificial Sequence: Synthetic oligonucleotide
  Antisense strand to SEQ ID NO: 15478
uugucccuugggaaccaac

SEQ ID NO: 15480 - RNA, 19 nt, Artificial Sequence
  Description of Artificial Sequence: Synthetic oligonucleotide
  Sense strand starting at position 3114 of SEQ ID NO: 155
uauucuauagcucggugaa

SEQ ID NO: 15481 - RNA, 19 nt, Artificial Sequence
  Description of Artificial Sequence: Synthetic oligonucleotide
  Antisense strand to SEQ ID NO: 15480
uucaccgagcuauagaaua

SEQ ID NO: 15482 - RNA, 19 nt, Artificial Sequence
  Description of Artificial Sequence: Synthetic oligonucleotide
  Sense strand starting at position 3070 of SEQ ID NO: 155
ggagaagcuucagugaugu

SEQ ID NO: 15483 - RNA, 19 nt, Artificial Sequence
  Description of Artificial Sequence: Synthetic oligonucleotide
  Antisense strand to SEQ ID NO: 15482
acaucacugaagcuucucc

SEQ ID NO: 15484 - RNA, 19 nt, Artificial Sequence
  Description of Artificial Sequence: Synthetic oligonucleotide
  Sense strand starting at position 2902 of SEQ ID NO: 155
agcauugagucuccaccau

SEQ ID NO: 15485 - RNA, 19 nt, Artificial Sequence
  Description of Artificial Sequence: Synthetic oligonucleotide
  Antisense strand to SEQ ID NO: 15484
augguggagacucaaugcu

SEQ ID NO: 15486 - RNA, 19 nt, Artificial Sequence
  Description of Artificial Sequence: Synthetic oligonucleotide
  Sense strand starting at position 2867 of SEQ ID NO: 155
gugucugguaaaugacuga

SEQ ID NO: 15487 - RNA, 19 nt, Artificial Sequence
  Description of Artificial Sequence: Synthetic oligonucleotide
  Antisense strand to SEQ ID NO: 15486
ucagucauuuaccagacac

SEQ ID NO: 15488 - RNA, 19 nt, Artificial Sequence
  Description of Artificial Sequence: Synthetic oligonucleotide
  Sense strand starting at position 2825 of SEQ ID NO: 155
agugacuugagcuaguaau

SEQ ID NO: 15489 - RNA, 19 nt, Artificial Sequence
  Description of Artificial Sequence: Synthetic oligonucleotide
  Antisense strand to SEQ ID NO: 15488
auuacuagcucaagucacu

SEQ ID NO: 15490 - RNA, 19 nt, Artificial Sequence
  Description of Artificial Sequence: Synthetic oligonucleotide
  Sense strand starting at position 2820 of SEQ ID NO: 155
acagcagugacuugagcua

SEQ ID NO: 15491 - RNA, 19 nt, Artificial Sequence
  Description of Artificial Sequence: Synthetic oligonucleotide
  Antisense strand to SEQ ID NO: 15490
uagcucaagucacugcugu

SEQ ID NO: 15492 - RNA, 19 nt, Artificial Sequence
  Description of Artificial Sequence: Synthetic oligonucleotide
  Sense strand starting at position 2679 of SEQ ID NO: 155
uaagguuaagguuggcaaa

SEQ ID NO: 15493 - RNA, 19 nt, Artificial Sequence
  Description of Artificial Sequence: Synthetic oligonucleotide
  Antisense strand to SEQ ID NO: 15492
uuugccaaccuuaaccuua

SEQ ID NO: 15494 - RNA, 19 nt, Artificial Sequence
  Description of Artificial Sequence: Synthetic oligonucleotide
  Sense strand starting at position 2673 of SEQ ID NO: 155
gauucuuaagguuaagguu

SEQ ID NO: 15495 - RNA, 19 nt, Artificial Sequence
  Description of Artificial Sequence: Synthetic oligonucleotide
  Antisense strand to SEQ ID NO: 15494
aaccuuaaccuuaagaauc

SEQ ID NO: 15496 - RNA, 19 nt, Artificial Sequence
  Description of Artificial Sequence: Synthetic oligonucleotide
  Sense strand starting at position 2666 of SEQ ID NO: 155
ggagguggauucuuaaggu

SEQ ID NO: 15497 - RNA, 19 nt, Artificial Sequence
  Description of Artificial Sequence: Synthetic oligonucleotide
  Antisense strand to SEQ ID NO: 15496
accuuaagaauccaccucc

SEQ ID NO: 15498 - RNA, 19 nt, Artificial Sequence
  Description of Artificial Sequence: Synthetic oligonucleotide
  Sense strand starting at position 2507 of SEQ ID NO: 155
cuaucagugaguggaagua

SEQ ID NO: 15499 - RNA, 19 nt, Artificial Sequence
  Description of Artificial Sequence: Synthetic oligonucleotide
  Antisense strand to SEQ ID NO: 15498
uacuuccacucacugauag

SEQ ID NO: 15500 - RNA, 19 nt, Artificial Sequence
  Description of Artificial Sequence: Synthetic oligonucleotide
  Sense strand starting at position 2491 of SEQ ID NO: 155
ugacgucaagcugaaacua

SEQ ID NO: 15501 - RNA, 19 nt, Artificial Sequence
  Description of Artificial Sequence: Synthetic oligonucleotide
  Antisense strand to SEQ ID NO: 15500
uaguuucagcuugacguca

SEQ ID NO: 15502 - RNA, 19 nt, Artificial Sequence
  Description of Artificial Sequence: Synthetic oligonucleotide
  Sense strand starting at position 2295 of SEQ ID NO: 155
gugcaaauguggccacaaa

SEQ ID NO: 15503 - RNA, 19 nt, Artificial Sequence
  Description of Artificial Sequence: Synthetic oligonucleotide
  Antisense strand to SEQ ID NO: 15502
uuuguggccacauuugcac

SEQ ID NO: 15504 - RNA, 19 nt, Artificial Sequence
  Description of Artificial Sequence: Synthetic oligonucleotide
  Sense strand starting at position 2260 of SEQ ID NO: 155
ucacaagaucuaugaguuu

SEQ ID NO: 15505 - RNA, 19 nt, Artificial Sequence
  Description of Artificial Sequence: Synthetic oligonucleotide
  Antisense strand to SEQ ID NO: 15504
aaacucauagaucuuguga

SEQ ID NO: 15506 - RNA, 19 nt, Artificial Sequence
  Description of Artificial Sequence: Synthetic oligonucleotide
  Sense strand starting at position 2221 of SEQ ID NO: 155
ugaaauuuauaagggauga

SEQ ID NO: 15507 - RNA, 19 nt, Artificial Sequence
  Description of Artificial Sequence: Synthetic oligonucleotide
  Antisense strand to SEQ ID NO: 15506
ucaucccuuauaaauuuca

SEQ ID NO: 15508 - RNA, 19 nt, Artificial Sequence
  Description of Artificial Sequence: Synthetic oligonucleotide
  Sense strand starting at position 2187 of SEQ ID NO: 155
cacauagcucagugacaug

SEQ ID NO: 15509 - RNA, 19 nt, Artificial Sequence
  Description of Artificial Sequence: Synthetic oligonucleotide
  Antisense strand to SEQ ID NO: 15508
caugucacugagcuaugug

SEQ ID NO: 15510 - RNA, 19 nt, Artificial Sequence
  Description of Artificial Sequence: Synthetic oligonucleotide
  Sense strand starting at position 2186 of SEQ ID NO: 155
acacauagcucagugacau

SEQ ID NO: 15511 - RNA, 19 nt, Artificial Sequence
  Description of Artificial Sequence: Synthetic oligonucleotide
  Antisense strand to SEQ ID NO: 15510
augucacugagcuaugugu

SEQ ID NO: 15512 - RNA, 19 nt, Artificial Sequence
  Description of Artificial Sequence: Synthetic oligonucleotide
  Sense strand starting at position 1369 of SEQ ID NO: 155
ugucauagagauuggguuu

SEQ ID NO: 15513 - RNA, 19 nt, Artificial Sequence
  Description of Artificial Sequence: Synthetic oligonucleotide
  Antisense strand to SEQ ID NO: 15512
aaacccaaucucuaugaca

SEQ ID NO: 15514 - RNA, 19 nt, Artificial Sequence
  Description of Artificial Sequence: Synthetic oligonucleotide
  Sense strand starting at position 1255 of SEQ ID NO: 155
ugaggugaucacggcucau

SEQ ID NO: 15515 - RNA, 19 nt, Artificial Sequence
  Description of Artificial Sequence: Synthetic oligonucleotide
  Antisense strand to SEQ ID NO: 15514
augagccgugaucaccuca

SEQ ID NO: 15516 - RNA, 19 nt, Artificial Sequence
  Description of Artificial Sequence: Synthetic oligonucleotide
  Sense strand starting at position 1024 of SEQ ID NO: 155
gugaauccuuaccugacuu

SEQ ID NO: 15517 - RNA, 19 nt, Artificial Sequence
  Description of Artificial Sequence: Synthetic oligonucleotide
  Antisense strand to SEQ ID NO: 15516
aagucagguaaggauucac

SEQ ID NO: 15518 - RNA, 19 nt, Artificial Sequence
  Description of Artificial Sequence: Synthetic oligonucleotide
  Sense strand starting at position 1023 of SEQ ID NO: 155
agugaauccuuaccugacu

SEQ ID NO: 15519 - RNA, 19 nt, Artificial Sequence
  Description of Artificial Sequence: Synthetic oligonucleotide
  Antisense strand to SEQ ID NO: 15518
agucagguaaggauucacu

SEQ ID NO: 15520 - RNA, 19 nt, Artificial Sequence
  Description of Artificial Sequence: Synthetic oligonucleotide
  Sense strand starting at position 153 of SEQ ID NO: 155
cagcuaugcuggccagaaa

SEQ ID NO: 15521 - RNA, 19 nt, Artificial Sequence
  Description of Artificial Sequence: Synthetic oligonucleotide
  Antisense strand to SEQ ID NO: 15520
uuucuggccagcauagcug

SEQ ID NO: 15522 - RNA, 19 nt, Artificial Sequence
  Description of Artificial Sequence: Synthetic oligonucleotide
  Sense strand starting at position 3844 of SEQ ID NO: 157
aggaucuacccaugguauu

SEQ ID NO: 15523 - RNA, 19 nt, Artificial Sequence
  Description of Artificial Sequence: Synthetic oligonucleotide
  Antisense strand to SEQ ID NO: 15522
aauaccauggguagauccu

SEQ ID NO: 15524 - RNA, 19 nt, Artificial Sequence
  Description of Artificial Sequence: Synthetic oligonucleotide
  Sense strand starting at position 3830 of SEQ ID NO: 157
cuuauuggauauuaaggau

SEQ ID NO: 15525 - RNA, 19 nt, Artificial Sequence
  Description of Artificial Sequence: Synthetic oligonucleotide
  Antisense strand to SEQ ID NO: 15524
auccuuaauauccaauaag

SEQ ID NO: 15526 - RNA, 19 nt, Artificial Sequence
  Description of Artificial Sequence: Synthetic oligonucleotide
  Sense strand starting at position 3770 of SEQ ID NO: 157
uuuagugucauuuggguuu

SEQ ID NO: 15527 - RNA, 19 nt, Artificial Sequence
  Description of Artificial Sequence: Synthetic oligonucleotide
  Antisense strand to SEQ ID NO: 15526
aaacccaaaugacacuaaa

SEQ ID NO: 15528 - RNA, 19 nt, Artificial Sequence
  Description of Artificial Sequence: Synthetic oligonucleotide
  Sense strand starting at position 3743 of SEQ ID NO: 157
gcuuaaacauguuuauaga

SEQ ID NO: 15529 - RNA, 19 nt, Artificial Sequence
  Description of Artificial Sequence: Synthetic oligonucleotide
  Antisense strand to SEQ ID NO: 15528
ucuauaaacauguuuaagc

SEQ ID NO: 15530 - RNA, 19 nt, Artificial Sequence
  Description of Artificial Sequence: Synthetic oligonucleotide
  Sense strand starting at position 3705 of SEQ ID NO: 157
guguaauucuaguccacuu

SEQ ID NO: 15531 - RNA, 19 nt, Artificial Sequence
  Description of Artificial Sequence: Synthetic oligonucleotide
  Antisense strand to SEQ ID NO: 15530
aaguggacuagaauuacac

SEQ ID NO: 15532 - RNA, 19 nt, Artificial Sequence
  Description of Artificial Sequence: Synthetic oligonucleotide
  Sense strand starting at position 3522 of SEQ ID NO: 157
ugugaccuaucaccaagaa

SEQ ID NO: 15533 - RNA, 19 nt, Artificial Sequence
  Description of Artificial Sequence: Synthetic oligonucleotide
  Antisense strand to SEQ ID NO: 15532
uucuuggugauaggucaca

SEQ ID NO: 15534 - RNA, 19 nt, Artificial Sequence
  Description of Artificial Sequence: Synthetic oligonucleotide
  Sense strand starting at position 3494 of SEQ ID NO: 157
aagugcaaguaauuaugaa

SEQ ID NO: 15535 - RNA, 19 nt, Artificial Sequence
  Description of Artificial Sequence: Synthetic oligonucleotide
  Antisense strand to SEQ ID NO: 15534
uucauaauuacuugcacuu

SEQ ID NO: 15536 - RNA, 19 nt, Artificial Sequence
  Description of Artificial Sequence: Synthetic oligonucleotide
  Sense strand starting at position 3392 of SEQ ID NO: 157
ucgagucuucuguauccca

SEQ ID NO: 15537 - RNA, 19 nt, Artificial Sequence
  Description of Artificial Sequence: Synthetic oligonucleotide
  Antisense strand to SEQ ID NO: 15536
ugggauacagaagacucga

SEQ ID NO: 15538 - RNA, 19 nt, Artificial Sequence
  Description of Artificial Sequence: Synthetic oligonucleotide
  Sense strand starting at position 3388 of SEQ ID NO: 157
aucaucgagucuucuguau

SEQ ID NO: 15539 - RNA, 19 nt, Artificial Sequence
  Description of Artificial Sequence: Synthetic oligonucleotide
  Antisense strand to SEQ ID NO: 15538
auacagaagacucgaugau

SEQ ID NO: 15540 - RNA, 19 nt, Artificial Sequence
  Description of Artificial Sequence: Synthetic oligonucleotide
  Sense strand starting at position 2994 of SEQ ID NO: 157
aggugaaauuuauaacacu

SEQ ID NO: 15541 - RNA, 19 nt, Artificial Sequence
  Description of Artificial Sequence: Synthetic oligonucleotide
  Antisense strand to SEQ ID NO: 15540
aguguuauaaauuucaccu

SEQ ID NO: 15542 - RNA, 19 nt, Artificial Sequence
  Description of Artificial Sequence: Synthetic oligonucleotide
  Sense strand starting at position 2858 of SEQ ID NO: 157
acugcucguggguauauua

SEQ ID NO: 15543 - RNA, 19 nt, Artificial Sequence
  Description of Artificial Sequence: Synthetic oligonucleotide
  Antisense strand to SEQ ID NO: 15542
uaauauacccacgagcagu

SEQ ID NO: 15544 - RNA, 19 nt, Artificial Sequence
  Description of Artificial Sequence: Synthetic oligonucleotide
  Sense strand starting at position 2804 of SEQ ID NO: 157
gaaucuuucccaugguagg

SEQ ID NO: 15545 - RNA, 19 nt, Artificial Sequence
  Description of Artificial Sequence: Synthetic oligonucleotide
  Antisense strand to SEQ ID NO: 15544
ccuaccaugggaaagauuc

SEQ ID NO: 15546 - RNA, 19 nt, Artificial Sequence
  Description of Artificial Sequence: Synthetic oligonucleotide
  Sense strand starting at position 2801 of SEQ ID NO: 157
guggaaucuuucccauggu

SEQ ID NO: 15547 - RNA, 19 nt, Artificial Sequence
  Description of Artificial Sequence: Synthetic oligonucleotide
  Antisense strand to SEQ ID NO: 15546
accaugggaaagauuccac

SEQ ID NO: 15548 - RNA, 19 nt, Artificial Sequence
  Description of Artificial Sequence: Synthetic oligonucleotide
  Sense strand starting at position 2606 of SEQ ID NO: 157
uuacuaaagauucggguuu

SEQ ID NO: 15549 - RNA, 19 nt, Artificial Sequence
  Description of Artificial Sequence: Synthetic oligonucleotide
  Antisense strand to SEQ ID NO: 15548
aaacccgaaucuuuaguaa

SEQ ID NO: 15550 - RNA, 19 nt, Artificial Sequence
  Description of Artificial Sequence: Synthetic oligonucleotide
  Sense strand starting at position 2573 of SEQ ID NO: 157
gaccuacaguaaucgaagu

SEQ ID NO: 15551 - RNA, 19 nt, Artificial Sequence
  Description of Artificial Sequence: Synthetic oligonucleotide
  Antisense strand to SEQ ID NO: 15550
acuucgauuacuguagguc

SEQ ID NO: 15552 - RNA, 19 nt, Artificial Sequence
  Description of Artificial Sequence: Synthetic oligonucleotide
  Sense strand starting at position 2556 of SEQ ID NO: 157
aagcgagucuacccuaaga

SEQ ID NO: 15553 - RNA, 19 nt, Artificial Sequence
  Description of Artificial Sequence: Synthetic oligonucleotide
  Antisense strand to SEQ ID NO: 15552
ucuuaggguagacucgcuu

SEQ ID NO: 15554 - RNA, 19 nt, Artificial Sequence
  Description of Artificial Sequence: Synthetic oligonucleotide
  Sense strand starting at position 2403 of SEQ ID NO: 157
gacaguaaccgagguaagu

SEQ ID NO: 15555 - RNA, 19 nt, Artificial Sequence
  Description of Artificial Sequence: Synthetic oligonucleotide
  Antisense strand to SEQ ID NO: 15554
acuuaccucgguuacuguc

SEQ ID NO: 15556 - RNA, 19 nt, Artificial Sequence
  Description of Artificial Sequence: Synthetic oligonucleotide
  Sense strand starting at position 2338 of SEQ ID NO: 157
cauauacgcguguaugaaa

SEQ ID NO: 15557 - RNA, 19 nt, Artificial Sequence
  Description of Artificial Sequence: Synthetic oligonucleotide
  Antisense strand to SEQ ID NO: 15556
uuucauacacgcguauaug

SEQ ID NO: 15558 - RNA, 19 nt, Artificial Sequence
  Description of Artificial Sequence: Synthetic oligonucleotide
  Sense strand starting at position 2272 of SEQ ID NO: 157
auuagagacuaacaguaaa

SEQ ID NO: 15559 - RNA, 19 nt, Artificial Sequence
  Description of Artificial Sequence: Synthetic oligonucleotide
  Antisense strand to SEQ ID NO: 15558
uuuacuguuagucucuaau

SEQ ID NO: 15560 - RNA, 19 nt, Artificial Sequence
  Description of Artificial Sequence: Synthetic oligonucleotide
  Sense strand starting at position 2217 of SEQ ID NO: 157
ggcuuauuccuugauuauc

SEQ ID NO: 15561 - RNA, 19 nt, Artificial Sequence
  Description of Artificial Sequence: Synthetic oligonucleotide
  Antisense strand to SEQ ID NO: 15560
gauaaucaaggaauaagcc

SEQ ID NO: 15562 - RNA, 19 nt, Artificial Sequence
  Description of Artificial Sequence: Synthetic oligonucleotide
  Sense strand starting at position 2216 of SEQ ID NO: 157
uggcuuauuccuugauuau

SEQ ID NO: 15563 - RNA, 19 nt, Artificial Sequence
  Description of Artificial Sequence: Synthetic oligonucleotide
  Antisense strand to SEQ ID NO: 15562
auaaucaaggaauaagcca

SEQ ID NO: 15564 - RNA, 19 nt, Artificial Sequence
  Description of Artificial Sequence: Synthetic oligonucleotide
  Sense strand starting at position 2215 of SEQ ID NO: 157
auggcuuauuccuugauua

SEQ ID NO: 15565 - RNA, 19 nt, Artificial Sequence
  Description of Artificial Sequence: Synthetic oligonucleotide
  Antisense strand to SEQ ID NO: 15564
uaaucaaggaauaagccau

SEQ ID NO: 15566 - RNA, 19 nt, Artificial Sequence
  Description of Artificial Sequence: Synthetic oligonucleotide
  Sense strand starting at position 2054 of SEQ ID NO: 157
ugaauagaccucugaguaa

SEQ ID NO: 15567 - RNA, 19 nt, Artificial Sequence
  Description of Artificial Sequence: Synthetic oligonucleotide
  Antisense strand to SEQ ID NO: 15566
uuacucagaggucuauuca

SEQ ID NO: 15568 - RNA, 19 nt, Artificial Sequence
  Description of Artificial Sequence: Synthetic oligonucleotide
  Sense strand starting at position 2043 of SEQ ID NO: 157
cuaagcaaauuugaauaga

SEQ ID NO: 15569 - RNA, 19 nt, Artificial Sequence
  Description of Artificial Sequence: Synthetic oligonucleotide
  Antisense strand to SEQ ID NO: 15568
ucuauucaaauuugcuuag

SEQ ID NO: 15570 - RNA, 19 nt, Artificial Sequence
  Description of Artificial Sequence: Synthetic oligonucleotide
  Sense strand starting at position 2035 of SEQ ID NO: 157
gucagagacuaagcaaauu

SEQ ID NO: 15571 - RNA, 19 nt, Artificial Sequence
  Description of Artificial Sequence: Synthetic oligonucleotide
  Antisense strand to SEQ ID NO: 15570
aauuugcuuagucucugac

SEQ ID NO: 15572 - RNA, 19 nt, Artificial Sequence
  Description of Artificial Sequence: Synthetic oligonucleotide
  Sense strand starting at position 2005 of SEQ ID NO: 157
gcacgagggauuuguacga

SEQ ID NO: 15573 - RNA, 19 nt, Artificial Sequence
  Description of Artificial Sequence: Synthetic oligonucleotide
  Antisense strand to SEQ ID NO: 15572
ucguacaaaucccucgugc

SEQ ID NO: 15574 - RNA, 19 nt, Artificial Sequence
  Description of Artificial Sequence: Synthetic oligonucleotide
  Sense strand starting at position 1637 of SEQ ID NO: 157
acgauacucccagacucuu

SEQ ID NO: 15575 - RNA, 19 nt, Artificial Sequence
  Description of Artificial Sequence: Synthetic oligonucleotide
  Antisense strand to SEQ ID NO: 15574
aagagucugggaguaucgu

SEQ ID NO: 15576 - RNA, 19 nt, Artificial Sequence
  Description of Artificial Sequence: Synthetic oligonucleotide
  Sense strand starting at position 1509 of SEQ ID NO: 157
ccuaaagacguccaguguu

SEQ ID NO: 15577 - RNA, 19 nt, Artificial Sequence
  Description of Artificial Sequence: Synthetic oligonucleotide
  Antisense strand to SEQ ID NO: 15576
aacacuggacgucuuuagg

SEQ ID NO: 15578 - RNA, 19 nt, Artificial Sequence
  Description of Artificial Sequence: Synthetic oligonucleotide
  Sense strand starting at position 1357 of SEQ ID NO: 157
gcuguaagauuagaauuuc

SEQ ID NO: 15579 - RNA, 19 nt, Artificial Sequence
  Description of Artificial Sequence: Synthetic oligonucleotide
  Antisense strand to SEQ ID NO: 15578
gaaauucuaaucuuacagc

SEQ ID NO: 15580 - RNA, 19 nt, Artificial Sequence
  Description of Artificial Sequence: Synthetic oligonucleotide
  Sense strand starting at position 1261 of SEQ ID NO: 157
aaguauuagguguagcuaa

SEQ ID NO: 15581 - RNA, 19 nt, Artificial Sequence
  Description of Artificial Sequence: Synthetic oligonucleotide
  Antisense strand to SEQ ID NO: 15580
uuagcuacaccuaauacuu

SEQ ID NO: 15582 - RNA, 19 nt, Artificial Sequence
  Description of Artificial Sequence: Synthetic oligonucleotide
  Sense strand starting at position 1259 of SEQ ID NO: 157
auaaguauuagguguagcu

SEQ ID NO: 15583 - RNA, 19 nt, Artificial Sequence
  Description of Artificial Sequence: Synthetic oligonucleotide
  Antisense strand to SEQ ID NO: 15582
agcuacaccuaauacuuau

SEQ ID NO: 15584 - RNA, 19 nt, Artificial Sequence
  Description of Artificial Sequence: Synthetic oligonucleotide
  Sense strand starting at position 1228 of SEQ ID NO: 157
gcuguaucuggagagcagu

SEQ ID NO: 15585 - RNA, 19 nt, Artificial Sequence
  Description of Artificial Sequence: Synthetic oligonucleotide
  Antisense strand to SEQ ID NO: 15584
acugcucuccagauacagc

SEQ ID NO: 15586 - RNA, 19 nt, Artificial Sequence
  Description of Artificial Sequence: Synthetic oligonucleotide
  Sense strand starting at position 1056 of SEQ ID NO: 157
auuggaaccuaagaacaau

SEQ ID NO: 15587 - RNA, 19 nt, Artificial Sequence
  Description of Artificial Sequence: Synthetic oligonucleotide
  Antisense strand to SEQ ID NO: 15586
auuguucuuagguuccaau

SEQ ID NO: 15588 - RNA, 19 nt, Artificial Sequence
  Description of Artificial Sequence: Synthetic oligonucleotide
  Sense strand starting at position 934 of SEQ ID NO: 157
ugcuauugagaaugcugau

SEQ ID NO: 15589 - RNA, 19 nt, Artificial Sequence
  Description of Artificial Sequence: Synthetic oligonucleotide
  Antisense strand to SEQ ID NO: 15588
aucagcauucucaauagca

SEQ ID NO: 15590 - RNA, 19 nt, Artificial Sequence
  Description of Artificial Sequence: Synthetic oligonucleotide
  Sense strand starting at position 867 of SEQ ID NO: 157
gagaacaucuguccuugaa

SEQ ID NO: 15591 - RNA, 19 nt, Artificial Sequence
  Description of Artificial Sequence: Synthetic oligonucleotide
  Antisense strand to SEQ ID NO: 15590
uucaaggacagauguucuc

SEQ ID NO: 15592 - RNA, 19 nt, Artificial Sequence
  Description of Artificial Sequence: Synthetic oligonucleotide
  Sense strand starting at position 747 of SEQ ID NO: 157
gguuacugucacuaaugca

SEQ ID NO: 15593 - RNA, 19 nt, Artificial Sequence
  Description of Artificial Sequence: Synthetic oligonucleotide
  Antisense strand to SEQ ID NO: 15592
ugcauuagugacaguaacc

SEQ ID NO: 15594 - RNA, 19 nt, Artificial Sequence
  Description of Artificial Sequence: Synthetic oligonucleotide
  Sense strand starting at position 516 of SEQ ID NO: 157
aggaaagcauuauagaaua

SEQ ID NO: 15595 - RNA, 19 nt, Artificial Sequence
  Description of Artificial Sequence: Synthetic oligonucleotide
  Antisense strand to SEQ ID NO: 15594
uauucuauaaugcuuuccu

SEQ ID NO: 15596 - RNA, 19 nt, Artificial Sequence
  Description of Artificial Sequence: Synthetic oligonucleotide
  Sense strand starting at position 477 of SEQ ID NO: 157
cagggaucuuaggaagaau

SEQ ID NO: 15597 - RNA, 19 nt, Artificial Sequence
  Description of Artificial Sequence: Synthetic oligonucleotide
  Antisense strand to SEQ ID NO: 15596
auucuuccuaagaucccug

SEQ ID NO: 15598 - RNA, 19 nt, Artificial Sequence
  Description of Artificial Sequence: Synthetic oligonucleotide
  Sense strand starting at position 54 of SEQ ID NO: 157
ggaagugucccacaguuau

SEQ ID NO: 15599 - RNA, 19 nt, Artificial Sequence
  Description of Artificial Sequence: Synthetic oligonucleotide
  Antisense strand to SEQ ID NO: 15598
auaacugugggacacuucc

SEQ ID NO: 15600 - RNA, 19 nt, Artificial Sequence
  Description of Artificial Sequence: Synthetic oligonucleotide
  Sense strand starting at position 21 of SEQ ID NO: 157
gguaucagaagacgacaua

SEQ ID NO: 15601 - RNA, 19 nt, Artificial Sequence
  Description of Artificial Sequence: Synthetic oligonucleotide
  Antisense strand to SEQ ID NO: 15600
uaugucgucuucugauacc

SEQ ID NO: 15602 - RNA, 19 nt, Artificial Sequence
  Description of Artificial Sequence: Synthetic oligonucleotide
  Sense strand starting at position 3912 of SEQ ID NO: 158
guguguauacuacagacuu

SEQ ID NO: 15603 - RNA, 19 nt, Artificial Sequence
  Description of Artificial Sequence: Synthetic oligonucleotide
  Antisense strand to SEQ ID NO: 15602
aagucuguaguauacacac

SEQ ID NO: 15604 - RNA, 19 nt, Artificial Sequence
  Description of Artificial Sequence: Synthetic oligonucleotide
  Sense strand starting at position 3905 of SEQ ID NO: 158
guaaauuguguguauacua

SEQ ID NO: 15605 - RNA, 19 nt, Artificial Sequence
  Description of Artificial Sequence: Synthetic oligonucleotide
  Antisense strand to SEQ ID NO: 15604
uaguauacacacaauuuac

SEQ ID NO: 15606 - RNA, 19 nt, Artificial Sequence
  Description of Artificial Sequence: Synthetic oligonucleotide
  Sense strand starting at position 3862 of SEQ ID NO: 158
gagaaacaaugcuuggauu

SEQ ID NO: 15607 - RNA, 19 nt, Artificial Sequence
  Description of Artificial Sequence: Synthetic oligonucleotide
  Antisense strand to SEQ ID NO: 15606
aauccaagcauuguuucuc

SEQ ID NO: 15608 - RNA, 19 nt, Artificial Sequence
  Description of Artificial Sequence: Synthetic oligonucleotide
  Sense strand starting at position 3847 of SEQ ID NO: 158
gcauuaacaggccaugaga

SEQ ID NO: 15609 - RNA, 19 nt, Artificial Sequence
  Description of Artificial Sequence: Synthetic oligonucleotide
  Antisense strand to SEQ ID NO: 15608
ucucauggccuguuaaugc

SEQ ID NO: 15610 - RNA, 19 nt, Artificial Sequence
  Description of Artificial Sequence: Synthetic oligonucleotide
  Sense strand starting at position 3836 of SEQ ID NO: 158
uuugguauugugcauuaac

SEQ ID NO: 15611 - RNA, 19 nt, Artificial Sequence
  Description of Artificial Sequence: Synthetic oligonucleotide
  Antisense strand to SEQ ID NO: 15610
guuaaugcacaauaccaaa

SEQ ID NO: 15612 - RNA, 19 nt, Artificial Sequence
  Description of Artificial Sequence: Synthetic oligonucleotide
  Sense strand starting at position 3809 of SEQ ID NO: 158
ggauuacaagaaugcaugu

SEQ ID NO: 15613 - RNA, 19 nt, Artificial Sequence
  Description of Artificial Sequence: Synthetic oligonucleotide
  Antisense strand to SEQ ID NO: 15612
acaugcauucuuguaaucc

SEQ ID NO: 15614 - RNA, 19 nt, Artificial Sequence
  Description of Artificial Sequence: Synthetic oligonucleotide
  Sense strand starting at position 3764 of SEQ ID NO: 158
cuaacaagcuguuuagaug

SEQ ID NO: 15615 - RNA, 19 nt, Artificial Sequence
  Description of Artificial Sequence: Synthetic oligonucleotide
  Antisense strand to SEQ ID NO: 15614
caucuaaacagcuuguuag

SEQ ID NO: 15616 - RNA, 19 nt, Artificial Sequence
  Description of Artificial Sequence: Synthetic oligonucleotide
  Sense strand starting at position 3655 of SEQ ID NO: 158
uuauuagagugagcaaagu

SEQ ID NO: 15617 - RNA, 19 nt, Artificial Sequence
  Description of Artificial Sequence: Synthetic oligonucleotide
  Antisense strand to SEQ ID NO: 15616
acuuugcucacucuaauaa

SEQ ID NO: 15618 - RNA, 19 nt, Artificial Sequence
  Description of Artificial Sequence: Synthetic oligonucleotide
  Sense strand starting at position 3652 of SEQ ID NO: 158
cacuuauuagagugagcaa

SEQ ID NO: 15619 - RNA, 19 nt, Artificial Sequence
  Description of Artificial Sequence: Synthetic oligonucleotide
  Antisense strand to SEQ ID NO: 15618
uugcucacucuaauaagug

SEQ ID NO: 15620 - RNA, 19 nt, Artificial Sequence
  Description of Artificial Sequence: Synthetic oligonucleotide
  Sense strand starting at position 3646 of SEQ ID NO: 158
auggcacacuuauuagagu

SEQ ID NO: 15621 - RNA, 19 nt, Artificial Sequence
  Description of Artificial Sequence: Synthetic oligonucleotide
  Antisense strand to SEQ ID NO: 15620
acucuaauaagugugccau

SEQ ID NO: 15622 - RNA, 19 nt, Artificial Sequence
  Description of Artificial Sequence: Synthetic oligonucleotide
  Sense strand starting at position 3626 of SEQ ID NO: 158
aggauaugauaagaucaca

SEQ ID NO: 15623 - RNA, 19 nt, Artificial Sequence
  Description of Artificial Sequence: Synthetic oligonucleotide
  Antisense strand to SEQ ID NO: 15622
ugugaucuuaucauauccu

SEQ ID NO: 15624 - RNA, 19 nt, Artificial Sequence
  Description of Artificial Sequence: Synthetic oligonucleotide
  Sense strand starting at position 2501 of SEQ ID NO: 158
aagggauaugugcacucau

SEQ ID NO: 15625 - RNA, 19 nt, Artificial Sequence
  Description of Artificial Sequence: Synthetic oligonucleotide
  Antisense strand to SEQ ID NO: 15624
augagugcacauaucccuu

SEQ ID NO: 15626 - RNA, 19 nt, Artificial Sequence
  Description of Artificial Sequence: Synthetic oligonucleotide
  Sense strand starting at position 2469 of SEQ ID NO: 158
uuauuaggacuguagguua

SEQ ID NO: 15627 - RNA, 19 nt, Artificial Sequence
  Description of Artificial Sequence: Synthetic oligonucleotide
  Antisense strand to SEQ ID NO: 15626
uaaccuacaguccuaauaa

SEQ ID NO: 15628 - RNA, 19 nt, Artificial Sequence
  Description of Artificial Sequence: Synthetic oligonucleotide
  Sense strand starting at position 2238 of SEQ ID NO: 158
gccauaaauuccucucgag

SEQ ID NO: 15629 - RNA, 19 nt, Artificial Sequence
  Description of Artificial Sequence: Synthetic oligonucleotide
  Antisense strand to SEQ ID NO: 15628
cucgagaggaauuuauggc

SEQ ID NO: 15630 - RNA, 19 nt, Artificial Sequence
  Description of Artificial Sequence: Synthetic oligonucleotide
  Sense strand starting at position 2083 of SEQ ID NO: 158
gcguaaaggccucugcuau

SEQ ID NO: 15631 - RNA, 19 nt, Artificial Sequence
  Description of Artificial Sequence: Synthetic oligonucleotide
  Antisense strand to SEQ ID NO: 15630
auagcagaggccuuuacgc

SEQ ID NO: 15632 - RNA, 19 nt, Artificial Sequence
  Description of Artificial Sequence: Synthetic oligonucleotide
  Sense strand starting at position 2082 of SEQ ID NO: 158
ggcguaaaggccucugcua

SEQ ID NO: 15633 - RNA, 19 nt, Artificial Sequence
  Description of Artificial Sequence: Synthetic oligonucleotide
  Antisense strand to SEQ ID NO: 15632
uagcagaggccuuuacgcc

SEQ ID NO: 15634 - RNA, 19 nt, Artificial Sequence
  Description of Artificial Sequence: Synthetic oligonucleotide
  Sense strand starting at position 2034 of SEQ ID NO: 158
ccacuuccgggauacgaaa

SEQ ID NO: 15635 - RNA, 19 nt, Artificial Sequence
  Description of Artificial Sequence: Synthetic oligonucleotide
  Antisense strand to SEQ ID NO: 15634
uuucguaucccggaagugg

SEQ ID NO: 15636 - RNA, 19 nt, Artificial Sequence
  Description of Artificial Sequence: Synthetic oligonucleotide
  Sense strand starting at position 1642 of SEQ ID NO: 158
gaggaagaguuagaagaca

SEQ ID NO: 15637 - RNA, 19 nt, Artificial Sequence
  Description of Artificial Sequence: Synthetic oligonucleotide
  Antisense strand to SEQ ID NO: 15636
ugucuucuaacucuuccuc

SEQ ID NO: 15638 - RNA, 19 nt, Artificial Sequence
  Description of Artificial Sequence: Synthetic oligonucleotide
  Sense strand starting at position 1614 of SEQ ID NO: 158
gguuuaucucugcaaccca

SEQ ID NO: 15639 - RNA, 19 nt, Artificial Sequence
  Description of Artificial Sequence: Synthetic oligonucleotide
  Antisense strand to SEQ ID NO: 15638
uggguugcagagauaaacc

SEQ ID NO: 15640 - RNA, 19 nt, Artificial Sequence
  Description of Artificial Sequence: Synthetic oligonucleotide
  Sense strand starting at position 1517 of SEQ ID NO: 158
gucaaauggaugcgauaga

SEQ ID NO: 15641 - RNA, 19 nt, Artificial Sequence
  Description of Artificial Sequence: Synthetic oligonucleotide
  Antisense strand to SEQ ID NO: 15640
ucuaucgcauccauuugac

SEQ ID NO: 15642 - RNA, 19 nt, Artificial Sequence
  Description of Artificial Sequence: Synthetic oligonucleotide
  Sense strand starting at position 1515 of SEQ ID NO: 158
gggucaaauggaugcgaua

SEQ ID NO: 15643 - RNA, 19 nt, Artificial Sequence
  Description of Artificial Sequence: Synthetic oligonucleotide
  Antisense strand to SEQ ID NO: 15642
uaucgcauccauuugaccc

SEQ ID NO: 15644 - RNA, 19 nt, Artificial Sequence
  Description of Artificial Sequence: Synthetic oligonucleotide
  Sense strand starting at position 1432 of SEQ ID NO: 158
gggauccaguuauuauuau

SEQ ID NO: 15645 - RNA, 19 nt, Artificial Sequence
  Description of Artificial Sequence: Synthetic oligonucleotide
  Antisense strand to SEQ ID NO: 15644
auaauaauaacuggauccc

SEQ ID NO: 15646 - RNA, 19 nt, Artificial Sequence
  Description of Artificial Sequence: Synthetic oligonucleotide
  Sense strand starting at position 1316 of SEQ ID NO: 158
cguuaauauuuagauggaa

SEQ ID NO: 15647 - RNA, 19 nt, Artificial Sequence
  Description of Artificial Sequence: Synthetic oligonucleotide
  Antisense strand to SEQ ID NO: 15646
uuccaucuaaauauuaacg

SEQ ID NO: 15648 - RNA, 19 nt, Artificial Sequence
  Description of Artificial Sequence: Synthetic oligonucleotide
  Sense strand starting at position 1307 of SEQ ID NO: 158
gugaaugaacguuaauauu

SEQ ID NO: 15649 - RNA, 19 nt, Artificial Sequence
  Description of Artificial Sequence: Synthetic oligonucleotide
  Antisense strand to SEQ ID NO: 15648
aauauuaacguucauucac

SEQ ID NO: 15650 - RNA, 19 nt, Artificial Sequence
  Description of Artificial Sequence: Synthetic oligonucleotide
  Sense strand starting at position 1255 of SEQ ID NO: 158
cuuagauguggguaggguu

SEQ ID NO: 15651 - RNA, 19 nt, Artificial Sequence
  Description of Artificial Sequence: Synthetic oligonucleotide
  Antisense strand to SEQ ID NO: 15650
aacccuacccacaucuaag

SEQ ID NO: 15652 - RNA, 19 nt, Artificial Sequence
  Description of Artificial Sequence: Synthetic oligonucleotide
  Sense strand starting at position 1201 of SEQ ID NO: 158
ugaauauagucaucauaug

SEQ ID NO: 15653 - RNA, 19 nt, Artificial Sequence
  Description of Artificial Sequence: Synthetic oligonucleotide
  Antisense strand to SEQ ID NO: 15652
cauaugaugacuauauuca

SEQ ID NO: 15654 - RNA, 19 nt, Artificial Sequence
  Description of Artificial Sequence: Synthetic oligonucleotide
  Sense strand starting at position 1162 of SEQ ID NO: 158
agcagugaugcugaguuga

SEQ ID NO: 15655 - RNA, 19 nt, Artificial Sequence
  Description of Artificial Sequence: Synthetic oligonucleotide
  Antisense strand to SEQ ID NO: 15654
ucaacucagcaucacugcu

SEQ ID NO: 15656 - RNA, 19 nt, Artificial Sequence
  Description of Artificial Sequence: Synthetic oligonucleotide
  Sense strand starting at position 1056 of SEQ ID NO: 158
gguauucuucuguaacuau

SEQ ID NO: 15657 - RNA, 19 nt, Artificial Sequence
  Description of Artificial Sequence: Synthetic oligonucleotide
  Antisense strand to SEQ ID NO: 15656
auaguuacagaagaauacc

SEQ ID NO: 15658 - RNA, 19 nt, Artificial Sequence
  Description of Artificial Sequence: Synthetic oligonucleotide
  Sense strand starting at position 1055 of SEQ ID NO: 158
agguauucuucuguaacua

SEQ ID NO: 15659 - RNA, 19 nt, Artificial Sequence
  Description of Artificial Sequence: Synthetic oligonucleotide
  Antisense strand to SEQ ID NO: 15658
uaguuacagaagaauaccu

SEQ ID NO: 15660 - RNA, 19 nt, Artificial Sequence
  Description of Artificial Sequence: Synthetic oligonucleotide
  Sense strand starting at position 1044 of SEQ ID NO: 158
gauguaagacgagguauuc

SEQ ID NO: 15661 - RNA, 19 nt, Artificial Sequence
  Description of Artificial Sequence: Synthetic oligonucleotide
  Antisense strand to SEQ ID NO: 15660
gaauaccucgucuuacauc

SEQ ID NO: 15662 - RNA, 19 nt, Artificial Sequence
  Description of Artificial Sequence: Synthetic oligonucleotide
  Sense strand starting at position 916 of SEQ ID NO: 158
gcaagaagaucauucccuu

SEQ ID NO: 15663 - RNA, 19 nt, Artificial Sequence
  Description of Artificial Sequence: Synthetic oligonucleotide
  Antisense strand to SEQ ID NO: 15662
aagggaaugaucuucuugc

SEQ ID NO: 15664 - RNA, 19 nt, Artificial Sequence
  Description of Artificial Sequence: Synthetic oligonucleotide
  Sense strand starting at position 872 of SEQ ID NO: 158
ggguauucucaauggcuca

SEQ ID NO: 15665 - RNA, 19 nt, Artificial Sequence
  Description of Artificial Sequence: Synthetic oligonucleotide
  Antisense strand to SEQ ID NO: 15664
ugagccauugagaauaccc

SEQ ID NO: 15666 - RNA, 19 nt, Artificial Sequence
  Description of Artificial Sequence: Synthetic oligonucleotide
  Sense strand starting at position 866 of SEQ ID NO: 158
cccucuggguauucucaau

SEQ ID NO: 15667 - RNA, 19 nt, Artificial Sequence
  Description of Artificial Sequence: Synthetic oligonucleotide
  Antisense strand to SEQ ID NO: 15666
auugagaauacccagaggg

SEQ ID NO: 15668 - RNA, 19 nt, Artificial Sequence
  Description of Artificial Sequence: Synthetic oligonucleotide
  Sense strand starting at position 733 of SEQ ID NO: 158
agcgaaugaacugguaauu

SEQ ID NO: 15669 - RNA, 19 nt, Artificial Sequence
  Description of Artificial Sequence: Synthetic oligonucleotide
  Antisense strand to SEQ ID NO: 15668
aauuaccaguucauucgcu

SEQ ID NO: 15670 - RNA, 19 nt, Artificial Sequence
  Description of Artificial Sequence: Synthetic oligonucleotide
  Sense strand starting at position 706 of SEQ ID NO: 158
uuugacaugugguucuaaa

SEQ ID NO: 15671 - RNA, 19 nt, Artificial Sequence
  Description of Artificial Sequence: Synthetic oligonucleotide
  Antisense strand to SEQ ID NO: 15670
uuuagaaccacaugucaaa

SEQ ID NO: 15672 - RNA, 19 nt, Artificial Sequence
  Description of Artificial Sequence: Synthetic oligonucleotide
  Sense strand starting at position 457 of SEQ ID NO: 158
gcugcaaacucauuugagu

SEQ ID NO: 15673 - RNA, 19 nt, Artificial Sequence
  Description of Artificial Sequence: Synthetic oligonucleotide
  Antisense strand to SEQ ID NO: 15672
acucaaaugaguuugcagc

SEQ ID NO: 15674 - RNA, 19 nt, Artificial Sequence
  Description of Artificial Sequence: Synthetic oligonucleotide
  Sense strand starting at position 192 of SEQ ID NO: 158
uugaguaauggcuaccgua

SEQ ID NO: 15675 - RNA, 19 nt, Artificial Sequence
  Description of Artificial Sequence: Synthetic oligonucleotide
  Antisense strand to SEQ ID NO: 15674
uacgguagccauuacucaa

SEQ ID NO: 15676 - RNA, 19 nt, Artificial Sequence
  Description of Artificial Sequence: Synthetic oligonucleotide
  Sense strand starting at position 126 of SEQ ID NO: 158
guuaaauaguaaguaguca

SEQ ID NO: 15677 - RNA, 19 nt, Artificial Sequence
  Description of Artificial Sequence: Synthetic oligonucleotide
  Antisense strand to SEQ ID NO: 15676
ugacuacuuacuauuuaac

SEQ ID NO: 15678 - RNA, 19 nt, Artificial Sequence
  Description of Artificial Sequence: Synthetic oligonucleotide
  Sense strand starting at position 17 of SEQ ID NO: 158
ucaauagcuuaguuggaau

SEQ ID NO: 15679 - RNA, 19 nt, Artificial Sequence
  Description of Artificial Sequence: Synthetic oligonucleotide
  Antisense strand to SEQ ID NO: 15678
auuccaacuaagcuauuga

SEQ ID NO: 15680 - RNA, 19 nt, Artificial Sequence
  Description of Artificial Sequence: Synthetic oligonucleotide
  Sense strand starting at position 16 of SEQ ID NO: 158
cucaauagcuuaguuggaa

SEQ ID NO: 15681 - RNA, 19 nt, Artificial Sequence
  Description of Artificial Sequence: Synthetic oligonucleotide
  Antisense strand to SEQ ID NO: 15680
uuccaacuaagcuauugag

SEQ ID NO: 15682 - RNA, 19 nt, Artificial Sequence
  Description of Artificial Sequence: Synthetic oligonucleotide
  Sense strand starting at position 218 of SEQ ID NO: 159
gccucaguuccugaaguag

SEQ ID NO: 15683 - RNA, 19 nt, Artificial Sequence
  Description of Artificial Sequence: Synthetic oligonucleotide
  Antisense strand to SEQ ID NO: 15682
cuacuucaggaacugaggc

SEQ ID NO: 15684 - RNA, 19 nt, Artificial Sequence
  Description of Artificial Sequence: Synthetic oligonucleotide
  Sense strand starting at position 226 of SEQ ID NO: 159
uccugaaguagcugagacu

SEQ ID NO: 15685 - RNA, 19 nt, Artificial Sequence
  Description of Artificial Sequence: Synthetic oligonucleotide
  Antisense strand to SEQ ID NO: 15684
agucucagcuacuucagga

SEQ ID NO: 15686 - RNA, 19 nt, Artificial Sequence
  Description of Artificial Sequence: Synthetic oligonucleotide
  Sense strand starting at position 406 of SEQ ID NO: 159
ugucauugcucuucugaug

SEQ ID NO: 15687 - RNA, 19 nt, Artificial Sequence
  Description of Artificial Sequence: Synthetic oligonucleotide
  Antisense strand to SEQ ID NO: 15686
caucagaagagcaaugaca

SEQ ID NO: 15688 - RNA, 19 nt, Artificial Sequence
  Description of Artificial Sequence: Synthetic oligonucleotide
  Sense strand starting at position 475 of SEQ ID NO: 159
gugcuaacucaaugaagcu

SEQ ID NO: 15689 - RNA, 19 nt, Artificial Sequence
  Description of Artificial Sequence: Synthetic oligonucleotide
  Antisense strand to SEQ ID NO: 15688
agcuucauugaguuagcac

SEQ ID NO: 15690 - RNA, 19 nt, Artificial Sequence
  Description of Artificial Sequence: Synthetic oligonucleotide
  Sense strand starting at position 553 of SEQ ID NO: 159
ugaggaacagcaugugaau

SEQ ID NO: 15691 - RNA, 19 nt, Artificial Sequence
  Description of Artificial Sequence: Synthetic oligonucleotide
  Antisense strand to SEQ ID NO: 15690
auucacaugcuguuccuca

SEQ ID NO: 15692 - RNA, 19 nt, Artificial Sequence
  Description of Artificial Sequence: Synthetic oligonucleotide
  Sense strand starting at position 564 of SEQ ID NO: 159
augugaaucccuuguccag

SEQ ID NO: 15693 - RNA, 19 nt, Artificial Sequence
  Description of Artificial Sequence: Synthetic oligonucleotide
  Antisense strand to SEQ ID NO: 15692
cuggacaagggauucacau

SEQ ID NO: 15694 - RNA, 19 nt, Artificial Sequence
  Description of Artificial Sequence: Synthetic oligonucleotide
  Sense strand starting at position 571 of SEQ ID NO: 159
ucccuuguccagggucaua

SEQ ID NO: 15695 - RNA, 19 nt, Artificial Sequence
  Description of Artificial Sequence: Synthetic oligonucleotide
  Antisense strand to SEQ ID NO: 15694
uaugacccuggacaaggga

SEQ ID NO: 15696 - RNA, 19 nt, Artificial Sequence
  Description of Artificial Sequence: Synthetic oligonucleotide
  Sense strand starting at position 583 of SEQ ID NO: 159
ggucauagagcuugaaagg

SEQ ID NO: 15697 - RNA, 19 nt, Artificial Sequence
  Description of Artificial Sequence: Synthetic oligonucleotide
  Antisense strand to SEQ ID NO: 15696
ccuuucaagcucuaugacc

SEQ ID NO: 15698 - RNA, 19 nt, Artificial Sequence
  Description of Artificial Sequence: Synthetic oligonucleotide
  Sense strand starting at position 608 of SEQ ID NO: 159
gcuggaaaugagugugucu

SEQ ID NO: 15699 - RNA, 19 nt, Artificial Sequence
  Description of Artificial Sequence: Synthetic oligonucleotide
  Antisense strand to SEQ ID NO: 15698
agacacacucauuuccagc

SEQ ID NO: 15700 - RNA, 19 nt, Artificial Sequence
  Description of Artificial Sequence: Synthetic oligonucleotide
  Sense strand starting at position 610 of SEQ ID NO: 159
uggaaaugagugugucuga

SEQ ID NO: 15701 - RNA, 19 nt, Artificial Sequence
  Description of Artificial Sequence: Synthetic oligonucleotide
  Antisense strand to SEQ ID NO: 15700
ucagacacacucauuucca

SEQ ID NO: 15702 - RNA, 19 nt, Artificial Sequence
  Description of Artificial Sequence: Synthetic oligonucleotide
  Sense strand starting at position 611 of SEQ ID NO: 159
ggaaaugagugugucugaa

SEQ ID NO: 15703 - RNA, 19 nt, Artificial Sequence
  Description of Artificial Sequence: Synthetic oligonucleotide
  Antisense strand to SEQ ID NO: 15702
uucagacacacucauuucc

SEQ ID NO: 15704 - RNA, 19 nt, Artificial Sequence
  Description of Artificial Sequence: Synthetic oligonucleotide
  Sense strand starting at position 613 of SEQ ID NO: 159
aaaugagugugucugaaug

SEQ ID NO: 15705 - RNA, 19 nt, Artificial Sequence
  Description of Artificial Sequence: Synthetic oligonucleotide
  Antisense strand to SEQ ID NO: 15704
cauucagacacacucauuu

SEQ ID NO: 15706 - RNA, 19 nt, Artificial Sequence
  Description of Artificial Sequence: Synthetic oligonucleotide
  Sense strand starting at position 751 of SEQ ID NO: 159
ggacuugaaccucgucuga

SEQ ID NO: 15707 - RNA, 19 nt, Artificial Sequence
  Description of Artificial Sequence: Synthetic oligonucleotide
  Antisense strand to SEQ ID NO: 15706
ucagacgagguucaagucc

SEQ ID NO: 15708 - RNA, 19 nt, Artificial Sequence
  Description of Artificial Sequence: Synthetic oligonucleotide
  Sense strand starting at position 1087 of SEQ ID NO: 159
augagaccuuucuggauag

SEQ ID NO: 15709 - RNA, 19 nt, Artificial Sequence
  Description of Artificial Sequence: Synthetic oligonucleotide
  Antisense strand to SEQ ID NO: 15708
cuauccagaaaggucucau

SEQ ID NO: 15710 - RNA, 19 nt, Artificial Sequence
  Description of Artificial Sequence: Synthetic oligonucleotide
  Sense strand starting at position 2184 of SEQ ID NO: 159
ccgugagcaagucacugau

SEQ ID NO: 15711 - RNA, 19 nt, Artificial Sequence
  Description of Artificial Sequence: Synthetic oligonucleotide
  Antisense strand to SEQ ID NO: 15710
aucagugacuugcucacgg

SEQ ID NO: 15712 - RNA, 19 nt, Artificial Sequence
  Description of Artificial Sequence: Synthetic oligonucleotide
  Sense strand starting at position 2187 of SEQ ID NO: 159
ugagcaagucacugauccu

SEQ ID NO: 15713 - RNA, 19 nt, Artificial Sequence
  Description of Artificial Sequence: Synthetic oligonucleotide
  Antisense strand to SEQ ID NO: 15712
aggaucagugacuugcuca

SEQ ID NO: 15714 - RNA, 19 nt, Artificial Sequence
  Description of Artificial Sequence: Synthetic oligonucleotide
  Sense strand starting at position 2218 of SEQ ID NO: 159
uuucccaaccuguaggaua

SEQ ID NO: 15715 - RNA, 19 nt, Artificial Sequence
  Description of Artificial Sequence: Synthetic oligonucleotide
  Antisense strand to SEQ ID NO: 15714
uauccuacagguugggaaa

SEQ ID NO: 15716 - RNA, 19 nt, Artificial Sequence
  Description of Artificial Sequence: Synthetic oligonucleotide
  Sense strand starting at position 2223 of SEQ ID NO: 159
caaccuguaggauagcaau

SEQ ID NO: 15717 - RNA, 19 nt, Artificial Sequence
  Description of Artificial Sequence: Synthetic oligonucleotide
  Antisense strand to SEQ ID NO: 15716
auugcuauccuacagguug

SEQ ID NO: 15718 - RNA, 19 nt, Artificial Sequence
  Description of Artificial Sequence: Synthetic oligonucleotide
  Sense strand starting at position 2253 of SEQ ID NO: 159
agagaacugcugcgaggau

SEQ ID NO: 15719 - RNA, 19 nt, Artificial Sequence
  Description of Artificial Sequence: Synthetic oligonucleotide
  Antisense strand to SEQ ID NO: 15718
auccucgcagcaguucucu

SEQ ID NO: 15720 - RNA, 19 nt, Artificial Sequence
  Description of Artificial Sequence: Synthetic oligonucleotide
  Sense strand starting at position 2492 of SEQ ID NO: 159
cugcuugaugaaugcaaag

SEQ ID NO: 15721 - RNA, 19 nt, Artificial Sequence
  Description of Artificial Sequence: Synthetic oligonucleotide
  Antisense strand to SEQ ID NO: 15720
cuuugcauucaucaagcag

SEQ ID NO: 15722 - RNA, 19 nt, Artificial Sequence
  Description of Artificial Sequence: Synthetic oligonucleotide
  Sense strand starting at position 2569 of SEQ ID NO: 159
gggagagucugccaugaug

SEQ ID NO: 15723 - RNA, 19 nt, Artificial Sequence
  Description of Artificial Sequence: Synthetic oligonucleotide
  Antisense strand to SEQ ID NO: 15722
caucauggcagacucuccc

SEQ ID NO: 15724 - RNA, 19 nt, Artificial Sequence
  Description of Artificial Sequence: Synthetic oligonucleotide
  Sense strand starting at position 2571 of SEQ ID NO: 159
gagagucugccaugaugca

SEQ ID NO: 15725 - RNA, 19 nt, Artificial Sequence
  Description of Artificial Sequence: Synthetic oligonucleotide
  Antisense strand to SEQ ID NO: 15724
ugcaucauggcagacucuc

SEQ ID NO: 15726 - RNA, 19 nt, Artificial Sequence
  Description of Artificial Sequence: Synthetic oligonucleotide
  Sense strand starting at position 2680 of SEQ ID NO: 159
aggcaccagagaugucuua

SEQ ID NO: 15727 - RNA, 19 nt, Artificial Sequence
  Description of Artificial Sequence: Synthetic oligonucleotide
  Antisense strand to SEQ ID NO: 15726
uaagacaucucuggugccu

SEQ ID NO: 15728 - RNA, 19 nt, Artificial Sequence
  Description of Artificial Sequence: Synthetic oligonucleotide
  Sense strand starting at position 2705 of SEQ ID NO: 159
ugcagcauuuauccugcua

SEQ ID NO: 15729 - RNA, 19 nt, Artificial Sequence
  Description of Artificial Sequence: Synthetic oligonucleotide
  Antisense strand to SEQ ID NO: 15728
uagcaggauaaaugcugca

SEQ ID NO: 15730 - RNA, 19 nt, Artificial Sequence
  Description of Artificial Sequence: Synthetic oligonucleotide
  Sense strand starting at position 2794 of SEQ ID NO: 159
gagaguggaucugugagau

SEQ ID NO: 15731 - RNA, 19 nt, Artificial Sequence
  Description of Artificial Sequence: Synthetic oligonucleotide
  Antisense strand to SEQ ID NO: 15730
aucucacagauccacucuc

SEQ ID NO: 15732 - RNA, 19 nt, Artificial Sequence
  Description of Artificial Sequence: Synthetic oligonucleotide
  Sense strand starting at position 2870 of SEQ ID NO: 159
acuggucauuuguccagua

SEQ ID NO: 15733 - RNA, 19 nt, Artificial Sequence
  Description of Artificial Sequence: Synthetic oligonucleotide
  Antisense strand to SEQ ID NO: 15732
uacuggacaaaugaccagu

SEQ ID NO: 15734 - RNA, 19 nt, Artificial Sequence
  Description of Artificial Sequence: Synthetic oligonucleotide
  Sense strand starting at position 2871 of SEQ ID NO: 159
cuggucauuuguccaguau

SEQ ID NO: 15735 - RNA, 19 nt, Artificial Sequence
  Description of Artificial Sequence: Synthetic oligonucleotide
  Antisense strand to SEQ ID NO: 15734
auacuggacaaaugaccag

SEQ ID NO: 15736 - RNA, 19 nt, Artificial Sequence
  Description of Artificial Sequence: Synthetic oligonucleotide
  Sense strand starting at position 2973 of SEQ ID NO: 159
ugcugucuacugggaagua

SEQ ID NO: 15737 - RNA, 19 nt, Artificial Sequence
  Description of Artificial Sequence: Synthetic oligonucleotide
  Antisense strand to SEQ ID NO: 15736
uacuucccaguagacagca

SEQ ID NO: 15738 - RNA, 19 nt, Artificial Sequence
  Description of Artificial Sequence: Synthetic oligonucleotide
  Sense strand starting at position 3120 of SEQ ID NO: 159
auagcaagaucccagugaa

SEQ ID NO: 15739 - RNA, 19 nt, Artificial Sequence
  Description of Artificial Sequence: Synthetic oligonucleotide
  Antisense strand to SEQ ID NO: 15738
uucacugggaucuugcuau

SEQ ID NO: 15740 - RNA, 19 nt, Artificial Sequence
  Description of Artificial Sequence: Synthetic oligonucleotide
  Sense strand starting at position 3123 of SEQ ID NO: 159
gcaagaucccagugaacau

SEQ ID NO: 15741 - RNA, 19 nt, Artificial Sequence
  Description of Artificial Sequence: Synthetic oligonucleotide
  Antisense strand to SEQ ID NO: 15740
auguucacugggaucuugc

SEQ ID NO: 15742 - RNA, 19 nt, Artificial Sequence
  Description of Artificial Sequence: Synthetic oligonucleotide
  Sense strand starting at position 3134 of SEQ ID NO: 159
gugaacauuugguacagga

SEQ ID NO: 15743 - RNA, 19 nt, Artificial Sequence
  Description of Artificial Sequence: Synthetic oligonucleotide
  Antisense strand to SEQ ID NO: 15742
uccuguaccaaauguucac

SEQ ID NO: 15744 - RNA, 19 nt, Artificial Sequence
  Description of Artificial Sequence: Synthetic oligonucleotide
  Sense strand starting at position 3293 of SEQ ID NO: 159
caaccaguugcgggucauu

SEQ ID NO: 15745 - RNA, 19 nt, Artificial Sequence
  Description of Artificial Sequence: Synthetic oligonucleotide
  Antisense strand to SEQ ID NO: 15744
aaugacccgcaacugguug

SEQ ID NO: 15746 - RNA, 19 nt, Artificial Sequence
  Description of Artificial Sequence: Synthetic oligonucleotide
  Sense strand starting at position 3445 of SEQ ID NO: 159
agcucaauuucuggcagga

SEQ ID NO: 15747 - RNA, 19 nt, Artificial Sequence
  Description of Artificial Sequence: Synthetic oligonucleotide
  Antisense strand to SEQ ID NO: 15746
uccugccagaaauugagcu

SEQ ID NO: 15748 - RNA, 19 nt, Artificial Sequence
  Description of Artificial Sequence: Synthetic oligonucleotide
  Sense strand starting at position 3557 of SEQ ID NO: 159
ggguucuggcaucagaaag

SEQ ID NO: 15749 - RNA, 19 nt, Artificial Sequence
  Description of Artificial Sequence: Synthetic oligonucleotide
  Antisense strand to SEQ ID NO: 15748
cuuucugaugccagaaccc

SEQ ID NO: 15750 - RNA, 19 nt, Artificial Sequence
  Description of Artificial Sequence: Synthetic oligonucleotide
  Sense strand starting at position 3582 of SEQ ID NO: 159
augcaugaguugcuuucua

SEQ ID NO: 15751 - RNA, 19 nt, Artificial Sequence
  Description of Artificial Sequence: Synthetic oligonucleotide
  Antisense strand to SEQ ID NO: 15750
uagaaagcaacucaugcau

SEQ ID NO: 15752 - RNA, 19 nt, Artificial Sequence
  Description of Artificial Sequence: Synthetic oligonucleotide
  Sense strand starting at position 3598 of SEQ ID NO: 159
cuagcugugugagcuuuaa

SEQ ID NO: 15753 - RNA, 19 nt, Artificial Sequence
  Description of Artificial Sequence: Synthetic oligonucleotide
  Antisense strand to SEQ ID NO: 15752
uuaaagcucacacagcuag

SEQ ID NO: 15754 - RNA, 19 nt, Artificial Sequence
  Description of Artificial Sequence: Synthetic oligonucleotide
  Sense strand starting at position 3711 of SEQ ID NO: 159
gccagcugcuugcuuuaga

SEQ ID NO: 15755 - RNA, 19 nt, Artificial Sequence
  Description of Artificial Sequence: Synthetic oligonucleotide
  Antisense strand to SEQ ID NO: 15754
ucuaaagcaagcagcuggc

SEQ ID NO: 15756 - RNA, 19 nt, Artificial Sequence
  Description of Artificial Sequence: Synthetic oligonucleotide
  Sense strand starting at position 3935 of SEQ ID NO: 159
ggcucuauucccugagcca

SEQ ID NO: 15757 - RNA, 19 nt, Artificial Sequence
  Description of Artificial Sequence: Synthetic oligonucleotide
  Antisense strand to SEQ ID NO: 15756
uggcucagggaauagagcc

SEQ ID NO: 15758 - RNA, 19 nt, Artificial Sequence
  Description of Artificial Sequence: Synthetic oligonucleotide
  Sense strand starting at position 3936 of SEQ ID NO: 159
gcucuauucccugagccag

SEQ ID NO: 15759 - RNA, 19 nt, Artificial Sequence
  Description of Artificial Sequence: Synthetic oligonucleotide
  Antisense strand to SEQ ID NO: 15758
cuggcucagggaauagagc

SEQ ID NO: 15760 - RNA, 19 nt, Artificial Sequence
  Description of Artificial Sequence: Synthetic oligonucleotide
  Sense strand starting at position 3980 of SEQ ID NO: 159
cgucccuucuccuuaauga

SEQ ID NO: 15761 - RNA, 19 nt, Artificial Sequence
  Description of Artificial Sequence: Synthetic oligonucleotide
  Antisense strand to SEQ ID NO: 15760
ucauuaaggagaagggacg

SEQ ID NO: 15762 - RNA, 19 nt, Artificial Sequence
  Description of Artificial Sequence: Synthetic oligonucleotide
  Sense strand starting at position 3770 of SEQ ID NO: 160
gggagauucgcuugaacca

SEQ ID NO: 15763 - RNA, 19 nt, Artificial Sequence
  Description of Artificial Sequence: Synthetic oligonucleotide
  Antisense strand to SEQ ID NO: 15762
ugguucaagcgaaucuccc

SEQ ID NO: 15764 - RNA, 19 nt, Artificial Sequence
  Description of Artificial Sequence: Synthetic oligonucleotide
  Sense strand starting at position 3549 of SEQ ID NO: 160
aagauagcuuguuuaagau

SEQ ID NO: 15765 - RNA, 19 nt, Artificial Sequence
  Description of Artificial Sequence: Synthetic oligonucleotide
  Antisense strand to SEQ ID NO: 15764
aucuuaaacaagcuaucuu

SEQ ID NO: 15766 - RNA, 19 nt, Artificial Sequence
  Description of Artificial Sequence: Synthetic oligonucleotide
  Sense strand starting at position 3548 of SEQ ID NO: 160
aaagauagcuuguuuaaga

SEQ ID NO: 15767 - RNA, 19 nt, Artificial Sequence
  Description of Artificial Sequence: Synthetic oligonucleotide
  Antisense strand to SEQ ID NO: 15766
ucuuaaacaagcuaucuuu

SEQ ID NO: 15768 - RNA, 19 nt, Artificial Sequence
  Description of Artificial Sequence: Synthetic oligonucleotide
  Sense strand starting at position 3515 of SEQ ID NO: 160
guuacuguacuuuguaaga

SEQ ID NO: 15769 - RNA, 19 nt, Artificial Sequence
  Description of Artificial Sequence: Synthetic oligonucleotide
  Antisense strand to SEQ ID NO: 15768
ucuuacaaaguacaguaac

SEQ ID NO: 15770 - RNA, 19 nt, Artificial Sequence
  Description of Artificial Sequence: Synthetic oligonucleotide
  Sense strand starting at position 3501 of SEQ ID NO: 160
gcuugauagccucaguuac

SEQ ID NO: 15771 - RNA, 19 nt, Artificial Sequence
  Description of Artificial Sequence: Synthetic oligonucleotide
  Antisense strand to SEQ ID NO: 15770
guaacugaggcuaucaagc

SEQ ID NO: 15772 - RNA, 19 nt, Artificial Sequence
  Description of Artificial Sequence: Synthetic oligonucleotide
  Sense strand starting at position 3460 of SEQ ID NO: 160
gggauccaucucuaagcuu

SEQ ID NO: 15773 - RNA, 19 nt, Artificial Sequence
  Description of Artificial Sequence: Synthetic oligonucleotide
  Antisense strand to SEQ ID NO: 15772
aagcuuagagauggauccc

SEQ ID NO: 15774 - RNA, 19 nt, Artificial Sequence
  Description of Artificial Sequence: Synthetic oligonucleotide
  Sense strand starting at position 3432 of SEQ ID NO: 160
cuguuaacagaggguuaca

SEQ ID NO: 15775 - RNA, 19 nt, Artificial Sequence
  Description of Artificial Sequence: Synthetic oligonucleotide
  Antisense strand to SEQ ID NO: 15774
uguaacccucuguuaacag

SEQ ID NO: 15776 - RNA, 19 nt, Artificial Sequence
  Description of Artificial Sequence: Synthetic oligonucleotide
  Sense strand starting at position 3302 of SEQ ID NO: 160
ugucuccuacagugaucua

SEQ ID NO: 15777 - RNA, 19 nt, Artificial Sequence
  Description of Artificial Sequence: Synthetic oligonucleotide
  Antisense strand to SEQ ID NO: 15776
uagaucacuguaggagaca

SEQ ID NO: 15778 - RNA, 19 nt, Artificial Sequence
  Description of Artificial Sequence: Synthetic oligonucleotide
  Sense strand starting at position 3299 of SEQ ID NO: 160
ugaugucuccuacagugau

SEQ ID NO: 15779 - RNA, 19 nt, Artificial Sequence
  Description of Artificial Sequence: Synthetic oligonucleotide
  Antisense strand to SEQ ID NO: 15778
aucacuguaggagacauca

SEQ ID NO: 15780 - RNA, 19 nt, Artificial Sequence
  Description of Artificial Sequence: Synthetic oligonucleotide
  Sense strand starting at position 3284 of SEQ ID NO: 160
uguauuguuaaagguugau

SEQ ID NO: 15781 - RNA, 19 nt, Artificial Sequence
  Description of Artificial Sequence: Synthetic oligonucleotide
  Antisense strand to SEQ ID NO: 15780
aucaaccuuuaacaauaca

SEQ ID NO: 15782 - RNA, 19 nt, Artificial Sequence
  Description of Artificial Sequence: Synthetic oligonucleotide
  Sense strand starting at position 3262 of SEQ ID NO: 160
acgagucucuucuccucaa

SEQ ID NO: 15783 - RNA, 19 nt, Artificial Sequence
  Description of Artificial Sequence: Synthetic oligonucleotide
  Antisense strand to SEQ ID NO: 15782
uugaggagaagagacucgu

SEQ ID NO: 15784 - RNA, 19 nt, Artificial Sequence
  Description of Artificial Sequence: Synthetic oligonucleotide
  Sense strand starting at position 3224 of SEQ ID NO: 160
ggguaauucucaucccuuc

SEQ ID NO: 15785 - RNA, 19 nt, Artificial Sequence
  Description of Artificial Sequence: Synthetic oligonucleotide
  Antisense strand to SEQ ID NO: 15784
gaagggaugagaauuaccc

SEQ ID NO: 15786 - RNA, 19 nt, Artificial Sequence
  Description of Artificial Sequence: Synthetic oligonucleotide
  Sense strand starting at position 3218 of SEQ ID NO: 160
ucauuaggguaauucucau

SEQ ID NO: 15787 - RNA, 19 nt, Artificial Sequence
  Description of Artificial Sequence: Synthetic oligonucleotide
  Antisense strand to SEQ ID NO: 15786
augagaauuacccuaauga

SEQ ID NO: 15788 - RNA, 19 nt, Artificial Sequence
  Description of Artificial Sequence: Synthetic oligonucleotide
  Sense strand starting at position 3210 of SEQ ID NO: 160
caguuacaucauuagggua

SEQ ID NO: 15789 - RNA, 19 nt, Artificial Sequence
  Description of Artificial Sequence: Synthetic oligonucleotide
  Antisense strand to SEQ ID NO: 15788
uacccuaaugauguaacug

SEQ ID NO: 15790 - RNA, 19 nt, Artificial Sequence
  Description of Artificial Sequence: Synthetic oligonucleotide
  Sense strand starting at position 3209 of SEQ ID NO: 160
ucaguuacaucauuagggu

SEQ ID NO: 15791 - RNA, 19 nt, Artificial Sequence
  Description of Artificial Sequence: Synthetic oligonucleotide
  Antisense strand to SEQ ID NO: 15790
acccuaaugauguaacuga

SEQ ID NO: 15792 - RNA, 19 nt, Artificial Sequence
  Description of Artificial Sequence: Synthetic oligonucleotide
  Sense strand starting at position 3197 of SEQ ID NO: 160
gaaacuguguugucaguua

SEQ ID NO: 15793 - RNA, 19 nt, Artificial Sequence
  Description of Artificial Sequence: Synthetic oligonucleotide
  Antisense strand to SEQ ID NO: 15792
uaacugacaacacaguuuc

SEQ ID NO: 15794 - RNA, 19 nt, Artificial Sequence
  Description of Artificial Sequence: Synthetic oligonucleotide
  Sense strand starting at position 3193 of SEQ ID NO: 160
acuagaaacuguguuguca

SEQ ID NO: 15795 - RNA, 19 nt, Artificial Sequence
  Description of Artificial Sequence: Synthetic oligonucleotide
  Antisense strand to SEQ ID NO: 15794
ugacaacacaguuucuagu

SEQ ID NO: 15796 - RNA, 19 nt, Artificial Sequence
  Description of Artificial Sequence: Synthetic oligonucleotide
  Sense strand starting at position 3084 of SEQ ID NO: 160
aaagguuccuaaguuaaag

SEQ ID NO: 15797 - RNA, 19 nt, Artificial Sequence
  Description of Artificial Sequence: Synthetic oligonucleotide
  Antisense strand to SEQ ID NO: 15796
cuuuaacuuaggaaccuuu

SEQ ID NO: 15798 - RNA, 19 nt, Artificial Sequence
  Description of Artificial Sequence: Synthetic oligonucleotide
  Sense strand starting at position 3080 of SEQ ID NO: 160
aagcaaagguuccuaaguu

SEQ ID NO: 15799 - RNA, 19 nt, Artificial Sequence
  Description of Artificial Sequence: Synthetic oligonucleotide
  Antisense strand to SEQ ID NO: 15798
aacuuaggaaccuuugcuu

SEQ ID NO: 15800 - RNA, 19 nt, Artificial Sequence
  Description of Artificial Sequence: Synthetic oligonucleotide
  Sense strand starting at position 3062 of SEQ ID NO: 160
ccaggauauugacuuucua

SEQ ID NO: 15801 - RNA, 19 nt, Artificial Sequence
  Description of Artificial Sequence: Synthetic oligonucleotide
  Antisense strand to SEQ ID NO: 15800
uagaaagucaauauccugg

SEQ ID NO: 15802 - RNA, 19 nt, Artificial Sequence
  Description of Artificial Sequence: Synthetic oligonucleotide
  Sense strand starting at position 3053 of SEQ ID NO: 160
ugggaaaggccaggauauu

SEQ ID NO: 15803 - RNA, 19 nt, Artificial Sequence
  Description of Artificial Sequence: Synthetic oligonucleotide
  Antisense strand to SEQ ID NO: 15802
aauauccuggccuuuccca

SEQ ID NO: 15804 - RNA, 19 nt, Artificial Sequence
  Description of Artificial Sequence: Synthetic oligonucleotide
  Sense strand starting at position 3041 of SEQ ID NO: 160
agucaaguacucugggaaa

SEQ ID NO: 15805 - RNA, 19 nt, Artificial Sequence
  Description of Artificial Sequence: Synthetic oligonucleotide
  Antisense strand to SEQ ID NO: 15804
uuucccagaguacuugacu

SEQ ID NO: 15806 - RNA, 19 nt, Artificial Sequence
  Description of Artificial Sequence: Synthetic oligonucleotide
  Sense strand starting at position 3027 of SEQ ID NO: 160
caagguuugcaggaaguca

SEQ ID NO: 15807 - RNA, 19 nt, Artificial Sequence
  Description of Artificial Sequence: Synthetic oligonucleotide
  Antisense strand to SEQ ID NO: 15806
ugacuuccugcaaaccuug

SEQ ID NO: 15808 - RNA, 19 nt, Artificial Sequence
  Description of Artificial Sequence: Synthetic oligonucleotide
  Sense strand starting at position 2910 of SEQ ID NO: 160
ggagaucccugguuccacu

SEQ ID NO: 15809 - RNA, 19 nt, Artificial Sequence
  Description of Artificial Sequence: Synthetic oligonucleotide
  Antisense strand to SEQ ID NO: 15808
aguggaaccagggaucucc

SEQ ID NO: 15810 - RNA, 19 nt, Artificial Sequence
  Description of Artificial Sequence: Synthetic oligonucleotide
  Sense strand starting at position 2629 of SEQ ID NO: 160
cucuuucuucgagauucca

SEQ ID NO: 15811 - RNA, 19 nt, Artificial Sequence
  Description of Artificial Sequence: Synthetic oligonucleotide
  Antisense strand to SEQ ID NO: 15810
uggaaucucgaagaaagag

SEQ ID NO: 15812 - RNA, 19 nt, Artificial Sequence
  Description of Artificial Sequence: Synthetic oligonucleotide
  Sense strand starting at position 2626 of SEQ ID NO: 160
ccucucuuucuucgagauu

SEQ ID NO: 15813 - RNA, 19 nt, Artificial Sequence
  Description of Artificial Sequence: Synthetic oligonucleotide
  Antisense strand to SEQ ID NO: 15812
aaucucgaagaaagagagg

SEQ ID NO: 15814 - RNA, 19 nt, Artificial Sequence
  Description of Artificial Sequence: Synthetic oligonucleotide
  Sense strand starting at position 2625 of SEQ ID NO: 160
accucucuuucuucgagau

SEQ ID NO: 15815 - RNA, 19 nt, Artificial Sequence
  Description of Artificial Sequence: Synthetic oligonucleotide
  Antisense strand to SEQ ID NO: 15814
aucucgaagaaagagaggu

SEQ ID NO: 15816 - RNA, 19 nt, Artificial Sequence
  Description of Artificial Sequence: Synthetic oligonucleotide
  Sense strand starting at position 2571 of SEQ ID NO: 160
cuggaaucgaucugaacug

SEQ ID NO: 15817 - RNA, 19 nt, Artificial Sequence
  Description of Artificial Sequence: Synthetic oligonucleotide
  Antisense strand to SEQ ID NO: 15816
caguucagaucgauuccag

SEQ ID NO: 15818 - RNA, 19 nt, Artificial Sequence
  Description of Artificial Sequence: Synthetic oligonucleotide
  Sense strand starting at position 2562 of SEQ ID NO: 160
ccgucauagcuggaaucga

SEQ ID NO: 15819 - RNA, 19 nt, Artificial Sequence
  Description of Artificial Sequence: Synthetic oligonucleotide
  Antisense strand to SEQ ID NO: 15818
ucgauuccagcuaugacgg

SEQ ID NO: 15820 - RNA, 19 nt, Artificial Sequence
  Description of Artificial Sequence: Synthetic oligonucleotide
  Sense strand starting at position 2368 of SEQ ID NO: 160
ggcgaucuccucugggacu

SEQ ID NO: 15821 - RNA, 19 nt, Artificial Sequence
  Description of Artificial Sequence: Synthetic oligonucleotide
  Antisense strand to SEQ ID NO: 15820
agucccagaggagaucgcc

SEQ ID NO: 15822 - RNA, 19 nt, Artificial Sequence
  Description of Artificial Sequence: Synthetic oligonucleotide
  Sense strand starting at position 884 of SEQ ID NO: 160
gcauccuguguuuacggaa

SEQ ID NO: 15823 - RNA, 19 nt, Artificial Sequence
  Description of Artificial Sequence: Synthetic oligonucleotide
  Antisense strand to SEQ ID NO: 15822
uuccguaaacacaggaugc

SEQ ID NO: 15824 - RNA, 19 nt, Artificial Sequence
  Description of Artificial Sequence: Synthetic oligonucleotide
  Sense strand starting at position 707 of SEQ ID NO: 160
gcuggaaaccggcagagau

SEQ ID NO: 15825 - RNA, 19 nt, Artificial Sequence
  Description of Artificial Sequence: Synthetic oligonucleotide
  Antisense strand to SEQ ID NO: 15824
aucucugccgguuuccagc

SEQ ID NO: 15826 - RNA, 19 nt, Artificial Sequence
  Description of Artificial Sequence: Synthetic oligonucleotide
  Sense strand starting at position 585 of SEQ ID NO: 160
gucuucgcuacagaaaugu

SEQ ID NO: 15827 - RNA, 19 nt, Artificial Sequence
  Description of Artificial Sequence: Synthetic oligonucleotide
  Antisense strand to SEQ ID NO: 15826
acauuucuguagcgaagac

SEQ ID NO: 15828 - RNA, 19 nt, Artificial Sequence
  Description of Artificial Sequence: Synthetic oligonucleotide
  Sense strand starting at position 583 of SEQ ID NO: 160
aagucuucgcuacagaaau

SEQ ID NO: 15829 - RNA, 19 nt, Artificial Sequence
  Description of Artificial Sequence: Synthetic oligonucleotide
  Antisense strand to SEQ ID NO: 15828
auuucuguagcgaagacuu

SEQ ID NO: 15830 - RNA, 19 nt, Artificial Sequence
  Description of Artificial Sequence: Synthetic oligonucleotide
  Sense strand starting at position 581 of SEQ ID NO: 160
ucaagucuucgcuacagaa

SEQ ID NO: 15831 - RNA, 19 nt, Artificial Sequence
  Description of Artificial Sequence: Synthetic oligonucleotide
  Antisense strand to SEQ ID NO: 15830
uucuguagcgaagacuuga

SEQ ID NO: 15832 - RNA, 19 nt, Artificial Sequence
  Description of Artificial Sequence: Synthetic oligonucleotide
  Sense strand starting at position 491 of SEQ ID NO: 160
agguuauucuguguaaauu

SEQ ID NO: 15833 - RNA, 19 nt, Artificial Sequence
  Description of Artificial Sequence: Synthetic oligonucleotide
  Antisense strand to SEQ ID NO: 15832
aauuuacacagaauaaccu

SEQ ID NO: 15834 - RNA, 19 nt, Artificial Sequence
  Description of Artificial Sequence: Synthetic oligonucleotide
  Sense strand starting at position 490 of SEQ ID NO: 160
gagguuauucuguguaaau

SEQ ID NO: 15835 - RNA, 19 nt, Artificial Sequence
  Description of Artificial Sequence: Synthetic oligonucleotide
  Antisense strand to SEQ ID NO: 15834
auuuacacagaauaaccuc

SEQ ID NO: 15836 - RNA, 19 nt, Artificial Sequence
  Description of Artificial Sequence: Synthetic oligonucleotide
  Sense strand starting at position 480 of SEQ ID NO: 160
caugaacuccgagguuauu

SEQ ID NO: 15837 - RNA, 19 nt, Artificial Sequence
  Description of Artificial Sequence: Synthetic oligonucleotide
  Antisense strand to SEQ ID NO: 15836
aauaaccucggaguucaug

SEQ ID NO: 15838 - RNA, 19 nt, Artificial Sequence
  Description of Artificial Sequence: Synthetic oligonucleotide
  Sense strand starting at position 409 of SEQ ID NO: 160
gugcuaaacccuggagaca

SEQ ID NO: 15839 - RNA, 19 nt, Artificial Sequence
  Description of Artificial Sequence: Synthetic oligonucleotide
  Antisense strand to SEQ ID NO: 15838
ugucuccaggguuuagcac

SEQ ID NO: 15840 - RNA, 19 nt, Artificial Sequence
  Description of Artificial Sequence: Synthetic oligonucleotide
  Sense strand starting at position 75 of SEQ ID NO: 160
uaaagugcauguuuacaga

SEQ ID NO: 15841 - RNA, 19 nt, Artificial Sequence
  Description of Artificial Sequence: Synthetic oligonucleotide
  Antisense strand to SEQ ID NO: 15840
ucuguaaacaugcacuuua

SEQ ID NO: 15842 - RNA, 19 nt, Artificial Sequence
  Description of Artificial Sequence: Synthetic oligonucleotide
  Sense strand starting at position 3978 of SEQ ID NO: 162
uguauuguuaaagguugau

SEQ ID NO: 15843 - RNA, 19 nt, Artificial Sequence
  Description of Artificial Sequence: Synthetic oligonucleotide
  Antisense strand to SEQ ID NO: 15842
aucaaccuuuaacaauaca

SEQ ID NO: 15844 - RNA, 19 nt, Artificial Sequence
  Description of Artificial Sequence: Synthetic oligonucleotide
  Sense strand starting at position 3956 of SEQ ID NO: 162
acgagucucuucuccucaa

SEQ ID NO: 15845 - RNA, 19 nt, Artificial Sequence
  Description of Artificial Sequence: Synthetic oligonucleotide
  Antisense strand to SEQ ID NO: 15844
uugaggagaagagacucgu

SEQ ID NO: 15846 - RNA, 19 nt, Artificial Sequence
  Description of Artificial Sequence: Synthetic oligonucleotide
  Sense strand starting at position 3918 of SEQ ID NO: 162
ggguaauucucaucccuuc

SEQ ID NO: 15847 - RNA, 19 nt, Artificial Sequence
  Description of Artificial Sequence: Synthetic oligonucleotide
  Antisense strand to SEQ ID NO: 15846
gaagggaugagaauuaccc

SEQ ID NO: 15848 - RNA, 19 nt, Artificial Sequence
  Description of Artificial Sequence: Synthetic oligonucleotide
  Sense strand starting at position 3912 of SEQ ID NO: 162
ucauuaggguaauucucau

SEQ ID NO: 15849 - RNA, 19 nt, Artificial Sequence
  Description of Artificial Sequence: Synthetic oligonucleotide
  Antisense strand to SEQ ID NO: 15848
augagaauuacccuaauga

SEQ ID NO: 15850 - RNA, 19 nt, Artificial Sequence
  Description of Artificial Sequence: Synthetic oligonucleotide
  Sense strand starting at position 3904 of SEQ ID NO: 162
caguuacaucauuagggua

SEQ ID NO: 15851 - RNA, 19 nt, Artificial Sequence
  Description of Artificial Sequence: Synthetic oligonucleotide
  Antisense strand to SEQ ID NO: 15850
uacccuaaugauguaacug

SEQ ID NO: 15852 - RNA, 19 nt, Artificial Sequence
  Description of Artificial Sequence: Synthetic oligonucleotide
  Sense strand starting at position 3903 of SEQ ID NO: 162
ucaguuacaucauuagggu

SEQ ID NO: 15853 - RNA, 19 nt, Artificial Sequence
  Description of Artificial Sequence: Synthetic oligonucleotide
  Antisense strand to SEQ ID NO: 15852
acccuaaugauguaacuga

SEQ ID NO: 15854 - RNA, 19 nt, Artificial Sequence
  Description of Artificial Sequence: Synthetic oligonucleotide
  Sense strand starting at position 3887 of SEQ ID NO: 162
acuagaaacuguguuguca

SEQ ID NO: 15855 - RNA, 19 nt, Artificial Sequence
  Description of Artificial Sequence: Synthetic oligonucleotide
  Antisense strand to SEQ ID NO: 15854
ugacaacacaguuucuagu

SEQ ID NO: 15856 - RNA, 19 nt, Artificial Sequence
  Description of Artificial Sequence: Synthetic oligonucleotide
  Sense strand starting at position 3778 of SEQ ID NO: 162
aaagguuccuaaguuaaag

SEQ ID NO: 15857 - RNA, 19 nt, Artificial Sequence
  Description of Artificial Sequence: Synthetic oligonucleotide
  Antisense strand to SEQ ID NO: 15856
cuuuaacuuaggaaccuuu

SEQ ID NO: 15858 - RNA, 19 nt, Artificial Sequence
  Description of Artificial Sequence: Synthetic oligonucleotide
  Sense strand starting at position 3774 of SEQ ID NO: 162
aagcaaagguuccuaaguu

SEQ ID NO: 15859 - RNA, 19 nt, Artificial Sequence
  Description of Artificial Sequence: Synthetic oligonucleotide
  Antisense strand to SEQ ID NO: 15858
aacuuaggaaccuuugcuu

SEQ ID NO: 15860 - RNA, 19 nt, Artificial Sequence
  Description of Artificial Sequence: Synthetic oligonucleotide
  Sense strand starting at position 3756 of SEQ ID NO: 162
ccaggauauugacuuucua

SEQ ID NO: 15861 - RNA, 19 nt, Artificial Sequence
  Description of Artificial Sequence: Synthetic oligonucleotide
  Antisense strand to SEQ ID NO: 15860
uagaaagucaauauccugg

SEQ ID NO: 15862 - RNA, 19 nt, Artificial Sequence
  Description of Artificial Sequence: Synthetic oligonucleotide
  Sense strand starting at position 3747 of SEQ ID NO: 162
ugggaaaggccaggauauu

SEQ ID NO: 15863 - RNA, 19 nt, Artificial Sequence
  Description of Artificial Sequence: Synthetic oligonucleotide
  Antisense strand to SEQ ID NO: 15862
aauauccuggccuuuccca

SEQ ID NO: 15864 - RNA, 19 nt, Artificial Sequence
  Description of Artificial Sequence: Synthetic oligonucleotide
  Sense strand starting at position 3735 of SEQ ID NO: 162
agucaaguacucugggaaa

SEQ ID NO: 15865 - RNA, 19 nt, Artificial Sequence
  Description of Artificial Sequence: Synthetic oligonucleotide
  Antisense strand to SEQ ID NO: 15864
uuucccagaguacuugacu

SEQ ID NO: 15866 - RNA, 19 nt, Artificial Sequence
  Description of Artificial Sequence: Synthetic oligonucleotide
  Sense strand starting at position 3721 of SEQ ID NO: 162
caagguuugcaggaaguca

SEQ ID NO: 15867 - RNA, 19 nt, Artificial Sequence
  Description of Artificial Sequence: Synthetic oligonucleotide
  Antisense strand to SEQ ID NO: 15866
ugacuuccugcaaaccuug

SEQ ID NO: 15868 - RNA, 19 nt, Artificial Sequence
  Description of Artificial Sequence: Synthetic oligonucleotide
  Sense strand starting at position 3604 of SEQ ID NO: 162
ggagaucccugguuccacu

SEQ ID NO: 15869 - RNA, 19 nt, Artificial Sequence
  Description of Artificial Sequence: Synthetic oligonucleotide
  Antisense strand to SEQ ID NO: 15868
aguggaaccagggaucucc

SEQ ID NO: 15870 - RNA, 19 nt, Artificial Sequence
  Description of Artificial Sequence: Synthetic oligonucleotide
  Sense strand starting at position 3323 of SEQ ID NO: 162
cucuuucuucgagauucca

SEQ ID NO: 15871 - RNA, 19 nt, Artificial Sequence
  Description of Artificial Sequence: Synthetic oligonucleotide
  Antisense strand to SEQ ID NO: 15870
uggaaucucgaagaaagag

SEQ ID NO: 15872 - RNA, 19 nt, Artificial Sequence
  Description of Artificial Sequence: Synthetic oligonucleotide
  Sense strand starting at position 3320 of SEQ ID NO: 162
ccucucuuucuucgagauu

SEQ ID NO: 15873 - RNA, 19 nt, Artificial Sequence
  Description of Artificial Sequence: Synthetic oligonucleotide
  Antisense strand to SEQ ID NO: 15872
aaucucgaagaaagagagg

SEQ ID NO: 15874 - RNA, 19 nt, Artificial Sequence
  Description of Artificial Sequence: Synthetic oligonucleotide
  Sense strand starting at position 3319 of SEQ ID NO: 162
accucucuuucuucgagau

SEQ ID NO: 15875 - RNA, 19 nt, Artificial Sequence
  Description of Artificial Sequence: Synthetic oligonucleotide
  Antisense strand to SEQ ID NO: 15874
aucucgaagaaagagaggu

SEQ ID NO: 15876 - RNA, 19 nt, Artificial Sequence
  Description of Artificial Sequence: Synthetic oligonucleotide
  Sense strand starting at position 3265 of SEQ ID NO: 162
cuggaaucgaucugaacug

SEQ ID NO: 15877 - RNA, 19 nt, Artificial Sequence
  Description of Artificial Sequence: Synthetic oligonucleotide
  Antisense strand to SEQ ID NO: 15876
caguucagaucgauuccag

SEQ ID NO: 15878 - RNA, 19 nt, Artificial Sequence
  Description of Artificial Sequence: Synthetic oligonucleotide
  Sense strand starting at position 3256 of SEQ ID NO: 162
ccgucauagcuggaaucga

SEQ ID NO: 15879 - RNA, 19 nt, Artificial Sequence
  Description of Artificial Sequence: Synthetic oligonucleotide
  Antisense strand to SEQ ID NO: 15878
ucgauuccagcuaugacgg

SEQ ID NO: 15880 - RNA, 19 nt, Artificial Sequence
  Description of Artificial Sequence: Synthetic oligonucleotide
  Sense strand starting at position 3062 of SEQ ID NO: 162
ggcgaucuccucugggacu

SEQ ID NO: 15881 - RNA, 19 nt, Artificial Sequence
  Description of Artificial Sequence: Synthetic oligonucleotide
  Antisense strand to SEQ ID NO: 15880
agucccagaggagaucgcc

SEQ ID NO: 15882 - RNA, 19 nt, Artificial Sequence
  Description of Artificial Sequence: Synthetic oligonucleotide
  Sense strand starting at position 1578 of SEQ ID NO: 162
gcauccuguguuuacggaa

SEQ ID NO: 15883 - RNA, 19 nt, Artificial Sequence
  Description of Artificial Sequence: Synthetic oligonucleotide
  Antisense strand to SEQ ID NO: 15882
uuccguaaacacaggaugc

SEQ ID NO: 15884 - RNA, 19 nt, Artificial Sequence
  Description of Artificial Sequence: Synthetic oligonucleotide
  Sense strand starting at position 1401 of SEQ ID NO: 162
gcuggaaaccggcagagau

SEQ ID NO: 15885 - RNA, 19 nt, Artificial Sequence
  Description of Artificial Sequence: Synthetic oligonucleotide
  Antisense strand to SEQ ID NO: 15884
aucucugccgguuuccagc

SEQ ID NO: 15886 - RNA, 19 nt, Artificial Sequence
  Description of Artificial Sequence: Synthetic oligonucleotide
  Sense strand starting at position 1279 of SEQ ID NO: 162
gucuucgcuacagaaaugu

SEQ ID NO: 15887 - RNA, 19 nt, Artificial Sequence
  Description of Artificial Sequence: Synthetic oligonucleotide
  Antisense strand to SEQ ID NO: 15886
acauuucuguagcgaagac

SEQ ID NO: 15888 - RNA, 19 nt, Artificial Sequence
  Description of Artificial Sequence: Synthetic oligonucleotide
  Sense strand starting at position 1277 of SEQ ID NO: 162
aagucuucgcuacagaaau

SEQ ID NO: 15889 - RNA, 19 nt, Artificial Sequence
  Description of Artificial Sequence: Synthetic oligonucleotide
  Antisense strand to SEQ ID NO: 15888
auuucuguagcgaagacuu

SEQ ID NO: 15890 - RNA, 19 nt, Artificial Sequence
  Description of Artificial Sequence: Synthetic oligonucleotide
  Sense strand starting at position 1275 of SEQ ID NO: 162
ucaagucuucgcuacagaa

SEQ ID NO: 15891 - RNA, 19 nt, Artificial Sequence
  Description of Artificial Sequence: Synthetic oligonucleotide
  Antisense strand to SEQ ID NO: 15890
uucuguagcgaagacuuga

SEQ ID NO: 15892 - RNA, 19 nt, Artificial Sequence
  Description of Artificial Sequence: Synthetic oligonucleotide
  Sense strand starting at position 1185 of SEQ ID NO: 162
agguuauucuguguaaauu

SEQ ID NO: 15893 - RNA, 19 nt, Artificial Sequence
  Description of Artificial Sequence: Synthetic oligonucleotide
  Antisense strand to SEQ ID NO: 15892
aauuuacacagaauaaccu

SEQ ID NO: 15894 - RNA, 19 nt, Artificial Sequence
  Description of Artificial Sequence: Synthetic oligonucleotide
  Sense strand starting at position 1184 of SEQ ID NO: 162
gagguuauucuguguaaau

SEQ ID NO: 15895 - RNA, 19 nt, Artificial Sequence
  Description of Artificial Sequence: Synthetic oligonucleotide
  Antisense strand to SEQ ID NO: 15894
auuuacacagaauaaccuc

SEQ ID NO: 15896 - RNA, 19 nt, Artificial Sequence
  Description of Artificial Sequence: Synthetic oligonucleotide
  Sense strand starting at position 1174 of SEQ ID NO: 162
caugaacuccgagguuauu

SEQ ID NO: 15897 - RNA, 19 nt, Artificial Sequence
  Description of Artificial Sequence: Synthetic oligonucleotide
  Antisense strand to SEQ ID NO: 15896
aauaaccucggaguucaug

SEQ ID NO: 15898 - RNA, 19 nt, Artificial Sequence
  Description of Artificial Sequence: Synthetic oligonucleotide
  Sense strand starting at position 1103 of SEQ ID NO: 162
gugcuaaacccuggagaca

SEQ ID NO: 15899 - RNA, 19 nt, Artificial Sequence
  Description of Artificial Sequence: Synthetic oligonucleotide
  Antisense strand to SEQ ID NO: 15898
ugucuccaggguuuagcac

SEQ ID NO: 15900 - RNA, 19 nt, Artificial Sequence
  Description of Artificial Sequence: Synthetic oligonucleotide
  Sense strand starting at position 769 of SEQ ID NO: 162
uaaagugcauguuuacaga

SEQ ID NO: 15901 - RNA, 19 nt, Artificial Sequence
  Description of Artificial Sequence: Synthetic oligonucleotide
  Antisense strand to SEQ ID NO: 15900
ucuguaaacaugcacuuua

SEQ ID NO: 15902 - RNA, 19 nt, Artificial Sequence
  Description of Artificial Sequence: Synthetic oligonucleotide
  Sense strand starting at position 526 of SEQ ID NO: 162
uucugaguucuguauaaag

SEQ ID NO: 15903 - RNA, 19 nt, Artificial Sequence
  Description of Artificial Sequence: Synthetic oligonucleotide
  Antisense strand to SEQ ID NO: 15902
cuuuauacagaacucagaa

SEQ ID NO: 15904 - RNA, 19 nt, Artificial Sequence
  Description of Artificial Sequence: Synthetic oligonucleotide
  Sense strand starting at position 421 of SEQ ID NO: 162
ugugguuauaaaggagaca

SEQ ID NO: 15905 - RNA, 19 nt, Artificial Sequence
  Description of Artificial Sequence: Synthetic oligonucleotide
  Antisense strand to SEQ ID NO: 15904
ugucuccuuuauaaccaca

SEQ ID NO: 15906 - RNA, 19 nt, Artificial Sequence
  Description of Artificial Sequence: Synthetic oligonucleotide
  Sense strand starting at position 354 of SEQ ID NO: 162
ggguuuaagcucuacuaac

SEQ ID NO: 15907 - RNA, 19 nt, Artificial Sequence
  Description of Artificial Sequence: Synthetic oligonucleotide
  Antisense strand to SEQ ID NO: 15906
guuaguagagcuuaaaccc

SEQ ID NO: 15908 - RNA, 19 nt, Artificial Sequence
  Description of Artificial Sequence: Synthetic oligonucleotide
  Sense strand starting at position 344 of SEQ ID NO: 162
uaagacaucuggguuuaag

SEQ ID NO: 15909 - RNA, 19 nt, Artificial Sequence
  Description of Artificial Sequence: Synthetic oligonucleotide
  Antisense strand to SEQ ID NO: 15908
cuuaaacccagaugucuua

SEQ ID NO: 15910 - RNA, 19 nt, Artificial Sequence
  Description of Artificial Sequence: Synthetic oligonucleotide
  Sense strand starting at position 343 of SEQ ID NO: 162
guaagacaucuggguuuaa

SEQ ID NO: 15911 - RNA, 19 nt, Artificial Sequence
  Description of Artificial Sequence: Synthetic oligonucleotide
  Antisense strand to SEQ ID NO: 15910
uuaaacccagaugucuuac

SEQ ID NO: 15912 - RNA, 19 nt, Artificial Sequence
  Description of Artificial Sequence: Synthetic oligonucleotide
  Sense strand starting at position 341 of SEQ ID NO: 162
uuguaagacaucuggguuu

SEQ ID NO: 15913 - RNA, 19 nt, Artificial Sequence
  Description of Artificial Sequence: Synthetic oligonucleotide
  Antisense strand to SEQ ID NO: 15912
aaacccagaugucuuacaa

SEQ ID NO: 15914 - RNA, 19 nt, Artificial Sequence
  Description of Artificial Sequence: Synthetic oligonucleotide
  Sense strand starting at position 313 of SEQ ID NO: 162
uuguguuugcuagccacua

SEQ ID NO: 15915 - RNA, 19 nt, Artificial Sequence
  Description of Artificial Sequence: Synthetic oligonucleotide
  Antisense strand to SEQ ID NO: 15914
uaguggcuagcaaacacaa

SEQ ID NO: 15916 - RNA, 19 nt, Artificial Sequence
  Description of Artificial Sequence: Synthetic oligonucleotide
  Sense strand starting at position 288 of SEQ ID NO: 162
caguguucgcagcuguaau

SEQ ID NO: 15917 - RNA, 19 nt, Artificial Sequence
  Description of Artificial Sequence: Synthetic oligonucleotide
  Antisense strand to SEQ ID NO: 15916
auuacagcugcgaacacug

SEQ ID NO: 15918 - RNA, 19 nt, Artificial Sequence
  Description of Artificial Sequence: Synthetic oligonucleotide
  Sense strand starting at position 164 of SEQ ID NO: 162
ggacgcucacaauaaguca

SEQ ID NO: 15919 - RNA, 19 nt, Artificial Sequence
  Description of Artificial Sequence: Synthetic oligonucleotide
  Antisense strand to SEQ ID NO: 15918
ugacuuauugugagcgucc

SEQ ID NO: 15920 - RNA, 19 nt, Artificial Sequence
  Description of Artificial Sequence: Synthetic oligonucleotide
  Sense strand starting at position 87 of SEQ ID NO: 162
gggcuuuagucacucucca

SEQ ID NO: 15921 - RNA, 19 nt, Artificial Sequence
  Description of Artificial Sequence: Synthetic oligonucleotide
  Antisense strand to SEQ ID NO: 15920
uggagagugacuaaagccc

SEQ ID NO: 15922 - RNA, 19 nt, Artificial Sequence
  Description of Artificial Sequence: Synthetic oligonucleotide
  Sense strand starting at position 3976 of SEQ ID NO: 161
cuuauucuugugggaacca

SEQ ID NO: 15923 - RNA, 19 nt, Artificial Sequence
  Description of Artificial Sequence: Synthetic oligonucleotide
  Antisense strand to SEQ ID NO: 15922
ugguucccacaagaauaag

SEQ ID NO: 15924 - RNA, 19 nt, Artificial Sequence
  Description of Artificial Sequence: Synthetic oligonucleotide
  Sense strand starting at position 3938 of SEQ ID NO: 161
aguucuucuccacaaguaa

SEQ ID NO: 15925 - RNA, 19 nt, Artificial Sequence
  Description of Artificial Sequence: Synthetic oligonucleotide
  Antisense strand to SEQ ID NO: 15924
uuacuuguggagaagaacu

SEQ ID NO: 15926 - RNA, 19 nt, Artificial Sequence
  Description of Artificial Sequence: Synthetic oligonucleotide
  Sense strand starting at position 3936 of SEQ ID NO: 161
uuaguucuucuccacaagu

SEQ ID NO: 15927 - RNA, 19 nt, Artificial Sequence
  Description of Artificial Sequence: Synthetic oligonucleotide
  Antisense strand to SEQ ID NO: 15926
acuuguggagaagaacuaa

SEQ ID NO: 15928 - RNA, 19 nt, Artificial Sequence
  Description of Artificial Sequence: Synthetic oligonucleotide
  Sense strand starting at position 3736 of SEQ ID NO: 161
aaaguuaguugggaauuua

SEQ ID NO: 15929 - RNA, 19 nt, Artificial Sequence
  Description of Artificial Sequence: Synthetic oligonucleotide
  Antisense strand to SEQ ID NO: 15928
uaaauucccaacuaacuuu

SEQ ID NO: 15930 - RNA, 19 nt, Artificial Sequence
  Description of Artificial Sequence: Synthetic oligonucleotide
  Sense strand starting at position 3733 of SEQ ID NO: 161
gcuaaaguuaguugggaau

SEQ ID NO: 15931 - RNA, 19 nt, Artificial Sequence
  Description of Artificial Sequence: Synthetic oligonucleotide
  Antisense strand to SEQ ID NO: 15930
auucccaacuaacuuuagc

SEQ ID NO: 15932 - RNA, 19 nt, Artificial Sequence
  Description of Artificial Sequence: Synthetic oligonucleotide
  Sense strand starting at position 3732 of SEQ ID NO: 161
ugcuaaaguuaguugggaa

SEQ ID NO: 15933 - RNA, 19 nt, Artificial Sequence
  Description of Artificial Sequence: Synthetic oligonucleotide
  Antisense strand to SEQ ID NO: 15932
uucccaacuaacuuuagca

SEQ ID NO: 15934 - RNA, 19 nt, Artificial Sequence
  Description of Artificial Sequence: Synthetic oligonucleotide
  Sense strand starting at position 3515 of SEQ ID NO: 161
gagcaaguugaauaucauu

SEQ ID NO: 15935 - RNA, 19 nt, Artificial Sequence
  Description of Artificial Sequence: Synthetic oligonucleotide
  Antisense strand to SEQ ID NO: 15934
aaugauauucaacuugcuc

SEQ ID NO: 15936 - RNA, 19 nt, Artificial Sequence
  Description of Artificial Sequence: Synthetic oligonucleotide
  Sense strand starting at position 3166 of SEQ ID NO: 161
ugugaccacuuuguauuaa

SEQ ID NO: 15937 - RNA, 19 nt, Artificial Sequence
  Description of Artificial Sequence: Synthetic oligonucleotide
  Antisense strand to SEQ ID NO: 15936
uuaauacaaaguggucaca

SEQ ID NO: 15938 - RNA, 19 nt, Artificial Sequence
  Description of Artificial Sequence: Synthetic oligonucleotide
  Sense strand starting at position 3165 of SEQ ID NO: 161
augugaccacuuuguauua

SEQ ID NO: 15939 - RNA, 19 nt, Artificial Sequence
  Description of Artificial Sequence: Synthetic oligonucleotide
  Antisense strand to SEQ ID NO: 15938
uaauacaaaguggucacau

SEQ ID NO: 15940 - RNA, 19 nt, Artificial Sequence
  Description of Artificial Sequence: Synthetic oligonucleotide
  Sense strand starting at position 3053 of SEQ ID NO: 161
gcuaaagugguauaucuuu

SEQ ID NO: 15941 - RNA, 19 nt, Artificial Sequence
  Description of Artificial Sequence: Synthetic oligonucleotide
  Antisense strand to SEQ ID NO: 15940
aaagauauaccacuuuagc

SEQ ID NO: 15942 - RNA, 19 nt, Artificial Sequence
  Description of Artificial Sequence: Synthetic oligonucleotide
  Sense strand starting at position 2960 of SEQ ID NO: 161
ggugccagaguuuaaauga

SEQ ID NO: 15943 - RNA, 19 nt, Artificial Sequence
  Description of Artificial Sequence: Synthetic oligonucleotide
  Antisense strand to SEQ ID NO: 15942
ucauuuaaacucuggcacc

SEQ ID NO: 15944 - RNA, 19 nt, Artificial Sequence
  Description of Artificial Sequence: Synthetic oligonucleotide
  Sense strand starting at position 2878 of SEQ ID NO: 161
gucuaaagauagucaacau

SEQ ID NO: 15945 - RNA, 19 nt, Artificial Sequence
  Description of Artificial Sequence: Synthetic oligonucleotide
  Antisense strand to SEQ ID NO: 15944
auguugacuaucuuuagac

SEQ ID NO: 15946 - RNA, 19 nt, Artificial Sequence
  Description of Artificial Sequence: Synthetic oligonucleotide
  Sense strand starting at position 2865 of SEQ ID NO: 161
auuaaugaagcaggucuaa

SEQ ID NO: 15947 - RNA, 19 nt, Artificial Sequence
  Description of Artificial Sequence: Synthetic oligonucleotide
  Antisense strand to SEQ ID NO: 15946
uuagaccugcuucauuaau

SEQ ID NO: 15948 - RNA, 19 nt, Artificial Sequence
  Description of Artificial Sequence: Synthetic oligonucleotide
  Sense strand starting at position 2803 of SEQ ID NO: 161
gcagcacuacuugacuaau

SEQ ID NO: 15949 - RNA, 19 nt, Artificial Sequence
  Description of Artificial Sequence: Synthetic oligonucleotide
  Antisense strand to SEQ ID NO: 15948
auuagucaaguagugcugc

SEQ ID NO: 15950 - RNA, 19 nt, Artificial Sequence
  Description of Artificial Sequence: Synthetic oligonucleotide
  Sense strand starting at position 2580 of SEQ ID NO: 161
ucguguccagauuauaauu

SEQ ID NO: 15951 - RNA, 19 nt, Artificial Sequence
  Description of Artificial Sequence: Synthetic oligonucleotide
  Antisense strand to SEQ ID NO: 15950
aauuauaaucuggacacga

SEQ ID NO: 15952 - RNA, 19 nt, Artificial Sequence
  Description of Artificial Sequence: Synthetic oligonucleotide
  Sense strand starting at position 2575 of SEQ ID NO: 161
ggaacucguguccagauua

SEQ ID NO: 15953 - RNA, 19 nt, Artificial Sequence
  Description of Artificial Sequence: Synthetic oligonucleotide
  Antisense strand to SEQ ID NO: 15952
uaaucuggacacgaguucc

SEQ ID NO: 15954 - RNA, 19 nt, Artificial Sequence
  Description of Artificial Sequence: Synthetic oligonucleotide
  Sense strand starting at position 1777 of SEQ ID NO: 161
ucagacagccuugaguuaa

SEQ ID NO: 15955 - RNA, 19 nt, Artificial Sequence
  Description of Artificial Sequence: Synthetic oligonucleotide
  Antisense strand to SEQ ID NO: 15954
uuaacucaaggcugucuga

SEQ ID NO: 15956 - RNA, 19 nt, Artificial Sequence
  Description of Artificial Sequence: Synthetic oligonucleotide
  Sense strand starting at position 1776 of SEQ ID NO: 161
aucagacagccuugaguua

SEQ ID NO: 15957 - RNA, 19 nt, Artificial Sequence
  Description of Artificial Sequence: Synthetic oligonucleotide
  Antisense strand to SEQ ID NO: 15956
uaacucaaggcugucugau

SEQ ID NO: 15958 - RNA, 19 nt, Artificial Sequence
  Description of Artificial Sequence: Synthetic oligonucleotide
  Sense strand starting at position 1753 of SEQ ID NO: 161
gugcuuaugaguccgcauu

SEQ ID NO: 15959 - RNA, 19 nt, Artificial Sequence
  Description of Artificial Sequence: Synthetic oligonucleotide
  Antisense strand to SEQ ID NO: 15958
aaugcggacucauaagcac

SEQ ID NO: 15960 - RNA, 19 nt, Artificial Sequence
  Description of Artificial Sequence: Synthetic oligonucleotide
  Sense strand starting at position 1752 of SEQ ID NO: 161
ugugcuuaugaguccgcau

SEQ ID NO: 15961 - RNA, 19 nt, Artificial Sequence
  Description of Artificial Sequence: Synthetic oligonucleotide
  Antisense strand to SEQ ID NO: 15960
augcggacucauaagcaca

SEQ ID NO: 15962 - RNA, 19 nt, Artificial Sequence
  Description of Artificial Sequence: Synthetic oligonucleotide
  Sense strand starting at position 1746 of SEQ ID NO: 161
caauauugugcuuaugagu

SEQ ID NO: 15963 - RNA, 19 nt, Artificial Sequence
  Description of Artificial Sequence: Synthetic oligonucleotide
  Antisense strand to SEQ ID NO: 15962
acucauaagcacaauauug

SEQ ID NO: 15964 - RNA, 19 nt, Artificial Sequence
  Description of Artificial Sequence: Synthetic oligonucleotide
  Sense strand starting at position 1732 of SEQ ID NO: 161
auuaacuuagagugcaaua

SEQ ID NO: 15965 - RNA, 19 nt, Artificial Sequence
  Description of Artificial Sequence: Synthetic oligonucleotide
  Antisense strand to SEQ ID NO: 15964
uauugcacucuaaguuaau

SEQ ID NO: 15966 - RNA, 19 nt, Artificial Sequence
  Description of Artificial Sequence: Synthetic oligonucleotide
  Sense strand starting at position 1539 of SEQ ID NO: 161
uuaauacauuggcucaaga

SEQ ID NO: 15967 - RNA, 19 nt, Artificial Sequence
  Description of Artificial Sequence: Synthetic oligonucleotide
  Antisense strand to SEQ ID NO: 15966
ucuugagccaauguauuaa

SEQ ID NO: 15968 - RNA, 19 nt, Artificial Sequence
  Description of Artificial Sequence: Synthetic oligonucleotide
  Sense strand starting at position 1461 of SEQ ID NO: 161
uuggaauagucauuaagau

SEQ ID NO: 15969 - RNA, 19 nt, Artificial Sequence
  Description of Artificial Sequence: Synthetic oligonucleotide
  Antisense strand to SEQ ID NO: 15968
aucuuaaugacuauuccaa

SEQ ID NO: 15970 - RNA, 19 nt, Artificial Sequence
  Description of Artificial Sequence: Synthetic oligonucleotide
  Sense strand starting at position 1452 of SEQ ID NO: 161
agucauaauuuggaauagu

SEQ ID NO: 15971 - RNA, 19 nt, Artificial Sequence
  Description of Artificial Sequence: Synthetic oligonucleotide
  Antisense strand to SEQ ID NO: 15970
acuauuccaaauuaugacu

SEQ ID NO: 15972 - RNA, 19 nt, Artificial Sequence
  Description of Artificial Sequence: Synthetic oligonucleotide
  Sense strand starting at position 1351 of SEQ ID NO: 161
guccaaccuguaggagaau

SEQ ID NO: 15973 - RNA, 19 nt, Artificial Sequence
  Description of Artificial Sequence: Synthetic oligonucleotide
  Antisense strand to SEQ ID NO: 15972
auucuccuacagguuggac

SEQ ID NO: 15974 - RNA, 19 nt, Artificial Sequence
  Description of Artificial Sequence: Synthetic oligonucleotide
  Sense strand starting at position 1152 of SEQ ID NO: 161
uauagcaguucuuugaaga

SEQ ID NO: 15975 - RNA, 19 nt, Artificial Sequence
  Description of Artificial Sequence: Synthetic oligonucleotide
  Antisense strand to SEQ ID NO: 15974
ucuucaaagaacugcuaua

SEQ ID NO: 15976 - RNA, 19 nt, Artificial Sequence
  Description of Artificial Sequence: Synthetic oligonucleotide
  Sense strand starting at position 1114 of SEQ ID NO: 161
agaugagaucuguacagcu

SEQ ID NO: 15977 - RNA, 19 nt, Artificial Sequence
  Description of Artificial Sequence: Synthetic oligonucleotide
  Antisense strand to SEQ ID NO: 15976
agcuguacagaucucaucu

SEQ ID NO: 15978 - RNA, 19 nt, Artificial Sequence
  Description of Artificial Sequence: Synthetic oligonucleotide
  Sense strand starting at position 1112 of SEQ ID NO: 161
cuagaugagaucuguacag

SEQ ID NO: 15979 - RNA, 19 nt, Artificial Sequence
  Description of Artificial Sequence: Synthetic oligonucleotide
  Antisense strand to SEQ ID NO: 15978
cuguacagaucucaucuag

SEQ ID NO: 15980 - RNA, 19 nt, Artificial Sequence
  Description of Artificial Sequence: Synthetic oligonucleotide
  Sense strand starting at position 1035 of SEQ ID NO: 161
augccagagugacugaaua

SEQ ID NO: 15981 - RNA, 19 nt, Artificial Sequence
  Description of Artificial Sequence: Synthetic oligonucleotide
  Antisense strand to SEQ ID NO: 15980
uauucagucacucuggcau

SEQ ID NO: 15982 - RNA, 19 nt, Artificial Sequence
  Description of Artificial Sequence: Synthetic oligonucleotide
  Sense strand starting at position 1029 of SEQ ID NO: 161
cugguuaugccagagugac

SEQ ID NO: 15983 - RNA, 19 nt, Artificial Sequence
  Description of Artificial Sequence: Synthetic oligonucleotide
  Antisense strand to SEQ ID NO: 15982
gucacucuggcauaaccag

SEQ ID NO: 15984 - RNA, 19 nt, Artificial Sequence
  Description of Artificial Sequence: Synthetic oligonucleotide
  Sense strand starting at position 904 of SEQ ID NO: 161
cgauucuagacagguuaag

SEQ ID NO: 15985 - RNA, 19 nt, Artificial Sequence
  Description of Artificial Sequence: Synthetic oligonucleotide
  Antisense strand to SEQ ID NO: 15984
cuuaaccugucuagaaucg

SEQ ID NO: 15986 - RNA, 19 nt, Artificial Sequence
  Description of Artificial Sequence: Synthetic oligonucleotide
  Sense strand starting at position 902 of SEQ ID NO: 161
gucgauucuagacagguua

SEQ ID NO: 15987 - RNA, 19 nt, Artificial Sequence
  Description of Artificial Sequence: Synthetic oligonucleotide
  Antisense strand to SEQ ID NO: 15986
uaaccugucuagaaucgac

SEQ ID NO: 15988 - RNA, 19 nt, Artificial Sequence
  Description of Artificial Sequence: Synthetic oligonucleotide
  Sense strand starting at position 889 of SEQ ID NO: 161
cucugaugaccaggucgau

SEQ ID NO: 15989 - RNA, 19 nt, Artificial Sequence
  Description of Artificial Sequence: Synthetic oligonucleotide
  Antisense strand to SEQ ID NO: 15988
aucgaccuggucaucagag

SEQ ID NO: 15990 - RNA, 19 nt, Artificial Sequence
  Description of Artificial Sequence: Synthetic oligonucleotide
  Sense strand starting at position 755 of SEQ ID NO: 161
accacacaguuaucauuga

SEQ ID NO: 15991 - RNA, 19 nt, Artificial Sequence
  Description of Artificial Sequence: Synthetic oligonucleotide
  Antisense strand to SEQ ID NO: 15990
ucaaugauaacuguguggu

SEQ ID NO: 15992 - RNA, 19 nt, Artificial Sequence
  Description of Artificial Sequence: Synthetic oligonucleotide
  Sense strand starting at position 737 of SEQ ID NO: 161
ucgcuuuguggcuuugcaa

SEQ ID NO: 15993 - RNA, 19 nt, Artificial Sequence
  Description of Artificial Sequence: Synthetic oligonucleotide
  Antisense strand to SEQ ID NO: 15992
uugcaaagccacaaagcga

SEQ ID NO: 15994 - RNA, 19 nt, Artificial Sequence
  Description of Artificial Sequence: Synthetic oligonucleotide
  Sense strand starting at position 616 of SEQ ID NO: 161
aguuaaacaguguaguaua

SEQ ID NO: 15995 - RNA, 19 nt, Artificial Sequence
  Description of Artificial Sequence: Synthetic oligonucleotide
  Antisense strand to SEQ ID NO: 15994
uauacuacacuguuuaacu

SEQ ID NO: 15996 - RNA, 19 nt, Artificial Sequence
  Description of Artificial Sequence: Synthetic oligonucleotide
  Sense strand starting at position 575 of SEQ ID NO: 161
aguuuaugaucauccuaag

SEQ ID NO: 15997 - RNA, 19 nt, Artificial Sequence
  Description of Artificial Sequence: Synthetic oligonucleotide
  Antisense strand to SEQ ID NO: 15996
cuuaggaugaucauaaacu

SEQ ID NO: 15998 - RNA, 19 nt, Artificial Sequence
  Description of Artificial Sequence: Synthetic oligonucleotide
  Sense strand starting at position 446 of SEQ ID NO: 161
agguuagaccuguauguaa

SEQ ID NO: 15999 - RNA, 19 nt, Artificial Sequence
  Description of Artificial Sequence: Synthetic oligonucleotide
  Antisense strand to SEQ ID NO: 15998
uuacauacaggucuaaccu

SEQ ID NO: 16000 - RNA, 19 nt, Artificial Sequence
  Description of Artificial Sequence: Synthetic oligonucleotide
  Sense strand starting at position 378 of SEQ ID NO: 161
ccaaauucugugcauguca

SEQ ID NO: 16001 - RNA, 19 nt, Artificial Sequence
  Description of Artificial Sequence: Synthetic oligonucleotide
  Antisense strand to SEQ ID NO: 16000
ugacaugcacagaauuugg

SEQ ID NO: 16002 - RNA, 19 nt, Artificial Sequence
  Description of Artificial Sequence: Synthetic oligonucleotide
  Sense strand starting at position 3983 of SEQ ID NO: 163
uuggaauuccuggguaauc

SEQ ID NO: 16003 - RNA, 19 nt, Artificial Sequence
  Description of Artificial Sequence: Synthetic oligonucleotide
  Antisense strand to SEQ ID NO: 16002
gauuacccaggaauuccaa

SEQ ID NO: 16004 - RNA, 19 nt, Artificial Sequence
  Description of Artificial Sequence: Synthetic oligonucleotide
  Sense strand starting at position 3982 of SEQ ID NO: 163
guuggaauuccuggguaau

SEQ ID NO: 16005 - RNA, 19 nt, Artificial Sequence
  Description of Artificial Sequence: Synthetic oligonucleotide
  Antisense strand to SEQ ID NO: 16004
auuacccaggaauuccaac

SEQ ID NO: 16006 - RNA, 19 nt, Artificial Sequence
  Description of Artificial Sequence: Synthetic oligonucleotide
  Sense strand starting at position 3970 of SEQ ID NO: 163
guagguuccuggguuggaa

SEQ ID NO: 16007 - RNA, 19 nt, Artificial Sequence
  Description of Artificial Sequence: Synthetic oligonucleotide
  Antisense strand to SEQ ID NO: 16006
uuccaacccaggaaccuac

SEQ ID NO: 16008 - RNA, 19 nt, Artificial Sequence
  Description of Artificial Sequence: Synthetic oligonucleotide
  Sense strand starting at position 3929 of SEQ ID NO: 163
ggaacaacaugauaaauug

SEQ ID NO: 16009 - RNA, 19 nt, Artificial Sequence
  Description of Artificial Sequence: Synthetic oligonucleotide
  Antisense strand to SEQ ID NO: 16008
caauuuaucauguuguucc

SEQ ID NO: 16010 - RNA, 19 nt, Artificial Sequence
  Description of Artificial Sequence: Synthetic oligonucleotide
  Sense strand starting at position 3818 of SEQ ID NO: 163
gaaagccugugguuagaca

SEQ ID NO: 16011 - RNA, 19 nt, Artificial Sequence
  Description of Artificial Sequence: Synthetic oligonucleotide
  Antisense strand to SEQ ID NO: 16010
ugucuaaccacaggcuuuc

SEQ ID NO: 16012 - RNA, 19 nt, Artificial Sequence
  Description of Artificial Sequence: Synthetic oligonucleotide
  Sense strand starting at position 3486 of SEQ ID NO: 163
gagggauuaucagccucuc

SEQ ID NO: 16013 - RNA, 19 nt, Artificial Sequence
  Description of Artificial Sequence: Synthetic oligonucleotide
  Antisense strand to SEQ ID NO: 16012
gagaggcugauaaucccuc

SEQ ID NO: 16014 - RNA, 19 nt, Artificial Sequence
  Description of Artificial Sequence: Synthetic oligonucleotide
  Sense strand starting at position 3364 of SEQ ID NO: 163
guguccugagugcaaagaa

SEQ ID NO: 16015 - RNA, 19 nt, Artificial Sequence
  Description of Artificial Sequence: Synthetic oligonucleotide
  Antisense strand to SEQ ID NO: 16014
uucuuugcacucaggacac

SEQ ID NO: 16016 - RNA, 19 nt, Artificial Sequence
  Description of Artificial Sequence: Synthetic oligonucleotide
  Sense strand starting at position 3173 of SEQ ID NO: 163
uuugaugaguaauccaaag

SEQ ID NO: 16017 - RNA, 19 nt, Artificial Sequence
  Description of Artificial Sequence: Synthetic oligonucleotide
  Antisense strand to SEQ ID NO: 16016
cuuuggauuacucaucaaa

SEQ ID NO: 16018 - RNA, 19 nt, Artificial Sequence
  Description of Artificial Sequence: Synthetic oligonucleotide
  Sense strand starting at position 3156 of SEQ ID NO: 163
gguguuguugcugcucauu

SEQ ID NO: 16019 - RNA, 19 nt, Artificial Sequence
  Description of Artificial Sequence: Synthetic oligonucleotide
  Antisense strand to SEQ ID NO: 16018
aaugagcagcaacaacacc

SEQ ID NO: 16020 - RNA, 19 nt, Artificial Sequence
  Description of Artificial Sequence: Synthetic oligonucleotide
  Sense strand starting at position 3082 of SEQ ID NO: 163
ggguaucuuuaaccuuaua

SEQ ID NO: 16021 - RNA, 19 nt, Artificial Sequence
  Description of Artificial Sequence: Synthetic oligonucleotide
  Antisense strand to SEQ ID NO: 16020
uauaagguuaaagauaccc

SEQ ID NO: 16022 - RNA, 19 nt, Artificial Sequence
  Description of Artificial Sequence: Synthetic oligonucleotide
  Sense strand starting at position 3076 of SEQ ID NO: 163
uggaaaggguaucuuuaac

SEQ ID NO: 16023 - RNA, 19 nt, Artificial Sequence
  Description of Artificial Sequence: Synthetic oligonucleotide
  Antisense strand to SEQ ID NO: 16022
guuaaagauacccuuucca

SEQ ID NO: 16024 - RNA, 19 nt, Artificial Sequence
  Description of Artificial Sequence: Synthetic oligonucleotide
  Sense strand starting at position 3038 of SEQ ID NO: 163
ggagcaaucccagaaaugc

SEQ ID NO: 16025 - RNA, 19 nt, Artificial Sequence
  Description of Artificial Sequence: Synthetic oligonucleotide
  Antisense strand to SEQ ID NO: 16024
gcauuucugggauugcucc

SEQ ID NO: 16026 - RNA, 19 nt, Artificial Sequence
  Description of Artificial Sequence: Synthetic oligonucleotide
  Sense strand starting at position 3005 of SEQ ID NO: 163
augucugaggagugaggau

SEQ ID NO: 16027 - RNA, 19 nt, Artificial Sequence
  Description of Artificial Sequence: Synthetic oligonucleotide
  Antisense strand to SEQ ID NO: 16026
auccucacuccucagacau

SEQ ID NO: 16028 - RNA, 19 nt, Artificial Sequence
  Description of Artificial Sequence: Synthetic oligonucleotide
  Sense strand starting at position 2847 of SEQ ID NO: 163
gugugugaaggucaauauc

SEQ ID NO: 16029 - RNA, 19 nt, Artificial Sequence
  Description of Artificial Sequence: Synthetic oligonucleotide
  Antisense strand to SEQ ID NO: 16028
gauauugaccuucacacac

SEQ ID NO: 16030 - RNA, 19 nt, Artificial Sequence
  Description of Artificial Sequence: Synthetic oligonucleotide
  Sense strand starting at position 2786 of SEQ ID NO: 163
gccugaguagaguagugau

SEQ ID NO: 16031 - RNA, 19 nt, Artificial Sequence
  Description of Artificial Sequence: Synthetic oligonucleotide
  Antisense strand to SEQ ID NO: 16030
aucacuacucuacucaggc

SEQ ID NO: 16032 - RNA, 19 nt, Artificial Sequence
  Description of Artificial Sequence: Synthetic oligonucleotide
  Sense strand starting at position 2778 of SEQ ID NO: 163
gaaucuaugccugaguaga

SEQ ID NO: 16033 - RNA, 19 nt, Artificial Sequence
  Description of Artificial Sequence: Synthetic oligonucleotide
  Antisense strand to SEQ ID NO: 16032
ucuacucaggcauagauuc

SEQ ID NO: 16034 - RNA, 19 nt, Artificial Sequence
  Description of Artificial Sequence: Synthetic oligonucleotide
  Sense strand starting at position 2777 of SEQ ID NO: 163
ugaaucuaugccugaguag

SEQ ID NO: 16035 - RNA, 19 nt, Artificial Sequence
  Description of Artificial Sequence: Synthetic oligonucleotide
  Antisense strand to SEQ ID NO: 16034
cuacucaggcauagauuca

SEQ ID NO: 16036 - RNA, 19 nt, Artificial Sequence
  Description of Artificial Sequence: Synthetic oligonucleotide
  Sense strand starting at position 2776 of SEQ ID NO: 163
cugaaucuaugccugagua

SEQ ID NO: 16037 - RNA, 19 nt, Artificial Sequence
  Description of Artificial Sequence: Synthetic oligonucleotide
  Antisense strand to SEQ ID NO: 16036
uacucaggcauagauucag

SEQ ID NO: 16038 - RNA, 19 nt, Artificial Sequence
  Description of Artificial Sequence: Synthetic oligonucleotide
  Sense strand starting at position 2765 of SEQ ID NO: 163
agagcucuagacugaaucu

SEQ ID NO: 16039 - RNA, 19 nt, Artificial Sequence
  Description of Artificial Sequence: Synthetic oligonucleotide
  Antisense strand to SEQ ID NO: 16038
agauucagucuagagcucu

SEQ ID NO: 16040 - RNA, 19 nt, Artificial Sequence
  Description of Artificial Sequence: Synthetic oligonucleotide
  Sense strand starting at position 2760 of SEQ ID NO: 163
guugaagagcucuagacug

SEQ ID NO: 16041 - RNA, 19 nt, Artificial Sequence
  Description of Artificial Sequence: Synthetic oligonucleotide
  Antisense strand to SEQ ID NO: 16040
cagucuagagcucuucaac

SEQ ID NO: 16042 - RNA, 19 nt, Artificial Sequence
  Description of Artificial Sequence: Synthetic oligonucleotide
  Sense strand starting at position 2711 of SEQ ID NO: 163
ugaugacaucucuggguuu

SEQ ID NO: 16043 - RNA, 19 nt, Artificial Sequence
  Description of Artificial Sequence: Synthetic oligonucleotide
  Antisense strand to SEQ ID NO: 16042
aaacccagagaugucauca

SEQ ID NO: 16044 - RNA, 19 nt, Artificial Sequence
  Description of Artificial Sequence: Synthetic oligonucleotide
  Sense strand starting at position 2614 of SEQ ID NO: 163
auguaaccucuccaaaguu

SEQ ID NO: 16045 - RNA, 19 nt, Artificial Sequence
  Description of Artificial Sequence: Synthetic oligonucleotide
  Antisense strand to SEQ ID NO: 16044
aacuuuggagagguuacau

SEQ ID NO: 16046 - RNA, 19 nt, Artificial Sequence
  Description of Artificial Sequence: Synthetic oligonucleotide
  Sense strand starting at position 2566 of SEQ ID NO: 163
cgggaaguuuggagaugga

SEQ ID NO: 16047 - RNA, 19 nt, Artificial Sequence
  Description of Artificial Sequence: Synthetic oligonucleotide
  Antisense strand to SEQ ID NO: 16046
uccaucuccaaacuucccg

SEQ ID NO: 16048 - RNA, 19 nt, Artificial Sequence
  Description of Artificial Sequence: Synthetic oligonucleotide
  Sense strand starting at position 2255 of SEQ ID NO: 163
gggagcaguugacucagaa

SEQ ID NO: 16049 - RNA, 19 nt, Artificial Sequence
  Description of Artificial Sequence: Synthetic oligonucleotide
  Antisense strand to SEQ ID NO: 16048
uucugagucaacugcuccc

SEQ ID NO: 16050 - RNA, 19 nt, Artificial Sequence
  Description of Artificial Sequence: Synthetic oligonucleotide
  Sense strand starting at position 2171 of SEQ ID NO: 163
ggcacucacaacugagaga

SEQ ID NO: 16051 - RNA, 19 nt, Artificial Sequence
  Description of Artificial Sequence: Synthetic oligonucleotide
  Antisense strand to SEQ ID NO: 16050
ucucucaguugugagugcc

SEQ ID NO: 16052 - RNA, 19 nt, Artificial Sequence
  Description of Artificial Sequence: Synthetic oligonucleotide
  Sense strand starting at position 2042 of SEQ ID NO: 163
aagaaacguuuguugaaac

SEQ ID NO: 16053 - RNA, 19 nt, Artificial Sequence
  Description of Artificial Sequence: Synthetic oligonucleotide
  Antisense strand to SEQ ID NO: 16052
guuucaacaaacguuucuu

SEQ ID NO: 16054 - RNA, 19 nt, Artificial Sequence
  Description of Artificial Sequence: Synthetic oligonucleotide
  Sense strand starting at position 2041 of SEQ ID NO: 163
aaagaaacguuuguugaaa

SEQ ID NO: 16055 - RNA, 19 nt, Artificial Sequence
  Description of Artificial Sequence: Synthetic oligonucleotide
  Antisense strand to SEQ ID NO: 16054
uuucaacaaacguuucuuu

SEQ ID NO: 16056 - RNA, 19 nt, Artificial Sequence
  Description of Artificial Sequence: Synthetic oligonucleotide
  Sense strand starting at position 2040 of SEQ ID NO: 163
gaaagaaacguuuguugaa

SEQ ID NO: 16057 - RNA, 19 nt, Artificial Sequence
  Description of Artificial Sequence: Synthetic oligonucleotide
  Antisense strand to SEQ ID NO: 16056
uucaacaaacguuucuuuc

SEQ ID NO: 16058 - RNA, 19 nt, Artificial Sequence
  Description of Artificial Sequence: Synthetic oligonucleotide
  Sense strand starting at position 1718 of SEQ ID NO: 163
ggagacuguuaguuucaag

SEQ ID NO: 16059 - RNA, 19 nt, Artificial Sequence
  Description of Artificial Sequence: Synthetic oligonucleotide
  Antisense strand to SEQ ID NO: 16058
cuugaaacuaacagucucc

SEQ ID NO: 16060 - RNA, 19 nt, Artificial Sequence
  Description of Artificial Sequence: Synthetic oligonucleotide
  Sense strand starting at position 1690 of SEQ ID NO: 163
gugggaucuguacacacau

SEQ ID NO: 16061 - RNA, 19 nt, Artificial Sequence
  Description of Artificial Sequence: Synthetic oligonucleotide
  Antisense strand to SEQ ID NO: 16060
auguguguacagaucccac

SEQ ID NO: 16062 - RNA, 19 nt, Artificial Sequence
  Description of Artificial Sequence: Synthetic oligonucleotide
  Sense strand starting at position 1562 of SEQ ID NO: 163
ggacuagagaugugggagu

SEQ ID NO: 16063 - RNA, 19 nt, Artificial Sequence
  Description of Artificial Sequence: Synthetic oligonucleotide
  Antisense strand to SEQ ID NO: 16062
acucccacaucucuagucc

SEQ ID NO: 16064 - RNA, 19 nt, Artificial Sequence
  Description of Artificial Sequence: Synthetic oligonucleotide
  Sense strand starting at position 1486 of SEQ ID NO: 163
gaggacucacagugccaaa

SEQ ID NO: 16065 - RNA, 19 nt, Artificial Sequence
  Description of Artificial Sequence: Synthetic oligonucleotide
  Antisense strand to SEQ ID NO: 16064
uuuggcacugugaguccuc

SEQ ID NO: 16066 - RNA, 19 nt, Artificial Sequence
  Description of Artificial Sequence: Synthetic oligonucleotide
  Sense strand starting at position 696 of SEQ ID NO: 163
guacucauccaugaguaac

SEQ ID NO: 16067 - RNA, 19 nt, Artificial Sequence
  Description of Artificial Sequence: Synthetic oligonucleotide
  Antisense strand to SEQ ID NO: 16066
guuacucauggaugaguac

SEQ ID NO: 16068 - RNA, 19 nt, Artificial Sequence
  Description of Artificial Sequence: Synthetic oligonucleotide
  Sense strand starting at position 695 of SEQ ID NO: 163
gguacucauccaugaguaa

SEQ ID NO: 16069 - RNA, 19 nt, Artificial Sequence
  Description of Artificial Sequence: Synthetic oligonucleotide
  Antisense strand to SEQ ID NO: 16068
uuacucauggaugaguacc

SEQ ID NO: 16070 - RNA, 19 nt, Artificial Sequence
  Description of Artificial Sequence: Synthetic oligonucleotide
  Sense strand starting at position 627 of SEQ ID NO: 163
gacauuuaugcuugugcag

SEQ ID NO: 16071 - RNA, 19 nt, Artificial Sequence
  Description of Artificial Sequence: Synthetic oligonucleotide
  Antisense strand to SEQ ID NO: 16070
cugcacaagcauaaauguc

SEQ ID NO: 16072 - RNA, 19 nt, Artificial Sequence
  Description of Artificial Sequence: Synthetic oligonucleotide
  Sense strand starting at position 626 of SEQ ID NO: 163
ugacauuuaugcuugugca

SEQ ID NO: 16073 - RNA, 19 nt, Artificial Sequence
  Description of Artificial Sequence: Synthetic oligonucleotide
  Antisense strand to SEQ ID NO: 16072
ugcacaagcauaaauguca

SEQ ID NO: 16074 - RNA, 19 nt, Artificial Sequence
  Description of Artificial Sequence: Synthetic oligonucleotide
  Sense strand starting at position 457 of SEQ ID NO: 163
cugcaucucagcuagggau

SEQ ID NO: 16075 - RNA, 19 nt, Artificial Sequence
  Description of Artificial Sequence: Synthetic oligonucleotide
  Antisense strand to SEQ ID NO: 16074
aucccuagcugagaugcag

SEQ ID NO: 16076 - RNA, 19 nt, Artificial Sequence
  Description of Artificial Sequence: Synthetic oligonucleotide
  Sense strand starting at position 415 of SEQ ID NO: 163
gggcuuaucugauccuuua

SEQ ID NO: 16077 - RNA, 19 nt, Artificial Sequence
  Description of Artificial Sequence: Synthetic oligonucleotide
  Antisense strand to SEQ ID NO: 16076
uaaaggaucagauaagccc

SEQ ID NO: 16078 - RNA, 19 nt, Artificial Sequence
  Description of Artificial Sequence: Synthetic oligonucleotide
  Sense strand starting at position 338 of SEQ ID NO: 163
ucuaccuugcucuaagaug

SEQ ID NO: 16079 - RNA, 19 nt, Artificial Sequence
  Description of Artificial Sequence: Synthetic oligonucleotide
  Antisense strand to SEQ ID NO: 16078
caucuuagagcaagguaga

SEQ ID NO: 16080 - RNA, 19 nt, Artificial Sequence
  Description of Artificial Sequence: Synthetic oligonucleotide
  Sense strand starting at position 232 of SEQ ID NO: 163
gcaacuuaggauggugauu

SEQ ID NO: 16081 - RNA, 19 nt, Artificial Sequence
  Description of Artificial Sequence: Synthetic oligonucleotide
  Antisense strand to SEQ ID NO: 16080
aaucaccauccuaaguugc

SEQ ID NO: 16082 - RNA, 19 nt, Artificial Sequence
  Description of Artificial Sequence: Synthetic oligonucleotide
  Sense strand starting at position 3913 of SEQ ID NO: 165
ggauuugugucuuuguucu

SEQ ID NO: 16083 - RNA, 19 nt, Artificial Sequence
  Description of Artificial Sequence: Synthetic oligonucleotide
  Antisense strand to SEQ ID NO: 16082
agaacaaagacacaaaucc

SEQ ID NO: 16084 - RNA, 19 nt, Artificial Sequence
  Description of Artificial Sequence: Synthetic oligonucleotide
  Sense strand starting at position 3911 of SEQ ID NO: 165
agggauuugugucuuuguu

SEQ ID NO: 16085 - RNA, 19 nt, Artificial Sequence
  Description of Artificial Sequence: Synthetic oligonucleotide
  Antisense strand to SEQ ID NO: 16084
aacaaagacacaaaucccu

SEQ ID NO: 16086 - RNA, 19 nt, Artificial Sequence
  Description of Artificial Sequence: Synthetic oligonucleotide
  Sense strand starting at position 3756 of SEQ ID NO: 165
gcugcauccgucucugacu

SEQ ID NO: 16087 - RNA, 19 nt, Artificial Sequence
  Description of Artificial Sequence: Synthetic oligonucleotide
  Antisense strand to SEQ ID NO: 16086
agucagagacggaugcagc

SEQ ID NO: 16088 - RNA, 19 nt, Artificial Sequence
  Description of Artificial Sequence: Synthetic oligonucleotide
  Sense strand starting at position 3595 of SEQ ID NO: 165
uugagaaugucaguauaaa

SEQ ID NO: 16089 - RNA, 19 nt, Artificial Sequence
  Description of Artificial Sequence: Synthetic oligonucleotide
  Antisense strand to SEQ ID NO: 16088
uuuauacugacauucucaa

SEQ ID NO: 16090 - RNA, 19 nt, Artificial Sequence
  Description of Artificial Sequence: Synthetic oligonucleotide
  Sense strand starting at position 3493 of SEQ ID NO: 165
gagccaugccgucugugua

SEQ ID NO: 16091 - RNA, 19 nt, Artificial Sequence
  Description of Artificial Sequence: Synthetic oligonucleotide
  Antisense strand to SEQ ID NO: 16090
uacacagacggcauggcuc

SEQ ID NO: 16092 - RNA, 19 nt, Artificial Sequence
  Description of Artificial Sequence: Synthetic oligonucleotide
  Sense strand starting at position 3344 of SEQ ID NO: 165
gugagaagcccugggagaa

SEQ ID NO: 16093 - RNA, 19 nt, Artificial Sequence
  Description of Artificial Sequence: Synthetic oligonucleotide
  Antisense strand to SEQ ID NO: 16092
uucucccagggcuucucac

SEQ ID NO: 16094 - RNA, 19 nt, Artificial Sequence
  Description of Artificial Sequence: Synthetic oligonucleotide
  Sense strand starting at position 3134 of SEQ ID NO: 165
gggaaucucuugcucacca

SEQ ID NO: 16095 - RNA, 19 nt, Artificial Sequence
  Description of Artificial Sequence: Synthetic oligonucleotide
  Antisense strand to SEQ ID NO: 16094
uggugagcaagagauuccc

SEQ ID NO: 16096 - RNA, 19 nt, Artificial Sequence
  Description of Artificial Sequence: Synthetic oligonucleotide
  Sense strand starting at position 3123 of SEQ ID NO: 165
ggcagaauucugggaaucu

SEQ ID NO: 16097 - RNA, 19 nt, Artificial Sequence
  Description of Artificial Sequence: Synthetic oligonucleotide
  Antisense strand to SEQ ID NO: 16096
agauucccagaauucugcc

SEQ ID NO: 16098 - RNA, 19 nt, Artificial Sequence
  Description of Artificial Sequence: Synthetic oligonucleotide
  Sense strand starting at position 3113 of SEQ ID NO: 165
gagcuuaggaggcagaauu

SEQ ID NO: 16099 - RNA, 19 nt, Artificial Sequence
  Description of Artificial Sequence: Synthetic oligonucleotide
  Antisense strand to SEQ ID NO: 16098
aauucugccuccuaagcuc

SEQ ID NO: 16100 - RNA, 19 nt, Artificial Sequence
  Description of Artificial Sequence: Synthetic oligonucleotide
  Sense strand starting at position 3058 of SEQ ID NO: 165
gaucauaaguggguuguca

SEQ ID NO: 16101 - RNA, 19 nt, Artificial Sequence
  Description of Artificial Sequence: Synthetic oligonucleotide
  Antisense strand to SEQ ID NO: 16100
ugacaacccacuuaugauc

SEQ ID NO: 16102 - RNA, 19 nt, Artificial Sequence
  Description of Artificial Sequence: Synthetic oligonucleotide
  Sense strand starting at position 2585 of SEQ ID NO: 165
uuacuuggcacuuggagau

SEQ ID NO: 16103 - RNA, 19 nt, Artificial Sequence
  Description of Artificial Sequence: Synthetic oligonucleotide
  Antisense strand to SEQ ID NO: 16102
aucuccaagugccaaguaa

SEQ ID NO: 16104 - RNA, 19 nt, Artificial Sequence
  Description of Artificial Sequence: Synthetic oligonucleotide
  Sense strand starting at position 2573 of SEQ ID NO: 165
ugucuauacucauuacuug

SEQ ID NO: 16105 - RNA, 19 nt, Artificial Sequence
  Description of Artificial Sequence: Synthetic oligonucleotide
  Antisense strand to SEQ ID NO: 16104
caaguaaugaguauagaca

SEQ ID NO: 16106 - RNA, 19 nt, Artificial Sequence
  Description of Artificial Sequence: Synthetic oligonucleotide
  Sense strand starting at position 2567 of SEQ ID NO: 165
auguucugucuauacucau

SEQ ID NO: 16107 - RNA, 19 nt, Artificial Sequence
  Description of Artificial Sequence: Synthetic oligonucleotide
  Antisense strand to SEQ ID NO: 16106
augaguauagacagaacau

SEQ ID NO: 16108 - RNA, 19 nt, Artificial Sequence
  Description of Artificial Sequence: Synthetic oligonucleotide
  Sense strand starting at position 2551 of SEQ ID NO: 165
uuuguaauccuguaguaug

SEQ ID NO: 16109 - RNA, 19 nt, Artificial Sequence
  Description of Artificial Sequence: Synthetic oligonucleotide
  Antisense strand to SEQ ID NO: 16108
cauacuacaggauuacaaa

SEQ ID NO: 16110 - RNA, 19 nt, Artificial Sequence
  Description of Artificial Sequence: Synthetic oligonucleotide
  Sense strand starting at position 2124 of SEQ ID NO: 165
uuugaaucacauggucuua

SEQ ID NO: 16111 - RNA, 19 nt, Artificial Sequence
  Description of Artificial Sequence: Synthetic oligonucleotide
  Antisense strand to SEQ ID NO: 16110
uaagaccaugugauucaaa

SEQ ID NO: 16112 - RNA, 19 nt, Artificial Sequence
  Description of Artificial Sequence: Synthetic oligonucleotide
  Sense strand starting at position 2114 of SEQ ID NO: 165
cagagucagcuuugaauca

SEQ ID NO: 16113 - RNA, 19 nt, Artificial Sequence
  Description of Artificial Sequence: Synthetic oligonucleotide
  Antisense strand to SEQ ID NO: 16112
ugauucaaagcugacucug

SEQ ID NO: 16114 - RNA, 19 nt, Artificial Sequence
  Description of Artificial Sequence: Synthetic oligonucleotide
  Sense strand starting at position 2055 of SEQ ID NO: 165
aucucucaucucuguggga

SEQ ID NO: 16115 - RNA, 19 nt, Artificial Sequence
  Description of Artificial Sequence: Synthetic oligonucleotide
  Antisense strand to SEQ ID NO: 16114
ucccacagagaugagagau

SEQ ID NO: 16116 - RNA, 19 nt, Artificial Sequence
  Description of Artificial Sequence: Synthetic oligonucleotide
  Sense strand starting at position 2013 of SEQ ID NO: 165
aguaaugcggaagaaucuu

SEQ ID NO: 16117 - RNA, 19 nt, Artificial Sequence
  Description of Artificial Sequence: Synthetic oligonucleotide
  Antisense strand to SEQ ID NO: 16116
aagauucuuccgcauuacu

SEQ ID NO: 16118 - RNA, 19 nt, Artificial Sequence
  Description of Artificial Sequence: Synthetic oligonucleotide
  Sense strand starting at position 2008 of SEQ ID NO: 165
ugaagaguaaugcggaaga

SEQ ID NO: 16119 - RNA, 19 nt, Artificial Sequence
  Description of Artificial Sequence: Synthetic oligonucleotide
  Antisense strand to SEQ ID NO: 16118
ucuuccgcauuacucuuca

SEQ ID NO: 16120 - RNA, 19 nt, Artificial Sequence
  Description of Artificial Sequence: Synthetic oligonucleotide
  Sense strand starting at position 1628 of SEQ ID NO: 165
gcaucagcucuguuugugu

SEQ ID NO: 16121 - RNA, 19 nt, Artificial Sequence
  Description of Artificial Sequence: Synthetic oligonucleotide
  Antisense strand to SEQ ID NO: 16120
acacaaacagagcugaugc

SEQ ID NO: 16122 - RNA, 19 nt, Artificial Sequence
  Description of Artificial Sequence: Synthetic oligonucleotide
  Sense strand starting at position 1534 of SEQ ID NO: 165
ccagaaugagccuaugcua

SEQ ID NO: 16123 - RNA, 19 nt, Artificial Sequence
  Description of Artificial Sequence: Synthetic oligonucleotide
  Antisense strand to SEQ ID NO: 16122
uagcauaggcucauucugg

SEQ ID NO: 16124 - RNA, 19 nt, Artificial Sequence
  Description of Artificial Sequence: Synthetic oligonucleotide
  Sense strand starting at position 1415 of SEQ ID NO: 165
gcaaucaugguugaaaccu

SEQ ID NO: 16125 - RNA, 19 nt, Artificial Sequence
  Description of Artificial Sequence: Synthetic oligonucleotide
  Antisense strand to SEQ ID NO: 16124
agguuucaaccaugauugc

SEQ ID NO: 16126 - RNA, 19 nt, Artificial Sequence
  Description of Artificial Sequence: Synthetic oligonucleotide
  Sense strand starting at position 1413 of SEQ ID NO: 165
gggcaaucaugguugaaac

SEQ ID NO: 16127 - RNA, 19 nt, Artificial Sequence
  Description of Artificial Sequence: Synthetic oligonucleotide
  Antisense strand to SEQ ID NO: 16126
guuucaaccaugauugccc

SEQ ID NO: 16128 - RNA, 19 nt, Artificial Sequence
  Description of Artificial Sequence: Synthetic oligonucleotide
  Sense strand starting at position 649 of SEQ ID NO: 165
agguauccucuagguuaaa

SEQ ID NO: 16129 - RNA, 19 nt, Artificial Sequence
  Description of Artificial Sequence: Synthetic oligonucleotide
  Antisense strand to SEQ ID NO: 16128
uuuaaccuagaggauaccu

SEQ ID NO: 16130 - RNA, 19 nt, Artificial Sequence
  Description of Artificial Sequence: Synthetic oligonucleotide
  Sense strand starting at position 647 of SEQ ID NO: 165
agagguauccucuagguua

SEQ ID NO: 16131 - RNA, 19 nt, Artificial Sequence
  Description of Artificial Sequence: Synthetic oligonucleotide
  Antisense strand to SEQ ID NO: 16130
uaaccuagaggauaccucu

SEQ ID NO: 16132 - RNA, 19 nt, Artificial Sequence
  Description of Artificial Sequence: Synthetic oligonucleotide
  Sense strand starting at position 616 of SEQ ID NO: 165
ucaucuugguuguuagaaa

SEQ ID NO: 16133 - RNA, 19 nt, Artificial Sequence
  Description of Artificial Sequence: Synthetic oligonucleotide
  Antisense strand to SEQ ID NO: 16132
uuucuaacaaccaagauga

SEQ ID NO: 16134 - RNA, 19 nt, Artificial Sequence
  Description of Artificial Sequence: Synthetic oligonucleotide
  Sense strand starting at position 512 of SEQ ID NO: 165
ugucuuagaaauugggaca

SEQ ID NO: 16135 - RNA, 19 nt, Artificial Sequence
  Description of Artificial Sequence: Synthetic oligonucleotide
  Antisense strand to SEQ ID NO: 16134
ugucccaauuucuaagaca

SEQ ID NO: 16136 - RNA, 19 nt, Artificial Sequence
  Description of Artificial Sequence: Synthetic oligonucleotide
  Sense strand starting at position 503 of SEQ ID NO: 165
augacccauugucuuagaa

SEQ ID NO: 16137 - RNA, 19 nt, Artificial Sequence
  Description of Artificial Sequence: Synthetic oligonucleotide
  Antisense strand to SEQ ID NO: 16136
uucuaagacaaugggucau

SEQ ID NO: 16138 - RNA, 19 nt, Artificial Sequence
  Description of Artificial Sequence: Synthetic oligonucleotide
  Sense strand starting at position 457 of SEQ ID NO: 165
ccucuaugacgcuacaauu

SEQ ID NO: 16139 - RNA, 19 nt, Artificial Sequence
  Description of Artificial Sequence: Synthetic oligonucleotide
  Antisense strand to SEQ ID NO: 16138
aauuguagcgucauagagg

SEQ ID NO: 16140 - RNA, 19 nt, Artificial Sequence
  Description of Artificial Sequence: Synthetic oligonucleotide
  Sense strand starting at position 398 of SEQ ID NO: 165
guuacagaaucuuccuaga

SEQ ID NO: 16141 - RNA, 19 nt, Artificial Sequence
  Description of Artificial Sequence: Synthetic oligonucleotide
  Antisense strand to SEQ ID NO: 16140
ucuaggaagauucuguaac

SEQ ID NO: 16142 - RNA, 19 nt, Artificial Sequence
  Description of Artificial Sequence: Synthetic oligonucleotide
  Sense strand starting at position 373 of SEQ ID NO: 165
ggauucacugugggacuuu

SEQ ID NO: 16143 - RNA, 19 nt, Artificial Sequence
  Description of Artificial Sequence: Synthetic oligonucleotide
  Antisense strand to SEQ ID NO: 16142
aaagucccacagugaaucc

SEQ ID NO: 16144 - RNA, 19 nt, Artificial Sequence
  Description of Artificial Sequence: Synthetic oligonucleotide
  Sense strand starting at position 299 of SEQ ID NO: 165
uggagacaucguggugaag

SEQ ID NO: 16145 - RNA, 19 nt, Artificial Sequence
  Description of Artificial Sequence: Synthetic oligonucleotide
  Antisense strand to SEQ ID NO: 16144
cuucaccacgaugucucca

SEQ ID NO: 16146 - RNA, 19 nt, Artificial Sequence
  Description of Artificial Sequence: Synthetic oligonucleotide
  Sense strand starting at position 187 of SEQ ID NO: 165
gacaucugauggccuuaca

SEQ ID NO: 16147 - RNA, 19 nt, Artificial Sequence
  Description of Artificial Sequence: Synthetic oligonucleotide
  Antisense strand to SEQ ID NO: 16146
uguaaggccaucagauguc

SEQ ID NO: 16148 - RNA, 19 nt, Artificial Sequence
  Description of Artificial Sequence: Synthetic oligonucleotide
  Sense strand starting at position 185 of SEQ ID NO: 165
uugacaucugauggccuua

SEQ ID NO: 16149 - RNA, 19 nt, Artificial Sequence
  Description of Artificial Sequence: Synthetic oligonucleotide
  Antisense strand to SEQ ID NO: 16148
uaaggccaucagaugucaa

SEQ ID NO: 16150 - RNA, 19 nt, Artificial Sequence
  Description of Artificial Sequence: Synthetic oligonucleotide
  Sense strand starting at position 167 of SEQ ID NO: 165
uguuaauagcugggaauau

SEQ ID NO: 16151 - RNA, 19 nt, Artificial Sequence
  Description of Artificial Sequence: Synthetic oligonucleotide
  Antisense strand to SEQ ID NO: 16150
auauucccagcuauuaaca

SEQ ID NO: 16152 - RNA, 19 nt, Artificial Sequence
  Description of Artificial Sequence: Synthetic oligonucleotide
  Sense strand starting at position 166 of SEQ ID NO: 165
guguuaauagcugggaaua

SEQ ID NO: 16153 - RNA, 19 nt, Artificial Sequence
  Description of Artificial Sequence: Synthetic oligonucleotide
  Antisense strand to SEQ ID NO: 16152
uauucccagcuauuaacac

SEQ ID NO: 16154 - RNA, 19 nt, Artificial Sequence
  Description of Artificial Sequence: Synthetic oligonucleotide
  Sense strand starting at position 165 of SEQ ID NO: 165
aguguuaauagcugggaau

SEQ ID NO: 16155 - RNA, 19 nt, Artificial Sequence
  Description of Artificial Sequence: Synthetic oligonucleotide
  Antisense strand to SEQ ID NO: 16154
auucccagcuauuaacacu

SEQ ID NO: 16156 - RNA, 19 nt, Artificial Sequence
  Description of Artificial Sequence: Synthetic oligonucleotide
  Sense strand starting at position 164 of SEQ ID NO: 165
caguguuaauagcugggaa

SEQ ID NO: 16157 - RNA, 19 nt, Artificial Sequence
  Description of Artificial Sequence: Synthetic oligonucleotide
  Antisense strand to SEQ ID NO: 16156
uucccagcuauuaacacug

SEQ ID NO: 16158 - RNA, 19 nt, Artificial Sequence
  Description of Artificial Sequence: Synthetic oligonucleotide
  Sense strand starting at position 134 of SEQ ID NO: 165
gagaacuuugggugucacu

SEQ ID NO: 16159 - RNA, 19 nt, Artificial Sequence
  Description of Artificial Sequence: Synthetic oligonucleotide
  Antisense strand to SEQ ID NO: 16158
agugacacccaaaguucuc

SEQ ID NO: 16160 - RNA, 19 nt, Artificial Sequence
  Description of Artificial Sequence: Synthetic oligonucleotide
  Sense strand starting at position 130 of SEQ ID NO: 165
caaugagaacuuugggugu

SEQ ID NO: 16161 - RNA, 19 nt, Artificial Sequence
  Description of Artificial Sequence: Synthetic oligonucleotide
  Antisense strand to SEQ ID NO: 16160
acacccaaaguucucauug

SEQ ID NO: 16162 - RNA, 19 nt, Artificial Sequence
  Description of Artificial Sequence: Synthetic oligonucleotide
  Sense strand starting at position 3828 of SEQ ID NO: 164
gaaguuacugcugguaaca

SEQ ID NO: 16163 - RNA, 19 nt, Artificial Sequence
  Description of Artificial Sequence: Synthetic oligonucleotide
  Antisense strand to SEQ ID NO: 16162
uguuaccagcaguaacuuc

SEQ ID NO: 16164 - RNA, 19 nt, Artificial Sequence
  Description of Artificial Sequence: Synthetic oligonucleotide
  Sense strand starting at position 3708 of SEQ ID NO: 164
gggauaaaugaucgucuau

SEQ ID NO: 16165 - RNA, 19 nt, Artificial Sequence
  Description of Artificial Sequence: Synthetic oligonucleotide
  Antisense strand to SEQ ID NO: 16164
auagacgaucauuuauccc

SEQ ID NO: 16166 - RNA, 19 nt, Artificial Sequence
  Description of Artificial Sequence: Synthetic oligonucleotide
  Sense strand starting at position 3707 of SEQ ID NO: 164
ugggauaaaugaucgucua

SEQ ID NO: 16167 - RNA, 19 nt, Artificial Sequence
  Description of Artificial Sequence: Synthetic oligonucleotide
  Antisense strand to SEQ ID NO: 16166
uagacgaucauuuauccca

SEQ ID NO: 16168 - RNA, 19 nt, Artificial Sequence
  Description of Artificial Sequence: Synthetic oligonucleotide
  Sense strand starting at position 3623 of SEQ ID NO: 164
auaugacuguaucuggaaa

SEQ ID NO: 16169 - RNA, 19 nt, Artificial Sequence
  Description of Artificial Sequence: Synthetic oligonucleotide
  Antisense strand to SEQ ID NO: 16168
uuuccagauacagucauau

SEQ ID NO: 16170 - RNA, 19 nt, Artificial Sequence
  Description of Artificial Sequence: Synthetic oligonucleotide
  Sense strand starting at position 3567 of SEQ ID NO: 164
ccaagccuggccugauauu

SEQ ID NO: 16171 - RNA, 19 nt, Artificial Sequence
  Description of Artificial Sequence: Synthetic oligonucleotide
  Antisense strand to SEQ ID NO: 16170
aauaucaggccaggcuugg

SEQ ID NO: 16172 - RNA, 19 nt, Artificial Sequence
  Description of Artificial Sequence: Synthetic oligonucleotide
  Sense strand starting at position 3336 of SEQ ID NO: 164
gcgauuauggcuuacucca

SEQ ID NO: 16173 - RNA, 19 nt, Artificial Sequence
  Description of Artificial Sequence: Synthetic oligonucleotide
  Antisense strand to SEQ ID NO: 16172
uggaguaagccauaaucgc

SEQ ID NO: 16174 - RNA, 19 nt, Artificial Sequence
  Description of Artificial Sequence: Synthetic oligonucleotide
  Sense strand starting at position 3257 of SEQ ID NO: 164
ccauucuguuguuugauau

SEQ ID NO: 16175 - RNA, 19 nt, Artificial Sequence
  Description of Artificial Sequence: Synthetic oligonucleotide
  Antisense strand to SEQ ID NO: 16174
auaucaaacaacagaaugg

SEQ ID NO: 16176 - RNA, 19 nt, Artificial Sequence
  Description of Artificial Sequence: Synthetic oligonucleotide
  Sense strand starting at position 3256 of SEQ ID NO: 164
cccauucuguuguuugaua

SEQ ID NO: 16177 - RNA, 19 nt, Artificial Sequence
  Description of Artificial Sequence: Synthetic oligonucleotide
  Antisense strand to SEQ ID NO: 16176
uaucaaacaacagaauggg

SEQ ID NO: 16178 - RNA, 19 nt, Artificial Sequence
  Description of Artificial Sequence: Synthetic oligonucleotide
  Sense strand starting at position 3148 of SEQ ID NO: 164
uuugcauguccauaggauu

SEQ ID NO: 16179 - RNA, 19 nt, Artificial Sequence
  Description of Artificial Sequence: Synthetic oligonucleotide
  Antisense strand to SEQ ID NO: 16178
aauccuauggacaugcaaa

SEQ ID NO: 16180 - RNA, 19 nt, Artificial Sequence
  Description of Artificial Sequence: Synthetic oligonucleotide
  Sense strand starting at position 3118 of SEQ ID NO: 164
gugcuuugacuauauuaac

SEQ ID NO: 16181 - RNA, 19 nt, Artificial Sequence
  Description of Artificial Sequence: Synthetic oligonucleotide
  Antisense strand to SEQ ID NO: 16180
guuaauauagucaaagcac

SEQ ID NO: 16182 - RNA, 19 nt, Artificial Sequence
  Description of Artificial Sequence: Synthetic oligonucleotide
  Sense strand starting at position 3112 of SEQ ID NO: 164
caguaagugcuuugacuau

SEQ ID NO: 16183 - RNA, 19 nt, Artificial Sequence
  Description of Artificial Sequence: Synthetic oligonucleotide
  Antisense strand to SEQ ID NO: 16182
auagucaaagcacuuacug

SEQ ID NO: 16184 - RNA, 19 nt, Artificial Sequence
  Description of Artificial Sequence: Synthetic oligonucleotide
  Sense strand starting at position 3041 of SEQ ID NO: 164
augugauagcguugcauuu

SEQ ID NO: 16185 - RNA, 19 nt, Artificial Sequence
  Description of Artificial Sequence: Synthetic oligonucleotide
  Antisense strand to SEQ ID NO: 16184
aaaugcaacgcuaucacau

SEQ ID NO: 16186 - RNA, 19 nt, Artificial Sequence
  Description of Artificial Sequence: Synthetic oligonucleotide
  Sense strand starting at position 3039 of SEQ ID NO: 164
ccaugugauagcguugcau

SEQ ID NO: 16187 - RNA, 19 nt, Artificial Sequence
  Description of Artificial Sequence: Synthetic oligonucleotide
  Antisense strand to SEQ ID NO: 16186
augcaacgcuaucacaugg

SEQ ID NO: 16188 - RNA, 19 nt, Artificial Sequence
  Description of Artificial Sequence: Synthetic oligonucleotide
  Sense strand starting at position 3007 of SEQ ID NO: 164
gcucuucucagugagggua

SEQ ID NO: 16189 - RNA, 19 nt, Artificial Sequence
  Description of Artificial Sequence: Synthetic oligonucleotide
  Antisense strand to SEQ ID NO: 16188
uacccucacugagaagagc

SEQ ID NO: 16190 - RNA, 19 nt, Artificial Sequence
  Description of Artificial Sequence: Synthetic oligonucleotide
  Sense strand starting at position 3006 of SEQ ID NO: 164
agcucuucucagugagggu

SEQ ID NO: 16191 - RNA, 19 nt, Artificial Sequence
  Description of Artificial Sequence: Synthetic oligonucleotide
  Antisense strand to SEQ ID NO: 16190
acccucacugagaagagcu

SEQ ID NO: 16192 - RNA, 19 nt, Artificial Sequence
  Description of Artificial Sequence: Synthetic oligonucleotide
  Sense strand starting at position 2955 of SEQ ID NO: 164
cucaauagguagcuugaau

SEQ ID NO: 16193 - RNA, 19 nt, Artificial Sequence
  Description of Artificial Sequence: Synthetic oligonucleotide
  Antisense strand to SEQ ID NO: 16192
auucaagcuaccuauugag

SEQ ID NO: 16194 - RNA, 19 nt, Artificial Sequence
  Description of Artificial Sequence: Synthetic oligonucleotide
  Sense strand starting at position 2948 of SEQ ID NO: 164
guaugugcucaauagguag

SEQ ID NO: 16195 - RNA, 19 nt, Artificial Sequence
  Description of Artificial Sequence: Synthetic oligonucleotide
  Antisense strand to SEQ ID NO: 16194
cuaccuauugagcacauac

SEQ ID NO: 16196 - RNA, 19 nt, Artificial Sequence
  Description of Artificial Sequence: Synthetic oligonucleotide
  Sense strand starting at position 2944 of SEQ ID NO: 164
uauaguaugugcucaauag

SEQ ID NO: 16197 - RNA, 19 nt, Artificial Sequence
  Description of Artificial Sequence: Synthetic oligonucleotide
  Antisense strand to SEQ ID NO: 16196
cuauugagcacauacuaua

SEQ ID NO: 16198 - RNA, 19 nt, Artificial Sequence
  Description of Artificial Sequence: Synthetic oligonucleotide
  Sense strand starting at position 2904 of SEQ ID NO: 164
ccuuaagugaggugcucua

SEQ ID NO: 16199 - RNA, 19 nt, Artificial Sequence
  Description of Artificial Sequence: Synthetic oligonucleotide
  Antisense strand to SEQ ID NO: 16198
uagagcaccucacuuaagg

SEQ ID NO: 16200 - RNA, 19 nt, Artificial Sequence
  Description of Artificial Sequence: Synthetic oligonucleotide
  Sense strand starting at position 2788 of SEQ ID NO: 164
uggaaccaguccuggauuu

SEQ ID NO: 16201 - RNA, 19 nt, Artificial Sequence
  Description of Artificial Sequence: Synthetic oligonucleotide
  Antisense strand to SEQ ID NO: 16200
aaauccaggacugguucca

SEQ ID NO: 16202 - RNA, 19 nt, Artificial Sequence
  Description of Artificial Sequence: Synthetic oligonucleotide
  Sense strand starting at position 2723 of SEQ ID NO: 164
uaacauuggguuugaucuu

SEQ ID NO: 16203 - RNA, 19 nt, Artificial Sequence
  Description of Artificial Sequence: Synthetic oligonucleotide
  Antisense strand to SEQ ID NO: 16202
aagaucaaacccaauguua

SEQ ID NO: 16204 - RNA, 19 nt, Artificial Sequence
  Description of Artificial Sequence: Synthetic oligonucleotide
  Sense strand starting at position 2720 of SEQ ID NO: 164
cacuaacauuggguuugau

SEQ ID NO: 16205 - RNA, 19 nt, Artificial Sequence
  Description of Artificial Sequence: Synthetic oligonucleotide
  Antisense strand to SEQ ID NO: 16204
aucaaacccaauguuagug

SEQ ID NO: 16206 - RNA, 19 nt, Artificial Sequence
  Description of Artificial Sequence: Synthetic oligonucleotide
  Sense strand starting at position 2617 of SEQ ID NO: 164
ugcaguuuggacuaauauu

SEQ ID NO: 16207 - RNA, 19 nt, Artificial Sequence
  Description of Artificial Sequence: Synthetic oligonucleotide
  Antisense strand to SEQ ID NO: 16206
aauauuaguccaaacugca

SEQ ID NO: 16208 - RNA, 19 nt, Artificial Sequence
  Description of Artificial Sequence: Synthetic oligonucleotide
  Sense strand starting at position 2449 of SEQ ID NO: 164
ggagaaacaucugaaucca

SEQ ID NO: 16209 - RNA, 19 nt, Artificial Sequence
  Description of Artificial Sequence: Synthetic oligonucleotide
  Antisense strand to SEQ ID NO: 16208
uggauucagauguuucucc

SEQ ID NO: 16210 - RNA, 19 nt, Artificial Sequence
  Description of Artificial Sequence: Synthetic oligonucleotide
  Sense strand starting at position 2238 of SEQ ID NO: 164
ggcuuagagguaugccaaa

SEQ ID NO: 16211 - RNA, 19 nt, Artificial Sequence
  Description of Artificial Sequence: Synthetic oligonucleotide
  Antisense strand to SEQ ID NO: 16210
uuuggcauaccucuaagcc

SEQ ID NO: 16212 - RNA, 19 nt, Artificial Sequence
  Description of Artificial Sequence: Synthetic oligonucleotide
  Sense strand starting at position 2236 of SEQ ID NO: 164
gaggcuuagagguaugcca

SEQ ID NO: 16213 - RNA, 19 nt, Artificial Sequence
  Description of Artificial Sequence: Synthetic oligonucleotide
  Antisense strand to SEQ ID NO: 16212
uggcauaccucuaagccuc

SEQ ID NO: 16214 - RNA, 19 nt, Artificial Sequence
  Description of Artificial Sequence: Synthetic oligonucleotide
  Sense strand starting at position 2122 of SEQ ID NO: 164
cuagaagucucagucuuug

SEQ ID NO: 16215 - RNA, 19 nt, Artificial Sequence
  Description of Artificial Sequence: Synthetic oligonucleotide
  Antisense strand to SEQ ID NO: 16214
caaagacugagacuucuag

SEQ ID NO: 16216 - RNA, 19 nt, Artificial Sequence
  Description of Artificial Sequence: Synthetic oligonucleotide
  Sense strand starting at position 1121 of SEQ ID NO: 164
ggcaguggacuguggaauu

SEQ ID NO: 16217 - RNA, 19 nt, Artificial Sequence
  Description of Artificial Sequence: Synthetic oligonucleotide
  Antisense strand to SEQ ID NO: 16216
aauuccacaguccacugcc

SEQ ID NO: 16218 - RNA, 19 nt, Artificial Sequence
  Description of Artificial Sequence: Synthetic oligonucleotide
  Sense strand starting at position 990 of SEQ ID NO: 164
gauuauauucuguggaaac

SEQ ID NO: 16219 - RNA, 19 nt, Artificial Sequence
  Description of Artificial Sequence: Synthetic oligonucleotide
  Antisense strand to SEQ ID NO: 16218
guuuccacagaauauaauc

SEQ ID NO: 16220 - RNA, 19 nt, Artificial Sequence
  Description of Artificial Sequence: Synthetic oligonucleotide
  Sense strand starting at position 989 of SEQ ID NO: 164
ugauuauauucuguggaaa

SEQ ID NO: 16221 - RNA, 19 nt, Artificial Sequence
  Description of Artificial Sequence: Synthetic oligonucleotide
  Antisense strand to SEQ ID NO: 16220
uuuccacagaauauaauca

SEQ ID NO: 16222 - RNA, 19 nt, Artificial Sequence
  Description of Artificial Sequence: Synthetic oligonucleotide
  Sense strand starting at position 967 of SEQ ID NO: 164
ggcaaagguccagggaaua

SEQ ID NO: 16223 - RNA, 19 nt, Artificial Sequence
  Description of Artificial Sequence: Synthetic oligonucleotide
  Antisense strand to SEQ ID NO: 16222
uauucccuggaccuuugcc

SEQ ID NO: 16224 - RNA, 19 nt, Artificial Sequence
  Description of Artificial Sequence: Synthetic oligonucleotide
  Sense strand starting at position 823 of SEQ ID NO: 164
uuuacaggccuuggucaaa

SEQ ID NO: 16225 - RNA, 19 nt, Artificial Sequence
  Description of Artificial Sequence: Synthetic oligonucleotide
  Antisense strand to SEQ ID NO: 16224
uuugaccaaggccuguaaa

SEQ ID NO: 16226 - RNA, 19 nt, Artificial Sequence
  Description of Artificial Sequence: Synthetic oligonucleotide
  Sense strand starting at position 510 of SEQ ID NO: 164
guaagcucccugcaauucu

SEQ ID NO: 16227 - RNA, 19 nt, Artificial Sequence
  Description of Artificial Sequence: Synthetic oligonucleotide
  Antisense strand to SEQ ID NO: 16226
agaauugcagggagcuuac

SEQ ID NO: 16228 - RNA, 19 nt, Artificial Sequence
  Description of Artificial Sequence: Synthetic oligonucleotide
  Sense strand starting at position 474 of SEQ ID NO: 164
ggagaauguuaguccaaac

SEQ ID NO: 16229 - RNA, 19 nt, Artificial Sequence
  Description of Artificial Sequence: Synthetic oligonucleotide
  Antisense strand to SEQ ID NO: 16228
guuuggacuaacauucucc

SEQ ID NO: 16230 - RNA, 19 nt, Artificial Sequence
  Description of Artificial Sequence: Synthetic oligonucleotide
  Sense strand starting at position 473 of SEQ ID NO: 164
uggagaauguuaguccaaa

SEQ ID NO: 16231 - RNA, 19 nt, Artificial Sequence
  Description of Artificial Sequence: Synthetic oligonucleotide
  Antisense strand to SEQ ID NO: 16230
uuuggacuaacauucucca

SEQ ID NO: 16232 - RNA, 19 nt, Artificial Sequence
  Description of Artificial Sequence: Synthetic oligonucleotide
  Sense strand starting at position 230 of SEQ ID NO: 164
aacguuggacuugaaguua

SEQ ID NO: 16233 - RNA, 19 nt, Artificial Sequence
  Description of Artificial Sequence: Synthetic oligonucleotide
  Antisense strand to SEQ ID NO: 16232
uaacuucaaguccaacguu

SEQ ID NO: 16234 - RNA, 19 nt, Artificial Sequence
  Description of Artificial Sequence: Synthetic oligonucleotide
  Sense strand starting at position 229 of SEQ ID NO: 164
gaacguuggacuugaaguu

SEQ ID NO: 16235 - RNA, 19 nt, Artificial Sequence
  Description of Artificial Sequence: Synthetic oligonucleotide
  Antisense strand to SEQ ID NO: 16234
aacuucaaguccaacguuc

SEQ ID NO: 16236 - RNA, 19 nt, Artificial Sequence
  Description of Artificial Sequence: Synthetic oligonucleotide
  Sense strand starting at position 183 of SEQ ID NO: 164
ccagguaguguccauggaa

SEQ ID NO: 16237 - RNA, 19 nt, Artificial Sequence
  Description of Artificial Sequence: Synthetic oligonucleotide
  Antisense strand to SEQ ID NO: 16236
uuccauggacacuaccugg

SEQ ID NO: 16238 - RNA, 19 nt, Artificial Sequence
  Description of Artificial Sequence: Synthetic oligonucleotide
  Sense strand starting at position 60 of SEQ ID NO: 164
aaauucuaagaguguaaag

SEQ ID NO: 16239 - RNA, 19 nt, Artificial Sequence
  Description of Artificial Sequence: Synthetic oligonucleotide
  Antisense strand to SEQ ID NO: 16238
cuuuacacucuuagaauuu

SEQ ID NO: 16240 - RNA, 19 nt, Artificial Sequence
  Description of Artificial Sequence: Synthetic oligonucleotide
  Sense strand starting at position 47 of SEQ ID NO: 164
ugcgguccuagauaaauuc

SEQ ID NO: 16241 - RNA, 19 nt, Artificial Sequence
  Description of Artificial Sequence: Synthetic oligonucleotide
  Antisense strand to SEQ ID NO: 16240
gaauuuaucuaggaccgca

SEQ ID NO: 16242 - RNA, 19 nt, Artificial Sequence
  Description of Artificial Sequence: Synthetic oligonucleotide
  Sense strand starting at position 3968 of SEQ ID NO: 166
uugaguguccauuacugua

SEQ ID NO: 16243 - RNA, 19 nt, Artificial Sequence
  Description of Artificial Sequence: Synthetic oligonucleotide
  Antisense strand to SEQ ID NO: 16242
uacaguaauggacacucaa

SEQ ID NO: 16244 - RNA, 19 nt, Artificial Sequence
  Description of Artificial Sequence: Synthetic oligonucleotide
  Sense strand starting at position 3909 of SEQ ID NO: 166
gaaguuaccuuaucgagua

SEQ ID NO: 16245 - RNA, 19 nt, Artificial Sequence
  Description of Artificial Sequence: Synthetic oligonucleotide
  Antisense strand to SEQ ID NO: 16244
uacucgauaagguaacuuc

SEQ ID NO: 16246 - RNA, 19 nt, Artificial Sequence
  Description of Artificial Sequence: Synthetic oligonucleotide
  Sense strand starting at position 3812 of SEQ ID NO: 166
uguaauguuuauguuggaa

SEQ ID NO: 16247 - RNA, 19 nt, Artificial Sequence
  Description of Artificial Sequence: Synthetic oligonucleotide
  Antisense strand to SEQ ID NO: 16246
uuccaacauaaacauuaca

SEQ ID NO: 16248 - RNA, 19 nt, Artificial Sequence
  Description of Artificial Sequence: Synthetic oligonucleotide
  Sense strand starting at position 3801 of SEQ ID NO: 166
cguuuagcaccuguaaugu

SEQ ID NO: 16249 - RNA, 19 nt, Artificial Sequence
  Description of Artificial Sequence: Synthetic oligonucleotide
  Antisense strand to SEQ ID NO: 16248
acauuacaggugcuaaacg

SEQ ID NO: 16250 - RNA, 19 nt, Artificial Sequence
  Description of Artificial Sequence: Synthetic oligonucleotide
  Sense strand starting at position 3611 of SEQ ID NO: 166
acugauuaagaaugagcau

SEQ ID NO: 16251 - RNA, 19 nt, Artificial Sequence
  Description of Artificial Sequence: Synthetic oligonucleotide
  Antisense strand to SEQ ID NO: 16250
augcucauucuuaaucagu

SEQ ID NO: 16252 - RNA, 19 nt, Artificial Sequence
  Description of Artificial Sequence: Synthetic oligonucleotide
  Sense strand starting at position 3605 of SEQ ID NO: 166
gcccgaacugauuaagaau

SEQ ID NO: 16253 - RNA, 19 nt, Artificial Sequence
  Description of Artificial Sequence: Synthetic oligonucleotide
  Antisense strand to SEQ ID NO: 16252
auucuuaaucaguucgggc

SEQ ID NO: 16254 - RNA, 19 nt, Artificial Sequence
  Description of Artificial Sequence: Synthetic oligonucleotide
  Sense strand starting at position 3540 of SEQ ID NO: 166
ggaugcuuguccuuauccu

SEQ ID NO: 16255 - RNA, 19 nt, Artificial Sequence
  Description of Artificial Sequence: Synthetic oligonucleotide
  Antisense strand to SEQ ID NO: 16254
aggauaaggacaagcaucc

SEQ ID NO: 16256 - RNA, 19 nt, Artificial Sequence
  Description of Artificial Sequence: Synthetic oligonucleotide
  Sense strand starting at position 3537 of SEQ ID NO: 166
ccaggaugcuuguccuuau

SEQ ID NO: 16257 - RNA, 19 nt, Artificial Sequence
  Description of Artificial Sequence: Synthetic oligonucleotide
  Antisense strand to SEQ ID NO: 16256
auaaggacaagcauccugg

SEQ ID NO: 16258 - RNA, 19 nt, Artificial Sequence
  Description of Artificial Sequence: Synthetic oligonucleotide
  Sense strand starting at position 3280 of SEQ ID NO: 166
gcgcauagggcaagauguu

SEQ ID NO: 16259 - RNA, 19 nt, Artificial Sequence
  Description of Artificial Sequence: Synthetic oligonucleotide
  Antisense strand to SEQ ID NO: 16258
aacaucuugcccuaugcgc

SEQ ID NO: 16260 - RNA, 19 nt, Artificial Sequence
  Description of Artificial Sequence: Synthetic oligonucleotide
  Sense strand starting at position 3181 of SEQ ID NO: 166
ggguauucucauuggcaug

SEQ ID NO: 16261 - RNA, 19 nt, Artificial Sequence
  Description of Artificial Sequence: Synthetic oligonucleotide
  Antisense strand to SEQ ID NO: 16260
caugccaaugagaauaccc

SEQ ID NO: 16262 - RNA, 19 nt, Artificial Sequence
  Description of Artificial Sequence: Synthetic oligonucleotide
  Sense strand starting at position 3123 of SEQ ID NO: 166
caacaauaucugcacguga

SEQ ID NO: 16263 - RNA, 19 nt, Artificial Sequence
  Description of Artificial Sequence: Synthetic oligonucleotide
  Antisense strand to SEQ ID NO: 16262
ucacgugcagauauuguug

SEQ ID NO: 16264 - RNA, 19 nt, Artificial Sequence
  Description of Artificial Sequence: Synthetic oligonucleotide
  Sense strand starting at position 3074 of SEQ ID NO: 166
aguugucccguagaaacca

SEQ ID NO: 16265 - RNA, 19 nt, Artificial Sequence
  Description of Artificial Sequence: Synthetic oligonucleotide
  Antisense strand to SEQ ID NO: 16264
ugguuucuacgggacaacu

SEQ ID NO: 16266 - RNA, 19 nt, Artificial Sequence
  Description of Artificial Sequence: Synthetic oligonucleotide
  Sense strand starting at position 3072 of SEQ ID NO: 166
ugaguugucccguagaaac

SEQ ID NO: 16267 - RNA, 19 nt, Artificial Sequence
  Description of Artificial Sequence: Synthetic oligonucleotide
  Antisense strand to SEQ ID NO: 16266
guuucuacgggacaacuca

SEQ ID NO: 16268 - RNA, 19 nt, Artificial Sequence
  Description of Artificial Sequence: Synthetic oligonucleotide
  Sense strand starting at position 1539 of SEQ ID NO: 166
cuacgauaugcauaaccuu

SEQ ID NO: 16269 - RNA, 19 nt, Artificial Sequence
  Description of Artificial Sequence: Synthetic oligonucleotide
  Antisense strand to SEQ ID NO: 16268
aagguuaugcauaucguag

SEQ ID NO: 16270 - RNA, 19 nt, Artificial Sequence
  Description of Artificial Sequence: Synthetic oligonucleotide
  Sense strand starting at position 1530 of SEQ ID NO: 166
ccaagaucgcuacgauaug

SEQ ID NO: 16271 - RNA, 19 nt, Artificial Sequence
  Description of Artificial Sequence: Synthetic oligonucleotide
  Antisense strand to SEQ ID NO: 16270
cauaucguagcgaucuugg

SEQ ID NO: 16272 - RNA, 19 nt, Artificial Sequence
  Description of Artificial Sequence: Synthetic oligonucleotide
  Sense strand starting at position 1528 of SEQ ID NO: 166
agccaagaucgcuacgaua

SEQ ID NO: 16273 - RNA, 19 nt, Artificial Sequence
  Description of Artificial Sequence: Synthetic oligonucleotide
  Antisense strand to SEQ ID NO: 16272
uaucguagcgaucuuggcu

SEQ ID NO: 16274 - RNA, 19 nt, Artificial Sequence
  Description of Artificial Sequence: Synthetic oligonucleotide
  Sense strand starting at position 1527 of SEQ ID NO: 166
aagccaagaucgcuacgau

SEQ ID NO: 16275 - RNA, 19 nt, Artificial Sequence
  Description of Artificial Sequence: Synthetic oligonucleotide
  Antisense strand to SEQ ID NO: 16274
aucguagcgaucuuggcuu

SEQ ID NO: 16276 - RNA, 19 nt, Artificial Sequence
  Description of Artificial Sequence: Synthetic oligonucleotide
  Sense strand starting at position 1467 of SEQ ID NO: 166
ugacuauucccaggaguaa

SEQ ID NO: 16277 - RNA, 19 nt, Artificial Sequence
  Description of Artificial Sequence: Synthetic oligonucleotide
  Antisense strand to SEQ ID NO: 16276
uuacuccugggaauaguca

SEQ ID NO: 16278 - RNA, 19 nt, Artificial Sequence
  Description of Artificial Sequence: Synthetic oligonucleotide
  Sense strand starting at position 1456 of SEQ ID NO: 166
cucgcagagccugacuauu

SEQ ID NO: 16279 - RNA, 19 nt, Artificial Sequence
  Description of Artificial Sequence: Synthetic oligonucleotide
  Antisense strand to SEQ ID NO: 16278
aauagucaggcucugcgag

SEQ ID NO: 16280 - RNA, 19 nt, Artificial Sequence
  Description of Artificial Sequence: Synthetic oligonucleotide
  Sense strand starting at position 1443 of SEQ ID NO: 166
agacaaauguagucucgca

SEQ ID NO: 16281 - RNA, 19 nt, Artificial Sequence
  Description of Artificial Sequence: Synthetic oligonucleotide
  Antisense strand to SEQ ID NO: 16280
ugcgagacuacauuugucu

SEQ ID NO: 16282 - RNA, 19 nt, Artificial Sequence
  Description of Artificial Sequence: Synthetic oligonucleotide
  Sense strand starting at position 1382 of SEQ ID NO: 166
ucacgagguucucucaaga

SEQ ID NO: 16283 - RNA, 19 nt, Artificial Sequence
  Description of Artificial Sequence: Synthetic oligonucleotide
  Antisense strand to SEQ ID NO: 16282
ucuugagagaaccucguga

SEQ ID NO: 16284 - RNA, 19 nt, Artificial Sequence
  Description of Artificial Sequence: Synthetic oligonucleotide
  Sense strand starting at position 1353 of SEQ ID NO: 166
caaccucgucugcauuaga

SEQ ID NO: 16285 - RNA, 19 nt, Artificial Sequence
  Description of Artificial Sequence: Synthetic oligonucleotide
  Antisense strand to SEQ ID NO: 16284
ucuaaugcagacgagguug

SEQ ID NO: 16286 - RNA, 19 nt, Artificial Sequence
  Description of Artificial Sequence: Synthetic oligonucleotide
  Sense strand starting at position 1260 of SEQ ID NO: 166
gaaauacuacaguguggau

SEQ ID NO: 16287 - RNA, 19 nt, Artificial Sequence
  Description of Artificial Sequence: Synthetic oligonucleotide
  Antisense strand to SEQ ID NO: 16286
auccacacuguaguauuuc

SEQ ID NO: 16288 - RNA, 19 nt, Artificial Sequence
  Description of Artificial Sequence: Synthetic oligonucleotide
  Sense strand starting at position 1104 of SEQ ID NO: 166
ccacaacugucuguguaga

SEQ ID NO: 16289 - RNA, 19 nt, Artificial Sequence
  Description of Artificial Sequence: Synthetic oligonucleotide
  Antisense strand to SEQ ID NO: 16288
ucuacacagacaguugugg

SEQ ID NO: 16290 - RNA, 19 nt, Artificial Sequence
  Description of Artificial Sequence: Synthetic oligonucleotide
  Sense strand starting at position 1095 of SEQ ID NO: 166
cugacugauccacaacugu

SEQ ID NO: 16291 - RNA, 19 nt, Artificial Sequence
  Description of Artificial Sequence: Synthetic oligonucleotide
  Antisense strand to SEQ ID NO: 16290
acaguuguggaucagucag

SEQ ID NO: 16292 - RNA, 19 nt, Artificial Sequence
  Description of Artificial Sequence: Synthetic oligonucleotide
  Sense strand starting at position 1050 of SEQ ID NO: 166
gcugcucugcguuuauauu

SEQ ID NO: 16293 - RNA, 19 nt, Artificial Sequence
  Description of Artificial Sequence: Synthetic oligonucleotide
  Antisense strand to SEQ ID NO: 16292
aauauaaacgcagagcagc

SEQ ID NO: 16294 - RNA, 19 nt, Artificial Sequence
  Description of Artificial Sequence: Synthetic oligonucleotide
  Sense strand starting at position 1049 of SEQ ID NO: 166
agcugcucugcguuuauau

SEQ ID NO: 16295 - RNA, 19 nt, Artificial Sequence
  Description of Artificial Sequence: Synthetic oligonucleotide
  Antisense strand to SEQ ID NO: 16294
auauaaacgcagagcagcu

SEQ ID NO: 16296 - RNA, 19 nt, Artificial Sequence
  Description of Artificial Sequence: Synthetic oligonucleotide
  Sense strand starting at position 893 of SEQ ID NO: 166
cucauagauucgccuacaa

SEQ ID NO: 16297 - RNA, 19 nt, Artificial Sequence
  Description of Artificial Sequence: Synthetic oligonucleotide
  Antisense strand to SEQ ID NO: 16296
uuguaggcgaaucuaugag

SEQ ID NO: 16298 - RNA, 19 nt, Artificial Sequence
  Description of Artificial Sequence: Synthetic oligonucleotide
  Sense strand starting at position 892 of SEQ ID NO: 166
acucauagauucgccuaca

SEQ ID NO: 16299 - RNA, 19 nt, Artificial Sequence
  Description of Artificial Sequence: Synthetic oligonucleotide
  Antisense strand to SEQ ID NO: 16298
uguaggcgaaucuaugagu

SEQ ID NO: 16300 - RNA, 19 nt, Artificial Sequence
  Description of Artificial Sequence: Synthetic oligonucleotide
  Sense strand starting at position 883 of SEQ ID NO: 166
gcagucacgacucauagau

SEQ ID NO: 16301 - RNA, 19 nt, Artificial Sequence
  Description of Artificial Sequence: Synthetic oligonucleotide
  Antisense strand to SEQ ID NO: 16300
aucuaugagucgugacugc

SEQ ID NO: 16302 - RNA, 19 nt, Artificial Sequence
  Description of Artificial Sequence: Synthetic oligonucleotide
  Sense strand starting at position 549 of SEQ ID NO: 166
ugaagugugaugcauuauu

SEQ ID NO: 16303 - RNA, 19 nt, Artificial Sequence
  Description of Artificial Sequence: Synthetic oligonucleotide
  Antisense strand to SEQ ID NO: 16302
aauaaugcaucacacuuca

SEQ ID NO: 16304 - RNA, 19 nt, Artificial Sequence
  Description of Artificial Sequence: Synthetic oligonucleotide
  Sense strand starting at position 538 of SEQ ID NO: 166
uugacuaaccuugaagugu

SEQ ID NO: 16305 - RNA, 19 nt, Artificial Sequence
  Description of Artificial Sequence: Synthetic oligonucleotide
  Antisense strand to SEQ ID NO: 16304
acacuucaagguuagucaa

SEQ ID NO: 16306 - RNA, 19 nt, Artificial Sequence
  Description of Artificial Sequence: Synthetic oligonucleotide
  Sense strand starting at position 509 of SEQ ID NO: 166
ccaguaacaccuuggaaag

SEQ ID NO: 16307 - RNA, 19 nt, Artificial Sequence
  Description of Artificial Sequence: Synthetic oligonucleotide
  Antisense strand to SEQ ID NO: 16306
cuuuccaagguguuacugg

SEQ ID NO: 16308 - RNA, 19 nt, Artificial Sequence
  Description of Artificial Sequence: Synthetic oligonucleotide
  Sense strand starting at position 393 of SEQ ID NO: 166
cugagacacuaugacaaua

SEQ ID NO: 16309 - RNA, 19 nt, Artificial Sequence
  Description of Artificial Sequence: Synthetic oligonucleotide
  Antisense strand to SEQ ID NO: 16308
uauugucauagugucucag

SEQ ID NO: 16310 - RNA, 19 nt, Artificial Sequence
  Description of Artificial Sequence: Synthetic oligonucleotide
  Sense strand starting at position 383 of SEQ ID NO: 166
accuuuaugccugagacac

SEQ ID NO: 16311 - RNA, 19 nt, Artificial Sequence
  Description of Artificial Sequence: Synthetic oligonucleotide
  Antisense strand to SEQ ID NO: 16310
gugucucaggcauaaaggu

SEQ ID NO: 16312 - RNA, 19 nt, Artificial Sequence
  Description of Artificial Sequence: Synthetic oligonucleotide
  Sense strand starting at position 280 of SEQ ID NO: 166
ccaggccucccucaaguua

SEQ ID NO: 16313 - RNA, 19 nt, Artificial Sequence
  Description of Artificial Sequence: Synthetic oligonucleotide
  Antisense strand to SEQ ID NO: 16312
uaacuugagggaggccugg

SEQ ID NO: 16314 - RNA, 19 nt, Artificial Sequence
  Description of Artificial Sequence: Synthetic oligonucleotide
  Sense strand starting at position 27 of SEQ ID NO: 166
cauuaaaugucggcuuaaa

SEQ ID NO: 16315 - RNA, 19 nt, Artificial Sequence
  Description of Artificial Sequence: Synthetic oligonucleotide
  Antisense strand to SEQ ID NO: 16314
uuuaagccgacauuuaaug

SEQ ID NO: 16316 - RNA, 19 nt, Artificial Sequence
  Description of Artificial Sequence: Synthetic oligonucleotide
  Sense strand starting at position 26 of SEQ ID NO: 166
ccauuaaaugucggcuuaa

SEQ ID NO: 16317 - RNA, 19 nt, Artificial Sequence
  Description of Artificial Sequence: Synthetic oligonucleotide
  Antisense strand to SEQ ID NO: 16316
uuaagccgacauuuaaugg

SEQ ID NO: 16318 - RNA, 19 nt, Artificial Sequence
  Description of Artificial Sequence: Synthetic oligonucleotide
  Sense strand starting at position 18 of SEQ ID NO: 166
ggugcugcccauuaaaugu

SEQ ID NO: 16319 - RNA, 19 nt, Artificial Sequence
  Description of Artificial Sequence: Synthetic oligonucleotide
  Antisense strand to SEQ ID NO: 16318
acauuuaaugggcagcacc

SEQ ID NO: 16320 - RNA, 19 nt, Artificial Sequence
  Description of Artificial Sequence: Synthetic oligonucleotide
  Sense strand starting at position 15 of SEQ ID NO: 166
ggaggugcugcccauuaaa

SEQ ID NO: 16321 - RNA, 19 nt, Artificial Sequence
  Description of Artificial Sequence: Synthetic oligonucleotide
  Antisense strand to SEQ ID NO: 16320
uuuaaugggcagcaccucc

SEQ ID NO: 16322 - RNA, 19 nt, Artificial Sequence
  Description of Artificial Sequence: Synthetic oligonucleotide
  Sense strand starting at position 3795 of SEQ ID NO: 167
caaugugaggcuggagauu

SEQ ID NO: 16323 - RNA, 19 nt, Artificial Sequence
  Description of Artificial Sequence: Synthetic oligonucleotide
  Antisense strand to SEQ ID NO: 16322
aaucuccagccucacauug

SEQ ID NO: 16324 - RNA, 19 nt, Artificial Sequence
  Description of Artificial Sequence: Synthetic oligonucleotide
  Sense strand starting at position 3773 of SEQ ID NO: 167
gggcucagaacucagaguu

SEQ ID NO: 16325 - RNA, 19 nt, Artificial Sequence
  Description of Artificial Sequence: Synthetic oligonucleotide
  Antisense strand to SEQ ID NO: 16324
aacucugaguucugagccc

SEQ ID NO: 16326 - RNA, 19 nt, Artificial Sequence
  Description of Artificial Sequence: Synthetic oligonucleotide
  Sense strand starting at position 3303 of SEQ ID NO: 167
ccacaugugcauggagaaa

SEQ ID NO: 16327 - RNA, 19 nt, Artificial Sequence
  Description of Artificial Sequence: Synthetic oligonucleotide
  Antisense strand to SEQ ID NO: 16326
uuucuccaugcacaugugg

SEQ ID NO: 16328 - RNA, 19 nt, Artificial Sequence
  Description of Artificial Sequence: Synthetic oligonucleotide
  Sense strand starting at position 3302 of SEQ ID NO: 167
gccacaugugcauggagaa

SEQ ID NO: 16329 - RNA, 19 nt, Artificial Sequence
  Description of Artificial Sequence: Synthetic oligonucleotide
  Antisense strand to SEQ ID NO: 16328
uucuccaugcacauguggc

SEQ ID NO: 16330 - RNA, 19 nt, Artificial Sequence
  Description of Artificial Sequence: Synthetic oligonucleotide
  Sense strand starting at position 3149 of SEQ ID NO: 167
ugagcuaugcugugaagaa

SEQ ID NO: 16331 - RNA, 19 nt, Artificial Sequence
  Description of Artificial Sequence: Synthetic oligonucleotide
  Antisense strand to SEQ ID NO: 16330
uucuucacagcauagcuca

SEQ ID NO: 16332 - RNA, 19 nt, Artificial Sequence
  Description of Artificial Sequence: Synthetic oligonucleotide
  Sense strand starting at position 3137 of SEQ ID NO: 167
agguuauagcuaugagcua

SEQ ID NO: 16333 - RNA, 19 nt, Artificial Sequence
  Description of Artificial Sequence: Synthetic oligonucleotide
  Antisense strand to SEQ ID NO: 16332
uagcucauagcuauaaccu

SEQ ID NO: 16334 - RNA, 19 nt, Artificial Sequence
  Description of Artificial Sequence: Synthetic oligonucleotide
  Sense strand starting at position 3096 of SEQ ID NO: 167
uguuuauaugcuuauggaa

SEQ ID NO: 16335 - RNA, 19 nt, Artificial Sequence
  Description of Artificial Sequence: Synthetic oligonucleotide
  Antisense strand to SEQ ID NO: 16334
uuccauaagcauauaaaca

SEQ ID NO: 16336 - RNA, 19 nt, Artificial Sequence
  Description of Artificial Sequence: Synthetic oligonucleotide
  Sense strand starting at position 3095 of SEQ ID NO: 167
auguuuauaugcuuaugga

SEQ ID NO: 16337 - RNA, 19 nt, Artificial Sequence
  Description of Artificial Sequence: Synthetic oligonucleotide
  Antisense strand to SEQ ID NO: 16336
uccauaagcauauaaacau

SEQ ID NO: 16338 - RNA, 19 nt, Artificial Sequence
  Description of Artificial Sequence: Synthetic oligonucleotide
  Sense strand starting at position 2845 of SEQ ID NO: 167
aucauacuccggcacauau

SEQ ID NO: 16339 - RNA, 19 nt, Artificial Sequence
  Description of Artificial Sequence: Synthetic oligonucleotide
  Antisense strand to SEQ ID NO: 16338
auaugugccggaguaugau

SEQ ID NO: 16340 - RNA, 19 nt, Artificial Sequence
  Description of Artificial Sequence: Synthetic oligonucleotide
  Sense strand starting at position 2822 of SEQ ID NO: 167
ccgaguacuuuccuguacu

SEQ ID NO: 16341 - RNA, 19 nt, Artificial Sequence
  Description of Artificial Sequence: Synthetic oligonucleotide
  Antisense strand to SEQ ID NO: 16340
aguacaggaaaguacucgg

SEQ ID NO: 16342 - RNA, 19 nt, Artificial Sequence
  Description of Artificial Sequence: Synthetic oligonucleotide
  Sense strand starting at position 2758 of SEQ ID NO: 167
agguuauacauccggcuaa

SEQ ID NO: 16343 - RNA, 19 nt, Artificial Sequence
  Description of Artificial Sequence: Synthetic oligonucleotide
  Antisense strand to SEQ ID NO: 16342
uuagccggauguauaaccu

SEQ ID NO: 16344 - RNA, 19 nt, Artificial Sequence
  Description of Artificial Sequence: Synthetic oligonucleotide
  Sense strand starting at position 2744 of SEQ ID NO: 167
gagugucuggcccaagguu

SEQ ID NO: 16345 - RNA, 19 nt, Artificial Sequence
  Description of Artificial Sequence: Synthetic oligonucleotide
  Antisense strand to SEQ ID NO: 16344
aaccuugggccagacacuc

SEQ ID NO: 16346 - RNA, 19 nt, Artificial Sequence
  Description of Artificial Sequence: Synthetic oligonucleotide
  Sense strand starting at position 2731 of SEQ ID NO: 167
ggaauugaagauugagugu

SEQ ID NO: 16347 - RNA, 19 nt, Artificial Sequence
  Description of Artificial Sequence: Synthetic oligonucleotide
  Antisense strand to SEQ ID NO: 16346
acacucaaucuucaauucc

SEQ ID NO: 16348 - RNA, 19 nt, Artificial Sequence
  Description of Artificial Sequence: Synthetic oligonucleotide
  Sense strand starting at position 2681 of SEQ ID NO: 167
cucauuuaaucuugaaagg

SEQ ID NO: 16349 - RNA, 19 nt, Artificial Sequence
  Description of Artificial Sequence: Synthetic oligonucleotide
  Antisense strand to SEQ ID NO: 16348
ccuuucaagauuaaaugag

SEQ ID NO: 16350 - RNA, 19 nt, Artificial Sequence
  Description of Artificial Sequence: Synthetic oligonucleotide
  Sense strand starting at position 2670 of SEQ ID NO: 167
cguuucuaguccucauuua

SEQ ID NO: 16351 - RNA, 19 nt, Artificial Sequence
  Description of Artificial Sequence: Synthetic oligonucleotide
  Antisense strand to SEQ ID NO: 16350
uaaaugaggacuagaaacg

SEQ ID NO: 16352 - RNA, 19 nt, Artificial Sequence
  Description of Artificial Sequence: Synthetic oligonucleotide
  Sense strand starting at position 2650 of SEQ ID NO: 167
aagcuuugucuauauggua

SEQ ID NO: 16353 - RNA, 19 nt, Artificial Sequence
  Description of Artificial Sequence: Synthetic oligonucleotide
  Antisense strand to SEQ ID NO: 16352
uaccauauagacaaagcuu

SEQ ID NO: 16354 - RNA, 19 nt, Artificial Sequence
  Description of Artificial Sequence: Synthetic oligonucleotide
  Sense strand starting at position 2411 of SEQ ID NO: 167
uccugcuccugucugaaua

SEQ ID NO: 16355 - RNA, 19 nt, Artificial Sequence
  Description of Artificial Sequence: Synthetic oligonucleotide
  Antisense strand to SEQ ID NO: 16354
uauucagacaggagcagga

SEQ ID NO: 16356 - RNA, 19 nt, Artificial Sequence
  Description of Artificial Sequence: Synthetic oligonucleotide
  Sense strand starting at position 2176 of SEQ ID NO: 167
cucucacuuguugaauaga

SEQ ID NO: 16357 - RNA, 19 nt, Artificial Sequence
  Description of Artificial Sequence: Synthetic oligonucleotide
  Antisense strand to SEQ ID NO: 16356
ucuauucaacaagugagag

SEQ ID NO: 16358 - RNA, 19 nt, Artificial Sequence
  Description of Artificial Sequence: Synthetic oligonucleotide
  Sense strand starting at position 2174 of SEQ ID NO: 167
ugcucucacuuguugaaua

SEQ ID NO: 16359 - RNA, 19 nt, Artificial Sequence
  Description of Artificial Sequence: Synthetic oligonucleotide
  Antisense strand to SEQ ID NO: 16358
uauucaacaagugagagca

SEQ ID NO: 16360 - RNA, 19 nt, Artificial Sequence
  Description of Artificial Sequence: Synthetic oligonucleotide
  Sense strand starting at position 2080 of SEQ ID NO: 167
ccgauucuugcgguuacuu

SEQ ID NO: 16361 - RNA, 19 nt, Artificial Sequence
  Description of Artificial Sequence: Synthetic oligonucleotide
  Antisense strand to SEQ ID NO: 16360
aaguaaccgcaagaaucgg

SEQ ID NO: 16362 - RNA, 19 nt, Artificial Sequence
  Description of Artificial Sequence: Synthetic oligonucleotide
  Sense strand starting at position 1495 of SEQ ID NO: 167
uuuagaagccauugagaga

SEQ ID NO: 16363 - RNA, 19 nt, Artificial Sequence
  Description of Artificial Sequence: Synthetic oligonucleotide
  Antisense strand to SEQ ID NO: 16362
ucucucaauggcuucuaaa

SEQ ID NO: 16364 - RNA, 19 nt, Artificial Sequence
  Description of Artificial Sequence: Synthetic oligonucleotide
  Sense strand starting at position 1450 of SEQ ID NO: 167
aacccagucgcaugaaaua

SEQ ID NO: 16365 - RNA, 19 nt, Artificial Sequence
  Description of Artificial Sequence: Synthetic oligonucleotide
  Antisense strand to SEQ ID NO: 16364
uauuucaugcgacuggguu

SEQ ID NO: 16366 - RNA, 19 nt, Artificial Sequence
  Description of Artificial Sequence: Synthetic oligonucleotide
  Sense strand starting at position 1406 of SEQ ID NO: 167
ugacaaaucugugcacaca

SEQ ID NO: 16367 - RNA, 19 nt, Artificial Sequence
  Description of Artificial Sequence: Synthetic oligonucleotide
  Antisense strand to SEQ ID NO: 16366
ugugugcacagauuuguca

SEQ ID NO: 16368 - RNA, 19 nt, Artificial Sequence
  Description of Artificial Sequence: Synthetic oligonucleotide
  Sense strand starting at position 1365 of SEQ ID NO: 167
cuauaugguuucucagaac

SEQ ID NO: 16369 - RNA, 19 nt, Artificial Sequence
  Description of Artificial Sequence: Synthetic oligonucleotide
  Antisense strand to SEQ ID NO: 16368
guucugagaaaccauauag

SEQ ID NO: 16370 - RNA, 19 nt, Artificial Sequence
  Description of Artificial Sequence: Synthetic oligonucleotide
  Sense strand starting at position 1364 of SEQ ID NO: 167
acuauaugguuucucagaa

SEQ ID NO: 16371 - RNA, 19 nt, Artificial Sequence
  Description of Artificial Sequence: Synthetic oligonucleotide
  Antisense strand to SEQ ID NO: 16370
uucugagaaaccauauagu

SEQ ID NO: 16372 - RNA, 19 nt, Artificial Sequence
  Description of Artificial Sequence: Synthetic oligonucleotide
  Sense strand starting at position 1361 of SEQ ID NO: 167
ucgacuauaugguuucuca

SEQ ID NO: 16373 - RNA, 19 nt, Artificial Sequence
  Description of Artificial Sequence: Synthetic oligonucleotide
  Antisense strand to SEQ ID NO: 16372
ugagaaaccauauagucga

SEQ ID NO: 16374 - RNA, 19 nt, Artificial Sequence
  Description of Artificial Sequence: Synthetic oligonucleotide
  Sense strand starting at position 1356 of SEQ ID NO: 167
cuuguucgacuauaugguu

SEQ ID NO: 16375 - RNA, 19 nt, Artificial Sequence
  Description of Artificial Sequence: Synthetic oligonucleotide
  Antisense strand to SEQ ID NO: 16374
aaccauauagucgaacaag

SEQ ID NO: 16376 - RNA, 19 nt, Artificial Sequence
  Description of Artificial Sequence: Synthetic oligonucleotide
  Sense strand starting at position 1348 of SEQ ID NO: 167
auaaaucacuuguucgacu

SEQ ID NO: 16377 - RNA, 19 nt, Artificial Sequence
  Description of Artificial Sequence: Synthetic oligonucleotide
  Antisense strand to SEQ ID NO: 16376
agucgaacaagugauuuau

SEQ ID NO: 16378 - RNA, 19 nt, Artificial Sequence
  Description of Artificial Sequence: Synthetic oligonucleotide
  Sense strand starting at position 1344 of SEQ ID NO: 167
agagauaaaucacuuguuc

SEQ ID NO: 16379 - RNA, 19 nt, Artificial Sequence
  Description of Artificial Sequence: Synthetic oligonucleotide
  Antisense strand to SEQ ID NO: 16378
gaacaagugauuuaucucu

SEQ ID NO: 16380 - RNA, 19 nt, Artificial Sequence
  Description of Artificial Sequence: Synthetic oligonucleotide
  Sense strand starting at position 1080 of SEQ ID NO: 167
gaagauuucuuugguuccu

SEQ ID NO: 16381 - RNA, 19 nt, Artificial Sequence
  Description of Artificial Sequence: Synthetic oligonucleotide
  Antisense strand to SEQ ID NO: 16380
aggaaccaaagaaaucuuc

SEQ ID NO: 16382 - RNA, 19 nt, Artificial Sequence
  Description of Artificial Sequence: Synthetic oligonucleotide
  Sense strand starting at position 1068 of SEQ ID NO: 167
ccucuuucugcugaagauu

SEQ ID NO: 16383 - RNA, 19 nt, Artificial Sequence
  Description of Artificial Sequence: Synthetic oligonucleotide
  Antisense strand to SEQ ID NO: 16382
aaucuucagcagaaagagg

SEQ ID NO: 16384 - RNA, 19 nt, Artificial Sequence
  Description of Artificial Sequence: Synthetic oligonucleotide
  Sense strand starting at position 942 of SEQ ID NO: 167
gagguuucucugcaaagcu

SEQ ID NO: 16385 - RNA, 19 nt, Artificial Sequence
  Description of Artificial Sequence: Synthetic oligonucleotide
  Antisense strand to SEQ ID NO: 16384
agcuuugcagagaaaccuc

SEQ ID NO: 16386 - RNA, 19 nt, Artificial Sequence
  Description of Artificial Sequence: Synthetic oligonucleotide
  Sense strand starting at position 941 of SEQ ID NO: 167
ugagguuucucugcaaagc

SEQ ID NO: 16387 - RNA, 19 nt, Artificial Sequence
  Description of Artificial Sequence: Synthetic oligonucleotide
  Antisense strand to SEQ ID NO: 16386
gcuuugcagagaaaccuca

SEQ ID NO: 16388 - RNA, 19 nt, Artificial Sequence
  Description of Artificial Sequence: Synthetic oligonucleotide
  Sense strand starting at position 938 of SEQ ID NO: 167
ugcugagguuucucugcaa

SEQ ID NO: 16389 - RNA, 19 nt, Artificial Sequence
  Description of Artificial Sequence: Synthetic oligonucleotide
  Antisense strand to SEQ ID NO: 16388
uugcagagaaaccucagca

SEQ ID NO: 16390 - RNA, 19 nt, Artificial Sequence
  Description of Artificial Sequence: Synthetic oligonucleotide
  Sense strand starting at position 896 of SEQ ID NO: 167
augugaaagucugaggaug

SEQ ID NO: 16391 - RNA, 19 nt, Artificial Sequence
  Description of Artificial Sequence: Synthetic oligonucleotide
  Antisense strand to SEQ ID NO: 16390
cauccucagacuuucacau

SEQ ID NO: 16392 - RNA, 19 nt, Artificial Sequence
  Description of Artificial Sequence: Synthetic oligonucleotide
  Sense strand starting at position 550 of SEQ ID NO: 167
gagcgagccaaguauguaa

SEQ ID NO: 16393 - RNA, 19 nt, Artificial Sequence
  Description of Artificial Sequence: Synthetic oligonucleotide
  Antisense strand to SEQ ID NO: 16392
uuacauacuuggcucgcuc

SEQ ID NO: 16394 - RNA, 19 nt, Artificial Sequence
  Description of Artificial Sequence: Synthetic oligonucleotide
  Sense strand starting at position 353 of SEQ ID NO: 167
uguuaaguccggcaggaau

SEQ ID NO: 16395 - RNA, 19 nt, Artificial Sequence
  Description of Artificial Sequence: Synthetic oligonucleotide
  Antisense strand to SEQ ID NO: 16394
auuccugccggacuuaaca

SEQ ID NO: 16396 - RNA, 19 nt, Artificial Sequence
  Description of Artificial Sequence: Synthetic oligonucleotide
  Sense strand starting at position 340 of SEQ ID NO: 167
gucugcaaguuauuguuaa

SEQ ID NO: 16397 - RNA, 19 nt, Artificial Sequence
  Description of Artificial Sequence: Synthetic oligonucleotide
  Antisense strand to SEQ ID NO: 16396
uuaacaauaacuugcagac

SEQ ID NO: 16398 - RNA, 19 nt, Artificial Sequence
  Description of Artificial Sequence: Synthetic oligonucleotide
  Sense strand starting at position 333 of SEQ ID NO: 167
gcaucacgucugcaaguua

SEQ ID NO: 16399 - RNA, 19 nt, Artificial Sequence
  Description of Artificial Sequence: Synthetic oligonucleotide
  Antisense strand to SEQ ID NO: 16398
uaacuugcagacgugaugc

SEQ ID NO: 16400 - RNA, 19 nt, Artificial Sequence
  Description of Artificial Sequence: Synthetic oligonucleotide
  Sense strand starting at position 43 of SEQ ID NO: 167
gaaugagccuggucuccuu

SEQ ID NO: 16401 - RNA, 19 nt, Artificial Sequence
  Description of Artificial Sequence: Synthetic oligonucleotide
  Antisense strand to SEQ ID NO: 16400
aaggagaccaggcucauuc

SEQ ID NO: 16402 - RNA, 19 nt, Artificial Sequence
  Description of Artificial Sequence: Synthetic oligonucleotide
  Sense strand starting at position 3938 of SEQ ID NO: 168
guaggucaagauuaaaugu

SEQ ID NO: 16403 - RNA, 19 nt, Artificial Sequence
  Description of Artificial Sequence: Synthetic oligonucleotide
  Antisense strand to SEQ ID NO: 16402
acauuuaaucuugaccuac

SEQ ID NO: 16404 - RNA, 19 nt, Artificial Sequence
  Description of Artificial Sequence: Synthetic oligonucleotide
  Sense strand starting at position 3932 of SEQ ID NO: 168
gauaguguaggucaagauu

SEQ ID NO: 16405 - RNA, 19 nt, Artificial Sequence
  Description of Artificial Sequence: Synthetic oligonucleotide
  Antisense strand to SEQ ID NO: 16404
aaucuugaccuacacuauc

SEQ ID NO: 16406 - RNA, 19 nt, Artificial Sequence
  Description of Artificial Sequence: Synthetic oligonucleotide
  Sense strand starting at position 3930 of SEQ ID NO: 168
uugauaguguaggucaaga

SEQ ID NO: 16407 - RNA, 19 nt, Artificial Sequence
  Description of Artificial Sequence: Synthetic oligonucleotide
  Antisense strand to SEQ ID NO: 16406
ucuugaccuacacuaucaa

SEQ ID NO: 16408 - RNA, 19 nt, Artificial Sequence
  Description of Artificial Sequence: Synthetic oligonucleotide
  Sense strand starting at position 3902 of SEQ ID NO: 168
gaaguucuuguuugaacac

SEQ ID NO: 16409 - RNA, 19 nt, Artificial Sequence
  Description of Artificial Sequence: Synthetic oligonucleotide
  Antisense strand to SEQ ID NO: 16408
guguucaaacaagaacuuc

SEQ ID NO: 16410 - RNA, 19 nt, Artificial Sequence
  Description of Artificial Sequence: Synthetic oligonucleotide
  Sense strand starting at position 3901 of SEQ ID NO: 168
ggaaguucuuguuugaaca

SEQ ID NO: 16411 - RNA, 19 nt, Artificial Sequence
  Description of Artificial Sequence: Synthetic oligonucleotide
  Antisense strand to SEQ ID NO: 16410
uguucaaacaagaacuucc

SEQ ID NO: 16412 - RNA, 19 nt, Artificial Sequence
  Description of Artificial Sequence: Synthetic oligonucleotide
  Sense strand starting at position 3802 of SEQ ID NO: 168
uuagcaugucuauaagguu

SEQ ID NO: 16413 - RNA, 19 nt, Artificial Sequence
  Description of Artificial Sequence: Synthetic oligonucleotide
  Antisense strand to SEQ ID NO: 16412
aaccuuauagacaugcuaa

SEQ ID NO: 16414 - RNA, 19 nt, Artificial Sequence
  Description of Artificial Sequence: Synthetic oligonucleotide
  Sense strand starting at position 3781 of SEQ ID NO: 168
cuaagaauccagugacuua

SEQ ID NO: 16415 - RNA, 19 nt, Artificial Sequence
  Description of Artificial Sequence: Synthetic oligonucleotide
  Antisense strand to SEQ ID NO: 16414
uaagucacuggauucuuag

SEQ ID NO: 16416 - RNA, 19 nt, Artificial Sequence
  Description of Artificial Sequence: Synthetic oligonucleotide
  Sense strand starting at position 3747 of SEQ ID NO: 168
uguuaaccucauuagguaa

SEQ ID NO: 16417 - RNA, 19 nt, Artificial Sequence
  Description of Artificial Sequence: Synthetic oligonucleotide
  Antisense strand to SEQ ID NO: 16416
uuaccuaaugagguuaaca

SEQ ID NO: 16418 - RNA, 19 nt, Artificial Sequence
  Description of Artificial Sequence: Synthetic oligonucleotide
  Sense strand starting at position 3616 of SEQ ID NO: 168
ugaugacauugugucuaca

SEQ ID NO: 16419 - RNA, 19 nt, Artificial Sequence
  Description of Artificial Sequence: Synthetic oligonucleotide
  Antisense strand to SEQ ID NO: 16418
uguagacacaaugucauca

SEQ ID NO: 16420 - RNA, 19 nt, Artificial Sequence
  Description of Artificial Sequence: Synthetic oligonucleotide
  Sense strand starting at position 3604 of SEQ ID NO: 168
caaguaugagcaugaugac

SEQ ID NO: 16421 - RNA, 19 nt, Artificial Sequence
  Description of Artificial Sequence: Synthetic oligonucleotide
  Antisense strand to SEQ ID NO: 16420
gucaucaugcucauacuug

SEQ ID NO: 16422 - RNA, 19 nt, Artificial Sequence
  Description of Artificial Sequence: Synthetic oligonucleotide
  Sense strand starting at position 3579 of SEQ ID NO: 168
agacacuuauugucagcaa

SEQ ID NO: 16423 - RNA, 19 nt, Artificial Sequence
  Description of Artificial Sequence: Synthetic oligonucleotide
  Antisense strand to SEQ ID NO: 16422
uugcugacaauaagugucu

SEQ ID NO: 16424 - RNA, 19 nt, Artificial Sequence
  Description of Artificial Sequence: Synthetic oligonucleotide
  Sense strand starting at position 3550 of SEQ ID NO: 168
uguugaauugugggaacua

SEQ ID NO: 16425 - RNA, 19 nt, Artificial Sequence
  Description of Artificial Sequence: Synthetic oligonucleotide
  Antisense strand to SEQ ID NO: 16424
uaguucccacaauucaaca

SEQ ID NO: 16426 - RNA, 19 nt, Artificial Sequence
  Description of Artificial Sequence: Synthetic oligonucleotide
  Sense strand starting at position 3396 of SEQ ID NO: 168
agcugaacucuccaaugau

SEQ ID NO: 16427 - RNA, 19 nt, Artificial Sequence
  Description of Artificial Sequence: Synthetic oligonucleotide
  Antisense strand to SEQ ID NO: 16426
aucauuggagaguucagcu

SEQ ID NO: 16428 - RNA, 19 nt, Artificial Sequence
  Description of Artificial Sequence: Synthetic oligonucleotide
  Sense strand starting at position 3386 of SEQ ID NO: 168
cucagaaauuagcugaacu

SEQ ID NO: 16429 - RNA, 19 nt, Artificial Sequence
  Description of Artificial Sequence: Synthetic oligonucleotide
  Antisense strand to SEQ ID NO: 16428
aguucagcuaauuucugag

SEQ ID NO: 16430 - RNA, 19 nt, Artificial Sequence
  Description of Artificial Sequence: Synthetic oligonucleotide
  Sense strand starting at position 3341 of SEQ ID NO: 168
cugggcugucauuaggaaa

SEQ ID NO: 16431 - RNA, 19 nt, Artificial Sequence
  Description of Artificial Sequence: Synthetic oligonucleotide
  Antisense strand to SEQ ID NO: 16430
uuuccuaaugacagcccag

SEQ ID NO: 16432 - RNA, 19 nt, Artificial Sequence
  Description of Artificial Sequence: Synthetic oligonucleotide
  Sense strand starting at position 3181 of SEQ ID NO: 168
uguuaacaucacuggauag

SEQ ID NO: 16433 - RNA, 19 nt, Artificial Sequence
  Description of Artificial Sequence: Synthetic oligonucleotide
  Antisense strand to SEQ ID NO: 16432
cuauccagugauguuaaca

SEQ ID NO: 16434 - RNA, 19 nt, Artificial Sequence
  Description of Artificial Sequence: Synthetic oligonucleotide
  Sense strand starting at position 3180 of SEQ ID NO: 168
guguuaacaucacuggaua

SEQ ID NO: 16435 - RNA, 19 nt, Artificial Sequence
  Description of Artificial Sequence: Synthetic oligonucleotide
  Antisense strand to SEQ ID NO: 16434
uauccagugauguuaacac

SEQ ID NO: 16436 - RNA, 19 nt, Artificial Sequence
  Description of Artificial Sequence: Synthetic oligonucleotide
  Sense strand starting at position 3154 of SEQ ID NO: 168
cuuacuaguguccaaauau

SEQ ID NO: 16437 - RNA, 19 nt, Artificial Sequence
  Description of Artificial Sequence: Synthetic oligonucleotide
  Antisense strand to SEQ ID NO: 16436
auauuuggacacuaguaag

SEQ ID NO: 16438 - RNA, 19 nt, Artificial Sequence
  Description of Artificial Sequence: Synthetic oligonucleotide
  Sense strand starting at position 3153 of SEQ ID NO: 168
acuuacuaguguccaaaua

SEQ ID NO: 16439 - RNA, 19 nt, Artificial Sequence
  Description of Artificial Sequence: Synthetic oligonucleotide
  Antisense strand to SEQ ID NO: 16438
uauuuggacacuaguaagu

SEQ ID NO: 16440 - RNA, 19 nt, Artificial Sequence
  Description of Artificial Sequence: Synthetic oligonucleotide
  Sense strand starting at position 3053 of SEQ ID NO: 168
gcggauucucuauacuuaa

SEQ ID NO: 16441 - RNA, 19 nt, Artificial Sequence
  Description of Artificial Sequence: Synthetic oligonucleotide
  Antisense strand to SEQ ID NO: 16440
uuaaguauagagaauccgc

SEQ ID NO: 16442 - RNA, 19 nt, Artificial Sequence
  Description of Artificial Sequence: Synthetic oligonucleotide
  Sense strand starting at position 3013 of SEQ ID NO: 168
acaguugagcuugaacacu

SEQ ID NO: 16443 - RNA, 19 nt, Artificial Sequence
  Description of Artificial Sequence: Synthetic oligonucleotide
  Antisense strand to SEQ ID NO: 16442
aguguucaagcucaacugu

SEQ ID NO: 16444 - RNA, 19 nt, Artificial Sequence
  Description of Artificial Sequence: Synthetic oligonucleotide
  Sense strand starting at position 2679 of SEQ ID NO: 168
auucuaaauugucugguga

SEQ ID NO: 16445 - RNA, 19 nt, Artificial Sequence
  Description of Artificial Sequence: Synthetic oligonucleotide
  Antisense strand to SEQ ID NO: 16444
ucaccagacaauuuagaau

SEQ ID NO: 16446 - RNA, 19 nt, Artificial Sequence
  Description of Artificial Sequence: Synthetic oligonucleotide
  Sense strand starting at position 2575 of SEQ ID NO: 168
gguugagcucaauaucuaa

SEQ ID NO: 16447 - RNA, 19 nt, Artificial Sequence
  Description of Artificial Sequence: Synthetic oligonucleotide
  Antisense strand to SEQ ID NO: 16446
uuagauauugagcucaacc

SEQ ID NO: 16448 - RNA, 19 nt, Artificial Sequence
  Description of Artificial Sequence: Synthetic oligonucleotide
  Sense strand starting at position 2572 of SEQ ID NO: 168
uaggguugagcucaauauc

SEQ ID NO: 16449 - RNA, 19 nt, Artificial Sequence
  Description of Artificial Sequence: Synthetic oligonucleotide
  Antisense strand to SEQ ID NO: 16448
gauauugagcucaacccua

SEQ ID NO: 16450 - RNA, 19 nt, Artificial Sequence
  Description of Artificial Sequence: Synthetic oligonucleotide
  Sense strand starting at position 2210 of SEQ ID NO: 168
cgcguuccugagcucagau

SEQ ID NO: 16451 - RNA, 19 nt, Artificial Sequence
  Description of Artificial Sequence: Synthetic oligonucleotide
  Antisense strand to SEQ ID NO: 16450
aucugagcucaggaacgcg

SEQ ID NO: 16452 - RNA, 19 nt, Artificial Sequence
  Description of Artificial Sequence: Synthetic oligonucleotide
  Sense strand starting at position 1227 of SEQ ID NO: 168
ggagcauuauccucacacu

SEQ ID NO: 16453 - RNA, 19 nt, Artificial Sequence
  Description of Artificial Sequence: Synthetic oligonucleotide
  Antisense strand to SEQ ID NO: 16452
agugugaggauaaugcucc

SEQ ID NO: 16454 - RNA, 19 nt, Artificial Sequence
  Description of Artificial Sequence: Synthetic oligonucleotide
  Sense strand starting at position 1111 of SEQ ID NO: 168
uugucugaaagaggguuua

SEQ ID NO: 16455 - RNA, 19 nt, Artificial Sequence
  Description of Artificial Sequence: Synthetic oligonucleotide
  Antisense strand to SEQ ID NO: 16454
uaaacccucuuucagacaa

SEQ ID NO: 16456 - RNA, 19 nt, Artificial Sequence
  Description of Artificial Sequence: Synthetic oligonucleotide
  Sense strand starting at position 1060 of SEQ ID NO: 168
uggucauuaggugacauga

SEQ ID NO: 16457 - RNA, 19 nt, Artificial Sequence
  Description of Artificial Sequence: Synthetic oligonucleotide
  Antisense strand to SEQ ID NO: 16456
ucaugucaccuaaugacca

SEQ ID NO: 16458 - RNA, 19 nt, Artificial Sequence
  Description of Artificial Sequence: Synthetic oligonucleotide
  Sense strand starting at position 1058 of SEQ ID NO: 168
cuuggucauuaggugacau

SEQ ID NO: 16459 - RNA, 19 nt, Artificial Sequence
  Description of Artificial Sequence: Synthetic oligonucleotide
  Antisense strand to SEQ ID NO: 16458
augucaccuaaugaccaag

SEQ ID NO: 16460 - RNA, 19 nt, Artificial Sequence
  Description of Artificial Sequence: Synthetic oligonucleotide
  Sense strand starting at position 1055 of SEQ ID NO: 168
aaucuuggucauuagguga

SEQ ID NO: 16461 - RNA, 19 nt, Artificial Sequence
  Description of Artificial Sequence: Synthetic oligonucleotide
  Antisense strand to SEQ ID NO: 16460
ucaccuaaugaccaagauu

SEQ ID NO: 16462 - RNA, 19 nt, Artificial Sequence
  Description of Artificial Sequence: Synthetic oligonucleotide
  Sense strand starting at position 1028 of SEQ ID NO: 168
guuagaauacguuacuuau

SEQ ID NO: 16463 - RNA, 19 nt, Artificial Sequence
  Description of Artificial Sequence: Synthetic oligonucleotide
  Antisense strand to SEQ ID NO: 16462
auaaguaacguauucuaac

SEQ ID NO: 16464 - RNA, 19 nt, Artificial Sequence
  Description of Artificial Sequence: Synthetic oligonucleotide
  Sense strand starting at position 818 of SEQ ID NO: 168
cucugauuguuaucauaug

SEQ ID NO: 16465 - RNA, 19 nt, Artificial Sequence
  Description of Artificial Sequence: Synthetic oligonucleotide
  Antisense strand to SEQ ID NO: 16464
cauaugauaacaaucagag

SEQ ID NO: 16466 - RNA, 19 nt, Artificial Sequence
  Description of Artificial Sequence: Synthetic oligonucleotide
  Sense strand starting at position 738 of SEQ ID NO: 168
gguaauuagccauacucau

SEQ ID NO: 16467 - RNA, 19 nt, Artificial Sequence
  Description of Artificial Sequence: Synthetic oligonucleotide
  Antisense strand to SEQ ID NO: 16466
augaguauggcuaauuacc

SEQ ID NO: 16468 - RNA, 19 nt, Artificial Sequence
  Description of Artificial Sequence: Synthetic oligonucleotide
  Sense strand starting at position 391 of SEQ ID NO: 168
caauuugaguuaccguauu

SEQ ID NO: 16469 - RNA, 19 nt, Artificial Sequence
  Description of Artificial Sequence: Synthetic oligonucleotide
  Antisense strand to SEQ ID NO: 16468
aauacgguaacucaaauug

SEQ ID NO: 16470 - RNA, 19 nt, Artificial Sequence
  Description of Artificial Sequence: Synthetic oligonucleotide
  Sense strand starting at position 305 of SEQ ID NO: 168
guuggaagcagucaauuau

SEQ ID NO: 16471 - RNA, 19 nt, Artificial Sequence
  Description of Artificial Sequence: Synthetic oligonucleotide
  Antisense strand to SEQ ID NO: 16470
auaauugacugcuuccaac

SEQ ID NO: 16472 - RNA, 19 nt, Artificial Sequence
  Description of Artificial Sequence: Synthetic oligonucleotide
  Sense strand starting at position 223 of SEQ ID NO: 168
guaucuuguaaguauaagu

SEQ ID NO: 16473 - RNA, 19 nt, Artificial Sequence
  Description of Artificial Sequence: Synthetic oligonucleotide
  Antisense strand to SEQ ID NO: 16472
acuuauacuuacaagauac

SEQ ID NO: 16474 - RNA, 19 nt, Artificial Sequence
  Description of Artificial Sequence: Synthetic oligonucleotide
  Sense strand starting at position 184 of SEQ ID NO: 168
cuggacauggagugugaaa

SEQ ID NO: 16475 - RNA, 19 nt, Artificial Sequence
  Description of Artificial Sequence: Synthetic oligonucleotide
  Antisense strand to SEQ ID NO: 16474
uuucacacuccauguccag

SEQ ID NO: 16476 - RNA, 19 nt, Artificial Sequence
  Description of Artificial Sequence: Synthetic oligonucleotide
  Sense strand starting at position 148 of SEQ ID NO: 168
aguccaaauuucuagagga

SEQ ID NO: 16477 - RNA, 19 nt, Artificial Sequence
  Description of Artificial Sequence: Synthetic oligonucleotide
  Antisense strand to SEQ ID NO: 16476
uccucuagaaauuuggacu

SEQ ID NO: 16478 - RNA, 19 nt, Artificial Sequence
  Description of Artificial Sequence: Synthetic oligonucleotide
  Sense strand starting at position 28 of SEQ ID NO: 168
augagaaugggcuguaaug

SEQ ID NO: 16479 - RNA, 19 nt, Artificial Sequence
  Description of Artificial Sequence: Synthetic oligonucleotide
  Antisense strand to SEQ ID NO: 16478
cauuacagcccauucucau

SEQ ID NO: 16480 - RNA, 19 nt, Artificial Sequence
  Description of Artificial Sequence: Synthetic oligonucleotide
  Sense strand starting at position 26 of SEQ ID NO: 168
uuaugagaaugggcuguaa

SEQ ID NO: 16481 - RNA, 19 nt, Artificial Sequence
  Description of Artificial Sequence: Synthetic oligonucleotide
  Antisense strand to SEQ ID NO: 16480
uuacagcccauucucauaa

SEQ ID NO: 16482 - RNA, 19 nt, Artificial Sequence
  Description of Artificial Sequence: Synthetic oligonucleotide
  Sense strand starting at position 3149 of SEQ ID NO: 169
uguacugacugcguauuua

SEQ ID NO: 16483 - RNA, 19 nt, Artificial Sequence
  Description of Artificial Sequence: Synthetic oligonucleotide
  Antisense strand to SEQ ID NO: 16482
uaaauacgcagucaguaca

SEQ ID NO: 16484 - RNA, 19 nt, Artificial Sequence
  Description of Artificial Sequence: Synthetic oligonucleotide
  Sense strand starting at position 3147 of SEQ ID NO: 169
uguguacugacugcguauu

SEQ ID NO: 16485 - RNA, 19 nt, Artificial Sequence
  Description of Artificial Sequence: Synthetic oligonucleotide
  Antisense strand to SEQ ID NO: 16484
aauacgcagucaguacaca

SEQ ID NO: 16486 - RNA, 19 nt, Artificial Sequence
  Description of Artificial Sequence: Synthetic oligonucleotide
  Sense strand starting at position 3083 of SEQ ID NO: 169
agguaucuccugugggauc

SEQ ID NO: 16487 - RNA, 19 nt, Artificial Sequence
  Description of Artificial Sequence: Synthetic oligonucleotide
  Antisense strand to SEQ ID NO: 16486
gaucccacaggagauaccu

SEQ ID NO: 16488 - RNA, 19 nt, Artificial Sequence
  Description of Artificial Sequence: Synthetic oligonucleotide
  Sense strand starting at position 3081 of SEQ ID NO: 169
ucagguaucuccuguggga

SEQ ID NO: 16489 - RNA, 19 nt, Artificial Sequence
  Description of Artificial Sequence: Synthetic oligonucleotide
  Antisense strand to SEQ ID NO: 16488
ucccacaggagauaccuga

SEQ ID NO: 16490 - RNA, 19 nt, Artificial Sequence
  Description of Artificial Sequence: Synthetic oligonucleotide
  Sense strand starting at position 3070 of SEQ ID NO: 169
cuuaguccuugucagguau

SEQ ID NO: 16491 - RNA, 19 nt, Artificial Sequence
  Description of Artificial Sequence: Synthetic oligonucleotide
  Antisense strand to SEQ ID NO: 16490
auaccugacaaggacuaag

SEQ ID NO: 16492 - RNA, 19 nt, Artificial Sequence
  Description of Artificial Sequence: Synthetic oligonucleotide
  Sense strand starting at position 3057 of SEQ ID NO: 169
ugggaagccuccucuuagu

SEQ ID NO: 16493 - RNA, 19 nt, Artificial Sequence
  Description of Artificial Sequence: Synthetic oligonucleotide
  Antisense strand to SEQ ID NO: 16492
acuaagaggaggcuuccca

SEQ ID NO: 16494 - RNA, 19 nt, Artificial Sequence
  Description of Artificial Sequence: Synthetic oligonucleotide
  Sense strand starting at position 3045 of SEQ ID NO: 169
uguuaugcccucugggaag

SEQ ID NO: 16495 - RNA, 19 nt, Artificial Sequence
  Description of Artificial Sequence: Synthetic oligonucleotide
  Antisense strand to SEQ ID NO: 16494
cuucccagagggcauaaca

SEQ ID NO: 16496 - RNA, 19 nt, Artificial Sequence
  Description of Artificial Sequence: Synthetic oligonucleotide
  Sense strand starting at position 2969 of SEQ ID NO: 169
cauguuuaagcccaaaggu

SEQ ID NO: 16497 - RNA, 19 nt, Artificial Sequence
  Description of Artificial Sequence: Synthetic oligonucleotide
  Antisense strand to SEQ ID NO: 16496
accuuugggcuuaaacaug

SEQ ID NO: 16498 - RNA, 19 nt, Artificial Sequence
  Description of Artificial Sequence: Synthetic oligonucleotide
  Sense strand starting at position 2856 of SEQ ID NO: 169
gugaccagauucucaacaa

SEQ ID NO: 16499 - RNA, 19 nt, Artificial Sequence
  Description of Artificial Sequence: Synthetic oligonucleotide
  Antisense strand to SEQ ID NO: 16498
uuguugagaaucuggucac

SEQ ID NO: 16500 - RNA, 19 nt, Artificial Sequence
  Description of Artificial Sequence: Synthetic oligonucleotide
  Sense strand starting at position 2747 of SEQ ID NO: 169
ggguuaccuuguuagcuua

SEQ ID NO: 16501 - RNA, 19 nt, Artificial Sequence
  Description of Artificial Sequence: Synthetic oligonucleotide
  Antisense strand to SEQ ID NO: 16500
uaagcuaacaagguaaccc

SEQ ID NO: 16502 - RNA, 19 nt, Artificial Sequence
  Description of Artificial Sequence: Synthetic oligonucleotide
  Sense strand starting at position 2734 of SEQ ID NO: 169
gcccacuuugucuggguua

SEQ ID NO: 16503 - RNA, 19 nt, Artificial Sequence
  Description of Artificial Sequence: Synthetic oligonucleotide
  Antisense strand to SEQ ID NO: 16502
uaacccagacaaagugggc

SEQ ID NO: 16504 - RNA, 19 nt, Artificial Sequence
  Description of Artificial Sequence: Synthetic oligonucleotide
  Sense strand starting at position 2705 of SEQ ID NO: 169
aguacauauuuguagaaca

SEQ ID NO: 16505 - RNA, 19 nt, Artificial Sequence
  Description of Artificial Sequence: Synthetic oligonucleotide
  Antisense strand to SEQ ID NO: 16504
uguucuacaaauauguacu

SEQ ID NO: 16506 - RNA, 19 nt, Artificial Sequence
  Description of Artificial Sequence: Synthetic oligonucleotide
  Sense strand starting at position 2695 of SEQ ID NO: 169
guguguccucaguacauau

SEQ ID NO: 16507 - RNA, 19 nt, Artificial Sequence
  Description of Artificial Sequence: Synthetic oligonucleotide
  Antisense strand to SEQ ID NO: 16506
auauguacugaggacacac

SEQ ID NO: 16508 - RNA, 19 nt, Artificial Sequence
  Description of Artificial Sequence: Synthetic oligonucleotide
  Sense strand starting at position 2691 of SEQ ID NO: 169
cagaguguguccucaguac

SEQ ID NO: 16509 - RNA, 19 nt, Artificial Sequence
  Description of Artificial Sequence: Synthetic oligonucleotide
  Antisense strand to SEQ ID NO: 16508
guacugaggacacacucug

SEQ ID NO: 16510 - RNA, 19 nt, Artificial Sequence
  Description of Artificial Sequence: Synthetic oligonucleotide
  Sense strand starting at position 2659 of SEQ ID NO: 169
gucgcucacugcuguauuu

SEQ ID NO: 16511 - RNA, 19 nt, Artificial Sequence
  Description of Artificial Sequence: Synthetic oligonucleotide
  Antisense strand to SEQ ID NO: 16510
aaauacagcagugagcgac

SEQ ID NO: 16512 - RNA, 19 nt, Artificial Sequence
  Description of Artificial Sequence: Synthetic oligonucleotide
  Sense strand starting at position 2577 of SEQ ID NO: 169
guacuuacugaucaccauu

SEQ ID NO: 16513 - RNA, 19 nt, Artificial Sequence
  Description of Artificial Sequence: Synthetic oligonucleotide
  Antisense strand to SEQ ID NO: 16512
aauggugaucaguaaguac

SEQ ID NO: 16514 - RNA, 19 nt, Artificial Sequence
  Description of Artificial Sequence: Synthetic oligonucleotide
  Sense strand starting at position 2576 of SEQ ID NO: 169
gguacuuacugaucaccau

SEQ ID NO: 16515 - RNA, 19 nt, Artificial Sequence
  Description of Artificial Sequence: Synthetic oligonucleotide
  Antisense strand to SEQ ID NO: 16514
auggugaucaguaaguacc

SEQ ID NO: 16516 - RNA, 19 nt, Artificial Sequence
  Description of Artificial Sequence: Synthetic oligonucleotide
  Sense strand starting at position 2563 of SEQ ID NO: 169
uuacauuucucacgguacu

SEQ ID NO: 16517 - RNA, 19 nt, Artificial Sequence
  Description of Artificial Sequence: Synthetic oligonucleotide
  Antisense strand to SEQ ID NO: 16516
aguaccgugagaaauguaa

SEQ ID NO: 16518 - RNA, 19 nt, Artificial Sequence
  Description of Artificial Sequence: Synthetic oligonucleotide
  Sense strand starting at position 2561 of SEQ ID NO: 169
cuuuacauuucucacggua

SEQ ID NO: 16519 - RNA, 19 nt, Artificial Sequence
  Description of Artificial Sequence: Synthetic oligonucleotide
  Antisense strand to SEQ ID NO: 16518
uaccgugagaaauguaaag

SEQ ID NO: 16520 - RNA, 19 nt, Artificial Sequence
  Description of Artificial Sequence: Synthetic oligonucleotide
  Sense strand starting at position 2451 of SEQ ID NO: 169
gcggcucauccuguaacuu

SEQ ID NO: 16521 - RNA, 19 nt, Artificial Sequence
  Description of Artificial Sequence: Synthetic oligonucleotide
  Antisense strand to SEQ ID NO: 16520
aaguuacaggaugagccgc

SEQ ID NO: 16522 - RNA, 19 nt, Artificial Sequence
  Description of Artificial Sequence: Synthetic oligonucleotide
  Sense strand starting at position 2369 of SEQ ID NO: 169
uugcuauuucuuugaacgu

SEQ ID NO: 16523 - RNA, 19 nt, Artificial Sequence
  Description of Artificial Sequence: Synthetic oligonucleotide
  Antisense strand to SEQ ID NO: 16522
acguucaaagaaauagcaa

SEQ ID NO: 16524 - RNA, 19 nt, Artificial Sequence
  Description of Artificial Sequence: Synthetic oligonucleotide
  Sense strand starting at position 2215 of SEQ ID NO: 169
ucacuacccugucgaaaug

SEQ ID NO: 16525 - RNA, 19 nt, Artificial Sequence
  Description of Artificial Sequence: Synthetic oligonucleotide
  Antisense strand to SEQ ID NO: 16524
cauuucgacaggguaguga

SEQ ID NO: 16526 - RNA, 19 nt, Artificial Sequence
  Description of Artificial Sequence: Synthetic oligonucleotide
  Sense strand starting at position 2212 of SEQ ID NO: 169
augucacuacccugucgaa

SEQ ID NO: 16527 - RNA, 19 nt, Artificial Sequence
  Description of Artificial Sequence: Synthetic oligonucleotide
  Antisense strand to SEQ ID NO: 16526
uucgacaggguagugacau

SEQ ID NO: 16528 - RNA, 19 nt, Artificial Sequence
  Description of Artificial Sequence: Synthetic oligonucleotide
  Sense strand starting at position 2207 of SEQ ID NO: 169
guaagaugucacuacccug

SEQ ID NO: 16529 - RNA, 19 nt, Artificial Sequence
  Description of Artificial Sequence: Synthetic oligonucleotide
  Antisense strand to SEQ ID NO: 16528
caggguagugacaucuuac

SEQ ID NO: 16530 - RNA, 19 nt, Artificial Sequence
  Description of Artificial Sequence: Synthetic oligonucleotide
  Sense strand starting at position 2186 of SEQ ID NO: 169
ggugaugcuuauuaagcuu

SEQ ID NO: 16531 - RNA, 19 nt, Artificial Sequence
  Description of Artificial Sequence: Synthetic oligonucleotide
  Antisense strand to SEQ ID NO: 16530
aagcuuaauaagcaucacc

SEQ ID NO: 16532 - RNA, 19 nt, Artificial Sequence
  Description of Artificial Sequence: Synthetic oligonucleotide
  Sense strand starting at position 2185 of SEQ ID NO: 169
uggugaugcuuauuaagcu

SEQ ID NO: 16533 - RNA, 19 nt, Artificial Sequence
  Description of Artificial Sequence: Synthetic oligonucleotide
  Antisense strand to SEQ ID NO: 16532
agcuuaauaagcaucacca

SEQ ID NO: 16534 - RNA, 19 nt, Artificial Sequence
  Description of Artificial Sequence: Synthetic oligonucleotide
  Sense strand starting at position 2183 of SEQ ID NO: 169
ccuggugaugcuuauuaag

SEQ ID NO: 16535 - RNA, 19 nt, Artificial Sequence
  Description of Artificial Sequence: Synthetic oligonucleotide
  Antisense strand to SEQ ID NO: 16534
cuuaauaagcaucaccagg

SEQ ID NO: 16536 - RNA, 19 nt, Artificial Sequence
  Description of Artificial Sequence: Synthetic oligonucleotide
  Sense strand starting at position 2174 of SEQ ID NO: 169
ccgcgauguccuggugaug

SEQ ID NO: 16537 - RNA, 19 nt, Artificial Sequence
  Description of Artificial Sequence: Synthetic oligonucleotide
  Antisense strand to SEQ ID NO: 16536
caucaccaggacaucgcgg

SEQ ID NO: 16538 - RNA, 19 nt, Artificial Sequence
  Description of Artificial Sequence: Synthetic oligonucleotide
  Sense strand starting at position 2099 of SEQ ID NO: 169
ccugcuguccuccgaaauc

SEQ ID NO: 16539 - RNA, 19 nt, Artificial Sequence
  Description of Artificial Sequence: Synthetic oligonucleotide
  Antisense strand to SEQ ID NO: 16538
gauuucggaggacagcagg

SEQ ID NO: 16540 - RNA, 19 nt, Artificial Sequence
  Description of Artificial Sequence: Synthetic oligonucleotide
  Sense strand starting at position 1378 of SEQ ID NO: 169
gucuccuuugucggaguca

SEQ ID NO: 16541 - RNA, 19 nt, Artificial Sequence
  Description of Artificial Sequence: Synthetic oligonucleotide
  Antisense strand to SEQ ID NO: 16540
ugacuccgacaaaggagac

SEQ ID NO: 16542 - RNA, 19 nt, Artificial Sequence
  Description of Artificial Sequence: Synthetic oligonucleotide
  Sense strand starting at position 1022 of SEQ ID NO: 169
cugccauucccucgcuaaa

SEQ ID NO: 16543 - RNA, 19 nt, Artificial Sequence
  Description of Artificial Sequence: Synthetic oligonucleotide
  Antisense strand to SEQ ID NO: 16542
uuuagcgagggaauggcag

SEQ ID NO: 16544 - RNA, 19 nt, Artificial Sequence
  Description of Artificial Sequence: Synthetic oligonucleotide
  Sense strand starting at position 992 of SEQ ID NO: 169
gacagauuccucugcuuag

SEQ ID NO: 16545 - RNA, 19 nt, Artificial Sequence
  Description of Artificial Sequence: Synthetic oligonucleotide
  Antisense strand to SEQ ID NO: 16544
cuaagcagaggaaucuguc

SEQ ID NO: 16546 - RNA, 19 nt, Artificial Sequence
  Description of Artificial Sequence: Synthetic oligonucleotide
  Sense strand starting at position 674 of SEQ ID NO: 169
ccgcguauuucccaaaggu

SEQ ID NO: 16547 - RNA, 19 nt, Artificial Sequence
  Description of Artificial Sequence: Synthetic oligonucleotide
  Antisense strand to SEQ ID NO: 16546
accuuugggaaauacgcgg

SEQ ID NO: 16548 - RNA, 19 nt, Artificial Sequence
  Description of Artificial Sequence: Synthetic oligonucleotide
  Sense strand starting at position 552 of SEQ ID NO: 169
ucaggaaccuguuguggaa

SEQ ID NO: 16549 - RNA, 19 nt, Artificial Sequence
  Description of Artificial Sequence: Synthetic oligonucleotide
  Antisense strand to SEQ ID NO: 16548
uuccacaacagguuccuga

SEQ ID NO: 16550 - RNA, 19 nt, Artificial Sequence
  Description of Artificial Sequence: Synthetic oligonucleotide
  Sense strand starting at position 228 of SEQ ID NO: 169
cacagcugguucugacaaa

SEQ ID NO: 16551 - RNA, 19 nt, Artificial Sequence
  Description of Artificial Sequence: Synthetic oligonucleotide
  Antisense strand to SEQ ID NO: 16550
uuugucagaaccagcugug

SEQ ID NO: 16552 - RNA, 19 nt, Artificial Sequence
  Description of Artificial Sequence: Synthetic oligonucleotide
  Sense strand starting at position 190 of SEQ ID NO: 169
gaaacaguaugucagauca

SEQ ID NO: 16553 - RNA, 19 nt, Artificial Sequence
  Description of Artificial Sequence: Synthetic oligonucleotide
  Antisense strand to SEQ ID NO: 16552
ugaucugacauacuguuuc

SEQ ID NO: 16554 - RNA, 19 nt, Artificial Sequence
  Description of Artificial Sequence: Synthetic oligonucleotide
  Sense strand starting at position 187 of SEQ ID NO: 169
ucagaaacaguaugucaga

SEQ ID NO: 16555 - RNA, 19 nt, Artificial Sequence
  Description of Artificial Sequence: Synthetic oligonucleotide
  Antisense strand to SEQ ID NO: 16554
ucugacauacuguuucuga

SEQ ID NO: 16556 - RNA, 19 nt, Artificial Sequence
  Description of Artificial Sequence: Synthetic oligonucleotide
  Sense strand starting at position 178 of SEQ ID NO: 169
gguggcuugucagaaacag

SEQ ID NO: 16557 - RNA, 19 nt, Artificial Sequence
  Description of Artificial Sequence: Synthetic oligonucleotide
  Antisense strand to SEQ ID NO: 16556
cuguuucugacaagccacc

SEQ ID NO: 16558 - RNA, 19 nt, Artificial Sequence
  Description of Artificial Sequence: Synthetic oligonucleotide
  Sense strand starting at position 175 of SEQ ID NO: 169
caagguggcuugucagaaa

SEQ ID NO: 16559 - RNA, 19 nt, Artificial Sequence
  Description of Artificial Sequence: Synthetic oligonucleotide
  Antisense strand to SEQ ID NO: 16558
uuucugacaagccaccuug

SEQ ID NO: 16560 - RNA, 19 nt, Artificial Sequence
  Description of Artificial Sequence: Synthetic oligonucleotide
  Sense strand starting at position 60 of SEQ ID NO: 169
cugguagugguagagauua

SEQ ID NO: 16561 - RNA, 19 nt, Artificial Sequence
  Description of Artificial Sequence: Synthetic oligonucleotide
  Antisense strand to SEQ ID NO: 16560
uaaucucuaccacuaccag

SEQ ID NO: 16562 - RNA, 19 nt, Artificial Sequence
  Description of Artificial Sequence: Synthetic oligonucleotide
  Sense strand starting at position 401 of SEQ ID NO: 170
agaguuacauaaguaacau

SEQ ID NO: 16563 - RNA, 19 nt, Artificial Sequence
  Description of Artificial Sequence: Synthetic oligonucleotide
  Antisense strand to SEQ ID NO: 16562
auguuacuuauguaacucu

SEQ ID NO: 16564 - RNA, 19 nt, Artificial Sequence
  Description of Artificial Sequence: Synthetic oligonucleotide
  Sense strand starting at position 650 of SEQ ID NO: 170
agaucugggcuuggaaauu

SEQ ID NO: 16565 - RNA, 19 nt, Artificial Sequence
  Description of Artificial Sequence: Synthetic oligonucleotide
  Antisense strand to SEQ ID NO: 16564
aauuuccaagcccagaucu

SEQ ID NO: 16566 - RNA, 19 nt, Artificial Sequence
  Description of Artificial Sequence: Synthetic oligonucleotide
  Sense strand starting at position 661 of SEQ ID NO: 170
uggaaauuauagcucaucu

SEQ ID NO: 16567 - RNA, 19 nt, Artificial Sequence
  Description of Artificial Sequence: Synthetic oligonucleotide
  Antisense strand to SEQ ID NO: 16566
agaugagcuauaauuucca

SEQ ID NO: 16568 - RNA, 19 nt, Artificial Sequence
  Description of Artificial Sequence: Synthetic oligonucleotide
  Sense strand starting at position 694 of SEQ ID NO: 170
ccauuuacccucuguguga

SEQ ID NO: 16569 - RNA, 19 nt, Artificial Sequence
  Description of Artificial Sequence: Synthetic oligonucleotide
  Antisense strand to SEQ ID NO: 16568
ucacacagaggguaaaugg

SEQ ID NO: 16570 - RNA, 19 nt, Artificial Sequence
  Description of Artificial Sequence: Synthetic oligonucleotide
  Sense strand starting at position 849 of SEQ ID NO: 170
gugacuccauuucugcaua

SEQ ID NO: 16571 - RNA, 19 nt, Artificial Sequence
  Description of Artificial Sequence: Synthetic oligonucleotide
  Antisense strand to SEQ ID NO: 16570
uaugcagaaauggagucac

SEQ ID NO: 16572 - RNA, 19 nt, Artificial Sequence
  Description of Artificial Sequence: Synthetic oligonucleotide
  Sense strand starting at position 929 of SEQ ID NO: 170
uguugaaguucauugagga

SEQ ID NO: 16573 - RNA, 19 nt, Artificial Sequence
  Description of Artificial Sequence: Synthetic oligonucleotide
  Antisense strand to SEQ ID NO: 16572
uccucaaugaacuucaaca

SEQ ID NO: 16574 - RNA, 19 nt, Artificial Sequence
  Description of Artificial Sequence: Synthetic oligonucleotide
  Sense strand starting at position 930 of SEQ ID NO: 170
guugaaguucauugaggac

SEQ ID NO: 16575 - RNA, 19 nt, Artificial Sequence
  Description of Artificial Sequence: Synthetic oligonucleotide
  Antisense strand to SEQ ID NO: 16574
guccucaaugaacuucaac

SEQ ID NO: 16576 - RNA, 19 nt, Artificial Sequence
  Description of Artificial Sequence: Synthetic oligonucleotide
  Sense strand starting at position 1461 of SEQ ID NO: 170
ggaacauauggcuggguaa

SEQ ID NO: 16577 - RNA, 19 nt, Artificial Sequence
  Description of Artificial Sequence: Synthetic oligonucleotide
  Antisense strand to SEQ ID NO: 16576
uuacccagccauauguucc

SEQ ID NO: 16578 - RNA, 19 nt, Artificial Sequence
  Description of Artificial Sequence: Synthetic oligonucleotide
  Sense strand starting at position 1462 of SEQ ID NO: 170
gaacauauggcuggguaau

SEQ ID NO: 16579 - RNA, 19 nt, Artificial Sequence
  Description of Artificial Sequence: Synthetic oligonucleotide
  Antisense strand to SEQ ID NO: 16578
auuacccagccauauguuc

SEQ ID NO: 16580 - RNA, 19 nt, Artificial Sequence
  Description of Artificial Sequence: Synthetic oligonucleotide
  Sense strand starting at position 1495 of SEQ ID NO: 170
gaaggucucacagggagua

SEQ ID NO: 16581 - RNA, 19 nt, Artificial Sequence
  Description of Artificial Sequence: Synthetic oligonucleotide
  Antisense strand to SEQ ID NO: 16580
uacucccugugagaccuuc

SEQ ID NO: 16582 - RNA, 19 nt, Artificial Sequence
  Description of Artificial Sequence: Synthetic oligonucleotide
  Sense strand starting at position 1730 of SEQ ID NO: 170
uucugugaaaucugggaag

SEQ ID NO: 16583 - RNA, 19 nt, Artificial Sequence
  Description of Artificial Sequence: Synthetic oligonucleotide
  Antisense strand to SEQ ID NO: 16582
cuucccagauuucacagaa

SEQ ID NO: 16584 - RNA, 19 nt, Artificial Sequence
  Description of Artificial Sequence: Synthetic oligonucleotide
  Sense strand starting at position 1732 of SEQ ID NO: 170
cugugaaaucugggaagua

SEQ ID NO: 16585 - RNA, 19 nt, Artificial Sequence
  Description of Artificial Sequence: Synthetic oligonucleotide
  Antisense strand to SEQ ID NO: 16584
uacuucccagauuucacag

SEQ ID NO: 16586 - RNA, 19 nt, Artificial Sequence
  Description of Artificial Sequence: Synthetic oligonucleotide
  Sense strand starting at position 2136 of SEQ ID NO: 170
cuuuauuuguuucuaguga

SEQ ID NO: 16587 - RNA, 19 nt, Artificial Sequence
  Description of Artificial Sequence: Synthetic oligonucleotide
  Antisense strand to SEQ ID NO: 16586
ucacuagaaacaaauaaag

SEQ ID NO: 16588 - RNA, 19 nt, Artificial Sequence
  Description of Artificial Sequence: Synthetic oligonucleotide
  Sense strand starting at position 2218 of SEQ ID NO: 170
ugcauagaugguggacuaa

SEQ ID NO: 16589 - RNA, 19 nt, Artificial Sequence
  Description of Artificial Sequence: Synthetic oligonucleotide
  Antisense strand to SEQ ID NO: 16588
uuaguccaccaucuaugca

SEQ ID NO: 16590 - RNA, 19 nt, Artificial Sequence
  Description of Artificial Sequence: Synthetic oligonucleotide
  Sense strand starting at position 2255 of SEQ ID NO: 170
gucucaggugacuggaaua

SEQ ID NO: 16591 - RNA, 19 nt, Artificial Sequence
  Description of Artificial Sequence: Synthetic oligonucleotide
  Antisense strand to SEQ ID NO: 16590
uauuccagucaccugagac

SEQ ID NO: 16592 - RNA, 19 nt, Artificial Sequence
  Description of Artificial Sequence: Synthetic oligonucleotide
  Sense strand starting at position 2288 of SEQ ID NO: 170
gggcauugugcugcucuua

SEQ ID NO: 16593 - RNA, 19 nt, Artificial Sequence
  Description of Artificial Sequence: Synthetic oligonucleotide
  Antisense strand to SEQ ID NO: 16592
uaagagcagcacaaugccc

SEQ ID NO: 16594 - RNA, 19 nt, Artificial Sequence
  Description of Artificial Sequence: Synthetic oligonucleotide
  Sense strand starting at position 2289 of SEQ ID NO: 170
ggcauugugcugcucuuaa

SEQ ID NO: 16595 - RNA, 19 nt, Artificial Sequence
  Description of Artificial Sequence: Synthetic oligonucleotide
  Antisense strand to SEQ ID NO: 16594
uuaagagcagcacaaugcc

SEQ ID NO: 16596 - RNA, 19 nt, Artificial Sequence
  Description of Artificial Sequence: Synthetic oligonucleotide
  Sense strand starting at position 2291 of SEQ ID NO: 170
cauugugcugcucuuaagu

SEQ ID NO: 16597 - RNA, 19 nt, Artificial Sequence
  Description of Artificial Sequence: Synthetic oligonucleotide
  Antisense strand to SEQ ID NO: 16596
acuuaagagcagcacaaug

SEQ ID NO: 16598 - RNA, 19 nt, Artificial Sequence
  Description of Artificial Sequence: Synthetic oligonucleotide
  Sense strand starting at position 2320 of SEQ ID NO: 170
guugaaguuccaggaagau

SEQ ID NO: 16599 - RNA, 19 nt, Artificial Sequence
  Description of Artificial Sequence: Synthetic oligonucleotide
  Antisense strand to SEQ ID NO: 16598
aucuuccuggaacuucaac

SEQ ID NO: 16600 - RNA, 19 nt, Artificial Sequence
  Description of Artificial Sequence: Synthetic oligonucleotide
  Sense strand starting at position 2340 of SEQ ID NO: 170
uuacuauggugacuaaaca

SEQ ID NO: 16601 - RNA, 19 nt, Artificial Sequence
  Description of Artificial Sequence: Synthetic oligonucleotide
  Antisense strand to SEQ ID NO: 16600
uguuuagucaccauaguaa

SEQ ID NO: 16602 - RNA, 19 nt, Artificial Sequence
  Description of Artificial Sequence: Synthetic oligonucleotide
  Sense strand starting at position 2371 of SEQ ID NO: 170
aguaguaguaaucaugaua

SEQ ID NO: 16603 - RNA, 19 nt, Artificial Sequence
  Description of Artificial Sequence: Synthetic oligonucleotide
  Antisense strand to SEQ ID NO: 16602
uaucaugauuacuacuacu

SEQ ID NO: 16604 - RNA, 19 nt, Artificial Sequence
  Description of Artificial Sequence: Synthetic oligonucleotide
  Sense strand starting at position 2395 of SEQ ID NO: 170
agacuauaacuguagguuu

SEQ ID NO: 16605 - RNA, 19 nt, Artificial Sequence
  Description of Artificial Sequence: Synthetic oligonucleotide
  Antisense strand to SEQ ID NO: 16604
aaaccuacaguuauagucu

SEQ ID NO: 16606 - RNA, 19 nt, Artificial Sequence
  Description of Artificial Sequence: Synthetic oligonucleotide
  Sense strand starting at position 2459 of SEQ ID NO: 170
guguuuguggugaguauug

SEQ ID NO: 16607 - RNA, 19 nt, Artificial Sequence
  Description of Artificial Sequence: Synthetic oligonucleotide
  Antisense strand to SEQ ID NO: 16606
caauacucaccacaaacac

SEQ ID NO: 16608 - RNA, 19 nt, Artificial Sequence
  Description of Artificial Sequence: Synthetic oligonucleotide
  Sense strand starting at position 2543 of SEQ ID NO: 170
ucagaauauuggucacaga

SEQ ID NO: 16609 - RNA, 19 nt, Artificial Sequence
  Description of Artificial Sequence: Synthetic oligonucleotide
  Antisense strand to SEQ ID NO: 16608
ucugugaccaauauucuga

SEQ ID NO: 16610 - RNA, 19 nt, Artificial Sequence
  Description of Artificial Sequence: Synthetic oligonucleotide
  Sense strand starting at position 2618 of SEQ ID NO: 170
cuaaucuguugacuuagaa

SEQ ID NO: 16611 - RNA, 19 nt, Artificial Sequence
  Description of Artificial Sequence: Synthetic oligonucleotide
  Antisense strand to SEQ ID NO: 16610
uucuaagucaacagauuag

SEQ ID NO: 16612 - RNA, 19 nt, Artificial Sequence
  Description of Artificial Sequence: Synthetic oligonucleotide
  Sense strand starting at position 2649 of SEQ ID NO: 170
cccgauacgauuugcagau

SEQ ID NO: 16613 - RNA, 19 nt, Artificial Sequence
  Description of Artificial Sequence: Synthetic oligonucleotide
  Antisense strand to SEQ ID NO: 16612
aucugcaaaucguaucggg

SEQ ID NO: 16614 - RNA, 19 nt, Artificial Sequence
  Description of Artificial Sequence: Synthetic oligonucleotide
  Sense strand starting at position 2650 of SEQ ID NO: 170
ccgauacgauuugcagauu

SEQ ID NO: 16615 - RNA, 19 nt, Artificial Sequence
  Description of Artificial Sequence: Synthetic oligonucleotide
  Antisense strand to SEQ ID NO: 16614
aaucugcaaaucguaucgg

SEQ ID NO: 16616 - RNA, 19 nt, Artificial Sequence
  Description of Artificial Sequence: Synthetic oligonucleotide
  Sense strand starting at position 2860 of SEQ ID NO: 170
cuacauuaugugugcauuu

SEQ ID NO: 16617 - RNA, 19 nt, Artificial Sequence
  Description of Artificial Sequence: Synthetic oligonucleotide
  Antisense strand to SEQ ID NO: 16616
aaaugcacacauaauguag

SEQ ID NO: 16618 - RNA, 19 nt, Artificial Sequence
  Description of Artificial Sequence: Synthetic oligonucleotide
  Sense strand starting at position 2999 of SEQ ID NO: 170
ccugguguaacugggauaa

SEQ ID NO: 16619 - RNA, 19 nt, Artificial Sequence
  Description of Artificial Sequence: Synthetic oligonucleotide
  Antisense strand to SEQ ID NO: 16618
uuaucccaguuacaccagg

SEQ ID NO: 16620 - RNA, 19 nt, Artificial Sequence
  Description of Artificial Sequence: Synthetic oligonucleotide
  Sense strand starting at position 3074 of SEQ ID NO: 170
gguggcuuaacaggaagaa

SEQ ID NO: 16621 - RNA, 19 nt, Artificial Sequence
  Description of Artificial Sequence: Synthetic oligonucleotide
  Antisense strand to SEQ ID NO: 16620
uucuuccuguuaagccacc

SEQ ID NO: 16622 - RNA, 19 nt, Artificial Sequence
  Description of Artificial Sequence: Synthetic oligonucleotide
  Sense strand starting at position 3236 of SEQ ID NO: 170
agaagaagcuucucaucuc

SEQ ID NO: 16623 - RNA, 19 nt, Artificial Sequence
  Description of Artificial Sequence: Synthetic oligonucleotide
  Antisense strand to SEQ ID NO: 16622
gagaugagaagcuucuucu

SEQ ID NO: 16624 - RNA, 19 nt, Artificial Sequence
  Description of Artificial Sequence: Synthetic oligonucleotide
  Sense strand starting at position 3304 of SEQ ID NO: 170
aaacuuauguggguuugaa

SEQ ID NO: 16625 - RNA, 19 nt, Artificial Sequence
  Description of Artificial Sequence: Synthetic oligonucleotide
  Antisense strand to SEQ ID NO: 16624
uucaaacccacauaaguuu

SEQ ID NO: 16626 - RNA, 19 nt, Artificial Sequence
  Description of Artificial Sequence: Synthetic oligonucleotide
  Sense strand starting at position 3328 of SEQ ID NO: 170
acagccucugcagagauaa

SEQ ID NO: 16627 - RNA, 19 nt, Artificial Sequence
  Description of Artificial Sequence: Synthetic oligonucleotide
  Antisense strand to SEQ ID NO: 16626
uuaucucugcagaggcugu

SEQ ID NO: 16628 - RNA, 19 nt, Artificial Sequence
  Description of Artificial Sequence: Synthetic oligonucleotide
  Sense strand starting at position 3441 of SEQ ID NO: 170
aaagccuggcuggagaauu

SEQ ID NO: 16629 - RNA, 19 nt, Artificial Sequence
  Description of Artificial Sequence: Synthetic oligonucleotide
  Antisense strand to SEQ ID NO: 16628
aauucuccagccaggcuuu

SEQ ID NO: 16630 - RNA, 19 nt, Artificial Sequence
  Description of Artificial Sequence: Synthetic oligonucleotide
  Sense strand starting at position 3650 of SEQ ID NO: 170
uguauuacugagcaucaau

SEQ ID NO: 16631 - RNA, 19 nt, Artificial Sequence
  Description of Artificial Sequence: Synthetic oligonucleotide
  Antisense strand to SEQ ID NO: 16630
auugaugcucaguaauaca

SEQ ID NO: 16632 - RNA, 19 nt, Artificial Sequence
  Description of Artificial Sequence: Synthetic oligonucleotide
  Sense strand starting at position 3661 of SEQ ID NO: 170
gcaucaaugggacaagcuu

SEQ ID NO: 16633 - RNA, 19 nt, Artificial Sequence
  Description of Artificial Sequence: Synthetic oligonucleotide
  Antisense strand to SEQ ID NO: 16632
aagcuugucccauugaugc

SEQ ID NO: 16634 - RNA, 19 nt, Artificial Sequence
  Description of Artificial Sequence: Synthetic oligonucleotide
  Sense strand starting at position 3716 of SEQ ID NO: 170
uccagaaacuggguaugau

SEQ ID NO: 16635 - RNA, 19 nt, Artificial Sequence
  Description of Artificial Sequence: Synthetic oligonucleotide
  Antisense strand to SEQ ID NO: 16634
aucauacccaguuucugga

SEQ ID NO: 16636 - RNA, 19 nt, Artificial Sequence
  Description of Artificial Sequence: Synthetic oligonucleotide
  Sense strand starting at position 3725 of SEQ ID NO: 170
uggguaugauacuuuacaa

SEQ ID NO: 16637 - RNA, 19 nt, Artificial Sequence
  Description of Artificial Sequence: Synthetic oligonucleotide
  Antisense strand to SEQ ID NO: 16636
uuguaaaguaucauaccca

SEQ ID NO: 16638 - RNA, 19 nt, Artificial Sequence
  Description of Artificial Sequence: Synthetic oligonucleotide
  Sense strand starting at position 3908 of SEQ ID NO: 170
guggcuucugaguagaaga

SEQ ID NO: 16639 - RNA, 19 nt, Artificial Sequence
  Description of Artificial Sequence: Synthetic oligonucleotide
  Antisense strand to SEQ ID NO: 16638
ucuucuacucagaagccac

SEQ ID NO: 16640 - RNA, 19 nt, Artificial Sequence
  Description of Artificial Sequence: Synthetic oligonucleotide
  Sense strand starting at position 3919 of SEQ ID NO: 170
guagaagaauuguucucau

SEQ ID NO: 16641 - RNA, 19 nt, Artificial Sequence
  Description of Artificial Sequence: Synthetic oligonucleotide
  Antisense strand to SEQ ID NO: 16640
augagaacaauucuucuac

SEQ ID NO: 16642 - RNA, 19 nt, Artificial Sequence
  Description of Artificial Sequence: Synthetic oligonucleotide
  Sense strand starting at position 3965 of SEQ ID NO: 171
cccagaaccuuggagucaa

SEQ ID NO: 16643 - RNA, 19 nt, Artificial Sequence
  Description of Artificial Sequence: Synthetic oligonucleotide
  Antisense strand to SEQ ID NO: 16642
uugacuccaagguucuggg

SEQ ID NO: 16644 - RNA, 19 nt, Artificial Sequence
  Description of Artificial Sequence: Synthetic oligonucleotide
  Sense strand starting at position 3634 of SEQ ID NO: 171
agaacacuguccuaagaag

SEQ ID NO: 16645 - RNA, 19 nt, Artificial Sequence
  Description of Artificial Sequence: Synthetic oligonucleotide
  Antisense strand to SEQ ID NO: 16644
cuucuuaggacaguguucu

SEQ ID NO: 16646 - RNA, 19 nt, Artificial Sequence
  Description of Artificial Sequence: Synthetic oligonucleotide
  Sense strand starting at position 3617 of SEQ ID NO: 171
gaauaugacuuggagaaag

SEQ ID NO: 16647 - RNA, 19 nt, Artificial Sequence
  Description of Artificial Sequence: Synthetic oligonucleotide
  Antisense strand to SEQ ID NO: 16646
cuuucuccaagucauauuc

SEQ ID NO: 16648 - RNA, 19 nt, Artificial Sequence
  Description of Artificial Sequence: Synthetic oligonucleotide
  Sense strand starting at position 3532 of SEQ ID NO: 171
aguaauguggcaugccuaa

SEQ ID NO: 16649 - RNA, 19 nt, Artificial Sequence
  Description of Artificial Sequence: Synthetic oligonucleotide
  Antisense strand to SEQ ID NO: 16648
uuaggcaugccacauuacu

SEQ ID NO: 16650 - RNA, 19 nt, Artificial Sequence
  Description of Artificial Sequence: Synthetic oligonucleotide
  Sense strand starting at position 3530 of SEQ ID NO: 171
gaaguaauguggcaugccu

SEQ ID NO: 16651 - RNA, 19 nt, Artificial Sequence
  Description of Artificial Sequence: Synthetic oligonucleotide
  Antisense strand to SEQ ID NO: 16650
aggcaugccacauuacuuc

SEQ ID NO: 16652 - RNA, 19 nt, Artificial Sequence
  Description of Artificial Sequence: Synthetic oligonucleotide
  Sense strand starting at position 3517 of SEQ ID NO: 171
acuaaugugcauggaagua

SEQ ID NO: 16653 - RNA, 19 nt, Artificial Sequence
  Description of Artificial Sequence: Synthetic oligonucleotide
  Antisense strand to SEQ ID NO: 16652
uacuuccaugcacauuagu

SEQ ID NO: 16654 - RNA, 19 nt, Artificial Sequence
  Description of Artificial Sequence: Synthetic oligonucleotide
  Sense strand starting at position 3516 of SEQ ID NO: 171
cacuaaugugcauggaagu

SEQ ID NO: 16655 - RNA, 19 nt, Artificial Sequence
  Description of Artificial Sequence: Synthetic oligonucleotide
  Antisense strand to SEQ ID NO: 16654
acuuccaugcacauuagug

SEQ ID NO: 16656 - RNA, 19 nt, Artificial Sequence
  Description of Artificial Sequence: Synthetic oligonucleotide
  Sense strand starting at position 3514 of SEQ ID NO: 171
gucacuaaugugcauggaa

SEQ ID NO: 16657 - RNA, 19 nt, Artificial Sequence
  Description of Artificial Sequence: Synthetic oligonucleotide
  Antisense strand to SEQ ID NO: 16656
uuccaugcacauuagugac

SEQ ID NO: 16658 - RNA, 19 nt, Artificial Sequence
  Description of Artificial Sequence: Synthetic oligonucleotide
  Sense strand starting at position 3510 of SEQ ID NO: 171
ugaagucacuaaugugcau

SEQ ID NO: 16659 - RNA, 19 nt, Artificial Sequence
  Description of Artificial Sequence: Synthetic oligonucleotide
  Antisense strand to SEQ ID NO: 16658
augcacauuagugacuuca

SEQ ID NO: 16660 - RNA, 19 nt, Artificial Sequence
  Description of Artificial Sequence: Synthetic oligonucleotide
  Sense strand starting at position 3478 of SEQ ID NO: 171
agggaauuaucugaauaua

SEQ ID NO: 16661 - RNA, 19 nt, Artificial Sequence
  Description of Artificial Sequence: Synthetic oligonucleotide
  Antisense strand to SEQ ID NO: 16660
uauauucagauaauucccu

SEQ ID NO: 16662 - RNA, 19 nt, Artificial Sequence
  Description of Artificial Sequence: Synthetic oligonucleotide
  Sense strand starting at position 3467 of SEQ ID NO: 171
ccucuugccuuagggaauu

SEQ ID NO: 16663 - RNA, 19 nt, Artificial Sequence
  Description of Artificial Sequence: Synthetic oligonucleotide
  Antisense strand to SEQ ID NO: 16662
aauucccuaaggcaagagg

SEQ ID NO: 16664 - RNA, 19 nt, Artificial Sequence
  Description of Artificial Sequence: Synthetic oligonucleotide
  Sense strand starting at position 3465 of SEQ ID NO: 171
agccucuugccuuagggaa

SEQ ID NO: 16665 - RNA, 19 nt, Artificial Sequence
  Description of Artificial Sequence: Synthetic oligonucleotide
  Antisense strand to SEQ ID NO: 16664
uucccuaaggcaagaggcu

SEQ ID NO: 16666 - RNA, 19 nt, Artificial Sequence
  Description of Artificial Sequence: Synthetic oligonucleotide
  Sense strand starting at position 3408 of SEQ ID NO: 171
uugccuugucaccaaagca

SEQ ID NO: 16667 - RNA, 19 nt, Artificial Sequence
  Description of Artificial Sequence: Synthetic oligonucleotide
  Antisense strand to SEQ ID NO: 16666
ugcuuuggugacaaggcaa

SEQ ID NO: 16668 - RNA, 19 nt, Artificial Sequence
  Description of Artificial Sequence: Synthetic oligonucleotide
  Sense strand starting at position 3404 of SEQ ID NO: 171
aggauugccuugucaccaa

SEQ ID NO: 16669 - RNA, 19 nt, Artificial Sequence
  Description of Artificial Sequence: Synthetic oligonucleotide
  Antisense strand to SEQ ID NO: 16668
uuggugacaaggcaauccu

SEQ ID NO: 16670 - RNA, 19 nt, Artificial Sequence
  Description of Artificial Sequence: Synthetic oligonucleotide
  Sense strand starting at position 3402 of SEQ ID NO: 171
agaggauugccuugucacc

SEQ ID NO: 16671 - RNA, 19 nt, Artificial Sequence
  Description of Artificial Sequence: Synthetic oligonucleotide
  Antisense strand to SEQ ID NO: 16670
ggugacaaggcaauccucu

SEQ ID NO: 16672 - RNA, 19 nt, Artificial Sequence
  Description of Artificial Sequence: Synthetic oligonucleotide
  Sense strand starting at position 3373 of SEQ ID NO: 171
aguuguucccaggguggua

SEQ ID NO: 16673 - RNA, 19 nt, Artificial Sequence
  Description of Artificial Sequence: Synthetic oligonucleotide
  Antisense strand to SEQ ID NO: 16672
uaccacccugggaacaacu

SEQ ID NO: 16674 - RNA, 19 nt, Artificial Sequence
  Description of Artificial Sequence: Synthetic oligonucleotide
  Sense strand starting at position 3358 of SEQ ID NO: 171
aagagagugcccuaaaguu

SEQ ID NO: 16675 - RNA, 19 nt, Artificial Sequence
  Description of Artificial Sequence: Synthetic oligonucleotide
  Antisense strand to SEQ ID NO: 16674
aacuuuagggcacucucuu

SEQ ID NO: 16676 - RNA, 19 nt, Artificial Sequence
  Description of Artificial Sequence: Synthetic oligonucleotide
  Sense strand starting at position 3311 of SEQ ID NO: 171
gagugacucccuuagccuu

SEQ ID NO: 16677 - RNA, 19 nt, Artificial Sequence
  Description of Artificial Sequence: Synthetic oligonucleotide
  Antisense strand to SEQ ID NO: 16676
aaggcuaagggagucacuc

SEQ ID NO: 16678 - RNA, 19 nt, Artificial Sequence
  Description of Artificial Sequence: Synthetic oligonucleotide
  Sense strand starting at position 3298 of SEQ ID NO: 171
gggaagguaucaggaguga

SEQ ID NO: 16679 - RNA, 19 nt, Artificial Sequence
  Description of Artificial Sequence: Synthetic oligonucleotide
  Antisense strand to SEQ ID NO: 16678
ucacuccugauaccuuccc

SEQ ID NO: 16680 - RNA, 19 nt, Artificial Sequence
  Description of Artificial Sequence: Synthetic oligonucleotide
  Sense strand starting at position 3296 of SEQ ID NO: 171
gugggaagguaucaggagu

SEQ ID NO: 16681 - RNA, 19 nt, Artificial Sequence
  Description of Artificial Sequence: Synthetic oligonucleotide
  Antisense strand to SEQ ID NO: 16680
acuccugauaccuucccac

SEQ ID NO: 16682 - RNA, 19 nt, Artificial Sequence
  Description of Artificial Sequence: Synthetic oligonucleotide
  Sense strand starting at position 1997 of SEQ ID NO: 171
cgcuacuuugugucaguuu

SEQ ID NO: 16683 - RNA, 19 nt, Artificial Sequence
  Description of Artificial Sequence: Synthetic oligonucleotide
  Antisense strand to SEQ ID NO: 16682
aaacugacacaaaguagcg

SEQ ID NO: 16684 - RNA, 19 nt, Artificial Sequence
  Description of Artificial Sequence: Synthetic oligonucleotide
  Sense strand starting at position 1424 of SEQ ID NO: 171
ggcauagaccuccaccuua

SEQ ID NO: 16685 - RNA, 19 nt, Artificial Sequence
  Description of Artificial Sequence: Synthetic oligonucleotide
  Antisense strand to SEQ ID NO: 16684
uaagguggaggucuaugcc

SEQ ID NO: 16686 - RNA, 19 nt, Artificial Sequence
  Description of Artificial Sequence: Synthetic oligonucleotide
  Sense strand starting at position 1372 of SEQ ID NO: 171
gcuaucaucucccagagcu

SEQ ID NO: 16687 - RNA, 19 nt, Artificial Sequence
  Description of Artificial Sequence: Synthetic oligonucleotide
  Antisense strand to SEQ ID NO: 16686
agcucugggagaugauagc

SEQ ID NO: 16688 - RNA, 19 nt, Artificial Sequence
  Description of Artificial Sequence: Synthetic oligonucleotide
  Sense strand starting at position 1157 of SEQ ID NO: 171
ggcaaugcuccauggagga

SEQ ID NO: 16689 - RNA, 19 nt, Artificial Sequence
  Description of Artificial Sequence: Synthetic oligonucleotide
  Antisense strand to SEQ ID NO: 16688
uccuccauggagcauugcc

SEQ ID NO: 16690 - RNA, 19 nt, Artificial Sequence
  Description of Artificial Sequence: Synthetic oligonucleotide
  Sense strand starting at position 889 of SEQ ID NO: 171
caggaaaguuguucuaccu

SEQ ID NO: 16691 - RNA, 19 nt, Artificial Sequence
  Description of Artificial Sequence: Synthetic oligonucleotide
  Antisense strand to SEQ ID NO: 16690
agguagaacaacuuuccug

SEQ ID NO: 16692 - RNA, 19 nt, Artificial Sequence
  Description of Artificial Sequence: Synthetic oligonucleotide
  Sense strand starting at position 866 of SEQ ID NO: 171
gagucaggagucuggauau

SEQ ID NO: 16693 - RNA, 19 nt, Artificial Sequence
  Description of Artificial Sequence: Synthetic oligonucleotide
  Antisense strand to SEQ ID NO: 16692
auauccagacuccugacuc

SEQ ID NO: 16694 - RNA, 19 nt, Artificial Sequence
  Description of Artificial Sequence: Synthetic oligonucleotide
  Sense strand starting at position 818 of SEQ ID NO: 171
guuugagucccaugaaaga

SEQ ID NO: 16695 - RNA, 19 nt, Artificial Sequence
  Description of Artificial Sequence: Synthetic oligonucleotide
  Antisense strand to SEQ ID NO: 16694
ucuuucaugggacucaaac

SEQ ID NO: 16696 - RNA, 19 nt, Artificial Sequence
  Description of Artificial Sequence: Synthetic oligonucleotide
  Sense strand starting at position 816 of SEQ ID NO: 171
gaguuugagucccaugaaa

SEQ ID NO: 16697 - RNA, 19 nt, Artificial Sequence
  Description of Artificial Sequence: Synthetic oligonucleotide
  Antisense strand to SEQ ID NO: 16696
uuucaugggacucaaacuc

SEQ ID NO: 16698 - RNA, 19 nt, Artificial Sequence
  Description of Artificial Sequence: Synthetic oligonucleotide
  Sense strand starting at position 812 of SEQ ID NO: 171
aucugaguuugagucccau

SEQ ID NO: 16699 - RNA, 19 nt, Artificial Sequence
  Description of Artificial Sequence: Synthetic oligonucleotide
  Antisense strand to SEQ ID NO: 16698
augggacucaaacucagau

SEQ ID NO: 16700 - RNA, 19 nt, Artificial Sequence
  Description of Artificial Sequence: Synthetic oligonucleotide
  Sense strand starting at position 804 of SEQ ID NO: 171
gccuaaacaucugaguuug

SEQ ID NO: 16701 - RNA, 19 nt, Artificial Sequence
  Description of Artificial Sequence: Synthetic oligonucleotide
  Antisense strand to SEQ ID NO: 16700
caaacucagauguuuaggc

SEQ ID NO: 16702 - RNA, 19 nt, Artificial Sequence
  Description of Artificial Sequence: Synthetic oligonucleotide
  Sense strand starting at position 678 of SEQ ID NO: 171
ccagucugaguaugaguca

SEQ ID NO: 16703 - RNA, 19 nt, Artificial Sequence
  Description of Artificial Sequence: Synthetic oligonucleotide
  Antisense strand to SEQ ID NO: 16702
ugacucauacucagacugg

SEQ ID NO: 16704 - RNA, 19 nt, Artificial Sequence
  Description of Artificial Sequence: Synthetic oligonucleotide
  Sense strand starting at position 596 of SEQ ID NO: 171
gugccuggcucaggaagaa

SEQ ID NO: 16705 - RNA, 19 nt, Artificial Sequence
  Description of Artificial Sequence: Synthetic oligonucleotide
  Antisense strand to SEQ ID NO: 16704
uucuuccugagccaggcac

SEQ ID NO: 16706 - RNA, 19 nt, Artificial Sequence
  Description of Artificial Sequence: Synthetic oligonucleotide
  Sense strand starting at position 440 of SEQ ID NO: 171
ggcuaagcucuauaauuac

SEQ ID NO: 16707 - RNA, 19 nt, Artificial Sequence
  Description of Artificial Sequence: Synthetic oligonucleotide
  Antisense strand to SEQ ID NO: 16706
guaauuauagagcuuagcc

SEQ ID NO: 16708 - RNA, 19 nt, Artificial Sequence
  Description of Artificial Sequence: Synthetic oligonucleotide
  Sense strand starting at position 438 of SEQ ID NO: 171
cuggcuaagcucuauaauu

SEQ ID NO: 16709 - RNA, 19 nt, Artificial Sequence
  Description of Artificial Sequence: Synthetic oligonucleotide
  Antisense strand to SEQ ID NO: 16708
aauuauagagcuuagccag

SEQ ID NO: 16710 - RNA, 19 nt, Artificial Sequence
  Description of Artificial Sequence: Synthetic oligonucleotide
  Sense strand starting at position 322 of SEQ ID NO: 171
uuuccuugucuggguggaa

SEQ ID NO: 16711 - RNA, 19 nt, Artificial Sequence
  Description of Artificial Sequence: Synthetic oligonucleotide
  Antisense strand to SEQ ID NO: 16710
uuccacccagacaaggaaa

SEQ ID NO: 16712 - RNA, 19 nt, Artificial Sequence
  Description of Artificial Sequence: Synthetic oligonucleotide
  Sense strand starting at position 3664 of SEQ ID NO: 172
ggcauagaccuccaccuua

SEQ ID NO: 16713 - RNA, 19 nt, Artificial Sequence
  Description of Artificial Sequence: Synthetic oligonucleotide
  Antisense strand to SEQ ID NO: 16712
uaagguggaggucuaugcc

SEQ ID NO: 16714 - RNA, 19 nt, Artificial Sequence
  Description of Artificial Sequence: Synthetic oligonucleotide
  Sense strand starting at position 3397 of SEQ ID NO: 172
ggcaaugcuccauggagga

SEQ ID NO: 16715 - RNA, 19 nt, Artificial Sequence
  Description of Artificial Sequence: Synthetic oligonucleotide
  Antisense strand to SEQ ID NO: 16714
uccuccauggagcauugcc

SEQ ID NO: 16716 - RNA, 19 nt, Artificial Sequence
  Description of Artificial Sequence: Synthetic oligonucleotide
  Sense strand starting at position 3129 of SEQ ID NO: 172
caggaaaguuguucuaccu

SEQ ID NO: 16717 - RNA, 19 nt, Artificial Sequence
  Description of Artificial Sequence: Synthetic oligonucleotide
  Antisense strand to SEQ ID NO: 16716
agguagaacaacuuuccug

SEQ ID NO: 16718 - RNA, 19 nt, Artificial Sequence
  Description of Artificial Sequence: Synthetic oligonucleotide
  Sense strand starting at position 3106 of SEQ ID NO: 172
gagucaggagucuggauau

SEQ ID NO: 16719 - RNA, 19 nt, Artificial Sequence
  Description of Artificial Sequence: Synthetic oligonucleotide
  Antisense strand to SEQ ID NO: 16718
auauccagacuccugacuc

SEQ ID NO: 16720 - RNA, 19 nt, Artificial Sequence
  Description of Artificial Sequence: Synthetic oligonucleotide
  Sense strand starting at position 3058 of SEQ ID NO: 172
guuugagucccaugaaaga

SEQ ID NO: 16721 - RNA, 19 nt, Artificial Sequence
  Description of Artificial Sequence: Synthetic oligonucleotide
  Antisense strand to SEQ ID NO: 16720
ucuuucaugggacucaaac

SEQ ID NO: 16722 - RNA, 19 nt, Artificial Sequence
  Description of Artificial Sequence: Synthetic oligonucleotide
  Sense strand starting at position 3056 of SEQ ID NO: 172
gaguuugagucccaugaaa

SEQ ID NO: 16723 - RNA, 19 nt, Artificial Sequence
  Description of Artificial Sequence: Synthetic oligonucleotide
  Antisense strand to SEQ ID NO: 16722
uuucaugggacucaaacuc

SEQ ID NO: 16724 - RNA, 19 nt, Artificial Sequence
  Description of Artificial Sequence: Synthetic oligonucleotide
  Sense strand starting at position 3052 of SEQ ID NO: 172
aucugaguuugagucccau

SEQ ID NO: 16725 - RNA, 19 nt, Artificial Sequence
  Description of Artificial Sequence: Synthetic oligonucleotide
  Antisense strand to SEQ ID NO: 16724
augggacucaaacucagau

SEQ ID NO: 16726 - RNA, 19 nt, Artificial Sequence
  Description of Artificial Sequence: Synthetic oligonucleotide
  Sense strand starting at position 3044 of SEQ ID NO: 172
gccuaaacaucugaguuug

SEQ ID NO: 16727 - RNA, 19 nt, Artificial Sequence
  Description of Artificial Sequence: Synthetic oligonucleotide
  Antisense strand to SEQ ID NO: 16726
caaacucagauguuuaggc

SEQ ID NO: 16728 - RNA, 19 nt, Artificial Sequence
  Description of Artificial Sequence: Synthetic oligonucleotide
  Sense strand starting at position 2918 of SEQ ID NO: 172
ccagucugaguaugaguca

SEQ ID NO: 16729 - RNA, 19 nt, Artificial Sequence
  Description of Artificial Sequence: Synthetic oligonucleotide
  Antisense strand to SEQ ID NO: 16728
ugacucauacucagacugg

SEQ ID NO: 16730 - RNA, 19 nt, Artificial Sequence
  Description of Artificial Sequence: Synthetic oligonucleotide
  Sense strand starting at position 2680 of SEQ ID NO: 172
ggcuaagcucuauaauuac

SEQ ID NO: 16731 - RNA, 19 nt, Artificial Sequence
  Description of Artificial Sequence: Synthetic oligonucleotide
  Antisense strand to SEQ ID NO: 16730
guaauuauagagcuuagcc

SEQ ID NO: 16732 - RNA, 19 nt, Artificial Sequence
  Description of Artificial Sequence: Synthetic oligonucleotide
  Sense strand starting at position 2678 of SEQ ID NO: 172
cuggcuaagcucuauaauu

SEQ ID NO: 16733 - RNA, 19 nt, Artificial Sequence
  Description of Artificial Sequence: Synthetic oligonucleotide
  Antisense strand to SEQ ID NO: 16732
aauuauagagcuuagccag

SEQ ID NO: 16734 - RNA, 19 nt, Artificial Sequence
  Description of Artificial Sequence: Synthetic oligonucleotide
  Sense strand starting at position 2562 of SEQ ID NO: 172
uuuccuugucuggguggaa

SEQ ID NO: 16735 - RNA, 19 nt, Artificial Sequence
  Description of Artificial Sequence: Synthetic oligonucleotide
  Antisense strand to SEQ ID NO: 16734
uuccacccagacaaggaaa

SEQ ID NO: 16736 - RNA, 19 nt, Artificial Sequence
  Description of Artificial Sequence: Synthetic oligonucleotide
  Sense strand starting at position 2165 of SEQ ID NO: 172
gcuuauaaguucccugcca

SEQ ID NO: 16737 - RNA, 19 nt, Artificial Sequence
  Description of Artificial Sequence: Synthetic oligonucleotide
  Antisense strand to SEQ ID NO: 16736
uggcagggaacuuauaagc

SEQ ID NO: 16738 - RNA, 19 nt, Artificial Sequence
  Description of Artificial Sequence: Synthetic oligonucleotide
  Sense strand starting at position 2158 of SEQ ID NO: 172
ucgaaaggcuuauaaguuc

SEQ ID NO: 16739 - RNA, 19 nt, Artificial Sequence
  Description of Artificial Sequence: Synthetic oligonucleotide
  Antisense strand to SEQ ID NO: 16738
gaacuuauaagccuuucga

SEQ ID NO: 16740 - RNA, 19 nt, Artificial Sequence
  Description of Artificial Sequence: Synthetic oligonucleotide
  Sense strand starting at position 2156 of SEQ ID NO: 172
ucucgaaaggcuuauaagu

SEQ ID NO: 16741 - RNA, 19 nt, Artificial Sequence
  Description of Artificial Sequence: Synthetic oligonucleotide
  Antisense strand to SEQ ID NO: 16740
acuuauaagccuuucgaga

SEQ ID NO: 16742 - RNA, 19 nt, Artificial Sequence
  Description of Artificial Sequence: Synthetic oligonucleotide
  Sense strand starting at position 2051 of SEQ ID NO: 172
uugugcuuacuagaaagca

SEQ ID NO: 16743 - RNA, 19 nt, Artificial Sequence
  Description of Artificial Sequence: Synthetic oligonucleotide
  Antisense strand to SEQ ID NO: 16742
ugcuuucuaguaagcacaa

SEQ ID NO: 16744 - RNA, 19 nt, Artificial Sequence
  Description of Artificial Sequence: Synthetic oligonucleotide
  Sense strand starting at position 2049 of SEQ ID NO: 172
gcuugugcuuacuagaaag

SEQ ID NO: 16745 - RNA, 19 nt, Artificial Sequence
  Description of Artificial Sequence: Synthetic oligonucleotide
  Antisense strand to SEQ ID NO: 16744
cuuucuaguaagcacaagc

SEQ ID NO: 16746 - RNA, 19 nt, Artificial Sequence
  Description of Artificial Sequence: Synthetic oligonucleotide
  Sense strand starting at position 2046 of SEQ ID NO: 172
agugcuugugcuuacuaga

SEQ ID NO: 16747 - RNA, 19 nt, Artificial Sequence
  Description of Artificial Sequence: Synthetic oligonucleotide
  Antisense strand to SEQ ID NO: 16746
ucuaguaagcacaagcacu

SEQ ID NO: 16748 - RNA, 19 nt, Artificial Sequence
  Description of Artificial Sequence: Synthetic oligonucleotide
  Sense strand starting at position 2041 of SEQ ID NO: 172
ugaguagugcuugugcuua

SEQ ID NO: 16749 - RNA, 19 nt, Artificial Sequence
  Description of Artificial Sequence: Synthetic oligonucleotide
  Antisense strand to SEQ ID NO: 16748
uaagcacaagcacuacuca

SEQ ID NO: 16750 - RNA, 19 nt, Artificial Sequence
  Description of Artificial Sequence: Synthetic oligonucleotide
  Sense strand starting at position 2040 of SEQ ID NO: 172
augaguagugcuugugcuu

SEQ ID NO: 16751 - RNA, 19 nt, Artificial Sequence
  Description of Artificial Sequence: Synthetic oligonucleotide
  Antisense strand to SEQ ID NO: 16750
aagcacaagcacuacucau

SEQ ID NO: 16752 - RNA, 19 nt, Artificial Sequence
  Description of Artificial Sequence: Synthetic oligonucleotide
  Sense strand starting at position 2024 of SEQ ID NO: 172
auguguucuggcggcaaug

SEQ ID NO: 16753 - RNA, 19 nt, Artificial Sequence
  Description of Artificial Sequence: Synthetic oligonucleotide
  Antisense strand to SEQ ID NO: 16752
cauugccgccagaacacau

SEQ ID NO: 16754 - RNA, 19 nt, Artificial Sequence
  Description of Artificial Sequence: Synthetic oligonucleotide
  Sense strand starting at position 2022 of SEQ ID NO: 172
ucauguguucuggcggcaa

SEQ ID NO: 16755 - RNA, 19 nt, Artificial Sequence
  Description of Artificial Sequence: Synthetic oligonucleotide
  Antisense strand to SEQ ID NO: 16754
uugccgccagaacacauga

SEQ ID NO: 16756 - RNA, 19 nt, Artificial Sequence
  Description of Artificial Sequence: Synthetic oligonucleotide
  Sense strand starting at position 1994 of SEQ ID NO: 172
guauccaucccagggacaa

SEQ ID NO: 16757 - RNA, 19 nt, Artificial Sequence
  Description of Artificial Sequence: Synthetic oligonucleotide
  Antisense strand to SEQ ID NO: 16756
uugucccugggauggauac

SEQ ID NO: 16758 - RNA, 19 nt, Artificial Sequence
  Description of Artificial Sequence: Synthetic oligonucleotide
  Sense strand starting at position 1841 of SEQ ID NO: 172
caugauggguuccugggaa

SEQ ID NO: 16759 - RNA, 19 nt, Artificial Sequence
  Description of Artificial Sequence: Synthetic oligonucleotide
  Antisense strand to SEQ ID NO: 16758
uucccaggaacccaucaug

SEQ ID NO: 16760 - RNA, 19 nt, Artificial Sequence
  Description of Artificial Sequence: Synthetic oligonucleotide
  Sense strand starting at position 1588 of SEQ ID NO: 172
ucuugaugguucccgggau

SEQ ID NO: 16761 - RNA, 19 nt, Artificial Sequence
  Description of Artificial Sequence: Synthetic oligonucleotide
  Antisense strand to SEQ ID NO: 16760
aucccgggaaccaucaaga

SEQ ID NO: 16762 - RNA, 19 nt, Artificial Sequence
  Description of Artificial Sequence: Synthetic oligonucleotide
  Sense strand starting at position 1428 of SEQ ID NO: 172
ugcgcuguccuggcagaua

SEQ ID NO: 16763 - RNA, 19 nt, Artificial Sequence
  Description of Artificial Sequence: Synthetic oligonucleotide
  Antisense strand to SEQ ID NO: 16762
uaucugccaggacagcgca

SEQ ID NO: 16764 - RNA, 19 nt, Artificial Sequence
  Description of Artificial Sequence: Synthetic oligonucleotide
  Sense strand starting at position 846 of SEQ ID NO: 172
cuauauguccuuggccuua

SEQ ID NO: 16765 - RNA, 19 nt, Artificial Sequence
  Description of Artificial Sequence: Synthetic oligonucleotide
  Antisense strand to SEQ ID NO: 16764
uaaggccaaggacauauag

SEQ ID NO: 16766 - RNA, 19 nt, Artificial Sequence
  Description of Artificial Sequence: Synthetic oligonucleotide
  Sense strand starting at position 845 of SEQ ID NO: 172
ucuauauguccuuggccuu

SEQ ID NO: 16767 - RNA, 19 nt, Artificial Sequence
  Description of Artificial Sequence: Synthetic oligonucleotide
  Antisense strand to SEQ ID NO: 16766
aaggccaaggacauauaga

SEQ ID NO: 16768 - RNA, 19 nt, Artificial Sequence
  Description of Artificial Sequence: Synthetic oligonucleotide
  Sense strand starting at position 808 of SEQ ID NO: 172
cgucaugaucccgguuuga

SEQ ID NO: 16769 - RNA, 19 nt, Artificial Sequence
  Description of Artificial Sequence: Synthetic oligonucleotide
  Antisense strand to SEQ ID NO: 16768
ucaaaccgggaucaugacg

SEQ ID NO: 16770 - RNA, 19 nt, Artificial Sequence
  Description of Artificial Sequence: Synthetic oligonucleotide
  Sense strand starting at position 739 of SEQ ID NO: 172
gggcuucuuucggcuccaa

SEQ ID NO: 16771 - RNA, 19 nt, Artificial Sequence
  Description of Artificial Sequence: Synthetic oligonucleotide
  Antisense strand to SEQ ID NO: 16770
uuggagccgaaagaagccc

SEQ ID NO: 16772 - RNA, 19 nt, Artificial Sequence
  Description of Artificial Sequence: Synthetic oligonucleotide
  Sense strand starting at position 606 of SEQ ID NO: 172
aucucugggucuggaaaga

SEQ ID NO: 16773 - RNA, 19 nt, Artificial Sequence
  Description of Artificial Sequence: Synthetic oligonucleotide
  Antisense strand to SEQ ID NO: 16772
ucuuuccagacccagagau

SEQ ID NO: 16774 - RNA, 19 nt, Artificial Sequence
  Description of Artificial Sequence: Synthetic oligonucleotide
  Sense strand starting at position 275 of SEQ ID NO: 172
ggagcuguccuauaauaga

SEQ ID NO: 16775 - RNA, 19 nt, Artificial Sequence
  Description of Artificial Sequence: Synthetic oligonucleotide
  Antisense strand to SEQ ID NO: 16774
ucuauuauaggacagcucc

SEQ ID NO: 16776 - RNA, 19 nt, Artificial Sequence
  Description of Artificial Sequence: Synthetic oligonucleotide
  Sense strand starting at position 219 of SEQ ID NO: 172
aucugaaaccucugcaggu

SEQ ID NO: 16777 - RNA, 19 nt, Artificial Sequence
  Description of Artificial Sequence: Synthetic oligonucleotide
  Antisense strand to SEQ ID NO: 16776
accugcagagguuucagau

SEQ ID NO: 16778 - RNA, 19 nt, Artificial Sequence
  Description of Artificial Sequence: Synthetic oligonucleotide
  Sense strand starting at position 195 of SEQ ID NO: 172
agugacaccuaucuagcua

SEQ ID NO: 16779 - RNA, 19 nt, Artificial Sequence
  Description of Artificial Sequence: Synthetic oligonucleotide
  Antisense strand to SEQ ID NO: 16778
uagcuagauaggugucacu

SEQ ID NO: 16780 - RNA, 19 nt, Artificial Sequence
  Description of Artificial Sequence: Synthetic oligonucleotide
  Sense strand starting at position 188 of SEQ ID NO: 172
cucaguuagugacaccuau

SEQ ID NO: 16781 - RNA, 19 nt, Artificial Sequence
  Description of Artificial Sequence: Synthetic oligonucleotide
  Antisense strand to SEQ ID NO: 16780
auaggugucacuaacugag

SEQ ID NO: 16782 - RNA, 19 nt, Artificial Sequence
  Description of Artificial Sequence: Synthetic oligonucleotide
  Sense strand starting at position 176 of SEQ ID NO: 172
gcucaucugucacucaguu

SEQ ID NO: 16783 - RNA, 19 nt, Artificial Sequence
  Description of Artificial Sequence: Synthetic oligonucleotide
  Antisense strand to SEQ ID NO: 16782
aacugagugacagaugagc

SEQ ID NO: 16784 - RNA, 19 nt, Artificial Sequence
  Description of Artificial Sequence: Synthetic oligonucleotide
  Sense strand starting at position 114 of SEQ ID NO: 172
ugaaacaguugcucucuaa

SEQ ID NO: 16785 - RNA, 19 nt, Artificial Sequence
  Description of Artificial Sequence: Synthetic oligonucleotide
  Antisense strand to SEQ ID NO: 16784
uuagagagcaacuguuuca

SEQ ID NO: 16786 - RNA, 19 nt, Artificial Sequence
  Description of Artificial Sequence: Synthetic oligonucleotide
  Sense strand starting at position 65 of SEQ ID NO: 172
ggucaugcagacugagaua

SEQ ID NO: 16787 - RNA, 19 nt, Artificial Sequence
  Description of Artificial Sequence: Synthetic oligonucleotide
  Antisense strand to SEQ ID NO: 16786
uaucucagucugcaugacc

SEQ ID NO: 16788 - RNA, 19 nt, Artificial Sequence
  Description of Artificial Sequence: Synthetic oligonucleotide
  Sense strand starting at position 58 of SEQ ID NO: 172
ggauaugggucaugcagac

SEQ ID NO: 16789 - RNA, 19 nt, Artificial Sequence
  Description of Artificial Sequence: Synthetic oligonucleotide
  Antisense strand to SEQ ID NO: 16788
gucugcaugacccauaucc

SEQ ID NO: 16790 - RNA, 19 nt, Artificial Sequence
  Description of Artificial Sequence: Synthetic oligonucleotide
  Sense strand starting at position 49 of SEQ ID NO: 172
gcguuucagggauaugggu

SEQ ID NO: 16791 - RNA, 19 nt, Artificial Sequence
  Description of Artificial Sequence: Synthetic oligonucleotide
  Antisense strand to SEQ ID NO: 16790
acccauaucccugaaacgc

SEQ ID NO: 16792 - RNA, 19 nt, Artificial Sequence
  Description of Artificial Sequence: Synthetic oligonucleotide
  Sense strand starting at position 30 of SEQ ID NO: 174
guugcugggaucugaggau

SEQ ID NO: 16793 - RNA, 19 nt, Artificial Sequence
  Description of Artificial Sequence: Synthetic oligonucleotide
  Antisense strand to SEQ ID NO: 16792
auccucagaucccagcaac

SEQ ID NO: 16794 - RNA, 19 nt, Artificial Sequence
  Description of Artificial Sequence: Synthetic oligonucleotide
  Sense strand starting at position 86 of SEQ ID NO: 174
cucacuauccagugggaga

SEQ ID NO: 16795 - RNA, 19 nt, Artificial Sequence
  Description of Artificial Sequence: Synthetic oligonucleotide
  Antisense strand to SEQ ID NO: 16794
ucucccacuggauagugag

SEQ ID NO: 16796 - RNA, 19 nt, Artificial Sequence
  Description of Artificial Sequence: Synthetic oligonucleotide
  Sense strand starting at position 313 of SEQ ID NO: 174
guaugaggaacuuguguga

SEQ ID NO: 16797 - RNA, 19 nt, Artificial Sequence
  Description of Artificial Sequence: Synthetic oligonucleotide
  Antisense strand to SEQ ID NO: 16796
ucacacaaguuccucauac

SEQ ID NO: 16798 - RNA, 19 nt, Artificial Sequence
  Description of Artificial Sequence: Synthetic oligonucleotide
  Sense strand starting at position 316 of SEQ ID NO: 174
ugaggaacuugugugaaac

SEQ ID NO: 16799 - RNA, 19 nt, Artificial Sequence
  Description of Artificial Sequence: Synthetic oligonucleotide
  Antisense strand to SEQ ID NO: 16798
guuucacacaaguuccuca

SEQ ID NO: 16800 - RNA, 19 nt, Artificial Sequence
  Description of Artificial Sequence: Synthetic oligonucleotide
  Sense strand starting at position 317 of SEQ ID NO: 174
gaggaacuugugugaaaca

SEQ ID NO: 16801 - RNA, 19 nt, Artificial Sequence
  Description of Artificial Sequence: Synthetic oligonucleotide
  Antisense strand to SEQ ID NO: 16800
uguuucacacaaguuccuc

SEQ ID NO: 16802 - RNA, 19 nt, Artificial Sequence
  Description of Artificial Sequence: Synthetic oligonucleotide
  Sense strand starting at position 371 of SEQ ID NO: 174
gggauaacaguauguguaa

SEQ ID NO: 16803 - RNA, 19 nt, Artificial Sequence
  Description of Artificial Sequence: Synthetic oligonucleotide
  Antisense strand to SEQ ID NO: 16802
uuacacauacuguuauccc

SEQ ID NO: 16804 - RNA, 19 nt, Artificial Sequence
  Description of Artificial Sequence: Synthetic oligonucleotide
  Sense strand starting at position 372 of SEQ ID NO: 174
ggauaacaguauguguaaa

SEQ ID NO: 16805 - RNA, 19 nt, Artificial Sequence
  Description of Artificial Sequence: Synthetic oligonucleotide
  Antisense strand to SEQ ID NO: 16804
uuuacacauacuguuaucc

SEQ ID NO: 16806 - RNA, 19 nt, Artificial Sequence
  Description of Artificial Sequence: Synthetic oligonucleotide
  Sense strand starting at position 386 of SEQ ID NO: 174
guaaauguugaugggaaug

SEQ ID NO: 16807 - RNA, 19 nt, Artificial Sequence
  Description of Artificial Sequence: Synthetic oligonucleotide
  Antisense strand to SEQ ID NO: 16806
cauucccaucaacauuuac

SEQ ID NO: 16808 - RNA, 19 nt, Artificial Sequence
  Description of Artificial Sequence: Synthetic oligonucleotide
  Sense strand starting at position 442 of SEQ ID NO: 174
uguucaugaguggguaaga

SEQ ID NO: 16809 - RNA, 19 nt, Artificial Sequence
  Description of Artificial Sequence: Synthetic oligonucleotide
  Antisense strand to SEQ ID NO: 16808
ucuuacccacucaugaaca

SEQ ID NO: 16810 - RNA, 19 nt, Artificial Sequence
  Description of Artificial Sequence: Synthetic oligonucleotide
  Sense strand starting at position 443 of SEQ ID NO: 174
guucaugaguggguaagaa

SEQ ID NO: 16811 - RNA, 19 nt, Artificial Sequence
  Description of Artificial Sequence: Synthetic oligonucleotide
  Antisense strand to SEQ ID NO: 16810
uucuuacccacucaugaac

SEQ ID NO: 16812 - RNA, 19 nt, Artificial Sequence
  Description of Artificial Sequence: Synthetic oligonucleotide
  Sense strand starting at position 715 of SEQ ID NO: 174
gguaaaguaguccaggaau

SEQ ID NO: 16813 - RNA, 19 nt, Artificial Sequence
  Description of Artificial Sequence: Synthetic oligonucleotide
  Antisense strand to SEQ ID NO: 16812
auuccuggacuacuuuacc

SEQ ID NO: 16814 - RNA, 19 nt, Artificial Sequence
  Description of Artificial Sequence: Synthetic oligonucleotide
  Sense strand starting at position 793 of SEQ ID NO: 174
agauuaaggcaguggaagu

SEQ ID NO: 16815 - RNA, 19 nt, Artificial Sequence
  Description of Artificial Sequence: Synthetic oligonucleotide
  Antisense strand to SEQ ID NO: 16814
acuuccacugccuuaaucu

SEQ ID NO: 16816 - RNA, 19 nt, Artificial Sequence
  Description of Artificial Sequence: Synthetic oligonucleotide
  Sense strand starting at position 1114 of SEQ ID NO: 174
uccucagucuccuuaagag

SEQ ID NO: 16817 - RNA, 19 nt, Artificial Sequence
  Description of Artificial Sequence: Synthetic oligonucleotide
  Antisense strand to SEQ ID NO: 16816
cucuuaaggagacugagga

SEQ ID NO: 16818 - RNA, 19 nt, Artificial Sequence
  Description of Artificial Sequence: Synthetic oligonucleotide
  Sense strand starting at position 1133 of SEQ ID NO: 174
gguucaaugggugauccga

SEQ ID NO: 16819 - RNA, 19 nt, Artificial Sequence
  Description of Artificial Sequence: Synthetic oligonucleotide
  Antisense strand to SEQ ID NO: 16818
ucggaucacccauugaacc

SEQ ID NO: 16820 - RNA, 19 nt, Artificial Sequence
  Description of Artificial Sequence: Synthetic oligonucleotide
  Sense strand starting at position 1155 of SEQ ID NO: 174
ugacacuauuagucuuuga

SEQ ID NO: 16821 - RNA, 19 nt, Artificial Sequence
  Description of Artificial Sequence: Synthetic oligonucleotide
  Antisense strand to SEQ ID NO: 16820
ucaaagacuaauaguguca

SEQ ID NO: 16822 - RNA, 19 nt, Artificial Sequence
  Description of Artificial Sequence: Synthetic oligonucleotide
  Sense strand starting at position 1369 of SEQ ID NO: 174
gucauaagaguccaccuua

SEQ ID NO: 16823 - RNA, 19 nt, Artificial Sequence
  Description of Artificial Sequence: Synthetic oligonucleotide
  Antisense strand to SEQ ID NO: 16822
uaagguggacucuuaugac

SEQ ID NO: 16824 - RNA, 19 nt, Artificial Sequence
  Description of Artificial Sequence: Synthetic oligonucleotide
  Sense strand starting at position 1505 of SEQ ID NO: 174
ggcuacaucaucugaagag

SEQ ID NO: 16825 - RNA, 19 nt, Artificial Sequence
  Description of Artificial Sequence: Synthetic oligonucleotide
  Antisense strand to SEQ ID NO: 16824
cucuucagaugauguagcc

SEQ ID NO: 16826 - RNA, 19 nt, Artificial Sequence
  Description of Artificial Sequence: Synthetic oligonucleotide
  Sense strand starting at position 1653 of SEQ ID NO: 174
gcgguagcggucguagaaa

SEQ ID NO: 16827 - RNA, 19 nt, Artificial Sequence
  Description of Artificial Sequence: Synthetic oligonucleotide
  Antisense strand to SEQ ID NO: 16826
uuucuacgaccgcuaccgc

SEQ ID NO: 16828 - RNA, 19 nt, Artificial Sequence
  Description of Artificial Sequence: Synthetic oligonucleotide
  Sense strand starting at position 2186 of SEQ ID NO: 174
gcgccaaguccguucucua

SEQ ID NO: 16829 - RNA, 19 nt, Artificial Sequence
  Description of Artificial Sequence: Synthetic oligonucleotide
  Antisense strand to SEQ ID NO: 16828
uagagaacggacuuggcgc

SEQ ID NO: 16830 - RNA, 19 nt, Artificial Sequence
  Description of Artificial Sequence: Synthetic oligonucleotide
  Sense strand starting at position 2187 of SEQ ID NO: 174
cgccaaguccguucucuaa

SEQ ID NO: 16831 - RNA, 19 nt, Artificial Sequence
  Description of Artificial Sequence: Synthetic oligonucleotide
  Antisense strand to SEQ ID NO: 16830
uuagagaacggacuuggcg

SEQ ID NO: 16832 - RNA, 19 nt, Artificial Sequence
  Description of Artificial Sequence: Synthetic oligonucleotide
  Sense strand starting at position 2272 of SEQ ID NO: 174
uguaguaguccguccuuca

SEQ ID NO: 16833 - RNA, 19 nt, Artificial Sequence
  Description of Artificial Sequence: Synthetic oligonucleotide
  Antisense strand to SEQ ID NO: 16832
ugaaggacggacuacuaca

SEQ ID NO: 16834 - RNA, 19 nt, Artificial Sequence
  Description of Artificial Sequence: Synthetic oligonucleotide
  Sense strand starting at position 2417 of SEQ ID NO: 174
gaaacugaggccgagagua

SEQ ID NO: 16835 - RNA, 19 nt, Artificial Sequence
  Description of Artificial Sequence: Synthetic oligonucleotide
  Antisense strand to SEQ ID NO: 16834
uacucucggccucaguuuc

SEQ ID NO: 16836 - RNA, 19 nt, Artificial Sequence
  Description of Artificial Sequence: Synthetic oligonucleotide
  Sense strand starting at position 2419 of SEQ ID NO: 174
aacugaggccgagaguaau

SEQ ID NO: 16837 - RNA, 19 nt, Artificial Sequence
  Description of Artificial Sequence: Synthetic oligonucleotide
  Antisense strand to SEQ ID NO: 16836
auuacucucggccucaguu

SEQ ID NO: 16838 - RNA, 19 nt, Artificial Sequence
  Description of Artificial Sequence: Synthetic oligonucleotide
  Sense strand starting at position 2429 of SEQ ID NO: 174
gagaguaauuaugugacuu

SEQ ID NO: 16839 - RNA, 19 nt, Artificial Sequence
  Description of Artificial Sequence: Synthetic oligonucleotide
  Antisense strand to SEQ ID NO: 16838
aagucacauaauuacucuc

SEQ ID NO: 16840 - RNA, 19 nt, Artificial Sequence
  Description of Artificial Sequence: Synthetic oligonucleotide
  Sense strand starting at position 2430 of SEQ ID NO: 174
agaguaauuaugugacuug

SEQ ID NO: 16841 - RNA, 19 nt, Artificial Sequence
  Description of Artificial Sequence: Synthetic oligonucleotide
  Antisense strand to SEQ ID NO: 16840
caagucacauaauuacucu

SEQ ID NO: 16842 - RNA, 19 nt, Artificial Sequence
  Description of Artificial Sequence: Synthetic oligonucleotide
  Sense strand starting at position 2776 of SEQ ID NO: 174
cugggacaguacucaucau

SEQ ID NO: 16843 - RNA, 19 nt, Artificial Sequence
  Description of Artificial Sequence: Synthetic oligonucleotide
  Antisense strand to SEQ ID NO: 16842
augaugaguacugucccag

SEQ ID NO: 16844 - RNA, 19 nt, Artificial Sequence
  Description of Artificial Sequence: Synthetic oligonucleotide
  Sense strand starting at position 3135 of SEQ ID NO: 174
agcaguuaucauuaucuga

SEQ ID NO: 16845 - RNA, 19 nt, Artificial Sequence
  Description of Artificial Sequence: Synthetic oligonucleotide
  Antisense strand to SEQ ID NO: 16844
ucagauaaugauaacugcu

SEQ ID NO: 16846 - RNA, 19 nt, Artificial Sequence
  Description of Artificial Sequence: Synthetic oligonucleotide
  Sense strand starting at position 3138 of SEQ ID NO: 174
aguuaucauuaucugaagu

SEQ ID NO: 16847 - RNA, 19 nt, Artificial Sequence
  Description of Artificial Sequence: Synthetic oligonucleotide
  Antisense strand to SEQ ID NO: 16846
acuucagauaaugauaacu

SEQ ID NO: 16848 - RNA, 19 nt, Artificial Sequence
  Description of Artificial Sequence: Synthetic oligonucleotide
  Sense strand starting at position 3158 of SEQ ID NO: 174
cuuagauccuuguuuauau

SEQ ID NO: 16849 - RNA, 19 nt, Artificial Sequence
  Description of Artificial Sequence: Synthetic oligonucleotide
  Antisense strand to SEQ ID NO: 16848
auauaaacaaggaucuaag

SEQ ID NO: 16850 - RNA, 19 nt, Artificial Sequence
  Description of Artificial Sequence: Synthetic oligonucleotide
  Sense strand starting at position 3194 of SEQ ID NO: 174
auucuaguggagugaaaca

SEQ ID NO: 16851 - RNA, 19 nt, Artificial Sequence
  Description of Artificial Sequence: Synthetic oligonucleotide
  Antisense strand to SEQ ID NO: 16850
uguuucacuccacuagaau

SEQ ID NO: 16852 - RNA, 19 nt, Artificial Sequence
  Description of Artificial Sequence: Synthetic oligonucleotide
  Sense strand starting at position 3372 of SEQ ID NO: 174
cccugaugaggagguuauu

SEQ ID NO: 16853 - RNA, 19 nt, Artificial Sequence
  Description of Artificial Sequence: Synthetic oligonucleotide
  Antisense strand to SEQ ID NO: 16852
aauaaccuccucaucaggg

SEQ ID NO: 16854 - RNA, 19 nt, Artificial Sequence
  Description of Artificial Sequence: Synthetic oligonucleotide
  Sense strand starting at position 3381 of SEQ ID NO: 174
ggagguuauugagucugaa

SEQ ID NO: 16855 - RNA, 19 nt, Artificial Sequence
  Description of Artificial Sequence: Synthetic oligonucleotide
  Antisense strand to SEQ ID NO: 16854
uucagacucaauaaccucc

SEQ ID NO: 16856 - RNA, 19 nt, Artificial Sequence
  Description of Artificial Sequence: Synthetic oligonucleotide
  Sense strand starting at position 3384 of SEQ ID NO: 174
gguuauugagucugaauga

SEQ ID NO: 16857 - RNA, 19 nt, Artificial Sequence
  Description of Artificial Sequence: Synthetic oligonucleotide
  Antisense strand to SEQ ID NO: 16856
ucauucagacucaauaacc

SEQ ID NO: 16858 - RNA, 19 nt, Artificial Sequence
  Description of Artificial Sequence: Synthetic oligonucleotide
  Sense strand starting at position 3492 of SEQ ID NO: 174
aucgaaugagaucggaagu

SEQ ID NO: 16859 - RNA, 19 nt, Artificial Sequence
  Description of Artificial Sequence: Synthetic oligonucleotide
  Antisense strand to SEQ ID NO: 16858
acuuccgaucucauucgau

SEQ ID NO: 16860 - RNA, 19 nt, Artificial Sequence
  Description of Artificial Sequence: Synthetic oligonucleotide
  Sense strand starting at position 3493 of SEQ ID NO: 174
ucgaaugagaucggaaguu

SEQ ID NO: 16861 - RNA, 19 nt, Artificial Sequence
  Description of Artificial Sequence: Synthetic oligonucleotide
  Antisense strand to SEQ ID NO: 16860
aacuuccgaucucauucga

SEQ ID NO: 16862 - RNA, 19 nt, Artificial Sequence
  Description of Artificial Sequence: Synthetic oligonucleotide
  Sense strand starting at position 3528 of SEQ ID NO: 174
aguggaguaacaugaucua

SEQ ID NO: 16863 - RNA, 19 nt, Artificial Sequence
  Description of Artificial Sequence: Synthetic oligonucleotide
  Antisense strand to SEQ ID NO: 16862
uagaucauguuacuccacu

SEQ ID NO: 16864 - RNA, 19 nt, Artificial Sequence
  Description of Artificial Sequence: Synthetic oligonucleotide
  Sense strand starting at position 3531 of SEQ ID NO: 174
ggaguaacaugaucuacuu

SEQ ID NO: 16865 - RNA, 19 nt, Artificial Sequence
  Description of Artificial Sequence: Synthetic oligonucleotide
  Antisense strand to SEQ ID NO: 16864
aaguagaucauguuacucc

SEQ ID NO: 16866 - RNA, 19 nt, Artificial Sequence
  Description of Artificial Sequence: Synthetic oligonucleotide
  Sense strand starting at position 3715 of SEQ ID NO: 174
ggauguuggucacccuaca

SEQ ID NO: 16867 - RNA, 19 nt, Artificial Sequence
  Description of Artificial Sequence: Synthetic oligonucleotide
  Antisense strand to SEQ ID NO: 16866
uguagggugaccaacaucc

SEQ ID NO: 16868 - RNA, 19 nt, Artificial Sequence
  Description of Artificial Sequence: Synthetic oligonucleotide
  Sense strand starting at position 3733 of SEQ ID NO: 174
agggaacaguaauccaagu

SEQ ID NO: 16869 - RNA, 19 nt, Artificial Sequence
  Description of Artificial Sequence: Synthetic oligonucleotide
  Antisense strand to SEQ ID NO: 16868
acuuggauuacuguucccu

SEQ ID NO: 16870 - RNA, 19 nt, Artificial Sequence
  Description of Artificial Sequence: Synthetic oligonucleotide
  Sense strand starting at position 3766 of SEQ ID NO: 174
cuuggacuaaagugauagu

SEQ ID NO: 16871 - RNA, 19 nt, Artificial Sequence
  Description of Artificial Sequence: Synthetic oligonucleotide
  Antisense strand to SEQ ID NO: 16870
acuaucacuuuaguccaag

SEQ ID NO: 16872 - RNA, 19 nt, Artificial Sequence
  Description of Artificial Sequence: Synthetic oligonucleotide
  Sense strand starting at position 38 of SEQ ID NO: 173
gcaccauccuagguuagaa

SEQ ID NO: 16873 - RNA, 19 nt, Artificial Sequence
  Description of Artificial Sequence: Synthetic oligonucleotide
  Antisense strand to SEQ ID NO: 16872
uucuaaccuaggauggugc

SEQ ID NO: 16874 - RNA, 19 nt, Artificial Sequence
  Description of Artificial Sequence: Synthetic oligonucleotide
  Sense strand starting at position 88 of SEQ ID NO: 173
aguggauugugaucagagu

SEQ ID NO: 16875 - RNA, 19 nt, Artificial Sequence
  Description of Artificial Sequence: Synthetic oligonucleotide
  Antisense strand to SEQ ID NO: 16874
acucugaucacaauccacu

SEQ ID NO: 16876 - RNA, 19 nt, Artificial Sequence
  Description of Artificial Sequence: Synthetic oligonucleotide
  Sense strand starting at position 89 of SEQ ID NO: 173
guggauugugaucagaguu

SEQ ID NO: 16877 - RNA, 19 nt, Artificial Sequence
  Description of Artificial Sequence: Synthetic oligonucleotide
  Antisense strand to SEQ ID NO: 16876
aacucugaucacaauccac

SEQ ID NO: 16878 - RNA, 19 nt, Artificial Sequence
  Description of Artificial Sequence: Synthetic oligonucleotide
  Sense strand starting at position 137 of SEQ ID NO: 173
auaagaauggacugcaugu

SEQ ID NO: 16879 - RNA, 19 nt, Artificial Sequence
  Description of Artificial Sequence: Synthetic oligonucleotide
  Antisense strand to SEQ ID NO: 16878
acaugcaguccauucuuau

SEQ ID NO: 16880 - RNA, 19 nt, Artificial Sequence
  Description of Artificial Sequence: Synthetic oligonucleotide
  Sense strand starting at position 618 of SEQ ID NO: 173
agaguuuaaugccuaacuu

SEQ ID NO: 16881 - RNA, 19 nt, Artificial Sequence
  Description of Artificial Sequence: Synthetic oligonucleotide
  Antisense strand to SEQ ID NO: 16880
aaguuaggcauuaaacucu

SEQ ID NO: 16882 - RNA, 19 nt, Artificial Sequence
  Description of Artificial Sequence: Synthetic oligonucleotide
  Sense strand starting at position 784 of SEQ ID NO: 173
gcugguugucaggaaacua

SEQ ID NO: 16883 - RNA, 19 nt, Artificial Sequence
  Description of Artificial Sequence: Synthetic oligonucleotide
  Antisense strand to SEQ ID NO: 16882
uaguuuccugacaaccagc

SEQ ID NO: 16884 - RNA, 19 nt, Artificial Sequence
  Description of Artificial Sequence: Synthetic oligonucleotide
  Sense strand starting at position 904 of SEQ ID NO: 173
agagcugaguagucacaaa

SEQ ID NO: 16885 - RNA, 19 nt, Artificial Sequence
  Description of Artificial Sequence: Synthetic oligonucleotide
  Antisense strand to SEQ ID NO: 16884
uuugugacuacucagcucu

SEQ ID NO: 16886 - RNA, 19 nt, Artificial Sequence
  Description of Artificial Sequence: Synthetic oligonucleotide
  Sense strand starting at position 958 of SEQ ID NO: 173
acaucuaguucuuuacaga

SEQ ID NO: 16887 - RNA, 19 nt, Artificial Sequence
  Description of Artificial Sequence: Synthetic oligonucleotide
  Antisense strand to SEQ ID NO: 16886
ucuguaaagaacuagaugu

SEQ ID NO: 16888 - RNA, 19 nt, Artificial Sequence
  Description of Artificial Sequence: Synthetic oligonucleotide
  Sense strand starting at position 1070 of SEQ ID NO: 173
uccaucucccaugggaaau

SEQ ID NO: 16889 - RNA, 19 nt, Artificial Sequence
  Description of Artificial Sequence: Synthetic oligonucleotide
  Antisense strand to SEQ ID NO: 16888
auuucccaugggagaugga

SEQ ID NO: 16890 - RNA, 19 nt, Artificial Sequence
  Description of Artificial Sequence: Synthetic oligonucleotide
  Sense strand starting at position 1200 of SEQ ID NO: 173
acaguacuuugccuagaaa

SEQ ID NO: 16891 - RNA, 19 nt, Artificial Sequence
  Description of Artificial Sequence: Synthetic oligonucleotide
  Antisense strand to SEQ ID NO: 16890
uuucuaggcaaaguacugu

SEQ ID NO: 16892 - RNA, 19 nt, Artificial Sequence
  Description of Artificial Sequence: Synthetic oligonucleotide
  Sense strand starting at position 1203 of SEQ ID NO: 173
guacuuugccuagaaagag

SEQ ID NO: 16893 - RNA, 19 nt, Artificial Sequence
  Description of Artificial Sequence: Synthetic oligonucleotide
  Antisense strand to SEQ ID NO: 16892
cucuuucuaggcaaaguac

SEQ ID NO: 16894 - RNA, 19 nt, Artificial Sequence
  Description of Artificial Sequence: Synthetic oligonucleotide
  Sense strand starting at position 1254 of SEQ ID NO: 173
gggagagacuauguucagu

SEQ ID NO: 16895 - RNA, 19 nt, Artificial Sequence
  Description of Artificial Sequence: Synthetic oligonucleotide
  Antisense strand to SEQ ID NO: 16894
acugaacauagucucuccc

SEQ ID NO: 16896 - RNA, 19 nt, Artificial Sequence
  Description of Artificial Sequence: Synthetic oligonucleotide
  Sense strand starting at position 1626 of SEQ ID NO: 173
ugggcacaggccuagaaau

SEQ ID NO: 16897 - RNA, 19 nt, Artificial Sequence
  Description of Artificial Sequence: Synthetic oligonucleotide
  Antisense strand to SEQ ID NO: 16896
auuucuaggccugugccca

SEQ ID NO: 16898 - RNA, 19 nt, Artificial Sequence
  Description of Artificial Sequence: Synthetic oligonucleotide
  Sense strand starting at position 2010 of SEQ ID NO: 173
ugcucuuggagaugaaaca

SEQ ID NO: 16899 - RNA, 19 nt, Artificial Sequence
  Description of Artificial Sequence: Synthetic oligonucleotide
  Antisense strand to SEQ ID NO: 16898
uguuucaucuccaagagca

SEQ ID NO: 16900 - RNA, 19 nt, Artificial Sequence
  Description of Artificial Sequence: Synthetic oligonucleotide
  Sense strand starting at position 2120 of SEQ ID NO: 173
uguagcuaaccaugggaua

SEQ ID NO: 16901 - RNA, 19 nt, Artificial Sequence
  Description of Artificial Sequence: Synthetic oligonucleotide
  Antisense strand to SEQ ID NO: 16900
uaucccaugguuagcuaca

SEQ ID NO: 16902 - RNA, 19 nt, Artificial Sequence
  Description of Artificial Sequence: Synthetic oligonucleotide
  Sense strand starting at position 2121 of SEQ ID NO: 173
guagcuaaccaugggauau

SEQ ID NO: 16903 - RNA, 19 nt, Artificial Sequence
  Description of Artificial Sequence: Synthetic oligonucleotide
  Antisense strand to SEQ ID NO: 16902
auaucccaugguuagcuac

SEQ ID NO: 16904 - RNA, 19 nt, Artificial Sequence
  Description of Artificial Sequence: Synthetic oligonucleotide
  Sense strand starting at position 2123 of SEQ ID NO: 173
agcuaaccaugggauauuu

SEQ ID NO: 16905 - RNA, 19 nt, Artificial Sequence
  Description of Artificial Sequence: Synthetic oligonucleotide
  Antisense strand to SEQ ID NO: 16904
aaauaucccaugguuagcu

SEQ ID NO: 16906 - RNA, 19 nt, Artificial Sequence
  Description of Artificial Sequence: Synthetic oligonucleotide
  Sense strand starting at position 2181 of SEQ ID NO: 173
cagcucuuuggccaugaga

SEQ ID NO: 16907 - RNA, 19 nt, Artificial Sequence
  Description of Artificial Sequence: Synthetic oligonucleotide
  Antisense strand to SEQ ID NO: 16906
ucucauggccaaagagcug

SEQ ID NO: 16908 - RNA, 19 nt, Artificial Sequence
  Description of Artificial Sequence: Synthetic oligonucleotide
  Sense strand starting at position 2190 of SEQ ID NO: 173
ggccaugagacccagaguu

SEQ ID NO: 16909 - RNA, 19 nt, Artificial Sequence
  Description of Artificial Sequence: Synthetic oligonucleotide
  Antisense strand to SEQ ID NO: 16908
aacucugggucucauggcc

SEQ ID NO: 16910 - RNA, 19 nt, Artificial Sequence
  Description of Artificial Sequence: Synthetic oligonucleotide
  Sense strand starting at position 2203 of SEQ ID NO: 173
agaguuucaugggugaggu

SEQ ID NO: 16911 - RNA, 19 nt, Artificial Sequence
  Description of Artificial Sequence: Synthetic oligonucleotide
  Antisense strand to SEQ ID NO: 16910
accucacccaugaaacucu

SEQ ID NO: 16912 - RNA, 19 nt, Artificial Sequence
  Description of Artificial Sequence: Synthetic oligonucleotide
  Sense strand starting at position 2306 of SEQ ID NO: 173
uuccuuucuggaggugaca

SEQ ID NO: 16913 - RNA, 19 nt, Artificial Sequence
  Description of Artificial Sequence: Synthetic oligonucleotide
  Antisense strand to SEQ ID NO: 16912
ugucaccuccagaaaggaa

SEQ ID NO: 16914 - RNA, 19 nt, Artificial Sequence
  Description of Artificial Sequence: Synthetic oligonucleotide
  Sense strand starting at position 2308 of SEQ ID NO: 173
ccuuucuggaggugacaua

SEQ ID NO: 16915 - RNA, 19 nt, Artificial Sequence
  Description of Artificial Sequence: Synthetic oligonucleotide
  Antisense strand to SEQ ID NO: 16914
uaugucaccuccagaaagg

SEQ ID NO: 16916 - RNA, 19 nt, Artificial Sequence
  Description of Artificial Sequence: Synthetic oligonucleotide
  Sense strand starting at position 2344 of SEQ ID NO: 173
cugucauguagaugggaug

SEQ ID NO: 16917 - RNA, 19 nt, Artificial Sequence
  Description of Artificial Sequence: Synthetic oligonucleotide
  Antisense strand to SEQ ID NO: 16916
caucccaucuacaugacag

SEQ ID NO: 16918 - RNA, 19 nt, Artificial Sequence
  Description of Artificial Sequence: Synthetic oligonucleotide
  Sense strand starting at position 2385 of SEQ ID NO: 173
ccggcuccuccucaauaaa

SEQ ID NO: 16919 - RNA, 19 nt, Artificial Sequence
  Description of Artificial Sequence: Synthetic oligonucleotide
  Antisense strand to SEQ ID NO: 16918
uuuauugaggaggagccgg

SEQ ID NO: 16920 - RNA, 19 nt, Artificial Sequence
  Description of Artificial Sequence: Synthetic oligonucleotide
  Sense strand starting at position 2579 of SEQ ID NO: 173
guugcugggaucugaggau

SEQ ID NO: 16921 - RNA, 19 nt, Artificial Sequence
  Description of Artificial Sequence: Synthetic oligonucleotide
  Antisense strand to SEQ ID NO: 16920
auccucagaucccagcaac

SEQ ID NO: 16922 - RNA, 19 nt, Artificial Sequence
  Description of Artificial Sequence: Synthetic oligonucleotide
  Sense strand starting at position 2635 of SEQ ID NO: 173
cucacuauccagugggaga

SEQ ID NO: 16923 - RNA, 19 nt, Artificial Sequence
  Description of Artificial Sequence: Synthetic oligonucleotide
  Antisense strand to SEQ ID NO: 16922
ucucccacuggauagugag

SEQ ID NO: 16924 - RNA, 19 nt, Artificial Sequence
  Description of Artificial Sequence: Synthetic oligonucleotide
  Sense strand starting at position 2862 of SEQ ID NO: 173
guaugaggaacuuguguga

SEQ ID NO: 16925 - RNA, 19 nt, Artificial Sequence
  Description of Artificial Sequence: Synthetic oligonucleotide
  Antisense strand to SEQ ID NO: 16924
ucacacaaguuccucauac

SEQ ID NO: 16926 - RNA, 19 nt, Artificial Sequence
  Description of Artificial Sequence: Synthetic oligonucleotide
  Sense strand starting at position 2865 of SEQ ID NO: 173
ugaggaacuugugugaaac

SEQ ID NO: 16927 - RNA, 19 nt, Artificial Sequence
  Description of Artificial Sequence: Synthetic oligonucleotide
  Antisense strand to SEQ ID NO: 16926
guuucacacaaguuccuca

SEQ ID NO: 16928 - RNA, 19 nt, Artificial Sequence
  Description of Artificial Sequence: Synthetic oligonucleotide
  Sense strand starting at position 2866 of SEQ ID NO: 173
gaggaacuugugugaaaca

SEQ ID NO: 16929 - RNA, 19 nt, Artificial Sequence
  Description of Artificial Sequence: Synthetic oligonucleotide
  Antisense strand to SEQ ID NO: 16928
uguuucacacaaguuccuc

SEQ ID NO: 16930 - RNA, 19 nt, Artificial Sequence
  Description of Artificial Sequence: Synthetic oligonucleotide
  Sense strand starting at position 2920 of SEQ ID NO: 173
gggauaacaguauguguaa

SEQ ID NO: 16931 - RNA, 19 nt, Artificial Sequence
  Description of Artificial Sequence: Synthetic oligonucleotide
  Antisense strand to SEQ ID NO: 16930
uuacacauacuguuauccc

SEQ ID NO: 16932 - RNA, 19 nt, Artificial Sequence
  Description of Artificial Sequence: Synthetic oligonucleotide
  Sense strand starting at position 2921 of SEQ ID NO: 173
ggauaacaguauguguaaa

SEQ ID NO: 16933 - RNA, 19 nt, Artificial Sequence
  Description of Artificial Sequence: Synthetic oligonucleotide
  Antisense strand to SEQ ID NO: 16932
uuuacacauacuguuaucc

SEQ ID NO: 16934 - RNA, 19 nt, Artificial Sequence
  Description of Artificial Sequence: Synthetic oligonucleotide
  Sense strand starting at position 2935 of SEQ ID NO: 173
guaaauguugaugggaaug

SEQ ID NO: 16935 - RNA, 19 nt, Artificial Sequence
  Description of Artificial Sequence: Synthetic oligonucleotide
  Antisense strand to SEQ ID NO: 16934
cauucccaucaacauuuac

SEQ ID NO: 16936 - RNA, 19 nt, Artificial Sequence
  Description of Artificial Sequence: Synthetic oligonucleotide
  Sense strand starting at position 2991 of SEQ ID NO: 173
uguucaugaguggguaaga

SEQ ID NO: 16937 - RNA, 19 nt, Artificial Sequence
  Description of Artificial Sequence: Synthetic oligonucleotide
  Antisense strand to SEQ ID NO: 16936
ucuuacccacucaugaaca

SEQ ID NO: 16938 - RNA, 19 nt, Artificial Sequence
  Description of Artificial Sequence: Synthetic oligonucleotide
  Sense strand starting at position 2992 of SEQ ID NO: 173
guucaugaguggguaagaa

SEQ ID NO: 16939 - RNA, 19 nt, Artificial Sequence
  Description of Artificial Sequence: Synthetic oligonucleotide
  Antisense strand to SEQ ID NO: 16938
uucuuacccacucaugaac

SEQ ID NO: 16940 - RNA, 19 nt, Artificial Sequence
  Description of Artificial Sequence: Synthetic oligonucleotide
  Sense strand starting at position 3264 of SEQ ID NO: 173
gguaaaguaguccaggaau

SEQ ID NO: 16941 - RNA, 19 nt, Artificial Sequence
  Description of Artificial Sequence: Synthetic oligonucleotide
  Antisense strand to SEQ ID NO: 16940
auuccuggacuacuuuacc

SEQ ID NO: 16942 - RNA, 19 nt, Artificial Sequence
  Description of Artificial Sequence: Synthetic oligonucleotide
  Sense strand starting at position 3342 of SEQ ID NO: 173
agauuaaggcaguggaagu

SEQ ID NO: 16943 - RNA, 19 nt, Artificial Sequence
  Description of Artificial Sequence: Synthetic oligonucleotide
  Antisense strand to SEQ ID NO: 16942
acuuccacugccuuaaucu

SEQ ID NO: 16944 - RNA, 19 nt, Artificial Sequence
  Description of Artificial Sequence: Synthetic oligonucleotide
  Sense strand starting at position 3663 of SEQ ID NO: 173
uccucagucuccuuaagag

SEQ ID NO: 16945 - RNA, 19 nt, Artificial Sequence
  Description of Artificial Sequence: Synthetic oligonucleotide
  Antisense strand to SEQ ID NO: 16944
cucuuaaggagacugagga

SEQ ID NO: 16946 - RNA, 19 nt, Artificial Sequence
  Description of Artificial Sequence: Synthetic oligonucleotide
  Sense strand starting at position 3682 of SEQ ID NO: 173
gguucaaugggugauccga

SEQ ID NO: 16947 - RNA, 19 nt, Artificial Sequence
  Description of Artificial Sequence: Synthetic oligonucleotide
  Antisense strand to SEQ ID NO: 16946
ucggaucacccauugaacc

SEQ ID NO: 16948 - RNA, 19 nt, Artificial Sequence
  Description of Artificial Sequence: Synthetic oligonucleotide
  Sense strand starting at position 3704 of SEQ ID NO: 173
ugacacuauuagucuuuga

SEQ ID NO: 16949 - RNA, 19 nt, Artificial Sequence
  Description of Artificial Sequence: Synthetic oligonucleotide
  Antisense strand to SEQ ID NO: 16948
ucaaagacuaauaguguca

SEQ ID NO: 16950 - RNA, 19 nt, Artificial Sequence
  Description of Artificial Sequence: Synthetic oligonucleotide
  Sense strand starting at position 3918 of SEQ ID NO: 173
gucauaagaguccaccuua

SEQ ID NO: 16951 - RNA, 19 nt, Artificial Sequence
  Description of Artificial Sequence: Synthetic oligonucleotide
  Antisense strand to SEQ ID NO: 16950
uaagguggacucuuaugac

SEQ ID NO: 16952 - RNA, 19 nt, Artificial Sequence
  Description of Artificial Sequence: Synthetic oligonucleotide
  Sense strand starting at position 3623 of SEQ ID NO: 175
cuaccugauugaugauuau

SEQ ID NO: 16953 - RNA, 19 nt, Artificial Sequence
  Description of Artificial Sequence: Synthetic oligonucleotide
  Antisense strand to SEQ ID NO: 16952
auaaucaucaaucagguag

SEQ ID NO: 16954 - RNA, 19 nt, Artificial Sequence
  Description of Artificial Sequence: Synthetic oligonucleotide
  Sense strand starting at position 3619 of SEQ ID NO: 175
uuaucuaccugauugauga

SEQ ID NO: 16955 - RNA, 19 nt, Artificial Sequence
  Description of Artificial Sequence: Synthetic oligonucleotide
  Antisense strand to SEQ ID NO: 16954
ucaucaaucagguagauaa

SEQ ID NO: 16956 - RNA, 19 nt, Artificial Sequence
  Description of Artificial Sequence: Synthetic oligonucleotide
  Sense strand starting at position 3530 of SEQ ID NO: 175
agucuuuacucucaugaag

SEQ ID NO: 16957 - RNA, 19 nt, Artificial Sequence
  Description of Artificial Sequence: Synthetic oligonucleotide
  Antisense strand to SEQ ID NO: 16956
cuucaugagaguaaagacu

SEQ ID NO: 16958 - RNA, 19 nt, Artificial Sequence
  Description of Artificial Sequence: Synthetic oligonucleotide
  Sense strand starting at position 3500 of SEQ ID NO: 175
ccaucuaaugaaugugaac

SEQ ID NO: 16959 - RNA, 19 nt, Artificial Sequence
  Description of Artificial Sequence: Synthetic oligonucleotide
  Antisense strand to SEQ ID NO: 16958
guucacauucauuagaugg

SEQ ID NO: 16960 - RNA, 19 nt, Artificial Sequence
  Description of Artificial Sequence: Synthetic oligonucleotide
  Sense strand starting at position 3471 of SEQ ID NO: 175
gggaaagcuugaccuuaac

SEQ ID NO: 16961 - RNA, 19 nt, Artificial Sequence
  Description of Artificial Sequence: Synthetic oligonucleotide
  Antisense strand to SEQ ID NO: 16960
guuaaggucaagcuuuccc

SEQ ID NO: 16962 - RNA, 19 nt, Artificial Sequence
  Description of Artificial Sequence: Synthetic oligonucleotide
  Sense strand starting at position 3452 of SEQ ID NO: 175
aaggauaaguaggagucua

SEQ ID NO: 16963 - RNA, 19 nt, Artificial Sequence
  Description of Artificial Sequence: Synthetic oligonucleotide
  Antisense strand to SEQ ID NO: 16962
uagacuccuacuuauccuu

SEQ ID NO: 16964 - RNA, 19 nt, Artificial Sequence
  Description of Artificial Sequence: Synthetic oligonucleotide
  Sense strand starting at position 2901 of SEQ ID NO: 175
guugaaugggcuuaauaac

SEQ ID NO: 16965 - RNA, 19 nt, Artificial Sequence
  Description of Artificial Sequence: Synthetic oligonucleotide
  Antisense strand to SEQ ID NO: 16964
guuauuaagcccauucaac

SEQ ID NO: 16966 - RNA, 19 nt, Artificial Sequence
  Description of Artificial Sequence: Synthetic oligonucleotide
  Sense strand starting at position 2898 of SEQ ID NO: 175
auuguugaaugggcuuaau

SEQ ID NO: 16967 - RNA, 19 nt, Artificial Sequence
  Description of Artificial Sequence: Synthetic oligonucleotide
  Antisense strand to SEQ ID NO: 16966
auuaagcccauucaacaau

SEQ ID NO: 16968 - RNA, 19 nt, Artificial Sequence
  Description of Artificial Sequence: Synthetic oligonucleotide
  Sense strand starting at position 2835 of SEQ ID NO: 175
cucaucuuggcucagaaua

SEQ ID NO: 16969 - RNA, 19 nt, Artificial Sequence
  Description of Artificial Sequence: Synthetic oligonucleotide
  Antisense strand to SEQ ID NO: 16968
uauucugagccaagaugag

SEQ ID NO: 16970 - RNA, 19 nt, Artificial Sequence
  Description of Artificial Sequence: Synthetic oligonucleotide
  Sense strand starting at position 2434 of SEQ ID NO: 175
ugagaagugucaguguucu

SEQ ID NO: 16971 - RNA, 19 nt, Artificial Sequence
  Description of Artificial Sequence: Synthetic oligonucleotide
  Antisense strand to SEQ ID NO: 16970
agaacacugacacuucuca

SEQ ID NO: 16972 - RNA, 19 nt, Artificial Sequence
  Description of Artificial Sequence: Synthetic oligonucleotide
  Sense strand starting at position 2429 of SEQ ID NO: 175
uguuaugagaagugucagu

SEQ ID NO: 16973 - RNA, 19 nt, Artificial Sequence
  Description of Artificial Sequence: Synthetic oligonucleotide
  Antisense strand to SEQ ID NO: 16972
acugacacuucucauaaca

SEQ ID NO: 16974 - RNA, 19 nt, Artificial Sequence
  Description of Artificial Sequence: Synthetic oligonucleotide
  Sense strand starting at position 2420 of SEQ ID NO: 175
gcguucauuuguuaugaga

SEQ ID NO: 16975 - RNA, 19 nt, Artificial Sequence
  Description of Artificial Sequence: Synthetic oligonucleotide
  Antisense strand to SEQ ID NO: 16974
ucucauaacaaaugaacgc

SEQ ID NO: 16976 - RNA, 19 nt, Artificial Sequence
  Description of Artificial Sequence: Synthetic oligonucleotide
  Sense strand starting at position 2418 of SEQ ID NO: 175
ucgcguucauuuguuauga

SEQ ID NO: 16977 - RNA, 19 nt, Artificial Sequence
  Description of Artificial Sequence: Synthetic oligonucleotide
  Antisense strand to SEQ ID NO: 16976
ucauaacaaaugaacgcga

SEQ ID NO: 16978 - RNA, 19 nt, Artificial Sequence
  Description of Artificial Sequence: Synthetic oligonucleotide
  Sense strand starting at position 2392 of SEQ ID NO: 175
ugugcccuggcuuagauau

SEQ ID NO: 16979 - RNA, 19 nt, Artificial Sequence
  Description of Artificial Sequence: Synthetic oligonucleotide
  Antisense strand to SEQ ID NO: 16978
auaucuaagccagggcaca

SEQ ID NO: 16980 - RNA, 19 nt, Artificial Sequence
  Description of Artificial Sequence: Synthetic oligonucleotide
  Sense strand starting at position 2309 of SEQ ID NO: 175
gccugcuagcaucaauaaa

SEQ ID NO: 16981 - RNA, 19 nt, Artificial Sequence
  Description of Artificial Sequence: Synthetic oligonucleotide
  Antisense strand to SEQ ID NO: 16980
uuuauugaugcuagcaggc

SEQ ID NO: 16982 - RNA, 19 nt, Artificial Sequence
  Description of Artificial Sequence: Synthetic oligonucleotide
  Sense strand starting at position 2204 of SEQ ID NO: 175
ggcucuuggacccaucaga

SEQ ID NO: 16983 - RNA, 19 nt, Artificial Sequence
  Description of Artificial Sequence: Synthetic oligonucleotide
  Antisense strand to SEQ ID NO: 16982
ucugauggguccaagagcc

SEQ ID NO: 16984 - RNA, 19 nt, Artificial Sequence
  Description of Artificial Sequence: Synthetic oligonucleotide
  Sense strand starting at position 2193 of SEQ ID NO: 175
gccgaaauuucggcucuug

SEQ ID NO: 16985 - RNA, 19 nt, Artificial Sequence
  Description of Artificial Sequence: Synthetic oligonucleotide
  Antisense strand to SEQ ID NO: 16984
caagagccgaaauuucggc

SEQ ID NO: 16986 - RNA, 19 nt, Artificial Sequence
  Description of Artificial Sequence: Synthetic oligonucleotide
  Sense strand starting at position 2192 of SEQ ID NO: 175
agccgaaauuucggcucuu

SEQ ID NO: 16987 - RNA, 19 nt, Artificial Sequence
  Description of Artificial Sequence: Synthetic oligonucleotide
  Antisense strand to SEQ ID NO: 16986
aagagccgaaauuucggcu

SEQ ID NO: 16988 - RNA, 19 nt, Artificial Sequence
  Description of Artificial Sequence: Synthetic oligonucleotide
  Sense strand starting at position 2160 of SEQ ID NO: 175
aguuuagagagcugaguga

SEQ ID NO: 16989 - RNA, 19 nt, Artificial Sequence
  Description of Artificial Sequence: Synthetic oligonucleotide
  Antisense strand to SEQ ID NO: 16988
ucacucagcucucuaaacu

SEQ ID NO: 16990 - RNA, 19 nt, Artificial Sequence
  Description of Artificial Sequence: Synthetic oligonucleotide
  Sense strand starting at position 2155 of SEQ ID NO: 175
ggaggaguuuagagagcug

SEQ ID NO: 16991 - RNA, 19 nt, Artificial Sequence
  Description of Artificial Sequence: Synthetic oligonucleotide
  Antisense strand to SEQ ID NO: 16990
cagcucucuaaacuccucc

SEQ ID NO: 16992 - RNA, 19 nt, Artificial Sequence
  Description of Artificial Sequence: Synthetic oligonucleotide
  Sense strand starting at position 2091 of SEQ ID NO: 175
cggguuucuucuuagccaa

SEQ ID NO: 16993 - RNA, 19 nt, Artificial Sequence
  Description of Artificial Sequence: Synthetic oligonucleotide
  Antisense strand to SEQ ID NO: 16992
uuggcuaagaagaaacccg

SEQ ID NO: 16994 - RNA, 19 nt, Artificial Sequence
  Description of Artificial Sequence: Synthetic oligonucleotide
  Sense strand starting at position 2090 of SEQ ID NO: 175
acggguuucuucuuagcca

SEQ ID NO: 16995 - RNA, 19 nt, Artificial Sequence
  Description of Artificial Sequence: Synthetic oligonucleotide
  Antisense strand to SEQ ID NO: 16994
uggcuaagaagaaacccgu

SEQ ID NO: 16996 - RNA, 19 nt, Artificial Sequence
  Description of Artificial Sequence: Synthetic oligonucleotide
  Sense strand starting at position 3719 of SEQ ID NO: 176
ggugaaaguccugauauug

SEQ ID NO: 16997 - RNA, 19 nt, Artificial Sequence
  Description of Artificial Sequence: Synthetic oligonucleotide
  Antisense strand to SEQ ID NO: 16996
caauaucaggacuuucacc

SEQ ID NO: 16998 - RNA, 19 nt, Artificial Sequence
  Description of Artificial Sequence: Synthetic oligonucleotide
  Sense strand starting at position 3710 of SEQ ID NO: 176
ugauaucuuggugaaaguc

SEQ ID NO: 16999 - RNA, 19 nt, Artificial Sequence
  Description of Artificial Sequence: Synthetic oligonucleotide
  Antisense strand to SEQ ID NO: 16998
gacuuucaccaagauauca

SEQ ID NO: 17000 - RNA, 19 nt, Artificial Sequence
  Description of Artificial Sequence: Synthetic oligonucleotide
  Sense strand starting at position 3704 of SEQ ID NO: 176
guagaaugauaucuuggug

SEQ ID NO: 17001 - RNA, 19 nt, Artificial Sequence
  Description of Artificial Sequence: Synthetic oligonucleotide
  Antisense strand to SEQ ID NO: 17000
caccaagauaucauucuac

SEQ ID NO: 17002 - RNA, 19 nt, Artificial Sequence
  Description of Artificial Sequence: Synthetic oligonucleotide
  Sense strand starting at position 3661 of SEQ ID NO: 176
aacagagucugacuuuguu

SEQ ID NO: 17003 - RNA, 19 nt, Artificial Sequence
  Description of Artificial Sequence: Synthetic oligonucleotide
  Antisense strand to SEQ ID NO: 17002
aacaaagucagacucuguu

SEQ ID NO: 17004 - RNA, 19 nt, Artificial Sequence
  Description of Artificial Sequence: Synthetic oligonucleotide
  Sense strand starting at position 3617 of SEQ ID NO: 176
cagagccugcuaggaauaa

SEQ ID NO: 17005 - RNA, 19 nt, Artificial Sequence
  Description of Artificial Sequence: Synthetic oligonucleotide
  Antisense strand to SEQ ID NO: 17004
uuauuccuagcaggcucug

SEQ ID NO: 17006 - RNA, 19 nt, Artificial Sequence
  Description of Artificial Sequence: Synthetic oligonucleotide
  Sense strand starting at position 3565 of SEQ ID NO: 176
ccaguuacuuuggucuaau

SEQ ID NO: 17007 - RNA, 19 nt, Artificial Sequence
  Description of Artificial Sequence: Synthetic oligonucleotide
  Antisense strand to SEQ ID NO: 17006
auuagaccaaaguaacugg

SEQ ID NO: 17008 - RNA, 19 nt, Artificial Sequence
  Description of Artificial Sequence: Synthetic oligonucleotide
  Sense strand starting at position 3543 of SEQ ID NO: 176
gcuccagaauugcuaauga

SEQ ID NO: 17009 - RNA, 19 nt, Artificial Sequence
  Description of Artificial Sequence: Synthetic oligonucleotide
  Antisense strand to SEQ ID NO: 17008
ucauuagcaauucuggagc

SEQ ID NO: 17010 - RNA, 19 nt, Artificial Sequence
  Description of Artificial Sequence: Synthetic oligonucleotide
  Sense strand starting at position 3537 of SEQ ID NO: 176
gaguuugcuccagaauugc

SEQ ID NO: 17011 - RNA, 19 nt, Artificial Sequence
  Description of Artificial Sequence: Synthetic oligonucleotide
  Antisense strand to SEQ ID NO: 17010
gcaauucuggagcaaacuc

SEQ ID NO: 17012 - RNA, 19 nt, Artificial Sequence
  Description of Artificial Sequence: Synthetic oligonucleotide
  Sense strand starting at position 3535 of SEQ ID NO: 176
uugaguuugcuccagaauu

SEQ ID NO: 17013 - RNA, 19 nt, Artificial Sequence
  Description of Artificial Sequence: Synthetic oligonucleotide
  Antisense strand to SEQ ID NO: 17012
aauucuggagcaaacucaa

SEQ ID NO: 17014 - RNA, 19 nt, Artificial Sequence
  Description of Artificial Sequence: Synthetic oligonucleotide
  Sense strand starting at position 3498 of SEQ ID NO: 176
uggaaacagcuuuguggaa

SEQ ID NO: 17015 - RNA, 19 nt, Artificial Sequence
  Description of Artificial Sequence: Synthetic oligonucleotide
  Antisense strand to SEQ ID NO: 17014
uuccacaaagcuguuucca

SEQ ID NO: 17016 - RNA, 19 nt, Artificial Sequence
  Description of Artificial Sequence: Synthetic oligonucleotide
  Sense strand starting at position 3465 of SEQ ID NO: 176
gccuguuugggucacagau

SEQ ID NO: 17017 - RNA, 19 nt, Artificial Sequence
  Description of Artificial Sequence: Synthetic oligonucleotide
  Antisense strand to SEQ ID NO: 17016
aucugugacccaaacaggc

SEQ ID NO: 17018 - RNA, 19 nt, Artificial Sequence
  Description of Artificial Sequence: Synthetic oligonucleotide
  Sense strand starting at position 3412 of SEQ ID NO: 176
agaagcugauaguuaagaa

SEQ ID NO: 17019 - RNA, 19 nt, Artificial Sequence
  Description of Artificial Sequence: Synthetic oligonucleotide
  Antisense strand to SEQ ID NO: 17018
uucuuaacuaucagcuucu

SEQ ID NO: 17020 - RNA, 19 nt, Artificial Sequence
  Description of Artificial Sequence: Synthetic oligonucleotide
  Sense strand starting at position 3385 of SEQ ID NO: 176
gggauagaggugcaaguuu

SEQ ID NO: 17021 - RNA, 19 nt, Artificial Sequence
  Description of Artificial Sequence: Synthetic oligonucleotide
  Antisense strand to SEQ ID NO: 17020
aaacuugcaccucuauccc

SEQ ID NO: 17022 - RNA, 19 nt, Artificial Sequence
  Description of Artificial Sequence: Synthetic oligonucleotide
  Sense strand starting at position 3366 of SEQ ID NO: 176
gugugugacucucugaaga

SEQ ID NO: 17023 - RNA, 19 nt, Artificial Sequence
  Description of Artificial Sequence: Synthetic oligonucleotide
  Antisense strand to SEQ ID NO: 17022
ucuucagagagucacacac

SEQ ID NO: 17024 - RNA, 19 nt, Artificial Sequence
  Description of Artificial Sequence: Synthetic oligonucleotide
  Sense strand starting at position 2958 of SEQ ID NO: 176
ugcuaaggucuggaaagua

SEQ ID NO: 17025 - RNA, 19 nt, Artificial Sequence
  Description of Artificial Sequence: Synthetic oligonucleotide
  Antisense strand to SEQ ID NO: 17024
uacuuuccagaccuuagca

SEQ ID NO: 17026 - RNA, 19 nt, Artificial Sequence
  Description of Artificial Sequence: Synthetic oligonucleotide
  Sense strand starting at position 2789 of SEQ ID NO: 176
ucuugagaacugcgaucga

SEQ ID NO: 17027 - RNA, 19 nt, Artificial Sequence
  Description of Artificial Sequence: Synthetic oligonucleotide
  Antisense strand to SEQ ID NO: 17026
ucgaucgcaguucucaaga

SEQ ID NO: 17028 - RNA, 19 nt, Artificial Sequence
  Description of Artificial Sequence: Synthetic oligonucleotide
  Sense strand starting at position 2778 of SEQ ID NO: 176
ugucucucuucucuugaga

SEQ ID NO: 17029 - RNA, 19 nt, Artificial Sequence
  Description of Artificial Sequence: Synthetic oligonucleotide
  Antisense strand to SEQ ID NO: 17028
ucucaagagaagagagaca

SEQ ID NO: 17030 - RNA, 19 nt, Artificial Sequence
  Description of Artificial Sequence: Synthetic oligonucleotide
  Sense strand starting at position 2627 of SEQ ID NO: 176
uggcguugucuggauuuga

SEQ ID NO: 17031 - RNA, 19 nt, Artificial Sequence
  Description of Artificial Sequence: Synthetic oligonucleotide
  Antisense strand to SEQ ID NO: 17030
ucaaauccagacaacgcca

SEQ ID NO: 17032 - RNA, 19 nt, Artificial Sequence
  Description of Artificial Sequence: Synthetic oligonucleotide
  Sense strand starting at position 2210 of SEQ ID NO: 176
cagcaagagucccuccgaa

SEQ ID NO: 17033 - RNA, 19 nt, Artificial Sequence
  Description of Artificial Sequence: Synthetic oligonucleotide
  Antisense strand to SEQ ID NO: 17032
uucggagggacucuugcug

SEQ ID NO: 17034 - RNA, 19 nt, Artificial Sequence
  Description of Artificial Sequence: Synthetic oligonucleotide
  Sense strand starting at position 2165 of SEQ ID NO: 176
ugggaaguguagucuugga

SEQ ID NO: 17035 - RNA, 19 nt, Artificial Sequence
  Description of Artificial Sequence: Synthetic oligonucleotide
  Antisense strand to SEQ ID NO: 17034
uccaagacuacacuuccca

SEQ ID NO: 17036 - RNA, 19 nt, Artificial Sequence
  Description of Artificial Sequence: Synthetic oligonucleotide
  Sense strand starting at position 1279 of SEQ ID NO: 176
gggcaagaggccugggaaa

SEQ ID NO: 17037 - RNA, 19 nt, Artificial Sequence
  Description of Artificial Sequence: Synthetic oligonucleotide
  Antisense strand to SEQ ID NO: 17036
uuucccaggccucuugccc

SEQ ID NO: 17038 - RNA, 19 nt, Artificial Sequence
  Description of Artificial Sequence: Synthetic oligonucleotide
  Sense strand starting at position 1186 of SEQ ID NO: 176
agacaaagaucagaagaag

SEQ ID NO: 17039 - RNA, 19 nt, Artificial Sequence
  Description of Artificial Sequence: Synthetic oligonucleotide
  Antisense strand to SEQ ID NO: 17038
cuucuucugaucuuugucu

SEQ ID NO: 17040 - RNA, 19 nt, Artificial Sequence
  Description of Artificial Sequence: Synthetic oligonucleotide
  Sense strand starting at position 1054 of SEQ ID NO: 176
gaacaagugucauuagaga

SEQ ID NO: 17041 - RNA, 19 nt, Artificial Sequence
  Description of Artificial Sequence: Synthetic oligonucleotide
  Antisense strand to SEQ ID NO: 17040
ucucuaaugacacuuguuc

SEQ ID NO: 17042 - RNA, 19 nt, Artificial Sequence
  Description of Artificial Sequence: Synthetic oligonucleotide
  Sense strand starting at position 979 of SEQ ID NO: 176
ccacucuaaguccguuaaa

SEQ ID NO: 17043 - RNA, 19 nt, Artificial Sequence
  Description of Artificial Sequence: Synthetic oligonucleotide
  Antisense strand to SEQ ID NO: 17042
uuuaacggacuuagagugg

SEQ ID NO: 17044 - RNA, 19 nt, Artificial Sequence
  Description of Artificial Sequence: Synthetic oligonucleotide
  Sense strand starting at position 879 of SEQ ID NO: 176
auaugcuccuuucuaggau

SEQ ID NO: 17045 - RNA, 19 nt, Artificial Sequence
  Description of Artificial Sequence: Synthetic oligonucleotide
  Antisense strand to SEQ ID NO: 17044
auccuagaaaggagcauau

SEQ ID NO: 17046 - RNA, 19 nt, Artificial Sequence
  Description of Artificial Sequence: Synthetic oligonucleotide
  Sense strand starting at position 700 of SEQ ID NO: 176
cucccugucccuugggaaa

SEQ ID NO: 17047 - RNA, 19 nt, Artificial Sequence
  Description of Artificial Sequence: Synthetic oligonucleotide
  Antisense strand to SEQ ID NO: 17046
uuucccaagggacagggag

SEQ ID NO: 17048 - RNA, 19 nt, Artificial Sequence
  Description of Artificial Sequence: Synthetic oligonucleotide
  Sense strand starting at position 429 of SEQ ID NO: 176
accauagcauugucaaagu

SEQ ID NO: 17049 - RNA, 19 nt, Artificial Sequence
  Description of Artificial Sequence: Synthetic oligonucleotide
  Antisense strand to SEQ ID NO: 17048
acuuugacaaugcuauggu

SEQ ID NO: 17050 - RNA, 19 nt, Artificial Sequence
  Description of Artificial Sequence: Synthetic oligonucleotide
  Sense strand starting at position 313 of SEQ ID NO: 176
cccugagucucuucuugag

SEQ ID NO: 17051 - RNA, 19 nt, Artificial Sequence
  Description of Artificial Sequence: Synthetic oligonucleotide
  Antisense strand to SEQ ID NO: 17050
cucaagaagagacucaggg

SEQ ID NO: 17052 - RNA, 19 nt, Artificial Sequence
  Description of Artificial Sequence: Synthetic oligonucleotide
  Sense strand starting at position 304 of SEQ ID NO: 176
ucuauaagucccugagucu

SEQ ID NO: 17053 - RNA, 19 nt, Artificial Sequence
  Description of Artificial Sequence: Synthetic oligonucleotide
  Antisense strand to SEQ ID NO: 17052
agacucagggacuuauaga

SEQ ID NO: 17054 - RNA, 19 nt, Artificial Sequence
  Description of Artificial Sequence: Synthetic oligonucleotide
  Sense strand starting at position 288 of SEQ ID NO: 176
guccuuaaccaauguuucu

SEQ ID NO: 17055 - RNA, 19 nt, Artificial Sequence
  Description of Artificial Sequence: Synthetic oligonucleotide
  Antisense strand to SEQ ID NO: 17054
agaaacauugguuaaggac

SEQ ID NO: 17056 - RNA, 19 nt, Artificial Sequence
  Description of Artificial Sequence: Synthetic oligonucleotide
  Sense strand starting at position 281 of SEQ ID NO: 176
ggaaaccguccuuaaccaa

SEQ ID NO: 17057 - RNA, 19 nt, Artificial Sequence
  Description of Artificial Sequence: Synthetic oligonucleotide
  Antisense strand to SEQ ID NO: 17056
uugguuaaggacgguuucc

SEQ ID NO: 17058 - RNA, 19 nt, Artificial Sequence
  Description of Artificial Sequence: Synthetic oligonucleotide
  Sense strand starting at position 280 of SEQ ID NO: 176
gggaaaccguccuuaacca

SEQ ID NO: 17059 - RNA, 19 nt, Artificial Sequence
  Description of Artificial Sequence: Synthetic oligonucleotide
  Antisense strand to SEQ ID NO: 17058
ugguuaaggacgguuuccc

SEQ ID NO: 17060 - RNA, 19 nt, Artificial Sequence
  Description of Artificial Sequence: Synthetic oligonucleotide
  Sense strand starting at position 236 of SEQ ID NO: 176
ggguaaguaucaucucuuu

SEQ ID NO: 17061 - RNA, 19 nt, Artificial Sequence
  Description of Artificial Sequence: Synthetic oligonucleotide
  Antisense strand to SEQ ID NO: 17060
aaagagaugauacuuaccc

SEQ ID NO: 17062 - RNA, 19 nt, Artificial Sequence
  Description of Artificial Sequence: Synthetic oligonucleotide
  Sense strand starting at position 230 of SEQ ID NO: 176
gauuguggguaaguaucau

SEQ ID NO: 17063 - RNA, 19 nt, Artificial Sequence
  Description of Artificial Sequence: Synthetic oligonucleotide
  Antisense strand to SEQ ID NO: 17062
augauacuuacccacaauc

SEQ ID NO: 17064 - RNA, 19 nt, Artificial Sequence
  Description of Artificial Sequence: Synthetic oligonucleotide
  Sense strand starting at position 227 of SEQ ID NO: 176
ggugauuguggguaaguau

SEQ ID NO: 17065 - RNA, 19 nt, Artificial Sequence
  Description of Artificial Sequence: Synthetic oligonucleotide
  Antisense strand to SEQ ID NO: 17064
auacuuacccacaaucacc

SEQ ID NO: 17066 - RNA, 19 nt, Artificial Sequence
  Description of Artificial Sequence: Synthetic oligonucleotide
  Sense strand starting at position 226 of SEQ ID NO: 176
gggugauuguggguaagua

SEQ ID NO: 17067 - RNA, 19 nt, Artificial Sequence
  Description of Artificial Sequence: Synthetic oligonucleotide
  Antisense strand to SEQ ID NO: 17066
uacuuacccacaaucaccc

SEQ ID NO: 17068 - RNA, 19 nt, Artificial Sequence
  Description of Artificial Sequence: Synthetic oligonucleotide
  Sense strand starting at position 225 of SEQ ID NO: 176
ugggugauuguggguaagu

SEQ ID NO: 17069 - RNA, 19 nt, Artificial Sequence
  Description of Artificial Sequence: Synthetic oligonucleotide
  Antisense strand to SEQ ID NO: 17068
acuuacccacaaucaccca

SEQ ID NO: 17070 - RNA, 19 nt, Artificial Sequence
  Description of Artificial Sequence: Synthetic oligonucleotide
  Sense strand starting at position 217 of SEQ ID NO: 176
uaacuaguugggugauugu

SEQ ID NO: 17071 - RNA, 19 nt, Artificial Sequence
  Description of Artificial Sequence: Synthetic oligonucleotide
  Antisense strand to SEQ ID NO: 17070
acaaucacccaacuaguua

SEQ ID NO: 17072 - RNA, 19 nt, Artificial Sequence
  Description of Artificial Sequence: Synthetic oligonucleotide
  Sense strand starting at position 213 of SEQ ID NO: 176
cugcuaacuaguuggguga

SEQ ID NO: 17073 - RNA, 19 nt, Artificial Sequence
  Description of Artificial Sequence: Synthetic oligonucleotide
  Antisense strand to SEQ ID NO: 17072
ucacccaacuaguuagcag

SEQ ID NO: 17074 - RNA, 19 nt, Artificial Sequence
  Description of Artificial Sequence: Synthetic oligonucleotide
  Sense strand starting at position 87 of SEQ ID NO: 176
guggguccauucucaaaug

SEQ ID NO: 17075 - RNA, 19 nt, Artificial Sequence
  Description of Artificial Sequence: Synthetic oligonucleotide
  Antisense strand to SEQ ID NO: 17074
cauuugagaauggacccac

SEQ ID NO: 17076 - RNA, 19 nt, Artificial Sequence
  Description of Artificial Sequence: Synthetic oligonucleotide
  Sense strand starting at position 645 of SEQ ID NO: 177
cuugcagggaacugagauu

SEQ ID NO: 17077 - RNA, 19 nt, Artificial Sequence
  Description of Artificial Sequence: Synthetic oligonucleotide
  Antisense strand to SEQ ID NO: 17076
aaucucaguucccugcaag

SEQ ID NO: 17078 - RNA, 19 nt, Artificial Sequence
  Description of Artificial Sequence: Synthetic oligonucleotide
  Sense strand starting at position 651 of SEQ ID NO: 177
gggaacugagauuguguca

SEQ ID NO: 17079 - RNA, 19 nt, Artificial Sequence
  Description of Artificial Sequence: Synthetic oligonucleotide
  Antisense strand to SEQ ID NO: 17078
ugacacaaucucaguuccc

SEQ ID NO: 17080 - RNA, 19 nt, Artificial Sequence
  Description of Artificial Sequence: Synthetic oligonucleotide
  Sense strand starting at position 805 of SEQ ID NO: 177
aguaccugccauugauaaa

SEQ ID NO: 17081 - RNA, 19 nt, Artificial Sequence
  Description of Artificial Sequence: Synthetic oligonucleotide
  Antisense strand to SEQ ID NO: 17080
uuuaucaauggcagguacu

SEQ ID NO: 17082 - RNA, 19 nt, Artificial Sequence
  Description of Artificial Sequence: Synthetic oligonucleotide
  Sense strand starting at position 915 of SEQ ID NO: 177
ccuauaagacugugagcaa

SEQ ID NO: 17083 - RNA, 19 nt, Artificial Sequence
  Description of Artificial Sequence: Synthetic oligonucleotide
  Antisense strand to SEQ ID NO: 17082
uugcucacagucuuauagg

SEQ ID NO: 17084 - RNA, 19 nt, Artificial Sequence
  Description of Artificial Sequence: Synthetic oligonucleotide
  Sense strand starting at position 1111 of SEQ ID NO: 177
guuucuuuacagugacuga

SEQ ID NO: 17085 - RNA, 19 nt, Artificial Sequence
  Description of Artificial Sequence: Synthetic oligonucleotide
  Antisense strand to SEQ ID NO: 17084
ucagucacuguaaagaaac

SEQ ID NO: 17086 - RNA, 19 nt, Artificial Sequence
  Description of Artificial Sequence: Synthetic oligonucleotide
  Sense strand starting at position 1114 of SEQ ID NO: 177
ucuuuacagugacugaaga

SEQ ID NO: 17087 - RNA, 19 nt, Artificial Sequence
  Description of Artificial Sequence: Synthetic oligonucleotide
  Antisense strand to SEQ ID NO: 17086
ucuucagucacuguaaaga

SEQ ID NO: 17088 - RNA, 19 nt, Artificial Sequence
  Description of Artificial Sequence: Synthetic oligonucleotide
  Sense strand starting at position 1131 of SEQ ID NO: 177
gagcaucuugccuagguga

SEQ ID NO: 17089 - RNA, 19 nt, Artificial Sequence
  Description of Artificial Sequence: Synthetic oligonucleotide
  Antisense strand to SEQ ID NO: 17088
ucaccuaggcaagaugcuc

SEQ ID NO: 17090 - RNA, 19 nt, Artificial Sequence
  Description of Artificial Sequence: Synthetic oligonucleotide
  Sense strand starting at position 1133 of SEQ ID NO: 177
gcaucuugccuaggugaca

SEQ ID NO: 17091 - RNA, 19 nt, Artificial Sequence
  Description of Artificial Sequence: Synthetic oligonucleotide
  Antisense strand to SEQ ID NO: 17090
ugucaccuaggcaagaugc

SEQ ID NO: 17092 - RNA, 19 nt, Artificial Sequence
  Description of Artificial Sequence: Synthetic oligonucleotide
  Sense strand starting at position 1144 of SEQ ID NO: 177
aggugacagaccugaaugu

SEQ ID NO: 17093 - RNA, 19 nt, Artificial Sequence
  Description of Artificial Sequence: Synthetic oligonucleotide
  Antisense strand to SEQ ID NO: 17092
acauucaggucugucaccu

SEQ ID NO: 17094 - RNA, 19 nt, Artificial Sequence
  Description of Artificial Sequence: Synthetic oligonucleotide
  Sense strand starting at position 1148 of SEQ ID NO: 177
gacagaccugaaugugauu

SEQ ID NO: 17095 - RNA, 19 nt, Artificial Sequence
  Description of Artificial Sequence: Synthetic oligonucleotide
  Antisense strand to SEQ ID NO: 17094
aaucacauucaggucuguc

SEQ ID NO: 17096 - RNA, 19 nt, Artificial Sequence
  Description of Artificial Sequence: Synthetic oligonucleotide
  Sense strand starting at position 1189 of SEQ ID NO: 177
ggccuagguuaguuacuga

SEQ ID NO: 17097 - RNA, 19 nt, Artificial Sequence
  Description of Artificial Sequence: Synthetic oligonucleotide
  Antisense strand to SEQ ID NO: 17096
ucaguaacuaaccuaggcc

SEQ ID NO: 17098 - RNA, 19 nt, Artificial Sequence
  Description of Artificial Sequence: Synthetic oligonucleotide
  Sense strand starting at position 1286 of SEQ ID NO: 177
agugacugcucaguacaua

SEQ ID NO: 17099 - RNA, 19 nt, Artificial Sequence
  Description of Artificial Sequence: Synthetic oligonucleotide
  Antisense strand to SEQ ID NO: 17098
uauguacugagcagucacu

SEQ ID NO: 17100 - RNA, 19 nt, Artificial Sequence
  Description of Artificial Sequence: Synthetic oligonucleotide
  Sense strand starting at position 1374 of SEQ ID NO: 177
gccugcaacuuggcaaauu

SEQ ID NO: 17101 - RNA, 19 nt, Artificial Sequence
  Description of Artificial Sequence: Synthetic oligonucleotide
  Antisense strand to SEQ ID NO: 17100
aauuugccaaguugcaggc

SEQ ID NO: 17102 - RNA, 19 nt, Artificial Sequence
  Description of Artificial Sequence: Synthetic oligonucleotide
  Sense strand starting at position 1385 of SEQ ID NO: 177
ggcaaauuggguggaaaca

SEQ ID NO: 17103 - RNA, 19 nt, Artificial Sequence
  Description of Artificial Sequence: Synthetic oligonucleotide
  Antisense strand to SEQ ID NO: 17102
uguuuccacccaauuugcc

SEQ ID NO: 17104 - RNA, 19 nt, Artificial Sequence
  Description of Artificial Sequence: Synthetic oligonucleotide
  Sense strand starting at position 1673 of SEQ ID NO: 177
aucccucucgccugugaau

SEQ ID NO: 17105 - RNA, 19 nt, Artificial Sequence
  Description of Artificial Sequence: Synthetic oligonucleotide
  Antisense strand to SEQ ID NO: 17104
auucacaggcgagagggau

SEQ ID NO: 17106 - RNA, 19 nt, Artificial Sequence
  Description of Artificial Sequence: Synthetic oligonucleotide
  Sense strand starting at position 2112 of SEQ ID NO: 177
gagugcgugcggcauauuu

SEQ ID NO: 17107 - RNA, 19 nt, Artificial Sequence
  Description of Artificial Sequence: Synthetic oligonucleotide
  Antisense strand to SEQ ID NO: 17106
aaauaugccgcacgcacuc

SEQ ID NO: 17108 - RNA, 19 nt, Artificial Sequence
  Description of Artificial Sequence: Synthetic oligonucleotide
  Sense strand starting at position 2138 of SEQ ID NO: 177
cggaggagugcguguucuu

SEQ ID NO: 17109 - RNA, 19 nt, Artificial Sequence
  Description of Artificial Sequence: Synthetic oligonucleotide
  Antisense strand to SEQ ID NO: 17108
aagaacacgcacuccuccg

SEQ ID NO: 17110 - RNA, 19 nt, Artificial Sequence
  Description of Artificial Sequence: Synthetic oligonucleotide
  Sense strand starting at position 2143 of SEQ ID NO: 177
gagugcguguucuuucuga

SEQ ID NO: 17111 - RNA, 19 nt, Artificial Sequence
  Description of Artificial Sequence: Synthetic oligonucleotide
  Antisense strand to SEQ ID NO: 17110
ucagaaagaacacgcacuc

SEQ ID NO: 17112 - RNA, 19 nt, Artificial Sequence
  Description of Artificial Sequence: Synthetic oligonucleotide
  Sense strand starting at position 2145 of SEQ ID NO: 177
gugcguguucuuucugauc

SEQ ID NO: 17113 - RNA, 19 nt, Artificial Sequence
  Description of Artificial Sequence: Synthetic oligonucleotide
  Antisense strand to SEQ ID NO: 17112
gaucagaaagaacacgcac

SEQ ID NO: 17114 - RNA, 19 nt, Artificial Sequence
  Description of Artificial Sequence: Synthetic oligonucleotide
  Sense strand starting at position 2206 of SEQ ID NO: 177
ucucgacagccucagaaau

SEQ ID NO: 17115 - RNA, 19 nt, Artificial Sequence
  Description of Artificial Sequence: Synthetic oligonucleotide
  Antisense strand to SEQ ID NO: 17114
auuucugaggcugucgaga

SEQ ID NO: 17116 - RNA, 19 nt, Artificial Sequence
  Description of Artificial Sequence: Synthetic oligonucleotide
  Sense strand starting at position 2259 of SEQ ID NO: 177
acaguauuucccgggcuua

SEQ ID NO: 17117 - RNA, 19 nt, Artificial Sequence
  Description of Artificial Sequence: Synthetic oligonucleotide
  Antisense strand to SEQ ID NO: 17116
uaagcccgggaaauacugu

SEQ ID NO: 17118 - RNA, 19 nt, Artificial Sequence
  Description of Artificial Sequence: Synthetic oligonucleotide
  Sense strand starting at position 2275 of SEQ ID NO: 177
uuaggaauuuguucguguc

SEQ ID NO: 17119 - RNA, 19 nt, Artificial Sequence
  Description of Artificial Sequence: Synthetic oligonucleotide
  Antisense strand to SEQ ID NO: 17118
gacacgaacaaauuccuaa

SEQ ID NO: 17120 - RNA, 19 nt, Artificial Sequence
  Description of Artificial Sequence: Synthetic oligonucleotide
  Sense strand starting at position 2276 of SEQ ID NO: 177
uaggaauuuguucguguca

SEQ ID NO: 17121 - RNA, 19 nt, Artificial Sequence
  Description of Artificial Sequence: Synthetic oligonucleotide
  Antisense strand to SEQ ID NO: 17120
ugacacgaacaaauuccua

SEQ ID NO: 17122 - RNA, 19 nt, Artificial Sequence
  Description of Artificial Sequence: Synthetic oligonucleotide
  Sense strand starting at position 2277 of SEQ ID NO: 177
aggaauuuguucgugucau

SEQ ID NO: 17123 - RNA, 19 nt, Artificial Sequence
  Description of Artificial Sequence: Synthetic oligonucleotide
  Antisense strand to SEQ ID NO: 17122
augacacgaacaaauuccu

SEQ ID NO: 17124 - RNA, 19 nt, Artificial Sequence
  Description of Artificial Sequence: Synthetic oligonucleotide
  Sense strand starting at position 2285 of SEQ ID NO: 177
guucgugucaucgcugaau

SEQ ID NO: 17125 - RNA, 19 nt, Artificial Sequence
  Description of Artificial Sequence: Synthetic oligonucleotide
  Antisense strand to SEQ ID NO: 17124
auucagcgaugacacgaac

SEQ ID NO: 17126 - RNA, 19 nt, Artificial Sequence
  Description of Artificial Sequence: Synthetic oligonucleotide
  Sense strand starting at position 2287 of SEQ ID NO: 177
ucgugucaucgcugaaucu

SEQ ID NO: 17127 - RNA, 19 nt, Artificial Sequence
  Description of Artificial Sequence: Synthetic oligonucleotide
  Antisense strand to SEQ ID NO: 17126
agauucagcgaugacacga

SEQ ID NO: 17128 - RNA, 19 nt, Artificial Sequence
  Description of Artificial Sequence: Synthetic oligonucleotide
  Sense strand starting at position 2288 of SEQ ID NO: 177
cgugucaucgcugaaucuu

SEQ ID NO: 17129 - RNA, 19 nt, Artificial Sequence
  Description of Artificial Sequence: Synthetic oligonucleotide
  Antisense strand to SEQ ID NO: 17128
aagauucagcgaugacacg

SEQ ID NO: 17130 - RNA, 19 nt, Artificial Sequence
  Description of Artificial Sequence: Synthetic oligonucleotide
  Sense strand starting at position 2294 of SEQ ID NO: 177
aucgcugaaucuucgcgau

SEQ ID NO: 17131 - RNA, 19 nt, Artificial Sequence
  Description of Artificial Sequence: Synthetic oligonucleotide
  Antisense strand to SEQ ID NO: 17130
aucgcgaagauucagcgau

SEQ ID NO: 17132 - RNA, 19 nt, Artificial Sequence
  Description of Artificial Sequence: Synthetic oligonucleotide
  Sense strand starting at position 2296 of SEQ ID NO: 177
cgcugaaucuucgcgauca

SEQ ID NO: 17133 - RNA, 19 nt, Artificial Sequence
  Description of Artificial Sequence: Synthetic oligonucleotide
  Antisense strand to SEQ ID NO: 17132
ugaucgcgaagauucagcg

SEQ ID NO: 17134 - RNA, 19 nt, Artificial Sequence
  Description of Artificial Sequence: Synthetic oligonucleotide
  Sense strand starting at position 2404 of SEQ ID NO: 177
ugcgaacaacuuugguaau

SEQ ID NO: 17135 - RNA, 19 nt, Artificial Sequence
  Description of Artificial Sequence: Synthetic oligonucleotide
  Antisense strand to SEQ ID NO: 17134
auuaccaaaguuguucgca

SEQ ID NO: 17136 - RNA, 19 nt, Artificial Sequence
  Description of Artificial Sequence: Synthetic oligonucleotide
  Sense strand starting at position 2524 of SEQ ID NO: 177
cguuuacugugccuuggau

SEQ ID NO: 17137 - RNA, 19 nt, Artificial Sequence
  Description of Artificial Sequence: Synthetic oligonucleotide
  Antisense strand to SEQ ID NO: 17136
auccaaggcacaguaaacg

SEQ ID NO: 17138 - RNA, 19 nt, Artificial Sequence
  Description of Artificial Sequence: Synthetic oligonucleotide
  Sense strand starting at position 2526 of SEQ ID NO: 177
uuuacugugccuuggauuu

SEQ ID NO: 17139 - RNA, 19 nt, Artificial Sequence
  Description of Artificial Sequence: Synthetic oligonucleotide
  Antisense strand to SEQ ID NO: 17138
aaauccaaggcacaguaaa

SEQ ID NO: 17140 - RNA, 19 nt, Artificial Sequence
  Description of Artificial Sequence: Synthetic oligonucleotide
  Sense strand starting at position 2556 of SEQ ID NO: 177
aaaugagguugugaaagua

SEQ ID NO: 17141 - RNA, 19 nt, Artificial Sequence
  Description of Artificial Sequence: Synthetic oligonucleotide
  Antisense strand to SEQ ID NO: 17140
uacuuucacaaccucauuu

SEQ ID NO: 17142 - RNA, 19 nt, Artificial Sequence
  Description of Artificial Sequence: Synthetic oligonucleotide
  Sense strand starting at position 2659 of SEQ ID NO: 177
gauggaauauauguacauu

SEQ ID NO: 17143 - RNA, 19 nt, Artificial Sequence
  Description of Artificial Sequence: Synthetic oligonucleotide
  Antisense strand to SEQ ID NO: 17142
aauguacauauauuccauc

SEQ ID NO: 17144 - RNA, 19 nt, Artificial Sequence
  Description of Artificial Sequence: Synthetic oligonucleotide
  Sense strand starting at position 3127 of SEQ ID NO: 177
gagccaucucgcuuuguca

SEQ ID NO: 17145 - RNA, 19 nt, Artificial Sequence
  Description of Artificial Sequence: Synthetic oligonucleotide
  Antisense strand to SEQ ID NO: 17144
ugacaaagcgagauggcuc

SEQ ID NO: 17146 - RNA, 19 nt, Artificial Sequence
  Description of Artificial Sequence: Synthetic oligonucleotide
  Sense strand starting at position 3396 of SEQ ID NO: 177
augccuggccuauaucaaa

SEQ ID NO: 17147 - RNA, 19 nt, Artificial Sequence
  Description of Artificial Sequence: Synthetic oligonucleotide
  Antisense strand to SEQ ID NO: 17146
uuugauauaggccaggcau

SEQ ID NO: 17148 - RNA, 19 nt, Artificial Sequence
  Description of Artificial Sequence: Synthetic oligonucleotide
  Sense strand starting at position 3507 of SEQ ID NO: 177
ucagcagugaagugauauu

SEQ ID NO: 17149 - RNA, 19 nt, Artificial Sequence
  Description of Artificial Sequence: Synthetic oligonucleotide
  Antisense strand to SEQ ID NO: 17148
aauaucacuucacugcuga

SEQ ID NO: 17150 - RNA, 19 nt, Artificial Sequence
  Description of Artificial Sequence: Synthetic oligonucleotide
  Sense strand starting at position 3574 of SEQ ID NO: 177
auauauugcuguguacuau

SEQ ID NO: 17151 - RNA, 19 nt, Artificial Sequence
  Description of Artificial Sequence: Synthetic oligonucleotide
  Antisense strand to SEQ ID NO: 17150
auaguacacagcaauauau

SEQ ID NO: 17152 - RNA, 19 nt, Artificial Sequence
  Description of Artificial Sequence: Synthetic oligonucleotide
  Sense strand starting at position 3647 of SEQ ID NO: 177
gcucaauauguguggugga

SEQ ID NO: 17153 - RNA, 19 nt, Artificial Sequence
  Description of Artificial Sequence: Synthetic oligonucleotide
  Antisense strand to SEQ ID NO: 17152
uccaccacacauauugagc

SEQ ID NO: 17154 - RNA, 19 nt, Artificial Sequence
  Description of Artificial Sequence: Synthetic oligonucleotide
  Sense strand starting at position 3756 of SEQ ID NO: 177
aucauaaagugggauuauc

SEQ ID NO: 17155 - RNA, 19 nt, Artificial Sequence
  Description of Artificial Sequence: Synthetic oligonucleotide
  Antisense strand to SEQ ID NO: 17154
gauaaucccacuuuaugau

SEQ ID NO: 17156 - RNA, 19 nt, Artificial Sequence
  Description of Artificial Sequence: Synthetic oligonucleotide
  Sense strand starting at position 261 of SEQ ID NO: 180
ggaauguggugcucaggga

SEQ ID NO: 17157 - RNA, 19 nt, Artificial Sequence
  Description of Artificial Sequence: Synthetic oligonucleotide
  Antisense strand to SEQ ID NO: 17156
ucccugagcaccacauucc

SEQ ID NO: 17158 - RNA, 19 nt, Artificial Sequence
  Description of Artificial Sequence: Synthetic oligonucleotide
  Sense strand starting at position 288 of SEQ ID NO: 180
gggaucuguucacagugau

SEQ ID NO: 17159 - RNA, 19 nt, Artificial Sequence
  Description of Artificial Sequence: Synthetic oligonucleotide
  Antisense strand to SEQ ID NO: 17158
aucacugugaacagauccc

SEQ ID NO: 17160 - RNA, 19 nt, Artificial Sequence
  Description of Artificial Sequence: Synthetic oligonucleotide
  Sense strand starting at position 478 of SEQ ID NO: 180
ccucaauccugagagaccu

SEQ ID NO: 17161 - RNA, 19 nt, Artificial Sequence
  Description of Artificial Sequence: Synthetic oligonucleotide
  Antisense strand to SEQ ID NO: 17160
aggucucucaggauugagg

SEQ ID NO: 17162 - RNA, 19 nt, Artificial Sequence
  Description of Artificial Sequence: Synthetic oligonucleotide
  Sense strand starting at position 531 of SEQ ID NO: 180
aaggcugaguccucugaga

SEQ ID NO: 17163 - RNA, 19 nt, Artificial Sequence
  Description of Artificial Sequence: Synthetic oligonucleotide
  Antisense strand to SEQ ID NO: 17162
ucucagaggacucagccuu

SEQ ID NO: 17164 - RNA, 19 nt, Artificial Sequence
  Description of Artificial Sequence: Synthetic oligonucleotide
  Sense strand starting at position 533 of SEQ ID NO: 180
ggcugaguccucugagaau

SEQ ID NO: 17165 - RNA, 19 nt, Artificial Sequence
  Description of Artificial Sequence: Synthetic oligonucleotide
  Antisense strand to SEQ ID NO: 17164
auucucagaggacucagcc

SEQ ID NO: 17166 - RNA, 19 nt, Artificial Sequence
  Description of Artificial Sequence: Synthetic oligonucleotide
  Sense strand starting at position 536 of SEQ ID NO: 180
ugaguccucugagaauuua

SEQ ID NO: 17167 - RNA, 19 nt, Artificial Sequence
  Description of Artificial Sequence: Synthetic oligonucleotide
  Antisense strand to SEQ ID NO: 17166
uaaauucucagaggacuca

SEQ ID NO: 17168 - RNA, 19 nt, Artificial Sequence
  Description of Artificial Sequence: Synthetic oligonucleotide
  Sense strand starting at position 547 of SEQ ID NO: 180
agaauuuauuacuacggau

SEQ ID NO: 17169 - RNA, 19 nt, Artificial Sequence
  Description of Artificial Sequence: Synthetic oligonucleotide
  Antisense strand to SEQ ID NO: 17168
auccguaguaauaaauucu

SEQ ID NO: 17170 - RNA, 19 nt, Artificial Sequence
  Description of Artificial Sequence: Synthetic oligonucleotide
  Sense strand starting at position 690 of SEQ ID NO: 180
ucucgaacuugaucugcaa

SEQ ID NO: 17171 - RNA, 19 nt, Artificial Sequence
  Description of Artificial Sequence: Synthetic oligonucleotide
  Antisense strand to SEQ ID NO: 17170
uugcagaucaaguucgaga

SEQ ID NO: 17172 - RNA, 19 nt, Artificial Sequence
  Description of Artificial Sequence: Synthetic oligonucleotide
  Sense strand starting at position 693 of SEQ ID NO: 180
cgaacuugaucugcaagac

SEQ ID NO: 17173 - RNA, 19 nt, Artificial Sequence
  Description of Artificial Sequence: Synthetic oligonucleotide
  Antisense strand to SEQ ID NO: 17172
gucuugcagaucaaguucg

SEQ ID NO: 17174 - RNA, 19 nt, Artificial Sequence
  Description of Artificial Sequence: Synthetic oligonucleotide
  Sense strand starting at position 729 of SEQ ID NO: 180
caaguaauucguggcaaag

SEQ ID NO: 17175 - RNA, 19 nt, Artificial Sequence
  Description of Artificial Sequence: Synthetic oligonucleotide
  Antisense strand to SEQ ID NO: 17174
cuuugccacgaauuacuug

SEQ ID NO: 17176 - RNA, 19 nt, Artificial Sequence
  Description of Artificial Sequence: Synthetic oligonucleotide
  Sense strand starting at position 731 of SEQ ID NO: 180
aguaauucguggcaaagaa

SEQ ID NO: 17177 - RNA, 19 nt, Artificial Sequence
  Description of Artificial Sequence: Synthetic oligonucleotide
  Antisense strand to SEQ ID NO: 17176
uucuuugccacgaauuacu

SEQ ID NO: 17178 - RNA, 19 nt, Artificial Sequence
  Description of Artificial Sequence: Synthetic oligonucleotide
  Sense strand starting at position 868 of SEQ ID NO: 180
gguacuuguggugguucau

SEQ ID NO: 17179 - RNA, 19 nt, Artificial Sequence
  Description of Artificial Sequence: Synthetic oligonucleotide
  Antisense strand to SEQ ID NO: 17178
augaaccaccacaaguacc

SEQ ID NO: 17180 - RNA, 19 nt, Artificial Sequence
  Description of Artificial Sequence: Synthetic oligonucleotide
  Sense strand starting at position 984 of SEQ ID NO: 180
ggcggacacugguaggauu

SEQ ID NO: 17181 - RNA, 19 nt, Artificial Sequence
  Description of Artificial Sequence: Synthetic oligonucleotide
  Antisense strand to SEQ ID NO: 17180
aauccuaccaguguccgcc

SEQ ID NO: 17182 - RNA, 19 nt, Artificial Sequence
  Description of Artificial Sequence: Synthetic oligonucleotide
  Sense strand starting at position 1315 of SEQ ID NO: 180
gguucgucccagcgaggau

SEQ ID NO: 17183 - RNA, 19 nt, Artificial Sequence
  Description of Artificial Sequence: Synthetic oligonucleotide
  Antisense strand to SEQ ID NO: 17182
auccucgcugggacgaacc

SEQ ID NO: 17184 - RNA, 19 nt, Artificial Sequence
  Description of Artificial Sequence: Synthetic oligonucleotide
  Sense strand starting at position 1718 of SEQ ID NO: 180
ggaggacuuugcuuccaac

SEQ ID NO: 17185 - RNA, 19 nt, Artificial Sequence
  Description of Artificial Sequence: Synthetic oligonucleotide
  Antisense strand to SEQ ID NO: 17184
guuggaagcaaaguccucc

SEQ ID NO: 17186 - RNA, 19 nt, Artificial Sequence
  Description of Artificial Sequence: Synthetic oligonucleotide
  Sense strand starting at position 1721 of SEQ ID NO: 180
ggacuuugcuuccaacaca

SEQ ID NO: 17187 - RNA, 19 nt, Artificial Sequence
  Description of Artificial Sequence: Synthetic oligonucleotide
  Antisense strand to SEQ ID NO: 17186
uguguuggaagcaaagucc

SEQ ID NO: 17188 - RNA, 19 nt, Artificial Sequence
  Description of Artificial Sequence: Synthetic oligonucleotide
  Sense strand starting at position 2128 of SEQ ID NO: 180
cgguuuccgguuaguggaa

SEQ ID NO: 17189 - RNA, 19 nt, Artificial Sequence
  Description of Artificial Sequence: Synthetic oligonucleotide
  Antisense strand to SEQ ID NO: 17188
uuccacuaaccggaaaccg

SEQ ID NO: 17190 - RNA, 19 nt, Artificial Sequence
  Description of Artificial Sequence: Synthetic oligonucleotide
  Sense strand starting at position 2335 of SEQ ID NO: 180
ugacguaucuggcaacgga

SEQ ID NO: 17191 - RNA, 19 nt, Artificial Sequence
  Description of Artificial Sequence: Synthetic oligonucleotide
  Antisense strand to SEQ ID NO: 17190
uccguugccagauacguca

SEQ ID NO: 17192 - RNA, 19 nt, Artificial Sequence
  Description of Artificial Sequence: Synthetic oligonucleotide
  Sense strand starting at position 2372 of SEQ ID NO: 180
gcggaagcgucuagagcua

SEQ ID NO: 17193 - RNA, 19 nt, Artificial Sequence
  Description of Artificial Sequence: Synthetic oligonucleotide
  Antisense strand to SEQ ID NO: 17192
uagcucuagacgcuuccgc

SEQ ID NO: 17194 - RNA, 19 nt, Artificial Sequence
  Description of Artificial Sequence: Synthetic oligonucleotide
  Sense strand starting at position 2752 of SEQ ID NO: 180
cagucugggugacauagau

SEQ ID NO: 17195 - RNA, 19 nt, Artificial Sequence
  Description of Artificial Sequence: Synthetic oligonucleotide
  Antisense strand to SEQ ID NO: 17194
aucuaugucacccagacug

SEQ ID NO: 17196 - RNA, 19 nt, Artificial Sequence
  Description of Artificial Sequence: Synthetic oligonucleotide
  Sense strand starting at position 2761 of SEQ ID NO: 180
ugacauagauccugucuca

SEQ ID NO: 17197 - RNA, 19 nt, Artificial Sequence
  Description of Artificial Sequence: Synthetic oligonucleotide
  Antisense strand to SEQ ID NO: 17196
ugagacaggaucuauguca

SEQ ID NO: 17198 - RNA, 19 nt, Artificial Sequence
  Description of Artificial Sequence: Synthetic oligonucleotide
  Sense strand starting at position 2942 of SEQ ID NO: 180
cuuugaccuccgugagguu

SEQ ID NO: 17199 - RNA, 19 nt, Artificial Sequence
  Description of Artificial Sequence: Synthetic oligonucleotide
  Antisense strand to SEQ ID NO: 17198
aaccucacggaggucaaag

SEQ ID NO: 17200 - RNA, 19 nt, Artificial Sequence
  Description of Artificial Sequence: Synthetic oligonucleotide
  Sense strand starting at position 2949 of SEQ ID NO: 180
cuccgugagguuggcuaau

SEQ ID NO: 17201 - RNA, 19 nt, Artificial Sequence
  Description of Artificial Sequence: Synthetic oligonucleotide
  Antisense strand to SEQ ID NO: 17200
auuagccaaccucacggag

SEQ ID NO: 17202 - RNA, 19 nt, Artificial Sequence
  Description of Artificial Sequence: Synthetic oligonucleotide
  Sense strand starting at position 2951 of SEQ ID NO: 180
ccgugagguuggcuaauau

SEQ ID NO: 17203 - RNA, 19 nt, Artificial Sequence
  Description of Artificial Sequence: Synthetic oligonucleotide
  Antisense strand to SEQ ID NO: 17202
auauuagccaaccucacgg

SEQ ID NO: 17204 - RNA, 19 nt, Artificial Sequence
  Description of Artificial Sequence: Synthetic oligonucleotide
  Sense strand starting at position 2955 of SEQ ID NO: 180
gagguuggcuaauauagag

SEQ ID NO: 17205 - RNA, 19 nt, Artificial Sequence
  Description of Artificial Sequence: Synthetic oligonucleotide
  Antisense strand to SEQ ID NO: 17204
cucuauauuagccaaccuc

SEQ ID NO: 17206 - RNA, 19 nt, Artificial Sequence
  Description of Artificial Sequence: Synthetic oligonucleotide
  Sense strand starting at position 3043 of SEQ ID NO: 180
ggagacuugccuugcagga

SEQ ID NO: 17207 - RNA, 19 nt, Artificial Sequence
  Description of Artificial Sequence: Synthetic oligonucleotide
  Antisense strand to SEQ ID NO: 17206
uccugcaaggcaagucucc

SEQ ID NO: 17208 - RNA, 19 nt, Artificial Sequence
  Description of Artificial Sequence: Synthetic oligonucleotide
  Sense strand starting at position 3206 of SEQ ID NO: 180
cccagaugacucuacguua

SEQ ID NO: 17209 - RNA, 19 nt, Artificial Sequence
  Description of Artificial Sequence: Synthetic oligonucleotide
  Antisense strand to SEQ ID NO: 17208
uaacguagagucaucuggg

SEQ ID NO: 17210 - RNA, 19 nt, Artificial Sequence
  Description of Artificial Sequence: Synthetic oligonucleotide
  Sense strand starting at position 3259 of SEQ ID NO: 180
aagguuuacgaacguuauu

SEQ ID NO: 17211 - RNA, 19 nt, Artificial Sequence
  Description of Artificial Sequence: Synthetic oligonucleotide
  Antisense strand to SEQ ID NO: 17210
aauaacguucguaaaccuu

SEQ ID NO: 17212 - RNA, 19 nt, Artificial Sequence
  Description of Artificial Sequence: Synthetic oligonucleotide
  Sense strand starting at position 3317 of SEQ ID NO: 180
aguggauuuggccguaaau

SEQ ID NO: 17213 - RNA, 19 nt, Artificial Sequence
  Description of Artificial Sequence: Synthetic oligonucleotide
  Antisense strand to SEQ ID NO: 17212
auuuacggccaaauccacu

SEQ ID NO: 17214 - RNA, 19 nt, Artificial Sequence
  Description of Artificial Sequence: Synthetic oligonucleotide
  Sense strand starting at position 3507 of SEQ ID NO: 180
gaggcauugacgugcagau

SEQ ID NO: 17215 - RNA, 19 nt, Artificial Sequence
  Description of Artificial Sequence: Synthetic oligonucleotide
  Antisense strand to SEQ ID NO: 17214
aucugcacgucaaugccuc

SEQ ID NO: 17216 - RNA, 19 nt, Artificial Sequence
  Description of Artificial Sequence: Synthetic oligonucleotide
  Sense strand starting at position 3509 of SEQ ID NO: 180
ggcauugacgugcagauau

SEQ ID NO: 17217 - RNA, 19 nt, Artificial Sequence
  Description of Artificial Sequence: Synthetic oligonucleotide
  Antisense strand to SEQ ID NO: 17216
auaucugcacgucaaugcc

SEQ ID NO: 17218 - RNA, 19 nt, Artificial Sequence
  Description of Artificial Sequence: Synthetic oligonucleotide
  Sense strand starting at position 3511 of SEQ ID NO: 180
cauugacgugcagauauaa

SEQ ID NO: 17219 - RNA, 19 nt, Artificial Sequence
  Description of Artificial Sequence: Synthetic oligonucleotide
  Antisense strand to SEQ ID NO: 17218
uuauaucugcacgucaaug

SEQ ID NO: 17220 - RNA, 19 nt, Artificial Sequence
  Description of Artificial Sequence: Synthetic oligonucleotide
  Sense strand starting at position 3540 of SEQ ID NO: 180
ugaguuagggacugguaga

SEQ ID NO: 17221 - RNA, 19 nt, Artificial Sequence
  Description of Artificial Sequence: Synthetic oligonucleotide
  Antisense strand to SEQ ID NO: 17220
ucuaccagucccuaacuca

SEQ ID NO: 17222 - RNA, 19 nt, Artificial Sequence
  Description of Artificial Sequence: Synthetic oligonucleotide
  Sense strand starting at position 3541 of SEQ ID NO: 180
gaguuagggacugguagaa

SEQ ID NO: 17223 - RNA, 19 nt, Artificial Sequence
  Description of Artificial Sequence: Synthetic oligonucleotide
  Antisense strand to SEQ ID NO: 17222
uucuaccagucccuaacuc

SEQ ID NO: 17224 - RNA, 19 nt, Artificial Sequence
  Description of Artificial Sequence: Synthetic oligonucleotide
  Sense strand starting at position 3584 of SEQ ID NO: 180
cugagaaagucuugaggag

SEQ ID NO: 17225 - RNA, 19 nt, Artificial Sequence
  Description of Artificial Sequence: Synthetic oligonucleotide
  Antisense strand to SEQ ID NO: 17224
cuccucaagacuuucucag

SEQ ID NO: 17226 - RNA, 19 nt, Artificial Sequence
  Description of Artificial Sequence: Synthetic oligonucleotide
  Sense strand starting at position 3825 of SEQ ID NO: 180
gaugaaugcccgggccaga

SEQ ID NO: 17227 - RNA, 19 nt, Artificial Sequence
  Description of Artificial Sequence: Synthetic oligonucleotide
  Antisense strand to SEQ ID NO: 17226
ucuggcccgggcauucauc

SEQ ID NO: 17228 - RNA, 19 nt, Artificial Sequence
  Description of Artificial Sequence: Synthetic oligonucleotide
  Sense strand starting at position 3890 of SEQ ID NO: 180
gcgccagaugcuuguguga

SEQ ID NO: 17229 - RNA, 19 nt, Artificial Sequence
  Description of Artificial Sequence: Synthetic oligonucleotide
  Antisense strand to SEQ ID NO: 17228
ucacacaagcaucuggcgc

SEQ ID NO: 17230 - RNA, 19 nt, Artificial Sequence
  Description of Artificial Sequence: Synthetic oligonucleotide
  Sense strand starting at position 3895 of SEQ ID NO: 180
agaugcuugugugagcaga

SEQ ID NO: 17231 - RNA, 19 nt, Artificial Sequence
  Description of Artificial Sequence: Synthetic oligonucleotide
  Antisense strand to SEQ ID NO: 17230
ucugcucacacaagcaucu

SEQ ID NO: 17232 - RNA, 19 nt, Artificial Sequence
  Description of Artificial Sequence: Synthetic oligonucleotide
  Sense strand starting at position 3922 of SEQ ID NO: 180
gcuagaugagcuggaacua

SEQ ID NO: 17233 - RNA, 19 nt, Artificial Sequence
  Description of Artificial Sequence: Synthetic oligonucleotide
  Antisense strand to SEQ ID NO: 17232
uaguuccagcucaucuagc

SEQ ID NO: 17234 - RNA, 19 nt, Artificial Sequence
  Description of Artificial Sequence: Synthetic oligonucleotide
  Sense strand starting at position 3962 of SEQ ID NO: 180
acaaacaucugaggaagaa

SEQ ID NO: 17235 - RNA, 19 nt, Artificial Sequence
  Description of Artificial Sequence: Synthetic oligonucleotide
  Antisense strand to SEQ ID NO: 17234
uucuuccucagauguuugu

SEQ ID NO: 17236 - RNA, 19 nt, Artificial Sequence
  Description of Artificial Sequence: Synthetic oligonucleotide
  Sense strand starting at position 279 of SEQ ID NO: 178
ggaauguggugcucaggga

SEQ ID NO: 17237 - RNA, 19 nt, Artificial Sequence
  Description of Artificial Sequence: Synthetic oligonucleotide
  Antisense strand to SEQ ID NO: 17236
ucccugagcaccacauucc

SEQ ID NO: 17238 - RNA, 19 nt, Artificial Sequence
  Description of Artificial Sequence: Synthetic oligonucleotide
  Sense strand starting at position 306 of SEQ ID NO: 178
gggaucuguucacagugau

SEQ ID NO: 17239 - RNA, 19 nt, Artificial Sequence
  Description of Artificial Sequence: Synthetic oligonucleotide
  Antisense strand to SEQ ID NO: 17238
aucacugugaacagauccc

SEQ ID NO: 17240 - RNA, 19 nt, Artificial Sequence
  Description of Artificial Sequence: Synthetic oligonucleotide
  Sense strand starting at position 496 of SEQ ID NO: 178
ccucaauccugagagaccu

SEQ ID NO: 17241 - RNA, 19 nt, Artificial Sequence
  Description of Artificial Sequence: Synthetic oligonucleotide
  Antisense strand to SEQ ID NO: 17240
aggucucucaggauugagg

SEQ ID NO: 17242 - RNA, 19 nt, Artificial Sequence
  Description of Artificial Sequence: Synthetic oligonucleotide
  Sense strand starting at position 549 of SEQ ID NO: 178
aaggcugaguccucugaga

SEQ ID NO: 17243 - RNA, 19 nt, Artificial Sequence
  Description of Artificial Sequence: Synthetic oligonucleotide
  Antisense strand to SEQ ID NO: 17242
ucucagaggacucagccuu

SEQ ID NO: 17244 - RNA, 19 nt, Artificial Sequence
  Description of Artificial Sequence: Synthetic oligonucleotide
  Sense strand starting at position 551 of SEQ ID NO: 178
ggcugaguccucugagaau

SEQ ID NO: 17245 - RNA, 19 nt, Artificial Sequence
  Description of Artificial Sequence: Synthetic oligonucleotide
  Antisense strand to SEQ ID NO: 17244
auucucagaggacucagcc

SEQ ID NO: 17246 - RNA, 19 nt, Artificial Sequence
  Description of Artificial Sequence: Synthetic oligonucleotide
  Sense strand starting at position 554 of SEQ ID NO: 178
ugaguccucugagaauuua

SEQ ID NO: 17247 - RNA, 19 nt, Artificial Sequence
  Description of Artificial Sequence: Synthetic oligonucleotide
  Antisense strand to SEQ ID NO: 17246
uaaauucucagaggacuca

SEQ ID NO: 17248 - RNA, 19 nt, Artificial Sequence
  Description of Artificial Sequence: Synthetic oligonucleotide
  Sense strand starting at position 565 of SEQ ID NO: 178
agaauuuauuacuacggau

SEQ ID NO: 17249 - RNA, 19 nt, Artificial Sequence
  Description of Artificial Sequence: Synthetic oligonucleotide
  Antisense strand to SEQ ID NO: 17248
auccguaguaauaaauucu

SEQ ID NO: 17250 - RNA, 19 nt, Artificial Sequence
  Description of Artificial Sequence: Synthetic oligonucleotide
  Sense strand starting at position 708 of SEQ ID NO: 178
ucucgaacuugaucugcaa

SEQ ID NO: 17251 - RNA, 19 nt, Artificial Sequence
  Description of Artificial Sequence: Synthetic oligonucleotide
  Antisense strand to SEQ ID NO: 17250
uugcagaucaaguucgaga

SEQ ID NO: 17252 - RNA, 19 nt, Artificial Sequence
  Description of Artificial Sequence: Synthetic oligonucleotide
  Sense strand starting at position 711 of SEQ ID NO: 178
cgaacuugaucugcaagac

SEQ ID NO: 17253 - RNA, 19 nt, Artificial Sequence
  Description of Artificial Sequence: Synthetic oligonucleotide
  Antisense strand to SEQ ID NO: 17252
gucuugcagaucaaguucg

SEQ ID NO: 17254 - RNA, 19 nt, Artificial Sequence
  Description of Artificial Sequence: Synthetic oligonucleotide
  Sense strand starting at position 747 of SEQ ID NO: 178
caaguaauucguggcaaag

SEQ ID NO: 17255 - RNA, 19 nt, Artificial Sequence
  Description of Artificial Sequence: Synthetic oligonucleotide
  Antisense strand to SEQ ID NO: 17254
cuuugccacgaauuacuug

SEQ ID NO: 17256 - RNA, 19 nt, Artificial Sequence
  Description of Artificial Sequence: Synthetic oligonucleotide
  Sense strand starting at position 749 of SEQ ID NO: 178
aguaauucguggcaaagaa

SEQ ID NO: 17257 - RNA, 19 nt, Artificial Sequence
  Description of Artificial Sequence: Synthetic oligonucleotide
  Antisense strand to SEQ ID NO: 17256
uucuuugccacgaauuacu

SEQ ID NO: 17258 - RNA, 19 nt, Artificial Sequence
  Description of Artificial Sequence: Synthetic oligonucleotide
  Sense strand starting at position 886 of SEQ ID NO: 178
gguacuuguggugguucau

SEQ ID NO: 17259 - RNA, 19 nt, Artificial Sequence
  Description of Artificial Sequence: Synthetic oligonucleotide
  Antisense strand to SEQ ID NO: 17258
augaaccaccacaaguacc

SEQ ID NO: 17260 - RNA, 19 nt, Artificial Sequence
  Description of Artificial Sequence: Synthetic oligonucleotide
  Sense strand starting at position 1002 of SEQ ID NO: 178
ggcggacacugguaggauu

SEQ ID NO: 17261 - RNA, 19 nt, Artificial Sequence
  Description of Artificial Sequence: Synthetic oligonucleotide
  Antisense strand to SEQ ID NO: 17260
aauccuaccaguguccgcc

SEQ ID NO: 17262 - RNA, 19 nt, Artificial Sequence
  Description of Artificial Sequence: Synthetic oligonucleotide
  Sense strand starting at position 1333 of SEQ ID NO: 178
gguucgucccagcgaggau

SEQ ID NO: 17263 - RNA, 19 nt, Artificial Sequence
  Description of Artificial Sequence: Synthetic oligonucleotide
  Antisense strand to SEQ ID NO: 17262
auccucgcugggacgaacc

SEQ ID NO: 17264 - RNA, 19 nt, Artificial Sequence
  Description of Artificial Sequence: Synthetic oligonucleotide
  Sense strand starting at position 1736 of SEQ ID NO: 178
ggaggacuuugcuuccaac

SEQ ID NO: 17265 - RNA, 19 nt, Artificial Sequence
  Description of Artificial Sequence: Synthetic oligonucleotide
  Antisense strand to SEQ ID NO: 17264
guuggaagcaaaguccucc

SEQ ID NO: 17266 - RNA, 19 nt, Artificial Sequence
  Description of Artificial Sequence: Synthetic oligonucleotide
  Sense strand starting at position 1739 of SEQ ID NO: 178
ggacuuugcuuccaacaca

SEQ ID NO: 17267 - RNA, 19 nt, Artificial Sequence
  Description of Artificial Sequence: Synthetic oligonucleotide
  Antisense strand to SEQ ID NO: 17266
uguguuggaagcaaagucc

SEQ ID NO: 17268 - RNA, 19 nt, Artificial Sequence
  Description of Artificial Sequence: Synthetic oligonucleotide
  Sense strand starting at position 2146 of SEQ ID NO: 178
cgguuuccgguuaguggaa

SEQ ID NO: 17269 - RNA, 19 nt, Artificial Sequence
  Description of Artificial Sequence: Synthetic oligonucleotide
  Antisense strand to SEQ ID NO: 17268
uuccacuaaccggaaaccg

SEQ ID NO: 17270 - RNA, 19 nt, Artificial Sequence
  Description of Artificial Sequence: Synthetic oligonucleotide
  Sense strand starting at position 2353 of SEQ ID NO: 178
ugacguaucuggcaacgga

SEQ ID NO: 17271 - RNA, 19 nt, Artificial Sequence
  Description of Artificial Sequence: Synthetic oligonucleotide
  Antisense strand to SEQ ID NO: 17270
uccguugccagauacguca

SEQ ID NO: 17272 - RNA, 19 nt, Artificial Sequence
  Description of Artificial Sequence: Synthetic oligonucleotide
  Sense strand starting at position 2390 of SEQ ID NO: 178
gcggaagcgucuagagcua

SEQ ID NO: 17273 - RNA, 19 nt, Artificial Sequence
  Description of Artificial Sequence: Synthetic oligonucleotide
  Antisense strand to SEQ ID NO: 17272
uagcucuagacgcuuccgc

SEQ ID NO: 17274 - RNA, 19 nt, Artificial Sequence
  Description of Artificial Sequence: Synthetic oligonucleotide
  Sense strand starting at position 2770 of SEQ ID NO: 178
cagucugggugacauagau

SEQ ID NO: 17275 - RNA, 19 nt, Artificial Sequence
  Description of Artificial Sequence: Synthetic oligonucleotide
  Antisense strand to SEQ ID NO: 17274
aucuaugucacccagacug

SEQ ID NO: 17276 - RNA, 19 nt, Artificial Sequence
  Description of Artificial Sequence: Synthetic oligonucleotide
  Sense strand starting at position 2779 of SEQ ID NO: 178
ugacauagauccugucuca

SEQ ID NO: 17277 - RNA, 19 nt, Artificial Sequence
  Description of Artificial Sequence: Synthetic oligonucleotide
  Antisense strand to SEQ ID NO: 17276
ugagacaggaucuauguca

SEQ ID NO: 17278 - RNA, 19 nt, Artificial Sequence
  Description of Artificial Sequence: Synthetic oligonucleotide
  Sense strand starting at position 2960 of SEQ ID NO: 178
cuuugaccuccgugagguu

SEQ ID NO: 17279 - RNA, 19 nt, Artificial Sequence
  Description of Artificial Sequence: Synthetic oligonucleotide
  Antisense strand to SEQ ID NO: 17278
aaccucacggaggucaaag

SEQ ID NO: 17280 - RNA, 19 nt, Artificial Sequence
  Description of Artificial Sequence: Synthetic oligonucleotide
  Sense strand starting at position 2967 of SEQ ID NO: 178
cuccgugagguuggcuaau

SEQ ID NO: 17281 - RNA, 19 nt, Artificial Sequence
  Description of Artificial Sequence: Synthetic oligonucleotide
  Antisense strand to SEQ ID NO: 17280
auuagccaaccucacggag

SEQ ID NO: 17282 - RNA, 19 nt, Artificial Sequence
  Description of Artificial Sequence: Synthetic oligonucleotide
  Sense strand starting at position 2969 of SEQ ID NO: 178
ccgugagguuggcuaauau

SEQ ID NO: 17283 - RNA, 19 nt, Artificial Sequence
  Description of Artificial Sequence: Synthetic oligonucleotide
  Antisense strand to SEQ ID NO: 17282
auauuagccaaccucacgg

SEQ ID NO: 17284 - RNA, 19 nt, Artificial Sequence
  Description of Artificial Sequence: Synthetic oligonucleotide
  Sense strand starting at position 2973 of SEQ ID NO: 178
gagguuggcuaauauagag

SEQ ID NO: 17285 - RNA, 19 nt, Artificial Sequence
  Description of Artificial Sequence: Synthetic oligonucleotide
  Antisense strand to SEQ ID NO: 17284
cucuauauuagccaaccuc

SEQ ID NO: 17286 - RNA, 19 nt, Artificial Sequence
  Description of Artificial Sequence: Synthetic oligonucleotide
  Sense strand starting at position 3061 of SEQ ID NO: 178
ggagacuugccuugcagga

SEQ ID NO: 17287 - RNA, 19 nt, Artificial Sequence
  Description of Artificial Sequence: Synthetic oligonucleotide
  Antisense strand to SEQ ID NO: 17286
uccugcaaggcaagucucc

SEQ ID NO: 17288 - RNA, 19 nt, Artificial Sequence
  Description of Artificial Sequence: Synthetic oligonucleotide
  Sense strand starting at position 3224 of SEQ ID NO: 178
cccagaugacucuacguua

SEQ ID NO: 17289 - RNA, 19 nt, Artificial Sequence
  Description of Artificial Sequence: Synthetic oligonucleotide
  Antisense strand to SEQ ID NO: 17288
uaacguagagucaucuggg

SEQ ID NO: 17290 - RNA, 19 nt, Artificial Sequence
  Description of Artificial Sequence: Synthetic oligonucleotide
  Sense strand starting at position 3277 of SEQ ID NO: 178
aagguuuacgaacguuauu

SEQ ID NO: 17291 - RNA, 19 nt, Artificial Sequence
  Description of Artificial Sequence: Synthetic oligonucleotide
  Antisense strand to SEQ ID NO: 17290
aauaacguucguaaaccuu

SEQ ID NO: 17292 - RNA, 19 nt, Artificial Sequence
  Description of Artificial Sequence: Synthetic oligonucleotide
  Sense strand starting at position 3335 of SEQ ID NO: 178
aguggauuuggccguaaau

SEQ ID NO: 17293 - RNA, 19 nt, Artificial Sequence
  Description of Artificial Sequence: Synthetic oligonucleotide
  Antisense strand to SEQ ID NO: 17292
auuuacggccaaauccacu

SEQ ID NO: 17294 - RNA, 19 nt, Artificial Sequence
  Description of Artificial Sequence: Synthetic oligonucleotide
  Sense strand starting at position 3525 of SEQ ID NO: 178
gaggcauugacgugcagau

SEQ ID NO: 17295 - RNA, 19 nt, Artificial Sequence
  Description of Artificial Sequence: Synthetic oligonucleotide
  Antisense strand to SEQ ID NO: 17294
aucugcacgucaaugccuc

SEQ ID NO: 17296 - RNA, 19 nt, Artificial Sequence
  Description of Artificial Sequence: Synthetic oligonucleotide
  Sense strand starting at position 3527 of SEQ ID NO: 178
ggcauugacgugcagauau

SEQ ID NO: 17297 - RNA, 19 nt, Artificial Sequence
  Description of Artificial Sequence: Synthetic oligonucleotide
  Antisense strand to SEQ ID NO: 17296
auaucugcacgucaaugcc

SEQ ID NO: 17298 - RNA, 19 nt, Artificial Sequence
  Description of Artificial Sequence: Synthetic oligonucleotide
  Sense strand starting at position 3529 of SEQ ID NO: 178
cauugacgugcagauauaa

SEQ ID NO: 17299 - RNA, 19 nt, Artificial Sequence
  Description of Artificial Sequence: Synthetic oligonucleotide
  Antisense strand to SEQ ID NO: 17298
uuauaucugcacgucaaug

SEQ ID NO: 17300 - RNA, 19 nt, Artificial Sequence
  Description of Artificial Sequence: Synthetic oligonucleotide
  Sense strand starting at position 3558 of SEQ ID NO: 178
ugaguuagggacugguaga

SEQ ID NO: 17301 - RNA, 19 nt, Artificial Sequence
  Description of Artificial Sequence: Synthetic oligonucleotide
  Antisense strand to SEQ ID NO: 17300
ucuaccagucccuaacuca

SEQ ID NO: 17302 - RNA, 19 nt, Artificial Sequence
  Description of Artificial Sequence: Synthetic oligonucleotide
  Sense strand starting at position 3559 of SEQ ID NO: 178
gaguuagggacugguagaa

SEQ ID NO: 17303 - RNA, 19 nt, Artificial Sequence
  Description of Artificial Sequence: Synthetic oligonucleotide
  Antisense strand to SEQ ID NO: 17302
uucuaccagucccuaacuc

SEQ ID NO: 17304 - RNA, 19 nt, Artificial Sequence
  Description of Artificial Sequence: Synthetic oligonucleotide
  Sense strand starting at position 3602 of SEQ ID NO: 178
cugagaaagucuugaggag

SEQ ID NO: 17305 - RNA, 19 nt, Artificial Sequence
  Description of Artificial Sequence: Synthetic oligonucleotide
  Antisense strand to SEQ ID NO: 17304
cuccucaagacuuucucag

SEQ ID NO: 17306 - RNA, 19 nt, Artificial Sequence
  Description of Artificial Sequence: Synthetic oligonucleotide
  Sense strand starting at position 3843 of SEQ ID NO: 178
gaugaaugcccgggccaga

SEQ ID NO: 17307 - RNA, 19 nt, Artificial Sequence
  Description of Artificial Sequence: Synthetic oligonucleotide
  Antisense strand to SEQ ID NO: 17306
ucuggcccgggcauucauc

SEQ ID NO: 17308 - RNA, 19 nt, Artificial Sequence
  Description of Artificial Sequence: Synthetic oligonucleotide
  Sense strand starting at position 3908 of SEQ ID NO: 178
gcgccagaugcuuguguga

SEQ ID NO: 17309 - RNA, 19 nt, Artificial Sequence
  Description of Artificial Sequence: Synthetic oligonucleotide
  Antisense strand to SEQ ID NO: 17308
ucacacaagcaucuggcgc

SEQ ID NO: 17310 - RNA, 19 nt, Artificial Sequence
  Description of Artificial Sequence: Synthetic oligonucleotide
  Sense strand starting at position 3913 of SEQ ID NO: 178
agaugcuugugugagcaga

SEQ ID NO: 17311 - RNA, 19 nt, Artificial Sequence
  Description of Artificial Sequence: Synthetic oligonucleotide
  Antisense strand to SEQ ID NO: 17310
ucugcucacacaagcaucu

SEQ ID NO: 17312 - RNA, 19 nt, Artificial Sequence
  Description of Artificial Sequence: Synthetic oligonucleotide
  Sense strand starting at position 3940 of SEQ ID NO: 178
gcuagaugagcuggaacua

SEQ ID NO: 17313 - RNA, 19 nt, Artificial Sequence
  Description of Artificial Sequence: Synthetic oligonucleotide
  Antisense strand to SEQ ID NO: 17312
uaguuccagcucaucuagc

SEQ ID NO: 17314 - RNA, 19 nt, Artificial Sequence
  Description of Artificial Sequence: Synthetic oligonucleotide
  Sense strand starting at position 3980 of SEQ ID NO: 178
acaaacaucugaggaagaa

SEQ ID NO: 17315 - RNA, 19 nt, Artificial Sequence
  Description of Artificial Sequence: Synthetic oligonucleotide
  Antisense strand to SEQ ID NO: 17314
uucuuccucagauguuugu

SEQ ID NO: 17316 - RNA, 19 nt, Artificial Sequence
  Description of Artificial Sequence: Synthetic oligonucleotide
  Sense strand starting at position 23 of SEQ ID NO: 179
ggaauguggugcucaggga

SEQ ID NO: 17317 - RNA, 19 nt, Artificial Sequence
  Description of Artificial Sequence: Synthetic oligonucleotide
  Antisense strand to SEQ ID NO: 17316
ucccugagcaccacauucc

SEQ ID NO: 17318 - RNA, 19 nt, Artificial Sequence
  Description of Artificial Sequence: Synthetic oligonucleotide
  Sense strand starting at position 50 of SEQ ID NO: 179
gggaucuguucacagugau

SEQ ID NO: 17319 - RNA, 19 nt, Artificial Sequence
  Description of Artificial Sequence: Synthetic oligonucleotide
  Antisense strand to SEQ ID NO: 17318
aucacugugaacagauccc

SEQ ID NO: 17320 - RNA, 19 nt, Artificial Sequence
  Description of Artificial Sequence: Synthetic oligonucleotide
  Sense strand starting at position 240 of SEQ ID NO: 179
ccucaauccugagagaccu

SEQ ID NO: 17321 - RNA, 19 nt, Artificial Sequence
  Description of Artificial Sequence: Synthetic oligonucleotide
  Antisense strand to SEQ ID NO: 17320
aggucucucaggauugagg

SEQ ID NO: 17322 - RNA, 19 nt, Artificial Sequence
  Description of Artificial Sequence: Synthetic oligonucleotide
  Sense strand starting at position 293 of SEQ ID NO: 179
aaggcugaguccucugaga

SEQ ID NO: 17323 - RNA, 19 nt, Artificial Sequence
  Description of Artificial Sequence: Synthetic oligonucleotide
  Antisense strand to SEQ ID NO: 17322
ucucagaggacucagccuu

SEQ ID NO: 17324 - RNA, 19 nt, Artificial Sequence
  Description of Artificial Sequence: Synthetic oligonucleotide
  Sense strand starting at position 295 of SEQ ID NO: 179
ggcugaguccucugagaau

SEQ ID NO: 17325 - RNA, 19 nt, Artificial Sequence
  Description of Artificial Sequence: Synthetic oligonucleotide
  Antisense strand to SEQ ID NO: 17324
auucucagaggacucagcc

SEQ ID NO: 17326 - RNA, 19 nt, Artificial Sequence
  Description of Artificial Sequence: Synthetic oligonucleotide
  Sense strand starting at position 298 of SEQ ID NO: 179
ugaguccucugagaauuua

SEQ ID NO: 17327 - RNA, 19 nt, Artificial Sequence
  Description of Artificial Sequence: Synthetic oligonucleotide
  Antisense strand to SEQ ID NO: 17326
uaaauucucagaggacuca

SEQ ID NO: 17328 - RNA, 19 nt, Artificial Sequence
  Description of Artificial Sequence: Synthetic oligonucleotide
  Sense strand starting at position 309 of SEQ ID NO: 179
agaauuuauuacuacggau

SEQ ID NO: 17329 - RNA, 19 nt, Artificial Sequence
  Description of Artificial Sequence: Synthetic oligonucleotide
  Antisense strand to SEQ ID NO: 17328
auccguaguaauaaauucu

SEQ ID NO: 17330 - RNA, 19 nt, Artificial Sequence
  Description of Artificial Sequence: Synthetic oligonucleotide
  Sense strand starting at position 452 of SEQ ID NO: 179
ucucgaacuugaucugcaa

SEQ ID NO: 17331 - RNA, 19 nt, Artificial Sequence
  Description of Artificial Sequence: Synthetic oligonucleotide
  Antisense strand to SEQ ID NO: 17330
uugcagaucaaguucgaga

SEQ ID NO: 17332 - RNA, 19 nt, Artificial Sequence
  Description of Artificial Sequence: Synthetic oligonucleotide
  Sense strand starting at position 455 of SEQ ID NO: 179
cgaacuugaucugcaagac

SEQ ID NO: 17333 - RNA, 19 nt, Artificial Sequence
  Description of Artificial Sequence: Synthetic oligonucleotide
  Antisense strand to SEQ ID NO: 17332
gucuugcagaucaaguucg

SEQ ID NO: 17334 - RNA, 19 nt, Artificial Sequence
  Description of Artificial Sequence: Synthetic oligonucleotide
  Sense strand starting at position 491 of SEQ ID NO: 179
caaguaauucguggcaaag

SEQ ID NO: 17335 - RNA, 19 nt, Artificial Sequence
  Description of Artificial Sequence: Synthetic oligonucleotide
  Antisense strand to SEQ ID NO: 17334
cuuugccacgaauuacuug

SEQ ID NO: 17336 - RNA, 19 nt, Artificial Sequence
  Description of Artificial Sequence: Synthetic oligonucleotide
  Sense strand starting at position 493 of SEQ ID NO: 179
aguaauucguggcaaagaa

SEQ ID NO: 17337 - RNA, 19 nt, Artificial Sequence
  Description of Artificial Sequence: Synthetic oligonucleotide
  Antisense strand to SEQ ID NO: 17336
uucuuugccacgaauuacu

SEQ ID NO: 17338 - RNA, 19 nt, Artificial Sequence
  Description of Artificial Sequence: Synthetic oligonucleotide
  Sense strand starting at position 630 of SEQ ID NO: 179
gguacuuguggugguucau

SEQ ID NO: 17339 - RNA, 19 nt, Artificial Sequence
  Description of Artificial Sequence: Synthetic oligonucleotide
  Antisense strand to SEQ ID NO: 17338
augaaccaccacaaguacc

SEQ ID NO: 17340 - RNA, 19 nt, Artificial Sequence
  Description of Artificial Sequence: Synthetic oligonucleotide
  Sense strand starting at position 746 of SEQ ID NO: 179
ggcggacacugguaggauu

SEQ ID NO: 17341 - RNA, 19 nt, Artificial Sequence
  Description of Artificial Sequence: Synthetic oligonucleotide
  Antisense strand to SEQ ID NO: 17340
aauccuaccaguguccgcc

SEQ ID NO: 17342 - RNA, 19 nt, Artificial Sequence
  Description of Artificial Sequence: Synthetic oligonucleotide
  Sense strand starting at position 1077 of SEQ ID NO: 179
gguucgucccagcgaggau

SEQ ID NO: 17343 - RNA, 19 nt, Artificial Sequence
  Description of Artificial Sequence: Synthetic oligonucleotide
  Antisense strand to SEQ ID NO: 17342
auccucgcugggacgaacc

SEQ ID NO: 17344 - RNA, 19 nt, Artificial Sequence
  Description of Artificial Sequence: Synthetic oligonucleotide
  Sense strand starting at position 1480 of SEQ ID NO: 179
ggaggacuuugcuuccaac

SEQ ID NO: 17345 - RNA, 19 nt, Artificial Sequence
  Description of Artificial Sequence: Synthetic oligonucleotide
  Antisense strand to SEQ ID NO: 17344
guuggaagcaaaguccucc

SEQ ID NO: 17346 - RNA, 19 nt, Artificial Sequence
  Description of Artificial Sequence: Synthetic oligonucleotide
  Sense strand starting at position 1483 of SEQ ID NO: 179
ggacuuugcuuccaacaca

SEQ ID NO: 17347 - RNA, 19 nt, Artificial Sequence
  Description of Artificial Sequence: Synthetic oligonucleotide
  Antisense strand to SEQ ID NO: 17346
uguguuggaagcaaagucc

SEQ ID NO: 17348 - RNA, 19 nt, Artificial Sequence
  Description of Artificial Sequence: Synthetic oligonucleotide
  Sense strand starting at position 1890 of SEQ ID NO: 179
cgguuuccgguuaguggaa

SEQ ID NO: 17349 - RNA, 19 nt, Artificial Sequence
  Description of Artificial Sequence: Synthetic oligonucleotide
  Antisense strand to SEQ ID NO: 17348
uuccacuaaccggaaaccg

SEQ ID NO: 17350 - RNA, 19 nt, Artificial Sequence
  Description of Artificial Sequence: Synthetic oligonucleotide
  Sense strand starting at position 2514 of SEQ ID NO: 179
cagucugggugacauagau

SEQ ID NO: 17351 - RNA, 19 nt, Artificial Sequence
  Description of Artificial Sequence: Synthetic oligonucleotide
  Antisense strand to SEQ ID NO: 17350
aucuaugucacccagacug

SEQ ID NO: 17352 - RNA, 19 nt, Artificial Sequence
  Description of Artificial Sequence: Synthetic oligonucleotide
  Sense strand starting at position 2704 of SEQ ID NO: 179
cuuugaccuccgugagguu

SEQ ID NO: 17353 - RNA, 19 nt, Artificial Sequence
  Description of Artificial Sequence: Synthetic oligonucleotide
  Antisense strand to SEQ ID NO: 17352
aaccucacggaggucaaag

SEQ ID NO: 17354 - RNA, 19 nt, Artificial Sequence
  Description of Artificial Sequence: Synthetic oligonucleotide
  Sense strand starting at position 2711 of SEQ ID NO: 179
cuccgugagguuggcuaau

SEQ ID NO: 17355 - RNA, 19 nt, Artificial Sequence
  Description of Artificial Sequence: Synthetic oligonucleotide
  Antisense strand to SEQ ID NO: 17354
auuagccaaccucacggag

SEQ ID NO: 17356 - RNA, 19 nt, Artificial Sequence
  Description of Artificial Sequence: Synthetic oligonucleotide
  Sense strand starting at position 2713 of SEQ ID NO: 179
ccgugagguuggcuaauau

SEQ ID NO: 17357 - RNA, 19 nt, Artificial Sequence
  Description of Artificial Sequence: Synthetic oligonucleotide
  Antisense strand to SEQ ID NO: 17356
auauuagccaaccucacgg

SEQ ID NO: 17358 - RNA, 19 nt, Artificial Sequence
  Description of Artificial Sequence: Synthetic oligonucleotide
  Sense strand starting at position 2717 of SEQ ID NO: 179
gagguuggcuaauauagag

SEQ ID NO: 17359 - RNA, 19 nt, Artificial Sequence
  Description of Artificial Sequence: Synthetic oligonucleotide
  Antisense strand to SEQ ID NO: 17358
cucuauauuagccaaccuc

SEQ ID NO: 17360 - RNA, 19 nt, Artificial Sequence
  Description of Artificial Sequence: Synthetic oligonucleotide
  Sense strand starting at position 2805 of SEQ ID NO: 179
ggagacuugccuugcagga

SEQ ID NO: 17361 - RNA, 19 nt, Artificial Sequence
  Description of Artificial Sequence: Synthetic oligonucleotide
  Antisense strand to SEQ ID NO: 17360
uccugcaaggcaagucucc

SEQ ID NO: 17362 - RNA, 19 nt, Artificial Sequence
  Description of Artificial Sequence: Synthetic oligonucleotide
  Sense strand starting at position 2968 of SEQ ID NO: 179
cccagaugacucuacguua

SEQ ID NO: 17363 - RNA, 19 nt, Artificial Sequence
  Description of Artificial Sequence: Synthetic oligonucleotide
  Antisense strand to SEQ ID NO: 17362
uaacguagagucaucuggg

SEQ ID NO: 17364 - RNA, 19 nt, Artificial Sequence
  Description of Artificial Sequence: Synthetic oligonucleotide
  Sense strand starting at position 3021 of SEQ ID NO: 179
aagguuuacgaacguuauu

SEQ ID NO: 17365 - RNA, 19 nt, Artificial Sequence
  Description of Artificial Sequence: Synthetic oligonucleotide
  Antisense strand to SEQ ID NO: 17364
aauaacguucguaaaccuu

SEQ ID NO: 17366 - RNA, 19 nt, Artificial Sequence
  Description of Artificial Sequence: Synthetic oligonucleotide
  Sense strand starting at position 3079 of SEQ ID NO: 179
aguggauuuggccguaaau

SEQ ID NO: 17367 - RNA, 19 nt, Artificial Sequence
  Description of Artificial Sequence: Synthetic oligonucleotide
  Antisense strand to SEQ ID NO: 17366
auuuacggccaaauccacu

SEQ ID NO: 17368 - RNA, 19 nt, Artificial Sequence
  Description of Artificial Sequence: Synthetic oligonucleotide
  Sense strand starting at position 3269 of SEQ ID NO: 179
gaggcauugacgugcagau

SEQ ID NO: 17369 - RNA, 19 nt, Artificial Sequence
  Description of Artificial Sequence: Synthetic oligonucleotide
  Antisense strand to SEQ ID NO: 17368
aucugcacgucaaugccuc

SEQ ID NO: 17370 - RNA, 19 nt, Artificial Sequence
  Description of Artificial Sequence: Synthetic oligonucleotide
  Sense strand starting at position 3271 of SEQ ID NO: 179
ggcauugacgugcagauau

SEQ ID NO: 17371 - RNA, 19 nt, Artificial Sequence
  Description of Artificial Sequence: Synthetic oligonucleotide
  Antisense strand to SEQ ID NO: 17370
auaucugcacgucaaugcc

SEQ ID NO: 17372 - RNA, 19 nt, Artificial Sequence
  Description of Artificial Sequence: Synthetic oligonucleotide
  Sense strand starting at position 3273 of SEQ ID NO: 179
cauugacgugcagauauaa

SEQ ID NO: 17373 - RNA, 19 nt, Artificial Sequence
  Description of Artificial Sequence: Synthetic oligonucleotide
  Antisense strand to SEQ ID NO: 17372
uuauaucugcacgucaaug

SEQ ID NO: 17374 - RNA, 19 nt, Artificial Sequence
  Description of Artificial Sequence: Synthetic oligonucleotide
  Sense strand starting at position 3302 of SEQ ID NO: 179
ugaguuagggacugguaga

SEQ ID NO: 17375 - RNA, 19 nt, Artificial Sequence
  Description of Artificial Sequence: Synthetic oligonucleotide
  Antisense strand to SEQ ID NO: 17374
ucuaccagucccuaacuca

SEQ ID NO: 17376 - RNA, 19 nt, Artificial Sequence
  Description of Artificial Sequence: Synthetic oligonucleotide
  Sense strand starting at position 3303 of SEQ ID NO: 179
gaguuagggacugguagaa

SEQ ID NO: 17377 - RNA, 19 nt, Artificial Sequence
  Description of Artificial Sequence: Synthetic oligonucleotide
  Antisense strand to SEQ ID NO: 17376
uucuaccagucccuaacuc

SEQ ID NO: 17378 - RNA, 19 nt, Artificial Sequence
  Description of Artificial Sequence: Synthetic oligonucleotide
  Sense strand starting at position 3346 of SEQ ID NO: 179
cugagaaagucuugaggag

SEQ ID NO: 17379 - RNA, 19 nt, Artificial Sequence
  Description of Artificial Sequence: Synthetic oligonucleotide
  Antisense strand to SEQ ID NO: 17378
cuccucaagacuuucucag

SEQ ID NO: 17380 - RNA, 19 nt, Artificial Sequence
  Description of Artificial Sequence: Synthetic oligonucleotide
  Sense strand starting at position 3587 of SEQ ID NO: 179
gaugaaugcccgggccaga

SEQ ID NO: 17381 - RNA, 19 nt, Artificial Sequence
  Description of Artificial Sequence: Synthetic oligonucleotide
  Antisense strand to SEQ ID NO: 17380
ucuggcccgggcauucauc

SEQ ID NO: 17382 - RNA, 19 nt, Artificial Sequence
  Description of Artificial Sequence: Synthetic oligonucleotide
  Sense strand starting at position 3684 of SEQ ID NO: 179
gcuagaugagcuggaacua

SEQ ID NO: 17383 - RNA, 19 nt, Artificial Sequence
  Description of Artificial Sequence: Synthetic oligonucleotide
  Antisense strand to SEQ ID NO: 17382
uaguuccagcucaucuagc

SEQ ID NO: 17384 - RNA, 19 nt, Artificial Sequence
  Description of Artificial Sequence: Synthetic oligonucleotide
  Sense strand starting at position 3724 of SEQ ID NO: 179
acaaacaucugaggaagaa

SEQ ID NO: 17385 - RNA, 19 nt, Artificial Sequence
  Description of Artificial Sequence: Synthetic oligonucleotide
  Antisense strand to SEQ ID NO: 17384
uucuuccucagauguuugu

SEQ ID NO: 17386 - RNA, 19 nt, Artificial Sequence
  Description of Artificial Sequence: Synthetic oligonucleotide
  Sense strand starting at position 3767 of SEQ ID NO: 179
gggugcauggguuaugauu

SEQ ID NO: 17387 - RNA, 19 nt, Artificial Sequence
  Description of Artificial Sequence: Synthetic oligonucleotide
  Antisense strand to SEQ ID NO: 17386
aaucauaacccaugcaccc

SEQ ID NO: 17388 - RNA, 19 nt, Artificial Sequence
  Description of Artificial Sequence: Synthetic oligonucleotide
  Sense strand starting at position 3806 of SEQ ID NO: 179
acucuagucucucaaggga

SEQ ID NO: 17389 - RNA, 19 nt, Artificial Sequence
  Description of Artificial Sequence: Synthetic oligonucleotide
  Antisense strand to SEQ ID NO: 17388
ucccuugagagacuagagu

SEQ ID NO: 17390 - RNA, 19 nt, Artificial Sequence
  Description of Artificial Sequence: Synthetic oligonucleotide
  Sense strand starting at position 3809 of SEQ ID NO: 179
cuagucucucaagggaagu

SEQ ID NO: 17391 - RNA, 19 nt, Artificial Sequence
  Description of Artificial Sequence: Synthetic oligonucleotide
  Antisense strand to SEQ ID NO: 17390
acuucccuugagagacuag

SEQ ID NO: 17392 - RNA, 19 nt, Artificial Sequence
  Description of Artificial Sequence: Synthetic oligonucleotide
  Sense strand starting at position 3966 of SEQ ID NO: 179
cgggcauacugucugaagu

SEQ ID NO: 17393 - RNA, 19 nt, Artificial Sequence
  Description of Artificial Sequence: Synthetic oligonucleotide
  Antisense strand to SEQ ID NO: 17392
acuucagacaguaugcccg

SEQ ID NO: 17394 - RNA, 19 nt, Artificial Sequence
  Description of Artificial Sequence: Synthetic oligonucleotide
  Sense strand starting at position 3967 of SEQ ID NO: 179
gggcauacugucugaaguc

SEQ ID NO: 17395 - RNA, 19 nt, Artificial Sequence
  Description of Artificial Sequence: Synthetic oligonucleotide
  Antisense strand to SEQ ID NO: 17394
gacuucagacaguaugccc

SEQ ID NO: 17396 - RNA, 19 nt, Artificial Sequence
  Description of Artificial Sequence: Synthetic oligonucleotide
  Sense strand starting at position 148 of SEQ ID NO: 181
aagccagaugcugguuaaa

SEQ ID NO: 17397 - RNA, 19 nt, Artificial Sequence
  Description of Artificial Sequence: Synthetic oligonucleotide
  Antisense strand to SEQ ID NO: 17396
uuuaaccagcaucuggcuu

SEQ ID NO: 17398 - RNA, 19 nt, Artificial Sequence
  Description of Artificial Sequence: Synthetic oligonucleotide
  Sense strand starting at position 150 of SEQ ID NO: 181
gccagaugcugguuaaaga

SEQ ID NO: 17399 - RNA, 19 nt, Artificial Sequence
  Description of Artificial Sequence: Synthetic oligonucleotide
  Antisense strand to SEQ ID NO: 17398
ucuuuaaccagcaucuggc

SEQ ID NO: 17400 - RNA, 19 nt, Artificial Sequence
  Description of Artificial Sequence: Synthetic oligonucleotide
  Sense strand starting at position 151 of SEQ ID NO: 181
ccagaugcugguuaaagau

SEQ ID NO: 17401 - RNA, 19 nt, Artificial Sequence
  Description of Artificial Sequence: Synthetic oligonucleotide
  Antisense strand to SEQ ID NO: 17400
aucuuuaaccagcaucugg

SEQ ID NO: 17402 - RNA, 19 nt, Artificial Sequence
  Description of Artificial Sequence: Synthetic oligonucleotide
  Sense strand starting at position 381 of SEQ ID NO: 181
gguaacaguuccucucuga

SEQ ID NO: 17403 - RNA, 19 nt, Artificial Sequence
  Description of Artificial Sequence: Synthetic oligonucleotide
  Antisense strand to SEQ ID NO: 17402
ucagagaggaacuguuacc

SEQ ID NO: 17404 - RNA, 19 nt, Artificial Sequence
  Description of Artificial Sequence: Synthetic oligonucleotide
  Sense strand starting at position 399 of SEQ ID NO: 181
agccucuguuuccucauua

SEQ ID NO: 17405 - RNA, 19 nt, Artificial Sequence
  Description of Artificial Sequence: Synthetic oligonucleotide
  Antisense strand to SEQ ID NO: 17404
uaaugaggaaacagaggcu

SEQ ID NO: 17406 - RNA, 19 nt, Artificial Sequence
  Description of Artificial Sequence: Synthetic oligonucleotide
  Sense strand starting at position 467 of SEQ ID NO: 181
ccuaauuaacuggaagugu

SEQ ID NO: 17407 - RNA, 19 nt, Artificial Sequence
  Description of Artificial Sequence: Synthetic oligonucleotide
  Antisense strand to SEQ ID NO: 17406
acacuuccaguuaauuagg

SEQ ID NO: 17408 - RNA, 19 nt, Artificial Sequence
  Description of Artificial Sequence: Synthetic oligonucleotide
  Sense strand starting at position 476 of SEQ ID NO: 181
cuggaagugucuguugaga

SEQ ID NO: 17409 - RNA, 19 nt, Artificial Sequence
  Description of Artificial Sequence: Synthetic oligonucleotide
  Antisense strand to SEQ ID NO: 17408
ucucaacagacacuuccag

SEQ ID NO: 17410 - RNA, 19 nt, Artificial Sequence
  Description of Artificial Sequence: Synthetic oligonucleotide
  Sense strand starting at position 478 of SEQ ID NO: 181
ggaagugucuguugagaag

SEQ ID NO: 17411 - RNA, 19 nt, Artificial Sequence
  Description of Artificial Sequence: Synthetic oligonucleotide
  Antisense strand to SEQ ID NO: 17410
cuucucaacagacacuucc

SEQ ID NO: 17412 - RNA, 19 nt, Artificial Sequence
  Description of Artificial Sequence: Synthetic oligonucleotide
  Sense strand starting at position 600 of SEQ ID NO: 181
cuaguaguugguggccaaa

SEQ ID NO: 17413 - RNA, 19 nt, Artificial Sequence
  Description of Artificial Sequence: Synthetic oligonucleotide
  Antisense strand to SEQ ID NO: 17412
uuuggccaccaacuacuag

SEQ ID NO: 17414 - RNA, 19 nt, Artificial Sequence
  Description of Artificial Sequence: Synthetic oligonucleotide
  Sense strand starting at position 618 of SEQ ID NO: 181
augugcuaauggucauauu

SEQ ID NO: 17415 - RNA, 19 nt, Artificial Sequence
  Description of Artificial Sequence: Synthetic oligonucleotide
  Antisense strand to SEQ ID NO: 17414
aauaugaccauuagcacau

SEQ ID NO: 17416 - RNA, 19 nt, Artificial Sequence
  Description of Artificial Sequence: Synthetic oligonucleotide
  Sense strand starting at position 1010 of SEQ ID NO: 181
cggaucuuggcccgugaga

SEQ ID NO: 17417 - RNA, 19 nt, Artificial Sequence
  Description of Artificial Sequence: Synthetic oligonucleotide
  Antisense strand to SEQ ID NO: 17416
ucucacgggccaagauccg

SEQ ID NO: 17418 - RNA, 19 nt, Artificial Sequence
  Description of Artificial Sequence: Synthetic oligonucleotide
  Sense strand starting at position 1012 of SEQ ID NO: 181
gaucuuggcccgugagaug

SEQ ID NO: 17419 - RNA, 19 nt, Artificial Sequence
  Description of Artificial Sequence: Synthetic oligonucleotide
  Antisense strand to SEQ ID NO: 17418
caucucacgggccaagauc

SEQ ID NO: 17420 - RNA, 19 nt, Artificial Sequence
  Description of Artificial Sequence: Synthetic oligonucleotide
  Sense strand starting at position 1161 of SEQ ID NO: 181
uacagaucucauggcagau

SEQ ID NO: 17421 - RNA, 19 nt, Artificial Sequence
  Description of Artificial Sequence: Synthetic oligonucleotide
  Antisense strand to SEQ ID NO: 17420
aucugccaugagaucugua

SEQ ID NO: 17422 - RNA, 19 nt, Artificial Sequence
  Description of Artificial Sequence: Synthetic oligonucleotide
  Sense strand starting at position 1163 of SEQ ID NO: 181
cagaucucauggcagauga

SEQ ID NO: 17423 - RNA, 19 nt, Artificial Sequence
  Description of Artificial Sequence: Synthetic oligonucleotide
  Antisense strand to SEQ ID NO: 17422
ucaucugccaugagaucug

SEQ ID NO: 17424 - RNA, 19 nt, Artificial Sequence
  Description of Artificial Sequence: Synthetic oligonucleotide
  Sense strand starting at position 1846 of SEQ ID NO: 181
caagguuugcugggaggga

SEQ ID NO: 17425 - RNA, 19 nt, Artificial Sequence
  Description of Artificial Sequence: Synthetic oligonucleotide
  Antisense strand to SEQ ID NO: 17424
ucccucccagcaaaccuug

SEQ ID NO: 17426 - RNA, 19 nt, Artificial Sequence
  Description of Artificial Sequence: Synthetic oligonucleotide
  Sense strand starting at position 1847 of SEQ ID NO: 181
aagguuugcugggagggaa

SEQ ID NO: 17427 - RNA, 19 nt, Artificial Sequence
  Description of Artificial Sequence: Synthetic oligonucleotide
  Antisense strand to SEQ ID NO: 17426
uucccucccagcaaaccuu

SEQ ID NO: 17428 - RNA, 19 nt, Artificial Sequence
  Description of Artificial Sequence: Synthetic oligonucleotide
  Sense strand starting at position 1890 of SEQ ID NO: 181
aguggagagguuugaugga

SEQ ID NO: 17429 - RNA, 19 nt, Artificial Sequence
  Description of Artificial Sequence: Synthetic oligonucleotide
  Antisense strand to SEQ ID NO: 17428
uccaucaaaccucuccacu

SEQ ID NO: 17430 - RNA, 19 nt, Artificial Sequence
  Description of Artificial Sequence: Synthetic oligonucleotide
  Sense strand starting at position 1891 of SEQ ID NO: 181
guggagagguuugauggau

SEQ ID NO: 17431 - RNA, 19 nt, Artificial Sequence
  Description of Artificial Sequence: Synthetic oligonucleotide
  Antisense strand to SEQ ID NO: 17430
auccaucaaaccucuccac

SEQ ID NO: 17432 - RNA, 19 nt, Artificial Sequence
  Description of Artificial Sequence: Synthetic oligonucleotide
  Sense strand starting at position 1941 of SEQ ID NO: 181
ggagaagcguugagaauga

SEQ ID NO: 17433 - RNA, 19 nt, Artificial Sequence
  Description of Artificial Sequence: Synthetic oligonucleotide
  Antisense strand to SEQ ID NO: 17432
ucauucucaacgcuucucc

SEQ ID NO: 17434 - RNA, 19 nt, Artificial Sequence
  Description of Artificial Sequence: Synthetic oligonucleotide
  Sense strand starting at position 1963 of SEQ ID NO: 181
ggagaaggcuugcaaauag

SEQ ID NO: 17435 - RNA, 19 nt, Artificial Sequence
  Description of Artificial Sequence: Synthetic oligonucleotide
  Antisense strand to SEQ ID NO: 17434
cuauuugcaagccuucucc

SEQ ID NO: 17436 - RNA, 19 nt, Artificial Sequence
  Description of Artificial Sequence: Synthetic oligonucleotide
  Sense strand starting at position 1982 of SEQ ID NO: 181
gcggaaaucguucagagga

SEQ ID NO: 17437 - RNA, 19 nt, Artificial Sequence
  Description of Artificial Sequence: Synthetic oligonucleotide
  Antisense strand to SEQ ID NO: 17436
uccucugaacgauuuccgc

SEQ ID NO: 17438 - RNA, 19 nt, Artificial Sequence
  Description of Artificial Sequence: Synthetic oligonucleotide
  Sense strand starting at position 1984 of SEQ ID NO: 181
ggaaaucguucagaggacu

SEQ ID NO: 17439 - RNA, 19 nt, Artificial Sequence
  Description of Artificial Sequence: Synthetic oligonucleotide
  Antisense strand to SEQ ID NO: 17438
aguccucugaacgauuucc

SEQ ID NO: 17440 - RNA, 19 nt, Artificial Sequence
  Description of Artificial Sequence: Synthetic oligonucleotide
  Sense strand starting at position 1990 of SEQ ID NO: 181
cguucagaggacugggaua

SEQ ID NO: 17441 - RNA, 19 nt, Artificial Sequence
  Description of Artificial Sequence: Synthetic oligonucleotide
  Antisense strand to SEQ ID NO: 17440
uaucccaguccucugaacg

SEQ ID NO: 17442 - RNA, 19 nt, Artificial Sequence
  Description of Artificial Sequence: Synthetic oligonucleotide
  Sense strand starting at position 2023 of SEQ ID NO: 181
ggaugagauucggaaggag

SEQ ID NO: 17443 - RNA, 19 nt, Artificial Sequence
  Description of Artificial Sequence: Synthetic oligonucleotide
  Antisense strand to SEQ ID NO: 17442
cuccuuccgaaucucaucc

SEQ ID NO: 17444 - RNA, 19 nt, Artificial Sequence
  Description of Artificial Sequence: Synthetic oligonucleotide
  Sense strand starting at position 2134 of SEQ ID NO: 181
ugaggcuucugggagggaa

SEQ ID NO: 17445 - RNA, 19 nt, Artificial Sequence
  Description of Artificial Sequence: Synthetic oligonucleotide
  Antisense strand to SEQ ID NO: 17444
uucccucccagaagccuca

SEQ ID NO: 17446 - RNA, 19 nt, Artificial Sequence
  Description of Artificial Sequence: Synthetic oligonucleotide
  Sense strand starting at position 2928 of SEQ ID NO: 181
ggugcuugaucggugggaa

SEQ ID NO: 17447 - RNA, 19 nt, Artificial Sequence
  Description of Artificial Sequence: Synthetic oligonucleotide
  Antisense strand to SEQ ID NO: 17446
uucccaccgaucaagcacc

SEQ ID NO: 17448 - RNA, 19 nt, Artificial Sequence
  Description of Artificial Sequence: Synthetic oligonucleotide
  Sense strand starting at position 2929 of SEQ ID NO: 181
gugcuugaucggugggaac

SEQ ID NO: 17449 - RNA, 19 nt, Artificial Sequence
  Description of Artificial Sequence: Synthetic oligonucleotide
  Antisense strand to SEQ ID NO: 17448
guucccaccgaucaagcac

SEQ ID NO: 17450 - RNA, 19 nt, Artificial Sequence
  Description of Artificial Sequence: Synthetic oligonucleotide
  Sense strand starting at position 3085 of SEQ ID NO: 181
ucaagaacuugcuguagaa

SEQ ID NO: 17451 - RNA, 19 nt, Artificial Sequence
  Description of Artificial Sequence: Synthetic oligonucleotide
  Antisense strand to SEQ ID NO: 17450
uucuacagcaaguucuuga

SEQ ID NO: 17452 - RNA, 19 nt, Artificial Sequence
  Description of Artificial Sequence: Synthetic oligonucleotide
  Sense strand starting at position 3089 of SEQ ID NO: 181
gaacuugcuguagaagauu

SEQ ID NO: 17453 - RNA, 19 nt, Artificial Sequence
  Description of Artificial Sequence: Synthetic oligonucleotide
  Antisense strand to SEQ ID NO: 17452
aaucuucuacagcaaguuc

SEQ ID NO: 17454 - RNA, 19 nt, Artificial Sequence
  Description of Artificial Sequence: Synthetic oligonucleotide
  Sense strand starting at position 3098 of SEQ ID NO: 181
guagaagauuacugaacga

SEQ ID NO: 17455 - RNA, 19 nt, Artificial Sequence
  Description of Artificial Sequence: Synthetic oligonucleotide
  Antisense strand to SEQ ID NO: 17454
ucguucaguaaucuucuac

SEQ ID NO: 17456 - RNA, 19 nt, Artificial Sequence
  Description of Artificial Sequence: Synthetic oligonucleotide
  Sense strand starting at position 3102 of SEQ ID NO: 181
aagauuacugaacgaguaa

SEQ ID NO: 17457 - RNA, 19 nt, Artificial Sequence
  Description of Artificial Sequence: Synthetic oligonucleotide
  Antisense strand to SEQ ID NO: 17456
uuacucguucaguaaucuu

SEQ ID NO: 17458 - RNA, 19 nt, Artificial Sequence
  Description of Artificial Sequence: Synthetic oligonucleotide
  Sense strand starting at position 3197 of SEQ ID NO: 181
uuggcuaaauucuauguga

SEQ ID NO: 17459 - RNA, 19 nt, Artificial Sequence
  Description of Artificial Sequence: Synthetic oligonucleotide
  Antisense strand to SEQ ID NO: 17458
ucacauagaauuuagccaa

SEQ ID NO: 17460 - RNA, 19 nt, Artificial Sequence
  Description of Artificial Sequence: Synthetic oligonucleotide
  Sense strand starting at position 3199 of SEQ ID NO: 181
ggcuaaauucuaugugaga

SEQ ID NO: 17461 - RNA, 19 nt, Artificial Sequence
  Description of Artificial Sequence: Synthetic oligonucleotide
  Antisense strand to SEQ ID NO: 17460
ucucacauagaauuuagcc

SEQ ID NO: 17462 - RNA, 19 nt, Artificial Sequence
  Description of Artificial Sequence: Synthetic oligonucleotide
  Sense strand starting at position 3200 of SEQ ID NO: 181
gcuaaauucuaugugagag

SEQ ID NO: 17463 - RNA, 19 nt, Artificial Sequence
  Description of Artificial Sequence: Synthetic oligonucleotide
  Antisense strand to SEQ ID NO: 17462
cucucacauagaauuuagc

SEQ ID NO: 17464 - RNA, 19 nt, Artificial Sequence
  Description of Artificial Sequence: Synthetic oligonucleotide
  Sense strand starting at position 3201 of SEQ ID NO: 181
cuaaauucuaugugagagg

SEQ ID NO: 17465 - RNA, 19 nt, Artificial Sequence
  Description of Artificial Sequence: Synthetic oligonucleotide
  Antisense strand to SEQ ID NO: 17464
ccucucacauagaauuuag

SEQ ID NO: 17466 - RNA, 19 nt, Artificial Sequence
  Description of Artificial Sequence: Synthetic oligonucleotide
  Sense strand starting at position 3289 of SEQ ID NO: 181
gaagguauugugugguguu

SEQ ID NO: 17467 - RNA, 19 nt, Artificial Sequence
  Description of Artificial Sequence: Synthetic oligonucleotide
  Antisense strand to SEQ ID NO: 17466
aacaccacacaauaccuuc

SEQ ID NO: 17468 - RNA, 19 nt, Artificial Sequence
  Description of Artificial Sequence: Synthetic oligonucleotide
  Sense strand starting at position 3298 of SEQ ID NO: 181
gugugguguuggcugugaa

SEQ ID NO: 17469 - RNA, 19 nt, Artificial Sequence
  Description of Artificial Sequence: Synthetic oligonucleotide
  Antisense strand to SEQ ID NO: 17468
uucacagccaacaccacac

SEQ ID NO: 17470 - RNA, 19 nt, Artificial Sequence
  Description of Artificial Sequence: Synthetic oligonucleotide
  Sense strand starting at position 3299 of SEQ ID NO: 181
ugugguguuggcugugaaa

SEQ ID NO: 17471 - RNA, 19 nt, Artificial Sequence
  Description of Artificial Sequence: Synthetic oligonucleotide
  Antisense strand to SEQ ID NO: 17470
uuucacagccaacaccaca

SEQ ID NO: 17472 - RNA, 19 nt, Artificial Sequence
  Description of Artificial Sequence: Synthetic oligonucleotide
  Sense strand starting at position 3301 of SEQ ID NO: 181
ugguguuggcugugaaauu

SEQ ID NO: 17473 - RNA, 19 nt, Artificial Sequence
  Description of Artificial Sequence: Synthetic oligonucleotide
  Antisense strand to SEQ ID NO: 17472
aauuucacagccaacacca

SEQ ID NO: 17474 - RNA, 19 nt, Artificial Sequence
  Description of Artificial Sequence: Synthetic oligonucleotide
  Sense strand starting at position 3333 of SEQ ID NO: 181
guaugcaagauggacuauu

SEQ ID NO: 17475 - RNA, 19 nt, Artificial Sequence
  Description of Artificial Sequence: Synthetic oligonucleotide
  Antisense strand to SEQ ID NO: 17474
aauaguccaucuugcauac

SEQ ID NO: 17476 - RNA, 19 nt, Artificial Sequence
  Description of Artificial Sequence: Synthetic oligonucleotide
  Sense strand starting at position 3930 of SEQ ID NO: 182
uuguauucuuaaccuaguu

SEQ ID NO: 17477 - RNA, 19 nt, Artificial Sequence
  Description of Artificial Sequence: Synthetic oligonucleotide
  Antisense strand to SEQ ID NO: 17476
aacuagguuaagaauacaa

SEQ ID NO: 17478 - RNA, 19 nt, Artificial Sequence
  Description of Artificial Sequence: Synthetic oligonucleotide
  Sense strand starting at position 3814 of SEQ ID NO: 182
aaacauguuggguguguua

SEQ ID NO: 17479 - RNA, 19 nt, Artificial Sequence
  Description of Artificial Sequence: Synthetic oligonucleotide
  Antisense strand to SEQ ID NO: 17478
uaacacacccaacauguuu

SEQ ID NO: 17480 - RNA, 19 nt, Artificial Sequence
  Description of Artificial Sequence: Synthetic oligonucleotide
  Sense strand starting at position 3798 of SEQ ID NO: 182
uugaacucuuccgaucaaa

SEQ ID NO: 17481 - RNA, 19 nt, Artificial Sequence
  Description of Artificial Sequence: Synthetic oligonucleotide
  Antisense strand to SEQ ID NO: 17480
uuugaucggaagaguucaa

SEQ ID NO: 17482 - RNA, 19 nt, Artificial Sequence
  Description of Artificial Sequence: Synthetic oligonucleotide
  Sense strand starting at position 3784 of SEQ ID NO: 182
ucuacauggucccuuugaa

SEQ ID NO: 17483 - RNA, 19 nt, Artificial Sequence
  Description of Artificial Sequence: Synthetic oligonucleotide
  Antisense strand to SEQ ID NO: 17482
uucaaagggaccauguaga

SEQ ID NO: 17484 - RNA, 19 nt, Artificial Sequence
  Description of Artificial Sequence: Synthetic oligonucleotide
  Sense strand starting at position 3750 of SEQ ID NO: 182
cugugagaaauucgagcaa

SEQ ID NO: 17485 - RNA, 19 nt, Artificial Sequence
  Description of Artificial Sequence: Synthetic oligonucleotide
  Antisense strand to SEQ ID NO: 17484
uugcucgaauuucucacag

SEQ ID NO: 17486 - RNA, 19 nt, Artificial Sequence
  Description of Artificial Sequence: Synthetic oligonucleotide
  Sense strand starting at position 3742 of SEQ ID NO: 182
uguaauagcugugagaaau

SEQ ID NO: 17487 - RNA, 19 nt, Artificial Sequence
  Description of Artificial Sequence: Synthetic oligonucleotide
  Antisense strand to SEQ ID NO: 17486
auuucucacagcuauuaca

SEQ ID NO: 17488 - RNA, 19 nt, Artificial Sequence
  Description of Artificial Sequence: Synthetic oligonucleotide
  Sense strand starting at position 3741 of SEQ ID NO: 182
guguaauagcugugagaaa

SEQ ID NO: 17489 - RNA, 19 nt, Artificial Sequence
  Description of Artificial Sequence: Synthetic oligonucleotide
  Antisense strand to SEQ ID NO: 17488
uuucucacagcuauuacac

SEQ ID NO: 17490 - RNA, 19 nt, Artificial Sequence
  Description of Artificial Sequence: Synthetic oligonucleotide
  Sense strand starting at position 3739 of SEQ ID NO: 182
gaguguaauagcugugaga

SEQ ID NO: 17491 - RNA, 19 nt, Artificial Sequence
  Description of Artificial Sequence: Synthetic oligonucleotide
  Antisense strand to SEQ ID NO: 17490
ucucacagcuauuacacuc

SEQ ID NO: 17492 - RNA, 19 nt, Artificial Sequence
  Description of Artificial Sequence: Synthetic oligonucleotide
  Sense strand starting at position 3699 of SEQ ID NO: 182
cucuucuguguugacagaa

SEQ ID NO: 17493 - RNA, 19 nt, Artificial Sequence
  Description of Artificial Sequence: Synthetic oligonucleotide
  Antisense strand to SEQ ID NO: 17492
uucugucaacacagaagag

SEQ ID NO: 17494 - RNA, 19 nt, Artificial Sequence
  Description of Artificial Sequence: Synthetic oligonucleotide
  Sense strand starting at position 3696 of SEQ ID NO: 182
guucucuucuguguugaca

SEQ ID NO: 17495 - RNA, 19 nt, Artificial Sequence
  Description of Artificial Sequence: Synthetic oligonucleotide
  Antisense strand to SEQ ID NO: 17494
ugucaacacagaagagaac

SEQ ID NO: 17496 - RNA, 19 nt, Artificial Sequence
  Description of Artificial Sequence: Synthetic oligonucleotide
  Sense strand starting at position 3694 of SEQ ID NO: 182
caguucucuucuguguuga

SEQ ID NO: 17497 - RNA, 19 nt, Artificial Sequence
  Description of Artificial Sequence: Synthetic oligonucleotide
  Antisense strand to SEQ ID NO: 17496
ucaacacagaagagaacug

SEQ ID NO: 17498 - RNA, 19 nt, Artificial Sequence
  Description of Artificial Sequence: Synthetic oligonucleotide
  Sense strand starting at position 3658 of SEQ ID NO: 182
aguagagugccuggacaaa

SEQ ID NO: 17499 - RNA, 19 nt, Artificial Sequence
  Description of Artificial Sequence: Synthetic oligonucleotide
  Antisense strand to SEQ ID NO: 17498
uuuguccaggcacucuacu

SEQ ID NO: 17500 - RNA, 19 nt, Artificial Sequence
  Description of Artificial Sequence: Synthetic oligonucleotide
  Sense strand starting at position 3592 of SEQ ID NO: 182
gcgucuaguugcuuccaga

SEQ ID NO: 17501 - RNA, 19 nt, Artificial Sequence
  Description of Artificial Sequence: Synthetic oligonucleotide
  Antisense strand to SEQ ID NO: 17500
ucuggaagcaacuagacgc

SEQ ID NO: 17502 - RNA, 19 nt, Artificial Sequence
  Description of Artificial Sequence: Synthetic oligonucleotide
  Sense strand starting at position 3569 of SEQ ID NO: 182
aaugaaucgcugggagaag

SEQ ID NO: 17503 - RNA, 19 nt, Artificial Sequence
  Description of Artificial Sequence: Synthetic oligonucleotide
  Antisense strand to SEQ ID NO: 17502
cuucucccagcgauucauu

SEQ ID NO: 17504 - RNA, 19 nt, Artificial Sequence
  Description of Artificial Sequence: Synthetic oligonucleotide
  Sense strand starting at position 3568 of SEQ ID NO: 182
uaaugaaucgcugggagaa

SEQ ID NO: 17505 - RNA, 19 nt, Artificial Sequence
  Description of Artificial Sequence: Synthetic oligonucleotide
  Antisense strand to SEQ ID NO: 17504
uucucccagcgauucauua

SEQ ID NO: 17506 - RNA, 19 nt, Artificial Sequence
  Description of Artificial Sequence: Synthetic oligonucleotide
  Sense strand starting at position 3552 of SEQ ID NO: 182
gagauuuagugccaaauaa

SEQ ID NO: 17507 - RNA, 19 nt, Artificial Sequence
  Description of Artificial Sequence: Synthetic oligonucleotide
  Antisense strand to SEQ ID NO: 17506
uuauuuggcacuaaaucuc

SEQ ID NO: 17508 - RNA, 19 nt, Artificial Sequence
  Description of Artificial Sequence: Synthetic oligonucleotide
  Sense strand starting at position 3530 of SEQ ID NO: 182
cggaucguuucauauuaag

SEQ ID NO: 17509 - RNA, 19 nt, Artificial Sequence
  Description of Artificial Sequence: Synthetic oligonucleotide
  Antisense strand to SEQ ID NO: 17508
cuuaauaugaaacgauccg

SEQ ID NO: 17510 - RNA, 19 nt, Artificial Sequence
  Description of Artificial Sequence: Synthetic oligonucleotide
  Sense strand starting at position 3525 of SEQ ID NO: 182
ugagccggaucguuucaua

SEQ ID NO: 17511 - RNA, 19 nt, Artificial Sequence
  Description of Artificial Sequence: Synthetic oligonucleotide
  Antisense strand to SEQ ID NO: 17510
uaugaaacgauccggcuca

SEQ ID NO: 17512 - RNA, 19 nt, Artificial Sequence
  Description of Artificial Sequence: Synthetic oligonucleotide
  Sense strand starting at position 3221 of SEQ ID NO: 182
gcucgguucggugagggau

SEQ ID NO: 17513 - RNA, 19 nt, Artificial Sequence
  Description of Artificial Sequence: Synthetic oligonucleotide
  Antisense strand to SEQ ID NO: 17512
aucccucaccgaaccgagc

SEQ ID NO: 17514 - RNA, 19 nt, Artificial Sequence
  Description of Artificial Sequence: Synthetic oligonucleotide
  Sense strand starting at position 3188 of SEQ ID NO: 182
agaguaucaucagagccuu

SEQ ID NO: 17515 - RNA, 19 nt, Artificial Sequence
  Description of Artificial Sequence: Synthetic oligonucleotide
  Antisense strand to SEQ ID NO: 17514
aaggcucugaugauacucu

SEQ ID NO: 17516 - RNA, 19 nt, Artificial Sequence
  Description of Artificial Sequence: Synthetic oligonucleotide
  Sense strand starting at position 2833 of SEQ ID NO: 182
ggaaccagcucagguauaa

SEQ ID NO: 17517 - RNA, 19 nt, Artificial Sequence
  Description of Artificial Sequence: Synthetic oligonucleotide
  Antisense strand to SEQ ID NO: 17516
uuauaccugagcugguucc

SEQ ID NO: 17518 - RNA, 19 nt, Artificial Sequence
  Description of Artificial Sequence: Synthetic oligonucleotide
  Sense strand starting at position 2703 of SEQ ID NO: 182
cguccagugcuuuacauuu

SEQ ID NO: 17519 - RNA, 19 nt, Artificial Sequence
  Description of Artificial Sequence: Synthetic oligonucleotide
  Antisense strand to SEQ ID NO: 17518
aaauguaaagcacuggacg

SEQ ID NO: 17520 - RNA, 19 nt, Artificial Sequence
  Description of Artificial Sequence: Synthetic oligonucleotide
  Sense strand starting at position 2701 of SEQ ID NO: 182
gccguccagugcuuuacau

SEQ ID NO: 17521 - RNA, 19 nt, Artificial Sequence
  Description of Artificial Sequence: Synthetic oligonucleotide
  Antisense strand to SEQ ID NO: 17520
auguaaagcacuggacggc

SEQ ID NO: 17522 - RNA, 19 nt, Artificial Sequence
  Description of Artificial Sequence: Synthetic oligonucleotide
  Sense strand starting at position 2660 of SEQ ID NO: 182
gauguuggguaauaagaaa

SEQ ID NO: 17523 - RNA, 19 nt, Artificial Sequence
  Description of Artificial Sequence: Synthetic oligonucleotide
  Antisense strand to SEQ ID NO: 17522
uuucuuauuacccaacauc

SEQ ID NO: 17524 - RNA, 19 nt, Artificial Sequence
  Description of Artificial Sequence: Synthetic oligonucleotide
  Sense strand starting at position 2618 of SEQ ID NO: 182
cccggacgcuuugcauauu

SEQ ID NO: 17525 - RNA, 19 nt, Artificial Sequence
  Description of Artificial Sequence: Synthetic oligonucleotide
  Antisense strand to SEQ ID NO: 17524
aauaugcaaagcguccggg

SEQ ID NO: 17526 - RNA, 19 nt, Artificial Sequence
  Description of Artificial Sequence: Synthetic oligonucleotide
  Sense strand starting at position 2209 of SEQ ID NO: 182
aguuuaauggugcgaucuc

SEQ ID NO: 17527 - RNA, 19 nt, Artificial Sequence
  Description of Artificial Sequence: Synthetic oligonucleotide
  Antisense strand to SEQ ID NO: 17526
gagaucgcaccauuaaacu

SEQ ID NO: 17528 - RNA, 19 nt, Artificial Sequence
  Description of Artificial Sequence: Synthetic oligonucleotide
  Sense strand starting at position 2075 of SEQ ID NO: 182
ucuucugaguuguuuccau

SEQ ID NO: 17529 - RNA, 19 nt, Artificial Sequence
  Description of Artificial Sequence: Synthetic oligonucleotide
  Antisense strand to SEQ ID NO: 17528
auggaaacaacucagaaga

SEQ ID NO: 17530 - RNA, 19 nt, Artificial Sequence
  Description of Artificial Sequence: Synthetic oligonucleotide
  Sense strand starting at position 2071 of SEQ ID NO: 182
agggucuucugaguuguuu

SEQ ID NO: 17531 - RNA, 19 nt, Artificial Sequence
  Description of Artificial Sequence: Synthetic oligonucleotide
  Antisense strand to SEQ ID NO: 17530
aaacaacucagaagacccu

SEQ ID NO: 17532 - RNA, 19 nt, Artificial Sequence
  Description of Artificial Sequence: Synthetic oligonucleotide
  Sense strand starting at position 2066 of SEQ ID NO: 182
aagcaagggucuucugagu

SEQ ID NO: 17533 - RNA, 19 nt, Artificial Sequence
  Description of Artificial Sequence: Synthetic oligonucleotide
  Antisense strand to SEQ ID NO: 17532
acucagaagacccuugcuu

SEQ ID NO: 17534 - RNA, 19 nt, Artificial Sequence
  Description of Artificial Sequence: Synthetic oligonucleotide
  Sense strand starting at position 1383 of SEQ ID NO: 182
cagaucgcaguuuagaauu

SEQ ID NO: 17535 - RNA, 19 nt, Artificial Sequence
  Description of Artificial Sequence: Synthetic oligonucleotide
  Antisense strand to SEQ ID NO: 17534
aauucuaaacugcgaucug

SEQ ID NO: 17536 - RNA, 19 nt, Artificial Sequence
  Description of Artificial Sequence: Synthetic oligonucleotide
  Sense strand starting at position 1364 of SEQ ID NO: 182
acuauugaguacuuagguu

SEQ ID NO: 17537 - RNA, 19 nt, Artificial Sequence
  Description of Artificial Sequence: Synthetic oligonucleotide
  Antisense strand to SEQ ID NO: 17536
aaccuaaguacucaauagu

SEQ ID NO: 17538 - RNA, 19 nt, Artificial Sequence
  Description of Artificial Sequence: Synthetic oligonucleotide
  Sense strand starting at position 1075 of SEQ ID NO: 182
ggccaugacuguuuaugac

SEQ ID NO: 17539 - RNA, 19 nt, Artificial Sequence
  Description of Artificial Sequence: Synthetic oligonucleotide
  Antisense strand to SEQ ID NO: 17538
gucauaaacagucauggcc

SEQ ID NO: 17540 - RNA, 19 nt, Artificial Sequence
  Description of Artificial Sequence: Synthetic oligonucleotide
  Sense strand starting at position 1066 of SEQ ID NO: 182
cugucuuacggccaugacu

SEQ ID NO: 17541 - RNA, 19 nt, Artificial Sequence
  Description of Artificial Sequence: Synthetic oligonucleotide
  Antisense strand to SEQ ID NO: 17540
agucauggccguaagacag

SEQ ID NO: 17542 - RNA, 19 nt, Artificial Sequence
  Description of Artificial Sequence: Synthetic oligonucleotide
  Sense strand starting at position 1055 of SEQ ID NO: 182
gaaggugauuucugucuua

SEQ ID NO: 17543 - RNA, 19 nt, Artificial Sequence
  Description of Artificial Sequence: Synthetic oligonucleotide
  Antisense strand to SEQ ID NO: 17542
uaagacagaaaucaccuuc

SEQ ID NO: 17544 - RNA, 19 nt, Artificial Sequence
  Description of Artificial Sequence: Synthetic oligonucleotide
  Sense strand starting at position 1046 of SEQ ID NO: 182
cggugaauggaaggugauu

SEQ ID NO: 17545 - RNA, 19 nt, Artificial Sequence
  Description of Artificial Sequence: Synthetic oligonucleotide
  Antisense strand to SEQ ID NO: 17544
aaucaccuuccauucaccg

SEQ ID NO: 17546 - RNA, 19 nt, Artificial Sequence
  Description of Artificial Sequence: Synthetic oligonucleotide
  Sense strand starting at position 983 of SEQ ID NO: 182
uuaagcaaguguguuagaa

SEQ ID NO: 17547 - RNA, 19 nt, Artificial Sequence
  Description of Artificial Sequence: Synthetic oligonucleotide
  Antisense strand to SEQ ID NO: 17546
uucuaacacacuugcuuaa

SEQ ID NO: 17548 - RNA, 19 nt, Artificial Sequence
  Description of Artificial Sequence: Synthetic oligonucleotide
  Sense strand starting at position 962 of SEQ ID NO: 182
aggaaugacuucuugcuuu

SEQ ID NO: 17549 - RNA, 19 nt, Artificial Sequence
  Description of Artificial Sequence: Synthetic oligonucleotide
  Antisense strand to SEQ ID NO: 17548
aaagcaagaagucauuccu

SEQ ID NO: 17550 - RNA, 19 nt, Artificial Sequence
  Description of Artificial Sequence: Synthetic oligonucleotide
  Sense strand starting at position 929 of SEQ ID NO: 182
gugaaacaguacucugacu

SEQ ID NO: 17551 - RNA, 19 nt, Artificial Sequence
  Description of Artificial Sequence: Synthetic oligonucleotide
  Antisense strand to SEQ ID NO: 17550
agucagaguacuguuucac

SEQ ID NO: 17552 - RNA, 19 nt, Artificial Sequence
  Description of Artificial Sequence: Synthetic oligonucleotide
  Sense strand starting at position 923 of SEQ ID NO: 182
ggaguagugaaacaguacu

SEQ ID NO: 17553 - RNA, 19 nt, Artificial Sequence
  Description of Artificial Sequence: Synthetic oligonucleotide
  Antisense strand to SEQ ID NO: 17552
aguacuguuucacuacucc

SEQ ID NO: 17554 - RNA, 19 nt, Artificial Sequence
  Description of Artificial Sequence: Synthetic oligonucleotide
  Sense strand starting at position 197 of SEQ ID NO: 182
ccucgugauuugagacgga

SEQ ID NO: 17555 - RNA, 19 nt, Artificial Sequence
  Description of Artificial Sequence: Synthetic oligonucleotide
  Antisense strand to SEQ ID NO: 17554
uccgucucaaaucacgagg

SEQ ID NO: 17556 - RNA, 19 nt, Artificial Sequence
  Description of Artificial Sequence: Synthetic oligonucleotide
  Sense strand starting at position 3779 of SEQ ID NO: 185
agaacaugcucaguacaca

SEQ ID NO: 17557 - RNA, 19 nt, Artificial Sequence
  Description of Artificial Sequence: Synthetic oligonucleotide
  Antisense strand to SEQ ID NO: 17556
uguguacugagcauguucu

SEQ ID NO: 17558 - RNA, 19 nt, Artificial Sequence
  Description of Artificial Sequence: Synthetic oligonucleotide
  Sense strand starting at position 3745 of SEQ ID NO: 185
uuaguaucucccuaggaca

SEQ ID NO: 17559 - RNA, 19 nt, Artificial Sequence
  Description of Artificial Sequence: Synthetic oligonucleotide
  Antisense strand to SEQ ID NO: 17558
uguccuagggagauacuaa

SEQ ID NO: 17560 - RNA, 19 nt, Artificial Sequence
  Description of Artificial Sequence: Synthetic oligonucleotide
  Sense strand starting at position 3733 of SEQ ID NO: 185
ucuugucccgccuuaguau

SEQ ID NO: 17561 - RNA, 19 nt, Artificial Sequence
  Description of Artificial Sequence: Synthetic oligonucleotide
  Antisense strand to SEQ ID NO: 17560
auacuaaggcgggacaaga

SEQ ID NO: 17562 - RNA, 19 nt, Artificial Sequence
  Description of Artificial Sequence: Synthetic oligonucleotide
  Sense strand starting at position 3296 of SEQ ID NO: 185
auuggagauugguacacaa

SEQ ID NO: 17563 - RNA, 19 nt, Artificial Sequence
  Description of Artificial Sequence: Synthetic oligonucleotide
  Antisense strand to SEQ ID NO: 17562
uuguguaccaaucuccaau

SEQ ID NO: 17564 - RNA, 19 nt, Artificial Sequence
  Description of Artificial Sequence: Synthetic oligonucleotide
  Sense strand starting at position 3286 of SEQ ID NO: 185
ucccauauacauuggagau

SEQ ID NO: 17565 - RNA, 19 nt, Artificial Sequence
  Description of Artificial Sequence: Synthetic oligonucleotide
  Antisense strand to SEQ ID NO: 17564
aucuccaauguauauggga

SEQ ID NO: 17566 - RNA, 19 nt, Artificial Sequence
  Description of Artificial Sequence: Synthetic oligonucleotide
  Sense strand starting at position 2916 of SEQ ID NO: 185
guaaguguacaagaacagu

SEQ ID NO: 17567 - RNA, 19 nt, Artificial Sequence
  Description of Artificial Sequence: Synthetic oligonucleotide
  Antisense strand to SEQ ID NO: 17566
acuguucuuguacacuuac

SEQ ID NO: 17568 - RNA, 19 nt, Artificial Sequence
  Description of Artificial Sequence: Synthetic oligonucleotide
  Sense strand starting at position 2849 of SEQ ID NO: 185
caagaaugcugaggaagau

SEQ ID NO: 17569 - RNA, 19 nt, Artificial Sequence
  Description of Artificial Sequence: Synthetic oligonucleotide
  Antisense strand to SEQ ID NO: 17568
aucuuccucagcauucuug

SEQ ID NO: 17570 - RNA, 19 nt, Artificial Sequence
  Description of Artificial Sequence: Synthetic oligonucleotide
  Sense strand starting at position 2846 of SEQ ID NO: 185
agacaagaaugcugaggaa

SEQ ID NO: 17571 - RNA, 19 nt, Artificial Sequence
  Description of Artificial Sequence: Synthetic oligonucleotide
  Antisense strand to SEQ ID NO: 17570
uuccucagcauucuugucu

SEQ ID NO: 17572 - RNA, 19 nt, Artificial Sequence
  Description of Artificial Sequence: Synthetic oligonucleotide
  Sense strand starting at position 2782 of SEQ ID NO: 185
ucuaguuugugauuuccca

SEQ ID NO: 17573 - RNA, 19 nt, Artificial Sequence
  Description of Artificial Sequence: Synthetic oligonucleotide
  Antisense strand to SEQ ID NO: 17572
ugggaaaucacaaacuaga

SEQ ID NO: 17574 - RNA, 19 nt, Artificial Sequence
  Description of Artificial Sequence: Synthetic oligonucleotide
  Sense strand starting at position 2767 of SEQ ID NO: 185
ugguuacacuuugcaucua

SEQ ID NO: 17575 - RNA, 19 nt, Artificial Sequence
  Description of Artificial Sequence: Synthetic oligonucleotide
  Antisense strand to SEQ ID NO: 17574
uagaugcaaaguguaacca

SEQ ID NO: 17576 - RNA, 19 nt, Artificial Sequence
  Description of Artificial Sequence: Synthetic oligonucleotide
  Sense strand starting at position 2722 of SEQ ID NO: 185
uuacccauagcgugagauu

SEQ ID NO: 17577 - RNA, 19 nt, Artificial Sequence
  Description of Artificial Sequence: Synthetic oligonucleotide
  Antisense strand to SEQ ID NO: 17576
aaucucacgcuauggguaa

SEQ ID NO: 17578 - RNA, 19 nt, Artificial Sequence
  Description of Artificial Sequence: Synthetic oligonucleotide
  Sense strand starting at position 2681 of SEQ ID NO: 185
agcauuuagucugucugga

SEQ ID NO: 17579 - RNA, 19 nt, Artificial Sequence
  Description of Artificial Sequence: Synthetic oligonucleotide
  Antisense strand to SEQ ID NO: 17578
uccagacagacuaaaugcu

SEQ ID NO: 17580 - RNA, 19 nt, Artificial Sequence
  Description of Artificial Sequence: Synthetic oligonucleotide
  Sense strand starting at position 2642 of SEQ ID NO: 185
uguugaaccuuccaugacu

SEQ ID NO: 17581 - RNA, 19 nt, Artificial Sequence
  Description of Artificial Sequence: Synthetic oligonucleotide
  Antisense strand to SEQ ID NO: 17580
agucauggaagguucaaca

SEQ ID NO: 17582 - RNA, 19 nt, Artificial Sequence
  Description of Artificial Sequence: Synthetic oligonucleotide
  Sense strand starting at position 2626 of SEQ ID NO: 185
uguauaaugucaccucugu

SEQ ID NO: 17583 - RNA, 19 nt, Artificial Sequence
  Description of Artificial Sequence: Synthetic oligonucleotide
  Antisense strand to SEQ ID NO: 17582
acagaggugacauuauaca

SEQ ID NO: 17584 - RNA, 19 nt, Artificial Sequence
  Description of Artificial Sequence: Synthetic oligonucleotide
  Sense strand starting at position 2616 of SEQ ID NO: 185
aucaaaguccuguauaaug

SEQ ID NO: 17585 - RNA, 19 nt, Artificial Sequence
  Description of Artificial Sequence: Synthetic oligonucleotide
  Antisense strand to SEQ ID NO: 17584
cauuauacaggacuuugau

SEQ ID NO: 17586 - RNA, 19 nt, Artificial Sequence
  Description of Artificial Sequence: Synthetic oligonucleotide
  Sense strand starting at position 2537 of SEQ ID NO: 185
gugucuccuucuccaagaa

SEQ ID NO: 17587 - RNA, 19 nt, Artificial Sequence
  Description of Artificial Sequence: Synthetic oligonucleotide
  Antisense strand to SEQ ID NO: 17586
uucuuggagaaggagacac

SEQ ID NO: 17588 - RNA, 19 nt, Artificial Sequence
  Description of Artificial Sequence: Synthetic oligonucleotide
  Sense strand starting at position 2536 of SEQ ID NO: 185
ugugucuccuucuccaaga

SEQ ID NO: 17589 - RNA, 19 nt, Artificial Sequence
  Description of Artificial Sequence: Synthetic oligonucleotide
  Antisense strand to SEQ ID NO: 17588
ucuuggagaaggagacaca

SEQ ID NO: 17590 - RNA, 19 nt, Artificial Sequence
  Description of Artificial Sequence: Synthetic oligonucleotide
  Sense strand starting at position 2337 of SEQ ID NO: 185
augacauguccuuguauua

SEQ ID NO: 17591 - RNA, 19 nt, Artificial Sequence
  Description of Artificial Sequence: Synthetic oligonucleotide
  Antisense strand to SEQ ID NO: 17590
uaauacaaggacaugucau

SEQ ID NO: 17592 - RNA, 19 nt, Artificial Sequence
  Description of Artificial Sequence: Synthetic oligonucleotide
  Sense strand starting at position 2308 of SEQ ID NO: 185
gcucacucaucucucgaaa

SEQ ID NO: 17593 - RNA, 19 nt, Artificial Sequence
  Description of Artificial Sequence: Synthetic oligonucleotide
  Antisense strand to SEQ ID NO: 17592
uuucgagagaugagugagc

SEQ ID NO: 17594 - RNA, 19 nt, Artificial Sequence
  Description of Artificial Sequence: Synthetic oligonucleotide
  Sense strand starting at position 2299 of SEQ ID NO: 185
ucaggaacugcucacucau

SEQ ID NO: 17595 - RNA, 19 nt, Artificial Sequence
  Description of Artificial Sequence: Synthetic oligonucleotide
  Antisense strand to SEQ ID NO: 17594
augagugagcaguuccuga

SEQ ID NO: 17596 - RNA, 19 nt, Artificial Sequence
  Description of Artificial Sequence: Synthetic oligonucleotide
  Sense strand starting at position 2286 of SEQ ID NO: 185
gcucuugucugcgucagga

SEQ ID NO: 17597 - RNA, 19 nt, Artificial Sequence
  Description of Artificial Sequence: Synthetic oligonucleotide
  Antisense strand to SEQ ID NO: 17596
uccugacgcagacaagagc

SEQ ID NO: 17598 - RNA, 19 nt, Artificial Sequence
  Description of Artificial Sequence: Synthetic oligonucleotide
  Sense strand starting at position 2213 of SEQ ID NO: 185
caucuuaggucuuagagag

SEQ ID NO: 17599 - RNA, 19 nt, Artificial Sequence
  Description of Artificial Sequence: Synthetic oligonucleotide
  Antisense strand to SEQ ID NO: 17598
cucucuaagaccuaagaug

SEQ ID NO: 17600 - RNA, 19 nt, Artificial Sequence
  Description of Artificial Sequence: Synthetic oligonucleotide
  Sense strand starting at position 2077 of SEQ ID NO: 185
ucgauuccgacauaaagca

SEQ ID NO: 17601 - RNA, 19 nt, Artificial Sequence
  Description of Artificial Sequence: Synthetic oligonucleotide
  Antisense strand to SEQ ID NO: 17600
ugcuuuaugucggaaucga

SEQ ID NO: 17602 - RNA, 19 nt, Artificial Sequence
  Description of Artificial Sequence: Synthetic oligonucleotide
  Sense strand starting at position 2075 of SEQ ID NO: 185
ggucgauuccgacauaaag

SEQ ID NO: 17603 - RNA, 19 nt, Artificial Sequence
  Description of Artificial Sequence: Synthetic oligonucleotide
  Antisense strand to SEQ ID NO: 17602
cuuuaugucggaaucgacc

SEQ ID NO: 17604 - RNA, 19 nt, Artificial Sequence
  Description of Artificial Sequence: Synthetic oligonucleotide
  Sense strand starting at position 1550 of SEQ ID NO: 185
gagugacuccuacagagug

SEQ ID NO: 17605 - RNA, 19 nt, Artificial Sequence
  Description of Artificial Sequence: Synthetic oligonucleotide
  Antisense strand to SEQ ID NO: 17604
cacucuguaggagucacuc

SEQ ID NO: 17606 - RNA, 19 nt, Artificial Sequence
  Description of Artificial Sequence: Synthetic oligonucleotide
  Sense strand starting at position 1548 of SEQ ID NO: 185
ccgagugacuccuacagag

SEQ ID NO: 17607 - RNA, 19 nt, Artificial Sequence
  Description of Artificial Sequence: Synthetic oligonucleotide
  Antisense strand to SEQ ID NO: 17606
cucuguaggagucacucgg

SEQ ID NO: 17608 - RNA, 19 nt, Artificial Sequence
  Description of Artificial Sequence: Synthetic oligonucleotide
  Sense strand starting at position 1194 of SEQ ID NO: 185
uucugaaauucuggauuuc

SEQ ID NO: 17609 - RNA, 19 nt, Artificial Sequence
  Description of Artificial Sequence: Synthetic oligonucleotide
  Antisense strand to SEQ ID NO: 17608
gaaauccagaauuucagaa

SEQ ID NO: 17610 - RNA, 19 nt, Artificial Sequence
  Description of Artificial Sequence: Synthetic oligonucleotide
  Sense strand starting at position 1142 of SEQ ID NO: 185
gucaguugcucccucugua

SEQ ID NO: 17611 - RNA, 19 nt, Artificial Sequence
  Description of Artificial Sequence: Synthetic oligonucleotide
  Antisense strand to SEQ ID NO: 17610
uacagagggagcaacugac

SEQ ID NO: 17612 - RNA, 19 nt, Artificial Sequence
  Description of Artificial Sequence: Synthetic oligonucleotide
  Sense strand starting at position 1076 of SEQ ID NO: 185
agucaagaaucccggauuu

SEQ ID NO: 17613 - RNA, 19 nt, Artificial Sequence
  Description of Artificial Sequence: Synthetic oligonucleotide
  Antisense strand to SEQ ID NO: 17612
aaauccgggauucuugacu

SEQ ID NO: 17614 - RNA, 19 nt, Artificial Sequence
  Description of Artificial Sequence: Synthetic oligonucleotide
  Sense strand starting at position 645 of SEQ ID NO: 185
aggauugcguaccaaauaa

SEQ ID NO: 17615 - RNA, 19 nt, Artificial Sequence
  Description of Artificial Sequence: Synthetic oligonucleotide
  Antisense strand to SEQ ID NO: 17614
uuauuugguacgcaauccu

SEQ ID NO: 17616 - RNA, 19 nt, Artificial Sequence
  Description of Artificial Sequence: Synthetic oligonucleotide
  Sense strand starting at position 480 of SEQ ID NO: 185
cuugguaaugccuagaugu

SEQ ID NO: 17617 - RNA, 19 nt, Artificial Sequence
  Description of Artificial Sequence: Synthetic oligonucleotide
  Antisense strand to SEQ ID NO: 17616
acaucuaggcauuaccaag

SEQ ID NO: 17618 - RNA, 19 nt, Artificial Sequence
  Description of Artificial Sequence: Synthetic oligonucleotide
  Sense strand starting at position 449 of SEQ ID NO: 185
aggcuuauuuaaggaggca

SEQ ID NO: 17619 - RNA, 19 nt, Artificial Sequence
  Description of Artificial Sequence: Synthetic oligonucleotide
  Antisense strand to SEQ ID NO: 17618
ugccuccuuaaauaagccu

SEQ ID NO: 17620 - RNA, 19 nt, Artificial Sequence
  Description of Artificial Sequence: Synthetic oligonucleotide
  Sense strand starting at position 312 of SEQ ID NO: 185
aguggagaauugccaaauu

SEQ ID NO: 17621 - RNA, 19 nt, Artificial Sequence
  Description of Artificial Sequence: Synthetic oligonucleotide
  Antisense strand to SEQ ID NO: 17620
aauuuggcaauucuccacu

SEQ ID NO: 17622 - RNA, 19 nt, Artificial Sequence
  Description of Artificial Sequence: Synthetic oligonucleotide
  Sense strand starting at position 303 of SEQ ID NO: 185
ccuguaggcaguggagaau

SEQ ID NO: 17623 - RNA, 19 nt, Artificial Sequence
  Description of Artificial Sequence: Synthetic oligonucleotide
  Antisense strand to SEQ ID NO: 17622
auucuccacugccuacagg

SEQ ID NO: 17624 - RNA, 19 nt, Artificial Sequence
  Description of Artificial Sequence: Synthetic oligonucleotide
  Sense strand starting at position 283 of SEQ ID NO: 185
cagggaagcucugacuuga

SEQ ID NO: 17625 - RNA, 19 nt, Artificial Sequence
  Description of Artificial Sequence: Synthetic oligonucleotide
  Antisense strand to SEQ ID NO: 17624
ucaagucagagcuucccug

SEQ ID NO: 17626 - RNA, 19 nt, Artificial Sequence
  Description of Artificial Sequence: Synthetic oligonucleotide
  Sense strand starting at position 219 of SEQ ID NO: 185
gucauucagcuccgaagga

SEQ ID NO: 17627 - RNA, 19 nt, Artificial Sequence
  Description of Artificial Sequence: Synthetic oligonucleotide
  Antisense strand to SEQ ID NO: 17626
uccuucggagcugaaugac

SEQ ID NO: 17628 - RNA, 19 nt, Artificial Sequence
  Description of Artificial Sequence: Synthetic oligonucleotide
  Sense strand starting at position 192 of SEQ ID NO: 185
acagcaucauugggaaaug

SEQ ID NO: 17629 - RNA, 19 nt, Artificial Sequence
  Description of Artificial Sequence: Synthetic oligonucleotide
  Antisense strand to SEQ ID NO: 17628
cauuucccaaugaugcugu

SEQ ID NO: 17630 - RNA, 19 nt, Artificial Sequence
  Description of Artificial Sequence: Synthetic oligonucleotide
  Sense strand starting at position 159 of SEQ ID NO: 185
gggcaaaggcaugguaaua

SEQ ID NO: 17631 - RNA, 19 nt, Artificial Sequence
  Description of Artificial Sequence: Synthetic oligonucleotide
  Antisense strand to SEQ ID NO: 17630
uauuaccaugccuuugccc

SEQ ID NO: 17632 - RNA, 19 nt, Artificial Sequence
  Description of Artificial Sequence: Synthetic oligonucleotide
  Sense strand starting at position 158 of SEQ ID NO: 185
ugggcaaaggcaugguaau

SEQ ID NO: 17633 - RNA, 19 nt, Artificial Sequence
  Description of Artificial Sequence: Synthetic oligonucleotide
  Antisense strand to SEQ ID NO: 17632
auuaccaugccuuugccca

SEQ ID NO: 17634 - RNA, 19 nt, Artificial Sequence
  Description of Artificial Sequence: Synthetic oligonucleotide
  Sense strand starting at position 68 of SEQ ID NO: 185
aggcaacacugaugagaag

SEQ ID NO: 17635 - RNA, 19 nt, Artificial Sequence
  Description of Artificial Sequence: Synthetic oligonucleotide
  Antisense strand to SEQ ID NO: 17634
cuucucaucaguguugccu

SEQ ID NO: 17636 - RNA, 19 nt, Artificial Sequence
  Description of Artificial Sequence: Synthetic oligonucleotide
  Sense strand starting at position 3795 of SEQ ID NO: 183
agaacaugcucaguacaca

SEQ ID NO: 17637 - RNA, 19 nt, Artificial Sequence
  Description of Artificial Sequence: Synthetic oligonucleotide
  Antisense strand to SEQ ID NO: 17636
uguguacugagcauguucu

SEQ ID NO: 17638 - RNA, 19 nt, Artificial Sequence
  Description of Artificial Sequence: Synthetic oligonucleotide
  Sense strand starting at position 3761 of SEQ ID NO: 183
uuaguaucucccuaggaca

SEQ ID NO: 17639 - RNA, 19 nt, Artificial Sequence
  Description of Artificial Sequence: Synthetic oligonucleotide
  Antisense strand to SEQ ID NO: 17638
uguccuagggagauacuaa

SEQ ID NO: 17640 - RNA, 19 nt, Artificial Sequence
  Description of Artificial Sequence: Synthetic oligonucleotide
  Sense strand starting at position 3749 of SEQ ID NO: 183
ucuugucccgccuuaguau

SEQ ID NO: 17641 - RNA, 19 nt, Artificial Sequence
  Description of Artificial Sequence: Synthetic oligonucleotide
  Antisense strand to SEQ ID NO: 17640
auacuaaggcgggacaaga

SEQ ID NO: 17642 - RNA, 19 nt, Artificial Sequence
  Description of Artificial Sequence: Synthetic oligonucleotide
  Sense strand starting at position 3312 of SEQ ID NO: 183
auuggagauugguacacaa

SEQ ID NO: 17643 - RNA, 19 nt, Artificial Sequence
  Description of Artificial Sequence: Synthetic oligonucleotide
  Antisense strand to SEQ ID NO: 17642
uuguguaccaaucuccaau

SEQ ID NO: 17644 - RNA, 19 nt, Artificial Sequence
  Description of Artificial Sequence: Synthetic oligonucleotide
  Sense strand starting at position 3302 of SEQ ID NO: 183
ucccauauacauuggagau

SEQ ID NO: 17645 - RNA, 19 nt, Artificial Sequence
  Description of Artificial Sequence: Synthetic oligonucleotide
  Antisense strand to SEQ ID NO: 17644
aucuccaauguauauggga

SEQ ID NO: 17646 - RNA, 19 nt, Artificial Sequence
  Description of Artificial Sequence: Synthetic oligonucleotide
  Sense strand starting at position 2932 of SEQ ID NO: 183
guaaguguacaagaacagu

SEQ ID NO: 17647 - RNA, 19 nt, Artificial Sequence
  Description of Artificial Sequence: Synthetic oligonucleotide
  Antisense strand to SEQ ID NO: 17646
acuguucuuguacacuuac

SEQ ID NO: 17648 - RNA, 19 nt, Artificial Sequence
  Description of Artificial Sequence: Synthetic oligonucleotide
  Sense strand starting at position 2865 of SEQ ID NO: 183
caagaaugcugaggaagau

SEQ ID NO: 17649 - RNA, 19 nt, Artificial Sequence
  Description of Artificial Sequence: Synthetic oligonucleotide
  Antisense strand to SEQ ID NO: 17648
aucuuccucagcauucuug

SEQ ID NO: 17650 - RNA, 19 nt, Artificial Sequence
  Description of Artificial Sequence: Synthetic oligonucleotide
  Sense strand starting at position 2862 of SEQ ID NO: 183
agacaagaaugcugaggaa

SEQ ID NO: 17651 - RNA, 19 nt, Artificial Sequence
  Description of Artificial Sequence: Synthetic oligonucleotide
  Antisense strand to SEQ ID NO: 17650
uuccucagcauucuugucu

SEQ ID NO: 17652 - RNA, 19 nt, Artificial Sequence
  Description of Artificial Sequence: Synthetic oligonucleotide
  Sense strand starting at position 2798 of SEQ ID NO: 183
ucuaguuugugauuuccca

SEQ ID NO: 17653 - RNA, 19 nt, Artificial Sequence
  Description of Artificial Sequence: Synthetic oligonucleotide
  Antisense strand to SEQ ID NO: 17652
ugggaaaucacaaacuaga

SEQ ID NO: 17654 - RNA, 19 nt, Artificial Sequence
  Description of Artificial Sequence: Synthetic oligonucleotide
  Sense strand starting at position 2783 of SEQ ID NO: 183
ugguuacacuuugcaucua

SEQ ID NO: 17655 - RNA, 19 nt, Artificial Sequence
  Description of Artificial Sequence: Synthetic oligonucleotide
  Antisense strand to SEQ ID NO: 17654
uagaugcaaaguguaacca

SEQ ID NO: 17656 - RNA, 19 nt, Artificial Sequence
  Description of Artificial Sequence: Synthetic oligonucleotide
  Sense strand starting at position 2738 of SEQ ID NO: 183
uuacccauagcgugagauu

SEQ ID NO: 17657 - RNA, 19 nt, Artificial Sequence
  Description of Artificial Sequence: Synthetic oligonucleotide
  Antisense strand to SEQ ID NO: 17656
aaucucacgcuauggguaa

SEQ ID NO: 17658 - RNA, 19 nt, Artificial Sequence
  Description of Artificial Sequence: Synthetic oligonucleotide
  Sense strand starting at position 2697 of SEQ ID NO: 183
agcauuuagucugucugga

SEQ ID NO: 17659 - RNA, 19 nt, Artificial Sequence
  Description of Artificial Sequence: Synthetic oligonucleotide
  Antisense strand to SEQ ID NO: 17658
uccagacagacuaaaugcu

SEQ ID NO: 17660 - RNA, 19 nt, Artificial Sequence
  Description of Artificial Sequence: Synthetic oligonucleotide
  Sense strand starting at position 2658 of SEQ ID NO: 183
uguugaaccuuccaugacu

SEQ ID NO: 17661 - RNA, 19 nt, Artificial Sequence
  Description of Artificial Sequence: Synthetic oligonucleotide
  Antisense strand to SEQ ID NO: 17660
agucauggaagguucaaca

SEQ ID NO: 17662 - RNA, 19 nt, Artificial Sequence
  Description of Artificial Sequence: Synthetic oligonucleotide
  Sense strand starting at position 2642 of SEQ ID NO: 183
uguauaaugucaccucugu

SEQ ID NO: 17663 - RNA, 19 nt, Artificial Sequence
  Description of Artificial Sequence: Synthetic oligonucleotide
  Antisense strand to SEQ ID NO: 17662
acagaggugacauuauaca

SEQ ID NO: 17664 - RNA, 19 nt, Artificial Sequence
  Description of Artificial Sequence: Synthetic oligonucleotide
  Sense strand starting at position 2632 of SEQ ID NO: 183
aucaaaguccuguauaaug

SEQ ID NO: 17665 - RNA, 19 nt, Artificial Sequence
  Description of Artificial Sequence: Synthetic oligonucleotide
  Antisense strand to SEQ ID NO: 17664
cauuauacaggacuuugau

SEQ ID NO: 17666 - RNA, 19 nt, Artificial Sequence
  Description of Artificial Sequence: Synthetic oligonucleotide
  Sense strand starting at position 2553 of SEQ ID NO: 183
gugucuccuucuccaagaa

SEQ ID NO: 17667 - RNA, 19 nt, Artificial Sequence
  Description of Artificial Sequence: Synthetic oligonucleotide
  Antisense strand to SEQ ID NO: 17666
uucuuggagaaggagacac

SEQ ID NO: 17668 - RNA, 19 nt, Artificial Sequence
  Description of Artificial Sequence: Synthetic oligonucleotide
  Sense strand starting at position 2552 of SEQ ID NO: 183
ugugucuccuucuccaaga

SEQ ID NO: 17669 - RNA, 19 nt, Artificial Sequence
  Description of Artificial Sequence: Synthetic oligonucleotide
  Antisense strand to SEQ ID NO: 17668
ucuuggagaaggagacaca

SEQ ID NO: 17670 - RNA, 19 nt, Artificial Sequence
  Description of Artificial Sequence: Synthetic oligonucleotide
  Sense strand starting at position 2353 of SEQ ID NO: 183
augacauguccuuguauua

SEQ ID NO: 17671 - RNA, 19 nt, Artificial Sequence
  Description of Artificial Sequence: Synthetic oligonucleotide
  Antisense strand to SEQ ID NO: 17670
uaauacaaggacaugucau

SEQ ID NO: 17672 - RNA, 19 nt, Artificial Sequence
  Description of Artificial Sequence: Synthetic oligonucleotide
  Sense strand starting at position 2324 of SEQ ID NO: 183
gcucacucaucucucgaaa

SEQ ID NO: 17673 - RNA, 19 nt, Artificial Sequence
  Description of Artificial Sequence: Synthetic oligonucleotide
  Antisense strand to SEQ ID NO: 17672
uuucgagagaugagugagc

SEQ ID NO: 17674 - RNA, 19 nt, Artificial Sequence
  Description of Artificial Sequence: Synthetic oligonucleotide
  Sense strand starting at position 2315 of SEQ ID NO: 183
ucaggaacugcucacucau

SEQ ID NO: 17675 - RNA, 19 nt, Artificial Sequence
  Description of Artificial Sequence: Synthetic oligonucleotide
  Antisense strand to SEQ ID NO: 17674
augagugagcaguuccuga

SEQ ID NO: 17676 - RNA, 19 nt, Artificial Sequence
  Description of Artificial Sequence: Synthetic oligonucleotide
  Sense strand starting at position 2302 of SEQ ID NO: 183
gcucuugucugcgucagga

SEQ ID NO: 17677 - RNA, 19 nt, Artificial Sequence
  Description of Artificial Sequence: Synthetic oligonucleotide
  Antisense strand to SEQ ID NO: 17676
uccugacgcagacaagagc

SEQ ID NO: 17678 - RNA, 19 nt, Artificial Sequence
  Description of Artificial Sequence: Synthetic oligonucleotide
  Sense strand starting at position 2229 of SEQ ID NO: 183
caucuuaggucuuagagag

SEQ ID NO: 17679 - RNA, 19 nt, Artificial Sequence
  Description of Artificial Sequence: Synthetic oligonucleotide
  Antisense strand to SEQ ID NO: 17678
cucucuaagaccuaagaug

SEQ ID NO: 17680 - RNA, 19 nt, Artificial Sequence
  Description of Artificial Sequence: Synthetic oligonucleotide
  Sense strand starting at position 2093 of SEQ ID NO: 183
ucgauuccgacauaaagca

SEQ ID NO: 17681 - RNA, 19 nt, Artificial Sequence
  Description of Artificial Sequence: Synthetic oligonucleotide
  Antisense strand to SEQ ID NO: 17680
ugcuuuaugucggaaucga

SEQ ID NO: 17682 - RNA, 19 nt, Artificial Sequence
  Description of Artificial Sequence: Synthetic oligonucleotide
  Sense strand starting at position 2091 of SEQ ID NO: 183
ggucgauuccgacauaaag

SEQ ID NO: 17683 - RNA, 19 nt, Artificial Sequence
  Description of Artificial Sequence: Synthetic oligonucleotide
  Antisense strand to SEQ ID NO: 17682
cuuuaugucggaaucgacc

SEQ ID NO: 17684 - RNA, 19 nt, Artificial Sequence
  Description of Artificial Sequence: Synthetic oligonucleotide
  Sense strand starting at position 1566 of SEQ ID NO: 183
gagugacuccuacagagug

SEQ ID NO: 17685 - RNA, 19 nt, Artificial Sequence
  Description of Artificial Sequence: Synthetic oligonucleotide
  Antisense strand to SEQ ID NO: 17684
cacucuguaggagucacuc

SEQ ID NO: 17686 - RNA, 19 nt, Artificial Sequence
  Description of Artificial Sequence: Synthetic oligonucleotide
  Sense strand starting at position 1564 of SEQ ID NO: 183
ccgagugacuccuacagag

SEQ ID NO: 17687 - RNA, 19 nt, Artificial Sequence
  Description of Artificial Sequence: Synthetic oligonucleotide
  Antisense strand to SEQ ID NO: 17686
cucuguaggagucacucgg

SEQ ID NO: 17688 - RNA, 19 nt, Artificial Sequence
  Description of Artificial Sequence: Synthetic oligonucleotide
  Sense strand starting at position 1210 of SEQ ID NO: 183
uucugaaauucuggauuuc

SEQ ID NO: 17689 - RNA, 19 nt, Artificial Sequence
  Description of Artificial Sequence: Synthetic oligonucleotide
  Antisense strand to SEQ ID NO: 17688
gaaauccagaauuucagaa

SEQ ID NO: 17690 - RNA, 19 nt, Artificial Sequence
  Description of Artificial Sequence: Synthetic oligonucleotide
  Sense strand starting at position 1158 of SEQ ID NO: 183
gucaguugcucccucugua

SEQ ID NO: 17691 - RNA, 19 nt, Artificial Sequence
  Description of Artificial Sequence: Synthetic oligonucleotide
  Antisense strand to SEQ ID NO: 17690
uacagagggagcaacugac

SEQ ID NO: 17692 - RNA, 19 nt, Artificial Sequence
  Description of Artificial Sequence: Synthetic oligonucleotide
  Sense strand starting at position 1092 of SEQ ID NO: 183
agucaagaaucccggauuu

SEQ ID NO: 17693 - RNA, 19 nt, Artificial Sequence
  Description of Artificial Sequence: Synthetic oligonucleotide
  Antisense strand to SEQ ID NO: 17692
aaauccgggauucuugacu

SEQ ID NO: 17694 - RNA, 19 nt, Artificial Sequence
  Description of Artificial Sequence: Synthetic oligonucleotide
  Sense strand starting at position 661 of SEQ ID NO: 183
aggauugcguaccaaauaa

SEQ ID NO: 17695 - RNA, 19 nt, Artificial Sequence
  Description of Artificial Sequence: Synthetic oligonucleotide
  Antisense strand to SEQ ID NO: 17694
uuauuugguacgcaauccu

SEQ ID NO: 17696 - RNA, 19 nt, Artificial Sequence
  Description of Artificial Sequence: Synthetic oligonucleotide
  Sense strand starting at position 496 of SEQ ID NO: 183
cuugguaaugccuagaugu

SEQ ID NO: 17697 - RNA, 19 nt, Artificial Sequence
  Description of Artificial Sequence: Synthetic oligonucleotide
  Antisense strand to SEQ ID NO: 17696
acaucuaggcauuaccaag

SEQ ID NO: 17698 - RNA, 19 nt, Artificial Sequence
  Description of Artificial Sequence: Synthetic oligonucleotide
  Sense strand starting at position 465 of SEQ ID NO: 183
aggcuuauuuaaggaggca

SEQ ID NO: 17699 - RNA, 19 nt, Artificial Sequence
  Description of Artificial Sequence: Synthetic oligonucleotide
  Antisense strand to SEQ ID NO: 17698
ugccuccuuaaauaagccu

SEQ ID NO: 17700 - RNA, 19 nt, Artificial Sequence
  Description of Artificial Sequence: Synthetic oligonucleotide
  Sense strand starting at position 328 of SEQ ID NO: 183
aguggagaauugccaaauu

SEQ ID NO: 17701 - RNA, 19 nt, Artificial Sequence
  Description of Artificial Sequence: Synthetic oligonucleotide
  Antisense strand to SEQ ID NO: 17700
aauuuggcaauucuccacu

SEQ ID NO: 17702 - RNA, 19 nt, Artificial Sequence
  Description of Artificial Sequence: Synthetic oligonucleotide
  Sense strand starting at position 319 of SEQ ID NO: 183
ccuguaggcaguggagaau

SEQ ID NO: 17703 - RNA, 19 nt, Artificial Sequence
  Description of Artificial Sequence: Synthetic oligonucleotide
  Antisense strand to SEQ ID NO: 17702
auucuccacugccuacagg

SEQ ID NO: 17704 - RNA, 19 nt, Artificial Sequence
  Description of Artificial Sequence: Synthetic oligonucleotide
  Sense strand starting at position 299 of SEQ ID NO: 183
cagggaagcucugacuuga

SEQ ID NO: 17705 - RNA, 19 nt, Artificial Sequence
  Description of Artificial Sequence: Synthetic oligonucleotide
  Antisense strand to SEQ ID NO: 17704
ucaagucagagcuucccug

SEQ ID NO: 17706 - RNA, 19 nt, Artificial Sequence
  Description of Artificial Sequence: Synthetic oligonucleotide
  Sense strand starting at position 235 of SEQ ID NO: 183
gucauucagcuccgaagga

SEQ ID NO: 17707 - RNA, 19 nt, Artificial Sequence
  Description of Artificial Sequence: Synthetic oligonucleotide
  Antisense strand to SEQ ID NO: 17706
uccuucggagcugaaugac

SEQ ID NO: 17708 - RNA, 19 nt, Artificial Sequence
  Description of Artificial Sequence: Synthetic oligonucleotide
  Sense strand starting at position 208 of SEQ ID NO: 183
acagcaucauugggaaaug

SEQ ID NO: 17709 - RNA, 19 nt, Artificial Sequence
  Description of Artificial Sequence: Synthetic oligonucleotide
  Antisense strand to SEQ ID NO: 17708
cauuucccaaugaugcugu

SEQ ID NO: 17710 - RNA, 19 nt, Artificial Sequence
  Description of Artificial Sequence: Synthetic oligonucleotide
  Sense strand starting at position 175 of SEQ ID NO: 183
gggcaaaggcaugguaaua

SEQ ID NO: 17711 - RNA, 19 nt, Artificial Sequence
  Description of Artificial Sequence: Synthetic oligonucleotide
  Antisense strand to SEQ ID NO: 17710
uauuaccaugccuuugccc

SEQ ID NO: 17712 - RNA, 19 nt, Artificial Sequence
  Description of Artificial Sequence: Synthetic oligonucleotide
  Sense strand starting at position 174 of SEQ ID NO: 183
ugggcaaaggcaugguaau

SEQ ID NO: 17713 - RNA, 19 nt, Artificial Sequence
  Description of Artificial Sequence: Synthetic oligonucleotide
  Antisense strand to SEQ ID NO: 17712
auuaccaugccuuugccca

SEQ ID NO: 17714 - RNA, 19 nt, Artificial Sequence
  Description of Artificial Sequence: Synthetic oligonucleotide
  Sense strand starting at position 84 of SEQ ID NO: 183
aggcaacacugaugagaag

SEQ ID NO: 17715 - RNA, 19 nt, Artificial Sequence
  Description of Artificial Sequence: Synthetic oligonucleotide
  Antisense strand to SEQ ID NO: 17714
cuucucaucaguguugccu

SEQ ID NO: 17716 - RNA, 19 nt, Artificial Sequence
  Description of Artificial Sequence: Synthetic oligonucleotide
  Sense strand starting at position 3981 of SEQ ID NO: 184
guaaguguacaagaacagu

SEQ ID NO: 17717 - RNA, 19 nt, Artificial Sequence
  Description of Artificial Sequence: Synthetic oligonucleotide
  Antisense strand to SEQ ID NO: 17716
acuguucuuguacacuuac

SEQ ID NO: 17718 - RNA, 19 nt, Artificial Sequence
  Description of Artificial Sequence: Synthetic oligonucleotide
  Sense strand starting at position 3914 of SEQ ID NO: 184
caagaaugcugaggaagau

SEQ ID NO: 17719 - RNA, 19 nt, Artificial Sequence
  Description of Artificial Sequence: Synthetic oligonucleotide
  Antisense strand to SEQ ID NO: 17718
aucuuccucagcauucuug

SEQ ID NO: 17720 - RNA, 19 nt, Artificial Sequence
  Description of Artificial Sequence: Synthetic oligonucleotide
  Sense strand starting at position 3911 of SEQ ID NO: 184
agacaagaaugcugaggaa

SEQ ID NO: 17721 - RNA, 19 nt, Artificial Sequence
  Description of Artificial Sequence: Synthetic oligonucleotide
  Antisense strand to SEQ ID NO: 17720
uuccucagcauucuugucu

SEQ ID NO: 17722 - RNA, 19 nt, Artificial Sequence
  Description of Artificial Sequence: Synthetic oligonucleotide
  Sense strand starting at position 3847 of SEQ ID NO: 184
ucuaguuugugauuuccca

SEQ ID NO: 17723 - RNA, 19 nt, Artificial Sequence
  Description of Artificial Sequence: Synthetic oligonucleotide
  Antisense strand to SEQ ID NO: 17722
ugggaaaucacaaacuaga

SEQ ID NO: 17724 - RNA, 19 nt, Artificial Sequence
  Description of Artificial Sequence: Synthetic oligonucleotide
  Sense strand starting at position 3832 of SEQ ID NO: 184
ugguuacacuuugcaucua

SEQ ID NO: 17725 - RNA, 19 nt, Artificial Sequence
  Description of Artificial Sequence: Synthetic oligonucleotide
  Antisense strand to SEQ ID NO: 17724
uagaugcaaaguguaacca

SEQ ID NO: 17726 - RNA, 19 nt, Artificial Sequence
  Description of Artificial Sequence: Synthetic oligonucleotide
  Sense strand starting at position 3787 of SEQ ID NO: 184
uuacccauagcgugagauu

SEQ ID NO: 17727 - RNA, 19 nt, Artificial Sequence
  Description of Artificial Sequence: Synthetic oligonucleotide
  Antisense strand to SEQ ID NO: 17726
aaucucacgcuauggguaa

SEQ ID NO: 17728 - RNA, 19 nt, Artificial Sequence
  Description of Artificial Sequence: Synthetic oligonucleotide
  Sense strand starting at position 3746 of SEQ ID NO: 184
agcauuuagucugucugga

SEQ ID NO: 17729 - RNA, 19 nt, Artificial Sequence
  Description of Artificial Sequence: Synthetic oligonucleotide
  Antisense strand to SEQ ID NO: 17728
uccagacagacuaaaugcu

SEQ ID NO: 17730 - RNA, 19 nt, Artificial Sequence
  Description of Artificial Sequence: Synthetic oligonucleotide
  Sense strand starting at position 3691 of SEQ ID NO: 184
uguauaaugucaccucugu

SEQ ID NO: 17731 - RNA, 19 nt, Artificial Sequence
  Description of Artificial Sequence: Synthetic oligonucleotide
  Antisense strand to SEQ ID NO: 17730
acagaggugacauuauaca

SEQ ID NO: 17732 - RNA, 19 nt, Artificial Sequence
  Description of Artificial Sequence: Synthetic oligonucleotide
  Sense strand starting at position 3681 of SEQ ID NO: 184
aucaaaguccuguauaaug

SEQ ID NO: 17733 - RNA, 19 nt, Artificial Sequence
  Description of Artificial Sequence: Synthetic oligonucleotide
  Antisense strand to SEQ ID NO: 17732
cauuauacaggacuuugau

SEQ ID NO: 17734 - RNA, 19 nt, Artificial Sequence
  Description of Artificial Sequence: Synthetic oligonucleotide
  Sense strand starting at position 3602 of SEQ ID NO: 184
gugucuccuucuccaagaa

SEQ ID NO: 17735 - RNA, 19 nt, Artificial Sequence
  Description of Artificial Sequence: Synthetic oligonucleotide
  Antisense strand to SEQ ID NO: 17734
uucuuggagaaggagacac

SEQ ID NO: 17736 - RNA, 19 nt, Artificial Sequence
  Description of Artificial Sequence: Synthetic oligonucleotide
  Sense strand starting at position 3601 of SEQ ID NO: 184
ugugucuccuucuccaaga

SEQ ID NO: 17737 - RNA, 19 nt, Artificial Sequence
  Description of Artificial Sequence: Synthetic oligonucleotide
  Antisense strand to SEQ ID NO: 17736
ucuuggagaaggagacaca

SEQ ID NO: 17738 - RNA, 19 nt, Artificial Sequence
  Description of Artificial Sequence: Synthetic oligonucleotide
  Sense strand starting at position 3402 of SEQ ID NO: 184
augacauguccuuguauua

SEQ ID NO: 17739 - RNA, 19 nt, Artificial Sequence
  Description of Artificial Sequence: Synthetic oligonucleotide
  Antisense strand to SEQ ID NO: 17738
uaauacaaggacaugucau

SEQ ID NO: 17740 - RNA, 19 nt, Artificial Sequence
  Description of Artificial Sequence: Synthetic oligonucleotide
  Sense strand starting at position 3373 of SEQ ID NO: 184
gcucacucaucucucgaaa

SEQ ID NO: 17741 - RNA, 19 nt, Artificial Sequence
  Description of Artificial Sequence: Synthetic oligonucleotide
  Antisense strand to SEQ ID NO: 17740
uuucgagagaugagugagc

SEQ ID NO: 17742 - RNA, 19 nt, Artificial Sequence
  Description of Artificial Sequence: Synthetic oligonucleotide
  Sense strand starting at position 3364 of SEQ ID NO: 184
ucaggaacugcucacucau

SEQ ID NO: 17743 - RNA, 19 nt, Artificial Sequence
  Description of Artificial Sequence: Synthetic oligonucleotide
  Antisense strand to SEQ ID NO: 17742
augagugagcaguuccuga

SEQ ID NO: 17744 - RNA, 19 nt, Artificial Sequence
  Description of Artificial Sequence: Synthetic oligonucleotide
  Sense strand starting at position 3278 of SEQ ID NO: 184
caucuuaggucuuagagag

SEQ ID NO: 17745 - RNA, 19 nt, Artificial Sequence
  Description of Artificial Sequence: Synthetic oligonucleotide
  Antisense strand to SEQ ID NO: 17744
cucucuaagaccuaagaug

SEQ ID NO: 17746 - RNA, 19 nt, Artificial Sequence
  Description of Artificial Sequence: Synthetic oligonucleotide
  Sense strand starting at position 3142 of SEQ ID NO: 184
ucgauuccgacauaaagca

SEQ ID NO: 17747 - RNA, 19 nt, Artificial Sequence
  Description of Artificial Sequence: Synthetic oligonucleotide
  Antisense strand to SEQ ID NO: 17746
ugcuuuaugucggaaucga

SEQ ID NO: 17748 - RNA, 19 nt, Artificial Sequence
  Description of Artificial Sequence: Synthetic oligonucleotide
  Sense strand starting at position 3140 of SEQ ID NO: 184
ggucgauuccgacauaaag

SEQ ID NO: 17749 - RNA, 19 nt, Artificial Sequence
  Description of Artificial Sequence: Synthetic oligonucleotide
  Antisense strand to SEQ ID NO: 17748
cuuuaugucggaaucgacc

SEQ ID NO: 17750 - RNA, 19 nt, Artificial Sequence
  Description of Artificial Sequence: Synthetic oligonucleotide
  Sense strand starting at position 2615 of SEQ ID NO: 184
gagugacuccuacagagug

SEQ ID NO: 17751 - RNA, 19 nt, Artificial Sequence
  Description of Artificial Sequence: Synthetic oligonucleotide
  Antisense strand to SEQ ID NO: 17750
cacucuguaggagucacuc

SEQ ID NO: 17752 - RNA, 19 nt, Artificial Sequence
  Description of Artificial Sequence: Synthetic oligonucleotide
  Sense strand starting at position 2259 of SEQ ID NO: 184
uucugaaauucuggauuuc

SEQ ID NO: 17753 - RNA, 19 nt, Artificial Sequence
  Description of Artificial Sequence: Synthetic oligonucleotide
  Antisense strand to SEQ ID NO: 17752
gaaauccagaauuucagaa

SEQ ID NO: 17754 - RNA, 19 nt, Artificial Sequence
  Description of Artificial Sequence: Synthetic oligonucleotide
  Sense strand starting at position 2141 of SEQ ID NO: 184
agucaagaaucccggauuu

SEQ ID NO: 17755 - RNA, 19 nt, Artificial Sequence
  Description of Artificial Sequence: Synthetic oligonucleotide
  Antisense strand to SEQ ID NO: 17754
aaauccgggauucuugacu

SEQ ID NO: 17756 - RNA, 19 nt, Artificial Sequence
  Description of Artificial Sequence: Synthetic oligonucleotide
  Sense strand starting at position 1545 of SEQ ID NO: 184
cuugguaaugccuagaugu

SEQ ID NO: 17757 - RNA, 19 nt, Artificial Sequence
  Description of Artificial Sequence: Synthetic oligonucleotide
  Antisense strand to SEQ ID NO: 17756
acaucuaggcauuaccaag

SEQ ID NO: 17758 - RNA, 19 nt, Artificial Sequence
  Description of Artificial Sequence: Synthetic oligonucleotide
  Sense strand starting at position 1514 of SEQ ID NO: 184
aggcuuauuuaaggaggca

SEQ ID NO: 17759 - RNA, 19 nt, Artificial Sequence
  Description of Artificial Sequence: Synthetic oligonucleotide
  Antisense strand to SEQ ID NO: 17758
ugccuccuuaaauaagccu

SEQ ID NO: 17760 - RNA, 19 nt, Artificial Sequence
  Description of Artificial Sequence: Synthetic oligonucleotide
  Sense strand starting at position 1377 of SEQ ID NO: 184
aguggagaauugccaaauu

SEQ ID NO: 17761 - RNA, 19 nt, Artificial Sequence
  Description of Artificial Sequence: Synthetic oligonucleotide
  Antisense strand to SEQ ID NO: 17760
aauuuggcaauucuccacu

SEQ ID NO: 17762 - RNA, 19 nt, Artificial Sequence
  Description of Artificial Sequence: Synthetic oligonucleotide
  Sense strand starting at position 1368 of SEQ ID NO: 184
ccuguaggcaguggagaau

SEQ ID NO: 17763 - RNA, 19 nt, Artificial Sequence
  Description of Artificial Sequence: Synthetic oligonucleotide
  Antisense strand to SEQ ID NO: 17762
auucuccacugccuacagg

SEQ ID NO: 17764 - RNA, 19 nt, Artificial Sequence
  Description of Artificial Sequence: Synthetic oligonucleotide
  Sense strand starting at position 1284 of SEQ ID NO: 184
gucauucagcuccgaagga

SEQ ID NO: 17765 - RNA, 19 nt, Artificial Sequence
  Description of Artificial Sequence: Synthetic oligonucleotide
  Antisense strand to SEQ ID NO: 17764
uccuucggagcugaaugac

SEQ ID NO: 17766 - RNA, 19 nt, Artificial Sequence
  Description of Artificial Sequence: Synthetic oligonucleotide
  Sense strand starting at position 1224 of SEQ ID NO: 184
gggcaaaggcaugguaaua

SEQ ID NO: 17767 - RNA, 19 nt, Artificial Sequence
  Description of Artificial Sequence: Synthetic oligonucleotide
  Antisense strand to SEQ ID NO: 17766
uauuaccaugccuuugccc

SEQ ID NO: 17768 - RNA, 19 nt, Artificial Sequence
  Description of Artificial Sequence: Synthetic oligonucleotide
  Sense strand starting at position 1223 of SEQ ID NO: 184
ugggcaaaggcaugguaau

SEQ ID NO: 17769 - RNA, 19 nt, Artificial Sequence
  Description of Artificial Sequence: Synthetic oligonucleotide
  Antisense strand to SEQ ID NO: 17768
auuaccaugccuuugccca

SEQ ID NO: 17770 - RNA, 19 nt, Artificial Sequence
  Description of Artificial Sequence: Synthetic oligonucleotide
  Sense strand starting at position 1133 of SEQ ID NO: 184
aggcaacacugaugagaag

SEQ ID NO: 17771 - RNA, 19 nt, Artificial Sequence
  Description of Artificial Sequence: Synthetic oligonucleotide
  Antisense strand to SEQ ID NO: 17770
cuucucaucaguguugccu

SEQ ID NO: 17772 - RNA, 19 nt, Artificial Sequence
  Description of Artificial Sequence: Synthetic oligonucleotide
  Sense strand starting at position 1048 of SEQ ID NO: 184
gcagauguuagauggcagu

SEQ ID NO: 17773 - RNA, 19 nt, Artificial Sequence
  Description of Artificial Sequence: Synthetic oligonucleotide
  Antisense strand to SEQ ID NO: 17772
acugccaucuaacaucugc

SEQ ID NO: 17774 - RNA, 19 nt, Artificial Sequence
  Description of Artificial Sequence: Synthetic oligonucleotide
  Sense strand starting at position 995 of SEQ ID NO: 184
ggagcuugggucuggaaga

SEQ ID NO: 17775 - RNA, 19 nt, Artificial Sequence
  Description of Artificial Sequence: Synthetic oligonucleotide
  Antisense strand to SEQ ID NO: 17774
ucuuccagacccaagcucc

SEQ ID NO: 17776 - RNA, 19 nt, Artificial Sequence
  Description of Artificial Sequence: Synthetic oligonucleotide
  Sense strand starting at position 983 of SEQ ID NO: 184
uguuguucugaaggagcuu

SEQ ID NO: 17777 - RNA, 19 nt, Artificial Sequence
  Description of Artificial Sequence: Synthetic oligonucleotide
  Antisense strand to SEQ ID NO: 17776
aagcuccuucagaacaaca

SEQ ID NO: 17778 - RNA, 19 nt, Artificial Sequence
  Description of Artificial Sequence: Synthetic oligonucleotide
  Sense strand starting at position 976 of SEQ ID NO: 184
acaguacuguuguucugaa

SEQ ID NO: 17779 - RNA, 19 nt, Artificial Sequence
  Description of Artificial Sequence: Synthetic oligonucleotide
  Antisense strand to SEQ ID NO: 17778
uucagaacaacaguacugu

SEQ ID NO: 17780 - RNA, 19 nt, Artificial Sequence
  Description of Artificial Sequence: Synthetic oligonucleotide
  Sense strand starting at position 948 of SEQ ID NO: 184
cguuaugcuaagggacaga

SEQ ID NO: 17781 - RNA, 19 nt, Artificial Sequence
  Description of Artificial Sequence: Synthetic oligonucleotide
  Antisense strand to SEQ ID NO: 17780
ucugucccuuagcauaacg

SEQ ID NO: 17782 - RNA, 19 nt, Artificial Sequence
  Description of Artificial Sequence: Synthetic oligonucleotide
  Sense strand starting at position 939 of SEQ ID NO: 184
ggugccaaacguuaugcua

SEQ ID NO: 17783 - RNA, 19 nt, Artificial Sequence
  Description of Artificial Sequence: Synthetic oligonucleotide
  Antisense strand to SEQ ID NO: 17782
uagcauaacguuuggcacc

SEQ ID NO: 17784 - RNA, 19 nt, Artificial Sequence
  Description of Artificial Sequence: Synthetic oligonucleotide
  Sense strand starting at position 649 of SEQ ID NO: 184
gcauaugcaucuguccauu

SEQ ID NO: 17785 - RNA, 19 nt, Artificial Sequence
  Description of Artificial Sequence: Synthetic oligonucleotide
  Antisense strand to SEQ ID NO: 17784
aauggacagaugcauaugc

SEQ ID NO: 17786 - RNA, 19 nt, Artificial Sequence
  Description of Artificial Sequence: Synthetic oligonucleotide
  Sense strand starting at position 640 of SEQ ID NO: 184
aucagaacugcauaugcau

SEQ ID NO: 17787 - RNA, 19 nt, Artificial Sequence
  Description of Artificial Sequence: Synthetic oligonucleotide
  Antisense strand to SEQ ID NO: 17786
augcauaugcaguucugau

SEQ ID NO: 17788 - RNA, 19 nt, Artificial Sequence
  Description of Artificial Sequence: Synthetic oligonucleotide
  Sense strand starting at position 625 of SEQ ID NO: 184
auaugcuuccaagguauca

SEQ ID NO: 17789 - RNA, 19 nt, Artificial Sequence
  Description of Artificial Sequence: Synthetic oligonucleotide
  Antisense strand to SEQ ID NO: 17788
ugauaccuuggaagcauau

SEQ ID NO: 17790 - RNA, 19 nt, Artificial Sequence
  Description of Artificial Sequence: Synthetic oligonucleotide
  Sense strand starting at position 526 of SEQ ID NO: 184
cacuccugugucuggcaaa

SEQ ID NO: 17791 - RNA, 19 nt, Artificial Sequence
  Description of Artificial Sequence: Synthetic oligonucleotide
  Antisense strand to SEQ ID NO: 17790
uuugccagacacaggagug

SEQ ID NO: 17792 - RNA, 19 nt, Artificial Sequence
  Description of Artificial Sequence: Synthetic oligonucleotide
  Sense strand starting at position 457 of SEQ ID NO: 184
agcuguaggcuggaucauu

SEQ ID NO: 17793 - RNA, 19 nt, Artificial Sequence
  Description of Artificial Sequence: Synthetic oligonucleotide
  Antisense strand to SEQ ID NO: 17792
aaugauccagccuacagcu

SEQ ID NO: 17794 - RNA, 19 nt, Artificial Sequence
  Description of Artificial Sequence: Synthetic oligonucleotide
  Sense strand starting at position 275 of SEQ ID NO: 184
ugugcaugccauccgugau

SEQ ID NO: 17795 - RNA, 19 nt, Artificial Sequence
  Description of Artificial Sequence: Synthetic oligonucleotide
  Antisense strand to SEQ ID NO: 17794
aucacggauggcaugcaca

SEQ ID NO: 17796 - RNA, 19 nt, Artificial Sequence
  Description of Artificial Sequence: Synthetic oligonucleotide
  Sense strand starting at position 29 of SEQ ID NO: 186
ucuucuuaccuacguuauu

SEQ ID NO: 17797 - RNA, 19 nt, Artificial Sequence
  Description of Artificial Sequence: Synthetic oligonucleotide
  Antisense strand to SEQ ID NO: 17796
aauaacguagguaagaaga

SEQ ID NO: 17798 - RNA, 19 nt, Artificial Sequence
  Description of Artificial Sequence: Synthetic oligonucleotide
  Sense strand starting at position 30 of SEQ ID NO: 186
cuucuuaccuacguuauua

SEQ ID NO: 17799 - RNA, 19 nt, Artificial Sequence
  Description of Artificial Sequence: Synthetic oligonucleotide
  Antisense strand to SEQ ID NO: 17798
uaauaacguagguaagaag

SEQ ID NO: 17800 - RNA, 19 nt, Artificial Sequence
  Description of Artificial Sequence: Synthetic oligonucleotide
  Sense strand starting at position 83 of SEQ ID NO: 186
cuuaaucuagccuggucua

SEQ ID NO: 17801 - RNA, 19 nt, Artificial Sequence
  Description of Artificial Sequence: Synthetic oligonucleotide
  Antisense strand to SEQ ID NO: 17800
uagaccaggcuagauuaag

SEQ ID NO: 17802 - RNA, 19 nt, Artificial Sequence
  Description of Artificial Sequence: Synthetic oligonucleotide
  Sense strand starting at position 84 of SEQ ID NO: 186
uuaaucuagccuggucuaa

SEQ ID NO: 17803 - RNA, 19 nt, Artificial Sequence
  Description of Artificial Sequence: Synthetic oligonucleotide
  Antisense strand to SEQ ID NO: 17802
uuagaccaggcuagauuaa

SEQ ID NO: 17804 - RNA, 19 nt, Artificial Sequence
  Description of Artificial Sequence: Synthetic oligonucleotide
  Sense strand starting at position 286 of SEQ ID NO: 186
gacgcucuacaaggagauu

SEQ ID NO: 17805 - RNA, 19 nt, Artificial Sequence
  Description of Artificial Sequence: Synthetic oligonucleotide
  Antisense strand to SEQ ID NO: 17804
aaucuccuuguagagcguc

SEQ ID NO: 17806 - RNA, 19 nt, Artificial Sequence
  Description of Artificial Sequence: Synthetic oligonucleotide
  Sense strand starting at position 310 of SEQ ID NO: 186
agggcucacucauaacaaa

SEQ ID NO: 17807 - RNA, 19 nt, Artificial Sequence
  Description of Artificial Sequence: Synthetic oligonucleotide
  Antisense strand to SEQ ID NO: 17806
uuuguuaugagugagcccu

SEQ ID NO: 17808 - RNA, 19 nt, Artificial Sequence
  Description of Artificial Sequence: Synthetic oligonucleotide
  Sense strand starting at position 380 of SEQ ID NO: 186
uggcguucucuucuuaguu

SEQ ID NO: 17809 - RNA, 19 nt, Artificial Sequence
  Description of Artificial Sequence: Synthetic oligonucleotide
  Antisense strand to SEQ ID NO: 17808
aacuaagaagagaacgcca

SEQ ID NO: 17810 - RNA, 19 nt, Artificial Sequence
  Description of Artificial Sequence: Synthetic oligonucleotide
  Sense strand starting at position 533 of SEQ ID NO: 186
aagagcuagugaucuaaua

SEQ ID NO: 17811 - RNA, 19 nt, Artificial Sequence
  Description of Artificial Sequence: Synthetic oligonucleotide
  Antisense strand to SEQ ID NO: 17810
uauuagaucacuagcucuu

SEQ ID NO: 17812 - RNA, 19 nt, Artificial Sequence
  Description of Artificial Sequence: Synthetic oligonucleotide
  Sense strand starting at position 618 of SEQ ID NO: 186
gccgaauacuuucuacuua

SEQ ID NO: 17813 - RNA, 19 nt, Artificial Sequence
  Description of Artificial Sequence: Synthetic oligonucleotide
  Antisense strand to SEQ ID NO: 17812
uaaguagaaaguauucggc

SEQ ID NO: 17814 - RNA, 19 nt, Artificial Sequence
  Description of Artificial Sequence: Synthetic oligonucleotide
  Sense strand starting at position 735 of SEQ ID NO: 186
gucccaguauaguuacaaa

SEQ ID NO: 17815 - RNA, 19 nt, Artificial Sequence
  Description of Artificial Sequence: Synthetic oligonucleotide
  Antisense strand to SEQ ID NO: 17814
uuuguaacuauacugggac

SEQ ID NO: 17816 - RNA, 19 nt, Artificial Sequence
  Description of Artificial Sequence: Synthetic oligonucleotide
  Sense strand starting at position 778 of SEQ ID NO: 186
agagcuuucuagguuucuu

SEQ ID NO: 17817 - RNA, 19 nt, Artificial Sequence
  Description of Artificial Sequence: Synthetic oligonucleotide
  Antisense strand to SEQ ID NO: 17816
aagaaaccuagaaagcucu

SEQ ID NO: 17818 - RNA, 19 nt, Artificial Sequence
  Description of Artificial Sequence: Synthetic oligonucleotide
  Sense strand starting at position 912 of SEQ ID NO: 186
gcauucuauuaggcuguga

SEQ ID NO: 17819 - RNA, 19 nt, Artificial Sequence
  Description of Artificial Sequence: Synthetic oligonucleotide
  Antisense strand to SEQ ID NO: 17818
ucacagccuaauagaaugc

SEQ ID NO: 17820 - RNA, 19 nt, Artificial Sequence
  Description of Artificial Sequence: Synthetic oligonucleotide
  Sense strand starting at position 983 of SEQ ID NO: 186
aauggacacgaucguuaaa

SEQ ID NO: 17821 - RNA, 19 nt, Artificial Sequence
  Description of Artificial Sequence: Synthetic oligonucleotide
  Antisense strand to SEQ ID NO: 17820
uuuaacgaucguguccauu

SEQ ID NO: 17822 - RNA, 19 nt, Artificial Sequence
  Description of Artificial Sequence: Synthetic oligonucleotide
  Sense strand starting at position 985 of SEQ ID NO: 186
uggacacgaucguuaaaga

SEQ ID NO: 17823 - RNA, 19 nt, Artificial Sequence
  Description of Artificial Sequence: Synthetic oligonucleotide
  Antisense strand to SEQ ID NO: 17822
ucuuuaacgaucgugucca

SEQ ID NO: 17824 - RNA, 19 nt, Artificial Sequence
  Description of Artificial Sequence: Synthetic oligonucleotide
  Sense strand starting at position 1035 of SEQ ID NO: 186
gguuaugcgauccaaacuc

SEQ ID NO: 17825 - RNA, 19 nt, Artificial Sequence
  Description of Artificial Sequence: Synthetic oligonucleotide
  Antisense strand to SEQ ID NO: 17824
gaguuuggaucgcauaacc

SEQ ID NO: 17826 - RNA, 19 nt, Artificial Sequence
  Description of Artificial Sequence: Synthetic oligonucleotide
  Sense strand starting at position 1231 of SEQ ID NO: 186
cccagucuugaccgagaaa

SEQ ID NO: 17827 - RNA, 19 nt, Artificial Sequence
  Description of Artificial Sequence: Synthetic oligonucleotide
  Antisense strand to SEQ ID NO: 17826
uuucucggucaagacuggg

SEQ ID NO: 17828 - RNA, 19 nt, Artificial Sequence
  Description of Artificial Sequence: Synthetic oligonucleotide
  Sense strand starting at position 1485 of SEQ ID NO: 186
ucaaguuugcccgauguua

SEQ ID NO: 17829 - RNA, 19 nt, Artificial Sequence
  Description of Artificial Sequence: Synthetic oligonucleotide
  Antisense strand to SEQ ID NO: 17828
uaacaucgggcaaacuuga

SEQ ID NO: 17830 - RNA, 19 nt, Artificial Sequence
  Description of Artificial Sequence: Synthetic oligonucleotide
  Sense strand starting at position 1487 of SEQ ID NO: 186
aaguuugcccgauguuaac

SEQ ID NO: 17831 - RNA, 19 nt, Artificial Sequence
  Description of Artificial Sequence: Synthetic oligonucleotide
  Antisense strand to SEQ ID NO: 17830
guuaacaucgggcaaacuu

SEQ ID NO: 17832 - RNA, 19 nt, Artificial Sequence
  Description of Artificial Sequence: Synthetic oligonucleotide
  Sense strand starting at position 1498 of SEQ ID NO: 186
auguuaacgcuccaaggau

SEQ ID NO: 17833 - RNA, 19 nt, Artificial Sequence
  Description of Artificial Sequence: Synthetic oligonucleotide
  Antisense strand to SEQ ID NO: 17832
auccuuggagcguuaacau

SEQ ID NO: 17834 - RNA, 19 nt, Artificial Sequence
  Description of Artificial Sequence: Synthetic oligonucleotide
  Sense strand starting at position 2315 of SEQ ID NO: 186
augcgcuuugccucagauu

SEQ ID NO: 17835 - RNA, 19 nt, Artificial Sequence
  Description of Artificial Sequence: Synthetic oligonucleotide
  Antisense strand to SEQ ID NO: 17834
aaucugaggcaaagcgcau

SEQ ID NO: 17836 - RNA, 19 nt, Artificial Sequence
  Description of Artificial Sequence: Synthetic oligonucleotide
  Sense strand starting at position 2316 of SEQ ID NO: 186
ugcgcuuugccucagauuu

SEQ ID NO: 17837 - RNA, 19 nt, Artificial Sequence
  Description of Artificial Sequence: Synthetic oligonucleotide
  Antisense strand to SEQ ID NO: 17836
aaaucugaggcaaagcgca

SEQ ID NO: 17838 - RNA, 19 nt, Artificial Sequence
  Description of Artificial Sequence: Synthetic oligonucleotide
  Sense strand starting at position 2323 of SEQ ID NO: 186
ugccucagauuugaaggaa

SEQ ID NO: 17839 - RNA, 19 nt, Artificial Sequence
  Description of Artificial Sequence: Synthetic oligonucleotide
  Antisense strand to SEQ ID NO: 17838
uuccuucaaaucugaggca

SEQ ID NO: 17840 - RNA, 19 nt, Artificial Sequence
  Description of Artificial Sequence: Synthetic oligonucleotide
  Sense strand starting at position 2347 of SEQ ID NO: 186
aguggcucuugugugaaau

SEQ ID NO: 17841 - RNA, 19 nt, Artificial Sequence
  Description of Artificial Sequence: Synthetic oligonucleotide
  Antisense strand to SEQ ID NO: 17840
auuucacacaagagccacu

SEQ ID NO: 17842 - RNA, 19 nt, Artificial Sequence
  Description of Artificial Sequence: Synthetic oligonucleotide
  Sense strand starting at position 2358 of SEQ ID NO: 186
ugugaaaucacgcagagcu

SEQ ID NO: 17843 - RNA, 19 nt, Artificial Sequence
  Description of Artificial Sequence: Synthetic oligonucleotide
  Antisense strand to SEQ ID NO: 17842
agcucugcgugauuucaca

SEQ ID NO: 17844 - RNA, 19 nt, Artificial Sequence
  Description of Artificial Sequence: Synthetic oligonucleotide
  Sense strand starting at position 2484 of SEQ ID NO: 186
agcggugacucaucaggga

SEQ ID NO: 17845 - RNA, 19 nt, Artificial Sequence
  Description of Artificial Sequence: Synthetic oligonucleotide
  Antisense strand to SEQ ID NO: 17844
ucccugaugagucaccgcu

SEQ ID NO: 17846 - RNA, 19 nt, Artificial Sequence
  Description of Artificial Sequence: Synthetic oligonucleotide
  Sense strand starting at position 2488 of SEQ ID NO: 186
gugacucaucagggauuag

SEQ ID NO: 17847 - RNA, 19 nt, Artificial Sequence
  Description of Artificial Sequence: Synthetic oligonucleotide
  Antisense strand to SEQ ID NO: 17846
cuaaucccugaugagucac

SEQ ID NO: 17848 - RNA, 19 nt, Artificial Sequence
  Description of Artificial Sequence: Synthetic oligonucleotide
  Sense strand starting at position 2539 of SEQ ID NO: 186
gguucugugcucugggaac

SEQ ID NO: 17849 - RNA, 19 nt, Artificial Sequence
  Description of Artificial Sequence: Synthetic oligonucleotide
  Antisense strand to SEQ ID NO: 17848
guucccagagcacagaacc

SEQ ID NO: 17850 - RNA, 19 nt, Artificial Sequence
  Description of Artificial Sequence: Synthetic oligonucleotide
  Sense strand starting at position 2727 of SEQ ID NO: 186
gcgagccuuccagggagaa

SEQ ID NO: 17851 - RNA, 19 nt, Artificial Sequence
  Description of Artificial Sequence: Synthetic oligonucleotide
  Antisense strand to SEQ ID NO: 17850
uucucccuggaaggcucgc

SEQ ID NO: 17852 - RNA, 19 nt, Artificial Sequence
  Description of Artificial Sequence: Synthetic oligonucleotide
  Sense strand starting at position 3251 of SEQ ID NO: 186
aacagaaggugacuguauu

SEQ ID NO: 17853 - RNA, 19 nt, Artificial Sequence
  Description of Artificial Sequence: Synthetic oligonucleotide
  Antisense strand to SEQ ID NO: 17852
aauacagucaccuucuguu

SEQ ID NO: 17854 - RNA, 19 nt, Artificial Sequence
  Description of Artificial Sequence: Synthetic oligonucleotide
  Sense strand starting at position 3252 of SEQ ID NO: 186
acagaaggugacuguauua

SEQ ID NO: 17855 - RNA, 19 nt, Artificial Sequence
  Description of Artificial Sequence: Synthetic oligonucleotide
  Antisense strand to SEQ ID NO: 17854
uaauacagucaccuucugu

SEQ ID NO: 17856 - RNA, 19 nt, Artificial Sequence
  Description of Artificial Sequence: Synthetic oligonucleotide
  Sense strand starting at position 3280 of SEQ ID NO: 186
agucuuggaugacagaaga

SEQ ID NO: 17857 - RNA, 19 nt, Artificial Sequence
  Description of Artificial Sequence: Synthetic oligonucleotide
  Antisense strand to SEQ ID NO: 17856
ucuucugucauccaagacu

SEQ ID NO: 17858 - RNA, 19 nt, Artificial Sequence
  Description of Artificial Sequence: Synthetic oligonucleotide
  Sense strand starting at position 3662 of SEQ ID NO: 186
guaauaauugguugccaga

SEQ ID NO: 17859 - RNA, 19 nt, Artificial Sequence
  Description of Artificial Sequence: Synthetic oligonucleotide
  Antisense strand to SEQ ID NO: 17858
ucuggcaaccaauuauuac

SEQ ID NO: 17860 - RNA, 19 nt, Artificial Sequence
  Description of Artificial Sequence: Synthetic oligonucleotide
  Sense strand starting at position 3714 of SEQ ID NO: 186
guaaauggccucuguugau

SEQ ID NO: 17861 - RNA, 19 nt, Artificial Sequence
  Description of Artificial Sequence: Synthetic oligonucleotide
  Antisense strand to SEQ ID NO: 17860
aucaacagaggccauuuac

SEQ ID NO: 17862 - RNA, 19 nt, Artificial Sequence
  Description of Artificial Sequence: Synthetic oligonucleotide
  Sense strand starting at position 3751 of SEQ ID NO: 186
ugugaauuagaaugaguua

SEQ ID NO: 17863 - RNA, 19 nt, Artificial Sequence
  Description of Artificial Sequence: Synthetic oligonucleotide
  Antisense strand to SEQ ID NO: 17862
uaacucauucuaauucaca

SEQ ID NO: 17864 - RNA, 19 nt, Artificial Sequence
  Description of Artificial Sequence: Synthetic oligonucleotide
  Sense strand starting at position 3801 of SEQ ID NO: 186
cagagcuagucauucgaca

SEQ ID NO: 17865 - RNA, 19 nt, Artificial Sequence
  Description of Artificial Sequence: Synthetic oligonucleotide
  Antisense strand to SEQ ID NO: 17864
ugucgaaugacuagcucug

SEQ ID NO: 17866 - RNA, 19 nt, Artificial Sequence
  Description of Artificial Sequence: Synthetic oligonucleotide
  Sense strand starting at position 3806 of SEQ ID NO: 186
cuagucauucgacaaauac

SEQ ID NO: 17867 - RNA, 19 nt, Artificial Sequence
  Description of Artificial Sequence: Synthetic oligonucleotide
  Antisense strand to SEQ ID NO: 17866
guauuugucgaaugacuag

SEQ ID NO: 17868 - RNA, 19 nt, Artificial Sequence
  Description of Artificial Sequence: Synthetic oligonucleotide
  Sense strand starting at position 3832 of SEQ ID NO: 186
gugucuauuauguaccaga

SEQ ID NO: 17869 - RNA, 19 nt, Artificial Sequence
  Description of Artificial Sequence: Synthetic oligonucleotide
  Antisense strand to SEQ ID NO: 17868
ucugguacauaauagacac

SEQ ID NO: 17870 - RNA, 19 nt, Artificial Sequence
  Description of Artificial Sequence: Synthetic oligonucleotide
  Sense strand starting at position 3894 of SEQ ID NO: 186
aucccuauccuguguugau

SEQ ID NO: 17871 - RNA, 19 nt, Artificial Sequence
  Description of Artificial Sequence: Synthetic oligonucleotide
  Antisense strand to SEQ ID NO: 17870
aucaacacaggauagggau

SEQ ID NO: 17872 - RNA, 19 nt, Artificial Sequence
  Description of Artificial Sequence: Synthetic oligonucleotide
  Sense strand starting at position 3895 of SEQ ID NO: 186
ucccuauccuguguugaug

SEQ ID NO: 17873 - RNA, 19 nt, Artificial Sequence
  Description of Artificial Sequence: Synthetic oligonucleotide
  Antisense strand to SEQ ID NO: 17872
caucaacacaggauaggga

SEQ ID NO: 17874 - RNA, 19 nt, Artificial Sequence
  Description of Artificial Sequence: Synthetic oligonucleotide
  Sense strand starting at position 3973 of SEQ ID NO: 186
gguuauuccugcucuggaa

SEQ ID NO: 17875 - RNA, 19 nt, Artificial Sequence
  Description of Artificial Sequence: Synthetic oligonucleotide
  Antisense strand to SEQ ID NO: 17874
uuccagagcaggaauaacc

SEQ ID NO: 17876 - RNA, 19 nt, Artificial Sequence
  Description of Artificial Sequence: Synthetic oligonucleotide
  Sense strand starting at position 38 of SEQ ID NO: 187
ugagauguauagcuuauaa

SEQ ID NO: 17877 - RNA, 19 nt, Artificial Sequence
  Description of Artificial Sequence: Synthetic oligonucleotide
  Antisense strand to SEQ ID NO: 17876
uuauaagcuauacaucuca

SEQ ID NO: 17878 - RNA, 19 nt, Artificial Sequence
  Description of Artificial Sequence: Synthetic oligonucleotide
  Sense strand starting at position 186 of SEQ ID NO: 187
gauguugagguguaauaga

SEQ ID NO: 17879 - RNA, 19 nt, Artificial Sequence
  Description of Artificial Sequence: Synthetic oligonucleotide
  Antisense strand to SEQ ID NO: 17878
ucuauuacaccucaacauc

SEQ ID NO: 17880 - RNA, 19 nt, Artificial Sequence
  Description of Artificial Sequence: Synthetic oligonucleotide
  Sense strand starting at position 196 of SEQ ID NO: 187
uguaauagagucugguaaa

SEQ ID NO: 17881 - RNA, 19 nt, Artificial Sequence
  Description of Artificial Sequence: Synthetic oligonucleotide
  Antisense strand to SEQ ID NO: 17880
uuuaccagacucuauuaca

SEQ ID NO: 17882 - RNA, 19 nt, Artificial Sequence
  Description of Artificial Sequence: Synthetic oligonucleotide
  Sense strand starting at position 209 of SEQ ID NO: 187
gguaaacuuguuuaaucuu

SEQ ID NO: 17883 - RNA, 19 nt, Artificial Sequence
  Description of Artificial Sequence: Synthetic oligonucleotide
  Antisense strand to SEQ ID NO: 17882
aagauuaaacaaguuuacc

SEQ ID NO: 17884 - RNA, 19 nt, Artificial Sequence
  Description of Artificial Sequence: Synthetic oligonucleotide
  Sense strand starting at position 324 of SEQ ID NO: 187
caggaucuuugauagauuu

SEQ ID NO: 17885 - RNA, 19 nt, Artificial Sequence
  Description of Artificial Sequence: Synthetic oligonucleotide
  Antisense strand to SEQ ID NO: 17884
aaaucuaucaaagauccug

SEQ ID NO: 17886 - RNA, 19 nt, Artificial Sequence
  Description of Artificial Sequence: Synthetic oligonucleotide
  Sense strand starting at position 411 of SEQ ID NO: 187
guuuauuugguuuaucugu

SEQ ID NO: 17887 - RNA, 19 nt, Artificial Sequence
  Description of Artificial Sequence: Synthetic oligonucleotide
  Antisense strand to SEQ ID NO: 17886
acagauaaaccaaauaaac

SEQ ID NO: 17888 - RNA, 19 nt, Artificial Sequence
  Description of Artificial Sequence: Synthetic oligonucleotide
  Sense strand starting at position 419 of SEQ ID NO: 187
gguuuaucugugcccugca

SEQ ID NO: 17889 - RNA, 19 nt, Artificial Sequence
  Description of Artificial Sequence: Synthetic oligonucleotide
  Antisense strand to SEQ ID NO: 17888
ugcagggcacagauaaacc

SEQ ID NO: 17890 - RNA, 19 nt, Artificial Sequence
  Description of Artificial Sequence: Synthetic oligonucleotide
  Sense strand starting at position 469 of SEQ ID NO: 187
auauuaauauagccuggaa

SEQ ID NO: 17891 - RNA, 19 nt, Artificial Sequence
  Description of Artificial Sequence: Synthetic oligonucleotide
  Antisense strand to SEQ ID NO: 17890
uuccaggcuauauuaauau

SEQ ID NO: 17892 - RNA, 19 nt, Artificial Sequence
  Description of Artificial Sequence: Synthetic oligonucleotide
  Sense strand starting at position 472 of SEQ ID NO: 187
uuaauauagccuggaagca

SEQ ID NO: 17893 - RNA, 19 nt, Artificial Sequence
  Description of Artificial Sequence: Synthetic oligonucleotide
  Antisense strand to SEQ ID NO: 17892
ugcuuccaggcuauauuaa

SEQ ID NO: 17894 - RNA, 19 nt, Artificial Sequence
  Description of Artificial Sequence: Synthetic oligonucleotide
  Sense strand starting at position 524 of SEQ ID NO: 187
uguauugccauuuguggau

SEQ ID NO: 17895 - RNA, 19 nt, Artificial Sequence
  Description of Artificial Sequence: Synthetic oligonucleotide
  Antisense strand to SEQ ID NO: 17894
auccacaaauggcaauaca

SEQ ID NO: 17896 - RNA, 19 nt, Artificial Sequence
  Description of Artificial Sequence: Synthetic oligonucleotide
  Sense strand starting at position 778 of SEQ ID NO: 187
augugaucuuauguuaaug

SEQ ID NO: 17897 - RNA, 19 nt, Artificial Sequence
  Description of Artificial Sequence: Synthetic oligonucleotide
  Antisense strand to SEQ ID NO: 17896
cauuaacauaagaucacau

SEQ ID NO: 17898 - RNA, 19 nt, Artificial Sequence
  Description of Artificial Sequence: Synthetic oligonucleotide
  Sense strand starting at position 1063 of SEQ ID NO: 187
uugaccuaauuugauagaa

SEQ ID NO: 17899 - RNA, 19 nt, Artificial Sequence
  Description of Artificial Sequence: Synthetic oligonucleotide
  Antisense strand to SEQ ID NO: 17898
uucuaucaaauuaggucaa

SEQ ID NO: 17900 - RNA, 19 nt, Artificial Sequence
  Description of Artificial Sequence: Synthetic oligonucleotide
  Sense strand starting at position 1095 of SEQ ID NO: 187
uuuguaaagggcuacagau

SEQ ID NO: 17901 - RNA, 19 nt, Artificial Sequence
  Description of Artificial Sequence: Synthetic oligonucleotide
  Antisense strand to SEQ ID NO: 17900
aucuguagcccuuuacaaa

SEQ ID NO: 17902 - RNA, 19 nt, Artificial Sequence
  Description of Artificial Sequence: Synthetic oligonucleotide
  Sense strand starting at position 1181 of SEQ ID NO: 187
ugaugucuauuacccagaa

SEQ ID NO: 17903 - RNA, 19 nt, Artificial Sequence
  Description of Artificial Sequence: Synthetic oligonucleotide
  Antisense strand to SEQ ID NO: 17902
uucuggguaauagacauca

SEQ ID NO: 17904 - RNA, 19 nt, Artificial Sequence
  Description of Artificial Sequence: Synthetic oligonucleotide
  Sense strand starting at position 1432 of SEQ ID NO: 187
agaggauuaugcccacuga

SEQ ID NO: 17905 - RNA, 19 nt, Artificial Sequence
  Description of Artificial Sequence: Synthetic oligonucleotide
  Antisense strand to SEQ ID NO: 17904
ucagugggcauaauccucu

SEQ ID NO: 17906 - RNA, 19 nt, Artificial Sequence
  Description of Artificial Sequence: Synthetic oligonucleotide
  Sense strand starting at position 1692 of SEQ ID NO: 187
uugacucuucccgacaguu

SEQ ID NO: 17907 - RNA, 19 nt, Artificial Sequence
  Description of Artificial Sequence: Synthetic oligonucleotide
  Antisense strand to SEQ ID NO: 17906
aacugucgggaagagucaa

SEQ ID NO: 17908 - RNA, 19 nt, Artificial Sequence
  Description of Artificial Sequence: Synthetic oligonucleotide
  Sense strand starting at position 1694 of SEQ ID NO: 187
gacucuucccgacaguuga

SEQ ID NO: 17909 - RNA, 19 nt, Artificial Sequence
  Description of Artificial Sequence: Synthetic oligonucleotide
  Antisense strand to SEQ ID NO: 17908
ucaacugucgggaagaguc

SEQ ID NO: 17910 - RNA, 19 nt, Artificial Sequence
  Description of Artificial Sequence: Synthetic oligonucleotide
  Sense strand starting at position 1763 of SEQ ID NO: 187
cuguguucucgucucagua

SEQ ID NO: 17911 - RNA, 19 nt, Artificial Sequence
  Description of Artificial Sequence: Synthetic oligonucleotide
  Antisense strand to SEQ ID NO: 17910
uacugagacgagaacacag

SEQ ID NO: 17912 - RNA, 19 nt, Artificial Sequence
  Description of Artificial Sequence: Synthetic oligonucleotide
  Sense strand starting at position 1764 of SEQ ID NO: 187
uguguucucgucucaguau

SEQ ID NO: 17913 - RNA, 19 nt, Artificial Sequence
  Description of Artificial Sequence: Synthetic oligonucleotide
  Antisense strand to SEQ ID NO: 17912
auacugagacgagaacaca

SEQ ID NO: 17914 - RNA, 19 nt, Artificial Sequence
  Description of Artificial Sequence: Synthetic oligonucleotide
  Sense strand starting at position 2103 of SEQ ID NO: 187
gggagaagcuuagagauuu

SEQ ID NO: 17915 - RNA, 19 nt, Artificial Sequence
  Description of Artificial Sequence: Synthetic oligonucleotide
  Antisense strand to SEQ ID NO: 17914
aaaucucuaagcuucuccc

SEQ ID NO: 17916 - RNA, 19 nt, Artificial Sequence
  Description of Artificial Sequence: Synthetic oligonucleotide
  Sense strand starting at position 2156 of SEQ ID NO: 187
aaguguagugaugagugaa

SEQ ID NO: 17917 - RNA, 19 nt, Artificial Sequence
  Description of Artificial Sequence: Synthetic oligonucleotide
  Antisense strand to SEQ ID NO: 17916
uucacucaucacuacacuu

SEQ ID NO: 17918 - RNA, 19 nt, Artificial Sequence
  Description of Artificial Sequence: Synthetic oligonucleotide
  Sense strand starting at position 2159 of SEQ ID NO: 187
uguagugaugagugaauaa

SEQ ID NO: 17919 - RNA, 19 nt, Artificial Sequence
  Description of Artificial Sequence: Synthetic oligonucleotide
  Antisense strand to SEQ ID NO: 17918
uuauucacucaucacuaca

SEQ ID NO: 17920 - RNA, 19 nt, Artificial Sequence
  Description of Artificial Sequence: Synthetic oligonucleotide
  Sense strand starting at position 2191 of SEQ ID NO: 187
ugauuaugaaaugguuaug

SEQ ID NO: 17921 - RNA, 19 nt, Artificial Sequence
  Description of Artificial Sequence: Synthetic oligonucleotide
  Antisense strand to SEQ ID NO: 17920
cauaaccauuucauaauca

SEQ ID NO: 17922 - RNA, 19 nt, Artificial Sequence
  Description of Artificial Sequence: Synthetic oligonucleotide
  Sense strand starting at position 2430 of SEQ ID NO: 187
acuaauauguaguuaagac

SEQ ID NO: 17923 - RNA, 19 nt, Artificial Sequence
  Description of Artificial Sequence: Synthetic oligonucleotide
  Antisense strand to SEQ ID NO: 17922
gucuuaacuacauauuagu

SEQ ID NO: 17924 - RNA, 19 nt, Artificial Sequence
  Description of Artificial Sequence: Synthetic oligonucleotide
  Sense strand starting at position 2438 of SEQ ID NO: 187
guaguuaagaccuaugguu

SEQ ID NO: 17925 - RNA, 19 nt, Artificial Sequence
  Description of Artificial Sequence: Synthetic oligonucleotide
  Antisense strand to SEQ ID NO: 17924
aaccauaggucuuaacuac

SEQ ID NO: 17926 - RNA, 19 nt, Artificial Sequence
  Description of Artificial Sequence: Synthetic oligonucleotide
  Sense strand starting at position 2446 of SEQ ID NO: 187
gaccuaugguuucuauuga

SEQ ID NO: 17927 - RNA, 19 nt, Artificial Sequence
  Description of Artificial Sequence: Synthetic oligonucleotide
  Antisense strand to SEQ ID NO: 17926
ucaauagaaaccauagguc

SEQ ID NO: 17928 - RNA, 19 nt, Artificial Sequence
  Description of Artificial Sequence: Synthetic oligonucleotide
  Sense strand starting at position 2517 of SEQ ID NO: 187
uaaauaagcugucuuggau

SEQ ID NO: 17929 - RNA, 19 nt, Artificial Sequence
  Description of Artificial Sequence: Synthetic oligonucleotide
  Antisense strand to SEQ ID NO: 17928
auccaagacagcuuauuua

SEQ ID NO: 17930 - RNA, 19 nt, Artificial Sequence
  Description of Artificial Sequence: Synthetic oligonucleotide
  Sense strand starting at position 2540 of SEQ ID NO: 187
uuacuaaugcaugauguga

SEQ ID NO: 17931 - RNA, 19 nt, Artificial Sequence
  Description of Artificial Sequence: Synthetic oligonucleotide
  Antisense strand to SEQ ID NO: 17930
ucacaucaugcauuaguaa

SEQ ID NO: 17932 - RNA, 19 nt, Artificial Sequence
  Description of Artificial Sequence: Synthetic oligonucleotide
  Sense strand starting at position 2991 of SEQ ID NO: 187
guccuagaaaguuauaguu

SEQ ID NO: 17933 - RNA, 19 nt, Artificial Sequence
  Description of Artificial Sequence: Synthetic oligonucleotide
  Antisense strand to SEQ ID NO: 17932
aacuauaacuuucuaggac

SEQ ID NO: 17934 - RNA, 19 nt, Artificial Sequence
  Description of Artificial Sequence: Synthetic oligonucleotide
  Sense strand starting at position 3202 of SEQ ID NO: 187
uuagaaggaucguuaaaga

SEQ ID NO: 17935 - RNA, 19 nt, Artificial Sequence
  Description of Artificial Sequence: Synthetic oligonucleotide
  Antisense strand to SEQ ID NO: 17934
ucuuuaacgauccuucuaa

SEQ ID NO: 17936 - RNA, 19 nt, Artificial Sequence
  Description of Artificial Sequence: Synthetic oligonucleotide
  Sense strand starting at position 3256 of SEQ ID NO: 187
uagacugagcuuugacuuu

SEQ ID NO: 17937 - RNA, 19 nt, Artificial Sequence
  Description of Artificial Sequence: Synthetic oligonucleotide
  Antisense strand to SEQ ID NO: 17936
aaagucaaagcucagucua

SEQ ID NO: 17938 - RNA, 19 nt, Artificial Sequence
  Description of Artificial Sequence: Synthetic oligonucleotide
  Sense strand starting at position 3276 of SEQ ID NO: 187
ccuaguuaaguuugaagga

SEQ ID NO: 17939 - RNA, 19 nt, Artificial Sequence
  Description of Artificial Sequence: Synthetic oligonucleotide
  Antisense strand to SEQ ID NO: 17938
uccuucaaacuuaacuagg

SEQ ID NO: 17940 - RNA, 19 nt, Artificial Sequence
  Description of Artificial Sequence: Synthetic oligonucleotide
  Sense strand starting at position 3374 of SEQ ID NO: 187
uuaguuuacuaguuaacag

SEQ ID NO: 17941 - RNA, 19 nt, Artificial Sequence
  Description of Artificial Sequence: Synthetic oligonucleotide
  Antisense strand to SEQ ID NO: 17940
cuguuaacuaguaaacuaa

SEQ ID NO: 17942 - RNA, 19 nt, Artificial Sequence
  Description of Artificial Sequence: Synthetic oligonucleotide
  Sense strand starting at position 3383 of SEQ ID NO: 187
uaguuaacagaguaaugcu

SEQ ID NO: 17943 - RNA, 19 nt, Artificial Sequence
  Description of Artificial Sequence: Synthetic oligonucleotide
  Antisense strand to SEQ ID NO: 17942
agcauuacucuguuaacua

SEQ ID NO: 17944 - RNA, 19 nt, Artificial Sequence
  Description of Artificial Sequence: Synthetic oligonucleotide
  Sense strand starting at position 3470 of SEQ ID NO: 187
aucagugauucuuuacaua

SEQ ID NO: 17945 - RNA, 19 nt, Artificial Sequence
  Description of Artificial Sequence: Synthetic oligonucleotide
  Antisense strand to SEQ ID NO: 17944
uauguaaagaaucacugau

SEQ ID NO: 17946 - RNA, 19 nt, Artificial Sequence
  Description of Artificial Sequence: Synthetic oligonucleotide
  Sense strand starting at position 3489 of SEQ ID NO: 187
ggauuugacuaugaagcua

SEQ ID NO: 17947 - RNA, 19 nt, Artificial Sequence
  Description of Artificial Sequence: Synthetic oligonucleotide
  Antisense strand to SEQ ID NO: 17946
uagcuucauagucaaaucc

SEQ ID NO: 17948 - RNA, 19 nt, Artificial Sequence
  Description of Artificial Sequence: Synthetic oligonucleotide
  Sense strand starting at position 3543 of SEQ ID NO: 187
ucagauugcgugcuaagcu

SEQ ID NO: 17949 - RNA, 19 nt, Artificial Sequence
  Description of Artificial Sequence: Synthetic oligonucleotide
  Antisense strand to SEQ ID NO: 17948
agcuuagcacgcaaucuga

SEQ ID NO: 17950 - RNA, 19 nt, Artificial Sequence
  Description of Artificial Sequence: Synthetic oligonucleotide
  Sense strand starting at position 3806 of SEQ ID NO: 187
auggcacugcuagagaaau

SEQ ID NO: 17951 - RNA, 19 nt, Artificial Sequence
  Description of Artificial Sequence: Synthetic oligonucleotide
  Antisense strand to SEQ ID NO: 17950
auuucucuagcagugccau

SEQ ID NO: 17952 - RNA, 19 nt, Artificial Sequence
  Description of Artificial Sequence: Synthetic oligonucleotide
  Sense strand starting at position 3856 of SEQ ID NO: 187
gcagcauacccaggaauca

SEQ ID NO: 17953 - RNA, 19 nt, Artificial Sequence
  Description of Artificial Sequence: Synthetic oligonucleotide
  Antisense strand to SEQ ID NO: 17952
ugauuccuggguaugcugc

SEQ ID NO: 17954 - RNA, 19 nt, Artificial Sequence
  Description of Artificial Sequence: Synthetic oligonucleotide
  Sense strand starting at position 3920 of SEQ ID NO: 187
gguacauauugauuaacua

SEQ ID NO: 17955 - RNA, 19 nt, Artificial Sequence
  Description of Artificial Sequence: Synthetic oligonucleotide
  Antisense strand to SEQ ID NO: 17954
uaguuaaucaauauguacc

SEQ ID NO: 17956 - RNA, 19 nt, Artificial Sequence
  Description of Artificial Sequence: Synthetic oligonucleotide
  Sense strand starting at position 3937 of SEQ ID NO: 188
guuuaauauuacccagggu

SEQ ID NO: 17957 - RNA, 19 nt, Artificial Sequence
  Description of Artificial Sequence: Synthetic oligonucleotide
  Antisense strand to SEQ ID NO: 17956
acccuggguaauauuaaac

SEQ ID NO: 17958 - RNA, 19 nt, Artificial Sequence
  Description of Artificial Sequence: Synthetic oligonucleotide
  Sense strand starting at position 3387 of SEQ ID NO: 188
gguucuuauccaggacucu

SEQ ID NO: 17959 - RNA, 19 nt, Artificial Sequence
  Description of Artificial Sequence: Synthetic oligonucleotide
  Antisense strand to SEQ ID NO: 17958
agaguccuggauaagaacc

SEQ ID NO: 17960 - RNA, 19 nt, Artificial Sequence
  Description of Artificial Sequence: Synthetic oligonucleotide
  Sense strand starting at position 3380 of SEQ ID NO: 188
gugucuugguucuuaucca

SEQ ID NO: 17961 - RNA, 19 nt, Artificial Sequence
  Description of Artificial Sequence: Synthetic oligonucleotide
  Antisense strand to SEQ ID NO: 17960
uggauaagaaccaagacac

SEQ ID NO: 17962 - RNA, 19 nt, Artificial Sequence
  Description of Artificial Sequence: Synthetic oligonucleotide
  Sense strand starting at position 3376 of SEQ ID NO: 188
ggaggugucuugguucuua

SEQ ID NO: 17963 - RNA, 19 nt, Artificial Sequence
  Description of Artificial Sequence: Synthetic oligonucleotide
  Antisense strand to SEQ ID NO: 17962
uaagaaccaagacaccucc

SEQ ID NO: 17964 - RNA, 19 nt, Artificial Sequence
  Description of Artificial Sequence: Synthetic oligonucleotide
  Sense strand starting at position 3313 of SEQ ID NO: 188
aguacagucucuuugcaca

SEQ ID NO: 17965 - RNA, 19 nt, Artificial Sequence
  Description of Artificial Sequence: Synthetic oligonucleotide
  Antisense strand to SEQ ID NO: 17964
ugugcaaagagacuguacu

SEQ ID NO: 17966 - RNA, 19 nt, Artificial Sequence
  Description of Artificial Sequence: Synthetic oligonucleotide
  Sense strand starting at position 3258 of SEQ ID NO: 188
guaacucaucaagauaugu

SEQ ID NO: 17967 - RNA, 19 nt, Artificial Sequence
  Description of Artificial Sequence: Synthetic oligonucleotide
  Antisense strand to SEQ ID NO: 17966
acauaucuugaugaguuac

SEQ ID NO: 17968 - RNA, 19 nt, Artificial Sequence
  Description of Artificial Sequence: Synthetic oligonucleotide
  Sense strand starting at position 3255 of SEQ ID NO: 188
cguguaacucaucaagaua

SEQ ID NO: 17969 - RNA, 19 nt, Artificial Sequence
  Description of Artificial Sequence: Synthetic oligonucleotide
  Antisense strand to SEQ ID NO: 17968
uaucuugaugaguuacacg

SEQ ID NO: 17970 - RNA, 19 nt, Artificial Sequence
  Description of Artificial Sequence: Synthetic oligonucleotide
  Sense strand starting at position 3254 of SEQ ID NO: 188
ccguguaacucaucaagau

SEQ ID NO: 17971 - RNA, 19 nt, Artificial Sequence
  Description of Artificial Sequence: Synthetic oligonucleotide
  Antisense strand to SEQ ID NO: 17970
aucuugaugaguuacacgg

SEQ ID NO: 17972 - RNA, 19 nt, Artificial Sequence
  Description of Artificial Sequence: Synthetic oligonucleotide
  Sense strand starting at position 3247 of SEQ ID NO: 188
aaguaaaccguguaacuca

SEQ ID NO: 17973 - RNA, 19 nt, Artificial Sequence
  Description of Artificial Sequence: Synthetic oligonucleotide
  Antisense strand to SEQ ID NO: 17972
ugaguuacacgguuuacuu

SEQ ID NO: 17974 - RNA, 19 nt, Artificial Sequence
  Description of Artificial Sequence: Synthetic oligonucleotide
  Sense strand starting at position 3245 of SEQ ID NO: 188
ucaaguaaaccguguaacu

SEQ ID NO: 17975 - RNA, 19 nt, Artificial Sequence
  Description of Artificial Sequence: Synthetic oligonucleotide
  Antisense strand to SEQ ID NO: 17974
aguuacacgguuuacuuga

SEQ ID NO: 17976 - RNA, 19 nt, Artificial Sequence
  Description of Artificial Sequence: Synthetic oligonucleotide
  Sense strand starting at position 3158 of SEQ ID NO: 188
gagacagggucuuaucuuu

SEQ ID NO: 17977 - RNA, 19 nt, Artificial Sequence
  Description of Artificial Sequence: Synthetic oligonucleotide
  Antisense strand to SEQ ID NO: 17976
aaagauaagacccugucuc

SEQ ID NO: 17978 - RNA, 19 nt, Artificial Sequence
  Description of Artificial Sequence: Synthetic oligonucleotide
  Sense strand starting at position 3109 of SEQ ID NO: 188
uccugauauuuauaguuac

SEQ ID NO: 17979 - RNA, 19 nt, Artificial Sequence
  Description of Artificial Sequence: Synthetic oligonucleotide
  Antisense strand to SEQ ID NO: 17978
guaacuauaaauaucagga

SEQ ID NO: 17980 - RNA, 19 nt, Artificial Sequence
  Description of Artificial Sequence: Synthetic oligonucleotide
  Sense strand starting at position 3103 of SEQ ID NO: 188
auggacuccugauauuuau

SEQ ID NO: 17981 - RNA, 19 nt, Artificial Sequence
  Description of Artificial Sequence: Synthetic oligonucleotide
  Antisense strand to SEQ ID NO: 17980
auaaauaucaggaguccau

SEQ ID NO: 17982 - RNA, 19 nt, Artificial Sequence
  Description of Artificial Sequence: Synthetic oligonucleotide
  Sense strand starting at position 3049 of SEQ ID NO: 188
cuggcacaccgugaugaau

SEQ ID NO: 17983 - RNA, 19 nt, Artificial Sequence
  Description of Artificial Sequence: Synthetic oligonucleotide
  Antisense strand to SEQ ID NO: 17982
auucaucacggugugccag

SEQ ID NO: 17984 - RNA, 19 nt, Artificial Sequence
  Description of Artificial Sequence: Synthetic oligonucleotide
  Sense strand starting at position 2959 of SEQ ID NO: 188
uugauuccuugcugggaac

SEQ ID NO: 17985 - RNA, 19 nt, Artificial Sequence
  Description of Artificial Sequence: Synthetic oligonucleotide
  Antisense strand to SEQ ID NO: 17984
guucccagcaaggaaucaa

SEQ ID NO: 17986 - RNA, 19 nt, Artificial Sequence
  Description of Artificial Sequence: Synthetic oligonucleotide
  Sense strand starting at position 2958 of SEQ ID NO: 188
guugauuccuugcugggaa

SEQ ID NO: 17987 - RNA, 19 nt, Artificial Sequence
  Description of Artificial Sequence: Synthetic oligonucleotide
  Antisense strand to SEQ ID NO: 17986
uucccagcaaggaaucaac

SEQ ID NO: 17988 - RNA, 19 nt, Artificial Sequence
  Description of Artificial Sequence: Synthetic oligonucleotide
  Sense strand starting at position 2946 of SEQ ID NO: 188
uugcaaggguguguugauu

SEQ ID NO: 17989 - RNA, 19 nt, Artificial Sequence
  Description of Artificial Sequence: Synthetic oligonucleotide
  Antisense strand to SEQ ID NO: 17988
aaucaacacacccuugcaa

SEQ ID NO: 17990 - RNA, 19 nt, Artificial Sequence
  Description of Artificial Sequence: Synthetic oligonucleotide
  Sense strand starting at position 2945 of SEQ ID NO: 188
uuugcaaggguguguugau

SEQ ID NO: 17991 - RNA, 19 nt, Artificial Sequence
  Description of Artificial Sequence: Synthetic oligonucleotide
  Antisense strand to SEQ ID NO: 17990
aucaacacacccuugcaaa

SEQ ID NO: 17992 - RNA, 19 nt, Artificial Sequence
  Description of Artificial Sequence: Synthetic oligonucleotide
  Sense strand starting at position 2907 of SEQ ID NO: 188
gaaauagcgucucugccua

SEQ ID NO: 17993 - RNA, 19 nt, Artificial Sequence
  Description of Artificial Sequence: Synthetic oligonucleotide
  Antisense strand to SEQ ID NO: 17992
uaggcagagacgcuauuuc

SEQ ID NO: 17994 - RNA, 19 nt, Artificial Sequence
  Description of Artificial Sequence: Synthetic oligonucleotide
  Sense strand starting at position 2861 of SEQ ID NO: 188
cagaaauagccucguucca

SEQ ID NO: 17995 - RNA, 19 nt, Artificial Sequence
  Description of Artificial Sequence: Synthetic oligonucleotide
  Antisense strand to SEQ ID NO: 17994
uggaacgaggcuauuucug

SEQ ID NO: 17996 - RNA, 19 nt, Artificial Sequence
  Description of Artificial Sequence: Synthetic oligonucleotide
  Sense strand starting at position 2851 of SEQ ID NO: 188
uguuaacugccagaaauag

SEQ ID NO: 17997 - RNA, 19 nt, Artificial Sequence
  Description of Artificial Sequence: Synthetic oligonucleotide
  Antisense strand to SEQ ID NO: 17996
cuauuucuggcaguuaaca

SEQ ID NO: 17998 - RNA, 19 nt, Artificial Sequence
  Description of Artificial Sequence: Synthetic oligonucleotide
  Sense strand starting at position 2849 of SEQ ID NO: 188
guuguuaacugccagaaau

SEQ ID NO: 17999 - RNA, 19 nt, Artificial Sequence
  Description of Artificial Sequence: Synthetic oligonucleotide
  Antisense strand to SEQ ID NO: 17998
auuucuggcaguuaacaac

SEQ ID NO: 18000 - RNA, 19 nt, Artificial Sequence
  Description of Artificial Sequence: Synthetic oligonucleotide
  Sense strand starting at position 2846 of SEQ ID NO: 188
uguguuguuaacugccaga

SEQ ID NO: 18001 - RNA, 19 nt, Artificial Sequence
  Description of Artificial Sequence: Synthetic oligonucleotide
  Antisense strand to SEQ ID NO: 18000
ucuggcaguuaacaacaca

SEQ ID NO: 18002 - RNA, 19 nt, Artificial Sequence
  Description of Artificial Sequence: Synthetic oligonucleotide
  Sense strand starting at position 2830 of SEQ ID NO: 188
uuagaaucuaaccgugugu

SEQ ID NO: 18003 - RNA, 19 nt, Artificial Sequence
  Description of Artificial Sequence: Synthetic oligonucleotide
  Antisense strand to SEQ ID NO: 18002
acacacgguuagauucuaa

SEQ ID NO: 18004 - RNA, 19 nt, Artificial Sequence
  Description of Artificial Sequence: Synthetic oligonucleotide
  Sense strand starting at position 2808 of SEQ ID NO: 188
uguuaugaacccuguugag

SEQ ID NO: 18005 - RNA, 19 nt, Artificial Sequence
  Description of Artificial Sequence: Synthetic oligonucleotide
  Antisense strand to SEQ ID NO: 18004
cucaacaggguucauaaca

SEQ ID NO: 18006 - RNA, 19 nt, Artificial Sequence
  Description of Artificial Sequence: Synthetic oligonucleotide
  Sense strand starting at position 2782 of SEQ ID NO: 188
gcccuugaugucuggcuca

SEQ ID NO: 18007 - RNA, 19 nt, Artificial Sequence
  Description of Artificial Sequence: Synthetic oligonucleotide
  Antisense strand to SEQ ID NO: 18006
ugagccagacaucaagggc

SEQ ID NO: 18008 - RNA, 19 nt, Artificial Sequence
  Description of Artificial Sequence: Synthetic oligonucleotide
  Sense strand starting at position 2655 of SEQ ID NO: 188
gcguuuaucggcgaggcga

SEQ ID NO: 18009 - RNA, 19 nt, Artificial Sequence
  Description of Artificial Sequence: Synthetic oligonucleotide
  Antisense strand to SEQ ID NO: 18008
ucgccucgccgauaaacgc

SEQ ID NO: 18010 - RNA, 19 nt, Artificial Sequence
  Description of Artificial Sequence: Synthetic oligonucleotide
  Sense strand starting at position 2608 of SEQ ID NO: 188
uacgaaugccaccgggaaa

SEQ ID NO: 18011 - RNA, 19 nt, Artificial Sequence
  Description of Artificial Sequence: Synthetic oligonucleotide
  Antisense strand to SEQ ID NO: 18010
uuucccgguggcauucgua

SEQ ID NO: 18012 - RNA, 19 nt, Artificial Sequence
  Description of Artificial Sequence: Synthetic oligonucleotide
  Sense strand starting at position 2152 of SEQ ID NO: 188
ccuugucauuggucaaccu

SEQ ID NO: 18013 - RNA, 19 nt, Artificial Sequence
  Description of Artificial Sequence: Synthetic oligonucleotide
  Antisense strand to SEQ ID NO: 18012
agguugaccaaugacaagg

SEQ ID NO: 18014 - RNA, 19 nt, Artificial Sequence
  Description of Artificial Sequence: Synthetic oligonucleotide
  Sense strand starting at position 2148 of SEQ ID NO: 188
gcacccuugucauugguca

SEQ ID NO: 18015 - RNA, 19 nt, Artificial Sequence
  Description of Artificial Sequence: Synthetic oligonucleotide
  Antisense strand to SEQ ID NO: 18014
ugaccaaugacaagggugc

SEQ ID NO: 18016 - RNA, 19 nt, Artificial Sequence
  Description of Artificial Sequence: Synthetic oligonucleotide
  Sense strand starting at position 3940 of SEQ ID NO: 191
cagucagagcccugagcaa

SEQ ID NO: 18017 - RNA, 19 nt, Artificial Sequence
  Description of Artificial Sequence: Synthetic oligonucleotide
  Antisense strand to SEQ ID NO: 18016
uugcucagggcucugacug

SEQ ID NO: 18018 - RNA, 19 nt, Artificial Sequence
  Description of Artificial Sequence: Synthetic oligonucleotide
  Sense strand starting at position 3906 of SEQ ID NO: 191
aguagaugcugucagacaa

SEQ ID NO: 18019 - RNA, 19 nt, Artificial Sequence
  Description of Artificial Sequence: Synthetic oligonucleotide
  Antisense strand to SEQ ID NO: 18018
uugucugacagcaucuacu

SEQ ID NO: 18020 - RNA, 19 nt, Artificial Sequence
  Description of Artificial Sequence: Synthetic oligonucleotide
  Sense strand starting at position 3903 of SEQ ID NO: 191
guaaguagaugcugucaga

SEQ ID NO: 18021 - RNA, 19 nt, Artificial Sequence
  Description of Artificial Sequence: Synthetic oligonucleotide
  Antisense strand to SEQ ID NO: 18020
ucugacagcaucuacuuac

SEQ ID NO: 18022 - RNA, 19 nt, Artificial Sequence
  Description of Artificial Sequence: Synthetic oligonucleotide
  Sense strand starting at position 3769 of SEQ ID NO: 191
gaacaaggaucagaguaga

SEQ ID NO: 18023 - RNA, 19 nt, Artificial Sequence
  Description of Artificial Sequence: Synthetic oligonucleotide
  Antisense strand to SEQ ID NO: 18022
ucuacucugauccuuguuc

SEQ ID NO: 18024 - RNA, 19 nt, Artificial Sequence
  Description of Artificial Sequence: Synthetic oligonucleotide
  Sense strand starting at position 2206 of SEQ ID NO: 191
gaugcuugggccuggagau

SEQ ID NO: 18025 - RNA, 19 nt, Artificial Sequence
  Description of Artificial Sequence: Synthetic oligonucleotide
  Antisense strand to SEQ ID NO: 18024
aucuccaggcccaagcauc

SEQ ID NO: 18026 - RNA, 19 nt, Artificial Sequence
  Description of Artificial Sequence: Synthetic oligonucleotide
  Sense strand starting at position 2047 of SEQ ID NO: 191
acuggauguuuacagaauc

SEQ ID NO: 18027 - RNA, 19 nt, Artificial Sequence
  Description of Artificial Sequence: Synthetic oligonucleotide
  Antisense strand to SEQ ID NO: 18026
gauucuguaaacauccagu

SEQ ID NO: 18028 - RNA, 19 nt, Artificial Sequence
  Description of Artificial Sequence: Synthetic oligonucleotide
  Sense strand starting at position 2044 of SEQ ID NO: 191
cagacuggauguuuacaga

SEQ ID NO: 18029 - RNA, 19 nt, Artificial Sequence
  Description of Artificial Sequence: Synthetic oligonucleotide
  Antisense strand to SEQ ID NO: 18028
ucuguaaacauccagucug

SEQ ID NO: 18030 - RNA, 19 nt, Artificial Sequence
  Description of Artificial Sequence: Synthetic oligonucleotide
  Sense strand starting at position 1872 of SEQ ID NO: 191
acggaauacugugcaccua

SEQ ID NO: 18031 - RNA, 19 nt, Artificial Sequence
  Description of Artificial Sequence: Synthetic oligonucleotide
  Antisense strand to SEQ ID NO: 18030
uaggugcacaguauuccgu

SEQ ID NO: 18032 - RNA, 19 nt, Artificial Sequence
  Description of Artificial Sequence: Synthetic oligonucleotide
  Sense strand starting at position 1764 of SEQ ID NO: 191
agacauguuuaccuauaga

SEQ ID NO: 18033 - RNA, 19 nt, Artificial Sequence
  Description of Artificial Sequence: Synthetic oligonucleotide
  Antisense strand to SEQ ID NO: 18032
ucuauagguaaacaugucu

SEQ ID NO: 18034 - RNA, 19 nt, Artificial Sequence
  Description of Artificial Sequence: Synthetic oligonucleotide
  Sense strand starting at position 1763 of SEQ ID NO: 191
gagacauguuuaccuauag

SEQ ID NO: 18035 - RNA, 19 nt, Artificial Sequence
  Description of Artificial Sequence: Synthetic oligonucleotide
  Antisense strand to SEQ ID NO: 18034
cuauagguaaacaugucuc

SEQ ID NO: 18036 - RNA, 19 nt, Artificial Sequence
  Description of Artificial Sequence: Synthetic oligonucleotide
  Sense strand starting at position 1742 of SEQ ID NO: 191
acugguuuguaccuaagca

SEQ ID NO: 18037 - RNA, 19 nt, Artificial Sequence
  Description of Artificial Sequence: Synthetic oligonucleotide
  Antisense strand to SEQ ID NO: 18036
ugcuuagguacaaaccagu

SEQ ID NO: 18038 - RNA, 19 nt, Artificial Sequence
  Description of Artificial Sequence: Synthetic oligonucleotide
  Sense strand starting at position 1703 of SEQ ID NO: 191
acgcauucccaggaacaca

SEQ ID NO: 18039 - RNA, 19 nt, Artificial Sequence
  Description of Artificial Sequence: Synthetic oligonucleotide
  Antisense strand to SEQ ID NO: 18038
uguguuccugggaaugcgu

SEQ ID NO: 18040 - RNA, 19 nt, Artificial Sequence
  Description of Artificial Sequence: Synthetic oligonucleotide
  Sense strand starting at position 845 of SEQ ID NO: 191
gggcauuggccagaaucca

SEQ ID NO: 18041 - RNA, 19 nt, Artificial Sequence
  Description of Artificial Sequence: Synthetic oligonucleotide
  Antisense strand to SEQ ID NO: 18040
uggauucuggccaaugccc

SEQ ID NO: 18042 - RNA, 19 nt, Artificial Sequence
  Description of Artificial Sequence: Synthetic oligonucleotide
  Sense strand starting at position 824 of SEQ ID NO: 191
acaggacagugucaggaau

SEQ ID NO: 18043 - RNA, 19 nt, Artificial Sequence
  Description of Artificial Sequence: Synthetic oligonucleotide
  Antisense strand to SEQ ID NO: 18042
auuccugacacuguccugu

SEQ ID NO: 18044 - RNA, 19 nt, Artificial Sequence
  Description of Artificial Sequence: Synthetic oligonucleotide
  Sense strand starting at position 578 of SEQ ID NO: 191
gcaccugguugaugacaua

SEQ ID NO: 18045 - RNA, 19 nt, Artificial Sequence
  Description of Artificial Sequence: Synthetic oligonucleotide
  Antisense strand to SEQ ID NO: 18044
uaugucaucaaccaggugc

SEQ ID NO: 18046 - RNA, 19 nt, Artificial Sequence
  Description of Artificial Sequence: Synthetic oligonucleotide
  Sense strand starting at position 403 of SEQ ID NO: 191
cagugugcaugccaacauu

SEQ ID NO: 18047 - RNA, 19 nt, Artificial Sequence
  Description of Artificial Sequence: Synthetic oligonucleotide
  Antisense strand to SEQ ID NO: 18046
aauguuggcaugcacacug

SEQ ID NO: 18048 - RNA, 19 nt, Artificial Sequence
  Description of Artificial Sequence: Synthetic oligonucleotide
  Sense strand starting at position 185 of SEQ ID NO: 191
uuaagaugcugagcugagu

SEQ ID NO: 18049 - RNA, 19 nt, Artificial Sequence
  Description of Artificial Sequence: Synthetic oligonucleotide
  Antisense strand to SEQ ID NO: 18048
acucagcucagcaucuuaa

SEQ ID NO: 18050 - RNA, 19 nt, Artificial Sequence
  Description of Artificial Sequence: Synthetic oligonucleotide
  Sense strand starting at position 48 of SEQ ID NO: 191
ccacuugugucccaucaua

SEQ ID NO: 18051 - RNA, 19 nt, Artificial Sequence
  Description of Artificial Sequence: Synthetic oligonucleotide
  Antisense strand to SEQ ID NO: 18050
uaugaugggacacaagugg

SEQ ID NO: 18052 - RNA, 19 nt, Artificial Sequence
  Description of Artificial Sequence: Synthetic oligonucleotide
  Sense strand starting at position 2782 of SEQ ID NO: 190
aagcucugugcagaucaga

SEQ ID NO: 18053 - RNA, 19 nt, Artificial Sequence
  Description of Artificial Sequence: Synthetic oligonucleotide
  Antisense strand to SEQ ID NO: 18052
ucugaucugcacagagcuu

SEQ ID NO: 18054 - RNA, 19 nt, Artificial Sequence
  Description of Artificial Sequence: Synthetic oligonucleotide
  Sense strand starting at position 2780 of SEQ ID NO: 190
gcaagcucugugcagauca

SEQ ID NO: 18055 - RNA, 19 nt, Artificial Sequence
  Description of Artificial Sequence: Synthetic oligonucleotide
  Antisense strand to SEQ ID NO: 18054
ugaucugcacagagcuugc

SEQ ID NO: 18056 - RNA, 19 nt, Artificial Sequence
  Description of Artificial Sequence: Synthetic oligonucleotide
  Sense strand starting at position 2778 of SEQ ID NO: 190
gagcaagcucugugcagau

SEQ ID NO: 18057 - RNA, 19 nt, Artificial Sequence
  Description of Artificial Sequence: Synthetic oligonucleotide
  Antisense strand to SEQ ID NO: 18056
aucugcacagagcuugcuc

SEQ ID NO: 18058 - RNA, 19 nt, Artificial Sequence
  Description of Artificial Sequence: Synthetic oligonucleotide
  Sense strand starting at position 2777 of SEQ ID NO: 190
ggagcaagcucugugcaga

SEQ ID NO: 18059 - RNA, 19 nt, Artificial Sequence
  Description of Artificial Sequence: Synthetic oligonucleotide
  Antisense strand to SEQ ID NO: 18058
ucugcacagagcuugcucc

SEQ ID NO: 18060 - RNA, 19 nt, Artificial Sequence
  Description of Artificial Sequence: Synthetic oligonucleotide
  Sense strand starting at position 2637 of SEQ ID NO: 190
cagucagagcccugagcaa

SEQ ID NO: 18061 - RNA, 19 nt, Artificial Sequence
  Description of Artificial Sequence: Synthetic oligonucleotide
  Antisense strand to SEQ ID NO: 18060
uugcucagggcucugacug

SEQ ID NO: 18062 - RNA, 19 nt, Artificial Sequence
  Description of Artificial Sequence: Synthetic oligonucleotide
  Sense strand starting at position 2603 of SEQ ID NO: 190
aguagaugcugucagacaa

SEQ ID NO: 18063 - RNA, 19 nt, Artificial Sequence
  Description of Artificial Sequence: Synthetic oligonucleotide
  Antisense strand to SEQ ID NO: 18062
uugucugacagcaucuacu

SEQ ID NO: 18064 - RNA, 19 nt, Artificial Sequence
  Description of Artificial Sequence: Synthetic oligonucleotide
  Sense strand starting at position 2600 of SEQ ID NO: 190
guaaguagaugcugucaga

SEQ ID NO: 18065 - RNA, 19 nt, Artificial Sequence
  Description of Artificial Sequence: Synthetic oligonucleotide
  Antisense strand to SEQ ID NO: 18064
ucugacagcaucuacuuac

SEQ ID NO: 18066 - RNA, 19 nt, Artificial Sequence
  Description of Artificial Sequence: Synthetic oligonucleotide
  Sense strand starting at position 2466 of SEQ ID NO: 190
gaacaaggaucagaguaga

SEQ ID NO: 18067 - RNA, 19 nt, Artificial Sequence
  Description of Artificial Sequence: Synthetic oligonucleotide
  Antisense strand to SEQ ID NO: 18066
ucuacucugauccuuguuc

SEQ ID NO: 18068 - RNA, 19 nt, Artificial Sequence
  Description of Artificial Sequence: Synthetic oligonucleotide
  Sense strand starting at position 903 of SEQ ID NO: 190
gaugcuugggccuggagau

SEQ ID NO: 18069 - RNA, 19 nt, Artificial Sequence
  Description of Artificial Sequence: Synthetic oligonucleotide
  Antisense strand to SEQ ID NO: 18068
aucuccaggcccaagcauc

SEQ ID NO: 18070 - RNA, 19 nt, Artificial Sequence
  Description of Artificial Sequence: Synthetic oligonucleotide
  Sense strand starting at position 744 of SEQ ID NO: 190
acuggauguuuacagaauc

SEQ ID NO: 18071 - RNA, 19 nt, Artificial Sequence
  Description of Artificial Sequence: Synthetic oligonucleotide
  Antisense strand to SEQ ID NO: 18070
gauucuguaaacauccagu

SEQ ID NO: 18072 - RNA, 19 nt, Artificial Sequence
  Description of Artificial Sequence: Synthetic oligonucleotide
  Sense strand starting at position 741 of SEQ ID NO: 190
cagacuggauguuuacaga

SEQ ID NO: 18073 - RNA, 19 nt, Artificial Sequence
  Description of Artificial Sequence: Synthetic oligonucleotide
  Antisense strand to SEQ ID NO: 18072
ucuguaaacauccagucug

SEQ ID NO: 18074 - RNA, 19 nt, Artificial Sequence
  Description of Artificial Sequence: Synthetic oligonucleotide
  Sense strand starting at position 569 of SEQ ID NO: 190
acggaauacugugcaccua

SEQ ID NO: 18075 - RNA, 19 nt, Artificial Sequence
  Description of Artificial Sequence: Synthetic oligonucleotide
  Antisense strand to SEQ ID NO: 18074
uaggugcacaguauuccgu

SEQ ID NO: 18076 - RNA, 19 nt, Artificial Sequence
  Description of Artificial Sequence: Synthetic oligonucleotide
  Sense strand starting at position 461 of SEQ ID NO: 190
agacauguuuaccuauaga

SEQ ID NO: 18077 - RNA, 19 nt, Artificial Sequence
  Description of Artificial Sequence: Synthetic oligonucleotide
  Antisense strand to SEQ ID NO: 18076
ucuauagguaaacaugucu

SEQ ID NO: 18078 - RNA, 19 nt, Artificial Sequence
  Description of Artificial Sequence: Synthetic oligonucleotide
  Sense strand starting at position 460 of SEQ ID NO: 190
gagacauguuuaccuauag

SEQ ID NO: 18079 - RNA, 19 nt, Artificial Sequence
  Description of Artificial Sequence: Synthetic oligonucleotide
  Antisense strand to SEQ ID NO: 18078
cuauagguaaacaugucuc

SEQ ID NO: 18080 - RNA, 19 nt, Artificial Sequence
  Description of Artificial Sequence: Synthetic oligonucleotide
  Sense strand starting at position 439 of SEQ ID NO: 190
acugguuuguaccuaagca

SEQ ID NO: 18081 - RNA, 19 nt, Artificial Sequence
  Description of Artificial Sequence: Synthetic oligonucleotide
  Antisense strand to SEQ ID NO: 18080
ugcuuagguacaaaccagu

SEQ ID NO: 18082 - RNA, 19 nt, Artificial Sequence
  Description of Artificial Sequence: Synthetic oligonucleotide
  Sense strand starting at position 400 of SEQ ID NO: 190
acgcauucccaggaacaca

SEQ ID NO: 18083 - RNA, 19 nt, Artificial Sequence
  Description of Artificial Sequence: Synthetic oligonucleotide
  Antisense strand to SEQ ID NO: 18082
uguguuccugggaaugcgu

SEQ ID NO: 18084 - RNA, 19 nt, Artificial Sequence
  Description of Artificial Sequence: Synthetic oligonucleotide
  Sense strand starting at position 3516 of SEQ ID NO: 189
aagcucugugcagaucaga

SEQ ID NO: 18085 - RNA, 19 nt, Artificial Sequence
  Description of Artificial Sequence: Synthetic oligonucleotide
  Antisense strand to SEQ ID NO: 18084
ucugaucugcacagagcuu

SEQ ID NO: 18086 - RNA, 19 nt, Artificial Sequence
  Description of Artificial Sequence: Synthetic oligonucleotide
  Sense strand starting at position 3514 of SEQ ID NO: 189
gcaagcucugugcagauca

SEQ ID NO: 18087 - RNA, 19 nt, Artificial Sequence
  Description of Artificial Sequence: Synthetic oligonucleotide
  Antisense strand to SEQ ID NO: 18086
ugaucugcacagagcuugc

SEQ ID NO: 18088 - RNA, 19 nt, Artificial Sequence
  Description of Artificial Sequence: Synthetic oligonucleotide
  Sense strand starting at position 3512 of SEQ ID NO: 189
gagcaagcucugugcagau

SEQ ID NO: 18089 - RNA, 19 nt, Artificial Sequence
  Description of Artificial Sequence: Synthetic oligonucleotide
  Antisense strand to SEQ ID NO: 18088
aucugcacagagcuugcuc

SEQ ID NO: 18090 - RNA, 19 nt, Artificial Sequence
  Description of Artificial Sequence: Synthetic oligonucleotide
  Sense strand starting at position 3511 of SEQ ID NO: 189
ggagcaagcucugugcaga

SEQ ID NO: 18091 - RNA, 19 nt, Artificial Sequence
  Description of Artificial Sequence: Synthetic oligonucleotide
  Antisense strand to SEQ ID NO: 18090
ucugcacagagcuugcucc

SEQ ID NO: 18092 - RNA, 19 nt, Artificial Sequence
  Description of Artificial Sequence: Synthetic oligonucleotide
  Sense strand starting at position 3371 of SEQ ID NO: 189
cagucagagcccugagcaa

SEQ ID NO: 18093 - RNA, 19 nt, Artificial Sequence
  Description of Artificial Sequence: Synthetic oligonucleotide
  Antisense strand to SEQ ID NO: 18092
uugcucagggcucugacug

SEQ ID NO: 18094 - RNA, 19 nt, Artificial Sequence
  Description of Artificial Sequence: Synthetic oligonucleotide
  Sense strand starting at position 3337 of SEQ ID NO: 189
aguagaugcugucagacaa

SEQ ID NO: 18095 - RNA, 19 nt, Artificial Sequence
  Description of Artificial Sequence: Synthetic oligonucleotide
  Antisense strand to SEQ ID NO: 18094
uugucugacagcaucuacu

SEQ ID NO: 18096 - RNA, 19 nt, Artificial Sequence
  Description of Artificial Sequence: Synthetic oligonucleotide
  Sense strand starting at position 3334 of SEQ ID NO: 189
guaaguagaugcugucaga

SEQ ID NO: 18097 - RNA, 19 nt, Artificial Sequence
  Description of Artificial Sequence: Synthetic oligonucleotide
  Antisense strand to SEQ ID NO: 18096
ucugacagcaucuacuuac

SEQ ID NO: 18098 - RNA, 19 nt, Artificial Sequence
  Description of Artificial Sequence: Synthetic oligonucleotide
  Sense strand starting at position 3200 of SEQ ID NO: 189
gaacaaggaucagaguaga

SEQ ID NO: 18099 - RNA, 19 nt, Artificial Sequence
  Description of Artificial Sequence: Synthetic oligonucleotide
  Antisense strand to SEQ ID NO: 18098
ucuacucugauccuuguuc

SEQ ID NO: 18100 - RNA, 19 nt, Artificial Sequence
  Description of Artificial Sequence: Synthetic oligonucleotide
  Sense strand starting at position 1637 of SEQ ID NO: 189
gaugcuugggccuggagau

SEQ ID NO: 18101 - RNA, 19 nt, Artificial Sequence
  Description of Artificial Sequence: Synthetic oligonucleotide
  Antisense strand to SEQ ID NO: 18100
aucuccaggcccaagcauc

SEQ ID NO: 18102 - RNA, 19 nt, Artificial Sequence
  Description of Artificial Sequence: Synthetic oligonucleotide
  Sense strand starting at position 1478 of SEQ ID NO: 189
acuggauguuuacagaauc

SEQ ID NO: 18103 - RNA, 19 nt, Artificial Sequence
  Description of Artificial Sequence: Synthetic oligonucleotide
  Antisense strand to SEQ ID NO: 18102
gauucuguaaacauccagu

SEQ ID NO: 18104 - RNA, 19 nt, Artificial Sequence
  Description of Artificial Sequence: Synthetic oligonucleotide
  Sense strand starting at position 1475 of SEQ ID NO: 189
cagacuggauguuuacaga

SEQ ID NO: 18105 - RNA, 19 nt, Artificial Sequence
  Description of Artificial Sequence: Synthetic oligonucleotide
  Antisense strand to SEQ ID NO: 18104
ucuguaaacauccagucug

SEQ ID NO: 18106 - RNA, 19 nt, Artificial Sequence
  Description of Artificial Sequence: Synthetic oligonucleotide
  Sense strand starting at position 1303 of SEQ ID NO: 189
acggaauacugugcaccua

SEQ ID NO: 18107 - RNA, 19 nt, Artificial Sequence
  Description of Artificial Sequence: Synthetic oligonucleotide
  Antisense strand to SEQ ID NO: 18106
uaggugcacaguauuccgu

SEQ ID NO: 18108 - RNA, 19 nt, Artificial Sequence
  Description of Artificial Sequence: Synthetic oligonucleotide
  Sense strand starting at position 1195 of SEQ ID NO: 189
agacauguuuaccuauaga

SEQ ID NO: 18109 - RNA, 19 nt, Artificial Sequence
  Description of Artificial Sequence: Synthetic oligonucleotide
  Antisense strand to SEQ ID NO: 18108
ucuauagguaaacaugucu

SEQ ID NO: 18110 - RNA, 19 nt, Artificial Sequence
  Description of Artificial Sequence: Synthetic oligonucleotide
  Sense strand starting at position 1194 of SEQ ID NO: 189
gagacauguuuaccuauag

SEQ ID NO: 18111 - RNA, 19 nt, Artificial Sequence
  Description of Artificial Sequence: Synthetic oligonucleotide
  Antisense strand to SEQ ID NO: 18110
cuauagguaaacaugucuc

SEQ ID NO: 18112 - RNA, 19 nt, Artificial Sequence
  Description of Artificial Sequence: Synthetic oligonucleotide
  Sense strand starting at position 1173 of SEQ ID NO: 189
acugguuuguaccuaagca

SEQ ID NO: 18113 - RNA, 19 nt, Artificial Sequence
  Description of Artificial Sequence: Synthetic oligonucleotide
  Antisense strand to SEQ ID NO: 18112
ugcuuagguacaaaccagu

SEQ ID NO: 18114 - RNA, 19 nt, Artificial Sequence
  Description of Artificial Sequence: Synthetic oligonucleotide
  Sense strand starting at position 1134 of SEQ ID NO: 189
acgcauucccaggaacaca

SEQ ID NO: 18115 - RNA, 19 nt, Artificial Sequence
  Description of Artificial Sequence: Synthetic oligonucleotide
  Antisense strand to SEQ ID NO: 18114
uguguuccugggaaugcgu

SEQ ID NO: 18116 - RNA, 19 nt, Artificial Sequence
  Description of Artificial Sequence: Synthetic oligonucleotide
  Sense strand starting at position 276 of SEQ ID NO: 189
gggcauuggccagaaucca

SEQ ID NO: 18117 - RNA, 19 nt, Artificial Sequence
  Description of Artificial Sequence: Synthetic oligonucleotide
  Antisense strand to SEQ ID NO: 18116
uggauucuggccaaugccc

SEQ ID NO: 18118 - RNA, 19 nt, Artificial Sequence
  Description of Artificial Sequence: Synthetic oligonucleotide
  Sense strand starting at position 255 of SEQ ID NO: 189
acaggacagugucaggaau

SEQ ID NO: 18119 - RNA, 19 nt, Artificial Sequence
  Description of Artificial Sequence: Synthetic oligonucleotide
  Antisense strand to SEQ ID NO: 18118
auuccugacacuguccugu

SEQ ID NO: 18120 - RNA, 19 nt, Artificial Sequence
  Description of Artificial Sequence: Synthetic oligonucleotide
  Sense strand starting at position 9 of SEQ ID NO: 189
gcaccugguugaugacaua

SEQ ID NO: 18121 - RNA, 19 nt, Artificial Sequence
  Description of Artificial Sequence: Synthetic oligonucleotide
  Antisense strand to SEQ ID NO: 18120
uaugucaucaaccaggugc

SEQ ID NO: 18122 - RNA, 19 nt, Artificial Sequence
  Description of Artificial Sequence: Synthetic oligonucleotide
  Sense strand starting at position 453 of SEQ ID NO: 192
gagauagacucaccuaggu

SEQ ID NO: 18123 - RNA, 19 nt, Artificial Sequence
  Description of Artificial Sequence: Synthetic oligonucleotide
  Antisense strand to SEQ ID NO: 18122
accuaggugagucuaucuc

SEQ ID NO: 18124 - RNA, 19 nt, Artificial Sequence
  Description of Artificial Sequence: Synthetic oligonucleotide
  Sense strand starting at position 477 of SEQ ID NO: 192
cugucuucuuagggaucau

SEQ ID NO: 18125 - RNA, 19 nt, Artificial Sequence
  Description of Artificial Sequence: Synthetic oligonucleotide
  Antisense strand to SEQ ID NO: 18124
augaucccuaagaagacag

SEQ ID NO: 18126 - RNA, 19 nt, Artificial Sequence
  Description of Artificial Sequence: Synthetic oligonucleotide
  Sense strand starting at position 478 of SEQ ID NO: 192
ugucuucuuagggaucaug

SEQ ID NO: 18127 - RNA, 19 nt, Artificial Sequence
  Description of Artificial Sequence: Synthetic oligonucleotide
  Antisense strand to SEQ ID NO: 18126
caugaucccuaagaagaca

SEQ ID NO: 18128 - RNA, 19 nt, Artificial Sequence
  Description of Artificial Sequence: Synthetic oligonucleotide
  Sense strand starting at position 760 of SEQ ID NO: 192
ccgugcuacccuggaauga

SEQ ID NO: 18129 - RNA, 19 nt, Artificial Sequence
  Description of Artificial Sequence: Synthetic oligonucleotide
  Antisense strand to SEQ ID NO: 18128
ucauuccaggguagcacgg

SEQ ID NO: 18130 - RNA, 19 nt, Artificial Sequence
  Description of Artificial Sequence: Synthetic oligonucleotide
  Sense strand starting at position 761 of SEQ ID NO: 192
cgugcuacccuggaaugau

SEQ ID NO: 18131 - RNA, 19 nt, Artificial Sequence
  Description of Artificial Sequence: Synthetic oligonucleotide
  Antisense strand to SEQ ID NO: 18130
aucauuccaggguagcacg

SEQ ID NO: 18132 - RNA, 19 nt, Artificial Sequence
  Description of Artificial Sequence: Synthetic oligonucleotide
  Sense strand starting at position 899 of SEQ ID NO: 192
uggcgacagagucaugaca

SEQ ID NO: 18133 - RNA, 19 nt, Artificial Sequence
  Description of Artificial Sequence: Synthetic oligonucleotide
  Antisense strand to SEQ ID NO: 18132
ugucaugacucugucgcca

SEQ ID NO: 18134 - RNA, 19 nt, Artificial Sequence
  Description of Artificial Sequence: Synthetic oligonucleotide
  Sense strand starting at position 1128 of SEQ ID NO: 192
gaggguuacugcugaagag

SEQ ID NO: 18135 - RNA, 19 nt, Artificial Sequence
  Description of Artificial Sequence: Synthetic oligonucleotide
  Antisense strand to SEQ ID NO: 18134
cucuucagcaguaacccuc

SEQ ID NO: 18136 - RNA, 19 nt, Artificial Sequence
  Description of Artificial Sequence: Synthetic oligonucleotide
  Sense strand starting at position 1801 of SEQ ID NO: 192
gacugaucaggaggcuagu

SEQ ID NO: 18137 - RNA, 19 nt, Artificial Sequence
  Description of Artificial Sequence: Synthetic oligonucleotide
  Antisense strand to SEQ ID NO: 18136
acuagccuccugaucaguc

SEQ ID NO: 18138 - RNA, 19 nt, Artificial Sequence
  Description of Artificial Sequence: Synthetic oligonucleotide
  Sense strand starting at position 1847 of SEQ ID NO: 192
ucguuaucaccuugugguu

SEQ ID NO: 18139 - RNA, 19 nt, Artificial Sequence
  Description of Artificial Sequence: Synthetic oligonucleotide
  Antisense strand to SEQ ID NO: 18138
aaccacaaggugauaacga

SEQ ID NO: 18140 - RNA, 19 nt, Artificial Sequence
  Description of Artificial Sequence: Synthetic oligonucleotide
  Sense strand starting at position 1910 of SEQ ID NO: 192
agugccacuuaguaucaau

SEQ ID NO: 18141 - RNA, 19 nt, Artificial Sequence
  Description of Artificial Sequence: Synthetic oligonucleotide
  Antisense strand to SEQ ID NO: 18140
auugauacuaaguggcacu

SEQ ID NO: 18142 - RNA, 19 nt, Artificial Sequence
  Description of Artificial Sequence: Synthetic oligonucleotide
  Sense strand starting at position 1923 of SEQ ID NO: 192
aucaauuguuccuuacgca

SEQ ID NO: 18143 - RNA, 19 nt, Artificial Sequence
  Description of Artificial Sequence: Synthetic oligonucleotide
  Antisense strand to SEQ ID NO: 18142
ugcguaaggaacaauugau

SEQ ID NO: 18144 - RNA, 19 nt, Artificial Sequence
  Description of Artificial Sequence: Synthetic oligonucleotide
  Sense strand starting at position 1974 of SEQ ID NO: 192
uuuguauucccguuguauc

SEQ ID NO: 18145 - RNA, 19 nt, Artificial Sequence
  Description of Artificial Sequence: Synthetic oligonucleotide
  Antisense strand to SEQ ID NO: 18144
gauacaacgggaauacaaa

SEQ ID NO: 18146 - RNA, 19 nt, Artificial Sequence
  Description of Artificial Sequence: Synthetic oligonucleotide
  Sense strand starting at position 2056 of SEQ ID NO: 192
aagacagcgucuucuuuaa

SEQ ID NO: 18147 - RNA, 19 nt, Artificial Sequence
  Description of Artificial Sequence: Synthetic oligonucleotide
  Antisense strand to SEQ ID NO: 18146
uuaaagaagacgcugucuu

SEQ ID NO: 18148 - RNA, 19 nt, Artificial Sequence
  Description of Artificial Sequence: Synthetic oligonucleotide
  Sense strand starting at position 2058 of SEQ ID NO: 192
gacagcgucuucuuuaaag

SEQ ID NO: 18149 - RNA, 19 nt, Artificial Sequence
  Description of Artificial Sequence: Synthetic oligonucleotide
  Antisense strand to SEQ ID NO: 18148
cuuuaaagaagacgcuguc

SEQ ID NO: 18150 - RNA, 19 nt, Artificial Sequence
  Description of Artificial Sequence: Synthetic oligonucleotide
  Sense strand starting at position 2060 of SEQ ID NO: 192
cagcgucuucuuuaaaguc

SEQ ID NO: 18151 - RNA, 19 nt, Artificial Sequence
  Description of Artificial Sequence: Synthetic oligonucleotide
  Antisense strand to SEQ ID NO: 18150
gacuuuaaagaagacgcug

SEQ ID NO: 18152 - RNA, 19 nt, Artificial Sequence
  Description of Artificial Sequence: Synthetic oligonucleotide
  Sense strand starting at position 2108 of SEQ ID NO: 192
aauggaugcuccguuaaca

SEQ ID NO: 18153 - RNA, 19 nt, Artificial Sequence
  Description of Artificial Sequence: Synthetic oligonucleotide
  Antisense strand to SEQ ID NO: 18152
uguuaacggagcauccauu

SEQ ID NO: 18154 - RNA, 19 nt, Artificial Sequence
  Description of Artificial Sequence: Synthetic oligonucleotide
  Sense strand starting at position 2120 of SEQ ID NO: 192
guuaacaugcaauauguuu

SEQ ID NO: 18155 - RNA, 19 nt, Artificial Sequence
  Description of Artificial Sequence: Synthetic oligonucleotide
  Antisense strand to SEQ ID NO: 18154
aaacauauugcauguuaac

SEQ ID NO: 18156 - RNA, 19 nt, Artificial Sequence
  Description of Artificial Sequence: Synthetic oligonucleotide
  Sense strand starting at position 2131 of SEQ ID NO: 192
auauguuuaccuuacgaca

SEQ ID NO: 18157 - RNA, 19 nt, Artificial Sequence
  Description of Artificial Sequence: Synthetic oligonucleotide
  Antisense strand to SEQ ID NO: 18156
ugucguaagguaaacauau

SEQ ID NO: 18158 - RNA, 19 nt, Artificial Sequence
  Description of Artificial Sequence: Synthetic oligonucleotide
  Sense strand starting at position 2133 of SEQ ID NO: 192
auguuuaccuuacgacaaa

SEQ ID NO: 18159 - RNA, 19 nt, Artificial Sequence
  Description of Artificial Sequence: Synthetic oligonucleotide
  Antisense strand to SEQ ID NO: 18158
uuugucguaagguaaacau

SEQ ID NO: 18160 - RNA, 19 nt, Artificial Sequence
  Description of Artificial Sequence: Synthetic oligonucleotide
  Sense strand starting at position 2163 of SEQ ID NO: 192
agcauauuguguuccuuag

SEQ ID NO: 18161 - RNA, 19 nt, Artificial Sequence
  Description of Artificial Sequence: Synthetic oligonucleotide
  Antisense strand to SEQ ID NO: 18160
cuaaggaacacaauaugcu

SEQ ID NO: 18162 - RNA, 19 nt, Artificial Sequence
  Description of Artificial Sequence: Synthetic oligonucleotide
  Sense strand starting at position 2167 of SEQ ID NO: 192
uauuguguuccuuagaagc

SEQ ID NO: 18163 - RNA, 19 nt, Artificial Sequence
  Description of Artificial Sequence: Synthetic oligonucleotide
  Antisense strand to SEQ ID NO: 18162
gcuucuaaggaacacaaua

SEQ ID NO: 18164 - RNA, 19 nt, Artificial Sequence
  Description of Artificial Sequence: Synthetic oligonucleotide
  Sense strand starting at position 2253 of SEQ ID NO: 192
ggucuuguguaucuuguau

SEQ ID NO: 18165 - RNA, 19 nt, Artificial Sequence
  Description of Artificial Sequence: Synthetic oligonucleotide
  Antisense strand to SEQ ID NO: 18164
auacaagauacacaagacc

SEQ ID NO: 18166 - RNA, 19 nt, Artificial Sequence
  Description of Artificial Sequence: Synthetic oligonucleotide
  Sense strand starting at position 2257 of SEQ ID NO: 192
uuguguaucuuguauggag

SEQ ID NO: 18167 - RNA, 19 nt, Artificial Sequence
  Description of Artificial Sequence: Synthetic oligonucleotide
  Antisense strand to SEQ ID NO: 18166
cuccauacaagauacacaa

SEQ ID NO: 18168 - RNA, 19 nt, Artificial Sequence
  Description of Artificial Sequence: Synthetic oligonucleotide
  Sense strand starting at position 2299 of SEQ ID NO: 192
ugauaaauaugcuggccua

SEQ ID NO: 18169 - RNA, 19 nt, Artificial Sequence
  Description of Artificial Sequence: Synthetic oligonucleotide
  Antisense strand to SEQ ID NO: 18168
uaggccagcauauuuauca

SEQ ID NO: 18170 - RNA, 19 nt, Artificial Sequence
  Description of Artificial Sequence: Synthetic oligonucleotide
  Sense strand starting at position 2360 of SEQ ID NO: 192
cccagaagugauggcuaau

SEQ ID NO: 18171 - RNA, 19 nt, Artificial Sequence
  Description of Artificial Sequence: Synthetic oligonucleotide
  Antisense strand to SEQ ID NO: 18170
auuagccaucacuucuggg

SEQ ID NO: 18172 - RNA, 19 nt, Artificial Sequence
  Description of Artificial Sequence: Synthetic oligonucleotide
  Sense strand starting at position 2366 of SEQ ID NO: 192
agugauggcuaaugggaaa

SEQ ID NO: 18173 - RNA, 19 nt, Artificial Sequence
  Description of Artificial Sequence: Synthetic oligonucleotide
  Antisense strand to SEQ ID NO: 18172
uuucccauuagccaucacu

SEQ ID NO: 18174 - RNA, 19 nt, Artificial Sequence
  Description of Artificial Sequence: Synthetic oligonucleotide
  Sense strand starting at position 2388 of SEQ ID NO: 192
gaaggacuugucuauagca

SEQ ID NO: 18175 - RNA, 19 nt, Artificial Sequence
  Description of Artificial Sequence: Synthetic oligonucleotide
  Antisense strand to SEQ ID NO: 18174
ugcuauagacaaguccuuc

SEQ ID NO: 18176 - RNA, 19 nt, Artificial Sequence
  Description of Artificial Sequence: Synthetic oligonucleotide
  Sense strand starting at position 2390 of SEQ ID NO: 192
aggacuugucuauagcaua

SEQ ID NO: 18177 - RNA, 19 nt, Artificial Sequence
  Description of Artificial Sequence: Synthetic oligonucleotide
  Antisense strand to SEQ ID NO: 18176
uaugcuauagacaaguccu

SEQ ID NO: 18178 - RNA, 19 nt, Artificial Sequence
  Description of Artificial Sequence: Synthetic oligonucleotide
  Sense strand starting at position 2459 of SEQ ID NO: 192
guagguaacugaucuguau

SEQ ID NO: 18179 - RNA, 19 nt, Artificial Sequence
  Description of Artificial Sequence: Synthetic oligonucleotide
  Antisense strand to SEQ ID NO: 18178
auacagaucaguuaccuac

SEQ ID NO: 18180 - RNA, 19 nt, Artificial Sequence
  Description of Artificial Sequence: Synthetic oligonucleotide
  Sense strand starting at position 2462 of SEQ ID NO: 192
gguaacugaucuguaugca

SEQ ID NO: 18181 - RNA, 19 nt, Artificial Sequence
  Description of Artificial Sequence: Synthetic oligonucleotide
  Antisense strand to SEQ ID NO: 18180
ugcauacagaucaguuacc

SEQ ID NO: 18182 - RNA, 19 nt, Artificial Sequence
  Description of Artificial Sequence: Synthetic oligonucleotide
  Sense strand starting at position 2463 of SEQ ID NO: 192
guaacugaucuguaugcaa

SEQ ID NO: 18183 - RNA, 19 nt, Artificial Sequence
  Description of Artificial Sequence: Synthetic oligonucleotide
  Antisense strand to SEQ ID NO: 18182
uugcauacagaucaguuac

SEQ ID NO: 18184 - RNA, 19 nt, Artificial Sequence
  Description of Artificial Sequence: Synthetic oligonucleotide
  Sense strand starting at position 2466 of SEQ ID NO: 192
acugaucuguaugcaaauu

SEQ ID NO: 18185 - RNA, 19 nt, Artificial Sequence
  Description of Artificial Sequence: Synthetic oligonucleotide
  Antisense strand to SEQ ID NO: 18184
aauuugcauacagaucagu

SEQ ID NO: 18186 - RNA, 19 nt, Artificial Sequence
  Description of Artificial Sequence: Synthetic oligonucleotide
  Sense strand starting at position 2483 of SEQ ID NO: 192
uucuauccugucugguaga

SEQ ID NO: 18187 - RNA, 19 nt, Artificial Sequence
  Description of Artificial Sequence: Synthetic oligonucleotide
  Antisense strand to SEQ ID NO: 18186
ucuaccagacaggauagaa

SEQ ID NO: 18188 - RNA, 19 nt, Artificial Sequence
  Description of Artificial Sequence: Synthetic oligonucleotide
  Sense strand starting at position 2486 of SEQ ID NO: 192
uauccugucugguagaggu

SEQ ID NO: 18189 - RNA, 19 nt, Artificial Sequence
  Description of Artificial Sequence: Synthetic oligonucleotide
  Antisense strand to SEQ ID NO: 18188
accucuaccagacaggaua

SEQ ID NO: 18190 - RNA, 19 nt, Artificial Sequence
  Description of Artificial Sequence: Synthetic oligonucleotide
  Sense strand starting at position 2588 of SEQ ID NO: 192
ccauaaauauguccguucu

SEQ ID NO: 18191 - RNA, 19 nt, Artificial Sequence
  Description of Artificial Sequence: Synthetic oligonucleotide
  Antisense strand to SEQ ID NO: 18190
agaacggacauauuuaugg

SEQ ID NO: 18192 - RNA, 19 nt, Artificial Sequence
  Description of Artificial Sequence: Synthetic oligonucleotide
  Sense strand starting at position 2594 of SEQ ID NO: 192
auauguccguucucuagau

SEQ ID NO: 18193 - RNA, 19 nt, Artificial Sequence
  Description of Artificial Sequence: Synthetic oligonucleotide
  Antisense strand to SEQ ID NO: 18192
aucuagagaacggacauau

SEQ ID NO: 18194 - RNA, 19 nt, Artificial Sequence
  Description of Artificial Sequence: Synthetic oligonucleotide
  Sense strand starting at position 2595 of SEQ ID NO: 192
uauguccguucucuagauu

SEQ ID NO: 18195 - RNA, 19 nt, Artificial Sequence
  Description of Artificial Sequence: Synthetic oligonucleotide
  Antisense strand to SEQ ID NO: 18194
aaucuagagaacggacaua

SEQ ID NO: 18196 - RNA, 19 nt, Artificial Sequence
  Description of Artificial Sequence: Synthetic oligonucleotide
  Sense strand starting at position 3909 of SEQ ID NO: 192
caagucaguuuagggauaa

SEQ ID NO: 18197 - RNA, 19 nt, Artificial Sequence
  Description of Artificial Sequence: Synthetic oligonucleotide
  Antisense strand to SEQ ID NO: 18196
uuaucccuaaacugacuug

SEQ ID NO: 18198 - RNA, 19 nt, Artificial Sequence
  Description of Artificial Sequence: Synthetic oligonucleotide
  Sense strand starting at position 3910 of SEQ ID NO: 192
aagucaguuuagggauaau

SEQ ID NO: 18199 - RNA, 19 nt, Artificial Sequence
  Description of Artificial Sequence: Synthetic oligonucleotide
  Antisense strand to SEQ ID NO: 18198
auuaucccuaaacugacuu

SEQ ID NO: 18200 - RNA, 19 nt, Artificial Sequence
  Description of Artificial Sequence: Synthetic oligonucleotide
  Sense strand starting at position 3949 of SEQ ID NO: 192
cuugauagcugaucuaucu

SEQ ID NO: 18201 - RNA, 19 nt, Artificial Sequence
  Description of Artificial Sequence: Synthetic oligonucleotide
  Antisense strand to SEQ ID NO: 18200
agauagaucagcuaucaag

SEQ ID NO: 18202 - RNA, 19 nt, Artificial Sequence
  Description of Artificial Sequence: Synthetic oligonucleotide
  Sense strand starting at position 102 of SEQ ID NO: 193
uuugaagagugauacagaa

SEQ ID NO: 18203 - RNA, 19 nt, Artificial Sequence
  Description of Artificial Sequence: Synthetic oligonucleotide
  Antisense strand to SEQ ID NO: 18202
uucuguaucacucuucaaa

SEQ ID NO: 18204 - RNA, 19 nt, Artificial Sequence
  Description of Artificial Sequence: Synthetic oligonucleotide
  Sense strand starting at position 178 of SEQ ID NO: 193
cucucaaucuugguccaga

SEQ ID NO: 18205 - RNA, 19 nt, Artificial Sequence
  Description of Artificial Sequence: Synthetic oligonucleotide
  Antisense strand to SEQ ID NO: 18204
ucuggaccaagauugagag

SEQ ID NO: 18206 - RNA, 19 nt, Artificial Sequence
  Description of Artificial Sequence: Synthetic oligonucleotide
  Sense strand starting at position 232 of SEQ ID NO: 193
ggacauauccugcgcagag

SEQ ID NO: 18207 - RNA, 19 nt, Artificial Sequence
  Description of Artificial Sequence: Synthetic oligonucleotide
  Antisense strand to SEQ ID NO: 18206
cucugcgcaggauaugucc

SEQ ID NO: 18208 - RNA, 19 nt, Artificial Sequence
  Description of Artificial Sequence: Synthetic oligonucleotide
  Sense strand starting at position 233 of SEQ ID NO: 193
gacauauccugcgcagagu

SEQ ID NO: 18209 - RNA, 19 nt, Artificial Sequence
  Description of Artificial Sequence: Synthetic oligonucleotide
  Antisense strand to SEQ ID NO: 18208
acucugcgcaggauauguc

SEQ ID NO: 18210 - RNA, 19 nt, Artificial Sequence
  Description of Artificial Sequence: Synthetic oligonucleotide
  Sense strand starting at position 382 of SEQ ID NO: 193
cccucaccucaugggaaau

SEQ ID NO: 18211 - RNA, 19 nt, Artificial Sequence
  Description of Artificial Sequence: Synthetic oligonucleotide
  Antisense strand to SEQ ID NO: 18210
auuucccaugaggugaggg

SEQ ID NO: 18212 - RNA, 19 nt, Artificial Sequence
  Description of Artificial Sequence: Synthetic oligonucleotide
  Sense strand starting at position 408 of SEQ ID NO: 193
gguagaggcucucuggcaa

SEQ ID NO: 18213 - RNA, 19 nt, Artificial Sequence
  Description of Artificial Sequence: Synthetic oligonucleotide
  Antisense strand to SEQ ID NO: 18212
uugccagagagccucuacc

SEQ ID NO: 18214 - RNA, 19 nt, Artificial Sequence
  Description of Artificial Sequence: Synthetic oligonucleotide
  Sense strand starting at position 654 of SEQ ID NO: 193
gggauuucccagcgucagu

SEQ ID NO: 18215 - RNA, 19 nt, Artificial Sequence
  Description of Artificial Sequence: Synthetic oligonucleotide
  Antisense strand to SEQ ID NO: 18214
acugacgcugggaaauccc

SEQ ID NO: 18216 - RNA, 19 nt, Artificial Sequence
  Description of Artificial Sequence: Synthetic oligonucleotide
  Sense strand starting at position 1060 of SEQ ID NO: 193
auagacuccggccaaagau

SEQ ID NO: 18217 - RNA, 19 nt, Artificial Sequence
  Description of Artificial Sequence: Synthetic oligonucleotide
  Antisense strand to SEQ ID NO: 18216
aucuuuggccggagucuau

SEQ ID NO: 18218 - RNA, 19 nt, Artificial Sequence
  Description of Artificial Sequence: Synthetic oligonucleotide
  Sense strand starting at position 1417 of SEQ ID NO: 193
aguugagcugcagguuaau

SEQ ID NO: 18219 - RNA, 19 nt, Artificial Sequence
  Description of Artificial Sequence: Synthetic oligonucleotide
  Antisense strand to SEQ ID NO: 18218
auuaaccugcagcucaacu

SEQ ID NO: 18220 - RNA, 19 nt, Artificial Sequence
  Description of Artificial Sequence: Synthetic oligonucleotide
  Sense strand starting at position 1537 of SEQ ID NO: 193
gggagacuuuagcauagau

SEQ ID NO: 18221 - RNA, 19 nt, Artificial Sequence
  Description of Artificial Sequence: Synthetic oligonucleotide
  Antisense strand to SEQ ID NO: 18220
aucuaugcuaaagucuccc

SEQ ID NO: 18222 - RNA, 19 nt, Artificial Sequence
  Description of Artificial Sequence: Synthetic oligonucleotide
  Sense strand starting at position 1545 of SEQ ID NO: 193
uuagcauagauggguaaga

SEQ ID NO: 18223 - RNA, 19 nt, Artificial Sequence
  Description of Artificial Sequence: Synthetic oligonucleotide
  Antisense strand to SEQ ID NO: 18222
ucuuacccaucuaugcuaa

SEQ ID NO: 18224 - RNA, 19 nt, Artificial Sequence
  Description of Artificial Sequence: Synthetic oligonucleotide
  Sense strand starting at position 2601 of SEQ ID NO: 193
ugaagcauuugcucaccuu

SEQ ID NO: 18225 - RNA, 19 nt, Artificial Sequence
  Description of Artificial Sequence: Synthetic oligonucleotide
  Antisense strand to SEQ ID NO: 18224
aaggugagcaaaugcuuca

SEQ ID NO: 18226 - RNA, 19 nt, Artificial Sequence
  Description of Artificial Sequence: Synthetic oligonucleotide
  Sense strand starting at position 2619 of SEQ ID NO: 193
ucccaugugcauugcauau

SEQ ID NO: 18227 - RNA, 19 nt, Artificial Sequence
  Description of Artificial Sequence: Synthetic oligonucleotide
  Antisense strand to SEQ ID NO: 18226
auaugcaaugcacauggga

SEQ ID NO: 18228 - RNA, 19 nt, Artificial Sequence
  Description of Artificial Sequence: Synthetic oligonucleotide
  Sense strand starting at position 2663 of SEQ ID NO: 193
cagucaugugcgcugaacu

SEQ ID NO: 18229 - RNA, 19 nt, Artificial Sequence
  Description of Artificial Sequence: Synthetic oligonucleotide
  Antisense strand to SEQ ID NO: 18228
aguucagcgcacaugacug

SEQ ID NO: 18230 - RNA, 19 nt, Artificial Sequence
  Description of Artificial Sequence: Synthetic oligonucleotide
  Sense strand starting at position 2670 of SEQ ID NO: 193
gugcgcugaacuuugcaua

SEQ ID NO: 18231 - RNA, 19 nt, Artificial Sequence
  Description of Artificial Sequence: Synthetic oligonucleotide
  Antisense strand to SEQ ID NO: 18230
uaugcaaaguucagcgcac

SEQ ID NO: 18232 - RNA, 19 nt, Artificial Sequence
  Description of Artificial Sequence: Synthetic oligonucleotide
  Sense strand starting at position 2675 of SEQ ID NO: 193
cugaacuuugcauaugcau

SEQ ID NO: 18233 - RNA, 19 nt, Artificial Sequence
  Description of Artificial Sequence: Synthetic oligonucleotide
  Antisense strand to SEQ ID NO: 18232
augcauaugcaaaguucag

SEQ ID NO: 18234 - RNA, 19 nt, Artificial Sequence
  Description of Artificial Sequence: Synthetic oligonucleotide
  Sense strand starting at position 2751 of SEQ ID NO: 193
acacaugcacgguguauua

SEQ ID NO: 18235 - RNA, 19 nt, Artificial Sequence
  Description of Artificial Sequence: Synthetic oligonucleotide
  Antisense strand to SEQ ID NO: 18234
uaauacaccgugcaugugu

SEQ ID NO: 18236 - RNA, 19 nt, Artificial Sequence
  Description of Artificial Sequence: Synthetic oligonucleotide
  Sense strand starting at position 2816 of SEQ ID NO: 193
ggauguuauauguaugcaa

SEQ ID NO: 18237 - RNA, 19 nt, Artificial Sequence
  Description of Artificial Sequence: Synthetic oligonucleotide
  Antisense strand to SEQ ID NO: 18236
uugcauacauauaacaucc

SEQ ID NO: 18238 - RNA, 19 nt, Artificial Sequence
  Description of Artificial Sequence: Synthetic oligonucleotide
  Sense strand starting at position 2819 of SEQ ID NO: 193
uguuauauguaugcaagcu

SEQ ID NO: 18239 - RNA, 19 nt, Artificial Sequence
  Description of Artificial Sequence: Synthetic oligonucleotide
  Antisense strand to SEQ ID NO: 18238
agcuugcauacauauaaca

SEQ ID NO: 18240 - RNA, 19 nt, Artificial Sequence
  Description of Artificial Sequence: Synthetic oligonucleotide
  Sense strand starting at position 2893 of SEQ ID NO: 193
uguauacugcaaugugaca

SEQ ID NO: 18241 - RNA, 19 nt, Artificial Sequence
  Description of Artificial Sequence: Synthetic oligonucleotide
  Antisense strand to SEQ ID NO: 18240
ugucacauugcaguauaca

SEQ ID NO: 18242 - RNA, 19 nt, Artificial Sequence
  Description of Artificial Sequence: Synthetic oligonucleotide
  Sense strand starting at position 2900 of SEQ ID NO: 193
ugcaaugugacauguuuga

SEQ ID NO: 18243 - RNA, 19 nt, Artificial Sequence
  Description of Artificial Sequence: Synthetic oligonucleotide
  Antisense strand to SEQ ID NO: 18242
ucaaacaugucacauugca

SEQ ID NO: 18244 - RNA, 19 nt, Artificial Sequence
  Description of Artificial Sequence: Synthetic oligonucleotide
  Sense strand starting at position 2904 of SEQ ID NO: 193
augugacauguuugaugca

SEQ ID NO: 18245 - RNA, 19 nt, Artificial Sequence
  Description of Artificial Sequence: Synthetic oligonucleotide
  Antisense strand to SEQ ID NO: 18244
ugcaucaaacaugucacau

SEQ ID NO: 18246 - RNA, 19 nt, Artificial Sequence
  Description of Artificial Sequence: Synthetic oligonucleotide
  Sense strand starting at position 2911 of SEQ ID NO: 193
auguuugaugcauacugua

SEQ ID NO: 18247 - RNA, 19 nt, Artificial Sequence
  Description of Artificial Sequence: Synthetic oligonucleotide
  Antisense strand to SEQ ID NO: 18246
uacaguaugcaucaaacau

SEQ ID NO: 18248 - RNA, 19 nt, Artificial Sequence
  Description of Artificial Sequence: Synthetic oligonucleotide
  Sense strand starting at position 3051 of SEQ ID NO: 193
uugcaucuguuuguguaga

SEQ ID NO: 18249 - RNA, 19 nt, Artificial Sequence
  Description of Artificial Sequence: Synthetic oligonucleotide
  Antisense strand to SEQ ID NO: 18248
ucuacacaaacagaugcaa

SEQ ID NO: 18250 - RNA, 19 nt, Artificial Sequence
  Description of Artificial Sequence: Synthetic oligonucleotide
  Sense strand starting at position 3053 of SEQ ID NO: 193
gcaucuguuuguguagaag

SEQ ID NO: 18251 - RNA, 19 nt, Artificial Sequence
  Description of Artificial Sequence: Synthetic oligonucleotide
  Antisense strand to SEQ ID NO: 18250
cuucuacacaaacagaugc

SEQ ID NO: 18252 - RNA, 19 nt, Artificial Sequence
  Description of Artificial Sequence: Synthetic oligonucleotide
  Sense strand starting at position 3166 of SEQ ID NO: 193
cagggagaugcccaugguu

SEQ ID NO: 18253 - RNA, 19 nt, Artificial Sequence
  Description of Artificial Sequence: Synthetic oligonucleotide
  Antisense strand to SEQ ID NO: 18252
aaccaugggcaucucccug

SEQ ID NO: 18254 - RNA, 19 nt, Artificial Sequence
  Description of Artificial Sequence: Synthetic oligonucleotide
  Sense strand starting at position 3168 of SEQ ID NO: 193
gggagaugcccaugguuca

SEQ ID NO: 18255 - RNA, 19 nt, Artificial Sequence
  Description of Artificial Sequence: Synthetic oligonucleotide
  Antisense strand to SEQ ID NO: 18254
ugaaccaugggcaucuccc

SEQ ID NO: 18256 - RNA, 19 nt, Artificial Sequence
  Description of Artificial Sequence: Synthetic oligonucleotide
  Sense strand starting at position 3216 of SEQ ID NO: 193
gcauguugccaucaguaag

SEQ ID NO: 18257 - RNA, 19 nt, Artificial Sequence
  Description of Artificial Sequence: Synthetic oligonucleotide
  Antisense strand to SEQ ID NO: 18256
cuuacugauggcaacaugc

SEQ ID NO: 18258 - RNA, 19 nt, Artificial Sequence
  Description of Artificial Sequence: Synthetic oligonucleotide
  Sense strand starting at position 3219 of SEQ ID NO: 193
uguugccaucaguaaggua

SEQ ID NO: 18259 - RNA, 19 nt, Artificial Sequence
  Description of Artificial Sequence: Synthetic oligonucleotide
  Antisense strand to SEQ ID NO: 18258
uaccuuacugauggcaaca

SEQ ID NO: 18260 - RNA, 19 nt, Artificial Sequence
  Description of Artificial Sequence: Synthetic oligonucleotide
  Sense strand starting at position 3275 of SEQ ID NO: 193
agguuaaucccauggcuuu

SEQ ID NO: 18261 - RNA, 19 nt, Artificial Sequence
  Description of Artificial Sequence: Synthetic oligonucleotide
  Antisense strand to SEQ ID NO: 18260
aaagccaugggauuaaccu

SEQ ID NO: 18262 - RNA, 19 nt, Artificial Sequence
  Description of Artificial Sequence: Synthetic oligonucleotide
  Sense strand starting at position 3285 of SEQ ID NO: 193
cauggcuuuggucagagga

SEQ ID NO: 18263 - RNA, 19 nt, Artificial Sequence
  Description of Artificial Sequence: Synthetic oligonucleotide
  Antisense strand to SEQ ID NO: 18262
uccucugaccaaagccaug

SEQ ID NO: 18264 - RNA, 19 nt, Artificial Sequence
  Description of Artificial Sequence: Synthetic oligonucleotide
  Sense strand starting at position 3318 of SEQ ID NO: 193
gcagcuuugcaauaagggu

SEQ ID NO: 18265 - RNA, 19 nt, Artificial Sequence
  Description of Artificial Sequence: Synthetic oligonucleotide
  Antisense strand to SEQ ID NO: 18264
acccuuauugcaaagcugc

SEQ ID NO: 18266 - RNA, 19 nt, Artificial Sequence
  Description of Artificial Sequence: Synthetic oligonucleotide
  Sense strand starting at position 3346 of SEQ ID NO: 193
ucagcuuugcgaugagggu

SEQ ID NO: 18267 - RNA, 19 nt, Artificial Sequence
  Description of Artificial Sequence: Synthetic oligonucleotide
  Antisense strand to SEQ ID NO: 18266
acccucaucgcaaagcuga

SEQ ID NO: 18268 - RNA, 19 nt, Artificial Sequence
  Description of Artificial Sequence: Synthetic oligonucleotide
  Sense strand starting at position 3612 of SEQ ID NO: 193
gacauuuguugugagugau

SEQ ID NO: 18269 - RNA, 19 nt, Artificial Sequence
  Description of Artificial Sequence: Synthetic oligonucleotide
  Antisense strand to SEQ ID NO: 18268
aucacucacaacaaauguc

SEQ ID NO: 18270 - RNA, 19 nt, Artificial Sequence
  Description of Artificial Sequence: Synthetic oligonucleotide
  Sense strand starting at position 3615 of SEQ ID NO: 193
auuuguugugagugauugu

SEQ ID NO: 18271 - RNA, 19 nt, Artificial Sequence
  Description of Artificial Sequence: Synthetic oligonucleotide
  Antisense strand to SEQ ID NO: 18270
acaaucacucacaacaaau

SEQ ID NO: 18272 - RNA, 19 nt, Artificial Sequence
  Description of Artificial Sequence: Synthetic oligonucleotide
  Sense strand starting at position 3624 of SEQ ID NO: 193
gagugauugugagagauua

SEQ ID NO: 18273 - RNA, 19 nt, Artificial Sequence
  Description of Artificial Sequence: Synthetic oligonucleotide
  Antisense strand to SEQ ID NO: 18272
uaaucucucacaaucacuc

SEQ ID NO: 18274 - RNA, 19 nt, Artificial Sequence
  Description of Artificial Sequence: Synthetic oligonucleotide
  Sense strand starting at position 3626 of SEQ ID NO: 193
gugauugugagagauuauc

SEQ ID NO: 18275 - RNA, 19 nt, Artificial Sequence
  Description of Artificial Sequence: Synthetic oligonucleotide
  Antisense strand to SEQ ID NO: 18274
gauaaucucucacaaucac

SEQ ID NO: 18276 - RNA, 19 nt, Artificial Sequence
  Description of Artificial Sequence: Synthetic oligonucleotide
  Sense strand starting at position 3677 of SEQ ID NO: 193
gaaggaaucucaccuguca

SEQ ID NO: 18277 - RNA, 19 nt, Artificial Sequence
  Description of Artificial Sequence: Synthetic oligonucleotide
  Antisense strand to SEQ ID NO: 18276
ugacaggugagauuccuuc

SEQ ID NO: 18278 - RNA, 19 nt, Artificial Sequence
  Description of Artificial Sequence: Synthetic oligonucleotide
  Sense strand starting at position 3702 of SEQ ID NO: 193
gagaauuuaugaggccuua

SEQ ID NO: 18279 - RNA, 19 nt, Artificial Sequence
  Description of Artificial Sequence: Synthetic oligonucleotide
  Antisense strand to SEQ ID NO: 18278
uaaggccucauaaauucuc

SEQ ID NO: 18280 - RNA, 19 nt, Artificial Sequence
  Description of Artificial Sequence: Synthetic oligonucleotide
  Sense strand starting at position 3910 of SEQ ID NO: 193
gcugcaaaguauguugaaa

SEQ ID NO: 18281 - RNA, 19 nt, Artificial Sequence
  Description of Artificial Sequence: Synthetic oligonucleotide
  Antisense strand to SEQ ID NO: 18280
uuucaacauacuuugcagc

SEQ ID NO: 18282 - RNA, 19 nt, Artificial Sequence
  Description of Artificial Sequence: Synthetic oligonucleotide
  Sense strand starting at position 26 of SEQ ID NO: 194
ucagaugcacuugggaaau

SEQ ID NO: 18283 - RNA, 19 nt, Artificial Sequence
  Description of Artificial Sequence: Synthetic oligonucleotide
  Antisense strand to SEQ ID NO: 18282
auuucccaagugcaucuga

SEQ ID NO: 18284 - RNA, 19 nt, Artificial Sequence
  Description of Artificial Sequence: Synthetic oligonucleotide
  Sense strand starting at position 32 of SEQ ID NO: 194
gcacuugggaaauguugga

SEQ ID NO: 18285 - RNA, 19 nt, Artificial Sequence
  Description of Artificial Sequence: Synthetic oligonucleotide
  Antisense strand to SEQ ID NO: 18284
uccaacauuucccaagugc

SEQ ID NO: 18286 - RNA, 19 nt, Artificial Sequence
  Description of Artificial Sequence: Synthetic oligonucleotide
  Sense strand starting at position 37 of SEQ ID NO: 194
ugggaaauguuggaaucaa

SEQ ID NO: 18287 - RNA, 19 nt, Artificial Sequence
  Description of Artificial Sequence: Synthetic oligonucleotide
  Antisense strand to SEQ ID NO: 18286
uugauuccaacauuuccca

SEQ ID NO: 18288 - RNA, 19 nt, Artificial Sequence
  Description of Artificial Sequence: Synthetic oligonucleotide
  Sense strand starting at position 150 of SEQ ID NO: 194
aggugacagcauggagauu

SEQ ID NO: 18289 - RNA, 19 nt, Artificial Sequence
  Description of Artificial Sequence: Synthetic oligonucleotide
  Antisense strand to SEQ ID NO: 18288
aaucuccaugcugucaccu

SEQ ID NO: 18290 - RNA, 19 nt, Artificial Sequence
  Description of Artificial Sequence: Synthetic oligonucleotide
  Sense strand starting at position 200 of SEQ ID NO: 194
acugaaaugcugggaaauc

SEQ ID NO: 18291 - RNA, 19 nt, Artificial Sequence
  Description of Artificial Sequence: Synthetic oligonucleotide
  Antisense strand to SEQ ID NO: 18290
gauuucccagcauuucagu

SEQ ID NO: 18292 - RNA, 19 nt, Artificial Sequence
  Description of Artificial Sequence: Synthetic oligonucleotide
  Sense strand starting at position 211 of SEQ ID NO: 194
gggaaaucgauaugucaau

SEQ ID NO: 18293 - RNA, 19 nt, Artificial Sequence
  Description of Artificial Sequence: Synthetic oligonucleotide
  Antisense strand to SEQ ID NO: 18292
auugacauaucgauuuccc

SEQ ID NO: 18294 - RNA, 19 nt, Artificial Sequence
  Description of Artificial Sequence: Synthetic oligonucleotide
  Sense strand starting at position 212 of SEQ ID NO: 194
ggaaaucgauaugucaauc

SEQ ID NO: 18295 - RNA, 19 nt, Artificial Sequence
  Description of Artificial Sequence: Synthetic oligonucleotide
  Antisense strand to SEQ ID NO: 18294
gauugacauaucgauuucc

SEQ ID NO: 18296 - RNA, 19 nt, Artificial Sequence
  Description of Artificial Sequence: Synthetic oligonucleotide
  Sense strand starting at position 238 of SEQ ID NO: 194
guuuguacccguuugugca

SEQ ID NO: 18297 - RNA, 19 nt, Artificial Sequence
  Description of Artificial Sequence: Synthetic oligonucleotide
  Antisense strand to SEQ ID NO: 18296
ugcacaaacggguacaaac

SEQ ID NO: 18298 - RNA, 19 nt, Artificial Sequence
  Description of Artificial Sequence: Synthetic oligonucleotide
  Sense strand starting at position 263 of SEQ ID NO: 194
cuugaucuucccugcagga

SEQ ID NO: 18299 - RNA, 19 nt, Artificial Sequence
  Description of Artificial Sequence: Synthetic oligonucleotide
  Antisense strand to SEQ ID NO: 18298
uccugcagggaagaucaag

SEQ ID NO: 18300 - RNA, 19 nt, Artificial Sequence
  Description of Artificial Sequence: Synthetic oligonucleotide
  Sense strand starting at position 371 of SEQ ID NO: 194
augcuaaugcuauaauagu

SEQ ID NO: 18301 - RNA, 19 nt, Artificial Sequence
  Description of Artificial Sequence: Synthetic oligonucleotide
  Antisense strand to SEQ ID NO: 18300
acuauuauagcauuagcau

SEQ ID NO: 18302 - RNA, 19 nt, Artificial Sequence
  Description of Artificial Sequence: Synthetic oligonucleotide
  Sense strand starting at position 462 of SEQ ID NO: 194
aaacaaugugucuguaaag

SEQ ID NO: 18303 - RNA, 19 nt, Artificial Sequence
  Description of Artificial Sequence: Synthetic oligonucleotide
  Antisense strand to SEQ ID NO: 18302
cuuuacagacacauuguuu

SEQ ID NO: 18304 - RNA, 19 nt, Artificial Sequence
  Description of Artificial Sequence: Synthetic oligonucleotide
  Sense strand starting at position 540 of SEQ ID NO: 194
uuaugaaauugucugauga

SEQ ID NO: 18305 - RNA, 19 nt, Artificial Sequence
  Description of Artificial Sequence: Synthetic oligonucleotide
  Antisense strand to SEQ ID NO: 18304
ucaucagacaauuucauaa

SEQ ID NO: 18306 - RNA, 19 nt, Artificial Sequence
  Description of Artificial Sequence: Synthetic oligonucleotide
  Sense strand starting at position 541 of SEQ ID NO: 194
uaugaaauugucugaugag

SEQ ID NO: 18307 - RNA, 19 nt, Artificial Sequence
  Description of Artificial Sequence: Synthetic oligonucleotide
  Antisense strand to SEQ ID NO: 18306
cucaucagacaauuucaua

SEQ ID NO: 18308 - RNA, 19 nt, Artificial Sequence
  Description of Artificial Sequence: Synthetic oligonucleotide
  Sense strand starting at position 842 of SEQ ID NO: 194
aaccgauaauuccugugau

SEQ ID NO: 18309 - RNA, 19 nt, Artificial Sequence
  Description of Artificial Sequence: Synthetic oligonucleotide
  Antisense strand to SEQ ID NO: 18308
aucacaggaauuaucgguu

SEQ ID NO: 18310 - RNA, 19 nt, Artificial Sequence
  Description of Artificial Sequence: Synthetic oligonucleotide
  Sense strand starting at position 845 of SEQ ID NO: 194
cgauaauuccugugaugau

SEQ ID NO: 18311 - RNA, 19 nt, Artificial Sequence
  Description of Artificial Sequence: Synthetic oligonucleotide
  Antisense strand to SEQ ID NO: 18310
aucaucacaggaauuaucg

SEQ ID NO: 18312 - RNA, 19 nt, Artificial Sequence
  Description of Artificial Sequence: Synthetic oligonucleotide
  Sense strand starting at position 849 of SEQ ID NO: 194
aauuccugugaugauguua

SEQ ID NO: 18313 - RNA, 19 nt, Artificial Sequence
  Description of Artificial Sequence: Synthetic oligonucleotide
  Antisense strand to SEQ ID NO: 18312
uaacaucaucacaggaauu

SEQ ID NO: 18314 - RNA, 19 nt, Artificial Sequence
  Description of Artificial Sequence: Synthetic oligonucleotide
  Sense strand starting at position 983 of SEQ ID NO: 194
cccaaagucuaggcuagaa

SEQ ID NO: 18315 - RNA, 19 nt, Artificial Sequence
  Description of Artificial Sequence: Synthetic oligonucleotide
  Antisense strand to SEQ ID NO: 18314
uucuagccuagacuuuggg

SEQ ID NO: 18316 - RNA, 19 nt, Artificial Sequence
  Description of Artificial Sequence: Synthetic oligonucleotide
  Sense strand starting at position 1246 of SEQ ID NO: 194
ccagcagagaucugcugaa

SEQ ID NO: 18317 - RNA, 19 nt, Artificial Sequence
  Description of Artificial Sequence: Synthetic oligonucleotide
  Antisense strand to SEQ ID NO: 18316
uucagcagaucucugcugg

SEQ ID NO: 18318 - RNA, 19 nt, Artificial Sequence
  Description of Artificial Sequence: Synthetic oligonucleotide
  Sense strand starting at position 1250 of SEQ ID NO: 194
cagagaucugcugaaggcu

SEQ ID NO: 18319 - RNA, 19 nt, Artificial Sequence
  Description of Artificial Sequence: Synthetic oligonucleotide
  Antisense strand to SEQ ID NO: 18318
agccuucagcagaucucug

SEQ ID NO: 18320 - RNA, 19 nt, Artificial Sequence
  Description of Artificial Sequence: Synthetic oligonucleotide
  Sense strand starting at position 1372 of SEQ ID NO: 194
ucgaguuuggucuugcugu

SEQ ID NO: 18321 - RNA, 19 nt, Artificial Sequence
  Description of Artificial Sequence: Synthetic oligonucleotide
  Antisense strand to SEQ ID NO: 18320
acagcaagaccaaacucga

SEQ ID NO: 18322 - RNA, 19 nt, Artificial Sequence
  Description of Artificial Sequence: Synthetic oligonucleotide
  Sense strand starting at position 1502 of SEQ ID NO: 194
guuugcugucgcccaagau

SEQ ID NO: 18323 - RNA, 19 nt, Artificial Sequence
  Description of Artificial Sequence: Synthetic oligonucleotide
  Antisense strand to SEQ ID NO: 18322
aucuugggcgacagcaaac

SEQ ID NO: 18324 - RNA, 19 nt, Artificial Sequence
  Description of Artificial Sequence: Synthetic oligonucleotide
  Sense strand starting at position 1511 of SEQ ID NO: 194
cgcccaagauguccuuaau

SEQ ID NO: 18325 - RNA, 19 nt, Artificial Sequence
  Description of Artificial Sequence: Synthetic oligonucleotide
  Antisense strand to SEQ ID NO: 18324
auuaaggacaucuugggcg

SEQ ID NO: 18326 - RNA, 19 nt, Artificial Sequence
  Description of Artificial Sequence: Synthetic oligonucleotide
  Sense strand starting at position 1745 of SEQ ID NO: 194
gcuccauggugacugagau

SEQ ID NO: 18327 - RNA, 19 nt, Artificial Sequence
  Description of Artificial Sequence: Synthetic oligonucleotide
  Antisense strand to SEQ ID NO: 18326
aucucagucaccauggagc

SEQ ID NO: 18328 - RNA, 19 nt, Artificial Sequence
  Description of Artificial Sequence: Synthetic oligonucleotide
  Sense strand starting at position 1746 of SEQ ID NO: 194
cuccauggugacugagaua

SEQ ID NO: 18329 - RNA, 19 nt, Artificial Sequence
  Description of Artificial Sequence: Synthetic oligonucleotide
  Antisense strand to SEQ ID NO: 18328
uaucucagucaccauggag

SEQ ID NO: 18330 - RNA, 19 nt, Artificial Sequence
  Description of Artificial Sequence: Synthetic oligonucleotide
  Sense strand starting at position 1787 of SEQ ID NO: 194
cgguaucaaucuccgaaca

SEQ ID NO: 18331 - RNA, 19 nt, Artificial Sequence
  Description of Artificial Sequence: Synthetic oligonucleotide
  Antisense strand to SEQ ID NO: 18330
uguucggagauugauaccg

SEQ ID NO: 18332 - RNA, 19 nt, Artificial Sequence
  Description of Artificial Sequence: Synthetic oligonucleotide
  Sense strand starting at position 1947 of SEQ ID NO: 194
uuccauugucauugcuaca

SEQ ID NO: 18333 - RNA, 19 nt, Artificial Sequence
  Description of Artificial Sequence: Synthetic oligonucleotide
  Antisense strand to SEQ ID NO: 18332
uguagcaaugacaauggaa

SEQ ID NO: 18334 - RNA, 19 nt, Artificial Sequence
  Description of Artificial Sequence: Synthetic oligonucleotide
  Sense strand starting at position 2008 of SEQ ID NO: 194
agcgaagaaagcuaucgau

SEQ ID NO: 18335 - RNA, 19 nt, Artificial Sequence
  Description of Artificial Sequence: Synthetic oligonucleotide
  Antisense strand to SEQ ID NO: 18334
aucgauagcuuucuucgcu

SEQ ID NO: 18336 - RNA, 19 nt, Artificial Sequence
  Description of Artificial Sequence: Synthetic oligonucleotide
  Sense strand starting at position 2051 of SEQ ID NO: 194
aauguugccgccgcuuaaa

SEQ ID NO: 18337 - RNA, 19 nt, Artificial Sequence
  Description of Artificial Sequence: Synthetic oligonucleotide
  Antisense strand to SEQ ID NO: 18336
uuuaagcggcggcaacauu

SEQ ID NO: 18338 - RNA, 19 nt, Artificial Sequence
  Description of Artificial Sequence: Synthetic oligonucleotide
  Sense strand starting at position 2102 of SEQ ID NO: 194
guaauugggaaguggcaau

SEQ ID NO: 18339 - RNA, 19 nt, Artificial Sequence
  Description of Artificial Sequence: Synthetic oligonucleotide
  Antisense strand to SEQ ID NO: 18338
auugccacuucccaauuac

SEQ ID NO: 18340 - RNA, 19 nt, Artificial Sequence
  Description of Artificial Sequence: Synthetic oligonucleotide
  Sense strand starting at position 2114 of SEQ ID NO: 194
uggcaaucuguggauacuu

SEQ ID NO: 18341 - RNA, 19 nt, Artificial Sequence
  Description of Artificial Sequence: Synthetic oligonucleotide
  Antisense strand to SEQ ID NO: 18340
aaguauccacagauugcca

SEQ ID NO: 18342 - RNA, 19 nt, Artificial Sequence
  Description of Artificial Sequence: Synthetic oligonucleotide
  Sense strand starting at position 2537 of SEQ ID NO: 194
uucugaacuuucuuggaaa

SEQ ID NO: 18343 - RNA, 19 nt, Artificial Sequence
  Description of Artificial Sequence: Synthetic oligonucleotide
  Antisense strand to SEQ ID NO: 18342
uuuccaagaaaguucagaa

SEQ ID NO: 18344 - RNA, 19 nt, Artificial Sequence
  Description of Artificial Sequence: Synthetic oligonucleotide
  Sense strand starting at position 2539 of SEQ ID NO: 194
cugaacuuucuuggaaagu

SEQ ID NO: 18345 - RNA, 19 nt, Artificial Sequence
  Description of Artificial Sequence: Synthetic oligonucleotide
  Antisense strand to SEQ ID NO: 18344
acuuuccaagaaaguucag

SEQ ID NO: 18346 - RNA, 19 nt, Artificial Sequence
  Description of Artificial Sequence: Synthetic oligonucleotide
  Sense strand starting at position 3205 of SEQ ID NO: 194
gcgggaauaguccgaagac

SEQ ID NO: 18347 - RNA, 19 nt, Artificial Sequence
  Description of Artificial Sequence: Synthetic oligonucleotide
  Antisense strand to SEQ ID NO: 18346
gucuucggacuauucccgc

SEQ ID NO: 18348 - RNA, 19 nt, Artificial Sequence
  Description of Artificial Sequence: Synthetic oligonucleotide
  Sense strand starting at position 3324 of SEQ ID NO: 194
ugauuucucgcccgacgaa

SEQ ID NO: 18349 - RNA, 19 nt, Artificial Sequence
  Description of Artificial Sequence: Synthetic oligonucleotide
  Antisense strand to SEQ ID NO: 18348
uucgucgggcgagaaauca

SEQ ID NO: 18350 - RNA, 19 nt, Artificial Sequence
  Description of Artificial Sequence: Synthetic oligonucleotide
  Sense strand starting at position 3516 of SEQ ID NO: 194
agcuaaugcccgaggcguu

SEQ ID NO: 18351 - RNA, 19 nt, Artificial Sequence
  Description of Artificial Sequence: Synthetic oligonucleotide
  Antisense strand to SEQ ID NO: 18350
aacgccucgggcauuagcu

SEQ ID NO: 18352 - RNA, 19 nt, Artificial Sequence
  Description of Artificial Sequence: Synthetic oligonucleotide
  Sense strand starting at position 3795 of SEQ ID NO: 194
ucucauguugaaugucaga

SEQ ID NO: 18353 - RNA, 19 nt, Artificial Sequence
  Description of Artificial Sequence: Synthetic oligonucleotide
  Antisense strand to SEQ ID NO: 18352
ucugacauucaacaugaga

SEQ ID NO: 18354 - RNA, 19 nt, Artificial Sequence
  Description of Artificial Sequence: Synthetic oligonucleotide
  Sense strand starting at position 3820 of SEQ ID NO: 194
ggaagugccagugacaaga

SEQ ID NO: 18355 - RNA, 19 nt, Artificial Sequence
  Description of Artificial Sequence: Synthetic oligonucleotide
  Antisense strand to SEQ ID NO: 18354
ucuugucacuggcacuucc

SEQ ID NO: 18356 - RNA, 19 nt, Artificial Sequence
  Description of Artificial Sequence: Synthetic oligonucleotide
  Sense strand starting at position 3842 of SEQ ID NO: 194
cguauuacuccugauuaag

SEQ ID NO: 18357 - RNA, 19 nt, Artificial Sequence
  Description of Artificial Sequence: Synthetic oligonucleotide
  Antisense strand to SEQ ID NO: 18356
cuuaaucaggaguaauacg

SEQ ID NO: 18358 - RNA, 19 nt, Artificial Sequence
  Description of Artificial Sequence: Synthetic oligonucleotide
  Sense strand starting at position 3871 of SEQ ID NO: 194
accuaauuagcagaguaau

SEQ ID NO: 18359 - RNA, 19 nt, Artificial Sequence
  Description of Artificial Sequence: Synthetic oligonucleotide
  Antisense strand to SEQ ID NO: 18358
auuacucugcuaauuaggu

SEQ ID NO: 18360 - RNA, 19 nt, Artificial Sequence
  Description of Artificial Sequence: Synthetic oligonucleotide
  Sense strand starting at position 3877 of SEQ ID NO: 194
uuagcagaguaauuauaag

SEQ ID NO: 18361 - RNA, 19 nt, Artificial Sequence
  Description of Artificial Sequence: Synthetic oligonucleotide
  Antisense strand to SEQ ID NO: 18360
cuuauaauuacucugcuaa

SEQ ID NO: 18362 - RNA, 19 nt, Artificial Sequence
  Description of Artificial Sequence: Synthetic oligonucleotide
  Sense strand starting at position 75 of SEQ ID NO: 195
caaguuacugcagguaaga

SEQ ID NO: 18363 - RNA, 19 nt, Artificial Sequence
  Description of Artificial Sequence: Synthetic oligonucleotide
  Antisense strand to SEQ ID NO: 18362
ucuuaccugcaguaacuug

SEQ ID NO: 18364 - RNA, 19 nt, Artificial Sequence
  Description of Artificial Sequence: Synthetic oligonucleotide
  Sense strand starting at position 170 of SEQ ID NO: 195
ggaacaaaguaugauaaua

SEQ ID NO: 18365 - RNA, 19 nt, Artificial Sequence
  Description of Artificial Sequence: Synthetic oligonucleotide
  Antisense strand to SEQ ID NO: 18364
uauuaucauacuuuguucc

SEQ ID NO: 18366 - RNA, 19 nt, Artificial Sequence
  Description of Artificial Sequence: Synthetic oligonucleotide
  Sense strand starting at position 183 of SEQ ID NO: 195
auaauacagucuucuagag

SEQ ID NO: 18367 - RNA, 19 nt, Artificial Sequence
  Description of Artificial Sequence: Synthetic oligonucleotide
  Antisense strand to SEQ ID NO: 18366
cucuagaagacuguauuau

SEQ ID NO: 18368 - RNA, 19 nt, Artificial Sequence
  Description of Artificial Sequence: Synthetic oligonucleotide
  Sense strand starting at position 242 of SEQ ID NO: 195
gggaacaugugguuagaag

SEQ ID NO: 18369 - RNA, 19 nt, Artificial Sequence
  Description of Artificial Sequence: Synthetic oligonucleotide
  Antisense strand to SEQ ID NO: 18368
cuucuaaccacauguuccc

SEQ ID NO: 18370 - RNA, 19 nt, Artificial Sequence
  Description of Artificial Sequence: Synthetic oligonucleotide
  Sense strand starting at position 261 of SEQ ID NO: 195
acagcucuuuagcuuuaga

SEQ ID NO: 18371 - RNA, 19 nt, Artificial Sequence
  Description of Artificial Sequence: Synthetic oligonucleotide
  Antisense strand to SEQ ID NO: 18370
ucuaaagcuaaagagcugu

SEQ ID NO: 18372 - RNA, 19 nt, Artificial Sequence
  Description of Artificial Sequence: Synthetic oligonucleotide
  Sense strand starting at position 264 of SEQ ID NO: 195
gcucuuuagcuuuagaauc

SEQ ID NO: 18373 - RNA, 19 nt, Artificial Sequence
  Description of Artificial Sequence: Synthetic oligonucleotide
  Antisense strand to SEQ ID NO: 18372
gauucuaaagcuaaagagc

SEQ ID NO: 18374 - RNA, 19 nt, Artificial Sequence
  Description of Artificial Sequence: Synthetic oligonucleotide
  Sense strand starting at position 472 of SEQ ID NO: 195
cagugaacucugcagacuu

SEQ ID NO: 18375 - RNA, 19 nt, Artificial Sequence
  Description of Artificial Sequence: Synthetic oligonucleotide
  Antisense strand to SEQ ID NO: 18374
aagucugcagaguucacug

SEQ ID NO: 18376 - RNA, 19 nt, Artificial Sequence
  Description of Artificial Sequence: Synthetic oligonucleotide
  Sense strand starting at position 512 of SEQ ID NO: 195
aggauugggaugcgaugaa

SEQ ID NO: 18377 - RNA, 19 nt, Artificial Sequence
  Description of Artificial Sequence: Synthetic oligonucleotide
  Antisense strand to SEQ ID NO: 18376
uucaucgcaucccaauccu

SEQ ID NO: 18378 - RNA, 19 nt, Artificial Sequence
  Description of Artificial Sequence: Synthetic oligonucleotide
  Sense strand starting at position 560 of SEQ ID NO: 195
acaguaugcccucaagaag

SEQ ID NO: 18379 - RNA, 19 nt, Artificial Sequence
  Description of Artificial Sequence: Synthetic oligonucleotide
  Antisense strand to SEQ ID NO: 18378
cuucuugagggcauacugu

SEQ ID NO: 18380 - RNA, 19 nt, Artificial Sequence
  Description of Artificial Sequence: Synthetic oligonucleotide
  Sense strand starting at position 563 of SEQ ID NO: 195
guaugcccucaagaaguua

SEQ ID NO: 18381 - RNA, 19 nt, Artificial Sequence
  Description of Artificial Sequence: Synthetic oligonucleotide
  Antisense strand to SEQ ID NO: 18380
uaacuucuugagggcauac

SEQ ID NO: 18382 - RNA, 19 nt, Artificial Sequence
  Description of Artificial Sequence: Synthetic oligonucleotide
  Sense strand starting at position 614 of SEQ ID NO: 195
aaauguauucugcauagug

SEQ ID NO: 18383 - RNA, 19 nt, Artificial Sequence
  Description of Artificial Sequence: Synthetic oligonucleotide
  Antisense strand to SEQ ID NO: 18382
cacuaugcagaauacauuu

SEQ ID NO: 18384 - RNA, 19 nt, Artificial Sequence
  Description of Artificial Sequence: Synthetic oligonucleotide
  Sense strand starting at position 789 of SEQ ID NO: 195
gcgaaaguuagagauagua

SEQ ID NO: 18385 - RNA, 19 nt, Artificial Sequence
  Description of Artificial Sequence: Synthetic oligonucleotide
  Antisense strand to SEQ ID NO: 18384
uacuaucucuaacuuucgc

SEQ ID NO: 18386 - RNA, 19 nt, Artificial Sequence
  Description of Artificial Sequence: Synthetic oligonucleotide
  Sense strand starting at position 844 of SEQ ID NO: 195
uccugagagguugauguua

SEQ ID NO: 18387 - RNA, 19 nt, Artificial Sequence
  Description of Artificial Sequence: Synthetic oligonucleotide
  Antisense strand to SEQ ID NO: 18386
uaacaucaaccucucagga

SEQ ID NO: 18388 - RNA, 19 nt, Artificial Sequence
  Description of Artificial Sequence: Synthetic oligonucleotide
  Sense strand starting at position 891 of SEQ ID NO: 195
gacgguccgagagguuaaa

SEQ ID NO: 18389 - RNA, 19 nt, Artificial Sequence
  Description of Artificial Sequence: Synthetic oligonucleotide
  Antisense strand to SEQ ID NO: 18388
uuuaaccucucggaccguc

SEQ ID NO: 18390 - RNA, 19 nt, Artificial Sequence
  Description of Artificial Sequence: Synthetic oligonucleotide
  Sense strand starting at position 960 of SEQ ID NO: 195
cucagaucucugugacacu

SEQ ID NO: 18391 - RNA, 19 nt, Artificial Sequence
  Description of Artificial Sequence: Synthetic oligonucleotide
  Antisense strand to SEQ ID NO: 18390
agugucacagagaucugag

SEQ ID NO: 18392 - RNA, 19 nt, Artificial Sequence
  Description of Artificial Sequence: Synthetic oligonucleotide
  Sense strand starting at position 2578 of SEQ ID NO: 195
ggugaauucccggagcgga

SEQ ID NO: 18393 - RNA, 19 nt, Artificial Sequence
  Description of Artificial Sequence: Synthetic oligonucleotide
  Antisense strand to SEQ ID NO: 18392
uccgcuccgggaauucacc

SEQ ID NO: 18394 - RNA, 19 nt, Artificial Sequence
  Description of Artificial Sequence: Synthetic oligonucleotide
  Sense strand starting at position 2609 of SEQ ID NO: 195
ggaggaugucccggacaaa

SEQ ID NO: 18395 - RNA, 19 nt, Artificial Sequence
  Description of Artificial Sequence: Synthetic oligonucleotide
  Antisense strand to SEQ ID NO: 18394
uuuguccgggacauccucc

SEQ ID NO: 18396 - RNA, 19 nt, Artificial Sequence
  Description of Artificial Sequence: Synthetic oligonucleotide
  Sense strand starting at position 2636 of SEQ ID NO: 195
cgggcuucccugagagcga

SEQ ID NO: 18397 - RNA, 19 nt, Artificial Sequence
  Description of Artificial Sequence: Synthetic oligonucleotide
  Antisense strand to SEQ ID NO: 18396
ucgcucucagggaagcccg

SEQ ID NO: 18398 - RNA, 19 nt, Artificial Sequence
  Description of Artificial Sequence: Synthetic oligonucleotide
  Sense strand starting at position 2746 of SEQ ID NO: 195
gauuuaucugcucgugcca

SEQ ID NO: 18399 - RNA, 19 nt, Artificial Sequence
  Description of Artificial Sequence: Synthetic oligonucleotide
  Antisense strand to SEQ ID NO: 18398
uggcacgagcagauaaauc

SEQ ID NO: 18400 - RNA, 19 nt, Artificial Sequence
  Description of Artificial Sequence: Synthetic oligonucleotide
  Sense strand starting at position 2823 of SEQ ID NO: 195
augcgaagccaagacaauu

SEQ ID NO: 18401 - RNA, 19 nt, Artificial Sequence
  Description of Artificial Sequence: Synthetic oligonucleotide
  Antisense strand to SEQ ID NO: 18400
aauugucuuggcuucgcau

SEQ ID NO: 18402 - RNA, 19 nt, Artificial Sequence
  Description of Artificial Sequence: Synthetic oligonucleotide
  Sense strand starting at position 2836 of SEQ ID NO: 195
acaauuacccgugguccua

SEQ ID NO: 18403 - RNA, 19 nt, Artificial Sequence
  Description of Artificial Sequence: Synthetic oligonucleotide
  Antisense strand to SEQ ID NO: 18402
uaggaccacggguaauugu

SEQ ID NO: 18404 - RNA, 19 nt, Artificial Sequence
  Description of Artificial Sequence: Synthetic oligonucleotide
  Sense strand starting at position 2906 of SEQ ID NO: 195
gggaaagauaaccgcgauu

SEQ ID NO: 18405 - RNA, 19 nt, Artificial Sequence
  Description of Artificial Sequence: Synthetic oligonucleotide
  Antisense strand to SEQ ID NO: 18404
aaucgcgguuaucuuuccc

SEQ ID NO: 18406 - RNA, 19 nt, Artificial Sequence
  Description of Artificial Sequence: Synthetic oligonucleotide
  Sense strand starting at position 3107 of SEQ ID NO: 195
gagagagcuugagugaacu

SEQ ID NO: 18407 - RNA, 19 nt, Artificial Sequence
  Description of Artificial Sequence: Synthetic oligonucleotide
  Antisense strand to SEQ ID NO: 18406
aguucacucaagcucucuc

SEQ ID NO: 18408 - RNA, 19 nt, Artificial Sequence
  Description of Artificial Sequence: Synthetic oligonucleotide
  Sense strand starting at position 3158 of SEQ ID NO: 195
gagauucuugucuguguga

SEQ ID NO: 18409 - RNA, 19 nt, Artificial Sequence
  Description of Artificial Sequence: Synthetic oligonucleotide
  Antisense strand to SEQ ID NO: 18408
ucacacagacaagaaucuc

SEQ ID NO: 18410 - RNA, 19 nt, Artificial Sequence
  Description of Artificial Sequence: Synthetic oligonucleotide
  Sense strand starting at position 3159 of SEQ ID NO: 195
agauucuugucugugugau

SEQ ID NO: 18411 - RNA, 19 nt, Artificial Sequence
  Description of Artificial Sequence: Synthetic oligonucleotide
  Antisense strand to SEQ ID NO: 18410
aucacacagacaagaaucu

SEQ ID NO: 18412 - RNA, 19 nt, Artificial Sequence
  Description of Artificial Sequence: Synthetic oligonucleotide
  Sense strand starting at position 3296 of SEQ ID NO: 195
gguuaucugcccggauuaa

SEQ ID NO: 18413 - RNA, 19 nt, Artificial Sequence
  Description of Artificial Sequence: Synthetic oligonucleotide
  Antisense strand to SEQ ID NO: 18412
uuaauccgggcagauaacc

SEQ ID NO: 18414 - RNA, 19 nt, Artificial Sequence
  Description of Artificial Sequence: Synthetic oligonucleotide
  Sense strand starting at position 3297 of SEQ ID NO: 195
guuaucugcccggauuaau

SEQ ID NO: 18415 - RNA, 19 nt, Artificial Sequence
  Description of Artificial Sequence: Synthetic oligonucleotide
  Antisense strand to SEQ ID NO: 18414
auuaauccgggcagauaac

SEQ ID NO: 18416 - RNA, 19 nt, Artificial Sequence
  Description of Artificial Sequence: Synthetic oligonucleotide
  Sense strand starting at position 3427 of SEQ ID NO: 195
ucaacaggugcucaguaua

SEQ ID NO: 18417 - RNA, 19 nt, Artificial Sequence
  Description of Artificial Sequence: Synthetic oligonucleotide
  Antisense strand to SEQ ID NO: 18416
uauacugagcaccuguuga

SEQ ID NO: 18418 - RNA, 19 nt, Artificial Sequence
  Description of Artificial Sequence: Synthetic oligonucleotide
  Sense strand starting at position 3430 of SEQ ID NO: 195
acaggugcucaguauaugu

SEQ ID NO: 18419 - RNA, 19 nt, Artificial Sequence
  Description of Artificial Sequence: Synthetic oligonucleotide
  Antisense strand to SEQ ID NO: 18418
acauauacugagcaccugu

SEQ ID NO: 18420 - RNA, 19 nt, Artificial Sequence
  Description of Artificial Sequence: Synthetic oligonucleotide
  Sense strand starting at position 3432 of SEQ ID NO: 195
aggugcucaguauauguau

SEQ ID NO: 18421 - RNA, 19 nt, Artificial Sequence
  Description of Artificial Sequence: Synthetic oligonucleotide
  Antisense strand to SEQ ID NO: 18420
auacauauacugagcaccu

SEQ ID NO: 18422 - RNA, 19 nt, Artificial Sequence
  Description of Artificial Sequence: Synthetic oligonucleotide
  Sense strand starting at position 3444 of SEQ ID NO: 195
uauguauugcacuagguca

SEQ ID NO: 18423 - RNA, 19 nt, Artificial Sequence
  Description of Artificial Sequence: Synthetic oligonucleotide
  Antisense strand to SEQ ID NO: 18422
ugaccuagugcaauacaua

SEQ ID NO: 18424 - RNA, 19 nt, Artificial Sequence
  Description of Artificial Sequence: Synthetic oligonucleotide
  Sense strand starting at position 3451 of SEQ ID NO: 195
ugcacuaggucagcugaaa

SEQ ID NO: 18425 - RNA, 19 nt, Artificial Sequence
  Description of Artificial Sequence: Synthetic oligonucleotide
  Antisense strand to SEQ ID NO: 18424
uuucagcugaccuagugca

SEQ ID NO: 18426 - RNA, 19 nt, Artificial Sequence
  Description of Artificial Sequence: Synthetic oligonucleotide
  Sense strand starting at position 3496 of SEQ ID NO: 195
gcucuaacgagcuaggaaa

SEQ ID NO: 18427 - RNA, 19 nt, Artificial Sequence
  Description of Artificial Sequence: Synthetic oligonucleotide
  Antisense strand to SEQ ID NO: 18426
uuuccuagcucguuagagc

SEQ ID NO: 18428 - RNA, 19 nt, Artificial Sequence
  Description of Artificial Sequence: Synthetic oligonucleotide
  Sense strand starting at position 3614 of SEQ ID NO: 195
cgugcacuccuacacuuua

SEQ ID NO: 18429 - RNA, 19 nt, Artificial Sequence
  Description of Artificial Sequence: Synthetic oligonucleotide
  Antisense strand to SEQ ID NO: 18428
uaaaguguaggagugcacg

SEQ ID NO: 18430 - RNA, 19 nt, Artificial Sequence
  Description of Artificial Sequence: Synthetic oligonucleotide
  Sense strand starting at position 3749 of SEQ ID NO: 195
uuuauauaggcauagucua

SEQ ID NO: 18431 - RNA, 19 nt, Artificial Sequence
  Description of Artificial Sequence: Synthetic oligonucleotide
  Antisense strand to SEQ ID NO: 18430
uagacuaugccuauauaaa

SEQ ID NO: 18432 - RNA, 19 nt, Artificial Sequence
  Description of Artificial Sequence: Synthetic oligonucleotide
  Sense strand starting at position 3766 of SEQ ID NO: 195
uacugucuuguguuacgca

SEQ ID NO: 18433 - RNA, 19 nt, Artificial Sequence
  Description of Artificial Sequence: Synthetic oligonucleotide
  Antisense strand to SEQ ID NO: 18432
ugcguaacacaagacagua

SEQ ID NO: 18434 - RNA, 19 nt, Artificial Sequence
  Description of Artificial Sequence: Synthetic oligonucleotide
  Sense strand starting at position 3806 of SEQ ID NO: 195
agucuugguuaacuaggua

SEQ ID NO: 18435 - RNA, 19 nt, Artificial Sequence
  Description of Artificial Sequence: Synthetic oligonucleotide
  Antisense strand to SEQ ID NO: 18434
uaccuaguuaaccaagacu

SEQ ID NO: 18436 - RNA, 19 nt, Artificial Sequence
  Description of Artificial Sequence: Synthetic oligonucleotide
  Sense strand starting at position 3811 of SEQ ID NO: 195
ugguuaacuagguagcauu

SEQ ID NO: 18437 - RNA, 19 nt, Artificial Sequence
  Description of Artificial Sequence: Synthetic oligonucleotide
  Antisense strand to SEQ ID NO: 18436
aaugcuaccuaguuaacca

SEQ ID NO: 18438 - RNA, 19 nt, Artificial Sequence
  Description of Artificial Sequence: Synthetic oligonucleotide
  Sense strand starting at position 3836 of SEQ ID NO: 195
agagaucaauuugauguaa

SEQ ID NO: 18439 - RNA, 19 nt, Artificial Sequence
  Description of Artificial Sequence: Synthetic oligonucleotide
  Antisense strand to SEQ ID NO: 18438
uuacaucaaauugaucucu

SEQ ID NO: 18440 - RNA, 19 nt, Artificial Sequence
  Description of Artificial Sequence: Synthetic oligonucleotide
  Sense strand starting at position 3838 of SEQ ID NO: 195
agaucaauuugauguaaag

SEQ ID NO: 18441 - RNA, 19 nt, Artificial Sequence
  Description of Artificial Sequence: Synthetic oligonucleotide
  Antisense strand to SEQ ID NO: 18440
cuuuacaucaaauugaucu

SEQ ID NO: 18442 - RNA, 19 nt, Artificial Sequence
  Description of Artificial Sequence: Synthetic oligonucleotide
  Sense strand starting at position 3977 of SEQ ID NO: 196
caguucuugccucagggaa

SEQ ID NO: 18443 - RNA, 19 nt, Artificial Sequence
  Description of Artificial Sequence: Synthetic oligonucleotide
  Antisense strand to SEQ ID NO: 18442
uucccugaggcaagaacug

SEQ ID NO: 18444 - RNA, 19 nt, Artificial Sequence
  Description of Artificial Sequence: Synthetic oligonucleotide
  Sense strand starting at position 3942 of SEQ ID NO: 196
gaaauuuaaucccaguggu

SEQ ID NO: 18445 - RNA, 19 nt, Artificial Sequence
  Description of Artificial Sequence: Synthetic oligonucleotide
  Antisense strand to SEQ ID NO: 18444
accacugggauuaaauuuc

SEQ ID NO: 18446 - RNA, 19 nt, Artificial Sequence
  Description of Artificial Sequence: Synthetic oligonucleotide
  Sense strand starting at position 3929 of SEQ ID NO: 196
caaccaagcggcugaaauu

SEQ ID NO: 18447 - RNA, 19 nt, Artificial Sequence
  Description of Artificial Sequence: Synthetic oligonucleotide
  Antisense strand to SEQ ID NO: 18446
aauuucagccgcuugguug

SEQ ID NO: 18448 - RNA, 19 nt, Artificial Sequence
  Description of Artificial Sequence: Synthetic oligonucleotide
  Sense strand starting at position 3715 of SEQ ID NO: 196
aguuccaauucuucuagua

SEQ ID NO: 18449 - RNA, 19 nt, Artificial Sequence
  Description of Artificial Sequence: Synthetic oligonucleotide
  Antisense strand to SEQ ID NO: 18448
uacuagaagaauuggaacu

SEQ ID NO: 18450 - RNA, 19 nt, Artificial Sequence
  Description of Artificial Sequence: Synthetic oligonucleotide
  Sense strand starting at position 3646 of SEQ ID NO: 196
ucguuagaccaauaugagu

SEQ ID NO: 18451 - RNA, 19 nt, Artificial Sequence
  Description of Artificial Sequence: Synthetic oligonucleotide
  Antisense strand to SEQ ID NO: 18450
acucauauuggucuaacga

SEQ ID NO: 18452 - RNA, 19 nt, Artificial Sequence
  Description of Artificial Sequence: Synthetic oligonucleotide
  Sense strand starting at position 3633 of SEQ ID NO: 196
cgaucuauuuacuucguua

SEQ ID NO: 18453 - RNA, 19 nt, Artificial Sequence
  Description of Artificial Sequence: Synthetic oligonucleotide
  Antisense strand to SEQ ID NO: 18452
uaacgaaguaaauagaucg

SEQ ID NO: 18454 - RNA, 19 nt, Artificial Sequence
  Description of Artificial Sequence: Synthetic oligonucleotide
  Sense strand starting at position 3481 of SEQ ID NO: 196
uuauauccugggugauaga

SEQ ID NO: 18455 - RNA, 19 nt, Artificial Sequence
  Description of Artificial Sequence: Synthetic oligonucleotide
  Antisense strand to SEQ ID NO: 18454
ucuaucacccaggauauaa

SEQ ID NO: 18456 - RNA, 19 nt, Artificial Sequence
  Description of Artificial Sequence: Synthetic oligonucleotide
  Sense strand starting at position 3480 of SEQ ID NO: 196
auuauauccugggugauag

SEQ ID NO: 18457 - RNA, 19 nt, Artificial Sequence
  Description of Artificial Sequence: Synthetic oligonucleotide
  Antisense strand to SEQ ID NO: 18456
cuaucacccaggauauaau

SEQ ID NO: 18458 - RNA, 19 nt, Artificial Sequence
  Description of Artificial Sequence: Synthetic oligonucleotide
  Sense strand starting at position 3479 of SEQ ID NO: 196
cauuauauccugggugaua

SEQ ID NO: 18459 - RNA, 19 nt, Artificial Sequence
  Description of Artificial Sequence: Synthetic oligonucleotide
  Antisense strand to SEQ ID NO: 18458
uaucacccaggauauaaug

SEQ ID NO: 18460 - RNA, 19 nt, Artificial Sequence
  Description of Artificial Sequence: Synthetic oligonucleotide
  Sense strand starting at position 3478 of SEQ ID NO: 196
gcauuauauccugggugau

SEQ ID NO: 18461 - RNA, 19 nt, Artificial Sequence
  Description of Artificial Sequence: Synthetic oligonucleotide
  Antisense strand to SEQ ID NO: 18460
aucacccaggauauaaugc

SEQ ID NO: 18462 - RNA, 19 nt, Artificial Sequence
  Description of Artificial Sequence: Synthetic oligonucleotide
  Sense strand starting at position 3255 of SEQ ID NO: 196
cuauaaucccagcauugga

SEQ ID NO: 18463 - RNA, 19 nt, Artificial Sequence
  Description of Artificial Sequence: Synthetic oligonucleotide
  Antisense strand to SEQ ID NO: 18462
uccaaugcugggauuauag

SEQ ID NO: 18464 - RNA, 19 nt, Artificial Sequence
  Description of Artificial Sequence: Synthetic oligonucleotide
  Sense strand starting at position 3104 of SEQ ID NO: 196
caaaucuuugagggucuaa

SEQ ID NO: 18465 - RNA, 19 nt, Artificial Sequence
  Description of Artificial Sequence: Synthetic oligonucleotide
  Antisense strand to SEQ ID NO: 18464
uuagacccucaaagauuug

SEQ ID NO: 18466 - RNA, 19 nt, Artificial Sequence
  Description of Artificial Sequence: Synthetic oligonucleotide
  Sense strand starting at position 3100 of SEQ ID NO: 196
acuccaaaucuuugagggu

SEQ ID NO: 18467 - RNA, 19 nt, Artificial Sequence
  Description of Artificial Sequence: Synthetic oligonucleotide
  Antisense strand to SEQ ID NO: 18466
acccucaaagauuuggagu

SEQ ID NO: 18468 - RNA, 19 nt, Artificial Sequence
  Description of Artificial Sequence: Synthetic oligonucleotide
  Sense strand starting at position 3066 of SEQ ID NO: 196
uccaaagggcuuugagaac

SEQ ID NO: 18469 - RNA, 19 nt, Artificial Sequence
  Description of Artificial Sequence: Synthetic oligonucleotide
  Antisense strand to SEQ ID NO: 18468
guucucaaagcccuuugga

SEQ ID NO: 18470 - RNA, 19 nt, Artificial Sequence
  Description of Artificial Sequence: Synthetic oligonucleotide
  Sense strand starting at position 2852 of SEQ ID NO: 196
ggcuuugauccucauaauc

SEQ ID NO: 18471 - RNA, 19 nt, Artificial Sequence
  Description of Artificial Sequence: Synthetic oligonucleotide
  Antisense strand to SEQ ID NO: 18470
gauuaugaggaucaaagcc

SEQ ID NO: 18472 - RNA, 19 nt, Artificial Sequence
  Description of Artificial Sequence: Synthetic oligonucleotide
  Sense strand starting at position 2851 of SEQ ID NO: 196
gggcuuugauccucauaau

SEQ ID NO: 18473 - RNA, 19 nt, Artificial Sequence
  Description of Artificial Sequence: Synthetic oligonucleotide
  Antisense strand to SEQ ID NO: 18472
auuaugaggaucaaagccc

SEQ ID NO: 18474 - RNA, 19 nt, Artificial Sequence
  Description of Artificial Sequence: Synthetic oligonucleotide
  Sense strand starting at position 2425 of SEQ ID NO: 196
agcagaaucauggguuaag

SEQ ID NO: 18475 - RNA, 19 nt, Artificial Sequence
  Description of Artificial Sequence: Synthetic oligonucleotide
  Antisense strand to SEQ ID NO: 18474
cuuaacccaugauucugcu

SEQ ID NO: 18476 - RNA, 19 nt, Artificial Sequence
  Description of Artificial Sequence: Synthetic oligonucleotide
  Sense strand starting at position 2327 of SEQ ID NO: 196
ccuggaggcagcuaugauu

SEQ ID NO: 18477 - RNA, 19 nt, Artificial Sequence
  Description of Artificial Sequence: Synthetic oligonucleotide
  Antisense strand to SEQ ID NO: 18476
aaucauagcugccuccagg

SEQ ID NO: 18478 - RNA, 19 nt, Artificial Sequence
  Description of Artificial Sequence: Synthetic oligonucleotide
  Sense strand starting at position 2201 of SEQ ID NO: 196
gacuguaagaaguggauga

SEQ ID NO: 18479 - RNA, 19 nt, Artificial Sequence
  Description of Artificial Sequence: Synthetic oligonucleotide
  Antisense strand to SEQ ID NO: 18478
ucauccacuucuuacaguc

SEQ ID NO: 18480 - RNA, 19 nt, Artificial Sequence
  Description of Artificial Sequence: Synthetic oligonucleotide
  Sense strand starting at position 2192 of SEQ ID NO: 196
agucaauuagacuguaaga

SEQ ID NO: 18481 - RNA, 19 nt, Artificial Sequence
  Description of Artificial Sequence: Synthetic oligonucleotide
  Antisense strand to SEQ ID NO: 18480
ucuuacagucuaauugacu

SEQ ID NO: 18482 - RNA, 19 nt, Artificial Sequence
  Description of Artificial Sequence: Synthetic oligonucleotide
  Sense strand starting at position 2017 of SEQ ID NO: 196
caucguucagcggaugaga

SEQ ID NO: 18483 - RNA, 19 nt, Artificial Sequence
  Description of Artificial Sequence: Synthetic oligonucleotide
  Antisense strand to SEQ ID NO: 18482
ucucauccgcugaacgaug

SEQ ID NO: 18484 - RNA, 19 nt, Artificial Sequence
  Description of Artificial Sequence: Synthetic oligonucleotide
  Sense strand starting at position 1462 of SEQ ID NO: 196
gcuggaagcauguagauca

SEQ ID NO: 18485 - RNA, 19 nt, Artificial Sequence
  Description of Artificial Sequence: Synthetic oligonucleotide
  Antisense strand to SEQ ID NO: 18484
ugaucuacaugcuuccagc

SEQ ID NO: 18486 - RNA, 19 nt, Artificial Sequence
  Description of Artificial Sequence: Synthetic oligonucleotide
  Sense strand starting at position 1170 of SEQ ID NO: 196
ugggauuccagccgaaaug

SEQ ID NO: 18487 - RNA, 19 nt, Artificial Sequence
  Description of Artificial Sequence: Synthetic oligonucleotide
  Antisense strand to SEQ ID NO: 18486
cauuucggcuggaauccca

SEQ ID NO: 18488 - RNA, 19 nt, Artificial Sequence
  Description of Artificial Sequence: Synthetic oligonucleotide
  Sense strand starting at position 1094 of SEQ ID NO: 196
ucauuacaccgaugaggaa

SEQ ID NO: 18489 - RNA, 19 nt, Artificial Sequence
  Description of Artificial Sequence: Synthetic oligonucleotide
  Antisense strand to SEQ ID NO: 18488
uuccucaucgguguaauga

SEQ ID NO: 18490 - RNA, 19 nt, Artificial Sequence
  Description of Artificial Sequence: Synthetic oligonucleotide
  Sense strand starting at position 1050 of SEQ ID NO: 196
uguggauaaccucaacugu

SEQ ID NO: 18491 - RNA, 19 nt, Artificial Sequence
  Description of Artificial Sequence: Synthetic oligonucleotide
  Antisense strand to SEQ ID NO: 18490
acaguugagguuauccaca

SEQ ID NO: 18492 - RNA, 19 nt, Artificial Sequence
  Description of Artificial Sequence: Synthetic oligonucleotide
  Sense strand starting at position 1040 of SEQ ID NO: 196
aaaugcuuccuguggauaa

SEQ ID NO: 18493 - RNA, 19 nt, Artificial Sequence
  Description of Artificial Sequence: Synthetic oligonucleotide
  Antisense strand to SEQ ID NO: 18492
uuauccacaggaagcauuu

SEQ ID NO: 18494 - RNA, 19 nt, Artificial Sequence
  Description of Artificial Sequence: Synthetic oligonucleotide
  Sense strand starting at position 1037 of SEQ ID NO: 196
ccuaaaugcuuccugugga

SEQ ID NO: 18495 - RNA, 19 nt, Artificial Sequence
  Description of Artificial Sequence: Synthetic oligonucleotide
  Antisense strand to SEQ ID NO: 18494
uccacaggaagcauuuagg

SEQ ID NO: 18496 - RNA, 19 nt, Artificial Sequence
  Description of Artificial Sequence: Synthetic oligonucleotide
  Sense strand starting at position 1025 of SEQ ID NO: 196
ugagccaguucuccuaaau

SEQ ID NO: 18497 - RNA, 19 nt, Artificial Sequence
  Description of Artificial Sequence: Synthetic oligonucleotide
  Antisense strand to SEQ ID NO: 18496
auuuaggagaacuggcuca

SEQ ID NO: 18498 - RNA, 19 nt, Artificial Sequence
  Description of Artificial Sequence: Synthetic oligonucleotide
  Sense strand starting at position 1024 of SEQ ID NO: 196
cugagccaguucuccuaaa

SEQ ID NO: 18499 - RNA, 19 nt, Artificial Sequence
  Description of Artificial Sequence: Synthetic oligonucleotide
  Antisense strand to SEQ ID NO: 18498
uuuaggagaacuggcucag

SEQ ID NO: 18500 - RNA, 19 nt, Artificial Sequence
  Description of Artificial Sequence: Synthetic oligonucleotide
  Sense strand starting at position 1009 of SEQ ID NO: 196
guuacugaugucuaccuga

SEQ ID NO: 18501 - RNA, 19 nt, Artificial Sequence
  Description of Artificial Sequence: Synthetic oligonucleotide
  Antisense strand to SEQ ID NO: 18500
ucagguagacaucaguaac

SEQ ID NO: 18502 - RNA, 19 nt, Artificial Sequence
  Description of Artificial Sequence: Synthetic oligonucleotide
  Sense strand starting at position 906 of SEQ ID NO: 196
gggaauaccugacaggaua

SEQ ID NO: 18503 - RNA, 19 nt, Artificial Sequence
  Description of Artificial Sequence: Synthetic oligonucleotide
  Antisense strand to SEQ ID NO: 18502
uauccugucagguauuccc

SEQ ID NO: 18504 - RNA, 19 nt, Artificial Sequence
  Description of Artificial Sequence: Synthetic oligonucleotide
  Sense strand starting at position 773 of SEQ ID NO: 196
guaacacuguucccugauc

SEQ ID NO: 18505 - RNA, 19 nt, Artificial Sequence
  Description of Artificial Sequence: Synthetic oligonucleotide
  Antisense strand to SEQ ID NO: 18504
gaucagggaacaguguuac

SEQ ID NO: 18506 - RNA, 19 nt, Artificial Sequence
  Description of Artificial Sequence: Synthetic oligonucleotide
  Sense strand starting at position 771 of SEQ ID NO: 196
ggguaacacuguucccuga

SEQ ID NO: 18507 - RNA, 19 nt, Artificial Sequence
  Description of Artificial Sequence: Synthetic oligonucleotide
  Antisense strand to SEQ ID NO: 18506
ucagggaacaguguuaccc

SEQ ID NO: 18508 - RNA, 19 nt, Artificial Sequence
  Description of Artificial Sequence: Synthetic oligonucleotide
  Sense strand starting at position 735 of SEQ ID NO: 196
caacauaggcacugguaau

SEQ ID NO: 18509 - RNA, 19 nt, Artificial Sequence
  Description of Artificial Sequence: Synthetic oligonucleotide
  Antisense strand to SEQ ID NO: 18508
auuaccagugccuauguug

SEQ ID NO: 18510 - RNA, 19 nt, Artificial Sequence
  Description of Artificial Sequence: Synthetic oligonucleotide
  Sense strand starting at position 690 of SEQ ID NO: 196
cugaaauguggaugaugcu

SEQ ID NO: 18511 - RNA, 19 nt, Artificial Sequence
  Description of Artificial Sequence: Synthetic oligonucleotide
  Antisense strand to SEQ ID NO: 18510
agcaucauccacauuucag

SEQ ID NO: 18512 - RNA, 19 nt, Artificial Sequence
  Description of Artificial Sequence: Synthetic oligonucleotide
  Sense strand starting at position 679 of SEQ ID NO: 196
ucguauagaaucugaaaug

SEQ ID NO: 18513 - RNA, 19 nt, Artificial Sequence
  Description of Artificial Sequence: Synthetic oligonucleotide
  Antisense strand to SEQ ID NO: 18512
cauuucagauucuauacga

SEQ ID NO: 18514 - RNA, 19 nt, Artificial Sequence
  Description of Artificial Sequence: Synthetic oligonucleotide
  Sense strand starting at position 565 of SEQ ID NO: 196
ggccuuagggccuguagaa

SEQ ID NO: 18515 - RNA, 19 nt, Artificial Sequence
  Description of Artificial Sequence: Synthetic oligonucleotide
  Antisense strand to SEQ ID NO: 18514
uucuacaggcccuaaggcc

SEQ ID NO: 18516 - RNA, 19 nt, Artificial Sequence
  Description of Artificial Sequence: Synthetic oligonucleotide
  Sense strand starting at position 413 of SEQ ID NO: 196
aggucugucccauaggaac

SEQ ID NO: 18517 - RNA, 19 nt, Artificial Sequence
  Description of Artificial Sequence: Synthetic oligonucleotide
  Antisense strand to SEQ ID NO: 18516
guuccuaugggacagaccu

SEQ ID NO: 18518 - RNA, 19 nt, Artificial Sequence
  Description of Artificial Sequence: Synthetic oligonucleotide
  Sense strand starting at position 267 of SEQ ID NO: 196
gaguuaagaccaggucucu

SEQ ID NO: 18519 - RNA, 19 nt, Artificial Sequence
  Description of Artificial Sequence: Synthetic oligonucleotide
  Antisense strand to SEQ ID NO: 18518
agagaccuggucuuaacuc

SEQ ID NO: 18520 - RNA, 19 nt, Artificial Sequence
  Description of Artificial Sequence: Synthetic oligonucleotide
  Sense strand starting at position 73 of SEQ ID NO: 196
cugagagcucagcagucau

SEQ ID NO: 18521 - RNA, 19 nt, Artificial Sequence
  Description of Artificial Sequence: Synthetic oligonucleotide
  Antisense strand to SEQ ID NO: 18520
augacugcugagcucucag

SEQ ID NO: 18522 - RNA, 19 nt, Artificial Sequence
  Description of Artificial Sequence: Synthetic oligonucleotide
  Sense strand starting at position 56 of SEQ ID NO: 197
gcagaauuccucuguaugg

SEQ ID NO: 18523 - RNA, 19 nt, Artificial Sequence
  Description of Artificial Sequence: Synthetic oligonucleotide
  Antisense strand to SEQ ID NO: 18522
ccauacagaggaauucugc

SEQ ID NO: 18524 - RNA, 19 nt, Artificial Sequence
  Description of Artificial Sequence: Synthetic oligonucleotide
  Sense strand starting at position 57 of SEQ ID NO: 197
cagaauuccucuguauggu

SEQ ID NO: 18525 - RNA, 19 nt, Artificial Sequence
  Description of Artificial Sequence: Synthetic oligonucleotide
  Antisense strand to SEQ ID NO: 18524
accauacagaggaauucug

SEQ ID NO: 18526 - RNA, 19 nt, Artificial Sequence
  Description of Artificial Sequence: Synthetic oligonucleotide
  Sense strand starting at position 58 of SEQ ID NO: 197
agaauuccucuguaugguu

SEQ ID NO: 18527 - RNA, 19 nt, Artificial Sequence
  Description of Artificial Sequence: Synthetic oligonucleotide
  Antisense strand to SEQ ID NO: 18526
aaccauacagaggaauucu

SEQ ID NO: 18528 - RNA, 19 nt, Artificial Sequence
  Description of Artificial Sequence: Synthetic oligonucleotide
  Sense strand starting at position 107 of SEQ ID NO: 197
ccauuucggcugugagcaa

SEQ ID NO: 18529 - RNA, 19 nt, Artificial Sequence
  Description of Artificial Sequence: Synthetic oligonucleotide
  Antisense strand to SEQ ID NO: 18528
uugcucacagccgaaaugg

SEQ ID NO: 18530 - RNA, 19 nt, Artificial Sequence
  Description of Artificial Sequence: Synthetic oligonucleotide
  Sense strand starting at position 252 of SEQ ID NO: 197
ugagaauucucccugcaug

SEQ ID NO: 18531 - RNA, 19 nt, Artificial Sequence
  Description of Artificial Sequence: Synthetic oligonucleotide
  Antisense strand to SEQ ID NO: 18530
caugcagggagaauucuca

SEQ ID NO: 18532 - RNA, 19 nt, Artificial Sequence
  Description of Artificial Sequence: Synthetic oligonucleotide
  Sense strand starting at position 356 of SEQ ID NO: 197
cuuuguuuacauuagagua

SEQ ID NO: 18533 - RNA, 19 nt, Artificial Sequence
  Description of Artificial Sequence: Synthetic oligonucleotide
  Antisense strand to SEQ ID NO: 18532
uacucuaauguaaacaaag

SEQ ID NO: 18534 - RNA, 19 nt, Artificial Sequence
  Description of Artificial Sequence: Synthetic oligonucleotide
  Sense strand starting at position 408 of SEQ ID NO: 197
gccacuuacuguuuggaga

SEQ ID NO: 18535 - RNA, 19 nt, Artificial Sequence
  Description of Artificial Sequence: Synthetic oligonucleotide
  Antisense strand to SEQ ID NO: 18534
ucuccaaacaguaaguggc

SEQ ID NO: 18536 - RNA, 19 nt, Artificial Sequence
  Description of Artificial Sequence: Synthetic oligonucleotide
  Sense strand starting at position 409 of SEQ ID NO: 197
ccacuuacuguuuggagaa

SEQ ID NO: 18537 - RNA, 19 nt, Artificial Sequence
  Description of Artificial Sequence: Synthetic oligonucleotide
  Antisense strand to SEQ ID NO: 18536
uucuccaaacaguaagugg

SEQ ID NO: 18538 - RNA, 19 nt, Artificial Sequence
  Description of Artificial Sequence: Synthetic oligonucleotide
  Sense strand starting at position 504 of SEQ ID NO: 197
ggccauuucucagcguugu

SEQ ID NO: 18539 - RNA, 19 nt, Artificial Sequence
  Description of Artificial Sequence: Synthetic oligonucleotide
  Antisense strand to SEQ ID NO: 18538
acaacgcugagaaauggcc

SEQ ID NO: 18540 - RNA, 19 nt, Artificial Sequence
  Description of Artificial Sequence: Synthetic oligonucleotide
  Sense strand starting at position 508 of SEQ ID NO: 197
auuucucagcguuguguuu

SEQ ID NO: 18541 - RNA, 19 nt, Artificial Sequence
  Description of Artificial Sequence: Synthetic oligonucleotide
  Antisense strand to SEQ ID NO: 18540
aaacacaacgcugagaaau

SEQ ID NO: 18542 - RNA, 19 nt, Artificial Sequence
  Description of Artificial Sequence: Synthetic oligonucleotide
  Sense strand starting at position 549 of SEQ ID NO: 197
gagguaaugucucccuaug

SEQ ID NO: 18543 - RNA, 19 nt, Artificial Sequence
  Description of Artificial Sequence: Synthetic oligonucleotide
  Antisense strand to SEQ ID NO: 18542
cauagggagacauuaccuc

SEQ ID NO: 18544 - RNA, 19 nt, Artificial Sequence
  Description of Artificial Sequence: Synthetic oligonucleotide
  Sense strand starting at position 551 of SEQ ID NO: 197
gguaaugucucccuaugga

SEQ ID NO: 18545 - RNA, 19 nt, Artificial Sequence
  Description of Artificial Sequence: Synthetic oligonucleotide
  Antisense strand to SEQ ID NO: 18544
uccauagggagacauuacc

SEQ ID NO: 18546 - RNA, 19 nt, Artificial Sequence
  Description of Artificial Sequence: Synthetic oligonucleotide
  Sense strand starting at position 648 of SEQ ID NO: 197
ccaucuuguguguaagcau

SEQ ID NO: 18547 - RNA, 19 nt, Artificial Sequence
  Description of Artificial Sequence: Synthetic oligonucleotide
  Antisense strand to SEQ ID NO: 18546
augcuuacacacaagaugg

SEQ ID NO: 18548 - RNA, 19 nt, Artificial Sequence
  Description of Artificial Sequence: Synthetic oligonucleotide
  Sense strand starting at position 679 of SEQ ID NO: 197
gugugcuucguuccuguga

SEQ ID NO: 18549 - RNA, 19 nt, Artificial Sequence
  Description of Artificial Sequence: Synthetic oligonucleotide
  Antisense strand to SEQ ID NO: 18548
ucacaggaacgaagcacac

SEQ ID NO: 18550 - RNA, 19 nt, Artificial Sequence
  Description of Artificial Sequence: Synthetic oligonucleotide
  Sense strand starting at position 806 of SEQ ID NO: 197
ucaugaaaccgugaaagcu

SEQ ID NO: 18551 - RNA, 19 nt, Artificial Sequence
  Description of Artificial Sequence: Synthetic oligonucleotide
  Antisense strand to SEQ ID NO: 18550
agcuuucacgguuucauga

SEQ ID NO: 18552 - RNA, 19 nt, Artificial Sequence
  Description of Artificial Sequence: Synthetic oligonucleotide
  Sense strand starting at position 1053 of SEQ ID NO: 197
cucuuugaacucugccaga

SEQ ID NO: 18553 - RNA, 19 nt, Artificial Sequence
  Description of Artificial Sequence: Synthetic oligonucleotide
  Antisense strand to SEQ ID NO: 18552
ucuggcagaguucaaagag

SEQ ID NO: 18554 - RNA, 19 nt, Artificial Sequence
  Description of Artificial Sequence: Synthetic oligonucleotide
  Sense strand starting at position 1066 of SEQ ID NO: 197
gccagagacuauucugcau

SEQ ID NO: 18555 - RNA, 19 nt, Artificial Sequence
  Description of Artificial Sequence: Synthetic oligonucleotide
  Antisense strand to SEQ ID NO: 18554
augcagaauagucucuggc

SEQ ID NO: 18556 - RNA, 19 nt, Artificial Sequence
  Description of Artificial Sequence: Synthetic oligonucleotide
  Sense strand starting at position 1081 of SEQ ID NO: 197
gcauuugaggccuggcgau

SEQ ID NO: 18557 - RNA, 19 nt, Artificial Sequence
  Description of Artificial Sequence: Synthetic oligonucleotide
  Antisense strand to SEQ ID NO: 18556
aucgccaggccucaaaugc

SEQ ID NO: 18558 - RNA, 19 nt, Artificial Sequence
  Description of Artificial Sequence: Synthetic oligonucleotide
  Sense strand starting at position 1147 of SEQ ID NO: 197
gcggguuuggugcagaaac

SEQ ID NO: 18559 - RNA, 19 nt, Artificial Sequence
  Description of Artificial Sequence: Synthetic oligonucleotide
  Antisense strand to SEQ ID NO: 18558
guuucugcaccaaacccgc

SEQ ID NO: 18560 - RNA, 19 nt, Artificial Sequence
  Description of Artificial Sequence: Synthetic oligonucleotide
  Sense strand starting at position 1302 of SEQ ID NO: 197
gcggcuuugaccgucuauu

SEQ ID NO: 18561 - RNA, 19 nt, Artificial Sequence
  Description of Artificial Sequence: Synthetic oligonucleotide
  Antisense strand to SEQ ID NO: 18560
aauagacggucaaagccgc

SEQ ID NO: 18562 - RNA, 19 nt, Artificial Sequence
  Description of Artificial Sequence: Synthetic oligonucleotide
  Sense strand starting at position 1651 of SEQ ID NO: 197
agacgagcucucggaggau

SEQ ID NO: 18563 - RNA, 19 nt, Artificial Sequence
  Description of Artificial Sequence: Synthetic oligonucleotide
  Antisense strand to SEQ ID NO: 18562
auccuccgagagcucgucu

SEQ ID NO: 18564 - RNA, 19 nt, Artificial Sequence
  Description of Artificial Sequence: Synthetic oligonucleotide
  Sense strand starting at position 2377 of SEQ ID NO: 197
gucgccucuggcuuaacau

SEQ ID NO: 18565 - RNA, 19 nt, Artificial Sequence
  Description of Artificial Sequence: Synthetic oligonucleotide
  Antisense strand to SEQ ID NO: 18564
auguuaagccagaggcgac

SEQ ID NO: 18566 - RNA, 19 nt, Artificial Sequence
  Description of Artificial Sequence: Synthetic oligonucleotide
  Sense strand starting at position 2378 of SEQ ID NO: 197
ucgccucuggcuuaacaua

SEQ ID NO: 18567 - RNA, 19 nt, Artificial Sequence
  Description of Artificial Sequence: Synthetic oligonucleotide
  Antisense strand to SEQ ID NO: 18566
uauguuaagccagaggcga

SEQ ID NO: 18568 - RNA, 19 nt, Artificial Sequence
  Description of Artificial Sequence: Synthetic oligonucleotide
  Sense strand starting at position 2450 of SEQ ID NO: 197
uggacuucuagaggcugaa

SEQ ID NO: 18569 - RNA, 19 nt, Artificial Sequence
  Description of Artificial Sequence: Synthetic oligonucleotide
  Antisense strand to SEQ ID NO: 18568
uucagccucuagaagucca

SEQ ID NO: 18570 - RNA, 19 nt, Artificial Sequence
  Description of Artificial Sequence: Synthetic oligonucleotide
  Sense strand starting at position 3096 of SEQ ID NO: 197
ccauuauuccagugcaaag

SEQ ID NO: 18571 - RNA, 19 nt, Artificial Sequence
  Description of Artificial Sequence: Synthetic oligonucleotide
  Antisense strand to SEQ ID NO: 18570
cuuugcacuggaauaaugg

SEQ ID NO: 18572 - RNA, 19 nt, Artificial Sequence
  Description of Artificial Sequence: Synthetic oligonucleotide
  Sense strand starting at position 3180 of SEQ ID NO: 197
guuaacuuuguacaagguu

SEQ ID NO: 18573 - RNA, 19 nt, Artificial Sequence
  Description of Artificial Sequence: Synthetic oligonucleotide
  Antisense strand to SEQ ID NO: 18572
aaccuuguacaaaguuaac

SEQ ID NO: 18574 - RNA, 19 nt, Artificial Sequence
  Description of Artificial Sequence: Synthetic oligonucleotide
  Sense strand starting at position 3309 of SEQ ID NO: 197
aguaaacauccauguuauu

SEQ ID NO: 18575 - RNA, 19 nt, Artificial Sequence
  Description of Artificial Sequence: Synthetic oligonucleotide
  Antisense strand to SEQ ID NO: 18574
aauaacauggauguuuacu

SEQ ID NO: 18576 - RNA, 19 nt, Artificial Sequence
  Description of Artificial Sequence: Synthetic oligonucleotide
  Sense strand starting at position 3320 of SEQ ID NO: 197
auguuauuccuauagucca

SEQ ID NO: 18577 - RNA, 19 nt, Artificial Sequence
  Description of Artificial Sequence: Synthetic oligonucleotide
  Antisense strand to SEQ ID NO: 18576
uggacuauaggaauaacau

SEQ ID NO: 18578 - RNA, 19 nt, Artificial Sequence
  Description of Artificial Sequence: Synthetic oligonucleotide
  Sense strand starting at position 3368 of SEQ ID NO: 197
ugguaaugguuucuuggaa

SEQ ID NO: 18579 - RNA, 19 nt, Artificial Sequence
  Description of Artificial Sequence: Synthetic oligonucleotide
  Antisense strand to SEQ ID NO: 18578
uuccaagaaaccauuacca

SEQ ID NO: 18580 - RNA, 19 nt, Artificial Sequence
  Description of Artificial Sequence: Synthetic oligonucleotide
  Sense strand starting at position 3369 of SEQ ID NO: 197
gguaaugguuucuuggaaa

SEQ ID NO: 18581 - RNA, 19 nt, Artificial Sequence
  Description of Artificial Sequence: Synthetic oligonucleotide
  Antisense strand to SEQ ID NO: 18580
uuuccaagaaaccauuacc

SEQ ID NO: 18582 - RNA, 19 nt, Artificial Sequence
  Description of Artificial Sequence: Synthetic oligonucleotide
  Sense strand starting at position 3435 of SEQ ID NO: 197
ugucauaaauaugucguaa

SEQ ID NO: 18583 - RNA, 19 nt, Artificial Sequence
  Description of Artificial Sequence: Synthetic oligonucleotide
  Antisense strand to SEQ ID NO: 18582
uuacgacauauuuaugaca

SEQ ID NO: 18584 - RNA, 19 nt, Artificial Sequence
  Description of Artificial Sequence: Synthetic oligonucleotide
  Sense strand starting at position 3543 of SEQ ID NO: 197
ccucguuccauuguacgua

SEQ ID NO: 18585 - RNA, 19 nt, Artificial Sequence
  Description of Artificial Sequence: Synthetic oligonucleotide
  Antisense strand to SEQ ID NO: 18584
uacguacaauggaacgagg

SEQ ID NO: 18586 - RNA, 19 nt, Artificial Sequence
  Description of Artificial Sequence: Synthetic oligonucleotide
  Sense strand starting at position 3583 of SEQ ID NO: 197
ucccuaauagcuggacauu

SEQ ID NO: 18587 - RNA, 19 nt, Artificial Sequence
  Description of Artificial Sequence: Synthetic oligonucleotide
  Antisense strand to SEQ ID NO: 18586
aauguccagcuauuaggga

SEQ ID NO: 18588 - RNA, 19 nt, Artificial Sequence
  Description of Artificial Sequence: Synthetic oligonucleotide
  Sense strand starting at position 3679 of SEQ ID NO: 197
gguacaucuaucuguagga

SEQ ID NO: 18589 - RNA, 19 nt, Artificial Sequence
  Description of Artificial Sequence: Synthetic oligonucleotide
  Antisense strand to SEQ ID NO: 18588
uccuacagauagauguacc

SEQ ID NO: 18590 - RNA, 19 nt, Artificial Sequence
  Description of Artificial Sequence: Synthetic oligonucleotide
  Sense strand starting at position 3680 of SEQ ID NO: 197
guacaucuaucuguaggau

SEQ ID NO: 18591 - RNA, 19 nt, Artificial Sequence
  Description of Artificial Sequence: Synthetic oligonucleotide
  Antisense strand to SEQ ID NO: 18590
auccuacagauagauguac

SEQ ID NO: 18592 - RNA, 19 nt, Artificial Sequence
  Description of Artificial Sequence: Synthetic oligonucleotide
  Sense strand starting at position 3683 of SEQ ID NO: 197
caucuaucuguaggauaga

SEQ ID NO: 18593 - RNA, 19 nt, Artificial Sequence
  Description of Artificial Sequence: Synthetic oligonucleotide
  Antisense strand to SEQ ID NO: 18592
ucuauccuacagauagaug

SEQ ID NO: 18594 - RNA, 19 nt, Artificial Sequence
  Description of Artificial Sequence: Synthetic oligonucleotide
  Sense strand starting at position 3694 of SEQ ID NO: 197
aggauagauuccuagaaag

SEQ ID NO: 18595 - RNA, 19 nt, Artificial Sequence
  Description of Artificial Sequence: Synthetic oligonucleotide
  Antisense strand to SEQ ID NO: 18594
cuuucuaggaaucuauccu

SEQ ID NO: 18596 - RNA, 19 nt, Artificial Sequence
  Description of Artificial Sequence: Synthetic oligonucleotide
  Sense strand starting at position 3730 of SEQ ID NO: 197
agguuugugcguucuuaau

SEQ ID NO: 18597 - RNA, 19 nt, Artificial Sequence
  Description of Artificial Sequence: Synthetic oligonucleotide
  Antisense strand to SEQ ID NO: 18596
auuaagaacgcacaaaccu

SEQ ID NO: 18598 - RNA, 19 nt, Artificial Sequence
  Description of Artificial Sequence: Synthetic oligonucleotide
  Sense strand starting at position 3809 of SEQ ID NO: 197
uccuuagcaaugugugaga

SEQ ID NO: 18599 - RNA, 19 nt, Artificial Sequence
  Description of Artificial Sequence: Synthetic oligonucleotide
  Antisense strand to SEQ ID NO: 18598
ucucacacauugcuaagga

SEQ ID NO: 18600 - RNA, 19 nt, Artificial Sequence
  Description of Artificial Sequence: Synthetic oligonucleotide
  Sense strand starting at position 3811 of SEQ ID NO: 197
cuuagcaaugugugagagu

SEQ ID NO: 18601 - RNA, 19 nt, Artificial Sequence
  Description of Artificial Sequence: Synthetic oligonucleotide
  Antisense strand to SEQ ID NO: 18600
acucucacacauugcuaag

SEQ ID NO: 18602 - RNA, 19 nt, Artificial Sequence
  Description of Artificial Sequence: Synthetic oligonucleotide
  Sense strand starting at position 162 of SEQ ID NO: 200
cucucuacugugcaggaaa

SEQ ID NO: 18603 - RNA, 19 nt, Artificial Sequence
  Description of Artificial Sequence: Synthetic oligonucleotide
  Antisense strand to SEQ ID NO: 18602
uuuccugcacaguagagag

SEQ ID NO: 18604 - RNA, 19 nt, Artificial Sequence
  Description of Artificial Sequence: Synthetic oligonucleotide
  Sense strand starting at position 191 of SEQ ID NO: 200
uguccugacucagucuaau

SEQ ID NO: 18605 - RNA, 19 nt, Artificial Sequence
  Description of Artificial Sequence: Synthetic oligonucleotide
  Antisense strand to SEQ ID NO: 18604
auuagacugagucaggaca

SEQ ID NO: 18606 - RNA, 19 nt, Artificial Sequence
  Description of Artificial Sequence: Synthetic oligonucleotide
  Sense strand starting at position 236 of SEQ ID NO: 200
gucaaagacucugcaucuu

SEQ ID NO: 18607 - RNA, 19 nt, Artificial Sequence
  Description of Artificial Sequence: Synthetic oligonucleotide
  Antisense strand to SEQ ID NO: 18606
aagaugcagagucuuugac

SEQ ID NO: 18608 - RNA, 19 nt, Artificial Sequence
  Description of Artificial Sequence: Synthetic oligonucleotide
  Sense strand starting at position 354 of SEQ ID NO: 200
cuuugaaauguuugugaac

SEQ ID NO: 18609 - RNA, 19 nt, Artificial Sequence
  Description of Artificial Sequence: Synthetic oligonucleotide
  Antisense strand to SEQ ID NO: 18608
guucacaaacauuucaaag

SEQ ID NO: 18610 - RNA, 19 nt, Artificial Sequence
  Description of Artificial Sequence: Synthetic oligonucleotide
  Sense strand starting at position 355 of SEQ ID NO: 200
uuugaaauguuugugaacu

SEQ ID NO: 18611 - RNA, 19 nt, Artificial Sequence
  Description of Artificial Sequence: Synthetic oligonucleotide
  Antisense strand to SEQ ID NO: 18610
aguucacaaacauuucaaa

SEQ ID NO: 18612 - RNA, 19 nt, Artificial Sequence
  Description of Artificial Sequence: Synthetic oligonucleotide
  Sense strand starting at position 393 of SEQ ID NO: 200
uuacaaugaugucucaaag

SEQ ID NO: 18613 - RNA, 19 nt, Artificial Sequence
  Description of Artificial Sequence: Synthetic oligonucleotide
  Antisense strand to SEQ ID NO: 18612
cuuugagacaucauuguaa

SEQ ID NO: 18614 - RNA, 19 nt, Artificial Sequence
  Description of Artificial Sequence: Synthetic oligonucleotide
  Sense strand starting at position 507 of SEQ ID NO: 200
ucauaaugguuaucugaug

SEQ ID NO: 18615 - RNA, 19 nt, Artificial Sequence
  Description of Artificial Sequence: Synthetic oligonucleotide
  Antisense strand to SEQ ID NO: 18614
caucagauaaccauuauga

SEQ ID NO: 18616 - RNA, 19 nt, Artificial Sequence
  Description of Artificial Sequence: Synthetic oligonucleotide
  Sense strand starting at position 521 of SEQ ID NO: 200
ugaugugagcuuuaagaac

SEQ ID NO: 18617 - RNA, 19 nt, Artificial Sequence
  Description of Artificial Sequence: Synthetic oligonucleotide
  Antisense strand to SEQ ID NO: 18616
guucuuaaagcucacauca

SEQ ID NO: 18618 - RNA, 19 nt, Artificial Sequence
  Description of Artificial Sequence: Synthetic oligonucleotide
  Sense strand starting at position 603 of SEQ ID NO: 200
caacuuggaucuguaguuu

SEQ ID NO: 18619 - RNA, 19 nt, Artificial Sequence
  Description of Artificial Sequence: Synthetic oligonucleotide
  Antisense strand to SEQ ID NO: 18618
aaacuacagauccaaguug

SEQ ID NO: 18620 - RNA, 19 nt, Artificial Sequence
  Description of Artificial Sequence: Synthetic oligonucleotide
  Sense strand starting at position 620 of SEQ ID NO: 200
uuuauaacuucucuggaga

SEQ ID NO: 18621 - RNA, 19 nt, Artificial Sequence
  Description of Artificial Sequence: Synthetic oligonucleotide
  Antisense strand to SEQ ID NO: 18620
ucuccagagaaguuauaaa

SEQ ID NO: 18622 - RNA, 19 nt, Artificial Sequence
  Description of Artificial Sequence: Synthetic oligonucleotide
  Sense strand starting at position 621 of SEQ ID NO: 200
uuauaacuucucuggagag

SEQ ID NO: 18623 - RNA, 19 nt, Artificial Sequence
  Description of Artificial Sequence: Synthetic oligonucleotide
  Antisense strand to SEQ ID NO: 18622
cucuccagagaaguuauaa

SEQ ID NO: 18624 - RNA, 19 nt, Artificial Sequence
  Description of Artificial Sequence: Synthetic oligonucleotide
  Sense strand starting at position 705 of SEQ ID NO: 200
uuugcuuggguuuaggaau

SEQ ID NO: 18625 - RNA, 19 nt, Artificial Sequence
  Description of Artificial Sequence: Synthetic oligonucleotide
  Antisense strand to SEQ ID NO: 18624
auuccuaaacccaagcaaa

SEQ ID NO: 18626 - RNA, 19 nt, Artificial Sequence
  Description of Artificial Sequence: Synthetic oligonucleotide
  Sense strand starting at position 752 of SEQ ID NO: 200
acuuaugaagucuagccaa

SEQ ID NO: 18627 - RNA, 19 nt, Artificial Sequence
  Description of Artificial Sequence: Synthetic oligonucleotide
  Antisense strand to SEQ ID NO: 18626
uuggcuagacuucauaagu

SEQ ID NO: 18628 - RNA, 19 nt, Artificial Sequence
  Description of Artificial Sequence: Synthetic oligonucleotide
  Sense strand starting at position 755 of SEQ ID NO: 200
uaugaagucuagccaaaug

SEQ ID NO: 18629 - RNA, 19 nt, Artificial Sequence
  Description of Artificial Sequence: Synthetic oligonucleotide
  Antisense strand to SEQ ID NO: 18628
cauuuggcuagacuucaua

SEQ ID NO: 18630 - RNA, 19 nt, Artificial Sequence
  Description of Artificial Sequence: Synthetic oligonucleotide
  Sense strand starting at position 786 of SEQ ID NO: 200
auaauuccuccauggauug

SEQ ID NO: 18631 - RNA, 19 nt, Artificial Sequence
  Description of Artificial Sequence: Synthetic oligonucleotide
  Antisense strand to SEQ ID NO: 18630
caauccauggaggaauuau

SEQ ID NO: 18632 - RNA, 19 nt, Artificial Sequence
  Description of Artificial Sequence: Synthetic oligonucleotide
  Sense strand starting at position 834 of SEQ ID NO: 200
ccgauaagguucuuaagau

SEQ ID NO: 18633 - RNA, 19 nt, Artificial Sequence
  Description of Artificial Sequence: Synthetic oligonucleotide
  Antisense strand to SEQ ID NO: 18632
aucuuaagaaccuuaucgg

SEQ ID NO: 18634 - RNA, 19 nt, Artificial Sequence
  Description of Artificial Sequence: Synthetic oligonucleotide
  Sense strand starting at position 841 of SEQ ID NO: 200
gguucuuaagauuagcauc

SEQ ID NO: 18635 - RNA, 19 nt, Artificial Sequence
  Description of Artificial Sequence: Synthetic oligonucleotide
  Antisense strand to SEQ ID NO: 18634
gaugcuaaucuuaagaacc

SEQ ID NO: 18636 - RNA, 19 nt, Artificial Sequence
  Description of Artificial Sequence: Synthetic oligonucleotide
  Sense strand starting at position 869 of SEQ ID NO: 200
agcaguucugccuauauga

SEQ ID NO: 18637 - RNA, 19 nt, Artificial Sequence
  Description of Artificial Sequence: Synthetic oligonucleotide
  Antisense strand to SEQ ID NO: 18636
ucauauaggcagaacugcu

SEQ ID NO: 18638 - RNA, 19 nt, Artificial Sequence
  Description of Artificial Sequence: Synthetic oligonucleotide
  Sense strand starting at position 896 of SEQ ID NO: 200
uuuagaccuugguuaguca

SEQ ID NO: 18639 - RNA, 19 nt, Artificial Sequence
  Description of Artificial Sequence: Synthetic oligonucleotide
  Antisense strand to SEQ ID NO: 18638
ugacuaaccaaggucuaaa

SEQ ID NO: 18640 - RNA, 19 nt, Artificial Sequence
  Description of Artificial Sequence: Synthetic oligonucleotide
  Sense strand starting at position 903 of SEQ ID NO: 200
cuugguuagucauccugga

SEQ ID NO: 18641 - RNA, 19 nt, Artificial Sequence
  Description of Artificial Sequence: Synthetic oligonucleotide
  Antisense strand to SEQ ID NO: 18640
uccaggaugacuaaccaag

SEQ ID NO: 18642 - RNA, 19 nt, Artificial Sequence
  Description of Artificial Sequence: Synthetic oligonucleotide
  Sense strand starting at position 907 of SEQ ID NO: 200
guuagucauccuggaaaug

SEQ ID NO: 18643 - RNA, 19 nt, Artificial Sequence
  Description of Artificial Sequence: Synthetic oligonucleotide
  Antisense strand to SEQ ID NO: 18642
cauuuccaggaugacuaac

SEQ ID NO: 18644 - RNA, 19 nt, Artificial Sequence
  Description of Artificial Sequence: Synthetic oligonucleotide
  Sense strand starting at position 945 of SEQ ID NO: 200
uuuagagaaaguuggaguu

SEQ ID NO: 18645 - RNA, 19 nt, Artificial Sequence
  Description of Artificial Sequence: Synthetic oligonucleotide
  Antisense strand to SEQ ID NO: 18644
aacuccaacuuucucuaaa

SEQ ID NO: 18646 - RNA, 19 nt, Artificial Sequence
  Description of Artificial Sequence: Synthetic oligonucleotide
  Sense strand starting at position 948 of SEQ ID NO: 200
agagaaaguuggaguugga

SEQ ID NO: 18647 - RNA, 19 nt, Artificial Sequence
  Description of Artificial Sequence: Synthetic oligonucleotide
  Antisense strand to SEQ ID NO: 18646
uccaacuccaacuuucucu

SEQ ID NO: 18648 - RNA, 19 nt, Artificial Sequence
  Description of Artificial Sequence: Synthetic oligonucleotide
  Sense strand starting at position 1249 of SEQ ID NO: 200
agauaaagucaagguuuaa

SEQ ID NO: 18649 - RNA, 19 nt, Artificial Sequence
  Description of Artificial Sequence: Synthetic oligonucleotide
  Antisense strand to SEQ ID NO: 18648
uuaaaccuugacuuuaucu

SEQ ID NO: 18650 - RNA, 19 nt, Artificial Sequence
  Description of Artificial Sequence: Synthetic oligonucleotide
  Sense strand starting at position 1467 of SEQ ID NO: 200
gugucuacaccugauuaca

SEQ ID NO: 18651 - RNA, 19 nt, Artificial Sequence
  Description of Artificial Sequence: Synthetic oligonucleotide
  Antisense strand to SEQ ID NO: 18650
uguaaucagguguagacac

SEQ ID NO: 18652 - RNA, 19 nt, Artificial Sequence
  Description of Artificial Sequence: Synthetic oligonucleotide
  Sense strand starting at position 1537 of SEQ ID NO: 200
ggcuguacgaucuaucgga

SEQ ID NO: 18653 - RNA, 19 nt, Artificial Sequence
  Description of Artificial Sequence: Synthetic oligonucleotide
  Antisense strand to SEQ ID NO: 18652
uccgauagaucguacagcc

SEQ ID NO: 18654 - RNA, 19 nt, Artificial Sequence
  Description of Artificial Sequence: Synthetic oligonucleotide
  Sense strand starting at position 1541 of SEQ ID NO: 200
guacgaucuaucggaaccu

SEQ ID NO: 18655 - RNA, 19 nt, Artificial Sequence
  Description of Artificial Sequence: Synthetic oligonucleotide
  Antisense strand to SEQ ID NO: 18654
agguuccgauagaucguac

SEQ ID NO: 18656 - RNA, 19 nt, Artificial Sequence
  Description of Artificial Sequence: Synthetic oligonucleotide
  Sense strand starting at position 1673 of SEQ ID NO: 200
agauguugucaacaguuac

SEQ ID NO: 18657 - RNA, 19 nt, Artificial Sequence
  Description of Artificial Sequence: Synthetic oligonucleotide
  Antisense strand to SEQ ID NO: 18656
guaacuguugacaacaucu

SEQ ID NO: 18658 - RNA, 19 nt, Artificial Sequence
  Description of Artificial Sequence: Synthetic oligonucleotide
  Sense strand starting at position 2641 of SEQ ID NO: 200
aggagccaguccucaagua

SEQ ID NO: 18659 - RNA, 19 nt, Artificial Sequence
  Description of Artificial Sequence: Synthetic oligonucleotide
  Antisense strand to SEQ ID NO: 18658
uacuugaggacuggcuccu

SEQ ID NO: 18660 - RNA, 19 nt, Artificial Sequence
  Description of Artificial Sequence: Synthetic oligonucleotide
  Sense strand starting at position 2642 of SEQ ID NO: 200
ggagccaguccucaaguau

SEQ ID NO: 18661 - RNA, 19 nt, Artificial Sequence
  Description of Artificial Sequence: Synthetic oligonucleotide
  Antisense strand to SEQ ID NO: 18660
auacuugaggacuggcucc

SEQ ID NO: 18662 - RNA, 19 nt, Artificial Sequence
  Description of Artificial Sequence: Synthetic oligonucleotide
  Sense strand starting at position 2654 of SEQ ID NO: 200
caaguauagcucgaucacu

SEQ ID NO: 18663 - RNA, 19 nt, Artificial Sequence
  Description of Artificial Sequence: Synthetic oligonucleotide
  Antisense strand to SEQ ID NO: 18662
agugaucgagcuauacuug

SEQ ID NO: 18664 - RNA, 19 nt, Artificial Sequence
  Description of Artificial Sequence: Synthetic oligonucleotide
  Sense strand starting at position 2664 of SEQ ID NO: 200
ucgaucacuuccuuucuga

SEQ ID NO: 18665 - RNA, 19 nt, Artificial Sequence
  Description of Artificial Sequence: Synthetic oligonucleotide
  Antisense strand to SEQ ID NO: 18664
ucagaaaggaagugaucga

SEQ ID NO: 18666 - RNA, 19 nt, Artificial Sequence
  Description of Artificial Sequence: Synthetic oligonucleotide
  Sense strand starting at position 2677 of SEQ ID NO: 200
uucugaagcucucuccaga

SEQ ID NO: 18667 - RNA, 19 nt, Artificial Sequence
  Description of Artificial Sequence: Synthetic oligonucleotide
  Antisense strand to SEQ ID NO: 18666
ucuggagagagcuucagaa

SEQ ID NO: 18668 - RNA, 19 nt, Artificial Sequence
  Description of Artificial Sequence: Synthetic oligonucleotide
  Sense strand starting at position 2730 of SEQ ID NO: 200
cgcguuauuuaauuaccca

SEQ ID NO: 18669 - RNA, 19 nt, Artificial Sequence
  Description of Artificial Sequence: Synthetic oligonucleotide
  Antisense strand to SEQ ID NO: 18668
uggguaauuaaauaacgcg

SEQ ID NO: 18670 - RNA, 19 nt, Artificial Sequence
  Description of Artificial Sequence: Synthetic oligonucleotide
  Sense strand starting at position 2756 of SEQ ID NO: 200
ugcuuugcucgucugcaga

SEQ ID NO: 18671 - RNA, 19 nt, Artificial Sequence
  Description of Artificial Sequence: Synthetic oligonucleotide
  Antisense strand to SEQ ID NO: 18670
ucugcagacgagcaaagca

SEQ ID NO: 18672 - RNA, 19 nt, Artificial Sequence
  Description of Artificial Sequence: Synthetic oligonucleotide
  Sense strand starting at position 2869 of SEQ ID NO: 200
cucguauggacguauugaa

SEQ ID NO: 18673 - RNA, 19 nt, Artificial Sequence
  Description of Artificial Sequence: Synthetic oligonucleotide
  Antisense strand to SEQ ID NO: 18672
uucaauacguccauacgag

SEQ ID NO: 18674 - RNA, 19 nt, Artificial Sequence
  Description of Artificial Sequence: Synthetic oligonucleotide
  Sense strand starting at position 3062 of SEQ ID NO: 200
acaauauguggucacuuga

SEQ ID NO: 18675 - RNA, 19 nt, Artificial Sequence
  Description of Artificial Sequence: Synthetic oligonucleotide
  Antisense strand to SEQ ID NO: 18674
ucaagugaccacauauugu

SEQ ID NO: 18676 - RNA, 19 nt, Artificial Sequence
  Description of Artificial Sequence: Synthetic oligonucleotide
  Sense strand starting at position 3069 of SEQ ID NO: 200
guggucacuugauuuaugu

SEQ ID NO: 18677 - RNA, 19 nt, Artificial Sequence
  Description of Artificial Sequence: Synthetic oligonucleotide
  Antisense strand to SEQ ID NO: 18676
acauaaaucaagugaccac

SEQ ID NO: 18678 - RNA, 19 nt, Artificial Sequence
  Description of Artificial Sequence: Synthetic oligonucleotide
  Sense strand starting at position 3566 of SEQ ID NO: 200
agacaaagacgaugucuua

SEQ ID NO: 18679 - RNA, 19 nt, Artificial Sequence
  Description of Artificial Sequence: Synthetic oligonucleotide
  Antisense strand to SEQ ID NO: 18678
uaagacaucgucuuugucu

SEQ ID NO: 18680 - RNA, 19 nt, Artificial Sequence
  Description of Artificial Sequence: Synthetic oligonucleotide
  Sense strand starting at position 3569 of SEQ ID NO: 200
caaagacgaugucuuaaac

SEQ ID NO: 18681 - RNA, 19 nt, Artificial Sequence
  Description of Artificial Sequence: Synthetic oligonucleotide
  Antisense strand to SEQ ID NO: 18680
guuuaagacaucgucuuug

SEQ ID NO: 18682 - RNA, 19 nt, Artificial Sequence
  Description of Artificial Sequence: Synthetic oligonucleotide
  Sense strand starting at position 72 of SEQ ID NO: 199
uacaguuuccagugaguga

SEQ ID NO: 18683 - RNA, 19 nt, Artificial Sequence
  Description of Artificial Sequence: Synthetic oligonucleotide
  Antisense strand to SEQ ID NO: 18682
ucacucacuggaaacugua

SEQ ID NO: 18684 - RNA, 19 nt, Artificial Sequence
  Description of Artificial Sequence: Synthetic oligonucleotide
  Sense strand starting at position 168 of SEQ ID NO: 199
guguuucuaccacagucaa

SEQ ID NO: 18685 - RNA, 19 nt, Artificial Sequence
  Description of Artificial Sequence: Synthetic oligonucleotide
  Antisense strand to SEQ ID NO: 18684
uugacugugguagaaacac

SEQ ID NO: 18686 - RNA, 19 nt, Artificial Sequence
  Description of Artificial Sequence: Synthetic oligonucleotide
  Sense strand starting at position 432 of SEQ ID NO: 199
cuucuauuagagugaaacc

SEQ ID NO: 18687 - RNA, 19 nt, Artificial Sequence
  Description of Artificial Sequence: Synthetic oligonucleotide
  Antisense strand to SEQ ID NO: 18686
gguuucacucuaauagaag

SEQ ID NO: 18688 - RNA, 19 nt, Artificial Sequence
  Description of Artificial Sequence: Synthetic oligonucleotide
  Sense strand starting at position 489 of SEQ ID NO: 199
cuccuagucuaucuuggaa

SEQ ID NO: 18689 - RNA, 19 nt, Artificial Sequence
  Description of Artificial Sequence: Synthetic oligonucleotide
  Antisense strand to SEQ ID NO: 18688
uuccaagauagacuaggag

SEQ ID NO: 18690 - RNA, 19 nt, Artificial Sequence
  Description of Artificial Sequence: Synthetic oligonucleotide
  Sense strand starting at position 519 of SEQ ID NO: 199
cuguuaauggcaugacuuc

SEQ ID NO: 18691 - RNA, 19 nt, Artificial Sequence
  Description of Artificial Sequence: Synthetic oligonucleotide
  Antisense strand to SEQ ID NO: 18690
gaagucaugccauuaacag

SEQ ID NO: 18692 - RNA, 19 nt, Artificial Sequence
  Description of Artificial Sequence: Synthetic oligonucleotide
  Sense strand starting at position 557 of SEQ ID NO: 199
gauccauauuuaggccaga

SEQ ID NO: 18693 - RNA, 19 nt, Artificial Sequence
  Description of Artificial Sequence: Synthetic oligonucleotide
  Antisense strand to SEQ ID NO: 18692
ucuggccuaaauauggauc

SEQ ID NO: 18694 - RNA, 19 nt, Artificial Sequence
  Description of Artificial Sequence: Synthetic oligonucleotide
  Sense strand starting at position 948 of SEQ ID NO: 199
aguccaauuucccaggaau

SEQ ID NO: 18695 - RNA, 19 nt, Artificial Sequence
  Description of Artificial Sequence: Synthetic oligonucleotide
  Antisense strand to SEQ ID NO: 18694
auuccugggaaauuggacu

SEQ ID NO: 18696 - RNA, 19 nt, Artificial Sequence
  Description of Artificial Sequence: Synthetic oligonucleotide
  Sense strand starting at position 1223 of SEQ ID NO: 199
aguucugaacccugagaug

SEQ ID NO: 18697 - RNA, 19 nt, Artificial Sequence
  Description of Artificial Sequence: Synthetic oligonucleotide
  Antisense strand to SEQ ID NO: 18696
caucucaggguucagaacu

SEQ ID NO: 18698 - RNA, 19 nt, Artificial Sequence
  Description of Artificial Sequence: Synthetic oligonucleotide
  Sense strand starting at position 1243 of SEQ ID NO: 199
uuugaaaccuggcugcaau

SEQ ID NO: 18699 - RNA, 19 nt, Artificial Sequence
  Description of Artificial Sequence: Synthetic oligonucleotide
  Antisense strand to SEQ ID NO: 18698
auugcagccagguuucaaa

SEQ ID NO: 18700 - RNA, 19 nt, Artificial Sequence
  Description of Artificial Sequence: Synthetic oligonucleotide
  Sense strand starting at position 1244 of SEQ ID NO: 199
uugaaaccuggcugcaauu

SEQ ID NO: 18701 - RNA, 19 nt, Artificial Sequence
  Description of Artificial Sequence: Synthetic oligonucleotide
  Antisense strand to SEQ ID NO: 18700
aauugcagccagguuucaa

SEQ ID NO: 18702 - RNA, 19 nt, Artificial Sequence
  Description of Artificial Sequence: Synthetic oligonucleotide
  Sense strand starting at position 1267 of SEQ ID NO: 199
aggaaauauuguguggcuu

SEQ ID NO: 18703 - RNA, 19 nt, Artificial Sequence
  Description of Artificial Sequence: Synthetic oligonucleotide
  Antisense strand to SEQ ID NO: 18702
aagccacacaauauuuccu

SEQ ID NO: 18704 - RNA, 19 nt, Artificial Sequence
  Description of Artificial Sequence: Synthetic oligonucleotide
  Sense strand starting at position 1268 of SEQ ID NO: 199
ggaaauauuguguggcuuc

SEQ ID NO: 18705 - RNA, 19 nt, Artificial Sequence
  Description of Artificial Sequence: Synthetic oligonucleotide
  Antisense strand to SEQ ID NO: 18704
gaagccacacaauauuucc

SEQ ID NO: 18706 - RNA, 19 nt, Artificial Sequence
  Description of Artificial Sequence: Synthetic oligonucleotide
  Sense strand starting at position 1353 of SEQ ID NO: 199
ccuuguguucguuagaaau

SEQ ID NO: 18707 - RNA, 19 nt, Artificial Sequence
  Description of Artificial Sequence: Synthetic oligonucleotide
  Antisense strand to SEQ ID NO: 18706
auuucuaacgaacacaagg

SEQ ID NO: 18708 - RNA, 19 nt, Artificial Sequence
  Description of Artificial Sequence: Synthetic oligonucleotide
  Sense strand starting at position 1359 of SEQ ID NO: 199
guucguuagaaaugaagga

SEQ ID NO: 18709 - RNA, 19 nt, Artificial Sequence
  Description of Artificial Sequence: Synthetic oligonucleotide
  Antisense strand to SEQ ID NO: 18708
uccuucauuucuaacgaac

SEQ ID NO: 18710 - RNA, 19 nt, Artificial Sequence
  Description of Artificial Sequence: Synthetic oligonucleotide
  Sense strand starting at position 1420 of SEQ ID NO: 199
ugagcuacuuuaguauaaa

SEQ ID NO: 18711 - RNA, 19 nt, Artificial Sequence
  Description of Artificial Sequence: Synthetic oligonucleotide
  Antisense strand to SEQ ID NO: 18710
uuuauacuaaaguagcuca

SEQ ID NO: 18712 - RNA, 19 nt, Artificial Sequence
  Description of Artificial Sequence: Synthetic oligonucleotide
  Sense strand starting at position 1455 of SEQ ID NO: 199
aacugaaaguguccugaaa

SEQ ID NO: 18713 - RNA, 19 nt, Artificial Sequence
  Description of Artificial Sequence: Synthetic oligonucleotide
  Antisense strand to SEQ ID NO: 18712
uuucaggacacuuucaguu

SEQ ID NO: 18714 - RNA, 19 nt, Artificial Sequence
  Description of Artificial Sequence: Synthetic oligonucleotide
  Sense strand starting at position 1621 of SEQ ID NO: 199
ucuauugcccuuuaggaaa

SEQ ID NO: 18715 - RNA, 19 nt, Artificial Sequence
  Description of Artificial Sequence: Synthetic oligonucleotide
  Antisense strand to SEQ ID NO: 18714
uuuccuaaagggcaauaga

SEQ ID NO: 18716 - RNA, 19 nt, Artificial Sequence
  Description of Artificial Sequence: Synthetic oligonucleotide
  Sense strand starting at position 1715 of SEQ ID NO: 199
aaagacuugcggugauaga

SEQ ID NO: 18717 - RNA, 19 nt, Artificial Sequence
  Description of Artificial Sequence: Synthetic oligonucleotide
  Antisense strand to SEQ ID NO: 18716
ucuaucaccgcaagucuuu

SEQ ID NO: 18718 - RNA, 19 nt, Artificial Sequence
  Description of Artificial Sequence: Synthetic oligonucleotide
  Sense strand starting at position 1716 of SEQ ID NO: 199
aagacuugcggugauagaa

SEQ ID NO: 18719 - RNA, 19 nt, Artificial Sequence
  Description of Artificial Sequence: Synthetic oligonucleotide
  Antisense strand to SEQ ID NO: 18718
uucuaucaccgcaagucuu

SEQ ID NO: 18720 - RNA, 19 nt, Artificial Sequence
  Description of Artificial Sequence: Synthetic oligonucleotide
  Sense strand starting at position 2044 of SEQ ID NO: 199
uucucaugugaccagacuu

SEQ ID NO: 18721 - RNA, 19 nt, Artificial Sequence
  Description of Artificial Sequence: Synthetic oligonucleotide
  Antisense strand to SEQ ID NO: 18720
aagucuggucacaugagaa

SEQ ID NO: 18722 - RNA, 19 nt, Artificial Sequence
  Description of Artificial Sequence: Synthetic oligonucleotide
  Sense strand starting at position 2056 of SEQ ID NO: 199
cagacuugcuuucugauga

SEQ ID NO: 18723 - RNA, 19 nt, Artificial Sequence
  Description of Artificial Sequence: Synthetic oligonucleotide
  Antisense strand to SEQ ID NO: 18722
ucaucagaaagcaagucug

SEQ ID NO: 18724 - RNA, 19 nt, Artificial Sequence
  Description of Artificial Sequence: Synthetic oligonucleotide
  Sense strand starting at position 2061 of SEQ ID NO: 199
uugcuuucugaugaaauuc

SEQ ID NO: 18725 - RNA, 19 nt, Artificial Sequence
  Description of Artificial Sequence: Synthetic oligonucleotide
  Antisense strand to SEQ ID NO: 18724
gaauuucaucagaaagcaa

SEQ ID NO: 18726 - RNA, 19 nt, Artificial Sequence
  Description of Artificial Sequence: Synthetic oligonucleotide
  Sense strand starting at position 2508 of SEQ ID NO: 199
uuugguguuuaauuagcaa

SEQ ID NO: 18727 - RNA, 19 nt, Artificial Sequence
  Description of Artificial Sequence: Synthetic oligonucleotide
  Antisense strand to SEQ ID NO: 18726
uugcuaauuaaacaccaaa

SEQ ID NO: 18728 - RNA, 19 nt, Artificial Sequence
  Description of Artificial Sequence: Synthetic oligonucleotide
  Sense strand starting at position 2616 of SEQ ID NO: 199
cucaacuguuuguccuaua

SEQ ID NO: 18729 - RNA, 19 nt, Artificial Sequence
  Description of Artificial Sequence: Synthetic oligonucleotide
  Antisense strand to SEQ ID NO: 18728
uauaggacaaacaguugag

SEQ ID NO: 18730 - RNA, 19 nt, Artificial Sequence
  Description of Artificial Sequence: Synthetic oligonucleotide
  Sense strand starting at position 2681 of SEQ ID NO: 199
acccacuuugcguaaccua

SEQ ID NO: 18731 - RNA, 19 nt, Artificial Sequence
  Description of Artificial Sequence: Synthetic oligonucleotide
  Antisense strand to SEQ ID NO: 18730
uagguuacgcaaagugggu

SEQ ID NO: 18732 - RNA, 19 nt, Artificial Sequence
  Description of Artificial Sequence: Synthetic oligonucleotide
  Sense strand starting at position 2840 of SEQ ID NO: 199
agcggaugcucaacgaguu

SEQ ID NO: 18733 - RNA, 19 nt, Artificial Sequence
  Description of Artificial Sequence: Synthetic oligonucleotide
  Antisense strand to SEQ ID NO: 18732
aacucguugagcauccgcu

SEQ ID NO: 18734 - RNA, 19 nt, Artificial Sequence
  Description of Artificial Sequence: Synthetic oligonucleotide
  Sense strand starting at position 2890 of SEQ ID NO: 199
cagauuucugccuguagcu

SEQ ID NO: 18735 - RNA, 19 nt, Artificial Sequence
  Description of Artificial Sequence: Synthetic oligonucleotide
  Antisense strand to SEQ ID NO: 18734
agcuacaggcagaaaucug

SEQ ID NO: 18736 - RNA, 19 nt, Artificial Sequence
  Description of Artificial Sequence: Synthetic oligonucleotide
  Sense strand starting at position 2965 of SEQ ID NO: 199
uauggaauguguccugaag

SEQ ID NO: 18737 - RNA, 19 nt, Artificial Sequence
  Description of Artificial Sequence: Synthetic oligonucleotide
  Antisense strand to SEQ ID NO: 18736
cuucaggacacauuccaua

SEQ ID NO: 18738 - RNA, 19 nt, Artificial Sequence
  Description of Artificial Sequence: Synthetic oligonucleotide
  Sense strand starting at position 3106 of SEQ ID NO: 199
cgucaaauccucgggagac

SEQ ID NO: 18739 - RNA, 19 nt, Artificial Sequence
  Description of Artificial Sequence: Synthetic oligonucleotide
  Antisense strand to SEQ ID NO: 18738
gucucccgaggauuugacg

SEQ ID NO: 18740 - RNA, 19 nt, Artificial Sequence
  Description of Artificial Sequence: Synthetic oligonucleotide
  Sense strand starting at position 3141 of SEQ ID NO: 199
ggucaagucugcccacaaa

SEQ ID NO: 18741 - RNA, 19 nt, Artificial Sequence
  Description of Artificial Sequence: Synthetic oligonucleotide
  Antisense strand to SEQ ID NO: 18740
uuugugggcagacuugacc

SEQ ID NO: 18742 - RNA, 19 nt, Artificial Sequence
  Description of Artificial Sequence: Synthetic oligonucleotide
  Sense strand starting at position 3549 of SEQ ID NO: 199
gcccucauuuccguuagau

SEQ ID NO: 18743 - RNA, 19 nt, Artificial Sequence
  Description of Artificial Sequence: Synthetic oligonucleotide
  Antisense strand to SEQ ID NO: 18742
aucuaacggaaaugagggc

SEQ ID NO: 18744 - RNA, 19 nt, Artificial Sequence
  Description of Artificial Sequence: Synthetic oligonucleotide
  Sense strand starting at position 3615 of SEQ ID NO: 199
caguucugugagcaugacu

SEQ ID NO: 18745 - RNA, 19 nt, Artificial Sequence
  Description of Artificial Sequence: Synthetic oligonucleotide
  Antisense strand to SEQ ID NO: 18744
agucaugcucacagaacug

SEQ ID NO: 18746 - RNA, 19 nt, Artificial Sequence
  Description of Artificial Sequence: Synthetic oligonucleotide
  Sense strand starting at position 3618 of SEQ ID NO: 199
uucugugagcaugacucau

SEQ ID NO: 18747 - RNA, 19 nt, Artificial Sequence
  Description of Artificial Sequence: Synthetic oligonucleotide
  Antisense strand to SEQ ID NO: 18746
augagucaugcucacagaa

SEQ ID NO: 18748 - RNA, 19 nt, Artificial Sequence
  Description of Artificial Sequence: Synthetic oligonucleotide
  Sense strand starting at position 3644 of SEQ ID NO: 199
gccauuagccaccacagaa

SEQ ID NO: 18749 - RNA, 19 nt, Artificial Sequence
  Description of Artificial Sequence: Synthetic oligonucleotide
  Antisense strand to SEQ ID NO: 18748
uucugugguggcuaauggc

SEQ ID NO: 18750 - RNA, 19 nt, Artificial Sequence
  Description of Artificial Sequence: Synthetic oligonucleotide
  Sense strand starting at position 3677 of SEQ ID NO: 199
cugguauucuccuuggaga

SEQ ID NO: 18751 - RNA, 19 nt, Artificial Sequence
  Description of Artificial Sequence: Synthetic oligonucleotide
  Antisense strand to SEQ ID NO: 18750
ucuccaaggagaauaccag

SEQ ID NO: 18752 - RNA, 19 nt, Artificial Sequence
  Description of Artificial Sequence: Synthetic oligonucleotide
  Sense strand starting at position 3678 of SEQ ID NO: 199
ugguauucuccuuggagag

SEQ ID NO: 18753 - RNA, 19 nt, Artificial Sequence
  Description of Artificial Sequence: Synthetic oligonucleotide
  Antisense strand to SEQ ID NO: 18752
cucuccaaggagaauacca

SEQ ID NO: 18754 - RNA, 19 nt, Artificial Sequence
  Description of Artificial Sequence: Synthetic oligonucleotide
  Sense strand starting at position 3793 of SEQ ID NO: 199
ugcacagaaauucgugaga

SEQ ID NO: 18755 - RNA, 19 nt, Artificial Sequence
  Description of Artificial Sequence: Synthetic oligonucleotide
  Antisense strand to SEQ ID NO: 18754
ucucacgaauuucugugca

SEQ ID NO: 18756 - RNA, 19 nt, Artificial Sequence
  Description of Artificial Sequence: Synthetic oligonucleotide
  Sense strand starting at position 3807 of SEQ ID NO: 199
ugagauuagucagccaaga

SEQ ID NO: 18757 - RNA, 19 nt, Artificial Sequence
  Description of Artificial Sequence: Synthetic oligonucleotide
  Antisense strand to SEQ ID NO: 18756
ucuuggcugacuaaucuca

SEQ ID NO: 18758 - RNA, 19 nt, Artificial Sequence
  Description of Artificial Sequence: Synthetic oligonucleotide
  Sense strand starting at position 3866 of SEQ ID NO: 199
ugaaaugcauuccugaaag

SEQ ID NO: 18759 - RNA, 19 nt, Artificial Sequence
  Description of Artificial Sequence: Synthetic oligonucleotide
  Antisense strand to SEQ ID NO: 18758
cuuucaggaaugcauuuca

SEQ ID NO: 18760 - RNA, 19 nt, Artificial Sequence
  Description of Artificial Sequence: Synthetic oligonucleotide
  Sense strand starting at position 3969 of SEQ ID NO: 199
cacuuaggucacuguggua

SEQ ID NO: 18761 - RNA, 19 nt, Artificial Sequence
  Description of Artificial Sequence: Synthetic oligonucleotide
  Antisense strand to SEQ ID NO: 18760
uaccacagugaccuaagug

SEQ ID NO: 18762 - RNA, 19 nt, Artificial Sequence
  Description of Artificial Sequence: Synthetic oligonucleotide
  Sense strand starting at position 39 of SEQ ID NO: 198
ucauaaugguuaucugaug

SEQ ID NO: 18763 - RNA, 19 nt, Artificial Sequence
  Description of Artificial Sequence: Synthetic oligonucleotide
  Antisense strand to SEQ ID NO: 18762
caucagauaaccauuauga

SEQ ID NO: 18764 - RNA, 19 nt, Artificial Sequence
  Description of Artificial Sequence: Synthetic oligonucleotide
  Sense strand starting at position 53 of SEQ ID NO: 198
ugaugugagcuuuaagaac

SEQ ID NO: 18765 - RNA, 19 nt, Artificial Sequence
  Description of Artificial Sequence: Synthetic oligonucleotide
  Antisense strand to SEQ ID NO: 18764
guucuuaaagcucacauca

SEQ ID NO: 18766 - RNA, 19 nt, Artificial Sequence
  Description of Artificial Sequence: Synthetic oligonucleotide
  Sense strand starting at position 135 of SEQ ID NO: 198
caacuuggaucuguaguuu

SEQ ID NO: 18767 - RNA, 19 nt, Artificial Sequence
  Description of Artificial Sequence: Synthetic oligonucleotide
  Antisense strand to SEQ ID NO: 18766
aaacuacagauccaaguug

SEQ ID NO: 18768 - RNA, 19 nt, Artificial Sequence
  Description of Artificial Sequence: Synthetic oligonucleotide
  Sense strand starting at position 152 of SEQ ID NO: 198
uuuauaacuucucuggaga

SEQ ID NO: 18769 - RNA, 19 nt, Artificial Sequence
  Description of Artificial Sequence: Synthetic oligonucleotide
  Antisense strand to SEQ ID NO: 18768
ucuccagagaaguuauaaa

SEQ ID NO: 18770 - RNA, 19 nt, Artificial Sequence
  Description of Artificial Sequence: Synthetic oligonucleotide
  Sense strand starting at position 153 of SEQ ID NO: 198
uuauaacuucucuggagag

SEQ ID NO: 18771 - RNA, 19 nt, Artificial Sequence
  Description of Artificial Sequence: Synthetic oligonucleotide
  Antisense strand to SEQ ID NO: 18770
cucuccagagaaguuauaa

SEQ ID NO: 18772 - RNA, 19 nt, Artificial Sequence
  Description of Artificial Sequence: Synthetic oligonucleotide
  Sense strand starting at position 237 of SEQ ID NO: 198
uuugcuuggguuuaggaau

SEQ ID NO: 18773 - RNA, 19 nt, Artificial Sequence
  Description of Artificial Sequence: Synthetic oligonucleotide
  Antisense strand to SEQ ID NO: 18772
auuccuaaacccaagcaaa

SEQ ID NO: 18774 - RNA, 19 nt, Artificial Sequence
  Description of Artificial Sequence: Synthetic oligonucleotide
  Sense strand starting at position 284 of SEQ ID NO: 198
acuuaugaagucuagccaa

SEQ ID NO: 18775 - RNA, 19 nt, Artificial Sequence
  Description of Artificial Sequence: Synthetic oligonucleotide
  Antisense strand to SEQ ID NO: 18774
uuggcuagacuucauaagu

SEQ ID NO: 18776 - RNA, 19 nt, Artificial Sequence
  Description of Artificial Sequence: Synthetic oligonucleotide
  Sense strand starting at position 287 of SEQ ID NO: 198
uaugaagucuagccaaaug

SEQ ID NO: 18777 - RNA, 19 nt, Artificial Sequence
  Description of Artificial Sequence: Synthetic oligonucleotide
  Antisense strand to SEQ ID NO: 18776
cauuuggcuagacuucaua

SEQ ID NO: 18778 - RNA, 19 nt, Artificial Sequence
  Description of Artificial Sequence: Synthetic oligonucleotide
  Sense strand starting at position 318 of SEQ ID NO: 198
auaauuccuccauggauug

SEQ ID NO: 18779 - RNA, 19 nt, Artificial Sequence
  Description of Artificial Sequence: Synthetic oligonucleotide
  Antisense strand to SEQ ID NO: 18778
caauccauggaggaauuau

SEQ ID NO: 18780 - RNA, 19 nt, Artificial Sequence
  Description of Artificial Sequence: Synthetic oligonucleotide
  Sense strand starting at position 366 of SEQ ID NO: 198
ccgauaagguucuuaagau

SEQ ID NO: 18781 - RNA, 19 nt, Artificial Sequence
  Description of Artificial Sequence: Synthetic oligonucleotide
  Antisense strand to SEQ ID NO: 18780
aucuuaagaaccuuaucgg

SEQ ID NO: 18782 - RNA, 19 nt, Artificial Sequence
  Description of Artificial Sequence: Synthetic oligonucleotide
  Sense strand starting at position 373 of SEQ ID NO: 198
gguucuuaagauuagcauc

SEQ ID NO: 18783 - RNA, 19 nt, Artificial Sequence
  Description of Artificial Sequence: Synthetic oligonucleotide
  Antisense strand to SEQ ID NO: 18782
gaugcuaaucuuaagaacc

SEQ ID NO: 18784 - RNA, 19 nt, Artificial Sequence
  Description of Artificial Sequence: Synthetic oligonucleotide
  Sense strand starting at position 401 of SEQ ID NO: 198
agcaguucugccuauauga

SEQ ID NO: 18785 - RNA, 19 nt, Artificial Sequence
  Description of Artificial Sequence: Synthetic oligonucleotide
  Antisense strand to SEQ ID NO: 18784
ucauauaggcagaacugcu

SEQ ID NO: 18786 - RNA, 19 nt, Artificial Sequence
  Description of Artificial Sequence: Synthetic oligonucleotide
  Sense strand starting at position 428 of SEQ ID NO: 198
uuuagaccuugguuaguca

SEQ ID NO: 18787 - RNA, 19 nt, Artificial Sequence
  Description of Artificial Sequence: Synthetic oligonucleotide
  Antisense strand to SEQ ID NO: 18786
ugacuaaccaaggucuaaa

SEQ ID NO: 18788 - RNA, 19 nt, Artificial Sequence
  Description of Artificial Sequence: Synthetic oligonucleotide
  Sense strand starting at position 435 of SEQ ID NO: 198
cuugguuagucauccugga

SEQ ID NO: 18789 - RNA, 19 nt, Artificial Sequence
  Description of Artificial Sequence: Synthetic oligonucleotide
  Antisense strand to SEQ ID NO: 18788
uccaggaugacuaaccaag

SEQ ID NO: 18790 - RNA, 19 nt, Artificial Sequence
  Description of Artificial Sequence: Synthetic oligonucleotide
  Sense strand starting at position 439 of SEQ ID NO: 198
guuagucauccuggaaaug

SEQ ID NO: 18791 - RNA, 19 nt, Artificial Sequence
  Description of Artificial Sequence: Synthetic oligonucleotide
  Antisense strand to SEQ ID NO: 18790
cauuuccaggaugacuaac

SEQ ID NO: 18792 - RNA, 19 nt, Artificial Sequence
  Description of Artificial Sequence: Synthetic oligonucleotide
  Sense strand starting at position 477 of SEQ ID NO: 198
uuuagagaaaguuggaguu

SEQ ID NO: 18793 - RNA, 19 nt, Artificial Sequence
  Description of Artificial Sequence: Synthetic oligonucleotide
  Antisense strand to SEQ ID NO: 18792
aacuccaacuuucucuaaa

SEQ ID NO: 18794 - RNA, 19 nt, Artificial Sequence
  Description of Artificial Sequence: Synthetic oligonucleotide
  Sense strand starting at position 480 of SEQ ID NO: 198
agagaaaguuggaguugga

SEQ ID NO: 18795 - RNA, 19 nt, Artificial Sequence
  Description of Artificial Sequence: Synthetic oligonucleotide
  Antisense strand to SEQ ID NO: 18794
uccaacuccaacuuucucu

SEQ ID NO: 18796 - RNA, 19 nt, Artificial Sequence
  Description of Artificial Sequence: Synthetic oligonucleotide
  Sense strand starting at position 781 of SEQ ID NO: 198
agauaaagucaagguuuaa

SEQ ID NO: 18797 - RNA, 19 nt, Artificial Sequence
  Description of Artificial Sequence: Synthetic oligonucleotide
  Antisense strand to SEQ ID NO: 18796
uuaaaccuugacuuuaucu

SEQ ID NO: 18798 - RNA, 19 nt, Artificial Sequence
  Description of Artificial Sequence: Synthetic oligonucleotide
  Sense strand starting at position 999 of SEQ ID NO: 198
gugucuacaccugauuaca

SEQ ID NO: 18799 - RNA, 19 nt, Artificial Sequence
  Description of Artificial Sequence: Synthetic oligonucleotide
  Antisense strand to SEQ ID NO: 18798
uguaaucagguguagacac

SEQ ID NO: 18800 - RNA, 19 nt, Artificial Sequence
  Description of Artificial Sequence: Synthetic oligonucleotide
  Sense strand starting at position 1205 of SEQ ID NO: 198
agauguugucaacaguuac

SEQ ID NO: 18801 - RNA, 19 nt, Artificial Sequence
  Description of Artificial Sequence: Synthetic oligonucleotide
  Antisense strand to SEQ ID NO: 18800
guaacuguugacaacaucu

SEQ ID NO: 18802 - RNA, 19 nt, Artificial Sequence
  Description of Artificial Sequence: Synthetic oligonucleotide
  Sense strand starting at position 2173 of SEQ ID NO: 198
aggagccaguccucaagua

SEQ ID NO: 18803 - RNA, 19 nt, Artificial Sequence
  Description of Artificial Sequence: Synthetic oligonucleotide
  Antisense strand to SEQ ID NO: 18802
uacuugaggacuggcuccu

SEQ ID NO: 18804 - RNA, 19 nt, Artificial Sequence
  Description of Artificial Sequence: Synthetic oligonucleotide
  Sense strand starting at position 2174 of SEQ ID NO: 198
ggagccaguccucaaguau

SEQ ID NO: 18805 - RNA, 19 nt, Artificial Sequence
  Description of Artificial Sequence: Synthetic oligonucleotide
  Antisense strand to SEQ ID NO: 18804
auacuugaggacuggcucc

SEQ ID NO: 18806 - RNA, 19 nt, Artificial Sequence
  Description of Artificial Sequence: Synthetic oligonucleotide
  Sense strand starting at position 2186 of SEQ ID NO: 198
caaguauagcucgaucacu

SEQ ID NO: 18807 - RNA, 19 nt, Artificial Sequence
  Description of Artificial Sequence: Synthetic oligonucleotide
  Antisense strand to SEQ ID NO: 18806
agugaucgagcuauacuug

SEQ ID NO: 18808 - RNA, 19 nt, Artificial Sequence
  Description of Artificial Sequence: Synthetic oligonucleotide
  Sense strand starting at position 2209 of SEQ ID NO: 198
uucugaagcucucuccaga

SEQ ID NO: 18809 - RNA, 19 nt, Artificial Sequence
  Description of Artificial Sequence: Synthetic oligonucleotide
  Antisense strand to SEQ ID NO: 18808
ucuggagagagcuucagaa

SEQ ID NO: 18810 - RNA, 19 nt, Artificial Sequence
  Description of Artificial Sequence: Synthetic oligonucleotide
  Sense strand starting at position 2262 of SEQ ID NO: 198
cgcguuauuuaauuaccca

SEQ ID NO: 18811 - RNA, 19 nt, Artificial Sequence
  Description of Artificial Sequence: Synthetic oligonucleotide
  Antisense strand to SEQ ID NO: 18810
uggguaauuaaauaacgcg

SEQ ID NO: 18812 - RNA, 19 nt, Artificial Sequence
  Description of Artificial Sequence: Synthetic oligonucleotide
  Sense strand starting at position 2288 of SEQ ID NO: 198
ugcuuugcucgucugcaga

SEQ ID NO: 18813 - RNA, 19 nt, Artificial Sequence
  Description of Artificial Sequence: Synthetic oligonucleotide
  Antisense strand to SEQ ID NO: 18812
ucugcagacgagcaaagca

SEQ ID NO: 18814 - RNA, 19 nt, Artificial Sequence
  Description of Artificial Sequence: Synthetic oligonucleotide
  Sense strand starting at position 2401 of SEQ ID NO: 198
cucguauggacguauugaa

SEQ ID NO: 18815 - RNA, 19 nt, Artificial Sequence
  Description of Artificial Sequence: Synthetic oligonucleotide
  Antisense strand to SEQ ID NO: 18814
uucaauacguccauacgag

SEQ ID NO: 18816 - RNA, 19 nt, Artificial Sequence
  Description of Artificial Sequence: Synthetic oligonucleotide
  Sense strand starting at position 2594 of SEQ ID NO: 198
acaauauguggucacuuga

SEQ ID NO: 18817 - RNA, 19 nt, Artificial Sequence
  Description of Artificial Sequence: Synthetic oligonucleotide
  Antisense strand to SEQ ID NO: 18816
ucaagugaccacauauugu

SEQ ID NO: 18818 - RNA, 19 nt, Artificial Sequence
  Description of Artificial Sequence: Synthetic oligonucleotide
  Sense strand starting at position 2601 of SEQ ID NO: 198
guggucacuugauuuaugu

SEQ ID NO: 18819 - RNA, 19 nt, Artificial Sequence
  Description of Artificial Sequence: Synthetic oligonucleotide
  Antisense strand to SEQ ID NO: 18818
acauaaaucaagugaccac

SEQ ID NO: 18820 - RNA, 19 nt, Artificial Sequence
  Description of Artificial Sequence: Synthetic oligonucleotide
  Sense strand starting at position 3098 of SEQ ID NO: 198
agacaaagacgaugucuua

SEQ ID NO: 18821 - RNA, 19 nt, Artificial Sequence
  Description of Artificial Sequence: Synthetic oligonucleotide
  Antisense strand to SEQ ID NO: 18820
uaagacaucgucuuugucu

SEQ ID NO: 18822 - RNA, 19 nt, Artificial Sequence
  Description of Artificial Sequence: Synthetic oligonucleotide
  Sense strand starting at position 3101 of SEQ ID NO: 198
caaagacgaugucuuaaac

SEQ ID NO: 18823 - RNA, 19 nt, Artificial Sequence
  Description of Artificial Sequence: Synthetic oligonucleotide
  Antisense strand to SEQ ID NO: 18822
guuuaagacaucgucuuug

SEQ ID NO: 18824 - RNA, 19 nt, Artificial Sequence
  Description of Artificial Sequence: Synthetic oligonucleotide
  Sense strand starting at position 3578 of SEQ ID NO: 198
acauguauccuaugaccca

SEQ ID NO: 18825 - RNA, 19 nt, Artificial Sequence
  Description of Artificial Sequence: Synthetic oligonucleotide
  Antisense strand to SEQ ID NO: 18824
ugggucauaggauacaugu

SEQ ID NO: 18826 - RNA, 19 nt, Artificial Sequence
  Description of Artificial Sequence: Synthetic oligonucleotide
  Sense strand starting at position 3729 of SEQ ID NO: 198
agagauaaacuguguaaca

SEQ ID NO: 18827 - RNA, 19 nt, Artificial Sequence
  Description of Artificial Sequence: Synthetic oligonucleotide
  Antisense strand to SEQ ID NO: 18826
uguuacacaguuuaucucu

SEQ ID NO: 18828 - RNA, 19 nt, Artificial Sequence
  Description of Artificial Sequence: Synthetic oligonucleotide
  Sense strand starting at position 3730 of SEQ ID NO: 198
gagauaaacuguguaacau

SEQ ID NO: 18829 - RNA, 19 nt, Artificial Sequence
  Description of Artificial Sequence: Synthetic oligonucleotide
  Antisense strand to SEQ ID NO: 18828
auguuacacaguuuaucuc

SEQ ID NO: 18830 - RNA, 19 nt, Artificial Sequence
  Description of Artificial Sequence: Synthetic oligonucleotide
  Sense strand starting at position 3912 of SEQ ID NO: 198
aagugaagacagugguuau

SEQ ID NO: 18831 - RNA, 19 nt, Artificial Sequence
  Description of Artificial Sequence: Synthetic oligonucleotide
  Antisense strand to SEQ ID NO: 18830
auaaccacugucuucacuu

SEQ ID NO: 18832 - RNA, 19 nt, Artificial Sequence
  Description of Artificial Sequence: Synthetic oligonucleotide
  Sense strand starting at position 3913 of SEQ ID NO: 198
agugaagacagugguuaua

SEQ ID NO: 18833 - RNA, 19 nt, Artificial Sequence
  Description of Artificial Sequence: Synthetic oligonucleotide
  Antisense strand to SEQ ID NO: 18832
uauaaccacugucuucacu

SEQ ID NO: 18834 - RNA, 19 nt, Artificial Sequence
  Description of Artificial Sequence: Synthetic oligonucleotide
  Sense strand starting at position 3915 of SEQ ID NO: 198
ugaagacagugguuauauu

SEQ ID NO: 18835 - RNA, 19 nt, Artificial Sequence
  Description of Artificial Sequence: Synthetic oligonucleotide
  Antisense strand to SEQ ID NO: 18834
aauauaaccacugucuuca

SEQ ID NO: 18836 - RNA, 19 nt, Artificial Sequence
  Description of Artificial Sequence: Synthetic oligonucleotide
  Sense strand starting at position 3928 of SEQ ID NO: 198
uauauugagcuguggauua

SEQ ID NO: 18837 - RNA, 19 nt, Artificial Sequence
  Description of Artificial Sequence: Synthetic oligonucleotide
  Antisense strand to SEQ ID NO: 18836
uaauccacagcucaauaua

SEQ ID NO: 18838 - RNA, 19 nt, Artificial Sequence
  Description of Artificial Sequence: Synthetic oligonucleotide
  Sense strand starting at position 3930 of SEQ ID NO: 198
uauugagcuguggauuaug

SEQ ID NO: 18839 - RNA, 19 nt, Artificial Sequence
  Description of Artificial Sequence: Synthetic oligonucleotide
  Antisense strand to SEQ ID NO: 18838
cauaauccacagcucaaua

SEQ ID NO: 18840 - RNA, 19 nt, Artificial Sequence
  Description of Artificial Sequence: Synthetic oligonucleotide
  Sense strand starting at position 3933 of SEQ ID NO: 198
ugagcuguggauuaugaca

SEQ ID NO: 18841 - RNA, 19 nt, Artificial Sequence
  Description of Artificial Sequence: Synthetic oligonucleotide
  Antisense strand to SEQ ID NO: 18840
ugucauaauccacagcuca

SEQ ID NO: 18842 - RNA, 19 nt, Artificial Sequence
  Description of Artificial Sequence: Synthetic oligonucleotide
  Sense strand starting at position 338 of SEQ ID NO: 201
gugcaauggcauuaucaug

SEQ ID NO: 18843 - RNA, 19 nt, Artificial Sequence
  Description of Artificial Sequence: Synthetic oligonucleotide
  Antisense strand to SEQ ID NO: 18842
caugauaaugccauugcac

SEQ ID NO: 18844 - RNA, 19 nt, Artificial Sequence
  Description of Artificial Sequence: Synthetic oligonucleotide
  Sense strand starting at position 727 of SEQ ID NO: 201
acuagaauccuggguguac

SEQ ID NO: 18845 - RNA, 19 nt, Artificial Sequence
  Description of Artificial Sequence: Synthetic oligonucleotide
  Antisense strand to SEQ ID NO: 18844
guacacccaggauucuagu

SEQ ID NO: 18846 - RNA, 19 nt, Artificial Sequence
  Description of Artificial Sequence: Synthetic oligonucleotide
  Sense strand starting at position 728 of SEQ ID NO: 201
cuagaauccuggguguacu

SEQ ID NO: 18847 - RNA, 19 nt, Artificial Sequence
  Description of Artificial Sequence: Synthetic oligonucleotide
  Antisense strand to SEQ ID NO: 18846
aguacacccaggauucuag

SEQ ID NO: 18848 - RNA, 19 nt, Artificial Sequence
  Description of Artificial Sequence: Synthetic oligonucleotide
  Sense strand starting at position 729 of SEQ ID NO: 201
uagaauccuggguguacuu

SEQ ID NO: 18849 - RNA, 19 nt, Artificial Sequence
  Description of Artificial Sequence: Synthetic oligonucleotide
  Antisense strand to SEQ ID NO: 18848
aaguacacccaggauucua

SEQ ID NO: 18850 - RNA, 19 nt, Artificial Sequence
  Description of Artificial Sequence: Synthetic oligonucleotide
  Sense strand starting at position 736 of SEQ ID NO: 201
cuggguguacuucaagguu

SEQ ID NO: 18851 - RNA, 19 nt, Artificial Sequence
  Description of Artificial Sequence: Synthetic oligonucleotide
  Antisense strand to SEQ ID NO: 18850
aaccuugaaguacacccag

SEQ ID NO: 18852 - RNA, 19 nt, Artificial Sequence
  Description of Artificial Sequence: Synthetic oligonucleotide
  Sense strand starting at position 766 of SEQ ID NO: 201
auaguaucauacucaaugu

SEQ ID NO: 18853 - RNA, 19 nt, Artificial Sequence
  Description of Artificial Sequence: Synthetic oligonucleotide
  Antisense strand to SEQ ID NO: 18852
acauugaguaugauacuau

SEQ ID NO: 18854 - RNA, 19 nt, Artificial Sequence
  Description of Artificial Sequence: Synthetic oligonucleotide
  Sense strand starting at position 774 of SEQ ID NO: 201
auacucaauguguggagua

SEQ ID NO: 18855 - RNA, 19 nt, Artificial Sequence
  Description of Artificial Sequence: Synthetic oligonucleotide
  Antisense strand to SEQ ID NO: 18854
uacuccacacauugaguau

SEQ ID NO: 18856 - RNA, 19 nt, Artificial Sequence
  Description of Artificial Sequence: Synthetic oligonucleotide
  Sense strand starting at position 776 of SEQ ID NO: 201
acucaauguguggaguaga

SEQ ID NO: 18857 - RNA, 19 nt, Artificial Sequence
  Description of Artificial Sequence: Synthetic oligonucleotide
  Antisense strand to SEQ ID NO: 18856
ucuacuccacacauugagu

SEQ ID NO: 18858 - RNA, 19 nt, Artificial Sequence
  Description of Artificial Sequence: Synthetic oligonucleotide
  Sense strand starting at position 779 of SEQ ID NO: 201
caauguguggaguagaaca

SEQ ID NO: 18859 - RNA, 19 nt, Artificial Sequence
  Description of Artificial Sequence: Synthetic oligonucleotide
  Antisense strand to SEQ ID NO: 18858
uguucuacuccacacauug

SEQ ID NO: 18860 - RNA, 19 nt, Artificial Sequence
  Description of Artificial Sequence: Synthetic oligonucleotide
  Sense strand starting at position 983 of SEQ ID NO: 201
uggagaggauguuugucuu

SEQ ID NO: 18861 - RNA, 19 nt, Artificial Sequence
  Description of Artificial Sequence: Synthetic oligonucleotide
  Antisense strand to SEQ ID NO: 18860
aagacaaacauccucucca

SEQ ID NO: 18862 - RNA, 19 nt, Artificial Sequence
  Description of Artificial Sequence: Synthetic oligonucleotide
  Sense strand starting at position 986 of SEQ ID NO: 201
agaggauguuugucuuaaa

SEQ ID NO: 18863 - RNA, 19 nt, Artificial Sequence
  Description of Artificial Sequence: Synthetic oligonucleotide
  Antisense strand to SEQ ID NO: 18862
uuuaagacaaacauccucu

SEQ ID NO: 18864 - RNA, 19 nt, Artificial Sequence
  Description of Artificial Sequence: Synthetic oligonucleotide
  Sense strand starting at position 987 of SEQ ID NO: 201
gaggauguuugucuuaaau

SEQ ID NO: 18865 - RNA, 19 nt, Artificial Sequence
  Description of Artificial Sequence: Synthetic oligonucleotide
  Antisense strand to SEQ ID NO: 18864
auuuaagacaaacauccuc

SEQ ID NO: 18866 - RNA, 19 nt, Artificial Sequence
  Description of Artificial Sequence: Synthetic oligonucleotide
  Sense strand starting at position 1287 of SEQ ID NO: 201
agugguucuaaagagcuua

SEQ ID NO: 18867 - RNA, 19 nt, Artificial Sequence
  Description of Artificial Sequence: Synthetic oligonucleotide
  Antisense strand to SEQ ID NO: 18866
uaagcucuuuagaaccacu

SEQ ID NO: 18868 - RNA, 19 nt, Artificial Sequence
  Description of Artificial Sequence: Synthetic oligonucleotide
  Sense strand starting at position 1292 of SEQ ID NO: 201
uucuaaagagcuuagguaa

SEQ ID NO: 18869 - RNA, 19 nt, Artificial Sequence
  Description of Artificial Sequence: Synthetic oligonucleotide
  Antisense strand to SEQ ID NO: 18868
uuaccuaagcucuuuagaa

SEQ ID NO: 18870 - RNA, 19 nt, Artificial Sequence
  Description of Artificial Sequence: Synthetic oligonucleotide
  Sense strand starting at position 1295 of SEQ ID NO: 201
uaaagagcuuagguaauua

SEQ ID NO: 18871 - RNA, 19 nt, Artificial Sequence
  Description of Artificial Sequence: Synthetic oligonucleotide
  Antisense strand to SEQ ID NO: 18870
uaauuaccuaagcucuuua

SEQ ID NO: 18872 - RNA, 19 nt, Artificial Sequence
  Description of Artificial Sequence: Synthetic oligonucleotide
  Sense strand starting at position 1303 of SEQ ID NO: 201
uuagguaauuaggcuuaua

SEQ ID NO: 18873 - RNA, 19 nt, Artificial Sequence
  Description of Artificial Sequence: Synthetic oligonucleotide
  Antisense strand to SEQ ID NO: 18872
uauaagccuaauuaccuaa

SEQ ID NO: 18874 - RNA, 19 nt, Artificial Sequence
  Description of Artificial Sequence: Synthetic oligonucleotide
  Sense strand starting at position 1306 of SEQ ID NO: 201
gguaauuaggcuuauacau

SEQ ID NO: 18875 - RNA, 19 nt, Artificial Sequence
  Description of Artificial Sequence: Synthetic oligonucleotide
  Antisense strand to SEQ ID NO: 18874
auguauaagccuaauuacc

SEQ ID NO: 18876 - RNA, 19 nt, Artificial Sequence
  Description of Artificial Sequence: Synthetic oligonucleotide
  Sense strand starting at position 1341 of SEQ ID NO: 201
ucacuugcuguagagugaa

SEQ ID NO: 18877 - RNA, 19 nt, Artificial Sequence
  Description of Artificial Sequence: Synthetic oligonucleotide
  Antisense strand to SEQ ID NO: 18876
uucacucuacagcaaguga

SEQ ID NO: 18878 - RNA, 19 nt, Artificial Sequence
  Description of Artificial Sequence: Synthetic oligonucleotide
  Sense strand starting at position 1353 of SEQ ID NO: 201
gagugaaucuuggcaggag

SEQ ID NO: 18879 - RNA, 19 nt, Artificial Sequence
  Description of Artificial Sequence: Synthetic oligonucleotide
  Antisense strand to SEQ ID NO: 18878
cuccugccaagauucacuc

SEQ ID NO: 18880 - RNA, 19 nt, Artificial Sequence
  Description of Artificial Sequence: Synthetic oligonucleotide
  Sense strand starting at position 1434 of SEQ ID NO: 201
cauuaagugaguuguggag

SEQ ID NO: 18881 - RNA, 19 nt, Artificial Sequence
  Description of Artificial Sequence: Synthetic oligonucleotide
  Antisense strand to SEQ ID NO: 18880
cuccacaacucacuuaaug

SEQ ID NO: 18882 - RNA, 19 nt, Artificial Sequence
  Description of Artificial Sequence: Synthetic oligonucleotide
  Sense strand starting at position 1454 of SEQ ID NO: 201
cccagaaagucuuccuaug

SEQ ID NO: 18883 - RNA, 19 nt, Artificial Sequence
  Description of Artificial Sequence: Synthetic oligonucleotide
  Antisense strand to SEQ ID NO: 18882
cauaggaagacuuucuggg

SEQ ID NO: 18884 - RNA, 19 nt, Artificial Sequence
  Description of Artificial Sequence: Synthetic oligonucleotide
  Sense strand starting at position 1498 of SEQ ID NO: 201
agacuuaucuaucuaguug

SEQ ID NO: 18885 - RNA, 19 nt, Artificial Sequence
  Description of Artificial Sequence: Synthetic oligonucleotide
  Antisense strand to SEQ ID NO: 18884
caacuagauagauaagucu

SEQ ID NO: 18886 - RNA, 19 nt, Artificial Sequence
  Description of Artificial Sequence: Synthetic oligonucleotide
  Sense strand starting at position 2059 of SEQ ID NO: 201
gugcaugcucaguugcuaa

SEQ ID NO: 18887 - RNA, 19 nt, Artificial Sequence
  Description of Artificial Sequence: Synthetic oligonucleotide
  Antisense strand to SEQ ID NO: 18886
uuagcaacugagcaugcac

SEQ ID NO: 18888 - RNA, 19 nt, Artificial Sequence
  Description of Artificial Sequence: Synthetic oligonucleotide
  Sense strand starting at position 2331 of SEQ ID NO: 201
gagauaaacugguuuccca

SEQ ID NO: 18889 - RNA, 19 nt, Artificial Sequence
  Description of Artificial Sequence: Synthetic oligonucleotide
  Antisense strand to SEQ ID NO: 18888
ugggaaaccaguuuaucuc

SEQ ID NO: 18890 - RNA, 19 nt, Artificial Sequence
  Description of Artificial Sequence: Synthetic oligonucleotide
  Sense strand starting at position 2741 of SEQ ID NO: 201
aaaccuuugcauuggguaa

SEQ ID NO: 18891 - RNA, 19 nt, Artificial Sequence
  Description of Artificial Sequence: Synthetic oligonucleotide
  Antisense strand to SEQ ID NO: 18890
uuacccaaugcaaagguuu

SEQ ID NO: 18892 - RNA, 19 nt, Artificial Sequence
  Description of Artificial Sequence: Synthetic oligonucleotide
  Sense strand starting at position 2815 of SEQ ID NO: 201
aagcuuuauggucugcgua

SEQ ID NO: 18893 - RNA, 19 nt, Artificial Sequence
  Description of Artificial Sequence: Synthetic oligonucleotide
  Antisense strand to SEQ ID NO: 18892
uacgcagaccauaaagcuu

SEQ ID NO: 18894 - RNA, 19 nt, Artificial Sequence
  Description of Artificial Sequence: Synthetic oligonucleotide
  Sense strand starting at position 2877 of SEQ ID NO: 201
uuaggacuuaacgguaaua

SEQ ID NO: 18895 - RNA, 19 nt, Artificial Sequence
  Description of Artificial Sequence: Synthetic oligonucleotide
  Antisense strand to SEQ ID NO: 18894
uauuaccguuaaguccuaa

SEQ ID NO: 18896 - RNA, 19 nt, Artificial Sequence
  Description of Artificial Sequence: Synthetic oligonucleotide
  Sense strand starting at position 2887 of SEQ ID NO: 201
acgguaauagaauggcauu

SEQ ID NO: 18897 - RNA, 19 nt, Artificial Sequence
  Description of Artificial Sequence: Synthetic oligonucleotide
  Antisense strand to SEQ ID NO: 18896
aaugccauucuauuaccgu

SEQ ID NO: 18898 - RNA, 19 nt, Artificial Sequence
  Description of Artificial Sequence: Synthetic oligonucleotide
  Sense strand starting at position 3062 of SEQ ID NO: 201
cugccaagagccuggaaau

SEQ ID NO: 18899 - RNA, 19 nt, Artificial Sequence
  Description of Artificial Sequence: Synthetic oligonucleotide
  Antisense strand to SEQ ID NO: 18898
auuuccaggcucuuggcag

SEQ ID NO: 18900 - RNA, 19 nt, Artificial Sequence
  Description of Artificial Sequence: Synthetic oligonucleotide
  Sense strand starting at position 3081 of SEQ ID NO: 201
guugaccuccguuauuaag

SEQ ID NO: 18901 - RNA, 19 nt, Artificial Sequence
  Description of Artificial Sequence: Synthetic oligonucleotide
  Antisense strand to SEQ ID NO: 18900
cuuaauaacggaggucaac

SEQ ID NO: 18902 - RNA, 19 nt, Artificial Sequence
  Description of Artificial Sequence: Synthetic oligonucleotide
  Sense strand starting at position 3133 of SEQ ID NO: 201
aguaccauuagguaaaugu

SEQ ID NO: 18903 - RNA, 19 nt, Artificial Sequence
  Description of Artificial Sequence: Synthetic oligonucleotide
  Antisense strand to SEQ ID NO: 18902
acauuuaccuaaugguacu

SEQ ID NO: 18904 - RNA, 19 nt, Artificial Sequence
  Description of Artificial Sequence: Synthetic oligonucleotide
  Sense strand starting at position 3356 of SEQ ID NO: 201
ugaagacaccauugcugaa

SEQ ID NO: 18905 - RNA, 19 nt, Artificial Sequence
  Description of Artificial Sequence: Synthetic oligonucleotide
  Antisense strand to SEQ ID NO: 18904
uucagcaauggugucuuca

SEQ ID NO: 18906 - RNA, 19 nt, Artificial Sequence
  Description of Artificial Sequence: Synthetic oligonucleotide
  Sense strand starting at position 3380 of SEQ ID NO: 201
ggucuccuccuagagggau

SEQ ID NO: 18907 - RNA, 19 nt, Artificial Sequence
  Description of Artificial Sequence: Synthetic oligonucleotide
  Antisense strand to SEQ ID NO: 18906
aucccucuaggaggagacc

SEQ ID NO: 18908 - RNA, 19 nt, Artificial Sequence
  Description of Artificial Sequence: Synthetic oligonucleotide
  Sense strand starting at position 3392 of SEQ ID NO: 201
gagggauagccaggaucca

SEQ ID NO: 18909 - RNA, 19 nt, Artificial Sequence
  Description of Artificial Sequence: Synthetic oligonucleotide
  Antisense strand to SEQ ID NO: 18908
uggauccuggcuaucccuc

SEQ ID NO: 18910 - RNA, 19 nt, Artificial Sequence
  Description of Artificial Sequence: Synthetic oligonucleotide
  Sense strand starting at position 3525 of SEQ ID NO: 201
ggguaaccugcuuaacauu

SEQ ID NO: 18911 - RNA, 19 nt, Artificial Sequence
  Description of Artificial Sequence: Synthetic oligonucleotide
  Antisense strand to SEQ ID NO: 18910
aauguuaagcagguuaccc

SEQ ID NO: 18912 - RNA, 19 nt, Artificial Sequence
  Description of Artificial Sequence: Synthetic oligonucleotide
  Sense strand starting at position 3550 of SEQ ID NO: 201
aagacaggcucaguucuau

SEQ ID NO: 18913 - RNA, 19 nt, Artificial Sequence
  Description of Artificial Sequence: Synthetic oligonucleotide
  Antisense strand to SEQ ID NO: 18912
auagaacugagccugucuu

SEQ ID NO: 18914 - RNA, 19 nt, Artificial Sequence
  Description of Artificial Sequence: Synthetic oligonucleotide
  Sense strand starting at position 3577 of SEQ ID NO: 201
cccacaucuguaggaauua

SEQ ID NO: 18915 - RNA, 19 nt, Artificial Sequence
  Description of Artificial Sequence: Synthetic oligonucleotide
  Antisense strand to SEQ ID NO: 18914
uaauuccuacagauguggg

SEQ ID NO: 18916 - RNA, 19 nt, Artificial Sequence
  Description of Artificial Sequence: Synthetic oligonucleotide
  Sense strand starting at position 3643 of SEQ ID NO: 201
auaccugaauggguuguaa

SEQ ID NO: 18917 - RNA, 19 nt, Artificial Sequence
  Description of Artificial Sequence: Synthetic oligonucleotide
  Antisense strand to SEQ ID NO: 18916
uuacaacccauucagguau

SEQ ID NO: 18918 - RNA, 19 nt, Artificial Sequence
  Description of Artificial Sequence: Synthetic oligonucleotide
  Sense strand starting at position 3645 of SEQ ID NO: 201
accugaauggguuguaaug

SEQ ID NO: 18919 - RNA, 19 nt, Artificial Sequence
  Description of Artificial Sequence: Synthetic oligonucleotide
  Antisense strand to SEQ ID NO: 18918
cauuacaacccauucaggu

SEQ ID NO: 18920 - RNA, 19 nt, Artificial Sequence
  Description of Artificial Sequence: Synthetic oligonucleotide
  Sense strand starting at position 3656 of SEQ ID NO: 201
uuguaaugacaauacugua

SEQ ID NO: 18921 - RNA, 19 nt, Artificial Sequence
  Description of Artificial Sequence: Synthetic oligonucleotide
  Antisense strand to SEQ ID NO: 18920
uacaguauugucauuacaa

SEQ ID NO: 18922 - RNA, 19 nt, Artificial Sequence
  Description of Artificial Sequence: Synthetic oligonucleotide
  Sense strand starting at position 54 of SEQ ID NO: 202
ucacaucuguacuuguaua

SEQ ID NO: 18923 - RNA, 19 nt, Artificial Sequence
  Description of Artificial Sequence: Synthetic oligonucleotide
  Antisense strand to SEQ ID NO: 18922
uauacaaguacagauguga

SEQ ID NO: 18924 - RNA, 19 nt, Artificial Sequence
  Description of Artificial Sequence: Synthetic oligonucleotide
  Sense strand starting at position 59 of SEQ ID NO: 202
ucuguacuuguauacagau

SEQ ID NO: 18925 - RNA, 19 nt, Artificial Sequence
  Description of Artificial Sequence: Synthetic oligonucleotide
  Antisense strand to SEQ ID NO: 18924
aucuguauacaaguacaga

SEQ ID NO: 18926 - RNA, 19 nt, Artificial Sequence
  Description of Artificial Sequence: Synthetic oligonucleotide
  Sense strand starting at position 136 of SEQ ID NO: 202
uggcaauuaucuucuuuag

SEQ ID NO: 18927 - RNA, 19 nt, Artificial Sequence
  Description of Artificial Sequence: Synthetic oligonucleotide
  Antisense strand to SEQ ID NO: 18926
cuaaagaagauaauugcca

SEQ ID NO: 18928 - RNA, 19 nt, Artificial Sequence
  Description of Artificial Sequence: Synthetic oligonucleotide
  Sense strand starting at position 156 of SEQ ID NO: 202
gguuguugcgaagguuaag

SEQ ID NO: 18929 - RNA, 19 nt, Artificial Sequence
  Description of Artificial Sequence: Synthetic oligonucleotide
  Antisense strand to SEQ ID NO: 18928
cuuaaccuucgcaacaacc

SEQ ID NO: 18930 - RNA, 19 nt, Artificial Sequence
  Description of Artificial Sequence: Synthetic oligonucleotide
  Sense strand starting at position 157 of SEQ ID NO: 202
guuguugcgaagguuaagu

SEQ ID NO: 18931 - RNA, 19 nt, Artificial Sequence
  Description of Artificial Sequence: Synthetic oligonucleotide
  Antisense strand to SEQ ID NO: 18930
acuuaaccuucgcaacaac

SEQ ID NO: 18932 - RNA, 19 nt, Artificial Sequence
  Description of Artificial Sequence: Synthetic oligonucleotide
  Sense strand starting at position 165 of SEQ ID NO: 202
gaagguuaagugggaacau

SEQ ID NO: 18933 - RNA, 19 nt, Artificial Sequence
  Description of Artificial Sequence: Synthetic oligonucleotide
  Antisense strand to SEQ ID NO: 18932
auguucccacuuaaccuuc

SEQ ID NO: 18934 - RNA, 19 nt, Artificial Sequence
  Description of Artificial Sequence: Synthetic oligonucleotide
  Sense strand starting at position 166 of SEQ ID NO: 202
aagguuaagugggaacauu

SEQ ID NO: 18935 - RNA, 19 nt, Artificial Sequence
  Description of Artificial Sequence: Synthetic oligonucleotide
  Antisense strand to SEQ ID NO: 18934
aauguucccacuuaaccuu

SEQ ID NO: 18936 - RNA, 19 nt, Artificial Sequence
  Description of Artificial Sequence: Synthetic oligonucleotide
  Sense strand starting at position 181 of SEQ ID NO: 202
cauuguaaacugugugaca

SEQ ID NO: 18937 - RNA, 19 nt, Artificial Sequence
  Description of Artificial Sequence: Synthetic oligonucleotide
  Antisense strand to SEQ ID NO: 18936
ugucacacaguuuacaaug

SEQ ID NO: 18938 - RNA, 19 nt, Artificial Sequence
  Description of Artificial Sequence: Synthetic oligonucleotide
  Sense strand starting at position 183 of SEQ ID NO: 202
uuguaaacugugugacaca

SEQ ID NO: 18939 - RNA, 19 nt, Artificial Sequence
  Description of Artificial Sequence: Synthetic oligonucleotide
  Antisense strand to SEQ ID NO: 18938
ugugucacacaguuuacaa

SEQ ID NO: 18940 - RNA, 19 nt, Artificial Sequence
  Description of Artificial Sequence: Synthetic oligonucleotide
  Sense strand starting at position 219 of SEQ ID NO: 202
ggccuagcucuuggaaguu

SEQ ID NO: 18941 - RNA, 19 nt, Artificial Sequence
  Description of Artificial Sequence: Synthetic oligonucleotide
  Antisense strand to SEQ ID NO: 18940
aacuuccaagagcuaggcc

SEQ ID NO: 18942 - RNA, 19 nt, Artificial Sequence
  Description of Artificial Sequence: Synthetic oligonucleotide
  Sense strand starting at position 247 of SEQ ID NO: 202
acuggcacucaccaugaau

SEQ ID NO: 18943 - RNA, 19 nt, Artificial Sequence
  Description of Artificial Sequence: Synthetic oligonucleotide
  Antisense strand to SEQ ID NO: 18942
auucauggugagugccagu

SEQ ID NO: 18944 - RNA, 19 nt, Artificial Sequence
  Description of Artificial Sequence: Synthetic oligonucleotide
  Sense strand starting at position 249 of SEQ ID NO: 202
uggcacucaccaugaauaa

SEQ ID NO: 18945 - RNA, 19 nt, Artificial Sequence
  Description of Artificial Sequence: Synthetic oligonucleotide
  Antisense strand to SEQ ID NO: 18944
uuauucauggugagugcca

SEQ ID NO: 18946 - RNA, 19 nt, Artificial Sequence
  Description of Artificial Sequence: Synthetic oligonucleotide
  Sense strand starting at position 285 of SEQ ID NO: 202
aguaguuauuuauguucca

SEQ ID NO: 18947 - RNA, 19 nt, Artificial Sequence
  Description of Artificial Sequence: Synthetic oligonucleotide
  Antisense strand to SEQ ID NO: 18946
uggaacauaaauaacuacu

SEQ ID NO: 18948 - RNA, 19 nt, Artificial Sequence
  Description of Artificial Sequence: Synthetic oligonucleotide
  Sense strand starting at position 286 of SEQ ID NO: 202
guaguuauuuauguuccau

SEQ ID NO: 18949 - RNA, 19 nt, Artificial Sequence
  Description of Artificial Sequence: Synthetic oligonucleotide
  Antisense strand to SEQ ID NO: 18948
auggaacauaaauaacuac

SEQ ID NO: 18950 - RNA, 19 nt, Artificial Sequence
  Description of Artificial Sequence: Synthetic oligonucleotide
  Sense strand starting at position 390 of SEQ ID NO: 202
gcaagugcuccauaaaucu

SEQ ID NO: 18951 - RNA, 19 nt, Artificial Sequence
  Description of Artificial Sequence: Synthetic oligonucleotide
  Antisense strand to SEQ ID NO: 18950
agauuuauggagcacuugc

SEQ ID NO: 18952 - RNA, 19 nt, Artificial Sequence
  Description of Artificial Sequence: Synthetic oligonucleotide
  Sense strand starting at position 405 of SEQ ID NO: 202
aucucuguugaaugaggaa

SEQ ID NO: 18953 - RNA, 19 nt, Artificial Sequence
  Description of Artificial Sequence: Synthetic oligonucleotide
  Antisense strand to SEQ ID NO: 18952
uuccucauucaacagagau

SEQ ID NO: 18954 - RNA, 19 nt, Artificial Sequence
  Description of Artificial Sequence: Synthetic oligonucleotide
  Sense strand starting at position 473 of SEQ ID NO: 202
caccaauugugaguacagu

SEQ ID NO: 18955 - RNA, 19 nt, Artificial Sequence
  Description of Artificial Sequence: Synthetic oligonucleotide
  Antisense strand to SEQ ID NO: 18954
acuguacucacaauuggug

SEQ ID NO: 18956 - RNA, 19 nt, Artificial Sequence
  Description of Artificial Sequence: Synthetic oligonucleotide
  Sense strand starting at position 479 of SEQ ID NO: 202
uugugaguacaguguaaua

SEQ ID NO: 18957 - RNA, 19 nt, Artificial Sequence
  Description of Artificial Sequence: Synthetic oligonucleotide
  Antisense strand to SEQ ID NO: 18956
uauuacacuguacucacaa

SEQ ID NO: 18958 - RNA, 19 nt, Artificial Sequence
  Description of Artificial Sequence: Synthetic oligonucleotide
  Sense strand starting at position 481 of SEQ ID NO: 202
gugaguacaguguaauaaa

SEQ ID NO: 18959 - RNA, 19 nt, Artificial Sequence
  Description of Artificial Sequence: Synthetic oligonucleotide
  Antisense strand to SEQ ID NO: 18958
uuuauuacacuguacucac

SEQ ID NO: 18960 - RNA, 19 nt, Artificial Sequence
  Description of Artificial Sequence: Synthetic oligonucleotide
  Sense strand starting at position 660 of SEQ ID NO: 202
uagugauacucauauaggu

SEQ ID NO: 18961 - RNA, 19 nt, Artificial Sequence
  Description of Artificial Sequence: Synthetic oligonucleotide
  Antisense strand to SEQ ID NO: 18960
accuauaugaguaucacua

SEQ ID NO: 18962 - RNA, 19 nt, Artificial Sequence
  Description of Artificial Sequence: Synthetic oligonucleotide
  Sense strand starting at position 669 of SEQ ID NO: 202
ucauauaggucucaucuga

SEQ ID NO: 18963 - RNA, 19 nt, Artificial Sequence
  Description of Artificial Sequence: Synthetic oligonucleotide
  Antisense strand to SEQ ID NO: 18962
ucagaugagaccuauauga

SEQ ID NO: 18964 - RNA, 19 nt, Artificial Sequence
  Description of Artificial Sequence: Synthetic oligonucleotide
  Sense strand starting at position 730 of SEQ ID NO: 202
caaagccauucguuacgaa

SEQ ID NO: 18965 - RNA, 19 nt, Artificial Sequence
  Description of Artificial Sequence: Synthetic oligonucleotide
  Antisense strand to SEQ ID NO: 18964
uucguaacgaauggcuuug

SEQ ID NO: 18966 - RNA, 19 nt, Artificial Sequence
  Description of Artificial Sequence: Synthetic oligonucleotide
  Sense strand starting at position 731 of SEQ ID NO: 202
aaagccauucguuacgaau

SEQ ID NO: 18967 - RNA, 19 nt, Artificial Sequence
  Description of Artificial Sequence: Synthetic oligonucleotide
  Antisense strand to SEQ ID NO: 18966
auucguaacgaauggcuuu

SEQ ID NO: 18968 - RNA, 19 nt, Artificial Sequence
  Description of Artificial Sequence: Synthetic oligonucleotide
  Sense strand starting at position 758 of SEQ ID NO: 202
agguuuaugugguucugca

SEQ ID NO: 18969 - RNA, 19 nt, Artificial Sequence
  Description of Artificial Sequence: Synthetic oligonucleotide
  Antisense strand to SEQ ID NO: 18968
ugcagaaccacauaaaccu

SEQ ID NO: 18970 - RNA, 19 nt, Artificial Sequence
  Description of Artificial Sequence: Synthetic oligonucleotide
  Sense strand starting at position 816 of SEQ ID NO: 202
gacguuuaccuguacauua

SEQ ID NO: 18971 - RNA, 19 nt, Artificial Sequence
  Description of Artificial Sequence: Synthetic oligonucleotide
  Antisense strand to SEQ ID NO: 18970
uaauguacagguaaacguc

SEQ ID NO: 18972 - RNA, 19 nt, Artificial Sequence
  Description of Artificial Sequence: Synthetic oligonucleotide
  Sense strand starting at position 818 of SEQ ID NO: 202
cguuuaccuguacauuaau

SEQ ID NO: 18973 - RNA, 19 nt, Artificial Sequence
  Description of Artificial Sequence: Synthetic oligonucleotide
  Antisense strand to SEQ ID NO: 18972
auuaauguacagguaaacg

SEQ ID NO: 18974 - RNA, 19 nt, Artificial Sequence
  Description of Artificial Sequence: Synthetic oligonucleotide
  Sense strand starting at position 1033 of SEQ ID NO: 202
ggcagccugacuuaaggau

SEQ ID NO: 18975 - RNA, 19 nt, Artificial Sequence
  Description of Artificial Sequence: Synthetic oligonucleotide
  Antisense strand to SEQ ID NO: 18974
auccuuaagucaggcugcc

SEQ ID NO: 18976 - RNA, 19 nt, Artificial Sequence
  Description of Artificial Sequence: Synthetic oligonucleotide
  Sense strand starting at position 1904 of SEQ ID NO: 202
cggguuagcuuccucauaa

SEQ ID NO: 18977 - RNA, 19 nt, Artificial Sequence
  Description of Artificial Sequence: Synthetic oligonucleotide
  Antisense strand to SEQ ID NO: 18976
uuaugaggaagcuaacccg

SEQ ID NO: 18978 - RNA, 19 nt, Artificial Sequence
  Description of Artificial Sequence: Synthetic oligonucleotide
  Sense strand starting at position 1905 of SEQ ID NO: 202
ggguuagcuuccucauaag

SEQ ID NO: 18979 - RNA, 19 nt, Artificial Sequence
  Description of Artificial Sequence: Synthetic oligonucleotide
  Antisense strand to SEQ ID NO: 18978
cuuaugaggaagcuaaccc

SEQ ID NO: 18980 - RNA, 19 nt, Artificial Sequence
  Description of Artificial Sequence: Synthetic oligonucleotide
  Sense strand starting at position 2221 of SEQ ID NO: 202
ucauuuaacguuugcauac

SEQ ID NO: 18981 - RNA, 19 nt, Artificial Sequence
  Description of Artificial Sequence: Synthetic oligonucleotide
  Antisense strand to SEQ ID NO: 18980
guaugcaaacguuaaauga

SEQ ID NO: 18982 - RNA, 19 nt, Artificial Sequence
  Description of Artificial Sequence: Synthetic oligonucleotide
  Sense strand starting at position 2279 of SEQ ID NO: 202
uuaguuaaucuguguaaug

SEQ ID NO: 18983 - RNA, 19 nt, Artificial Sequence
  Description of Artificial Sequence: Synthetic oligonucleotide
  Antisense strand to SEQ ID NO: 18982
cauuacacagauuaacuaa

SEQ ID NO: 18984 - RNA, 19 nt, Artificial Sequence
  Description of Artificial Sequence: Synthetic oligonucleotide
  Sense strand starting at position 2280 of SEQ ID NO: 202
uaguuaaucuguguaaugg

SEQ ID NO: 18985 - RNA, 19 nt, Artificial Sequence
  Description of Artificial Sequence: Synthetic oligonucleotide
  Antisense strand to SEQ ID NO: 18984
ccauuacacagauuaacua

SEQ ID NO: 18986 - RNA, 19 nt, Artificial Sequence
  Description of Artificial Sequence: Synthetic oligonucleotide
  Sense strand starting at position 2281 of SEQ ID NO: 202
aguuaaucuguguaaugga

SEQ ID NO: 18987 - RNA, 19 nt, Artificial Sequence
  Description of Artificial Sequence: Synthetic oligonucleotide
  Antisense strand to SEQ ID NO: 18986
uccauuacacagauuaacu

SEQ ID NO: 18988 - RNA, 19 nt, Artificial Sequence
  Description of Artificial Sequence: Synthetic oligonucleotide
  Sense strand starting at position 2319 of SEQ ID NO: 202
uagggcugccgggaucaua

SEQ ID NO: 18989 - RNA, 19 nt, Artificial Sequence
  Description of Artificial Sequence: Synthetic oligonucleotide
  Antisense strand to SEQ ID NO: 18988
uaugaucccggcagcccua

SEQ ID NO: 18990 - RNA, 19 nt, Artificial Sequence
  Description of Artificial Sequence: Synthetic oligonucleotide
  Sense strand starting at position 2327 of SEQ ID NO: 202
ccgggaucauauguaaagu

SEQ ID NO: 18991 - RNA, 19 nt, Artificial Sequence
  Description of Artificial Sequence: Synthetic oligonucleotide
  Antisense strand to SEQ ID NO: 18990
acuuuacauaugaucccgg

SEQ ID NO: 18992 - RNA, 19 nt, Artificial Sequence
  Description of Artificial Sequence: Synthetic oligonucleotide
  Sense strand starting at position 2328 of SEQ ID NO: 202
cgggaucauauguaaaguu

SEQ ID NO: 18993 - RNA, 19 nt, Artificial Sequence
  Description of Artificial Sequence: Synthetic oligonucleotide
  Antisense strand to SEQ ID NO: 18992
aacuuuacauaugaucccg

SEQ ID NO: 18994 - RNA, 19 nt, Artificial Sequence
  Description of Artificial Sequence: Synthetic oligonucleotide
  Sense strand starting at position 2680 of SEQ ID NO: 202
uugaguccuuacuaauaug

SEQ ID NO: 18995 - RNA, 19 nt, Artificial Sequence
  Description of Artificial Sequence: Synthetic oligonucleotide
  Antisense strand to SEQ ID NO: 18994
cauauuaguaaggacucaa

SEQ ID NO: 18996 - RNA, 19 nt, Artificial Sequence
  Description of Artificial Sequence: Synthetic oligonucleotide
  Sense strand starting at position 3921 of SEQ ID NO: 202
ggcuguauggauugguaaa

SEQ ID NO: 18997 - RNA, 19 nt, Artificial Sequence
  Description of Artificial Sequence: Synthetic oligonucleotide
  Antisense strand to SEQ ID NO: 18996
uuuaccaauccauacagcc

SEQ ID NO: 18998 - RNA, 19 nt, Artificial Sequence
  Description of Artificial Sequence: Synthetic oligonucleotide
  Sense strand starting at position 3978 of SEQ ID NO: 202
ggaggagucuguccuuguc

SEQ ID NO: 18999 - RNA, 19 nt, Artificial Sequence
  Description of Artificial Sequence: Synthetic oligonucleotide
  Antisense strand to SEQ ID NO: 18998
gacaaggacagacuccucc

SEQ ID NO: 19000 - RNA, 19 nt, Artificial Sequence
  Description of Artificial Sequence: Synthetic oligonucleotide
  Sense strand starting at position 3980 of SEQ ID NO: 202
aggagucuguccuugucuu

SEQ ID NO: 19001 - RNA, 19 nt, Artificial Sequence
  Description of Artificial Sequence: Synthetic oligonucleotide
  Antisense strand to SEQ ID NO: 19000
aagacaaggacagacuccu

SEQ ID NO: 19002 - RNA, 19 nt, Artificial Sequence
  Description of Artificial Sequence: Synthetic oligonucleotide
  Sense strand starting at position 743 of SEQ ID NO: 203
gcacaacagcugugaugaa

SEQ ID NO: 19003 - RNA, 19 nt, Artificial Sequence
  Description of Artificial Sequence: Synthetic oligonucleotide
  Antisense strand to SEQ ID NO: 19002
uucaucacagcuguugugc

SEQ ID NO: 19004 - RNA, 19 nt, Artificial Sequence
  Description of Artificial Sequence: Synthetic oligonucleotide
  Sense strand starting at position 839 of SEQ ID NO: 203
auuggagaauucuugcuau

SEQ ID NO: 19005 - RNA, 19 nt, Artificial Sequence
  Description of Artificial Sequence: Synthetic oligonucleotide
  Antisense strand to SEQ ID NO: 19004
auagcaagaauucuccaau

SEQ ID NO: 19006 - RNA, 19 nt, Artificial Sequence
  Description of Artificial Sequence: Synthetic oligonucleotide
  Sense strand starting at position 842 of SEQ ID NO: 203
ggagaauucuugcuauacu

SEQ ID NO: 19007 - RNA, 19 nt, Artificial Sequence
  Description of Artificial Sequence: Synthetic oligonucleotide
  Antisense strand to SEQ ID NO: 19006
aguauagcaagaauucucc

SEQ ID NO: 19008 - RNA, 19 nt, Artificial Sequence
  Description of Artificial Sequence: Synthetic oligonucleotide
  Sense strand starting at position 911 of SEQ ID NO: 203
guaguaugggaguaguaag

SEQ ID NO: 19009 - RNA, 19 nt, Artificial Sequence
  Description of Artificial Sequence: Synthetic oligonucleotide
  Antisense strand to SEQ ID NO: 19008
cuuacuacucccauacuac

SEQ ID NO: 19010 - RNA, 19 nt, Artificial Sequence
  Description of Artificial Sequence: Synthetic oligonucleotide
  Sense strand starting at position 986 of SEQ ID NO: 203
ugaccugucccuuaauggu

SEQ ID NO: 19011 - RNA, 19 nt, Artificial Sequence
  Description of Artificial Sequence: Synthetic oligonucleotide
  Antisense strand to SEQ ID NO: 19010
accauuaagggacagguca

SEQ ID NO: 19012 - RNA, 19 nt, Artificial Sequence
  Description of Artificial Sequence: Synthetic oligonucleotide
  Sense strand starting at position 1134 of SEQ ID NO: 203
guuacaaugcuugaagcaa

SEQ ID NO: 19013 - RNA, 19 nt, Artificial Sequence
  Description of Artificial Sequence: Synthetic oligonucleotide
  Antisense strand to SEQ ID NO: 19012
uugcuucaagcauuguaac

SEQ ID NO: 19014 - RNA, 19 nt, Artificial Sequence
  Description of Artificial Sequence: Synthetic oligonucleotide
  Sense strand starting at position 1162 of SEQ ID NO: 203
ccaggaaucugggcaauga

SEQ ID NO: 19015 - RNA, 19 nt, Artificial Sequence
  Description of Artificial Sequence: Synthetic oligonucleotide
  Antisense strand to SEQ ID NO: 19014
ucauugcccagauuccugg

SEQ ID NO: 19016 - RNA, 19 nt, Artificial Sequence
  Description of Artificial Sequence: Synthetic oligonucleotide
  Sense strand starting at position 1218 of SEQ ID NO: 203
augaucucccaagagcuua

SEQ ID NO: 19017 - RNA, 19 nt, Artificial Sequence
  Description of Artificial Sequence: Synthetic oligonucleotide
  Antisense strand to SEQ ID NO: 19016
uaagcucuugggagaucau

SEQ ID NO: 19018 - RNA, 19 nt, Artificial Sequence
  Description of Artificial Sequence: Synthetic oligonucleotide
  Sense strand starting at position 1223 of SEQ ID NO: 203
cucccaagagcuuaaaugu

SEQ ID NO: 19019 - RNA, 19 nt, Artificial Sequence
  Description of Artificial Sequence: Synthetic oligonucleotide
  Antisense strand to SEQ ID NO: 19018
acauuuaagcucuugggag

SEQ ID NO: 19020 - RNA, 19 nt, Artificial Sequence
  Description of Artificial Sequence: Synthetic oligonucleotide
  Sense strand starting at position 1233 of SEQ ID NO: 203
cuuaaauguucugucaaca

SEQ ID NO: 19021 - RNA, 19 nt, Artificial Sequence
  Description of Artificial Sequence: Synthetic oligonucleotide
  Antisense strand to SEQ ID NO: 19020
uguugacagaacauuuaag

SEQ ID NO: 19022 - RNA, 19 nt, Artificial Sequence
  Description of Artificial Sequence: Synthetic oligonucleotide
  Sense strand starting at position 1238 of SEQ ID NO: 203
auguucugucaacaccaau

SEQ ID NO: 19023 - RNA, 19 nt, Artificial Sequence
  Description of Artificial Sequence: Synthetic oligonucleotide
  Antisense strand to SEQ ID NO: 19022
auugguguugacagaacau

SEQ ID NO: 19024 - RNA, 19 nt, Artificial Sequence
  Description of Artificial Sequence: Synthetic oligonucleotide
  Sense strand starting at position 1295 of SEQ ID NO: 203
uuagguguuacugaaagcu

SEQ ID NO: 19025 - RNA, 19 nt, Artificial Sequence
  Description of Artificial Sequence: Synthetic oligonucleotide
  Antisense strand to SEQ ID NO: 19024
agcuuucaguaacaccuaa

SEQ ID NO: 19026 - RNA, 19 nt, Artificial Sequence
  Description of Artificial Sequence: Synthetic oligonucleotide
  Sense strand starting at position 1689 of SEQ ID NO: 203
gcaggaaccuuaccugaau

SEQ ID NO: 19027 - RNA, 19 nt, Artificial Sequence
  Description of Artificial Sequence: Synthetic oligonucleotide
  Antisense strand to SEQ ID NO: 19026
auucagguaagguuccugc

SEQ ID NO: 19028 - RNA, 19 nt, Artificial Sequence
  Description of Artificial Sequence: Synthetic oligonucleotide
  Sense strand starting at position 1757 of SEQ ID NO: 203
gcucaagaaguccaugagu

SEQ ID NO: 19029 - RNA, 19 nt, Artificial Sequence
  Description of Artificial Sequence: Synthetic oligonucleotide
  Antisense strand to SEQ ID NO: 19028
acucauggacuucuugagc

SEQ ID NO: 19030 - RNA, 19 nt, Artificial Sequence
  Description of Artificial Sequence: Synthetic oligonucleotide
  Sense strand starting at position 1759 of SEQ ID NO: 203
ucaagaaguccaugaguag

SEQ ID NO: 19031 - RNA, 19 nt, Artificial Sequence
  Description of Artificial Sequence: Synthetic oligonucleotide
  Antisense strand to SEQ ID NO: 19030
cuacucauggacuucuuga

SEQ ID NO: 19032 - RNA, 19 nt, Artificial Sequence
  Description of Artificial Sequence: Synthetic oligonucleotide
  Sense strand starting at position 1943 of SEQ ID NO: 203
acauguaauccuggaacuu

SEQ ID NO: 19033 - RNA, 19 nt, Artificial Sequence
  Description of Artificial Sequence: Synthetic oligonucleotide
  Antisense strand to SEQ ID NO: 19032
aaguuccaggauuacaugu

SEQ ID NO: 19034 - RNA, 19 nt, Artificial Sequence
  Description of Artificial Sequence: Synthetic oligonucleotide
  Sense strand starting at position 2174 of SEQ ID NO: 203
agaaauacuuccucgacuu

SEQ ID NO: 19035 - RNA, 19 nt, Artificial Sequence
  Description of Artificial Sequence: Synthetic oligonucleotide
  Antisense strand to SEQ ID NO: 19034
aagucgaggaaguauuucu

SEQ ID NO: 19036 - RNA, 19 nt, Artificial Sequence
  Description of Artificial Sequence: Synthetic oligonucleotide
  Sense strand starting at position 2207 of SEQ ID NO: 203
augguauaauuugaaggaa

SEQ ID NO: 19037 - RNA, 19 nt, Artificial Sequence
  Description of Artificial Sequence: Synthetic oligonucleotide
  Antisense strand to SEQ ID NO: 19036
uuccuucaaauuauaccau

SEQ ID NO: 19038 - RNA, 19 nt, Artificial Sequence
  Description of Artificial Sequence: Synthetic oligonucleotide
  Sense strand starting at position 2253 of SEQ ID NO: 203
ucaacuucuguuuauggaa

SEQ ID NO: 19039 - RNA, 19 nt, Artificial Sequence
  Description of Artificial Sequence: Synthetic oligonucleotide
  Antisense strand to SEQ ID NO: 19038
uuccauaaacagaaguuga

SEQ ID NO: 19040 - RNA, 19 nt, Artificial Sequence
  Description of Artificial Sequence: Synthetic oligonucleotide
  Sense strand starting at position 2312 of SEQ ID NO: 203
ggaacuauaguuggcacua

SEQ ID NO: 19041 - RNA, 19 nt, Artificial Sequence
  Description of Artificial Sequence: Synthetic oligonucleotide
  Antisense strand to SEQ ID NO: 19040
uagugccaacuauaguucc

SEQ ID NO: 19042 - RNA, 19 nt, Artificial Sequence
  Description of Artificial Sequence: Synthetic oligonucleotide
  Sense strand starting at position 2317 of SEQ ID NO: 203
uauaguuggcacuacaagu

SEQ ID NO: 19043 - RNA, 19 nt, Artificial Sequence
  Description of Artificial Sequence: Synthetic oligonucleotide
  Antisense strand to SEQ ID NO: 19042
acuuguagugccaacuaua

SEQ ID NO: 19044 - RNA, 19 nt, Artificial Sequence
  Description of Artificial Sequence: Synthetic oligonucleotide
  Sense strand starting at position 2369 of SEQ ID NO: 203
gcucaugaagcuuacacuu

SEQ ID NO: 19045 - RNA, 19 nt, Artificial Sequence
  Description of Artificial Sequence: Synthetic oligonucleotide
  Antisense strand to SEQ ID NO: 19044
aaguguaagcuucaugagc

SEQ ID NO: 19046 - RNA, 19 nt, Artificial Sequence
  Description of Artificial Sequence: Synthetic oligonucleotide
  Sense strand starting at position 2436 of SEQ ID NO: 203
uauugagaucagugcacuu

SEQ ID NO: 19047 - RNA, 19 nt, Artificial Sequence
  Description of Artificial Sequence: Synthetic oligonucleotide
  Antisense strand to SEQ ID NO: 19046
aagugcacugaucucaaua

SEQ ID NO: 19048 - RNA, 19 nt, Artificial Sequence
  Description of Artificial Sequence: Synthetic oligonucleotide
  Sense strand starting at position 2447 of SEQ ID NO: 203
gugcacuuugaucagugaa

SEQ ID NO: 19049 - RNA, 19 nt, Artificial Sequence
  Description of Artificial Sequence: Synthetic oligonucleotide
  Antisense strand to SEQ ID NO: 19048
uucacugaucaaagugcac

SEQ ID NO: 19050 - RNA, 19 nt, Artificial Sequence
  Description of Artificial Sequence: Synthetic oligonucleotide
  Sense strand starting at position 2450 of SEQ ID NO: 203
cacuuugaucagugaagug

SEQ ID NO: 19051 - RNA, 19 nt, Artificial Sequence
  Description of Artificial Sequence: Synthetic oligonucleotide
  Antisense strand to SEQ ID NO: 19050
cacuucacugaucaaagug

SEQ ID NO: 19052 - RNA, 19 nt, Artificial Sequence
  Description of Artificial Sequence: Synthetic oligonucleotide
  Sense strand starting at position 2455 of SEQ ID NO: 203
ugaucagugaaguguaaca

SEQ ID NO: 19053 - RNA, 19 nt, Artificial Sequence
  Description of Artificial Sequence: Synthetic oligonucleotide
  Antisense strand to SEQ ID NO: 19052
uguuacacuucacugauca

SEQ ID NO: 19054 - RNA, 19 nt, Artificial Sequence
  Description of Artificial Sequence: Synthetic oligonucleotide
  Sense strand starting at position 2551 of SEQ ID NO: 203
ugacaugagcucugaggaa

SEQ ID NO: 19055 - RNA, 19 nt, Artificial Sequence
  Description of Artificial Sequence: Synthetic oligonucleotide
  Antisense strand to SEQ ID NO: 19054
uuccucagagcucauguca

SEQ ID NO: 19056 - RNA, 19 nt, Artificial Sequence
  Description of Artificial Sequence: Synthetic oligonucleotide
  Sense strand starting at position 2604 of SEQ ID NO: 203
acacuauucuaggcggaga

SEQ ID NO: 19057 - RNA, 19 nt, Artificial Sequence
  Description of Artificial Sequence: Synthetic oligonucleotide
  Antisense strand to SEQ ID NO: 19056
ucuccgccuagaauagugu

SEQ ID NO: 19058 - RNA, 19 nt, Artificial Sequence
  Description of Artificial Sequence: Synthetic oligonucleotide
  Sense strand starting at position 2631 of SEQ ID NO: 203
auauaaagucugggaaggu

SEQ ID NO: 19059 - RNA, 19 nt, Artificial Sequence
  Description of Artificial Sequence: Synthetic oligonucleotide
  Antisense strand to SEQ ID NO: 19058
accuucccagacuuuauau

SEQ ID NO: 19060 - RNA, 19 nt, Artificial Sequence
  Description of Artificial Sequence: Synthetic oligonucleotide
  Sense strand starting at position 2818 of SEQ ID NO: 203
aucugagauucucugucua

SEQ ID NO: 19061 - RNA, 19 nt, Artificial Sequence
  Description of Artificial Sequence: Synthetic oligonucleotide
  Antisense strand to SEQ ID NO: 19060
uagacagagaaucucagau

SEQ ID NO: 19062 - RNA, 19 nt, Artificial Sequence
  Description of Artificial Sequence: Synthetic oligonucleotide
  Sense strand starting at position 2822 of SEQ ID NO: 203
gagauucucugucuagcaa

SEQ ID NO: 19063 - RNA, 19 nt, Artificial Sequence
  Description of Artificial Sequence: Synthetic oligonucleotide
  Antisense strand to SEQ ID NO: 19062
uugcuagacagagaaucuc

SEQ ID NO: 19064 - RNA, 19 nt, Artificial Sequence
  Description of Artificial Sequence: Synthetic oligonucleotide
  Sense strand starting at position 2823 of SEQ ID NO: 203
agauucucugucuagcaaa

SEQ ID NO: 19065 - RNA, 19 nt, Artificial Sequence
  Description of Artificial Sequence: Synthetic oligonucleotide
  Antisense strand to SEQ ID NO: 19064
uuugcuagacagagaaucu

SEQ ID NO: 19066 - RNA, 19 nt, Artificial Sequence
  Description of Artificial Sequence: Synthetic oligonucleotide
  Sense strand starting at position 2859 of SEQ ID NO: 203
guuggacuccaucauuguu

SEQ ID NO: 19067 - RNA, 19 nt, Artificial Sequence
  Description of Artificial Sequence: Synthetic oligonucleotide
  Antisense strand to SEQ ID NO: 19066
aacaaugauggaguccaac

SEQ ID NO: 19068 - RNA, 19 nt, Artificial Sequence
  Description of Artificial Sequence: Synthetic oligonucleotide
  Sense strand starting at position 2897 of SEQ ID NO: 203
gacacuuaucuguaguggu

SEQ ID NO: 19069 - RNA, 19 nt, Artificial Sequence
  Description of Artificial Sequence: Synthetic oligonucleotide
  Antisense strand to SEQ ID NO: 19068
accacuacagauaaguguc

SEQ ID NO: 19070 - RNA, 19 nt, Artificial Sequence
  Description of Artificial Sequence: Synthetic oligonucleotide
  Sense strand starting at position 2999 of SEQ ID NO: 203
accugucugaccuggugaa

SEQ ID NO: 19071 - RNA, 19 nt, Artificial Sequence
  Description of Artificial Sequence: Synthetic oligonucleotide
  Antisense strand to SEQ ID NO: 19070
uucaccaggucagacaggu

SEQ ID NO: 19072 - RNA, 19 nt, Artificial Sequence
  Description of Artificial Sequence: Synthetic oligonucleotide
  Sense strand starting at position 3003 of SEQ ID NO: 203
gucugaccuggugaaguua

SEQ ID NO: 19073 - RNA, 19 nt, Artificial Sequence
  Description of Artificial Sequence: Synthetic oligonucleotide
  Antisense strand to SEQ ID NO: 19072
uaacuucaccaggucagac

SEQ ID NO: 19074 - RNA, 19 nt, Artificial Sequence
  Description of Artificial Sequence: Synthetic oligonucleotide
  Sense strand starting at position 3538 of SEQ ID NO: 203
ugggucaggaacugucauu

SEQ ID NO: 19075 - RNA, 19 nt, Artificial Sequence
  Description of Artificial Sequence: Synthetic oligonucleotide
  Antisense strand to SEQ ID NO: 19074
aaugacaguuccugaccca

SEQ ID NO: 19076 - RNA, 19 nt, Artificial Sequence
  Description of Artificial Sequence: Synthetic oligonucleotide
  Sense strand starting at position 3586 of SEQ ID NO: 203
gccacuuuggaagaguuua

SEQ ID NO: 19077 - RNA, 19 nt, Artificial Sequence
  Description of Artificial Sequence: Synthetic oligonucleotide
  Antisense strand to SEQ ID NO: 19076
uaaacucuuccaaaguggc

SEQ ID NO: 19078 - RNA, 19 nt, Artificial Sequence
  Description of Artificial Sequence: Synthetic oligonucleotide
  Sense strand starting at position 3651 of SEQ ID NO: 203
auuauacuccuugguaucu

SEQ ID NO: 19079 - RNA, 19 nt, Artificial Sequence
  Description of Artificial Sequence: Synthetic oligonucleotide
  Antisense strand to SEQ ID NO: 19078
agauaccaaggaguauaau

SEQ ID NO: 19080 - RNA, 19 nt, Artificial Sequence
  Description of Artificial Sequence: Synthetic oligonucleotide
  Sense strand starting at position 3652 of SEQ ID NO: 203
uuauacuccuugguaucua

SEQ ID NO: 19081 - RNA, 19 nt, Artificial Sequence
  Description of Artificial Sequence: Synthetic oligonucleotide
  Antisense strand to SEQ ID NO: 19080
uagauaccaaggaguauaa

SEQ ID NO: 19082 - RNA, 19 nt, Artificial Sequence
  Description of Artificial Sequence: Synthetic oligonucleotide
  Sense strand starting at position 3936 of SEQ ID NO: 204
acucauuuguaucaugaag

SEQ ID NO: 19083 - RNA, 19 nt, Artificial Sequence
  Description of Artificial Sequence: Synthetic oligonucleotide
  Antisense strand to SEQ ID NO: 19082
cuucaugauacaaaugagu

SEQ ID NO: 19084 - RNA, 19 nt, Artificial Sequence
  Description of Artificial Sequence: Synthetic oligonucleotide
  Sense strand starting at position 3845 of SEQ ID NO: 204
cccgacucccauuaaugau

SEQ ID NO: 19085 - RNA, 19 nt, Artificial Sequence
  Description of Artificial Sequence: Synthetic oligonucleotide
  Antisense strand to SEQ ID NO: 19084
aucauuaaugggagucggg

SEQ ID NO: 19086 - RNA, 19 nt, Artificial Sequence
  Description of Artificial Sequence: Synthetic oligonucleotide
  Sense strand starting at position 3776 of SEQ ID NO: 204
acagacuuguuccuguuau

SEQ ID NO: 19087 - RNA, 19 nt, Artificial Sequence
  Description of Artificial Sequence: Synthetic oligonucleotide
  Antisense strand to SEQ ID NO: 19086
auaacaggaacaagucugu

SEQ ID NO: 19088 - RNA, 19 nt, Artificial Sequence
  Description of Artificial Sequence: Synthetic oligonucleotide
  Sense strand starting at position 3732 of SEQ ID NO: 204
agcuaaaugaggugucacu

SEQ ID NO: 19089 - RNA, 19 nt, Artificial Sequence
  Description of Artificial Sequence: Synthetic oligonucleotide
  Antisense strand to SEQ ID NO: 19088
agugacaccucauuuagcu

SEQ ID NO: 19090 - RNA, 19 nt, Artificial Sequence
  Description of Artificial Sequence: Synthetic oligonucleotide
  Sense strand starting at position 3648 of SEQ ID NO: 204
uggaaauuaugagaacaca

SEQ ID NO: 19091 - RNA, 19 nt, Artificial Sequence
  Description of Artificial Sequence: Synthetic oligonucleotide
  Antisense strand to SEQ ID NO: 19090
uguguucucauaauuucca

SEQ ID NO: 19092 - RNA, 19 nt, Artificial Sequence
  Description of Artificial Sequence: Synthetic oligonucleotide
  Sense strand starting at position 3601 of SEQ ID NO: 204
caugaagauuguuuagacu

SEQ ID NO: 19093 - RNA, 19 nt, Artificial Sequence
  Description of Artificial Sequence: Synthetic oligonucleotide
  Antisense strand to SEQ ID NO: 19092
agucuaaacaaucuucaug

SEQ ID NO: 19094 - RNA, 19 nt, Artificial Sequence
  Description of Artificial Sequence: Synthetic oligonucleotide
  Sense strand starting at position 3600 of SEQ ID NO: 204
ucaugaagauuguuuagac

SEQ ID NO: 19095 - RNA, 19 nt, Artificial Sequence
  Description of Artificial Sequence: Synthetic oligonucleotide
  Antisense strand to SEQ ID NO: 19094
gucuaaacaaucuucauga

SEQ ID NO: 19096 - RNA, 19 nt, Artificial Sequence
  Description of Artificial Sequence: Synthetic oligonucleotide
  Sense strand starting at position 3580 of SEQ ID NO: 204
ugaaucaguucuguacuuu

SEQ ID NO: 19097 - RNA, 19 nt, Artificial Sequence
  Description of Artificial Sequence: Synthetic oligonucleotide
  Antisense strand to SEQ ID NO: 19096
aaaguacagaacugauuca

SEQ ID NO: 19098 - RNA, 19 nt, Artificial Sequence
  Description of Artificial Sequence: Synthetic oligonucleotide
  Sense strand starting at position 3521 of SEQ ID NO: 204
ccagaagaguuaucccuau

SEQ ID NO: 19099 - RNA, 19 nt, Artificial Sequence
  Description of Artificial Sequence: Synthetic oligonucleotide
  Antisense strand to SEQ ID NO: 19098
auagggauaacucuucugg

SEQ ID NO: 19100 - RNA, 19 nt, Artificial Sequence
  Description of Artificial Sequence: Synthetic oligonucleotide
  Sense strand starting at position 3446 of SEQ ID NO: 204
acaggaugauuauaugaca

SEQ ID NO: 19101 - RNA, 19 nt, Artificial Sequence
  Description of Artificial Sequence: Synthetic oligonucleotide
  Antisense strand to SEQ ID NO: 19100
ugucauauaaucauccugu

SEQ ID NO: 19102 - RNA, 19 nt, Artificial Sequence
  Description of Artificial Sequence: Synthetic oligonucleotide
  Sense strand starting at position 3377 of SEQ ID NO: 204
cacaaaggaugugcaaauu

SEQ ID NO: 19103 - RNA, 19 nt, Artificial Sequence
  Description of Artificial Sequence: Synthetic oligonucleotide
  Antisense strand to SEQ ID NO: 19102
aauuugcacauccuuugug

SEQ ID NO: 19104 - RNA, 19 nt, Artificial Sequence
  Description of Artificial Sequence: Synthetic oligonucleotide
  Sense strand starting at position 3376 of SEQ ID NO: 204
gcacaaaggaugugcaaau

SEQ ID NO: 19105 - RNA, 19 nt, Artificial Sequence
  Description of Artificial Sequence: Synthetic oligonucleotide
  Antisense strand to SEQ ID NO: 19104
auuugcacauccuuugugc

SEQ ID NO: 19106 - RNA, 19 nt, Artificial Sequence
  Description of Artificial Sequence: Synthetic oligonucleotide
  Sense strand starting at position 3089 of SEQ ID NO: 204
gagggugggccugagaguu

SEQ ID NO: 19107 - RNA, 19 nt, Artificial Sequence
  Description of Artificial Sequence: Synthetic oligonucleotide
  Antisense strand to SEQ ID NO: 19106
aacucucaggcccacccuc

SEQ ID NO: 19108 - RNA, 19 nt, Artificial Sequence
  Description of Artificial Sequence: Synthetic oligonucleotide
  Sense strand starting at position 3008 of SEQ ID NO: 204
aguaguaacaaguagugua

SEQ ID NO: 19109 - RNA, 19 nt, Artificial Sequence
  Description of Artificial Sequence: Synthetic oligonucleotide
  Antisense strand to SEQ ID NO: 19108
uacacuacuuguuacuacu

SEQ ID NO: 19110 - RNA, 19 nt, Artificial Sequence
  Description of Artificial Sequence: Synthetic oligonucleotide
  Sense strand starting at position 2884 of SEQ ID NO: 204
guaaaugugugaguaaacu

SEQ ID NO: 19111 - RNA, 19 nt, Artificial Sequence
  Description of Artificial Sequence: Synthetic oligonucleotide
  Antisense strand to SEQ ID NO: 19110
aguuuacucacacauuuac

SEQ ID NO: 19112 - RNA, 19 nt, Artificial Sequence
  Description of Artificial Sequence: Synthetic oligonucleotide
  Sense strand starting at position 2880 of SEQ ID NO: 204
auguguaaaugugugagua

SEQ ID NO: 19113 - RNA, 19 nt, Artificial Sequence
  Description of Artificial Sequence: Synthetic oligonucleotide
  Antisense strand to SEQ ID NO: 19112
uacucacacauuuacacau

SEQ ID NO: 19114 - RNA, 19 nt, Artificial Sequence
  Description of Artificial Sequence: Synthetic oligonucleotide
  Sense strand starting at position 2873 of SEQ ID NO: 204
ucaugaaauguguaaaugu

SEQ ID NO: 19115 - RNA, 19 nt, Artificial Sequence
  Description of Artificial Sequence: Synthetic oligonucleotide
  Antisense strand to SEQ ID NO: 19114
acauuuacacauuucauga

SEQ ID NO: 19116 - RNA, 19 nt, Artificial Sequence
  Description of Artificial Sequence: Synthetic oligonucleotide
  Sense strand starting at position 2839 of SEQ ID NO: 204
ugagcauggacuugagcua

SEQ ID NO: 19117 - RNA, 19 nt, Artificial Sequence
  Description of Artificial Sequence: Synthetic oligonucleotide
  Antisense strand to SEQ ID NO: 19116
uagcucaaguccaugcuca

SEQ ID NO: 19118 - RNA, 19 nt, Artificial Sequence
  Description of Artificial Sequence: Synthetic oligonucleotide
  Sense strand starting at position 2830 of SEQ ID NO: 204
cugcauaauugagcaugga

SEQ ID NO: 19119 - RNA, 19 nt, Artificial Sequence
  Description of Artificial Sequence: Synthetic oligonucleotide
  Antisense strand to SEQ ID NO: 19118
uccaugcucaauuaugcag

SEQ ID NO: 19120 - RNA, 19 nt, Artificial Sequence
  Description of Artificial Sequence: Synthetic oligonucleotide
  Sense strand starting at position 2689 of SEQ ID NO: 204
gucccauuagcuggagauu

SEQ ID NO: 19121 - RNA, 19 nt, Artificial Sequence
  Description of Artificial Sequence: Synthetic oligonucleotide
  Antisense strand to SEQ ID NO: 19120
aaucuccagcuaaugggac

SEQ ID NO: 19122 - RNA, 19 nt, Artificial Sequence
  Description of Artificial Sequence: Synthetic oligonucleotide
  Sense strand starting at position 2688 of SEQ ID NO: 204
agucccauuagcuggagau

SEQ ID NO: 19123 - RNA, 19 nt, Artificial Sequence
  Description of Artificial Sequence: Synthetic oligonucleotide
  Antisense strand to SEQ ID NO: 19122
aucuccagcuaaugggacu

SEQ ID NO: 19124 - RNA, 19 nt, Artificial Sequence
  Description of Artificial Sequence: Synthetic oligonucleotide
  Sense strand starting at position 2635 of SEQ ID NO: 204
ccaucucagcgccaggaaa

SEQ ID NO: 19125 - RNA, 19 nt, Artificial Sequence
  Description of Artificial Sequence: Synthetic oligonucleotide
  Antisense strand to SEQ ID NO: 19124
uuuccuggcgcugagaugg

SEQ ID NO: 19126 - RNA, 19 nt, Artificial Sequence
  Description of Artificial Sequence: Synthetic oligonucleotide
  Sense strand starting at position 2573 of SEQ ID NO: 204
aggugaguccuuuggaaga

SEQ ID NO: 19127 - RNA, 19 nt, Artificial Sequence
  Description of Artificial Sequence: Synthetic oligonucleotide
  Antisense strand to SEQ ID NO: 19126
ucuuccaaaggacucaccu

SEQ ID NO: 19128 - RNA, 19 nt, Artificial Sequence
  Description of Artificial Sequence: Synthetic oligonucleotide
  Sense strand starting at position 2571 of SEQ ID NO: 204
agaggugaguccuuuggaa

SEQ ID NO: 19129 - RNA, 19 nt, Artificial Sequence
  Description of Artificial Sequence: Synthetic oligonucleotide
  Antisense strand to SEQ ID NO: 19128
uuccaaaggacucaccucu

SEQ ID NO: 19130 - RNA, 19 nt, Artificial Sequence
  Description of Artificial Sequence: Synthetic oligonucleotide
  Sense strand starting at position 2083 of SEQ ID NO: 204
cauggaagcuugucucaag

SEQ ID NO: 19131 - RNA, 19 nt, Artificial Sequence
  Description of Artificial Sequence: Synthetic oligonucleotide
  Antisense strand to SEQ ID NO: 19130
cuugagacaagcuuccaug

SEQ ID NO: 19132 - RNA, 19 nt, Artificial Sequence
  Description of Artificial Sequence: Synthetic oligonucleotide
  Sense strand starting at position 1674 of SEQ ID NO: 204
aguccuggaugccuugaaa

SEQ ID NO: 19133 - RNA, 19 nt, Artificial Sequence
  Description of Artificial Sequence: Synthetic oligonucleotide
  Antisense strand to SEQ ID NO: 19132
uuucaaggcauccaggacu

SEQ ID NO: 19134 - RNA, 19 nt, Artificial Sequence
  Description of Artificial Sequence: Synthetic oligonucleotide
  Sense strand starting at position 1418 of SEQ ID NO: 204
ccuugcucagccugagaau

SEQ ID NO: 19135 - RNA, 19 nt, Artificial Sequence
  Description of Artificial Sequence: Synthetic oligonucleotide
  Antisense strand to SEQ ID NO: 19134
auucucaggcugagcaagg

SEQ ID NO: 19136 - RNA, 19 nt, Artificial Sequence
  Description of Artificial Sequence: Synthetic oligonucleotide
  Sense strand starting at position 1012 of SEQ ID NO: 204
acgauuucuccacgcguuu

SEQ ID NO: 19137 - RNA, 19 nt, Artificial Sequence
  Description of Artificial Sequence: Synthetic oligonucleotide
  Antisense strand to SEQ ID NO: 19136
aaacgcguggagaaaucgu

SEQ ID NO: 19138 - RNA, 19 nt, Artificial Sequence
  Description of Artificial Sequence: Synthetic oligonucleotide
  Sense strand starting at position 1010 of SEQ ID NO: 204
ugacgauuucuccacgcgu

SEQ ID NO: 19139 - RNA, 19 nt, Artificial Sequence
  Description of Artificial Sequence: Synthetic oligonucleotide
  Antisense strand to SEQ ID NO: 19138
acgcguggagaaaucguca

SEQ ID NO: 19140 - RNA, 19 nt, Artificial Sequence
  Description of Artificial Sequence: Synthetic oligonucleotide
  Sense strand starting at position 999 of SEQ ID NO: 204
gcaucucuagcugacgauu

SEQ ID NO: 19141 - RNA, 19 nt, Artificial Sequence
  Description of Artificial Sequence: Synthetic oligonucleotide
  Antisense strand to SEQ ID NO: 19140
aaucgucagcuagagaugc

SEQ ID NO: 19142 - RNA, 19 nt, Artificial Sequence
  Description of Artificial Sequence: Synthetic oligonucleotide
  Sense strand starting at position 980 of SEQ ID NO: 204
ucuacucugugauuccaca

SEQ ID NO: 19143 - RNA, 19 nt, Artificial Sequence
  Description of Artificial Sequence: Synthetic oligonucleotide
  Antisense strand to SEQ ID NO: 19142
uguggaaucacagaguaga

SEQ ID NO: 19144 - RNA, 19 nt, Artificial Sequence
  Description of Artificial Sequence: Synthetic oligonucleotide
  Sense strand starting at position 975 of SEQ ID NO: 204
acacuucuacucugugauu

SEQ ID NO: 19145 - RNA, 19 nt, Artificial Sequence
  Description of Artificial Sequence: Synthetic oligonucleotide
  Antisense strand to SEQ ID NO: 19144
aaucacagaguagaagugu

SEQ ID NO: 19146 - RNA, 19 nt, Artificial Sequence
  Description of Artificial Sequence: Synthetic oligonucleotide
  Sense strand starting at position 920 of SEQ ID NO: 204
ggugucuuuaaugauguuu

SEQ ID NO: 19147 - RNA, 19 nt, Artificial Sequence
  Description of Artificial Sequence: Synthetic oligonucleotide
  Antisense strand to SEQ ID NO: 19146
aaacaucauuaaagacacc

SEQ ID NO: 19148 - RNA, 19 nt, Artificial Sequence
  Description of Artificial Sequence: Synthetic oligonucleotide
  Sense strand starting at position 913 of SEQ ID NO: 204
gucucagggugucuuuaau

SEQ ID NO: 19149 - RNA, 19 nt, Artificial Sequence
  Description of Artificial Sequence: Synthetic oligonucleotide
  Antisense strand to SEQ ID NO: 19148
auuaaagacacccugagac

SEQ ID NO: 19150 - RNA, 19 nt, Artificial Sequence
  Description of Artificial Sequence: Synthetic oligonucleotide
  Sense strand starting at position 891 of SEQ ID NO: 204
aucugugcuccucagucua

SEQ ID NO: 19151 - RNA, 19 nt, Artificial Sequence
  Description of Artificial Sequence: Synthetic oligonucleotide
  Antisense strand to SEQ ID NO: 19150
uagacugaggagcacagau

SEQ ID NO: 19152 - RNA, 19 nt, Artificial Sequence
  Description of Artificial Sequence: Synthetic oligonucleotide
  Sense strand starting at position 786 of SEQ ID NO: 204
guacaaaucggccaauaaa

SEQ ID NO: 19153 - RNA, 19 nt, Artificial Sequence
  Description of Artificial Sequence: Synthetic oligonucleotide
  Antisense strand to SEQ ID NO: 19152
uuuauuggccgauuuguac

SEQ ID NO: 19154 - RNA, 19 nt, Artificial Sequence
  Description of Artificial Sequence: Synthetic oligonucleotide
  Sense strand starting at position 387 of SEQ ID NO: 204
augaauguuaggcacugau

SEQ ID NO: 19155 - RNA, 19 nt, Artificial Sequence
  Description of Artificial Sequence: Synthetic oligonucleotide
  Antisense strand to SEQ ID NO: 19154
aucagugccuaacauucau

SEQ ID NO: 19156 - RNA, 19 nt, Artificial Sequence
  Description of Artificial Sequence: Synthetic oligonucleotide
  Sense strand starting at position 386 of SEQ ID NO: 204
gaugaauguuaggcacuga

SEQ ID NO: 19157 - RNA, 19 nt, Artificial Sequence
  Description of Artificial Sequence: Synthetic oligonucleotide
  Antisense strand to SEQ ID NO: 19156
ucagugccuaacauucauc

SEQ ID NO: 19158 - RNA, 19 nt, Artificial Sequence
  Description of Artificial Sequence: Synthetic oligonucleotide
  Sense strand starting at position 121 of SEQ ID NO: 204
cagcuaucacagggaguca

SEQ ID NO: 19159 - RNA, 19 nt, Artificial Sequence
  Description of Artificial Sequence: Synthetic oligonucleotide
  Antisense strand to SEQ ID NO: 19158
ugacucccugugauagcug

SEQ ID NO: 19160 - RNA, 19 nt, Artificial Sequence
  Description of Artificial Sequence: Synthetic oligonucleotide
  Sense strand starting at position 56 of SEQ ID NO: 204
uuuccaggccucugugaaa

SEQ ID NO: 19161 - RNA, 19 nt, Artificial Sequence
  Description of Artificial Sequence: Synthetic oligonucleotide
  Antisense strand to SEQ ID NO: 19160
uuucacagaggccuggaaa

SEQ ID NO: 19162 - RNA, 19 nt, Artificial Sequence
  Description of Artificial Sequence: Synthetic oligonucleotide
  Sense strand starting at position 3933 of SEQ ID NO: 205
auuauaggcucacugcaaa

SEQ ID NO: 19163 - RNA, 19 nt, Artificial Sequence
  Description of Artificial Sequence: Synthetic oligonucleotide
  Antisense strand to SEQ ID NO: 19162
uuugcagugagccuauaau

SEQ ID NO: 19164 - RNA, 19 nt, Artificial Sequence
  Description of Artificial Sequence: Synthetic oligonucleotide
  Sense strand starting at position 3928 of SEQ ID NO: 205
gugcaauuauaggcucacu

SEQ ID NO: 19165 - RNA, 19 nt, Artificial Sequence
  Description of Artificial Sequence: Synthetic oligonucleotide
  Antisense strand to SEQ ID NO: 19164
agugagccuauaauugcac

SEQ ID NO: 19166 - RNA, 19 nt, Artificial Sequence
  Description of Artificial Sequence: Synthetic oligonucleotide
  Sense strand starting at position 3619 of SEQ ID NO: 205
cuucguguccaggguucaa

SEQ ID NO: 19167 - RNA, 19 nt, Artificial Sequence
  Description of Artificial Sequence: Synthetic oligonucleotide
  Antisense strand to SEQ ID NO: 19166
uugaacccuggacacgaag

SEQ ID NO: 19168 - RNA, 19 nt, Artificial Sequence
  Description of Artificial Sequence: Synthetic oligonucleotide
  Sense strand starting at position 3524 of SEQ ID NO: 205
cugcucuugugacaaacuu

SEQ ID NO: 19169 - RNA, 19 nt, Artificial Sequence
  Description of Artificial Sequence: Synthetic oligonucleotide
  Antisense strand to SEQ ID NO: 19168
aaguuugucacaagagcag

SEQ ID NO: 19170 - RNA, 19 nt, Artificial Sequence
  Description of Artificial Sequence: Synthetic oligonucleotide
  Sense strand starting at position 3519 of SEQ ID NO: 205
gcugucugcucuugugaca

SEQ ID NO: 19171 - RNA, 19 nt, Artificial Sequence
  Description of Artificial Sequence: Synthetic oligonucleotide
  Antisense strand to SEQ ID NO: 19170
ugucacaagagcagacagc

SEQ ID NO: 19172 - RNA, 19 nt, Artificial Sequence
  Description of Artificial Sequence: Synthetic oligonucleotide
  Sense strand starting at position 3441 of SEQ ID NO: 205
ggaugcuucuguuauugau

SEQ ID NO: 19173 - RNA, 19 nt, Artificial Sequence
  Description of Artificial Sequence: Synthetic oligonucleotide
  Antisense strand to SEQ ID NO: 19172
aucaauaacagaagcaucc

SEQ ID NO: 19174 - RNA, 19 nt, Artificial Sequence
  Description of Artificial Sequence: Synthetic oligonucleotide
  Sense strand starting at position 3439 of SEQ ID NO: 205
gaggaugcuucuguuauug

SEQ ID NO: 19175 - RNA, 19 nt, Artificial Sequence
  Description of Artificial Sequence: Synthetic oligonucleotide
  Antisense strand to SEQ ID NO: 19174
caauaacagaagcauccuc

SEQ ID NO: 19176 - RNA, 19 nt, Artificial Sequence
  Description of Artificial Sequence: Synthetic oligonucleotide
  Sense strand starting at position 3438 of SEQ ID NO: 205
agaggaugcuucuguuauu

SEQ ID NO: 19177 - RNA, 19 nt, Artificial Sequence
  Description of Artificial Sequence: Synthetic oligonucleotide
  Antisense strand to SEQ ID NO: 19176
aauaacagaagcauccucu

SEQ ID NO: 19178 - RNA, 19 nt, Artificial Sequence
  Description of Artificial Sequence: Synthetic oligonucleotide
  Sense strand starting at position 3435 of SEQ ID NO: 205
gccagaggaugcuucuguu

SEQ ID NO: 19179 - RNA, 19 nt, Artificial Sequence
  Description of Artificial Sequence: Synthetic oligonucleotide
  Antisense strand to SEQ ID NO: 19178
aacagaagcauccucuggc

SEQ ID NO: 19180 - RNA, 19 nt, Artificial Sequence
  Description of Artificial Sequence: Synthetic oligonucleotide
  Sense strand starting at position 3350 of SEQ ID NO: 205
gugguugccucucauguuu

SEQ ID NO: 19181 - RNA, 19 nt, Artificial Sequence
  Description of Artificial Sequence: Synthetic oligonucleotide
  Antisense strand to SEQ ID NO: 19180
aaacaugagaggcaaccac

SEQ ID NO: 19182 - RNA, 19 nt, Artificial Sequence
  Description of Artificial Sequence: Synthetic oligonucleotide
  Sense strand starting at position 3349 of SEQ ID NO: 205
ugugguugccucucauguu

SEQ ID NO: 19183 - RNA, 19 nt, Artificial Sequence
  Description of Artificial Sequence: Synthetic oligonucleotide
  Antisense strand to SEQ ID NO: 19182
aacaugagaggcaaccaca

SEQ ID NO: 19184 - RNA, 19 nt, Artificial Sequence
  Description of Artificial Sequence: Synthetic oligonucleotide
  Sense strand starting at position 3277 of SEQ ID NO: 205
uugcuaaauccacagugaa

SEQ ID NO: 19185 - RNA, 19 nt, Artificial Sequence
  Description of Artificial Sequence: Synthetic oligonucleotide
  Antisense strand to SEQ ID NO: 19184
uucacuguggauuuagcaa

SEQ ID NO: 19186 - RNA, 19 nt, Artificial Sequence
  Description of Artificial Sequence: Synthetic oligonucleotide
  Sense strand starting at position 3268 of SEQ ID NO: 205
gcugauuaauugcuaaauc

SEQ ID NO: 19187 - RNA, 19 nt, Artificial Sequence
  Description of Artificial Sequence: Synthetic oligonucleotide
  Antisense strand to SEQ ID NO: 19186
gauuuagcaauuaaucagc

SEQ ID NO: 19188 - RNA, 19 nt, Artificial Sequence
  Description of Artificial Sequence: Synthetic oligonucleotide
  Sense strand starting at position 3265 of SEQ ID NO: 205
agggcugauuaauugcuaa

SEQ ID NO: 19189 - RNA, 19 nt, Artificial Sequence
  Description of Artificial Sequence: Synthetic oligonucleotide
  Antisense strand to SEQ ID NO: 19188
uuagcaauuaaucagcccu

SEQ ID NO: 19190 - RNA, 19 nt, Artificial Sequence
  Description of Artificial Sequence: Synthetic oligonucleotide
  Sense strand starting at position 3259 of SEQ ID NO: 205
uccucuagggcugauuaau

SEQ ID NO: 19191 - RNA, 19 nt, Artificial Sequence
  Description of Artificial Sequence: Synthetic oligonucleotide
  Antisense strand to SEQ ID NO: 19190
auuaaucagcccuagagga

SEQ ID NO: 19192 - RNA, 19 nt, Artificial Sequence
  Description of Artificial Sequence: Synthetic oligonucleotide
  Sense strand starting at position 3258 of SEQ ID NO: 205
auccucuagggcugauuaa

SEQ ID NO: 19193 - RNA, 19 nt, Artificial Sequence
  Description of Artificial Sequence: Synthetic oligonucleotide
  Antisense strand to SEQ ID NO: 19192
uuaaucagcccuagaggau

SEQ ID NO: 19194 - RNA, 19 nt, Artificial Sequence
  Description of Artificial Sequence: Synthetic oligonucleotide
  Sense strand starting at position 3196 of SEQ ID NO: 205
guaacauuguucccucuaa

SEQ ID NO: 19195 - RNA, 19 nt, Artificial Sequence
  Description of Artificial Sequence: Synthetic oligonucleotide
  Antisense strand to SEQ ID NO: 19194
uuagagggaacaauguuac

SEQ ID NO: 19196 - RNA, 19 nt, Artificial Sequence
  Description of Artificial Sequence: Synthetic oligonucleotide
  Sense strand starting at position 3183 of SEQ ID NO: 205
guucuuccagcauguaaca

SEQ ID NO: 19197 - RNA, 19 nt, Artificial Sequence
  Description of Artificial Sequence: Synthetic oligonucleotide
  Antisense strand to SEQ ID NO: 19196
uguuacaugcuggaagaac

SEQ ID NO: 19198 - RNA, 19 nt, Artificial Sequence
  Description of Artificial Sequence: Synthetic oligonucleotide
  Sense strand starting at position 3181 of SEQ ID NO: 205
cgguucuuccagcauguaa

SEQ ID NO: 19199 - RNA, 19 nt, Artificial Sequence
  Description of Artificial Sequence: Synthetic oligonucleotide
  Antisense strand to SEQ ID NO: 19198
uuacaugcuggaagaaccg

SEQ ID NO: 19200 - RNA, 19 nt, Artificial Sequence
  Description of Artificial Sequence: Synthetic oligonucleotide
  Sense strand starting at position 3138 of SEQ ID NO: 205
gggcuccucuguguuacua

SEQ ID NO: 19201 - RNA, 19 nt, Artificial Sequence
  Description of Artificial Sequence: Synthetic oligonucleotide
  Antisense strand to SEQ ID NO: 19200
uaguaacacagaggagccc

SEQ ID NO: 19202 - RNA, 19 nt, Artificial Sequence
  Description of Artificial Sequence: Synthetic oligonucleotide
  Sense strand starting at position 2898 of SEQ ID NO: 205
ggugauggguguuuguaau

SEQ ID NO: 19203 - RNA, 19 nt, Artificial Sequence
  Description of Artificial Sequence: Synthetic oligonucleotide
  Antisense strand to SEQ ID NO: 19202
auuacaaacacccaucacc

SEQ ID NO: 19204 - RNA, 19 nt, Artificial Sequence
  Description of Artificial Sequence: Synthetic oligonucleotide
  Sense strand starting at position 2582 of SEQ ID NO: 205
ugagcuaugguccacuaca

SEQ ID NO: 19205 - RNA, 19 nt, Artificial Sequence
  Description of Artificial Sequence: Synthetic oligonucleotide
  Antisense strand to SEQ ID NO: 19204
uguaguggaccauagcuca

SEQ ID NO: 19206 - RNA, 19 nt, Artificial Sequence
  Description of Artificial Sequence: Synthetic oligonucleotide
  Sense strand starting at position 2552 of SEQ ID NO: 205
ggaggauugcuucagagcu

SEQ ID NO: 19207 - RNA, 19 nt, Artificial Sequence
  Description of Artificial Sequence: Synthetic oligonucleotide
  Antisense strand to SEQ ID NO: 19206
agcucugaagcaauccucc

SEQ ID NO: 19208 - RNA, 19 nt, Artificial Sequence
  Description of Artificial Sequence: Synthetic oligonucleotide
  Sense strand starting at position 2447 of SEQ ID NO: 205
agaauacccugggcuagau

SEQ ID NO: 19209 - RNA, 19 nt, Artificial Sequence
  Description of Artificial Sequence: Synthetic oligonucleotide
  Antisense strand to SEQ ID NO: 19208
aucuagcccaggguauucu

SEQ ID NO: 19210 - RNA, 19 nt, Artificial Sequence
  Description of Artificial Sequence: Synthetic oligonucleotide
  Sense strand starting at position 2446 of SEQ ID NO: 205
uagaauacccugggcuaga

SEQ ID NO: 19211 - RNA, 19 nt, Artificial Sequence
  Description of Artificial Sequence: Synthetic oligonucleotide
  Antisense strand to SEQ ID NO: 19210
ucuagcccaggguauucua

SEQ ID NO: 19212 - RNA, 19 nt, Artificial Sequence
  Description of Artificial Sequence: Synthetic oligonucleotide
  Sense strand starting at position 2444 of SEQ ID NO: 205
ccuagaauacccugggcua

SEQ ID NO: 19213 - RNA, 19 nt, Artificial Sequence
  Description of Artificial Sequence: Synthetic oligonucleotide
  Antisense strand to SEQ ID NO: 19212
uagcccaggguauucuagg

SEQ ID NO: 19214 - RNA, 19 nt, Artificial Sequence
  Description of Artificial Sequence: Synthetic oligonucleotide
  Sense strand starting at position 2436 of SEQ ID NO: 205
ccaguaguccuagaauacc

SEQ ID NO: 19215 - RNA, 19 nt, Artificial Sequence
  Description of Artificial Sequence: Synthetic oligonucleotide
  Antisense strand to SEQ ID NO: 19214
gguauucuaggacuacugg

SEQ ID NO: 19216 - RNA, 19 nt, Artificial Sequence
  Description of Artificial Sequence: Synthetic oligonucleotide
  Sense strand starting at position 2353 of SEQ ID NO: 205
uccaaucagcuuuggcaga

SEQ ID NO: 19217 - RNA, 19 nt, Artificial Sequence
  Description of Artificial Sequence: Synthetic oligonucleotide
  Antisense strand to SEQ ID NO: 19216
ucugccaaagcugauugga

SEQ ID NO: 19218 - RNA, 19 nt, Artificial Sequence
  Description of Artificial Sequence: Synthetic oligonucleotide
  Sense strand starting at position 2260 of SEQ ID NO: 205
acgccuuaagcguaaucuu

SEQ ID NO: 19219 - RNA, 19 nt, Artificial Sequence
  Description of Artificial Sequence: Synthetic oligonucleotide
  Antisense strand to SEQ ID NO: 19218
aagauuacgcuuaaggcgu

SEQ ID NO: 19220 - RNA, 19 nt, Artificial Sequence
  Description of Artificial Sequence: Synthetic oligonucleotide
  Sense strand starting at position 2078 of SEQ ID NO: 205
gucuuucuagaagagugau

SEQ ID NO: 19221 - RNA, 19 nt, Artificial Sequence
  Description of Artificial Sequence: Synthetic oligonucleotide
  Antisense strand to SEQ ID NO: 19220
aucacucuucuagaaagac

SEQ ID NO: 19222 - RNA, 19 nt, Artificial Sequence
  Description of Artificial Sequence: Synthetic oligonucleotide
  Sense strand starting at position 2075 of SEQ ID NO: 205
caggucuuucuagaagagu

SEQ ID NO: 19223 - RNA, 19 nt, Artificial Sequence
  Description of Artificial Sequence: Synthetic oligonucleotide
  Antisense strand to SEQ ID NO: 19222
acucuucuagaaagaccug

SEQ ID NO: 19224 - RNA, 19 nt, Artificial Sequence
  Description of Artificial Sequence: Synthetic oligonucleotide
  Sense strand starting at position 2028 of SEQ ID NO: 205
gucuaaguuuccucuggcu

SEQ ID NO: 19225 - RNA, 19 nt, Artificial Sequence
  Description of Artificial Sequence: Synthetic oligonucleotide
  Antisense strand to SEQ ID NO: 19224
agccagaggaaacuuagac

SEQ ID NO: 19226 - RNA, 19 nt, Artificial Sequence
  Description of Artificial Sequence: Synthetic oligonucleotide
  Sense strand starting at position 2019 of SEQ ID NO: 205
ccgccuugagucuaaguuu

SEQ ID NO: 19227 - RNA, 19 nt, Artificial Sequence
  Description of Artificial Sequence: Synthetic oligonucleotide
  Antisense strand to SEQ ID NO: 19226
aaacuuagacucaaggcgg

SEQ ID NO: 19228 - RNA, 19 nt, Artificial Sequence
  Description of Artificial Sequence: Synthetic oligonucleotide
  Sense strand starting at position 2018 of SEQ ID NO: 205
gccgccuugagucuaaguu

SEQ ID NO: 19229 - RNA, 19 nt, Artificial Sequence
  Description of Artificial Sequence: Synthetic oligonucleotide
  Antisense strand to SEQ ID NO: 19228
aacuuagacucaaggcggc

SEQ ID NO: 19230 - RNA, 19 nt, Artificial Sequence
  Description of Artificial Sequence: Synthetic oligonucleotide
  Sense strand starting at position 31 of SEQ ID NO: 206
guuacaaccuaguuauaac

SEQ ID NO: 19231 - RNA, 19 nt, Artificial Sequence
  Description of Artificial Sequence: Synthetic oligonucleotide
  Antisense strand to SEQ ID NO: 19230
guuauaacuagguuguaac

SEQ ID NO: 19232 - RNA, 19 nt, Artificial Sequence
  Description of Artificial Sequence: Synthetic oligonucleotide
  Sense strand starting at position 259 of SEQ ID NO: 206
auggauagagccugucaaa

SEQ ID NO: 19233 - RNA, 19 nt, Artificial Sequence
  Description of Artificial Sequence: Synthetic oligonucleotide
  Antisense strand to SEQ ID NO: 19232
uuugacaggcucuauccau

SEQ ID NO: 19234 - RNA, 19 nt, Artificial Sequence
  Description of Artificial Sequence: Synthetic oligonucleotide
  Sense strand starting at position 348 of SEQ ID NO: 206
ggcaacaugaguugugaga

SEQ ID NO: 19235 - RNA, 19 nt, Artificial Sequence
  Description of Artificial Sequence: Synthetic oligonucleotide
  Antisense strand to SEQ ID NO: 19234
ucucacaacucauguugcc

SEQ ID NO: 19236 - RNA, 19 nt, Artificial Sequence
  Description of Artificial Sequence: Synthetic oligonucleotide
  Sense strand starting at position 357 of SEQ ID NO: 206
aguugugagacugagcuaa

SEQ ID NO: 19237 - RNA, 19 nt, Artificial Sequence
  Description of Artificial Sequence: Synthetic oligonucleotide
  Antisense strand to SEQ ID NO: 19236
uuagcucagucucacaacu

SEQ ID NO: 19238 - RNA, 19 nt, Artificial Sequence
  Description of Artificial Sequence: Synthetic oligonucleotide
  Sense strand starting at position 359 of SEQ ID NO: 206
uugugagacugagcuaacu

SEQ ID NO: 19239 - RNA, 19 nt, Artificial Sequence
  Description of Artificial Sequence: Synthetic oligonucleotide
  Antisense strand to SEQ ID NO: 19238
aguuagcucagucucacaa

SEQ ID NO: 19240 - RNA, 19 nt, Artificial Sequence
  Description of Artificial Sequence: Synthetic oligonucleotide
  Sense strand starting at position 396 of SEQ ID NO: 206
aagucucuauggguugaga

SEQ ID NO: 19241 - RNA, 19 nt, Artificial Sequence
  Description of Artificial Sequence: Synthetic oligonucleotide
  Antisense strand to SEQ ID NO: 19240
ucucaacccauagagacuu

SEQ ID NO: 19242 - RNA, 19 nt, Artificial Sequence
  Description of Artificial Sequence: Synthetic oligonucleotide
  Sense strand starting at position 398 of SEQ ID NO: 206
gucucuauggguugagaga

SEQ ID NO: 19243 - RNA, 19 nt, Artificial Sequence
  Description of Artificial Sequence: Synthetic oligonucleotide
  Antisense strand to SEQ ID NO: 19242
ucucucaacccauagagac

SEQ ID NO: 19244 - RNA, 19 nt, Artificial Sequence
  Description of Artificial Sequence: Synthetic oligonucleotide
  Sense strand starting at position 412 of SEQ ID NO: 206
agagaauguuggguucauc

SEQ ID NO: 19245 - RNA, 19 nt, Artificial Sequence
  Description of Artificial Sequence: Synthetic oligonucleotide
  Antisense strand to SEQ ID NO: 19244
gaugaacccaacauucucu

SEQ ID NO: 19246 - RNA, 19 nt, Artificial Sequence
  Description of Artificial Sequence: Synthetic oligonucleotide
  Sense strand starting at position 433 of SEQ ID NO: 206
uuaggcuaaaugugaggaa

SEQ ID NO: 19247 - RNA, 19 nt, Artificial Sequence
  Description of Artificial Sequence: Synthetic oligonucleotide
  Antisense strand to SEQ ID NO: 19246
uuccucacauuuagccuaa

SEQ ID NO: 19248 - RNA, 19 nt, Artificial Sequence
  Description of Artificial Sequence: Synthetic oligonucleotide
  Sense strand starting at position 437 of SEQ ID NO: 206
gcuaaaugugaggaagcaa

SEQ ID NO: 19249 - RNA, 19 nt, Artificial Sequence
  Description of Artificial Sequence: Synthetic oligonucleotide
  Antisense strand to SEQ ID NO: 19248
uugcuuccucacauuuagc

SEQ ID NO: 19250 - RNA, 19 nt, Artificial Sequence
  Description of Artificial Sequence: Synthetic oligonucleotide
  Sense strand starting at position 519 of SEQ ID NO: 206
cuucguguucuuucuggua

SEQ ID NO: 19251 - RNA, 19 nt, Artificial Sequence
  Description of Artificial Sequence: Synthetic oligonucleotide
  Antisense strand to SEQ ID NO: 19250
uaccagaaagaacacgaag

SEQ ID NO: 19252 - RNA, 19 nt, Artificial Sequence
  Description of Artificial Sequence: Synthetic oligonucleotide
  Sense strand starting at position 637 of SEQ ID NO: 206
cuugcuugucuagacucaa

SEQ ID NO: 19253 - RNA, 19 nt, Artificial Sequence
  Description of Artificial Sequence: Synthetic oligonucleotide
  Antisense strand to SEQ ID NO: 19252
uugagucuagacaagcaag

SEQ ID NO: 19254 - RNA, 19 nt, Artificial Sequence
  Description of Artificial Sequence: Synthetic oligonucleotide
  Sense strand starting at position 862 of SEQ ID NO: 206
ggaugagagguccaguguu

SEQ ID NO: 19255 - RNA, 19 nt, Artificial Sequence
  Description of Artificial Sequence: Synthetic oligonucleotide
  Antisense strand to SEQ ID NO: 19254
aacacuggaccucucaucc

SEQ ID NO: 19256 - RNA, 19 nt, Artificial Sequence
  Description of Artificial Sequence: Synthetic oligonucleotide
  Sense strand starting at position 876 of SEQ ID NO: 206
guguuauucugacccagaa

SEQ ID NO: 19257 - RNA, 19 nt, Artificial Sequence
  Description of Artificial Sequence: Synthetic oligonucleotide
  Antisense strand to SEQ ID NO: 19256
uucugggucagaauaacac

SEQ ID NO: 19258 - RNA, 19 nt, Artificial Sequence
  Description of Artificial Sequence: Synthetic oligonucleotide
  Sense strand starting at position 926 of SEQ ID NO: 206
gggagccuucugggagauu

SEQ ID NO: 19259 - RNA, 19 nt, Artificial Sequence
  Description of Artificial Sequence: Synthetic oligonucleotide
  Antisense strand to SEQ ID NO: 19258
aaucucccagaaggcuccc

SEQ ID NO: 19260 - RNA, 19 nt, Artificial Sequence
  Description of Artificial Sequence: Synthetic oligonucleotide
  Sense strand starting at position 2131 of SEQ ID NO: 206
aaagucagacccgagcaau

SEQ ID NO: 19261 - RNA, 19 nt, Artificial Sequence
  Description of Artificial Sequence: Synthetic oligonucleotide
  Antisense strand to SEQ ID NO: 19260
auugcucgggucugacuuu

SEQ ID NO: 19262 - RNA, 19 nt, Artificial Sequence
  Description of Artificial Sequence: Synthetic oligonucleotide
  Sense strand starting at position 2154 of SEQ ID NO: 206
gccggagcgcgauucgaau

SEQ ID NO: 19263 - RNA, 19 nt, Artificial Sequence
  Description of Artificial Sequence: Synthetic oligonucleotide
  Antisense strand to SEQ ID NO: 19262
auucgaaucgcgcuccggc

SEQ ID NO: 19264 - RNA, 19 nt, Artificial Sequence
  Description of Artificial Sequence: Synthetic oligonucleotide
  Sense strand starting at position 2320 of SEQ ID NO: 206
ugcauugccaaguagagaa

SEQ ID NO: 19265 - RNA, 19 nt, Artificial Sequence
  Description of Artificial Sequence: Synthetic oligonucleotide
  Antisense strand to SEQ ID NO: 19264
uucucuacuuggcaaugca

SEQ ID NO: 19266 - RNA, 19 nt, Artificial Sequence
  Description of Artificial Sequence: Synthetic oligonucleotide
  Sense strand starting at position 2328 of SEQ ID NO: 206
caaguagagaaguguauga

SEQ ID NO: 19267 - RNA, 19 nt, Artificial Sequence
  Description of Artificial Sequence: Synthetic oligonucleotide
  Antisense strand to SEQ ID NO: 19266
ucauacacuucucuacuug

SEQ ID NO: 19268 - RNA, 19 nt, Artificial Sequence
  Description of Artificial Sequence: Synthetic oligonucleotide
  Sense strand starting at position 2330 of SEQ ID NO: 206
aguagagaaguguaugagu

SEQ ID NO: 19269 - RNA, 19 nt, Artificial Sequence
  Description of Artificial Sequence: Synthetic oligonucleotide
  Antisense strand to SEQ ID NO: 19268
acucauacacuucucuacu

SEQ ID NO: 19270 - RNA, 19 nt, Artificial Sequence
  Description of Artificial Sequence: Synthetic oligonucleotide
  Sense strand starting at position 2332 of SEQ ID NO: 206
uagagaaguguaugaguga

SEQ ID NO: 19271 - RNA, 19 nt, Artificial Sequence
  Description of Artificial Sequence: Synthetic oligonucleotide
  Antisense strand to SEQ ID NO: 19270
ucacucauacacuucucua

SEQ ID NO: 19272 - RNA, 19 nt, Artificial Sequence
  Description of Artificial Sequence: Synthetic oligonucleotide
  Sense strand starting at position 2337 of SEQ ID NO: 206
aaguguaugagugagugaa

SEQ ID NO: 19273 - RNA, 19 nt, Artificial Sequence
  Description of Artificial Sequence: Synthetic oligonucleotide
  Antisense strand to SEQ ID NO: 19272
uucacucacucauacacuu

SEQ ID NO: 19274 - RNA, 19 nt, Artificial Sequence
  Description of Artificial Sequence: Synthetic oligonucleotide
  Sense strand starting at position 2372 of SEQ ID NO: 206
gggcaaucuugauugaauc

SEQ ID NO: 19275 - RNA, 19 nt, Artificial Sequence
  Description of Artificial Sequence: Synthetic oligonucleotide
  Antisense strand to SEQ ID NO: 19274
gauucaaucaagauugccc

SEQ ID NO: 19276 - RNA, 19 nt, Artificial Sequence
  Description of Artificial Sequence: Synthetic oligonucleotide
  Sense strand starting at position 2373 of SEQ ID NO: 206
ggcaaucuugauugaaucu

SEQ ID NO: 19277 - RNA, 19 nt, Artificial Sequence
  Description of Artificial Sequence: Synthetic oligonucleotide
  Antisense strand to SEQ ID NO: 19276
agauucaaucaagauugcc

SEQ ID NO: 19278 - RNA, 19 nt, Artificial Sequence
  Description of Artificial Sequence: Synthetic oligonucleotide
  Sense strand starting at position 2748 of SEQ ID NO: 206
gucuuucuccauugagaua

SEQ ID NO: 19279 - RNA, 19 nt, Artificial Sequence
  Description of Artificial Sequence: Synthetic oligonucleotide
  Antisense strand to SEQ ID NO: 19278
uaucucaauggagaaagac

SEQ ID NO: 19280 - RNA, 19 nt, Artificial Sequence
  Description of Artificial Sequence: Synthetic oligonucleotide
  Sense strand starting at position 2891 of SEQ ID NO: 206
auaguacuccauggaauag

SEQ ID NO: 19281 - RNA, 19 nt, Artificial Sequence
  Description of Artificial Sequence: Synthetic oligonucleotide
  Antisense strand to SEQ ID NO: 19280
cuauuccauggaguacuau

SEQ ID NO: 19282 - RNA, 19 nt, Artificial Sequence
  Description of Artificial Sequence: Synthetic oligonucleotide
  Sense strand starting at position 3002 of SEQ ID NO: 206
gggcucuguacucauagga

SEQ ID NO: 19283 - RNA, 19 nt, Artificial Sequence
  Description of Artificial Sequence: Synthetic oligonucleotide
  Antisense strand to SEQ ID NO: 19282
uccuaugaguacagagccc

SEQ ID NO: 19284 - RNA, 19 nt, Artificial Sequence
  Description of Artificial Sequence: Synthetic oligonucleotide
  Sense strand starting at position 3070 of SEQ ID NO: 206
aucaaauauggcuaguuau

SEQ ID NO: 19285 - RNA, 19 nt, Artificial Sequence
  Description of Artificial Sequence: Synthetic oligonucleotide
  Antisense strand to SEQ ID NO: 19284
auaacuagccauauuugau

SEQ ID NO: 19286 - RNA, 19 nt, Artificial Sequence
  Description of Artificial Sequence: Synthetic oligonucleotide
  Sense strand starting at position 3112 of SEQ ID NO: 206
ggcacuugacagggaguua

SEQ ID NO: 19287 - RNA, 19 nt, Artificial Sequence
  Description of Artificial Sequence: Synthetic oligonucleotide
  Antisense strand to SEQ ID NO: 19286
uaacucccugucaagugcc

SEQ ID NO: 19288 - RNA, 19 nt, Artificial Sequence
  Description of Artificial Sequence: Synthetic oligonucleotide
  Sense strand starting at position 3294 of SEQ ID NO: 206
ccaggugcuggugauagaa

SEQ ID NO: 19289 - RNA, 19 nt, Artificial Sequence
  Description of Artificial Sequence: Synthetic oligonucleotide
  Antisense strand to SEQ ID NO: 19288
uucuaucaccagcaccugg

SEQ ID NO: 19290 - RNA, 19 nt, Artificial Sequence
  Description of Artificial Sequence: Synthetic oligonucleotide
  Sense strand starting at position 3400 of SEQ ID NO: 206
uagguaacuguaugaauaa

SEQ ID NO: 19291 - RNA, 19 nt, Artificial Sequence
  Description of Artificial Sequence: Synthetic oligonucleotide
  Antisense strand to SEQ ID NO: 19290
uuauucauacaguuaccua

SEQ ID NO: 19292 - RNA, 19 nt, Artificial Sequence
  Description of Artificial Sequence: Synthetic oligonucleotide
  Sense strand starting at position 3443 of SEQ ID NO: 206
uuuacaaucuagucuagga

SEQ ID NO: 19293 - RNA, 19 nt, Artificial Sequence
  Description of Artificial Sequence: Synthetic oligonucleotide
  Antisense strand to SEQ ID NO: 19292
uccuagacuagauuguaaa

SEQ ID NO: 19294 - RNA, 19 nt, Artificial Sequence
  Description of Artificial Sequence: Synthetic oligonucleotide
  Sense strand starting at position 3445 of SEQ ID NO: 206
uacaaucuagucuaggagu

SEQ ID NO: 19295 - RNA, 19 nt, Artificial Sequence
  Description of Artificial Sequence: Synthetic oligonucleotide
  Antisense strand to SEQ ID NO: 19294
acuccuagacuagauugua

SEQ ID NO: 19296 - RNA, 19 nt, Artificial Sequence
  Description of Artificial Sequence: Synthetic oligonucleotide
  Sense strand starting at position 3447 of SEQ ID NO: 206
caaucuagucuaggaguau

SEQ ID NO: 19297 - RNA, 19 nt, Artificial Sequence
  Description of Artificial Sequence: Synthetic oligonucleotide
  Antisense strand to SEQ ID NO: 19296
auacuccuagacuagauug

SEQ ID NO: 19298 - RNA, 19 nt, Artificial Sequence
  Description of Artificial Sequence: Synthetic oligonucleotide
  Sense strand starting at position 3467 of SEQ ID NO: 206
aaagaaguauaagcaagua

SEQ ID NO: 19299 - RNA, 19 nt, Artificial Sequence
  Description of Artificial Sequence: Synthetic oligonucleotide
  Antisense strand to SEQ ID NO: 19298
uacuugcuuauacuucuuu

SEQ ID NO: 19300 - RNA, 19 nt, Artificial Sequence
  Description of Artificial Sequence: Synthetic oligonucleotide
  Sense strand starting at position 3511 of SEQ ID NO: 206
gucauagaggaaugcuuaa

SEQ ID NO: 19301 - RNA, 19 nt, Artificial Sequence
  Description of Artificial Sequence: Synthetic oligonucleotide
  Antisense strand to SEQ ID NO: 19300
uuaagcauuccucuaugac

SEQ ID NO: 19302 - RNA, 19 nt, Artificial Sequence
  Description of Artificial Sequence: Synthetic oligonucleotide
  Sense strand starting at position 3648 of SEQ ID NO: 206
uuaguagugguagaugauu

SEQ ID NO: 19303 - RNA, 19 nt, Artificial Sequence
  Description of Artificial Sequence: Synthetic oligonucleotide
  Antisense strand to SEQ ID NO: 19302
aaucaucuaccacuacuaa

SEQ ID NO: 19304 - RNA, 19 nt, Artificial Sequence
  Description of Artificial Sequence: Synthetic oligonucleotide
  Sense strand starting at position 3882 of SEQ ID NO: 206
uauccaaauguguagguca

SEQ ID NO: 19305 - RNA, 19 nt, Artificial Sequence
  Description of Artificial Sequence: Synthetic oligonucleotide
  Antisense strand to SEQ ID NO: 19304
ugaccuacacauuuggaua

SEQ ID NO: 19306 - RNA, 19 nt, Artificial Sequence
  Description of Artificial Sequence: Synthetic oligonucleotide
  Sense strand starting at position 3887 of SEQ ID NO: 206
aaauguguaggucaguaca

SEQ ID NO: 19307 - RNA, 19 nt, Artificial Sequence
  Description of Artificial Sequence: Synthetic oligonucleotide
  Antisense strand to SEQ ID NO: 19306
uguacugaccuacacauuu

SEQ ID NO: 19308 - RNA, 19 nt, Artificial Sequence
  Description of Artificial Sequence: Synthetic oligonucleotide
  Sense strand starting at position 3890 of SEQ ID NO: 206
uguguaggucaguacaaau

SEQ ID NO: 19309 - RNA, 19 nt, Artificial Sequence
  Description of Artificial Sequence: Synthetic oligonucleotide
  Antisense strand to SEQ ID NO: 19308
auuuguacugaccuacaca

SEQ ID NO: 19310 - RNA, 19 nt, Artificial Sequence
  Description of Artificial Sequence: Synthetic oligonucleotide
  Sense strand starting at position 4 of SEQ ID NO: 207
ccaggaggcucuuucucau

SEQ ID NO: 19311 - RNA, 19 nt, Artificial Sequence
  Description of Artificial Sequence: Synthetic oligonucleotide
  Antisense strand to SEQ ID NO: 19310
augagaaagagccuccugg

SEQ ID NO: 19312 - RNA, 19 nt, Artificial Sequence
  Description of Artificial Sequence: Synthetic oligonucleotide
  Sense strand starting at position 25 of SEQ ID NO: 207
ugcccucagagguguauua

SEQ ID NO: 19313 - RNA, 19 nt, Artificial Sequence
  Description of Artificial Sequence: Synthetic oligonucleotide
  Antisense strand to SEQ ID NO: 19312
uaauacaccucugagggca

SEQ ID NO: 19314 - RNA, 19 nt, Artificial Sequence
  Description of Artificial Sequence: Synthetic oligonucleotide
  Sense strand starting at position 27 of SEQ ID NO: 207
cccucagagguguauuaag

SEQ ID NO: 19315 - RNA, 19 nt, Artificial Sequence
  Description of Artificial Sequence: Synthetic oligonucleotide
  Antisense strand to SEQ ID NO: 19314
cuuaauacaccucugaggg

SEQ ID NO: 19316 - RNA, 19 nt, Artificial Sequence
  Description of Artificial Sequence: Synthetic oligonucleotide
  Sense strand starting at position 71 of SEQ ID NO: 207
cuaacuagcuguguaacuu

SEQ ID NO: 19317 - RNA, 19 nt, Artificial Sequence
  Description of Artificial Sequence: Synthetic oligonucleotide
  Antisense strand to SEQ ID NO: 19316
aaguuacacagcuaguuag

SEQ ID NO: 19318 - RNA, 19 nt, Artificial Sequence
  Description of Artificial Sequence: Synthetic oligonucleotide
  Sense strand starting at position 80 of SEQ ID NO: 207
uguguaacuuaggcaaauu

SEQ ID NO: 19319 - RNA, 19 nt, Artificial Sequence
  Description of Artificial Sequence: Synthetic oligonucleotide
  Antisense strand to SEQ ID NO: 19318
aauuugccuaaguuacaca

SEQ ID NO: 19320 - RNA, 19 nt, Artificial Sequence
  Description of Artificial Sequence: Synthetic oligonucleotide
  Sense strand starting at position 138 of SEQ ID NO: 207
ggaggaugauaguaccuau

SEQ ID NO: 19321 - RNA, 19 nt, Artificial Sequence
  Description of Artificial Sequence: Synthetic oligonucleotide
  Antisense strand to SEQ ID NO: 19320
auagguacuaucauccucc

SEQ ID NO: 19322 - RNA, 19 nt, Artificial Sequence
  Description of Artificial Sequence: Synthetic oligonucleotide
  Sense strand starting at position 141 of SEQ ID NO: 207
ggaugauaguaccuauguc

SEQ ID NO: 19323 - RNA, 19 nt, Artificial Sequence
  Description of Artificial Sequence: Synthetic oligonucleotide
  Antisense strand to SEQ ID NO: 19322
gacauagguacuaucaucc

SEQ ID NO: 19324 - RNA, 19 nt, Artificial Sequence
  Description of Artificial Sequence: Synthetic oligonucleotide
  Sense strand starting at position 145 of SEQ ID NO: 207
gauaguaccuaugucaaga

SEQ ID NO: 19325 - RNA, 19 nt, Artificial Sequence
  Description of Artificial Sequence: Synthetic oligonucleotide
  Antisense strand to SEQ ID NO: 19324
ucuugacauagguacuauc

SEQ ID NO: 19326 - RNA, 19 nt, Artificial Sequence
  Description of Artificial Sequence: Synthetic oligonucleotide
  Sense strand starting at position 156 of SEQ ID NO: 207
ugucaagaguugcuguaag

SEQ ID NO: 19327 - RNA, 19 nt, Artificial Sequence
  Description of Artificial Sequence: Synthetic oligonucleotide
  Antisense strand to SEQ ID NO: 19326
cuuacagcaacucuugaca

SEQ ID NO: 19328 - RNA, 19 nt, Artificial Sequence
  Description of Artificial Sequence: Synthetic oligonucleotide
  Sense strand starting at position 164 of SEQ ID NO: 207
guugcuguaagggaugaau

SEQ ID NO: 19329 - RNA, 19 nt, Artificial Sequence
  Description of Artificial Sequence: Synthetic oligonucleotide
  Antisense strand to SEQ ID NO: 19328
auucaucccuuacagcaac

SEQ ID NO: 19330 - RNA, 19 nt, Artificial Sequence
  Description of Artificial Sequence: Synthetic oligonucleotide
  Sense strand starting at position 166 of SEQ ID NO: 207
ugcuguaagggaugaauga

SEQ ID NO: 19331 - RNA, 19 nt, Artificial Sequence
  Description of Artificial Sequence: Synthetic oligonucleotide
  Antisense strand to SEQ ID NO: 19330
ucauucaucccuuacagca

SEQ ID NO: 19332 - RNA, 19 nt, Artificial Sequence
  Description of Artificial Sequence: Synthetic oligonucleotide
  Sense strand starting at position 181 of SEQ ID NO: 207
augaguuaacauggguaca

SEQ ID NO: 19333 - RNA, 19 nt, Artificial Sequence
  Description of Artificial Sequence: Synthetic oligonucleotide
  Antisense strand to SEQ ID NO: 19332
uguacccauguuaacucau

SEQ ID NO: 19334 - RNA, 19 nt, Artificial Sequence
  Description of Artificial Sequence: Synthetic oligonucleotide
  Sense strand starting at position 337 of SEQ ID NO: 207
gagcgauaucgucacguau

SEQ ID NO: 19335 - RNA, 19 nt, Artificial Sequence
  Description of Artificial Sequence: Synthetic oligonucleotide
  Antisense strand to SEQ ID NO: 19334
auacgugacgauaucgcuc

SEQ ID NO: 19336 - RNA, 19 nt, Artificial Sequence
  Description of Artificial Sequence: Synthetic oligonucleotide
  Sense strand starting at position 406 of SEQ ID NO: 207
ggacccaguacuuguugaa

SEQ ID NO: 19337 - RNA, 19 nt, Artificial Sequence
  Description of Artificial Sequence: Synthetic oligonucleotide
  Antisense strand to SEQ ID NO: 19336
uucaacaaguacugggucc

SEQ ID NO: 19338 - RNA, 19 nt, Artificial Sequence
  Description of Artificial Sequence: Synthetic oligonucleotide
  Sense strand starting at position 415 of SEQ ID NO: 207
acuuguugaagucggauuu

SEQ ID NO: 19339 - RNA, 19 nt, Artificial Sequence
  Description of Artificial Sequence: Synthetic oligonucleotide
  Antisense strand to SEQ ID NO: 19338
aaauccgacuucaacaagu

SEQ ID NO: 19340 - RNA, 19 nt, Artificial Sequence
  Description of Artificial Sequence: Synthetic oligonucleotide
  Sense strand starting at position 451 of SEQ ID NO: 207
uccucucuuccugggacau

SEQ ID NO: 19341 - RNA, 19 nt, Artificial Sequence
  Description of Artificial Sequence: Synthetic oligonucleotide
  Antisense strand to SEQ ID NO: 19340
augucccaggaagagagga

SEQ ID NO: 19342 - RNA, 19 nt, Artificial Sequence
  Description of Artificial Sequence: Synthetic oligonucleotide
  Sense strand starting at position 1372 of SEQ ID NO: 207
caccguguugaguaauucu

SEQ ID NO: 19343 - RNA, 19 nt, Artificial Sequence
  Description of Artificial Sequence: Synthetic oligonucleotide
  Antisense strand to SEQ ID NO: 19342
agaauuacucaacacggug

SEQ ID NO: 19344 - RNA, 19 nt, Artificial Sequence
  Description of Artificial Sequence: Synthetic oligonucleotide
  Sense strand starting at position 1515 of SEQ ID NO: 207
acaccaucuguuggguaau

SEQ ID NO: 19345 - RNA, 19 nt, Artificial Sequence
  Description of Artificial Sequence: Synthetic oligonucleotide
  Antisense strand to SEQ ID NO: 19344
auuacccaacagauggugu

SEQ ID NO: 19346 - RNA, 19 nt, Artificial Sequence
  Description of Artificial Sequence: Synthetic oligonucleotide
  Sense strand starting at position 1518 of SEQ ID NO: 207
ccaucuguuggguaauucu

SEQ ID NO: 19347 - RNA, 19 nt, Artificial Sequence
  Description of Artificial Sequence: Synthetic oligonucleotide
  Antisense strand to SEQ ID NO: 19346
agaauuacccaacagaugg

SEQ ID NO: 19348 - RNA, 19 nt, Artificial Sequence
  Description of Artificial Sequence: Synthetic oligonucleotide
  Sense strand starting at position 1840 of SEQ ID NO: 207
ggaggaauuccuuguagag

SEQ ID NO: 19349 - RNA, 19 nt, Artificial Sequence
  Description of Artificial Sequence: Synthetic oligonucleotide
  Antisense strand to SEQ ID NO: 19348
cucuacaaggaauuccucc

SEQ ID NO: 19350 - RNA, 19 nt, Artificial Sequence
  Description of Artificial Sequence: Synthetic oligonucleotide
  Sense strand starting at position 1842 of SEQ ID NO: 207
aggaauuccuuguagagga

SEQ ID NO: 19351 - RNA, 19 nt, Artificial Sequence
  Description of Artificial Sequence: Synthetic oligonucleotide
  Antisense strand to SEQ ID NO: 19350
uccucuacaaggaauuccu

SEQ ID NO: 19352 - RNA, 19 nt, Artificial Sequence
  Description of Artificial Sequence: Synthetic oligonucleotide
  Sense strand starting at position 1852 of SEQ ID NO: 207
uguagaggagcuuguagau

SEQ ID NO: 19353 - RNA, 19 nt, Artificial Sequence
  Description of Artificial Sequence: Synthetic oligonucleotide
  Antisense strand to SEQ ID NO: 19352
aucuacaagcuccucuaca

SEQ ID NO: 19354 - RNA, 19 nt, Artificial Sequence
  Description of Artificial Sequence: Synthetic oligonucleotide
  Sense strand starting at position 1924 of SEQ ID NO: 207
ccacuuugagaguguauga

SEQ ID NO: 19355 - RNA, 19 nt, Artificial Sequence
  Description of Artificial Sequence: Synthetic oligonucleotide
  Antisense strand to SEQ ID NO: 19354
ucauacacucucaaagugg

SEQ ID NO: 19356 - RNA, 19 nt, Artificial Sequence
  Description of Artificial Sequence: Synthetic oligonucleotide
  Sense strand starting at position 1937 of SEQ ID NO: 207
guaugaaaccgucauggug

SEQ ID NO: 19357 - RNA, 19 nt, Artificial Sequence
  Description of Artificial Sequence: Synthetic oligonucleotide
  Antisense strand to SEQ ID NO: 19356
caccaugacgguuucauac

SEQ ID NO: 19358 - RNA, 19 nt, Artificial Sequence
  Description of Artificial Sequence: Synthetic oligonucleotide
  Sense strand starting at position 2001 of SEQ ID NO: 207
ucguuuaguucuccagaca

SEQ ID NO: 19359 - RNA, 19 nt, Artificial Sequence
  Description of Artificial Sequence: Synthetic oligonucleotide
  Antisense strand to SEQ ID NO: 19358
ugucuggagaacuaaacga

SEQ ID NO: 19360 - RNA, 19 nt, Artificial Sequence
  Description of Artificial Sequence: Synthetic oligonucleotide
  Sense strand starting at position 2002 of SEQ ID NO: 207
cguuuaguucuccagacaa

SEQ ID NO: 19361 - RNA, 19 nt, Artificial Sequence
  Description of Artificial Sequence: Synthetic oligonucleotide
  Antisense strand to SEQ ID NO: 19360
uugucuggagaacuaaacg

SEQ ID NO: 19362 - RNA, 19 nt, Artificial Sequence
  Description of Artificial Sequence: Synthetic oligonucleotide
  Sense strand starting at position 2171 of SEQ ID NO: 207
aacugagaucugugucccu

SEQ ID NO: 19363 - RNA, 19 nt, Artificial Sequence
  Description of Artificial Sequence: Synthetic oligonucleotide
  Antisense strand to SEQ ID NO: 19362
agggacacagaucucaguu

SEQ ID NO: 19364 - RNA, 19 nt, Artificial Sequence
  Description of Artificial Sequence: Synthetic oligonucleotide
  Sense strand starting at position 2314 of SEQ ID NO: 207
uuuggaagcugauuaacua

SEQ ID NO: 19365 - RNA, 19 nt, Artificial Sequence
  Description of Artificial Sequence: Synthetic oligonucleotide
  Antisense strand to SEQ ID NO: 19364
uaguuaaucagcuuccaaa

SEQ ID NO: 19366 - RNA, 19 nt, Artificial Sequence
  Description of Artificial Sequence: Synthetic oligonucleotide
  Sense strand starting at position 2450 of SEQ ID NO: 207
cucugcaguccauaaaguu

SEQ ID NO: 19367 - RNA, 19 nt, Artificial Sequence
  Description of Artificial Sequence: Synthetic oligonucleotide
  Antisense strand to SEQ ID NO: 19366
aacuuuauggacugcagag

SEQ ID NO: 19368 - RNA, 19 nt, Artificial Sequence
  Description of Artificial Sequence: Synthetic oligonucleotide
  Sense strand starting at position 2462 of SEQ ID NO: 207
uaaaguuaggcuggacuga

SEQ ID NO: 19369 - RNA, 19 nt, Artificial Sequence
  Description of Artificial Sequence: Synthetic oligonucleotide
  Antisense strand to SEQ ID NO: 19368
ucaguccagccuaacuuua

SEQ ID NO: 19370 - RNA, 19 nt, Artificial Sequence
  Description of Artificial Sequence: Synthetic oligonucleotide
  Sense strand starting at position 2473 of SEQ ID NO: 207
uggacugaggccuaucauu

SEQ ID NO: 19371 - RNA, 19 nt, Artificial Sequence
  Description of Artificial Sequence: Synthetic oligonucleotide
  Antisense strand to SEQ ID NO: 19370
aaugauaggccucagucca

SEQ ID NO: 19372 - RNA, 19 nt, Artificial Sequence
  Description of Artificial Sequence: Synthetic oligonucleotide
  Sense strand starting at position 2479 of SEQ ID NO: 207
gaggccuaucauugaugga

SEQ ID NO: 19373 - RNA, 19 nt, Artificial Sequence
  Description of Artificial Sequence: Synthetic oligonucleotide
  Antisense strand to SEQ ID NO: 19372
uccaucaaugauaggccuc

SEQ ID NO: 19374 - RNA, 19 nt, Artificial Sequence
  Description of Artificial Sequence: Synthetic oligonucleotide
  Sense strand starting at position 2483 of SEQ ID NO: 207
ccuaucauugauggauuga

SEQ ID NO: 19375 - RNA, 19 nt, Artificial Sequence
  Description of Artificial Sequence: Synthetic oligonucleotide
  Antisense strand to SEQ ID NO: 19374
ucaauccaucaaugauagg

SEQ ID NO: 19376 - RNA, 19 nt, Artificial Sequence
  Description of Artificial Sequence: Synthetic oligonucleotide
  Sense strand starting at position 2663 of SEQ ID NO: 207
ccacguuucaggugggaag

SEQ ID NO: 19377 - RNA, 19 nt, Artificial Sequence
  Description of Artificial Sequence: Synthetic oligonucleotide
  Antisense strand to SEQ ID NO: 19376
cuucccaccugaaacgugg

SEQ ID NO: 19378 - RNA, 19 nt, Artificial Sequence
  Description of Artificial Sequence: Synthetic oligonucleotide
  Sense strand starting at position 2664 of SEQ ID NO: 207
cacguuucaggugggaaga

SEQ ID NO: 19379 - RNA, 19 nt, Artificial Sequence
  Description of Artificial Sequence: Synthetic oligonucleotide
  Antisense strand to SEQ ID NO: 19378
ucuucccaccugaaacgug

SEQ ID NO: 19380 - RNA, 19 nt, Artificial Sequence
  Description of Artificial Sequence: Synthetic oligonucleotide
  Sense strand starting at position 2874 of SEQ ID NO: 207
cggccauacagcuagaaca

SEQ ID NO: 19381 - RNA, 19 nt, Artificial Sequence
  Description of Artificial Sequence: Synthetic oligonucleotide
  Antisense strand to SEQ ID NO: 19380
uguucuagcuguauggccg

SEQ ID NO: 19382 - RNA, 19 nt, Artificial Sequence
  Description of Artificial Sequence: Synthetic oligonucleotide
  Sense strand starting at position 2890 of SEQ ID NO: 207
acauguuggaggcaggauu

SEQ ID NO: 19383 - RNA, 19 nt, Artificial Sequence
  Description of Artificial Sequence: Synthetic oligonucleotide
  Antisense strand to SEQ ID NO: 19382
aauccugccuccaacaugu

SEQ ID NO: 19384 - RNA, 19 nt, Artificial Sequence
  Description of Artificial Sequence: Synthetic oligonucleotide
  Sense strand starting at position 2937 of SEQ ID NO: 207
cuggaaguggccuagcaaa

SEQ ID NO: 19385 - RNA, 19 nt, Artificial Sequence
  Description of Artificial Sequence: Synthetic oligonucleotide
  Antisense strand to SEQ ID NO: 19384
uuugcuaggccacuuccag

SEQ ID NO: 19386 - RNA, 19 nt, Artificial Sequence
  Description of Artificial Sequence: Synthetic oligonucleotide
  Sense strand starting at position 3438 of SEQ ID NO: 207
gcagguugcaacgaguuga

SEQ ID NO: 19387 - RNA, 19 nt, Artificial Sequence
  Description of Artificial Sequence: Synthetic oligonucleotide
  Antisense strand to SEQ ID NO: 19386
ucaacucguugcaaccugc

SEQ ID NO: 19388 - RNA, 19 nt, Artificial Sequence
  Description of Artificial Sequence: Synthetic oligonucleotide
  Sense strand starting at position 3471 of SEQ ID NO: 207
acucuagccuggguaauca

SEQ ID NO: 19389 - RNA, 19 nt, Artificial Sequence
  Description of Artificial Sequence: Synthetic oligonucleotide
  Antisense strand to SEQ ID NO: 19388
ugauuacccaggcuagagu

SEQ ID NO: 19390 - RNA, 19 nt, Artificial Sequence
  Description of Artificial Sequence: Synthetic oligonucleotide
  Sense strand starting at position 3964 of SEQ ID NO: 208
ugcacaugauggucuagua

SEQ ID NO: 19391 - RNA, 19 nt, Artificial Sequence
  Description of Artificial Sequence: Synthetic oligonucleotide
  Antisense strand to SEQ ID NO: 19390
uacuagaccaucaugugca

SEQ ID NO: 19392 - RNA, 19 nt, Artificial Sequence
  Description of Artificial Sequence: Synthetic oligonucleotide
  Sense strand starting at position 3859 of SEQ ID NO: 208
uaaugauucuuggagggug

SEQ ID NO: 19393 - RNA, 19 nt, Artificial Sequence
  Description of Artificial Sequence: Synthetic oligonucleotide
  Antisense strand to SEQ ID NO: 19392
cacccuccaagaaucauua

SEQ ID NO: 19394 - RNA, 19 nt, Artificial Sequence
  Description of Artificial Sequence: Synthetic oligonucleotide
  Sense strand starting at position 2972 of SEQ ID NO: 208
agacauguccugggaccuu

SEQ ID NO: 19395 - RNA, 19 nt, Artificial Sequence
  Description of Artificial Sequence: Synthetic oligonucleotide
  Antisense strand to SEQ ID NO: 19394
aaggucccaggacaugucu

SEQ ID NO: 19396 - RNA, 19 nt, Artificial Sequence
  Description of Artificial Sequence: Synthetic oligonucleotide
  Sense strand starting at position 2880 of SEQ ID NO: 208
aggccuauccucuacggua

SEQ ID NO: 19397 - RNA, 19 nt, Artificial Sequence
  Description of Artificial Sequence: Synthetic oligonucleotide
  Antisense strand to SEQ ID NO: 19396
uaccguagaggauaggccu

SEQ ID NO: 19398 - RNA, 19 nt, Artificial Sequence
  Description of Artificial Sequence: Synthetic oligonucleotide
  Sense strand starting at position 2853 of SEQ ID NO: 208
cccguagugcuccgauaag

SEQ ID NO: 19399 - RNA, 19 nt, Artificial Sequence
  Description of Artificial Sequence: Synthetic oligonucleotide
  Antisense strand to SEQ ID NO: 19398
cuuaucggagcacuacggg

SEQ ID NO: 19400 - RNA, 19 nt, Artificial Sequence
  Description of Artificial Sequence: Synthetic oligonucleotide
  Sense strand starting at position 2852 of SEQ ID NO: 208
ucccguagugcuccgauaa

SEQ ID NO: 19401 - RNA, 19 nt, Artificial Sequence
  Description of Artificial Sequence: Synthetic oligonucleotide
  Antisense strand to SEQ ID NO: 19400
uuaucggagcacuacggga

SEQ ID NO: 19402 - RNA, 19 nt, Artificial Sequence
  Description of Artificial Sequence: Synthetic oligonucleotide
  Sense strand starting at position 2811 of SEQ ID NO: 208
ugcagccuccaguguuaaa

SEQ ID NO: 19403 - RNA, 19 nt, Artificial Sequence
  Description of Artificial Sequence: Synthetic oligonucleotide
  Antisense strand to SEQ ID NO: 19402
uuuaacacuggaggcugca

SEQ ID NO: 19404 - RNA, 19 nt, Artificial Sequence
  Description of Artificial Sequence: Synthetic oligonucleotide
  Sense strand starting at position 2623 of SEQ ID NO: 208
ccgguugguuucugggaca

SEQ ID NO: 19405 - RNA, 19 nt, Artificial Sequence
  Description of Artificial Sequence: Synthetic oligonucleotide
  Antisense strand to SEQ ID NO: 19404
ugucccagaaaccaaccgg

SEQ ID NO: 19406 - RNA, 19 nt, Artificial Sequence
  Description of Artificial Sequence: Synthetic oligonucleotide
  Sense strand starting at position 2401 of SEQ ID NO: 208
ugugauuucuacugucagc

SEQ ID NO: 19407 - RNA, 19 nt, Artificial Sequence
  Description of Artificial Sequence: Synthetic oligonucleotide
  Antisense strand to SEQ ID NO: 19406
gcugacaguagaaaucaca

SEQ ID NO: 19408 - RNA, 19 nt, Artificial Sequence
  Description of Artificial Sequence: Synthetic oligonucleotide
  Sense strand starting at position 2389 of SEQ ID NO: 208
ugucucacagccugugauu

SEQ ID NO: 19409 - RNA, 19 nt, Artificial Sequence
  Description of Artificial Sequence: Synthetic oligonucleotide
  Antisense strand to SEQ ID NO: 19408
aaucacaggcugugagaca

SEQ ID NO: 19410 - RNA, 19 nt, Artificial Sequence
  Description of Artificial Sequence: Synthetic oligonucleotide
  Sense strand starting at position 2128 of SEQ ID NO: 208
aggauauugugguugggag

SEQ ID NO: 19411 - RNA, 19 nt, Artificial Sequence
  Description of Artificial Sequence: Synthetic oligonucleotide
  Antisense strand to SEQ ID NO: 19410
cucccaaccacaauauccu

SEQ ID NO: 19412 - RNA, 19 nt, Artificial Sequence
  Description of Artificial Sequence: Synthetic oligonucleotide
  Sense strand starting at position 2070 of SEQ ID NO: 208
ggaaucugccagggcuauu

SEQ ID NO: 19413 - RNA, 19 nt, Artificial Sequence
  Description of Artificial Sequence: Synthetic oligonucleotide
  Antisense strand to SEQ ID NO: 19412
aauagcccuggcagauucc

SEQ ID NO: 19414 - RNA, 19 nt, Artificial Sequence
  Description of Artificial Sequence: Synthetic oligonucleotide
  Sense strand starting at position 2069 of SEQ ID NO: 208
gggaaucugccagggcuau

SEQ ID NO: 19415 - RNA, 19 nt, Artificial Sequence
  Description of Artificial Sequence: Synthetic oligonucleotide
  Antisense strand to SEQ ID NO: 19414
auagcccuggcagauuccc

SEQ ID NO: 19416 - RNA, 19 nt, Artificial Sequence
  Description of Artificial Sequence: Synthetic oligonucleotide
  Sense strand starting at position 1744 of SEQ ID NO: 208
gcaacaaggugguuagacu

SEQ ID NO: 19417 - RNA, 19 nt, Artificial Sequence
  Description of Artificial Sequence: Synthetic oligonucleotide
  Antisense strand to SEQ ID NO: 19416
agucuaaccaccuuguugc

SEQ ID NO: 19418 - RNA, 19 nt, Artificial Sequence
  Description of Artificial Sequence: Synthetic oligonucleotide
  Sense strand starting at position 1731 of SEQ ID NO: 208
auggauugagccugcaaca

SEQ ID NO: 19419 - RNA, 19 nt, Artificial Sequence
  Description of Artificial Sequence: Synthetic oligonucleotide
  Antisense strand to SEQ ID NO: 19418
uguugcaggcucaauccau

SEQ ID NO: 19420 - RNA, 19 nt, Artificial Sequence
  Description of Artificial Sequence: Synthetic oligonucleotide
  Sense strand starting at position 666 of SEQ ID NO: 208
cuaguuagacuuugggaag

SEQ ID NO: 19421 - RNA, 19 nt, Artificial Sequence
  Description of Artificial Sequence: Synthetic oligonucleotide
  Antisense strand to SEQ ID NO: 19420
cuucccaaagucuaacuag

SEQ ID NO: 19422 - RNA, 19 nt, Artificial Sequence
  Description of Artificial Sequence: Synthetic oligonucleotide
  Sense strand starting at position 658 of SEQ ID NO: 208
ggguaucccuaguuagacu

SEQ ID NO: 19423 - RNA, 19 nt, Artificial Sequence
  Description of Artificial Sequence: Synthetic oligonucleotide
  Antisense strand to SEQ ID NO: 19422
agucuaacuagggauaccc

SEQ ID NO: 19424 - RNA, 19 nt, Artificial Sequence
  Description of Artificial Sequence: Synthetic oligonucleotide
  Sense strand starting at position 609 of SEQ ID NO: 208
ggaugguuugguggauuga

SEQ ID NO: 19425 - RNA, 19 nt, Artificial Sequence
  Description of Artificial Sequence: Synthetic oligonucleotide
  Antisense strand to SEQ ID NO: 19424
ucaauccaccaaaccaucc

SEQ ID NO: 19426 - RNA, 19 nt, Artificial Sequence
  Description of Artificial Sequence: Synthetic oligonucleotide
  Sense strand starting at position 589 of SEQ ID NO: 208
ggccuaucugggugcauua

SEQ ID NO: 19427 - RNA, 19 nt, Artificial Sequence
  Description of Artificial Sequence: Synthetic oligonucleotide
  Antisense strand to SEQ ID NO: 19426
uaaugcacccagauaggcc

SEQ ID NO: 19428 - RNA, 19 nt, Artificial Sequence
  Description of Artificial Sequence: Synthetic oligonucleotide
  Sense strand starting at position 588 of SEQ ID NO: 208
gggccuaucugggugcauu

SEQ ID NO: 19429 - RNA, 19 nt, Artificial Sequence
  Description of Artificial Sequence: Synthetic oligonucleotide
  Antisense strand to SEQ ID NO: 19428
aaugcacccagauaggccc

SEQ ID NO: 19430 - RNA, 19 nt, Artificial Sequence
  Description of Artificial Sequence: Synthetic oligonucleotide
  Sense strand starting at position 551 of SEQ ID NO: 208
auaacugugugcucaaggu

SEQ ID NO: 19431 - RNA, 19 nt, Artificial Sequence
  Description of Artificial Sequence: Synthetic oligonucleotide
  Antisense strand to SEQ ID NO: 19430
accuugagcacacaguuau

SEQ ID NO: 19432 - RNA, 19 nt, Artificial Sequence
  Description of Artificial Sequence: Synthetic oligonucleotide
  Sense strand starting at position 549 of SEQ ID NO: 208
ucauaacugugugcucaag

SEQ ID NO: 19433 - RNA, 19 nt, Artificial Sequence
  Description of Artificial Sequence: Synthetic oligonucleotide
  Antisense strand to SEQ ID NO: 19432
cuugagcacacaguuauga

SEQ ID NO: 19434 - RNA, 19 nt, Artificial Sequence
  Description of Artificial Sequence: Synthetic oligonucleotide
  Sense strand starting at position 548 of SEQ ID NO: 208
gucauaacugugugcucaa

SEQ ID NO: 19435 - RNA, 19 nt, Artificial Sequence
  Description of Artificial Sequence: Synthetic oligonucleotide
  Antisense strand to SEQ ID NO: 19434
uugagcacacaguuaugac

SEQ ID NO: 19436 - RNA, 19 nt, Artificial Sequence
  Description of Artificial Sequence: Synthetic oligonucleotide
  Sense strand starting at position 547 of SEQ ID NO: 208
ggucauaacugugugcuca

SEQ ID NO: 19437 - RNA, 19 nt, Artificial Sequence
  Description of Artificial Sequence: Synthetic oligonucleotide
  Antisense strand to SEQ ID NO: 19436
ugagcacacaguuaugacc

SEQ ID NO: 19438 - RNA, 19 nt, Artificial Sequence
  Description of Artificial Sequence: Synthetic oligonucleotide
  Sense strand starting at position 538 of SEQ ID NO: 208
gucuguccuggucauaacu

SEQ ID NO: 19439 - RNA, 19 nt, Artificial Sequence
  Description of Artificial Sequence: Synthetic oligonucleotide
  Antisense strand to SEQ ID NO: 19438
aguuaugaccaggacagac

SEQ ID NO: 19440 - RNA, 19 nt, Artificial Sequence
  Description of Artificial Sequence: Synthetic oligonucleotide
  Sense strand starting at position 535 of SEQ ID NO: 208
ugagucuguccuggucaua

SEQ ID NO: 19441 - RNA, 19 nt, Artificial Sequence
  Description of Artificial Sequence: Synthetic oligonucleotide
  Antisense strand to SEQ ID NO: 19440
uaugaccaggacagacuca

SEQ ID NO: 19442 - RNA, 19 nt, Artificial Sequence
  Description of Artificial Sequence: Synthetic oligonucleotide
  Sense strand starting at position 523 of SEQ ID NO: 208
ugccuauagagaugagucu

SEQ ID NO: 19443 - RNA, 19 nt, Artificial Sequence
  Description of Artificial Sequence: Synthetic oligonucleotide
  Antisense strand to SEQ ID NO: 19442
agacucaucucuauaggca

SEQ ID NO: 19444 - RNA, 19 nt, Artificial Sequence
  Description of Artificial Sequence: Synthetic oligonucleotide
  Sense strand starting at position 514 of SEQ ID NO: 208
gcagcuauuugccuauaga

SEQ ID NO: 19445 - RNA, 19 nt, Artificial Sequence
  Description of Artificial Sequence: Synthetic oligonucleotide
  Antisense strand to SEQ ID NO: 19444
ucuauaggcaaauagcugc

SEQ ID NO: 19446 - RNA, 19 nt, Artificial Sequence
  Description of Artificial Sequence: Synthetic oligonucleotide
  Sense strand starting at position 503 of SEQ ID NO: 208
ccaguuugccagcagcuau

SEQ ID NO: 19447 - RNA, 19 nt, Artificial Sequence
  Description of Artificial Sequence: Synthetic oligonucleotide
  Antisense strand to SEQ ID NO: 19446
auagcugcuggcaaacugg

SEQ ID NO: 19448 - RNA, 19 nt, Artificial Sequence
  Description of Artificial Sequence: Synthetic oligonucleotide
  Sense strand starting at position 502 of SEQ ID NO: 208
gccaguuugccagcagcua

SEQ ID NO: 19449 - RNA, 19 nt, Artificial Sequence
  Description of Artificial Sequence: Synthetic oligonucleotide
  Antisense strand to SEQ ID NO: 19448
uagcugcuggcaaacuggc

SEQ ID NO: 19450 - RNA, 19 nt, Artificial Sequence
  Description of Artificial Sequence: Synthetic oligonucleotide
  Sense strand starting at position 433 of SEQ ID NO: 208
cugaaugcuucuugcuaac

SEQ ID NO: 19451 - RNA, 19 nt, Artificial Sequence
  Description of Artificial Sequence: Synthetic oligonucleotide
  Antisense strand to SEQ ID NO: 19450
guuagcaagaagcauucag

SEQ ID NO: 19452 - RNA, 19 nt, Artificial Sequence
  Description of Artificial Sequence: Synthetic oligonucleotide
  Sense strand starting at position 432 of SEQ ID NO: 208
ccugaaugcuucuugcuaa

SEQ ID NO: 19453 - RNA, 19 nt, Artificial Sequence
  Description of Artificial Sequence: Synthetic oligonucleotide
  Antisense strand to SEQ ID NO: 19452
uuagcaagaagcauucagg

SEQ ID NO: 19454 - RNA, 19 nt, Artificial Sequence
  Description of Artificial Sequence: Synthetic oligonucleotide
  Sense strand starting at position 308 of SEQ ID NO: 208
ccuauauucugucaaaggu

SEQ ID NO: 19455 - RNA, 19 nt, Artificial Sequence
  Description of Artificial Sequence: Synthetic oligonucleotide
  Antisense strand to SEQ ID NO: 19454
accuuugacagaauauagg

SEQ ID NO: 19456 - RNA, 19 nt, Artificial Sequence
  Description of Artificial Sequence: Synthetic oligonucleotide
  Sense strand starting at position 286 of SEQ ID NO: 208
gcguguccaggcugaagau

SEQ ID NO: 19457 - RNA, 19 nt, Artificial Sequence
  Description of Artificial Sequence: Synthetic oligonucleotide
  Antisense strand to SEQ ID NO: 19456
aucuucagccuggacacgc

SEQ ID NO: 19458 - RNA, 19 nt, Artificial Sequence
  Description of Artificial Sequence: Synthetic oligonucleotide
  Sense strand starting at position 3942 of SEQ ID NO: 209
ggacacaucugucucaaau

SEQ ID NO: 19459 - RNA, 19 nt, Artificial Sequence
  Description of Artificial Sequence: Synthetic oligonucleotide
  Antisense strand to SEQ ID NO: 19458
auuugagacagaugugucc

SEQ ID NO: 19460 - RNA, 19 nt, Artificial Sequence
  Description of Artificial Sequence: Synthetic oligonucleotide
  Sense strand starting at position 3775 of SEQ ID NO: 209
gaaugucauucuuuggaau

SEQ ID NO: 19461 - RNA, 19 nt, Artificial Sequence
  Description of Artificial Sequence: Synthetic oligonucleotide
  Antisense strand to SEQ ID NO: 19460
auuccaaagaaugacauuc

SEQ ID NO: 19462 - RNA, 19 nt, Artificial Sequence
  Description of Artificial Sequence: Synthetic oligonucleotide
  Sense strand starting at position 3716 of SEQ ID NO: 209
cuuugugacaacugagguu

SEQ ID NO: 19463 - RNA, 19 nt, Artificial Sequence
  Description of Artificial Sequence: Synthetic oligonucleotide
  Antisense strand to SEQ ID NO: 19462
aaccucaguugucacaaag

SEQ ID NO: 19464 - RNA, 19 nt, Artificial Sequence
  Description of Artificial Sequence: Synthetic oligonucleotide
  Sense strand starting at position 3549 of SEQ ID NO: 209
ucaguaaacuucuugaaag

SEQ ID NO: 19465 - RNA, 19 nt, Artificial Sequence
  Description of Artificial Sequence: Synthetic oligonucleotide
  Antisense strand to SEQ ID NO: 19464
cuuucaagaaguuuacuga

SEQ ID NO: 19466 - RNA, 19 nt, Artificial Sequence
  Description of Artificial Sequence: Synthetic oligonucleotide
  Sense strand starting at position 3227 of SEQ ID NO: 209
uggaguauaacaggccauu

SEQ ID NO: 19467 - RNA, 19 nt, Artificial Sequence
  Description of Artificial Sequence: Synthetic oligonucleotide
  Antisense strand to SEQ ID NO: 19466
aauggccuguuauacucca

SEQ ID NO: 19468 - RNA, 19 nt, Artificial Sequence
  Description of Artificial Sequence: Synthetic oligonucleotide
  Sense strand starting at position 3216 of SEQ ID NO: 209
ucuaaacaugauggaguau

SEQ ID NO: 19469 - RNA, 19 nt, Artificial Sequence
  Description of Artificial Sequence: Synthetic oligonucleotide
  Antisense strand to SEQ ID NO: 19468
auacuccaucauguuuaga

SEQ ID NO: 19470 - RNA, 19 nt, Artificial Sequence
  Description of Artificial Sequence: Synthetic oligonucleotide
  Sense strand starting at position 3143 of SEQ ID NO: 209
acccauucucugugaagac

SEQ ID NO: 19471 - RNA, 19 nt, Artificial Sequence
  Description of Artificial Sequence: Synthetic oligonucleotide
  Antisense strand to SEQ ID NO: 19470
gucuucacagagaaugggu

SEQ ID NO: 19472 - RNA, 19 nt, Artificial Sequence
  Description of Artificial Sequence: Synthetic oligonucleotide
  Sense strand starting at position 3142 of SEQ ID NO: 209
gacccauucucugugaaga

SEQ ID NO: 19473 - RNA, 19 nt, Artificial Sequence
  Description of Artificial Sequence: Synthetic oligonucleotide
  Antisense strand to SEQ ID NO: 19472
ucuucacagagaauggguc

SEQ ID NO: 19474 - RNA, 19 nt, Artificial Sequence
  Description of Artificial Sequence: Synthetic oligonucleotide
  Sense strand starting at position 3141 of SEQ ID NO: 209
ugacccauucucugugaag

SEQ ID NO: 19475 - RNA, 19 nt, Artificial Sequence
  Description of Artificial Sequence: Synthetic oligonucleotide
  Antisense strand to SEQ ID NO: 19474
cuucacagagaauggguca

SEQ ID NO: 19476 - RNA, 19 nt, Artificial Sequence
  Description of Artificial Sequence: Synthetic oligonucleotide
  Sense strand starting at position 2954 of SEQ ID NO: 209
uauguuugagaggguucua

SEQ ID NO: 19477 - RNA, 19 nt, Artificial Sequence
  Description of Artificial Sequence: Synthetic oligonucleotide
  Antisense strand to SEQ ID NO: 19476
uagaacccucucaaacaua

SEQ ID NO: 19478 - RNA, 19 nt, Artificial Sequence
  Description of Artificial Sequence: Synthetic oligonucleotide
  Sense strand starting at position 2919 of SEQ ID NO: 209
uuuaaauaagccuauaggu

SEQ ID NO: 19479 - RNA, 19 nt, Artificial Sequence
  Description of Artificial Sequence: Synthetic oligonucleotide
  Antisense strand to SEQ ID NO: 19478
accuauaggcuuauuuaaa

SEQ ID NO: 19480 - RNA, 19 nt, Artificial Sequence
  Description of Artificial Sequence: Synthetic oligonucleotide
  Sense strand starting at position 2901 of SEQ ID NO: 209
ggagcucgguauuugcauu

SEQ ID NO: 19481 - RNA, 19 nt, Artificial Sequence
  Description of Artificial Sequence: Synthetic oligonucleotide
  Antisense strand to SEQ ID NO: 19480
aaugcaaauaccgagcucc

SEQ ID NO: 19482 - RNA, 19 nt, Artificial Sequence
  Description of Artificial Sequence: Synthetic oligonucleotide
  Sense strand starting at position 2627 of SEQ ID NO: 209
ugaucugaaucucccuaga

SEQ ID NO: 19483 - RNA, 19 nt, Artificial Sequence
  Description of Artificial Sequence: Synthetic oligonucleotide
  Antisense strand to SEQ ID NO: 19482
ucuagggagauucagauca

SEQ ID NO: 19484 - RNA, 19 nt, Artificial Sequence
  Description of Artificial Sequence: Synthetic oligonucleotide
  Sense strand starting at position 2488 of SEQ ID NO: 209
aggcaucgagucuaauaac

SEQ ID NO: 19485 - RNA, 19 nt, Artificial Sequence
  Description of Artificial Sequence: Synthetic oligonucleotide
  Antisense strand to SEQ ID NO: 19484
guuauuagacucgaugccu

SEQ ID NO: 19486 - RNA, 19 nt, Artificial Sequence
  Description of Artificial Sequence: Synthetic oligonucleotide
  Sense strand starting at position 2483 of SEQ ID NO: 209
ggguaaggcaucgagucua

SEQ ID NO: 19487 - RNA, 19 nt, Artificial Sequence
  Description of Artificial Sequence: Synthetic oligonucleotide
  Antisense strand to SEQ ID NO: 19486
uagacucgaugccuuaccc

SEQ ID NO: 19488 - RNA, 19 nt, Artificial Sequence
  Description of Artificial Sequence: Synthetic oligonucleotide
  Sense strand starting at position 2447 of SEQ ID NO: 209
uuacuaagucucuagagua

SEQ ID NO: 19489 - RNA, 19 nt, Artificial Sequence
  Description of Artificial Sequence: Synthetic oligonucleotide
  Antisense strand to SEQ ID NO: 19488
uacucuagagacuuaguaa

SEQ ID NO: 19490 - RNA, 19 nt, Artificial Sequence
  Description of Artificial Sequence: Synthetic oligonucleotide
  Sense strand starting at position 2203 of SEQ ID NO: 209
cugucucaacgauaccuau

SEQ ID NO: 19491 - RNA, 19 nt, Artificial Sequence
  Description of Artificial Sequence: Synthetic oligonucleotide
  Antisense strand to SEQ ID NO: 19490
auagguaucguugagacag

SEQ ID NO: 19492 - RNA, 19 nt, Artificial Sequence
  Description of Artificial Sequence: Synthetic oligonucleotide
  Sense strand starting at position 2053 of SEQ ID NO: 209
gcgggucugucgauuggau

SEQ ID NO: 19493 - RNA, 19 nt, Artificial Sequence
  Description of Artificial Sequence: Synthetic oligonucleotide
  Antisense strand to SEQ ID NO: 19492
auccaaucgacagacccgc

SEQ ID NO: 19494 - RNA, 19 nt, Artificial Sequence
  Description of Artificial Sequence: Synthetic oligonucleotide
  Sense strand starting at position 1595 of SEQ ID NO: 209
cugcuuguccucggauuua

SEQ ID NO: 19495 - RNA, 19 nt, Artificial Sequence
  Description of Artificial Sequence: Synthetic oligonucleotide
  Antisense strand to SEQ ID NO: 19494
uaaauccgaggacaagcag

SEQ ID NO: 19496 - RNA, 19 nt, Artificial Sequence
  Description of Artificial Sequence: Synthetic oligonucleotide
  Sense strand starting at position 1594 of SEQ ID NO: 209
ccugcuuguccucggauuu

SEQ ID NO: 19497 - RNA, 19 nt, Artificial Sequence
  Description of Artificial Sequence: Synthetic oligonucleotide
  Antisense strand to SEQ ID NO: 19496
aaauccgaggacaagcagg

SEQ ID NO: 19498 - RNA, 19 nt, Artificial Sequence
  Description of Artificial Sequence: Synthetic oligonucleotide
  Sense strand starting at position 1509 of SEQ ID NO: 209
ccggaacaaucuuucccua

SEQ ID NO: 19499 - RNA, 19 nt, Artificial Sequence
  Description of Artificial Sequence: Synthetic oligonucleotide
  Antisense strand to SEQ ID NO: 19498
uagggaaagauuguuccgg

SEQ ID NO: 19500 - RNA, 19 nt, Artificial Sequence
  Description of Artificial Sequence: Synthetic oligonucleotide
  Sense strand starting at position 1300 of SEQ ID NO: 209
cccugaaacugcccuugau

SEQ ID NO: 19501 - RNA, 19 nt, Artificial Sequence
  Description of Artificial Sequence: Synthetic oligonucleotide
  Antisense strand to SEQ ID NO: 19500
aucaagggcaguuucaggg

SEQ ID NO: 19502 - RNA, 19 nt, Artificial Sequence
  Description of Artificial Sequence: Synthetic oligonucleotide
  Sense strand starting at position 1291 of SEQ ID NO: 209
aguaacgaucccugaaacu

SEQ ID NO: 19503 - RNA, 19 nt, Artificial Sequence
  Description of Artificial Sequence: Synthetic oligonucleotide
  Antisense strand to SEQ ID NO: 19502
aguuucagggaucguuacu

SEQ ID NO: 19504 - RNA, 19 nt, Artificial Sequence
  Description of Artificial Sequence: Synthetic oligonucleotide
  Sense strand starting at position 1290 of SEQ ID NO: 209
gaguaacgaucccugaaac

SEQ ID NO: 19505 - RNA, 19 nt, Artificial Sequence
  Description of Artificial Sequence: Synthetic oligonucleotide
  Antisense strand to SEQ ID NO: 19504
guuucagggaucguuacuc

SEQ ID NO: 19506 - RNA, 19 nt, Artificial Sequence
  Description of Artificial Sequence: Synthetic oligonucleotide
  Sense strand starting at position 1206 of SEQ ID NO: 209
cgacuaacuuucuuaacag

SEQ ID NO: 19507 - RNA, 19 nt, Artificial Sequence
  Description of Artificial Sequence: Synthetic oligonucleotide
  Antisense strand to SEQ ID NO: 19506
cuguuaagaaaguuagucg

SEQ ID NO: 19508 - RNA, 19 nt, Artificial Sequence
  Description of Artificial Sequence: Synthetic oligonucleotide
  Sense strand starting at position 1194 of SEQ ID NO: 209
uagugaacccgacgacuaa

SEQ ID NO: 19509 - RNA, 19 nt, Artificial Sequence
  Description of Artificial Sequence: Synthetic oligonucleotide
  Antisense strand to SEQ ID NO: 19508
uuagucgucggguucacua

SEQ ID NO: 19510 - RNA, 19 nt, Artificial Sequence
  Description of Artificial Sequence: Synthetic oligonucleotide
  Sense strand starting at position 1159 of SEQ ID NO: 209
gaucguucucaguacuaga

SEQ ID NO: 19511 - RNA, 19 nt, Artificial Sequence
  Description of Artificial Sequence: Synthetic oligonucleotide
  Antisense strand to SEQ ID NO: 19510
ucuaguacugagaacgauc

SEQ ID NO: 19512 - RNA, 19 nt, Artificial Sequence
  Description of Artificial Sequence: Synthetic oligonucleotide
  Sense strand starting at position 1091 of SEQ ID NO: 209
augcuacugcaaugauaua

SEQ ID NO: 19513 - RNA, 19 nt, Artificial Sequence
  Description of Artificial Sequence: Synthetic oligonucleotide
  Antisense strand to SEQ ID NO: 19512
uauaucauugcaguagcau

SEQ ID NO: 19514 - RNA, 19 nt, Artificial Sequence
  Description of Artificial Sequence: Synthetic oligonucleotide
  Sense strand starting at position 1033 of SEQ ID NO: 209
auguauacauugucuuaca

SEQ ID NO: 19515 - RNA, 19 nt, Artificial Sequence
  Description of Artificial Sequence: Synthetic oligonucleotide
  Antisense strand to SEQ ID NO: 19514
uguaagacaauguauacau

SEQ ID NO: 19516 - RNA, 19 nt, Artificial Sequence
  Description of Artificial Sequence: Synthetic oligonucleotide
  Sense strand starting at position 893 of SEQ ID NO: 209
cuguuuagauguuuaacaa

SEQ ID NO: 19517 - RNA, 19 nt, Artificial Sequence
  Description of Artificial Sequence: Synthetic oligonucleotide
  Antisense strand to SEQ ID NO: 19516
uuguuaaacaucuaaacag

SEQ ID NO: 19518 - RNA, 19 nt, Artificial Sequence
  Description of Artificial Sequence: Synthetic oligonucleotide
  Sense strand starting at position 885 of SEQ ID NO: 209
aggagcuucuguuuagaug

SEQ ID NO: 19519 - RNA, 19 nt, Artificial Sequence
  Description of Artificial Sequence: Synthetic oligonucleotide
  Antisense strand to SEQ ID NO: 19518
caucuaaacagaagcuccu

SEQ ID NO: 19520 - RNA, 19 nt, Artificial Sequence
  Description of Artificial Sequence: Synthetic oligonucleotide
  Sense strand starting at position 883 of SEQ ID NO: 209
aaaggagcuucuguuuaga

SEQ ID NO: 19521 - RNA, 19 nt, Artificial Sequence
  Description of Artificial Sequence: Synthetic oligonucleotide
  Antisense strand to SEQ ID NO: 19520
ucuaaacagaagcuccuuu

SEQ ID NO: 19522 - RNA, 19 nt, Artificial Sequence
  Description of Artificial Sequence: Synthetic oligonucleotide
  Sense strand starting at position 824 of SEQ ID NO: 209
guaauuacuuucuuaggag

SEQ ID NO: 19523 - RNA, 19 nt, Artificial Sequence
  Description of Artificial Sequence: Synthetic oligonucleotide
  Antisense strand to SEQ ID NO: 19522
cuccuaagaaaguaauuac

SEQ ID NO: 19524 - RNA, 19 nt, Artificial Sequence
  Description of Artificial Sequence: Synthetic oligonucleotide
  Sense strand starting at position 736 of SEQ ID NO: 209
ucagaaguauguccugaau

SEQ ID NO: 19525 - RNA, 19 nt, Artificial Sequence
  Description of Artificial Sequence: Synthetic oligonucleotide
  Antisense strand to SEQ ID NO: 19524
auucaggacauacuucuga

SEQ ID NO: 19526 - RNA, 19 nt, Artificial Sequence
  Description of Artificial Sequence: Synthetic oligonucleotide
  Sense strand starting at position 630 of SEQ ID NO: 209
cacagaaggcauuguuaug

SEQ ID NO: 19527 - RNA, 19 nt, Artificial Sequence
  Description of Artificial Sequence: Synthetic oligonucleotide
  Antisense strand to SEQ ID NO: 19526
cauaacaaugccuucugug

SEQ ID NO: 19528 - RNA, 19 nt, Artificial Sequence
  Description of Artificial Sequence: Synthetic oligonucleotide
  Sense strand starting at position 603 of SEQ ID NO: 209
agagaaaugucccuuauau

SEQ ID NO: 19529 - RNA, 19 nt, Artificial Sequence
  Description of Artificial Sequence: Synthetic oligonucleotide
  Antisense strand to SEQ ID NO: 19528
auauaagggacauuucucu

SEQ ID NO: 19530 - RNA, 19 nt, Artificial Sequence
  Description of Artificial Sequence: Synthetic oligonucleotide
  Sense strand starting at position 578 of SEQ ID NO: 209
guauuuaguacgcaugcau

SEQ ID NO: 19531 - RNA, 19 nt, Artificial Sequence
  Description of Artificial Sequence: Synthetic oligonucleotide
  Antisense strand to SEQ ID NO: 19530
augcaugcguacuaaauac

SEQ ID NO: 19532 - RNA, 19 nt, Artificial Sequence
  Description of Artificial Sequence: Synthetic oligonucleotide
  Sense strand starting at position 143 of SEQ ID NO: 209
agggaauauagcuguuaaa

SEQ ID NO: 19533 - RNA, 19 nt, Artificial Sequence
  Description of Artificial Sequence: Synthetic oligonucleotide
  Antisense strand to SEQ ID NO: 19532
uuuaacagcuauauucccu

SEQ ID NO: 19534 - RNA, 19 nt, Artificial Sequence
  Description of Artificial Sequence: Synthetic oligonucleotide
  Sense strand starting at position 142 of SEQ ID NO: 209
uagggaauauagcuguuaa

SEQ ID NO: 19535 - RNA, 19 nt, Artificial Sequence
  Description of Artificial Sequence: Synthetic oligonucleotide
  Antisense strand to SEQ ID NO: 19534
uuaacagcuauauucccua

SEQ ID NO: 19536 - RNA, 19 nt, Artificial Sequence
  Description of Artificial Sequence: Synthetic oligonucleotide
  Sense strand starting at position 130 of SEQ ID NO: 209
ucuucuaguguauagggaa

SEQ ID NO: 19537 - RNA, 19 nt, Artificial Sequence
  Description of Artificial Sequence: Synthetic oligonucleotide
  Antisense strand to SEQ ID NO: 19536
uucccuauacacuagaaga

SEQ ID NO: 19538 - RNA, 19 nt, Artificial Sequence
  Description of Artificial Sequence: Synthetic oligonucleotide
  Sense strand starting at position 3899 of SEQ ID NO: 210
augucaucuuggucagagu

SEQ ID NO: 19539 - RNA, 19 nt, Artificial Sequence
  Description of Artificial Sequence: Synthetic oligonucleotide
  Antisense strand to SEQ ID NO: 19538
acucugaccaagaugacau

SEQ ID NO: 19540 - RNA, 19 nt, Artificial Sequence
  Description of Artificial Sequence: Synthetic oligonucleotide
  Sense strand starting at position 3897 of SEQ ID NO: 210
ccaugucaucuuggucaga

SEQ ID NO: 19541 - RNA, 19 nt, Artificial Sequence
  Description of Artificial Sequence: Synthetic oligonucleotide
  Antisense strand to SEQ ID NO: 19540
ucugaccaagaugacaugg

SEQ ID NO: 19542 - RNA, 19 nt, Artificial Sequence
  Description of Artificial Sequence: Synthetic oligonucleotide
  Sense strand starting at position 3874 of SEQ ID NO: 210
gcugaauccacagggcuuu

SEQ ID NO: 19543 - RNA, 19 nt, Artificial Sequence
  Description of Artificial Sequence: Synthetic oligonucleotide
  Antisense strand to SEQ ID NO: 19542
aaagcccuguggauucagc

SEQ ID NO: 19544 - RNA, 19 nt, Artificial Sequence
  Description of Artificial Sequence: Synthetic oligonucleotide
  Sense strand starting at position 3855 of SEQ ID NO: 210
ggagaaagcuguuuaggag

SEQ ID NO: 19545 - RNA, 19 nt, Artificial Sequence
  Description of Artificial Sequence: Synthetic oligonucleotide
  Antisense strand to SEQ ID NO: 19544
cuccuaaacagcuuucucc

SEQ ID NO: 19546 - RNA, 19 nt, Artificial Sequence
  Description of Artificial Sequence: Synthetic oligonucleotide
  Sense strand starting at position 3809 of SEQ ID NO: 210
guacaaugaccaugagucu

SEQ ID NO: 19547 - RNA, 19 nt, Artificial Sequence
  Description of Artificial Sequence: Synthetic oligonucleotide
  Antisense strand to SEQ ID NO: 19546
agacucauggucauuguac

SEQ ID NO: 19548 - RNA, 19 nt, Artificial Sequence
  Description of Artificial Sequence: Synthetic oligonucleotide
  Sense strand starting at position 3686 of SEQ ID NO: 210
cagaauaaccguugaaagu

SEQ ID NO: 19549 - RNA, 19 nt, Artificial Sequence
  Description of Artificial Sequence: Synthetic oligonucleotide
  Antisense strand to SEQ ID NO: 19548
acuuucaacgguuauucug

SEQ ID NO: 19550 - RNA, 19 nt, Artificial Sequence
  Description of Artificial Sequence: Synthetic oligonucleotide
  Sense strand starting at position 3658 of SEQ ID NO: 210
ccauaaggauacugagcua

SEQ ID NO: 19551 - RNA, 19 nt, Artificial Sequence
  Description of Artificial Sequence: Synthetic oligonucleotide
  Antisense strand to SEQ ID NO: 19550
uagcucaguauccuuaugg

SEQ ID NO: 19552 - RNA, 19 nt, Artificial Sequence
  Description of Artificial Sequence: Synthetic oligonucleotide
  Sense strand starting at position 3528 of SEQ ID NO: 210
ccacacugcucguaaauuu

SEQ ID NO: 19553 - RNA, 19 nt, Artificial Sequence
  Description of Artificial Sequence: Synthetic oligonucleotide
  Antisense strand to SEQ ID NO: 19552
aaauuuacgagcagugugg

SEQ ID NO: 19554 - RNA, 19 nt, Artificial Sequence
  Description of Artificial Sequence: Synthetic oligonucleotide
  Sense strand starting at position 3526 of SEQ ID NO: 210
uuccacacugcucguaaau

SEQ ID NO: 19555 - RNA, 19 nt, Artificial Sequence
  Description of Artificial Sequence: Synthetic oligonucleotide
  Antisense strand to SEQ ID NO: 19554
auuuacgagcaguguggaa

SEQ ID NO: 19556 - RNA, 19 nt, Artificial Sequence
  Description of Artificial Sequence: Synthetic oligonucleotide
  Sense strand starting at position 3525 of SEQ ID NO: 210
uuuccacacugcucguaaa

SEQ ID NO: 19557 - RNA, 19 nt, Artificial Sequence
  Description of Artificial Sequence: Synthetic oligonucleotide
  Antisense strand to SEQ ID NO: 19556
uuuacgagcaguguggaaa

SEQ ID NO: 19558 - RNA, 19 nt, Artificial Sequence
  Description of Artificial Sequence: Synthetic oligonucleotide
  Sense strand starting at position 3379 of SEQ ID NO: 210
ccucgaagcaaguguauaa

SEQ ID NO: 19559 - RNA, 19 nt, Artificial Sequence
  Description of Artificial Sequence: Synthetic oligonucleotide
  Antisense strand to SEQ ID NO: 19558
uuauacacuugcuucgagg

SEQ ID NO: 19560 - RNA, 19 nt, Artificial Sequence
  Description of Artificial Sequence: Synthetic oligonucleotide
  Sense strand starting at position 3356 of SEQ ID NO: 210
cgccauguggauugaagau

SEQ ID NO: 19561 - RNA, 19 nt, Artificial Sequence
  Description of Artificial Sequence: Synthetic oligonucleotide
  Antisense strand to SEQ ID NO: 19560
aucuucaauccacauggcg

SEQ ID NO: 19562 - RNA, 19 nt, Artificial Sequence
  Description of Artificial Sequence: Synthetic oligonucleotide
  Sense strand starting at position 3185 of SEQ ID NO: 210
ggacuuacgccaggucaca

SEQ ID NO: 19563 - RNA, 19 nt, Artificial Sequence
  Description of Artificial Sequence: Synthetic oligonucleotide
  Antisense strand to SEQ ID NO: 19562
ugugaccuggcguaagucc

SEQ ID NO: 19564 - RNA, 19 nt, Artificial Sequence
  Description of Artificial Sequence: Synthetic oligonucleotide
  Sense strand starting at position 3095 of SEQ ID NO: 210
uucugugaugcucgcacau

SEQ ID NO: 19565 - RNA, 19 nt, Artificial Sequence
  Description of Artificial Sequence: Synthetic oligonucleotide
  Antisense strand to SEQ ID NO: 19564
augugcgagcaucacagaa

SEQ ID NO: 19566 - RNA, 19 nt, Artificial Sequence
  Description of Artificial Sequence: Synthetic oligonucleotide
  Sense strand starting at position 3089 of SEQ ID NO: 210
ugucauuucugugaugcuc

SEQ ID NO: 19567 - RNA, 19 nt, Artificial Sequence
  Description of Artificial Sequence: Synthetic oligonucleotide
  Antisense strand to SEQ ID NO: 19566
gagcaucacagaaaugaca

SEQ ID NO: 19568 - RNA, 19 nt, Artificial Sequence
  Description of Artificial Sequence: Synthetic oligonucleotide
  Sense strand starting at position 3088 of SEQ ID NO: 210
gugucauuucugugaugcu

SEQ ID NO: 19569 - RNA, 19 nt, Artificial Sequence
  Description of Artificial Sequence: Synthetic oligonucleotide
  Antisense strand to SEQ ID NO: 19568
agcaucacagaaaugacac

SEQ ID NO: 19570 - RNA, 19 nt, Artificial Sequence
  Description of Artificial Sequence: Synthetic oligonucleotide
  Sense strand starting at position 3064 of SEQ ID NO: 210
aggcauguucugagugugu

SEQ ID NO: 19571 - RNA, 19 nt, Artificial Sequence
  Description of Artificial Sequence: Synthetic oligonucleotide
  Antisense strand to SEQ ID NO: 19570
acacacucagaacaugccu

SEQ ID NO: 19572 - RNA, 19 nt, Artificial Sequence
  Description of Artificial Sequence: Synthetic oligonucleotide
  Sense strand starting at position 2985 of SEQ ID NO: 210
gagggaauagcuugugcca

SEQ ID NO: 19573 - RNA, 19 nt, Artificial Sequence
  Description of Artificial Sequence: Synthetic oligonucleotide
  Antisense strand to SEQ ID NO: 19572
uggcacaagcuauucccuc

SEQ ID NO: 19574 - RNA, 19 nt, Artificial Sequence
  Description of Artificial Sequence: Synthetic oligonucleotide
  Sense strand starting at position 2865 of SEQ ID NO: 210
uacuuauuccugugugguu

SEQ ID NO: 19575 - RNA, 19 nt, Artificial Sequence
  Description of Artificial Sequence: Synthetic oligonucleotide
  Antisense strand to SEQ ID NO: 19574
aaccacacaggaauaagua

SEQ ID NO: 19576 - RNA, 19 nt, Artificial Sequence
  Description of Artificial Sequence: Synthetic oligonucleotide
  Sense strand starting at position 2853 of SEQ ID NO: 210
gcgcucucgccuuacuuau

SEQ ID NO: 19577 - RNA, 19 nt, Artificial Sequence
  Description of Artificial Sequence: Synthetic oligonucleotide
  Antisense strand to SEQ ID NO: 19576
auaaguaaggcgagagcgc

SEQ ID NO: 19578 - RNA, 19 nt, Artificial Sequence
  Description of Artificial Sequence: Synthetic oligonucleotide
  Sense strand starting at position 2852 of SEQ ID NO: 210
cgcgcucucgccuuacuua

SEQ ID NO: 19579 - RNA, 19 nt, Artificial Sequence
  Description of Artificial Sequence: Synthetic oligonucleotide
  Antisense strand to SEQ ID NO: 19578
uaaguaaggcgagagcgcg

SEQ ID NO: 19580 - RNA, 19 nt, Artificial Sequence
  Description of Artificial Sequence: Synthetic oligonucleotide
  Sense strand starting at position 2802 of SEQ ID NO: 210
aaacgucucgacugacuca

SEQ ID NO: 19581 - RNA, 19 nt, Artificial Sequence
  Description of Artificial Sequence: Synthetic oligonucleotide
  Antisense strand to SEQ ID NO: 19580
ugagucagucgagacguuu

SEQ ID NO: 19582 - RNA, 19 nt, Artificial Sequence
  Description of Artificial Sequence: Synthetic oligonucleotide
  Sense strand starting at position 2010 of SEQ ID NO: 210
gcgauucccgcgaguccuu

SEQ ID NO: 19583 - RNA, 19 nt, Artificial Sequence
  Description of Artificial Sequence: Synthetic oligonucleotide
  Antisense strand to SEQ ID NO: 19582
aaggacucgcgggaaucgc

SEQ ID NO: 19584 - RNA, 19 nt, Artificial Sequence
  Description of Artificial Sequence: Synthetic oligonucleotide
  Sense strand starting at position 943 of SEQ ID NO: 210
ucaguacuguccuuaucac

SEQ ID NO: 19585 - RNA, 19 nt, Artificial Sequence
  Description of Artificial Sequence: Synthetic oligonucleotide
  Antisense strand to SEQ ID NO: 19584
gugauaaggacaguacuga

SEQ ID NO: 19586 - RNA, 19 nt, Artificial Sequence
  Description of Artificial Sequence: Synthetic oligonucleotide
  Sense strand starting at position 913 of SEQ ID NO: 210
agguuuccacgcugaacuu

SEQ ID NO: 19587 - RNA, 19 nt, Artificial Sequence
  Description of Artificial Sequence: Synthetic oligonucleotide
  Antisense strand to SEQ ID NO: 19586
aaguucagcguggaaaccu

SEQ ID NO: 19588 - RNA, 19 nt, Artificial Sequence
  Description of Artificial Sequence: Synthetic oligonucleotide
  Sense strand starting at position 890 of SEQ ID NO: 210
ggucacuccgaugauguga

SEQ ID NO: 19589 - RNA, 19 nt, Artificial Sequence
  Description of Artificial Sequence: Synthetic oligonucleotide
  Antisense strand to SEQ ID NO: 19588
ucacaucaucggagugacc

SEQ ID NO: 19590 - RNA, 19 nt, Artificial Sequence
  Description of Artificial Sequence: Synthetic oligonucleotide
  Sense strand starting at position 652 of SEQ ID NO: 210
ggcuuugccugggagaaca

SEQ ID NO: 19591 - RNA, 19 nt, Artificial Sequence
  Description of Artificial Sequence: Synthetic oligonucleotide
  Antisense strand to SEQ ID NO: 19590
uguucucccaggcaaagcc

SEQ ID NO: 19592 - RNA, 19 nt, Artificial Sequence
  Description of Artificial Sequence: Synthetic oligonucleotide
  Sense strand starting at position 651 of SEQ ID NO: 210
cggcuuugccugggagaac

SEQ ID NO: 19593 - RNA, 19 nt, Artificial Sequence
  Description of Artificial Sequence: Synthetic oligonucleotide
  Antisense strand to SEQ ID NO: 19592
guucucccaggcaaagccg

SEQ ID NO: 19594 - RNA, 19 nt, Artificial Sequence
  Description of Artificial Sequence: Synthetic oligonucleotide
  Sense strand starting at position 650 of SEQ ID NO: 210
ccggcuuugccugggagaa

SEQ ID NO: 19595 - RNA, 19 nt, Artificial Sequence
  Description of Artificial Sequence: Synthetic oligonucleotide
  Antisense strand to SEQ ID NO: 19594
uucucccaggcaaagccgg

SEQ ID NO: 19596 - RNA, 19 nt, Artificial Sequence
  Description of Artificial Sequence: Synthetic oligonucleotide
  Sense strand starting at position 649 of SEQ ID NO: 210
cccggcuuugccugggaga

SEQ ID NO: 19597 - RNA, 19 nt, Artificial Sequence
  Description of Artificial Sequence: Synthetic oligonucleotide
  Antisense strand to SEQ ID NO: 19596
ucucccaggcaaagccggg

SEQ ID NO: 19598 - RNA, 19 nt, Artificial Sequence
  Description of Artificial Sequence: Synthetic oligonucleotide
  Sense strand starting at position 621 of SEQ ID NO: 210
gauacaagauguuugcaga

SEQ ID NO: 19599 - RNA, 19 nt, Artificial Sequence
  Description of Artificial Sequence: Synthetic oligonucleotide
  Antisense strand to SEQ ID NO: 19598
ucugcaaacaucuuguauc

SEQ ID NO: 19600 - RNA, 19 nt, Artificial Sequence
  Description of Artificial Sequence: Synthetic oligonucleotide
  Sense strand starting at position 609 of SEQ ID NO: 210
gcuccaggguuugauacaa

SEQ ID NO: 19601 - RNA, 19 nt, Artificial Sequence
  Description of Artificial Sequence: Synthetic oligonucleotide
  Antisense strand to SEQ ID NO: 19600
uuguaucaaacccuggagc

SEQ ID NO: 19602 - RNA, 19 nt, Artificial Sequence
  Description of Artificial Sequence: Synthetic oligonucleotide
  Sense strand starting at position 608 of SEQ ID NO: 210
agcuccaggguuugauaca

SEQ ID NO: 19603 - RNA, 19 nt, Artificial Sequence
  Description of Artificial Sequence: Synthetic oligonucleotide
  Antisense strand to SEQ ID NO: 19602
uguaucaaacccuggagcu

SEQ ID NO: 19604 - RNA, 19 nt, Artificial Sequence
  Description of Artificial Sequence: Synthetic oligonucleotide
  Sense strand starting at position 601 of SEQ ID NO: 210
aauaaauagcuccaggguu

SEQ ID NO: 19605 - RNA, 19 nt, Artificial Sequence
  Description of Artificial Sequence: Synthetic oligonucleotide
  Antisense strand to SEQ ID NO: 19604
aacccuggagcuauuuauu

SEQ ID NO: 19606 - RNA, 19 nt, Artificial Sequence
  Description of Artificial Sequence: Synthetic oligonucleotide
  Sense strand starting at position 587 of SEQ ID NO: 210
cugagaucuuaaggaauaa

SEQ ID NO: 19607 - RNA, 19 nt, Artificial Sequence
  Description of Artificial Sequence: Synthetic oligonucleotide
  Antisense strand to SEQ ID NO: 19606
uuauuccuuaagaucucag

SEQ ID NO: 19608 - RNA, 19 nt, Artificial Sequence
  Description of Artificial Sequence: Synthetic oligonucleotide
  Sense strand starting at position 558 of SEQ ID NO: 210
caaagaguuuaguacugga

SEQ ID NO: 19609 - RNA, 19 nt, Artificial Sequence
  Description of Artificial Sequence: Synthetic oligonucleotide
  Antisense strand to SEQ ID NO: 19608
uccaguacuaaacucuuug

SEQ ID NO: 19610 - RNA, 19 nt, Artificial Sequence
  Description of Artificial Sequence: Synthetic oligonucleotide
  Sense strand starting at position 369 of SEQ ID NO: 210
uaaugaugcugucugugga

SEQ ID NO: 19611 - RNA, 19 nt, Artificial Sequence
  Description of Artificial Sequence: Synthetic oligonucleotide
  Antisense strand to SEQ ID NO: 19610
uccacagacagcaucauua

SEQ ID NO: 19612 - RNA, 19 nt, Artificial Sequence
  Description of Artificial Sequence: Synthetic oligonucleotide
  Sense strand starting at position 335 of SEQ ID NO: 210
ggcuguuaucaggguuguc

SEQ ID NO: 19613 - RNA, 19 nt, Artificial Sequence
  Description of Artificial Sequence: Synthetic oligonucleotide
  Antisense strand to SEQ ID NO: 19612
gacaacccugauaacagcc

SEQ ID NO: 19614 - RNA, 19 nt, Artificial Sequence
  Description of Artificial Sequence: Synthetic oligonucleotide
  Sense strand starting at position 124 of SEQ ID NO: 210
cuguguuccucagcccaga

SEQ ID NO: 19615 - RNA, 19 nt, Artificial Sequence
  Description of Artificial Sequence: Synthetic oligonucleotide
  Antisense strand to SEQ ID NO: 19614
ucugggcugaggaacacag

SEQ ID NO: 19616 - RNA, 19 nt, Artificial Sequence
  Description of Artificial Sequence: Synthetic oligonucleotide
  Sense strand starting at position 57 of SEQ ID NO: 210
ccucuucugcucuagugua

SEQ ID NO: 19617 - RNA, 19 nt, Artificial Sequence
  Description of Artificial Sequence: Synthetic oligonucleotide
  Antisense strand to SEQ ID NO: 19616
uacacuagagcagaagagg

SEQ ID NO: 19618 - RNA, 19 nt, Artificial Sequence
  Description of Artificial Sequence: Synthetic oligonucleotide
  Sense strand starting at position 105 of SEQ ID NO: 211
agcccagacuccucagaaa

SEQ ID NO: 19619 - RNA, 19 nt, Artificial Sequence
  Description of Artificial Sequence: Synthetic oligonucleotide
  Antisense strand to SEQ ID NO: 19618
uuucugaggagucugggcu

SEQ ID NO: 19620 - RNA, 19 nt, Artificial Sequence
  Description of Artificial Sequence: Synthetic oligonucleotide
  Sense strand starting at position 108 of SEQ ID NO: 211
ccagacuccucagaaaggu

SEQ ID NO: 19621 - RNA, 19 nt, Artificial Sequence
  Description of Artificial Sequence: Synthetic oligonucleotide
  Antisense strand to SEQ ID NO: 19620
accuuucugaggagucugg

SEQ ID NO: 19622 - RNA, 19 nt, Artificial Sequence
  Description of Artificial Sequence: Synthetic oligonucleotide
  Sense strand starting at position 134 of SEQ ID NO: 211
ccuugaaagccugaccuga

SEQ ID NO: 19623 - RNA, 19 nt, Artificial Sequence
  Description of Artificial Sequence: Synthetic oligonucleotide
  Antisense strand to SEQ ID NO: 19622
ucaggucaggcuuucaagg

SEQ ID NO: 19624 - RNA, 19 nt, Artificial Sequence
  Description of Artificial Sequence: Synthetic oligonucleotide
  Sense strand starting at position 305 of SEQ ID NO: 211
ggcuguuaucaggguuguc

SEQ ID NO: 19625 - RNA, 19 nt, Artificial Sequence
  Description of Artificial Sequence: Synthetic oligonucleotide
  Antisense strand to SEQ ID NO: 19624
gacaacccugauaacagcc

SEQ ID NO: 19626 - RNA, 19 nt, Artificial Sequence
  Description of Artificial Sequence: Synthetic oligonucleotide
  Sense strand starting at position 316 of SEQ ID NO: 211
ggguugucgggaggaugaa

SEQ ID NO: 19627 - RNA, 19 nt, Artificial Sequence
  Description of Artificial Sequence: Synthetic oligonucleotide
  Antisense strand to SEQ ID NO: 19626
uucauccucccgacaaccc

SEQ ID NO: 19628 - RNA, 19 nt, Artificial Sequence
  Description of Artificial Sequence: Synthetic oligonucleotide
  Sense strand starting at position 339 of SEQ ID NO: 211
uaaugaugcugucugugga

SEQ ID NO: 19629 - RNA, 19 nt, Artificial Sequence
  Description of Artificial Sequence: Synthetic oligonucleotide
  Antisense strand to SEQ ID NO: 19628
uccacagacagcaucauua

SEQ ID NO: 19630 - RNA, 19 nt, Artificial Sequence
  Description of Artificial Sequence: Synthetic oligonucleotide
  Sense strand starting at position 493 of SEQ ID NO: 211
gggugaccugaccaauagu

SEQ ID NO: 19631 - RNA, 19 nt, Artificial Sequence
  Description of Artificial Sequence: Synthetic oligonucleotide
  Antisense strand to SEQ ID NO: 19630
acuauuggucaggucaccc

SEQ ID NO: 19632 - RNA, 19 nt, Artificial Sequence
  Description of Artificial Sequence: Synthetic oligonucleotide
  Sense strand starting at position 559 of SEQ ID NO: 211
cugagaucuuagggaauaa

SEQ ID NO: 19633 - RNA, 19 nt, Artificial Sequence
  Description of Artificial Sequence: Synthetic oligonucleotide
  Antisense strand to SEQ ID NO: 19632
uuauucccuaagaucucag

SEQ ID NO: 19634 - RNA, 19 nt, Artificial Sequence
  Description of Artificial Sequence: Synthetic oligonucleotide
  Sense strand starting at position 573 of SEQ ID NO: 211
aauaaauagcuccaggguu

SEQ ID NO: 19635 - RNA, 19 nt, Artificial Sequence
  Description of Artificial Sequence: Synthetic oligonucleotide
  Antisense strand to SEQ ID NO: 19634
aacccuggagcuauuuauu

SEQ ID NO: 19636 - RNA, 19 nt, Artificial Sequence
  Description of Artificial Sequence: Synthetic oligonucleotide
  Sense strand starting at position 580 of SEQ ID NO: 211
agcuccaggguuugauaca

SEQ ID NO: 19637 - RNA, 19 nt, Artificial Sequence
  Description of Artificial Sequence: Synthetic oligonucleotide
  Antisense strand to SEQ ID NO: 19636
uguaucaaacccuggagcu

SEQ ID NO: 19638 - RNA, 19 nt, Artificial Sequence
  Description of Artificial Sequence: Synthetic oligonucleotide
  Sense strand starting at position 621 of SEQ ID NO: 211
ccgggcuuugccugggaga

SEQ ID NO: 19639 - RNA, 19 nt, Artificial Sequence
  Description of Artificial Sequence: Synthetic oligonucleotide
  Antisense strand to SEQ ID NO: 19638
ucucccaggcaaagcccgg

SEQ ID NO: 19640 - RNA, 19 nt, Artificial Sequence
  Description of Artificial Sequence: Synthetic oligonucleotide
  Sense strand starting at position 622 of SEQ ID NO: 211
cgggcuuugccugggagaa

SEQ ID NO: 19641 - RNA, 19 nt, Artificial Sequence
  Description of Artificial Sequence: Synthetic oligonucleotide
  Antisense strand to SEQ ID NO: 19640
uucucccaggcaaagcccg

SEQ ID NO: 19642 - RNA, 19 nt, Artificial Sequence
  Description of Artificial Sequence: Synthetic oligonucleotide
  Sense strand starting at position 623 of SEQ ID NO: 211
gggcuuugccugggagaac

SEQ ID NO: 19643 - RNA, 19 nt, Artificial Sequence
  Description of Artificial Sequence: Synthetic oligonucleotide
  Antisense strand to SEQ ID NO: 19642
guucucccaggcaaagccc

SEQ ID NO: 19644 - RNA, 19 nt, Artificial Sequence
  Description of Artificial Sequence: Synthetic oligonucleotide
  Sense strand starting at position 882 of SEQ ID NO: 211
agguuuccacgcugaacuu

SEQ ID NO: 19645 - RNA, 19 nt, Artificial Sequence
  Description of Artificial Sequence: Synthetic oligonucleotide
  Antisense strand to SEQ ID NO: 19644
aaguucagcguggaaaccu

SEQ ID NO: 19646 - RNA, 19 nt, Artificial Sequence
  Description of Artificial Sequence: Synthetic oligonucleotide
  Sense strand starting at position 1282 of SEQ ID NO: 211
cgcacucacccauguuaac

SEQ ID NO: 19647 - RNA, 19 nt, Artificial Sequence
  Description of Artificial Sequence: Synthetic oligonucleotide
  Antisense strand to SEQ ID NO: 19646
guuaacaugggugagugcg

SEQ ID NO: 19648 - RNA, 19 nt, Artificial Sequence
  Description of Artificial Sequence: Synthetic oligonucleotide
  Sense strand starting at position 2638 of SEQ ID NO: 211
cggaaaugccucuacuaac

SEQ ID NO: 19649 - RNA, 19 nt, Artificial Sequence
  Description of Artificial Sequence: Synthetic oligonucleotide
  Antisense strand to SEQ ID NO: 19648
guuaguagaggcauuuccg

SEQ ID NO: 19650 - RNA, 19 nt, Artificial Sequence
  Description of Artificial Sequence: Synthetic oligonucleotide
  Sense strand starting at position 2692 of SEQ ID NO: 211
cgcgcucucgccuuacuua

SEQ ID NO: 19651 - RNA, 19 nt, Artificial Sequence
  Description of Artificial Sequence: Synthetic oligonucleotide
  Antisense strand to SEQ ID NO: 19650
uaaguaaggcgagagcgcg

SEQ ID NO: 19652 - RNA, 19 nt, Artificial Sequence
  Description of Artificial Sequence: Synthetic oligonucleotide
  Sense strand starting at position 2705 of SEQ ID NO: 211
uacuuauuccugugugguu

SEQ ID NO: 19653 - RNA, 19 nt, Artificial Sequence
  Description of Artificial Sequence: Synthetic oligonucleotide
  Antisense strand to SEQ ID NO: 19652
aaccacacaggaauaagua

SEQ ID NO: 19654 - RNA, 19 nt, Artificial Sequence
  Description of Artificial Sequence: Synthetic oligonucleotide
  Sense strand starting at position 2870 of SEQ ID NO: 211
cuaauaauggcagguaaca

SEQ ID NO: 19655 - RNA, 19 nt, Artificial Sequence
  Description of Artificial Sequence: Synthetic oligonucleotide
  Antisense strand to SEQ ID NO: 19654
uguuaccugccauuauuag

SEQ ID NO: 19656 - RNA, 19 nt, Artificial Sequence
  Description of Artificial Sequence: Synthetic oligonucleotide
  Sense strand starting at position 2907 of SEQ ID NO: 211
cgaggcauguucucagugu

SEQ ID NO: 19657 - RNA, 19 nt, Artificial Sequence
  Description of Artificial Sequence: Synthetic oligonucleotide
  Antisense strand to SEQ ID NO: 19656
acacugagaacaugccucg

SEQ ID NO: 19658 - RNA, 19 nt, Artificial Sequence
  Description of Artificial Sequence: Synthetic oligonucleotide
  Sense strand starting at position 2927 of SEQ ID NO: 211
ugucuugugucauuucugu

SEQ ID NO: 19659 - RNA, 19 nt, Artificial Sequence
  Description of Artificial Sequence: Synthetic oligonucleotide
  Antisense strand to SEQ ID NO: 19658
acagaaaugacacaagaca

SEQ ID NO: 19660 - RNA, 19 nt, Artificial Sequence
  Description of Artificial Sequence: Synthetic oligonucleotide
  Sense strand starting at position 2940 of SEQ ID NO: 211
uucugugaugcuugcacau

SEQ ID NO: 19661 - RNA, 19 nt, Artificial Sequence
  Description of Artificial Sequence: Synthetic oligonucleotide
  Antisense strand to SEQ ID NO: 19660
augugcaagcaucacagaa

SEQ ID NO: 19662 - RNA, 19 nt, Artificial Sequence
  Description of Artificial Sequence: Synthetic oligonucleotide
  Sense strand starting at position 3023 of SEQ ID NO: 211
gguuaagggacuuacgcua

SEQ ID NO: 19663 - RNA, 19 nt, Artificial Sequence
  Description of Artificial Sequence: Synthetic oligonucleotide
  Antisense strand to SEQ ID NO: 19662
uagcguaagucccuuaacc

SEQ ID NO: 19664 - RNA, 19 nt, Artificial Sequence
  Description of Artificial Sequence: Synthetic oligonucleotide
  Sense strand starting at position 3030 of SEQ ID NO: 211
ggacuuacgcuaggucaca

SEQ ID NO: 19665 - RNA, 19 nt, Artificial Sequence
  Description of Artificial Sequence: Synthetic oligonucleotide
  Antisense strand to SEQ ID NO: 19664
ugugaccuagcguaagucc

SEQ ID NO: 19666 - RNA, 19 nt, Artificial Sequence
  Description of Artificial Sequence: Synthetic oligonucleotide
  Sense strand starting at position 3232 of SEQ ID NO: 211
ccucgaagcaaguguauaa

SEQ ID NO: 19667 - RNA, 19 nt, Artificial Sequence
  Description of Artificial Sequence: Synthetic oligonucleotide
  Antisense strand to SEQ ID NO: 19666
uuauacacuugcuucgagg

SEQ ID NO: 19668 - RNA, 19 nt, Artificial Sequence
  Description of Artificial Sequence: Synthetic oligonucleotide
  Sense strand starting at position 3326 of SEQ ID NO: 211
gucauuugcuggcuccuua

SEQ ID NO: 19669 - RNA, 19 nt, Artificial Sequence
  Description of Artificial Sequence: Synthetic oligonucleotide
  Antisense strand to SEQ ID NO: 19668
uaaggagccagcaaaugac

SEQ ID NO: 19670 - RNA, 19 nt, Artificial Sequence
  Description of Artificial Sequence: Synthetic oligonucleotide
  Sense strand starting at position 3374 of SEQ ID NO: 211
gaaguaaauuucugcaagg

SEQ ID NO: 19671 - RNA, 19 nt, Artificial Sequence
  Description of Artificial Sequence: Synthetic oligonucleotide
  Antisense strand to SEQ ID NO: 19670
ccuugcagaaauuuacuuc

SEQ ID NO: 19672 - RNA, 19 nt, Artificial Sequence
  Description of Artificial Sequence: Synthetic oligonucleotide
  Sense strand starting at position 3586 of SEQ ID NO: 211
gcacacagcgauuaaggaa

SEQ ID NO: 19673 - RNA, 19 nt, Artificial Sequence
  Description of Artificial Sequence: Synthetic oligonucleotide
  Antisense strand to SEQ ID NO: 19672
uuccuuaaucgcugugugc

SEQ ID NO: 19674 - RNA, 19 nt, Artificial Sequence
  Description of Artificial Sequence: Synthetic oligonucleotide
  Sense strand starting at position 3602 of SEQ ID NO: 211
gaacuuaugccaggucagu

SEQ ID NO: 19675 - RNA, 19 nt, Artificial Sequence
  Description of Artificial Sequence: Synthetic oligonucleotide
  Antisense strand to SEQ ID NO: 19674
acugaccuggcauaaguuc

SEQ ID NO: 19676 - RNA, 19 nt, Artificial Sequence
  Description of Artificial Sequence: Synthetic oligonucleotide
  Sense strand starting at position 3693 of SEQ ID NO: 211
gguaauauuugaugucucu

SEQ ID NO: 19677 - RNA, 19 nt, Artificial Sequence
  Description of Artificial Sequence: Synthetic oligonucleotide
  Antisense strand to SEQ ID NO: 19676
agagacaucaaauauuacc

SEQ ID NO: 19678 - RNA, 19 nt, Artificial Sequence
  Description of Artificial Sequence: Synthetic oligonucleotide
  Sense strand starting at position 3714 of SEQ ID NO: 211
uucuuacauguauguguau

SEQ ID NO: 19679 - RNA, 19 nt, Artificial Sequence
  Description of Artificial Sequence: Synthetic oligonucleotide
  Antisense strand to SEQ ID NO: 19678
auacacauacauguaagaa

SEQ ID NO: 19680 - RNA, 19 nt, Artificial Sequence
  Description of Artificial Sequence: Synthetic oligonucleotide
  Sense strand starting at position 3880 of SEQ ID NO: 211
gcuuauguuaugggauaau

SEQ ID NO: 19681 - RNA, 19 nt, Artificial Sequence
  Description of Artificial Sequence: Synthetic oligonucleotide
  Antisense strand to SEQ ID NO: 19680
auuaucccauaacauaagc

SEQ ID NO: 19682 - RNA, 19 nt, Artificial Sequence
  Description of Artificial Sequence: Synthetic oligonucleotide
  Sense strand starting at position 3915 of SEQ ID NO: 211
auacuauguuguuaugaac

SEQ ID NO: 19683 - RNA, 19 nt, Artificial Sequence
  Description of Artificial Sequence: Synthetic oligonucleotide
  Antisense strand to SEQ ID NO: 19682
guucauaacaacauaguau

SEQ ID NO: 19684 - RNA, 19 nt, Artificial Sequence
  Description of Artificial Sequence: Synthetic oligonucleotide
  Sense strand starting at position 3921 of SEQ ID NO: 211
uguuguuaugaacaaucuu

SEQ ID NO: 19685 - RNA, 19 nt, Artificial Sequence
  Description of Artificial Sequence: Synthetic oligonucleotide
  Antisense strand to SEQ ID NO: 19684
aagauuguucauaacaaca

SEQ ID NO: 19686 - RNA, 19 nt, Artificial Sequence
  Description of Artificial Sequence: Synthetic oligonucleotide
  Sense strand starting at position 3929 of SEQ ID NO: 211
ugaacaaucuuguagaaua

SEQ ID NO: 19687 - RNA, 19 nt, Artificial Sequence
  Description of Artificial Sequence: Synthetic oligonucleotide
  Antisense strand to SEQ ID NO: 19686
uauucuacaagauuguuca

SEQ ID NO: 19688 - RNA, 19 nt, Artificial Sequence
  Description of Artificial Sequence: Synthetic oligonucleotide
  Sense strand starting at position 3940 of SEQ ID NO: 211
guagaauaaucugugcaca

SEQ ID NO: 19689 - RNA, 19 nt, Artificial Sequence
  Description of Artificial Sequence: Synthetic oligonucleotide
  Antisense strand to SEQ ID NO: 19688
ugugcacagauuauucuac

SEQ ID NO: 19690 - RNA, 19 nt, Artificial Sequence
  Description of Artificial Sequence: Synthetic oligonucleotide
  Sense strand starting at position 3942 of SEQ ID NO: 211
agaauaaucugugcacauc

SEQ ID NO: 19691 - RNA, 19 nt, Artificial Sequence
  Description of Artificial Sequence: Synthetic oligonucleotide
  Antisense strand to SEQ ID NO: 19690
gaugugcacagauuauucu

SEQ ID NO: 19692 - RNA, 19 nt, Artificial Sequence
  Description of Artificial Sequence: Synthetic oligonucleotide
  Sense strand starting at position 3951 of SEQ ID NO: 211
ugugcacauccauggugau

SEQ ID NO: 19693 - RNA, 19 nt, Artificial Sequence
  Description of Artificial Sequence: Synthetic oligonucleotide
  Antisense strand to SEQ ID NO: 19692
aucaccauggaugugcaca

SEQ ID NO: 19694 - RNA, 19 nt, Artificial Sequence
  Description of Artificial Sequence: Synthetic oligonucleotide
  Sense strand starting at position 3952 of SEQ ID NO: 211
gugcacauccauggugauu

SEQ ID NO: 19695 - RNA, 19 nt, Artificial Sequence
  Description of Artificial Sequence: Synthetic oligonucleotide
  Antisense strand to SEQ ID NO: 19694
aaucaccauggaugugcac

SEQ ID NO: 19696 - RNA, 19 nt, Artificial Sequence
  Description of Artificial Sequence: Synthetic oligonucleotide
  Sense strand starting at position 3965 of SEQ ID NO: 211
gugauuucuuuaggaugaa

SEQ ID NO: 19697 - RNA, 19 nt, Artificial Sequence
  Description of Artificial Sequence: Synthetic oligonucleotide
  Antisense strand to SEQ ID NO: 19696
uucauccuaaagaaaucac

SEQ ID NO: 19698 - RNA, 19 nt, Artificial Sequence
  Description of Artificial Sequence: Synthetic oligonucleotide
  Sense strand starting at position 2634 of SEQ ID NO: 212
ggagguuucugggagaaua

SEQ ID NO: 19699 - RNA, 19 nt, Artificial Sequence
  Description of Artificial Sequence: Synthetic oligonucleotide
  Antisense strand to SEQ ID NO: 19698
uauucucccagaaaccucc

SEQ ID NO: 19700 - RNA, 19 nt, Artificial Sequence
  Description of Artificial Sequence: Synthetic oligonucleotide
  Sense strand starting at position 2631 of SEQ ID NO: 212
uaaggagguuucugggaga

SEQ ID NO: 19701 - RNA, 19 nt, Artificial Sequence
  Description of Artificial Sequence: Synthetic oligonucleotide
  Antisense strand to SEQ ID NO: 19700
ucucccagaaaccuccuua

SEQ ID NO: 19702 - RNA, 19 nt, Artificial Sequence
  Description of Artificial Sequence: Synthetic oligonucleotide
  Sense strand starting at position 2623 of SEQ ID NO: 212
guauguuauaaggagguuu

SEQ ID NO: 19703 - RNA, 19 nt, Artificial Sequence
  Description of Artificial Sequence: Synthetic oligonucleotide
  Antisense strand to SEQ ID NO: 19702
aaaccuccuuauaacauac

SEQ ID NO: 19704 - RNA, 19 nt, Artificial Sequence
  Description of Artificial Sequence: Synthetic oligonucleotide
  Sense strand starting at position 2619 of SEQ ID NO: 212
ggaaguauguuauaaggag

SEQ ID NO: 19705 - RNA, 19 nt, Artificial Sequence
  Description of Artificial Sequence: Synthetic oligonucleotide
  Antisense strand to SEQ ID NO: 19704
cuccuuauaacauacuucc

SEQ ID NO: 19706 - RNA, 19 nt, Artificial Sequence
  Description of Artificial Sequence: Synthetic oligonucleotide
  Sense strand starting at position 2571 of SEQ ID NO: 212
acuguuaucuuggaucuac

SEQ ID NO: 19707 - RNA, 19 nt, Artificial Sequence
  Description of Artificial Sequence: Synthetic oligonucleotide
  Antisense strand to SEQ ID NO: 19706
guagauccaagauaacagu

SEQ ID NO: 19708 - RNA, 19 nt, Artificial Sequence
  Description of Artificial Sequence: Synthetic oligonucleotide
  Sense strand starting at position 2570 of SEQ ID NO: 212
gacuguuaucuuggaucua

SEQ ID NO: 19709 - RNA, 19 nt, Artificial Sequence
  Description of Artificial Sequence: Synthetic oligonucleotide
  Antisense strand to SEQ ID NO: 19708
uagauccaagauaacaguc

SEQ ID NO: 19710 - RNA, 19 nt, Artificial Sequence
  Description of Artificial Sequence: Synthetic oligonucleotide
  Sense strand starting at position 2567 of SEQ ID NO: 212
uaggacuguuaucuuggau

SEQ ID NO: 19711 - RNA, 19 nt, Artificial Sequence
  Description of Artificial Sequence: Synthetic oligonucleotide
  Antisense strand to SEQ ID NO: 19710
auccaagauaacaguccua

SEQ ID NO: 19712 - RNA, 19 nt, Artificial Sequence
  Description of Artificial Sequence: Synthetic oligonucleotide
  Sense strand starting at position 2566 of SEQ ID NO: 212
cuaggacuguuaucuugga

SEQ ID NO: 19713 - RNA, 19 nt, Artificial Sequence
  Description of Artificial Sequence: Synthetic oligonucleotide
  Antisense strand to SEQ ID NO: 19712
uccaagauaacaguccuag

SEQ ID NO: 19714 - RNA, 19 nt, Artificial Sequence
  Description of Artificial Sequence: Synthetic oligonucleotide
  Sense strand starting at position 2558 of SEQ ID NO: 212
guguguuucuaggacuguu

SEQ ID NO: 19715 - RNA, 19 nt, Artificial Sequence
  Description of Artificial Sequence: Synthetic oligonucleotide
  Antisense strand to SEQ ID NO: 19714
aacaguccuagaaacacac

SEQ ID NO: 19716 - RNA, 19 nt, Artificial Sequence
  Description of Artificial Sequence: Synthetic oligonucleotide
  Sense strand starting at position 2192 of SEQ ID NO: 212
aguagaaaccguuguguuu

SEQ ID NO: 19717 - RNA, 19 nt, Artificial Sequence
  Description of Artificial Sequence: Synthetic oligonucleotide
  Antisense strand to SEQ ID NO: 19716
aaacacaacgguuucuacu

SEQ ID NO: 19718 - RNA, 19 nt, Artificial Sequence
  Description of Artificial Sequence: Synthetic oligonucleotide
  Sense strand starting at position 2092 of SEQ ID NO: 212
gggccagucucgguugagu

SEQ ID NO: 19719 - RNA, 19 nt, Artificial Sequence
  Description of Artificial Sequence: Synthetic oligonucleotide
  Antisense strand to SEQ ID NO: 19718
acucaaccgagacuggccc

SEQ ID NO: 19720 - RNA, 19 nt, Artificial Sequence
  Description of Artificial Sequence: Synthetic oligonucleotide
  Sense strand starting at position 1731 of SEQ ID NO: 212
gucucuccggacuguuuau

SEQ ID NO: 19721 - RNA, 19 nt, Artificial Sequence
  Description of Artificial Sequence: Synthetic oligonucleotide
  Antisense strand to SEQ ID NO: 19720
auaaacaguccggagagac

SEQ ID NO: 19722 - RNA, 19 nt, Artificial Sequence
  Description of Artificial Sequence: Synthetic oligonucleotide
  Sense strand starting at position 1728 of SEQ ID NO: 212
gaagucucuccggacuguu

SEQ ID NO: 19723 - RNA, 19 nt, Artificial Sequence
  Description of Artificial Sequence: Synthetic oligonucleotide
  Antisense strand to SEQ ID NO: 19722
aacaguccggagagacuuc

SEQ ID NO: 19724 - RNA, 19 nt, Artificial Sequence
  Description of Artificial Sequence: Synthetic oligonucleotide
  Sense strand starting at position 1727 of SEQ ID NO: 212
ggaagucucuccggacugu

SEQ ID NO: 19725 - RNA, 19 nt, Artificial Sequence
  Description of Artificial Sequence: Synthetic oligonucleotide
  Antisense strand to SEQ ID NO: 19724
acaguccggagagacuucc

SEQ ID NO: 19726 - RNA, 19 nt, Artificial Sequence
  Description of Artificial Sequence: Synthetic oligonucleotide
  Sense strand starting at position 1683 of SEQ ID NO: 212
ccuugaggaacccgagauu

SEQ ID NO: 19727 - RNA, 19 nt, Artificial Sequence
  Description of Artificial Sequence: Synthetic oligonucleotide
  Antisense strand to SEQ ID NO: 19726
aaucucggguuccucaagg

SEQ ID NO: 19728 - RNA, 19 nt, Artificial Sequence
  Description of Artificial Sequence: Synthetic oligonucleotide
  Sense strand starting at position 1675 of SEQ ID NO: 212
ucuugucuccuugaggaac

SEQ ID NO: 19729 - RNA, 19 nt, Artificial Sequence
  Description of Artificial Sequence: Synthetic oligonucleotide
  Antisense strand to SEQ ID NO: 19728
guuccucaaggagacaaga

SEQ ID NO: 19730 - RNA, 19 nt, Artificial Sequence
  Description of Artificial Sequence: Synthetic oligonucleotide
  Sense strand starting at position 1673 of SEQ ID NO: 212
agucuugucuccuugagga

SEQ ID NO: 19731 - RNA, 19 nt, Artificial Sequence
  Description of Artificial Sequence: Synthetic oligonucleotide
  Antisense strand to SEQ ID NO: 19730
uccucaaggagacaagacu

SEQ ID NO: 19732 - RNA, 19 nt, Artificial Sequence
  Description of Artificial Sequence: Synthetic oligonucleotide
  Sense strand starting at position 1578 of SEQ ID NO: 212
agggaauuauccuggaauc

SEQ ID NO: 19733 - RNA, 19 nt, Artificial Sequence
  Description of Artificial Sequence: Synthetic oligonucleotide
  Antisense strand to SEQ ID NO: 19732
gauuccaggauaauucccu

SEQ ID NO: 19734 - RNA, 19 nt, Artificial Sequence
  Description of Artificial Sequence: Synthetic oligonucleotide
  Sense strand starting at position 1539 of SEQ ID NO: 212
gguacaacauauuacagaa

SEQ ID NO: 19735 - RNA, 19 nt, Artificial Sequence
  Description of Artificial Sequence: Synthetic oligonucleotide
  Antisense strand to SEQ ID NO: 19734
uucuguaauauguuguacc

SEQ ID NO: 19736 - RNA, 19 nt, Artificial Sequence
  Description of Artificial Sequence: Synthetic oligonucleotide
  Sense strand starting at position 1527 of SEQ ID NO: 212
gcagauuuaucagguacaa

SEQ ID NO: 19737 - RNA, 19 nt, Artificial Sequence
  Description of Artificial Sequence: Synthetic oligonucleotide
  Antisense strand to SEQ ID NO: 19736
uuguaccugauaaaucugc

SEQ ID NO: 19738 - RNA, 19 nt, Artificial Sequence
  Description of Artificial Sequence: Synthetic oligonucleotide
  Sense strand starting at position 1472 of SEQ ID NO: 212
cagcuuuccugauggccau

SEQ ID NO: 19739 - RNA, 19 nt, Artificial Sequence
  Description of Artificial Sequence: Synthetic oligonucleotide
  Antisense strand to SEQ ID NO: 19738
auggccaucaggaaagcug

SEQ ID NO: 19740 - RNA, 19 nt, Artificial Sequence
  Description of Artificial Sequence: Synthetic oligonucleotide
  Sense strand starting at position 1324 of SEQ ID NO: 212
ggaagacgguaccuaguua

SEQ ID NO: 19741 - RNA, 19 nt, Artificial Sequence
  Description of Artificial Sequence: Synthetic oligonucleotide
  Antisense strand to SEQ ID NO: 19740
uaacuagguaccgucuucc

SEQ ID NO: 19742 - RNA, 19 nt, Artificial Sequence
  Description of Artificial Sequence: Synthetic oligonucleotide
  Sense strand starting at position 1304 of SEQ ID NO: 212
gcuaucauugagcaaaguc

SEQ ID NO: 19743 - RNA, 19 nt, Artificial Sequence
  Description of Artificial Sequence: Synthetic oligonucleotide
  Antisense strand to SEQ ID NO: 19742
gacuuugcucaaugauagc

SEQ ID NO: 19744 - RNA, 19 nt, Artificial Sequence
  Description of Artificial Sequence: Synthetic oligonucleotide
  Sense strand starting at position 1303 of SEQ ID NO: 212
agcuaucauugagcaaagu

SEQ ID NO: 19745 - RNA, 19 nt, Artificial Sequence
  Description of Artificial Sequence: Synthetic oligonucleotide
  Antisense strand to SEQ ID NO: 19744
acuuugcucaaugauagcu

SEQ ID NO: 19746 - RNA, 19 nt, Artificial Sequence
  Description of Artificial Sequence: Synthetic oligonucleotide
  Sense strand starting at position 1300 of SEQ ID NO: 212
cccagcuaucauugagcaa

SEQ ID NO: 19747 - RNA, 19 nt, Artificial Sequence
  Description of Artificial Sequence: Synthetic oligonucleotide
  Antisense strand to SEQ ID NO: 19746
uugcucaaugauagcuggg

SEQ ID NO: 19748 - RNA, 19 nt, Artificial Sequence
  Description of Artificial Sequence: Synthetic oligonucleotide
  Sense strand starting at position 883 of SEQ ID NO: 212
cguccucaccuagggaauu

SEQ ID NO: 19749 - RNA, 19 nt, Artificial Sequence
  Description of Artificial Sequence: Synthetic oligonucleotide
  Antisense strand to SEQ ID NO: 19748
aauucccuaggugaggacg

SEQ ID NO: 19750 - RNA, 19 nt, Artificial Sequence
  Description of Artificial Sequence: Synthetic oligonucleotide
  Sense strand starting at position 370 of SEQ ID NO: 212
cagaguagucuugaacuuc

SEQ ID NO: 19751 - RNA, 19 nt, Artificial Sequence
  Description of Artificial Sequence: Synthetic oligonucleotide
  Antisense strand to SEQ ID NO: 19750
gaaguucaagacuacucug

SEQ ID NO: 19752 - RNA, 19 nt, Artificial Sequence
  Description of Artificial Sequence: Synthetic oligonucleotide
  Sense strand starting at position 357 of SEQ ID NO: 212
augccauguugcccagagu

SEQ ID NO: 19753 - RNA, 19 nt, Artificial Sequence
  Description of Artificial Sequence: Synthetic oligonucleotide
  Antisense strand to SEQ ID NO: 19752
acucugggcaacauggcau

SEQ ID NO: 19754 - RNA, 19 nt, Artificial Sequence
  Description of Artificial Sequence: Synthetic oligonucleotide
  Sense strand starting at position 3440 of SEQ ID NO: 213
gaguuaggugcagaaaucu

SEQ ID NO: 19755 - RNA, 19 nt, Artificial Sequence
  Description of Artificial Sequence: Synthetic oligonucleotide
  Antisense strand to SEQ ID NO: 19754
agauuucugcaccuaacuc

SEQ ID NO: 19756 - RNA, 19 nt, Artificial Sequence
  Description of Artificial Sequence: Synthetic oligonucleotide
  Sense strand starting at position 3438 of SEQ ID NO: 213
uugaguuaggugcagaaau

SEQ ID NO: 19757 - RNA, 19 nt, Artificial Sequence
  Description of Artificial Sequence: Synthetic oligonucleotide
  Antisense strand to SEQ ID NO: 19756
auuucugcaccuaacucaa

SEQ ID NO: 19758 - RNA, 19 nt, Artificial Sequence
  Description of Artificial Sequence: Synthetic oligonucleotide
  Sense strand starting at position 3436 of SEQ ID NO: 213
acuugaguuaggugcagaa

SEQ ID NO: 19759 - RNA, 19 nt, Artificial Sequence
  Description of Artificial Sequence: Synthetic oligonucleotide
  Antisense strand to SEQ ID NO: 19758
uucugcaccuaacucaagu

SEQ ID NO: 19760 - RNA, 19 nt, Artificial Sequence
  Description of Artificial Sequence: Synthetic oligonucleotide
  Sense strand starting at position 3430 of SEQ ID NO: 213
ugaaucacuugaguuaggu

SEQ ID NO: 19761 - RNA, 19 nt, Artificial Sequence
  Description of Artificial Sequence: Synthetic oligonucleotide
  Antisense strand to SEQ ID NO: 19760
accuaacucaagugauuca

SEQ ID NO: 19762 - RNA, 19 nt, Artificial Sequence
  Description of Artificial Sequence: Synthetic oligonucleotide
  Sense strand starting at position 3428 of SEQ ID NO: 213
gcugaaucacuugaguuag

SEQ ID NO: 19763 - RNA, 19 nt, Artificial Sequence
  Description of Artificial Sequence: Synthetic oligonucleotide
  Antisense strand to SEQ ID NO: 19762
cuaacucaagugauucagc

SEQ ID NO: 19764 - RNA, 19 nt, Artificial Sequence
  Description of Artificial Sequence: Synthetic oligonucleotide
  Sense strand starting at position 3359 of SEQ ID NO: 213
cagacuuggcuuuguaucu

SEQ ID NO: 19765 - RNA, 19 nt, Artificial Sequence
  Description of Artificial Sequence: Synthetic oligonucleotide
  Antisense strand to SEQ ID NO: 19764
agauacaaagccaagucug

SEQ ID NO: 19766 - RNA, 19 nt, Artificial Sequence
  Description of Artificial Sequence: Synthetic oligonucleotide
  Sense strand starting at position 3291 of SEQ ID NO: 213
uugcaagauuaauacaaug

SEQ ID NO: 19767 - RNA, 19 nt, Artificial Sequence
  Description of Artificial Sequence: Synthetic oligonucleotide
  Antisense strand to SEQ ID NO: 19766
cauuguauuaaucuugcaa

SEQ ID NO: 19768 - RNA, 19 nt, Artificial Sequence
  Description of Artificial Sequence: Synthetic oligonucleotide
  Sense strand starting at position 3104 of SEQ ID NO: 213
gaugaaccauuugaaagua

SEQ ID NO: 19769 - RNA, 19 nt, Artificial Sequence
  Description of Artificial Sequence: Synthetic oligonucleotide
  Antisense strand to SEQ ID NO: 19768
uacuuucaaaugguucauc

SEQ ID NO: 19770 - RNA, 19 nt, Artificial Sequence
  Description of Artificial Sequence: Synthetic oligonucleotide
  Sense strand starting at position 2841 of SEQ ID NO: 213
ccaggaugauucuuaacuu

SEQ ID NO: 19771 - RNA, 19 nt, Artificial Sequence
  Description of Artificial Sequence: Synthetic oligonucleotide
  Antisense strand to SEQ ID NO: 19770
aaguuaagaaucauccugg

SEQ ID NO: 19772 - RNA, 19 nt, Artificial Sequence
  Description of Artificial Sequence: Synthetic oligonucleotide
  Sense strand starting at position 2838 of SEQ ID NO: 213
uuuccaggaugauucuuaa

SEQ ID NO: 19773 - RNA, 19 nt, Artificial Sequence
  Description of Artificial Sequence: Synthetic oligonucleotide
  Antisense strand to SEQ ID NO: 19772
uuaagaaucauccuggaaa

SEQ ID NO: 19774 - RNA, 19 nt, Artificial Sequence
  Description of Artificial Sequence: Synthetic oligonucleotide
  Sense strand starting at position 2819 of SEQ ID NO: 213
gauguaacaggauguaauu

SEQ ID NO: 19775 - RNA, 19 nt, Artificial Sequence
  Description of Artificial Sequence: Synthetic oligonucleotide
  Antisense strand to SEQ ID NO: 19774
aauuacauccuguuacauc

SEQ ID NO: 19776 - RNA, 19 nt, Artificial Sequence
  Description of Artificial Sequence: Synthetic oligonucleotide
  Sense strand starting at position 2816 of SEQ ID NO: 213
agggauguaacaggaugua

SEQ ID NO: 19777 - RNA, 19 nt, Artificial Sequence
  Description of Artificial Sequence: Synthetic oligonucleotide
  Antisense strand to SEQ ID NO: 19776
uacauccuguuacaucccu

SEQ ID NO: 19778 - RNA, 19 nt, Artificial Sequence
  Description of Artificial Sequence: Synthetic oligonucleotide
  Sense strand starting at position 2773 of SEQ ID NO: 213
gucuuuauccuagaaguag

SEQ ID NO: 19779 - RNA, 19 nt, Artificial Sequence
  Description of Artificial Sequence: Synthetic oligonucleotide
  Antisense strand to SEQ ID NO: 19778
cuacuucuaggauaaagac

SEQ ID NO: 19780 - RNA, 19 nt, Artificial Sequence
  Description of Artificial Sequence: Synthetic oligonucleotide
  Sense strand starting at position 2771 of SEQ ID NO: 213
uugucuuuauccuagaagu

SEQ ID NO: 19781 - RNA, 19 nt, Artificial Sequence
  Description of Artificial Sequence: Synthetic oligonucleotide
  Antisense strand to SEQ ID NO: 19780
acuucuaggauaaagacaa

SEQ ID NO: 19782 - RNA, 19 nt, Artificial Sequence
  Description of Artificial Sequence: Synthetic oligonucleotide
  Sense strand starting at position 2745 of SEQ ID NO: 213
ggccuuguagcccuuguua

SEQ ID NO: 19783 - RNA, 19 nt, Artificial Sequence
  Description of Artificial Sequence: Synthetic oligonucleotide
  Antisense strand to SEQ ID NO: 19782
uaacaagggcuacaaggcc

SEQ ID NO: 19784 - RNA, 19 nt, Artificial Sequence
  Description of Artificial Sequence: Synthetic oligonucleotide
  Sense strand starting at position 2694 of SEQ ID NO: 213
gauggugaugaguagggua

SEQ ID NO: 19785 - RNA, 19 nt, Artificial Sequence
  Description of Artificial Sequence: Synthetic oligonucleotide
  Antisense strand to SEQ ID NO: 19784
uacccuacucaucaccauc

SEQ ID NO: 19786 - RNA, 19 nt, Artificial Sequence
  Description of Artificial Sequence: Synthetic oligonucleotide
  Sense strand starting at position 2660 of SEQ ID NO: 213
gugguuaugugugguugga

SEQ ID NO: 19787 - RNA, 19 nt, Artificial Sequence
  Description of Artificial Sequence: Synthetic oligonucleotide
  Antisense strand to SEQ ID NO: 19786
uccaaccacacauaaccac

SEQ ID NO: 19788 - RNA, 19 nt, Artificial Sequence
  Description of Artificial Sequence: Synthetic oligonucleotide
  Sense strand starting at position 2649 of SEQ ID NO: 213
guaguuagggugugguuau

SEQ ID NO: 19789 - RNA, 19 nt, Artificial Sequence
  Description of Artificial Sequence: Synthetic oligonucleotide
  Antisense strand to SEQ ID NO: 19788
auaaccacacccuaacuac

SEQ ID NO: 19790 - RNA, 19 nt, Artificial Sequence
  Description of Artificial Sequence: Synthetic oligonucleotide
  Sense strand starting at position 2636 of SEQ ID NO: 213
cuuuccuucugguguaguu

SEQ ID NO: 19791 - RNA, 19 nt, Artificial Sequence
  Description of Artificial Sequence: Synthetic oligonucleotide
  Antisense strand to SEQ ID NO: 19790
aacuacaccagaaggaaag

SEQ ID NO: 19792 - RNA, 19 nt, Artificial Sequence
  Description of Artificial Sequence: Synthetic oligonucleotide
  Sense strand starting at position 2633 of SEQ ID NO: 213
agucuuuccuucuggugua

SEQ ID NO: 19793 - RNA, 19 nt, Artificial Sequence
  Description of Artificial Sequence: Synthetic oligonucleotide
  Antisense strand to SEQ ID NO: 19792
uacaccagaaggaaagacu

SEQ ID NO: 19794 - RNA, 19 nt, Artificial Sequence
  Description of Artificial Sequence: Synthetic oligonucleotide
  Sense strand starting at position 2630 of SEQ ID NO: 213
gggagucuuuccuucuggu

SEQ ID NO: 19795 - RNA, 19 nt, Artificial Sequence
  Description of Artificial Sequence: Synthetic oligonucleotide
  Antisense strand to SEQ ID NO: 19794
accagaaggaaagacuccc

SEQ ID NO: 19796 - RNA, 19 nt, Artificial Sequence
  Description of Artificial Sequence: Synthetic oligonucleotide
  Sense strand starting at position 2586 of SEQ ID NO: 213
uugguagcugcauguguaa

SEQ ID NO: 19797 - RNA, 19 nt, Artificial Sequence
  Description of Artificial Sequence: Synthetic oligonucleotide
  Antisense strand to SEQ ID NO: 19796
uuacacaugcagcuaccaa

SEQ ID NO: 19798 - RNA, 19 nt, Artificial Sequence
  Description of Artificial Sequence: Synthetic oligonucleotide
  Sense strand starting at position 2499 of SEQ ID NO: 213
agagaauauuuccgagauu

SEQ ID NO: 19799 - RNA, 19 nt, Artificial Sequence
  Description of Artificial Sequence: Synthetic oligonucleotide
  Antisense strand to SEQ ID NO: 19798
aaucucggaaauauucucu

SEQ ID NO: 19800 - RNA, 19 nt, Artificial Sequence
  Description of Artificial Sequence: Synthetic oligonucleotide
  Sense strand starting at position 2411 of SEQ ID NO: 213
aggugcuacgaugagauaa

SEQ ID NO: 19801 - RNA, 19 nt, Artificial Sequence
  Description of Artificial Sequence: Synthetic oligonucleotide
  Antisense strand to SEQ ID NO: 19800
uuaucucaucguagcaccu

SEQ ID NO: 19802 - RNA, 19 nt, Artificial Sequence
  Description of Artificial Sequence: Synthetic oligonucleotide
  Sense strand starting at position 2216 of SEQ ID NO: 213
gccaauagaucuuguagau

SEQ ID NO: 19803 - RNA, 19 nt, Artificial Sequence
  Description of Artificial Sequence: Synthetic oligonucleotide
  Antisense strand to SEQ ID NO: 19802
aucuacaagaucuauuggc

SEQ ID NO: 19804 - RNA, 19 nt, Artificial Sequence
  Description of Artificial Sequence: Synthetic oligonucleotide
  Sense strand starting at position 2191 of SEQ ID NO: 213
uugggauuauuagaucuau

SEQ ID NO: 19805 - RNA, 19 nt, Artificial Sequence
  Description of Artificial Sequence: Synthetic oligonucleotide
  Antisense strand to SEQ ID NO: 19804
auagaucuaauaaucccaa

SEQ ID NO: 19806 - RNA, 19 nt, Artificial Sequence
  Description of Artificial Sequence: Synthetic oligonucleotide
  Sense strand starting at position 2181 of SEQ ID NO: 213
gcaguugggauugggauua

SEQ ID NO: 19807 - RNA, 19 nt, Artificial Sequence
  Description of Artificial Sequence: Synthetic oligonucleotide
  Antisense strand to SEQ ID NO: 19806
uaaucccaaucccaacugc

SEQ ID NO: 19808 - RNA, 19 nt, Artificial Sequence
  Description of Artificial Sequence: Synthetic oligonucleotide
  Sense strand starting at position 2134 of SEQ ID NO: 213
gucagaaagucugaaccca

SEQ ID NO: 19809 - RNA, 19 nt, Artificial Sequence
  Description of Artificial Sequence: Synthetic oligonucleotide
  Antisense strand to SEQ ID NO: 19808
uggguucagacuuucugac

SEQ ID NO: 19810 - RNA, 19 nt, Artificial Sequence
  Description of Artificial Sequence: Synthetic oligonucleotide
  Sense strand starting at position 2123 of SEQ ID NO: 213
cugguaagguggucagaaa

SEQ ID NO: 19811 - RNA, 19 nt, Artificial Sequence
  Description of Artificial Sequence: Synthetic oligonucleotide
  Antisense strand to SEQ ID NO: 19810
uuucugaccaccuuaccag

SEQ ID NO: 19812 - RNA, 19 nt, Artificial Sequence
  Description of Artificial Sequence: Synthetic oligonucleotide
  Sense strand starting at position 1891 of SEQ ID NO: 213
cccuguguucccugugaag

SEQ ID NO: 19813 - RNA, 19 nt, Artificial Sequence
  Description of Artificial Sequence: Synthetic oligonucleotide
  Antisense strand to SEQ ID NO: 19812
cuucacagggaacacaggg

SEQ ID NO: 19814 - RNA, 19 nt, Artificial Sequence
  Description of Artificial Sequence: Synthetic oligonucleotide
  Sense strand starting at position 802 of SEQ ID NO: 213
acagccucauaguguaauu

SEQ ID NO: 19815 - RNA, 19 nt, Artificial Sequence
  Description of Artificial Sequence: Synthetic oligonucleotide
  Antisense strand to SEQ ID NO: 19814
aauuacacuaugaggcugu

SEQ ID NO: 19816 - RNA, 19 nt, Artificial Sequence
  Description of Artificial Sequence: Synthetic oligonucleotide
  Sense strand starting at position 783 of SEQ ID NO: 213
ucagcaguccauuaagaac

SEQ ID NO: 19817 - RNA, 19 nt, Artificial Sequence
  Description of Artificial Sequence: Synthetic oligonucleotide
  Antisense strand to SEQ ID NO: 19816
guucuuaauggacugcuga

SEQ ID NO: 19818 - RNA, 19 nt, Artificial Sequence
  Description of Artificial Sequence: Synthetic oligonucleotide
  Sense strand starting at position 731 of SEQ ID NO: 213
ccgacuagucuacaaguau

SEQ ID NO: 19819 - RNA, 19 nt, Artificial Sequence
  Description of Artificial Sequence: Synthetic oligonucleotide
  Antisense strand to SEQ ID NO: 19818
auacuuguagacuagucgg

SEQ ID NO: 19820 - RNA, 19 nt, Artificial Sequence
  Description of Artificial Sequence: Synthetic oligonucleotide
  Sense strand starting at position 729 of SEQ ID NO: 213
ucccgacuagucuacaagu

SEQ ID NO: 19821 - RNA, 19 nt, Artificial Sequence
  Description of Artificial Sequence: Synthetic oligonucleotide
  Antisense strand to SEQ ID NO: 19820
acuuguagacuagucggga

SEQ ID NO: 19822 - RNA, 19 nt, Artificial Sequence
  Description of Artificial Sequence: Synthetic oligonucleotide
  Sense strand starting at position 724 of SEQ ID NO: 213
gcccuucccgacuagucua

SEQ ID NO: 19823 - RNA, 19 nt, Artificial Sequence
  Description of Artificial Sequence: Synthetic oligonucleotide
  Antisense strand to SEQ ID NO: 19822
uagacuagucgggaagggc

SEQ ID NO: 19824 - RNA, 19 nt, Artificial Sequence
  Description of Artificial Sequence: Synthetic oligonucleotide
  Sense strand starting at position 680 of SEQ ID NO: 213
ugugcuuuccuuuaaagau

SEQ ID NO: 19825 - RNA, 19 nt, Artificial Sequence
  Description of Artificial Sequence: Synthetic oligonucleotide
  Antisense strand to SEQ ID NO: 19824
aucuuuaaaggaaagcaca

SEQ ID NO: 19826 - RNA, 19 nt, Artificial Sequence
  Description of Artificial Sequence: Synthetic oligonucleotide
  Sense strand starting at position 616 of SEQ ID NO: 213
cuaugucuuugcucagguu

SEQ ID NO: 19827 - RNA, 19 nt, Artificial Sequence
  Description of Artificial Sequence: Synthetic oligonucleotide
  Antisense strand to SEQ ID NO: 19826
aaccugagcaaagacauag

SEQ ID NO: 19828 - RNA, 19 nt, Artificial Sequence
  Description of Artificial Sequence: Synthetic oligonucleotide
  Sense strand starting at position 612 of SEQ ID NO: 213
gcgucuaugucuuugcuca

SEQ ID NO: 19829 - RNA, 19 nt, Artificial Sequence
  Description of Artificial Sequence: Synthetic oligonucleotide
  Antisense strand to SEQ ID NO: 19828
ugagcaaagacauagacgc

SEQ ID NO: 19830 - RNA, 19 nt, Artificial Sequence
  Description of Artificial Sequence: Synthetic oligonucleotide
  Sense strand starting at position 581 of SEQ ID NO: 213
ugucuuguccauuaacuca

SEQ ID NO: 19831 - RNA, 19 nt, Artificial Sequence
  Description of Artificial Sequence: Synthetic oligonucleotide
  Antisense strand to SEQ ID NO: 19830
ugaguuaauggacaagaca

SEQ ID NO: 19832 - RNA, 19 nt, Artificial Sequence
  Description of Artificial Sequence: Synthetic oligonucleotide
  Sense strand starting at position 555 of SEQ ID NO: 213
ucaaaugugucccugccua

SEQ ID NO: 19833 - RNA, 19 nt, Artificial Sequence
  Description of Artificial Sequence: Synthetic oligonucleotide
  Antisense strand to SEQ ID NO: 19832
uaggcagggacacauuuga

SEQ ID NO: 19834 - RNA, 19 nt, Artificial Sequence
  Description of Artificial Sequence: Synthetic oligonucleotide
  Sense strand starting at position 873 of SEQ ID NO: 214
guugcagugagacauaaug

SEQ ID NO: 19835 - RNA, 19 nt, Artificial Sequence
  Description of Artificial Sequence: Synthetic oligonucleotide
  Antisense strand to SEQ ID NO: 19834
cauuaugucucacugcaac

SEQ ID NO: 19836 - RNA, 19 nt, Artificial Sequence
  Description of Artificial Sequence: Synthetic oligonucleotide
  Sense strand starting at position 1318 of SEQ ID NO: 214
agaagaagaguuuguccuu

SEQ ID NO: 19837 - RNA, 19 nt, Artificial Sequence
  Description of Artificial Sequence: Synthetic oligonucleotide
  Antisense strand to SEQ ID NO: 19836
aaggacaaacucuucuucu

SEQ ID NO: 19838 - RNA, 19 nt, Artificial Sequence
  Description of Artificial Sequence: Synthetic oligonucleotide
  Sense strand starting at position 1321 of SEQ ID NO: 214
agaagaguuuguccuuugu

SEQ ID NO: 19839 - RNA, 19 nt, Artificial Sequence
  Description of Artificial Sequence: Synthetic oligonucleotide
  Antisense strand to SEQ ID NO: 19838
acaaaggacaaacucuucu

SEQ ID NO: 19840 - RNA, 19 nt, Artificial Sequence
  Description of Artificial Sequence: Synthetic oligonucleotide
  Sense strand starting at position 1325 of SEQ ID NO: 214
gaguuuguccuuuguccag

SEQ ID NO: 19841 - RNA, 19 nt, Artificial Sequence
  Description of Artificial Sequence: Synthetic oligonucleotide
  Antisense strand to SEQ ID NO: 19840
cuggacaaaggacaaacuc

SEQ ID NO: 19842 - RNA, 19 nt, Artificial Sequence
  Description of Artificial Sequence: Synthetic oligonucleotide
  Sense strand starting at position 1331 of SEQ ID NO: 214
guccuuuguccaguuugca

SEQ ID NO: 19843 - RNA, 19 nt, Artificial Sequence
  Description of Artificial Sequence: Synthetic oligonucleotide
  Antisense strand to SEQ ID NO: 19842
ugcaaacuggacaaaggac

SEQ ID NO: 19844 - RNA, 19 nt, Artificial Sequence
  Description of Artificial Sequence: Synthetic oligonucleotide
  Sense strand starting at position 1359 of SEQ ID NO: 214
gggaacauguuccugagca

SEQ ID NO: 19845 - RNA, 19 nt, Artificial Sequence
  Description of Artificial Sequence: Synthetic oligonucleotide
  Antisense strand to SEQ ID NO: 19844
ugcucaggaacauguuccc

SEQ ID NO: 19846 - RNA, 19 nt, Artificial Sequence
  Description of Artificial Sequence: Synthetic oligonucleotide
  Sense strand starting at position 1361 of SEQ ID NO: 214
gaacauguuccugagcauu

SEQ ID NO: 19847 - RNA, 19 nt, Artificial Sequence
  Description of Artificial Sequence: Synthetic oligonucleotide
  Antisense strand to SEQ ID NO: 19846
aaugcucaggaacauguuc

SEQ ID NO: 19848 - RNA, 19 nt, Artificial Sequence
  Description of Artificial Sequence: Synthetic oligonucleotide
  Sense strand starting at position 1363 of SEQ ID NO: 214
acauguuccugagcauugu

SEQ ID NO: 19849 - RNA, 19 nt, Artificial Sequence
  Description of Artificial Sequence: Synthetic oligonucleotide
  Antisense strand to SEQ ID NO: 19848
acaaugcucaggaacaugu

SEQ ID NO: 19850 - RNA, 19 nt, Artificial Sequence
  Description of Artificial Sequence: Synthetic oligonucleotide
  Sense strand starting at position 1364 of SEQ ID NO: 214
cauguuccugagcauuguu

SEQ ID NO: 19851 - RNA, 19 nt, Artificial Sequence
  Description of Artificial Sequence: Synthetic oligonucleotide
  Antisense strand to SEQ ID NO: 19850
aacaaugcucaggaacaug

SEQ ID NO: 19852 - RNA, 19 nt, Artificial Sequence
  Description of Artificial Sequence: Synthetic oligonucleotide
  Sense strand starting at position 1369 of SEQ ID NO: 214
uccugagcauuguuggcaa

SEQ ID NO: 19853 - RNA, 19 nt, Artificial Sequence
  Description of Artificial Sequence: Synthetic oligonucleotide
  Antisense strand to SEQ ID NO: 19852
uugccaacaaugcucagga

SEQ ID NO: 19854 - RNA, 19 nt, Artificial Sequence
  Description of Artificial Sequence: Synthetic oligonucleotide
  Sense strand starting at position 1391 of SEQ ID NO: 214
ggugaacccucuuaggaga

SEQ ID NO: 19855 - RNA, 19 nt, Artificial Sequence
  Description of Artificial Sequence: Synthetic oligonucleotide
  Antisense strand to SEQ ID NO: 19854
ucuccuaagaggguucacc

SEQ ID NO: 19856 - RNA, 19 nt, Artificial Sequence
  Description of Artificial Sequence: Synthetic oligonucleotide
  Sense strand starting at position 1431 of SEQ ID NO: 214
guauaaaguacguaucuuu

SEQ ID NO: 19857 - RNA, 19 nt, Artificial Sequence
  Description of Artificial Sequence: Synthetic oligonucleotide
  Antisense strand to SEQ ID NO: 19856
aaagauacguacuuuauac

SEQ ID NO: 19858 - RNA, 19 nt, Artificial Sequence
  Description of Artificial Sequence: Synthetic oligonucleotide
  Sense strand starting at position 1875 of SEQ ID NO: 214
gcgcguuaucguagaccca

SEQ ID NO: 19859 - RNA, 19 nt, Artificial Sequence
  Description of Artificial Sequence: Synthetic oligonucleotide
  Antisense strand to SEQ ID NO: 19858
ugggucuacgauaacgcgc

SEQ ID NO: 19860 - RNA, 19 nt, Artificial Sequence
  Description of Artificial Sequence: Synthetic oligonucleotide
  Sense strand starting at position 1917 of SEQ ID NO: 214
gagcuuuggcacugucaau

SEQ ID NO: 19861 - RNA, 19 nt, Artificial Sequence
  Description of Artificial Sequence: Synthetic oligonucleotide
  Antisense strand to SEQ ID NO: 19860
auugacagugccaaagcuc

SEQ ID NO: 19862 - RNA, 19 nt, Artificial Sequence
  Description of Artificial Sequence: Synthetic oligonucleotide
  Sense strand starting at position 2032 of SEQ ID NO: 214
acuccugauccgcgggaaa

SEQ ID NO: 19863 - RNA, 19 nt, Artificial Sequence
  Description of Artificial Sequence: Synthetic oligonucleotide
  Antisense strand to SEQ ID NO: 19862
uuucccgcggaucaggagu

SEQ ID NO: 19864 - RNA, 19 nt, Artificial Sequence
  Description of Artificial Sequence: Synthetic oligonucleotide
  Sense strand starting at position 2116 of SEQ ID NO: 214
agcgaaagaugugucaacu

SEQ ID NO: 19865 - RNA, 19 nt, Artificial Sequence
  Description of Artificial Sequence: Synthetic oligonucleotide
  Antisense strand to SEQ ID NO: 19864
aguugacacaucuuucgcu

SEQ ID NO: 19866 - RNA, 19 nt, Artificial Sequence
  Description of Artificial Sequence: Synthetic oligonucleotide
  Sense strand starting at position 2177 of SEQ ID NO: 214
acauuaagccagcaacagu

SEQ ID NO: 19867 - RNA, 19 nt, Artificial Sequence
  Description of Artificial Sequence: Synthetic oligonucleotide
  Antisense strand to SEQ ID NO: 19866
acuguugcuggcuuaaugu

SEQ ID NO: 19868 - RNA, 19 nt, Artificial Sequence
  Description of Artificial Sequence: Synthetic oligonucleotide
  Sense strand starting at position 2185 of SEQ ID NO: 214
ccagcaacaguguguugaa

SEQ ID NO: 19869 - RNA, 19 nt, Artificial Sequence
  Description of Artificial Sequence: Synthetic oligonucleotide
  Antisense strand to SEQ ID NO: 19868
uucaacacacuguugcugg

SEQ ID NO: 19870 - RNA, 19 nt, Artificial Sequence
  Description of Artificial Sequence: Synthetic oligonucleotide
  Sense strand starting at position 2186 of SEQ ID NO: 214
cagcaacaguguguugaaa

SEQ ID NO: 19871 - RNA, 19 nt, Artificial Sequence
  Description of Artificial Sequence: Synthetic oligonucleotide
  Antisense strand to SEQ ID NO: 19870
uuucaacacacuguugcug

SEQ ID NO: 19872 - RNA, 19 nt, Artificial Sequence
  Description of Artificial Sequence: Synthetic oligonucleotide
  Sense strand starting at position 2274 of SEQ ID NO: 214
uucuuuguauuagugauac

SEQ ID NO: 19873 - RNA, 19 nt, Artificial Sequence
  Description of Artificial Sequence: Synthetic oligonucleotide
  Antisense strand to SEQ ID NO: 19872
guaucacuaauacaaagaa

SEQ ID NO: 19874 - RNA, 19 nt, Artificial Sequence
  Description of Artificial Sequence: Synthetic oligonucleotide
  Sense strand starting at position 2292 of SEQ ID NO: 214
ccacucugcggcuauuuaa

SEQ ID NO: 19875 - RNA, 19 nt, Artificial Sequence
  Description of Artificial Sequence: Synthetic oligonucleotide
  Antisense strand to SEQ ID NO: 19874
uuaaauagccgcagagugg

SEQ ID NO: 19876 - RNA, 19 nt, Artificial Sequence
  Description of Artificial Sequence: Synthetic oligonucleotide
  Sense strand starting at position 2299 of SEQ ID NO: 214
gcggcuauuuaacuucgaa

SEQ ID NO: 19877 - RNA, 19 nt, Artificial Sequence
  Description of Artificial Sequence: Synthetic oligonucleotide
  Antisense strand to SEQ ID NO: 19876
uucgaaguuaaauagccgc

SEQ ID NO: 19878 - RNA, 19 nt, Artificial Sequence
  Description of Artificial Sequence: Synthetic oligonucleotide
  Sense strand starting at position 2414 of SEQ ID NO: 214
ugucaaagaugcuugcuua

SEQ ID NO: 19879 - RNA, 19 nt, Artificial Sequence
  Description of Artificial Sequence: Synthetic oligonucleotide
  Antisense strand to SEQ ID NO: 19878
uaagcaagcaucuuugaca

SEQ ID NO: 19880 - RNA, 19 nt, Artificial Sequence
  Description of Artificial Sequence: Synthetic oligonucleotide
  Sense strand starting at position 2415 of SEQ ID NO: 214
gucaaagaugcuugcuuac

SEQ ID NO: 19881 - RNA, 19 nt, Artificial Sequence
  Description of Artificial Sequence: Synthetic oligonucleotide
  Antisense strand to SEQ ID NO: 19880
guaagcaagcaucuuugac

SEQ ID NO: 19882 - RNA, 19 nt, Artificial Sequence
  Description of Artificial Sequence: Synthetic oligonucleotide
  Sense strand starting at position 2981 of SEQ ID NO: 214
acaauaacucugugaguua

SEQ ID NO: 19883 - RNA, 19 nt, Artificial Sequence
  Description of Artificial Sequence: Synthetic oligonucleotide
  Antisense strand to SEQ ID NO: 19882
uaacucacagaguuauugu

SEQ ID NO: 19884 - RNA, 19 nt, Artificial Sequence
  Description of Artificial Sequence: Synthetic oligonucleotide
  Sense strand starting at position 3507 of SEQ ID NO: 214
agguaagcucaacaaguga

SEQ ID NO: 19885 - RNA, 19 nt, Artificial Sequence
  Description of Artificial Sequence: Synthetic oligonucleotide
  Antisense strand to SEQ ID NO: 19884
ucacuuguugagcuuaccu

SEQ ID NO: 19886 - RNA, 19 nt, Artificial Sequence
  Description of Artificial Sequence: Synthetic oligonucleotide
  Sense strand starting at position 3621 of SEQ ID NO: 214
cagcaaguuauguagaggu

SEQ ID NO: 19887 - RNA, 19 nt, Artificial Sequence
  Description of Artificial Sequence: Synthetic oligonucleotide
  Antisense strand to SEQ ID NO: 19886
accucuacauaacuugcug

SEQ ID NO: 19888 - RNA, 19 nt, Artificial Sequence
  Description of Artificial Sequence: Synthetic oligonucleotide
  Sense strand starting at position 3625 of SEQ ID NO: 214
aaguuauguagagguuggu

SEQ ID NO: 19889 - RNA, 19 nt, Artificial Sequence
  Description of Artificial Sequence: Synthetic oligonucleotide
  Antisense strand to SEQ ID NO: 19888
accaaccucuacauaacuu

SEQ ID NO: 19890 - RNA, 19 nt, Artificial Sequence
  Description of Artificial Sequence: Synthetic oligonucleotide
  Sense strand starting at position 3632 of SEQ ID NO: 214
guagagguugguuaggaga

SEQ ID NO: 19891 - RNA, 19 nt, Artificial Sequence
  Description of Artificial Sequence: Synthetic oligonucleotide
  Antisense strand to SEQ ID NO: 19890
ucuccuaaccaaccucuac

SEQ ID NO: 19892 - RNA, 19 nt, Artificial Sequence
  Description of Artificial Sequence: Synthetic oligonucleotide
  Sense strand starting at position 3643 of SEQ ID NO: 214
uuaggagaguuucuaugua

SEQ ID NO: 19893 - RNA, 19 nt, Artificial Sequence
  Description of Artificial Sequence: Synthetic oligonucleotide
  Antisense strand to SEQ ID NO: 19892
uacauagaaacucuccuaa

SEQ ID NO: 19894 - RNA, 19 nt, Artificial Sequence
  Description of Artificial Sequence: Synthetic oligonucleotide
  Sense strand starting at position 3647 of SEQ ID NO: 214
gagaguuucuauguaaaua

SEQ ID NO: 19895 - RNA, 19 nt, Artificial Sequence
  Description of Artificial Sequence: Synthetic oligonucleotide
  Antisense strand to SEQ ID NO: 19894
uauuuacauagaaacucuc

SEQ ID NO: 19896 - RNA, 19 nt, Artificial Sequence
  Description of Artificial Sequence: Synthetic oligonucleotide
  Sense strand starting at position 3659 of SEQ ID NO: 214
guaaauauaucuuugugcu

SEQ ID NO: 19897 - RNA, 19 nt, Artificial Sequence
  Description of Artificial Sequence: Synthetic oligonucleotide
  Antisense strand to SEQ ID NO: 19896
agcacaaagauauauuuac

SEQ ID NO: 19898 - RNA, 19 nt, Artificial Sequence
  Description of Artificial Sequence: Synthetic oligonucleotide
  Sense strand starting at position 3665 of SEQ ID NO: 214
auaucuuugugcuccugga

SEQ ID NO: 19899 - RNA, 19 nt, Artificial Sequence
  Description of Artificial Sequence: Synthetic oligonucleotide
  Antisense strand to SEQ ID NO: 19898
uccaggagcacaaagauau

SEQ ID NO: 19900 - RNA, 19 nt, Artificial Sequence
  Description of Artificial Sequence: Synthetic oligonucleotide
  Sense strand starting at position 3669 of SEQ ID NO: 214
cuuugugcuccuggaagac

SEQ ID NO: 19901 - RNA, 19 nt, Artificial Sequence
  Description of Artificial Sequence: Synthetic oligonucleotide
  Antisense strand to SEQ ID NO: 19900
gucuuccaggagcacaaag

SEQ ID NO: 19902 - RNA, 19 nt, Artificial Sequence
  Description of Artificial Sequence: Synthetic oligonucleotide
  Sense strand starting at position 3673 of SEQ ID NO: 214
gugcuccuggaagacuaua

SEQ ID NO: 19903 - RNA, 19 nt, Artificial Sequence
  Description of Artificial Sequence: Synthetic oligonucleotide
  Antisense strand to SEQ ID NO: 19902
uauagucuuccaggagcac

SEQ ID NO: 19904 - RNA, 19 nt, Artificial Sequence
  Description of Artificial Sequence: Synthetic oligonucleotide
  Sense strand starting at position 3681 of SEQ ID NO: 214
ggaagacuauagcugugau

SEQ ID NO: 19905 - RNA, 19 nt, Artificial Sequence
  Description of Artificial Sequence: Synthetic oligonucleotide
  Antisense strand to SEQ ID NO: 19904
aucacagcuauagucuucc

SEQ ID NO: 19906 - RNA, 19 nt, Artificial Sequence
  Description of Artificial Sequence: Synthetic oligonucleotide
  Sense strand starting at position 3684 of SEQ ID NO: 214
agacuauagcugugauaga

SEQ ID NO: 19907 - RNA, 19 nt, Artificial Sequence
  Description of Artificial Sequence: Synthetic oligonucleotide
  Antisense strand to SEQ ID NO: 19906
ucuaucacagcuauagucu

SEQ ID NO: 19908 - RNA, 19 nt, Artificial Sequence
  Description of Artificial Sequence: Synthetic oligonucleotide
  Sense strand starting at position 3709 of SEQ ID NO: 214
augugaaaccgugggucaa

SEQ ID NO: 19909 - RNA, 19 nt, Artificial Sequence
  Description of Artificial Sequence: Synthetic oligonucleotide
  Antisense strand to SEQ ID NO: 19908
uugacccacgguuucacau

SEQ ID NO: 19910 - RNA, 19 nt, Artificial Sequence
  Description of Artificial Sequence: Synthetic oligonucleotide
  Sense strand starting at position 3710 of SEQ ID NO: 214
ugugaaaccgugggucaaa

SEQ ID NO: 19911 - RNA, 19 nt, Artificial Sequence
  Description of Artificial Sequence: Synthetic oligonucleotide
  Antisense strand to SEQ ID NO: 19910
uuugacccacgguuucaca

SEQ ID NO: 19912 - RNA, 19 nt, Artificial Sequence
  Description of Artificial Sequence: Synthetic oligonucleotide
  Sense strand starting at position 3713 of SEQ ID NO: 214
gaaaccgugggucaaagau

SEQ ID NO: 19913 - RNA, 19 nt, Artificial Sequence
  Description of Artificial Sequence: Synthetic oligonucleotide
  Antisense strand to SEQ ID NO: 19912
aucuuugacccacgguuuc

SEQ ID NO: 19914 - RNA, 19 nt, Artificial Sequence
  Description of Artificial Sequence: Synthetic oligonucleotide
  Sense strand starting at position 3981 of SEQ ID NO: 216
uggauuaggucuuccuguu

SEQ ID NO: 19915 - RNA, 19 nt, Artificial Sequence
  Description of Artificial Sequence: Synthetic oligonucleotide
  Antisense strand to SEQ ID NO: 19914
aacaggaagaccuaaucca

SEQ ID NO: 19916 - RNA, 19 nt, Artificial Sequence
  Description of Artificial Sequence: Synthetic oligonucleotide
  Sense strand starting at position 3181 of SEQ ID NO: 216
uguacacucuagguaaaga

SEQ ID NO: 19917 - RNA, 19 nt, Artificial Sequence
  Description of Artificial Sequence: Synthetic oligonucleotide
  Antisense strand to SEQ ID NO: 19916
ucuuuaccuagaguguaca

SEQ ID NO: 19918 - RNA, 19 nt, Artificial Sequence
  Description of Artificial Sequence: Synthetic oligonucleotide
  Sense strand starting at position 3178 of SEQ ID NO: 216
acauguacacucuagguaa

SEQ ID NO: 19919 - RNA, 19 nt, Artificial Sequence
  Description of Artificial Sequence: Synthetic oligonucleotide
  Antisense strand to SEQ ID NO: 19918
uuaccuagaguguacaugu

SEQ ID NO: 19920 - RNA, 19 nt, Artificial Sequence
  Description of Artificial Sequence: Synthetic oligonucleotide
  Sense strand starting at position 2971 of SEQ ID NO: 216
gugaaacucuaauagauua

SEQ ID NO: 19921 - RNA, 19 nt, Artificial Sequence
  Description of Artificial Sequence: Synthetic oligonucleotide
  Antisense strand to SEQ ID NO: 19920
uaaucuauuagaguuucac

SEQ ID NO: 19922 - RNA, 19 nt, Artificial Sequence
  Description of Artificial Sequence: Synthetic oligonucleotide
  Sense strand starting at position 2921 of SEQ ID NO: 216
gcggaaggcucacuuaauc

SEQ ID NO: 19923 - RNA, 19 nt, Artificial Sequence
  Description of Artificial Sequence: Synthetic oligonucleotide
  Antisense strand to SEQ ID NO: 19922
gauuaagugagccuuccgc

SEQ ID NO: 19924 - RNA, 19 nt, Artificial Sequence
  Description of Artificial Sequence: Synthetic oligonucleotide
  Sense strand starting at position 2853 of SEQ ID NO: 216
ugcuguuuaaaguaguauu

SEQ ID NO: 19925 - RNA, 19 nt, Artificial Sequence
  Description of Artificial Sequence: Synthetic oligonucleotide
  Antisense strand to SEQ ID NO: 19924
aauacuacuuuaaacagca

SEQ ID NO: 19926 - RNA, 19 nt, Artificial Sequence
  Description of Artificial Sequence: Synthetic oligonucleotide
  Sense strand starting at position 2779 of SEQ ID NO: 216
cuuacuagacgucacauaa

SEQ ID NO: 19927 - RNA, 19 nt, Artificial Sequence
  Description of Artificial Sequence: Synthetic oligonucleotide
  Antisense strand to SEQ ID NO: 19926
uuaugugacgucuaguaag

SEQ ID NO: 19928 - RNA, 19 nt, Artificial Sequence
  Description of Artificial Sequence: Synthetic oligonucleotide
  Sense strand starting at position 2724 of SEQ ID NO: 216
uuugauguggcaggaaaga

SEQ ID NO: 19929 - RNA, 19 nt, Artificial Sequence
  Description of Artificial Sequence: Synthetic oligonucleotide
  Antisense strand to SEQ ID NO: 19928
ucuuuccugccacaucaaa

SEQ ID NO: 19930 - RNA, 19 nt, Artificial Sequence
  Description of Artificial Sequence: Synthetic oligonucleotide
  Sense strand starting at position 2621 of SEQ ID NO: 216
ugacaagcugcucgcaaau

SEQ ID NO: 19931 - RNA, 19 nt, Artificial Sequence
  Description of Artificial Sequence: Synthetic oligonucleotide
  Antisense strand to SEQ ID NO: 19930
auuugcgagcagcuuguca

SEQ ID NO: 19932 - RNA, 19 nt, Artificial Sequence
  Description of Artificial Sequence: Synthetic oligonucleotide
  Sense strand starting at position 2527 of SEQ ID NO: 216
aguaguuucccuuaggauc

SEQ ID NO: 19933 - RNA, 19 nt, Artificial Sequence
  Description of Artificial Sequence: Synthetic oligonucleotide
  Antisense strand to SEQ ID NO: 19932
gauccuaagggaaacuacu

SEQ ID NO: 19934 - RNA, 19 nt, Artificial Sequence
  Description of Artificial Sequence: Synthetic oligonucleotide
  Sense strand starting at position 2525 of SEQ ID NO: 216
acaguaguuucccuuagga

SEQ ID NO: 19935 - RNA, 19 nt, Artificial Sequence
  Description of Artificial Sequence: Synthetic oligonucleotide
  Antisense strand to SEQ ID NO: 19934
uccuaagggaaacuacugu

SEQ ID NO: 19936 - RNA, 19 nt, Artificial Sequence
  Description of Artificial Sequence: Synthetic oligonucleotide
  Sense strand starting at position 2492 of SEQ ID NO: 216
ggugcuaacauguaucaga

SEQ ID NO: 19937 - RNA, 19 nt, Artificial Sequence
  Description of Artificial Sequence: Synthetic oligonucleotide
  Antisense strand to SEQ ID NO: 19936
ucugauacauguuagcacc

SEQ ID NO: 19938 - RNA, 19 nt, Artificial Sequence
  Description of Artificial Sequence: Synthetic oligonucleotide
  Sense strand starting at position 2480 of SEQ ID NO: 216
agauacuuuagaggugcua

SEQ ID NO: 19939 - RNA, 19 nt, Artificial Sequence
  Description of Artificial Sequence: Synthetic oligonucleotide
  Antisense strand to SEQ ID NO: 19938
uagcaccucuaaaguaucu

SEQ ID NO: 19940 - RNA, 19 nt, Artificial Sequence
  Description of Artificial Sequence: Synthetic oligonucleotide
  Sense strand starting at position 2466 of SEQ ID NO: 216
ucuugaugguuugcagaua

SEQ ID NO: 19941 - RNA, 19 nt, Artificial Sequence
  Description of Artificial Sequence: Synthetic oligonucleotide
  Antisense strand to SEQ ID NO: 19940
uaucugcaaaccaucaaga

SEQ ID NO: 19942 - RNA, 19 nt, Artificial Sequence
  Description of Artificial Sequence: Synthetic oligonucleotide
  Sense strand starting at position 2426 of SEQ ID NO: 216
augagugcgugauuuagga

SEQ ID NO: 19943 - RNA, 19 nt, Artificial Sequence
  Description of Artificial Sequence: Synthetic oligonucleotide
  Antisense strand to SEQ ID NO: 19942
uccuaaaucacgcacucau

SEQ ID NO: 19944 - RNA, 19 nt, Artificial Sequence
  Description of Artificial Sequence: Synthetic oligonucleotide
  Sense strand starting at position 2422 of SEQ ID NO: 216
acugaugagugcgugauuu

SEQ ID NO: 19945 - RNA, 19 nt, Artificial Sequence
  Description of Artificial Sequence: Synthetic oligonucleotide
  Antisense strand to SEQ ID NO: 19944
aaaucacgcacucaucagu

SEQ ID NO: 19946 - RNA, 19 nt, Artificial Sequence
  Description of Artificial Sequence: Synthetic oligonucleotide
  Sense strand starting at position 2421 of SEQ ID NO: 216
uacugaugagugcgugauu

SEQ ID NO: 19947 - RNA, 19 nt, Artificial Sequence
  Description of Artificial Sequence: Synthetic oligonucleotide
  Antisense strand to SEQ ID NO: 19946
aaucacgcacucaucagua

SEQ ID NO: 19948 - RNA, 19 nt, Artificial Sequence
  Description of Artificial Sequence: Synthetic oligonucleotide
  Sense strand starting at position 2379 of SEQ ID NO: 216
gguuuaaaguggcaauuua

SEQ ID NO: 19949 - RNA, 19 nt, Artificial Sequence
  Description of Artificial Sequence: Synthetic oligonucleotide
  Antisense strand to SEQ ID NO: 19948
uaaauugccacuuuaaacc

SEQ ID NO: 19950 - RNA, 19 nt, Artificial Sequence
  Description of Artificial Sequence: Synthetic oligonucleotide
  Sense strand starting at position 2377 of SEQ ID NO: 216
uggguuuaaaguggcaauu

SEQ ID NO: 19951 - RNA, 19 nt, Artificial Sequence
  Description of Artificial Sequence: Synthetic oligonucleotide
  Antisense strand to SEQ ID NO: 19950
aauugccacuuuaaaccca

SEQ ID NO: 19952 - RNA, 19 nt, Artificial Sequence
  Description of Artificial Sequence: Synthetic oligonucleotide
  Sense strand starting at position 2376 of SEQ ID NO: 216
uuggguuuaaaguggcaau

SEQ ID NO: 19953 - RNA, 19 nt, Artificial Sequence
  Description of Artificial Sequence: Synthetic oligonucleotide
  Antisense strand to SEQ ID NO: 19952
auugccacuuuaaacccaa

SEQ ID NO: 19954 - RNA, 19 nt, Artificial Sequence
  Description of Artificial Sequence: Synthetic oligonucleotide
  Sense strand starting at position 2364 of SEQ ID NO: 216
gacauacucucuuuggguu

SEQ ID NO: 19955 - RNA, 19 nt, Artificial Sequence
  Description of Artificial Sequence: Synthetic oligonucleotide
  Antisense strand to SEQ ID NO: 19954
aacccaaagagaguauguc

SEQ ID NO: 19956 - RNA, 19 nt, Artificial Sequence
  Description of Artificial Sequence: Synthetic oligonucleotide
  Sense strand starting at position 2328 of SEQ ID NO: 216
gugcuugaucaauauuagg

SEQ ID NO: 19957 - RNA, 19 nt, Artificial Sequence
  Description of Artificial Sequence: Synthetic oligonucleotide
  Antisense strand to SEQ ID NO: 19956
ccuaauauugaucaagcac

SEQ ID NO: 19958 - RNA, 19 nt, Artificial Sequence
  Description of Artificial Sequence: Synthetic oligonucleotide
  Sense strand starting at position 2324 of SEQ ID NO: 216
gugagugcuugaucaauau

SEQ ID NO: 19959 - RNA, 19 nt, Artificial Sequence
  Description of Artificial Sequence: Synthetic oligonucleotide
  Antisense strand to SEQ ID NO: 19958
auauugaucaagcacucac

SEQ ID NO: 19960 - RNA, 19 nt, Artificial Sequence
  Description of Artificial Sequence: Synthetic oligonucleotide
  Sense strand starting at position 2322 of SEQ ID NO: 216
uagugagugcuugaucaau

SEQ ID NO: 19961 - RNA, 19 nt, Artificial Sequence
  Description of Artificial Sequence: Synthetic oligonucleotide
  Antisense strand to SEQ ID NO: 19960
auugaucaagcacucacua

SEQ ID NO: 19962 - RNA, 19 nt, Artificial Sequence
  Description of Artificial Sequence: Synthetic oligonucleotide
  Sense strand starting at position 2217 of SEQ ID NO: 216
cuaaucaguuagccuagua

SEQ ID NO: 19963 - RNA, 19 nt, Artificial Sequence
  Description of Artificial Sequence: Synthetic oligonucleotide
  Antisense strand to SEQ ID NO: 19962
uacuaggcuaacugauuag

SEQ ID NO: 19964 - RNA, 19 nt, Artificial Sequence
  Description of Artificial Sequence: Synthetic oligonucleotide
  Sense strand starting at position 2188 of SEQ ID NO: 216
aggcguuugcuguuaacac

SEQ ID NO: 19965 - RNA, 19 nt, Artificial Sequence
  Description of Artificial Sequence: Synthetic oligonucleotide
  Antisense strand to SEQ ID NO: 19964
guguuaacagcaaacgccu

SEQ ID NO: 19966 - RNA, 19 nt, Artificial Sequence
  Description of Artificial Sequence: Synthetic oligonucleotide
  Sense strand starting at position 2138 of SEQ ID NO: 216
gugauugccguguagagag

SEQ ID NO: 19967 - RNA, 19 nt, Artificial Sequence
  Description of Artificial Sequence: Synthetic oligonucleotide
  Antisense strand to SEQ ID NO: 19966
cucucuacacggcaaucac

SEQ ID NO: 19968 - RNA, 19 nt, Artificial Sequence
  Description of Artificial Sequence: Synthetic oligonucleotide
  Sense strand starting at position 2136 of SEQ ID NO: 216
gggugauugccguguagag

SEQ ID NO: 19969 - RNA, 19 nt, Artificial Sequence
  Description of Artificial Sequence: Synthetic oligonucleotide
  Antisense strand to SEQ ID NO: 19968
cucuacacggcaaucaccc

SEQ ID NO: 19970 - RNA, 19 nt, Artificial Sequence
  Description of Artificial Sequence: Synthetic oligonucleotide
  Sense strand starting at position 2135 of SEQ ID NO: 216
cgggugauugccguguaga

SEQ ID NO: 19971 - RNA, 19 nt, Artificial Sequence
  Description of Artificial Sequence: Synthetic oligonucleotide
  Antisense strand to SEQ ID NO: 19970
ucuacacggcaaucacccg

SEQ ID NO: 19972 - RNA, 19 nt, Artificial Sequence
  Description of Artificial Sequence: Synthetic oligonucleotide
  Sense strand starting at position 2023 of SEQ ID NO: 216
ugcccauuggucugaaccu

SEQ ID NO: 19973 - RNA, 19 nt, Artificial Sequence
  Description of Artificial Sequence: Synthetic oligonucleotide
  Antisense strand to SEQ ID NO: 19972
agguucagaccaaugggca

SEQ ID NO: 19974 - RNA, 19 nt, Artificial Sequence
  Description of Artificial Sequence: Synthetic oligonucleotide
  Sense strand starting at position 1569 of SEQ ID NO: 216
ccagcccucccuugaagaa

SEQ ID NO: 19975 - RNA, 19 nt, Artificial Sequence
  Description of Artificial Sequence: Synthetic oligonucleotide
  Antisense strand to SEQ ID NO: 19974
uucuucaagggagggcugg

SEQ ID NO: 19976 - RNA, 19 nt, Artificial Sequence
  Description of Artificial Sequence: Synthetic oligonucleotide
  Sense strand starting at position 877 of SEQ ID NO: 216
ucccaaagucccuguacau

SEQ ID NO: 19977 - RNA, 19 nt, Artificial Sequence
  Description of Artificial Sequence: Synthetic oligonucleotide
  Antisense strand to SEQ ID NO: 19976
auguacagggacuuuggga

SEQ ID NO: 19978 - RNA, 19 nt, Artificial Sequence
  Description of Artificial Sequence: Synthetic oligonucleotide
  Sense strand starting at position 799 of SEQ ID NO: 216
ucaagaucaagacgaguua

SEQ ID NO: 19979 - RNA, 19 nt, Artificial Sequence
  Description of Artificial Sequence: Synthetic oligonucleotide
  Antisense strand to SEQ ID NO: 19978
uaacucgucuugaucuuga

SEQ ID NO: 19980 - RNA, 19 nt, Artificial Sequence
  Description of Artificial Sequence: Synthetic oligonucleotide
  Sense strand starting at position 705 of SEQ ID NO: 216
cauccuacucgguguacau

SEQ ID NO: 19981 - RNA, 19 nt, Artificial Sequence
  Description of Artificial Sequence: Synthetic oligonucleotide
  Antisense strand to SEQ ID NO: 19980
auguacaccgaguaggaug

SEQ ID NO: 19982 - RNA, 19 nt, Artificial Sequence
  Description of Artificial Sequence: Synthetic oligonucleotide
  Sense strand starting at position 648 of SEQ ID NO: 216
agcagcuaucuguauuaaa

SEQ ID NO: 19983 - RNA, 19 nt, Artificial Sequence
  Description of Artificial Sequence: Synthetic oligonucleotide
  Antisense strand to SEQ ID NO: 19982
uuuaauacagauagcugcu

SEQ ID NO: 19984 - RNA, 19 nt, Artificial Sequence
  Description of Artificial Sequence: Synthetic oligonucleotide
  Sense strand starting at position 282 of SEQ ID NO: 216
caugacagugccugucaau

SEQ ID NO: 19985 - RNA, 19 nt, Artificial Sequence
  Description of Artificial Sequence: Synthetic oligonucleotide
  Antisense strand to SEQ ID NO: 19984
auugacaggcacugucaug

SEQ ID NO: 19986 - RNA, 19 nt, Artificial Sequence
  Description of Artificial Sequence: Synthetic oligonucleotide
  Sense strand starting at position 272 of SEQ ID NO: 216
uguaguuggccaugacagu

SEQ ID NO: 19987 - RNA, 19 nt, Artificial Sequence
  Description of Artificial Sequence: Synthetic oligonucleotide
  Antisense strand to SEQ ID NO: 19986
acugucauggccaacuaca

SEQ ID NO: 19988 - RNA, 19 nt, Artificial Sequence
  Description of Artificial Sequence: Synthetic oligonucleotide
  Sense strand starting at position 270 of SEQ ID NO: 216
gcuguaguuggccaugaca

SEQ ID NO: 19989 - RNA, 19 nt, Artificial Sequence
  Description of Artificial Sequence: Synthetic oligonucleotide
  Antisense strand to SEQ ID NO: 19988
ugucauggccaacuacagc

SEQ ID NO: 19990 - RNA, 19 nt, Artificial Sequence
  Description of Artificial Sequence: Synthetic oligonucleotide
  Sense strand starting at position 72 of SEQ ID NO: 216
aaugguguugcuuaagauc

SEQ ID NO: 19991 - RNA, 19 nt, Artificial Sequence
  Description of Artificial Sequence: Synthetic oligonucleotide
  Antisense strand to SEQ ID NO: 19990
gaucuuaagcaacaccauu

SEQ ID NO: 19992 - RNA, 19 nt, Artificial Sequence
  Description of Artificial Sequence: Synthetic oligonucleotide
  Sense strand starting at position 62 of SEQ ID NO: 216
uaaauuaugcaaugguguu

SEQ ID NO: 19993 - RNA, 19 nt, Artificial Sequence
  Description of Artificial Sequence: Synthetic oligonucleotide
  Antisense strand to SEQ ID NO: 19992
aacaccauugcauaauuua

SEQ ID NO: 19994 - RNA, 19 nt, Artificial Sequence
  Description of Artificial Sequence: Synthetic oligonucleotide
  Sense strand starting at position 3658 of SEQ ID NO: 215
ucccaaagucccuguacau

SEQ ID NO: 19995 - RNA, 19 nt, Artificial Sequence
  Description of Artificial Sequence: Synthetic oligonucleotide
  Antisense strand to SEQ ID NO: 19994
auguacagggacuuuggga

SEQ ID NO: 19996 - RNA, 19 nt, Artificial Sequence
  Description of Artificial Sequence: Synthetic oligonucleotide
  Sense strand starting at position 3580 of SEQ ID NO: 215
ucaagaucaagacgaguua

SEQ ID NO: 19997 - RNA, 19 nt, Artificial Sequence
  Description of Artificial Sequence: Synthetic oligonucleotide
  Antisense strand to SEQ ID NO: 19996
uaacucgucuugaucuuga

SEQ ID NO: 19998 - RNA, 19 nt, Artificial Sequence
  Description of Artificial Sequence: Synthetic oligonucleotide
  Sense strand starting at position 3509 of SEQ ID NO: 215
ccaugccuuugagaaacuu

SEQ ID NO: 19999 - RNA, 19 nt, Artificial Sequence
  Description of Artificial Sequence: Synthetic oligonucleotide
  Antisense strand to SEQ ID NO: 19998
aaguuucucaaaggcaugg

SEQ ID NO: 20000 - RNA, 19 nt, Artificial Sequence
  Description of Artificial Sequence: Synthetic oligonucleotide
  Sense strand starting at position 3486 of SEQ ID NO: 215
cauccuacucgguguacau

SEQ ID NO: 20001 - RNA, 19 nt, Artificial Sequence
  Description of Artificial Sequence: Synthetic oligonucleotide
  Antisense strand to SEQ ID NO: 20000
auguacaccgaguaggaug

SEQ ID NO: 20002 - RNA, 19 nt, Artificial Sequence
  Description of Artificial Sequence: Synthetic oligonucleotide
  Sense strand starting at position 3429 of SEQ ID NO: 215
agcagcuaucuguauuaaa

SEQ ID NO: 20003 - RNA, 19 nt, Artificial Sequence
  Description of Artificial Sequence: Synthetic oligonucleotide
  Antisense strand to SEQ ID NO: 20002
uuuaauacagauagcugcu

SEQ ID NO: 20004 - RNA, 19 nt, Artificial Sequence
  Description of Artificial Sequence: Synthetic oligonucleotide
  Sense strand starting at position 3066 of SEQ ID NO: 215
gacagugccugucaauacu

SEQ ID NO: 20005 - RNA, 19 nt, Artificial Sequence
  Description of Artificial Sequence: Synthetic oligonucleotide
  Antisense strand to SEQ ID NO: 20004
aguauugacaggcacuguc

SEQ ID NO: 20006 - RNA, 19 nt, Artificial Sequence
  Description of Artificial Sequence: Synthetic oligonucleotide
  Sense strand starting at position 3063 of SEQ ID NO: 215
caugacagugccugucaau

SEQ ID NO: 20007 - RNA, 19 nt, Artificial Sequence
  Description of Artificial Sequence: Synthetic oligonucleotide
  Antisense strand to SEQ ID NO: 20006
auugacaggcacugucaug

SEQ ID NO: 20008 - RNA, 19 nt, Artificial Sequence
  Description of Artificial Sequence: Synthetic oligonucleotide
  Sense strand starting at position 3053 of SEQ ID NO: 215
uguaguuggccaugacagu

SEQ ID NO: 20009 - RNA, 19 nt, Artificial Sequence
  Description of Artificial Sequence: Synthetic oligonucleotide
  Antisense strand to SEQ ID NO: 20008
acugucauggccaacuaca

SEQ ID NO: 20010 - RNA, 19 nt, Artificial Sequence
  Description of Artificial Sequence: Synthetic oligonucleotide
  Sense strand starting at position 3051 of SEQ ID NO: 215
gcuguaguuggccaugaca

SEQ ID NO: 20011 - RNA, 19 nt, Artificial Sequence
  Description of Artificial Sequence: Synthetic oligonucleotide
  Antisense strand to SEQ ID NO: 20010
ugucauggccaacuacagc

SEQ ID NO: 20012 - RNA, 19 nt, Artificial Sequence
  Description of Artificial Sequence: Synthetic oligonucleotide
  Sense strand starting at position 3041 of SEQ ID NO: 215
gucaguucaggcuguaguu

SEQ ID NO: 20013 - RNA, 19 nt, Artificial Sequence
  Description of Artificial Sequence: Synthetic oligonucleotide
  Antisense strand to SEQ ID NO: 20012
aacuacagccugaacugac

SEQ ID NO: 20014 - RNA, 19 nt, Artificial Sequence
  Description of Artificial Sequence: Synthetic oligonucleotide
  Sense strand starting at position 2861 of SEQ ID NO: 215
ugcuuaagaucauacaguu

SEQ ID NO: 20015 - RNA, 19 nt, Artificial Sequence
  Description of Artificial Sequence: Synthetic oligonucleotide
  Antisense strand to SEQ ID NO: 20014
aacuguaugaucuuaagca

SEQ ID NO: 20016 - RNA, 19 nt, Artificial Sequence
  Description of Artificial Sequence: Synthetic oligonucleotide
  Sense strand starting at position 2856 of SEQ ID NO: 215
gguguugcuuaagaucaua

SEQ ID NO: 20017 - RNA, 19 nt, Artificial Sequence
  Description of Artificial Sequence: Synthetic oligonucleotide
  Antisense strand to SEQ ID NO: 20016
uaugaucuuaagcaacacc

SEQ ID NO: 20018 - RNA, 19 nt, Artificial Sequence
  Description of Artificial Sequence: Synthetic oligonucleotide
  Sense strand starting at position 2853 of SEQ ID NO: 215
aaugguguugcuuaagauc

SEQ ID NO: 20019 - RNA, 19 nt, Artificial Sequence
  Description of Artificial Sequence: Synthetic oligonucleotide
  Antisense strand to SEQ ID NO: 20018
gaucuuaagcaacaccauu

SEQ ID NO: 20020 - RNA, 19 nt, Artificial Sequence
  Description of Artificial Sequence: Synthetic oligonucleotide
  Sense strand starting at position 2849 of SEQ ID NO: 215
augcaaugguguugcuuaa

SEQ ID NO: 20021 - RNA, 19 nt, Artificial Sequence
  Description of Artificial Sequence: Synthetic oligonucleotide
  Antisense strand to SEQ ID NO: 20020
uuaagcaacaccauugcau

SEQ ID NO: 20022 - RNA, 19 nt, Artificial Sequence
  Description of Artificial Sequence: Synthetic oligonucleotide
  Sense strand starting at position 2843 of SEQ ID NO: 215
uaaauuaugcaaugguguu

SEQ ID NO: 20023 - RNA, 19 nt, Artificial Sequence
  Description of Artificial Sequence: Synthetic oligonucleotide
  Antisense strand to SEQ ID NO: 20022
aacaccauugcauaauuua

SEQ ID NO: 20024 - RNA, 19 nt, Artificial Sequence
  Description of Artificial Sequence: Synthetic oligonucleotide
  Sense strand starting at position 2742 of SEQ ID NO: 215
acaaaugacugcugaauau

SEQ ID NO: 20025 - RNA, 19 nt, Artificial Sequence
  Description of Artificial Sequence: Synthetic oligonucleotide
  Antisense strand to SEQ ID NO: 20024
auauucagcagucauuugu

SEQ ID NO: 20026 - RNA, 19 nt, Artificial Sequence
  Description of Artificial Sequence: Synthetic oligonucleotide
  Sense strand starting at position 2739 of SEQ ID NO: 215
ggcacaaaugacugcugaa

SEQ ID NO: 20027 - RNA, 19 nt, Artificial Sequence
  Description of Artificial Sequence: Synthetic oligonucleotide
  Antisense strand to SEQ ID NO: 20026
uucagcagucauuugugcc

SEQ ID NO: 20028 - RNA, 19 nt, Artificial Sequence
  Description of Artificial Sequence: Synthetic oligonucleotide
  Sense strand starting at position 2101 of SEQ ID NO: 215
acagucucuuugcagaguu

SEQ ID NO: 20029 - RNA, 19 nt, Artificial Sequence
  Description of Artificial Sequence: Synthetic oligonucleotide
  Antisense strand to SEQ ID NO: 20028
aacucugcaaagagacugu

SEQ ID NO: 20030 - RNA, 19 nt, Artificial Sequence
  Description of Artificial Sequence: Synthetic oligonucleotide
  Sense strand starting at position 2098 of SEQ ID NO: 215
gauacagucucuuugcaga

SEQ ID NO: 20031 - RNA, 19 nt, Artificial Sequence
  Description of Artificial Sequence: Synthetic oligonucleotide
  Antisense strand to SEQ ID NO: 20030
ucugcaaagagacuguauc

SEQ ID NO: 20032 - RNA, 19 nt, Artificial Sequence
  Description of Artificial Sequence: Synthetic oligonucleotide
  Sense strand starting at position 2096 of SEQ ID NO: 215
gggauacagucucuuugca

SEQ ID NO: 20033 - RNA, 19 nt, Artificial Sequence
  Description of Artificial Sequence: Synthetic oligonucleotide
  Antisense strand to SEQ ID NO: 20032
ugcaaagagacuguauccc

SEQ ID NO: 20034 - RNA, 19 nt, Artificial Sequence
  Description of Artificial Sequence: Synthetic oligonucleotide
  Sense strand starting at position 2070 of SEQ ID NO: 215
gugccaaagcauugaguua

SEQ ID NO: 20035 - RNA, 19 nt, Artificial Sequence
  Description of Artificial Sequence: Synthetic oligonucleotide
  Antisense strand to SEQ ID NO: 20034
uaacucaaugcuuuggcac

SEQ ID NO: 20036 - RNA, 19 nt, Artificial Sequence
  Description of Artificial Sequence: Synthetic oligonucleotide
  Sense strand starting at position 1991 of SEQ ID NO: 215
ucugguuuccaggauacca

SEQ ID NO: 20037 - RNA, 19 nt, Artificial Sequence
  Description of Artificial Sequence: Synthetic oligonucleotide
  Antisense strand to SEQ ID NO: 20036
ugguauccuggaaaccaga

SEQ ID NO: 20038 - RNA, 19 nt, Artificial Sequence
  Description of Artificial Sequence: Synthetic oligonucleotide
  Sense strand starting at position 1578 of SEQ ID NO: 215
cuuugucagucuccuuuaa

SEQ ID NO: 20039 - RNA, 19 nt, Artificial Sequence
  Description of Artificial Sequence: Synthetic oligonucleotide
  Antisense strand to SEQ ID NO: 20038
uuaaaggagacugacaaag

SEQ ID NO: 20040 - RNA, 19 nt, Artificial Sequence
  Description of Artificial Sequence: Synthetic oligonucleotide
  Sense strand starting at position 1571 of SEQ ID NO: 215
auauaaacuuugucagucu

SEQ ID NO: 20041 - RNA, 19 nt, Artificial Sequence
  Description of Artificial Sequence: Synthetic oligonucleotide
  Antisense strand to SEQ ID NO: 20040
agacugacaaaguuuauau

SEQ ID NO: 20042 - RNA, 19 nt, Artificial Sequence
  Description of Artificial Sequence: Synthetic oligonucleotide
  Sense strand starting at position 1569 of SEQ ID NO: 215
ccauauaaacuuugucagu

SEQ ID NO: 20043 - RNA, 19 nt, Artificial Sequence
  Description of Artificial Sequence: Synthetic oligonucleotide
  Antisense strand to SEQ ID NO: 20042
acugacaaaguuuauaugg

SEQ ID NO: 20044 - RNA, 19 nt, Artificial Sequence
  Description of Artificial Sequence: Synthetic oligonucleotide
  Sense strand starting at position 1534 of SEQ ID NO: 215
uucuguaucuucgacauuu

SEQ ID NO: 20045 - RNA, 19 nt, Artificial Sequence
  Description of Artificial Sequence: Synthetic oligonucleotide
  Antisense strand to SEQ ID NO: 20044
aaaugucgaagauacagaa

SEQ ID NO: 20046 - RNA, 19 nt, Artificial Sequence
  Description of Artificial Sequence: Synthetic oligonucleotide
  Sense strand starting at position 1512 of SEQ ID NO: 215
aacagauggccugguccau

SEQ ID NO: 20047 - RNA, 19 nt, Artificial Sequence
  Description of Artificial Sequence: Synthetic oligonucleotide
  Antisense strand to SEQ ID NO: 20046
auggaccaggccaucuguu

SEQ ID NO: 20048 - RNA, 19 nt, Artificial Sequence
  Description of Artificial Sequence: Synthetic oligonucleotide
  Sense strand starting at position 898 of SEQ ID NO: 215
ccuugaugagcuuauacac

SEQ ID NO: 20049 - RNA, 19 nt, Artificial Sequence
  Description of Artificial Sequence: Synthetic oligonucleotide
  Antisense strand to SEQ ID NO: 20048
guguauaagcucaucaagg

SEQ ID NO: 20050 - RNA, 19 nt, Artificial Sequence
  Description of Artificial Sequence: Synthetic oligonucleotide
  Sense strand starting at position 895 of SEQ ID NO: 215
ggcccuugaugagcuuaua

SEQ ID NO: 20051 - RNA, 19 nt, Artificial Sequence
  Description of Artificial Sequence: Synthetic oligonucleotide
  Antisense strand to SEQ ID NO: 20050
uauaagcucaucaagggcc

SEQ ID NO: 20052 - RNA, 19 nt, Artificial Sequence
  Description of Artificial Sequence: Synthetic oligonucleotide
  Sense strand starting at position 868 of SEQ ID NO: 215
uuggauucuggaggucaaa

SEQ ID NO: 20053 - RNA, 19 nt, Artificial Sequence
  Description of Artificial Sequence: Synthetic oligonucleotide
  Antisense strand to SEQ ID NO: 20052
uuugaccuccagaauccaa

SEQ ID NO: 20054 - RNA, 19 nt, Artificial Sequence
  Description of Artificial Sequence: Synthetic oligonucleotide
  Sense strand starting at position 803 of SEQ ID NO: 215
uaaauuguguugcccuaag

SEQ ID NO: 20055 - RNA, 19 nt, Artificial Sequence
  Description of Artificial Sequence: Synthetic oligonucleotide
  Antisense strand to SEQ ID NO: 20054
cuuagggcaacacaauuua

SEQ ID NO: 20056 - RNA, 19 nt, Artificial Sequence
  Description of Artificial Sequence: Synthetic oligonucleotide
  Sense strand starting at position 801 of SEQ ID NO: 215
auuaaauuguguugcccua

SEQ ID NO: 20057 - RNA, 19 nt, Artificial Sequence
  Description of Artificial Sequence: Synthetic oligonucleotide
  Antisense strand to SEQ ID NO: 20056
uagggcaacacaauuuaau

SEQ ID NO: 20058 - RNA, 19 nt, Artificial Sequence
  Description of Artificial Sequence: Synthetic oligonucleotide
  Sense strand starting at position 777 of SEQ ID NO: 215
agugauuacuaacuguaau

SEQ ID NO: 20059 - RNA, 19 nt, Artificial Sequence
  Description of Artificial Sequence: Synthetic oligonucleotide
  Antisense strand to SEQ ID NO: 20058
auuacaguuaguaaucacu

SEQ ID NO: 20060 - RNA, 19 nt, Artificial Sequence
  Description of Artificial Sequence: Synthetic oligonucleotide
  Sense strand starting at position 774 of SEQ ID NO: 215
cucagugauuacuaacugu

SEQ ID NO: 20061 - RNA, 19 nt, Artificial Sequence
  Description of Artificial Sequence: Synthetic oligonucleotide
  Antisense strand to SEQ ID NO: 20060
acaguuaguaaucacugag

SEQ ID NO: 20062 - RNA, 19 nt, Artificial Sequence
  Description of Artificial Sequence: Synthetic oligonucleotide
  Sense strand starting at position 766 of SEQ ID NO: 215
ugaauucccucagugauua

SEQ ID NO: 20063 - RNA, 19 nt, Artificial Sequence
  Description of Artificial Sequence: Synthetic oligonucleotide
  Antisense strand to SEQ ID NO: 20062
uaaucacugagggaauuca

SEQ ID NO: 20064 - RNA, 19 nt, Artificial Sequence
  Description of Artificial Sequence: Synthetic oligonucleotide
  Sense strand starting at position 764 of SEQ ID NO: 215
uuugaauucccucagugau

SEQ ID NO: 20065 - RNA, 19 nt, Artificial Sequence
  Description of Artificial Sequence: Synthetic oligonucleotide
  Antisense strand to SEQ ID NO: 20064
aucacugagggaauucaaa

SEQ ID NO: 20066 - RNA, 19 nt, Artificial Sequence
  Description of Artificial Sequence: Synthetic oligonucleotide
  Sense strand starting at position 387 of SEQ ID NO: 215
ucagucuaugguugaauga

SEQ ID NO: 20067 - RNA, 19 nt, Artificial Sequence
  Description of Artificial Sequence: Synthetic oligonucleotide
  Antisense strand to SEQ ID NO: 20066
ucauucaaccauagacuga

SEQ ID NO: 20068 - RNA, 19 nt, Artificial Sequence
  Description of Artificial Sequence: Synthetic oligonucleotide
  Sense strand starting at position 384 of SEQ ID NO: 215
acaucagucuaugguugaa

SEQ ID NO: 20069 - RNA, 19 nt, Artificial Sequence
  Description of Artificial Sequence: Synthetic oligonucleotide
  Antisense strand to SEQ ID NO: 20068
uucaaccauagacugaugu

SEQ ID NO: 20070 - RNA, 19 nt, Artificial Sequence
  Description of Artificial Sequence: Synthetic oligonucleotide
  Sense strand starting at position 381 of SEQ ID NO: 215
guuacaucagucuaugguu

SEQ ID NO: 20071 - RNA, 19 nt, Artificial Sequence
  Description of Artificial Sequence: Synthetic oligonucleotide
  Antisense strand to SEQ ID NO: 20070
aaccauagacugauguaac

SEQ ID NO: 20072 - RNA, 19 nt, Artificial Sequence
  Description of Artificial Sequence: Synthetic oligonucleotide
  Sense strand starting at position 227 of SEQ ID NO: 215
aauguaucaugagcagaug

SEQ ID NO: 20073 - RNA, 19 nt, Artificial Sequence
  Description of Artificial Sequence: Synthetic oligonucleotide
  Antisense strand to SEQ ID NO: 20072
caucugcucaugauacauu

SEQ ID NO: 20074 - RNA, 19 nt, Artificial Sequence
  Description of Artificial Sequence: Synthetic oligonucleotide
  Sense strand starting at position 3942 of SEQ ID NO: 217
guaaguucugaaugaauaa

SEQ ID NO: 20075 - RNA, 19 nt, Artificial Sequence
  Description of Artificial Sequence: Synthetic oligonucleotide
  Antisense strand to SEQ ID NO: 20074
uuauucauucagaacuuac

SEQ ID NO: 20076 - RNA, 19 nt, Artificial Sequence
  Description of Artificial Sequence: Synthetic oligonucleotide
  Sense strand starting at position 3833 of SEQ ID NO: 217
agcaacaucggagauuauu

SEQ ID NO: 20077 - RNA, 19 nt, Artificial Sequence
  Description of Artificial Sequence: Synthetic oligonucleotide
  Antisense strand to SEQ ID NO: 20076
aauaaucuccgauguugcu

SEQ ID NO: 20078 - RNA, 19 nt, Artificial Sequence
  Description of Artificial Sequence: Synthetic oligonucleotide
  Sense strand starting at position 3830 of SEQ ID NO: 217
gagagcaacaucggagauu

SEQ ID NO: 20079 - RNA, 19 nt, Artificial Sequence
  Description of Artificial Sequence: Synthetic oligonucleotide
  Antisense strand to SEQ ID NO: 20078
aaucuccgauguugcucuc

SEQ ID NO: 20080 - RNA, 19 nt, Artificial Sequence
  Description of Artificial Sequence: Synthetic oligonucleotide
  Sense strand starting at position 3730 of SEQ ID NO: 217
uugggagauccaugcuaag

SEQ ID NO: 20081 - RNA, 19 nt, Artificial Sequence
  Description of Artificial Sequence: Synthetic oligonucleotide
  Antisense strand to SEQ ID NO: 20080
cuuagcauggaucucccaa

SEQ ID NO: 20082 - RNA, 19 nt, Artificial Sequence
  Description of Artificial Sequence: Synthetic oligonucleotide
  Sense strand starting at position 3619 of SEQ ID NO: 217
cgcuaacuagcauacuaaa

SEQ ID NO: 20083 - RNA, 19 nt, Artificial Sequence
  Description of Artificial Sequence: Synthetic oligonucleotide
  Antisense strand to SEQ ID NO: 20082
uuuaguaugcuaguuagcg

SEQ ID NO: 20084 - RNA, 19 nt, Artificial Sequence
  Description of Artificial Sequence: Synthetic oligonucleotide
  Sense strand starting at position 3585 of SEQ ID NO: 217
uauccuaaugaggguacaa

SEQ ID NO: 20085 - RNA, 19 nt, Artificial Sequence
  Description of Artificial Sequence: Synthetic oligonucleotide
  Antisense strand to SEQ ID NO: 20084
uuguacccucauuaggaua

SEQ ID NO: 20086 - RNA, 19 nt, Artificial Sequence
  Description of Artificial Sequence: Synthetic oligonucleotide
  Sense strand starting at position 3555 of SEQ ID NO: 217
uacauugaagugugaagua

SEQ ID NO: 20087 - RNA, 19 nt, Artificial Sequence
  Description of Artificial Sequence: Synthetic oligonucleotide
  Antisense strand to SEQ ID NO: 20086
uacuucacacuucaaugua

SEQ ID NO: 20088 - RNA, 19 nt, Artificial Sequence
  Description of Artificial Sequence: Synthetic oligonucleotide
  Sense strand starting at position 3553 of SEQ ID NO: 217
uuuacauugaagugugaag

SEQ ID NO: 20089 - RNA, 19 nt, Artificial Sequence
  Description of Artificial Sequence: Synthetic oligonucleotide
  Antisense strand to SEQ ID NO: 20088
cuucacacuucaauguaaa

SEQ ID NO: 20090 - RNA, 19 nt, Artificial Sequence
  Description of Artificial Sequence: Synthetic oligonucleotide
  Sense strand starting at position 3463 of SEQ ID NO: 217
gggccugugaauugaaaga

SEQ ID NO: 20091 - RNA, 19 nt, Artificial Sequence
  Description of Artificial Sequence: Synthetic oligonucleotide
  Antisense strand to SEQ ID NO: 20090
ucuuucaauucacaggccc

SEQ ID NO: 20092 - RNA, 19 nt, Artificial Sequence
  Description of Artificial Sequence: Synthetic oligonucleotide
  Sense strand starting at position 3379 of SEQ ID NO: 217
gugcaucuccguuuaguuu

SEQ ID NO: 20093 - RNA, 19 nt, Artificial Sequence
  Description of Artificial Sequence: Synthetic oligonucleotide
  Antisense strand to SEQ ID NO: 20092
aaacuaaacggagaugcac

SEQ ID NO: 20094 - RNA, 19 nt, Artificial Sequence
  Description of Artificial Sequence: Synthetic oligonucleotide
  Sense strand starting at position 3378 of SEQ ID NO: 217
ugugcaucuccguuuaguu

SEQ ID NO: 20095 - RNA, 19 nt, Artificial Sequence
  Description of Artificial Sequence: Synthetic oligonucleotide
  Antisense strand to SEQ ID NO: 20094
aacuaaacggagaugcaca

SEQ ID NO: 20096 - RNA, 19 nt, Artificial Sequence
  Description of Artificial Sequence: Synthetic oligonucleotide
  Sense strand starting at position 3148 of SEQ ID NO: 217
ccaguaagauggcuagaga

SEQ ID NO: 20097 - RNA, 19 nt, Artificial Sequence
  Description of Artificial Sequence: Synthetic oligonucleotide
  Antisense strand to SEQ ID NO: 20096
ucucuagccaucuuacugg

SEQ ID NO: 20098 - RNA, 19 nt, Artificial Sequence
  Description of Artificial Sequence: Synthetic oligonucleotide
  Sense strand starting at position 3020 of SEQ ID NO: 217
agccucuuggauuacuuaa

SEQ ID NO: 20099 - RNA, 19 nt, Artificial Sequence
  Description of Artificial Sequence: Synthetic oligonucleotide
  Antisense strand to SEQ ID NO: 20098
uuaaguaauccaagaggcu

SEQ ID NO: 20100 - RNA, 19 nt, Artificial Sequence
  Description of Artificial Sequence: Synthetic oligonucleotide
  Sense strand starting at position 2546 of SEQ ID NO: 217
ccagaugagugucuuaaga

SEQ ID NO: 20101 - RNA, 19 nt, Artificial Sequence
  Description of Artificial Sequence: Synthetic oligonucleotide
  Antisense strand to SEQ ID NO: 20100
ucuuaagacacucaucugg

SEQ ID NO: 20102 - RNA, 19 nt, Artificial Sequence
  Description of Artificial Sequence: Synthetic oligonucleotide
  Sense strand starting at position 2543 of SEQ ID NO: 217
acaccagaugagugucuua

SEQ ID NO: 20103 - RNA, 19 nt, Artificial Sequence
  Description of Artificial Sequence: Synthetic oligonucleotide
  Antisense strand to SEQ ID NO: 20102
uaagacacucaucuggugu

SEQ ID NO: 20104 - RNA, 19 nt, Artificial Sequence
  Description of Artificial Sequence: Synthetic oligonucleotide
  Sense strand starting at position 2261 of SEQ ID NO: 217
gcucucucacccgaaauca

SEQ ID NO: 20105 - RNA, 19 nt, Artificial Sequence
  Description of Artificial Sequence: Synthetic oligonucleotide
  Antisense strand to SEQ ID NO: 20104
ugauuucgggugagagagc

SEQ ID NO: 20106 - RNA, 19 nt, Artificial Sequence
  Description of Artificial Sequence: Synthetic oligonucleotide
  Sense strand starting at position 2097 of SEQ ID NO: 217
cccagagcaucuuugaagu

SEQ ID NO: 20107 - RNA, 19 nt, Artificial Sequence
  Description of Artificial Sequence: Synthetic oligonucleotide
  Antisense strand to SEQ ID NO: 20106
acuucaaagaugcucuggg

SEQ ID NO: 20108 - RNA, 19 nt, Artificial Sequence
  Description of Artificial Sequence: Synthetic oligonucleotide
  Sense strand starting at position 1663 of SEQ ID NO: 217
gggcaagaggguuguauga

SEQ ID NO: 20109 - RNA, 19 nt, Artificial Sequence
  Description of Artificial Sequence: Synthetic oligonucleotide
  Antisense strand to SEQ ID NO: 20108
ucauacaacccucuugccc

SEQ ID NO: 20110 - RNA, 19 nt, Artificial Sequence
  Description of Artificial Sequence: Synthetic oligonucleotide
  Sense strand starting at position 1314 of SEQ ID NO: 217
cgauaauauagauaucgug

SEQ ID NO: 20111 - RNA, 19 nt, Artificial Sequence
  Description of Artificial Sequence: Synthetic oligonucleotide
  Antisense strand to SEQ ID NO: 20110
cacgauaucuauauuaucg

SEQ ID NO: 20112 - RNA, 19 nt, Artificial Sequence
  Description of Artificial Sequence: Synthetic oligonucleotide
  Sense strand starting at position 1305 of SEQ ID NO: 217
cuaugagcacgauaauaua

SEQ ID NO: 20113 - RNA, 19 nt, Artificial Sequence
  Description of Artificial Sequence: Synthetic oligonucleotide
  Antisense strand to SEQ ID NO: 20112
uauauuaucgugcucauag

SEQ ID NO: 20114 - RNA, 19 nt, Artificial Sequence
  Description of Artificial Sequence: Synthetic oligonucleotide
  Sense strand starting at position 1303 of SEQ ID NO: 217
cucuaugagcacgauaaua

SEQ ID NO: 20115 - RNA, 19 nt, Artificial Sequence
  Description of Artificial Sequence: Synthetic oligonucleotide
  Antisense strand to SEQ ID NO: 20114
uauuaucgugcucauagag

SEQ ID NO: 20116 - RNA, 19 nt, Artificial Sequence
  Description of Artificial Sequence: Synthetic oligonucleotide
  Sense strand starting at position 1300 of SEQ ID NO: 217
gggcucuaugagcacgaua

SEQ ID NO: 20117 - RNA, 19 nt, Artificial Sequence
  Description of Artificial Sequence: Synthetic oligonucleotide
  Antisense strand to SEQ ID NO: 20116
uaucgugcucauagagccc

SEQ ID NO: 20118 - RNA, 19 nt, Artificial Sequence
  Description of Artificial Sequence: Synthetic oligonucleotide
  Sense strand starting at position 1241 of SEQ ID NO: 217
aggguucacuguuuggaau

SEQ ID NO: 20119 - RNA, 19 nt, Artificial Sequence
  Description of Artificial Sequence: Synthetic oligonucleotide
  Antisense strand to SEQ ID NO: 20118
auuccaaacagugaacccu

SEQ ID NO: 20120 - RNA, 19 nt, Artificial Sequence
  Description of Artificial Sequence: Synthetic oligonucleotide
  Sense strand starting at position 1221 of SEQ ID NO: 217
ggagacuauuugcaaccua

SEQ ID NO: 20121 - RNA, 19 nt, Artificial Sequence
  Description of Artificial Sequence: Synthetic oligonucleotide
  Antisense strand to SEQ ID NO: 20120
uagguugcaaauagucucc

SEQ ID NO: 20122 - RNA, 19 nt, Artificial Sequence
  Description of Artificial Sequence: Synthetic oligonucleotide
  Sense strand starting at position 833 of SEQ ID NO: 217
gucuauauacccuggauaa

SEQ ID NO: 20123 - RNA, 19 nt, Artificial Sequence
  Description of Artificial Sequence: Synthetic oligonucleotide
  Antisense strand to SEQ ID NO: 20122
uuauccaggguauauagac

SEQ ID NO: 20124 - RNA, 19 nt, Artificial Sequence
  Description of Artificial Sequence: Synthetic oligonucleotide
  Sense strand starting at position 805 of SEQ ID NO: 217
cuugaacauugguuaacau

SEQ ID NO: 20125 - RNA, 19 nt, Artificial Sequence
  Description of Artificial Sequence: Synthetic oligonucleotide
  Antisense strand to SEQ ID NO: 20124
auguuaaccaauguucaag

SEQ ID NO: 20126 - RNA, 19 nt, Artificial Sequence
  Description of Artificial Sequence: Synthetic oligonucleotide
  Sense strand starting at position 804 of SEQ ID NO: 217
gcuugaacauugguuaaca

SEQ ID NO: 20127 - RNA, 19 nt, Artificial Sequence
  Description of Artificial Sequence: Synthetic oligonucleotide
  Antisense strand to SEQ ID NO: 20126
uguuaaccaauguucaagc

SEQ ID NO: 20128 - RNA, 19 nt, Artificial Sequence
  Description of Artificial Sequence: Synthetic oligonucleotide
  Sense strand starting at position 802 of SEQ ID NO: 217
uagcuugaacauugguuaa

SEQ ID NO: 20129 - RNA, 19 nt, Artificial Sequence
  Description of Artificial Sequence: Synthetic oligonucleotide
  Antisense strand to SEQ ID NO: 20128
uuaaccaauguucaagcua

SEQ ID NO: 20130 - RNA, 19 nt, Artificial Sequence
  Description of Artificial Sequence: Synthetic oligonucleotide
  Sense strand starting at position 785 of SEQ ID NO: 217
aucacauuacagugcauua

SEQ ID NO: 20131 - RNA, 19 nt, Artificial Sequence
  Description of Artificial Sequence: Synthetic oligonucleotide
  Antisense strand to SEQ ID NO: 20130
uaaugcacuguaaugugau

SEQ ID NO: 20132 - RNA, 19 nt, Artificial Sequence
  Description of Artificial Sequence: Synthetic oligonucleotide
  Sense strand starting at position 705 of SEQ ID NO: 217
acauuuguuucugcucaua

SEQ ID NO: 20133 - RNA, 19 nt, Artificial Sequence
  Description of Artificial Sequence: Synthetic oligonucleotide
  Antisense strand to SEQ ID NO: 20132
uaugagcagaaacaaaugu

SEQ ID NO: 20134 - RNA, 19 nt, Artificial Sequence
  Description of Artificial Sequence: Synthetic oligonucleotide
  Sense strand starting at position 648 of SEQ ID NO: 217
ggccuagauuacccaacua

SEQ ID NO: 20135 - RNA, 19 nt, Artificial Sequence
  Description of Artificial Sequence: Synthetic oligonucleotide
  Antisense strand to SEQ ID NO: 20134
uaguuggguaaucuaggcc

SEQ ID NO: 20136 - RNA, 19 nt, Artificial Sequence
  Description of Artificial Sequence: Synthetic oligonucleotide
  Sense strand starting at position 625 of SEQ ID NO: 217
auaacaaugucccugcuga

SEQ ID NO: 20137 - RNA, 19 nt, Artificial Sequence
  Description of Artificial Sequence: Synthetic oligonucleotide
  Antisense strand to SEQ ID NO: 20136
ucagcagggacauuguuau

SEQ ID NO: 20138 - RNA, 19 nt, Artificial Sequence
  Description of Artificial Sequence: Synthetic oligonucleotide
  Sense strand starting at position 610 of SEQ ID NO: 217
uuggucuaugcugacauaa

SEQ ID NO: 20139 - RNA, 19 nt, Artificial Sequence
  Description of Artificial Sequence: Synthetic oligonucleotide
  Antisense strand to SEQ ID NO: 20138
uuaugucagcauagaccaa

SEQ ID NO: 20140 - RNA, 19 nt, Artificial Sequence
  Description of Artificial Sequence: Synthetic oligonucleotide
  Sense strand starting at position 542 of SEQ ID NO: 217
caugcacaugucuggagaa

SEQ ID NO: 20141 - RNA, 19 nt, Artificial Sequence
  Description of Artificial Sequence: Synthetic oligonucleotide
  Antisense strand to SEQ ID NO: 20140
uucuccagacaugugcaug

SEQ ID NO: 20142 - RNA, 19 nt, Artificial Sequence
  Description of Artificial Sequence: Synthetic oligonucleotide
  Sense strand starting at position 433 of SEQ ID NO: 217
gccugaugucaucagacug

SEQ ID NO: 20143 - RNA, 19 nt, Artificial Sequence
  Description of Artificial Sequence: Synthetic oligonucleotide
  Antisense strand to SEQ ID NO: 20142
cagucugaugacaucaggc

SEQ ID NO: 20144 - RNA, 19 nt, Artificial Sequence
  Description of Artificial Sequence: Synthetic oligonucleotide
  Sense strand starting at position 348 of SEQ ID NO: 217
agggucaugccuuaaacaa

SEQ ID NO: 20145 - RNA, 19 nt, Artificial Sequence
  Description of Artificial Sequence: Synthetic oligonucleotide
  Antisense strand to SEQ ID NO: 20144
uuguuuaaggcaugacccu

SEQ ID NO: 20146 - RNA, 19 nt, Artificial Sequence
  Description of Artificial Sequence: Synthetic oligonucleotide
  Sense strand starting at position 319 of SEQ ID NO: 217
aacuuauucugggugaagg

SEQ ID NO: 20147 - RNA, 19 nt, Artificial Sequence
  Description of Artificial Sequence: Synthetic oligonucleotide
  Antisense strand to SEQ ID NO: 20146
ccuucacccagaauaaguu

SEQ ID NO: 20148 - RNA, 19 nt, Artificial Sequence
  Description of Artificial Sequence: Synthetic oligonucleotide
  Sense strand starting at position 318 of SEQ ID NO: 217
caacuuauucugggugaag

SEQ ID NO: 20149 - RNA, 19 nt, Artificial Sequence
  Description of Artificial Sequence: Synthetic oligonucleotide
  Antisense strand to SEQ ID NO: 20148
cuucacccagaauaaguug

SEQ ID NO: 20150 - RNA, 19 nt, Artificial Sequence
  Description of Artificial Sequence: Synthetic oligonucleotide
  Sense strand starting at position 135 of SEQ ID NO: 217
gugugacauuugcuuccuu

SEQ ID NO: 20151 - RNA, 19 nt, Artificial Sequence
  Description of Artificial Sequence: Synthetic oligonucleotide
  Antisense strand to SEQ ID NO: 20150
aaggaagcaaaugucacac

SEQ ID NO: 20152 - RNA, 19 nt, Artificial Sequence
  Description of Artificial Sequence: Synthetic oligonucleotide
  Sense strand starting at position 126 of SEQ ID NO: 217
gagacuauggugugacauu

SEQ ID NO: 20153 - RNA, 19 nt, Artificial Sequence
  Description of Artificial Sequence: Synthetic oligonucleotide
  Antisense strand to SEQ ID NO: 20152
aaugucacaccauagucuc

SEQ ID NO: 20154 - RNA, 19 nt, Artificial Sequence
  Description of Artificial Sequence: Synthetic oligonucleotide
  Sense strand starting at position 19 of SEQ ID NO: 218
gagaaaucuccacgcagag

SEQ ID NO: 20155 - RNA, 19 nt, Artificial Sequence
  Description of Artificial Sequence: Synthetic oligonucleotide
  Antisense strand to SEQ ID NO: 20154
cucugcguggagauuucuc

SEQ ID NO: 20156 - RNA, 19 nt, Artificial Sequence
  Description of Artificial Sequence: Synthetic oligonucleotide
  Sense strand starting at position 162 of SEQ ID NO: 218
cugucuguuccuuacugga

SEQ ID NO: 20157 - RNA, 19 nt, Artificial Sequence
  Description of Artificial Sequence: Synthetic oligonucleotide
  Antisense strand to SEQ ID NO: 20156
uccaguaaggaacagacag

SEQ ID NO: 20158 - RNA, 19 nt, Artificial Sequence
  Description of Artificial Sequence: Synthetic oligonucleotide
  Sense strand starting at position 257 of SEQ ID NO: 218
cuccaaagagaauguuuga

SEQ ID NO: 20159 - RNA, 19 nt, Artificial Sequence
  Description of Artificial Sequence: Synthetic oligonucleotide
  Antisense strand to SEQ ID NO: 20158
ucaaacauucucuuuggag

SEQ ID NO: 20160 - RNA, 19 nt, Artificial Sequence
  Description of Artificial Sequence: Synthetic oligonucleotide
  Sense strand starting at position 576 of SEQ ID NO: 218
ucgcgucagccaucaauga

SEQ ID NO: 20161 - RNA, 19 nt, Artificial Sequence
  Description of Artificial Sequence: Synthetic oligonucleotide
  Antisense strand to SEQ ID NO: 20160
ucauugauggcugacgcga

SEQ ID NO: 20162 - RNA, 19 nt, Artificial Sequence
  Description of Artificial Sequence: Synthetic oligonucleotide
  Sense strand starting at position 660 of SEQ ID NO: 218
gguucuuaccuccauguau

SEQ ID NO: 20163 - RNA, 19 nt, Artificial Sequence
  Description of Artificial Sequence: Synthetic oligonucleotide
  Antisense strand to SEQ ID NO: 20162
auacauggagguaagaacc

SEQ ID NO: 20164 - RNA, 19 nt, Artificial Sequence
  Description of Artificial Sequence: Synthetic oligonucleotide
  Sense strand starting at position 705 of SEQ ID NO: 218
ccaggaacuuguccuuaau

SEQ ID NO: 20165 - RNA, 19 nt, Artificial Sequence
  Description of Artificial Sequence: Synthetic oligonucleotide
  Antisense strand to SEQ ID NO: 20164
auuaaggacaaguuccugg

SEQ ID NO: 20166 - RNA, 19 nt, Artificial Sequence
  Description of Artificial Sequence: Synthetic oligonucleotide
  Sense strand starting at position 903 of SEQ ID NO: 218
gucaguuaaguccauagaa

SEQ ID NO: 20167 - RNA, 19 nt, Artificial Sequence
  Description of Artificial Sequence: Synthetic oligonucleotide
  Antisense strand to SEQ ID NO: 20166
uucuauggacuuaacugac

SEQ ID NO: 20168 - RNA, 19 nt, Artificial Sequence
  Description of Artificial Sequence: Synthetic oligonucleotide
  Sense strand starting at position 1019 of SEQ ID NO: 218
ucauguaaagucuauucuu

SEQ ID NO: 20169 - RNA, 19 nt, Artificial Sequence
  Description of Artificial Sequence: Synthetic oligonucleotide
  Antisense strand to SEQ ID NO: 20168
aagaauagacuuuacauga

SEQ ID NO: 20170 - RNA, 19 nt, Artificial Sequence
  Description of Artificial Sequence: Synthetic oligonucleotide
  Sense strand starting at position 1022 of SEQ ID NO: 218
uguaaagucuauucuugaa

SEQ ID NO: 20171 - RNA, 19 nt, Artificial Sequence
  Description of Artificial Sequence: Synthetic oligonucleotide
  Antisense strand to SEQ ID NO: 20170
uucaagaauagacuuuaca

SEQ ID NO: 20172 - RNA, 19 nt, Artificial Sequence
  Description of Artificial Sequence: Synthetic oligonucleotide
  Sense strand starting at position 1082 of SEQ ID NO: 218
auugcuccucucugaaaug

SEQ ID NO: 20173 - RNA, 19 nt, Artificial Sequence
  Description of Artificial Sequence: Synthetic oligonucleotide
  Antisense strand to SEQ ID NO: 20172
cauuucagagaggagcaau

SEQ ID NO: 20174 - RNA, 19 nt, Artificial Sequence
  Description of Artificial Sequence: Synthetic oligonucleotide
  Sense strand starting at position 1102 of SEQ ID NO: 218
guacucuguguccaauuaa

SEQ ID NO: 20175 - RNA, 19 nt, Artificial Sequence
  Description of Artificial Sequence: Synthetic oligonucleotide
  Antisense strand to SEQ ID NO: 20174
uuaauuggacacagaguac

SEQ ID NO: 20176 - RNA, 19 nt, Artificial Sequence
  Description of Artificial Sequence: Synthetic oligonucleotide
  Sense strand starting at position 1157 of SEQ ID NO: 218
ugacaaauacuaugccuga

SEQ ID NO: 20177 - RNA, 19 nt, Artificial Sequence
  Description of Artificial Sequence: Synthetic oligonucleotide
  Antisense strand to SEQ ID NO: 20176
ucaggcauaguauuuguca

SEQ ID NO: 20178 - RNA, 19 nt, Artificial Sequence
  Description of Artificial Sequence: Synthetic oligonucleotide
  Sense strand starting at position 1394 of SEQ ID NO: 218
ugaauauccgacuagcgaa

SEQ ID NO: 20179 - RNA, 19 nt, Artificial Sequence
  Description of Artificial Sequence: Synthetic oligonucleotide
  Antisense strand to SEQ ID NO: 20178
uucgcuagucggauauuca

SEQ ID NO: 20180 - RNA, 19 nt, Artificial Sequence
  Description of Artificial Sequence: Synthetic oligonucleotide
  Sense strand starting at position 1495 of SEQ ID NO: 218
acaggaaugugugccaaga

SEQ ID NO: 20181 - RNA, 19 nt, Artificial Sequence
  Description of Artificial Sequence: Synthetic oligonucleotide
  Antisense strand to SEQ ID NO: 20180
ucuuggcacacauuccugu

SEQ ID NO: 20182 - RNA, 19 nt, Artificial Sequence
  Description of Artificial Sequence: Synthetic oligonucleotide
  Sense strand starting at position 1531 of SEQ ID NO: 218
gggcgauuaauguccgugu

SEQ ID NO: 20183 - RNA, 19 nt, Artificial Sequence
  Description of Artificial Sequence: Synthetic oligonucleotide
  Antisense strand to SEQ ID NO: 20182
acacggacauuaaucgccc

SEQ ID NO: 20184 - RNA, 19 nt, Artificial Sequence
  Description of Artificial Sequence: Synthetic oligonucleotide
  Sense strand starting at position 1544 of SEQ ID NO: 218
ccguguaacccauaauaua

SEQ ID NO: 20185 - RNA, 19 nt, Artificial Sequence
  Description of Artificial Sequence: Synthetic oligonucleotide
  Antisense strand to SEQ ID NO: 20184
uauauuauggguuacacgg

SEQ ID NO: 20186 - RNA, 19 nt, Artificial Sequence
  Description of Artificial Sequence: Synthetic oligonucleotide
  Sense strand starting at position 1660 of SEQ ID NO: 218
ugcaguugccacuaacaua

SEQ ID NO: 20187 - RNA, 19 nt, Artificial Sequence
  Description of Artificial Sequence: Synthetic oligonucleotide
  Antisense strand to SEQ ID NO: 20186
uauguuaguggcaacugca

SEQ ID NO: 20188 - RNA, 19 nt, Artificial Sequence
  Description of Artificial Sequence: Synthetic oligonucleotide
  Sense strand starting at position 1956 of SEQ ID NO: 218
guggcauguaaccaaguaa

SEQ ID NO: 20189 - RNA, 19 nt, Artificial Sequence
  Description of Artificial Sequence: Synthetic oligonucleotide
  Antisense strand to SEQ ID NO: 20188
uuacuugguuacaugccac

SEQ ID NO: 20190 - RNA, 19 nt, Artificial Sequence
  Description of Artificial Sequence: Synthetic oligonucleotide
  Sense strand starting at position 2203 of SEQ ID NO: 218
uguugaagacaacgagaua

SEQ ID NO: 20191 - RNA, 19 nt, Artificial Sequence
  Description of Artificial Sequence: Synthetic oligonucleotide
  Antisense strand to SEQ ID NO: 20190
uaucucguugucuucaaca

SEQ ID NO: 20192 - RNA, 19 nt, Artificial Sequence
  Description of Artificial Sequence: Synthetic oligonucleotide
  Sense strand starting at position 2245 of SEQ ID NO: 218
uguagucauccugauagau

SEQ ID NO: 20193 - RNA, 19 nt, Artificial Sequence
  Description of Artificial Sequence: Synthetic oligonucleotide
  Antisense strand to SEQ ID NO: 20192
aucuaucaggaugacuaca

SEQ ID NO: 20194 - RNA, 19 nt, Artificial Sequence
  Description of Artificial Sequence: Synthetic oligonucleotide
  Sense strand starting at position 2352 of SEQ ID NO: 218
acucucaguucuuuaagag

SEQ ID NO: 20195 - RNA, 19 nt, Artificial Sequence
  Description of Artificial Sequence: Synthetic oligonucleotide
  Antisense strand to SEQ ID NO: 20194
cucuuaaagaacugagagu

SEQ ID NO: 20196 - RNA, 19 nt, Artificial Sequence
  Description of Artificial Sequence: Synthetic oligonucleotide
  Sense strand starting at position 2353 of SEQ ID NO: 218
cucucaguucuuuaagagu

SEQ ID NO: 20197 - RNA, 19 nt, Artificial Sequence
  Description of Artificial Sequence: Synthetic oligonucleotide
  Antisense strand to SEQ ID NO: 20196
acucuuaaagaacugagag

SEQ ID NO: 20198 - RNA, 19 nt, Artificial Sequence
  Description of Artificial Sequence: Synthetic oligonucleotide
  Sense strand starting at position 2404 of SEQ ID NO: 218
auaguauuccaucagugca

SEQ ID NO: 20199 - RNA, 19 nt, Artificial Sequence
  Description of Artificial Sequence: Synthetic oligonucleotide
  Antisense strand to SEQ ID NO: 20198
ugcacugauggaauacuau

SEQ ID NO: 20200 - RNA, 19 nt, Artificial Sequence
  Description of Artificial Sequence: Synthetic oligonucleotide
  Sense strand starting at position 2407 of SEQ ID NO: 218
guauuccaucagugcauuu

SEQ ID NO: 20201 - RNA, 19 nt, Artificial Sequence
  Description of Artificial Sequence: Synthetic oligonucleotide
  Antisense strand to SEQ ID NO: 20200
aaaugcacugauggaauac

SEQ ID NO: 20202 - RNA, 19 nt, Artificial Sequence
  Description of Artificial Sequence: Synthetic oligonucleotide
  Sense strand starting at position 2533 of SEQ ID NO: 218
gucacauuacgaugaccaa

SEQ ID NO: 20203 - RNA, 19 nt, Artificial Sequence
  Description of Artificial Sequence: Synthetic oligonucleotide
  Antisense strand to SEQ ID NO: 20202
uuggucaucguaaugugac

SEQ ID NO: 20204 - RNA, 19 nt, Artificial Sequence
  Description of Artificial Sequence: Synthetic oligonucleotide
  Sense strand starting at position 2545 of SEQ ID NO: 218
ugaccaaaucaucagcgau

SEQ ID NO: 20205 - RNA, 19 nt, Artificial Sequence
  Description of Artificial Sequence: Synthetic oligonucleotide
  Antisense strand to SEQ ID NO: 20204
aucgcugaugauuugguca

SEQ ID NO: 20206 - RNA, 19 nt, Artificial Sequence
  Description of Artificial Sequence: Synthetic oligonucleotide
  Sense strand starting at position 2889 of SEQ ID NO: 218
cucugauuccugcaguaac

SEQ ID NO: 20207 - RNA, 19 nt, Artificial Sequence
  Description of Artificial Sequence: Synthetic oligonucleotide
  Antisense strand to SEQ ID NO: 20206
guuacugcaggaaucagag

SEQ ID NO: 20208 - RNA, 19 nt, Artificial Sequence
  Description of Artificial Sequence: Synthetic oligonucleotide
  Sense strand starting at position 2892 of SEQ ID NO: 218
ugauuccugcaguaacuga

SEQ ID NO: 20209 - RNA, 19 nt, Artificial Sequence
  Description of Artificial Sequence: Synthetic oligonucleotide
  Antisense strand to SEQ ID NO: 20208
ucaguuacugcaggaauca

SEQ ID NO: 20210 - RNA, 19 nt, Artificial Sequence
  Description of Artificial Sequence: Synthetic oligonucleotide
  Sense strand starting at position 2992 of SEQ ID NO: 218
cugaucgaucgguaagauu

SEQ ID NO: 20211 - RNA, 19 nt, Artificial Sequence
  Description of Artificial Sequence: Synthetic oligonucleotide
  Antisense strand to SEQ ID NO: 20210
aaucuuaccgaucgaucag

SEQ ID NO: 20212 - RNA, 19 nt, Artificial Sequence
  Description of Artificial Sequence: Synthetic oligonucleotide
  Sense strand starting at position 3149 of SEQ ID NO: 218
ccgguuucccaagggaacu

SEQ ID NO: 20213 - RNA, 19 nt, Artificial Sequence
  Description of Artificial Sequence: Synthetic oligonucleotide
  Antisense strand to SEQ ID NO: 20212
aguucccuugggaaaccgg

SEQ ID NO: 20214 - RNA, 19 nt, Artificial Sequence
  Description of Artificial Sequence: Synthetic oligonucleotide
  Sense strand starting at position 3247 of SEQ ID NO: 218
ggaguacucuccuuagaga

SEQ ID NO: 20215 - RNA, 19 nt, Artificial Sequence
  Description of Artificial Sequence: Synthetic oligonucleotide
  Antisense strand to SEQ ID NO: 20214
ucucuaaggagaguacucc

SEQ ID NO: 20216 - RNA, 19 nt, Artificial Sequence
  Description of Artificial Sequence: Synthetic oligonucleotide
  Sense strand starting at position 3300 of SEQ ID NO: 218
agagcugggaucuguauaa

SEQ ID NO: 20217 - RNA, 19 nt, Artificial Sequence
  Description of Artificial Sequence: Synthetic oligonucleotide
  Antisense strand to SEQ ID NO: 20216
uuauacagaucccagcucu

SEQ ID NO: 20218 - RNA, 19 nt, Artificial Sequence
  Description of Artificial Sequence: Synthetic oligonucleotide
  Sense strand starting at position 3508 of SEQ ID NO: 218
cuugguaaguaaucuuauu

SEQ ID NO: 20219 - RNA, 19 nt, Artificial Sequence
  Description of Artificial Sequence: Synthetic oligonucleotide
  Antisense strand to SEQ ID NO: 20218
aauaagauuacuuaccaag

SEQ ID NO: 20220 - RNA, 19 nt, Artificial Sequence
  Description of Artificial Sequence: Synthetic oligonucleotide
  Sense strand starting at position 3586 of SEQ ID NO: 218
uuauuugcucucuguaugu

SEQ ID NO: 20221 - RNA, 19 nt, Artificial Sequence
  Description of Artificial Sequence: Synthetic oligonucleotide
  Antisense strand to SEQ ID NO: 20220
acauacagagagcaaauaa

SEQ ID NO: 20222 - RNA, 19 nt, Artificial Sequence
  Description of Artificial Sequence: Synthetic oligonucleotide
  Sense strand starting at position 3636 of SEQ ID NO: 218
uuuccucuucccuaggaga

SEQ ID NO: 20223 - RNA, 19 nt, Artificial Sequence
  Description of Artificial Sequence: Synthetic oligonucleotide
  Antisense strand to SEQ ID NO: 20222
ucuccuagggaagaggaaa

SEQ ID NO: 20224 - RNA, 19 nt, Artificial Sequence
  Description of Artificial Sequence: Synthetic oligonucleotide
  Sense strand starting at position 3638 of SEQ ID NO: 218
uccucuucccuaggagagu

SEQ ID NO: 20225 - RNA, 19 nt, Artificial Sequence
  Description of Artificial Sequence: Synthetic oligonucleotide
  Antisense strand to SEQ ID NO: 20224
acucuccuagggaagagga

SEQ ID NO: 20226 - RNA, 19 nt, Artificial Sequence
  Description of Artificial Sequence: Synthetic oligonucleotide
  Sense strand starting at position 3661 of SEQ ID NO: 218
gcuuguaagggugaaauug

SEQ ID NO: 20227 - RNA, 19 nt, Artificial Sequence
  Description of Artificial Sequence: Synthetic oligonucleotide
  Antisense strand to SEQ ID NO: 20226
caauuucacccuuacaagc

SEQ ID NO: 20228 - RNA, 19 nt, Artificial Sequence
  Description of Artificial Sequence: Synthetic oligonucleotide
  Sense strand starting at position 3669 of SEQ ID NO: 218
gggugaaauugaaguagag

SEQ ID NO: 20229 - RNA, 19 nt, Artificial Sequence
  Description of Artificial Sequence: Synthetic oligonucleotide
  Antisense strand to SEQ ID NO: 20228
cucuacuucaauuucaccc

SEQ ID NO: 20230 - RNA, 19 nt, Artificial Sequence
  Description of Artificial Sequence: Synthetic oligonucleotide
  Sense strand starting at position 3698 of SEQ ID NO: 218
agacaauaugaacgcuuua

SEQ ID NO: 20231 - RNA, 19 nt, Artificial Sequence
  Description of Artificial Sequence: Synthetic oligonucleotide
  Antisense strand to SEQ ID NO: 20230
uaaagcguucauauugucu

SEQ ID NO: 20232 - RNA, 19 nt, Artificial Sequence
  Description of Artificial Sequence: Synthetic oligonucleotide
  Sense strand starting at position 3945 of SEQ ID NO: 218
ucacauuucgcagguauau

SEQ ID NO: 20233 - RNA, 19 nt, Artificial Sequence
  Description of Artificial Sequence: Synthetic oligonucleotide
  Antisense strand to SEQ ID NO: 20232
auauaccugcgaaauguga

SEQ ID NO: 20234 - RNA, 19 nt, Artificial Sequence
  Description of Artificial Sequence: Synthetic oligonucleotide
  Sense strand starting at position 3881 of SEQ ID NO: 219
guaauucuguaagugaauu

SEQ ID NO: 20235 - RNA, 19 nt, Artificial Sequence
  Description of Artificial Sequence: Synthetic oligonucleotide
  Antisense strand to SEQ ID NO: 20234
aauucacuuacagaauuac

SEQ ID NO: 20236 - RNA, 19 nt, Artificial Sequence
  Description of Artificial Sequence: Synthetic oligonucleotide
  Sense strand starting at position 3878 of SEQ ID NO: 219
agaguaauucuguaaguga

SEQ ID NO: 20237 - RNA, 19 nt, Artificial Sequence
  Description of Artificial Sequence: Synthetic oligonucleotide
  Antisense strand to SEQ ID NO: 20236
ucacuuacagaauuacucu

SEQ ID NO: 20238 - RNA, 19 nt, Artificial Sequence
  Description of Artificial Sequence: Synthetic oligonucleotide
  Sense strand starting at position 3877 of SEQ ID NO: 219
gagaguaauucuguaagug

SEQ ID NO: 20239 - RNA, 19 nt, Artificial Sequence
  Description of Artificial Sequence: Synthetic oligonucleotide
  Antisense strand to SEQ ID NO: 20238
cacuuacagaauuacucuc

SEQ ID NO: 20240 - RNA, 19 nt, Artificial Sequence
  Description of Artificial Sequence: Synthetic oligonucleotide
  Sense strand starting at position 3873 of SEQ ID NO: 219
cugagagaguaauucugua

SEQ ID NO: 20241 - RNA, 19 nt, Artificial Sequence
  Description of Artificial Sequence: Synthetic oligonucleotide
  Antisense strand to SEQ ID NO: 20240
uacagaauuacucucucag

SEQ ID NO: 20242 - RNA, 19 nt, Artificial Sequence
  Description of Artificial Sequence: Synthetic oligonucleotide
  Sense strand starting at position 3851 of SEQ ID NO: 219
acuacagagugcuuaagau

SEQ ID NO: 20243 - RNA, 19 nt, Artificial Sequence
  Description of Artificial Sequence: Synthetic oligonucleotide
  Antisense strand to SEQ ID NO: 20242
aucuuaagcacucuguagu

SEQ ID NO: 20244 - RNA, 19 nt, Artificial Sequence
  Description of Artificial Sequence: Synthetic oligonucleotide
  Sense strand starting at position 3848 of SEQ ID NO: 219
ucuacuacagagugcuuaa

SEQ ID NO: 20245 - RNA, 19 nt, Artificial Sequence
  Description of Artificial Sequence: Synthetic oligonucleotide
  Antisense strand to SEQ ID NO: 20244
uuaagcacucuguaguaga

SEQ ID NO: 20246 - RNA, 19 nt, Artificial Sequence
  Description of Artificial Sequence: Synthetic oligonucleotide
  Sense strand starting at position 3807 of SEQ ID NO: 219
acugaaaucugggauuuaa

SEQ ID NO: 20247 - RNA, 19 nt, Artificial Sequence
  Description of Artificial Sequence: Synthetic oligonucleotide
  Antisense strand to SEQ ID NO: 20246
uuaaaucccagauuucagu

SEQ ID NO: 20248 - RNA, 19 nt, Artificial Sequence
  Description of Artificial Sequence: Synthetic oligonucleotide
  Sense strand starting at position 3797 of SEQ ID NO: 219
agcugauaccacugaaauc

SEQ ID NO: 20249 - RNA, 19 nt, Artificial Sequence
  Description of Artificial Sequence: Synthetic oligonucleotide
  Antisense strand to SEQ ID NO: 20248
gauuucagugguaucagcu

SEQ ID NO: 20250 - RNA, 19 nt, Artificial Sequence
  Description of Artificial Sequence: Synthetic oligonucleotide
  Sense strand starting at position 3711 of SEQ ID NO: 219
gcaauaacccagugagaau

SEQ ID NO: 20251 - RNA, 19 nt, Artificial Sequence
  Description of Artificial Sequence: Synthetic oligonucleotide
  Antisense strand to SEQ ID NO: 20250
auucucacuggguuauugc

SEQ ID NO: 20252 - RNA, 19 nt, Artificial Sequence
  Description of Artificial Sequence: Synthetic oligonucleotide
  Sense strand starting at position 3594 of SEQ ID NO: 219
uuugaaucgccuguagcuu

SEQ ID NO: 20253 - RNA, 19 nt, Artificial Sequence
  Description of Artificial Sequence: Synthetic oligonucleotide
  Antisense strand to SEQ ID NO: 20252
aagcuacaggcgauucaaa

SEQ ID NO: 20254 - RNA, 19 nt, Artificial Sequence
  Description of Artificial Sequence: Synthetic oligonucleotide
  Sense strand starting at position 3538 of SEQ ID NO: 219
ccgcaauaguuauuuguuu

SEQ ID NO: 20255 - RNA, 19 nt, Artificial Sequence
  Description of Artificial Sequence: Synthetic oligonucleotide
  Antisense strand to SEQ ID NO: 20254
aaacaaauaacuauugcgg

SEQ ID NO: 20256 - RNA, 19 nt, Artificial Sequence
  Description of Artificial Sequence: Synthetic oligonucleotide
  Sense strand starting at position 3499 of SEQ ID NO: 219
acgcuugguacuuggaaga

SEQ ID NO: 20257 - RNA, 19 nt, Artificial Sequence
  Description of Artificial Sequence: Synthetic oligonucleotide
  Antisense strand to SEQ ID NO: 20256
ucuuccaaguaccaagcgu

SEQ ID NO: 20258 - RNA, 19 nt, Artificial Sequence
  Description of Artificial Sequence: Synthetic oligonucleotide
  Sense strand starting at position 3478 of SEQ ID NO: 219
aacgauuucuggcaagaau

SEQ ID NO: 20259 - RNA, 19 nt, Artificial Sequence
  Description of Artificial Sequence: Synthetic oligonucleotide
  Antisense strand to SEQ ID NO: 20258
auucuugccagaaaucguu

SEQ ID NO: 20260 - RNA, 19 nt, Artificial Sequence
  Description of Artificial Sequence: Synthetic oligonucleotide
  Sense strand starting at position 3419 of SEQ ID NO: 219
aaccacguaugaguagaau

SEQ ID NO: 20261 - RNA, 19 nt, Artificial Sequence
  Description of Artificial Sequence: Synthetic oligonucleotide
  Antisense strand to SEQ ID NO: 20260
auucuacucauacgugguu

SEQ ID NO: 20262 - RNA, 19 nt, Artificial Sequence
  Description of Artificial Sequence: Synthetic oligonucleotide
  Sense strand starting at position 3410 of SEQ ID NO: 219
ugaguaugaaaccacguau

SEQ ID NO: 20263 - RNA, 19 nt, Artificial Sequence
  Description of Artificial Sequence: Synthetic oligonucleotide
  Antisense strand to SEQ ID NO: 20262
auacgugguuucauacuca

SEQ ID NO: 20264 - RNA, 19 nt, Artificial Sequence
  Description of Artificial Sequence: Synthetic oligonucleotide
  Sense strand starting at position 3387 of SEQ ID NO: 219
caaguuauuguuugagauu

SEQ ID NO: 20265 - RNA, 19 nt, Artificial Sequence
  Description of Artificial Sequence: Synthetic oligonucleotide
  Antisense strand to SEQ ID NO: 20264
aaucucaaacaauaacuug

SEQ ID NO: 20266 - RNA, 19 nt, Artificial Sequence
  Description of Artificial Sequence: Synthetic oligonucleotide
  Sense strand starting at position 3352 of SEQ ID NO: 219
uugcaaacucgccauuaau

SEQ ID NO: 20267 - RNA, 19 nt, Artificial Sequence
  Description of Artificial Sequence: Synthetic oligonucleotide
  Antisense strand to SEQ ID NO: 20266
auuaauggcgaguuugcaa

SEQ ID NO: 20268 - RNA, 19 nt, Artificial Sequence
  Description of Artificial Sequence: Synthetic oligonucleotide
  Sense strand starting at position 3323 of SEQ ID NO: 219
uuaagaacugucugccaaa

SEQ ID NO: 20269 - RNA, 19 nt, Artificial Sequence
  Description of Artificial Sequence: Synthetic oligonucleotide
  Antisense strand to SEQ ID NO: 20268
uuuggcagacaguucuuaa

SEQ ID NO: 20270 - RNA, 19 nt, Artificial Sequence
  Description of Artificial Sequence: Synthetic oligonucleotide
  Sense strand starting at position 3219 of SEQ ID NO: 219
ccuuucugguuuccacaga

SEQ ID NO: 20271 - RNA, 19 nt, Artificial Sequence
  Description of Artificial Sequence: Synthetic oligonucleotide
  Antisense strand to SEQ ID NO: 20270
ucuguggaaaccagaaagg

SEQ ID NO: 20272 - RNA, 19 nt, Artificial Sequence
  Description of Artificial Sequence: Synthetic oligonucleotide
  Sense strand starting at position 3182 of SEQ ID NO: 219
accaguuuccuugagcaac

SEQ ID NO: 20273 - RNA, 19 nt, Artificial Sequence
  Description of Artificial Sequence: Synthetic oligonucleotide
  Antisense strand to SEQ ID NO: 20272
guugcucaaggaaacuggu

SEQ ID NO: 20274 - RNA, 19 nt, Artificial Sequence
  Description of Artificial Sequence: Synthetic oligonucleotide
  Sense strand starting at position 3047 of SEQ ID NO: 219
gguggaguccgcgcaggau

SEQ ID NO: 20275 - RNA, 19 nt, Artificial Sequence
  Description of Artificial Sequence: Synthetic oligonucleotide
  Antisense strand to SEQ ID NO: 20274
auccugcgcggacuccacc

SEQ ID NO: 20276 - RNA, 19 nt, Artificial Sequence
  Description of Artificial Sequence: Synthetic oligonucleotide
  Sense strand starting at position 2997 of SEQ ID NO: 219
guuauuugguaggcuguga

SEQ ID NO: 20277 - RNA, 19 nt, Artificial Sequence
  Description of Artificial Sequence: Synthetic oligonucleotide
  Antisense strand to SEQ ID NO: 20276
ucacagccuaccaaauaac

SEQ ID NO: 20278 - RNA, 19 nt, Artificial Sequence
  Description of Artificial Sequence: Synthetic oligonucleotide
  Sense strand starting at position 2993 of SEQ ID NO: 219
gacuguuauuugguaggcu

SEQ ID NO: 20279 - RNA, 19 nt, Artificial Sequence
  Description of Artificial Sequence: Synthetic oligonucleotide
  Antisense strand to SEQ ID NO: 20278
agccuaccaaauaacaguc

SEQ ID NO: 20280 - RNA, 19 nt, Artificial Sequence
  Description of Artificial Sequence: Synthetic oligonucleotide
  Sense strand starting at position 2882 of SEQ ID NO: 219
agggauaccucuucugcca

SEQ ID NO: 20281 - RNA, 19 nt, Artificial Sequence
  Description of Artificial Sequence: Synthetic oligonucleotide
  Antisense strand to SEQ ID NO: 20280
uggcagaagagguaucccu

SEQ ID NO: 20282 - RNA, 19 nt, Artificial Sequence
  Description of Artificial Sequence: Synthetic oligonucleotide
  Sense strand starting at position 2806 of SEQ ID NO: 219
uucuuccaugcguaggaaa

SEQ ID NO: 20283 - RNA, 19 nt, Artificial Sequence
  Description of Artificial Sequence: Synthetic oligonucleotide
  Antisense strand to SEQ ID NO: 20282
uuuccuacgcauggaagaa

SEQ ID NO: 20284 - RNA, 19 nt, Artificial Sequence
  Description of Artificial Sequence: Synthetic oligonucleotide
  Sense strand starting at position 2763 of SEQ ID NO: 219
ccacguuccaaggaugagu

SEQ ID NO: 20285 - RNA, 19 nt, Artificial Sequence
  Description of Artificial Sequence: Synthetic oligonucleotide
  Antisense strand to SEQ ID NO: 20284
acucauccuuggaacgugg

SEQ ID NO: 20286 - RNA, 19 nt, Artificial Sequence
  Description of Artificial Sequence: Synthetic oligonucleotide
  Sense strand starting at position 2623 of SEQ ID NO: 219
gcaggcuaucugcuuaguu

SEQ ID NO: 20287 - RNA, 19 nt, Artificial Sequence
  Description of Artificial Sequence: Synthetic oligonucleotide
  Antisense strand to SEQ ID NO: 20286
aacuaagcagauagccugc

SEQ ID NO: 20288 - RNA, 19 nt, Artificial Sequence
  Description of Artificial Sequence: Synthetic oligonucleotide
  Sense strand starting at position 2340 of SEQ ID NO: 219
aucagaugugagugacuaa

SEQ ID NO: 20289 - RNA, 19 nt, Artificial Sequence
  Description of Artificial Sequence: Synthetic oligonucleotide
  Antisense strand to SEQ ID NO: 20288
uuagucacucacaucugau

SEQ ID NO: 20290 - RNA, 19 nt, Artificial Sequence
  Description of Artificial Sequence: Synthetic oligonucleotide
  Sense strand starting at position 2336 of SEQ ID NO: 219
gaguaucagaugugaguga

SEQ ID NO: 20291 - RNA, 19 nt, Artificial Sequence
  Description of Artificial Sequence: Synthetic oligonucleotide
  Antisense strand to SEQ ID NO: 20290
ucacucacaucugauacuc

SEQ ID NO: 20292 - RNA, 19 nt, Artificial Sequence
  Description of Artificial Sequence: Synthetic oligonucleotide
  Sense strand starting at position 1539 of SEQ ID NO: 219
auccuauugcuugagacuc

SEQ ID NO: 20293 - RNA, 19 nt, Artificial Sequence
  Description of Artificial Sequence: Synthetic oligonucleotide
  Antisense strand to SEQ ID NO: 20292
gagucucaagcaauaggau

SEQ ID NO: 20294 - RNA, 19 nt, Artificial Sequence
  Description of Artificial Sequence: Synthetic oligonucleotide
  Sense strand starting at position 1538 of SEQ ID NO: 219
gauccuauugcuugagacu

SEQ ID NO: 20295 - RNA, 19 nt, Artificial Sequence
  Description of Artificial Sequence: Synthetic oligonucleotide
  Antisense strand to SEQ ID NO: 20294
agucucaagcaauaggauc

SEQ ID NO: 20296 - RNA, 19 nt, Artificial Sequence
  Description of Artificial Sequence: Synthetic oligonucleotide
  Sense strand starting at position 1536 of SEQ ID NO: 219
gugauccuauugcuugaga

SEQ ID NO: 20297 - RNA, 19 nt, Artificial Sequence
  Description of Artificial Sequence: Synthetic oligonucleotide
  Antisense strand to SEQ ID NO: 20296
ucucaagcaauaggaucac

SEQ ID NO: 20298 - RNA, 19 nt, Artificial Sequence
  Description of Artificial Sequence: Synthetic oligonucleotide
  Sense strand starting at position 1432 of SEQ ID NO: 219
uguggugaccaauauggau

SEQ ID NO: 20299 - RNA, 19 nt, Artificial Sequence
  Description of Artificial Sequence: Synthetic oligonucleotide
  Antisense strand to SEQ ID NO: 20298
auccauauuggucaccaca

SEQ ID NO: 20300 - RNA, 19 nt, Artificial Sequence
  Description of Artificial Sequence: Synthetic oligonucleotide
  Sense strand starting at position 1004 of SEQ ID NO: 219
ggacaagggugccuuuaga

SEQ ID NO: 20301 - RNA, 19 nt, Artificial Sequence
  Description of Artificial Sequence: Synthetic oligonucleotide
  Antisense strand to SEQ ID NO: 20300
ucuaaaggcacccuugucc

SEQ ID NO: 20302 - RNA, 19 nt, Artificial Sequence
  Description of Artificial Sequence: Synthetic oligonucleotide
  Sense strand starting at position 961 of SEQ ID NO: 219
gaguuccuagggugggaua

SEQ ID NO: 20303 - RNA, 19 nt, Artificial Sequence
  Description of Artificial Sequence: Synthetic oligonucleotide
  Antisense strand to SEQ ID NO: 20302
uaucccacccuaggaacuc

SEQ ID NO: 20304 - RNA, 19 nt, Artificial Sequence
  Description of Artificial Sequence: Synthetic oligonucleotide
  Sense strand starting at position 548 of SEQ ID NO: 219
guaugaaaugccuacauua

SEQ ID NO: 20305 - RNA, 19 nt, Artificial Sequence
  Description of Artificial Sequence: Synthetic oligonucleotide
  Antisense strand to SEQ ID NO: 20304
uaauguaggcauuucauac

SEQ ID NO: 20306 - RNA, 19 nt, Artificial Sequence
  Description of Artificial Sequence: Synthetic oligonucleotide
  Sense strand starting at position 537 of SEQ ID NO: 219
ggcuguacaguguaugaaa

SEQ ID NO: 20307 - RNA, 19 nt, Artificial Sequence
  Description of Artificial Sequence: Synthetic oligonucleotide
  Antisense strand to SEQ ID NO: 20306
uuucauacacuguacagcc

SEQ ID NO: 20308 - RNA, 19 nt, Artificial Sequence
  Description of Artificial Sequence: Synthetic oligonucleotide
  Sense strand starting at position 376 of SEQ ID NO: 219
gguagugcagcagauaaua

SEQ ID NO: 20309 - RNA, 19 nt, Artificial Sequence
  Description of Artificial Sequence: Synthetic oligonucleotide
  Antisense strand to SEQ ID NO: 20308
uauuaucugcugcacuacc

SEQ ID NO: 20310 - RNA, 19 nt, Artificial Sequence
  Description of Artificial Sequence: Synthetic oligonucleotide
  Sense strand starting at position 361 of SEQ ID NO: 219
aaauguccuuggguaggua

SEQ ID NO: 20311 - RNA, 19 nt, Artificial Sequence
  Description of Artificial Sequence: Synthetic oligonucleotide
  Antisense strand to SEQ ID NO: 20310
uaccuacccaaggacauuu

SEQ ID NO: 20312 - RNA, 19 nt, Artificial Sequence
  Description of Artificial Sequence: Synthetic oligonucleotide
  Sense strand starting at position 358 of SEQ ID NO: 219
ucuaaauguccuuggguag

SEQ ID NO: 20313 - RNA, 19 nt, Artificial Sequence
  Description of Artificial Sequence: Synthetic oligonucleotide
  Antisense strand to SEQ ID NO: 20312
cuacccaaggacauuuaga

SEQ ID NO: 20314 - RNA, 19 nt, Artificial Sequence
  Description of Artificial Sequence: Synthetic oligonucleotide
  Sense strand starting at position 3950 of SEQ ID NO: 220
accaguuuccuugagcaac

SEQ ID NO: 20315 - RNA, 19 nt, Artificial Sequence
  Description of Artificial Sequence: Synthetic oligonucleotide
  Antisense strand to SEQ ID NO: 20314
guugcucaaggaaacuggu

SEQ ID NO: 20316 - RNA, 19 nt, Artificial Sequence
  Description of Artificial Sequence: Synthetic oligonucleotide
  Sense strand starting at position 3922 of SEQ ID NO: 220
aauguauagccgcagggua

SEQ ID NO: 20317 - RNA, 19 nt, Artificial Sequence
  Description of Artificial Sequence: Synthetic oligonucleotide
  Antisense strand to SEQ ID NO: 20316
uacccugcggcuauacauu

SEQ ID NO: 20318 - RNA, 19 nt, Artificial Sequence
  Description of Artificial Sequence: Synthetic oligonucleotide
  Sense strand starting at position 3815 of SEQ ID NO: 220
gguggaguccgcgcaggau

SEQ ID NO: 20319 - RNA, 19 nt, Artificial Sequence
  Description of Artificial Sequence: Synthetic oligonucleotide
  Antisense strand to SEQ ID NO: 20318
auccugcgcggacuccacc

SEQ ID NO: 20320 - RNA, 19 nt, Artificial Sequence
  Description of Artificial Sequence: Synthetic oligonucleotide
  Sense strand starting at position 3765 of SEQ ID NO: 220
guuauuugguaggcuguga

SEQ ID NO: 20321 - RNA, 19 nt, Artificial Sequence
  Description of Artificial Sequence: Synthetic oligonucleotide
  Antisense strand to SEQ ID NO: 20320
ucacagccuaccaaauaac

SEQ ID NO: 20322 - RNA, 19 nt, Artificial Sequence
  Description of Artificial Sequence: Synthetic oligonucleotide
  Sense strand starting at position 3761 of SEQ ID NO: 220
gacuguuauuugguaggcu

SEQ ID NO: 20323 - RNA, 19 nt, Artificial Sequence
  Description of Artificial Sequence: Synthetic oligonucleotide
  Antisense strand to SEQ ID NO: 20322
agccuaccaaauaacaguc

SEQ ID NO: 20324 - RNA, 19 nt, Artificial Sequence
  Description of Artificial Sequence: Synthetic oligonucleotide
  Sense strand starting at position 3752 of SEQ ID NO: 220
gguuucugggacuguuauu

SEQ ID NO: 20325 - RNA, 19 nt, Artificial Sequence
  Description of Artificial Sequence: Synthetic oligonucleotide
  Antisense strand to SEQ ID NO: 20324
aauaacagucccagaaacc

SEQ ID NO: 20326 - RNA, 19 nt, Artificial Sequence
  Description of Artificial Sequence: Synthetic oligonucleotide
  Sense strand starting at position 3650 of SEQ ID NO: 220
agggauaccucuucugcca

SEQ ID NO: 20327 - RNA, 19 nt, Artificial Sequence
  Description of Artificial Sequence: Synthetic oligonucleotide
  Antisense strand to SEQ ID NO: 20326
uggcagaagagguaucccu

SEQ ID NO: 20328 - RNA, 19 nt, Artificial Sequence
  Description of Artificial Sequence: Synthetic oligonucleotide
  Sense strand starting at position 3594 of SEQ ID NO: 220
gagggaacuguuugcgauu

SEQ ID NO: 20329 - RNA, 19 nt, Artificial Sequence
  Description of Artificial Sequence: Synthetic oligonucleotide
  Antisense strand to SEQ ID NO: 20328
aaucgcaaacaguucccuc

SEQ ID NO: 20330 - RNA, 19 nt, Artificial Sequence
  Description of Artificial Sequence: Synthetic oligonucleotide
  Sense strand starting at position 3574 of SEQ ID NO: 220
uucuuccaugcguaggaaa

SEQ ID NO: 20331 - RNA, 19 nt, Artificial Sequence
  Description of Artificial Sequence: Synthetic oligonucleotide
  Antisense strand to SEQ ID NO: 20330
uuuccuacgcauggaagaa

SEQ ID NO: 20332 - RNA, 19 nt, Artificial Sequence
  Description of Artificial Sequence: Synthetic oligonucleotide
  Sense strand starting at position 3531 of SEQ ID NO: 220
ccacguuccaaggaugagu

SEQ ID NO: 20333 - RNA, 19 nt, Artificial Sequence
  Description of Artificial Sequence: Synthetic oligonucleotide
  Antisense strand to SEQ ID NO: 20332
acucauccuuggaacgugg

SEQ ID NO: 20334 - RNA, 19 nt, Artificial Sequence
  Description of Artificial Sequence: Synthetic oligonucleotide
  Sense strand starting at position 3509 of SEQ ID NO: 220
ggaauacuuguguguucuc

SEQ ID NO: 20335 - RNA, 19 nt, Artificial Sequence
  Description of Artificial Sequence: Synthetic oligonucleotide
  Antisense strand to SEQ ID NO: 20334
gagaacacacaaguauucc

SEQ ID NO: 20336 - RNA, 19 nt, Artificial Sequence
  Description of Artificial Sequence: Synthetic oligonucleotide
  Sense strand starting at position 3508 of SEQ ID NO: 220
aggaauacuuguguguucu

SEQ ID NO: 20337 - RNA, 19 nt, Artificial Sequence
  Description of Artificial Sequence: Synthetic oligonucleotide
  Antisense strand to SEQ ID NO: 20336
agaacacacaaguauuccu

SEQ ID NO: 20338 - RNA, 19 nt, Artificial Sequence
  Description of Artificial Sequence: Synthetic oligonucleotide
  Sense strand starting at position 3391 of SEQ ID NO: 220
gcaggcuaucugcuuaguu

SEQ ID NO: 20339 - RNA, 19 nt, Artificial Sequence
  Description of Artificial Sequence: Synthetic oligonucleotide
  Antisense strand to SEQ ID NO: 20338
aacuaagcagauagccugc

SEQ ID NO: 20340 - RNA, 19 nt, Artificial Sequence
  Description of Artificial Sequence: Synthetic oligonucleotide
  Sense strand starting at position 3108 of SEQ ID NO: 220
aucagaugugagugacuaa

SEQ ID NO: 20341 - RNA, 19 nt, Artificial Sequence
  Description of Artificial Sequence: Synthetic oligonucleotide
  Antisense strand to SEQ ID NO: 20340
uuagucacucacaucugau

SEQ ID NO: 20342 - RNA, 19 nt, Artificial Sequence
  Description of Artificial Sequence: Synthetic oligonucleotide
  Sense strand starting at position 3104 of SEQ ID NO: 220
gaguaucagaugugaguga

SEQ ID NO: 20343 - RNA, 19 nt, Artificial Sequence
  Description of Artificial Sequence: Synthetic oligonucleotide
  Antisense strand to SEQ ID NO: 20342
ucacucacaucugauacuc

SEQ ID NO: 20344 - RNA, 19 nt, Artificial Sequence
  Description of Artificial Sequence: Synthetic oligonucleotide
  Sense strand starting at position 3102 of SEQ ID NO: 220
acgaguaucagaugugagu

SEQ ID NO: 20345 - RNA, 19 nt, Artificial Sequence
  Description of Artificial Sequence: Synthetic oligonucleotide
  Antisense strand to SEQ ID NO: 20344
acucacaucugauacucgu

SEQ ID NO: 20346 - RNA, 19 nt, Artificial Sequence
  Description of Artificial Sequence: Synthetic oligonucleotide
  Sense strand starting at position 2341 of SEQ ID NO: 220
ggauauuacugagaaacac

SEQ ID NO: 20347 - RNA, 19 nt, Artificial Sequence
  Description of Artificial Sequence: Synthetic oligonucleotide
  Antisense strand to SEQ ID NO: 20346
guguuucucaguaauaucc

SEQ ID NO: 20348 - RNA, 19 nt, Artificial Sequence
  Description of Artificial Sequence: Synthetic oligonucleotide
  Sense strand starting at position 2307 of SEQ ID NO: 220
auccuauugcuugagacuc

SEQ ID NO: 20349 - RNA, 19 nt, Artificial Sequence
  Description of Artificial Sequence: Synthetic oligonucleotide
  Antisense strand to SEQ ID NO: 20348
gagucucaagcaauaggau

SEQ ID NO: 20350 - RNA, 19 nt, Artificial Sequence
  Description of Artificial Sequence: Synthetic oligonucleotide
  Sense strand starting at position 2306 of SEQ ID NO: 220
gauccuauugcuugagacu

SEQ ID NO: 20351 - RNA, 19 nt, Artificial Sequence
  Description of Artificial Sequence: Synthetic oligonucleotide
  Antisense strand to SEQ ID NO: 20350
agucucaagcaauaggauc

SEQ ID NO: 20352 - RNA, 19 nt, Artificial Sequence
  Description of Artificial Sequence: Synthetic oligonucleotide
  Sense strand starting at position 2304 of SEQ ID NO: 220
gugauccuauugcuugaga

SEQ ID NO: 20353 - RNA, 19 nt, Artificial Sequence
  Description of Artificial Sequence: Synthetic oligonucleotide
  Antisense strand to SEQ ID NO: 20352
ucucaagcaauaggaucac

SEQ ID NO: 20354 - RNA, 19 nt, Artificial Sequence
  Description of Artificial Sequence: Synthetic oligonucleotide
  Sense strand starting at position 2200 of SEQ ID NO: 220
uguggugaccaauauggau

SEQ ID NO: 20355 - RNA, 19 nt, Artificial Sequence
  Description of Artificial Sequence: Synthetic oligonucleotide
  Antisense strand to SEQ ID NO: 20354
auccauauuggucaccaca

SEQ ID NO: 20356 - RNA, 19 nt, Artificial Sequence
  Description of Artificial Sequence: Synthetic oligonucleotide
  Sense strand starting at position 1772 of SEQ ID NO: 220
ggacaagggugccuuuaga

SEQ ID NO: 20357 - RNA, 19 nt, Artificial Sequence
  Description of Artificial Sequence: Synthetic oligonucleotide
  Antisense strand to SEQ ID NO: 20356
ucuaaaggcacccuugucc

SEQ ID NO: 20358 - RNA, 19 nt, Artificial Sequence
  Description of Artificial Sequence: Synthetic oligonucleotide
  Sense strand starting at position 1729 of SEQ ID NO: 220
gaguuccuagggugggaua

SEQ ID NO: 20359 - RNA, 19 nt, Artificial Sequence
  Description of Artificial Sequence: Synthetic oligonucleotide
  Antisense strand to SEQ ID NO: 20358
uaucccacccuaggaacuc

SEQ ID NO: 20360 - RNA, 19 nt, Artificial Sequence
  Description of Artificial Sequence: Synthetic oligonucleotide
  Sense strand starting at position 1316 of SEQ ID NO: 220
guaugaaaugccuacauua

SEQ ID NO: 20361 - RNA, 19 nt, Artificial Sequence
  Description of Artificial Sequence: Synthetic oligonucleotide
  Antisense strand to SEQ ID NO: 20360
uaauguaggcauuucauac

SEQ ID NO: 20362 - RNA, 19 nt, Artificial Sequence
  Description of Artificial Sequence: Synthetic oligonucleotide
  Sense strand starting at position 1305 of SEQ ID NO: 220
ggcuguacaguguaugaaa

SEQ ID NO: 20363 - RNA, 19 nt, Artificial Sequence
  Description of Artificial Sequence: Synthetic oligonucleotide
  Antisense strand to SEQ ID NO: 20362
uuucauacacuguacagcc

SEQ ID NO: 20364 - RNA, 19 nt, Artificial Sequence
  Description of Artificial Sequence: Synthetic oligonucleotide
  Sense strand starting at position 1144 of SEQ ID NO: 220
gguagugcagcagauaaua

SEQ ID NO: 20365 - RNA, 19 nt, Artificial Sequence
  Description of Artificial Sequence: Synthetic oligonucleotide
  Antisense strand to SEQ ID NO: 20364
uauuaucugcugcacuacc

SEQ ID NO: 20366 - RNA, 19 nt, Artificial Sequence
  Description of Artificial Sequence: Synthetic oligonucleotide
  Sense strand starting at position 1129 of SEQ ID NO: 220
aaauguccuuggguaggua

SEQ ID NO: 20367 - RNA, 19 nt, Artificial Sequence
  Description of Artificial Sequence: Synthetic oligonucleotide
  Antisense strand to SEQ ID NO: 20366
uaccuacccaaggacauuu

SEQ ID NO: 20368 - RNA, 19 nt, Artificial Sequence
  Description of Artificial Sequence: Synthetic oligonucleotide
  Sense strand starting at position 1126 of SEQ ID NO: 220
ucuaaauguccuuggguag

SEQ ID NO: 20369 - RNA, 19 nt, Artificial Sequence
  Description of Artificial Sequence: Synthetic oligonucleotide
  Antisense strand to SEQ ID NO: 20368
cuacccaaggacauuuaga

SEQ ID NO: 20370 - RNA, 19 nt, Artificial Sequence
  Description of Artificial Sequence: Synthetic oligonucleotide
  Sense strand starting at position 1125 of SEQ ID NO: 220
gucuaaauguccuugggua

SEQ ID NO: 20371 - RNA, 19 nt, Artificial Sequence
  Description of Artificial Sequence: Synthetic oligonucleotide
  Antisense strand to SEQ ID NO: 20370
uacccaaggacauuuagac

SEQ ID NO: 20372 - RNA, 19 nt, Artificial Sequence
  Description of Artificial Sequence: Synthetic oligonucleotide
  Sense strand starting at position 1116 of SEQ ID NO: 220
gcaugucuugucuaaaugu

SEQ ID NO: 20373 - RNA, 19 nt, Artificial Sequence
  Description of Artificial Sequence: Synthetic oligonucleotide
  Antisense strand to SEQ ID NO: 20372
acauuuagacaagacaugc

SEQ ID NO: 20374 - RNA, 19 nt, Artificial Sequence
  Description of Artificial Sequence: Synthetic oligonucleotide
  Sense strand starting at position 330 of SEQ ID NO: 220
gcauguguucuacaauaaa

SEQ ID NO: 20375 - RNA, 19 nt, Artificial Sequence
  Description of Artificial Sequence: Synthetic oligonucleotide
  Antisense strand to SEQ ID NO: 20374
uuuauuguagaacacaugc

SEQ ID NO: 20376 - RNA, 19 nt, Artificial Sequence
  Description of Artificial Sequence: Synthetic oligonucleotide
  Sense strand starting at position 310 of SEQ ID NO: 220
acaacaguggauugguuau

SEQ ID NO: 20377 - RNA, 19 nt, Artificial Sequence
  Description of Artificial Sequence: Synthetic oligonucleotide
  Antisense strand to SEQ ID NO: 20376
auaaccaauccacuguugu

SEQ ID NO: 20378 - RNA, 19 nt, Artificial Sequence
  Description of Artificial Sequence: Synthetic oligonucleotide
  Sense strand starting at position 297 of SEQ ID NO: 220
cgacauauugcugacaaca

SEQ ID NO: 20379 - RNA, 19 nt, Artificial Sequence
  Description of Artificial Sequence: Synthetic oligonucleotide
  Antisense strand to SEQ ID NO: 20378
uguugucagcaauaugucg

SEQ ID NO: 20380 - RNA, 19 nt, Artificial Sequence
  Description of Artificial Sequence: Synthetic oligonucleotide
  Sense strand starting at position 295 of SEQ ID NO: 220
uccgacauauugcugacaa

SEQ ID NO: 20381 - RNA, 19 nt, Artificial Sequence
  Description of Artificial Sequence: Synthetic oligonucleotide
  Antisense strand to SEQ ID NO: 20380
uugucagcaauaugucgga

SEQ ID NO: 20382 - RNA, 19 nt, Artificial Sequence
  Description of Artificial Sequence: Synthetic oligonucleotide
  Sense strand starting at position 284 of SEQ ID NO: 220
acugcuguauuuccgacau

SEQ ID NO: 20383 - RNA, 19 nt, Artificial Sequence
  Description of Artificial Sequence: Synthetic oligonucleotide
  Antisense strand to SEQ ID NO: 20382
augucggaaauacagcagu

SEQ ID NO: 20384 - RNA, 19 nt, Artificial Sequence
  Description of Artificial Sequence: Synthetic oligonucleotide
  Sense strand starting at position 243 of SEQ ID NO: 220
ugauuauaucgcuaaggcu

SEQ ID NO: 20385 - RNA, 19 nt, Artificial Sequence
  Description of Artificial Sequence: Synthetic oligonucleotide
  Antisense strand to SEQ ID NO: 20384
agccuuagcgauauaauca

SEQ ID NO: 20386 - RNA, 19 nt, Artificial Sequence
  Description of Artificial Sequence: Synthetic oligonucleotide
  Sense strand starting at position 234 of SEQ ID NO: 220
ugguaacccugauuauauc

SEQ ID NO: 20387 - RNA, 19 nt, Artificial Sequence
  Description of Artificial Sequence: Synthetic oligonucleotide
  Antisense strand to SEQ ID NO: 20386
gauauaaucaggguuacca

SEQ ID NO: 20388 - RNA, 19 nt, Artificial Sequence
  Description of Artificial Sequence: Synthetic oligonucleotide
  Sense strand starting at position 198 of SEQ ID NO: 220
ggaccagaugaacguaauu

SEQ ID NO: 20389 - RNA, 19 nt, Artificial Sequence
  Description of Artificial Sequence: Synthetic oligonucleotide
  Antisense strand to SEQ ID NO: 20388
aauuacguucaucuggucc

SEQ ID NO: 20390 - RNA, 19 nt, Artificial Sequence
  Description of Artificial Sequence: Synthetic oligonucleotide
  Sense strand starting at position 148 of SEQ ID NO: 220
auagcaaaguacuagauuu

SEQ ID NO: 20391 - RNA, 19 nt, Artificial Sequence
  Description of Artificial Sequence: Synthetic oligonucleotide
  Antisense strand to SEQ ID NO: 20390
aaaucuaguacuuugcuau

SEQ ID NO: 20392 - RNA, 19 nt, Artificial Sequence
  Description of Artificial Sequence: Synthetic oligonucleotide
  Sense strand starting at position 15 of SEQ ID NO: 220
agcaguaauguuuaaacug

SEQ ID NO: 20393 - RNA, 19 nt, Artificial Sequence
  Description of Artificial Sequence: Synthetic oligonucleotide
  Antisense strand to SEQ ID NO: 20392
caguuuaaacauuacugcu

SEQ ID NO: 20394 - RNA, 19 nt, Artificial Sequence
  Description of Artificial Sequence: Synthetic oligonucleotide
  Sense strand starting at position 103 of SEQ ID NO: 221
gcaacaucugcugaaugaa

SEQ ID NO: 20395 - RNA, 19 nt, Artificial Sequence
  Description of Artificial Sequence: Synthetic oligonucleotide
  Antisense strand to SEQ ID NO: 20394
uucauucagcagauguugc

SEQ ID NO: 20396 - RNA, 19 nt, Artificial Sequence
  Description of Artificial Sequence: Synthetic oligonucleotide
  Sense strand starting at position 128 of SEQ ID NO: 221
acuuuccugccaggaaauu

SEQ ID NO: 20397 - RNA, 19 nt, Artificial Sequence
  Description of Artificial Sequence: Synthetic oligonucleotide
  Antisense strand to SEQ ID NO: 20396
aauuuccuggcaggaaagu

SEQ ID NO: 20398 - RNA, 19 nt, Artificial Sequence
  Description of Artificial Sequence: Synthetic oligonucleotide
  Sense strand starting at position 129 of SEQ ID NO: 221
cuuuccugccaggaaauua

SEQ ID NO: 20399 - RNA, 19 nt, Artificial Sequence
  Description of Artificial Sequence: Synthetic oligonucleotide
  Antisense strand to SEQ ID NO: 20398
uaauuuccuggcaggaaag

SEQ ID NO: 20400 - RNA, 19 nt, Artificial Sequence
  Description of Artificial Sequence: Synthetic oligonucleotide
  Sense strand starting at position 244 of SEQ ID NO: 221
cucagauuugcugggcuau

SEQ ID NO: 20401 - RNA, 19 nt, Artificial Sequence
  Description of Artificial Sequence: Synthetic oligonucleotide
  Antisense strand to SEQ ID NO: 20400
auagcccagcaaaucugag

SEQ ID NO: 20402 - RNA, 19 nt, Artificial Sequence
  Description of Artificial Sequence: Synthetic oligonucleotide
  Sense strand starting at position 245 of SEQ ID NO: 221
ucagauuugcugggcuauu

SEQ ID NO: 20403 - RNA, 19 nt, Artificial Sequence
  Description of Artificial Sequence: Synthetic oligonucleotide
  Antisense strand to SEQ ID NO: 20402
aauagcccagcaaaucuga

SEQ ID NO: 20404 - RNA, 19 nt, Artificial Sequence
  Description of Artificial Sequence: Synthetic oligonucleotide
  Sense strand starting at position 637 of SEQ ID NO: 221
uuauuuaggugaggucaga

SEQ ID NO: 20405 - RNA, 19 nt, Artificial Sequence
  Description of Artificial Sequence: Synthetic oligonucleotide
  Antisense strand to SEQ ID NO: 20404
ucugaccucaccuaaauaa

SEQ ID NO: 20406 - RNA, 19 nt, Artificial Sequence
  Description of Artificial Sequence: Synthetic oligonucleotide
  Sense strand starting at position 650 of SEQ ID NO: 221
gucagaagcuuccuggagu

SEQ ID NO: 20407 - RNA, 19 nt, Artificial Sequence
  Description of Artificial Sequence: Synthetic oligonucleotide
  Antisense strand to SEQ ID NO: 20406
acuccaggaagcuucugac

SEQ ID NO: 20408 - RNA, 19 nt, Artificial Sequence
  Description of Artificial Sequence: Synthetic oligonucleotide
  Sense strand starting at position 663 of SEQ ID NO: 221
uggaguuggcccugaagca

SEQ ID NO: 20409 - RNA, 19 nt, Artificial Sequence
  Description of Artificial Sequence: Synthetic oligonucleotide
  Antisense strand to SEQ ID NO: 20408
ugcuucagggccaacucca

SEQ ID NO: 20410 - RNA, 19 nt, Artificial Sequence
  Description of Artificial Sequence: Synthetic oligonucleotide
  Sense strand starting at position 688 of SEQ ID NO: 221
aucccaauugcuugaggua

SEQ ID NO: 20411 - RNA, 19 nt, Artificial Sequence
  Description of Artificial Sequence: Synthetic oligonucleotide
  Antisense strand to SEQ ID NO: 20410
uaccucaagcaauugggau

SEQ ID NO: 20412 - RNA, 19 nt, Artificial Sequence
  Description of Artificial Sequence: Synthetic oligonucleotide
  Sense strand starting at position 689 of SEQ ID NO: 221
ucccaauugcuugagguaa

SEQ ID NO: 20413 - RNA, 19 nt, Artificial Sequence
  Description of Artificial Sequence: Synthetic oligonucleotide
  Antisense strand to SEQ ID NO: 20412
uuaccucaagcaauuggga

SEQ ID NO: 20414 - RNA, 19 nt, Artificial Sequence
  Description of Artificial Sequence: Synthetic oligonucleotide
  Sense strand starting at position 697 of SEQ ID NO: 221
gcuugagguaaauaguaau

SEQ ID NO: 20415 - RNA, 19 nt, Artificial Sequence
  Description of Artificial Sequence: Synthetic oligonucleotide
  Antisense strand to SEQ ID NO: 20414
auuacuauuuaccucaagc

SEQ ID NO: 20416 - RNA, 19 nt, Artificial Sequence
  Description of Artificial Sequence: Synthetic oligonucleotide
  Sense strand starting at position 700 of SEQ ID NO: 221
ugagguaaauaguaaucaa

SEQ ID NO: 20417 - RNA, 19 nt, Artificial Sequence
  Description of Artificial Sequence: Synthetic oligonucleotide
  Antisense strand to SEQ ID NO: 20416
uugauuacuauuuaccuca

SEQ ID NO: 20418 - RNA, 19 nt, Artificial Sequence
  Description of Artificial Sequence: Synthetic oligonucleotide
  Sense strand starting at position 703 of SEQ ID NO: 221
gguaaauaguaaucaacuu

SEQ ID NO: 20419 - RNA, 19 nt, Artificial Sequence
  Description of Artificial Sequence: Synthetic oligonucleotide
  Antisense strand to SEQ ID NO: 20418
aaguugauuacuauuuacc

SEQ ID NO: 20420 - RNA, 19 nt, Artificial Sequence
  Description of Artificial Sequence: Synthetic oligonucleotide
  Sense strand starting at position 852 of SEQ ID NO: 221
ccacucucuggugauuaau

SEQ ID NO: 20421 - RNA, 19 nt, Artificial Sequence
  Description of Artificial Sequence: Synthetic oligonucleotide
  Antisense strand to SEQ ID NO: 20420
auuaaucaccagagagugg

SEQ ID NO: 20422 - RNA, 19 nt, Artificial Sequence
  Description of Artificial Sequence: Synthetic oligonucleotide
  Sense strand starting at position 854 of SEQ ID NO: 221
acucucuggugauuaaucu

SEQ ID NO: 20423 - RNA, 19 nt, Artificial Sequence
  Description of Artificial Sequence: Synthetic oligonucleotide
  Antisense strand to SEQ ID NO: 20422
agauuaaucaccagagagu

SEQ ID NO: 20424 - RNA, 19 nt, Artificial Sequence
  Description of Artificial Sequence: Synthetic oligonucleotide
  Sense strand starting at position 983 of SEQ ID NO: 221
caggguugcccuugaugag

SEQ ID NO: 20425 - RNA, 19 nt, Artificial Sequence
  Description of Artificial Sequence: Synthetic oligonucleotide
  Antisense strand to SEQ ID NO: 20424
cucaucaagggcaacccug

SEQ ID NO: 20426 - RNA, 19 nt, Artificial Sequence
  Description of Artificial Sequence: Synthetic oligonucleotide
  Sense strand starting at position 1025 of SEQ ID NO: 221
ccuggugaguuacugacua

SEQ ID NO: 20427 - RNA, 19 nt, Artificial Sequence
  Description of Artificial Sequence: Synthetic oligonucleotide
  Antisense strand to SEQ ID NO: 20426
uagucaguaacucaccagg

SEQ ID NO: 20428 - RNA, 19 nt, Artificial Sequence
  Description of Artificial Sequence: Synthetic oligonucleotide
  Sense strand starting at position 1027 of SEQ ID NO: 221
uggugaguuacugacuaac

SEQ ID NO: 20429 - RNA, 19 nt, Artificial Sequence
  Description of Artificial Sequence: Synthetic oligonucleotide
  Antisense strand to SEQ ID NO: 20428
guuagucaguaacucacca

SEQ ID NO: 20430 - RNA, 19 nt, Artificial Sequence
  Description of Artificial Sequence: Synthetic oligonucleotide
  Sense strand starting at position 1029 of SEQ ID NO: 221
gugaguuacugacuaacca

SEQ ID NO: 20431 - RNA, 19 nt, Artificial Sequence
  Description of Artificial Sequence: Synthetic oligonucleotide
  Antisense strand to SEQ ID NO: 20430
ugguuagucaguaacucac

SEQ ID NO: 20432 - RNA, 19 nt, Artificial Sequence
  Description of Artificial Sequence: Synthetic oligonucleotide
  Sense strand starting at position 1160 of SEQ ID NO: 221
cuuuguaaggcccaggauu

SEQ ID NO: 20433 - RNA, 19 nt, Artificial Sequence
  Description of Artificial Sequence: Synthetic oligonucleotide
  Antisense strand to SEQ ID NO: 20432
aauccugggccuuacaaag

SEQ ID NO: 20434 - RNA, 19 nt, Artificial Sequence
  Description of Artificial Sequence: Synthetic oligonucleotide
  Sense strand starting at position 1179 of SEQ ID NO: 221
acaucuguuuggcugaagu

SEQ ID NO: 20435 - RNA, 19 nt, Artificial Sequence
  Description of Artificial Sequence: Synthetic oligonucleotide
  Antisense strand to SEQ ID NO: 20434
acuucagccaaacagaugu

SEQ ID NO: 20436 - RNA, 19 nt, Artificial Sequence
  Description of Artificial Sequence: Synthetic oligonucleotide
  Sense strand starting at position 1210 of SEQ ID NO: 221
gaccuaucagagugcuggu

SEQ ID NO: 20437 - RNA, 19 nt, Artificial Sequence
  Description of Artificial Sequence: Synthetic oligonucleotide
  Antisense strand to SEQ ID NO: 20436
accagcacucugauagguc

SEQ ID NO: 20438 - RNA, 19 nt, Artificial Sequence
  Description of Artificial Sequence: Synthetic oligonucleotide
  Sense strand starting at position 1226 of SEQ ID NO: 221
gguugucgcauauacucua

SEQ ID NO: 20439 - RNA, 19 nt, Artificial Sequence
  Description of Artificial Sequence: Synthetic oligonucleotide
  Antisense strand to SEQ ID NO: 20438
uagaguauaugcgacaacc

SEQ ID NO: 20440 - RNA, 19 nt, Artificial Sequence
  Description of Artificial Sequence: Synthetic oligonucleotide
  Sense strand starting at position 1229 of SEQ ID NO: 221
ugucgcauauacucuaaua

SEQ ID NO: 20441 - RNA, 19 nt, Artificial Sequence
  Description of Artificial Sequence: Synthetic oligonucleotide
  Antisense strand to SEQ ID NO: 20440
uauuagaguauaugcgaca

SEQ ID NO: 20442 - RNA, 19 nt, Artificial Sequence
  Description of Artificial Sequence: Synthetic oligonucleotide
  Sense strand starting at position 1248 of SEQ ID NO: 221
uuugaaugacuauacgagu

SEQ ID NO: 20443 - RNA, 19 nt, Artificial Sequence
  Description of Artificial Sequence: Synthetic oligonucleotide
  Antisense strand to SEQ ID NO: 20442
acucguauagucauucaaa

SEQ ID NO: 20444 - RNA, 19 nt, Artificial Sequence
  Description of Artificial Sequence: Synthetic oligonucleotide
  Sense strand starting at position 1254 of SEQ ID NO: 221
ugacuauacgaguaaguuu

SEQ ID NO: 20445 - RNA, 19 nt, Artificial Sequence
  Description of Artificial Sequence: Synthetic oligonucleotide
  Antisense strand to SEQ ID NO: 20444
aaacuuacucguauaguca

SEQ ID NO: 20446 - RNA, 19 nt, Artificial Sequence
  Description of Artificial Sequence: Synthetic oligonucleotide
  Sense strand starting at position 1505 of SEQ ID NO: 221
agccucauccuugagacuu

SEQ ID NO: 20447 - RNA, 19 nt, Artificial Sequence
  Description of Artificial Sequence: Synthetic oligonucleotide
  Antisense strand to SEQ ID NO: 20446
aagucucaaggaugaggcu

SEQ ID NO: 20448 - RNA, 19 nt, Artificial Sequence
  Description of Artificial Sequence: Synthetic oligonucleotide
  Sense strand starting at position 1611 of SEQ ID NO: 221
cggcuuaccuucucuuuga

SEQ ID NO: 20449 - RNA, 19 nt, Artificial Sequence
  Description of Artificial Sequence: Synthetic oligonucleotide
  Antisense strand to SEQ ID NO: 20448
ucaaagagaagguaagccg

SEQ ID NO: 20450 - RNA, 19 nt, Artificial Sequence
  Description of Artificial Sequence: Synthetic oligonucleotide
  Sense strand starting at position 1950 of SEQ ID NO: 221
ccaucuugccugcaugaca

SEQ ID NO: 20451 - RNA, 19 nt, Artificial Sequence
  Description of Artificial Sequence: Synthetic oligonucleotide
  Antisense strand to SEQ ID NO: 20450
ugucaugcaggcaagaugg

SEQ ID NO: 20452 - RNA, 19 nt, Artificial Sequence
  Description of Artificial Sequence: Synthetic oligonucleotide
  Sense strand starting at position 2312 of SEQ ID NO: 221
gagagauagcucgaacguc

SEQ ID NO: 20453 - RNA, 19 nt, Artificial Sequence
  Description of Artificial Sequence: Synthetic oligonucleotide
  Antisense strand to SEQ ID NO: 20452
gacguucgagcuaucucuc

SEQ ID NO: 20454 - RNA, 19 nt, Artificial Sequence
  Description of Artificial Sequence: Synthetic oligonucleotide
  Sense strand starting at position 2573 of SEQ ID NO: 221
guggagguggucuggagaa

SEQ ID NO: 20455 - RNA, 19 nt, Artificial Sequence
  Description of Artificial Sequence: Synthetic oligonucleotide
  Antisense strand to SEQ ID NO: 20454
uucuccagaccaccuccac

SEQ ID NO: 20456 - RNA, 19 nt, Artificial Sequence
  Description of Artificial Sequence: Synthetic oligonucleotide
  Sense strand starting at position 2621 of SEQ ID NO: 221
ugcgauuggaagggagauu

SEQ ID NO: 20457 - RNA, 19 nt, Artificial Sequence
  Description of Artificial Sequence: Synthetic oligonucleotide
  Antisense strand to SEQ ID NO: 20456
aaucucccuuccaaucgca

SEQ ID NO: 20458 - RNA, 19 nt, Artificial Sequence
  Description of Artificial Sequence: Synthetic oligonucleotide
  Sense strand starting at position 2706 of SEQ ID NO: 221
ccucuuguuugcuuaagga

SEQ ID NO: 20459 - RNA, 19 nt, Artificial Sequence
  Description of Artificial Sequence: Synthetic oligonucleotide
  Antisense strand to SEQ ID NO: 20458
uccuuaagcaaacaagagg

SEQ ID NO: 20460 - RNA, 19 nt, Artificial Sequence
  Description of Artificial Sequence: Synthetic oligonucleotide
  Sense strand starting at position 2769 of SEQ ID NO: 221
cugcauuuauccuugucau

SEQ ID NO: 20461 - RNA, 19 nt, Artificial Sequence
  Description of Artificial Sequence: Synthetic oligonucleotide
  Antisense strand to SEQ ID NO: 20460
augacaaggauaaaugcag

SEQ ID NO: 20462 - RNA, 19 nt, Artificial Sequence
  Description of Artificial Sequence: Synthetic oligonucleotide
  Sense strand starting at position 2770 of SEQ ID NO: 221
ugcauuuauccuugucauc

SEQ ID NO: 20463 - RNA, 19 nt, Artificial Sequence
  Description of Artificial Sequence: Synthetic oligonucleotide
  Antisense strand to SEQ ID NO: 20462
gaugacaaggauaaaugca

SEQ ID NO: 20464 - RNA, 19 nt, Artificial Sequence
  Description of Artificial Sequence: Synthetic oligonucleotide
  Sense strand starting at position 3115 of SEQ ID NO: 221
uuugguccucccuguggaa

SEQ ID NO: 20465 - RNA, 19 nt, Artificial Sequence
  Description of Artificial Sequence: Synthetic oligonucleotide
  Antisense strand to SEQ ID NO: 20464
uuccacagggaggaccaaa

SEQ ID NO: 20466 - RNA, 19 nt, Artificial Sequence
  Description of Artificial Sequence: Synthetic oligonucleotide
  Sense strand starting at position 3117 of SEQ ID NO: 221
ugguccucccuguggaaga

SEQ ID NO: 20467 - RNA, 19 nt, Artificial Sequence
  Description of Artificial Sequence: Synthetic oligonucleotide
  Antisense strand to SEQ ID NO: 20466
ucuuccacagggaggacca

SEQ ID NO: 20468 - RNA, 19 nt, Artificial Sequence
  Description of Artificial Sequence: Synthetic oligonucleotide
  Sense strand starting at position 3465 of SEQ ID NO: 221
uaaggucgccaagaggaau

SEQ ID NO: 20469 - RNA, 19 nt, Artificial Sequence
  Description of Artificial Sequence: Synthetic oligonucleotide
  Antisense strand to SEQ ID NO: 20468
auuccucuuggcgaccuua

SEQ ID NO: 20470 - RNA, 19 nt, Artificial Sequence
  Description of Artificial Sequence: Synthetic oligonucleotide
  Sense strand starting at position 3593 of SEQ ID NO: 221
uuggcaucucaguauucuu

SEQ ID NO: 20471 - RNA, 19 nt, Artificial Sequence
  Description of Artificial Sequence: Synthetic oligonucleotide
  Antisense strand to SEQ ID NO: 20470
aagaauacugagaugccaa

SEQ ID NO: 20472 - RNA, 19 nt, Artificial Sequence
  Description of Artificial Sequence: Synthetic oligonucleotide
  Sense strand starting at position 3635 of SEQ ID NO: 221
guugcuggaaugggauauu

SEQ ID NO: 20473 - RNA, 19 nt, Artificial Sequence
  Description of Artificial Sequence: Synthetic oligonucleotide
  Antisense strand to SEQ ID NO: 20472
aauaucccauuccagcaac

SEQ ID NO: 20474 - RNA, 19 nt, Artificial Sequence
  Description of Artificial Sequence: Synthetic oligonucleotide
  Sense strand starting at position 3828 of SEQ ID NO: 222
ggagucaucgcccgcauuu

SEQ ID NO: 20475 - RNA, 19 nt, Artificial Sequence
  Description of Artificial Sequence: Synthetic oligonucleotide
  Antisense strand to SEQ ID NO: 20474
aaaugcgggcgaugacucc

SEQ ID NO: 20476 - RNA, 19 nt, Artificial Sequence
  Description of Artificial Sequence: Synthetic oligonucleotide
  Sense strand starting at position 3827 of SEQ ID NO: 222
gggagucaucgcccgcauu

SEQ ID NO: 20477 - RNA, 19 nt, Artificial Sequence
  Description of Artificial Sequence: Synthetic oligonucleotide
  Antisense strand to SEQ ID NO: 20476
aaugcgggcgaugacuccc

SEQ ID NO: 20478 - RNA, 19 nt, Artificial Sequence
  Description of Artificial Sequence: Synthetic oligonucleotide
  Sense strand starting at position 3607 of SEQ ID NO: 222
gcgagugccguguuaccua

SEQ ID NO: 20479 - RNA, 19 nt, Artificial Sequence
  Description of Artificial Sequence: Synthetic oligonucleotide
  Antisense strand to SEQ ID NO: 20478
uagguaacacggcacucgc

SEQ ID NO: 20480 - RNA, 19 nt, Artificial Sequence
  Description of Artificial Sequence: Synthetic oligonucleotide
  Sense strand starting at position 3558 of SEQ ID NO: 222
acggaaacauuauuaucau

SEQ ID NO: 20481 - RNA, 19 nt, Artificial Sequence
  Description of Artificial Sequence: Synthetic oligonucleotide
  Antisense strand to SEQ ID NO: 20480
augauaauaauguuuccgu

SEQ ID NO: 20482 - RNA, 19 nt, Artificial Sequence
  Description of Artificial Sequence: Synthetic oligonucleotide
  Sense strand starting at position 3524 of SEQ ID NO: 222
guaaucugugacuauuaac

SEQ ID NO: 20483 - RNA, 19 nt, Artificial Sequence
  Description of Artificial Sequence: Synthetic oligonucleotide
  Antisense strand to SEQ ID NO: 20482
guuaauagucacagauuac

SEQ ID NO: 20484 - RNA, 19 nt, Artificial Sequence
  Description of Artificial Sequence: Synthetic oligonucleotide
  Sense strand starting at position 3523 of SEQ ID NO: 222
uguaaucugugacuauuaa

SEQ ID NO: 20485 - RNA, 19 nt, Artificial Sequence
  Description of Artificial Sequence: Synthetic oligonucleotide
  Antisense strand to SEQ ID NO: 20484
uuaauagucacagauuaca

SEQ ID NO: 20486 - RNA, 19 nt, Artificial Sequence
  Description of Artificial Sequence: Synthetic oligonucleotide
  Sense strand starting at position 3520 of SEQ ID NO: 222
cuuuguaaucugugacuau

SEQ ID NO: 20487 - RNA, 19 nt, Artificial Sequence
  Description of Artificial Sequence: Synthetic oligonucleotide
  Antisense strand to SEQ ID NO: 20486
auagucacagauuacaaag

SEQ ID NO: 20488 - RNA, 19 nt, Artificial Sequence
  Description of Artificial Sequence: Synthetic oligonucleotide
  Sense strand starting at position 3511 of SEQ ID NO: 222
aggcaaguacuuuguaauc

SEQ ID NO: 20489 - RNA, 19 nt, Artificial Sequence
  Description of Artificial Sequence: Synthetic oligonucleotide
  Antisense strand to SEQ ID NO: 20488
gauuacaaaguacuugccu

SEQ ID NO: 20490 - RNA, 19 nt, Artificial Sequence
  Description of Artificial Sequence: Synthetic oligonucleotide
  Sense strand starting at position 3509 of SEQ ID NO: 222
aaaggcaaguacuuuguaa

SEQ ID NO: 20491 - RNA, 19 nt, Artificial Sequence
  Description of Artificial Sequence: Synthetic oligonucleotide
  Antisense strand to SEQ ID NO: 20490
uuacaaaguacuugccuuu

SEQ ID NO: 20492 - RNA, 19 nt, Artificial Sequence
  Description of Artificial Sequence: Synthetic oligonucleotide
  Sense strand starting at position 3036 of SEQ ID NO: 222
gguuaaaucgccgaugcag

SEQ ID NO: 20493 - RNA, 19 nt, Artificial Sequence
  Description of Artificial Sequence: Synthetic oligonucleotide
  Antisense strand to SEQ ID NO: 20492
cugcaucggcgauuuaacc

SEQ ID NO: 20494 - RNA, 19 nt, Artificial Sequence
  Description of Artificial Sequence: Synthetic oligonucleotide
  Sense strand starting at position 2992 of SEQ ID NO: 222
accaucggucucuacaaga

SEQ ID NO: 20495 - RNA, 19 nt, Artificial Sequence
  Description of Artificial Sequence: Synthetic oligonucleotide
  Antisense strand to SEQ ID NO: 20494
ucuuguagagaccgauggu

SEQ ID NO: 20496 - RNA, 19 nt, Artificial Sequence
  Description of Artificial Sequence: Synthetic oligonucleotide
  Sense strand starting at position 2887 of SEQ ID NO: 222
cuaggaagaugccuuccua

SEQ ID NO: 20497 - RNA, 19 nt, Artificial Sequence
  Description of Artificial Sequence: Synthetic oligonucleotide
  Antisense strand to SEQ ID NO: 20496
uaggaaggcaucuuccuag

SEQ ID NO: 20498 - RNA, 19 nt, Artificial Sequence
  Description of Artificial Sequence: Synthetic oligonucleotide
  Sense strand starting at position 2878 of SEQ ID NO: 222
cagccugaucuaggaagau

SEQ ID NO: 20499 - RNA, 19 nt, Artificial Sequence
  Description of Artificial Sequence: Synthetic oligonucleotide
  Antisense strand to SEQ ID NO: 20498
aucuuccuagaucaggcug

SEQ ID NO: 20500 - RNA, 19 nt, Artificial Sequence
  Description of Artificial Sequence: Synthetic oligonucleotide
  Sense strand starting at position 2635 of SEQ ID NO: 222
uguggucaugaucagguua

SEQ ID NO: 20501 - RNA, 19 nt, Artificial Sequence
  Description of Artificial Sequence: Synthetic oligonucleotide
  Antisense strand to SEQ ID NO: 20500
uaaccugaucaugaccaca

SEQ ID NO: 20502 - RNA, 19 nt, Artificial Sequence
  Description of Artificial Sequence: Synthetic oligonucleotide
  Sense strand starting at position 2535 of SEQ ID NO: 222
gcgugauacuucuuaacug

SEQ ID NO: 20503 - RNA, 19 nt, Artificial Sequence
  Description of Artificial Sequence: Synthetic oligonucleotide
  Antisense strand to SEQ ID NO: 20502
caguuaagaaguaucacgc

SEQ ID NO: 20504 - RNA, 19 nt, Artificial Sequence
  Description of Artificial Sequence: Synthetic oligonucleotide
  Sense strand starting at position 2492 of SEQ ID NO: 222
gagcuagugggaugugaag

SEQ ID NO: 20505 - RNA, 19 nt, Artificial Sequence
  Description of Artificial Sequence: Synthetic oligonucleotide
  Antisense strand to SEQ ID NO: 20504
cuucacaucccacuagcuc

SEQ ID NO: 20506 - RNA, 19 nt, Artificial Sequence
  Description of Artificial Sequence: Synthetic oligonucleotide
  Sense strand starting at position 2314 of SEQ ID NO: 222
ggaauaauggcccauaugu

SEQ ID NO: 20507 - RNA, 19 nt, Artificial Sequence
  Description of Artificial Sequence: Synthetic oligonucleotide
  Antisense strand to SEQ ID NO: 20506
acauaugggccauuauucc

SEQ ID NO: 20508 - RNA, 19 nt, Artificial Sequence
  Description of Artificial Sequence: Synthetic oligonucleotide
  Sense strand starting at position 2190 of SEQ ID NO: 222
gguacaguucugcagcuga

SEQ ID NO: 20509 - RNA, 19 nt, Artificial Sequence
  Description of Artificial Sequence: Synthetic oligonucleotide
  Antisense strand to SEQ ID NO: 20508
ucagcugcagaacuguacc

SEQ ID NO: 20510 - RNA, 19 nt, Artificial Sequence
  Description of Artificial Sequence: Synthetic oligonucleotide
  Sense strand starting at position 1364 of SEQ ID NO: 222
cugaucaacccuuaggcua

SEQ ID NO: 20511 - RNA, 19 nt, Artificial Sequence
  Description of Artificial Sequence: Synthetic oligonucleotide
  Antisense strand to SEQ ID NO: 20510
uagccuaaggguugaucag

SEQ ID NO: 20512 - RNA, 19 nt, Artificial Sequence
  Description of Artificial Sequence: Synthetic oligonucleotide
  Sense strand starting at position 1309 of SEQ ID NO: 222
guuugcugugucuauacca

SEQ ID NO: 20513 - RNA, 19 nt, Artificial Sequence
  Description of Artificial Sequence: Synthetic oligonucleotide
  Antisense strand to SEQ ID NO: 20512
ugguauagacacagcaaac

SEQ ID NO: 20514 - RNA, 19 nt, Artificial Sequence
  Description of Artificial Sequence: Synthetic oligonucleotide
  Sense strand starting at position 1307 of SEQ ID NO: 222
guguuugcugugucuauac

SEQ ID NO: 20515 - RNA, 19 nt, Artificial Sequence
  Description of Artificial Sequence: Synthetic oligonucleotide
  Antisense strand to SEQ ID NO: 20514
guauagacacagcaaacac

SEQ ID NO: 20516 - RNA, 19 nt, Artificial Sequence
  Description of Artificial Sequence: Synthetic oligonucleotide
  Sense strand starting at position 1099 of SEQ ID NO: 222
gggugacguguaagucaca

SEQ ID NO: 20517 - RNA, 19 nt, Artificial Sequence
  Description of Artificial Sequence: Synthetic oligonucleotide
  Antisense strand to SEQ ID NO: 20516
ugugacuuacacgucaccc

SEQ ID NO: 20518 - RNA, 19 nt, Artificial Sequence
  Description of Artificial Sequence: Synthetic oligonucleotide
  Sense strand starting at position 1097 of SEQ ID NO: 222
aagggugacguguaaguca

SEQ ID NO: 20519 - RNA, 19 nt, Artificial Sequence
  Description of Artificial Sequence: Synthetic oligonucleotide
  Antisense strand to SEQ ID NO: 20518
ugacuuacacgucacccuu

SEQ ID NO: 20520 - RNA, 19 nt, Artificial Sequence
  Description of Artificial Sequence: Synthetic oligonucleotide
  Sense strand starting at position 973 of SEQ ID NO: 222
acauaaggcugagaauaca

SEQ ID NO: 20521 - RNA, 19 nt, Artificial Sequence
  Description of Artificial Sequence: Synthetic oligonucleotide
  Antisense strand to SEQ ID NO: 20520
uguauucucagccuuaugu

SEQ ID NO: 20522 - RNA, 19 nt, Artificial Sequence
  Description of Artificial Sequence: Synthetic oligonucleotide
  Sense strand starting at position 888 of SEQ ID NO: 222
agacaaaggucauagagag

SEQ ID NO: 20523 - RNA, 19 nt, Artificial Sequence
  Description of Artificial Sequence: Synthetic oligonucleotide
  Antisense strand to SEQ ID NO: 20522
cucucuaugaccuuugucu

SEQ ID NO: 20524 - RNA, 19 nt, Artificial Sequence
  Description of Artificial Sequence: Synthetic oligonucleotide
  Sense strand starting at position 851 of SEQ ID NO: 222
ggaucucauuugcagauga

SEQ ID NO: 20525 - RNA, 19 nt, Artificial Sequence
  Description of Artificial Sequence: Synthetic oligonucleotide
  Antisense strand to SEQ ID NO: 20524
ucaucugcaaaugagaucc

SEQ ID NO: 20526 - RNA, 19 nt, Artificial Sequence
  Description of Artificial Sequence: Synthetic oligonucleotide
  Sense strand starting at position 822 of SEQ ID NO: 222
cugugaagcucuguggaaa

SEQ ID NO: 20527 - RNA, 19 nt, Artificial Sequence
  Description of Artificial Sequence: Synthetic oligonucleotide
  Antisense strand to SEQ ID NO: 20526
uuuccacagagcuucacag

SEQ ID NO: 20528 - RNA, 19 nt, Artificial Sequence
  Description of Artificial Sequence: Synthetic oligonucleotide
  Sense strand starting at position 811 of SEQ ID NO: 222
uuauaaugacccugugaag

SEQ ID NO: 20529 - RNA, 19 nt, Artificial Sequence
  Description of Artificial Sequence: Synthetic oligonucleotide
  Antisense strand to SEQ ID NO: 20528
cuucacagggucauuauaa

SEQ ID NO: 20530 - RNA, 19 nt, Artificial Sequence
  Description of Artificial Sequence: Synthetic oligonucleotide
  Sense strand starting at position 718 of SEQ ID NO: 222
aggaucaguauggguaaca

SEQ ID NO: 20531 - RNA, 19 nt, Artificial Sequence
  Description of Artificial Sequence: Synthetic oligonucleotide
  Antisense strand to SEQ ID NO: 20530
uguuacccauacugauccu

SEQ ID NO: 20532 - RNA, 19 nt, Artificial Sequence
  Description of Artificial Sequence: Synthetic oligonucleotide
  Sense strand starting at position 716 of SEQ ID NO: 222
ggaggaucaguauggguaa

SEQ ID NO: 20533 - RNA, 19 nt, Artificial Sequence
  Description of Artificial Sequence: Synthetic oligonucleotide
  Antisense strand to SEQ ID NO: 20532
uuacccauacugauccucc

SEQ ID NO: 20534 - RNA, 19 nt, Artificial Sequence
  Description of Artificial Sequence: Synthetic oligonucleotide
  Sense strand starting at position 660 of SEQ ID NO: 222
cucucuaggcauugaagau

SEQ ID NO: 20535 - RNA, 19 nt, Artificial Sequence
  Description of Artificial Sequence: Synthetic oligonucleotide
  Antisense strand to SEQ ID NO: 20534
aucuucaaugccuagagag

SEQ ID NO: 20536 - RNA, 19 nt, Artificial Sequence
  Description of Artificial Sequence: Synthetic oligonucleotide
  Sense strand starting at position 550 of SEQ ID NO: 222
caaagucucccaggcagua

SEQ ID NO: 20537 - RNA, 19 nt, Artificial Sequence
  Description of Artificial Sequence: Synthetic oligonucleotide
  Antisense strand to SEQ ID NO: 20536
uacugccugggagacuuug

SEQ ID NO: 20538 - RNA, 19 nt, Artificial Sequence
  Description of Artificial Sequence: Synthetic oligonucleotide
  Sense strand starting at position 427 of SEQ ID NO: 222
ccuggagcccuagauauua

SEQ ID NO: 20539 - RNA, 19 nt, Artificial Sequence
  Description of Artificial Sequence: Synthetic oligonucleotide
  Antisense strand to SEQ ID NO: 20538
uaauaucuagggcuccagg

SEQ ID NO: 20540 - RNA, 19 nt, Artificial Sequence
  Description of Artificial Sequence: Synthetic oligonucleotide
  Sense strand starting at position 217 of SEQ ID NO: 222
cuguaaacugccugcuaaa

SEQ ID NO: 20541 - RNA, 19 nt, Artificial Sequence
  Description of Artificial Sequence: Synthetic oligonucleotide
  Antisense strand to SEQ ID NO: 20540
uuuagcaggcaguuuacag

SEQ ID NO: 20542 - RNA, 19 nt, Artificial Sequence
  Description of Artificial Sequence: Synthetic oligonucleotide
  Sense strand starting at position 216 of SEQ ID NO: 222
acuguaaacugccugcuaa

SEQ ID NO: 20543 - RNA, 19 nt, Artificial Sequence
  Description of Artificial Sequence: Synthetic oligonucleotide
  Antisense strand to SEQ ID NO: 20542
uuagcaggcaguuuacagu

SEQ ID NO: 20544 - RNA, 19 nt, Artificial Sequence
  Description of Artificial Sequence: Synthetic oligonucleotide
  Sense strand starting at position 208 of SEQ ID NO: 222
gcaaguugacuguaaacug

SEQ ID NO: 20545 - RNA, 19 nt, Artificial Sequence
  Description of Artificial Sequence: Synthetic oligonucleotide
  Antisense strand to SEQ ID NO: 20544
caguuuacagucaacuugc

SEQ ID NO: 20546 - RNA, 19 nt, Artificial Sequence
  Description of Artificial Sequence: Synthetic oligonucleotide
  Sense strand starting at position 206 of SEQ ID NO: 222
aggcaaguugacuguaaac

SEQ ID NO: 20547 - RNA, 19 nt, Artificial Sequence
  Description of Artificial Sequence: Synthetic oligonucleotide
  Antisense strand to SEQ ID NO: 20546
guuuacagucaacuugccu

SEQ ID NO: 20548 - RNA, 19 nt, Artificial Sequence
  Description of Artificial Sequence: Synthetic oligonucleotide
  Sense strand starting at position 205 of SEQ ID NO: 222
gaggcaaguugacuguaaa

SEQ ID NO: 20549 - RNA, 19 nt, Artificial Sequence
  Description of Artificial Sequence: Synthetic oligonucleotide
  Antisense strand to SEQ ID NO: 20548
uuuacagucaacuugccuc

SEQ ID NO: 20550 - RNA, 19 nt, Artificial Sequence
  Description of Artificial Sequence: Synthetic oligonucleotide
  Sense strand starting at position 175 of SEQ ID NO: 222
gugaccucugcucaaggaa

SEQ ID NO: 20551 - RNA, 19 nt, Artificial Sequence
  Description of Artificial Sequence: Synthetic oligonucleotide
  Antisense strand to SEQ ID NO: 20550
uuccuugagcagaggucac

SEQ ID NO: 20552 - RNA, 19 nt, Artificial Sequence
  Description of Artificial Sequence: Synthetic oligonucleotide
  Sense strand starting at position 171 of SEQ ID NO: 222
cccagugaccucugcucaa

SEQ ID NO: 20553 - RNA, 19 nt, Artificial Sequence
  Description of Artificial Sequence: Synthetic oligonucleotide
  Antisense strand to SEQ ID NO: 20552
uugagcagaggucacuggg

SEQ ID NO: 20554 - RNA, 19 nt, Artificial Sequence
  Description of Artificial Sequence: Synthetic oligonucleotide
  Sense strand starting at position 3759 of SEQ ID NO: 223
uagacagaugccuggugaa

SEQ ID NO: 20555 - RNA, 19 nt, Artificial Sequence
  Description of Artificial Sequence: Synthetic oligonucleotide
  Antisense strand to SEQ ID NO: 20554
uucaccaggcaucugucua

SEQ ID NO: 20556 - RNA, 19 nt, Artificial Sequence
  Description of Artificial Sequence: Synthetic oligonucleotide
  Sense strand starting at position 3726 of SEQ ID NO: 223
ccuugacaucacugagcaa

SEQ ID NO: 20557 - RNA, 19 nt, Artificial Sequence
  Description of Artificial Sequence: Synthetic oligonucleotide
  Antisense strand to SEQ ID NO: 20556
uugcucagugaugucaagg

SEQ ID NO: 20558 - RNA, 19 nt, Artificial Sequence
  Description of Artificial Sequence: Synthetic oligonucleotide
  Sense strand starting at position 3667 of SEQ ID NO: 223
gggacuaucugauccacuu

SEQ ID NO: 20559 - RNA, 19 nt, Artificial Sequence
  Description of Artificial Sequence: Synthetic oligonucleotide
  Antisense strand to SEQ ID NO: 20558
aaguggaucagauaguccc

SEQ ID NO: 20560 - RNA, 19 nt, Artificial Sequence
  Description of Artificial Sequence: Synthetic oligonucleotide
  Sense strand starting at position 3535 of SEQ ID NO: 223
uuccauagugcccagagaa

SEQ ID NO: 20561 - RNA, 19 nt, Artificial Sequence
  Description of Artificial Sequence: Synthetic oligonucleotide
  Antisense strand to SEQ ID NO: 20560
uucucugggcacuauggaa

SEQ ID NO: 20562 - RNA, 19 nt, Artificial Sequence
  Description of Artificial Sequence: Synthetic oligonucleotide
  Sense strand starting at position 3534 of SEQ ID NO: 223
cuuccauagugcccagaga

SEQ ID NO: 20563 - RNA, 19 nt, Artificial Sequence
  Description of Artificial Sequence: Synthetic oligonucleotide
  Antisense strand to SEQ ID NO: 20562
ucucugggcacuauggaag

SEQ ID NO: 20564 - RNA, 19 nt, Artificial Sequence
  Description of Artificial Sequence: Synthetic oligonucleotide
  Sense strand starting at position 3497 of SEQ ID NO: 223
aauggcagucucuaagacu

SEQ ID NO: 20565 - RNA, 19 nt, Artificial Sequence
  Description of Artificial Sequence: Synthetic oligonucleotide
  Antisense strand to SEQ ID NO: 20564
agucuuagagacugccauu

SEQ ID NO: 20566 - RNA, 19 nt, Artificial Sequence
  Description of Artificial Sequence: Synthetic oligonucleotide
  Sense strand starting at position 3321 of SEQ ID NO: 223
guagaucuggguggaagau

SEQ ID NO: 20567 - RNA, 19 nt, Artificial Sequence
  Description of Artificial Sequence: Synthetic oligonucleotide
  Antisense strand to SEQ ID NO: 20566
aucuuccacccagaucuac

SEQ ID NO: 20568 - RNA, 19 nt, Artificial Sequence
  Description of Artificial Sequence: Synthetic oligonucleotide
  Sense strand starting at position 3320 of SEQ ID NO: 223
aguagaucuggguggaaga

SEQ ID NO: 20569 - RNA, 19 nt, Artificial Sequence
  Description of Artificial Sequence: Synthetic oligonucleotide
  Antisense strand to SEQ ID NO: 20568
ucuuccacccagaucuacu

SEQ ID NO: 20570 - RNA, 19 nt, Artificial Sequence
  Description of Artificial Sequence: Synthetic oligonucleotide
  Sense strand starting at position 3318 of SEQ ID NO: 223
agaguagaucuggguggaa

SEQ ID NO: 20571 - RNA, 19 nt, Artificial Sequence
  Description of Artificial Sequence: Synthetic oligonucleotide
  Antisense strand to SEQ ID NO: 20570
uuccacccagaucuacucu

SEQ ID NO: 20572 - RNA, 19 nt, Artificial Sequence
  Description of Artificial Sequence: Synthetic oligonucleotide
  Sense strand starting at position 3198 of SEQ ID NO: 223
agaacugauucuggaggaa

SEQ ID NO: 20573 - RNA, 19 nt, Artificial Sequence
  Description of Artificial Sequence: Synthetic oligonucleotide
  Antisense strand to SEQ ID NO: 20572
uuccuccagaaucaguucu

SEQ ID NO: 20574 - RNA, 19 nt, Artificial Sequence
  Description of Artificial Sequence: Synthetic oligonucleotide
  Sense strand starting at position 3166 of SEQ ID NO: 223
agggaguuucgggagcaga

SEQ ID NO: 20575 - RNA, 19 nt, Artificial Sequence
  Description of Artificial Sequence: Synthetic oligonucleotide
  Antisense strand to SEQ ID NO: 20574
ucugcucccgaaacucccu

SEQ ID NO: 20576 - RNA, 19 nt, Artificial Sequence
  Description of Artificial Sequence: Synthetic oligonucleotide
  Sense strand starting at position 3026 of SEQ ID NO: 223
gaguguuugcucuagcaac

SEQ ID NO: 20577 - RNA, 19 nt, Artificial Sequence
  Description of Artificial Sequence: Synthetic oligonucleotide
  Antisense strand to SEQ ID NO: 20576
guugcuagagcaaacacuc

SEQ ID NO: 20578 - RNA, 19 nt, Artificial Sequence
  Description of Artificial Sequence: Synthetic oligonucleotide
  Sense strand starting at position 3022 of SEQ ID NO: 223
ggaggaguguuugcucuag

SEQ ID NO: 20579 - RNA, 19 nt, Artificial Sequence
  Description of Artificial Sequence: Synthetic oligonucleotide
  Antisense strand to SEQ ID NO: 20578
cuagagcaaacacuccucc

SEQ ID NO: 20580 - RNA, 19 nt, Artificial Sequence
  Description of Artificial Sequence: Synthetic oligonucleotide
  Sense strand starting at position 2884 of SEQ ID NO: 223
gaaguuugccucuaagcug

SEQ ID NO: 20581 - RNA, 19 nt, Artificial Sequence
  Description of Artificial Sequence: Synthetic oligonucleotide
  Antisense strand to SEQ ID NO: 20580
cagcuuagaggcaaacuuc

SEQ ID NO: 20582 - RNA, 19 nt, Artificial Sequence
  Description of Artificial Sequence: Synthetic oligonucleotide
  Sense strand starting at position 2881 of SEQ ID NO: 223
uaggaaguuugccucuaag

SEQ ID NO: 20583 - RNA, 19 nt, Artificial Sequence
  Description of Artificial Sequence: Synthetic oligonucleotide
  Antisense strand to SEQ ID NO: 20582
cuuagaggcaaacuuccua

SEQ ID NO: 20584 - RNA, 19 nt, Artificial Sequence
  Description of Artificial Sequence: Synthetic oligonucleotide
  Sense strand starting at position 2880 of SEQ ID NO: 223
uuaggaaguuugccucuaa

SEQ ID NO: 20585 - RNA, 19 nt, Artificial Sequence
  Description of Artificial Sequence: Synthetic oligonucleotide
  Antisense strand to SEQ ID NO: 20584
uuagaggcaaacuuccuaa

SEQ ID NO: 20586 - RNA, 19 nt, Artificial Sequence
  Description of Artificial Sequence: Synthetic oligonucleotide
  Sense strand starting at position 2610 of SEQ ID NO: 223
ggaaauguuuguccuuguc

SEQ ID NO: 20587 - RNA, 19 nt, Artificial Sequence
  Description of Artificial Sequence: Synthetic oligonucleotide
  Antisense strand to SEQ ID NO: 20586
gacaaggacaaacauuucc

SEQ ID NO: 20588 - RNA, 19 nt, Artificial Sequence
  Description of Artificial Sequence: Synthetic oligonucleotide
  Sense strand starting at position 2365 of SEQ ID NO: 223
cucugccaucucugaaaug

SEQ ID NO: 20589 - RNA, 19 nt, Artificial Sequence
  Description of Artificial Sequence: Synthetic oligonucleotide
  Antisense strand to SEQ ID NO: 20588
cauuucagagauggcagag

SEQ ID NO: 20590 - RNA, 19 nt, Artificial Sequence
  Description of Artificial Sequence: Synthetic oligonucleotide
  Sense strand starting at position 2324 of SEQ ID NO: 223
ggagucacaugaguuguca

SEQ ID NO: 20591 - RNA, 19 nt, Artificial Sequence
  Description of Artificial Sequence: Synthetic oligonucleotide
  Antisense strand to SEQ ID NO: 20590
ugacaacucaugugacucc

SEQ ID NO: 20592 - RNA, 19 nt, Artificial Sequence
  Description of Artificial Sequence: Synthetic oligonucleotide
  Sense strand starting at position 2090 of SEQ ID NO: 223
ggcauuaagcgccauacga

SEQ ID NO: 20593 - RNA, 19 nt, Artificial Sequence
  Description of Artificial Sequence: Synthetic oligonucleotide
  Antisense strand to SEQ ID NO: 20592
ucguauggcgcuuaaugcc

SEQ ID NO: 20594 - RNA, 19 nt, Artificial Sequence
  Description of Artificial Sequence: Synthetic oligonucleotide
  Sense strand starting at position 2020 of SEQ ID NO: 223
uggagcuggccugagaaga

SEQ ID NO: 20595 - RNA, 19 nt, Artificial Sequence
  Description of Artificial Sequence: Synthetic oligonucleotide
  Antisense strand to SEQ ID NO: 20594
ucuucucaggccagcucca

SEQ ID NO: 20596 - RNA, 19 nt, Artificial Sequence
  Description of Artificial Sequence: Synthetic oligonucleotide
  Sense strand starting at position 1991 of SEQ ID NO: 223
gugggaagccuguggguuu

SEQ ID NO: 20597 - RNA, 19 nt, Artificial Sequence
  Description of Artificial Sequence: Synthetic oligonucleotide
  Antisense strand to SEQ ID NO: 20596
aaacccacaggcuucccac

SEQ ID NO: 20598 - RNA, 19 nt, Artificial Sequence
  Description of Artificial Sequence: Synthetic oligonucleotide
  Sense strand starting at position 1410 of SEQ ID NO: 223
cugagugaccaguagccau

SEQ ID NO: 20599 - RNA, 19 nt, Artificial Sequence
  Description of Artificial Sequence: Synthetic oligonucleotide
  Antisense strand to SEQ ID NO: 20598
auggcuacuggucacucag

SEQ ID NO: 20600 - RNA, 19 nt, Artificial Sequence
  Description of Artificial Sequence: Synthetic oligonucleotide
  Sense strand starting at position 1138 of SEQ ID NO: 223
gcucaaucucuggagcuuu

SEQ ID NO: 20601 - RNA, 19 nt, Artificial Sequence
  Description of Artificial Sequence: Synthetic oligonucleotide
  Antisense strand to SEQ ID NO: 20600
aaagcuccagagauugagc

SEQ ID NO: 20602 - RNA, 19 nt, Artificial Sequence
  Description of Artificial Sequence: Synthetic oligonucleotide
  Sense strand starting at position 1118 of SEQ ID NO: 223
gcuuccugucagggacuau

SEQ ID NO: 20603 - RNA, 19 nt, Artificial Sequence
  Description of Artificial Sequence: Synthetic oligonucleotide
  Antisense strand to SEQ ID NO: 20602
auagucccugacaggaagc

SEQ ID NO: 20604 - RNA, 19 nt, Artificial Sequence
  Description of Artificial Sequence: Synthetic oligonucleotide
  Sense strand starting at position 883 of SEQ ID NO: 223
cucuuagucccagguccaa

SEQ ID NO: 20605 - RNA, 19 nt, Artificial Sequence
  Description of Artificial Sequence: Synthetic oligonucleotide
  Antisense strand to SEQ ID NO: 20604
uuggaccugggacuaagag

SEQ ID NO: 20606 - RNA, 19 nt, Artificial Sequence
  Description of Artificial Sequence: Synthetic oligonucleotide
  Sense strand starting at position 576 of SEQ ID NO: 223
ggcuaauagaagcaagguu

SEQ ID NO: 20607 - RNA, 19 nt, Artificial Sequence
  Description of Artificial Sequence: Synthetic oligonucleotide
  Antisense strand to SEQ ID NO: 20606
aaccuugcuucuauuagcc

SEQ ID NO: 20608 - RNA, 19 nt, Artificial Sequence
  Description of Artificial Sequence: Synthetic oligonucleotide
  Sense strand starting at position 567 of SEQ ID NO: 223
gggcaucugggcuaauaga

SEQ ID NO: 20609 - RNA, 19 nt, Artificial Sequence
  Description of Artificial Sequence: Synthetic oligonucleotide
  Antisense strand to SEQ ID NO: 20608
ucuauuagcccagaugccc

SEQ ID NO: 20610 - RNA, 19 nt, Artificial Sequence
  Description of Artificial Sequence: Synthetic oligonucleotide
  Sense strand starting at position 547 of SEQ ID NO: 223
gacuaugcuugauuacuga

SEQ ID NO: 20611 - RNA, 19 nt, Artificial Sequence
  Description of Artificial Sequence: Synthetic oligonucleotide
  Antisense strand to SEQ ID NO: 20610
ucaguaaucaagcauaguc

SEQ ID NO: 20612 - RNA, 19 nt, Artificial Sequence
  Description of Artificial Sequence: Synthetic oligonucleotide
  Sense strand starting at position 545 of SEQ ID NO: 223
augacuaugcuugauuacu

SEQ ID NO: 20613 - RNA, 19 nt, Artificial Sequence
  Description of Artificial Sequence: Synthetic oligonucleotide
  Antisense strand to SEQ ID NO: 20612
aguaaucaagcauagucau

SEQ ID NO: 20614 - RNA, 19 nt, Artificial Sequence
  Description of Artificial Sequence: Synthetic oligonucleotide
  Sense strand starting at position 544 of SEQ ID NO: 223
gaugacuaugcuugauuac

SEQ ID NO: 20615 - RNA, 19 nt, Artificial Sequence
  Description of Artificial Sequence: Synthetic oligonucleotide
  Antisense strand to SEQ ID NO: 20614
guaaucaagcauagucauc

SEQ ID NO: 20616 - RNA, 19 nt, Artificial Sequence
  Description of Artificial Sequence: Synthetic oligonucleotide
  Sense strand starting at position 543 of SEQ ID NO: 223
agaugacuaugcuugauua

SEQ ID NO: 20617 - RNA, 19 nt, Artificial Sequence
  Description of Artificial Sequence: Synthetic oligonucleotide
  Antisense strand to SEQ ID NO: 20616
uaaucaagcauagucaucu

SEQ ID NO: 20618 - RNA, 19 nt, Artificial Sequence
  Description of Artificial Sequence: Synthetic oligonucleotide
  Sense strand starting at position 541 of SEQ ID NO: 223
ggagaugacuaugcuugau

SEQ ID NO: 20619 - RNA, 19 nt, Artificial Sequence
  Description of Artificial Sequence: Synthetic oligonucleotide
  Antisense strand to SEQ ID NO: 20618
aucaagcauagucaucucc

SEQ ID NO: 20620 - RNA, 19 nt, Artificial Sequence
  Description of Artificial Sequence: Synthetic oligonucleotide
  Sense strand starting at position 540 of SEQ ID NO: 223
aggagaugacuaugcuuga

SEQ ID NO: 20621 - RNA, 19 nt, Artificial Sequence
  Description of Artificial Sequence: Synthetic oligonucleotide
  Antisense strand to SEQ ID NO: 20620
ucaagcauagucaucuccu

SEQ ID NO: 20622 - RNA, 19 nt, Artificial Sequence
  Description of Artificial Sequence: Synthetic oligonucleotide
  Sense strand starting at position 492 of SEQ ID NO: 223
guuucucacccaugaaaug

SEQ ID NO: 20623 - RNA, 19 nt, Artificial Sequence
  Description of Artificial Sequence: Synthetic oligonucleotide
  Antisense strand to SEQ ID NO: 20622
cauuucaugggugagaaac

SEQ ID NO: 20624 - RNA, 19 nt, Artificial Sequence
  Description of Artificial Sequence: Synthetic oligonucleotide
  Sense strand starting at position 488 of SEQ ID NO: 223
ucagguuucucacccauga

SEQ ID NO: 20625 - RNA, 19 nt, Artificial Sequence
  Description of Artificial Sequence: Synthetic oligonucleotide
  Antisense strand to SEQ ID NO: 20624
ucaugggugagaaaccuga

SEQ ID NO: 20626 - RNA, 19 nt, Artificial Sequence
  Description of Artificial Sequence: Synthetic oligonucleotide
  Sense strand starting at position 467 of SEQ ID NO: 223
gugacuuccuaucuuugaa

SEQ ID NO: 20627 - RNA, 19 nt, Artificial Sequence
  Description of Artificial Sequence: Synthetic oligonucleotide
  Antisense strand to SEQ ID NO: 20626
uucaaagauaggaagucac

SEQ ID NO: 20628 - RNA, 19 nt, Artificial Sequence
  Description of Artificial Sequence: Synthetic oligonucleotide
  Sense strand starting at position 463 of SEQ ID NO: 223
gcaagugacuuccuaucuu

SEQ ID NO: 20629 - RNA, 19 nt, Artificial Sequence
  Description of Artificial Sequence: Synthetic oligonucleotide
  Antisense strand to SEQ ID NO: 20628
aagauaggaagucacuugc

SEQ ID NO: 20630 - RNA, 19 nt, Artificial Sequence
  Description of Artificial Sequence: Synthetic oligonucleotide
  Sense strand starting at position 358 of SEQ ID NO: 223
guuuccuaaccagaaugua

SEQ ID NO: 20631 - RNA, 19 nt, Artificial Sequence
  Description of Artificial Sequence: Synthetic oligonucleotide
  Antisense strand to SEQ ID NO: 20630
uacauucugguuaggaaac

SEQ ID NO: 20632 - RNA, 19 nt, Artificial Sequence
  Description of Artificial Sequence: Synthetic oligonucleotide
  Sense strand starting at position 351 of SEQ ID NO: 223
ggucuuaguuuccuaacca

SEQ ID NO: 20633 - RNA, 19 nt, Artificial Sequence
  Description of Artificial Sequence: Synthetic oligonucleotide
  Antisense strand to SEQ ID NO: 20632
ugguuaggaaacuaagacc

SEQ ID NO: 20634 - RNA, 19 nt, Artificial Sequence
  Description of Artificial Sequence: Synthetic oligonucleotide
  Sense strand starting at position 3814 of SEQ ID NO: 224
gcuggaggacguuaaguaa

SEQ ID NO: 20635 - RNA, 19 nt, Artificial Sequence
  Description of Artificial Sequence: Synthetic oligonucleotide
  Antisense strand to SEQ ID NO: 20634
uuacuuaacguccuccagc

SEQ ID NO: 20636 - RNA, 19 nt, Artificial Sequence
  Description of Artificial Sequence: Synthetic oligonucleotide
  Sense strand starting at position 3708 of SEQ ID NO: 224
ccuaacugucccuaggaua

SEQ ID NO: 20637 - RNA, 19 nt, Artificial Sequence
  Description of Artificial Sequence: Synthetic oligonucleotide
  Antisense strand to SEQ ID NO: 20636
uauccuagggacaguuagg

SEQ ID NO: 20638 - RNA, 19 nt, Artificial Sequence
  Description of Artificial Sequence: Synthetic oligonucleotide
  Sense strand starting at position 3707 of SEQ ID NO: 224
accuaacugucccuaggau

SEQ ID NO: 20639 - RNA, 19 nt, Artificial Sequence
  Description of Artificial Sequence: Synthetic oligonucleotide
  Antisense strand to SEQ ID NO: 20638
auccuagggacaguuaggu

SEQ ID NO: 20640 - RNA, 19 nt, Artificial Sequence
  Description of Artificial Sequence: Synthetic oligonucleotide
  Sense strand starting at position 3423 of SEQ ID NO: 224
uguguuacaccauaauaau

SEQ ID NO: 20641 - RNA, 19 nt, Artificial Sequence
  Description of Artificial Sequence: Synthetic oligonucleotide
  Antisense strand to SEQ ID NO: 20640
auuauuaugguguaacaca

SEQ ID NO: 20642 - RNA, 19 nt, Artificial Sequence
  Description of Artificial Sequence: Synthetic oligonucleotide
  Sense strand starting at position 3413 of SEQ ID NO: 224
uaauauaugguguguuaca

SEQ ID NO: 20643 - RNA, 19 nt, Artificial Sequence
  Description of Artificial Sequence: Synthetic oligonucleotide
  Antisense strand to SEQ ID NO: 20642
uguaacacaccauauauua

SEQ ID NO: 20644 - RNA, 19 nt, Artificial Sequence
  Description of Artificial Sequence: Synthetic oligonucleotide
  Sense strand starting at position 3247 of SEQ ID NO: 224
ugugauaaacgcuacucua

SEQ ID NO: 20645 - RNA, 19 nt, Artificial Sequence
  Description of Artificial Sequence: Synthetic oligonucleotide
  Antisense strand to SEQ ID NO: 20644
uagaguagcguuuaucaca

SEQ ID NO: 20646 - RNA, 19 nt, Artificial Sequence
  Description of Artificial Sequence: Synthetic oligonucleotide
  Sense strand starting at position 3232 of SEQ ID NO: 224
uuugaauccuuauuaugug

SEQ ID NO: 20647 - RNA, 19 nt, Artificial Sequence
  Description of Artificial Sequence: Synthetic oligonucleotide
  Antisense strand to SEQ ID NO: 20646
cacauaauaaggauucaaa

SEQ ID NO: 20648 - RNA, 19 nt, Artificial Sequence
  Description of Artificial Sequence: Synthetic oligonucleotide
  Sense strand starting at position 3180 of SEQ ID NO: 224
auuauuccuguagaaacga

SEQ ID NO: 20649 - RNA, 19 nt, Artificial Sequence
  Description of Artificial Sequence: Synthetic oligonucleotide
  Antisense strand to SEQ ID NO: 20648
ucguuucuacaggaauaau

SEQ ID NO: 20650 - RNA, 19 nt, Artificial Sequence
  Description of Artificial Sequence: Synthetic oligonucleotide
  Sense strand starting at position 3152 of SEQ ID NO: 224
aaaugcuuggauggauaau

SEQ ID NO: 20651 - RNA, 19 nt, Artificial Sequence
  Description of Artificial Sequence: Synthetic oligonucleotide
  Antisense strand to SEQ ID NO: 20650
auuauccauccaagcauuu

SEQ ID NO: 20652 - RNA, 19 nt, Artificial Sequence
  Description of Artificial Sequence: Synthetic oligonucleotide
  Sense strand starting at position 3034 of SEQ ID NO: 224
guaccauaagauuggccaa

SEQ ID NO: 20653 - RNA, 19 nt, Artificial Sequence
  Description of Artificial Sequence: Synthetic oligonucleotide
  Antisense strand to SEQ ID NO: 20652
uuggccaaucuuaugguac

SEQ ID NO: 20654 - RNA, 19 nt, Artificial Sequence
  Description of Artificial Sequence: Synthetic oligonucleotide
  Sense strand starting at position 2619 of SEQ ID NO: 224
uaaggaaacucaguaguuc

SEQ ID NO: 20655 - RNA, 19 nt, Artificial Sequence
  Description of Artificial Sequence: Synthetic oligonucleotide
  Antisense strand to SEQ ID NO: 20654
gaacuacugaguuuccuua

SEQ ID NO: 20656 - RNA, 19 nt, Artificial Sequence
  Description of Artificial Sequence: Synthetic oligonucleotide
  Sense strand starting at position 2559 of SEQ ID NO: 224
guagcaaacugauuaucau

SEQ ID NO: 20657 - RNA, 19 nt, Artificial Sequence
  Description of Artificial Sequence: Synthetic oligonucleotide
  Antisense strand to SEQ ID NO: 20656
augauaaucaguuugcuac

SEQ ID NO: 20658 - RNA, 19 nt, Artificial Sequence
  Description of Artificial Sequence: Synthetic oligonucleotide
  Sense strand starting at position 2507 of SEQ ID NO: 224
cagugaagugauggaugga

SEQ ID NO: 20659 - RNA, 19 nt, Artificial Sequence
  Description of Artificial Sequence: Synthetic oligonucleotide
  Antisense strand to SEQ ID NO: 20658
uccauccaucacuucacug

SEQ ID NO: 20660 - RNA, 19 nt, Artificial Sequence
  Description of Artificial Sequence: Synthetic oligonucleotide
  Sense strand starting at position 2495 of SEQ ID NO: 224
aaagucuuugagcagugaa

SEQ ID NO: 20661 - RNA, 19 nt, Artificial Sequence
  Description of Artificial Sequence: Synthetic oligonucleotide
  Antisense strand to SEQ ID NO: 20660
uucacugcucaaagacuuu

SEQ ID NO: 20662 - RNA, 19 nt, Artificial Sequence
  Description of Artificial Sequence: Synthetic oligonucleotide
  Sense strand starting at position 2494 of SEQ ID NO: 224
caaagucuuugagcaguga

SEQ ID NO: 20663 - RNA, 19 nt, Artificial Sequence
  Description of Artificial Sequence: Synthetic oligonucleotide
  Antisense strand to SEQ ID NO: 20662
ucacugcucaaagacuuug

SEQ ID NO: 20664 - RNA, 19 nt, Artificial Sequence
  Description of Artificial Sequence: Synthetic oligonucleotide
  Sense strand starting at position 2434 of SEQ ID NO: 224
cagggcuuugcauauaaag

SEQ ID NO: 20665 - RNA, 19 nt, Artificial Sequence
  Description of Artificial Sequence: Synthetic oligonucleotide
  Antisense strand to SEQ ID NO: 20664
cuuuauaugcaaagcccug

SEQ ID NO: 20666 - RNA, 19 nt, Artificial Sequence
  Description of Artificial Sequence: Synthetic oligonucleotide
  Sense strand starting at position 2411 of SEQ ID NO: 224
uuuggacuugaucggagaa

SEQ ID NO: 20667 - RNA, 19 nt, Artificial Sequence
  Description of Artificial Sequence: Synthetic oligonucleotide
  Antisense strand to SEQ ID NO: 20666
uucuccgaucaaguccaaa

SEQ ID NO: 20668 - RNA, 19 nt, Artificial Sequence
  Description of Artificial Sequence: Synthetic oligonucleotide
  Sense strand starting at position 2238 of SEQ ID NO: 224
cuucuuaacccugagguau

SEQ ID NO: 20669 - RNA, 19 nt, Artificial Sequence
  Description of Artificial Sequence: Synthetic oligonucleotide
  Antisense strand to SEQ ID NO: 20668
auaccucaggguuaagaag

SEQ ID NO: 20670 - RNA, 19 nt, Artificial Sequence
  Description of Artificial Sequence: Synthetic oligonucleotide
  Sense strand starting at position 2173 of SEQ ID NO: 224
uccugacaggucuacacuu

SEQ ID NO: 20671 - RNA, 19 nt, Artificial Sequence
  Description of Artificial Sequence: Synthetic oligonucleotide
  Antisense strand to SEQ ID NO: 20670
aaguguagaccugucagga

SEQ ID NO: 20672 - RNA, 19 nt, Artificial Sequence
  Description of Artificial Sequence: Synthetic oligonucleotide
  Sense strand starting at position 1306 of SEQ ID NO: 224
uugagauauuucuagcaaa

SEQ ID NO: 20673 - RNA, 19 nt, Artificial Sequence
  Description of Artificial Sequence: Synthetic oligonucleotide
  Antisense strand to SEQ ID NO: 20672
uuugcuagaaauaucucaa

SEQ ID NO: 20674 - RNA, 19 nt, Artificial Sequence
  Description of Artificial Sequence: Synthetic oligonucleotide
  Sense strand starting at position 1270 of SEQ ID NO: 224
gaccuuagugauuggaaac

SEQ ID NO: 20675 - RNA, 19 nt, Artificial Sequence
  Description of Artificial Sequence: Synthetic oligonucleotide
  Antisense strand to SEQ ID NO: 20674
guuuccaaucacuaagguc

SEQ ID NO: 20676 - RNA, 19 nt, Artificial Sequence
  Description of Artificial Sequence: Synthetic oligonucleotide
  Sense strand starting at position 1269 of SEQ ID NO: 224
cgaccuuagugauuggaaa

SEQ ID NO: 20677 - RNA, 19 nt, Artificial Sequence
  Description of Artificial Sequence: Synthetic oligonucleotide
  Antisense strand to SEQ ID NO: 20676
uuuccaaucacuaaggucg

SEQ ID NO: 20678 - RNA, 19 nt, Artificial Sequence
  Description of Artificial Sequence: Synthetic oligonucleotide
  Sense strand starting at position 1112 of SEQ ID NO: 224
cugguaaauuguuuaaaga

SEQ ID NO: 20679 - RNA, 19 nt, Artificial Sequence
  Description of Artificial Sequence: Synthetic oligonucleotide
  Antisense strand to SEQ ID NO: 20678
ucuuuaaacaauuuaccag

SEQ ID NO: 20680 - RNA, 19 nt, Artificial Sequence
  Description of Artificial Sequence: Synthetic oligonucleotide
  Sense strand starting at position 969 of SEQ ID NO: 224
gaaggauauccaugaggcu

SEQ ID NO: 20681 - RNA, 19 nt, Artificial Sequence
  Description of Artificial Sequence: Synthetic oligonucleotide
  Antisense strand to SEQ ID NO: 20680
agccucauggauauccuuc

SEQ ID NO: 20682 - RNA, 19 nt, Artificial Sequence
  Description of Artificial Sequence: Synthetic oligonucleotide
  Sense strand starting at position 945 of SEQ ID NO: 224
uuagcuggauucccaauaa

SEQ ID NO: 20683 - RNA, 19 nt, Artificial Sequence
  Description of Artificial Sequence: Synthetic oligonucleotide
  Antisense strand to SEQ ID NO: 20682
uuauugggaauccagcuaa

SEQ ID NO: 20684 - RNA, 19 nt, Artificial Sequence
  Description of Artificial Sequence: Synthetic oligonucleotide
  Sense strand starting at position 932 of SEQ ID NO: 224
agcugaaauuacuuuagcu

SEQ ID NO: 20685 - RNA, 19 nt, Artificial Sequence
  Description of Artificial Sequence: Synthetic oligonucleotide
  Antisense strand to SEQ ID NO: 20684
agcuaaaguaauuucagcu

SEQ ID NO: 20686 - RNA, 19 nt, Artificial Sequence
  Description of Artificial Sequence: Synthetic oligonucleotide
  Sense strand starting at position 889 of SEQ ID NO: 224
guaaauuagcuaggucaua

SEQ ID NO: 20687 - RNA, 19 nt, Artificial Sequence
  Description of Artificial Sequence: Synthetic oligonucleotide
  Antisense strand to SEQ ID NO: 20686
uaugaccuagcuaauuuac

SEQ ID NO: 20688 - RNA, 19 nt, Artificial Sequence
  Description of Artificial Sequence: Synthetic oligonucleotide
  Sense strand starting at position 871 of SEQ ID NO: 224
caaugucuugcuggaaaug

SEQ ID NO: 20689 - RNA, 19 nt, Artificial Sequence
  Description of Artificial Sequence: Synthetic oligonucleotide
  Antisense strand to SEQ ID NO: 20688
cauuuccagcaagacauug

SEQ ID NO: 20690 - RNA, 19 nt, Artificial Sequence
  Description of Artificial Sequence: Synthetic oligonucleotide
  Sense strand starting at position 869 of SEQ ID NO: 224
aucaaugucuugcuggaaa

SEQ ID NO: 20691 - RNA, 19 nt, Artificial Sequence
  Description of Artificial Sequence: Synthetic oligonucleotide
  Antisense strand to SEQ ID NO: 20690
uuuccagcaagacauugau

SEQ ID NO: 20692 - RNA, 19 nt, Artificial Sequence
  Description of Artificial Sequence: Synthetic oligonucleotide
  Sense strand starting at position 756 of SEQ ID NO: 224
aguaauuauguuuaccuca

SEQ ID NO: 20693 - RNA, 19 nt, Artificial Sequence
  Description of Artificial Sequence: Synthetic oligonucleotide
  Antisense strand to SEQ ID NO: 20692
ugagguaaacauaauuacu

SEQ ID NO: 20694 - RNA, 19 nt, Artificial Sequence
  Description of Artificial Sequence: Synthetic oligonucleotide
  Sense strand starting at position 727 of SEQ ID NO: 224
aguagaaugcugcacaacu

SEQ ID NO: 20695 - RNA, 19 nt, Artificial Sequence
  Description of Artificial Sequence: Synthetic oligonucleotide
  Antisense strand to SEQ ID NO: 20694
aguugugcagcauucuacu

SEQ ID NO: 20696 - RNA, 19 nt, Artificial Sequence
  Description of Artificial Sequence: Synthetic oligonucleotide
  Sense strand starting at position 378 of SEQ ID NO: 224
gagccuuaaguauggguga

SEQ ID NO: 20697 - RNA, 19 nt, Artificial Sequence
  Description of Artificial Sequence: Synthetic oligonucleotide
  Antisense strand to SEQ ID NO: 20696
ucacccauacuuaaggcuc

SEQ ID NO: 20698 - RNA, 19 nt, Artificial Sequence
  Description of Artificial Sequence: Synthetic oligonucleotide
  Sense strand starting at position 361 of SEQ ID NO: 224
ucuguuuauagcuaucgga

SEQ ID NO: 20699 - RNA, 19 nt, Artificial Sequence
  Description of Artificial Sequence: Synthetic oligonucleotide
  Antisense strand to SEQ ID NO: 20698
uccgauagcuauaaacaga

SEQ ID NO: 20700 - RNA, 19 nt, Artificial Sequence
  Description of Artificial Sequence: Synthetic oligonucleotide
  Sense strand starting at position 311 of SEQ ID NO: 224
cccaguagauagucccaaa

SEQ ID NO: 20701 - RNA, 19 nt, Artificial Sequence
  Description of Artificial Sequence: Synthetic oligonucleotide
  Antisense strand to SEQ ID NO: 20700
uuugggacuaucuacuggg

SEQ ID NO: 20702 - RNA, 19 nt, Artificial Sequence
  Description of Artificial Sequence: Synthetic oligonucleotide
  Sense strand starting at position 240 of SEQ ID NO: 224
cguuaacaacuuuaguauu

SEQ ID NO: 20703 - RNA, 19 nt, Artificial Sequence
  Description of Artificial Sequence: Synthetic oligonucleotide
  Antisense strand to SEQ ID NO: 20702
aauacuaaaguuguuaacg

SEQ ID NO: 20704 - RNA, 19 nt, Artificial Sequence
  Description of Artificial Sequence: Synthetic oligonucleotide
  Sense strand starting at position 224 of SEQ ID NO: 224
uguguuacccuagaaacgu

SEQ ID NO: 20705 - RNA, 19 nt, Artificial Sequence
  Description of Artificial Sequence: Synthetic oligonucleotide
  Antisense strand to SEQ ID NO: 20704
acguuucuaggguaacaca

SEQ ID NO: 20706 - RNA, 19 nt, Artificial Sequence
  Description of Artificial Sequence: Synthetic oligonucleotide
  Sense strand starting at position 219 of SEQ ID NO: 224
uuagauguguuacccuaga

SEQ ID NO: 20707 - RNA, 19 nt, Artificial Sequence
  Description of Artificial Sequence: Synthetic oligonucleotide
  Antisense strand to SEQ ID NO: 20706
ucuaggguaacacaucuaa

SEQ ID NO: 20708 - RNA, 19 nt, Artificial Sequence
  Description of Artificial Sequence: Synthetic oligonucleotide
  Sense strand starting at position 121 of SEQ ID NO: 224
auaagaauuugagaguucu

SEQ ID NO: 20709 - RNA, 19 nt, Artificial Sequence
  Description of Artificial Sequence: Synthetic oligonucleotide
  Antisense strand to SEQ ID NO: 20708
agaacucucaaauucuuau

SEQ ID NO: 20710 - RNA, 19 nt, Artificial Sequence
  Description of Artificial Sequence: Synthetic oligonucleotide
  Sense strand starting at position 6 of SEQ ID NO: 224
auugcuaugcuuggagaaa

SEQ ID NO: 20711 - RNA, 19 nt, Artificial Sequence
  Description of Artificial Sequence: Synthetic oligonucleotide
  Antisense strand to SEQ ID NO: 20710
uuucuccaagcauagcaau

SEQ ID NO: 20712 - RNA, 19 nt, Artificial Sequence
  Description of Artificial Sequence: Synthetic oligonucleotide
  Sense strand starting at position 5 of SEQ ID NO: 224
cauugcuaugcuuggagaa

SEQ ID NO: 20713 - RNA, 19 nt, Artificial Sequence
  Description of Artificial Sequence: Synthetic oligonucleotide
  Antisense strand to SEQ ID NO: 20712
uucuccaagcauagcaaug

SEQ ID NO: 20714 - RNA, 19 nt, Artificial Sequence
  Description of Artificial Sequence: Synthetic oligonucleotide
  Sense strand starting at position 3896 of SEQ ID NO: 225
gaacucagaguuuaugcuu

SEQ ID NO: 20715 - RNA, 19 nt, Artificial Sequence
  Description of Artificial Sequence: Synthetic oligonucleotide
  Antisense strand to SEQ ID NO: 20714
aagcauaaacucugaguuc

SEQ ID NO: 20716 - RNA, 19 nt, Artificial Sequence
  Description of Artificial Sequence: Synthetic oligonucleotide
  Sense strand starting at position 3882 of SEQ ID NO: 225
gacugacagucugugaacu

SEQ ID NO: 20717 - RNA, 19 nt, Artificial Sequence
  Description of Artificial Sequence: Synthetic oligonucleotide
  Antisense strand to SEQ ID NO: 20716
aguucacagacugucaguc

SEQ ID NO: 20718 - RNA, 19 nt, Artificial Sequence
  Description of Artificial Sequence: Synthetic oligonucleotide
  Sense strand starting at position 3862 of SEQ ID NO: 225
ccuuacuuaguugaaaguu

SEQ ID NO: 20719 - RNA, 19 nt, Artificial Sequence
  Description of Artificial Sequence: Synthetic oligonucleotide
  Antisense strand to SEQ ID NO: 20718
aacuuucaacuaaguaagg

SEQ ID NO: 20720 - RNA, 19 nt, Artificial Sequence
  Description of Artificial Sequence: Synthetic oligonucleotide
  Sense strand starting at position 3860 of SEQ ID NO: 225
gcccuuacuuaguugaaag

SEQ ID NO: 20721 - RNA, 19 nt, Artificial Sequence
  Description of Artificial Sequence: Synthetic oligonucleotide
  Antisense strand to SEQ ID NO: 20720
cuuucaacuaaguaagggc

SEQ ID NO: 20722 - RNA, 19 nt, Artificial Sequence
  Description of Artificial Sequence: Synthetic oligonucleotide
  Sense strand starting at position 3859 of SEQ ID NO: 225
agcccuuacuuaguugaaa

SEQ ID NO: 20723 - RNA, 19 nt, Artificial Sequence
  Description of Artificial Sequence: Synthetic oligonucleotide
  Antisense strand to SEQ ID NO: 20722
uuucaacuaaguaagggcu

SEQ ID NO: 20724 - RNA, 19 nt, Artificial Sequence
  Description of Artificial Sequence: Synthetic oligonucleotide
  Sense strand starting at position 3769 of SEQ ID NO: 225
gugguuaugaauggagguu

SEQ ID NO: 20725 - RNA, 19 nt, Artificial Sequence
  Description of Artificial Sequence: Synthetic oligonucleotide
  Antisense strand to SEQ ID NO: 20724
aaccuccauucauaaccac

SEQ ID NO: 20726 - RNA, 19 nt, Artificial Sequence
  Description of Artificial Sequence: Synthetic oligonucleotide
  Sense strand starting at position 3768 of SEQ ID NO: 225
agugguuaugaauggaggu

SEQ ID NO: 20727 - RNA, 19 nt, Artificial Sequence
  Description of Artificial Sequence: Synthetic oligonucleotide
  Antisense strand to SEQ ID NO: 20726
accuccauucauaaccacu

SEQ ID NO: 20728 - RNA, 19 nt, Artificial Sequence
  Description of Artificial Sequence: Synthetic oligonucleotide
  Sense strand starting at position 3762 of SEQ ID NO: 225
gcgaucagugguuaugaau

SEQ ID NO: 20729 - RNA, 19 nt, Artificial Sequence
  Description of Artificial Sequence: Synthetic oligonucleotide
  Antisense strand to SEQ ID NO: 20728
auucauaaccacugaucgc

SEQ ID NO: 20730 - RNA, 19 nt, Artificial Sequence
  Description of Artificial Sequence: Synthetic oligonucleotide
  Sense strand starting at position 3657 of SEQ ID NO: 225
guaucuagugcauaagaag

SEQ ID NO: 20731 - RNA, 19 nt, Artificial Sequence
  Description of Artificial Sequence: Synthetic oligonucleotide
  Antisense strand to SEQ ID NO: 20730
cuucuuaugcacuagauac

SEQ ID NO: 20732 - RNA, 19 nt, Artificial Sequence
  Description of Artificial Sequence: Synthetic oligonucleotide
  Sense strand starting at position 3655 of SEQ ID NO: 225
cuguaucuagugcauaaga

SEQ ID NO: 20733 - RNA, 19 nt, Artificial Sequence
  Description of Artificial Sequence: Synthetic oligonucleotide
  Antisense strand to SEQ ID NO: 20732
ucuuaugcacuagauacag

SEQ ID NO: 20734 - RNA, 19 nt, Artificial Sequence
  Description of Artificial Sequence: Synthetic oligonucleotide
  Sense strand starting at position 3579 of SEQ ID NO: 225
ucguuacuucuuccgcgaa

SEQ ID NO: 20735 - RNA, 19 nt, Artificial Sequence
  Description of Artificial Sequence: Synthetic oligonucleotide
  Antisense strand to SEQ ID NO: 20734
uucgcggaagaaguaacga

SEQ ID NO: 20736 - RNA, 19 nt, Artificial Sequence
  Description of Artificial Sequence: Synthetic oligonucleotide
  Sense strand starting at position 3570 of SEQ ID NO: 225
agauuucucucguuacuuc

SEQ ID NO: 20737 - RNA, 19 nt, Artificial Sequence
  Description of Artificial Sequence: Synthetic oligonucleotide
  Antisense strand to SEQ ID NO: 20736
gaaguaacgagagaaaucu

SEQ ID NO: 20738 - RNA, 19 nt, Artificial Sequence
  Description of Artificial Sequence: Synthetic oligonucleotide
  Sense strand starting at position 3565 of SEQ ID NO: 225
ucugaagauuucucucguu

SEQ ID NO: 20739 - RNA, 19 nt, Artificial Sequence
  Description of Artificial Sequence: Synthetic oligonucleotide
  Antisense strand to SEQ ID NO: 20738
aacgagagaaaucuucaga

SEQ ID NO: 20740 - RNA, 19 nt, Artificial Sequence
  Description of Artificial Sequence: Synthetic oligonucleotide
  Sense strand starting at position 3564 of SEQ ID NO: 225
gucugaagauuucucucgu

SEQ ID NO: 20741 - RNA, 19 nt, Artificial Sequence
  Description of Artificial Sequence: Synthetic oligonucleotide
  Antisense strand to SEQ ID NO: 20740
acgagagaaaucuucagac

SEQ ID NO: 20742 - RNA, 19 nt, Artificial Sequence
  Description of Artificial Sequence: Synthetic oligonucleotide
  Sense strand starting at position 3448 of SEQ ID NO: 225
auguuaagagcccagcaua

SEQ ID NO: 20743 - RNA, 19 nt, Artificial Sequence
  Description of Artificial Sequence: Synthetic oligonucleotide
  Antisense strand to SEQ ID NO: 20742
uaugcugggcucuuaacau

SEQ ID NO: 20744 - RNA, 19 nt, Artificial Sequence
  Description of Artificial Sequence: Synthetic oligonucleotide
  Sense strand starting at position 3421 of SEQ ID NO: 225
aggaauggcccguaaauua

SEQ ID NO: 20745 - RNA, 19 nt, Artificial Sequence
  Description of Artificial Sequence: Synthetic oligonucleotide
  Antisense strand to SEQ ID NO: 20744
uaauuuacgggccauuccu

SEQ ID NO: 20746 - RNA, 19 nt, Artificial Sequence
  Description of Artificial Sequence: Synthetic oligonucleotide
  Sense strand starting at position 3419 of SEQ ID NO: 225
gaaggaauggcccguaaau

SEQ ID NO: 20747 - RNA, 19 nt, Artificial Sequence
  Description of Artificial Sequence: Synthetic oligonucleotide
  Antisense strand to SEQ ID NO: 20746
auuuacgggccauuccuuc

SEQ ID NO: 20748 - RNA, 19 nt, Artificial Sequence
  Description of Artificial Sequence: Synthetic oligonucleotide
  Sense strand starting at position 3222 of SEQ ID NO: 225
uuacuauacugaucccagu

SEQ ID NO: 20749 - RNA, 19 nt, Artificial Sequence
  Description of Artificial Sequence: Synthetic oligonucleotide
  Antisense strand to SEQ ID NO: 20748
acugggaucaguauaguaa

SEQ ID NO: 20750 - RNA, 19 nt, Artificial Sequence
  Description of Artificial Sequence: Synthetic oligonucleotide
  Sense strand starting at position 3187 of SEQ ID NO: 225
gucagaccgcguucuuauc

SEQ ID NO: 20751 - RNA, 19 nt, Artificial Sequence
  Description of Artificial Sequence: Synthetic oligonucleotide
  Antisense strand to SEQ ID NO: 20750
gauaagaacgcggucugac

SEQ ID NO: 20752 - RNA, 19 nt, Artificial Sequence
  Description of Artificial Sequence: Synthetic oligonucleotide
  Sense strand starting at position 3153 of SEQ ID NO: 225
aucucuucugauggacaua

SEQ ID NO: 20753 - RNA, 19 nt, Artificial Sequence
  Description of Artificial Sequence: Synthetic oligonucleotide
  Antisense strand to SEQ ID NO: 20752
uauguccaucagaagagau

SEQ ID NO: 20754 - RNA, 19 nt, Artificial Sequence
  Description of Artificial Sequence: Synthetic oligonucleotide
  Sense strand starting at position 2653 of SEQ ID NO: 225
agcgacugaccucacgaau

SEQ ID NO: 20755 - RNA, 19 nt, Artificial Sequence
  Description of Artificial Sequence: Synthetic oligonucleotide
  Antisense strand to SEQ ID NO: 20754
auucgugaggucagucgcu

SEQ ID NO: 20756 - RNA, 19 nt, Artificial Sequence
  Description of Artificial Sequence: Synthetic oligonucleotide
  Sense strand starting at position 2423 of SEQ ID NO: 225
caucaucccugaguagaag

SEQ ID NO: 20757 - RNA, 19 nt, Artificial Sequence
  Description of Artificial Sequence: Synthetic oligonucleotide
  Antisense strand to SEQ ID NO: 20756
cuucuacucagggaugaug

SEQ ID NO: 20758 - RNA, 19 nt, Artificial Sequence
  Description of Artificial Sequence: Synthetic oligonucleotide
  Sense strand starting at position 2179 of SEQ ID NO: 225
gcauuaaguacggacuuua

SEQ ID NO: 20759 - RNA, 19 nt, Artificial Sequence
  Description of Artificial Sequence: Synthetic oligonucleotide
  Antisense strand to SEQ ID NO: 20758
uaaaguccguacuuaaugc

SEQ ID NO: 20760 - RNA, 19 nt, Artificial Sequence
  Description of Artificial Sequence: Synthetic oligonucleotide
  Sense strand starting at position 2137 of SEQ ID NO: 225
uuuauuuggguguguacuu

SEQ ID NO: 20761 - RNA, 19 nt, Artificial Sequence
  Description of Artificial Sequence: Synthetic oligonucleotide
  Antisense strand to SEQ ID NO: 20760
aaguacacacccaaauaaa

SEQ ID NO: 20762 - RNA, 19 nt, Artificial Sequence
  Description of Artificial Sequence: Synthetic oligonucleotide
  Sense strand starting at position 2081 of SEQ ID NO: 225
uguugugucccugccuaca

SEQ ID NO: 20763 - RNA, 19 nt, Artificial Sequence
  Description of Artificial Sequence: Synthetic oligonucleotide
  Antisense strand to SEQ ID NO: 20762
uguaggcagggacacaaca

SEQ ID NO: 20764 - RNA, 19 nt, Artificial Sequence
  Description of Artificial Sequence: Synthetic oligonucleotide
  Sense strand starting at position 1466 of SEQ ID NO: 225
cuguauaaagcucaaagca

SEQ ID NO: 20765 - RNA, 19 nt, Artificial Sequence
  Description of Artificial Sequence: Synthetic oligonucleotide
  Antisense strand to SEQ ID NO: 20764
ugcuuugagcuuuauacag

SEQ ID NO: 20766 - RNA, 19 nt, Artificial Sequence
  Description of Artificial Sequence: Synthetic oligonucleotide
  Sense strand starting at position 1356 of SEQ ID NO: 225
ugaagagugcuguaacuga

SEQ ID NO: 20767 - RNA, 19 nt, Artificial Sequence
  Description of Artificial Sequence: Synthetic oligonucleotide
  Antisense strand to SEQ ID NO: 20766
ucaguuacagcacucuuca

SEQ ID NO: 20768 - RNA, 19 nt, Artificial Sequence
  Description of Artificial Sequence: Synthetic oligonucleotide
  Sense strand starting at position 1299 of SEQ ID NO: 225
ggguuauaaagaugggcaa

SEQ ID NO: 20769 - RNA, 19 nt, Artificial Sequence
  Description of Artificial Sequence: Synthetic oligonucleotide
  Antisense strand to SEQ ID NO: 20768
uugcccaucuuuauaaccc

SEQ ID NO: 20770 - RNA, 19 nt, Artificial Sequence
  Description of Artificial Sequence: Synthetic oligonucleotide
  Sense strand starting at position 1020 of SEQ ID NO: 225
gguucuaccaguugggaaa

SEQ ID NO: 20771 - RNA, 19 nt, Artificial Sequence
  Description of Artificial Sequence: Synthetic oligonucleotide
  Antisense strand to SEQ ID NO: 20770
uuucccaacugguagaacc

SEQ ID NO: 20772 - RNA, 19 nt, Artificial Sequence
  Description of Artificial Sequence: Synthetic oligonucleotide
  Sense strand starting at position 870 of SEQ ID NO: 225
uuaagugccuaaguuagaa

SEQ ID NO: 20773 - RNA, 19 nt, Artificial Sequence
  Description of Artificial Sequence: Synthetic oligonucleotide
  Antisense strand to SEQ ID NO: 20772
uucuaacuuaggcacuuaa

SEQ ID NO: 20774 - RNA, 19 nt, Artificial Sequence
  Description of Artificial Sequence: Synthetic oligonucleotide
  Sense strand starting at position 867 of SEQ ID NO: 225
uuauuaagugccuaaguua

SEQ ID NO: 20775 - RNA, 19 nt, Artificial Sequence
  Description of Artificial Sequence: Synthetic oligonucleotide
  Antisense strand to SEQ ID NO: 20774
uaacuuaggcacuuaauaa

SEQ ID NO: 20776 - RNA, 19 nt, Artificial Sequence
  Description of Artificial Sequence: Synthetic oligonucleotide
  Sense strand starting at position 819 of SEQ ID NO: 225
uuagcacuguucucaagga

SEQ ID NO: 20777 - RNA, 19 nt, Artificial Sequence
  Description of Artificial Sequence: Synthetic oligonucleotide
  Antisense strand to SEQ ID NO: 20776
uccuugagaacagugcuaa

SEQ ID NO: 20778 - RNA, 19 nt, Artificial Sequence
  Description of Artificial Sequence: Synthetic oligonucleotide
  Sense strand starting at position 558 of SEQ ID NO: 225
ccaagaucaccugguuuaa

SEQ ID NO: 20779 - RNA, 19 nt, Artificial Sequence
  Description of Artificial Sequence: Synthetic oligonucleotide
  Antisense strand to SEQ ID NO: 20778
uuaaaccaggugaucuugg

SEQ ID NO: 20780 - RNA, 19 nt, Artificial Sequence
  Description of Artificial Sequence: Synthetic oligonucleotide
  Sense strand starting at position 381 of SEQ ID NO: 225
guuccuaaggaguaucuca

SEQ ID NO: 20781 - RNA, 19 nt, Artificial Sequence
  Description of Artificial Sequence: Synthetic oligonucleotide
  Antisense strand to SEQ ID NO: 20780
ugagauacuccuuaggaac

SEQ ID NO: 20782 - RNA, 19 nt, Artificial Sequence
  Description of Artificial Sequence: Synthetic oligonucleotide
  Sense strand starting at position 269 of SEQ ID NO: 225
ucuugacuuguuugaaaua

SEQ ID NO: 20783 - RNA, 19 nt, Artificial Sequence
  Description of Artificial Sequence: Synthetic oligonucleotide
  Antisense strand to SEQ ID NO: 20782
uauuucaaacaagucaaga

SEQ ID NO: 20784 - RNA, 19 nt, Artificial Sequence
  Description of Artificial Sequence: Synthetic oligonucleotide
  Sense strand starting at position 267 of SEQ ID NO: 225
agucuugacuuguuugaaa

SEQ ID NO: 20785 - RNA, 19 nt, Artificial Sequence
  Description of Artificial Sequence: Synthetic oligonucleotide
  Antisense strand to SEQ ID NO: 20784
uuucaaacaagucaagacu

SEQ ID NO: 20786 - RNA, 19 nt, Artificial Sequence
  Description of Artificial Sequence: Synthetic oligonucleotide
  Sense strand starting at position 261 of SEQ ID NO: 225
agacaaagucuugacuugu

SEQ ID NO: 20787 - RNA, 19 nt, Artificial Sequence
  Description of Artificial Sequence: Synthetic oligonucleotide
  Antisense strand to SEQ ID NO: 20786
acaagucaagacuuugucu

SEQ ID NO: 20788 - RNA, 19 nt, Artificial Sequence
  Description of Artificial Sequence: Synthetic oligonucleotide
  Sense strand starting at position 187 of SEQ ID NO: 225
ugguaaacccuuugggauu

SEQ ID NO: 20789 - RNA, 19 nt, Artificial Sequence
  Description of Artificial Sequence: Synthetic oligonucleotide
  Antisense strand to SEQ ID NO: 20788
aaucccaaaggguuuacca

SEQ ID NO: 20790 - RNA, 19 nt, Artificial Sequence
  Description of Artificial Sequence: Synthetic oligonucleotide
  Sense strand starting at position 174 of SEQ ID NO: 225
agaccuagauacuugguaa

SEQ ID NO: 20791 - RNA, 19 nt, Artificial Sequence
  Description of Artificial Sequence: Synthetic oligonucleotide
  Antisense strand to SEQ ID NO: 20790
uuaccaaguaucuaggucu

SEQ ID NO: 20792 - RNA, 19 nt, Artificial Sequence
  Description of Artificial Sequence: Synthetic oligonucleotide
  Sense strand starting at position 11 of SEQ ID NO: 225
agacuuaaauuugaugacu

SEQ ID NO: 20793 - RNA, 19 nt, Artificial Sequence
  Description of Artificial Sequence: Synthetic oligonucleotide
  Antisense strand to SEQ ID NO: 20792
agucaucaaauuuaagucu

SEQ ID NO: 20794 - RNA, 19 nt, Artificial Sequence
  Description of Artificial Sequence: Synthetic oligonucleotide
  Sense strand starting at position 3931 of SEQ ID NO: 226
ugcauacaucauugucuau

SEQ ID NO: 20795 - RNA, 19 nt, Artificial Sequence
  Description of Artificial Sequence: Synthetic oligonucleotide
  Antisense strand to SEQ ID NO: 20794
auagacaaugauguaugca

SEQ ID NO: 20796 - RNA, 19 nt, Artificial Sequence
  Description of Artificial Sequence: Synthetic oligonucleotide
  Sense strand starting at position 3930 of SEQ ID NO: 226
cugcauacaucauugucua

SEQ ID NO: 20797 - RNA, 19 nt, Artificial Sequence
  Description of Artificial Sequence: Synthetic oligonucleotide
  Antisense strand to SEQ ID NO: 20796
uagacaaugauguaugcag

SEQ ID NO: 20798 - RNA, 19 nt, Artificial Sequence
  Description of Artificial Sequence: Synthetic oligonucleotide
  Sense strand starting at position 3638 of SEQ ID NO: 226
ucaggucauucugaaacau

SEQ ID NO: 20799 - RNA, 19 nt, Artificial Sequence
  Description of Artificial Sequence: Synthetic oligonucleotide
  Antisense strand to SEQ ID NO: 20798
auguuucagaaugaccuga

SEQ ID NO: 20800 - RNA, 19 nt, Artificial Sequence
  Description of Artificial Sequence: Synthetic oligonucleotide
  Sense strand starting at position 3634 of SEQ ID NO: 226
uugcucaggucauucugaa

SEQ ID NO: 20801 - RNA, 19 nt, Artificial Sequence
  Description of Artificial Sequence: Synthetic oligonucleotide
  Antisense strand to SEQ ID NO: 20800
uucagaaugaccugagcaa

SEQ ID NO: 20802 - RNA, 19 nt, Artificial Sequence
  Description of Artificial Sequence: Synthetic oligonucleotide
  Sense strand starting at position 3523 of SEQ ID NO: 226
ucuuacuaucuagaugguu

SEQ ID NO: 20803 - RNA, 19 nt, Artificial Sequence
  Description of Artificial Sequence: Synthetic oligonucleotide
  Antisense strand to SEQ ID NO: 20802
aaccaucuagauaguaaga

SEQ ID NO: 20804 - RNA, 19 nt, Artificial Sequence
  Description of Artificial Sequence: Synthetic oligonucleotide
  Sense strand starting at position 3520 of SEQ ID NO: 226
gcuucuuacuaucuagaug

SEQ ID NO: 20805 - RNA, 19 nt, Artificial Sequence
  Description of Artificial Sequence: Synthetic oligonucleotide
  Antisense strand to SEQ ID NO: 20804
caucuagauaguaagaagc

SEQ ID NO: 20806 - RNA, 19 nt, Artificial Sequence
  Description of Artificial Sequence: Synthetic oligonucleotide
  Sense strand starting at position 3516 of SEQ ID NO: 226
ggcugcuucuuacuaucua

SEQ ID NO: 20807 - RNA, 19 nt, Artificial Sequence
  Description of Artificial Sequence: Synthetic oligonucleotide
  Antisense strand to SEQ ID NO: 20806
uagauaguaagaagcagcc

SEQ ID NO: 20808 - RNA, 19 nt, Artificial Sequence
  Description of Artificial Sequence: Synthetic oligonucleotide
  Sense strand starting at position 3421 of SEQ ID NO: 226
ccauuucugucagcgauac

SEQ ID NO: 20809 - RNA, 19 nt, Artificial Sequence
  Description of Artificial Sequence: Synthetic oligonucleotide
  Antisense strand to SEQ ID NO: 20808
guaucgcugacagaaaugg

SEQ ID NO: 20810 - RNA, 19 nt, Artificial Sequence
  Description of Artificial Sequence: Synthetic oligonucleotide
  Sense strand starting at position 3419 of SEQ ID NO: 226
cuccauuucugucagcgau

SEQ ID NO: 20811 - RNA, 19 nt, Artificial Sequence
  Description of Artificial Sequence: Synthetic oligonucleotide
  Antisense strand to SEQ ID NO: 20810
aucgcugacagaaauggag

SEQ ID NO: 20812 - RNA, 19 nt, Artificial Sequence
  Description of Artificial Sequence: Synthetic oligonucleotide
  Sense strand starting at position 3391 of SEQ ID NO: 226
agcccagugucucuccaaa

SEQ ID NO: 20813 - RNA, 19 nt, Artificial Sequence
  Description of Artificial Sequence: Synthetic oligonucleotide
  Antisense strand to SEQ ID NO: 20812
uuuggagagacacugggcu

SEQ ID NO: 20814 - RNA, 19 nt, Artificial Sequence
  Description of Artificial Sequence: Synthetic oligonucleotide
  Sense strand starting at position 3250 of SEQ ID NO: 226
guagccugucuugauguuu

SEQ ID NO: 20815 - RNA, 19 nt, Artificial Sequence
  Description of Artificial Sequence: Synthetic oligonucleotide
  Antisense strand to SEQ ID NO: 20814
aaacaucaagacaggcuac

SEQ ID NO: 20816 - RNA, 19 nt, Artificial Sequence
  Description of Artificial Sequence: Synthetic oligonucleotide
  Sense strand starting at position 3182 of SEQ ID NO: 226
cgcacuaugucuccucagu

SEQ ID NO: 20817 - RNA, 19 nt, Artificial Sequence
  Description of Artificial Sequence: Synthetic oligonucleotide
  Antisense strand to SEQ ID NO: 20816
acugaggagacauagugcg

SEQ ID NO: 20818 - RNA, 19 nt, Artificial Sequence
  Description of Artificial Sequence: Synthetic oligonucleotide
  Sense strand starting at position 3007 of SEQ ID NO: 226
guguuuguaaggugacuaa

SEQ ID NO: 20819 - RNA, 19 nt, Artificial Sequence
  Description of Artificial Sequence: Synthetic oligonucleotide
  Antisense strand to SEQ ID NO: 20818
uuagucaccuuacaaacac

SEQ ID NO: 20820 - RNA, 19 nt, Artificial Sequence
  Description of Artificial Sequence: Synthetic oligonucleotide
  Sense strand starting at position 2985 of SEQ ID NO: 226
cagggucuggcauacagau

SEQ ID NO: 20821 - RNA, 19 nt, Artificial Sequence
  Description of Artificial Sequence: Synthetic oligonucleotide
  Antisense strand to SEQ ID NO: 20820
aucuguaugccagacccug

SEQ ID NO: 20822 - RNA, 19 nt, Artificial Sequence
  Description of Artificial Sequence: Synthetic oligonucleotide
  Sense strand starting at position 2936 of SEQ ID NO: 226
augucugcugaaugaggau

SEQ ID NO: 20823 - RNA, 19 nt, Artificial Sequence
  Description of Artificial Sequence: Synthetic oligonucleotide
  Antisense strand to SEQ ID NO: 20822
auccucauucagcagacau

SEQ ID NO: 20824 - RNA, 19 nt, Artificial Sequence
  Description of Artificial Sequence: Synthetic oligonucleotide
  Sense strand starting at position 2929 of SEQ ID NO: 226
ucgguagaugucugcugaa

SEQ ID NO: 20825 - RNA, 19 nt, Artificial Sequence
  Description of Artificial Sequence: Synthetic oligonucleotide
  Antisense strand to SEQ ID NO: 20824
uucagcagacaucuaccga

SEQ ID NO: 20826 - RNA, 19 nt, Artificial Sequence
  Description of Artificial Sequence: Synthetic oligonucleotide
  Sense strand starting at position 2869 of SEQ ID NO: 226
gaaagaaucuggccucagu

SEQ ID NO: 20827 - RNA, 19 nt, Artificial Sequence
  Description of Artificial Sequence: Synthetic oligonucleotide
  Antisense strand to SEQ ID NO: 20826
acugaggccagauucuuuc

SEQ ID NO: 20828 - RNA, 19 nt, Artificial Sequence
  Description of Artificial Sequence: Synthetic oligonucleotide
  Sense strand starting at position 2587 of SEQ ID NO: 226
ucuauuuauuuccguggua

SEQ ID NO: 20829 - RNA, 19 nt, Artificial Sequence
  Description of Artificial Sequence: Synthetic oligonucleotide
  Antisense strand to SEQ ID NO: 20828
uaccacggaaauaaauaga

SEQ ID NO: 20830 - RNA, 19 nt, Artificial Sequence
  Description of Artificial Sequence: Synthetic oligonucleotide
  Sense strand starting at position 2577 of SEQ ID NO: 226
gaggcugucuucuauuuau

SEQ ID NO: 20831 - RNA, 19 nt, Artificial Sequence
  Description of Artificial Sequence: Synthetic oligonucleotide
  Antisense strand to SEQ ID NO: 20830
auaaauagaagacagccuc

SEQ ID NO: 20832 - RNA, 19 nt, Artificial Sequence
  Description of Artificial Sequence: Synthetic oligonucleotide
  Sense strand starting at position 2573 of SEQ ID NO: 226
aagggaggcugucuucuau

SEQ ID NO: 20833 - RNA, 19 nt, Artificial Sequence
  Description of Artificial Sequence: Synthetic oligonucleotide
  Antisense strand to SEQ ID NO: 20832
auagaagacagccucccuu

SEQ ID NO: 20834 - RNA, 19 nt, Artificial Sequence
  Description of Artificial Sequence: Synthetic oligonucleotide
  Sense strand starting at position 2531 of SEQ ID NO: 226
gucucuuaacuagacgaaa

SEQ ID NO: 20835 - RNA, 19 nt, Artificial Sequence
  Description of Artificial Sequence: Synthetic oligonucleotide
  Antisense strand to SEQ ID NO: 20834
uuucgucuaguuaagagac

SEQ ID NO: 20836 - RNA, 19 nt, Artificial Sequence
  Description of Artificial Sequence: Synthetic oligonucleotide
  Sense strand starting at position 2294 of SEQ ID NO: 226
gacugagagcucugaaagg

SEQ ID NO: 20837 - RNA, 19 nt, Artificial Sequence
  Description of Artificial Sequence: Synthetic oligonucleotide
  Antisense strand to SEQ ID NO: 20836
ccuuucagagcucucaguc

SEQ ID NO: 20838 - RNA, 19 nt, Artificial Sequence
  Description of Artificial Sequence: Synthetic oligonucleotide
  Sense strand starting at position 2216 of SEQ ID NO: 226
cucgcugucgucagugcua

SEQ ID NO: 20839 - RNA, 19 nt, Artificial Sequence
  Description of Artificial Sequence: Synthetic oligonucleotide
  Antisense strand to SEQ ID NO: 20838
uagcacugacgacagcgag

SEQ ID NO: 20840 - RNA, 19 nt, Artificial Sequence
  Description of Artificial Sequence: Synthetic oligonucleotide
  Sense strand starting at position 1454 of SEQ ID NO: 226
uuaagaucucgagggucca

SEQ ID NO: 20841 - RNA, 19 nt, Artificial Sequence
  Description of Artificial Sequence: Synthetic oligonucleotide
  Antisense strand to SEQ ID NO: 20840
uggacccucgagaucuuaa

SEQ ID NO: 20842 - RNA, 19 nt, Artificial Sequence
  Description of Artificial Sequence: Synthetic oligonucleotide
  Sense strand starting at position 1443 of SEQ ID NO: 226
caucgagggucuuaagauc

SEQ ID NO: 20843 - RNA, 19 nt, Artificial Sequence
  Description of Artificial Sequence: Synthetic oligonucleotide
  Antisense strand to SEQ ID NO: 20842
gaucuuaagacccucgaug

SEQ ID NO: 20844 - RNA, 19 nt, Artificial Sequence
  Description of Artificial Sequence: Synthetic oligonucleotide
  Sense strand starting at position 1438 of SEQ ID NO: 226
acauccaucgagggucuua

SEQ ID NO: 20845 - RNA, 19 nt, Artificial Sequence
  Description of Artificial Sequence: Synthetic oligonucleotide
  Antisense strand to SEQ ID NO: 20844
uaagacccucgauggaugu

SEQ ID NO: 20846 - RNA, 19 nt, Artificial Sequence
  Description of Artificial Sequence: Synthetic oligonucleotide
  Sense strand starting at position 1357 of SEQ ID NO: 226
gggacuccaaauuguugaa

SEQ ID NO: 20847 - RNA, 19 nt, Artificial Sequence
  Description of Artificial Sequence: Synthetic oligonucleotide
  Antisense strand to SEQ ID NO: 20846
uucaacaauuuggaguccc

SEQ ID NO: 20848 - RNA, 19 nt, Artificial Sequence
  Description of Artificial Sequence: Synthetic oligonucleotide
  Sense strand starting at position 1061 of SEQ ID NO: 226
ugcguuccgagauggcuau

SEQ ID NO: 20849 - RNA, 19 nt, Artificial Sequence
  Description of Artificial Sequence: Synthetic oligonucleotide
  Antisense strand to SEQ ID NO: 20848
auagccaucucggaacgca

SEQ ID NO: 20850 - RNA, 19 nt, Artificial Sequence
  Description of Artificial Sequence: Synthetic oligonucleotide
  Sense strand starting at position 971 of SEQ ID NO: 226
gagaaccuuccuuagcagu

SEQ ID NO: 20851 - RNA, 19 nt, Artificial Sequence
  Description of Artificial Sequence: Synthetic oligonucleotide
  Antisense strand to SEQ ID NO: 20850
acugcuaaggaagguucuc

SEQ ID NO: 20852 - RNA, 19 nt, Artificial Sequence
  Description of Artificial Sequence: Synthetic oligonucleotide
  Sense strand starting at position 898 of SEQ ID NO: 226
caacauuguuggguccaca

SEQ ID NO: 20853 - RNA, 19 nt, Artificial Sequence
  Description of Artificial Sequence: Synthetic oligonucleotide
  Antisense strand to SEQ ID NO: 20852
uguggacccaacaauguug

SEQ ID NO: 20854 - RNA, 19 nt, Artificial Sequence
  Description of Artificial Sequence: Synthetic oligonucleotide
  Sense strand starting at position 886 of SEQ ID NO: 226
caggaaggcugccaacauu

SEQ ID NO: 20855 - RNA, 19 nt, Artificial Sequence
  Description of Artificial Sequence: Synthetic oligonucleotide
  Antisense strand to SEQ ID NO: 20854
aauguuggcagccuuccug

SEQ ID NO: 20856 - RNA, 19 nt, Artificial Sequence
  Description of Artificial Sequence: Synthetic oligonucleotide
  Sense strand starting at position 860 of SEQ ID NO: 226
agaccugugagcugaaguu

SEQ ID NO: 20857 - RNA, 19 nt, Artificial Sequence
  Description of Artificial Sequence: Synthetic oligonucleotide
  Antisense strand to SEQ ID NO: 20856
aacuucagcucacaggucu

SEQ ID NO: 20858 - RNA, 19 nt, Artificial Sequence
  Description of Artificial Sequence: Synthetic oligonucleotide
  Sense strand starting at position 751 of SEQ ID NO: 226
auucuagagcucuagggua

SEQ ID NO: 20859 - RNA, 19 nt, Artificial Sequence
  Description of Artificial Sequence: Synthetic oligonucleotide
  Antisense strand to SEQ ID NO: 20858
uacccuagagcucuagaau

SEQ ID NO: 20860 - RNA, 19 nt, Artificial Sequence
  Description of Artificial Sequence: Synthetic oligonucleotide
  Sense strand starting at position 641 of SEQ ID NO: 226
aggacaaguguaugugaga

SEQ ID NO: 20861 - RNA, 19 nt, Artificial Sequence
  Description of Artificial Sequence: Synthetic oligonucleotide
  Antisense strand to SEQ ID NO: 20860
ucucacauacacuuguccu

SEQ ID NO: 20862 - RNA, 19 nt, Artificial Sequence
  Description of Artificial Sequence: Synthetic oligonucleotide
  Sense strand starting at position 558 of SEQ ID NO: 226
ggauuccucugaguucuag

SEQ ID NO: 20863 - RNA, 19 nt, Artificial Sequence
  Description of Artificial Sequence: Synthetic oligonucleotide
  Antisense strand to SEQ ID NO: 20862
cuagaacucagaggaaucc

SEQ ID NO: 20864 - RNA, 19 nt, Artificial Sequence
  Description of Artificial Sequence: Synthetic oligonucleotide
  Sense strand starting at position 555 of SEQ ID NO: 226
gguggauuccucugaguuc

SEQ ID NO: 20865 - RNA, 19 nt, Artificial Sequence
  Description of Artificial Sequence: Synthetic oligonucleotide
  Antisense strand to SEQ ID NO: 20864
gaacucagaggaauccacc

SEQ ID NO: 20866 - RNA, 19 nt, Artificial Sequence
  Description of Artificial Sequence: Synthetic oligonucleotide
  Sense strand starting at position 479 of SEQ ID NO: 226
ggccauggauacuaccaua

SEQ ID NO: 20867 - RNA, 19 nt, Artificial Sequence
  Description of Artificial Sequence: Synthetic oligonucleotide
  Antisense strand to SEQ ID NO: 20866
uaugguaguauccauggcc

SEQ ID NO: 20868 - RNA, 19 nt, Artificial Sequence
  Description of Artificial Sequence: Synthetic oligonucleotide
  Sense strand starting at position 453 of SEQ ID NO: 226
ggcagaugcccugguuaga

SEQ ID NO: 20869 - RNA, 19 nt, Artificial Sequence
  Description of Artificial Sequence: Synthetic oligonucleotide
  Antisense strand to SEQ ID NO: 20868
ucuaaccagggcaucugcc

SEQ ID NO: 20870 - RNA, 19 nt, Artificial Sequence
  Description of Artificial Sequence: Synthetic oligonucleotide
  Sense strand starting at position 425 of SEQ ID NO: 226
uguagugcucuguggagac

SEQ ID NO: 20871 - RNA, 19 nt, Artificial Sequence
  Description of Artificial Sequence: Synthetic oligonucleotide
  Antisense strand to SEQ ID NO: 20870
gucuccacagagcacuaca

SEQ ID NO: 20872 - RNA, 19 nt, Artificial Sequence
  Description of Artificial Sequence: Synthetic oligonucleotide
  Sense strand starting at position 422 of SEQ ID NO: 226
guuuguagugcucugugga

SEQ ID NO: 20873 - RNA, 19 nt, Artificial Sequence
  Description of Artificial Sequence: Synthetic oligonucleotide
  Antisense strand to SEQ ID NO: 20872
uccacagagcacuacaaac

SEQ ID NO: 20874 - RNA, 19 nt, Artificial Sequence
  Description of Artificial Sequence: Synthetic oligonucleotide
  Sense strand starting at position 57 of SEQ ID NO: 227
acggaauccugugcucagu

SEQ ID NO: 20875 - RNA, 19 nt, Artificial Sequence
  Description of Artificial Sequence: Synthetic oligonucleotide
  Antisense strand to SEQ ID NO: 20874
acugagcacaggauuccgu

SEQ ID NO: 20876 - RNA, 19 nt, Artificial Sequence
  Description of Artificial Sequence: Synthetic oligonucleotide
  Sense strand starting at position 59 of SEQ ID NO: 227
ggaauccugugcucaguga

SEQ ID NO: 20877 - RNA, 19 nt, Artificial Sequence
  Description of Artificial Sequence: Synthetic oligonucleotide
  Antisense strand to SEQ ID NO: 20876
ucacugagcacaggauucc

SEQ ID NO: 20878 - RNA, 19 nt, Artificial Sequence
  Description of Artificial Sequence: Synthetic oligonucleotide
  Sense strand starting at position 60 of SEQ ID NO: 227
gaauccugugcucagugau

SEQ ID NO: 20879 - RNA, 19 nt, Artificial Sequence
  Description of Artificial Sequence: Synthetic oligonucleotide
  Antisense strand to SEQ ID NO: 20878
aucacugagcacaggauuc

SEQ ID NO: 20880 - RNA, 19 nt, Artificial Sequence
  Description of Artificial Sequence: Synthetic oligonucleotide
  Sense strand starting at position 242 of SEQ ID NO: 227
ggcugauagauuggucaca

SEQ ID NO: 20881 - RNA, 19 nt, Artificial Sequence
  Description of Artificial Sequence: Synthetic oligonucleotide
  Antisense strand to SEQ ID NO: 20880
ugugaccaaucuaucagcc

SEQ ID NO: 20882 - RNA, 19 nt, Artificial Sequence
  Description of Artificial Sequence: Synthetic oligonucleotide
  Sense strand starting at position 352 of SEQ ID NO: 227
gcuggucugucaccuggau

SEQ ID NO: 20883 - RNA, 19 nt, Artificial Sequence
  Description of Artificial Sequence: Synthetic oligonucleotide
  Antisense strand to SEQ ID NO: 20882
auccaggugacagaccagc

SEQ ID NO: 20884 - RNA, 19 nt, Artificial Sequence
  Description of Artificial Sequence: Synthetic oligonucleotide
  Sense strand starting at position 665 of SEQ ID NO: 227
uucugagucacucgggaaa

SEQ ID NO: 20885 - RNA, 19 nt, Artificial Sequence
  Description of Artificial Sequence: Synthetic oligonucleotide
  Antisense strand to SEQ ID NO: 20884
uuucccgagugacucagaa

SEQ ID NO: 20886 - RNA, 19 nt, Artificial Sequence
  Description of Artificial Sequence: Synthetic oligonucleotide
  Sense strand starting at position 679 of SEQ ID NO: 227
ggaaaccucccguaucuga

SEQ ID NO: 20887 - RNA, 19 nt, Artificial Sequence
  Description of Artificial Sequence: Synthetic oligonucleotide
  Antisense strand to SEQ ID NO: 20886
ucagauacgggagguuucc

SEQ ID NO: 20888 - RNA, 19 nt, Artificial Sequence
  Description of Artificial Sequence: Synthetic oligonucleotide
  Sense strand starting at position 732 of SEQ ID NO: 227
ugucauuauuucucugucu

SEQ ID NO: 20889 - RNA, 19 nt, Artificial Sequence
  Description of Artificial Sequence: Synthetic oligonucleotide
  Antisense strand to SEQ ID NO: 20888
agacagagaaauaaugaca

SEQ ID NO: 20890 - RNA, 19 nt, Artificial Sequence
  Description of Artificial Sequence: Synthetic oligonucleotide
  Sense strand starting at position 1421 of SEQ ID NO: 227
gcaguauguccuguuguca

SEQ ID NO: 20891 - RNA, 19 nt, Artificial Sequence
  Description of Artificial Sequence: Synthetic oligonucleotide
  Antisense strand to SEQ ID NO: 20890
ugacaacaggacauacugc

SEQ ID NO: 20892 - RNA, 19 nt, Artificial Sequence
  Description of Artificial Sequence: Synthetic oligonucleotide
  Sense strand starting at position 1450 of SEQ ID NO: 227
cccugugacuccucaccau

SEQ ID NO: 20893 - RNA, 19 nt, Artificial Sequence
  Description of Artificial Sequence: Synthetic oligonucleotide
  Antisense strand to SEQ ID NO: 20892
auggugaggagucacaggg

SEQ ID NO: 20894 - RNA, 19 nt, Artificial Sequence
  Description of Artificial Sequence: Synthetic oligonucleotide
  Sense strand starting at position 1606 of SEQ ID NO: 227
ccauguccucggcacugau

SEQ ID NO: 20895 - RNA, 19 nt, Artificial Sequence
  Description of Artificial Sequence: Synthetic oligonucleotide
  Antisense strand to SEQ ID NO: 20894
aucagugccgaggacaugg

SEQ ID NO: 20896 - RNA, 19 nt, Artificial Sequence
  Description of Artificial Sequence: Synthetic oligonucleotide
  Sense strand starting at position 1907 of SEQ ID NO: 227
aggagucugucccucaguu

SEQ ID NO: 20897 - RNA, 19 nt, Artificial Sequence
  Description of Artificial Sequence: Synthetic oligonucleotide
  Antisense strand to SEQ ID NO: 20896
aacugagggacagacuccu

SEQ ID NO: 20898 - RNA, 19 nt, Artificial Sequence
  Description of Artificial Sequence: Synthetic oligonucleotide
  Sense strand starting at position 2235 of SEQ ID NO: 227
gcggaauuccacgaggaca

SEQ ID NO: 20899 - RNA, 19 nt, Artificial Sequence
  Description of Artificial Sequence: Synthetic oligonucleotide
  Antisense strand to SEQ ID NO: 20898
uguccucguggaauuccgc

SEQ ID NO: 20900 - RNA, 19 nt, Artificial Sequence
  Description of Artificial Sequence: Synthetic oligonucleotide
  Sense strand starting at position 2370 of SEQ ID NO: 227
aagcaaauucgaggucaga

SEQ ID NO: 20901 - RNA, 19 nt, Artificial Sequence
  Description of Artificial Sequence: Synthetic oligonucleotide
  Antisense strand to SEQ ID NO: 20900
ucugaccucgaauuugcuu

SEQ ID NO: 20902 - RNA, 19 nt, Artificial Sequence
  Description of Artificial Sequence: Synthetic oligonucleotide
  Sense strand starting at position 2506 of SEQ ID NO: 227
ggccaagacccucaugagu

SEQ ID NO: 20903 - RNA, 19 nt, Artificial Sequence
  Description of Artificial Sequence: Synthetic oligonucleotide
  Antisense strand to SEQ ID NO: 20902
acucaugagggucuuggcc

SEQ ID NO: 20904 - RNA, 19 nt, Artificial Sequence
  Description of Artificial Sequence: Synthetic oligonucleotide
  Sense strand starting at position 2515 of SEQ ID NO: 227
ccucaugagucucuuguga

SEQ ID NO: 20905 - RNA, 19 nt, Artificial Sequence
  Description of Artificial Sequence: Synthetic oligonucleotide
  Antisense strand to SEQ ID NO: 20904
ucacaagagacucaugagg

SEQ ID NO: 20906 - RNA, 19 nt, Artificial Sequence
  Description of Artificial Sequence: Synthetic oligonucleotide
  Sense strand starting at position 2523 of SEQ ID NO: 227
gucucuugugagcauuucu

SEQ ID NO: 20907 - RNA, 19 nt, Artificial Sequence
  Description of Artificial Sequence: Synthetic oligonucleotide
  Antisense strand to SEQ ID NO: 20906
agaaaugcucacaagagac

SEQ ID NO: 20908 - RNA, 19 nt, Artificial Sequence
  Description of Artificial Sequence: Synthetic oligonucleotide
  Sense strand starting at position 2528 of SEQ ID NO: 227
uugugagcauuucuuguaa

SEQ ID NO: 20909 - RNA, 19 nt, Artificial Sequence
  Description of Artificial Sequence: Synthetic oligonucleotide
  Antisense strand to SEQ ID NO: 20908
uuacaagaaaugcucacaa

SEQ ID NO: 20910 - RNA, 19 nt, Artificial Sequence
  Description of Artificial Sequence: Synthetic oligonucleotide
  Sense strand starting at position 2540 of SEQ ID NO: 227
cuuguaaccuugguuuaga

SEQ ID NO: 20911 - RNA, 19 nt, Artificial Sequence
  Description of Artificial Sequence: Synthetic oligonucleotide
  Antisense strand to SEQ ID NO: 20910
ucuaaaccaagguuacaag

SEQ ID NO: 20912 - RNA, 19 nt, Artificial Sequence
  Description of Artificial Sequence: Synthetic oligonucleotide
  Sense strand starting at position 2622 of SEQ ID NO: 227
ugggcauuuacguguguga

SEQ ID NO: 20913 - RNA, 19 nt, Artificial Sequence
  Description of Artificial Sequence: Synthetic oligonucleotide
  Antisense strand to SEQ ID NO: 20912
ucacacacguaaaugccca

SEQ ID NO: 20914 - RNA, 19 nt, Artificial Sequence
  Description of Artificial Sequence: Synthetic oligonucleotide
  Sense strand starting at position 2624 of SEQ ID NO: 227
ggcauuuacgugugugauu

SEQ ID NO: 20915 - RNA, 19 nt, Artificial Sequence
  Description of Artificial Sequence: Synthetic oligonucleotide
  Antisense strand to SEQ ID NO: 20914
aaucacacacguaaaugcc

SEQ ID NO: 20916 - RNA, 19 nt, Artificial Sequence
  Description of Artificial Sequence: Synthetic oligonucleotide
  Sense strand starting at position 2625 of SEQ ID NO: 227
gcauuuacgugugugauua

SEQ ID NO: 20917 - RNA, 19 nt, Artificial Sequence
  Description of Artificial Sequence: Synthetic oligonucleotide
  Antisense strand to SEQ ID NO: 20916
uaaucacacacguaaaugc

SEQ ID NO: 20918 - RNA, 19 nt, Artificial Sequence
  Description of Artificial Sequence: Synthetic oligonucleotide
  Sense strand starting at position 2626 of SEQ ID NO: 227
cauuuacgugugugauuag

SEQ ID NO: 20919 - RNA, 19 nt, Artificial Sequence
  Description of Artificial Sequence: Synthetic oligonucleotide
  Antisense strand to SEQ ID NO: 20918
cuaaucacacacguaaaug

SEQ ID NO: 20920 - RNA, 19 nt, Artificial Sequence
  Description of Artificial Sequence: Synthetic oligonucleotide
  Sense strand starting at position 2629 of SEQ ID NO: 227
uuacgugugugauuaggga

SEQ ID NO: 20921 - RNA, 19 nt, Artificial Sequence
  Description of Artificial Sequence: Synthetic oligonucleotide
  Antisense strand to SEQ ID NO: 20920
ucccuaaucacacacguaa

SEQ ID NO: 20922 - RNA, 19 nt, Artificial Sequence
  Description of Artificial Sequence: Synthetic oligonucleotide
  Sense strand starting at position 2663 of SEQ ID NO: 227
gcucuuguccuguuugguu

SEQ ID NO: 20923 - RNA, 19 nt, Artificial Sequence
  Description of Artificial Sequence: Synthetic oligonucleotide
  Antisense strand to SEQ ID NO: 20922
aaccaaacaggacaagagc

SEQ ID NO: 20924 - RNA, 19 nt, Artificial Sequence
  Description of Artificial Sequence: Synthetic oligonucleotide
  Sense strand starting at position 2820 of SEQ ID NO: 227
cugggaaguccuggcaacu

SEQ ID NO: 20925 - RNA, 19 nt, Artificial Sequence
  Description of Artificial Sequence: Synthetic oligonucleotide
  Antisense strand to SEQ ID NO: 20924
aguugccaggacuucccag

SEQ ID NO: 20926 - RNA, 19 nt, Artificial Sequence
  Description of Artificial Sequence: Synthetic oligonucleotide
  Sense strand starting at position 2899 of SEQ ID NO: 227
gcugucuccaagcagugau

SEQ ID NO: 20927 - RNA, 19 nt, Artificial Sequence
  Description of Artificial Sequence: Synthetic oligonucleotide
  Antisense strand to SEQ ID NO: 20926
aucacugcuuggagacagc

SEQ ID NO: 20928 - RNA, 19 nt, Artificial Sequence
  Description of Artificial Sequence: Synthetic oligonucleotide
  Sense strand starting at position 3167 of SEQ ID NO: 227
gcagauaaagccugugguu

SEQ ID NO: 20929 - RNA, 19 nt, Artificial Sequence
  Description of Artificial Sequence: Synthetic oligonucleotide
  Antisense strand to SEQ ID NO: 20928
aaccacaggcuuuaucugc

SEQ ID NO: 20930 - RNA, 19 nt, Artificial Sequence
  Description of Artificial Sequence: Synthetic oligonucleotide
  Sense strand starting at position 3228 of SEQ ID NO: 227
caggaaagguguuuaugau

SEQ ID NO: 20931 - RNA, 19 nt, Artificial Sequence
  Description of Artificial Sequence: Synthetic oligonucleotide
  Antisense strand to SEQ ID NO: 20930
aucauaaacaccuuuccug

SEQ ID NO: 20932 - RNA, 19 nt, Artificial Sequence
  Description of Artificial Sequence: Synthetic oligonucleotide
  Sense strand starting at position 3234 of SEQ ID NO: 227
agguguuuaugaucauguc

SEQ ID NO: 20933 - RNA, 19 nt, Artificial Sequence
  Description of Artificial Sequence: Synthetic oligonucleotide
  Antisense strand to SEQ ID NO: 20932
gacaugaucauaaacaccu

SEQ ID NO: 20934 - RNA, 19 nt, Artificial Sequence
  Description of Artificial Sequence: Synthetic oligonucleotide
  Sense strand starting at position 3259 of SEQ ID NO: 227
uccuaauuccuguauuguc

SEQ ID NO: 20935 - RNA, 19 nt, Artificial Sequence
  Description of Artificial Sequence: Synthetic oligonucleotide
  Antisense strand to SEQ ID NO: 20934
gacaauacaggaauuagga

SEQ ID NO: 20936 - RNA, 19 nt, Artificial Sequence
  Description of Artificial Sequence: Synthetic oligonucleotide
  Sense strand starting at position 3264 of SEQ ID NO: 227
auuccuguauugucccaga

SEQ ID NO: 20937 - RNA, 19 nt, Artificial Sequence
  Description of Artificial Sequence: Synthetic oligonucleotide
  Antisense strand to SEQ ID NO: 20936
ucugggacaauacaggaau

SEQ ID NO: 20938 - RNA, 19 nt, Artificial Sequence
  Description of Artificial Sequence: Synthetic oligonucleotide
  Sense strand starting at position 3269 of SEQ ID NO: 227
uguauugucccagagggac

SEQ ID NO: 20939 - RNA, 19 nt, Artificial Sequence
  Description of Artificial Sequence: Synthetic oligonucleotide
  Antisense strand to SEQ ID NO: 20938
gucccucugggacaauaca

SEQ ID NO: 20940 - RNA, 19 nt, Artificial Sequence
  Description of Artificial Sequence: Synthetic oligonucleotide
  Sense strand starting at position 3340 of SEQ ID NO: 227
augggugucuguucucacu

SEQ ID NO: 20941 - RNA, 19 nt, Artificial Sequence
  Description of Artificial Sequence: Synthetic oligonucleotide
  Antisense strand to SEQ ID NO: 20940
agugagaacagacacccau

SEQ ID NO: 20942 - RNA, 19 nt, Artificial Sequence
  Description of Artificial Sequence: Synthetic oligonucleotide
  Sense strand starting at position 3431 of SEQ ID NO: 227
ucaccuucuuguuugauga

SEQ ID NO: 20943 - RNA, 19 nt, Artificial Sequence
  Description of Artificial Sequence: Synthetic oligonucleotide
  Antisense strand to SEQ ID NO: 20942
ucaucaaacaagaagguga

SEQ ID NO: 20944 - RNA, 19 nt, Artificial Sequence
  Description of Artificial Sequence: Synthetic oligonucleotide
  Sense strand starting at position 3491 of SEQ ID NO: 227
aggaguccuugcuuuccua

SEQ ID NO: 20945 - RNA, 19 nt, Artificial Sequence
  Description of Artificial Sequence: Synthetic oligonucleotide
  Antisense strand to SEQ ID NO: 20944
uaggaaagcaaggacuccu

SEQ ID NO: 20946 - RNA, 19 nt, Artificial Sequence
  Description of Artificial Sequence: Synthetic oligonucleotide
  Sense strand starting at position 3513 of SEQ ID NO: 227
ggaggagcuuuauccaaac

SEQ ID NO: 20947 - RNA, 19 nt, Artificial Sequence
  Description of Artificial Sequence: Synthetic oligonucleotide
  Antisense strand to SEQ ID NO: 20946
guuuggauaaagcuccucc

SEQ ID NO: 20948 - RNA, 19 nt, Artificial Sequence
  Description of Artificial Sequence: Synthetic oligonucleotide
  Sense strand starting at position 3649 of SEQ ID NO: 227
uuuauaugucaacacguaa

SEQ ID NO: 20949 - RNA, 19 nt, Artificial Sequence
  Description of Artificial Sequence: Synthetic oligonucleotide
  Antisense strand to SEQ ID NO: 20948
uuacguguugacauauaaa

SEQ ID NO: 20950 - RNA, 19 nt, Artificial Sequence
  Description of Artificial Sequence: Synthetic oligonucleotide
  Sense strand starting at position 3667 of SEQ ID NO: 227
agaauuaugucguccugug

SEQ ID NO: 20951 - RNA, 19 nt, Artificial Sequence
  Description of Artificial Sequence: Synthetic oligonucleotide
  Antisense strand to SEQ ID NO: 20950
cacaggacgacauaauucu

SEQ ID NO: 20952 - RNA, 19 nt, Artificial Sequence
  Description of Artificial Sequence: Synthetic oligonucleotide
  Sense strand starting at position 3856 of SEQ ID NO: 227
ggaaacccaucuguacuaa

SEQ ID NO: 20953 - RNA, 19 nt, Artificial Sequence
  Description of Artificial Sequence: Synthetic oligonucleotide
  Antisense strand to SEQ ID NO: 20952
uuaguacagauggguuucc

SEQ ID NO: 20954 - RNA, 19 nt, Artificial Sequence
  Description of Artificial Sequence: Synthetic oligonucleotide
  Sense strand starting at position 3980 of SEQ ID NO: 228
gcauucuguagggaagcaa

SEQ ID NO: 20955 - RNA, 19 nt, Artificial Sequence
  Description of Artificial Sequence: Synthetic oligonucleotide
  Antisense strand to SEQ ID NO: 20954
uugcuucccuacagaaugc

SEQ ID NO: 20956 - RNA, 19 nt, Artificial Sequence
  Description of Artificial Sequence: Synthetic oligonucleotide
  Sense strand starting at position 3976 of SEQ ID NO: 228
ccuggcauucuguagggaa

SEQ ID NO: 20957 - RNA, 19 nt, Artificial Sequence
  Description of Artificial Sequence: Synthetic oligonucleotide
  Antisense strand to SEQ ID NO: 20956
uucccuacagaaugccagg

SEQ ID NO: 20958 - RNA, 19 nt, Artificial Sequence
  Description of Artificial Sequence: Synthetic oligonucleotide
  Sense strand starting at position 3923 of SEQ ID NO: 228
gcaggcuaucaguaaaguc

SEQ ID NO: 20959 - RNA, 19 nt, Artificial Sequence
  Description of Artificial Sequence: Synthetic oligonucleotide
  Antisense strand to SEQ ID NO: 20958
gacuuuacugauagccugc

SEQ ID NO: 20960 - RNA, 19 nt, Artificial Sequence
  Description of Artificial Sequence: Synthetic oligonucleotide
  Sense strand starting at position 3394 of SEQ ID NO: 228
aguaauaaccaguauucuu

SEQ ID NO: 20961 - RNA, 19 nt, Artificial Sequence
  Description of Artificial Sequence: Synthetic oligonucleotide
  Antisense strand to SEQ ID NO: 20960
aagaauacugguuauuacu

SEQ ID NO: 20962 - RNA, 19 nt, Artificial Sequence
  Description of Artificial Sequence: Synthetic oligonucleotide
  Sense strand starting at position 3171 of SEQ ID NO: 228
ugauuuguugagugagcac

SEQ ID NO: 20963 - RNA, 19 nt, Artificial Sequence
  Description of Artificial Sequence: Synthetic oligonucleotide
  Antisense strand to SEQ ID NO: 20962
gugcucacucaacaaauca

SEQ ID NO: 20964 - RNA, 19 nt, Artificial Sequence
  Description of Artificial Sequence: Synthetic oligonucleotide
  Sense strand starting at position 3165 of SEQ ID NO: 228
uugguuugauuuguugagu

SEQ ID NO: 20965 - RNA, 19 nt, Artificial Sequence
  Description of Artificial Sequence: Synthetic oligonucleotide
  Antisense strand to SEQ ID NO: 20964
acucaacaaaucaaaccaa

SEQ ID NO: 20966 - RNA, 19 nt, Artificial Sequence
  Description of Artificial Sequence: Synthetic oligonucleotide
  Sense strand starting at position 3157 of SEQ ID NO: 228
aggauaaauugguuugauu

SEQ ID NO: 20967 - RNA, 19 nt, Artificial Sequence
  Description of Artificial Sequence: Synthetic oligonucleotide
  Antisense strand to SEQ ID NO: 20966
aaucaaaccaauuuauccu

SEQ ID NO: 20968 - RNA, 19 nt, Artificial Sequence
  Description of Artificial Sequence: Synthetic oligonucleotide
  Sense strand starting at position 3078 of SEQ ID NO: 228
guugaaagcagauaagcua

SEQ ID NO: 20969 - RNA, 19 nt, Artificial Sequence
  Description of Artificial Sequence: Synthetic oligonucleotide
  Antisense strand to SEQ ID NO: 20968
uagcuuaucugcuuucaac

SEQ ID NO: 20970 - RNA, 19 nt, Artificial Sequence
  Description of Artificial Sequence: Synthetic oligonucleotide
  Sense strand starting at position 3053 of SEQ ID NO: 228
gacagagucuuggugacag

SEQ ID NO: 20971 - RNA, 19 nt, Artificial Sequence
  Description of Artificial Sequence: Synthetic oligonucleotide
  Antisense strand to SEQ ID NO: 20970
cugucaccaagacucuguc

SEQ ID NO: 20972 - RNA, 19 nt, Artificial Sequence
  Description of Artificial Sequence: Synthetic oligonucleotide
  Sense strand starting at position 2887 of SEQ ID NO: 228
guagguuguccuggaaaca

SEQ ID NO: 20973 - RNA, 19 nt, Artificial Sequence
  Description of Artificial Sequence: Synthetic oligonucleotide
  Antisense strand to SEQ ID NO: 20972
uguuuccaggacaaccuac

SEQ ID NO: 20974 - RNA, 19 nt, Artificial Sequence
  Description of Artificial Sequence: Synthetic oligonucleotide
  Sense strand starting at position 2884 of SEQ ID NO: 228
acaguagguuguccuggaa

SEQ ID NO: 20975 - RNA, 19 nt, Artificial Sequence
  Description of Artificial Sequence: Synthetic oligonucleotide
  Antisense strand to SEQ ID NO: 20974
uuccaggacaaccuacugu

SEQ ID NO: 20976 - RNA, 19 nt, Artificial Sequence
  Description of Artificial Sequence: Synthetic oligonucleotide
  Sense strand starting at position 2742 of SEQ ID NO: 228
uucuguauauuaguagaga

SEQ ID NO: 20977 - RNA, 19 nt, Artificial Sequence
  Description of Artificial Sequence: Synthetic oligonucleotide
  Antisense strand to SEQ ID NO: 20976
ucucuacuaauauacagaa

SEQ ID NO: 20978 - RNA, 19 nt, Artificial Sequence
  Description of Artificial Sequence: Synthetic oligonucleotide
  Sense strand starting at position 2394 of SEQ ID NO: 228
gcagguaucaaaggauaau

SEQ ID NO: 20979 - RNA, 19 nt, Artificial Sequence
  Description of Artificial Sequence: Synthetic oligonucleotide
  Antisense strand to SEQ ID NO: 20978
auuauccuuugauaccugc

SEQ ID NO: 20980 - RNA, 19 nt, Artificial Sequence
  Description of Artificial Sequence: Synthetic oligonucleotide
  Sense strand starting at position 2226 of SEQ ID NO: 228
cuguaaagauugucccaag

SEQ ID NO: 20981 - RNA, 19 nt, Artificial Sequence
  Description of Artificial Sequence: Synthetic oligonucleotide
  Antisense strand to SEQ ID NO: 20980
cuugggacaaucuuuacag

SEQ ID NO: 20982 - RNA, 19 nt, Artificial Sequence
  Description of Artificial Sequence: Synthetic oligonucleotide
  Sense strand starting at position 2224 of SEQ ID NO: 228
uccuguaaagauuguccca

SEQ ID NO: 20983 - RNA, 19 nt, Artificial Sequence
  Description of Artificial Sequence: Synthetic oligonucleotide
  Antisense strand to SEQ ID NO: 20982
ugggacaaucuuuacagga

SEQ ID NO: 20984 - RNA, 19 nt, Artificial Sequence
  Description of Artificial Sequence: Synthetic oligonucleotide
  Sense strand starting at position 2217 of SEQ ID NO: 228
cuugcuuuccuguaaagau

SEQ ID NO: 20985 - RNA, 19 nt, Artificial Sequence
  Description of Artificial Sequence: Synthetic oligonucleotide
  Antisense strand to SEQ ID NO: 20984
aucuuuacaggaaagcaag

SEQ ID NO: 20986 - RNA, 19 nt, Artificial Sequence
  Description of Artificial Sequence: Synthetic oligonucleotide
  Sense strand starting at position 2109 of SEQ ID NO: 228
cuccuuuggucucuaggga

SEQ ID NO: 20987 - RNA, 19 nt, Artificial Sequence
  Description of Artificial Sequence: Synthetic oligonucleotide
  Antisense strand to SEQ ID NO: 20986
ucccuagagaccaaaggag

SEQ ID NO: 20988 - RNA, 19 nt, Artificial Sequence
  Description of Artificial Sequence: Synthetic oligonucleotide
  Sense strand starting at position 2006 of SEQ ID NO: 228
gggccugauuccuuuacau

SEQ ID NO: 20989 - RNA, 19 nt, Artificial Sequence
  Description of Artificial Sequence: Synthetic oligonucleotide
  Antisense strand to SEQ ID NO: 20988
auguaaaggaaucaggccc

SEQ ID NO: 20990 - RNA, 19 nt, Artificial Sequence
  Description of Artificial Sequence: Synthetic oligonucleotide
  Sense strand starting at position 1850 of SEQ ID NO: 228
cucuaaaugaggcgagaga

SEQ ID NO: 20991 - RNA, 19 nt, Artificial Sequence
  Description of Artificial Sequence: Synthetic oligonucleotide
  Antisense strand to SEQ ID NO: 20990
ucucucgccucauuuagag

SEQ ID NO: 20992 - RNA, 19 nt, Artificial Sequence
  Description of Artificial Sequence: Synthetic oligonucleotide
  Sense strand starting at position 1767 of SEQ ID NO: 228
aaggcuugccaugaaguuu

SEQ ID NO: 20993 - RNA, 19 nt, Artificial Sequence
  Description of Artificial Sequence: Synthetic oligonucleotide
  Antisense strand to SEQ ID NO: 20992
aaacuucauggcaagccuu

SEQ ID NO: 20994 - RNA, 19 nt, Artificial Sequence
  Description of Artificial Sequence: Synthetic oligonucleotide
  Sense strand starting at position 1516 of SEQ ID NO: 228
caaggagugcuugaugcau

SEQ ID NO: 20995 - RNA, 19 nt, Artificial Sequence
  Description of Artificial Sequence: Synthetic oligonucleotide
  Antisense strand to SEQ ID NO: 20994
augcaucaagcacuccuug

SEQ ID NO: 20996 - RNA, 19 nt, Artificial Sequence
  Description of Artificial Sequence: Synthetic oligonucleotide
  Sense strand starting at position 1169 of SEQ ID NO: 228
ccaggcuuuggauaagguu

SEQ ID NO: 20997 - RNA, 19 nt, Artificial Sequence
  Description of Artificial Sequence: Synthetic oligonucleotide
  Antisense strand to SEQ ID NO: 20996
aaccuuauccaaagccugg

SEQ ID NO: 20998 - RNA, 19 nt, Artificial Sequence
  Description of Artificial Sequence: Synthetic oligonucleotide
  Sense strand starting at position 1061 of SEQ ID NO: 228
gagauucuccuacgcauuu

SEQ ID NO: 20999 - RNA, 19 nt, Artificial Sequence
  Description of Artificial Sequence: Synthetic oligonucleotide
  Antisense strand to SEQ ID NO: 20998
aaaugcguaggagaaucuc

SEQ ID NO: 21000 - RNA, 19 nt, Artificial Sequence
  Description of Artificial Sequence: Synthetic oligonucleotide
  Sense strand starting at position 886 of SEQ ID NO: 228
ucaccaguucuguaaugaa

SEQ ID NO: 21001 - RNA, 19 nt, Artificial Sequence
  Description of Artificial Sequence: Synthetic oligonucleotide
  Antisense strand to SEQ ID NO: 21000
uucauuacagaacugguga

SEQ ID NO: 21002 - RNA, 19 nt, Artificial Sequence
  Description of Artificial Sequence: Synthetic oligonucleotide
  Sense strand starting at position 885 of SEQ ID NO: 228
cucaccaguucuguaauga

SEQ ID NO: 21003 - RNA, 19 nt, Artificial Sequence
  Description of Artificial Sequence: Synthetic oligonucleotide
  Antisense strand to SEQ ID NO: 21002
ucauuacagaacuggugag

SEQ ID NO: 21004 - RNA, 19 nt, Artificial Sequence
  Description of Artificial Sequence: Synthetic oligonucleotide
  Sense strand starting at position 790 of SEQ ID NO: 228
agcaaugaguuacuuugau

SEQ ID NO: 21005 - RNA, 19 nt, Artificial Sequence
  Description of Artificial Sequence: Synthetic oligonucleotide
  Antisense strand to SEQ ID NO: 21004
aucaaaguaacucauugcu

SEQ ID NO: 21006 - RNA, 19 nt, Artificial Sequence
  Description of Artificial Sequence: Synthetic oligonucleotide
  Sense strand starting at position 788 of SEQ ID NO: 228
gcagcaaugaguuacuuug

SEQ ID NO: 21007 - RNA, 19 nt, Artificial Sequence
  Description of Artificial Sequence: Synthetic oligonucleotide
  Antisense strand to SEQ ID NO: 21006
caaaguaacucauugcugc

SEQ ID NO: 21008 - RNA, 19 nt, Artificial Sequence
  Description of Artificial Sequence: Synthetic oligonucleotide
  Sense strand starting at position 762 of SEQ ID NO: 228
augagaggcuguuuagaag

SEQ ID NO: 21009 - RNA, 19 nt, Artificial Sequence
  Description of Artificial Sequence: Synthetic oligonucleotide
  Antisense strand to SEQ ID NO: 21008
cuucuaaacagccucucau

SEQ ID NO: 21010 - RNA, 19 nt, Artificial Sequence
  Description of Artificial Sequence: Synthetic oligonucleotide
  Sense strand starting at position 689 of SEQ ID NO: 228
gugcuuugggauugacaug

SEQ ID NO: 21011 - RNA, 19 nt, Artificial Sequence
  Description of Artificial Sequence: Synthetic oligonucleotide
  Antisense strand to SEQ ID NO: 21010
caugucaaucccaaagcac

SEQ ID NO: 21012 - RNA, 19 nt, Artificial Sequence
  Description of Artificial Sequence: Synthetic oligonucleotide
  Sense strand starting at position 647 of SEQ ID NO: 228
gcccuagugaucugaggau

SEQ ID NO: 21013 - RNA, 19 nt, Artificial Sequence
  Description of Artificial Sequence: Synthetic oligonucleotide
  Antisense strand to SEQ ID NO: 21012
auccucagaucacuagggc

SEQ ID NO: 21014 - RNA, 19 nt, Artificial Sequence
  Description of Artificial Sequence: Synthetic oligonucleotide
  Sense strand starting at position 599 of SEQ ID NO: 228
aucugugcucaugaaauua

SEQ ID NO: 21015 - RNA, 19 nt, Artificial Sequence
  Description of Artificial Sequence: Synthetic oligonucleotide
  Antisense strand to SEQ ID NO: 21014
uaauuucaugagcacagau

SEQ ID NO: 21016 - RNA, 19 nt, Artificial Sequence
  Description of Artificial Sequence: Synthetic oligonucleotide
  Sense strand starting at position 596 of SEQ ID NO: 228
ugcaucugugcucaugaaa

SEQ ID NO: 21017 - RNA, 19 nt, Artificial Sequence
  Description of Artificial Sequence: Synthetic oligonucleotide
  Antisense strand to SEQ ID NO: 21016
uuucaugagcacagaugca

SEQ ID NO: 21018 - RNA, 19 nt, Artificial Sequence
  Description of Artificial Sequence: Synthetic oligonucleotide
  Sense strand starting at position 548 of SEQ ID NO: 228
guugacuuucuggaugcau

SEQ ID NO: 21019 - RNA, 19 nt, Artificial Sequence
  Description of Artificial Sequence: Synthetic oligonucleotide
  Antisense strand to SEQ ID NO: 21018
augcauccagaaagucaac

SEQ ID NO: 21020 - RNA, 19 nt, Artificial Sequence
  Description of Artificial Sequence: Synthetic oligonucleotide
  Sense strand starting at position 497 of SEQ ID NO: 228
cuuguagaauagucagaaa

SEQ ID NO: 21021 - RNA, 19 nt, Artificial Sequence
  Description of Artificial Sequence: Synthetic oligonucleotide
  Antisense strand to SEQ ID NO: 21020
uuucugacuauucuacaag

SEQ ID NO: 21022 - RNA, 19 nt, Artificial Sequence
  Description of Artificial Sequence: Synthetic oligonucleotide
  Sense strand starting at position 449 of SEQ ID NO: 228
auguuauguaucugguaag

SEQ ID NO: 21023 - RNA, 19 nt, Artificial Sequence
  Description of Artificial Sequence: Synthetic oligonucleotide
  Antisense strand to SEQ ID NO: 21022
cuuaccagauacauaacau

SEQ ID NO: 21024 - RNA, 19 nt, Artificial Sequence
  Description of Artificial Sequence: Synthetic oligonucleotide
  Sense strand starting at position 448 of SEQ ID NO: 228
gauguuauguaucugguaa

SEQ ID NO: 21025 - RNA, 19 nt, Artificial Sequence
  Description of Artificial Sequence: Synthetic oligonucleotide
  Antisense strand to SEQ ID NO: 21024
uuaccagauacauaacauc

SEQ ID NO: 21026 - RNA, 19 nt, Artificial Sequence
  Description of Artificial Sequence: Synthetic oligonucleotide
  Sense strand starting at position 436 of SEQ ID NO: 228
gucccaagacuugauguua

SEQ ID NO: 21027 - RNA, 19 nt, Artificial Sequence
  Description of Artificial Sequence: Synthetic oligonucleotide
  Antisense strand to SEQ ID NO: 21026
uaacaucaagucuugggac

SEQ ID NO: 21028 - RNA, 19 nt, Artificial Sequence
  Description of Artificial Sequence: Synthetic oligonucleotide
  Sense strand starting at position 435 of SEQ ID NO: 228
ggucccaagacuugauguu

SEQ ID NO: 21029 - RNA, 19 nt, Artificial Sequence
  Description of Artificial Sequence: Synthetic oligonucleotide
  Antisense strand to SEQ ID NO: 21028
aacaucaagucuugggacc

SEQ ID NO: 21030 - RNA, 19 nt, Artificial Sequence
  Description of Artificial Sequence: Synthetic oligonucleotide
  Sense strand starting at position 322 of SEQ ID NO: 228
aguaacaguuacuuagcaa

SEQ ID NO: 21031 - RNA, 19 nt, Artificial Sequence
  Description of Artificial Sequence: Synthetic oligonucleotide
  Antisense strand to SEQ ID NO: 21030
uugcuaaguaacuguuacu

SEQ ID NO: 21032 - RNA, 19 nt, Artificial Sequence
  Description of Artificial Sequence: Synthetic oligonucleotide
  Sense strand starting at position 291 of SEQ ID NO: 228
ggguacucccaguacaaug

SEQ ID NO: 21033 - RNA, 19 nt, Artificial Sequence
  Description of Artificial Sequence: Synthetic oligonucleotide
  Antisense strand to SEQ ID NO: 21032
cauuguacugggaguaccc

SEQ ID NO: 21034 - RNA, 19 nt, Artificial Sequence
  Description of Artificial Sequence: Synthetic oligonucleotide
  Sense strand starting at position 3945 of SEQ ID NO: 229
aacucuguuccaugaagga

SEQ ID NO: 21035 - RNA, 19 nt, Artificial Sequence
  Description of Artificial Sequence: Synthetic oligonucleotide
  Antisense strand to SEQ ID NO: 21034
uccuucauggaacagaguu

SEQ ID NO: 21036 - RNA, 19 nt, Artificial Sequence
  Description of Artificial Sequence: Synthetic oligonucleotide
  Sense strand starting at position 3938 of SEQ ID NO: 229
cugauagaacucuguucca

SEQ ID NO: 21037 - RNA, 19 nt, Artificial Sequence
  Description of Artificial Sequence: Synthetic oligonucleotide
  Antisense strand to SEQ ID NO: 21036
uggaacagaguucuaucag

SEQ ID NO: 21038 - RNA, 19 nt, Artificial Sequence
  Description of Artificial Sequence: Synthetic oligonucleotide
  Sense strand starting at position 3701 of SEQ ID NO: 229
uuuaguguguagucuaaac

SEQ ID NO: 21039 - RNA, 19 nt, Artificial Sequence
  Description of Artificial Sequence: Synthetic oligonucleotide
  Antisense strand to SEQ ID NO: 21038
guuuagacuacacacuaaa

SEQ ID NO: 21040 - RNA, 19 nt, Artificial Sequence
  Description of Artificial Sequence: Synthetic oligonucleotide
  Sense strand starting at position 3694 of SEQ ID NO: 229
caaauaauuuaguguguag

SEQ ID NO: 21041 - RNA, 19 nt, Artificial Sequence
  Description of Artificial Sequence: Synthetic oligonucleotide
  Antisense strand to SEQ ID NO: 21040
cuacacacuaaauuauuug

SEQ ID NO: 21042 - RNA, 19 nt, Artificial Sequence
  Description of Artificial Sequence: Synthetic oligonucleotide
  Sense strand starting at position 3586 of SEQ ID NO: 229
aagugaacagccugcuaua

SEQ ID NO: 21043 - RNA, 19 nt, Artificial Sequence
  Description of Artificial Sequence: Synthetic oligonucleotide
  Antisense strand to SEQ ID NO: 21042
uauagcaggcuguucacuu

SEQ ID NO: 21044 - RNA, 19 nt, Artificial Sequence
  Description of Artificial Sequence: Synthetic oligonucleotide
  Sense strand starting at position 3528 of SEQ ID NO: 229
ccaagaguugcauggcaaa

SEQ ID NO: 21045 - RNA, 19 nt, Artificial Sequence
  Description of Artificial Sequence: Synthetic oligonucleotide
  Antisense strand to SEQ ID NO: 21044
uuugccaugcaacucuugg

SEQ ID NO: 21046 - RNA, 19 nt, Artificial Sequence
  Description of Artificial Sequence: Synthetic oligonucleotide
  Sense strand starting at position 3476 of SEQ ID NO: 229
guggaauugcuuugcaacu

SEQ ID NO: 21047 - RNA, 19 nt, Artificial Sequence
  Description of Artificial Sequence: Synthetic oligonucleotide
  Antisense strand to SEQ ID NO: 21046
aguugcaaagcaauuccac

SEQ ID NO: 21048 - RNA, 19 nt, Artificial Sequence
  Description of Artificial Sequence: Synthetic oligonucleotide
  Sense strand starting at position 3374 of SEQ ID NO: 229
uuggguaggcuaugaagau

SEQ ID NO: 21049 - RNA, 19 nt, Artificial Sequence
  Description of Artificial Sequence: Synthetic oligonucleotide
  Antisense strand to SEQ ID NO: 21048
aucuucauagccuacccaa

SEQ ID NO: 21050 - RNA, 19 nt, Artificial Sequence
  Description of Artificial Sequence: Synthetic oligonucleotide
  Sense strand starting at position 3206 of SEQ ID NO: 229
accgucuuuguguaaacua

SEQ ID NO: 21051 - RNA, 19 nt, Artificial Sequence
  Description of Artificial Sequence: Synthetic oligonucleotide
  Antisense strand to SEQ ID NO: 21050
uaguuuacacaaagacggu

SEQ ID NO: 21052 - RNA, 19 nt, Artificial Sequence
  Description of Artificial Sequence: Synthetic oligonucleotide
  Sense strand starting at position 3124 of SEQ ID NO: 229
caaaucuugugguuaaugu

SEQ ID NO: 21053 - RNA, 19 nt, Artificial Sequence
  Description of Artificial Sequence: Synthetic oligonucleotide
  Antisense strand to SEQ ID NO: 21052
acauuaaccacaagauuug

SEQ ID NO: 21054 - RNA, 19 nt, Artificial Sequence
  Description of Artificial Sequence: Synthetic oligonucleotide
  Sense strand starting at position 3053 of SEQ ID NO: 229
cgaucuuaggagcgguuua

SEQ ID NO: 21055 - RNA, 19 nt, Artificial Sequence
  Description of Artificial Sequence: Synthetic oligonucleotide
  Antisense strand to SEQ ID NO: 21054
uaaaccgcuccuaagaucg

SEQ ID NO: 21056 - RNA, 19 nt, Artificial Sequence
  Description of Artificial Sequence: Synthetic oligonucleotide
  Sense strand starting at position 2910 of SEQ ID NO: 229
ggugaaaucauagggagua

SEQ ID NO: 21057 - RNA, 19 nt, Artificial Sequence
  Description of Artificial Sequence: Synthetic oligonucleotide
  Antisense strand to SEQ ID NO: 21056
uacucccuaugauuucacc

SEQ ID NO: 21058 - RNA, 19 nt, Artificial Sequence
  Description of Artificial Sequence: Synthetic oligonucleotide
  Sense strand starting at position 2401 of SEQ ID NO: 229
cagugcuuuccagggagca

SEQ ID NO: 21059 - RNA, 19 nt, Artificial Sequence
  Description of Artificial Sequence: Synthetic oligonucleotide
  Antisense strand to SEQ ID NO: 21058
ugcucccuggaaagcacug

SEQ ID NO: 21060 - RNA, 19 nt, Artificial Sequence
  Description of Artificial Sequence: Synthetic oligonucleotide
  Sense strand starting at position 2366 of SEQ ID NO: 229
gcguauagacacugcaaua

SEQ ID NO: 21061 - RNA, 19 nt, Artificial Sequence
  Description of Artificial Sequence: Synthetic oligonucleotide
  Antisense strand to SEQ ID NO: 21060
uauugcagugucuauacgc

SEQ ID NO: 21062 - RNA, 19 nt, Artificial Sequence
  Description of Artificial Sequence: Synthetic oligonucleotide
  Sense strand starting at position 2356 of SEQ ID NO: 229
ucaugugacugcguauaga

SEQ ID NO: 21063 - RNA, 19 nt, Artificial Sequence
  Description of Artificial Sequence: Synthetic oligonucleotide
  Antisense strand to SEQ ID NO: 21062
ucuauacgcagucacauga

SEQ ID NO: 21064 - RNA, 19 nt, Artificial Sequence
  Description of Artificial Sequence: Synthetic oligonucleotide
  Sense strand starting at position 2202 of SEQ ID NO: 229
ccagcagugagauagcaaa

SEQ ID NO: 21065 - RNA, 19 nt, Artificial Sequence
  Description of Artificial Sequence: Synthetic oligonucleotide
  Antisense strand to SEQ ID NO: 21064
uuugcuaucucacugcugg

SEQ ID NO: 21066 - RNA, 19 nt, Artificial Sequence
  Description of Artificial Sequence: Synthetic oligonucleotide
  Sense strand starting at position 2197 of SEQ ID NO: 229
gcuuuccagcagugagaua

SEQ ID NO: 21067 - RNA, 19 nt, Artificial Sequence
  Description of Artificial Sequence: Synthetic oligonucleotide
  Antisense strand to SEQ ID NO: 21066
uaucucacugcuggaaagc

SEQ ID NO: 21068 - RNA, 19 nt, Artificial Sequence
  Description of Artificial Sequence: Synthetic oligonucleotide
  Sense strand starting at position 2130 of SEQ ID NO: 229
ucccuagaggccugaaagu

SEQ ID NO: 21069 - RNA, 19 nt, Artificial Sequence
  Description of Artificial Sequence: Synthetic oligonucleotide
  Antisense strand to SEQ ID NO: 21068
acuuucaggccucuaggga

SEQ ID NO: 21070 - RNA, 19 nt, Artificial Sequence
  Description of Artificial Sequence: Synthetic oligonucleotide
  Sense strand starting at position 1269 of SEQ ID NO: 229
gcucauagucuguaauuac

SEQ ID NO: 21071 - RNA, 19 nt, Artificial Sequence
  Description of Artificial Sequence: Synthetic oligonucleotide
  Antisense strand to SEQ ID NO: 21070
guaauuacagacuaugagc

SEQ ID NO: 21072 - RNA, 19 nt, Artificial Sequence
  Description of Artificial Sequence: Synthetic oligonucleotide
  Sense strand starting at position 1268 of SEQ ID NO: 229
agcucauagucuguaauua

SEQ ID NO: 21073 - RNA, 19 nt, Artificial Sequence
  Description of Artificial Sequence: Synthetic oligonucleotide
  Antisense strand to SEQ ID NO: 21072
uaauuacagacuaugagcu

SEQ ID NO: 21074 - RNA, 19 nt, Artificial Sequence
  Description of Artificial Sequence: Synthetic oligonucleotide
  Sense strand starting at position 1267 of SEQ ID NO: 229
gagcucauagucuguaauu

SEQ ID NO: 21075 - RNA, 19 nt, Artificial Sequence
  Description of Artificial Sequence: Synthetic oligonucleotide
  Antisense strand to SEQ ID NO: 21074
aauuacagacuaugagcuc

SEQ ID NO: 21076 - RNA, 19 nt, Artificial Sequence
  Description of Artificial Sequence: Synthetic oligonucleotide
  Sense strand starting at position 1265 of SEQ ID NO: 229
cagagcucauagucuguaa

SEQ ID NO: 21077 - RNA, 19 nt, Artificial Sequence
  Description of Artificial Sequence: Synthetic oligonucleotide
  Antisense strand to SEQ ID NO: 21076
uuacagacuaugagcucug

SEQ ID NO: 21078 - RNA, 19 nt, Artificial Sequence
  Description of Artificial Sequence: Synthetic oligonucleotide
  Sense strand starting at position 1114 of SEQ ID NO: 229
ugcagauggacaugugcua

SEQ ID NO: 21079 - RNA, 19 nt, Artificial Sequence
  Description of Artificial Sequence: Synthetic oligonucleotide
  Antisense strand to SEQ ID NO: 21078
uagcacauguccaucugca

SEQ ID NO: 21080 - RNA, 19 nt, Artificial Sequence
  Description of Artificial Sequence: Synthetic oligonucleotide
  Sense strand starting at position 1065 of SEQ ID NO: 229
uguauucuuguuggaaaca

SEQ ID NO: 21081 - RNA, 19 nt, Artificial Sequence
  Description of Artificial Sequence: Synthetic oligonucleotide
  Antisense strand to SEQ ID NO: 21080
uguuuccaacaagaauaca

SEQ ID NO: 21082 - RNA, 19 nt, Artificial Sequence
  Description of Artificial Sequence: Synthetic oligonucleotide
  Sense strand starting at position 1063 of SEQ ID NO: 229
aauguauucuuguuggaaa

SEQ ID NO: 21083 - RNA, 19 nt, Artificial Sequence
  Description of Artificial Sequence: Synthetic oligonucleotide
  Antisense strand to SEQ ID NO: 21082
uuuccaacaagaauacauu

SEQ ID NO: 21084 - RNA, 19 nt, Artificial Sequence
  Description of Artificial Sequence: Synthetic oligonucleotide
  Sense strand starting at position 970 of SEQ ID NO: 229
agcucaaagagucacguuu

SEQ ID NO: 21085 - RNA, 19 nt, Artificial Sequence
  Description of Artificial Sequence: Synthetic oligonucleotide
  Antisense strand to SEQ ID NO: 21084
aaacgugacucuuugagcu

SEQ ID NO: 21086 - RNA, 19 nt, Artificial Sequence
  Description of Artificial Sequence: Synthetic oligonucleotide
  Sense strand starting at position 858 of SEQ ID NO: 229
cugguagugaaaggaugaa

SEQ ID NO: 21087 - RNA, 19 nt, Artificial Sequence
  Description of Artificial Sequence: Synthetic oligonucleotide
  Antisense strand to SEQ ID NO: 21086
uucauccuuucacuaccag

SEQ ID NO: 21088 - RNA, 19 nt, Artificial Sequence
  Description of Artificial Sequence: Synthetic oligonucleotide
  Sense strand starting at position 648 of SEQ ID NO: 229
guauauacagaucgaauua

SEQ ID NO: 21089 - RNA, 19 nt, Artificial Sequence
  Description of Artificial Sequence: Synthetic oligonucleotide
  Antisense strand to SEQ ID NO: 21088
uaauucgaucuguauauac

SEQ ID NO: 21090 - RNA, 19 nt, Artificial Sequence
  Description of Artificial Sequence: Synthetic oligonucleotide
  Sense strand starting at position 612 of SEQ ID NO: 229
ggaaaucagucaccuuuau

SEQ ID NO: 21091 - RNA, 19 nt, Artificial Sequence
  Description of Artificial Sequence: Synthetic oligonucleotide
  Antisense strand to SEQ ID NO: 21090
auaaaggugacugauuucc

SEQ ID NO: 21092 - RNA, 19 nt, Artificial Sequence
  Description of Artificial Sequence: Synthetic oligonucleotide
  Sense strand starting at position 596 of SEQ ID NO: 229
aauucuuauguuuaacgga

SEQ ID NO: 21093 - RNA, 19 nt, Artificial Sequence
  Description of Artificial Sequence: Synthetic oligonucleotide
  Antisense strand to SEQ ID NO: 21092
uccguuaaacauaagaauu

SEQ ID NO: 21094 - RNA, 19 nt, Artificial Sequence
  Description of Artificial Sequence: Synthetic oligonucleotide
  Sense strand starting at position 541 of SEQ ID NO: 229
ggauaucauuaugcaauuc

SEQ ID NO: 21095 - RNA, 19 nt, Artificial Sequence
  Description of Artificial Sequence: Synthetic oligonucleotide
  Antisense strand to SEQ ID NO: 21094
gaauugcauaaugauaucc

SEQ ID NO: 21096 - RNA, 19 nt, Artificial Sequence
  Description of Artificial Sequence: Synthetic oligonucleotide
  Sense strand starting at position 526 of SEQ ID NO: 229
gaggaagaguugcuaggau

SEQ ID NO: 21097 - RNA, 19 nt, Artificial Sequence
  Description of Artificial Sequence: Synthetic oligonucleotide
  Antisense strand to SEQ ID NO: 21096
auccuagcaacucuuccuc

SEQ ID NO: 21098 - RNA, 19 nt, Artificial Sequence
  Description of Artificial Sequence: Synthetic oligonucleotide
  Sense strand starting at position 374 of SEQ ID NO: 229
guagcuggugacuaucaua

SEQ ID NO: 21099 - RNA, 19 nt, Artificial Sequence
  Description of Artificial Sequence: Synthetic oligonucleotide
  Antisense strand to SEQ ID NO: 21098
uaugauagucaccagcuac

SEQ ID NO: 21100 - RNA, 19 nt, Artificial Sequence
  Description of Artificial Sequence: Synthetic oligonucleotide
  Sense strand starting at position 302 of SEQ ID NO: 229
aaaucugguguguacauua

SEQ ID NO: 21101 - RNA, 19 nt, Artificial Sequence
  Description of Artificial Sequence: Synthetic oligonucleotide
  Antisense strand to SEQ ID NO: 21100
uaauguacacaccagauuu

SEQ ID NO: 21102 - RNA, 19 nt, Artificial Sequence
  Description of Artificial Sequence: Synthetic oligonucleotide
  Sense strand starting at position 301 of SEQ ID NO: 229
gaaaucugguguguacauu

SEQ ID NO: 21103 - RNA, 19 nt, Artificial Sequence
  Description of Artificial Sequence: Synthetic oligonucleotide
  Antisense strand to SEQ ID NO: 21102
aauguacacaccagauuuc

SEQ ID NO: 21104 - RNA, 19 nt, Artificial Sequence
  Description of Artificial Sequence: Synthetic oligonucleotide
  Sense strand starting at position 300 of SEQ ID NO: 229
ugaaaucugguguguacau

SEQ ID NO: 21105 - RNA, 19 nt, Artificial Sequence
  Description of Artificial Sequence: Synthetic oligonucleotide
  Antisense strand to SEQ ID NO: 21104
auguacacaccagauuuca

SEQ ID NO: 21106 - RNA, 19 nt, Artificial Sequence
  Description of Artificial Sequence: Synthetic oligonucleotide
  Sense strand starting at position 288 of SEQ ID NO: 229
agacuaagucuuugaaauc

SEQ ID NO: 21107 - RNA, 19 nt, Artificial Sequence
  Description of Artificial Sequence: Synthetic oligonucleotide
  Antisense strand to SEQ ID NO: 21106
gauuucaaagacuuagucu

SEQ ID NO: 21108 - RNA, 19 nt, Artificial Sequence
  Description of Artificial Sequence: Synthetic oligonucleotide
  Sense strand starting at position 38 of SEQ ID NO: 229
uuaauucccgucuaucuga

SEQ ID NO: 21109 - RNA, 19 nt, Artificial Sequence
  Description of Artificial Sequence: Synthetic oligonucleotide
  Antisense strand to SEQ ID NO: 21108
ucagauagacgggaauuaa

SEQ ID NO: 21110 - RNA, 19 nt, Artificial Sequence
  Description of Artificial Sequence: Synthetic oligonucleotide
  Sense strand starting at position 33 of SEQ ID NO: 229
gguucuuaauucccgucua

SEQ ID NO: 21111 - RNA, 19 nt, Artificial Sequence
  Description of Artificial Sequence: Synthetic oligonucleotide
  Antisense strand to SEQ ID NO: 21110
uagacgggaauuaagaacc

SEQ ID NO: 21112 - RNA, 19 nt, Artificial Sequence
  Description of Artificial Sequence: Synthetic oligonucleotide
  Sense strand starting at position 26 of SEQ ID NO: 229
gauggaggguucuuaauuc

SEQ ID NO: 21113 - RNA, 19 nt, Artificial Sequence
  Description of Artificial Sequence: Synthetic oligonucleotide
  Antisense strand to SEQ ID NO: 21112
gaauuaagaacccuccauc

SEQ ID NO: 21114 - RNA, 19 nt, Artificial Sequence
  Description of Artificial Sequence: Synthetic oligonucleotide
  Sense strand starting at position 3940 of SEQ ID NO: 231
cgaggaaauguuuaggcuu

SEQ ID NO: 21115 - RNA, 19 nt, Artificial Sequence
  Description of Artificial Sequence: Synthetic oligonucleotide
  Antisense strand to SEQ ID NO: 21114
aagccuaaacauuuccucg

SEQ ID NO: 21116 - RNA, 19 nt, Artificial Sequence
  Description of Artificial Sequence: Synthetic oligonucleotide
  Sense strand starting at position 3932 of SEQ ID NO: 231
uguuuaaacgaggaaaugu

SEQ ID NO: 21117 - RNA, 19 nt, Artificial Sequence
  Description of Artificial Sequence: Synthetic oligonucleotide
  Antisense strand to SEQ ID NO: 21116
acauuuccucguuuaaaca

SEQ ID NO: 21118 - RNA, 19 nt, Artificial Sequence
  Description of Artificial Sequence: Synthetic oligonucleotide
  Sense strand starting at position 3931 of SEQ ID NO: 231
auguuuaaacgaggaaaug

SEQ ID NO: 21119 - RNA, 19 nt, Artificial Sequence
  Description of Artificial Sequence: Synthetic oligonucleotide
  Antisense strand to SEQ ID NO: 21118
cauuuccucguuuaaacau

SEQ ID NO: 21120 - RNA, 19 nt, Artificial Sequence
  Description of Artificial Sequence: Synthetic oligonucleotide
  Sense strand starting at position 3924 of SEQ ID NO: 231
acaguagauguuuaaacga

SEQ ID NO: 21121 - RNA, 19 nt, Artificial Sequence
  Description of Artificial Sequence: Synthetic oligonucleotide
  Antisense strand to SEQ ID NO: 21120
ucguuuaaacaucuacugu

SEQ ID NO: 21122 - RNA, 19 nt, Artificial Sequence
  Description of Artificial Sequence: Synthetic oligonucleotide
  Sense strand starting at position 3913 of SEQ ID NO: 231
gaagcuucuccacaguaga

SEQ ID NO: 21123 - RNA, 19 nt, Artificial Sequence
  Description of Artificial Sequence: Synthetic oligonucleotide
  Antisense strand to SEQ ID NO: 21122
ucuacuguggagaagcuuc

SEQ ID NO: 21124 - RNA, 19 nt, Artificial Sequence
  Description of Artificial Sequence: Synthetic oligonucleotide
  Sense strand starting at position 3670 of SEQ ID NO: 231
aucuauuaguaacugagga

SEQ ID NO: 21125 - RNA, 19 nt, Artificial Sequence
  Description of Artificial Sequence: Synthetic oligonucleotide
  Antisense strand to SEQ ID NO: 21124
uccucaguuacuaauagau

SEQ ID NO: 21126 - RNA, 19 nt, Artificial Sequence
  Description of Artificial Sequence: Synthetic oligonucleotide
  Sense strand starting at position 3435 of SEQ ID NO: 231
agaguucuuaguggugaga

SEQ ID NO: 21127 - RNA, 19 nt, Artificial Sequence
  Description of Artificial Sequence: Synthetic oligonucleotide
  Antisense strand to SEQ ID NO: 21126
ucucaccacuaagaacucu

SEQ ID NO: 21128 - RNA, 19 nt, Artificial Sequence
  Description of Artificial Sequence: Synthetic oligonucleotide
  Sense strand starting at position 2643 of SEQ ID NO: 231
acuucagucggcuagaaag

SEQ ID NO: 21129 - RNA, 19 nt, Artificial Sequence
  Description of Artificial Sequence: Synthetic oligonucleotide
  Antisense strand to SEQ ID NO: 21128
cuuucuagccgacugaagu

SEQ ID NO: 21130 - RNA, 19 nt, Artificial Sequence
  Description of Artificial Sequence: Synthetic oligonucleotide
  Sense strand starting at position 2586 of SEQ ID NO: 231
aggagaaagcugugaccca

SEQ ID NO: 21131 - RNA, 19 nt, Artificial Sequence
  Description of Artificial Sequence: Synthetic oligonucleotide
  Antisense strand to SEQ ID NO: 21130
ugggucacagcuuucuccu

SEQ ID NO: 21132 - RNA, 19 nt, Artificial Sequence
  Description of Artificial Sequence: Synthetic oligonucleotide
  Sense strand starting at position 2284 of SEQ ID NO: 231
cuugaacccuugguaaaga

SEQ ID NO: 21133 - RNA, 19 nt, Artificial Sequence
  Description of Artificial Sequence: Synthetic oligonucleotide
  Antisense strand to SEQ ID NO: 21132
ucuuuaccaaggguucaag

SEQ ID NO: 21134 - RNA, 19 nt, Artificial Sequence
  Description of Artificial Sequence: Synthetic oligonucleotide
  Sense strand starting at position 2283 of SEQ ID NO: 231
ucuugaacccuugguaaag

SEQ ID NO: 21135 - RNA, 19 nt, Artificial Sequence
  Description of Artificial Sequence: Synthetic oligonucleotide
  Antisense strand to SEQ ID NO: 21134
cuuuaccaaggguucaaga

SEQ ID NO: 21136 - RNA, 19 nt, Artificial Sequence
  Description of Artificial Sequence: Synthetic oligonucleotide
  Sense strand starting at position 2246 of SEQ ID NO: 231
ugucuaagggcugacucau

SEQ ID NO: 21137 - RNA, 19 nt, Artificial Sequence
  Description of Artificial Sequence: Synthetic oligonucleotide
  Antisense strand to SEQ ID NO: 21136
augagucagcccuuagaca

SEQ ID NO: 21138 - RNA, 19 nt, Artificial Sequence
  Description of Artificial Sequence: Synthetic oligonucleotide
  Sense strand starting at position 2197 of SEQ ID NO: 231
auuugacaauuggaaacau

SEQ ID NO: 21139 - RNA, 19 nt, Artificial Sequence
  Description of Artificial Sequence: Synthetic oligonucleotide
  Antisense strand to SEQ ID NO: 21138
auguuuccaauugucaaau

SEQ ID NO: 21140 - RNA, 19 nt, Artificial Sequence
  Description of Artificial Sequence: Synthetic oligonucleotide
  Sense strand starting at position 2045 of SEQ ID NO: 231
gaggcacuggaauguuaau

SEQ ID NO: 21141 - RNA, 19 nt, Artificial Sequence
  Description of Artificial Sequence: Synthetic oligonucleotide
  Antisense strand to SEQ ID NO: 21140
auuaacauuccagugccuc

SEQ ID NO: 21142 - RNA, 19 nt, Artificial Sequence
  Description of Artificial Sequence: Synthetic oligonucleotide
  Sense strand starting at position 1695 of SEQ ID NO: 231
uguacucuaccucagacuu

SEQ ID NO: 21143 - RNA, 19 nt, Artificial Sequence
  Description of Artificial Sequence: Synthetic oligonucleotide
  Antisense strand to SEQ ID NO: 21142
aagucugagguagaguaca

SEQ ID NO: 21144 - RNA, 19 nt, Artificial Sequence
  Description of Artificial Sequence: Synthetic oligonucleotide
  Sense strand starting at position 1538 of SEQ ID NO: 231
aaacaacuugggugacuuu

SEQ ID NO: 21145 - RNA, 19 nt, Artificial Sequence
  Description of Artificial Sequence: Synthetic oligonucleotide
  Antisense strand to SEQ ID NO: 21144
aaagucacccaaguuguuu

SEQ ID NO: 21146 - RNA, 19 nt, Artificial Sequence
  Description of Artificial Sequence: Synthetic oligonucleotide
  Sense strand starting at position 1446 of SEQ ID NO: 231
aguguuguaguacaacaaa

SEQ ID NO: 21147 - RNA, 19 nt, Artificial Sequence
  Description of Artificial Sequence: Synthetic oligonucleotide
  Antisense strand to SEQ ID NO: 21146
uuuguuguacuacaacacu

SEQ ID NO: 21148 - RNA, 19 nt, Artificial Sequence
  Description of Artificial Sequence: Synthetic oligonucleotide
  Sense strand starting at position 1433 of SEQ ID NO: 231
guuacagaacauuaguguu

SEQ ID NO: 21149 - RNA, 19 nt, Artificial Sequence
  Description of Artificial Sequence: Synthetic oligonucleotide
  Antisense strand to SEQ ID NO: 21148
aacacuaauguucuguaac

SEQ ID NO: 21150 - RNA, 19 nt, Artificial Sequence
  Description of Artificial Sequence: Synthetic oligonucleotide
  Sense strand starting at position 1306 of SEQ ID NO: 231
augaaugagucauuguaag

SEQ ID NO: 21151 - RNA, 19 nt, Artificial Sequence
  Description of Artificial Sequence: Synthetic oligonucleotide
  Antisense strand to SEQ ID NO: 21150
cuuacaaugacucauucau

SEQ ID NO: 21152 - RNA, 19 nt, Artificial Sequence
  Description of Artificial Sequence: Synthetic oligonucleotide
  Sense strand starting at position 1195 of SEQ ID NO: 231
ggcugagaguuauuauauu

SEQ ID NO: 21153 - RNA, 19 nt, Artificial Sequence
  Description of Artificial Sequence: Synthetic oligonucleotide
  Antisense strand to SEQ ID NO: 21152
aauauaauaacucucagcc

SEQ ID NO: 21154 - RNA, 19 nt, Artificial Sequence
  Description of Artificial Sequence: Synthetic oligonucleotide
  Sense strand starting at position 1193 of SEQ ID NO: 231
cgggcugagaguuauuaua

SEQ ID NO: 21155 - RNA, 19 nt, Artificial Sequence
  Description of Artificial Sequence: Synthetic oligonucleotide
  Antisense strand to SEQ ID NO: 21154
uauaauaacucucagcccg

SEQ ID NO: 21156 - RNA, 19 nt, Artificial Sequence
  Description of Artificial Sequence: Synthetic oligonucleotide
  Sense strand starting at position 1136 of SEQ ID NO: 231
ucuagcuuucuuuguauuu

SEQ ID NO: 21157 - RNA, 19 nt, Artificial Sequence
  Description of Artificial Sequence: Synthetic oligonucleotide
  Antisense strand to SEQ ID NO: 21156
aaauacaaagaaagcuaga

SEQ ID NO: 21158 - RNA, 19 nt, Artificial Sequence
  Description of Artificial Sequence: Synthetic oligonucleotide
  Sense strand starting at position 1035 of SEQ ID NO: 231
gguguuacauccucagaaa

SEQ ID NO: 21159 - RNA, 19 nt, Artificial Sequence
  Description of Artificial Sequence: Synthetic oligonucleotide
  Antisense strand to SEQ ID NO: 21158
uuucugaggauguaacacc

SEQ ID NO: 21160 - RNA, 19 nt, Artificial Sequence
  Description of Artificial Sequence: Synthetic oligonucleotide
  Sense strand starting at position 915 of SEQ ID NO: 231
uguaaaugugaguacagag

SEQ ID NO: 21161 - RNA, 19 nt, Artificial Sequence
  Description of Artificial Sequence: Synthetic oligonucleotide
  Antisense strand to SEQ ID NO: 21160
cucuguacucacauuuaca

SEQ ID NO: 21162 - RNA, 19 nt, Artificial Sequence
  Description of Artificial Sequence: Synthetic oligonucleotide
  Sense strand starting at position 914 of SEQ ID NO: 231
cuguaaaugugaguacaga

SEQ ID NO: 21163 - RNA, 19 nt, Artificial Sequence
  Description of Artificial Sequence: Synthetic oligonucleotide
  Antisense strand to SEQ ID NO: 21162
ucuguacucacauuuacag

SEQ ID NO: 21164 - RNA, 19 nt, Artificial Sequence
  Description of Artificial Sequence: Synthetic oligonucleotide
  Sense strand starting at position 891 of SEQ ID NO: 231
agaucuugcuagguuaaug

SEQ ID NO: 21165 - RNA, 19 nt, Artificial Sequence
  Description of Artificial Sequence: Synthetic oligonucleotide
  Antisense strand to SEQ ID NO: 21164
cauuaaccuagcaagaucu

SEQ ID NO: 21166 - RNA, 19 nt, Artificial Sequence
  Description of Artificial Sequence: Synthetic oligonucleotide
  Sense strand starting at position 890 of SEQ ID NO: 231
aagaucuugcuagguuaau

SEQ ID NO: 21167 - RNA, 19 nt, Artificial Sequence
  Description of Artificial Sequence: Synthetic oligonucleotide
  Antisense strand to SEQ ID NO: 21166
auuaaccuagcaagaucuu

SEQ ID NO: 21168 - RNA, 19 nt, Artificial Sequence
  Description of Artificial Sequence: Synthetic oligonucleotide
  Sense strand starting at position 856 of SEQ ID NO: 231
agauauuauuugcaagauc

SEQ ID NO: 21169 - RNA, 19 nt, Artificial Sequence
  Description of Artificial Sequence: Synthetic oligonucleotide
  Antisense strand to SEQ ID NO: 21168
gaucuugcaaauaauaucu

SEQ ID NO: 21170 - RNA, 19 nt, Artificial Sequence
  Description of Artificial Sequence: Synthetic oligonucleotide
  Sense strand starting at position 705 of SEQ ID NO: 231
agaauucuugggcagguuu

SEQ ID NO: 21171 - RNA, 19 nt, Artificial Sequence
  Description of Artificial Sequence: Synthetic oligonucleotide
  Antisense strand to SEQ ID NO: 21170
aaaccugcccaagaauucu

SEQ ID NO: 21172 - RNA, 19 nt, Artificial Sequence
  Description of Artificial Sequence: Synthetic oligonucleotide
  Sense strand starting at position 704 of SEQ ID NO: 231
aagaauucuugggcagguu

SEQ ID NO: 21173 - RNA, 19 nt, Artificial Sequence
  Description of Artificial Sequence: Synthetic oligonucleotide
  Antisense strand to SEQ ID NO: 21172
aaccugcccaagaauucuu

SEQ ID NO: 21174 - RNA, 19 nt, Artificial Sequence
  Description of Artificial Sequence: Synthetic oligonucleotide
  Sense strand starting at position 499 of SEQ ID NO: 231
gagguaugagagugaggua

SEQ ID NO: 21175 - RNA, 19 nt, Artificial Sequence
  Description of Artificial Sequence: Synthetic oligonucleotide
  Antisense strand to SEQ ID NO: 21174
uaccucacucucauaccuc

SEQ ID NO: 21176 - RNA, 19 nt, Artificial Sequence
  Description of Artificial Sequence: Synthetic oligonucleotide
  Sense strand starting at position 493 of SEQ ID NO: 231
aucuuugagguaugagagu

SEQ ID NO: 21177 - RNA, 19 nt, Artificial Sequence
  Description of Artificial Sequence: Synthetic oligonucleotide
  Antisense strand to SEQ ID NO: 21176
acucucauaccucaaagau

SEQ ID NO: 21178 - RNA, 19 nt, Artificial Sequence
  Description of Artificial Sequence: Synthetic oligonucleotide
  Sense strand starting at position 486 of SEQ ID NO: 231
cccucacaucuuugaggua

SEQ ID NO: 21179 - RNA, 19 nt, Artificial Sequence
  Description of Artificial Sequence: Synthetic oligonucleotide
  Antisense strand to SEQ ID NO: 21178
uaccucaaagaugugaggg

SEQ ID NO: 21180 - RNA, 19 nt, Artificial Sequence
  Description of Artificial Sequence: Synthetic oligonucleotide
  Sense strand starting at position 373 of SEQ ID NO: 231
aggaaaugucuguggauau

SEQ ID NO: 21181 - RNA, 19 nt, Artificial Sequence
  Description of Artificial Sequence: Synthetic oligonucleotide
  Antisense strand to SEQ ID NO: 21180
auauccacagacauuuccu

SEQ ID NO: 21182 - RNA, 19 nt, Artificial Sequence
  Description of Artificial Sequence: Synthetic oligonucleotide
  Sense strand starting at position 372 of SEQ ID NO: 231
gaggaaaugucuguggaua

SEQ ID NO: 21183 - RNA, 19 nt, Artificial Sequence
  Description of Artificial Sequence: Synthetic oligonucleotide
  Antisense strand to SEQ ID NO: 21182
uauccacagacauuuccuc

SEQ ID NO: 21184 - RNA, 19 nt, Artificial Sequence
  Description of Artificial Sequence: Synthetic oligonucleotide
  Sense strand starting at position 371 of SEQ ID NO: 231
agaggaaaugucuguggau

SEQ ID NO: 21185 - RNA, 19 nt, Artificial Sequence
  Description of Artificial Sequence: Synthetic oligonucleotide
  Antisense strand to SEQ ID NO: 21184
auccacagacauuuccucu

SEQ ID NO: 21186 - RNA, 19 nt, Artificial Sequence
  Description of Artificial Sequence: Synthetic oligonucleotide
  Sense strand starting at position 290 of SEQ ID NO: 231
aucagcuucggguaaguga

SEQ ID NO: 21187 - RNA, 19 nt, Artificial Sequence
  Description of Artificial Sequence: Synthetic oligonucleotide
  Antisense strand to SEQ ID NO: 21186
ucacuuacccgaagcugau

SEQ ID NO: 21188 - RNA, 19 nt, Artificial Sequence
  Description of Artificial Sequence: Synthetic oligonucleotide
  Sense strand starting at position 94 of SEQ ID NO: 231
gaaauauaucgaggcucca

SEQ ID NO: 21189 - RNA, 19 nt, Artificial Sequence
  Description of Artificial Sequence: Synthetic oligonucleotide
  Antisense strand to SEQ ID NO: 21188
uggagccucgauauauuuc

SEQ ID NO: 21190 - RNA, 19 nt, Artificial Sequence
  Description of Artificial Sequence: Synthetic oligonucleotide
  Sense strand starting at position 43 of SEQ ID NO: 231
uccaguagccuauacauca

SEQ ID NO: 21191 - RNA, 19 nt, Artificial Sequence
  Description of Artificial Sequence: Synthetic oligonucleotide
  Antisense strand to SEQ ID NO: 21190
ugauguauaggcuacugga

SEQ ID NO: 21192 - RNA, 19 nt, Artificial Sequence
  Description of Artificial Sequence: Synthetic oligonucleotide
  Sense strand starting at position 14 of SEQ ID NO: 231
cauaguuugugaccucaag

SEQ ID NO: 21193 - RNA, 19 nt, Artificial Sequence
  Description of Artificial Sequence: Synthetic oligonucleotide
  Antisense strand to SEQ ID NO: 21192
cuugaggucacaaacuaug

SEQ ID NO: 21194 - RNA, 19 nt, Artificial Sequence
  Description of Artificial Sequence: Synthetic oligonucleotide
  Sense strand starting at position 3966 of SEQ ID NO: 230
auuauuuagucuucugugu

SEQ ID NO: 21195 - RNA, 19 nt, Artificial Sequence
  Description of Artificial Sequence: Synthetic oligonucleotide
  Antisense strand to SEQ ID NO: 21194
acacagaagacuaaauaau

SEQ ID NO: 21196 - RNA, 19 nt, Artificial Sequence
  Description of Artificial Sequence: Synthetic oligonucleotide
  Sense strand starting at position 3943 of SEQ ID NO: 230
gggauuccuggagguggau

SEQ ID NO: 21197 - RNA, 19 nt, Artificial Sequence
  Description of Artificial Sequence: Synthetic oligonucleotide
  Antisense strand to SEQ ID NO: 21196
auccaccuccaggaauccc

SEQ ID NO: 21198 - RNA, 19 nt, Artificial Sequence
  Description of Artificial Sequence: Synthetic oligonucleotide
  Sense strand starting at position 3942 of SEQ ID NO: 230
ugggauuccuggaggugga

SEQ ID NO: 21199 - RNA, 19 nt, Artificial Sequence
  Description of Artificial Sequence: Synthetic oligonucleotide
  Antisense strand to SEQ ID NO: 21198
uccaccuccaggaauccca

SEQ ID NO: 21200 - RNA, 19 nt, Artificial Sequence
  Description of Artificial Sequence: Synthetic oligonucleotide
  Sense strand starting at position 3879 of SEQ ID NO: 230
ccuuaagaguguuuagaaa

SEQ ID NO: 21201 - RNA, 19 nt, Artificial Sequence
  Description of Artificial Sequence: Synthetic oligonucleotide
  Antisense strand to SEQ ID NO: 21200
uuucuaaacacucuuaagg

SEQ ID NO: 21202 - RNA, 19 nt, Artificial Sequence
  Description of Artificial Sequence: Synthetic oligonucleotide
  Sense strand starting at position 3844 of SEQ ID NO: 230
ucuacaguuucuucuauga

SEQ ID NO: 21203 - RNA, 19 nt, Artificial Sequence
  Description of Artificial Sequence: Synthetic oligonucleotide
  Antisense strand to SEQ ID NO: 21202
ucauagaagaaacuguaga

SEQ ID NO: 21204 - RNA, 19 nt, Artificial Sequence
  Description of Artificial Sequence: Synthetic oligonucleotide
  Sense strand starting at position 3725 of SEQ ID NO: 230
ugaagagucuuucuucuca

SEQ ID NO: 21205 - RNA, 19 nt, Artificial Sequence
  Description of Artificial Sequence: Synthetic oligonucleotide
  Antisense strand to SEQ ID NO: 21204
ugagaagaaagacucuuca

SEQ ID NO: 21206 - RNA, 19 nt, Artificial Sequence
  Description of Artificial Sequence: Synthetic oligonucleotide
  Sense strand starting at position 3638 of SEQ ID NO: 230
auuaccauuugaggauaga

SEQ ID NO: 21207 - RNA, 19 nt, Artificial Sequence
  Description of Artificial Sequence: Synthetic oligonucleotide
  Antisense strand to SEQ ID NO: 21206
ucuauccucaaaugguaau

SEQ ID NO: 21208 - RNA, 19 nt, Artificial Sequence
  Description of Artificial Sequence: Synthetic oligonucleotide
  Sense strand starting at position 3580 of SEQ ID NO: 230
uuggauacaucuuugggau

SEQ ID NO: 21209 - RNA, 19 nt, Artificial Sequence
  Description of Artificial Sequence: Synthetic oligonucleotide
  Antisense strand to SEQ ID NO: 21208
aucccaaagauguauccaa

SEQ ID NO: 21210 - RNA, 19 nt, Artificial Sequence
  Description of Artificial Sequence: Synthetic oligonucleotide
  Sense strand starting at position 3426 of SEQ ID NO: 230
gaucucauuugagaaggac

SEQ ID NO: 21211 - RNA, 19 nt, Artificial Sequence
  Description of Artificial Sequence: Synthetic oligonucleotide
  Antisense strand to SEQ ID NO: 21210
guccuucucaaaugagauc

SEQ ID NO: 21212 - RNA, 19 nt, Artificial Sequence
  Description of Artificial Sequence: Synthetic oligonucleotide
  Sense strand starting at position 3320 of SEQ ID NO: 230
cuaggucagaugugaagua

SEQ ID NO: 21213 - RNA, 19 nt, Artificial Sequence
  Description of Artificial Sequence: Synthetic oligonucleotide
  Antisense strand to SEQ ID NO: 21212
uacuucacaucugaccuag

SEQ ID NO: 21214 - RNA, 19 nt, Artificial Sequence
  Description of Artificial Sequence: Synthetic oligonucleotide
  Sense strand starting at position 3081 of SEQ ID NO: 230
cuuucuuaguuaucacuga

SEQ ID NO: 21215 - RNA, 19 nt, Artificial Sequence
  Description of Artificial Sequence: Synthetic oligonucleotide
  Antisense strand to SEQ ID NO: 21214
ucagugauaacuaagaaag

SEQ ID NO: 21216 - RNA, 19 nt, Artificial Sequence
  Description of Artificial Sequence: Synthetic oligonucleotide
  Sense strand starting at position 2884 of SEQ ID NO: 230
ugaaaucaucuagguacau

SEQ ID NO: 21217 - RNA, 19 nt, Artificial Sequence
  Description of Artificial Sequence: Synthetic oligonucleotide
  Antisense strand to SEQ ID NO: 21216
auguaccuagaugauuuca

SEQ ID NO: 21218 - RNA, 19 nt, Artificial Sequence
  Description of Artificial Sequence: Synthetic oligonucleotide
  Sense strand starting at position 2756 of SEQ ID NO: 230
uguguaacacugcauauaa

SEQ ID NO: 21219 - RNA, 19 nt, Artificial Sequence
  Description of Artificial Sequence: Synthetic oligonucleotide
  Antisense strand to SEQ ID NO: 21218
uuauaugcaguguuacaca

SEQ ID NO: 21220 - RNA, 19 nt, Artificial Sequence
  Description of Artificial Sequence: Synthetic oligonucleotide
  Sense strand starting at position 2748 of SEQ ID NO: 230
aucuaaacuguguaacacu

SEQ ID NO: 21221 - RNA, 19 nt, Artificial Sequence
  Description of Artificial Sequence: Synthetic oligonucleotide
  Antisense strand to SEQ ID NO: 21220
aguguuacacaguuuagau

SEQ ID NO: 21222 - RNA, 19 nt, Artificial Sequence
  Description of Artificial Sequence: Synthetic oligonucleotide
  Sense strand starting at position 2746 of SEQ ID NO: 230
acaucuaaacuguguaaca

SEQ ID NO: 21223 - RNA, 19 nt, Artificial Sequence
  Description of Artificial Sequence: Synthetic oligonucleotide
  Antisense strand to SEQ ID NO: 21222
uguuacacaguuuagaugu

SEQ ID NO: 21224 - RNA, 19 nt, Artificial Sequence
  Description of Artificial Sequence: Synthetic oligonucleotide
  Sense strand starting at position 2641 of SEQ ID NO: 230
ggaacacacuucuuuguua

SEQ ID NO: 21225 - RNA, 19 nt, Artificial Sequence
  Description of Artificial Sequence: Synthetic oligonucleotide
  Antisense strand to SEQ ID NO: 21224
uaacaaagaaguguguucc

SEQ ID NO: 21226 - RNA, 19 nt, Artificial Sequence
  Description of Artificial Sequence: Synthetic oligonucleotide
  Sense strand starting at position 2415 of SEQ ID NO: 230
cugaguuaugaucaacucu

SEQ ID NO: 21227 - RNA, 19 nt, Artificial Sequence
  Description of Artificial Sequence: Synthetic oligonucleotide
  Antisense strand to SEQ ID NO: 21226
agaguugaucauaacucag

SEQ ID NO: 21228 - RNA, 19 nt, Artificial Sequence
  Description of Artificial Sequence: Synthetic oligonucleotide
  Sense strand starting at position 2407 of SEQ ID NO: 230
ugacuauccugaguuauga

SEQ ID NO: 21229 - RNA, 19 nt, Artificial Sequence
  Description of Artificial Sequence: Synthetic oligonucleotide
  Antisense strand to SEQ ID NO: 21228
ucauaacucaggauaguca

SEQ ID NO: 21230 - RNA, 19 nt, Artificial Sequence
  Description of Artificial Sequence: Synthetic oligonucleotide
  Sense strand starting at position 2405 of SEQ ID NO: 230
ccugacuauccugaguuau

SEQ ID NO: 21231 - RNA, 19 nt, Artificial Sequence
  Description of Artificial Sequence: Synthetic oligonucleotide
  Antisense strand to SEQ ID NO: 21230
auaacucaggauagucagg

SEQ ID NO: 21232 - RNA, 19 nt, Artificial Sequence
  Description of Artificial Sequence: Synthetic oligonucleotide
  Sense strand starting at position 2377 of SEQ ID NO: 230
uuacuaaaggcauaauagu

SEQ ID NO: 21233 - RNA, 19 nt, Artificial Sequence
  Description of Artificial Sequence: Synthetic oligonucleotide
  Antisense strand to SEQ ID NO: 21232
acuauuaugccuuuaguaa

SEQ ID NO: 21234 - RNA, 19 nt, Artificial Sequence
  Description of Artificial Sequence: Synthetic oligonucleotide
  Sense strand starting at position 2321 of SEQ ID NO: 230
ucaagaaauguuugaugca

SEQ ID NO: 21235 - RNA, 19 nt, Artificial Sequence
  Description of Artificial Sequence: Synthetic oligonucleotide
  Antisense strand to SEQ ID NO: 21234
ugcaucaaacauuucuuga

SEQ ID NO: 21236 - RNA, 19 nt, Artificial Sequence
  Description of Artificial Sequence: Synthetic oligonucleotide
  Sense strand starting at position 2236 of SEQ ID NO: 230
guaauugcuuauuuagcua

SEQ ID NO: 21237 - RNA, 19 nt, Artificial Sequence
  Description of Artificial Sequence: Synthetic oligonucleotide
  Antisense strand to SEQ ID NO: 21236
uagcuaaauaagcaauuac

SEQ ID NO: 21238 - RNA, 19 nt, Artificial Sequence
  Description of Artificial Sequence: Synthetic oligonucleotide
  Sense strand starting at position 2183 of SEQ ID NO: 230
acaguucucccuggaaaga

SEQ ID NO: 21239 - RNA, 19 nt, Artificial Sequence
  Description of Artificial Sequence: Synthetic oligonucleotide
  Antisense strand to SEQ ID NO: 21238
ucuuuccagggagaacugu

SEQ ID NO: 21240 - RNA, 19 nt, Artificial Sequence
  Description of Artificial Sequence: Synthetic oligonucleotide
  Sense strand starting at position 2069 of SEQ ID NO: 230
uuccuuucuuuguuagaag

SEQ ID NO: 21241 - RNA, 19 nt, Artificial Sequence
  Description of Artificial Sequence: Synthetic oligonucleotide
  Antisense strand to SEQ ID NO: 21240
cuucuaacaaagaaaggaa

SEQ ID NO: 21242 - RNA, 19 nt, Artificial Sequence
  Description of Artificial Sequence: Synthetic oligonucleotide
  Sense strand starting at position 2039 of SEQ ID NO: 230
guuucugauuggcugaaau

SEQ ID NO: 21243 - RNA, 19 nt, Artificial Sequence
  Description of Artificial Sequence: Synthetic oligonucleotide
  Antisense strand to SEQ ID NO: 21242
auuucagccaaucagaaac

SEQ ID NO: 21244 - RNA, 19 nt, Artificial Sequence
  Description of Artificial Sequence: Synthetic oligonucleotide
  Sense strand starting at position 1506 of SEQ ID NO: 230
cuuaaaugcugaguuauaa

SEQ ID NO: 21245 - RNA, 19 nt, Artificial Sequence
  Description of Artificial Sequence: Synthetic oligonucleotide
  Antisense strand to SEQ ID NO: 21244
uuauaacucagcauuuaag

SEQ ID NO: 21246 - RNA, 19 nt, Artificial Sequence
  Description of Artificial Sequence: Synthetic oligonucleotide
  Sense strand starting at position 1378 of SEQ ID NO: 230
cuuaacuuccugugacuga

SEQ ID NO: 21247 - RNA, 19 nt, Artificial Sequence
  Description of Artificial Sequence: Synthetic oligonucleotide
  Antisense strand to SEQ ID NO: 21246
ucagucacaggaaguuaag

SEQ ID NO: 21248 - RNA, 19 nt, Artificial Sequence
  Description of Artificial Sequence: Synthetic oligonucleotide
  Sense strand starting at position 1295 of SEQ ID NO: 230
ucauaagcucaaugugauu

SEQ ID NO: 21249 - RNA, 19 nt, Artificial Sequence
  Description of Artificial Sequence: Synthetic oligonucleotide
  Antisense strand to SEQ ID NO: 21248
aaucacauugagcuuauga

SEQ ID NO: 21250 - RNA, 19 nt, Artificial Sequence
  Description of Artificial Sequence: Synthetic oligonucleotide
  Sense strand starting at position 1281 of SEQ ID NO: 230
ggaaacauacagugucaua

SEQ ID NO: 21251 - RNA, 19 nt, Artificial Sequence
  Description of Artificial Sequence: Synthetic oligonucleotide
  Antisense strand to SEQ ID NO: 21250
uaugacacuguauguuucc

SEQ ID NO: 21252 - RNA, 19 nt, Artificial Sequence
  Description of Artificial Sequence: Synthetic oligonucleotide
  Sense strand starting at position 1151 of SEQ ID NO: 230
caggguauugcaugcauuu

SEQ ID NO: 21253 - RNA, 19 nt, Artificial Sequence
  Description of Artificial Sequence: Synthetic oligonucleotide
  Antisense strand to SEQ ID NO: 21252
aaaugcaugcaauacccug

SEQ ID NO: 21254 - RNA, 19 nt, Artificial Sequence
  Description of Artificial Sequence: Synthetic oligonucleotide
  Sense strand starting at position 1045 of SEQ ID NO: 230
aaauuugauguucgugcau

SEQ ID NO: 21255 - RNA, 19 nt, Artificial Sequence
  Description of Artificial Sequence: Synthetic oligonucleotide
  Antisense strand to SEQ ID NO: 21254
augcacgaacaucaaauuu

SEQ ID NO: 21256 - RNA, 19 nt, Artificial Sequence
  Description of Artificial Sequence: Synthetic oligonucleotide
  Sense strand starting at position 1044 of SEQ ID NO: 230
uaaauuugauguucgugca

SEQ ID NO: 21257 - RNA, 19 nt, Artificial Sequence
  Description of Artificial Sequence: Synthetic oligonucleotide
  Antisense strand to SEQ ID NO: 21256
ugcacgaacaucaaauuua

SEQ ID NO: 21258 - RNA, 19 nt, Artificial Sequence
  Description of Artificial Sequence: Synthetic oligonucleotide
  Sense strand starting at position 984 of SEQ ID NO: 230
ucacuuugugaucacugau

SEQ ID NO: 21259 - RNA, 19 nt, Artificial Sequence
  Description of Artificial Sequence: Synthetic oligonucleotide
  Antisense strand to SEQ ID NO: 21258
aucagugaucacaaaguga

SEQ ID NO: 21260 - RNA, 19 nt, Artificial Sequence
  Description of Artificial Sequence: Synthetic oligonucleotide
  Sense strand starting at position 983 of SEQ ID NO: 230
aucacuuugugaucacuga

SEQ ID NO: 21261 - RNA, 19 nt, Artificial Sequence
  Description of Artificial Sequence: Synthetic oligonucleotide
  Antisense strand to SEQ ID NO: 21260
ucagugaucacaaagugau

SEQ ID NO: 21262 - RNA, 19 nt, Artificial Sequence
  Description of Artificial Sequence: Synthetic oligonucleotide
  Sense strand starting at position 979 of SEQ ID NO: 230
ugugaucacuuugugauca

SEQ ID NO: 21263 - RNA, 19 nt, Artificial Sequence
  Description of Artificial Sequence: Synthetic oligonucleotide
  Antisense strand to SEQ ID NO: 21262
ugaucacaaagugaucaca

SEQ ID NO: 21264 - RNA, 19 nt, Artificial Sequence
  Description of Artificial Sequence: Synthetic oligonucleotide
  Sense strand starting at position 972 of SEQ ID NO: 230
cagguacugugaucacuuu

SEQ ID NO: 21265 - RNA, 19 nt, Artificial Sequence
  Description of Artificial Sequence: Synthetic oligonucleotide
  Antisense strand to SEQ ID NO: 21264
aaagugaucacaguaccug

SEQ ID NO: 21266 - RNA, 19 nt, Artificial Sequence
  Description of Artificial Sequence: Synthetic oligonucleotide
  Sense strand starting at position 741 of SEQ ID NO: 230
ggcuaaggguggucuaaau

SEQ ID NO: 21267 - RNA, 19 nt, Artificial Sequence
  Description of Artificial Sequence: Synthetic oligonucleotide
  Antisense strand to SEQ ID NO: 21266
auuuagaccacccuuagcc

SEQ ID NO: 21268 - RNA, 19 nt, Artificial Sequence
  Description of Artificial Sequence: Synthetic oligonucleotide
  Sense strand starting at position 349 of SEQ ID NO: 230
caaugagugccucaggauu

SEQ ID NO: 21269 - RNA, 19 nt, Artificial Sequence
  Description of Artificial Sequence: Synthetic oligonucleotide
  Antisense strand to SEQ ID NO: 21268
aauccugaggcacucauug

SEQ ID NO: 21270 - RNA, 19 nt, Artificial Sequence
  Description of Artificial Sequence: Synthetic oligonucleotide
  Sense strand starting at position 247 of SEQ ID NO: 230
ucagcaugugaugaaaucu

SEQ ID NO: 21271 - RNA, 19 nt, Artificial Sequence
  Description of Artificial Sequence: Synthetic oligonucleotide
  Antisense strand to SEQ ID NO: 21270
agauuucaucacaugcuga

SEQ ID NO: 21272 - RNA, 19 nt, Artificial Sequence
  Description of Artificial Sequence: Synthetic oligonucleotide
  Sense strand starting at position 122 of SEQ ID NO: 230
ccaccagaccugugaaugu

SEQ ID NO: 21273 - RNA, 19 nt, Artificial Sequence
  Description of Artificial Sequence: Synthetic oligonucleotide
  Antisense strand to SEQ ID NO: 21272
acauucacaggucuggugg

SEQ ID NO: 21274 - RNA, 19 nt, Artificial Sequence
  Description of Artificial Sequence: Synthetic oligonucleotide
  Sense strand starting at position 3917 of SEQ ID NO: 232
uugcauugauccuuuggaa

SEQ ID NO: 21275 - RNA, 19 nt, Artificial Sequence
  Description of Artificial Sequence: Synthetic oligonucleotide
  Antisense strand to SEQ ID NO: 21274
uuccaaaggaucaaugcaa

SEQ ID NO: 21276 - RNA, 19 nt, Artificial Sequence
  Description of Artificial Sequence: Synthetic oligonucleotide
  Sense strand starting at position 3740 of SEQ ID NO: 232
cuguuaaagguuggugaaa

SEQ ID NO: 21277 - RNA, 19 nt, Artificial Sequence
  Description of Artificial Sequence: Synthetic oligonucleotide
  Antisense strand to SEQ ID NO: 21276
uuucaccaaccuuuaacag

SEQ ID NO: 21278 - RNA, 19 nt, Artificial Sequence
  Description of Artificial Sequence: Synthetic oligonucleotide
  Sense strand starting at position 3739 of SEQ ID NO: 232
ucuguuaaagguuggugaa

SEQ ID NO: 21279 - RNA, 19 nt, Artificial Sequence
  Description of Artificial Sequence: Synthetic oligonucleotide
  Antisense strand to SEQ ID NO: 21278
uucaccaaccuuuaacaga

SEQ ID NO: 21280 - RNA, 19 nt, Artificial Sequence
  Description of Artificial Sequence: Synthetic oligonucleotide
  Sense strand starting at position 3697 of SEQ ID NO: 232
uacugugauuuguugucuu

SEQ ID NO: 21281 - RNA, 19 nt, Artificial Sequence
  Description of Artificial Sequence: Synthetic oligonucleotide
  Antisense strand to SEQ ID NO: 21280
aagacaacaaaucacagua

SEQ ID NO: 21282 - RNA, 19 nt, Artificial Sequence
  Description of Artificial Sequence: Synthetic oligonucleotide
  Sense strand starting at position 3637 of SEQ ID NO: 232
ugcagugugauaugaaacu

SEQ ID NO: 21283 - RNA, 19 nt, Artificial Sequence
  Description of Artificial Sequence: Synthetic oligonucleotide
  Antisense strand to SEQ ID NO: 21282
aguuucauaucacacugca

SEQ ID NO: 21284 - RNA, 19 nt, Artificial Sequence
  Description of Artificial Sequence: Synthetic oligonucleotide
  Sense strand starting at position 3630 of SEQ ID NO: 232
cugugacugcagugugaua

SEQ ID NO: 21285 - RNA, 19 nt, Artificial Sequence
  Description of Artificial Sequence: Synthetic oligonucleotide
  Antisense strand to SEQ ID NO: 21284
uaucacacugcagucacag

SEQ ID NO: 21286 - RNA, 19 nt, Artificial Sequence
  Description of Artificial Sequence: Synthetic oligonucleotide
  Sense strand starting at position 3573 of SEQ ID NO: 232
ggucuagcaguggguaauu

SEQ ID NO: 21287 - RNA, 19 nt, Artificial Sequence
  Description of Artificial Sequence: Synthetic oligonucleotide
  Antisense strand to SEQ ID NO: 21286
aauuacccacugcuagacc

SEQ ID NO: 21288 - RNA, 19 nt, Artificial Sequence
  Description of Artificial Sequence: Synthetic oligonucleotide
  Sense strand starting at position 3572 of SEQ ID NO: 232
gggucuagcaguggguaau

SEQ ID NO: 21289 - RNA, 19 nt, Artificial Sequence
  Description of Artificial Sequence: Synthetic oligonucleotide
  Antisense strand to SEQ ID NO: 21288
auuacccacugcuagaccc

SEQ ID NO: 21290 - RNA, 19 nt, Artificial Sequence
  Description of Artificial Sequence: Synthetic oligonucleotide
  Sense strand starting at position 3434 of SEQ ID NO: 232
ugugaauuggcucacaguu

SEQ ID NO: 21291 - RNA, 19 nt, Artificial Sequence
  Description of Artificial Sequence: Synthetic oligonucleotide
  Antisense strand to SEQ ID NO: 21290
aacugugagccaauucaca

SEQ ID NO: 21292 - RNA, 19 nt, Artificial Sequence
  Description of Artificial Sequence: Synthetic oligonucleotide
  Sense strand starting at position 3431 of SEQ ID NO: 232
agcugugaauuggcucaca

SEQ ID NO: 21293 - RNA, 19 nt, Artificial Sequence
  Description of Artificial Sequence: Synthetic oligonucleotide
  Antisense strand to SEQ ID NO: 21292
ugugagccaauucacagcu

SEQ ID NO: 21294 - RNA, 19 nt, Artificial Sequence
  Description of Artificial Sequence: Synthetic oligonucleotide
  Sense strand starting at position 3351 of SEQ ID NO: 232
gguugacucugggcauaag

SEQ ID NO: 21295 - RNA, 19 nt, Artificial Sequence
  Description of Artificial Sequence: Synthetic oligonucleotide
  Antisense strand to SEQ ID NO: 21294
cuuaugcccagagucaacc

SEQ ID NO: 21296 - RNA, 19 nt, Artificial Sequence
  Description of Artificial Sequence: Synthetic oligonucleotide
  Sense strand starting at position 3280 of SEQ ID NO: 232
cccaguccuccgugacaca

SEQ ID NO: 21297 - RNA, 19 nt, Artificial Sequence
  Description of Artificial Sequence: Synthetic oligonucleotide
  Antisense strand to SEQ ID NO: 21296
ugugucacggaggacuggg

SEQ ID NO: 21298 - RNA, 19 nt, Artificial Sequence
  Description of Artificial Sequence: Synthetic oligonucleotide
  Sense strand starting at position 2912 of SEQ ID NO: 232
cucaauacaugucuggauu

SEQ ID NO: 21299 - RNA, 19 nt, Artificial Sequence
  Description of Artificial Sequence: Synthetic oligonucleotide
  Antisense strand to SEQ ID NO: 21298
aauccagacauguauugag

SEQ ID NO: 21300 - RNA, 19 nt, Artificial Sequence
  Description of Artificial Sequence: Synthetic oligonucleotide
  Sense strand starting at position 2900 of SEQ ID NO: 232
agauuccagugccucaaua

SEQ ID NO: 21301 - RNA, 19 nt, Artificial Sequence
  Description of Artificial Sequence: Synthetic oligonucleotide
  Antisense strand to SEQ ID NO: 21300
uauugaggcacuggaaucu

SEQ ID NO: 21302 - RNA, 19 nt, Artificial Sequence
  Description of Artificial Sequence: Synthetic oligonucleotide
  Sense strand starting at position 2897 of SEQ ID NO: 232
cccagauuccagugccuca

SEQ ID NO: 21303 - RNA, 19 nt, Artificial Sequence
  Description of Artificial Sequence: Synthetic oligonucleotide
  Antisense strand to SEQ ID NO: 21302
ugaggcacuggaaucuggg

SEQ ID NO: 21304 - RNA, 19 nt, Artificial Sequence
  Description of Artificial Sequence: Synthetic oligonucleotide
  Sense strand starting at position 2530 of SEQ ID NO: 232
guugauuauuuacauccau

SEQ ID NO: 21305 - RNA, 19 nt, Artificial Sequence
  Description of Artificial Sequence: Synthetic oligonucleotide
  Antisense strand to SEQ ID NO: 21304
auggauguaaauaaucaac

SEQ ID NO: 21306 - RNA, 19 nt, Artificial Sequence
  Description of Artificial Sequence: Synthetic oligonucleotide
  Sense strand starting at position 2517 of SEQ ID NO: 232
ccaucacuucucuguugau

SEQ ID NO: 21307 - RNA, 19 nt, Artificial Sequence
  Description of Artificial Sequence: Synthetic oligonucleotide
  Antisense strand to SEQ ID NO: 21306
aucaacagagaagugaugg

SEQ ID NO: 21308 - RNA, 19 nt, Artificial Sequence
  Description of Artificial Sequence: Synthetic oligonucleotide
  Sense strand starting at position 2516 of SEQ ID NO: 232
gccaucacuucucuguuga

SEQ ID NO: 21309 - RNA, 19 nt, Artificial Sequence
  Description of Artificial Sequence: Synthetic oligonucleotide
  Antisense strand to SEQ ID NO: 21308
ucaacagagaagugauggc

SEQ ID NO: 21310 - RNA, 19 nt, Artificial Sequence
  Description of Artificial Sequence: Synthetic oligonucleotide
  Sense strand starting at position 2444 of SEQ ID NO: 232
guucuagaauccuagagag

SEQ ID NO: 21311 - RNA, 19 nt, Artificial Sequence
  Description of Artificial Sequence: Synthetic oligonucleotide
  Antisense strand to SEQ ID NO: 21310
cucucuaggauucuagaac

SEQ ID NO: 21312 - RNA, 19 nt, Artificial Sequence
  Description of Artificial Sequence: Synthetic oligonucleotide
  Sense strand starting at position 2438 of SEQ ID NO: 232
gcagaaguucuagaauccu

SEQ ID NO: 21313 - RNA, 19 nt, Artificial Sequence
  Description of Artificial Sequence: Synthetic oligonucleotide
  Antisense strand to SEQ ID NO: 21312
aggauucuagaacuucugc

SEQ ID NO: 21314 - RNA, 19 nt, Artificial Sequence
  Description of Artificial Sequence: Synthetic oligonucleotide
  Sense strand starting at position 2382 of SEQ ID NO: 232
aucucucccgagugaggau

SEQ ID NO: 21315 - RNA, 19 nt, Artificial Sequence
  Description of Artificial Sequence: Synthetic oligonucleotide
  Antisense strand to SEQ ID NO: 21314
auccucacucgggagagau

SEQ ID NO: 21316 - RNA, 19 nt, Artificial Sequence
  Description of Artificial Sequence: Synthetic oligonucleotide
  Sense strand starting at position 2274 of SEQ ID NO: 232
ugaaauguccacuguccau

SEQ ID NO: 21317 - RNA, 19 nt, Artificial Sequence
  Description of Artificial Sequence: Synthetic oligonucleotide
  Antisense strand to SEQ ID NO: 21316
auggacaguggacauuuca

SEQ ID NO: 21318 - RNA, 19 nt, Artificial Sequence
  Description of Artificial Sequence: Synthetic oligonucleotide
  Sense strand starting at position 2239 of SEQ ID NO: 232
gaaauugaggccuguuaag

SEQ ID NO: 21319 - RNA, 19 nt, Artificial Sequence
  Description of Artificial Sequence: Synthetic oligonucleotide
  Antisense strand to SEQ ID NO: 21318
cuuaacaggccucaauuuc

SEQ ID NO: 21320 - RNA, 19 nt, Artificial Sequence
  Description of Artificial Sequence: Synthetic oligonucleotide
  Sense strand starting at position 2154 of SEQ ID NO: 232
cauucugagcugugaggua

SEQ ID NO: 21321 - RNA, 19 nt, Artificial Sequence
  Description of Artificial Sequence: Synthetic oligonucleotide
  Antisense strand to SEQ ID NO: 21320
uaccucacagcucagaaug

SEQ ID NO: 21322 - RNA, 19 nt, Artificial Sequence
  Description of Artificial Sequence: Synthetic oligonucleotide
  Sense strand starting at position 2150 of SEQ ID NO: 232
acaacauucugagcuguga

SEQ ID NO: 21323 - RNA, 19 nt, Artificial Sequence
  Description of Artificial Sequence: Synthetic oligonucleotide
  Antisense strand to SEQ ID NO: 21322
ucacagcucagaauguugu

SEQ ID NO: 21324 - RNA, 19 nt, Artificial Sequence
  Description of Artificial Sequence: Synthetic oligonucleotide
  Sense strand starting at position 1222 of SEQ ID NO: 232
gucuuaagugucuaaggca

SEQ ID NO: 21325 - RNA, 19 nt, Artificial Sequence
  Description of Artificial Sequence: Synthetic oligonucleotide
  Antisense strand to SEQ ID NO: 21324
ugccuuagacacuuaagac

SEQ ID NO: 21326 - RNA, 19 nt, Artificial Sequence
  Description of Artificial Sequence: Synthetic oligonucleotide
  Sense strand starting at position 1059 of SEQ ID NO: 232
ucucgaccucuuggucaau

SEQ ID NO: 21327 - RNA, 19 nt, Artificial Sequence
  Description of Artificial Sequence: Synthetic oligonucleotide
  Antisense strand to SEQ ID NO: 21326
auugaccaagaggucgaga

SEQ ID NO: 21328 - RNA, 19 nt, Artificial Sequence
  Description of Artificial Sequence: Synthetic oligonucleotide
  Sense strand starting at position 693 of SEQ ID NO: 232
gagacuguugcagaggagu

SEQ ID NO: 21329 - RNA, 19 nt, Artificial Sequence
  Description of Artificial Sequence: Synthetic oligonucleotide
  Antisense strand to SEQ ID NO: 21328
acuccucugcaacagucuc

SEQ ID NO: 21330 - RNA, 19 nt, Artificial Sequence
  Description of Artificial Sequence: Synthetic oligonucleotide
  Sense strand starting at position 640 of SEQ ID NO: 232
aguaguugccuuggaaagu

SEQ ID NO: 21331 - RNA, 19 nt, Artificial Sequence
  Description of Artificial Sequence: Synthetic oligonucleotide
  Antisense strand to SEQ ID NO: 21330
acuuuccaaggcaacuacu

SEQ ID NO: 21332 - RNA, 19 nt, Artificial Sequence
  Description of Artificial Sequence: Synthetic oligonucleotide
  Sense strand starting at position 637 of SEQ ID NO: 232
cuaaguaguugccuuggaa

SEQ ID NO: 21333 - RNA, 19 nt, Artificial Sequence
  Description of Artificial Sequence: Synthetic oligonucleotide
  Antisense strand to SEQ ID NO: 21332
uuccaaggcaacuacuuag

SEQ ID NO: 21334 - RNA, 19 nt, Artificial Sequence
  Description of Artificial Sequence: Synthetic oligonucleotide
  Sense strand starting at position 594 of SEQ ID NO: 232
ggaagccauuaauuaguca

SEQ ID NO: 21335 - RNA, 19 nt, Artificial Sequence
  Description of Artificial Sequence: Synthetic oligonucleotide
  Antisense strand to SEQ ID NO: 21334
ugacuaauuaauggcuucc

SEQ ID NO: 21336 - RNA, 19 nt, Artificial Sequence
  Description of Artificial Sequence: Synthetic oligonucleotide
  Sense strand starting at position 558 of SEQ ID NO: 232
gucugcuuugcacagagga

SEQ ID NO: 21337 - RNA, 19 nt, Artificial Sequence
  Description of Artificial Sequence: Synthetic oligonucleotide
  Antisense strand to SEQ ID NO: 21336
uccucugugcaaagcagac

SEQ ID NO: 21338 - RNA, 19 nt, Artificial Sequence
  Description of Artificial Sequence: Synthetic oligonucleotide
  Sense strand starting at position 401 of SEQ ID NO: 232
cuaucccucguagagauaa

SEQ ID NO: 21339 - RNA, 19 nt, Artificial Sequence
  Description of Artificial Sequence: Synthetic oligonucleotide
  Antisense strand to SEQ ID NO: 21338
uuaucucuacgagggauag

SEQ ID NO: 21340 - RNA, 19 nt, Artificial Sequence
  Description of Artificial Sequence: Synthetic oligonucleotide
  Sense strand starting at position 313 of SEQ ID NO: 232
cugaaagauuggccauaua

SEQ ID NO: 21341 - RNA, 19 nt, Artificial Sequence
  Description of Artificial Sequence: Synthetic oligonucleotide
  Antisense strand to SEQ ID NO: 21340
uauauggccaaucuuucag

SEQ ID NO: 21342 - RNA, 19 nt, Artificial Sequence
  Description of Artificial Sequence: Synthetic oligonucleotide
  Sense strand starting at position 312 of SEQ ID NO: 232
ucugaaagauuggccauau

SEQ ID NO: 21343 - RNA, 19 nt, Artificial Sequence
  Description of Artificial Sequence: Synthetic oligonucleotide
  Antisense strand to SEQ ID NO: 21342
auauggccaaucuuucaga

SEQ ID NO: 21344 - RNA, 19 nt, Artificial Sequence
  Description of Artificial Sequence: Synthetic oligonucleotide
  Sense strand starting at position 249 of SEQ ID NO: 232
gagaaugcaugggagaauu

SEQ ID NO: 21345 - RNA, 19 nt, Artificial Sequence
  Description of Artificial Sequence: Synthetic oligonucleotide
  Antisense strand to SEQ ID NO: 21344
aauucucccaugcauucuc

SEQ ID NO: 21346 - RNA, 19 nt, Artificial Sequence
  Description of Artificial Sequence: Synthetic oligonucleotide
  Sense strand starting at position 86 of SEQ ID NO: 232
gugauaccucuccacccau

SEQ ID NO: 21347 - RNA, 19 nt, Artificial Sequence
  Description of Artificial Sequence: Synthetic oligonucleotide
  Antisense strand to SEQ ID NO: 21346
auggguggagagguaucac

SEQ ID NO: 21348 - RNA, 19 nt, Artificial Sequence
  Description of Artificial Sequence: Synthetic oligonucleotide
  Sense strand starting at position 85 of SEQ ID NO: 232
ggugauaccucuccaccca

SEQ ID NO: 21349 - RNA, 19 nt, Artificial Sequence
  Description of Artificial Sequence: Synthetic oligonucleotide
  Antisense strand to SEQ ID NO: 21348
uggguggagagguaucacc

SEQ ID NO: 21350 - RNA, 19 nt, Artificial Sequence
  Description of Artificial Sequence: Synthetic oligonucleotide
  Sense strand starting at position 72 of SEQ ID NO: 232
cagccaggucccuggugau

SEQ ID NO: 21351 - RNA, 19 nt, Artificial Sequence
  Description of Artificial Sequence: Synthetic oligonucleotide
  Antisense strand to SEQ ID NO: 21350
aucaccagggaccuggcug

SEQ ID NO: 21352 - RNA, 19 nt, Artificial Sequence
  Description of Artificial Sequence: Synthetic oligonucleotide
  Sense strand starting at position 23 of SEQ ID NO: 232
ugggaaagcugguaacaaa

SEQ ID NO: 21353 - RNA, 19 nt, Artificial Sequence
  Description of Artificial Sequence: Synthetic oligonucleotide
  Antisense strand to SEQ ID NO: 21352
uuuguuaccagcuuuccca

SEQ ID NO: 21354 - RNA, 19 nt, Artificial Sequence
  Description of Artificial Sequence: Synthetic oligonucleotide
  Sense strand starting at position 3972 of SEQ ID NO: 233
ccagaaucugcaggauaga

SEQ ID NO: 21355 - RNA, 19 nt, Artificial Sequence
  Description of Artificial Sequence: Synthetic oligonucleotide
  Antisense strand to SEQ ID NO: 21354
ucuauccugcagauucugg

SEQ ID NO: 21356 - RNA, 19 nt, Artificial Sequence
  Description of Artificial Sequence: Synthetic oligonucleotide
  Sense strand starting at position 3943 of SEQ ID NO: 233
ggcucauuggauugugaaa

SEQ ID NO: 21357 - RNA, 19 nt, Artificial Sequence
  Description of Artificial Sequence: Synthetic oligonucleotide
  Antisense strand to SEQ ID NO: 21356
uuucacaauccaaugagcc

SEQ ID NO: 21358 - RNA, 19 nt, Artificial Sequence
  Description of Artificial Sequence: Synthetic oligonucleotide
  Sense strand starting at position 3937 of SEQ ID NO: 233
ggaacuggcucauuggauu

SEQ ID NO: 21359 - RNA, 19 nt, Artificial Sequence
  Description of Artificial Sequence: Synthetic oligonucleotide
  Antisense strand to SEQ ID NO: 21358
aauccaaugagccaguucc

SEQ ID NO: 21360 - RNA, 19 nt, Artificial Sequence
  Description of Artificial Sequence: Synthetic oligonucleotide
  Sense strand starting at position 3867 of SEQ ID NO: 233
guaagauguguauguauag

SEQ ID NO: 21361 - RNA, 19 nt, Artificial Sequence
  Description of Artificial Sequence: Synthetic oligonucleotide
  Antisense strand to SEQ ID NO: 21360
cuauacauacacaucuuac

SEQ ID NO: 21362 - RNA, 19 nt, Artificial Sequence
  Description of Artificial Sequence: Synthetic oligonucleotide
  Sense strand starting at position 3864 of SEQ ID NO: 233
ccaguaagauguguaugua

SEQ ID NO: 21363 - RNA, 19 nt, Artificial Sequence
  Description of Artificial Sequence: Synthetic oligonucleotide
  Antisense strand to SEQ ID NO: 21362
uacauacacaucuuacugg

SEQ ID NO: 21364 - RNA, 19 nt, Artificial Sequence
  Description of Artificial Sequence: Synthetic oligonucleotide
  Sense strand starting at position 3863 of SEQ ID NO: 233
accaguaagauguguaugu

SEQ ID NO: 21365 - RNA, 19 nt, Artificial Sequence
  Description of Artificial Sequence: Synthetic oligonucleotide
  Antisense strand to SEQ ID NO: 21364
acauacacaucuuacuggu

SEQ ID NO: 21366 - RNA, 19 nt, Artificial Sequence
  Description of Artificial Sequence: Synthetic oligonucleotide
  Sense strand starting at position 3840 of SEQ ID NO: 233
aucagcacucucugagaaa

SEQ ID NO: 21367 - RNA, 19 nt, Artificial Sequence
  Description of Artificial Sequence: Synthetic oligonucleotide
  Antisense strand to SEQ ID NO: 21366
uuucucagagagugcugau

SEQ ID NO: 21368 - RNA, 19 nt, Artificial Sequence
  Description of Artificial Sequence: Synthetic oligonucleotide
  Sense strand starting at position 3703 of SEQ ID NO: 233
gcuguaucugccuagagag

SEQ ID NO: 21369 - RNA, 19 nt, Artificial Sequence
  Description of Artificial Sequence: Synthetic oligonucleotide
  Antisense strand to SEQ ID NO: 21368
cucucuaggcagauacagc

SEQ ID NO: 21370 - RNA, 19 nt, Artificial Sequence
  Description of Artificial Sequence: Synthetic oligonucleotide
  Sense strand starting at position 3702 of SEQ ID NO: 233
agcuguaucugccuagaga

SEQ ID NO: 21371 - RNA, 19 nt, Artificial Sequence
  Description of Artificial Sequence: Synthetic oligonucleotide
  Antisense strand to SEQ ID NO: 21370
ucucuaggcagauacagcu

SEQ ID NO: 21372 - RNA, 19 nt, Artificial Sequence
  Description of Artificial Sequence: Synthetic oligonucleotide
  Sense strand starting at position 3700 of SEQ ID NO: 233
agagcuguaucugccuaga

SEQ ID NO: 21373 - RNA, 19 nt, Artificial Sequence
  Description of Artificial Sequence: Synthetic oligonucleotide
  Antisense strand to SEQ ID NO: 21372
ucuaggcagauacagcucu

SEQ ID NO: 21374 - RNA, 19 nt, Artificial Sequence
  Description of Artificial Sequence: Synthetic oligonucleotide
  Sense strand starting at position 3685 of SEQ ID NO: 233
gcccuauguuuggucagag

SEQ ID NO: 21375 - RNA, 19 nt, Artificial Sequence
  Description of Artificial Sequence: Synthetic oligonucleotide
  Antisense strand to SEQ ID NO: 21374
cucugaccaaacauagggc

SEQ ID NO: 21376 - RNA, 19 nt, Artificial Sequence
  Description of Artificial Sequence: Synthetic oligonucleotide
  Sense strand starting at position 3634 of SEQ ID NO: 233
cagguugugcacuauacua

SEQ ID NO: 21377 - RNA, 19 nt, Artificial Sequence
  Description of Artificial Sequence: Synthetic oligonucleotide
  Antisense strand to SEQ ID NO: 21376
uaguauagugcacaaccug

SEQ ID NO: 21378 - RNA, 19 nt, Artificial Sequence
  Description of Artificial Sequence: Synthetic oligonucleotide
  Sense strand starting at position 3197 of SEQ ID NO: 233
agccaauaucccgagacua

SEQ ID NO: 21379 - RNA, 19 nt, Artificial Sequence
  Description of Artificial Sequence: Synthetic oligonucleotide
  Antisense strand to SEQ ID NO: 21378
uagucucgggauauuggcu

SEQ ID NO: 21380 - RNA, 19 nt, Artificial Sequence
  Description of Artificial Sequence: Synthetic oligonucleotide
  Sense strand starting at position 2944 of SEQ ID NO: 233
gucaguggcucauccagaa

SEQ ID NO: 21381 - RNA, 19 nt, Artificial Sequence
  Description of Artificial Sequence: Synthetic oligonucleotide
  Antisense strand to SEQ ID NO: 21380
uucuggaugagccacugac

SEQ ID NO: 21382 - RNA, 19 nt, Artificial Sequence
  Description of Artificial Sequence: Synthetic oligonucleotide
  Sense strand starting at position 2930 of SEQ ID NO: 233
aggcuaauucgucagucag

SEQ ID NO: 21383 - RNA, 19 nt, Artificial Sequence
  Description of Artificial Sequence: Synthetic oligonucleotide
  Antisense strand to SEQ ID NO: 21382
cugacugacgaauuagccu

SEQ ID NO: 21384 - RNA, 19 nt, Artificial Sequence
  Description of Artificial Sequence: Synthetic oligonucleotide
  Sense strand starting at position 2929 of SEQ ID NO: 233
gaggcuaauucgucaguca

SEQ ID NO: 21385 - RNA, 19 nt, Artificial Sequence
  Description of Artificial Sequence: Synthetic oligonucleotide
  Antisense strand to SEQ ID NO: 21384
ugacugacgaauuagccuc

SEQ ID NO: 21386 - RNA, 19 nt, Artificial Sequence
  Description of Artificial Sequence: Synthetic oligonucleotide
  Sense strand starting at position 2811 of SEQ ID NO: 233
agcagugacagguguacaa

SEQ ID NO: 21387 - RNA, 19 nt, Artificial Sequence
  Description of Artificial Sequence: Synthetic oligonucleotide
  Antisense strand to SEQ ID NO: 21386
uuguacaccugucacugcu

SEQ ID NO: 21388 - RNA, 19 nt, Artificial Sequence
  Description of Artificial Sequence: Synthetic oligonucleotide
  Sense strand starting at position 2688 of SEQ ID NO: 233
agcacaguaccugaaguaa

SEQ ID NO: 21389 - RNA, 19 nt, Artificial Sequence
  Description of Artificial Sequence: Synthetic oligonucleotide
  Antisense strand to SEQ ID NO: 21388
uuacuucagguacugugcu

SEQ ID NO: 21390 - RNA, 19 nt, Artificial Sequence
  Description of Artificial Sequence: Synthetic oligonucleotide
  Sense strand starting at position 2667 of SEQ ID NO: 233
aaucuagacgagugaugaa

SEQ ID NO: 21391 - RNA, 19 nt, Artificial Sequence
  Description of Artificial Sequence: Synthetic oligonucleotide
  Antisense strand to SEQ ID NO: 21390
uucaucacucgucuagauu

SEQ ID NO: 21392 - RNA, 19 nt, Artificial Sequence
  Description of Artificial Sequence: Synthetic oligonucleotide
  Sense strand starting at position 2664 of SEQ ID NO: 233
uccaaucuagacgagugau

SEQ ID NO: 21393 - RNA, 19 nt, Artificial Sequence
  Description of Artificial Sequence: Synthetic oligonucleotide
  Antisense strand to SEQ ID NO: 21392
aucacucgucuagauugga

SEQ ID NO: 21394 - RNA, 19 nt, Artificial Sequence
  Description of Artificial Sequence: Synthetic oligonucleotide
  Sense strand starting at position 2663 of SEQ ID NO: 233
cuccaaucuagacgaguga

SEQ ID NO: 21395 - RNA, 19 nt, Artificial Sequence
  Description of Artificial Sequence: Synthetic oligonucleotide
  Antisense strand to SEQ ID NO: 21394
ucacucgucuagauuggag

SEQ ID NO: 21396 - RNA, 19 nt, Artificial Sequence
  Description of Artificial Sequence: Synthetic oligonucleotide
  Sense strand starting at position 1428 of SEQ ID NO: 233
uggaaugcgcccugaaaug

SEQ ID NO: 21397 - RNA, 19 nt, Artificial Sequence
  Description of Artificial Sequence: Synthetic oligonucleotide
  Antisense strand to SEQ ID NO: 21396
cauuucagggcgcauucca

SEQ ID NO: 21398 - RNA, 19 nt, Artificial Sequence
  Description of Artificial Sequence: Synthetic oligonucleotide
  Sense strand starting at position 1348 of SEQ ID NO: 233
cucccugcucacuaggaaa

SEQ ID NO: 21399 - RNA, 19 nt, Artificial Sequence
  Description of Artificial Sequence: Synthetic oligonucleotide
  Antisense strand to SEQ ID NO: 21398
uuuccuagugagcagggag

SEQ ID NO: 21400 - RNA, 19 nt, Artificial Sequence
  Description of Artificial Sequence: Synthetic oligonucleotide
  Sense strand starting at position 1311 of SEQ ID NO: 233
ggagaugguuccuucacug

SEQ ID NO: 21401 - RNA, 19 nt, Artificial Sequence
  Description of Artificial Sequence: Synthetic oligonucleotide
  Antisense strand to SEQ ID NO: 21400
cagugaaggaaccaucucc

SEQ ID NO: 21402 - RNA, 19 nt, Artificial Sequence
  Description of Artificial Sequence: Synthetic oligonucleotide
  Sense strand starting at position 1125 of SEQ ID NO: 233
uuggaaguucuuuaaagca

SEQ ID NO: 21403 - RNA, 19 nt, Artificial Sequence
  Description of Artificial Sequence: Synthetic oligonucleotide
  Antisense strand to SEQ ID NO: 21402
ugcuuuaaagaacuuccaa

SEQ ID NO: 21404 - RNA, 19 nt, Artificial Sequence
  Description of Artificial Sequence: Synthetic oligonucleotide
  Sense strand starting at position 1124 of SEQ ID NO: 233
auuggaaguucuuuaaagc

SEQ ID NO: 21405 - RNA, 19 nt, Artificial Sequence
  Description of Artificial Sequence: Synthetic oligonucleotide
  Antisense strand to SEQ ID NO: 21404
gcuuuaaagaacuuccaau

SEQ ID NO: 21406 - RNA, 19 nt, Artificial Sequence
  Description of Artificial Sequence: Synthetic oligonucleotide
  Sense strand starting at position 932 of SEQ ID NO: 233
auuauaguacuuggaaucu

SEQ ID NO: 21407 - RNA, 19 nt, Artificial Sequence
  Description of Artificial Sequence: Synthetic oligonucleotide
  Antisense strand to SEQ ID NO: 21406
agauuccaaguacuauaau

SEQ ID NO: 21408 - RNA, 19 nt, Artificial Sequence
  Description of Artificial Sequence: Synthetic oligonucleotide
  Sense strand starting at position 930 of SEQ ID NO: 233
acauuauaguacuuggaau

SEQ ID NO: 21409 - RNA, 19 nt, Artificial Sequence
  Description of Artificial Sequence: Synthetic oligonucleotide
  Antisense strand to SEQ ID NO: 21408
auuccaaguacuauaaugu

SEQ ID NO: 21410 - RNA, 19 nt, Artificial Sequence
  Description of Artificial Sequence: Synthetic oligonucleotide
  Sense strand starting at position 911 of SEQ ID NO: 233
agugguauuuccuugcaaa

SEQ ID NO: 21411 - RNA, 19 nt, Artificial Sequence
  Description of Artificial Sequence: Synthetic oligonucleotide
  Antisense strand to SEQ ID NO: 21410
uuugcaaggaaauaccacu

SEQ ID NO: 21412 - RNA, 19 nt, Artificial Sequence
  Description of Artificial Sequence: Synthetic oligonucleotide
  Sense strand starting at position 742 of SEQ ID NO: 233
cucugauggccaugucauu

SEQ ID NO: 21413 - RNA, 19 nt, Artificial Sequence
  Description of Artificial Sequence: Synthetic oligonucleotide
  Antisense strand to SEQ ID NO: 21412
aaugacauggccaucagag

SEQ ID NO: 21414 - RNA, 19 nt, Artificial Sequence
  Description of Artificial Sequence: Synthetic oligonucleotide
  Sense strand starting at position 595 of SEQ ID NO: 233
uugcauugauccuuuggaa

SEQ ID NO: 21415 - RNA, 19 nt, Artificial Sequence
  Description of Artificial Sequence: Synthetic oligonucleotide
  Antisense strand to SEQ ID NO: 21414
uuccaaaggaucaaugcaa

SEQ ID NO: 21416 - RNA, 19 nt, Artificial Sequence
  Description of Artificial Sequence: Synthetic oligonucleotide
  Sense strand starting at position 418 of SEQ ID NO: 233
cuguuaaagguuggugaaa

SEQ ID NO: 21417 - RNA, 19 nt, Artificial Sequence
  Description of Artificial Sequence: Synthetic oligonucleotide
  Antisense strand to SEQ ID NO: 21416
uuucaccaaccuuuaacag

SEQ ID NO: 21418 - RNA, 19 nt, Artificial Sequence
  Description of Artificial Sequence: Synthetic oligonucleotide
  Sense strand starting at position 417 of SEQ ID NO: 233
ucuguuaaagguuggugaa

SEQ ID NO: 21419 - RNA, 19 nt, Artificial Sequence
  Description of Artificial Sequence: Synthetic oligonucleotide
  Antisense strand to SEQ ID NO: 21418
uucaccaaccuuuaacaga

SEQ ID NO: 21420 - RNA, 19 nt, Artificial Sequence
  Description of Artificial Sequence: Synthetic oligonucleotide
  Sense strand starting at position 375 of SEQ ID NO: 233
uacugugauuuguugucuu

SEQ ID NO: 21421 - RNA, 19 nt, Artificial Sequence
  Description of Artificial Sequence: Synthetic oligonucleotide
  Antisense strand to SEQ ID NO: 21420
aagacaacaaaucacagua

SEQ ID NO: 21422 - RNA, 19 nt, Artificial Sequence
  Description of Artificial Sequence: Synthetic oligonucleotide
  Sense strand starting at position 315 of SEQ ID NO: 233
ugcagugugauaugaaacu

SEQ ID NO: 21423 - RNA, 19 nt, Artificial Sequence
  Description of Artificial Sequence: Synthetic oligonucleotide
  Antisense strand to SEQ ID NO: 21422
aguuucauaucacacugca

SEQ ID NO: 21424 - RNA, 19 nt, Artificial Sequence
  Description of Artificial Sequence: Synthetic oligonucleotide
  Sense strand starting at position 251 of SEQ ID NO: 233
ggucuagcaguggguaauu

SEQ ID NO: 21425 - RNA, 19 nt, Artificial Sequence
  Description of Artificial Sequence: Synthetic oligonucleotide
  Antisense strand to SEQ ID NO: 21424
aauuacccacugcuagacc

SEQ ID NO: 21426 - RNA, 19 nt, Artificial Sequence
  Description of Artificial Sequence: Synthetic oligonucleotide
  Sense strand starting at position 250 of SEQ ID NO: 233
gggucuagcaguggguaau

SEQ ID NO: 21427 - RNA, 19 nt, Artificial Sequence
  Description of Artificial Sequence: Synthetic oligonucleotide
  Antisense strand to SEQ ID NO: 21426
auuacccacugcuagaccc

SEQ ID NO: 21428 - RNA, 19 nt, Artificial Sequence
  Description of Artificial Sequence: Synthetic oligonucleotide
  Sense strand starting at position 112 of SEQ ID NO: 233
ugugaauuggcucacaguu

SEQ ID NO: 21429 - RNA, 19 nt, Artificial Sequence
  Description of Artificial Sequence: Synthetic oligonucleotide
  Antisense strand to SEQ ID NO: 21428
aacugugagccaauucaca

SEQ ID NO: 21430 - RNA, 19 nt, Artificial Sequence
  Description of Artificial Sequence: Synthetic oligonucleotide
  Sense strand starting at position 109 of SEQ ID NO: 233
agcugugaauuggcucaca

SEQ ID NO: 21431 - RNA, 19 nt, Artificial Sequence
  Description of Artificial Sequence: Synthetic oligonucleotide
  Antisense strand to SEQ ID NO: 21430
ugugagccaauucacagcu

SEQ ID NO: 21432 - RNA, 19 nt, Artificial Sequence
  Description of Artificial Sequence: Synthetic oligonucleotide
  Sense strand starting at position 29 of SEQ ID NO: 233
gguugacucugggcauaag

SEQ ID NO: 21433 - RNA, 19 nt, Artificial Sequence
  Description of Artificial Sequence: Synthetic oligonucleotide
  Antisense strand to SEQ ID NO: 21432
cuuaugcccagagucaacc

SEQ ID NO: 21434 - RNA, 19 nt, Artificial Sequence
  Description of Artificial Sequence: Synthetic oligonucleotide
  Sense strand starting at position 73 of SEQ ID NO: 234
ccacaaggugccuaaugaa

SEQ ID NO: 21435 - RNA, 19 nt, Artificial Sequence
  Description of Artificial Sequence: Synthetic oligonucleotide
  Antisense strand to SEQ ID NO: 21434
uucauuaggcaccuugugg

SEQ ID NO: 21436 - RNA, 19 nt, Artificial Sequence
  Description of Artificial Sequence: Synthetic oligonucleotide
  Sense strand starting at position 80 of SEQ ID NO: 234
gugccuaaugaacguauuu

SEQ ID NO: 21437 - RNA, 19 nt, Artificial Sequence
  Description of Artificial Sequence: Synthetic oligonucleotide
  Antisense strand to SEQ ID NO: 21436
aaauacguucauuaggcac

SEQ ID NO: 21438 - RNA, 19 nt, Artificial Sequence
  Description of Artificial Sequence: Synthetic oligonucleotide
  Sense strand starting at position 114 of SEQ ID NO: 234
aaggaaaguccucaucugu

SEQ ID NO: 21439 - RNA, 19 nt, Artificial Sequence
  Description of Artificial Sequence: Synthetic oligonucleotide
  Antisense strand to SEQ ID NO: 21438
acagaugaggacuuuccuu

SEQ ID NO: 21440 - RNA, 19 nt, Artificial Sequence
  Description of Artificial Sequence: Synthetic oligonucleotide
  Sense strand starting at position 129 of SEQ ID NO: 234
cugugacaguuuccuauua

SEQ ID NO: 21441 - RNA, 19 nt, Artificial Sequence
  Description of Artificial Sequence: Synthetic oligonucleotide
  Antisense strand to SEQ ID NO: 21440
uaauaggaaacugucacag

SEQ ID NO: 21442 - RNA, 19 nt, Artificial Sequence
  Description of Artificial Sequence: Synthetic oligonucleotide
  Sense strand starting at position 137 of SEQ ID NO: 234
guuuccuauuagucuauga

SEQ ID NO: 21443 - RNA, 19 nt, Artificial Sequence
  Description of Artificial Sequence: Synthetic oligonucleotide
  Antisense strand to SEQ ID NO: 21442
ucauagacuaauaggaaac

SEQ ID NO: 21444 - RNA, 19 nt, Artificial Sequence
  Description of Artificial Sequence: Synthetic oligonucleotide
  Sense strand starting at position 139 of SEQ ID NO: 234
uuccuauuagucuaugaca

SEQ ID NO: 21445 - RNA, 19 nt, Artificial Sequence
  Description of Artificial Sequence: Synthetic oligonucleotide
  Antisense strand to SEQ ID NO: 21444
ugucauagacuaauaggaa

SEQ ID NO: 21446 - RNA, 19 nt, Artificial Sequence
  Description of Artificial Sequence: Synthetic oligonucleotide
  Sense strand starting at position 141 of SEQ ID NO: 234
ccuauuagucuaugacaga

SEQ ID NO: 21447 - RNA, 19 nt, Artificial Sequence
  Description of Artificial Sequence: Synthetic oligonucleotide
  Antisense strand to SEQ ID NO: 21446
ucugucauagacuaauagg

SEQ ID NO: 21448 - RNA, 19 nt, Artificial Sequence
  Description of Artificial Sequence: Synthetic oligonucleotide
  Sense strand starting at position 317 of SEQ ID NO: 234
acgcuuguugucccaggua

SEQ ID NO: 21449 - RNA, 19 nt, Artificial Sequence
  Description of Artificial Sequence: Synthetic oligonucleotide
  Antisense strand to SEQ ID NO: 21448
uaccugggacaacaagcgu

SEQ ID NO: 21450 - RNA, 19 nt, Artificial Sequence
  Description of Artificial Sequence: Synthetic oligonucleotide
  Sense strand starting at position 369 of SEQ ID NO: 234
cagggaaaucgaggcuaca

SEQ ID NO: 21451 - RNA, 19 nt, Artificial Sequence
  Description of Artificial Sequence: Synthetic oligonucleotide
  Antisense strand to SEQ ID NO: 21450
uguagccucgauuucccug

SEQ ID NO: 21452 - RNA, 19 nt, Artificial Sequence
  Description of Artificial Sequence: Synthetic oligonucleotide
  Sense strand starting at position 552 of SEQ ID NO: 234
gcagaacaaaguggugauu

SEQ ID NO: 21453 - RNA, 19 nt, Artificial Sequence
  Description of Artificial Sequence: Synthetic oligonucleotide
  Antisense strand to SEQ ID NO: 21452
aaucaccacuuuguucugc

SEQ ID NO: 21454 - RNA, 19 nt, Artificial Sequence
  Description of Artificial Sequence: Synthetic oligonucleotide
  Sense strand starting at position 592 of SEQ ID NO: 234
aggcacacuugaguuagaa

SEQ ID NO: 21455 - RNA, 19 nt, Artificial Sequence
  Description of Artificial Sequence: Synthetic oligonucleotide
  Antisense strand to SEQ ID NO: 21454
uucuaacucaagugugccu

SEQ ID NO: 21456 - RNA, 19 nt, Artificial Sequence
  Description of Artificial Sequence: Synthetic oligonucleotide
  Sense strand starting at position 666 of SEQ ID NO: 234
guuuccuaccugcauagaa

SEQ ID NO: 21457 - RNA, 19 nt, Artificial Sequence
  Description of Artificial Sequence: Synthetic oligonucleotide
  Antisense strand to SEQ ID NO: 21456
uucuaugcagguaggaaac

SEQ ID NO: 21458 - RNA, 19 nt, Artificial Sequence
  Description of Artificial Sequence: Synthetic oligonucleotide
  Sense strand starting at position 680 of SEQ ID NO: 234
uagaauuaagugcaguuaa

SEQ ID NO: 21459 - RNA, 19 nt, Artificial Sequence
  Description of Artificial Sequence: Synthetic oligonucleotide
  Antisense strand to SEQ ID NO: 21458
uuaacugcacuuaauucua

SEQ ID NO: 21460 - RNA, 19 nt, Artificial Sequence
  Description of Artificial Sequence: Synthetic oligonucleotide
  Sense strand starting at position 693 of SEQ ID NO: 234
aguuaagucacagauaugu

SEQ ID NO: 21461 - RNA, 19 nt, Artificial Sequence
  Description of Artificial Sequence: Synthetic oligonucleotide
  Antisense strand to SEQ ID NO: 21460
acauaucugugacuuaacu

SEQ ID NO: 21462 - RNA, 19 nt, Artificial Sequence
  Description of Artificial Sequence: Synthetic oligonucleotide
  Sense strand starting at position 882 of SEQ ID NO: 234
augccuagucucugacaaa

SEQ ID NO: 21463 - RNA, 19 nt, Artificial Sequence
  Description of Artificial Sequence: Synthetic oligonucleotide
  Antisense strand to SEQ ID NO: 21462
uuugucagagacuaggcau

SEQ ID NO: 21464 - RNA, 19 nt, Artificial Sequence
  Description of Artificial Sequence: Synthetic oligonucleotide
  Sense strand starting at position 1354 of SEQ ID NO: 234
gagucaucuucugcugaaa

SEQ ID NO: 21465 - RNA, 19 nt, Artificial Sequence
  Description of Artificial Sequence: Synthetic oligonucleotide
  Antisense strand to SEQ ID NO: 21464
uuucagcagaagaugacuc

SEQ ID NO: 21466 - RNA, 19 nt, Artificial Sequence
  Description of Artificial Sequence: Synthetic oligonucleotide
  Sense strand starting at position 1437 of SEQ ID NO: 234
gugggcgucaucucuguua

SEQ ID NO: 21467 - RNA, 19 nt, Artificial Sequence
  Description of Artificial Sequence: Synthetic oligonucleotide
  Antisense strand to SEQ ID NO: 21466
uaacagagaugacgcccac

SEQ ID NO: 21468 - RNA, 19 nt, Artificial Sequence
  Description of Artificial Sequence: Synthetic oligonucleotide
  Sense strand starting at position 1441 of SEQ ID NO: 234
gcgucaucucuguuaucgu

SEQ ID NO: 21469 - RNA, 19 nt, Artificial Sequence
  Description of Artificial Sequence: Synthetic oligonucleotide
  Antisense strand to SEQ ID NO: 21468
acgauaacagagaugacgc

SEQ ID NO: 21470 - RNA, 19 nt, Artificial Sequence
  Description of Artificial Sequence: Synthetic oligonucleotide
  Sense strand starting at position 1469 of SEQ ID NO: 234
ggaguugucucaccuccag

SEQ ID NO: 21471 - RNA, 19 nt, Artificial Sequence
  Description of Artificial Sequence: Synthetic oligonucleotide
  Antisense strand to SEQ ID NO: 21470
cuggaggugagacaacucc

SEQ ID NO: 21472 - RNA, 19 nt, Artificial Sequence
  Description of Artificial Sequence: Synthetic oligonucleotide
  Sense strand starting at position 1906 of SEQ ID NO: 234
gccggucgccuuccugaaa

SEQ ID NO: 21473 - RNA, 19 nt, Artificial Sequence
  Description of Artificial Sequence: Synthetic oligonucleotide
  Antisense strand to SEQ ID NO: 21472
uuucaggaaggcgaccggc

SEQ ID NO: 21474 - RNA, 19 nt, Artificial Sequence
  Description of Artificial Sequence: Synthetic oligonucleotide
  Sense strand starting at position 2075 of SEQ ID NO: 234
uaucguagugccgcaauga

SEQ ID NO: 21475 - RNA, 19 nt, Artificial Sequence
  Description of Artificial Sequence: Synthetic oligonucleotide
  Antisense strand to SEQ ID NO: 21474
ucauugcggcacuacgaua

SEQ ID NO: 21476 - RNA, 19 nt, Artificial Sequence
  Description of Artificial Sequence: Synthetic oligonucleotide
  Sense strand starting at position 2090 of SEQ ID NO: 234
augacuucuggguacugua

SEQ ID NO: 21477 - RNA, 19 nt, Artificial Sequence
  Description of Artificial Sequence: Synthetic oligonucleotide
  Antisense strand to SEQ ID NO: 21476
uacaguacccagaagucau

SEQ ID NO: 21478 - RNA, 19 nt, Artificial Sequence
  Description of Artificial Sequence: Synthetic oligonucleotide
  Sense strand starting at position 2134 of SEQ ID NO: 234
gcuugaagcuuccuuggga

SEQ ID NO: 21479 - RNA, 19 nt, Artificial Sequence
  Description of Artificial Sequence: Synthetic oligonucleotide
  Antisense strand to SEQ ID NO: 21478
ucccaaggaagcuucaagc

SEQ ID NO: 21480 - RNA, 19 nt, Artificial Sequence
  Description of Artificial Sequence: Synthetic oligonucleotide
  Sense strand starting at position 2135 of SEQ ID NO: 234
cuugaagcuuccuugggau

SEQ ID NO: 21481 - RNA, 19 nt, Artificial Sequence
  Description of Artificial Sequence: Synthetic oligonucleotide
  Antisense strand to SEQ ID NO: 21480
aucccaaggaagcuucaag

SEQ ID NO: 21482 - RNA, 19 nt, Artificial Sequence
  Description of Artificial Sequence: Synthetic oligonucleotide
  Sense strand starting at position 2178 of SEQ ID NO: 234
ggcgacuucucauuuguca

SEQ ID NO: 21483 - RNA, 19 nt, Artificial Sequence
  Description of Artificial Sequence: Synthetic oligonucleotide
  Antisense strand to SEQ ID NO: 21482
ugacaaaugagaagucgcc

SEQ ID NO: 21484 - RNA, 19 nt, Artificial Sequence
  Description of Artificial Sequence: Synthetic oligonucleotide
  Sense strand starting at position 2197 of SEQ ID NO: 234
gccugcggcaguuuaaauu

SEQ ID NO: 21485 - RNA, 19 nt, Artificial Sequence
  Description of Artificial Sequence: Synthetic oligonucleotide
  Antisense strand to SEQ ID NO: 21484
aauuuaaacugccgcaggc

SEQ ID NO: 21486 - RNA, 19 nt, Artificial Sequence
  Description of Artificial Sequence: Synthetic oligonucleotide
  Sense strand starting at position 2227 of SEQ ID NO: 234
guggcauguccuguuagcu

SEQ ID NO: 21487 - RNA, 19 nt, Artificial Sequence
  Description of Artificial Sequence: Synthetic oligonucleotide
  Antisense strand to SEQ ID NO: 21486
agcuaacaggacaugccac

SEQ ID NO: 21488 - RNA, 19 nt, Artificial Sequence
  Description of Artificial Sequence: Synthetic oligonucleotide
  Sense strand starting at position 2297 of SEQ ID NO: 234
uuugacauuguguaucaca

SEQ ID NO: 21489 - RNA, 19 nt, Artificial Sequence
  Description of Artificial Sequence: Synthetic oligonucleotide
  Antisense strand to SEQ ID NO: 21488
ugugauacacaaugucaaa

SEQ ID NO: 21490 - RNA, 19 nt, Artificial Sequence
  Description of Artificial Sequence: Synthetic oligonucleotide
  Sense strand starting at position 2513 of SEQ ID NO: 234
guugucaucccgucucauc

SEQ ID NO: 21491 - RNA, 19 nt, Artificial Sequence
  Description of Artificial Sequence: Synthetic oligonucleotide
  Antisense strand to SEQ ID NO: 21490
gaugagacgggaugacaac

SEQ ID NO: 21492 - RNA, 19 nt, Artificial Sequence
  Description of Artificial Sequence: Synthetic oligonucleotide
  Sense strand starting at position 2533 of SEQ ID NO: 234
uggccaucugacugaugga

SEQ ID NO: 21493 - RNA, 19 nt, Artificial Sequence
  Description of Artificial Sequence: Synthetic oligonucleotide
  Antisense strand to SEQ ID NO: 21492
uccaucagucagauggcca

SEQ ID NO: 21494 - RNA, 19 nt, Artificial Sequence
  Description of Artificial Sequence: Synthetic oligonucleotide
  Sense strand starting at position 2617 of SEQ ID NO: 234
gcggaagagcgacauucaa

SEQ ID NO: 21495 - RNA, 19 nt, Artificial Sequence
  Description of Artificial Sequence: Synthetic oligonucleotide
  Antisense strand to SEQ ID NO: 21494
uugaaugucgcucuuccgc

SEQ ID NO: 21496 - RNA, 19 nt, Artificial Sequence
  Description of Artificial Sequence: Synthetic oligonucleotide
  Sense strand starting at position 2712 of SEQ ID NO: 234
ggacuucuaugcuuggacu

SEQ ID NO: 21497 - RNA, 19 nt, Artificial Sequence
  Description of Artificial Sequence: Synthetic oligonucleotide
  Antisense strand to SEQ ID NO: 21496
aguccaagcauagaagucc

SEQ ID NO: 21498 - RNA, 19 nt, Artificial Sequence
  Description of Artificial Sequence: Synthetic oligonucleotide
  Sense strand starting at position 2779 of SEQ ID NO: 234
uuugcuuauuucuucgauu

SEQ ID NO: 21499 - RNA, 19 nt, Artificial Sequence
  Description of Artificial Sequence: Synthetic oligonucleotide
  Antisense strand to SEQ ID NO: 21498
aaucgaagaaauaagcaaa

SEQ ID NO: 21500 - RNA, 19 nt, Artificial Sequence
  Description of Artificial Sequence: Synthetic oligonucleotide
  Sense strand starting at position 2780 of SEQ ID NO: 234
uugcuuauuucuucgauug

SEQ ID NO: 21501 - RNA, 19 nt, Artificial Sequence
  Description of Artificial Sequence: Synthetic oligonucleotide
  Antisense strand to SEQ ID NO: 21500
caaucgaagaaauaagcaa

SEQ ID NO: 21502 - RNA, 19 nt, Artificial Sequence
  Description of Artificial Sequence: Synthetic oligonucleotide
  Sense strand starting at position 2781 of SEQ ID NO: 234
ugcuuauuucuucgauugu

SEQ ID NO: 21503 - RNA, 19 nt, Artificial Sequence
  Description of Artificial Sequence: Synthetic oligonucleotide
  Antisense strand to SEQ ID NO: 21502
acaaucgaagaaauaagca

SEQ ID NO: 21504 - RNA, 19 nt, Artificial Sequence
  Description of Artificial Sequence: Synthetic oligonucleotide
  Sense strand starting at position 2792 of SEQ ID NO: 234
ucgauuguuccucaacuca

SEQ ID NO: 21505 - RNA, 19 nt, Artificial Sequence
  Description of Artificial Sequence: Synthetic oligonucleotide
  Antisense strand to SEQ ID NO: 21504
ugaguugaggaacaaucga

SEQ ID NO: 21506 - RNA, 19 nt, Artificial Sequence
  Description of Artificial Sequence: Synthetic oligonucleotide
  Sense strand starting at position 2889 of SEQ ID NO: 234
accgcauccacaggugaaa

SEQ ID NO: 21507 - RNA, 19 nt, Artificial Sequence
  Description of Artificial Sequence: Synthetic oligonucleotide
  Antisense strand to SEQ ID NO: 21506
uuucaccuguggaugcggu

SEQ ID NO: 21508 - RNA, 19 nt, Artificial Sequence
  Description of Artificial Sequence: Synthetic oligonucleotide
  Sense strand starting at position 2983 of SEQ ID NO: 234
ugagacucagccugagcua

SEQ ID NO: 21509 - RNA, 19 nt, Artificial Sequence
  Description of Artificial Sequence: Synthetic oligonucleotide
  Antisense strand to SEQ ID NO: 21508
uagcucaggcugagucuca

SEQ ID NO: 21510 - RNA, 19 nt, Artificial Sequence
  Description of Artificial Sequence: Synthetic oligonucleotide
  Sense strand starting at position 3734 of SEQ ID NO: 234
ggaguaguaguuuguauag

SEQ ID NO: 21511 - RNA, 19 nt, Artificial Sequence
  Description of Artificial Sequence: Synthetic oligonucleotide
  Antisense strand to SEQ ID NO: 21510
cuauacaaacuacuacucc

SEQ ID NO: 21512 - RNA, 19 nt, Artificial Sequence
  Description of Artificial Sequence: Synthetic oligonucleotide
  Sense strand starting at position 3740 of SEQ ID NO: 234
guaguuuguauaguucgca

SEQ ID NO: 21513 - RNA, 19 nt, Artificial Sequence
  Description of Artificial Sequence: Synthetic oligonucleotide
  Antisense strand to SEQ ID NO: 21512
ugcgaacuauacaaacuac

SEQ ID NO: 21514 - RNA, 19 nt, Artificial Sequence
  Description of Artificial Sequence: Synthetic oligonucleotide
  Sense strand starting at position 46 of SEQ ID NO: 235
caaguaguauuggaacaau

SEQ ID NO: 21515 - RNA, 19 nt, Artificial Sequence
  Description of Artificial Sequence: Synthetic oligonucleotide
  Antisense strand to SEQ ID NO: 21514
auuguuccaauacuacuug

SEQ ID NO: 21516 - RNA, 19 nt, Artificial Sequence
  Description of Artificial Sequence: Synthetic oligonucleotide
  Sense strand starting at position 63 of SEQ ID NO: 235
auggguaucuauguggaaa

SEQ ID NO: 21517 - RNA, 19 nt, Artificial Sequence
  Description of Artificial Sequence: Synthetic oligonucleotide
  Antisense strand to SEQ ID NO: 21516
uuuccacauagauacccau

SEQ ID NO: 21518 - RNA, 19 nt, Artificial Sequence
  Description of Artificial Sequence: Synthetic oligonucleotide
  Sense strand starting at position 358 of SEQ ID NO: 235
guuggaauauauugacaac

SEQ ID NO: 21519 - RNA, 19 nt, Artificial Sequence
  Description of Artificial Sequence: Synthetic oligonucleotide
  Antisense strand to SEQ ID NO: 21518
guugucaauauauuccaac

SEQ ID NO: 21520 - RNA, 19 nt, Artificial Sequence
  Description of Artificial Sequence: Synthetic oligonucleotide
  Sense strand starting at position 361 of SEQ ID NO: 235
ggaauauauugacaacgca

SEQ ID NO: 21521 - RNA, 19 nt, Artificial Sequence
  Description of Artificial Sequence: Synthetic oligonucleotide
  Antisense strand to SEQ ID NO: 21520
ugcguugucaauauauucc

SEQ ID NO: 21522 - RNA, 19 nt, Artificial Sequence
  Description of Artificial Sequence: Synthetic oligonucleotide
  Sense strand starting at position 617 of SEQ ID NO: 235
aagcaaguauuggugagaa

SEQ ID NO: 21523 - RNA, 19 nt, Artificial Sequence
  Description of Artificial Sequence: Synthetic oligonucleotide
  Antisense strand to SEQ ID NO: 21522
uucucaccaauacuugcuu

SEQ ID NO: 21524 - RNA, 19 nt, Artificial Sequence
  Description of Artificial Sequence: Synthetic oligonucleotide
  Sense strand starting at position 619 of SEQ ID NO: 235
gcaaguauuggugagaaua

SEQ ID NO: 21525 - RNA, 19 nt, Artificial Sequence
  Description of Artificial Sequence: Synthetic oligonucleotide
  Antisense strand to SEQ ID NO: 21524
uauucucaccaauacuugc

SEQ ID NO: 21526 - RNA, 19 nt, Artificial Sequence
  Description of Artificial Sequence: Synthetic oligonucleotide
  Sense strand starting at position 785 of SEQ ID NO: 235
gaaagcaugugcucauaaa

SEQ ID NO: 21527 - RNA, 19 nt, Artificial Sequence
  Description of Artificial Sequence: Synthetic oligonucleotide
  Antisense strand to SEQ ID NO: 21526
uuuaugagcacaugcuuuc

SEQ ID NO: 21528 - RNA, 19 nt, Artificial Sequence
  Description of Artificial Sequence: Synthetic oligonucleotide
  Sense strand starting at position 949 of SEQ ID NO: 235
auacauuaauaugggcaaa

SEQ ID NO: 21529 - RNA, 19 nt, Artificial Sequence
  Description of Artificial Sequence: Synthetic oligonucleotide
  Antisense strand to SEQ ID NO: 21528
uuugcccauauuaauguau

SEQ ID NO: 21530 - RNA, 19 nt, Artificial Sequence
  Description of Artificial Sequence: Synthetic oligonucleotide
  Sense strand starting at position 971 of SEQ ID NO: 235
augaaugaaucuuacagau

SEQ ID NO: 21531 - RNA, 19 nt, Artificial Sequence
  Description of Artificial Sequence: Synthetic oligonucleotide
  Antisense strand to SEQ ID NO: 21530
aucuguaagauucauucau

SEQ ID NO: 21532 - RNA, 19 nt, Artificial Sequence
  Description of Artificial Sequence: Synthetic oligonucleotide
  Sense strand starting at position 1021 of SEQ ID NO: 235
agaaguggauuccauauau

SEQ ID NO: 21533 - RNA, 19 nt, Artificial Sequence
  Description of Artificial Sequence: Synthetic oligonucleotide
  Antisense strand to SEQ ID NO: 21532
auauauggaauccacuucu

SEQ ID NO: 21534 - RNA, 19 nt, Artificial Sequence
  Description of Artificial Sequence: Synthetic oligonucleotide
  Sense strand starting at position 1143 of SEQ ID NO: 235
aaggaacuuuccugggaga

SEQ ID NO: 21535 - RNA, 19 nt, Artificial Sequence
  Description of Artificial Sequence: Synthetic oligonucleotide
  Antisense strand to SEQ ID NO: 21534
ucucccaggaaaguuccuu

SEQ ID NO: 21536 - RNA, 19 nt, Artificial Sequence
  Description of Artificial Sequence: Synthetic oligonucleotide
  Sense strand starting at position 1146 of SEQ ID NO: 235
gaacuuuccugggagacag

SEQ ID NO: 21537 - RNA, 19 nt, Artificial Sequence
  Description of Artificial Sequence: Synthetic oligonucleotide
  Antisense strand to SEQ ID NO: 21536
cugucucccaggaaaguuc

SEQ ID NO: 21538 - RNA, 19 nt, Artificial Sequence
  Description of Artificial Sequence: Synthetic oligonucleotide
  Sense strand starting at position 1180 of SEQ ID NO: 235
gcugcauauauuugucgaa

SEQ ID NO: 21539 - RNA, 19 nt, Artificial Sequence
  Description of Artificial Sequence: Synthetic oligonucleotide
  Antisense strand to SEQ ID NO: 21538
uucgacaaauauaugcagc

SEQ ID NO: 21540 - RNA, 19 nt, Artificial Sequence
  Description of Artificial Sequence: Synthetic oligonucleotide
  Sense strand starting at position 1326 of SEQ ID NO: 235
agaguuugucuccacuaaa

SEQ ID NO: 21541 - RNA, 19 nt, Artificial Sequence
  Description of Artificial Sequence: Synthetic oligonucleotide
  Antisense strand to SEQ ID NO: 21540
uuuaguggagacaaacucu

SEQ ID NO: 21542 - RNA, 19 nt, Artificial Sequence
  Description of Artificial Sequence: Synthetic oligonucleotide
  Sense strand starting at position 1329 of SEQ ID NO: 235
guuugucuccacuaaauaa

SEQ ID NO: 21543 - RNA, 19 nt, Artificial Sequence
  Description of Artificial Sequence: Synthetic oligonucleotide
  Antisense strand to SEQ ID NO: 21542
uuauuuaguggagacaaac

SEQ ID NO: 21544 - RNA, 19 nt, Artificial Sequence
  Description of Artificial Sequence: Synthetic oligonucleotide
  Sense strand starting at position 1375 of SEQ ID NO: 235
aagaaauguuucuagaugu

SEQ ID NO: 21545 - RNA, 19 nt, Artificial Sequence
  Description of Artificial Sequence: Synthetic oligonucleotide
  Antisense strand to SEQ ID NO: 21544
acaucuagaaacauuucuu

SEQ ID NO: 21546 - RNA, 19 nt, Artificial Sequence
  Description of Artificial Sequence: Synthetic oligonucleotide
  Sense strand starting at position 1381 of SEQ ID NO: 235
uguuucuagauguaggacu

SEQ ID NO: 21547 - RNA, 19 nt, Artificial Sequence
  Description of Artificial Sequence: Synthetic oligonucleotide
  Antisense strand to SEQ ID NO: 21546
aguccuacaucuagaaaca

SEQ ID NO: 21548 - RNA, 19 nt, Artificial Sequence
  Description of Artificial Sequence: Synthetic oligonucleotide
  Sense strand starting at position 1383 of SEQ ID NO: 235
uuucuagauguaggacuaa

SEQ ID NO: 21549 - RNA, 19 nt, Artificial Sequence
  Description of Artificial Sequence: Synthetic oligonucleotide
  Antisense strand to SEQ ID NO: 21548
uuaguccuacaucuagaaa

SEQ ID NO: 21550 - RNA, 19 nt, Artificial Sequence
  Description of Artificial Sequence: Synthetic oligonucleotide
  Sense strand starting at position 1420 of SEQ ID NO: 235
gggcaaagaaagugguaaa

SEQ ID NO: 21551 - RNA, 19 nt, Artificial Sequence
  Description of Artificial Sequence: Synthetic oligonucleotide
  Antisense strand to SEQ ID NO: 21550
uuuaccacuuucuuugccc

SEQ ID NO: 21552 - RNA, 19 nt, Artificial Sequence
  Description of Artificial Sequence: Synthetic oligonucleotide
  Sense strand starting at position 1431 of SEQ ID NO: 235
gugguaaacauguggguac

SEQ ID NO: 21553 - RNA, 19 nt, Artificial Sequence
  Description of Artificial Sequence: Synthetic oligonucleotide
  Antisense strand to SEQ ID NO: 21552
guacccacauguuuaccac

SEQ ID NO: 21554 - RNA, 19 nt, Artificial Sequence
  Description of Artificial Sequence: Synthetic oligonucleotide
  Sense strand starting at position 1433 of SEQ ID NO: 235
gguaaacauguggguacau

SEQ ID NO: 21555 - RNA, 19 nt, Artificial Sequence
  Description of Artificial Sequence: Synthetic oligonucleotide
  Antisense strand to SEQ ID NO: 21554
auguacccacauguuuacc

SEQ ID NO: 21556 - RNA, 19 nt, Artificial Sequence
  Description of Artificial Sequence: Synthetic oligonucleotide
  Sense strand starting at position 1741 of SEQ ID NO: 235
gugugucccagcuguggaa

SEQ ID NO: 21557 - RNA, 19 nt, Artificial Sequence
  Description of Artificial Sequence: Synthetic oligonucleotide
  Antisense strand to SEQ ID NO: 21556
uuccacagcugggacacac

SEQ ID NO: 21558 - RNA, 19 nt, Artificial Sequence
  Description of Artificial Sequence: Synthetic oligonucleotide
  Sense strand starting at position 1811 of SEQ ID NO: 235
ugaagaccucuuuguggga

SEQ ID NO: 21559 - RNA, 19 nt, Artificial Sequence
  Description of Artificial Sequence: Synthetic oligonucleotide
  Antisense strand to SEQ ID NO: 21558
ucccacaaagaggucuuca

SEQ ID NO: 21560 - RNA, 19 nt, Artificial Sequence
  Description of Artificial Sequence: Synthetic oligonucleotide
  Sense strand starting at position 1818 of SEQ ID NO: 235
cucuuugugggagaaguua

SEQ ID NO: 21561 - RNA, 19 nt, Artificial Sequence
  Description of Artificial Sequence: Synthetic oligonucleotide
  Antisense strand to SEQ ID NO: 21560
uaacuucucccacaaagag

SEQ ID NO: 21562 - RNA, 19 nt, Artificial Sequence
  Description of Artificial Sequence: Synthetic oligonucleotide
  Sense strand starting at position 1826 of SEQ ID NO: 235
gggagaaguuaccuggagu

SEQ ID NO: 21563 - RNA, 19 nt, Artificial Sequence
  Description of Artificial Sequence: Synthetic oligonucleotide
  Antisense strand to SEQ ID NO: 21562
acuccagguaacuucuccc

SEQ ID NO: 21564 - RNA, 19 nt, Artificial Sequence
  Description of Artificial Sequence: Synthetic oligonucleotide
  Sense strand starting at position 1827 of SEQ ID NO: 235
ggagaaguuaccuggaguu

SEQ ID NO: 21565 - RNA, 19 nt, Artificial Sequence
  Description of Artificial Sequence: Synthetic oligonucleotide
  Antisense strand to SEQ ID NO: 21564
aacuccagguaacuucucc

SEQ ID NO: 21566 - RNA, 19 nt, Artificial Sequence
  Description of Artificial Sequence: Synthetic oligonucleotide
  Sense strand starting at position 2319 of SEQ ID NO: 235
agccauaauccuggguaca

SEQ ID NO: 21567 - RNA, 19 nt, Artificial Sequence
  Description of Artificial Sequence: Synthetic oligonucleotide
  Antisense strand to SEQ ID NO: 21566
uguacccaggauuauggcu

SEQ ID NO: 21568 - RNA, 19 nt, Artificial Sequence
  Description of Artificial Sequence: Synthetic oligonucleotide
  Sense strand starting at position 2320 of SEQ ID NO: 235
gccauaauccuggguacac

SEQ ID NO: 21569 - RNA, 19 nt, Artificial Sequence
  Description of Artificial Sequence: Synthetic oligonucleotide
  Antisense strand to SEQ ID NO: 21568
guguacccaggauuauggc

SEQ ID NO: 21570 - RNA, 19 nt, Artificial Sequence
  Description of Artificial Sequence: Synthetic oligonucleotide
  Sense strand starting at position 2321 of SEQ ID NO: 235
ccauaauccuggguacaca

SEQ ID NO: 21571 - RNA, 19 nt, Artificial Sequence
  Description of Artificial Sequence: Synthetic oligonucleotide
  Antisense strand to SEQ ID NO: 21570
uguguacccaggauuaugg

SEQ ID NO: 21572 - RNA, 19 nt, Artificial Sequence
  Description of Artificial Sequence: Synthetic oligonucleotide
  Sense strand starting at position 2482 of SEQ ID NO: 235
ggcuuauaaccuugggagu

SEQ ID NO: 21573 - RNA, 19 nt, Artificial Sequence
  Description of Artificial Sequence: Synthetic oligonucleotide
  Antisense strand to SEQ ID NO: 21572
acucccaagguuauaagcc

SEQ ID NO: 21574 - RNA, 19 nt, Artificial Sequence
  Description of Artificial Sequence: Synthetic oligonucleotide
  Sense strand starting at position 2483 of SEQ ID NO: 235
gcuuauaaccuugggaguu

SEQ ID NO: 21575 - RNA, 19 nt, Artificial Sequence
  Description of Artificial Sequence: Synthetic oligonucleotide
  Antisense strand to SEQ ID NO: 21574
aacucccaagguuauaagc

SEQ ID NO: 21576 - RNA, 19 nt, Artificial Sequence
  Description of Artificial Sequence: Synthetic oligonucleotide
  Sense strand starting at position 2543 of SEQ ID NO: 235
aacugaugcuuucuggaag

SEQ ID NO: 21577 - RNA, 19 nt, Artificial Sequence
  Description of Artificial Sequence: Synthetic oligonucleotide
  Antisense strand to SEQ ID NO: 21576
cuuccagaaagcaucaguu

SEQ ID NO: 21578 - RNA, 19 nt, Artificial Sequence
  Description of Artificial Sequence: Synthetic oligonucleotide
  Sense strand starting at position 2736 of SEQ ID NO: 235
caguguuagccuggagcca

SEQ ID NO: 21579 - RNA, 19 nt, Artificial Sequence
  Description of Artificial Sequence: Synthetic oligonucleotide
  Antisense strand to SEQ ID NO: 21578
uggcuccaggcuaacacug

SEQ ID NO: 21580 - RNA, 19 nt, Artificial Sequence
  Description of Artificial Sequence: Synthetic oligonucleotide
  Sense strand starting at position 3240 of SEQ ID NO: 235
aagugaaaugcucggcaaa

SEQ ID NO: 21581 - RNA, 19 nt, Artificial Sequence
  Description of Artificial Sequence: Synthetic oligonucleotide
  Antisense strand to SEQ ID NO: 21580
uuugccgagcauuucacuu

SEQ ID NO: 21582 - RNA, 19 nt, Artificial Sequence
  Description of Artificial Sequence: Synthetic oligonucleotide
  Sense strand starting at position 3241 of SEQ ID NO: 235
agugaaaugcucggcaaag

SEQ ID NO: 21583 - RNA, 19 nt, Artificial Sequence
  Description of Artificial Sequence: Synthetic oligonucleotide
  Antisense strand to SEQ ID NO: 21582
cuuugccgagcauuucacu

SEQ ID NO: 21584 - RNA, 19 nt, Artificial Sequence
  Description of Artificial Sequence: Synthetic oligonucleotide
  Sense strand starting at position 3242 of SEQ ID NO: 235
gugaaaugcucggcaaagu

SEQ ID NO: 21585 - RNA, 19 nt, Artificial Sequence
  Description of Artificial Sequence: Synthetic oligonucleotide
  Antisense strand to SEQ ID NO: 21584
acuuugccgagcauuucac

SEQ ID NO: 21586 - RNA, 19 nt, Artificial Sequence
  Description of Artificial Sequence: Synthetic oligonucleotide
  Sense strand starting at position 3243 of SEQ ID NO: 235
ugaaaugcucggcaaaguu

SEQ ID NO: 21587 - RNA, 19 nt, Artificial Sequence
  Description of Artificial Sequence: Synthetic oligonucleotide
  Antisense strand to SEQ ID NO: 21586
aacuuugccgagcauuuca

SEQ ID NO: 21588 - RNA, 19 nt, Artificial Sequence
  Description of Artificial Sequence: Synthetic oligonucleotide
  Sense strand starting at position 3302 of SEQ ID NO: 235
gcuugaagacagugucuuu

SEQ ID NO: 21589 - RNA, 19 nt, Artificial Sequence
  Description of Artificial Sequence: Synthetic oligonucleotide
  Antisense strand to SEQ ID NO: 21588
aaagacacugucuucaagc

SEQ ID NO: 21590 - RNA, 19 nt, Artificial Sequence
  Description of Artificial Sequence: Synthetic oligonucleotide
  Sense strand starting at position 3307 of SEQ ID NO: 235
aagacagugucuuugaauu

SEQ ID NO: 21591 - RNA, 19 nt, Artificial Sequence
  Description of Artificial Sequence: Synthetic oligonucleotide
  Antisense strand to SEQ ID NO: 21590
aauucaaagacacugucuu

SEQ ID NO: 21592 - RNA, 19 nt, Artificial Sequence
  Description of Artificial Sequence: Synthetic oligonucleotide
  Sense strand starting at position 3512 of SEQ ID NO: 235
agaccuagauguccacaua

SEQ ID NO: 21593 - RNA, 19 nt, Artificial Sequence
  Description of Artificial Sequence: Synthetic oligonucleotide
  Antisense strand to SEQ ID NO: 21592
uauguggacaucuaggucu

SEQ ID NO: 21594 - RNA, 19 nt, Artificial Sequence
  Description of Artificial Sequence: Synthetic oligonucleotide
  Sense strand starting at position 8 of SEQ ID NO: 236
uugguaagccuugguauuu

SEQ ID NO: 21595 - RNA, 19 nt, Artificial Sequence
  Description of Artificial Sequence: Synthetic oligonucleotide
  Antisense strand to SEQ ID NO: 21594
aaauaccaaggcuuaccaa

SEQ ID NO: 21596 - RNA, 19 nt, Artificial Sequence
  Description of Artificial Sequence: Synthetic oligonucleotide
  Sense strand starting at position 279 of SEQ ID NO: 236
gugucuaccaaaggaagaa

SEQ ID NO: 21597 - RNA, 19 nt, Artificial Sequence
  Description of Artificial Sequence: Synthetic oligonucleotide
  Antisense strand to SEQ ID NO: 21596
uucuuccuuugguagacac

SEQ ID NO: 21598 - RNA, 19 nt, Artificial Sequence
  Description of Artificial Sequence: Synthetic oligonucleotide
  Sense strand starting at position 426 of SEQ ID NO: 236
aaguccucaccuggugaga

SEQ ID NO: 21599 - RNA, 19 nt, Artificial Sequence
  Description of Artificial Sequence: Synthetic oligonucleotide
  Antisense strand to SEQ ID NO: 21598
ucucaccaggugaggacuu

SEQ ID NO: 21600 - RNA, 19 nt, Artificial Sequence
  Description of Artificial Sequence: Synthetic oligonucleotide
  Sense strand starting at position 441 of SEQ ID NO: 236
gagagcgcuguguucugua

SEQ ID NO: 21601 - RNA, 19 nt, Artificial Sequence
  Description of Artificial Sequence: Synthetic oligonucleotide
  Antisense strand to SEQ ID NO: 21600
uacagaacacagcgcucuc

SEQ ID NO: 21602 - RNA, 19 nt, Artificial Sequence
  Description of Artificial Sequence: Synthetic oligonucleotide
  Sense strand starting at position 469 of SEQ ID NO: 236
ugacaaugaugcuuuggua

SEQ ID NO: 21603 - RNA, 19 nt, Artificial Sequence
  Description of Artificial Sequence: Synthetic oligonucleotide
  Antisense strand to SEQ ID NO: 21602
uaccaaagcaucauuguca

SEQ ID NO: 21604 - RNA, 19 nt, Artificial Sequence
  Description of Artificial Sequence: Synthetic oligonucleotide
  Sense strand starting at position 700 of SEQ ID NO: 236
agcuauucuggaugacauc

SEQ ID NO: 21605 - RNA, 19 nt, Artificial Sequence
  Description of Artificial Sequence: Synthetic oligonucleotide
  Antisense strand to SEQ ID NO: 21604
gaugucauccagaauagcu

SEQ ID NO: 21606 - RNA, 19 nt, Artificial Sequence
  Description of Artificial Sequence: Synthetic oligonucleotide
  Sense strand starting at position 767 of SEQ ID NO: 236
ucuggaaagugggauuuau

SEQ ID NO: 21607 - RNA, 19 nt, Artificial Sequence
  Description of Artificial Sequence: Synthetic oligonucleotide
  Antisense strand to SEQ ID NO: 21606
auaaaucccacuuuccaga

SEQ ID NO: 21608 - RNA, 19 nt, Artificial Sequence
  Description of Artificial Sequence: Synthetic oligonucleotide
  Sense strand starting at position 783 of SEQ ID NO: 236
uaugauguagcccagauga

SEQ ID NO: 21609 - RNA, 19 nt, Artificial Sequence
  Description of Artificial Sequence: Synthetic oligonucleotide
  Antisense strand to SEQ ID NO: 21608
ucaucugggcuacaucaua

SEQ ID NO: 21610 - RNA, 19 nt, Artificial Sequence
  Description of Artificial Sequence: Synthetic oligonucleotide
  Sense strand starting at position 785 of SEQ ID NO: 236
ugauguagcccagaugaca

SEQ ID NO: 21611 - RNA, 19 nt, Artificial Sequence
  Description of Artificial Sequence: Synthetic oligonucleotide
  Antisense strand to SEQ ID NO: 21610
ugucaucugggcuacauca

SEQ ID NO: 21612 - RNA, 19 nt, Artificial Sequence
  Description of Artificial Sequence: Synthetic oligonucleotide
  Sense strand starting at position 943 of SEQ ID NO: 236
gauuguccaguugaaacau

SEQ ID NO: 21613 - RNA, 19 nt, Artificial Sequence
  Description of Artificial Sequence: Synthetic oligonucleotide
  Antisense strand to SEQ ID NO: 21612
auguuucaacuggacaauc

SEQ ID NO: 21614 - RNA, 19 nt, Artificial Sequence
  Description of Artificial Sequence: Synthetic oligonucleotide
  Sense strand starting at position 1016 of SEQ ID NO: 236
gugcuaacacuuggacaaa

SEQ ID NO: 21615 - RNA, 19 nt, Artificial Sequence
  Description of Artificial Sequence: Synthetic oligonucleotide
  Antisense strand to SEQ ID NO: 21614
uuuguccaaguguuagcac

SEQ ID NO: 21616 - RNA, 19 nt, Artificial Sequence
  Description of Artificial Sequence: Synthetic oligonucleotide
  Sense strand starting at position 1082 of SEQ ID NO: 236
gggacaaauuuauaaaugu

SEQ ID NO: 21617 - RNA, 19 nt, Artificial Sequence
  Description of Artificial Sequence: Synthetic oligonucleotide
  Antisense strand to SEQ ID NO: 21616
acauuuauaaauuuguccc

SEQ ID NO: 21618 - RNA, 19 nt, Artificial Sequence
  Description of Artificial Sequence: Synthetic oligonucleotide
  Sense strand starting at position 1432 of SEQ ID NO: 236
uuucuacucuauguagaca

SEQ ID NO: 21619 - RNA, 19 nt, Artificial Sequence
  Description of Artificial Sequence: Synthetic oligonucleotide
  Antisense strand to SEQ ID NO: 21618
ugucuacauagaguagaaa

SEQ ID NO: 21620 - RNA, 19 nt, Artificial Sequence
  Description of Artificial Sequence: Synthetic oligonucleotide
  Sense strand starting at position 1737 of SEQ ID NO: 236
acuaaaucaugguccugua

SEQ ID NO: 21621 - RNA, 19 nt, Artificial Sequence
  Description of Artificial Sequence: Synthetic oligonucleotide
  Antisense strand to SEQ ID NO: 21620
uacaggaccaugauuuagu

SEQ ID NO: 21622 - RNA, 19 nt, Artificial Sequence
  Description of Artificial Sequence: Synthetic oligonucleotide
  Sense strand starting at position 1750 of SEQ ID NO: 236
ccuguaacaugaucuggua

SEQ ID NO: 21623 - RNA, 19 nt, Artificial Sequence
  Description of Artificial Sequence: Synthetic oligonucleotide
  Antisense strand to SEQ ID NO: 21622
uaccagaucauguuacagg

SEQ ID NO: 21624 - RNA, 19 nt, Artificial Sequence
  Description of Artificial Sequence: Synthetic oligonucleotide
  Sense strand starting at position 1763 of SEQ ID NO: 236
cugguaggguacucaauua

SEQ ID NO: 21625 - RNA, 19 nt, Artificial Sequence
  Description of Artificial Sequence: Synthetic oligonucleotide
  Antisense strand to SEQ ID NO: 21624
uaauugaguacccuaccag

SEQ ID NO: 21626 - RNA, 19 nt, Artificial Sequence
  Description of Artificial Sequence: Synthetic oligonucleotide
  Sense strand starting at position 1904 of SEQ ID NO: 236
uccagagaugcugaggagu

SEQ ID NO: 21627 - RNA, 19 nt, Artificial Sequence
  Description of Artificial Sequence: Synthetic oligonucleotide
  Antisense strand to SEQ ID NO: 21626
acuccucagcaucucugga

SEQ ID NO: 21628 - RNA, 19 nt, Artificial Sequence
  Description of Artificial Sequence: Synthetic oligonucleotide
  Sense strand starting at position 1921 of SEQ ID NO: 236
gugagaaguucuccauauu

SEQ ID NO: 21629 - RNA, 19 nt, Artificial Sequence
  Description of Artificial Sequence: Synthetic oligonucleotide
  Antisense strand to SEQ ID NO: 21628
aauauggagaacuucucac

SEQ ID NO: 21630 - RNA, 19 nt, Artificial Sequence
  Description of Artificial Sequence: Synthetic oligonucleotide
  Sense strand starting at position 1922 of SEQ ID NO: 236
ugagaaguucuccauauuc

SEQ ID NO: 21631 - RNA, 19 nt, Artificial Sequence
  Description of Artificial Sequence: Synthetic oligonucleotide
  Antisense strand to SEQ ID NO: 21630
gaauauggagaacuucuca

SEQ ID NO: 21632 - RNA, 19 nt, Artificial Sequence
  Description of Artificial Sequence: Synthetic oligonucleotide
  Sense strand starting at position 1924 of SEQ ID NO: 236
agaaguucuccauauucug

SEQ ID NO: 21633 - RNA, 19 nt, Artificial Sequence
  Description of Artificial Sequence: Synthetic oligonucleotide
  Antisense strand to SEQ ID NO: 21632
cagaauauggagaacuucu

SEQ ID NO: 21634 - RNA, 19 nt, Artificial Sequence
  Description of Artificial Sequence: Synthetic oligonucleotide
  Sense strand starting at position 1990 of SEQ ID NO: 236
cugguuuguccagaggaua

SEQ ID NO: 21635 - RNA, 19 nt, Artificial Sequence
  Description of Artificial Sequence: Synthetic oligonucleotide
  Antisense strand to SEQ ID NO: 21634
uauccucuggacaaaccag

SEQ ID NO: 21636 - RNA, 19 nt, Artificial Sequence
  Description of Artificial Sequence: Synthetic oligonucleotide
  Sense strand starting at position 2059 of SEQ ID NO: 236
uagguuacccuuuggaaga

SEQ ID NO: 21637 - RNA, 19 nt, Artificial Sequence
  Description of Artificial Sequence: Synthetic oligonucleotide
  Antisense strand to SEQ ID NO: 21636
ucuuccaaaggguaaccua

SEQ ID NO: 21638 - RNA, 19 nt, Artificial Sequence
  Description of Artificial Sequence: Synthetic oligonucleotide
  Sense strand starting at position 2196 of SEQ ID NO: 236
uagugaugcugucuauuug

SEQ ID NO: 21639 - RNA, 19 nt, Artificial Sequence
  Description of Artificial Sequence: Synthetic oligonucleotide
  Antisense strand to SEQ ID NO: 21638
caaauagacagcaucacua

SEQ ID NO: 21640 - RNA, 19 nt, Artificial Sequence
  Description of Artificial Sequence: Synthetic oligonucleotide
  Sense strand starting at position 2197 of SEQ ID NO: 236
agugaugcugucuauuugu

SEQ ID NO: 21641 - RNA, 19 nt, Artificial Sequence
  Description of Artificial Sequence: Synthetic oligonucleotide
  Antisense strand to SEQ ID NO: 21640
acaaauagacagcaucacu

SEQ ID NO: 21642 - RNA, 19 nt, Artificial Sequence
  Description of Artificial Sequence: Synthetic oligonucleotide
  Sense strand starting at position 2535 of SEQ ID NO: 236
gcuagacaaacauggugaa

SEQ ID NO: 21643 - RNA, 19 nt, Artificial Sequence
  Description of Artificial Sequence: Synthetic oligonucleotide
  Antisense strand to SEQ ID NO: 21642
uucaccauguuugucuagc

SEQ ID NO: 21644 - RNA, 19 nt, Artificial Sequence
  Description of Artificial Sequence: Synthetic oligonucleotide
  Sense strand starting at position 2877 of SEQ ID NO: 236
ugugaacuauuugaaggua

SEQ ID NO: 21645 - RNA, 19 nt, Artificial Sequence
  Description of Artificial Sequence: Synthetic oligonucleotide
  Antisense strand to SEQ ID NO: 21644
uaccuucaaauaguucaca

SEQ ID NO: 21646 - RNA, 19 nt, Artificial Sequence
  Description of Artificial Sequence: Synthetic oligonucleotide
  Sense strand starting at position 3013 of SEQ ID NO: 236
auggguggcuuacucaaua

SEQ ID NO: 21647 - RNA, 19 nt, Artificial Sequence
  Description of Artificial Sequence: Synthetic oligonucleotide
  Antisense strand to SEQ ID NO: 21646
uauugaguaagccacccau

SEQ ID NO: 21648 - RNA, 19 nt, Artificial Sequence
  Description of Artificial Sequence: Synthetic oligonucleotide
  Sense strand starting at position 3133 of SEQ ID NO: 236
acuaacgagguguggaaua

SEQ ID NO: 21649 - RNA, 19 nt, Artificial Sequence
  Description of Artificial Sequence: Synthetic oligonucleotide
  Antisense strand to SEQ ID NO: 21648
uauuccacaccucguuagu

SEQ ID NO: 21650 - RNA, 19 nt, Artificial Sequence
  Description of Artificial Sequence: Synthetic oligonucleotide
  Sense strand starting at position 3249 of SEQ ID NO: 236
cuagauggcagguauguuu

SEQ ID NO: 21651 - RNA, 19 nt, Artificial Sequence
  Description of Artificial Sequence: Synthetic oligonucleotide
  Antisense strand to SEQ ID NO: 21650
aaacauaccugccaucuag

SEQ ID NO: 21652 - RNA, 19 nt, Artificial Sequence
  Description of Artificial Sequence: Synthetic oligonucleotide
  Sense strand starting at position 3347 of SEQ ID NO: 236
gugugaguuagcuucugca

SEQ ID NO: 21653 - RNA, 19 nt, Artificial Sequence
  Description of Artificial Sequence: Synthetic oligonucleotide
  Antisense strand to SEQ ID NO: 21652
ugcagaagcuaacucacac

SEQ ID NO: 21654 - RNA, 19 nt, Artificial Sequence
  Description of Artificial Sequence: Synthetic oligonucleotide
  Sense strand starting at position 3379 of SEQ ID NO: 236
aguugucuuccugugugua

SEQ ID NO: 21655 - RNA, 19 nt, Artificial Sequence
  Description of Artificial Sequence: Synthetic oligonucleotide
  Antisense strand to SEQ ID NO: 21654
uacacacaggaagacaacu

SEQ ID NO: 21656 - RNA, 19 nt, Artificial Sequence
  Description of Artificial Sequence: Synthetic oligonucleotide
  Sense strand starting at position 3383 of SEQ ID NO: 236
gucuuccuguguguauuua

SEQ ID NO: 21657 - RNA, 19 nt, Artificial Sequence
  Description of Artificial Sequence: Synthetic oligonucleotide
  Antisense strand to SEQ ID NO: 21656
uaaauacacacaggaagac

SEQ ID NO: 21658 - RNA, 19 nt, Artificial Sequence
  Description of Artificial Sequence: Synthetic oligonucleotide
  Sense strand starting at position 3384 of SEQ ID NO: 236
ucuuccuguguguauuuau

SEQ ID NO: 21659 - RNA, 19 nt, Artificial Sequence
  Description of Artificial Sequence: Synthetic oligonucleotide
  Antisense strand to SEQ ID NO: 21658
auaaauacacacaggaaga

SEQ ID NO: 21660 - RNA, 19 nt, Artificial Sequence
  Description of Artificial Sequence: Synthetic oligonucleotide
  Sense strand starting at position 3391 of SEQ ID NO: 236
guguguauuuauucacggu

SEQ ID NO: 21661 - RNA, 19 nt, Artificial Sequence
  Description of Artificial Sequence: Synthetic oligonucleotide
  Antisense strand to SEQ ID NO: 21660
accgugaauaaauacacac

SEQ ID NO: 21662 - RNA, 19 nt, Artificial Sequence
  Description of Artificial Sequence: Synthetic oligonucleotide
  Sense strand starting at position 3462 of SEQ ID NO: 236
cagauagccugguuuggaa

SEQ ID NO: 21663 - RNA, 19 nt, Artificial Sequence
  Description of Artificial Sequence: Synthetic oligonucleotide
  Antisense strand to SEQ ID NO: 21662
uuccaaaccaggcuaucug

SEQ ID NO: 21664 - RNA, 19 nt, Artificial Sequence
  Description of Artificial Sequence: Synthetic oligonucleotide
  Sense strand starting at position 3477 of SEQ ID NO: 236
ggaacauuagcauguauug

SEQ ID NO: 21665 - RNA, 19 nt, Artificial Sequence
  Description of Artificial Sequence: Synthetic oligonucleotide
  Antisense strand to SEQ ID NO: 21664
caauacaugcuaauguucc

SEQ ID NO: 21666 - RNA, 19 nt, Artificial Sequence
  Description of Artificial Sequence: Synthetic oligonucleotide
  Sense strand starting at position 3586 of SEQ ID NO: 236
ugggcaucagcuuauguga

SEQ ID NO: 21667 - RNA, 19 nt, Artificial Sequence
  Description of Artificial Sequence: Synthetic oligonucleotide
  Antisense strand to SEQ ID NO: 21666
ucacauaagcugaugccca

SEQ ID NO: 21668 - RNA, 19 nt, Artificial Sequence
  Description of Artificial Sequence: Synthetic oligonucleotide
  Sense strand starting at position 3636 of SEQ ID NO: 236
ugugauauugggcaaaucu

SEQ ID NO: 21669 - RNA, 19 nt, Artificial Sequence
  Description of Artificial Sequence: Synthetic oligonucleotide
  Antisense strand to SEQ ID NO: 21668
agauuugcccaauaucaca

SEQ ID NO: 21670 - RNA, 19 nt, Artificial Sequence
  Description of Artificial Sequence: Synthetic oligonucleotide
  Sense strand starting at position 3673 of SEQ ID NO: 236
ccauguuauuaguuuagac

SEQ ID NO: 21671 - RNA, 19 nt, Artificial Sequence
  Description of Artificial Sequence: Synthetic oligonucleotide
  Antisense strand to SEQ ID NO: 21670
gucuaaacuaauaacaugg

SEQ ID NO: 21672 - RNA, 19 nt, Artificial Sequence
  Description of Artificial Sequence: Synthetic oligonucleotide
  Sense strand starting at position 3762 of SEQ ID NO: 236
gugagugaugcacacagga

SEQ ID NO: 21673 - RNA, 19 nt, Artificial Sequence
  Description of Artificial Sequence: Synthetic oligonucleotide
  Antisense strand to SEQ ID NO: 21672
uccugugugcaucacucac

SEQ ID NO: 21674 - RNA, 19 nt, Artificial Sequence
  Description of Artificial Sequence: Synthetic oligonucleotide
  Sense strand starting at position 3885 of SEQ ID NO: 237
ggaucacuugugggaacau

SEQ ID NO: 21675 - RNA, 19 nt, Artificial Sequence
  Description of Artificial Sequence: Synthetic oligonucleotide
  Antisense strand to SEQ ID NO: 21674
auguucccacaagugaucc

SEQ ID NO: 21676 - RNA, 19 nt, Artificial Sequence
  Description of Artificial Sequence: Synthetic oligonucleotide
  Sense strand starting at position 3769 of SEQ ID NO: 237
cccauuagagauggagcuu

SEQ ID NO: 21677 - RNA, 19 nt, Artificial Sequence
  Description of Artificial Sequence: Synthetic oligonucleotide
  Antisense strand to SEQ ID NO: 21676
aagcuccaucucuaauggg

SEQ ID NO: 21678 - RNA, 19 nt, Artificial Sequence
  Description of Artificial Sequence: Synthetic oligonucleotide
  Sense strand starting at position 3671 of SEQ ID NO: 237
guugaagaaucugaauuua

SEQ ID NO: 21679 - RNA, 19 nt, Artificial Sequence
  Description of Artificial Sequence: Synthetic oligonucleotide
  Antisense strand to SEQ ID NO: 21678
uaaauucagauucuucaac

SEQ ID NO: 21680 - RNA, 19 nt, Artificial Sequence
  Description of Artificial Sequence: Synthetic oligonucleotide
  Sense strand starting at position 3636 of SEQ ID NO: 237
gcagauuuguguguaucau

SEQ ID NO: 21681 - RNA, 19 nt, Artificial Sequence
  Description of Artificial Sequence: Synthetic oligonucleotide
  Antisense strand to SEQ ID NO: 21680
augauacacacaaaucugc

SEQ ID NO: 21682 - RNA, 19 nt, Artificial Sequence
  Description of Artificial Sequence: Synthetic oligonucleotide
  Sense strand starting at position 3635 of SEQ ID NO: 237
ggcagauuuguguguauca

SEQ ID NO: 21683 - RNA, 19 nt, Artificial Sequence
  Description of Artificial Sequence: Synthetic oligonucleotide
  Antisense strand to SEQ ID NO: 21682
ugauacacacaaaucugcc

SEQ ID NO: 21684 - RNA, 19 nt, Artificial Sequence
  Description of Artificial Sequence: Synthetic oligonucleotide
  Sense strand starting at position 3632 of SEQ ID NO: 237
ugaggcagauuugugugua

SEQ ID NO: 21685 - RNA, 19 nt, Artificial Sequence
  Description of Artificial Sequence: Synthetic oligonucleotide
  Antisense strand to SEQ ID NO: 21684
uacacacaaaucugccuca

SEQ ID NO: 21686 - RNA, 19 nt, Artificial Sequence
  Description of Artificial Sequence: Synthetic oligonucleotide
  Sense strand starting at position 3276 of SEQ ID NO: 237
guuguucuucuguuuguuu

SEQ ID NO: 21687 - RNA, 19 nt, Artificial Sequence
  Description of Artificial Sequence: Synthetic oligonucleotide
  Antisense strand to SEQ ID NO: 21686
aaacaaacagaagaacaac

SEQ ID NO: 21688 - RNA, 19 nt, Artificial Sequence
  Description of Artificial Sequence: Synthetic oligonucleotide
  Sense strand starting at position 3224 of SEQ ID NO: 237
ucugaauaucuuggacuuu

SEQ ID NO: 21689 - RNA, 19 nt, Artificial Sequence
  Description of Artificial Sequence: Synthetic oligonucleotide
  Antisense strand to SEQ ID NO: 21688
aaaguccaagauauucaga

SEQ ID NO: 21690 - RNA, 19 nt, Artificial Sequence
  Description of Artificial Sequence: Synthetic oligonucleotide
  Sense strand starting at position 3163 of SEQ ID NO: 237
gugaauaugguuggacaca

SEQ ID NO: 21691 - RNA, 19 nt, Artificial Sequence
  Description of Artificial Sequence: Synthetic oligonucleotide
  Antisense strand to SEQ ID NO: 21690
uguguccaaccauauucac

SEQ ID NO: 21692 - RNA, 19 nt, Artificial Sequence
  Description of Artificial Sequence: Synthetic oligonucleotide
  Sense strand starting at position 3162 of SEQ ID NO: 237
ggugaauaugguuggacac

SEQ ID NO: 21693 - RNA, 19 nt, Artificial Sequence
  Description of Artificial Sequence: Synthetic oligonucleotide
  Antisense strand to SEQ ID NO: 21692
guguccaaccauauucacc

SEQ ID NO: 21694 - RNA, 19 nt, Artificial Sequence
  Description of Artificial Sequence: Synthetic oligonucleotide
  Sense strand starting at position 3161 of SEQ ID NO: 237
gggugaauaugguuggaca

SEQ ID NO: 21695 - RNA, 19 nt, Artificial Sequence
  Description of Artificial Sequence: Synthetic oligonucleotide
  Antisense strand to SEQ ID NO: 21694
uguccaaccauauucaccc

SEQ ID NO: 21696 - RNA, 19 nt, Artificial Sequence
  Description of Artificial Sequence: Synthetic oligonucleotide
  Sense strand starting at position 3139 of SEQ ID NO: 237
gaaguuauucuggaagcuu

SEQ ID NO: 21697 - RNA, 19 nt, Artificial Sequence
  Description of Artificial Sequence: Synthetic oligonucleotide
  Antisense strand to SEQ ID NO: 21696
aagcuuccagaauaacuuc

SEQ ID NO: 21698 - RNA, 19 nt, Artificial Sequence
  Description of Artificial Sequence: Synthetic oligonucleotide
  Sense strand starting at position 3135 of SEQ ID NO: 237
aagugaaguuauucuggaa

SEQ ID NO: 21699 - RNA, 19 nt, Artificial Sequence
  Description of Artificial Sequence: Synthetic oligonucleotide
  Antisense strand to SEQ ID NO: 21698
uuccagaauaacuucacuu

SEQ ID NO: 21700 - RNA, 19 nt, Artificial Sequence
  Description of Artificial Sequence: Synthetic oligonucleotide
  Sense strand starting at position 3027 of SEQ ID NO: 237
gagugaagucuuggaugaa

SEQ ID NO: 21701 - RNA, 19 nt, Artificial Sequence
  Description of Artificial Sequence: Synthetic oligonucleotide
  Antisense strand to SEQ ID NO: 21700
uucauccaagacuucacuc

SEQ ID NO: 21702 - RNA, 19 nt, Artificial Sequence
  Description of Artificial Sequence: Synthetic oligonucleotide
  Sense strand starting at position 2948 of SEQ ID NO: 237
cgaauuagucuuuacuaau

SEQ ID NO: 21703 - RNA, 19 nt, Artificial Sequence
  Description of Artificial Sequence: Synthetic oligonucleotide
  Antisense strand to SEQ ID NO: 21702
auuaguaaagacuaauucg

SEQ ID NO: 21704 - RNA, 19 nt, Artificial Sequence
  Description of Artificial Sequence: Synthetic oligonucleotide
  Sense strand starting at position 2846 of SEQ ID NO: 237
gugucuagcgcaguagaua

SEQ ID NO: 21705 - RNA, 19 nt, Artificial Sequence
  Description of Artificial Sequence: Synthetic oligonucleotide
  Antisense strand to SEQ ID NO: 21704
uaucuacugcgcuagacac

SEQ ID NO: 21706 - RNA, 19 nt, Artificial Sequence
  Description of Artificial Sequence: Synthetic oligonucleotide
  Sense strand starting at position 2660 of SEQ ID NO: 237
ggucggauuuguuccggga

SEQ ID NO: 21707 - RNA, 19 nt, Artificial Sequence
  Description of Artificial Sequence: Synthetic oligonucleotide
  Antisense strand to SEQ ID NO: 21706
ucccggaacaaauccgacc

SEQ ID NO: 21708 - RNA, 19 nt, Artificial Sequence
  Description of Artificial Sequence: Synthetic oligonucleotide
  Sense strand starting at position 2594 of SEQ ID NO: 237
aggucuggaucacuguaaa

SEQ ID NO: 21709 - RNA, 19 nt, Artificial Sequence
  Description of Artificial Sequence: Synthetic oligonucleotide
  Antisense strand to SEQ ID NO: 21708
uuuacagugauccagaccu

SEQ ID NO: 21710 - RNA, 19 nt, Artificial Sequence
  Description of Artificial Sequence: Synthetic oligonucleotide
  Sense strand starting at position 2511 of SEQ ID NO: 237
gcgauuuagguccggagga

SEQ ID NO: 21711 - RNA, 19 nt, Artificial Sequence
  Description of Artificial Sequence: Synthetic oligonucleotide
  Antisense strand to SEQ ID NO: 21710
uccuccggaccuaaaucgc

SEQ ID NO: 21712 - RNA, 19 nt, Artificial Sequence
  Description of Artificial Sequence: Synthetic oligonucleotide
  Sense strand starting at position 1991 of SEQ ID NO: 237
gggccaaagccuuacuuaa

SEQ ID NO: 21713 - RNA, 19 nt, Artificial Sequence
  Description of Artificial Sequence: Synthetic oligonucleotide
  Antisense strand to SEQ ID NO: 21712
uuaaguaaggcuuuggccc

SEQ ID NO: 21714 - RNA, 19 nt, Artificial Sequence
  Description of Artificial Sequence: Synthetic oligonucleotide
  Sense strand starting at position 1417 of SEQ ID NO: 237
uaugguuuaccaugaaagg

SEQ ID NO: 21715 - RNA, 19 nt, Artificial Sequence
  Description of Artificial Sequence: Synthetic oligonucleotide
  Antisense strand to SEQ ID NO: 21714
ccuuucaugguaaaccaua

SEQ ID NO: 21716 - RNA, 19 nt, Artificial Sequence
  Description of Artificial Sequence: Synthetic oligonucleotide
  Sense strand starting at position 1414 of SEQ ID NO: 237
acauaugguuuaccaugaa

SEQ ID NO: 21717 - RNA, 19 nt, Artificial Sequence
  Description of Artificial Sequence: Synthetic oligonucleotide
  Antisense strand to SEQ ID NO: 21716
uucaugguaaaccauaugu

SEQ ID NO: 21718 - RNA, 19 nt, Artificial Sequence
  Description of Artificial Sequence: Synthetic oligonucleotide
  Sense strand starting at position 1278 of SEQ ID NO: 237
cuucuaugugauuacauag

SEQ ID NO: 21719 - RNA, 19 nt, Artificial Sequence
  Description of Artificial Sequence: Synthetic oligonucleotide
  Antisense strand to SEQ ID NO: 21718
cuauguaaucacauagaag

SEQ ID NO: 21720 - RNA, 19 nt, Artificial Sequence
  Description of Artificial Sequence: Synthetic oligonucleotide
  Sense strand starting at position 1277 of SEQ ID NO: 237
acuucuaugugauuacaua

SEQ ID NO: 21721 - RNA, 19 nt, Artificial Sequence
  Description of Artificial Sequence: Synthetic oligonucleotide
  Antisense strand to SEQ ID NO: 21720
uauguaaucacauagaagu

SEQ ID NO: 21722 - RNA, 19 nt, Artificial Sequence
  Description of Artificial Sequence: Synthetic oligonucleotide
  Sense strand starting at position 1272 of SEQ ID NO: 237
gaaugacuucuaugugauu

SEQ ID NO: 21723 - RNA, 19 nt, Artificial Sequence
  Description of Artificial Sequence: Synthetic oligonucleotide
  Antisense strand to SEQ ID NO: 21722
aaucacauagaagucauuc

SEQ ID NO: 21724 - RNA, 19 nt, Artificial Sequence
  Description of Artificial Sequence: Synthetic oligonucleotide
  Sense strand starting at position 1266 of SEQ ID NO: 237
cuaggugaaugacuucuau

SEQ ID NO: 21725 - RNA, 19 nt, Artificial Sequence
  Description of Artificial Sequence: Synthetic oligonucleotide
  Antisense strand to SEQ ID NO: 21724
auagaagucauucaccuag

SEQ ID NO: 21726 - RNA, 19 nt, Artificial Sequence
  Description of Artificial Sequence: Synthetic oligonucleotide
  Sense strand starting at position 1180 of SEQ ID NO: 237
guugaaacuccuugaagac

SEQ ID NO: 21727 - RNA, 19 nt, Artificial Sequence
  Description of Artificial Sequence: Synthetic oligonucleotide
  Antisense strand to SEQ ID NO: 21726
gucuucaaggaguuucaac

SEQ ID NO: 21728 - RNA, 19 nt, Artificial Sequence
  Description of Artificial Sequence: Synthetic oligonucleotide
  Sense strand starting at position 1179 of SEQ ID NO: 237
aguugaaacuccuugaaga

SEQ ID NO: 21729 - RNA, 19 nt, Artificial Sequence
  Description of Artificial Sequence: Synthetic oligonucleotide
  Antisense strand to SEQ ID NO: 21728
ucuucaaggaguuucaacu

SEQ ID NO: 21730 - RNA, 19 nt, Artificial Sequence
  Description of Artificial Sequence: Synthetic oligonucleotide
  Sense strand starting at position 794 of SEQ ID NO: 237
gugauaaggguuuggaauc

SEQ ID NO: 21731 - RNA, 19 nt, Artificial Sequence
  Description of Artificial Sequence: Synthetic oligonucleotide
  Antisense strand to SEQ ID NO: 21730
gauuccaaacccuuaucac

SEQ ID NO: 21732 - RNA, 19 nt, Artificial Sequence
  Description of Artificial Sequence: Synthetic oligonucleotide
  Sense strand starting at position 783 of SEQ ID NO: 237
ccaagugagaggugauaag

SEQ ID NO: 21733 - RNA, 19 nt, Artificial Sequence
  Description of Artificial Sequence: Synthetic oligonucleotide
  Antisense strand to SEQ ID NO: 21732
cuuaucaccucucacuugg

SEQ ID NO: 21734 - RNA, 19 nt, Artificial Sequence
  Description of Artificial Sequence: Synthetic oligonucleotide
  Sense strand starting at position 781 of SEQ ID NO: 237
cuccaagugagaggugaua

SEQ ID NO: 21735 - RNA, 19 nt, Artificial Sequence
  Description of Artificial Sequence: Synthetic oligonucleotide
  Antisense strand to SEQ ID NO: 21734
uaucaccucucacuuggag

SEQ ID NO: 21736 - RNA, 19 nt, Artificial Sequence
  Description of Artificial Sequence: Synthetic oligonucleotide
  Sense strand starting at position 654 of SEQ ID NO: 237
aggcuuagaucaccuggaa

SEQ ID NO: 21737 - RNA, 19 nt, Artificial Sequence
  Description of Artificial Sequence: Synthetic oligonucleotide
  Antisense strand to SEQ ID NO: 21736
uuccaggugaucuaagccu

SEQ ID NO: 21738 - RNA, 19 nt, Artificial Sequence
  Description of Artificial Sequence: Synthetic oligonucleotide
  Sense strand starting at position 625 of SEQ ID NO: 237
guuaauuaacuagguauga

SEQ ID NO: 21739 - RNA, 19 nt, Artificial Sequence
  Description of Artificial Sequence: Synthetic oligonucleotide
  Antisense strand to SEQ ID NO: 21738
ucauaccuaguuaauuaac

SEQ ID NO: 21740 - RNA, 19 nt, Artificial Sequence
  Description of Artificial Sequence: Synthetic oligonucleotide
  Sense strand starting at position 614 of SEQ ID NO: 237
aacagaguguaguuaauua

SEQ ID NO: 21741 - RNA, 19 nt, Artificial Sequence
  Description of Artificial Sequence: Synthetic oligonucleotide
  Antisense strand to SEQ ID NO: 21740
uaauuaacuacacucuguu

SEQ ID NO: 21742 - RNA, 19 nt, Artificial Sequence
  Description of Artificial Sequence: Synthetic oligonucleotide
  Sense strand starting at position 437 of SEQ ID NO: 237
gugauacaaguguaagacu

SEQ ID NO: 21743 - RNA, 19 nt, Artificial Sequence
  Description of Artificial Sequence: Synthetic oligonucleotide
  Antisense strand to SEQ ID NO: 21742
agucuuacacuuguaucac

SEQ ID NO: 21744 - RNA, 19 nt, Artificial Sequence
  Description of Artificial Sequence: Synthetic oligonucleotide
  Sense strand starting at position 435 of SEQ ID NO: 237
augugauacaaguguaaga

SEQ ID NO: 21745 - RNA, 19 nt, Artificial Sequence
  Description of Artificial Sequence: Synthetic oligonucleotide
  Antisense strand to SEQ ID NO: 21744
ucuuacacuuguaucacau

SEQ ID NO: 21746 - RNA, 19 nt, Artificial Sequence
  Description of Artificial Sequence: Synthetic oligonucleotide
  Sense strand starting at position 424 of SEQ ID NO: 237
ugaacaggccaaugugaua

SEQ ID NO: 21747 - RNA, 19 nt, Artificial Sequence
  Description of Artificial Sequence: Synthetic oligonucleotide
  Antisense strand to SEQ ID NO: 21746
uaucacauuggccuguuca

SEQ ID NO: 21748 - RNA, 19 nt, Artificial Sequence
  Description of Artificial Sequence: Synthetic oligonucleotide
  Sense strand starting at position 345 of SEQ ID NO: 237
caacauaauguguagaagu

SEQ ID NO: 21749 - RNA, 19 nt, Artificial Sequence
  Description of Artificial Sequence: Synthetic oligonucleotide
  Antisense strand to SEQ ID NO: 21748
acuucuacacauuauguug

SEQ ID NO: 21750 - RNA, 19 nt, Artificial Sequence
  Description of Artificial Sequence: Synthetic oligonucleotide
  Sense strand starting at position 344 of SEQ ID NO: 237
gcaacauaauguguagaag

SEQ ID NO: 21751 - RNA, 19 nt, Artificial Sequence
  Description of Artificial Sequence: Synthetic oligonucleotide
  Antisense strand to SEQ ID NO: 21750
cuucuacacauuauguugc

SEQ ID NO: 21752 - RNA, 19 nt, Artificial Sequence
  Description of Artificial Sequence: Synthetic oligonucleotide
  Sense strand starting at position 41 of SEQ ID NO: 237
aguuaugauuaugcagaca

SEQ ID NO: 21753 - RNA, 19 nt, Artificial Sequence
  Description of Artificial Sequence: Synthetic oligonucleotide
  Antisense strand to SEQ ID NO: 21752
ugucugcauaaucauaacu

SEQ ID NO: 21754 - RNA, 19 nt, Artificial Sequence
  Description of Artificial Sequence: Synthetic oligonucleotide
  Sense strand starting at position 3933 of SEQ ID NO: 238
uuuaucgggugaguaaaua

SEQ ID NO: 21755 - RNA, 19 nt, Artificial Sequence
  Description of Artificial Sequence: Synthetic oligonucleotide
  Antisense strand to SEQ ID NO: 21754
uauuuacucacccgauaaa

SEQ ID NO: 21756 - RNA, 19 nt, Artificial Sequence
  Description of Artificial Sequence: Synthetic oligonucleotide
  Sense strand starting at position 3912 of SEQ ID NO: 238
uccuuacaguaauuguaaa

SEQ ID NO: 21757 - RNA, 19 nt, Artificial Sequence
  Description of Artificial Sequence: Synthetic oligonucleotide
  Antisense strand to SEQ ID NO: 21756
uuuacaauuacuguaagga

SEQ ID NO: 21758 - RNA, 19 nt, Artificial Sequence
  Description of Artificial Sequence: Synthetic oligonucleotide
  Sense strand starting at position 3275 of SEQ ID NO: 238
aggaguucugagcaacgua

SEQ ID NO: 21759 - RNA, 19 nt, Artificial Sequence
  Description of Artificial Sequence: Synthetic oligonucleotide
  Antisense strand to SEQ ID NO: 21758
uacguugcucagaacuccu

SEQ ID NO: 21760 - RNA, 19 nt, Artificial Sequence
  Description of Artificial Sequence: Synthetic oligonucleotide
  Sense strand starting at position 3100 of SEQ ID NO: 238
aagaauaacguguauaugu

SEQ ID NO: 21761 - RNA, 19 nt, Artificial Sequence
  Description of Artificial Sequence: Synthetic oligonucleotide
  Antisense strand to SEQ ID NO: 21760
acauauacacguuauucuu

SEQ ID NO: 21762 - RNA, 19 nt, Artificial Sequence
  Description of Artificial Sequence: Synthetic oligonucleotide
  Sense strand starting at position 2929 of SEQ ID NO: 238
gggagaucgcuugauccug

SEQ ID NO: 21763 - RNA, 19 nt, Artificial Sequence
  Description of Artificial Sequence: Synthetic oligonucleotide
  Antisense strand to SEQ ID NO: 21762
caggaucaagcgaucuccc

SEQ ID NO: 21764 - RNA, 19 nt, Artificial Sequence
  Description of Artificial Sequence: Synthetic oligonucleotide
  Sense strand starting at position 2624 of SEQ ID NO: 238
cuggcuaauguagaauuaa

SEQ ID NO: 21765 - RNA, 19 nt, Artificial Sequence
  Description of Artificial Sequence: Synthetic oligonucleotide
  Antisense strand to SEQ ID NO: 21764
uuaauucuacauuagccag

SEQ ID NO: 21766 - RNA, 19 nt, Artificial Sequence
  Description of Artificial Sequence: Synthetic oligonucleotide
  Sense strand starting at position 2617 of SEQ ID NO: 238
uugaauucuggcuaaugua

SEQ ID NO: 21767 - RNA, 19 nt, Artificial Sequence
  Description of Artificial Sequence: Synthetic oligonucleotide
  Antisense strand to SEQ ID NO: 21766
uacauuagccagaauucaa

SEQ ID NO: 21768 - RNA, 19 nt, Artificial Sequence
  Description of Artificial Sequence: Synthetic oligonucleotide
  Sense strand starting at position 2606 of SEQ ID NO: 238
gguaaaugccuuugaauuc

SEQ ID NO: 21769 - RNA, 19 nt, Artificial Sequence
  Description of Artificial Sequence: Synthetic oligonucleotide
  Antisense strand to SEQ ID NO: 21768
gaauucaaaggcauuuacc

SEQ ID NO: 21770 - RNA, 19 nt, Artificial Sequence
  Description of Artificial Sequence: Synthetic oligonucleotide
  Sense strand starting at position 2578 of SEQ ID NO: 238
agcugagagugcccuauuu

SEQ ID NO: 21771 - RNA, 19 nt, Artificial Sequence
  Description of Artificial Sequence: Synthetic oligonucleotide
  Antisense strand to SEQ ID NO: 21770
aaauagggcacucucagcu

SEQ ID NO: 21772 - RNA, 19 nt, Artificial Sequence
  Description of Artificial Sequence: Synthetic oligonucleotide
  Sense strand starting at position 2541 of SEQ ID NO: 238
ugagauaagcauuaucagu

SEQ ID NO: 21773 - RNA, 19 nt, Artificial Sequence
  Description of Artificial Sequence: Synthetic oligonucleotide
  Antisense strand to SEQ ID NO: 21772
acugauaaugcuuaucuca

SEQ ID NO: 21774 - RNA, 19 nt, Artificial Sequence
  Description of Artificial Sequence: Synthetic oligonucleotide
  Sense strand starting at position 2528 of SEQ ID NO: 238
gaauaucucucugugagau

SEQ ID NO: 21775 - RNA, 19 nt, Artificial Sequence
  Description of Artificial Sequence: Synthetic oligonucleotide
  Antisense strand to SEQ ID NO: 21774
aucucacagagagauauuc

SEQ ID NO: 21776 - RNA, 19 nt, Artificial Sequence
  Description of Artificial Sequence: Synthetic oligonucleotide
  Sense strand starting at position 2527 of SEQ ID NO: 238
ggaauaucucucugugaga

SEQ ID NO: 21777 - RNA, 19 nt, Artificial Sequence
  Description of Artificial Sequence: Synthetic oligonucleotide
  Antisense strand to SEQ ID NO: 21776
ucucacagagagauauucc

SEQ ID NO: 21778 - RNA, 19 nt, Artificial Sequence
  Description of Artificial Sequence: Synthetic oligonucleotide
  Sense strand starting at position 2526 of SEQ ID NO: 238
aggaauaucucucugugag

SEQ ID NO: 21779 - RNA, 19 nt, Artificial Sequence
  Description of Artificial Sequence: Synthetic oligonucleotide
  Antisense strand to SEQ ID NO: 21778
cucacagagagauauuccu

SEQ ID NO: 21780 - RNA, 19 nt, Artificial Sequence
  Description of Artificial Sequence: Synthetic oligonucleotide
  Sense strand starting at position 2493 of SEQ ID NO: 238
gcauauggcgcagucuuua

SEQ ID NO: 21781 - RNA, 19 nt, Artificial Sequence
  Description of Artificial Sequence: Synthetic oligonucleotide
  Antisense strand to SEQ ID NO: 21780
uaaagacugcgccauaugc

SEQ ID NO: 21782 - RNA, 19 nt, Artificial Sequence
  Description of Artificial Sequence: Synthetic oligonucleotide
  Sense strand starting at position 2470 of SEQ ID NO: 238
gaaauucuggugcagacau

SEQ ID NO: 21783 - RNA, 19 nt, Artificial Sequence
  Description of Artificial Sequence: Synthetic oligonucleotide
  Antisense strand to SEQ ID NO: 21782
augucugcaccagaauuuc

SEQ ID NO: 21784 - RNA, 19 nt, Artificial Sequence
  Description of Artificial Sequence: Synthetic oligonucleotide
  Sense strand starting at position 2366 of SEQ ID NO: 238
guccguauucuaggaaaua

SEQ ID NO: 21785 - RNA, 19 nt, Artificial Sequence
  Description of Artificial Sequence: Synthetic oligonucleotide
  Antisense strand to SEQ ID NO: 21784
uauuuccuagaauacggac

SEQ ID NO: 21786 - RNA, 19 nt, Artificial Sequence
  Description of Artificial Sequence: Synthetic oligonucleotide
  Sense strand starting at position 2359 of SEQ ID NO: 238
aggaaacguccguauucua

SEQ ID NO: 21787 - RNA, 19 nt, Artificial Sequence
  Description of Artificial Sequence: Synthetic oligonucleotide
  Antisense strand to SEQ ID NO: 21786
uagaauacggacguuuccu

SEQ ID NO: 21788 - RNA, 19 nt, Artificial Sequence
  Description of Artificial Sequence: Synthetic oligonucleotide
  Sense strand starting at position 2340 of SEQ ID NO: 238
aaucuuuaucgugagucuu

SEQ ID NO: 21789 - RNA, 19 nt, Artificial Sequence
  Description of Artificial Sequence: Synthetic oligonucleotide
  Antisense strand to SEQ ID NO: 21788
aagacucacgauaaagauu

SEQ ID NO: 21790 - RNA, 19 nt, Artificial Sequence
  Description of Artificial Sequence: Synthetic oligonucleotide
  Sense strand starting at position 1322 of SEQ ID NO: 238
uugagaauguucuuaagaa

SEQ ID NO: 21791 - RNA, 19 nt, Artificial Sequence
  Description of Artificial Sequence: Synthetic oligonucleotide
  Antisense strand to SEQ ID NO: 21790
uucuuaagaacauucucaa

SEQ ID NO: 21792 - RNA, 19 nt, Artificial Sequence
  Description of Artificial Sequence: Synthetic oligonucleotide
  Sense strand starting at position 1320 of SEQ ID NO: 238
ccuugagaauguucuuaag

SEQ ID NO: 21793 - RNA, 19 nt, Artificial Sequence
  Description of Artificial Sequence: Synthetic oligonucleotide
  Antisense strand to SEQ ID NO: 21792
cuuaagaacauucucaagg

SEQ ID NO: 21794 - RNA, 19 nt, Artificial Sequence
  Description of Artificial Sequence: Synthetic oligonucleotide
  Sense strand starting at position 1274 of SEQ ID NO: 238
ggaaacugauuccugaucu

SEQ ID NO: 21795 - RNA, 19 nt, Artificial Sequence
  Description of Artificial Sequence: Synthetic oligonucleotide
  Antisense strand to SEQ ID NO: 21794
agaucaggaaucaguuucc

SEQ ID NO: 21796 - RNA, 19 nt, Artificial Sequence
  Description of Artificial Sequence: Synthetic oligonucleotide
  Sense strand starting at position 1259 of SEQ ID NO: 238
ucccaucuguaaucaggaa

SEQ ID NO: 21797 - RNA, 19 nt, Artificial Sequence
  Description of Artificial Sequence: Synthetic oligonucleotide
  Antisense strand to SEQ ID NO: 21796
uuccugauuacagauggga

SEQ ID NO: 21798 - RNA, 19 nt, Artificial Sequence
  Description of Artificial Sequence: Synthetic oligonucleotide
  Sense strand starting at position 1255 of SEQ ID NO: 238
guauucccaucuguaauca

SEQ ID NO: 21799 - RNA, 19 nt, Artificial Sequence
  Description of Artificial Sequence: Synthetic oligonucleotide
  Antisense strand to SEQ ID NO: 21798
ugauuacagaugggaauac

SEQ ID NO: 21800 - RNA, 19 nt, Artificial Sequence
  Description of Artificial Sequence: Synthetic oligonucleotide
  Sense strand starting at position 1107 of SEQ ID NO: 238
gggaauauuugggagagua

SEQ ID NO: 21801 - RNA, 19 nt, Artificial Sequence
  Description of Artificial Sequence: Synthetic oligonucleotide
  Antisense strand to SEQ ID NO: 21800
uacucucccaaauauuccc

SEQ ID NO: 21802 - RNA, 19 nt, Artificial Sequence
  Description of Artificial Sequence: Synthetic oligonucleotide
  Sense strand starting at position 1106 of SEQ ID NO: 238
ugggaauauuugggagagu

SEQ ID NO: 21803 - RNA, 19 nt, Artificial Sequence
  Description of Artificial Sequence: Synthetic oligonucleotide
  Antisense strand to SEQ ID NO: 21802
acucucccaaauauuccca

SEQ ID NO: 21804 - RNA, 19 nt, Artificial Sequence
  Description of Artificial Sequence: Synthetic oligonucleotide
  Sense strand starting at position 1028 of SEQ ID NO: 238
gauaguuggcuagacgaga

SEQ ID NO: 21805 - RNA, 19 nt, Artificial Sequence
  Description of Artificial Sequence: Synthetic oligonucleotide
  Antisense strand to SEQ ID NO: 21804
ucucgucuagccaacuauc

SEQ ID NO: 21806 - RNA, 19 nt, Artificial Sequence
  Description of Artificial Sequence: Synthetic oligonucleotide
  Sense strand starting at position 1026 of SEQ ID NO: 238
cugauaguuggcuagacga

SEQ ID NO: 21807 - RNA, 19 nt, Artificial Sequence
  Description of Artificial Sequence: Synthetic oligonucleotide
  Antisense strand to SEQ ID NO: 21806
ucgucuagccaacuaucag

SEQ ID NO: 21808 - RNA, 19 nt, Artificial Sequence
  Description of Artificial Sequence: Synthetic oligonucleotide
  Sense strand starting at position 1015 of SEQ ID NO: 238
cccagaguacacugauagu

SEQ ID NO: 21809 - RNA, 19 nt, Artificial Sequence
  Description of Artificial Sequence: Synthetic oligonucleotide
  Antisense strand to SEQ ID NO: 21808
acuaucaguguacucuggg

SEQ ID NO: 21810 - RNA, 19 nt, Artificial Sequence
  Description of Artificial Sequence: Synthetic oligonucleotide
  Sense strand starting at position 922 of SEQ ID NO: 238
cuuugauuuccgcgaagga

SEQ ID NO: 21811 - RNA, 19 nt, Artificial Sequence
  Description of Artificial Sequence: Synthetic oligonucleotide
  Antisense strand to SEQ ID NO: 21810
uccuucgcggaaaucaaag

SEQ ID NO: 21812 - RNA, 19 nt, Artificial Sequence
  Description of Artificial Sequence: Synthetic oligonucleotide
  Sense strand starting at position 911 of SEQ ID NO: 238
cugcaucugcgcuuugauu

SEQ ID NO: 21813 - RNA, 19 nt, Artificial Sequence
  Description of Artificial Sequence: Synthetic oligonucleotide
  Antisense strand to SEQ ID NO: 21812
aaucaaagcgcagaugcag

SEQ ID NO: 21814 - RNA, 19 nt, Artificial Sequence
  Description of Artificial Sequence: Synthetic oligonucleotide
  Sense strand starting at position 910 of SEQ ID NO: 238
acugcaucugcgcuuugau

SEQ ID NO: 21815 - RNA, 19 nt, Artificial Sequence
  Description of Artificial Sequence: Synthetic oligonucleotide
  Antisense strand to SEQ ID NO: 21814
aucaaagcgcagaugcagu

SEQ ID NO: 21816 - RNA, 19 nt, Artificial Sequence
  Description of Artificial Sequence: Synthetic oligonucleotide
  Sense strand starting at position 814 of SEQ ID NO: 238
acaguaacuucugugacuu

SEQ ID NO: 21817 - RNA, 19 nt, Artificial Sequence
  Description of Artificial Sequence: Synthetic oligonucleotide
  Antisense strand to SEQ ID NO: 21816
aagucacagaaguuacugu

SEQ ID NO: 21818 - RNA, 19 nt, Artificial Sequence
  Description of Artificial Sequence: Synthetic oligonucleotide
  Sense strand starting at position 612 of SEQ ID NO: 238
ggcucuaagccugaaagac

SEQ ID NO: 21819 - RNA, 19 nt, Artificial Sequence
  Description of Artificial Sequence: Synthetic oligonucleotide
  Antisense strand to SEQ ID NO: 21818
gucuuucaggcuuagagcc

SEQ ID NO: 21820 - RNA, 19 nt, Artificial Sequence
  Description of Artificial Sequence: Synthetic oligonucleotide
  Sense strand starting at position 611 of SEQ ID NO: 238
gggcucuaagccugaaaga

SEQ ID NO: 21821 - RNA, 19 nt, Artificial Sequence
  Description of Artificial Sequence: Synthetic oligonucleotide
  Antisense strand to SEQ ID NO: 21820
ucuuucaggcuuagagccc

SEQ ID NO: 21822 - RNA, 19 nt, Artificial Sequence
  Description of Artificial Sequence: Synthetic oligonucleotide
  Sense strand starting at position 550 of SEQ ID NO: 238
gggacaugauggcuucuuu

SEQ ID NO: 21823 - RNA, 19 nt, Artificial Sequence
  Description of Artificial Sequence: Synthetic oligonucleotide
  Antisense strand to SEQ ID NO: 21822
aaagaagccaucauguccc

SEQ ID NO: 21824 - RNA, 19 nt, Artificial Sequence
  Description of Artificial Sequence: Synthetic oligonucleotide
  Sense strand starting at position 222 of SEQ ID NO: 238
cuguuaucuggugaaaucu

SEQ ID NO: 21825 - RNA, 19 nt, Artificial Sequence
  Description of Artificial Sequence: Synthetic oligonucleotide
  Antisense strand to SEQ ID NO: 21824
agauuucaccagauaacag

SEQ ID NO: 21826 - RNA, 19 nt, Artificial Sequence
  Description of Artificial Sequence: Synthetic oligonucleotide
  Sense strand starting at position 142 of SEQ ID NO: 238
uuuguuauucgguuuguuu

SEQ ID NO: 21827 - RNA, 19 nt, Artificial Sequence
  Description of Artificial Sequence: Synthetic oligonucleotide
  Antisense strand to SEQ ID NO: 21826
aaacaaaccgaauaacaaa

SEQ ID NO: 21828 - RNA, 19 nt, Artificial Sequence
  Description of Artificial Sequence: Synthetic oligonucleotide
  Sense strand starting at position 141 of SEQ ID NO: 238
auuuguuauucgguuuguu

SEQ ID NO: 21829 - RNA, 19 nt, Artificial Sequence
  Description of Artificial Sequence: Synthetic oligonucleotide
  Antisense strand to SEQ ID NO: 21828
aacaaaccgaauaacaaau

SEQ ID NO: 21830 - RNA, 19 nt, Artificial Sequence
  Description of Artificial Sequence: Synthetic oligonucleotide
  Sense strand starting at position 138 of SEQ ID NO: 238
aacauuuguuauucgguuu

SEQ ID NO: 21831 - RNA, 19 nt, Artificial Sequence
  Description of Artificial Sequence: Synthetic oligonucleotide
  Antisense strand to SEQ ID NO: 21830
aaaccgaauaacaaauguu

SEQ ID NO: 21832 - RNA, 19 nt, Artificial Sequence
  Description of Artificial Sequence: Synthetic oligonucleotide
  Sense strand starting at position 137 of SEQ ID NO: 238
caacauuuguuauucgguu

SEQ ID NO: 21833 - RNA, 19 nt, Artificial Sequence
  Description of Artificial Sequence: Synthetic oligonucleotide
  Antisense strand to SEQ ID NO: 21832
aaccgaauaacaaauguug

SEQ ID NO: 21834 - RNA, 19 nt, Artificial Sequence
  Description of Artificial Sequence: Synthetic oligonucleotide
  Sense strand starting at position 66 of SEQ ID NO: 239
agaaauaugcagcaccuau

SEQ ID NO: 21835 - RNA, 19 nt, Artificial Sequence
  Description of Artificial Sequence: Synthetic oligonucleotide
  Antisense strand to SEQ ID NO: 21834
auaggugcugcauauuucu

SEQ ID NO: 21836 - RNA, 19 nt, Artificial Sequence
  Description of Artificial Sequence: Synthetic oligonucleotide
  Sense strand starting at position 385 of SEQ ID NO: 239
cuuguugacuacccagaaa

SEQ ID NO: 21837 - RNA, 19 nt, Artificial Sequence
  Description of Artificial Sequence: Synthetic oligonucleotide
  Antisense strand to SEQ ID NO: 21836
uuucuggguagucaacaag

SEQ ID NO: 21838 - RNA, 19 nt, Artificial Sequence
  Description of Artificial Sequence: Synthetic oligonucleotide
  Sense strand starting at position 388 of SEQ ID NO: 239
guugacuacccagaaaugu

SEQ ID NO: 21839 - RNA, 19 nt, Artificial Sequence
  Description of Artificial Sequence: Synthetic oligonucleotide
  Antisense strand to SEQ ID NO: 21838
acauuucuggguagucaac

SEQ ID NO: 21840 - RNA, 19 nt, Artificial Sequence
  Description of Artificial Sequence: Synthetic oligonucleotide
  Sense strand starting at position 506 of SEQ ID NO: 239
guguuuaggcaacauuauc

SEQ ID NO: 21841 - RNA, 19 nt, Artificial Sequence
  Description of Artificial Sequence: Synthetic oligonucleotide
  Antisense strand to SEQ ID NO: 21840
gauaauguugccuaaacac

SEQ ID NO: 21842 - RNA, 19 nt, Artificial Sequence
  Description of Artificial Sequence: Synthetic oligonucleotide
  Sense strand starting at position 565 of SEQ ID NO: 239
agaaauacccucugcauag

SEQ ID NO: 21843 - RNA, 19 nt, Artificial Sequence
  Description of Artificial Sequence: Synthetic oligonucleotide
  Antisense strand to SEQ ID NO: 21842
cuaugcagaggguauuucu

SEQ ID NO: 21844 - RNA, 19 nt, Artificial Sequence
  Description of Artificial Sequence: Synthetic oligonucleotide
  Sense strand starting at position 1055 of SEQ ID NO: 239
acaugcagccacgaaauau

SEQ ID NO: 21845 - RNA, 19 nt, Artificial Sequence
  Description of Artificial Sequence: Synthetic oligonucleotide
  Antisense strand to SEQ ID NO: 21844
auauuucguggcugcaugu

SEQ ID NO: 21846 - RNA, 19 nt, Artificial Sequence
  Description of Artificial Sequence: Synthetic oligonucleotide
  Sense strand starting at position 1101 of SEQ ID NO: 239
gguagcuuucuguuugcca

SEQ ID NO: 21847 - RNA, 19 nt, Artificial Sequence
  Description of Artificial Sequence: Synthetic oligonucleotide
  Antisense strand to SEQ ID NO: 21846
uggcaaacagaaagcuacc

SEQ ID NO: 21848 - RNA, 19 nt, Artificial Sequence
  Description of Artificial Sequence: Synthetic oligonucleotide
  Sense strand starting at position 1130 of SEQ ID NO: 239
cuauuaacaggcugaguca

SEQ ID NO: 21849 - RNA, 19 nt, Artificial Sequence
  Description of Artificial Sequence: Synthetic oligonucleotide
  Antisense strand to SEQ ID NO: 21848
ugacucagccuguuaauag

SEQ ID NO: 21850 - RNA, 19 nt, Artificial Sequence
  Description of Artificial Sequence: Synthetic oligonucleotide
  Sense strand starting at position 1146 of SEQ ID NO: 239
ucagaaaguuaauugagua

SEQ ID NO: 21851 - RNA, 19 nt, Artificial Sequence
  Description of Artificial Sequence: Synthetic oligonucleotide
  Antisense strand to SEQ ID NO: 21850
uacucaauuaacuuucuga

SEQ ID NO: 21852 - RNA, 19 nt, Artificial Sequence
  Description of Artificial Sequence: Synthetic oligonucleotide
  Sense strand starting at position 1191 of SEQ ID NO: 239
cuagauuauccauggguuu

SEQ ID NO: 21853 - RNA, 19 nt, Artificial Sequence
  Description of Artificial Sequence: Synthetic oligonucleotide
  Antisense strand to SEQ ID NO: 21852
aaacccauggauaaucuag

SEQ ID NO: 21854 - RNA, 19 nt, Artificial Sequence
  Description of Artificial Sequence: Synthetic oligonucleotide
  Sense strand starting at position 1323 of SEQ ID NO: 239
aucacaugagcaugaucaa

SEQ ID NO: 21855 - RNA, 19 nt, Artificial Sequence
  Description of Artificial Sequence: Synthetic oligonucleotide
  Antisense strand to SEQ ID NO: 21854
uugaucaugcucaugugau

SEQ ID NO: 21856 - RNA, 19 nt, Artificial Sequence
  Description of Artificial Sequence: Synthetic oligonucleotide
  Sense strand starting at position 1392 of SEQ ID NO: 239
gguaaagccacgggagaau

SEQ ID NO: 21857 - RNA, 19 nt, Artificial Sequence
  Description of Artificial Sequence: Synthetic oligonucleotide
  Antisense strand to SEQ ID NO: 21856
auucucccguggcuuuacc

SEQ ID NO: 21858 - RNA, 19 nt, Artificial Sequence
  Description of Artificial Sequence: Synthetic oligonucleotide
  Sense strand starting at position 1703 of SEQ ID NO: 239
gaggaaaucucccuagcug

SEQ ID NO: 21859 - RNA, 19 nt, Artificial Sequence
  Description of Artificial Sequence: Synthetic oligonucleotide
  Antisense strand to SEQ ID NO: 21858
cagcuagggagauuuccuc

SEQ ID NO: 21860 - RNA, 19 nt, Artificial Sequence
  Description of Artificial Sequence: Synthetic oligonucleotide
  Sense strand starting at position 1776 of SEQ ID NO: 239
uuccuauugcuauaggaua

SEQ ID NO: 21861 - RNA, 19 nt, Artificial Sequence
  Description of Artificial Sequence: Synthetic oligonucleotide
  Antisense strand to SEQ ID NO: 21860
uauccuauagcaauaggaa

SEQ ID NO: 21862 - RNA, 19 nt, Artificial Sequence
  Description of Artificial Sequence: Synthetic oligonucleotide
  Sense strand starting at position 1798 of SEQ ID NO: 239
aauaguugguuagugauua

SEQ ID NO: 21863 - RNA, 19 nt, Artificial Sequence
  Description of Artificial Sequence: Synthetic oligonucleotide
  Antisense strand to SEQ ID NO: 21862
uaaucacuaaccaacuauu

SEQ ID NO: 21864 - RNA, 19 nt, Artificial Sequence
  Description of Artificial Sequence: Synthetic oligonucleotide
  Sense strand starting at position 1803 of SEQ ID NO: 239
uugguuagugauuaacuca

SEQ ID NO: 21865 - RNA, 19 nt, Artificial Sequence
  Description of Artificial Sequence: Synthetic oligonucleotide
  Antisense strand to SEQ ID NO: 21864
ugaguuaaucacuaaccaa

SEQ ID NO: 21866 - RNA, 19 nt, Artificial Sequence
  Description of Artificial Sequence: Synthetic oligonucleotide
  Sense strand starting at position 2296 of SEQ ID NO: 239
uuuccauaggucuauguga

SEQ ID NO: 21867 - RNA, 19 nt, Artificial Sequence
  Description of Artificial Sequence: Synthetic oligonucleotide
  Antisense strand to SEQ ID NO: 21866
ucacauagaccuauggaaa

SEQ ID NO: 21868 - RNA, 19 nt, Artificial Sequence
  Description of Artificial Sequence: Synthetic oligonucleotide
  Sense strand starting at position 2298 of SEQ ID NO: 239
uccauaggucuaugugaaa

SEQ ID NO: 21869 - RNA, 19 nt, Artificial Sequence
  Description of Artificial Sequence: Synthetic oligonucleotide
  Antisense strand to SEQ ID NO: 21868
uuucacauagaccuaugga

SEQ ID NO: 21870 - RNA, 19 nt, Artificial Sequence
  Description of Artificial Sequence: Synthetic oligonucleotide
  Sense strand starting at position 2305 of SEQ ID NO: 239
gucuaugugaaacagguuu

SEQ ID NO: 21871 - RNA, 19 nt, Artificial Sequence
  Description of Artificial Sequence: Synthetic oligonucleotide
  Antisense strand to SEQ ID NO: 21870
aaaccuguuucacauagac

SEQ ID NO: 21872 - RNA, 19 nt, Artificial Sequence
  Description of Artificial Sequence: Synthetic oligonucleotide
  Sense strand starting at position 2365 of SEQ ID NO: 239
cccugaauucucuaggcua

SEQ ID NO: 21873 - RNA, 19 nt, Artificial Sequence
  Description of Artificial Sequence: Synthetic oligonucleotide
  Antisense strand to SEQ ID NO: 21872
uagccuagagaauucaggg

SEQ ID NO: 21874 - RNA, 19 nt, Artificial Sequence
  Description of Artificial Sequence: Synthetic oligonucleotide
  Sense strand starting at position 2368 of SEQ ID NO: 239
ugaauucucuaggcuaaac

SEQ ID NO: 21875 - RNA, 19 nt, Artificial Sequence
  Description of Artificial Sequence: Synthetic oligonucleotide
  Antisense strand to SEQ ID NO: 21874
guuuagccuagagaauuca

SEQ ID NO: 21876 - RNA, 19 nt, Artificial Sequence
  Description of Artificial Sequence: Synthetic oligonucleotide
  Sense strand starting at position 2378 of SEQ ID NO: 239
aggcuaaacucauuugugu

SEQ ID NO: 21877 - RNA, 19 nt, Artificial Sequence
  Description of Artificial Sequence: Synthetic oligonucleotide
  Antisense strand to SEQ ID NO: 21876
acacaaaugaguuuagccu

SEQ ID NO: 21878 - RNA, 19 nt, Artificial Sequence
  Description of Artificial Sequence: Synthetic oligonucleotide
  Sense strand starting at position 2781 of SEQ ID NO: 239
uggacugauacuuggcauu

SEQ ID NO: 21879 - RNA, 19 nt, Artificial Sequence
  Description of Artificial Sequence: Synthetic oligonucleotide
  Antisense strand to SEQ ID NO: 21878
aaugccaaguaucagucca

SEQ ID NO: 21880 - RNA, 19 nt, Artificial Sequence
  Description of Artificial Sequence: Synthetic oligonucleotide
  Sense strand starting at position 2794 of SEQ ID NO: 239
ggcauucguagggagaaga

SEQ ID NO: 21881 - RNA, 19 nt, Artificial Sequence
  Description of Artificial Sequence: Synthetic oligonucleotide
  Antisense strand to SEQ ID NO: 21880
ucuucucccuacgaaugcc

SEQ ID NO: 21882 - RNA, 19 nt, Artificial Sequence
  Description of Artificial Sequence: Synthetic oligonucleotide
  Sense strand starting at position 2914 of SEQ ID NO: 239
acagguagauuauccuuga

SEQ ID NO: 21883 - RNA, 19 nt, Artificial Sequence
  Description of Artificial Sequence: Synthetic oligonucleotide
  Antisense strand to SEQ ID NO: 21882
ucaaggauaaucuaccugu

SEQ ID NO: 21884 - RNA, 19 nt, Artificial Sequence
  Description of Artificial Sequence: Synthetic oligonucleotide
  Sense strand starting at position 2915 of SEQ ID NO: 239
cagguagauuauccuugau

SEQ ID NO: 21885 - RNA, 19 nt, Artificial Sequence
  Description of Artificial Sequence: Synthetic oligonucleotide
  Antisense strand to SEQ ID NO: 21884
aucaaggauaaucuaccug

SEQ ID NO: 21886 - RNA, 19 nt, Artificial Sequence
  Description of Artificial Sequence: Synthetic oligonucleotide
  Sense strand starting at position 2917 of SEQ ID NO: 239
gguagauuauccuugauag

SEQ ID NO: 21887 - RNA, 19 nt, Artificial Sequence
  Description of Artificial Sequence: Synthetic oligonucleotide
  Antisense strand to SEQ ID NO: 21886
cuaucaaggauaaucuacc

SEQ ID NO: 21888 - RNA, 19 nt, Artificial Sequence
  Description of Artificial Sequence: Synthetic oligonucleotide
  Sense strand starting at position 2918 of SEQ ID NO: 239
guagauuauccuugauagg

SEQ ID NO: 21889 - RNA, 19 nt, Artificial Sequence
  Description of Artificial Sequence: Synthetic oligonucleotide
  Antisense strand to SEQ ID NO: 21888
ccuaucaaggauaaucuac

SEQ ID NO: 21890 - RNA, 19 nt, Artificial Sequence
  Description of Artificial Sequence: Synthetic oligonucleotide
  Sense strand starting at position 3031 of SEQ ID NO: 239
ucuugcuauuugcuaggua

SEQ ID NO: 21891 - RNA, 19 nt, Artificial Sequence
  Description of Artificial Sequence: Synthetic oligonucleotide
  Antisense strand to SEQ ID NO: 21890
uaccuagcaaauagcaaga

SEQ ID NO: 21892 - RNA, 19 nt, Artificial Sequence
  Description of Artificial Sequence: Synthetic oligonucleotide
  Sense strand starting at position 3034 of SEQ ID NO: 239
ugcuauuugcuagguauug

SEQ ID NO: 21893 - RNA, 19 nt, Artificial Sequence
  Description of Artificial Sequence: Synthetic oligonucleotide
  Antisense strand to SEQ ID NO: 21892
caauaccuagcaaauagca

SEQ ID NO: 21894 - RNA, 19 nt, Artificial Sequence
  Description of Artificial Sequence: Synthetic oligonucleotide
  Sense strand starting at position 3197 of SEQ ID NO: 239
gcaguauaacaucaagguu

SEQ ID NO: 21895 - RNA, 19 nt, Artificial Sequence
  Description of Artificial Sequence: Synthetic oligonucleotide
  Antisense strand to SEQ ID NO: 21894
aaccuugauguuauacugc

SEQ ID NO: 21896 - RNA, 19 nt, Artificial Sequence
  Description of Artificial Sequence: Synthetic oligonucleotide
  Sense strand starting at position 3205 of SEQ ID NO: 239
acaucaagguugcuaugaa

SEQ ID NO: 21897 - RNA, 19 nt, Artificial Sequence
  Description of Artificial Sequence: Synthetic oligonucleotide
  Antisense strand to SEQ ID NO: 21896
uucauagcaaccuugaugu

SEQ ID NO: 21898 - RNA, 19 nt, Artificial Sequence
  Description of Artificial Sequence: Synthetic oligonucleotide
  Sense strand starting at position 3215 of SEQ ID NO: 239
ugcuaugaaucagcauaau

SEQ ID NO: 21899 - RNA, 19 nt, Artificial Sequence
  Description of Artificial Sequence: Synthetic oligonucleotide
  Antisense strand to SEQ ID NO: 21898
auuaugcugauucauagca

SEQ ID NO: 21900 - RNA, 19 nt, Artificial Sequence
  Description of Artificial Sequence: Synthetic oligonucleotide
  Sense strand starting at position 3405 of SEQ ID NO: 239
cugugaucaugguuggaua

SEQ ID NO: 21901 - RNA, 19 nt, Artificial Sequence
  Description of Artificial Sequence: Synthetic oligonucleotide
  Antisense strand to SEQ ID NO: 21900
uauccaaccaugaucacag

SEQ ID NO: 21902 - RNA, 19 nt, Artificial Sequence
  Description of Artificial Sequence: Synthetic oligonucleotide
  Sense strand starting at position 3533 of SEQ ID NO: 239
gcagccuauggauaucaca

SEQ ID NO: 21903 - RNA, 19 nt, Artificial Sequence
  Description of Artificial Sequence: Synthetic oligonucleotide
  Antisense strand to SEQ ID NO: 21902
ugugauauccauaggcugc

SEQ ID NO: 21904 - RNA, 19 nt, Artificial Sequence
  Description of Artificial Sequence: Synthetic oligonucleotide
  Sense strand starting at position 3542 of SEQ ID NO: 239
ggauaucacagcugaauga

SEQ ID NO: 21905 - RNA, 19 nt, Artificial Sequence
  Description of Artificial Sequence: Synthetic oligonucleotide
  Antisense strand to SEQ ID NO: 21904
ucauucagcugugauaucc

SEQ ID NO: 21906 - RNA, 19 nt, Artificial Sequence
  Description of Artificial Sequence: Synthetic oligonucleotide
  Sense strand starting at position 3670 of SEQ ID NO: 239
gagucacacccauggauga

SEQ ID NO: 21907 - RNA, 19 nt, Artificial Sequence
  Description of Artificial Sequence: Synthetic oligonucleotide
  Antisense strand to SEQ ID NO: 21906
ucauccaugggugugacuc

SEQ ID NO: 21908 - RNA, 19 nt, Artificial Sequence
  Description of Artificial Sequence: Synthetic oligonucleotide
  Sense strand starting at position 3709 of SEQ ID NO: 239
cuccauaggugugugauuu

SEQ ID NO: 21909 - RNA, 19 nt, Artificial Sequence
  Description of Artificial Sequence: Synthetic oligonucleotide
  Antisense strand to SEQ ID NO: 21908
aaaucacacaccuauggag

SEQ ID NO: 21910 - RNA, 19 nt, Artificial Sequence
  Description of Artificial Sequence: Synthetic oligonucleotide
  Sense strand starting at position 3710 of SEQ ID NO: 239
uccauaggugugugauuug

SEQ ID NO: 21911 - RNA, 19 nt, Artificial Sequence
  Description of Artificial Sequence: Synthetic oligonucleotide
  Antisense strand to SEQ ID NO: 21910
caaaucacacaccuaugga

SEQ ID NO: 21912 - RNA, 19 nt, Artificial Sequence
  Description of Artificial Sequence: Synthetic oligonucleotide
  Sense strand starting at position 3786 of SEQ ID NO: 239
gcaacagucuuauuuguga

SEQ ID NO: 21913 - RNA, 19 nt, Artificial Sequence
  Description of Artificial Sequence: Synthetic oligonucleotide
  Antisense strand to SEQ ID NO: 21912
ucacaaauaagacuguugc

SEQ ID NO: 21914 - RNA, 19 nt, Artificial Sequence
  Description of Artificial Sequence: Synthetic oligonucleotide
  Sense strand starting at position 3959 of SEQ ID NO: 240
cgugcagucacauagagau

SEQ ID NO: 21915 - RNA, 19 nt, Artificial Sequence
  Description of Artificial Sequence: Synthetic oligonucleotide
  Antisense strand to SEQ ID NO: 21914
aucucuaugugacugcacg

SEQ ID NO: 21916 - RNA, 19 nt, Artificial Sequence
  Description of Artificial Sequence: Synthetic oligonucleotide
  Sense strand starting at position 3954 of SEQ ID NO: 240
acuugcgugcagucacaua

SEQ ID NO: 21917 - RNA, 19 nt, Artificial Sequence
  Description of Artificial Sequence: Synthetic oligonucleotide
  Antisense strand to SEQ ID NO: 21916
uaugugacugcacgcaagu

SEQ ID NO: 21918 - RNA, 19 nt, Artificial Sequence
  Description of Artificial Sequence: Synthetic oligonucleotide
  Sense strand starting at position 3932 of SEQ ID NO: 240
gcuaauaagccuggauaga

SEQ ID NO: 21919 - RNA, 19 nt, Artificial Sequence
  Description of Artificial Sequence: Synthetic oligonucleotide
  Antisense strand to SEQ ID NO: 21918
ucuauccaggcuuauuagc

SEQ ID NO: 21920 - RNA, 19 nt, Artificial Sequence
  Description of Artificial Sequence: Synthetic oligonucleotide
  Sense strand starting at position 3909 of SEQ ID NO: 240
cuuccuugggcuuauuaca

SEQ ID NO: 21921 - RNA, 19 nt, Artificial Sequence
  Description of Artificial Sequence: Synthetic oligonucleotide
  Antisense strand to SEQ ID NO: 21920
uguaauaagcccaaggaag

SEQ ID NO: 21922 - RNA, 19 nt, Artificial Sequence
  Description of Artificial Sequence: Synthetic oligonucleotide
  Sense strand starting at position 3751 of SEQ ID NO: 240
cuuucuuggcuacauagau

SEQ ID NO: 21923 - RNA, 19 nt, Artificial Sequence
  Description of Artificial Sequence: Synthetic oligonucleotide
  Antisense strand to SEQ ID NO: 21922
aucuauguagccaagaaag

SEQ ID NO: 21924 - RNA, 19 nt, Artificial Sequence
  Description of Artificial Sequence: Synthetic oligonucleotide
  Sense strand starting at position 3654 of SEQ ID NO: 240
uuaagugacugacucagau

SEQ ID NO: 21925 - RNA, 19 nt, Artificial Sequence
  Description of Artificial Sequence: Synthetic oligonucleotide
  Antisense strand to SEQ ID NO: 21924
aucugagucagucacuuaa

SEQ ID NO: 21926 - RNA, 19 nt, Artificial Sequence
  Description of Artificial Sequence: Synthetic oligonucleotide
  Sense strand starting at position 3651 of SEQ ID NO: 240
ccauuaagugacugacuca

SEQ ID NO: 21927 - RNA, 19 nt, Artificial Sequence
  Description of Artificial Sequence: Synthetic oligonucleotide
  Antisense strand to SEQ ID NO: 21926
ugagucagucacuuaaugg

SEQ ID NO: 21928 - RNA, 19 nt, Artificial Sequence
  Description of Artificial Sequence: Synthetic oligonucleotide
  Sense strand starting at position 3605 of SEQ ID NO: 240
aaguuuagccuccagaaag

SEQ ID NO: 21929 - RNA, 19 nt, Artificial Sequence
  Description of Artificial Sequence: Synthetic oligonucleotide
  Antisense strand to SEQ ID NO: 21928
cuuucuggaggcuaaacuu

SEQ ID NO: 21930 - RNA, 19 nt, Artificial Sequence
  Description of Artificial Sequence: Synthetic oligonucleotide
  Sense strand starting at position 3272 of SEQ ID NO: 240
acgacagugcuguaaagaa

SEQ ID NO: 21931 - RNA, 19 nt, Artificial Sequence
  Description of Artificial Sequence: Synthetic oligonucleotide
  Antisense strand to SEQ ID NO: 21930
uucuuuacagcacugucgu

SEQ ID NO: 21932 - RNA, 19 nt, Artificial Sequence
  Description of Artificial Sequence: Synthetic oligonucleotide
  Sense strand starting at position 3251 of SEQ ID NO: 240
acaguuaggcuauaaaucu

SEQ ID NO: 21933 - RNA, 19 nt, Artificial Sequence
  Description of Artificial Sequence: Synthetic oligonucleotide
  Antisense strand to SEQ ID NO: 21932
agauuuauagccuaacugu

SEQ ID NO: 21934 - RNA, 19 nt, Artificial Sequence
  Description of Artificial Sequence: Synthetic oligonucleotide
  Sense strand starting at position 3204 of SEQ ID NO: 240
agaacaaugucuuccuguu

SEQ ID NO: 21935 - RNA, 19 nt, Artificial Sequence
  Description of Artificial Sequence: Synthetic oligonucleotide
  Antisense strand to SEQ ID NO: 21934
aacaggaagacauuguucu

SEQ ID NO: 21936 - RNA, 19 nt, Artificial Sequence
  Description of Artificial Sequence: Synthetic oligonucleotide
  Sense strand starting at position 3045 of SEQ ID NO: 240
gaguucuugggccaacagu

SEQ ID NO: 21937 - RNA, 19 nt, Artificial Sequence
  Description of Artificial Sequence: Synthetic oligonucleotide
  Antisense strand to SEQ ID NO: 21936
acuguuggcccaagaacuc

SEQ ID NO: 21938 - RNA, 19 nt, Artificial Sequence
  Description of Artificial Sequence: Synthetic oligonucleotide
  Sense strand starting at position 3043 of SEQ ID NO: 240
gagaguucuugggccaaca

SEQ ID NO: 21939 - RNA, 19 nt, Artificial Sequence
  Description of Artificial Sequence: Synthetic oligonucleotide
  Antisense strand to SEQ ID NO: 21938
uguuggcccaagaacucuc

SEQ ID NO: 21940 - RNA, 19 nt, Artificial Sequence
  Description of Artificial Sequence: Synthetic oligonucleotide
  Sense strand starting at position 3041 of SEQ ID NO: 240
augagaguucuugggccaa

SEQ ID NO: 21941 - RNA, 19 nt, Artificial Sequence
  Description of Artificial Sequence: Synthetic oligonucleotide
  Antisense strand to SEQ ID NO: 21940
uuggcccaagaacucucau

SEQ ID NO: 21942 - RNA, 19 nt, Artificial Sequence
  Description of Artificial Sequence: Synthetic oligonucleotide
  Sense strand starting at position 3005 of SEQ ID NO: 240
aucaguggcauugauagua

SEQ ID NO: 21943 - RNA, 19 nt, Artificial Sequence
  Description of Artificial Sequence: Synthetic oligonucleotide
  Antisense strand to SEQ ID NO: 21942
uacuaucaaugccacugau

SEQ ID NO: 21944 - RNA, 19 nt, Artificial Sequence
  Description of Artificial Sequence: Synthetic oligonucleotide
  Sense strand starting at position 2999 of SEQ ID NO: 240
cugugaaucaguggcauug

SEQ ID NO: 21945 - RNA, 19 nt, Artificial Sequence
  Description of Artificial Sequence: Synthetic oligonucleotide
  Antisense strand to SEQ ID NO: 21944
caaugccacugauucacag

SEQ ID NO: 21946 - RNA, 19 nt, Artificial Sequence
  Description of Artificial Sequence: Synthetic oligonucleotide
  Sense strand starting at position 2969 of SEQ ID NO: 240
uggaaaugucaccagcgca

SEQ ID NO: 21947 - RNA, 19 nt, Artificial Sequence
  Description of Artificial Sequence: Synthetic oligonucleotide
  Antisense strand to SEQ ID NO: 21946
ugcgcuggugacauuucca

SEQ ID NO: 21948 - RNA, 19 nt, Artificial Sequence
  Description of Artificial Sequence: Synthetic oligonucleotide
  Sense strand starting at position 2936 of SEQ ID NO: 240
gaaugucgaggugaguuua

SEQ ID NO: 21949 - RNA, 19 nt, Artificial Sequence
  Description of Artificial Sequence: Synthetic oligonucleotide
  Antisense strand to SEQ ID NO: 21948
uaaacucaccucgacauuc

SEQ ID NO: 21950 - RNA, 19 nt, Artificial Sequence
  Description of Artificial Sequence: Synthetic oligonucleotide
  Sense strand starting at position 2921 of SEQ ID NO: 240
ccaggccaguucucugaau

SEQ ID NO: 21951 - RNA, 19 nt, Artificial Sequence
  Description of Artificial Sequence: Synthetic oligonucleotide
  Antisense strand to SEQ ID NO: 21950
auucagagaacuggccugg

SEQ ID NO: 21952 - RNA, 19 nt, Artificial Sequence
  Description of Artificial Sequence: Synthetic oligonucleotide
  Sense strand starting at position 2870 of SEQ ID NO: 240
ggcucagauguuugagggu

SEQ ID NO: 21953 - RNA, 19 nt, Artificial Sequence
  Description of Artificial Sequence: Synthetic oligonucleotide
  Antisense strand to SEQ ID NO: 21952
acccucaaacaucugagcc

SEQ ID NO: 21954 - RNA, 19 nt, Artificial Sequence
  Description of Artificial Sequence: Synthetic oligonucleotide
  Sense strand starting at position 2862 of SEQ ID NO: 240
caagacuuggcucagaugu

SEQ ID NO: 21955 - RNA, 19 nt, Artificial Sequence
  Description of Artificial Sequence: Synthetic oligonucleotide
  Antisense strand to SEQ ID NO: 21954
acaucugagccaagucuug

SEQ ID NO: 21956 - RNA, 19 nt, Artificial Sequence
  Description of Artificial Sequence: Synthetic oligonucleotide
  Sense strand starting at position 2859 of SEQ ID NO: 240
augcaagacuuggcucaga

SEQ ID NO: 21957 - RNA, 19 nt, Artificial Sequence
  Description of Artificial Sequence: Synthetic oligonucleotide
  Antisense strand to SEQ ID NO: 21956
ucugagccaagucuugcau

SEQ ID NO: 21958 - RNA, 19 nt, Artificial Sequence
  Description of Artificial Sequence: Synthetic oligonucleotide
  Sense strand starting at position 2838 of SEQ ID NO: 240
cggauuccugaucaugcuu

SEQ ID NO: 21959 - RNA, 19 nt, Artificial Sequence
  Description of Artificial Sequence: Synthetic oligonucleotide
  Antisense strand to SEQ ID NO: 21958
aagcaugaucaggaauccg

SEQ ID NO: 21960 - RNA, 19 nt, Artificial Sequence
  Description of Artificial Sequence: Synthetic oligonucleotide
  Sense strand starting at position 2837 of SEQ ID NO: 240
ucggauuccugaucaugcu

SEQ ID NO: 21961 - RNA, 19 nt, Artificial Sequence
  Description of Artificial Sequence: Synthetic oligonucleotide
  Antisense strand to SEQ ID NO: 21960
agcaugaucaggaauccga

SEQ ID NO: 21962 - RNA, 19 nt, Artificial Sequence
  Description of Artificial Sequence: Synthetic oligonucleotide
  Sense strand starting at position 2574 of SEQ ID NO: 240
cuguguuucccagauacug

SEQ ID NO: 21963 - RNA, 19 nt, Artificial Sequence
  Description of Artificial Sequence: Synthetic oligonucleotide
  Antisense strand to SEQ ID NO: 21962
caguaucugggaaacacag

SEQ ID NO: 21964 - RNA, 19 nt, Artificial Sequence
  Description of Artificial Sequence: Synthetic oligonucleotide
  Sense strand starting at position 2561 of SEQ ID NO: 240
uggauuuauucuucugugu

SEQ ID NO: 21965 - RNA, 19 nt, Artificial Sequence
  Description of Artificial Sequence: Synthetic oligonucleotide
  Antisense strand to SEQ ID NO: 21964
acacagaagaauaaaucca

SEQ ID NO: 21966 - RNA, 19 nt, Artificial Sequence
  Description of Artificial Sequence: Synthetic oligonucleotide
  Sense strand starting at position 2514 of SEQ ID NO: 240
cugccuagagucuaggaaa

SEQ ID NO: 21967 - RNA, 19 nt, Artificial Sequence
  Description of Artificial Sequence: Synthetic oligonucleotide
  Antisense strand to SEQ ID NO: 21966
uuuccuagacucuaggcag

SEQ ID NO: 21968 - RNA, 19 nt, Artificial Sequence
  Description of Artificial Sequence: Synthetic oligonucleotide
  Sense strand starting at position 2370 of SEQ ID NO: 240
guuguagucccugagacca

SEQ ID NO: 21969 - RNA, 19 nt, Artificial Sequence
  Description of Artificial Sequence: Synthetic oligonucleotide
  Antisense strand to SEQ ID NO: 21968
uggucucagggacuacaac

SEQ ID NO: 21970 - RNA, 19 nt, Artificial Sequence
  Description of Artificial Sequence: Synthetic oligonucleotide
  Sense strand starting at position 2332 of SEQ ID NO: 240
gcuugaucccacuaucaug

SEQ ID NO: 21971 - RNA, 19 nt, Artificial Sequence
  Description of Artificial Sequence: Synthetic oligonucleotide
  Antisense strand to SEQ ID NO: 21970
caugauagugggaucaagc

SEQ ID NO: 21972 - RNA, 19 nt, Artificial Sequence
  Description of Artificial Sequence: Synthetic oligonucleotide
  Sense strand starting at position 2301 of SEQ ID NO: 240
agcgaaugccuugaagaaa

SEQ ID NO: 21973 - RNA, 19 nt, Artificial Sequence
  Description of Artificial Sequence: Synthetic oligonucleotide
  Antisense strand to SEQ ID NO: 21972
uuucuucaaggcauucgcu

SEQ ID NO: 21974 - RNA, 19 nt, Artificial Sequence
  Description of Artificial Sequence: Synthetic oligonucleotide
  Sense strand starting at position 2300 of SEQ ID NO: 240
uagcgaaugccuugaagaa

SEQ ID NO: 21975 - RNA, 19 nt, Artificial Sequence
  Description of Artificial Sequence: Synthetic oligonucleotide
  Antisense strand to SEQ ID NO: 21974
uucuucaaggcauucgcua

SEQ ID NO: 21976 - RNA, 19 nt, Artificial Sequence
  Description of Artificial Sequence: Synthetic oligonucleotide
  Sense strand starting at position 2233 of SEQ ID NO: 240
uggcguauuugugcuaauu

SEQ ID NO: 21977 - RNA, 19 nt, Artificial Sequence
  Description of Artificial Sequence: Synthetic oligonucleotide
  Antisense strand to SEQ ID NO: 21976
aauuagcacaaauacgcca

SEQ ID NO: 21978 - RNA, 19 nt, Artificial Sequence
  Description of Artificial Sequence: Synthetic oligonucleotide
  Sense strand starting at position 1996 of SEQ ID NO: 240
ggccgacgucuacagguaa

SEQ ID NO: 21979 - RNA, 19 nt, Artificial Sequence
  Description of Artificial Sequence: Synthetic oligonucleotide
  Antisense strand to SEQ ID NO: 21978
uuaccuguagacgucggcc

SEQ ID NO: 21980 - RNA, 19 nt, Artificial Sequence
  Description of Artificial Sequence: Synthetic oligonucleotide
  Sense strand starting at position 903 of SEQ ID NO: 240
gcauuuggauaguauuaac

SEQ ID NO: 21981 - RNA, 19 nt, Artificial Sequence
  Description of Artificial Sequence: Synthetic oligonucleotide
  Antisense strand to SEQ ID NO: 21980
guuaauacuauccaaaugc

SEQ ID NO: 21982 - RNA, 19 nt, Artificial Sequence
  Description of Artificial Sequence: Synthetic oligonucleotide
  Sense strand starting at position 859 of SEQ ID NO: 240
gaggcaaggccuuggauua

SEQ ID NO: 21983 - RNA, 19 nt, Artificial Sequence
  Description of Artificial Sequence: Synthetic oligonucleotide
  Antisense strand to SEQ ID NO: 21982
uaauccaaggccuugccuc

SEQ ID NO: 21984 - RNA, 19 nt, Artificial Sequence
  Description of Artificial Sequence: Synthetic oligonucleotide
  Sense strand starting at position 818 of SEQ ID NO: 240
agacguucuaguuggaaca

SEQ ID NO: 21985 - RNA, 19 nt, Artificial Sequence
  Description of Artificial Sequence: Synthetic oligonucleotide
  Antisense strand to SEQ ID NO: 21984
uguuccaacuagaacgucu

SEQ ID NO: 21986 - RNA, 19 nt, Artificial Sequence
  Description of Artificial Sequence: Synthetic oligonucleotide
  Sense strand starting at position 87 of SEQ ID NO: 240
aaugguguuugcuuaauug

SEQ ID NO: 21987 - RNA, 19 nt, Artificial Sequence
  Description of Artificial Sequence: Synthetic oligonucleotide
  Antisense strand to SEQ ID NO: 21986
caauuaagcaaacaccauu

SEQ ID NO: 21988 - RNA, 19 nt, Artificial Sequence
  Description of Artificial Sequence: Synthetic oligonucleotide
  Sense strand starting at position 84 of SEQ ID NO: 240
aauaaugguguuugcuuaa

SEQ ID NO: 21989 - RNA, 19 nt, Artificial Sequence
  Description of Artificial Sequence: Synthetic oligonucleotide
  Antisense strand to SEQ ID NO: 21988
uuaagcaaacaccauuauu

SEQ ID NO: 21990 - RNA, 19 nt, Artificial Sequence
  Description of Artificial Sequence: Synthetic oligonucleotide
  Sense strand starting at position 83 of SEQ ID NO: 240
aaauaaugguguuugcuua

SEQ ID NO: 21991 - RNA, 19 nt, Artificial Sequence
  Description of Artificial Sequence: Synthetic oligonucleotide
  Antisense strand to SEQ ID NO: 21990
uaagcaaacaccauuauuu

SEQ ID NO: 21992 - RNA, 19 nt, Artificial Sequence
  Description of Artificial Sequence: Synthetic oligonucleotide
  Sense strand starting at position 78 of SEQ ID NO: 240
augugaaauaaugguguuu

SEQ ID NO: 21993 - RNA, 19 nt, Artificial Sequence
  Description of Artificial Sequence: Synthetic oligonucleotide
  Antisense strand to SEQ ID NO: 21992
aaacaccauuauuucacau

SEQ ID NO: 21994 - RNA, 19 nt, Artificial Sequence
  Description of Artificial Sequence: Synthetic oligonucleotide
  Sense strand starting at position 75 of SEQ ID NO: 241
ccucaaagaugccuauuga

SEQ ID NO: 21995 - RNA, 19 nt, Artificial Sequence
  Description of Artificial Sequence: Synthetic oligonucleotide
  Antisense strand to SEQ ID NO: 21994
ucaauaggcaucuuugagg

SEQ ID NO: 21996 - RNA, 19 nt, Artificial Sequence
  Description of Artificial Sequence: Synthetic oligonucleotide
  Sense strand starting at position 88 of SEQ ID NO: 241
uauugaauccagugcugau

SEQ ID NO: 21997 - RNA, 19 nt, Artificial Sequence
  Description of Artificial Sequence: Synthetic oligonucleotide
  Antisense strand to SEQ ID NO: 21996
aucagcacuggauucaaua

SEQ ID NO: 21998 - RNA, 19 nt, Artificial Sequence
  Description of Artificial Sequence: Synthetic oligonucleotide
  Sense strand starting at position 92 of SEQ ID NO: 241
gaauccagugcugaucaca

SEQ ID NO: 21999 - RNA, 19 nt, Artificial Sequence
  Description of Artificial Sequence: Synthetic oligonucleotide
  Antisense strand to SEQ ID NO: 21998
ugugaucagcacuggauuc

SEQ ID NO: 22000 - RNA, 19 nt, Artificial Sequence
  Description of Artificial Sequence: Synthetic oligonucleotide
  Sense strand starting at position 275 of SEQ ID NO: 241
uccgaaaucucaccacagu

SEQ ID NO: 22001 - RNA, 19 nt, Artificial Sequence
  Description of Artificial Sequence: Synthetic oligonucleotide
  Antisense strand to SEQ ID NO: 22000
acuguggugagauuucgga

SEQ ID NO: 22002 - RNA, 19 nt, Artificial Sequence
  Description of Artificial Sequence: Synthetic oligonucleotide
  Sense strand starting at position 276 of SEQ ID NO: 241
ccgaaaucucaccacaguu

SEQ ID NO: 22003 - RNA, 19 nt, Artificial Sequence
  Description of Artificial Sequence: Synthetic oligonucleotide
  Antisense strand to SEQ ID NO: 22002
aacuguggugagauuucgg

SEQ ID NO: 22004 - RNA, 19 nt, Artificial Sequence
  Description of Artificial Sequence: Synthetic oligonucleotide
  Sense strand starting at position 462 of SEQ ID NO: 241
gaacuaucucugggcaaag

SEQ ID NO: 22005 - RNA, 19 nt, Artificial Sequence
  Description of Artificial Sequence: Synthetic oligonucleotide
  Antisense strand to SEQ ID NO: 22004
cuuugcccagagauaguuc

SEQ ID NO: 22006 - RNA, 19 nt, Artificial Sequence
  Description of Artificial Sequence: Synthetic oligonucleotide
  Sense strand starting at position 484 of SEQ ID NO: 241
agguaaggcuguuuccuau

SEQ ID NO: 22007 - RNA, 19 nt, Artificial Sequence
  Description of Artificial Sequence: Synthetic oligonucleotide
  Antisense strand to SEQ ID NO: 22006
auaggaaacagccuuaccu

SEQ ID NO: 22008 - RNA, 19 nt, Artificial Sequence
  Description of Artificial Sequence: Synthetic oligonucleotide
  Sense strand starting at position 556 of SEQ ID NO: 241
gcaccuguggugcagaaau

SEQ ID NO: 22009 - RNA, 19 nt, Artificial Sequence
  Description of Artificial Sequence: Synthetic oligonucleotide
  Antisense strand to SEQ ID NO: 22008
auuucugcaccacaggugc

SEQ ID NO: 22010 - RNA, 19 nt, Artificial Sequence
  Description of Artificial Sequence: Synthetic oligonucleotide
  Sense strand starting at position 678 of SEQ ID NO: 241
ggaugacuauagcugacaa

SEQ ID NO: 22011 - RNA, 19 nt, Artificial Sequence
  Description of Artificial Sequence: Synthetic oligonucleotide
  Antisense strand to SEQ ID NO: 22010
uugucagcuauagucaucc

SEQ ID NO: 22012 - RNA, 19 nt, Artificial Sequence
  Description of Artificial Sequence: Synthetic oligonucleotide
  Sense strand starting at position 753 of SEQ ID NO: 241
acacguuugaggugaauau

SEQ ID NO: 22013 - RNA, 19 nt, Artificial Sequence
  Description of Artificial Sequence: Synthetic oligonucleotide
  Antisense strand to SEQ ID NO: 22012
auauucaccucaaacgugu

SEQ ID NO: 22014 - RNA, 19 nt, Artificial Sequence
  Description of Artificial Sequence: Synthetic oligonucleotide
  Sense strand starting at position 757 of SEQ ID NO: 241
guuugaggugaauaugcua

SEQ ID NO: 22015 - RNA, 19 nt, Artificial Sequence
  Description of Artificial Sequence: Synthetic oligonucleotide
  Antisense strand to SEQ ID NO: 22014
uagcauauucaccucaaac

SEQ ID NO: 22016 - RNA, 19 nt, Artificial Sequence
  Description of Artificial Sequence: Synthetic oligonucleotide
  Sense strand starting at position 801 of SEQ ID NO: 241
uuacauuuaucggaacauc

SEQ ID NO: 22017 - RNA, 19 nt, Artificial Sequence
  Description of Artificial Sequence: Synthetic oligonucleotide
  Antisense strand to SEQ ID NO: 22016
gauguuccgauaaauguaa

SEQ ID NO: 22018 - RNA, 19 nt, Artificial Sequence
  Description of Artificial Sequence: Synthetic oligonucleotide
  Sense strand starting at position 809 of SEQ ID NO: 241
aucggaacaucacuauaua

SEQ ID NO: 22019 - RNA, 19 nt, Artificial Sequence
  Description of Artificial Sequence: Synthetic oligonucleotide
  Antisense strand to SEQ ID NO: 22018
uauauagugauguuccgau

SEQ ID NO: 22020 - RNA, 19 nt, Artificial Sequence
  Description of Artificial Sequence: Synthetic oligonucleotide
  Sense strand starting at position 839 of SEQ ID NO: 241
uguacaauucugugucaau

SEQ ID NO: 22021 - RNA, 19 nt, Artificial Sequence
  Description of Artificial Sequence: Synthetic oligonucleotide
  Antisense strand to SEQ ID NO: 22020
auugacacagaauuguaca

SEQ ID NO: 22022 - RNA, 19 nt, Artificial Sequence
  Description of Artificial Sequence: Synthetic oligonucleotide
  Sense strand starting at position 840 of SEQ ID NO: 241
guacaauucugugucaauu

SEQ ID NO: 22023 - RNA, 19 nt, Artificial Sequence
  Description of Artificial Sequence: Synthetic oligonucleotide
  Antisense strand to SEQ ID NO: 22022
aauugacacagaauuguac

SEQ ID NO: 22024 - RNA, 19 nt, Artificial Sequence
  Description of Artificial Sequence: Synthetic oligonucleotide
  Sense strand starting at position 895 of SEQ ID NO: 241
gacccacucugcuugguua

SEQ ID NO: 22025 - RNA, 19 nt, Artificial Sequence
  Description of Artificial Sequence: Synthetic oligonucleotide
  Antisense strand to SEQ ID NO: 22024
uaaccaagcagaguggguc

SEQ ID NO: 22026 - RNA, 19 nt, Artificial Sequence
  Description of Artificial Sequence: Synthetic oligonucleotide
  Sense strand starting at position 911 of SEQ ID NO: 241
uuagcuuuauguucccaca

SEQ ID NO: 22027 - RNA, 19 nt, Artificial Sequence
  Description of Artificial Sequence: Synthetic oligonucleotide
  Antisense strand to SEQ ID NO: 22026
ugugggaacauaaagcuaa

SEQ ID NO: 22028 - RNA, 19 nt, Artificial Sequence
  Description of Artificial Sequence: Synthetic oligonucleotide
  Sense strand starting at position 934 of SEQ ID NO: 241
cuguaugucacugguauaa

SEQ ID NO: 22029 - RNA, 19 nt, Artificial Sequence
  Description of Artificial Sequence: Synthetic oligonucleotide
  Antisense strand to SEQ ID NO: 22028
uuauaccagugacauacag

SEQ ID NO: 22030 - RNA, 19 nt, Artificial Sequence
  Description of Artificial Sequence: Synthetic oligonucleotide
  Sense strand starting at position 1020 of SEQ ID NO: 241
agaacagauucucccaagu

SEQ ID NO: 22031 - RNA, 19 nt, Artificial Sequence
  Description of Artificial Sequence: Synthetic oligonucleotide
  Antisense strand to SEQ ID NO: 22030
acuugggagaaucuguucu

SEQ ID NO: 22032 - RNA, 19 nt, Artificial Sequence
  Description of Artificial Sequence: Synthetic oligonucleotide
  Sense strand starting at position 1033 of SEQ ID NO: 241
ccaaguaagcccugguauu

SEQ ID NO: 22033 - RNA, 19 nt, Artificial Sequence
  Description of Artificial Sequence: Synthetic oligonucleotide
  Antisense strand to SEQ ID NO: 22032
aauaccagggcuuacuugg

SEQ ID NO: 22034 - RNA, 19 nt, Artificial Sequence
  Description of Artificial Sequence: Synthetic oligonucleotide
  Sense strand starting at position 1034 of SEQ ID NO: 241
caaguaagcccugguauuc

SEQ ID NO: 22035 - RNA, 19 nt, Artificial Sequence
  Description of Artificial Sequence: Synthetic oligonucleotide
  Antisense strand to SEQ ID NO: 22034
gaauaccagggcuuacuug

SEQ ID NO: 22036 - RNA, 19 nt, Artificial Sequence
  Description of Artificial Sequence: Synthetic oligonucleotide
  Sense strand starting at position 1168 of SEQ ID NO: 241
agcucugggaucuggaaga

SEQ ID NO: 22037 - RNA, 19 nt, Artificial Sequence
  Description of Artificial Sequence: Synthetic oligonucleotide
  Antisense strand to SEQ ID NO: 22036
ucuuccagaucccagagcu

SEQ ID NO: 22038 - RNA, 19 nt, Artificial Sequence
  Description of Artificial Sequence: Synthetic oligonucleotide
  Sense strand starting at position 1247 of SEQ ID NO: 241
cagcuuuaccaguguggga

SEQ ID NO: 22039 - RNA, 19 nt, Artificial Sequence
  Description of Artificial Sequence: Synthetic oligonucleotide
  Antisense strand to SEQ ID NO: 22038
ucccacacugguaaagcug

SEQ ID NO: 22040 - RNA, 19 nt, Artificial Sequence
  Description of Artificial Sequence: Synthetic oligonucleotide
  Sense strand starting at position 1390 of SEQ ID NO: 241
uucguuuaguguccauuua

SEQ ID NO: 22041 - RNA, 19 nt, Artificial Sequence
  Description of Artificial Sequence: Synthetic oligonucleotide
  Antisense strand to SEQ ID NO: 22040
uaaauggacacuaaacgaa

SEQ ID NO: 22042 - RNA, 19 nt, Artificial Sequence
  Description of Artificial Sequence: Synthetic oligonucleotide
  Sense strand starting at position 1536 of SEQ ID NO: 241
acuuaaugugccugguuaa

SEQ ID NO: 22043 - RNA, 19 nt, Artificial Sequence
  Description of Artificial Sequence: Synthetic oligonucleotide
  Antisense strand to SEQ ID NO: 22042
uuaaccaggcacauuaagu

SEQ ID NO: 22044 - RNA, 19 nt, Artificial Sequence
  Description of Artificial Sequence: Synthetic oligonucleotide
  Sense strand starting at position 1537 of SEQ ID NO: 241
cuuaaugugccugguuaaa

SEQ ID NO: 22045 - RNA, 19 nt, Artificial Sequence
  Description of Artificial Sequence: Synthetic oligonucleotide
  Antisense strand to SEQ ID NO: 22044
uuuaaccaggcacauuaag

SEQ ID NO: 22046 - RNA, 19 nt, Artificial Sequence
  Description of Artificial Sequence: Synthetic oligonucleotide
  Sense strand starting at position 1539 of SEQ ID NO: 241
uaaugugccugguuaaaua

SEQ ID NO: 22047 - RNA, 19 nt, Artificial Sequence
  Description of Artificial Sequence: Synthetic oligonucleotide
  Antisense strand to SEQ ID NO: 22046
uauuuaaccaggcacauua

SEQ ID NO: 22048 - RNA, 19 nt, Artificial Sequence
  Description of Artificial Sequence: Synthetic oligonucleotide
  Sense strand starting at position 1561 of SEQ ID NO: 241
ucucauacugccggagaga

SEQ ID NO: 22049 - RNA, 19 nt, Artificial Sequence
  Description of Artificial Sequence: Synthetic oligonucleotide
  Antisense strand to SEQ ID NO: 22048
ucucuccggcaguaugaga

SEQ ID NO: 22050 - RNA, 19 nt, Artificial Sequence
  Description of Artificial Sequence: Synthetic oligonucleotide
  Sense strand starting at position 1562 of SEQ ID NO: 241
cucauacugccggagagaa

SEQ ID NO: 22051 - RNA, 19 nt, Artificial Sequence
  Description of Artificial Sequence: Synthetic oligonucleotide
  Antisense strand to SEQ ID NO: 22050
uucucuccggcaguaugag

SEQ ID NO: 22052 - RNA, 19 nt, Artificial Sequence
  Description of Artificial Sequence: Synthetic oligonucleotide
  Sense strand starting at position 1574 of SEQ ID NO: 241
gagagaaggcuccgguuca

SEQ ID NO: 22053 - RNA, 19 nt, Artificial Sequence
  Description of Artificial Sequence: Synthetic oligonucleotide
  Antisense strand to SEQ ID NO: 22052
ugaaccggagccuucucuc

SEQ ID NO: 22054 - RNA, 19 nt, Artificial Sequence
  Description of Artificial Sequence: Synthetic oligonucleotide
  Sense strand starting at position 2420 of SEQ ID NO: 241
guagaauguauugguuuau

SEQ ID NO: 22055 - RNA, 19 nt, Artificial Sequence
  Description of Artificial Sequence: Synthetic oligonucleotide
  Antisense strand to SEQ ID NO: 22054
auaaaccaauacauucuac

SEQ ID NO: 22056 - RNA, 19 nt, Artificial Sequence
  Description of Artificial Sequence: Synthetic oligonucleotide
  Sense strand starting at position 2424 of SEQ ID NO: 241
aauguauugguuuaucaga

SEQ ID NO: 22057 - RNA, 19 nt, Artificial Sequence
  Description of Artificial Sequence: Synthetic oligonucleotide
  Antisense strand to SEQ ID NO: 22056
ucugauaaaccaauacauu

SEQ ID NO: 22058 - RNA, 19 nt, Artificial Sequence
  Description of Artificial Sequence: Synthetic oligonucleotide
  Sense strand starting at position 2426 of SEQ ID NO: 241
uguauugguuuaucagauu

SEQ ID NO: 22059 - RNA, 19 nt, Artificial Sequence
  Description of Artificial Sequence: Synthetic oligonucleotide
  Antisense strand to SEQ ID NO: 22058
aaucugauaaaccaauaca

SEQ ID NO: 22060 - RNA, 19 nt, Artificial Sequence
  Description of Artificial Sequence: Synthetic oligonucleotide
  Sense strand starting at position 2617 of SEQ ID NO: 241
ucucauaacguuuauugaa

SEQ ID NO: 22061 - RNA, 19 nt, Artificial Sequence
  Description of Artificial Sequence: Synthetic oligonucleotide
  Antisense strand to SEQ ID NO: 22060
uucaauaaacguuaugaga

SEQ ID NO: 22062 - RNA, 19 nt, Artificial Sequence
  Description of Artificial Sequence: Synthetic oligonucleotide
  Sense strand starting at position 2619 of SEQ ID NO: 241
ucauaacguuuauugaacu

SEQ ID NO: 22063 - RNA, 19 nt, Artificial Sequence
  Description of Artificial Sequence: Synthetic oligonucleotide
  Antisense strand to SEQ ID NO: 22062
aguucaauaaacguuauga

SEQ ID NO: 22064 - RNA, 19 nt, Artificial Sequence
  Description of Artificial Sequence: Synthetic oligonucleotide
  Sense strand starting at position 2680 of SEQ ID NO: 241
gcaggagcuguggagauua

SEQ ID NO: 22065 - RNA, 19 nt, Artificial Sequence
  Description of Artificial Sequence: Synthetic oligonucleotide
  Antisense strand to SEQ ID NO: 22064
uaaucuccacagcuccugc

SEQ ID NO: 22066 - RNA, 19 nt, Artificial Sequence
  Description of Artificial Sequence: Synthetic oligonucleotide
  Sense strand starting at position 3625 of SEQ ID NO: 241
gagccaaaggaguguuuau

SEQ ID NO: 22067 - RNA, 19 nt, Artificial Sequence
  Description of Artificial Sequence: Synthetic oligonucleotide
  Antisense strand to SEQ ID NO: 22066
auaaacacuccuuuggcuc

SEQ ID NO: 22068 - RNA, 19 nt, Artificial Sequence
  Description of Artificial Sequence: Synthetic oligonucleotide
  Sense strand starting at position 3632 of SEQ ID NO: 241
aggaguguuuaugucacca

SEQ ID NO: 22069 - RNA, 19 nt, Artificial Sequence
  Description of Artificial Sequence: Synthetic oligonucleotide
  Antisense strand to SEQ ID NO: 22068
uggugacauaaacacuccu

SEQ ID NO: 22070 - RNA, 19 nt, Artificial Sequence
  Description of Artificial Sequence: Synthetic oligonucleotide
  Sense strand starting at position 3823 of SEQ ID NO: 241
cccagauauuucuagagcu

SEQ ID NO: 22071 - RNA, 19 nt, Artificial Sequence
  Description of Artificial Sequence: Synthetic oligonucleotide
  Antisense strand to SEQ ID NO: 22070
agcucuagaaauaucuggg

SEQ ID NO: 22072 - RNA, 19 nt, Artificial Sequence
  Description of Artificial Sequence: Synthetic oligonucleotide
  Sense strand starting at position 3944 of SEQ ID NO: 241
uuguaauagccacaguacu

SEQ ID NO: 22073 - RNA, 19 nt, Artificial Sequence
  Description of Artificial Sequence: Synthetic oligonucleotide
  Antisense strand to SEQ ID NO: 22072
aguacuguggcuauuacaa

SEQ ID NO: 22074 - RNA, 19 nt, Artificial Sequence
  Description of Artificial Sequence: Synthetic oligonucleotide
  Sense strand starting at position 397 of SEQ ID NO: 242
cggaauuccucucccagca

SEQ ID NO: 22075 - RNA, 19 nt, Artificial Sequence
  Description of Artificial Sequence: Synthetic oligonucleotide
  Antisense strand to SEQ ID NO: 22074
ugcugggagaggaauuccg

SEQ ID NO: 22076 - RNA, 19 nt, Artificial Sequence
  Description of Artificial Sequence: Synthetic oligonucleotide
  Sense strand starting at position 424 of SEQ ID NO: 242
gcgcuauuauuaguugauu

SEQ ID NO: 22077 - RNA, 19 nt, Artificial Sequence
  Description of Artificial Sequence: Synthetic oligonucleotide
  Antisense strand to SEQ ID NO: 22076
aaucaacuaauaauagcgc

SEQ ID NO: 22078 - RNA, 19 nt, Artificial Sequence
  Description of Artificial Sequence: Synthetic oligonucleotide
  Sense strand starting at position 425 of SEQ ID NO: 242
cgcuauuauuaguugauua

SEQ ID NO: 22079 - RNA, 19 nt, Artificial Sequence
  Description of Artificial Sequence: Synthetic oligonucleotide
  Antisense strand to SEQ ID NO: 22078
uaaucaacuaauaauagcg

SEQ ID NO: 22080 - RNA, 19 nt, Artificial Sequence
  Description of Artificial Sequence: Synthetic oligonucleotide
  Sense strand starting at position 469 of SEQ ID NO: 242
ggcaauuggucuugaagga

SEQ ID NO: 22081 - RNA, 19 nt, Artificial Sequence
  Description of Artificial Sequence: Synthetic oligonucleotide
  Antisense strand to SEQ ID NO: 22080
uccuucaagaccaauugcc

SEQ ID NO: 22082 - RNA, 19 nt, Artificial Sequence
  Description of Artificial Sequence: Synthetic oligonucleotide
  Sense strand starting at position 501 of SEQ ID NO: 242
gcgaguaaaucugagacag

SEQ ID NO: 22083 - RNA, 19 nt, Artificial Sequence
  Description of Artificial Sequence: Synthetic oligonucleotide
  Antisense strand to SEQ ID NO: 22082
cugucucagauuuacucgc

SEQ ID NO: 22084 - RNA, 19 nt, Artificial Sequence
  Description of Artificial Sequence: Synthetic oligonucleotide
  Sense strand starting at position 503 of SEQ ID NO: 242
gaguaaaucugagacagga

SEQ ID NO: 22085 - RNA, 19 nt, Artificial Sequence
  Description of Artificial Sequence: Synthetic oligonucleotide
  Antisense strand to SEQ ID NO: 22084
uccugucucagauuuacuc

SEQ ID NO: 22086 - RNA, 19 nt, Artificial Sequence
  Description of Artificial Sequence: Synthetic oligonucleotide
  Sense strand starting at position 610 of SEQ ID NO: 242
agggaaugcugucuggaau

SEQ ID NO: 22087 - RNA, 19 nt, Artificial Sequence
  Description of Artificial Sequence: Synthetic oligonucleotide
  Antisense strand to SEQ ID NO: 22086
auuccagacagcauucccu

SEQ ID NO: 22088 - RNA, 19 nt, Artificial Sequence
  Description of Artificial Sequence: Synthetic oligonucleotide
  Sense strand starting at position 611 of SEQ ID NO: 242
gggaaugcugucuggaauc

SEQ ID NO: 22089 - RNA, 19 nt, Artificial Sequence
  Description of Artificial Sequence: Synthetic oligonucleotide
  Antisense strand to SEQ ID NO: 22088
gauuccagacagcauuccc

SEQ ID NO: 22090 - RNA, 19 nt, Artificial Sequence
  Description of Artificial Sequence: Synthetic oligonucleotide
  Sense strand starting at position 685 of SEQ ID NO: 242
uguucuccuccuugagcau

SEQ ID NO: 22091 - RNA, 19 nt, Artificial Sequence
  Description of Artificial Sequence: Synthetic oligonucleotide
  Antisense strand to SEQ ID NO: 22090
augcucaaggaggagaaca

SEQ ID NO: 22092 - RNA, 19 nt, Artificial Sequence
  Description of Artificial Sequence: Synthetic oligonucleotide
  Sense strand starting at position 697 of SEQ ID NO: 242
ugagcaucaaucgggagaa

SEQ ID NO: 22093 - RNA, 19 nt, Artificial Sequence
  Description of Artificial Sequence: Synthetic oligonucleotide
  Antisense strand to SEQ ID NO: 22092
uucucccgauugaugcuca

SEQ ID NO: 22094 - RNA, 19 nt, Artificial Sequence
  Description of Artificial Sequence: Synthetic oligonucleotide
  Sense strand starting at position 698 of SEQ ID NO: 242
gagcaucaaucgggagaaa

SEQ ID NO: 22095 - RNA, 19 nt, Artificial Sequence
  Description of Artificial Sequence: Synthetic oligonucleotide
  Antisense strand to SEQ ID NO: 22094
uuucucccgauugaugcuc

SEQ ID NO: 22096 - RNA, 19 nt, Artificial Sequence
  Description of Artificial Sequence: Synthetic oligonucleotide
  Sense strand starting at position 1095 of SEQ ID NO: 242
gguagcaauucuguugcca

SEQ ID NO: 22097 - RNA, 19 nt, Artificial Sequence
  Description of Artificial Sequence: Synthetic oligonucleotide
  Antisense strand to SEQ ID NO: 22096
uggcaacagaauugcuacc

SEQ ID NO: 22098 - RNA, 19 nt, Artificial Sequence
  Description of Artificial Sequence: Synthetic oligonucleotide
  Sense strand starting at position 1099 of SEQ ID NO: 242
gcaauucuguugccaagga

SEQ ID NO: 22099 - RNA, 19 nt, Artificial Sequence
  Description of Artificial Sequence: Synthetic oligonucleotide
  Antisense strand to SEQ ID NO: 22098
uccuuggcaacagaauugc

SEQ ID NO: 22100 - RNA, 19 nt, Artificial Sequence
  Description of Artificial Sequence: Synthetic oligonucleotide
  Sense strand starting at position 1352 of SEQ ID NO: 242
gacagugaacuaugaucuu

SEQ ID NO: 22101 - RNA, 19 nt, Artificial Sequence
  Description of Artificial Sequence: Synthetic oligonucleotide
  Antisense strand to SEQ ID NO: 22100
aagaucauaguucacuguc

SEQ ID NO: 22102 - RNA, 19 nt, Artificial Sequence
  Description of Artificial Sequence: Synthetic oligonucleotide
  Sense strand starting at position 1610 of SEQ ID NO: 242
ucaagcaucucuuggucaa

SEQ ID NO: 22103 - RNA, 19 nt, Artificial Sequence
  Description of Artificial Sequence: Synthetic oligonucleotide
  Antisense strand to SEQ ID NO: 22102
uugaccaagagaugcuuga

SEQ ID NO: 22104 - RNA, 19 nt, Artificial Sequence
  Description of Artificial Sequence: Synthetic oligonucleotide
  Sense strand starting at position 1613 of SEQ ID NO: 242
agcaucucuuggucaacuu

SEQ ID NO: 22105 - RNA, 19 nt, Artificial Sequence
  Description of Artificial Sequence: Synthetic oligonucleotide
  Antisense strand to SEQ ID NO: 22104
aaguugaccaagagaugcu

SEQ ID NO: 22106 - RNA, 19 nt, Artificial Sequence
  Description of Artificial Sequence: Synthetic oligonucleotide
  Sense strand starting at position 1785 of SEQ ID NO: 242
ccggaccucaccugagaaa

SEQ ID NO: 22107 - RNA, 19 nt, Artificial Sequence
  Description of Artificial Sequence: Synthetic oligonucleotide
  Antisense strand to SEQ ID NO: 22106
uuucucaggugagguccgg

SEQ ID NO: 22108 - RNA, 19 nt, Artificial Sequence
  Description of Artificial Sequence: Synthetic oligonucleotide
  Sense strand starting at position 1875 of SEQ ID NO: 242
ggcuucugauucugaugga

SEQ ID NO: 22109 - RNA, 19 nt, Artificial Sequence
  Description of Artificial Sequence: Synthetic oligonucleotide
  Antisense strand to SEQ ID NO: 22108
uccaucagaaucagaagcc

SEQ ID NO: 22110 - RNA, 19 nt, Artificial Sequence
  Description of Artificial Sequence: Synthetic oligonucleotide
  Sense strand starting at position 1876 of SEQ ID NO: 242
gcuucugauucugauggaa

SEQ ID NO: 22111 - RNA, 19 nt, Artificial Sequence
  Description of Artificial Sequence: Synthetic oligonucleotide
  Antisense strand to SEQ ID NO: 22110
uuccaucagaaucagaagc

SEQ ID NO: 22112 - RNA, 19 nt, Artificial Sequence
  Description of Artificial Sequence: Synthetic oligonucleotide
  Sense strand starting at position 1878 of SEQ ID NO: 242
uucugauucugauggaaga

SEQ ID NO: 22113 - RNA, 19 nt, Artificial Sequence
  Description of Artificial Sequence: Synthetic oligonucleotide
  Antisense strand to SEQ ID NO: 22112
ucuuccaucagaaucagaa

SEQ ID NO: 22114 - RNA, 19 nt, Artificial Sequence
  Description of Artificial Sequence: Synthetic oligonucleotide
  Sense strand starting at position 1901 of SEQ ID NO: 242
uggcuucuucaaggagugu

SEQ ID NO: 22115 - RNA, 19 nt, Artificial Sequence
  Description of Artificial Sequence: Synthetic oligonucleotide
  Antisense strand to SEQ ID NO: 22114
acacuccuugaagaagcca

SEQ ID NO: 22116 - RNA, 19 nt, Artificial Sequence
  Description of Artificial Sequence: Synthetic oligonucleotide
  Sense strand starting at position 2019 of SEQ ID NO: 242
ucuccugcccugggagaau

SEQ ID NO: 22117 - RNA, 19 nt, Artificial Sequence
  Description of Artificial Sequence: Synthetic oligonucleotide
  Antisense strand to SEQ ID NO: 22116
auucucccagggcaggaga

SEQ ID NO: 22118 - RNA, 19 nt, Artificial Sequence
  Description of Artificial Sequence: Synthetic oligonucleotide
  Sense strand starting at position 2033 of SEQ ID NO: 242
agaauuuaaucugaagcag

SEQ ID NO: 22119 - RNA, 19 nt, Artificial Sequence
  Description of Artificial Sequence: Synthetic oligonucleotide
  Antisense strand to SEQ ID NO: 22118
cugcuucagauuaaauucu

SEQ ID NO: 22120 - RNA, 19 nt, Artificial Sequence
  Description of Artificial Sequence: Synthetic oligonucleotide
  Sense strand starting at position 2170 of SEQ ID NO: 242
cugcaugggugagaugaau

SEQ ID NO: 22121 - RNA, 19 nt, Artificial Sequence
  Description of Artificial Sequence: Synthetic oligonucleotide
  Antisense strand to SEQ ID NO: 22120
auucaucucacccaugcag

SEQ ID NO: 22122 - RNA, 19 nt, Artificial Sequence
  Description of Artificial Sequence: Synthetic oligonucleotide
  Sense strand starting at position 2475 of SEQ ID NO: 242
cagagaugggcagauuguu

SEQ ID NO: 22123 - RNA, 19 nt, Artificial Sequence
  Description of Artificial Sequence: Synthetic oligonucleotide
  Antisense strand to SEQ ID NO: 22122
aacaaucugcccaucucug

SEQ ID NO: 22124 - RNA, 19 nt, Artificial Sequence
  Description of Artificial Sequence: Synthetic oligonucleotide
  Sense strand starting at position 2747 of SEQ ID NO: 242
ugcccauaaucccagugau

SEQ ID NO: 22125 - RNA, 19 nt, Artificial Sequence
  Description of Artificial Sequence: Synthetic oligonucleotide
  Antisense strand to SEQ ID NO: 22124
aucacugggauuaugggca

SEQ ID NO: 22126 - RNA, 19 nt, Artificial Sequence
  Description of Artificial Sequence: Synthetic oligonucleotide
  Sense strand starting at position 3303 of SEQ ID NO: 242
cagccugggcgauacaaua

SEQ ID NO: 22127 - RNA, 19 nt, Artificial Sequence
  Description of Artificial Sequence: Synthetic oligonucleotide
  Antisense strand to SEQ ID NO: 22126
uauuguaucgcccaggcug

SEQ ID NO: 22128 - RNA, 19 nt, Artificial Sequence
  Description of Artificial Sequence: Synthetic oligonucleotide
  Sense strand starting at position 3502 of SEQ ID NO: 242
agaaaucaauuggugugua

SEQ ID NO: 22129 - RNA, 19 nt, Artificial Sequence
  Description of Artificial Sequence: Synthetic oligonucleotide
  Antisense strand to SEQ ID NO: 22128
uacacaccaauugauuucu

SEQ ID NO: 22130 - RNA, 19 nt, Artificial Sequence
  Description of Artificial Sequence: Synthetic oligonucleotide
  Sense strand starting at position 3503 of SEQ ID NO: 242
gaaaucaauugguguguaa

SEQ ID NO: 22131 - RNA, 19 nt, Artificial Sequence
  Description of Artificial Sequence: Synthetic oligonucleotide
  Antisense strand to SEQ ID NO: 22130
uuacacaccaauugauuuc

SEQ ID NO: 22132 - RNA, 19 nt, Artificial Sequence
  Description of Artificial Sequence: Synthetic oligonucleotide
  Sense strand starting at position 3505 of SEQ ID NO: 242
aaucaauugguguguaaau

SEQ ID NO: 22133 - RNA, 19 nt, Artificial Sequence
  Description of Artificial Sequence: Synthetic oligonucleotide
  Antisense strand to SEQ ID NO: 22132
auuuacacaccaauugauu

SEQ ID NO: 22134 - RNA, 19 nt, Artificial Sequence
  Description of Artificial Sequence: Synthetic oligonucleotide
  Sense strand starting at position 3506 of SEQ ID NO: 242
aucaauugguguguaaauc

SEQ ID NO: 22135 - RNA, 19 nt, Artificial Sequence
  Description of Artificial Sequence: Synthetic oligonucleotide
  Antisense strand to SEQ ID NO: 22134
gauuuacacaccaauugau

SEQ ID NO: 22136 - RNA, 19 nt, Artificial Sequence
  Description of Artificial Sequence: Synthetic oligonucleotide
  Sense strand starting at position 3514 of SEQ ID NO: 242
guguguaaaucccaagucu

SEQ ID NO: 22137 - RNA, 19 nt, Artificial Sequence
  Description of Artificial Sequence: Synthetic oligonucleotide
  Antisense strand to SEQ ID NO: 22136
agacuugggauuuacacac

SEQ ID NO: 22138 - RNA, 19 nt, Artificial Sequence
  Description of Artificial Sequence: Synthetic oligonucleotide
  Sense strand starting at position 3589 of SEQ ID NO: 242
aggacuagaugguuccuaa

SEQ ID NO: 22139 - RNA, 19 nt, Artificial Sequence
  Description of Artificial Sequence: Synthetic oligonucleotide
  Antisense strand to SEQ ID NO: 22138
uuaggaaccaucuaguccu

SEQ ID NO: 22140 - RNA, 19 nt, Artificial Sequence
  Description of Artificial Sequence: Synthetic oligonucleotide
  Sense strand starting at position 3592 of SEQ ID NO: 242
acuagaugguuccuaauac

SEQ ID NO: 22141 - RNA, 19 nt, Artificial Sequence
  Description of Artificial Sequence: Synthetic oligonucleotide
  Antisense strand to SEQ ID NO: 22140
guauuaggaaccaucuagu

SEQ ID NO: 22142 - RNA, 19 nt, Artificial Sequence
  Description of Artificial Sequence: Synthetic oligonucleotide
  Sense strand starting at position 3696 of SEQ ID NO: 242
acuugccauuauugaaagu

SEQ ID NO: 22143 - RNA, 19 nt, Artificial Sequence
  Description of Artificial Sequence: Synthetic oligonucleotide
  Antisense strand to SEQ ID NO: 22142
acuuucaauaauggcaagu

SEQ ID NO: 22144 - RNA, 19 nt, Artificial Sequence
  Description of Artificial Sequence: Synthetic oligonucleotide
  Sense strand starting at position 3703 of SEQ ID NO: 242
auuauugaaagucgaggaa

SEQ ID NO: 22145 - RNA, 19 nt, Artificial Sequence
  Description of Artificial Sequence: Synthetic oligonucleotide
  Antisense strand to SEQ ID NO: 22144
uuccucgacuuucaauaau

SEQ ID NO: 22146 - RNA, 19 nt, Artificial Sequence
  Description of Artificial Sequence: Synthetic oligonucleotide
  Sense strand starting at position 3751 of SEQ ID NO: 242
gcaacagagcaagauugua

SEQ ID NO: 22147 - RNA, 19 nt, Artificial Sequence
  Description of Artificial Sequence: Synthetic oligonucleotide
  Antisense strand to SEQ ID NO: 22146
uacaaucuugcucuguugc

SEQ ID NO: 22148 - RNA, 19 nt, Artificial Sequence
  Description of Artificial Sequence: Synthetic oligonucleotide
  Sense strand starting at position 3759 of SEQ ID NO: 242
gcaagauuguaucucagga

SEQ ID NO: 22149 - RNA, 19 nt, Artificial Sequence
  Description of Artificial Sequence: Synthetic oligonucleotide
  Antisense strand to SEQ ID NO: 22148
uccugagauacaaucuugc

SEQ ID NO: 22150 - RNA, 19 nt, Artificial Sequence
  Description of Artificial Sequence: Synthetic oligonucleotide
  Sense strand starting at position 3761 of SEQ ID NO: 242
aagauuguaucucaggaag

SEQ ID NO: 22151 - RNA, 19 nt, Artificial Sequence
  Description of Artificial Sequence: Synthetic oligonucleotide
  Antisense strand to SEQ ID NO: 22150
cuuccugagauacaaucuu

SEQ ID NO: 22152 - RNA, 19 nt, Artificial Sequence
  Description of Artificial Sequence: Synthetic oligonucleotide
  Sense strand starting at position 3763 of SEQ ID NO: 242
gauuguaucucaggaagag

SEQ ID NO: 22153 - RNA, 19 nt, Artificial Sequence
  Description of Artificial Sequence: Synthetic oligonucleotide
  Antisense strand to SEQ ID NO: 22152
cucuuccugagauacaauc

SEQ ID NO: 22154 - RNA, 19 nt, Artificial Sequence
  Description of Artificial Sequence: Synthetic oligonucleotide
  Sense strand starting at position 81 of SEQ ID NO: 243
guacauauuccagggcuau

SEQ ID NO: 22155 - RNA, 19 nt, Artificial Sequence
  Description of Artificial Sequence: Synthetic oligonucleotide
  Antisense strand to SEQ ID NO: 22154
auagcccuggaauauguac

SEQ ID NO: 22156 - RNA, 19 nt, Artificial Sequence
  Description of Artificial Sequence: Synthetic oligonucleotide
  Sense strand starting at position 266 of SEQ ID NO: 243
gugucaucacagcaauagu

SEQ ID NO: 22157 - RNA, 19 nt, Artificial Sequence
  Description of Artificial Sequence: Synthetic oligonucleotide
  Antisense strand to SEQ ID NO: 22156
acuauugcugugaugacac

SEQ ID NO: 22158 - RNA, 19 nt, Artificial Sequence
  Description of Artificial Sequence: Synthetic oligonucleotide
  Sense strand starting at position 377 of SEQ ID NO: 243
auggaauagucuuccuauu

SEQ ID NO: 22159 - RNA, 19 nt, Artificial Sequence
  Description of Artificial Sequence: Synthetic oligonucleotide
  Antisense strand to SEQ ID NO: 22158
aauaggaagacuauuccau

SEQ ID NO: 22160 - RNA, 19 nt, Artificial Sequence
  Description of Artificial Sequence: Synthetic oligonucleotide
  Sense strand starting at position 437 of SEQ ID NO: 243
gcucaauuugaaugccuuu

SEQ ID NO: 22161 - RNA, 19 nt, Artificial Sequence
  Description of Artificial Sequence: Synthetic oligonucleotide
  Antisense strand to SEQ ID NO: 22160
aaaggcauucaaauugagc

SEQ ID NO: 22162 - RNA, 19 nt, Artificial Sequence
  Description of Artificial Sequence: Synthetic oligonucleotide
  Sense strand starting at position 590 of SEQ ID NO: 243
gcugauuuaugcuugcuac

SEQ ID NO: 22163 - RNA, 19 nt, Artificial Sequence
  Description of Artificial Sequence: Synthetic oligonucleotide
  Antisense strand to SEQ ID NO: 22162
guagcaagcauaaaucagc

SEQ ID NO: 22164 - RNA, 19 nt, Artificial Sequence
  Description of Artificial Sequence: Synthetic oligonucleotide
  Sense strand starting at position 591 of SEQ ID NO: 243
cugauuuaugcuugcuacu

SEQ ID NO: 22165 - RNA, 19 nt, Artificial Sequence
  Description of Artificial Sequence: Synthetic oligonucleotide
  Antisense strand to SEQ ID NO: 22164
aguagcaagcauaaaucag

SEQ ID NO: 22166 - RNA, 19 nt, Artificial Sequence
  Description of Artificial Sequence: Synthetic oligonucleotide
  Sense strand starting at position 600 of SEQ ID NO: 243
gcuugcuacuauuugcuua

SEQ ID NO: 22167 - RNA, 19 nt, Artificial Sequence
  Description of Artificial Sequence: Synthetic oligonucleotide
  Antisense strand to SEQ ID NO: 22166
uaagcaaauaguagcaagc

SEQ ID NO: 22168 - RNA, 19 nt, Artificial Sequence
  Description of Artificial Sequence: Synthetic oligonucleotide
  Sense strand starting at position 726 of SEQ ID NO: 243
cuguguugacaugaacuau

SEQ ID NO: 22169 - RNA, 19 nt, Artificial Sequence
  Description of Artificial Sequence: Synthetic oligonucleotide
  Antisense strand to SEQ ID NO: 22168
auaguucaugucaacacag

SEQ ID NO: 22170 - RNA, 19 nt, Artificial Sequence
  Description of Artificial Sequence: Synthetic oligonucleotide
  Sense strand starting at position 796 of SEQ ID NO: 243
gagacuaagucuucucugu

SEQ ID NO: 22171 - RNA, 19 nt, Artificial Sequence
  Description of Artificial Sequence: Synthetic oligonucleotide
  Antisense strand to SEQ ID NO: 22170
acagagaagacuuagucuc

SEQ ID NO: 22172 - RNA, 19 nt, Artificial Sequence
  Description of Artificial Sequence: Synthetic oligonucleotide
  Sense strand starting at position 819 of SEQ ID NO: 243
caauauguccaagggcaca

SEQ ID NO: 22173 - RNA, 19 nt, Artificial Sequence
  Description of Artificial Sequence: Synthetic oligonucleotide
  Antisense strand to SEQ ID NO: 22172
ugugcccuuggacauauug

SEQ ID NO: 22174 - RNA, 19 nt, Artificial Sequence
  Description of Artificial Sequence: Synthetic oligonucleotide
  Sense strand starting at position 1072 of SEQ ID NO: 243
uacuguuuaggugaacuua

SEQ ID NO: 22175 - RNA, 19 nt, Artificial Sequence
  Description of Artificial Sequence: Synthetic oligonucleotide
  Antisense strand to SEQ ID NO: 22174
uaaguucaccuaaacagua

SEQ ID NO: 22176 - RNA, 19 nt, Artificial Sequence
  Description of Artificial Sequence: Synthetic oligonucleotide
  Sense strand starting at position 1385 of SEQ ID NO: 243
ggacuaugaugucucugga

SEQ ID NO: 22177 - RNA, 19 nt, Artificial Sequence
  Description of Artificial Sequence: Synthetic oligonucleotide
  Antisense strand to SEQ ID NO: 22176
uccagagacaucauagucc

SEQ ID NO: 22178 - RNA, 19 nt, Artificial Sequence
  Description of Artificial Sequence: Synthetic oligonucleotide
  Sense strand starting at position 1388 of SEQ ID NO: 243
cuaugaugucucuggagag

SEQ ID NO: 22179 - RNA, 19 nt, Artificial Sequence
  Description of Artificial Sequence: Synthetic oligonucleotide
  Antisense strand to SEQ ID NO: 22178
cucuccagagacaucauag

SEQ ID NO: 22180 - RNA, 19 nt, Artificial Sequence
  Description of Artificial Sequence: Synthetic oligonucleotide
  Sense strand starting at position 1391 of SEQ ID NO: 243
ugaugucucuggagaggga

SEQ ID NO: 22181 - RNA, 19 nt, Artificial Sequence
  Description of Artificial Sequence: Synthetic oligonucleotide
  Antisense strand to SEQ ID NO: 22180
ucccucuccagagacauca

SEQ ID NO: 22182 - RNA, 19 nt, Artificial Sequence
  Description of Artificial Sequence: Synthetic oligonucleotide
  Sense strand starting at position 1516 of SEQ ID NO: 243
gggacuucccagggcucaa

SEQ ID NO: 22183 - RNA, 19 nt, Artificial Sequence
  Description of Artificial Sequence: Synthetic oligonucleotide
  Antisense strand to SEQ ID NO: 22182
uugagcccugggaaguccc

SEQ ID NO: 22184 - RNA, 19 nt, Artificial Sequence
  Description of Artificial Sequence: Synthetic oligonucleotide
  Sense strand starting at position 1576 of SEQ ID NO: 243
uggugcuuccuacaagcaa

SEQ ID NO: 22185 - RNA, 19 nt, Artificial Sequence
  Description of Artificial Sequence: Synthetic oligonucleotide
  Antisense strand to SEQ ID NO: 22184
uugcuuguaggaagcacca

SEQ ID NO: 22186 - RNA, 19 nt, Artificial Sequence
  Description of Artificial Sequence: Synthetic oligonucleotide
  Sense strand starting at position 1665 of SEQ ID NO: 243
ggugacuuccgauggagaa

SEQ ID NO: 22187 - RNA, 19 nt, Artificial Sequence
  Description of Artificial Sequence: Synthetic oligonucleotide
  Antisense strand to SEQ ID NO: 22186
uucuccaucggaagucacc

SEQ ID NO: 22188 - RNA, 19 nt, Artificial Sequence
  Description of Artificial Sequence: Synthetic oligonucleotide
  Sense strand starting at position 1666 of SEQ ID NO: 243
gugacuuccgauggagaaa

SEQ ID NO: 22189 - RNA, 19 nt, Artificial Sequence
  Description of Artificial Sequence: Synthetic oligonucleotide
  Antisense strand to SEQ ID NO: 22188
uuucuccaucggaagucac

SEQ ID NO: 22190 - RNA, 19 nt, Artificial Sequence
  Description of Artificial Sequence: Synthetic oligonucleotide
  Sense strand starting at position 1710 of SEQ ID NO: 243
gacgaagggugcuugacau

SEQ ID NO: 22191 - RNA, 19 nt, Artificial Sequence
  Description of Artificial Sequence: Synthetic oligonucleotide
  Antisense strand to SEQ ID NO: 22190
augucaagcacccuucguc

SEQ ID NO: 22192 - RNA, 19 nt, Artificial Sequence
  Description of Artificial Sequence: Synthetic oligonucleotide
  Sense strand starting at position 1718 of SEQ ID NO: 243
gugcuugacaugcaagaac

SEQ ID NO: 22193 - RNA, 19 nt, Artificial Sequence
  Description of Artificial Sequence: Synthetic oligonucleotide
  Antisense strand to SEQ ID NO: 22192
guucuugcaugucaagcac

SEQ ID NO: 22194 - RNA, 19 nt, Artificial Sequence
  Description of Artificial Sequence: Synthetic oligonucleotide
  Sense strand starting at position 1866 of SEQ ID NO: 243
ucaagaagugucggagaac

SEQ ID NO: 22195 - RNA, 19 nt, Artificial Sequence
  Description of Artificial Sequence: Synthetic oligonucleotide
  Antisense strand to SEQ ID NO: 22194
guucuccgacacuucuuga

SEQ ID NO: 22196 - RNA, 19 nt, Artificial Sequence
  Description of Artificial Sequence: Synthetic oligonucleotide
  Sense strand starting at position 1906 of SEQ ID NO: 243
gcccuugcuccugcgacau

SEQ ID NO: 22197 - RNA, 19 nt, Artificial Sequence
  Description of Artificial Sequence: Synthetic oligonucleotide
  Antisense strand to SEQ ID NO: 22196
augucgcaggagcaagggc

SEQ ID NO: 22198 - RNA, 19 nt, Artificial Sequence
  Description of Artificial Sequence: Synthetic oligonucleotide
  Sense strand starting at position 1929 of SEQ ID NO: 243
gggucagccgaggaaucaa

SEQ ID NO: 22199 - RNA, 19 nt, Artificial Sequence
  Description of Artificial Sequence: Synthetic oligonucleotide
  Antisense strand to SEQ ID NO: 22198
uugauuccucggcugaccc

SEQ ID NO: 22200 - RNA, 19 nt, Artificial Sequence
  Description of Artificial Sequence: Synthetic oligonucleotide
  Sense strand starting at position 2633 of SEQ ID NO: 243
gagaaacuugcggguuuga

SEQ ID NO: 22201 - RNA, 19 nt, Artificial Sequence
  Description of Artificial Sequence: Synthetic oligonucleotide
  Antisense strand to SEQ ID NO: 22200
ucaaacccgcaaguuucuc

SEQ ID NO: 22202 - RNA, 19 nt, Artificial Sequence
  Description of Artificial Sequence: Synthetic oligonucleotide
  Sense strand starting at position 2697 of SEQ ID NO: 243
uguuauauuccugggagua

SEQ ID NO: 22203 - RNA, 19 nt, Artificial Sequence
  Description of Artificial Sequence: Synthetic oligonucleotide
  Antisense strand to SEQ ID NO: 22202
uacucccaggaauauaaca

SEQ ID NO: 22204 - RNA, 19 nt, Artificial Sequence
  Description of Artificial Sequence: Synthetic oligonucleotide
  Sense strand starting at position 2698 of SEQ ID NO: 243
guuauauuccugggaguag

SEQ ID NO: 22205 - RNA, 19 nt, Artificial Sequence
  Description of Artificial Sequence: Synthetic oligonucleotide
  Antisense strand to SEQ ID NO: 22204
cuacucccaggaauauaac

SEQ ID NO: 22206 - RNA, 19 nt, Artificial Sequence
  Description of Artificial Sequence: Synthetic oligonucleotide
  Sense strand starting at position 2801 of SEQ ID NO: 243
ucuuccagucauuauugua

SEQ ID NO: 22207 - RNA, 19 nt, Artificial Sequence
  Description of Artificial Sequence: Synthetic oligonucleotide
  Antisense strand to SEQ ID NO: 22206
uacaauaaugacuggaaga

SEQ ID NO: 22208 - RNA, 19 nt, Artificial Sequence
  Description of Artificial Sequence: Synthetic oligonucleotide
  Sense strand starting at position 2964 of SEQ ID NO: 243
aagaaauuaugagauggga

SEQ ID NO: 22209 - RNA, 19 nt, Artificial Sequence
  Description of Artificial Sequence: Synthetic oligonucleotide
  Antisense strand to SEQ ID NO: 22208
ucccaucucauaauuucuu

SEQ ID NO: 22210 - RNA, 19 nt, Artificial Sequence
  Description of Artificial Sequence: Synthetic oligonucleotide
  Sense strand starting at position 3119 of SEQ ID NO: 243
gcauauccuggugauuacu

SEQ ID NO: 22211 - RNA, 19 nt, Artificial Sequence
  Description of Artificial Sequence: Synthetic oligonucleotide
  Antisense strand to SEQ ID NO: 22210
aguaaucaccaggauaugc

SEQ ID NO: 22212 - RNA, 19 nt, Artificial Sequence
  Description of Artificial Sequence: Synthetic oligonucleotide
  Sense strand starting at position 3231 of SEQ ID NO: 243
gagaauauauggguuccuu

SEQ ID NO: 22213 - RNA, 19 nt, Artificial Sequence
  Description of Artificial Sequence: Synthetic oligonucleotide
  Antisense strand to SEQ ID NO: 22212
aaggaacccauauauucuc

SEQ ID NO: 22214 - RNA, 19 nt, Artificial Sequence
  Description of Artificial Sequence: Synthetic oligonucleotide
  Sense strand starting at position 3281 of SEQ ID NO: 243
ggagaaacuucuguucccu

SEQ ID NO: 22215 - RNA, 19 nt, Artificial Sequence
  Description of Artificial Sequence: Synthetic oligonucleotide
  Antisense strand to SEQ ID NO: 22214
agggaacagaaguuucucc

SEQ ID NO: 22216 - RNA, 19 nt, Artificial Sequence
  Description of Artificial Sequence: Synthetic oligonucleotide
  Sense strand starting at position 3389 of SEQ ID NO: 243
aguucugugguggauauca

SEQ ID NO: 22217 - RNA, 19 nt, Artificial Sequence
  Description of Artificial Sequence: Synthetic oligonucleotide
  Antisense strand to SEQ ID NO: 22216
ugauauccaccacagaacu

SEQ ID NO: 22218 - RNA, 19 nt, Artificial Sequence
  Description of Artificial Sequence: Synthetic oligonucleotide
  Sense strand starting at position 3500 of SEQ ID NO: 243
cccaacugguuugugaauu

SEQ ID NO: 22219 - RNA, 19 nt, Artificial Sequence
  Description of Artificial Sequence: Synthetic oligonucleotide
  Antisense strand to SEQ ID NO: 22218
aauucacaaaccaguuggg

SEQ ID NO: 22220 - RNA, 19 nt, Artificial Sequence
  Description of Artificial Sequence: Synthetic oligonucleotide
  Sense strand starting at position 3508 of SEQ ID NO: 243
guuugugaauugguuggaa

SEQ ID NO: 22221 - RNA, 19 nt, Artificial Sequence
  Description of Artificial Sequence: Synthetic oligonucleotide
  Antisense strand to SEQ ID NO: 22220
uuccaaccaauucacaaac

SEQ ID NO: 22222 - RNA, 19 nt, Artificial Sequence
  Description of Artificial Sequence: Synthetic oligonucleotide
  Sense strand starting at position 3510 of SEQ ID NO: 243
uugugaauugguuggaauu

SEQ ID NO: 22223 - RNA, 19 nt, Artificial Sequence
  Description of Artificial Sequence: Synthetic oligonucleotide
  Antisense strand to SEQ ID NO: 22222
aauuccaaccaauucacaa

SEQ ID NO: 22224 - RNA, 19 nt, Artificial Sequence
  Description of Artificial Sequence: Synthetic oligonucleotide
  Sense strand starting at position 3595 of SEQ ID NO: 243
accaacgguucuuuaauaa

SEQ ID NO: 22225 - RNA, 19 nt, Artificial Sequence
  Description of Artificial Sequence: Synthetic oligonucleotide
  Antisense strand to SEQ ID NO: 22224
uuauuaaagaaccguuggu

SEQ ID NO: 22226 - RNA, 19 nt, Artificial Sequence
  Description of Artificial Sequence: Synthetic oligonucleotide
  Sense strand starting at position 3838 of SEQ ID NO: 243
acuuuagaagcguagaaga

SEQ ID NO: 22227 - RNA, 19 nt, Artificial Sequence
  Description of Artificial Sequence: Synthetic oligonucleotide
  Antisense strand to SEQ ID NO: 22226
ucuucuacgcuucuaaagu

SEQ ID NO: 22228 - RNA, 19 nt, Artificial Sequence
  Description of Artificial Sequence: Synthetic oligonucleotide
  Sense strand starting at position 3840 of SEQ ID NO: 243
uuuagaagcguagaagaua

SEQ ID NO: 22229 - RNA, 19 nt, Artificial Sequence
  Description of Artificial Sequence: Synthetic oligonucleotide
  Antisense strand to SEQ ID NO: 22228
uaucuucuacgcuucuaaa

SEQ ID NO: 22230 - RNA, 19 nt, Artificial Sequence
  Description of Artificial Sequence: Synthetic oligonucleotide
  Sense strand starting at position 3852 of SEQ ID NO: 243
gaagauacugcugauugca

SEQ ID NO: 22231 - RNA, 19 nt, Artificial Sequence
  Description of Artificial Sequence: Synthetic oligonucleotide
  Antisense strand to SEQ ID NO: 22230
ugcaaucagcaguaucuuc

SEQ ID NO: 22232 - RNA, 19 nt, Artificial Sequence
  Description of Artificial Sequence: Synthetic oligonucleotide
  Sense strand starting at position 3860 of SEQ ID NO: 243
ugcugauugcagcaaacau

SEQ ID NO: 22233 - RNA, 19 nt, Artificial Sequence
  Description of Artificial Sequence: Synthetic oligonucleotide
  Antisense strand to SEQ ID NO: 22232
auguuugcugcaaucagca

SEQ ID NO: 22234 - RNA, 19 nt, Artificial Sequence
  Description of Artificial Sequence: Synthetic oligonucleotide
  Sense strand starting at position 3557 of SEQ ID NO: 244
agauauacuguagguaaac

SEQ ID NO: 22235 - RNA, 19 nt, Artificial Sequence
  Description of Artificial Sequence: Synthetic oligonucleotide
  Antisense strand to SEQ ID NO: 22234
guuuaccuacaguauaucu

SEQ ID NO: 22236 - RNA, 19 nt, Artificial Sequence
  Description of Artificial Sequence: Synthetic oligonucleotide
  Sense strand starting at position 3517 of SEQ ID NO: 244
gccacuggccuguagaaua

SEQ ID NO: 22237 - RNA, 19 nt, Artificial Sequence
  Description of Artificial Sequence: Synthetic oligonucleotide
  Antisense strand to SEQ ID NO: 22236
uauucuacaggccaguggc

SEQ ID NO: 22238 - RNA, 19 nt, Artificial Sequence
  Description of Artificial Sequence: Synthetic oligonucleotide
  Sense strand starting at position 3419 of SEQ ID NO: 244
uuauuaagccauugugagu

SEQ ID NO: 22239 - RNA, 19 nt, Artificial Sequence
  Description of Artificial Sequence: Synthetic oligonucleotide
  Antisense strand to SEQ ID NO: 22238
acucacaauggcuuaauaa

SEQ ID NO: 22240 - RNA, 19 nt, Artificial Sequence
  Description of Artificial Sequence: Synthetic oligonucleotide
  Sense strand starting at position 3390 of SEQ ID NO: 244
cuuguuauggagcauaaua

SEQ ID NO: 22241 - RNA, 19 nt, Artificial Sequence
  Description of Artificial Sequence: Synthetic oligonucleotide
  Antisense strand to SEQ ID NO: 22240
uauuaugcuccauaacaag

SEQ ID NO: 22242 - RNA, 19 nt, Artificial Sequence
  Description of Artificial Sequence: Synthetic oligonucleotide
  Sense strand starting at position 3383 of SEQ ID NO: 244
uggauuucuuguuauggag

SEQ ID NO: 22243 - RNA, 19 nt, Artificial Sequence
  Description of Artificial Sequence: Synthetic oligonucleotide
  Antisense strand to SEQ ID NO: 22242
cuccauaacaagaaaucca

SEQ ID NO: 22244 - RNA, 19 nt, Artificial Sequence
  Description of Artificial Sequence: Synthetic oligonucleotide
  Sense strand starting at position 3322 of SEQ ID NO: 244
cugggucuucuaugacauu

SEQ ID NO: 22245 - RNA, 19 nt, Artificial Sequence
  Description of Artificial Sequence: Synthetic oligonucleotide
  Antisense strand to SEQ ID NO: 22244
aaugucauagaagacccag

SEQ ID NO: 22246 - RNA, 19 nt, Artificial Sequence
  Description of Artificial Sequence: Synthetic oligonucleotide
  Sense strand starting at position 3318 of SEQ ID NO: 244
gaaacugggucuucuauga

SEQ ID NO: 22247 - RNA, 19 nt, Artificial Sequence
  Description of Artificial Sequence: Synthetic oligonucleotide
  Antisense strand to SEQ ID NO: 22246
ucauagaagacccaguuuc

SEQ ID NO: 22248 - RNA, 19 nt, Artificial Sequence
  Description of Artificial Sequence: Synthetic oligonucleotide
  Sense strand starting at position 3280 of SEQ ID NO: 244
gugcaacccgaugaagaua

SEQ ID NO: 22249 - RNA, 19 nt, Artificial Sequence
  Description of Artificial Sequence: Synthetic oligonucleotide
  Antisense strand to SEQ ID NO: 22248
uaucuucaucggguugcac

SEQ ID NO: 22250 - RNA, 19 nt, Artificial Sequence
  Description of Artificial Sequence: Synthetic oligonucleotide
  Sense strand starting at position 3279 of SEQ ID NO: 244
agugcaacccgaugaagau

SEQ ID NO: 22251 - RNA, 19 nt, Artificial Sequence
  Description of Artificial Sequence: Synthetic oligonucleotide
  Antisense strand to SEQ ID NO: 22250
aucuucaucggguugcacu

SEQ ID NO: 22252 - RNA, 19 nt, Artificial Sequence
  Description of Artificial Sequence: Synthetic oligonucleotide
  Sense strand starting at position 3259 of SEQ ID NO: 244
ggagaguuaccgugaggaa

SEQ ID NO: 22253 - RNA, 19 nt, Artificial Sequence
  Description of Artificial Sequence: Synthetic oligonucleotide
  Antisense strand to SEQ ID NO: 22252
uuccucacgguaacucucc

SEQ ID NO: 22254 - RNA, 19 nt, Artificial Sequence
  Description of Artificial Sequence: Synthetic oligonucleotide
  Sense strand starting at position 3216 of SEQ ID NO: 244
auuagaucugcuuaguaca

SEQ ID NO: 22255 - RNA, 19 nt, Artificial Sequence
  Description of Artificial Sequence: Synthetic oligonucleotide
  Antisense strand to SEQ ID NO: 22254
uguacuaagcagaucuaau

SEQ ID NO: 22256 - RNA, 19 nt, Artificial Sequence
  Description of Artificial Sequence: Synthetic oligonucleotide
  Sense strand starting at position 3213 of SEQ ID NO: 244
uggauuagaucugcuuagu

SEQ ID NO: 22257 - RNA, 19 nt, Artificial Sequence
  Description of Artificial Sequence: Synthetic oligonucleotide
  Antisense strand to SEQ ID NO: 22256
acuaagcagaucuaaucca

SEQ ID NO: 22258 - RNA, 19 nt, Artificial Sequence
  Description of Artificial Sequence: Synthetic oligonucleotide
  Sense strand starting at position 3212 of SEQ ID NO: 244
cuggauuagaucugcuuag

SEQ ID NO: 22259 - RNA, 19 nt, Artificial Sequence
  Description of Artificial Sequence: Synthetic oligonucleotide
  Antisense strand to SEQ ID NO: 22258
cuaagcagaucuaauccag

SEQ ID NO: 22260 - RNA, 19 nt, Artificial Sequence
  Description of Artificial Sequence: Synthetic oligonucleotide
  Sense strand starting at position 3200 of SEQ ID NO: 244
cugucauauuaucuggauu

SEQ ID NO: 22261 - RNA, 19 nt, Artificial Sequence
  Description of Artificial Sequence: Synthetic oligonucleotide
  Antisense strand to SEQ ID NO: 22260
aauccagauaauaugacag

SEQ ID NO: 22262 - RNA, 19 nt, Artificial Sequence
  Description of Artificial Sequence: Synthetic oligonucleotide
  Sense strand starting at position 3199 of SEQ ID NO: 244
acugucauauuaucuggau

SEQ ID NO: 22263 - RNA, 19 nt, Artificial Sequence
  Description of Artificial Sequence: Synthetic oligonucleotide
  Antisense strand to SEQ ID NO: 22262
auccagauaauaugacagu

SEQ ID NO: 22264 - RNA, 19 nt, Artificial Sequence
  Description of Artificial Sequence: Synthetic oligonucleotide
  Sense strand starting at position 3189 of SEQ ID NO: 244
agaagcaggcacugucaua

SEQ ID NO: 22265 - RNA, 19 nt, Artificial Sequence
  Description of Artificial Sequence: Synthetic oligonucleotide
  Antisense strand to SEQ ID NO: 22264
uaugacagugccugcuucu

SEQ ID NO: 22266 - RNA, 19 nt, Artificial Sequence
  Description of Artificial Sequence: Synthetic oligonucleotide
  Sense strand starting at position 2885 of SEQ ID NO: 244
gauagauaauaucuguuga

SEQ ID NO: 22267 - RNA, 19 nt, Artificial Sequence
  Description of Artificial Sequence: Synthetic oligonucleotide
  Antisense strand to SEQ ID NO: 22266
ucaacagauauuaucuauc

SEQ ID NO: 22268 - RNA, 19 nt, Artificial Sequence
  Description of Artificial Sequence: Synthetic oligonucleotide
  Sense strand starting at position 2875 of SEQ ID NO: 244
cuggguauaugauagauaa

SEQ ID NO: 22269 - RNA, 19 nt, Artificial Sequence
  Description of Artificial Sequence: Synthetic oligonucleotide
  Antisense strand to SEQ ID NO: 22268
uuaucuaucauauacccag

SEQ ID NO: 22270 - RNA, 19 nt, Artificial Sequence
  Description of Artificial Sequence: Synthetic oligonucleotide
  Sense strand starting at position 2870 of SEQ ID NO: 244
caaugcuggguauaugaua

SEQ ID NO: 22271 - RNA, 19 nt, Artificial Sequence
  Description of Artificial Sequence: Synthetic oligonucleotide
  Antisense strand to SEQ ID NO: 22270
uaucauauacccagcauug

SEQ ID NO: 22272 - RNA, 19 nt, Artificial Sequence
  Description of Artificial Sequence: Synthetic oligonucleotide
  Sense strand starting at position 2868 of SEQ ID NO: 244
cacaaugcuggguauauga

SEQ ID NO: 22273 - RNA, 19 nt, Artificial Sequence
  Description of Artificial Sequence: Synthetic oligonucleotide
  Antisense strand to SEQ ID NO: 22272
ucauauacccagcauugug

SEQ ID NO: 22274 - RNA, 19 nt, Artificial Sequence
  Description of Artificial Sequence: Synthetic oligonucleotide
  Sense strand starting at position 2867 of SEQ ID NO: 244
gcacaaugcuggguauaug

SEQ ID NO: 22275 - RNA, 19 nt, Artificial Sequence
  Description of Artificial Sequence: Synthetic oligonucleotide
  Antisense strand to SEQ ID NO: 22274
cauauacccagcauugugc

SEQ ID NO: 22276 - RNA, 19 nt, Artificial Sequence
  Description of Artificial Sequence: Synthetic oligonucleotide
  Sense strand starting at position 2866 of SEQ ID NO: 244
agcacaaugcuggguauau

SEQ ID NO: 22277 - RNA, 19 nt, Artificial Sequence
  Description of Artificial Sequence: Synthetic oligonucleotide
  Antisense strand to SEQ ID NO: 22276
auauacccagcauugugcu

SEQ ID NO: 22278 - RNA, 19 nt, Artificial Sequence
  Description of Artificial Sequence: Synthetic oligonucleotide
  Sense strand starting at position 2865 of SEQ ID NO: 244
cagcacaaugcuggguaua

SEQ ID NO: 22279 - RNA, 19 nt, Artificial Sequence
  Description of Artificial Sequence: Synthetic oligonucleotide
  Antisense strand to SEQ ID NO: 22278
uauacccagcauugugcug

SEQ ID NO: 22280 - RNA, 19 nt, Artificial Sequence
  Description of Artificial Sequence: Synthetic oligonucleotide
  Sense strand starting at position 2826 of SEQ ID NO: 244
gggaucuugucucucaugu

SEQ ID NO: 22281 - RNA, 19 nt, Artificial Sequence
  Description of Artificial Sequence: Synthetic oligonucleotide
  Antisense strand to SEQ ID NO: 22280
acaugagagacaagauccc

SEQ ID NO: 22282 - RNA, 19 nt, Artificial Sequence
  Description of Artificial Sequence: Synthetic oligonucleotide
  Sense strand starting at position 2824 of SEQ ID NO: 244
gagggaucuugucucucau

SEQ ID NO: 22283 - RNA, 19 nt, Artificial Sequence
  Description of Artificial Sequence: Synthetic oligonucleotide
  Antisense strand to SEQ ID NO: 22282
augagagacaagaucccuc

SEQ ID NO: 22284 - RNA, 19 nt, Artificial Sequence
  Description of Artificial Sequence: Synthetic oligonucleotide
  Sense strand starting at position 2461 of SEQ ID NO: 244
cgucucuuucccuacggga

SEQ ID NO: 22285 - RNA, 19 nt, Artificial Sequence
  Description of Artificial Sequence: Synthetic oligonucleotide
  Antisense strand to SEQ ID NO: 22284
ucccguagggaaagagacg

SEQ ID NO: 22286 - RNA, 19 nt, Artificial Sequence
  Description of Artificial Sequence: Synthetic oligonucleotide
  Sense strand starting at position 2399 of SEQ ID NO: 244
ugauuuccuuaugauaguu

SEQ ID NO: 22287 - RNA, 19 nt, Artificial Sequence
  Description of Artificial Sequence: Synthetic oligonucleotide
  Antisense strand to SEQ ID NO: 22286
aacuaucauaaggaaauca

SEQ ID NO: 22288 - RNA, 19 nt, Artificial Sequence
  Description of Artificial Sequence: Synthetic oligonucleotide
  Sense strand starting at position 2190 of SEQ ID NO: 244
agucauuaggcacagacuu

SEQ ID NO: 22289 - RNA, 19 nt, Artificial Sequence
  Description of Artificial Sequence: Synthetic oligonucleotide
  Antisense strand to SEQ ID NO: 22288
aagucugugccuaaugacu

SEQ ID NO: 22290 - RNA, 19 nt, Artificial Sequence
  Description of Artificial Sequence: Synthetic oligonucleotide
  Sense strand starting at position 2187 of SEQ ID NO: 244
auuagucauuaggcacaga

SEQ ID NO: 22291 - RNA, 19 nt, Artificial Sequence
  Description of Artificial Sequence: Synthetic oligonucleotide
  Antisense strand to SEQ ID NO: 22290
ucugugccuaaugacuaau

SEQ ID NO: 22292 - RNA, 19 nt, Artificial Sequence
  Description of Artificial Sequence: Synthetic oligonucleotide
  Sense strand starting at position 2183 of SEQ ID NO: 244
uuugauuagucauuaggca

SEQ ID NO: 22293 - RNA, 19 nt, Artificial Sequence
  Description of Artificial Sequence: Synthetic oligonucleotide
  Antisense strand to SEQ ID NO: 22292
ugccuaaugacuaaucaaa

SEQ ID NO: 22294 - RNA, 19 nt, Artificial Sequence
  Description of Artificial Sequence: Synthetic oligonucleotide
  Sense strand starting at position 1909 of SEQ ID NO: 244
uuuauaccuccguagaugu

SEQ ID NO: 22295 - RNA, 19 nt, Artificial Sequence
  Description of Artificial Sequence: Synthetic oligonucleotide
  Antisense strand to SEQ ID NO: 22294
acaucuacggagguauaaa

SEQ ID NO: 22296 - RNA, 19 nt, Artificial Sequence
  Description of Artificial Sequence: Synthetic oligonucleotide
  Sense strand starting at position 979 of SEQ ID NO: 244
ggugguggacucuacugua

SEQ ID NO: 22297 - RNA, 19 nt, Artificial Sequence
  Description of Artificial Sequence: Synthetic oligonucleotide
  Antisense strand to SEQ ID NO: 22296
uacaguagaguccaccacc

SEQ ID NO: 22298 - RNA, 19 nt, Artificial Sequence
  Description of Artificial Sequence: Synthetic oligonucleotide
  Sense strand starting at position 881 of SEQ ID NO: 244
uggacuccuuaagagaaau

SEQ ID NO: 22299 - RNA, 19 nt, Artificial Sequence
  Description of Artificial Sequence: Synthetic oligonucleotide
  Antisense strand to SEQ ID NO: 22298
auuucucuuaaggagucca

SEQ ID NO: 22300 - RNA, 19 nt, Artificial Sequence
  Description of Artificial Sequence: Synthetic oligonucleotide
  Sense strand starting at position 753 of SEQ ID NO: 244
agaugucuaccuggauucu

SEQ ID NO: 22301 - RNA, 19 nt, Artificial Sequence
  Description of Artificial Sequence: Synthetic oligonucleotide
  Antisense strand to SEQ ID NO: 22300
agaauccagguagacaucu

SEQ ID NO: 22302 - RNA, 19 nt, Artificial Sequence
  Description of Artificial Sequence: Synthetic oligonucleotide
  Sense strand starting at position 751 of SEQ ID NO: 244
ccagaugucuaccuggauu

SEQ ID NO: 22303 - RNA, 19 nt, Artificial Sequence
  Description of Artificial Sequence: Synthetic oligonucleotide
  Antisense strand to SEQ ID NO: 22302
aauccagguagacaucugg

SEQ ID NO: 22304 - RNA, 19 nt, Artificial Sequence
  Description of Artificial Sequence: Synthetic oligonucleotide
  Sense strand starting at position 630 of SEQ ID NO: 244
ugaagcaguugaccuaaua

SEQ ID NO: 22305 - RNA, 19 nt, Artificial Sequence
  Description of Artificial Sequence: Synthetic oligonucleotide
  Antisense strand to SEQ ID NO: 22304
uauuaggucaacugcuuca

SEQ ID NO: 22306 - RNA, 19 nt, Artificial Sequence
  Description of Artificial Sequence: Synthetic oligonucleotide
  Sense strand starting at position 451 of SEQ ID NO: 244
gaggcucuugaauguaaag

SEQ ID NO: 22307 - RNA, 19 nt, Artificial Sequence
  Description of Artificial Sequence: Synthetic oligonucleotide
  Antisense strand to SEQ ID NO: 22306
cuuuacauucaagagccuc

SEQ ID NO: 22308 - RNA, 19 nt, Artificial Sequence
  Description of Artificial Sequence: Synthetic oligonucleotide
  Sense strand starting at position 394 of SEQ ID NO: 244
cuaggugucuuaucagaag

SEQ ID NO: 22309 - RNA, 19 nt, Artificial Sequence
  Description of Artificial Sequence: Synthetic oligonucleotide
  Antisense strand to SEQ ID NO: 22308
cuucugauaagacaccuag

SEQ ID NO: 22310 - RNA, 19 nt, Artificial Sequence
  Description of Artificial Sequence: Synthetic oligonucleotide
  Sense strand starting at position 390 of SEQ ID NO: 244
uggccuaggugucuuauca

SEQ ID NO: 22311 - RNA, 19 nt, Artificial Sequence
  Description of Artificial Sequence: Synthetic oligonucleotide
  Antisense strand to SEQ ID NO: 22310
ugauaagacaccuaggcca

SEQ ID NO: 22312 - RNA, 19 nt, Artificial Sequence
  Description of Artificial Sequence: Synthetic oligonucleotide
  Sense strand starting at position 320 of SEQ ID NO: 244
cgcauaugugcucaaggag

SEQ ID NO: 22313 - RNA, 19 nt, Artificial Sequence
  Description of Artificial Sequence: Synthetic oligonucleotide
  Antisense strand to SEQ ID NO: 22312
cuccuugagcacauaugcg

SEQ ID NO: 22314 - RNA, 19 nt, Artificial Sequence
  Description of Artificial Sequence: Synthetic oligonucleotide
  Sense strand starting at position 56 of SEQ ID NO: 245
aggucaauauuauuagcau

SEQ ID NO: 22315 - RNA, 19 nt, Artificial Sequence
  Description of Artificial Sequence: Synthetic oligonucleotide
  Antisense strand to SEQ ID NO: 22314
augcuaauaauauugaccu

SEQ ID NO: 22316 - RNA, 19 nt, Artificial Sequence
  Description of Artificial Sequence: Synthetic oligonucleotide
  Sense strand starting at position 188 of SEQ ID NO: 245
cagugucgucaauauaaua

SEQ ID NO: 22317 - RNA, 19 nt, Artificial Sequence
  Description of Artificial Sequence: Synthetic oligonucleotide
  Antisense strand to SEQ ID NO: 22316
uauuauauugacgacacug

SEQ ID NO: 22318 - RNA, 19 nt, Artificial Sequence
  Description of Artificial Sequence: Synthetic oligonucleotide
  Sense strand starting at position 357 of SEQ ID NO: 245
augcuuacuccuugaggac

SEQ ID NO: 22319 - RNA, 19 nt, Artificial Sequence
  Description of Artificial Sequence: Synthetic oligonucleotide
  Antisense strand to SEQ ID NO: 22318
guccucaaggaguaagcau

SEQ ID NO: 22320 - RNA, 19 nt, Artificial Sequence
  Description of Artificial Sequence: Synthetic oligonucleotide
  Sense strand starting at position 472 of SEQ ID NO: 245
uuagauaacuggcugaguu

SEQ ID NO: 22321 - RNA, 19 nt, Artificial Sequence
  Description of Artificial Sequence: Synthetic oligonucleotide
  Antisense strand to SEQ ID NO: 22320
aacucagccaguuaucuaa

SEQ ID NO: 22322 - RNA, 19 nt, Artificial Sequence
  Description of Artificial Sequence: Synthetic oligonucleotide
  Sense strand starting at position 473 of SEQ ID NO: 245
uagauaacuggcugaguua

SEQ ID NO: 22323 - RNA, 19 nt, Artificial Sequence
  Description of Artificial Sequence: Synthetic oligonucleotide
  Antisense strand to SEQ ID NO: 22322
uaacucagccaguuaucua

SEQ ID NO: 22324 - RNA, 19 nt, Artificial Sequence
  Description of Artificial Sequence: Synthetic oligonucleotide
  Sense strand starting at position 474 of SEQ ID NO: 245
agauaacuggcugaguuau

SEQ ID NO: 22325 - RNA, 19 nt, Artificial Sequence
  Description of Artificial Sequence: Synthetic oligonucleotide
  Antisense strand to SEQ ID NO: 22324
auaacucagccaguuaucu

SEQ ID NO: 22326 - RNA, 19 nt, Artificial Sequence
  Description of Artificial Sequence: Synthetic oligonucleotide
  Sense strand starting at position 484 of SEQ ID NO: 245
cugaguuaucuccaucuca

SEQ ID NO: 22327 - RNA, 19 nt, Artificial Sequence
  Description of Artificial Sequence: Synthetic oligonucleotide
  Antisense strand to SEQ ID NO: 22326
ugagauggagauaacucag

SEQ ID NO: 22328 - RNA, 19 nt, Artificial Sequence
  Description of Artificial Sequence: Synthetic oligonucleotide
  Sense strand starting at position 551 of SEQ ID NO: 245
guugauaaauggcccauau

SEQ ID NO: 22329 - RNA, 19 nt, Artificial Sequence
  Description of Artificial Sequence: Synthetic oligonucleotide
  Antisense strand to SEQ ID NO: 22328
auaugggccauuuaucaac

SEQ ID NO: 22330 - RNA, 19 nt, Artificial Sequence
  Description of Artificial Sequence: Synthetic oligonucleotide
  Sense strand starting at position 563 of SEQ ID NO: 245
cccauauuauaggcugaau

SEQ ID NO: 22331 - RNA, 19 nt, Artificial Sequence
  Description of Artificial Sequence: Synthetic oligonucleotide
  Antisense strand to SEQ ID NO: 22330
auucagccuauaauauggg

SEQ ID NO: 22332 - RNA, 19 nt, Artificial Sequence
  Description of Artificial Sequence: Synthetic oligonucleotide
  Sense strand starting at position 622 of SEQ ID NO: 245
aggaucucagacugugauu

SEQ ID NO: 22333 - RNA, 19 nt, Artificial Sequence
  Description of Artificial Sequence: Synthetic oligonucleotide
  Antisense strand to SEQ ID NO: 22332
aaucacagucugagauccu

SEQ ID NO: 22334 - RNA, 19 nt, Artificial Sequence
  Description of Artificial Sequence: Synthetic oligonucleotide
  Sense strand starting at position 757 of SEQ ID NO: 245
agaggaaagucguugugaa

SEQ ID NO: 22335 - RNA, 19 nt, Artificial Sequence
  Description of Artificial Sequence: Synthetic oligonucleotide
  Antisense strand to SEQ ID NO: 22334
uucacaacgacuuuccucu

SEQ ID NO: 22336 - RNA, 19 nt, Artificial Sequence
  Description of Artificial Sequence: Synthetic oligonucleotide
  Sense strand starting at position 758 of SEQ ID NO: 245
gaggaaagucguugugaag

SEQ ID NO: 22337 - RNA, 19 nt, Artificial Sequence
  Description of Artificial Sequence: Synthetic oligonucleotide
  Antisense strand to SEQ ID NO: 22336
cuucacaacgacuuuccuc

SEQ ID NO: 22338 - RNA, 19 nt, Artificial Sequence
  Description of Artificial Sequence: Synthetic oligonucleotide
  Sense strand starting at position 770 of SEQ ID NO: 245
ugugaagauucagugagaa

SEQ ID NO: 22339 - RNA, 19 nt, Artificial Sequence
  Description of Artificial Sequence: Synthetic oligonucleotide
  Antisense strand to SEQ ID NO: 22338
uucucacugaaucuucaca

SEQ ID NO: 22340 - RNA, 19 nt, Artificial Sequence
  Description of Artificial Sequence: Synthetic oligonucleotide
  Sense strand starting at position 1387 of SEQ ID NO: 245
uggauuguggaguauuauu

SEQ ID NO: 22341 - RNA, 19 nt, Artificial Sequence
  Description of Artificial Sequence: Synthetic oligonucleotide
  Antisense strand to SEQ ID NO: 22340
aauaauacuccacaaucca

SEQ ID NO: 22342 - RNA, 19 nt, Artificial Sequence
  Description of Artificial Sequence: Synthetic oligonucleotide
  Sense strand starting at position 1400 of SEQ ID NO: 245
auuauugugggcgacuaau

SEQ ID NO: 22343 - RNA, 19 nt, Artificial Sequence
  Description of Artificial Sequence: Synthetic oligonucleotide
  Antisense strand to SEQ ID NO: 22342
auuagucgcccacaauaau

SEQ ID NO: 22344 - RNA, 19 nt, Artificial Sequence
  Description of Artificial Sequence: Synthetic oligonucleotide
  Sense strand starting at position 1406 of SEQ ID NO: 245
gugggcgacuaaucagaua

SEQ ID NO: 22345 - RNA, 19 nt, Artificial Sequence
  Description of Artificial Sequence: Synthetic oligonucleotide
  Antisense strand to SEQ ID NO: 22344
uaucugauuagucgcccac

SEQ ID NO: 22346 - RNA, 19 nt, Artificial Sequence
  Description of Artificial Sequence: Synthetic oligonucleotide
  Sense strand starting at position 1418 of SEQ ID NO: 245
ucagauaaugauugcaaga

SEQ ID NO: 22347 - RNA, 19 nt, Artificial Sequence
  Description of Artificial Sequence: Synthetic oligonucleotide
  Antisense strand to SEQ ID NO: 22346
ucuugcaaucauuaucuga

SEQ ID NO: 22348 - RNA, 19 nt, Artificial Sequence
  Description of Artificial Sequence: Synthetic oligonucleotide
  Sense strand starting at position 1431 of SEQ ID NO: 245
gcaagaauugauuagccag

SEQ ID NO: 22349 - RNA, 19 nt, Artificial Sequence
  Description of Artificial Sequence: Synthetic oligonucleotide
  Antisense strand to SEQ ID NO: 22348
cuggcuaaucaauucuugc

SEQ ID NO: 22350 - RNA, 19 nt, Artificial Sequence
  Description of Artificial Sequence: Synthetic oligonucleotide
  Sense strand starting at position 1493 of SEQ ID NO: 245
ccauccauuccaggauguu

SEQ ID NO: 22351 - RNA, 19 nt, Artificial Sequence
  Description of Artificial Sequence: Synthetic oligonucleotide
  Antisense strand to SEQ ID NO: 22350
aacauccuggaauggaugg

SEQ ID NO: 22352 - RNA, 19 nt, Artificial Sequence
  Description of Artificial Sequence: Synthetic oligonucleotide
  Sense strand starting at position 1604 of SEQ ID NO: 245
uccaucucgcuggaaacau

SEQ ID NO: 22353 - RNA, 19 nt, Artificial Sequence
  Description of Artificial Sequence: Synthetic oligonucleotide
  Antisense strand to SEQ ID NO: 22352
auguuuccagcgagaugga

SEQ ID NO: 22354 - RNA, 19 nt, Artificial Sequence
  Description of Artificial Sequence: Synthetic oligonucleotide
  Sense strand starting at position 1690 of SEQ ID NO: 245
ugaggaagcucauuaauau

SEQ ID NO: 22355 - RNA, 19 nt, Artificial Sequence
  Description of Artificial Sequence: Synthetic oligonucleotide
  Antisense strand to SEQ ID NO: 22354
auauuaaugagcuuccuca

SEQ ID NO: 22356 - RNA, 19 nt, Artificial Sequence
  Description of Artificial Sequence: Synthetic oligonucleotide
  Sense strand starting at position 1708 of SEQ ID NO: 245
uuuaguuuagaagaugcaa

SEQ ID NO: 22357 - RNA, 19 nt, Artificial Sequence
  Description of Artificial Sequence: Synthetic oligonucleotide
  Antisense strand to SEQ ID NO: 22356
uugcaucuucuaaacuaaa

SEQ ID NO: 22358 - RNA, 19 nt, Artificial Sequence
  Description of Artificial Sequence: Synthetic oligonucleotide
  Sense strand starting at position 2094 of SEQ ID NO: 245
agaguucucuucucagagg

SEQ ID NO: 22359 - RNA, 19 nt, Artificial Sequence
  Description of Artificial Sequence: Synthetic oligonucleotide
  Antisense strand to SEQ ID NO: 22358
ccucugagaagagaacucu

SEQ ID NO: 22360 - RNA, 19 nt, Artificial Sequence
  Description of Artificial Sequence: Synthetic oligonucleotide
  Sense strand starting at position 2160 of SEQ ID NO: 245
gaugcuuacggauauuaaa

SEQ ID NO: 22361 - RNA, 19 nt, Artificial Sequence
  Description of Artificial Sequence: Synthetic oligonucleotide
  Antisense strand to SEQ ID NO: 22360
uuuaauauccguaagcauc

SEQ ID NO: 22362 - RNA, 19 nt, Artificial Sequence
  Description of Artificial Sequence: Synthetic oligonucleotide
  Sense strand starting at position 2290 of SEQ ID NO: 245
ugugcuuuccuggaaacau

SEQ ID NO: 22363 - RNA, 19 nt, Artificial Sequence
  Description of Artificial Sequence: Synthetic oligonucleotide
  Antisense strand to SEQ ID NO: 22362
auguuuccaggaaagcaca

SEQ ID NO: 22364 - RNA, 19 nt, Artificial Sequence
  Description of Artificial Sequence: Synthetic oligonucleotide
  Sense strand starting at position 2381 of SEQ ID NO: 245
uugaauauuugauggaaga

SEQ ID NO: 22365 - RNA, 19 nt, Artificial Sequence
  Description of Artificial Sequence: Synthetic oligonucleotide
  Antisense strand to SEQ ID NO: 22364
ucuuccaucaaauauucaa

SEQ ID NO: 22366 - RNA, 19 nt, Artificial Sequence
  Description of Artificial Sequence: Synthetic oligonucleotide
  Sense strand starting at position 2499 of SEQ ID NO: 245
guauuacgcaaguugugua

SEQ ID NO: 22367 - RNA, 19 nt, Artificial Sequence
  Description of Artificial Sequence: Synthetic oligonucleotide
  Antisense strand to SEQ ID NO: 22366
uacacaacuugcguaauac

SEQ ID NO: 22368 - RNA, 19 nt, Artificial Sequence
  Description of Artificial Sequence: Synthetic oligonucleotide
  Sense strand starting at position 2656 of SEQ ID NO: 245
gcacuaaggccaugggaau

SEQ ID NO: 22369 - RNA, 19 nt, Artificial Sequence
  Description of Artificial Sequence: Synthetic oligonucleotide
  Antisense strand to SEQ ID NO: 22368
auucccauggccuuagugc

SEQ ID NO: 22370 - RNA, 19 nt, Artificial Sequence
  Description of Artificial Sequence: Synthetic oligonucleotide
  Sense strand starting at position 2799 of SEQ ID NO: 245
gaauguaccuuaucugaug

SEQ ID NO: 22371 - RNA, 19 nt, Artificial Sequence
  Description of Artificial Sequence: Synthetic oligonucleotide
  Antisense strand to SEQ ID NO: 22370
caucagauaagguacauuc

SEQ ID NO: 22372 - RNA, 19 nt, Artificial Sequence
  Description of Artificial Sequence: Synthetic oligonucleotide
  Sense strand starting at position 2956 of SEQ ID NO: 245
aguauaguuauguagcaau

SEQ ID NO: 22373 - RNA, 19 nt, Artificial Sequence
  Description of Artificial Sequence: Synthetic oligonucleotide
  Antisense strand to SEQ ID NO: 22372
auugcuacauaacuauacu

SEQ ID NO: 22374 - RNA, 19 nt, Artificial Sequence
  Description of Artificial Sequence: Synthetic oligonucleotide
  Sense strand starting at position 2997 of SEQ ID NO: 245
auuaauagucaaugcauga

SEQ ID NO: 22375 - RNA, 19 nt, Artificial Sequence
  Description of Artificial Sequence: Synthetic oligonucleotide
  Antisense strand to SEQ ID NO: 22374
ucaugcauugacuauuaau

SEQ ID NO: 22376 - RNA, 19 nt, Artificial Sequence
  Description of Artificial Sequence: Synthetic oligonucleotide
  Sense strand starting at position 3072 of SEQ ID NO: 245
aguagaagguaguuugauu

SEQ ID NO: 22377 - RNA, 19 nt, Artificial Sequence
  Description of Artificial Sequence: Synthetic oligonucleotide
  Antisense strand to SEQ ID NO: 22376
aaucaaacuaccuucuacu

SEQ ID NO: 22378 - RNA, 19 nt, Artificial Sequence
  Description of Artificial Sequence: Synthetic oligonucleotide
  Sense strand starting at position 3339 of SEQ ID NO: 245
ggauuacagaugugaguag

SEQ ID NO: 22379 - RNA, 19 nt, Artificial Sequence
  Description of Artificial Sequence: Synthetic oligonucleotide
  Antisense strand to SEQ ID NO: 22378
cuacucacaucuguaaucc

SEQ ID NO: 22380 - RNA, 19 nt, Artificial Sequence
  Description of Artificial Sequence: Synthetic oligonucleotide
  Sense strand starting at position 3415 of SEQ ID NO: 245
caggaacaaugguuuguau

SEQ ID NO: 22381 - RNA, 19 nt, Artificial Sequence
  Description of Artificial Sequence: Synthetic oligonucleotide
  Antisense strand to SEQ ID NO: 22380
auacaaaccauuguuccug

SEQ ID NO: 22382 - RNA, 19 nt, Artificial Sequence
  Description of Artificial Sequence: Synthetic oligonucleotide
  Sense strand starting at position 3418 of SEQ ID NO: 245
gaacaaugguuuguaugga

SEQ ID NO: 22383 - RNA, 19 nt, Artificial Sequence
  Description of Artificial Sequence: Synthetic oligonucleotide
  Antisense strand to SEQ ID NO: 22382
uccauacaaaccauuguuc

SEQ ID NO: 22384 - RNA, 19 nt, Artificial Sequence
  Description of Artificial Sequence: Synthetic oligonucleotide
  Sense strand starting at position 3423 of SEQ ID NO: 245
augguuuguauggaauuga

SEQ ID NO: 22385 - RNA, 19 nt, Artificial Sequence
  Description of Artificial Sequence: Synthetic oligonucleotide
  Antisense strand to SEQ ID NO: 22384
ucaauuccauacaaaccau

SEQ ID NO: 22386 - RNA, 19 nt, Artificial Sequence
  Description of Artificial Sequence: Synthetic oligonucleotide
  Sense strand starting at position 3444 of SEQ ID NO: 245
acuggaaucuaguugauag

SEQ ID NO: 22387 - RNA, 19 nt, Artificial Sequence
  Description of Artificial Sequence: Synthetic oligonucleotide
  Antisense strand to SEQ ID NO: 22386
cuaucaacuagauuccagu

SEQ ID NO: 22388 - RNA, 19 nt, Artificial Sequence
  Description of Artificial Sequence: Synthetic oligonucleotide
  Sense strand starting at position 3445 of SEQ ID NO: 245
cuggaaucuaguugauagu

SEQ ID NO: 22389 - RNA, 19 nt, Artificial Sequence
  Description of Artificial Sequence: Synthetic oligonucleotide
  Antisense strand to SEQ ID NO: 22388
acuaucaacuagauuccag

SEQ ID NO: 22390 - RNA, 19 nt, Artificial Sequence
  Description of Artificial Sequence: Synthetic oligonucleotide
  Sense strand starting at position 3585 of SEQ ID NO: 245
uuuguaaagcaugaaucuu

SEQ ID NO: 22391 - RNA, 19 nt, Artificial Sequence
  Description of Artificial Sequence: Synthetic oligonucleotide
  Antisense strand to SEQ ID NO: 22390
aagauucaugcuuuacaaa

SEQ ID NO: 22392 - RNA, 19 nt, Artificial Sequence
  Description of Artificial Sequence: Synthetic oligonucleotide
  Sense strand starting at position 3796 of SEQ ID NO: 245
cuaugugauuugcccagca

SEQ ID NO: 22393 - RNA, 19 nt, Artificial Sequence
  Description of Artificial Sequence: Synthetic oligonucleotide
  Antisense strand to SEQ ID NO: 22392
ugcugggcaaaucacauag

SEQ ID NO: 22394 - RNA, 19 nt, Artificial Sequence
  Description of Artificial Sequence: Synthetic oligonucleotide
  Sense strand starting at position 3593 of SEQ ID NO: 245
gcaugaaucuuaugaaauu

SEQ ID NO: 22395 - RNA, 19 nt, Artificial Sequence
  Description of Artificial Sequence: Synthetic oligonucleotide
  Antisense strand to SEQ ID NO: 22394
aauuucauaagauucaugc

SEQ ID NO: 22396 - RNA, 19 nt, Artificial Sequence
  Description of Artificial Sequence: Synthetic oligonucleotide
  Sense strand starting at position 3326 of SEQ ID NO: 246
uguauaauccuauguaagg

SEQ ID NO: 22397 - RNA, 19 nt, Artificial Sequence
  Description of Artificial Sequence: Synthetic oligonucleotide
  Antisense strand to SEQ ID NO: 22396
ccuuacauaggauuauaca

SEQ ID NO: 22398 - RNA, 19 nt, Artificial Sequence
  Description of Artificial Sequence: Synthetic oligonucleotide
  Sense strand starting at position 3318 of SEQ ID NO: 246
aggugaacuguauaauccu

SEQ ID NO: 22399 - RNA, 19 nt, Artificial Sequence
  Description of Artificial Sequence: Synthetic oligonucleotide
  Antisense strand to SEQ ID NO: 22398
aggauuauacaguucaccu

SEQ ID NO: 22400 - RNA, 19 nt, Artificial Sequence
  Description of Artificial Sequence: Synthetic oligonucleotide
  Sense strand starting at position 3316 of SEQ ID NO: 246
guaggugaacuguauaauc

SEQ ID NO: 22401 - RNA, 19 nt, Artificial Sequence
  Description of Artificial Sequence: Synthetic oligonucleotide
  Antisense strand to SEQ ID NO: 22400
gauuauacaguucaccuac

SEQ ID NO: 22402 - RNA, 19 nt, Artificial Sequence
  Description of Artificial Sequence: Synthetic oligonucleotide
  Sense strand starting at position 3308 of SEQ ID NO: 246
caacuauaguaggugaacu

SEQ ID NO: 22403 - RNA, 19 nt, Artificial Sequence
  Description of Artificial Sequence: Synthetic oligonucleotide
  Antisense strand to SEQ ID NO: 22402
aguucaccuacuauaguug

SEQ ID NO: 22404 - RNA, 19 nt, Artificial Sequence
  Description of Artificial Sequence: Synthetic oligonucleotide
  Sense strand starting at position 3138 of SEQ ID NO: 246
gugaaauaguuacugcuaa

SEQ ID NO: 22405 - RNA, 19 nt, Artificial Sequence
  Description of Artificial Sequence: Synthetic oligonucleotide
  Antisense strand to SEQ ID NO: 22404
uuagcaguaacuauuucac

SEQ ID NO: 22406 - RNA, 19 nt, Artificial Sequence
  Description of Artificial Sequence: Synthetic oligonucleotide
  Sense strand starting at position 3132 of SEQ ID NO: 246
gcugaagugaaauaguuac

SEQ ID NO: 22407 - RNA, 19 nt, Artificial Sequence
  Description of Artificial Sequence: Synthetic oligonucleotide
  Antisense strand to SEQ ID NO: 22406
guaacuauuucacuucagc

SEQ ID NO: 22408 - RNA, 19 nt, Artificial Sequence
  Description of Artificial Sequence: Synthetic oligonucleotide
  Sense strand starting at position 3015 of SEQ ID NO: 246
uggccucuuguuuauaaau

SEQ ID NO: 22409 - RNA, 19 nt, Artificial Sequence
  Description of Artificial Sequence: Synthetic oligonucleotide
  Antisense strand to SEQ ID NO: 22408
auuuauaaacaagaggcca

SEQ ID NO: 22410 - RNA, 19 nt, Artificial Sequence
  Description of Artificial Sequence: Synthetic oligonucleotide
  Sense strand starting at position 2970 of SEQ ID NO: 246
gcacucuugcugccucauu

SEQ ID NO: 22411 - RNA, 19 nt, Artificial Sequence
  Description of Artificial Sequence: Synthetic oligonucleotide
  Antisense strand to SEQ ID NO: 22410
aaugaggcagcaagagugc

SEQ ID NO: 22412 - RNA, 19 nt, Artificial Sequence
  Description of Artificial Sequence: Synthetic oligonucleotide
  Sense strand starting at position 2790 of SEQ ID NO: 246
ugagccuaaugguuaggau

SEQ ID NO: 22413 - RNA, 19 nt, Artificial Sequence
  Description of Artificial Sequence: Synthetic oligonucleotide
  Antisense strand to SEQ ID NO: 22412
auccuaaccauuaggcuca

SEQ ID NO: 22414 - RNA, 19 nt, Artificial Sequence
  Description of Artificial Sequence: Synthetic oligonucleotide
  Sense strand starting at position 2717 of SEQ ID NO: 246
cuaauugaagcucagcaau

SEQ ID NO: 22415 - RNA, 19 nt, Artificial Sequence
  Description of Artificial Sequence: Synthetic oligonucleotide
  Antisense strand to SEQ ID NO: 22414
auugcugagcuucaauuag

SEQ ID NO: 22416 - RNA, 19 nt, Artificial Sequence
  Description of Artificial Sequence: Synthetic oligonucleotide
  Sense strand starting at position 2562 of SEQ ID NO: 246
aggcucaauucuuagauuu

SEQ ID NO: 22417 - RNA, 19 nt, Artificial Sequence
  Description of Artificial Sequence: Synthetic oligonucleotide
  Antisense strand to SEQ ID NO: 22416
aaaucuaagaauugagccu

SEQ ID NO: 22418 - RNA, 19 nt, Artificial Sequence
  Description of Artificial Sequence: Synthetic oligonucleotide
  Sense strand starting at position 2521 of SEQ ID NO: 246
cucaguuguccggaauuga

SEQ ID NO: 22419 - RNA, 19 nt, Artificial Sequence
  Description of Artificial Sequence: Synthetic oligonucleotide
  Antisense strand to SEQ ID NO: 22418
ucaauuccggacaacugag

SEQ ID NO: 22420 - RNA, 19 nt, Artificial Sequence
  Description of Artificial Sequence: Synthetic oligonucleotide
  Sense strand starting at position 2518 of SEQ ID NO: 246
agacucaguuguccggaau

SEQ ID NO: 22421 - RNA, 19 nt, Artificial Sequence
  Description of Artificial Sequence: Synthetic oligonucleotide
  Antisense strand to SEQ ID NO: 22420
auuccggacaacugagucu

SEQ ID NO: 22422 - RNA, 19 nt, Artificial Sequence
  Description of Artificial Sequence: Synthetic oligonucleotide
  Sense strand starting at position 2509 of SEQ ID NO: 246
uugcguguuagacucaguu

SEQ ID NO: 22423 - RNA, 19 nt, Artificial Sequence
  Description of Artificial Sequence: Synthetic oligonucleotide
  Antisense strand to SEQ ID NO: 22422
aacugagucuaacacgcaa

SEQ ID NO: 22424 - RNA, 19 nt, Artificial Sequence
  Description of Artificial Sequence: Synthetic oligonucleotide
  Sense strand starting at position 2168 of SEQ ID NO: 246
gccggaagugguuaagaag

SEQ ID NO: 22425 - RNA, 19 nt, Artificial Sequence
  Description of Artificial Sequence: Synthetic oligonucleotide
  Antisense strand to SEQ ID NO: 22424
cuucuuaaccacuuccggc

SEQ ID NO: 22426 - RNA, 19 nt, Artificial Sequence
  Description of Artificial Sequence: Synthetic oligonucleotide
  Sense strand starting at position 2016 of SEQ ID NO: 246
gaacguuccgugagcagug

SEQ ID NO: 22427 - RNA, 19 nt, Artificial Sequence
  Description of Artificial Sequence: Synthetic oligonucleotide
  Antisense strand to SEQ ID NO: 22426
cacugcucacggaacguuc

SEQ ID NO: 22428 - RNA, 19 nt, Artificial Sequence
  Description of Artificial Sequence: Synthetic oligonucleotide
  Sense strand starting at position 2004 of SEQ ID NO: 246
cccaaacuuccagaacguu

SEQ ID NO: 22429 - RNA, 19 nt, Artificial Sequence
  Description of Artificial Sequence: Synthetic oligonucleotide
  Antisense strand to SEQ ID NO: 22428
aacguucuggaaguuuggg

SEQ ID NO: 22430 - RNA, 19 nt, Artificial Sequence
  Description of Artificial Sequence: Synthetic oligonucleotide
  Sense strand starting at position 1854 of SEQ ID NO: 246
gagguaaagcucugagcuc

SEQ ID NO: 22431 - RNA, 19 nt, Artificial Sequence
  Description of Artificial Sequence: Synthetic oligonucleotide
  Antisense strand to SEQ ID NO: 22430
gagcucagagcuuuaccuc

SEQ ID NO: 22432 - RNA, 19 nt, Artificial Sequence
  Description of Artificial Sequence: Synthetic oligonucleotide
  Sense strand starting at position 1390 of SEQ ID NO: 246
acacgaguuuaaccuaugu

SEQ ID NO: 22433 - RNA, 19 nt, Artificial Sequence
  Description of Artificial Sequence: Synthetic oligonucleotide
  Antisense strand to SEQ ID NO: 22432
acauagguuaaacucgugu

SEQ ID NO: 22434 - RNA, 19 nt, Artificial Sequence
  Description of Artificial Sequence: Synthetic oligonucleotide
  Sense strand starting at position 1387 of SEQ ID NO: 246
gugacacgaguuuaaccua

SEQ ID NO: 22435 - RNA, 19 nt, Artificial Sequence
  Description of Artificial Sequence: Synthetic oligonucleotide
  Antisense strand to SEQ ID NO: 22434
uagguuaaacucgugucac

SEQ ID NO: 22436 - RNA, 19 nt, Artificial Sequence
  Description of Artificial Sequence: Synthetic oligonucleotide
  Sense strand starting at position 1215 of SEQ ID NO: 246
gcugcauccucaccugaaa

SEQ ID NO: 22437 - RNA, 19 nt, Artificial Sequence
  Description of Artificial Sequence: Synthetic oligonucleotide
  Antisense strand to SEQ ID NO: 22436
uuucaggugaggaugcagc

SEQ ID NO: 22438 - RNA, 19 nt, Artificial Sequence
  Description of Artificial Sequence: Synthetic oligonucleotide
  Sense strand starting at position 1092 of SEQ ID NO: 246
aggaaugaaucagaaaccu

SEQ ID NO: 22439 - RNA, 19 nt, Artificial Sequence
  Description of Artificial Sequence: Synthetic oligonucleotide
  Antisense strand to SEQ ID NO: 22438
agguuucugauucauuccu

SEQ ID NO: 22440 - RNA, 19 nt, Artificial Sequence
  Description of Artificial Sequence: Synthetic oligonucleotide
  Sense strand starting at position 1078 of SEQ ID NO: 246
cccuguuaaaggugaggaa

SEQ ID NO: 22441 - RNA, 19 nt, Artificial Sequence
  Description of Artificial Sequence: Synthetic oligonucleotide
  Antisense strand to SEQ ID NO: 22440
uuccucaccuuuaacaggg

SEQ ID NO: 22442 - RNA, 19 nt, Artificial Sequence
  Description of Artificial Sequence: Synthetic oligonucleotide
  Sense strand starting at position 1036 of SEQ ID NO: 246
cacaauaagugagaaagga

SEQ ID NO: 22443 - RNA, 19 nt, Artificial Sequence
  Description of Artificial Sequence: Synthetic oligonucleotide
  Antisense strand to SEQ ID NO: 22442
uccuuucucacuuauugug

SEQ ID NO: 22444 - RNA, 19 nt, Artificial Sequence
  Description of Artificial Sequence: Synthetic oligonucleotide
  Sense strand starting at position 1033 of SEQ ID NO: 246
gugcacaauaagugagaaa

SEQ ID NO: 22445 - RNA, 19 nt, Artificial Sequence
  Description of Artificial Sequence: Synthetic oligonucleotide
  Antisense strand to SEQ ID NO: 22444
uuucucacuuauugugcac

SEQ ID NO: 22446 - RNA, 19 nt, Artificial Sequence
  Description of Artificial Sequence: Synthetic oligonucleotide
  Sense strand starting at position 1024 of SEQ ID NO: 246
aguaaucacgugcacaaua

SEQ ID NO: 22447 - RNA, 19 nt, Artificial Sequence
  Description of Artificial Sequence: Synthetic oligonucleotide
  Antisense strand to SEQ ID NO: 22446
uauugugcacgugauuacu

SEQ ID NO: 22448 - RNA, 19 nt, Artificial Sequence
  Description of Artificial Sequence: Synthetic oligonucleotide
  Sense strand starting at position 934 of SEQ ID NO: 246
aucaguuaguaauccauaa

SEQ ID NO: 22449 - RNA, 19 nt, Artificial Sequence
  Description of Artificial Sequence: Synthetic oligonucleotide
  Antisense strand to SEQ ID NO: 22448
uuauggauuacuaacugau

SEQ ID NO: 22450 - RNA, 19 nt, Artificial Sequence
  Description of Artificial Sequence: Synthetic oligonucleotide
  Sense strand starting at position 928 of SEQ ID NO: 246
gugccuaucaguuaguaau

SEQ ID NO: 22451 - RNA, 19 nt, Artificial Sequence
  Description of Artificial Sequence: Synthetic oligonucleotide
  Antisense strand to SEQ ID NO: 22450
auuacuaacugauaggcac

SEQ ID NO: 22452 - RNA, 19 nt, Artificial Sequence
  Description of Artificial Sequence: Synthetic oligonucleotide
  Sense strand starting at position 901 of SEQ ID NO: 246
cugguauguauguggauau

SEQ ID NO: 22453 - RNA, 19 nt, Artificial Sequence
  Description of Artificial Sequence: Synthetic oligonucleotide
  Antisense strand to SEQ ID NO: 22452
auauccacauacauaccag

SEQ ID NO: 22454 - RNA, 19 nt, Artificial Sequence
  Description of Artificial Sequence: Synthetic oligonucleotide
  Sense strand starting at position 900 of SEQ ID NO: 246
acugguauguauguggaua

SEQ ID NO: 22455 - RNA, 19 nt, Artificial Sequence
  Description of Artificial Sequence: Synthetic oligonucleotide
  Antisense strand to SEQ ID NO: 22454
uauccacauacauaccagu

SEQ ID NO: 22456 - RNA, 19 nt, Artificial Sequence
  Description of Artificial Sequence: Synthetic oligonucleotide
  Sense strand starting at position 768 of SEQ ID NO: 246
gaaugaguaaauggugagu

SEQ ID NO: 22457 - RNA, 19 nt, Artificial Sequence
  Description of Artificial Sequence: Synthetic oligonucleotide
  Antisense strand to SEQ ID NO: 22456
acucaccauuuacucauuc

SEQ ID NO: 22458 - RNA, 19 nt, Artificial Sequence
  Description of Artificial Sequence: Synthetic oligonucleotide
  Sense strand starting at position 755 of SEQ ID NO: 246
cucaaagauuugugaauga

SEQ ID NO: 22459 - RNA, 19 nt, Artificial Sequence
  Description of Artificial Sequence: Synthetic oligonucleotide
  Antisense strand to SEQ ID NO: 22458
ucauucacaaaucuuugag

SEQ ID NO: 22460 - RNA, 19 nt, Artificial Sequence
  Description of Artificial Sequence: Synthetic oligonucleotide
  Sense strand starting at position 679 of SEQ ID NO: 246
guuaacuagcuccaugaga

SEQ ID NO: 22461 - RNA, 19 nt, Artificial Sequence
  Description of Artificial Sequence: Synthetic oligonucleotide
  Antisense strand to SEQ ID NO: 22460
ucucauggagcuaguuaac

SEQ ID NO: 22462 - RNA, 19 nt, Artificial Sequence
  Description of Artificial Sequence: Synthetic oligonucleotide
  Sense strand starting at position 664 of SEQ ID NO: 246
augaaugaaugagaaguua

SEQ ID NO: 22463 - RNA, 19 nt, Artificial Sequence
  Description of Artificial Sequence: Synthetic oligonucleotide
  Antisense strand to SEQ ID NO: 22462
uaacuucucauucauucau

SEQ ID NO: 22464 - RNA, 19 nt, Artificial Sequence
  Description of Artificial Sequence: Synthetic oligonucleotide
  Sense strand starting at position 610 of SEQ ID NO: 246
ucuuccugcugaguugaaa

SEQ ID NO: 22465 - RNA, 19 nt, Artificial Sequence
  Description of Artificial Sequence: Synthetic oligonucleotide
  Antisense strand to SEQ ID NO: 22464
uuucaacucagcaggaaga

SEQ ID NO: 22466 - RNA, 19 nt, Artificial Sequence
  Description of Artificial Sequence: Synthetic oligonucleotide
  Sense strand starting at position 554 of SEQ ID NO: 246
aguaucucccaaggugauu

SEQ ID NO: 22467 - RNA, 19 nt, Artificial Sequence
  Description of Artificial Sequence: Synthetic oligonucleotide
  Antisense strand to SEQ ID NO: 22466
aaucaccuugggagauacu

SEQ ID NO: 22468 - RNA, 19 nt, Artificial Sequence
  Description of Artificial Sequence: Synthetic oligonucleotide
  Sense strand starting at position 547 of SEQ ID NO: 246
guaaguuaguaucucccaa

SEQ ID NO: 22469 - RNA, 19 nt, Artificial Sequence
  Description of Artificial Sequence: Synthetic oligonucleotide
  Antisense strand to SEQ ID NO: 22468
uugggagauacuaacuuac

SEQ ID NO: 22470 - RNA, 19 nt, Artificial Sequence
  Description of Artificial Sequence: Synthetic oligonucleotide
  Sense strand starting at position 539 of SEQ ID NO: 246
cagugaugguaaguuagua

SEQ ID NO: 22471 - RNA, 19 nt, Artificial Sequence
  Description of Artificial Sequence: Synthetic oligonucleotide
  Antisense strand to SEQ ID NO: 22470
uacuaacuuaccaucacug

SEQ ID NO: 22472 - RNA, 19 nt, Artificial Sequence
  Description of Artificial Sequence: Synthetic oligonucleotide
  Sense strand starting at position 68 of SEQ ID NO: 246
gugaauauccaugagucua

SEQ ID NO: 22473 - RNA, 19 nt, Artificial Sequence
  Description of Artificial Sequence: Synthetic oligonucleotide
  Antisense strand to SEQ ID NO: 22472
uagacucauggauauucac

SEQ ID NO: 22474 - RNA, 19 nt, Artificial Sequence
  Description of Artificial Sequence: Synthetic oligonucleotide
  Sense strand starting at position 67 of SEQ ID NO: 246
agugaauauccaugagucu

SEQ ID NO: 22475 - RNA, 19 nt, Artificial Sequence
  Description of Artificial Sequence: Synthetic oligonucleotide
  Antisense strand to SEQ ID NO: 22474
agacucauggauauucacu

SEQ ID NO: 22476 - RNA, 19 nt, Artificial Sequence
  Description of Artificial Sequence: Synthetic oligonucleotide
  Sense strand starting at position 3972 of SEQ ID NO: 247
aaggccuguguuuauauau

SEQ ID NO: 22477 - RNA, 19 nt, Artificial Sequence
  Description of Artificial Sequence: Synthetic oligonucleotide
  Antisense strand to SEQ ID NO: 22476
auauauaaacacaggccuu

SEQ ID NO: 22478 - RNA, 19 nt, Artificial Sequence
  Description of Artificial Sequence: Synthetic oligonucleotide
  Sense strand starting at position 3899 of SEQ ID NO: 247
gacagucuccagcauggau

SEQ ID NO: 22479 - RNA, 19 nt, Artificial Sequence
  Description of Artificial Sequence: Synthetic oligonucleotide
  Antisense strand to SEQ ID NO: 22478
auccaugcuggagacuguc

SEQ ID NO: 22480 - RNA, 19 nt, Artificial Sequence
  Description of Artificial Sequence: Synthetic oligonucleotide
  Sense strand starting at position 3895 of SEQ ID NO: 247
gagagacagucuccagcau

SEQ ID NO: 22481 - RNA, 19 nt, Artificial Sequence
  Description of Artificial Sequence: Synthetic oligonucleotide
  Antisense strand to SEQ ID NO: 22480
augcuggagacugucucuc

SEQ ID NO: 22482 - RNA, 19 nt, Artificial Sequence
  Description of Artificial Sequence: Synthetic oligonucleotide
  Sense strand starting at position 3065 of SEQ ID NO: 247
augcguucgguauaauuua

SEQ ID NO: 22483 - RNA, 19 nt, Artificial Sequence
  Description of Artificial Sequence: Synthetic oligonucleotide
  Antisense strand to SEQ ID NO: 22482
uaaauuauaccgaacgcau

SEQ ID NO: 22484 - RNA, 19 nt, Artificial Sequence
  Description of Artificial Sequence: Synthetic oligonucleotide
  Sense strand starting at position 3059 of SEQ ID NO: 247
ggaggcaugcguucgguau

SEQ ID NO: 22485 - RNA, 19 nt, Artificial Sequence
  Description of Artificial Sequence: Synthetic oligonucleotide
  Antisense strand to SEQ ID NO: 22484
auaccgaacgcaugccucc

SEQ ID NO: 22486 - RNA, 19 nt, Artificial Sequence
  Description of Artificial Sequence: Synthetic oligonucleotide
  Sense strand starting at position 2961 of SEQ ID NO: 247
uguucugcagguuagaaua

SEQ ID NO: 22487 - RNA, 19 nt, Artificial Sequence
  Description of Artificial Sequence: Synthetic oligonucleotide
  Antisense strand to SEQ ID NO: 22486
uauucuaaccugcagaaca

SEQ ID NO: 22488 - RNA, 19 nt, Artificial Sequence
  Description of Artificial Sequence: Synthetic oligonucleotide
  Sense strand starting at position 2956 of SEQ ID NO: 247
aaagauguucugcagguua

SEQ ID NO: 22489 - RNA, 19 nt, Artificial Sequence
  Description of Artificial Sequence: Synthetic oligonucleotide
  Antisense strand to SEQ ID NO: 22488
uaaccugcagaacaucuuu

SEQ ID NO: 22490 - RNA, 19 nt, Artificial Sequence
  Description of Artificial Sequence: Synthetic oligonucleotide
  Sense strand starting at position 2913 of SEQ ID NO: 247
guguuccaucuugaaacua

SEQ ID NO: 22491 - RNA, 19 nt, Artificial Sequence
  Description of Artificial Sequence: Synthetic oligonucleotide
  Antisense strand to SEQ ID NO: 22490
uaguuucaagauggaacac

SEQ ID NO: 22492 - RNA, 19 nt, Artificial Sequence
  Description of Artificial Sequence: Synthetic oligonucleotide
  Sense strand starting at position 2839 of SEQ ID NO: 247
uggauuucgcuaggcaauu

SEQ ID NO: 22493 - RNA, 19 nt, Artificial Sequence
  Description of Artificial Sequence: Synthetic oligonucleotide
  Antisense strand to SEQ ID NO: 22492
aauugccuagcgaaaucca

SEQ ID NO: 22494 - RNA, 19 nt, Artificial Sequence
  Description of Artificial Sequence: Synthetic oligonucleotide
  Sense strand starting at position 2837 of SEQ ID NO: 247
gcuggauuucgcuaggcaa

SEQ ID NO: 22495 - RNA, 19 nt, Artificial Sequence
  Description of Artificial Sequence: Synthetic oligonucleotide
  Antisense strand to SEQ ID NO: 22494
uugccuagcgaaauccagc

SEQ ID NO: 22496 - RNA, 19 nt, Artificial Sequence
  Description of Artificial Sequence: Synthetic oligonucleotide
  Sense strand starting at position 2777 of SEQ ID NO: 247
acaugugguuaacuaaaca

SEQ ID NO: 22497 - RNA, 19 nt, Artificial Sequence
  Description of Artificial Sequence: Synthetic oligonucleotide
  Antisense strand to SEQ ID NO: 22496
uguuuaguuaaccacaugu

SEQ ID NO: 22498 - RNA, 19 nt, Artificial Sequence
  Description of Artificial Sequence: Synthetic oligonucleotide
  Sense strand starting at position 2747 of SEQ ID NO: 247
uuuaaaggcugacuuuaaa

SEQ ID NO: 22499 - RNA, 19 nt, Artificial Sequence
  Description of Artificial Sequence: Synthetic oligonucleotide
  Antisense strand to SEQ ID NO: 22498
uuuaaagucagccuuuaaa

SEQ ID NO: 22500 - RNA, 19 nt, Artificial Sequence
  Description of Artificial Sequence: Synthetic oligonucleotide
  Sense strand starting at position 2728 of SEQ ID NO: 247
ugaaauccucugcaagagu

SEQ ID NO: 22501 - RNA, 19 nt, Artificial Sequence
  Description of Artificial Sequence: Synthetic oligonucleotide
  Antisense strand to SEQ ID NO: 22500
acucuugcagaggauuuca

SEQ ID NO: 22502 - RNA, 19 nt, Artificial Sequence
  Description of Artificial Sequence: Synthetic oligonucleotide
  Sense strand starting at position 2727 of SEQ ID NO: 247
augaaauccucugcaagag

SEQ ID NO: 22503 - RNA, 19 nt, Artificial Sequence
  Description of Artificial Sequence: Synthetic oligonucleotide
  Antisense strand to SEQ ID NO: 22502
cucuugcagaggauuucau

SEQ ID NO: 22504 - RNA, 19 nt, Artificial Sequence
  Description of Artificial Sequence: Synthetic oligonucleotide
  Sense strand starting at position 2625 of SEQ ID NO: 247
ggccuuugucuugcucauu

SEQ ID NO: 22505 - RNA, 19 nt, Artificial Sequence
  Description of Artificial Sequence: Synthetic oligonucleotide
  Antisense strand to SEQ ID NO: 22504
aaugagcaagacaaaggcc

SEQ ID NO: 22506 - RNA, 19 nt, Artificial Sequence
  Description of Artificial Sequence: Synthetic oligonucleotide
  Sense strand starting at position 2604 of SEQ ID NO: 247
agcucaguccaaugagaua

SEQ ID NO: 22507 - RNA, 19 nt, Artificial Sequence
  Description of Artificial Sequence: Synthetic oligonucleotide
  Antisense strand to SEQ ID NO: 22506
uaucucauuggacugagcu

SEQ ID NO: 22508 - RNA, 19 nt, Artificial Sequence
  Description of Artificial Sequence: Synthetic oligonucleotide
  Sense strand starting at position 2453 of SEQ ID NO: 247
aaagaauucugucuuugug

SEQ ID NO: 22509 - RNA, 19 nt, Artificial Sequence
  Description of Artificial Sequence: Synthetic oligonucleotide
  Antisense strand to SEQ ID NO: 22508
cacaaagacagaauucuuu

SEQ ID NO: 22510 - RNA, 19 nt, Artificial Sequence
  Description of Artificial Sequence: Synthetic oligonucleotide
  Sense strand starting at position 2374 of SEQ ID NO: 247
gauuuaaauccacgcuggu

SEQ ID NO: 22511 - RNA, 19 nt, Artificial Sequence
  Description of Artificial Sequence: Synthetic oligonucleotide
  Antisense strand to SEQ ID NO: 22510
accagcguggauuuaaauc

SEQ ID NO: 22512 - RNA, 19 nt, Artificial Sequence
  Description of Artificial Sequence: Synthetic oligonucleotide
  Sense strand starting at position 2360 of SEQ ID NO: 247
ugcaguugugaugggauuu

SEQ ID NO: 22513 - RNA, 19 nt, Artificial Sequence
  Description of Artificial Sequence: Synthetic oligonucleotide
  Antisense strand to SEQ ID NO: 22512
aaaucccaucacaacugca

SEQ ID NO: 22514 - RNA, 19 nt, Artificial Sequence
  Description of Artificial Sequence: Synthetic oligonucleotide
  Sense strand starting at position 2128 of SEQ ID NO: 247
guguucucaccacaauacu

SEQ ID NO: 22515 - RNA, 19 nt, Artificial Sequence
  Description of Artificial Sequence: Synthetic oligonucleotide
  Antisense strand to SEQ ID NO: 22514
aguauuguggugagaacac

SEQ ID NO: 22516 - RNA, 19 nt, Artificial Sequence
  Description of Artificial Sequence: Synthetic oligonucleotide
  Sense strand starting at position 2126 of SEQ ID NO: 247
cuguguucucaccacaaua

SEQ ID NO: 22517 - RNA, 19 nt, Artificial Sequence
  Description of Artificial Sequence: Synthetic oligonucleotide
  Antisense strand to SEQ ID NO: 22516
uauuguggugagaacacag

SEQ ID NO: 22518 - RNA, 19 nt, Artificial Sequence
  Description of Artificial Sequence: Synthetic oligonucleotide
  Sense strand starting at position 2111 of SEQ ID NO: 247
agaagaaccugguuucugu

SEQ ID NO: 22519 - RNA, 19 nt, Artificial Sequence
  Description of Artificial Sequence: Synthetic oligonucleotide
  Antisense strand to SEQ ID NO: 22518
acagaaaccagguucuucu

SEQ ID NO: 22520 - RNA, 19 nt, Artificial Sequence
  Description of Artificial Sequence: Synthetic oligonucleotide
  Sense strand starting at position 2037 of SEQ ID NO: 247
gcugauucugcagaagcaa

SEQ ID NO: 22521 - RNA, 19 nt, Artificial Sequence
  Description of Artificial Sequence: Synthetic oligonucleotide
  Antisense strand to SEQ ID NO: 22520
uugcuucugcagaaucagc

SEQ ID NO: 22522 - RNA, 19 nt, Artificial Sequence
  Description of Artificial Sequence: Synthetic oligonucleotide
  Sense strand starting at position 1996 of SEQ ID NO: 247
ggugacagacucugaguau

SEQ ID NO: 22523 - RNA, 19 nt, Artificial Sequence
  Description of Artificial Sequence: Synthetic oligonucleotide
  Antisense strand to SEQ ID NO: 22522
auacucagagucugucacc

SEQ ID NO: 22524 - RNA, 19 nt, Artificial Sequence
  Description of Artificial Sequence: Synthetic oligonucleotide
  Sense strand starting at position 1492 of SEQ ID NO: 247
guaacuauccuuuguagag

SEQ ID NO: 22525 - RNA, 19 nt, Artificial Sequence
  Description of Artificial Sequence: Synthetic oligonucleotide
  Antisense strand to SEQ ID NO: 22524
cucuacaaaggauaguuac

SEQ ID NO: 22526 - RNA, 19 nt, Artificial Sequence
  Description of Artificial Sequence: Synthetic oligonucleotide
  Sense strand starting at position 1476 of SEQ ID NO: 247
ugaugauugcuugaaugua

SEQ ID NO: 22527 - RNA, 19 nt, Artificial Sequence
  Description of Artificial Sequence: Synthetic oligonucleotide
  Antisense strand to SEQ ID NO: 22526
uacauucaagcaaucauca

SEQ ID NO: 22528 - RNA, 19 nt, Artificial Sequence
  Description of Artificial Sequence: Synthetic oligonucleotide
  Sense strand starting at position 1474 of SEQ ID NO: 247
auugaugauugcuugaaug

SEQ ID NO: 22529 - RNA, 19 nt, Artificial Sequence
  Description of Artificial Sequence: Synthetic oligonucleotide
  Antisense strand to SEQ ID NO: 22528
cauucaagcaaucaucaau

SEQ ID NO: 22530 - RNA, 19 nt, Artificial Sequence
  Description of Artificial Sequence: Synthetic oligonucleotide
  Sense strand starting at position 1468 of SEQ ID NO: 247
gugaauauugaugauugcu

SEQ ID NO: 22531 - RNA, 19 nt, Artificial Sequence
  Description of Artificial Sequence: Synthetic oligonucleotide
  Antisense strand to SEQ ID NO: 22530
agcaaucaucaauauucac

SEQ ID NO: 22532 - RNA, 19 nt, Artificial Sequence
  Description of Artificial Sequence: Synthetic oligonucleotide
  Sense strand starting at position 1420 of SEQ ID NO: 247
uucgauaaccaucauguau

SEQ ID NO: 22533 - RNA, 19 nt, Artificial Sequence
  Description of Artificial Sequence: Synthetic oligonucleotide
  Antisense strand to SEQ ID NO: 22532
auacaugaugguuaucgaa

SEQ ID NO: 22534 - RNA, 19 nt, Artificial Sequence
  Description of Artificial Sequence: Synthetic oligonucleotide
  Sense strand starting at position 1387 of SEQ ID NO: 247
cuguuauaucuguaagaga

SEQ ID NO: 22535 - RNA, 19 nt, Artificial Sequence
  Description of Artificial Sequence: Synthetic oligonucleotide
  Antisense strand to SEQ ID NO: 22534
ucucuuacagauauaacag

SEQ ID NO: 22536 - RNA, 19 nt, Artificial Sequence
  Description of Artificial Sequence: Synthetic oligonucleotide
  Sense strand starting at position 1386 of SEQ ID NO: 247
ccuguuauaucuguaagag

SEQ ID NO: 22537 - RNA, 19 nt, Artificial Sequence
  Description of Artificial Sequence: Synthetic oligonucleotide
  Antisense strand to SEQ ID NO: 22536
cucuuacagauauaacagg

SEQ ID NO: 22538 - RNA, 19 nt, Artificial Sequence
  Description of Artificial Sequence: Synthetic oligonucleotide
  Sense strand starting at position 1140 of SEQ ID NO: 247
ggcaggauuguggaaaggu

SEQ ID NO: 22539 - RNA, 19 nt, Artificial Sequence
  Description of Artificial Sequence: Synthetic oligonucleotide
  Antisense strand to SEQ ID NO: 22538
accuuuccacaauccugcc

SEQ ID NO: 22540 - RNA, 19 nt, Artificial Sequence
  Description of Artificial Sequence: Synthetic oligonucleotide
  Sense strand starting at position 1130 of SEQ ID NO: 247
gcauuaguagggcaggauu

SEQ ID NO: 22541 - RNA, 19 nt, Artificial Sequence
  Description of Artificial Sequence: Synthetic oligonucleotide
  Antisense strand to SEQ ID NO: 22540
aauccugcccuacuaaugc

SEQ ID NO: 22542 - RNA, 19 nt, Artificial Sequence
  Description of Artificial Sequence: Synthetic oligonucleotide
  Sense strand starting at position 711 of SEQ ID NO: 247
guaugccaacuugaaacuu

SEQ ID NO: 22543 - RNA, 19 nt, Artificial Sequence
  Description of Artificial Sequence: Synthetic oligonucleotide
  Antisense strand to SEQ ID NO: 22542
aaguuucaaguuggcauac

SEQ ID NO: 22544 - RNA, 19 nt, Artificial Sequence
  Description of Artificial Sequence: Synthetic oligonucleotide
  Sense strand starting at position 577 of SEQ ID NO: 247
accaaagcugaguauucua

SEQ ID NO: 22545 - RNA, 19 nt, Artificial Sequence
  Description of Artificial Sequence: Synthetic oligonucleotide
  Antisense strand to SEQ ID NO: 22544
uagaauacucagcuuuggu

SEQ ID NO: 22546 - RNA, 19 nt, Artificial Sequence
  Description of Artificial Sequence: Synthetic oligonucleotide
  Sense strand starting at position 525 of SEQ ID NO: 247
uuacuaauguucuccagga

SEQ ID NO: 22547 - RNA, 19 nt, Artificial Sequence
  Description of Artificial Sequence: Synthetic oligonucleotide
  Antisense strand to SEQ ID NO: 22546
uccuggagaacauuaguaa

SEQ ID NO: 22548 - RNA, 19 nt, Artificial Sequence
  Description of Artificial Sequence: Synthetic oligonucleotide
  Sense strand starting at position 499 of SEQ ID NO: 247
guuguaucuggccagagag

SEQ ID NO: 22549 - RNA, 19 nt, Artificial Sequence
  Description of Artificial Sequence: Synthetic oligonucleotide
  Antisense strand to SEQ ID NO: 22548
cucucuggccagauacaac

SEQ ID NO: 22550 - RNA, 19 nt, Artificial Sequence
  Description of Artificial Sequence: Synthetic oligonucleotide
  Sense strand starting at position 371 of SEQ ID NO: 247
ugaguacugcaucacccau

SEQ ID NO: 22551 - RNA, 19 nt, Artificial Sequence
  Description of Artificial Sequence: Synthetic oligonucleotide
  Antisense strand to SEQ ID NO: 22550
augggugaugcaguacuca

SEQ ID NO: 22552 - RNA, 19 nt, Artificial Sequence
  Description of Artificial Sequence: Synthetic oligonucleotide
  Sense strand starting at position 266 of SEQ ID NO: 247
gaaugagaaccuggagcuu

SEQ ID NO: 22553 - RNA, 19 nt, Artificial Sequence
  Description of Artificial Sequence: Synthetic oligonucleotide
  Antisense strand to SEQ ID NO: 22552
aagcuccagguucucauuc

SEQ ID NO: 22554 - RNA, 19 nt, Artificial Sequence
  Description of Artificial Sequence: Synthetic oligonucleotide
  Sense strand starting at position 183 of SEQ ID NO: 247
uuugauuugucgcuauaua

SEQ ID NO: 22555 - RNA, 19 nt, Artificial Sequence
  Description of Artificial Sequence: Synthetic oligonucleotide
  Antisense strand to SEQ ID NO: 22554
uauauagcgacaaaucaaa

SEQ ID NO: 22556 - RNA, 19 nt, Artificial Sequence
  Description of Artificial Sequence: Synthetic oligonucleotide
  Sense strand starting at position 68 of SEQ ID NO: 248
cagcgcuagcuguucuuua

SEQ ID NO: 22557 - RNA, 19 nt, Artificial Sequence
  Description of Artificial Sequence: Synthetic oligonucleotide
  Antisense strand to SEQ ID NO: 22556
uaaagaacagcuagcgcug

SEQ ID NO: 22558 - RNA, 19 nt, Artificial Sequence
  Description of Artificial Sequence: Synthetic oligonucleotide
  Sense strand starting at position 69 of SEQ ID NO: 248
agcgcuagcuguucuuuaa

SEQ ID NO: 22559 - RNA, 19 nt, Artificial Sequence
  Description of Artificial Sequence: Synthetic oligonucleotide
  Antisense strand to SEQ ID NO: 22558
uuaaagaacagcuagcgcu

SEQ ID NO: 22560 - RNA, 19 nt, Artificial Sequence
  Description of Artificial Sequence: Synthetic oligonucleotide
  Sense strand starting at position 70 of SEQ ID NO: 248
gcgcuagcuguucuuuaaa

SEQ ID NO: 22561 - RNA, 19 nt, Artificial Sequence
  Description of Artificial Sequence: Synthetic oligonucleotide
  Antisense strand to SEQ ID NO: 22560
uuuaaagaacagcuagcgc

SEQ ID NO: 22562 - RNA, 19 nt, Artificial Sequence
  Description of Artificial Sequence: Synthetic oligonucleotide
  Sense strand starting at position 72 of SEQ ID NO: 248
gcuagcuguucuuuaaaug

SEQ ID NO: 22563 - RNA, 19 nt, Artificial Sequence
  Description of Artificial Sequence: Synthetic oligonucleotide
  Antisense strand to SEQ ID NO: 22562
cauuuaaagaacagcuagc

SEQ ID NO: 22564 - RNA, 19 nt, Artificial Sequence
  Description of Artificial Sequence: Synthetic oligonucleotide
  Sense strand starting at position 73 of SEQ ID NO: 248
cuagcuguucuuuaaauga

SEQ ID NO: 22565 - RNA, 19 nt, Artificial Sequence
  Description of Artificial Sequence: Synthetic oligonucleotide
  Antisense strand to SEQ ID NO: 22564
ucauuuaaagaacagcuag

SEQ ID NO: 22566 - RNA, 19 nt, Artificial Sequence
  Description of Artificial Sequence: Synthetic oligonucleotide
  Sense strand starting at position 89 of SEQ ID NO: 248
ugagcuacccaguaaguca

SEQ ID NO: 22567 - RNA, 19 nt, Artificial Sequence
  Description of Artificial Sequence: Synthetic oligonucleotide
  Antisense strand to SEQ ID NO: 22566
ugacuuacuggguagcuca

SEQ ID NO: 22568 - RNA, 19 nt, Artificial Sequence
  Description of Artificial Sequence: Synthetic oligonucleotide
  Sense strand starting at position 253 of SEQ ID NO: 248
cgggaugugugucaggaaa

SEQ ID NO: 22569 - RNA, 19 nt, Artificial Sequence
  Description of Artificial Sequence: Synthetic oligonucleotide
  Antisense strand to SEQ ID NO: 22568
uuuccugacacacaucccg

SEQ ID NO: 22570 - RNA, 19 nt, Artificial Sequence
  Description of Artificial Sequence: Synthetic oligonucleotide
  Sense strand starting at position 324 of SEQ ID NO: 248
gacggauccuggcugaaug

SEQ ID NO: 22571 - RNA, 19 nt, Artificial Sequence
  Description of Artificial Sequence: Synthetic oligonucleotide
  Antisense strand to SEQ ID NO: 22570
cauucagccaggauccguc

SEQ ID NO: 22572 - RNA, 19 nt, Artificial Sequence
  Description of Artificial Sequence: Synthetic oligonucleotide
  Sense strand starting at position 362 of SEQ ID NO: 248
ugaguaaucaggcgcauca

SEQ ID NO: 22573 - RNA, 19 nt, Artificial Sequence
  Description of Artificial Sequence: Synthetic oligonucleotide
  Antisense strand to SEQ ID NO: 22572
ugaugcgccugauuacuca

SEQ ID NO: 22574 - RNA, 19 nt, Artificial Sequence
  Description of Artificial Sequence: Synthetic oligonucleotide
  Sense strand starting at position 436 of SEQ ID NO: 248
gaggguuucccagguuaag

SEQ ID NO: 22575 - RNA, 19 nt, Artificial Sequence
  Description of Artificial Sequence: Synthetic oligonucleotide
  Antisense strand to SEQ ID NO: 22574
cuuaaccugggaaacccuc

SEQ ID NO: 22576 - RNA, 19 nt, Artificial Sequence
  Description of Artificial Sequence: Synthetic oligonucleotide
  Sense strand starting at position 559 of SEQ ID NO: 248
gugcguacugcucggguga

SEQ ID NO: 22577 - RNA, 19 nt, Artificial Sequence
  Description of Artificial Sequence: Synthetic oligonucleotide
  Antisense strand to SEQ ID NO: 22576
ucacccgagcaguacgcac

SEQ ID NO: 22578 - RNA, 19 nt, Artificial Sequence
  Description of Artificial Sequence: Synthetic oligonucleotide
  Sense strand starting at position 560 of SEQ ID NO: 248
ugcguacugcucgggugau

SEQ ID NO: 22579 - RNA, 19 nt, Artificial Sequence
  Description of Artificial Sequence: Synthetic oligonucleotide
  Antisense strand to SEQ ID NO: 22578
aucacccgagcaguacgca

SEQ ID NO: 22580 - RNA, 19 nt, Artificial Sequence
  Description of Artificial Sequence: Synthetic oligonucleotide
  Sense strand starting at position 701 of SEQ ID NO: 248
ucugcacacccugguaaua

SEQ ID NO: 22581 - RNA, 19 nt, Artificial Sequence
  Description of Artificial Sequence: Synthetic oligonucleotide
  Antisense strand to SEQ ID NO: 22580
uauuaccagggugugcaga

SEQ ID NO: 22582 - RNA, 19 nt, Artificial Sequence
  Description of Artificial Sequence: Synthetic oligonucleotide
  Sense strand starting at position 777 of SEQ ID NO: 248
ggacgaggcggcuaagaau

SEQ ID NO: 22583 - RNA, 19 nt, Artificial Sequence
  Description of Artificial Sequence: Synthetic oligonucleotide
  Antisense strand to SEQ ID NO: 22582
auucuuagccgccucgucc

SEQ ID NO: 22584 - RNA, 19 nt, Artificial Sequence
  Description of Artificial Sequence: Synthetic oligonucleotide
  Sense strand starting at position 819 of SEQ ID NO: 248
gaagaagccgcguuugcuu

SEQ ID NO: 22585 - RNA, 19 nt, Artificial Sequence
  Description of Artificial Sequence: Synthetic oligonucleotide
  Antisense strand to SEQ ID NO: 22584
aagcaaacgcggcuucuuc

SEQ ID NO: 22586 - RNA, 19 nt, Artificial Sequence
  Description of Artificial Sequence: Synthetic oligonucleotide
  Sense strand starting at position 824 of SEQ ID NO: 248
agccgcguuugcuuugaaa

SEQ ID NO: 22587 - RNA, 19 nt, Artificial Sequence
  Description of Artificial Sequence: Synthetic oligonucleotide
  Antisense strand to SEQ ID NO: 22586
uuucaaagcaaacgcggcu

SEQ ID NO: 22588 - RNA, 19 nt, Artificial Sequence
  Description of Artificial Sequence: Synthetic oligonucleotide
  Sense strand starting at position 836 of SEQ ID NO: 248
uuugaaacgcgguaagaaa

SEQ ID NO: 22589 - RNA, 19 nt, Artificial Sequence
  Description of Artificial Sequence: Synthetic oligonucleotide
  Antisense strand to SEQ ID NO: 22588
uuucuuaccgcguuucaaa

SEQ ID NO: 22590 - RNA, 19 nt, Artificial Sequence
  Description of Artificial Sequence: Synthetic oligonucleotide
  Sense strand starting at position 955 of SEQ ID NO: 248
ggcuacuccaggugacaaa

SEQ ID NO: 22591 - RNA, 19 nt, Artificial Sequence
  Description of Artificial Sequence: Synthetic oligonucleotide
  Antisense strand to SEQ ID NO: 22590
uuugucaccuggaguagcc

SEQ ID NO: 22592 - RNA, 19 nt, Artificial Sequence
  Description of Artificial Sequence: Synthetic oligonucleotide
  Sense strand starting at position 989 of SEQ ID NO: 248
ccuaaagccucgcgggaaa

SEQ ID NO: 22593 - RNA, 19 nt, Artificial Sequence
  Description of Artificial Sequence: Synthetic oligonucleotide
  Antisense strand to SEQ ID NO: 22592
uuucccgcgaggcuuuagg

SEQ ID NO: 22594 - RNA, 19 nt, Artificial Sequence
  Description of Artificial Sequence: Synthetic oligonucleotide
  Sense strand starting at position 1012 of SEQ ID NO: 248
ccugaaucguggccgacuu

SEQ ID NO: 22595 - RNA, 19 nt, Artificial Sequence
  Description of Artificial Sequence: Synthetic oligonucleotide
  Antisense strand to SEQ ID NO: 22594
aagucggccacgauucagg

SEQ ID NO: 22596 - RNA, 19 nt, Artificial Sequence
  Description of Artificial Sequence: Synthetic oligonucleotide
  Sense strand starting at position 1926 of SEQ ID NO: 248
ugggaaauguaguccuaga

SEQ ID NO: 22597 - RNA, 19 nt, Artificial Sequence
  Description of Artificial Sequence: Synthetic oligonucleotide
  Antisense strand to SEQ ID NO: 22596
ucuaggacuacauuuccca

SEQ ID NO: 22598 - RNA, 19 nt, Artificial Sequence
  Description of Artificial Sequence: Synthetic oligonucleotide
  Sense strand starting at position 2561 of SEQ ID NO: 248
cgcagcuuucggcaaacau

SEQ ID NO: 22599 - RNA, 19 nt, Artificial Sequence
  Description of Artificial Sequence: Synthetic oligonucleotide
  Antisense strand to SEQ ID NO: 22598
auguuugccgaaagcugcg

SEQ ID NO: 22600 - RNA, 19 nt, Artificial Sequence
  Description of Artificial Sequence: Synthetic oligonucleotide
  Sense strand starting at position 2631 of SEQ ID NO: 248
gcuucaauccugucggugu

SEQ ID NO: 22601 - RNA, 19 nt, Artificial Sequence
  Description of Artificial Sequence: Synthetic oligonucleotide
  Antisense strand to SEQ ID NO: 22600
acaccgacaggauugaagc

SEQ ID NO: 22602 - RNA, 19 nt, Artificial Sequence
  Description of Artificial Sequence: Synthetic oligonucleotide
  Sense strand starting at position 2900 of SEQ ID NO: 248
guuguuccuccuugaugga

SEQ ID NO: 22603 - RNA, 19 nt, Artificial Sequence
  Description of Artificial Sequence: Synthetic oligonucleotide
  Antisense strand to SEQ ID NO: 22602
uccaucaaggaggaacaac

SEQ ID NO: 22604 - RNA, 19 nt, Artificial Sequence
  Description of Artificial Sequence: Synthetic oligonucleotide
  Sense strand starting at position 2928 of SEQ ID NO: 248
cggguuccaucccaaguuu

SEQ ID NO: 22605 - RNA, 19 nt, Artificial Sequence
  Description of Artificial Sequence: Synthetic oligonucleotide
  Antisense strand to SEQ ID NO: 22604
aaacuugggauggaacccg

SEQ ID NO: 22606 - RNA, 19 nt, Artificial Sequence
  Description of Artificial Sequence: Synthetic oligonucleotide
  Sense strand starting at position 2941 of SEQ ID NO: 248
aaguuuaaaugccagagau

SEQ ID NO: 22607 - RNA, 19 nt, Artificial Sequence
  Description of Artificial Sequence: Synthetic oligonucleotide
  Antisense strand to SEQ ID NO: 22606
aucucuggcauuuaaacuu

SEQ ID NO: 22608 - RNA, 19 nt, Artificial Sequence
  Description of Artificial Sequence: Synthetic oligonucleotide
  Sense strand starting at position 2981 of SEQ ID NO: 248
aucuuaacagcgugaggau

SEQ ID NO: 22609 - RNA, 19 nt, Artificial Sequence
  Description of Artificial Sequence: Synthetic oligonucleotide
  Antisense strand to SEQ ID NO: 22608
auccucacgcuguuaagau

SEQ ID NO: 22610 - RNA, 19 nt, Artificial Sequence
  Description of Artificial Sequence: Synthetic oligonucleotide
  Sense strand starting at position 3029 of SEQ ID NO: 248
ggaagucacauuugugucu

SEQ ID NO: 22611 - RNA, 19 nt, Artificial Sequence
  Description of Artificial Sequence: Synthetic oligonucleotide
  Antisense strand to SEQ ID NO: 22610
agacacaaaugugacuucc

SEQ ID NO: 22612 - RNA, 19 nt, Artificial Sequence
  Description of Artificial Sequence: Synthetic oligonucleotide
  Sense strand starting at position 3038 of SEQ ID NO: 248
auuugugucuucucuuuag

SEQ ID NO: 22613 - RNA, 19 nt, Artificial Sequence
  Description of Artificial Sequence: Synthetic oligonucleotide
  Antisense strand to SEQ ID NO: 22612
cuaaagagaagacacaaau

SEQ ID NO: 22614 - RNA, 19 nt, Artificial Sequence
  Description of Artificial Sequence: Synthetic oligonucleotide
  Sense strand starting at position 3674 of SEQ ID NO: 248
gcguccacuuucuugacua

SEQ ID NO: 22615 - RNA, 19 nt, Artificial Sequence
  Description of Artificial Sequence: Synthetic oligonucleotide
  Antisense strand to SEQ ID NO: 22614
uagucaagaaaguggacgc

SEQ ID NO: 22616 - RNA, 19 nt, Artificial Sequence
  Description of Artificial Sequence: Synthetic oligonucleotide
  Sense strand starting at position 3675 of SEQ ID NO: 248
cguccacuuucuugacuau

SEQ ID NO: 22617 - RNA, 19 nt, Artificial Sequence
  Description of Artificial Sequence: Synthetic oligonucleotide
  Antisense strand to SEQ ID NO: 22616
auagucaagaaaguggacg

SEQ ID NO: 22618 - RNA, 19 nt, Artificial Sequence
  Description of Artificial Sequence: Synthetic oligonucleotide
  Sense strand starting at position 3676 of SEQ ID NO: 248
guccacuuucuugacuauu

SEQ ID NO: 22619 - RNA, 19 nt, Artificial Sequence
  Description of Artificial Sequence: Synthetic oligonucleotide
  Antisense strand to SEQ ID NO: 22618
aauagucaagaaaguggac

SEQ ID NO: 22620 - RNA, 19 nt, Artificial Sequence
  Description of Artificial Sequence: Synthetic oligonucleotide
  Sense strand starting at position 3686 of SEQ ID NO: 248
uugacuauuuccugaagac

SEQ ID NO: 22621 - RNA, 19 nt, Artificial Sequence
  Description of Artificial Sequence: Synthetic oligonucleotide
  Antisense strand to SEQ ID NO: 22620
gucuucaggaaauagucaa

SEQ ID NO: 22622 - RNA, 19 nt, Artificial Sequence
  Description of Artificial Sequence: Synthetic oligonucleotide
  Sense strand starting at position 3734 of SEQ ID NO: 248
ggaagcugccugugucagu

SEQ ID NO: 22623 - RNA, 19 nt, Artificial Sequence
  Description of Artificial Sequence: Synthetic oligonucleotide
  Antisense strand to SEQ ID NO: 22622
acugacacaggcagcuucc

SEQ ID NO: 22624 - RNA, 19 nt, Artificial Sequence
  Description of Artificial Sequence: Synthetic oligonucleotide
  Sense strand starting at position 3741 of SEQ ID NO: 248
gccugugucagugucaagu

SEQ ID NO: 22625 - RNA, 19 nt, Artificial Sequence
  Description of Artificial Sequence: Synthetic oligonucleotide
  Antisense strand to SEQ ID NO: 22624
acuugacacugacacaggc

SEQ ID NO: 22626 - RNA, 19 nt, Artificial Sequence
  Description of Artificial Sequence: Synthetic oligonucleotide
  Sense strand starting at position 3795 of SEQ ID NO: 248
gggugaccguguccuuaug

SEQ ID NO: 22627 - RNA, 19 nt, Artificial Sequence
  Description of Artificial Sequence: Synthetic oligonucleotide
  Antisense strand to SEQ ID NO: 22626
cauaaggacacggucaccc

SEQ ID NO: 22628 - RNA, 19 nt, Artificial Sequence
  Description of Artificial Sequence: Synthetic oligonucleotide
  Sense strand starting at position 3813 of SEQ ID NO: 248
gcuggagcuugguccacaa

SEQ ID NO: 22629 - RNA, 19 nt, Artificial Sequence
  Description of Artificial Sequence: Synthetic oligonucleotide
  Antisense strand to SEQ ID NO: 22628
uuguggaccaagcuccagc

SEQ ID NO: 22630 - RNA, 19 nt, Artificial Sequence
  Description of Artificial Sequence: Synthetic oligonucleotide
  Sense strand starting at position 3815 of SEQ ID NO: 248
uggagcuugguccacaagu

SEQ ID NO: 22631 - RNA, 19 nt, Artificial Sequence
  Description of Artificial Sequence: Synthetic oligonucleotide
  Antisense strand to SEQ ID NO: 22630
acuuguggaccaagcucca

SEQ ID NO: 22632 - RNA, 19 nt, Artificial Sequence
  Description of Artificial Sequence: Synthetic oligonucleotide
  Sense strand starting at position 3817 of SEQ ID NO: 248
gagcuugguccacaagugu

SEQ ID NO: 22633 - RNA, 19 nt, Artificial Sequence
  Description of Artificial Sequence: Synthetic oligonucleotide
  Antisense strand to SEQ ID NO: 22632
acacuuguggaccaagcuc

SEQ ID NO: 22634 - RNA, 19 nt, Artificial Sequence
  Description of Artificial Sequence: Synthetic oligonucleotide
  Sense strand starting at position 3983 of SEQ ID NO: 249
cuggguauuguguaguaag

SEQ ID NO: 22635 - RNA, 19 nt, Artificial Sequence
  Description of Artificial Sequence: Synthetic oligonucleotide
  Antisense strand to SEQ ID NO: 22634
cuuacuacacaauacccag

SEQ ID NO: 22636 - RNA, 19 nt, Artificial Sequence
  Description of Artificial Sequence: Synthetic oligonucleotide
  Sense strand starting at position 3974 of SEQ ID NO: 249
ggugauauucuggguauug

SEQ ID NO: 22637 - RNA, 19 nt, Artificial Sequence
  Description of Artificial Sequence: Synthetic oligonucleotide
  Antisense strand to SEQ ID NO: 22636
caauacccagaauaucacc

SEQ ID NO: 22638 - RNA, 19 nt, Artificial Sequence
  Description of Artificial Sequence: Synthetic oligonucleotide
  Sense strand starting at position 3935 of SEQ ID NO: 249
agauaaauuguggguagag

SEQ ID NO: 22639 - RNA, 19 nt, Artificial Sequence
  Description of Artificial Sequence: Synthetic oligonucleotide
  Antisense strand to SEQ ID NO: 22638
cucuacccacaauuuaucu

SEQ ID NO: 22640 - RNA, 19 nt, Artificial Sequence
  Description of Artificial Sequence: Synthetic oligonucleotide
  Sense strand starting at position 3783 of SEQ ID NO: 249
aguugacuuagauggauug

SEQ ID NO: 22641 - RNA, 19 nt, Artificial Sequence
  Description of Artificial Sequence: Synthetic oligonucleotide
  Antisense strand to SEQ ID NO: 22640
caauccaucuaagucaacu

SEQ ID NO: 22642 - RNA, 19 nt, Artificial Sequence
  Description of Artificial Sequence: Synthetic oligonucleotide
  Sense strand starting at position 3712 of SEQ ID NO: 249
gugacagagugcuuaaaua

SEQ ID NO: 22643 - RNA, 19 nt, Artificial Sequence
  Description of Artificial Sequence: Synthetic oligonucleotide
  Antisense strand to SEQ ID NO: 22642
uauuuaagcacucugucac

SEQ ID NO: 22644 - RNA, 19 nt, Artificial Sequence
  Description of Artificial Sequence: Synthetic oligonucleotide
  Sense strand starting at position 3545 of SEQ ID NO: 249
auguauuucugggauauua

SEQ ID NO: 22645 - RNA, 19 nt, Artificial Sequence
  Description of Artificial Sequence: Synthetic oligonucleotide
  Antisense strand to SEQ ID NO: 22644
uaauaucccagaaauacau

SEQ ID NO: 22646 - RNA, 19 nt, Artificial Sequence
  Description of Artificial Sequence: Synthetic oligonucleotide
  Sense strand starting at position 3410 of SEQ ID NO: 249
cuggcagagcuggagaaau

SEQ ID NO: 22647 - RNA, 19 nt, Artificial Sequence
  Description of Artificial Sequence: Synthetic oligonucleotide
  Antisense strand to SEQ ID NO: 22646
auuucuccagcucugccag

SEQ ID NO: 22648 - RNA, 19 nt, Artificial Sequence
  Description of Artificial Sequence: Synthetic oligonucleotide
  Sense strand starting at position 3378 of SEQ ID NO: 249
gagguuuccacguggagaa

SEQ ID NO: 22649 - RNA, 19 nt, Artificial Sequence
  Description of Artificial Sequence: Synthetic oligonucleotide
  Antisense strand to SEQ ID NO: 22648
uucuccacguggaaaccuc

SEQ ID NO: 22650 - RNA, 19 nt, Artificial Sequence
  Description of Artificial Sequence: Synthetic oligonucleotide
  Sense strand starting at position 3239 of SEQ ID NO: 249
gugcuagcuagacagaaua

SEQ ID NO: 22651 - RNA, 19 nt, Artificial Sequence
  Description of Artificial Sequence: Synthetic oligonucleotide
  Antisense strand to SEQ ID NO: 22650
uauucugucuagcuagcac

SEQ ID NO: 22652 - RNA, 19 nt, Artificial Sequence
  Description of Artificial Sequence: Synthetic oligonucleotide
  Sense strand starting at position 3237 of SEQ ID NO: 249
gagugcuagcuagacagaa

SEQ ID NO: 22653 - RNA, 19 nt, Artificial Sequence
  Description of Artificial Sequence: Synthetic oligonucleotide
  Antisense strand to SEQ ID NO: 22652
uucugucuagcuagcacuc

SEQ ID NO: 22654 - RNA, 19 nt, Artificial Sequence
  Description of Artificial Sequence: Synthetic oligonucleotide
  Sense strand starting at position 3154 of SEQ ID NO: 249
ccacauaauugagaagaga

SEQ ID NO: 22655 - RNA, 19 nt, Artificial Sequence
  Description of Artificial Sequence: Synthetic oligonucleotide
  Antisense strand to SEQ ID NO: 22654
ucucuucucaauuaugugg

SEQ ID NO: 22656 - RNA, 19 nt, Artificial Sequence
  Description of Artificial Sequence: Synthetic oligonucleotide
  Sense strand starting at position 3068 of SEQ ID NO: 249
cagguuauauagguuuaau

SEQ ID NO: 22657 - RNA, 19 nt, Artificial Sequence
  Description of Artificial Sequence: Synthetic oligonucleotide
  Antisense strand to SEQ ID NO: 22656
auuaaaccuauauaaccug

SEQ ID NO: 22658 - RNA, 19 nt, Artificial Sequence
  Description of Artificial Sequence: Synthetic oligonucleotide
  Sense strand starting at position 2490 of SEQ ID NO: 249
ucaguaugacauugucauc

SEQ ID NO: 22659 - RNA, 19 nt, Artificial Sequence
  Description of Artificial Sequence: Synthetic oligonucleotide
  Antisense strand to SEQ ID NO: 22658
gaugacaaugucauacuga

SEQ ID NO: 22660 - RNA, 19 nt, Artificial Sequence
  Description of Artificial Sequence: Synthetic oligonucleotide
  Sense strand starting at position 2412 of SEQ ID NO: 249
aagacagguuucuugcuaa

SEQ ID NO: 22661 - RNA, 19 nt, Artificial Sequence
  Description of Artificial Sequence: Synthetic oligonucleotide
  Antisense strand to SEQ ID NO: 22660
uuagcaagaaaccugucuu

SEQ ID NO: 22662 - RNA, 19 nt, Artificial Sequence
  Description of Artificial Sequence: Synthetic oligonucleotide
  Sense strand starting at position 2411 of SEQ ID NO: 249
caagacagguuucuugcua

SEQ ID NO: 22663 - RNA, 19 nt, Artificial Sequence
  Description of Artificial Sequence: Synthetic oligonucleotide
  Antisense strand to SEQ ID NO: 22662
uagcaagaaaccugucuug

SEQ ID NO: 22664 - RNA, 19 nt, Artificial Sequence
  Description of Artificial Sequence: Synthetic oligonucleotide
  Sense strand starting at position 2377 of SEQ ID NO: 249
gugucugacacaugaauga

SEQ ID NO: 22665 - RNA, 19 nt, Artificial Sequence
  Description of Artificial Sequence: Synthetic oligonucleotide
  Antisense strand to SEQ ID NO: 22664
ucauucaugugucagacac

SEQ ID NO: 22666 - RNA, 19 nt, Artificial Sequence
  Description of Artificial Sequence: Synthetic oligonucleotide
  Sense strand starting at position 2023 of SEQ ID NO: 249
ggucaacauuaugauuuau

SEQ ID NO: 22667 - RNA, 19 nt, Artificial Sequence
  Description of Artificial Sequence: Synthetic oligonucleotide
  Antisense strand to SEQ ID NO: 22666
auaaaucauaauguugacc

SEQ ID NO: 22668 - RNA, 19 nt, Artificial Sequence
  Description of Artificial Sequence: Synthetic oligonucleotide
  Sense strand starting at position 2014 of SEQ ID NO: 249
ccucuuugaggucaacauu

SEQ ID NO: 22669 - RNA, 19 nt, Artificial Sequence
  Description of Artificial Sequence: Synthetic oligonucleotide
  Antisense strand to SEQ ID NO: 22668
aauguugaccucaaagagg

SEQ ID NO: 22670 - RNA, 19 nt, Artificial Sequence
  Description of Artificial Sequence: Synthetic oligonucleotide
  Sense strand starting at position 1819 of SEQ ID NO: 249
gcaugugguaaaugcauuu

SEQ ID NO: 22671 - RNA, 19 nt, Artificial Sequence
  Description of Artificial Sequence: Synthetic oligonucleotide
  Antisense strand to SEQ ID NO: 22670
aaaugcauuuaccacaugc

SEQ ID NO: 22672 - RNA, 19 nt, Artificial Sequence
  Description of Artificial Sequence: Synthetic oligonucleotide
  Sense strand starting at position 1604 of SEQ ID NO: 249
uuggcagaagcauaaauua

SEQ ID NO: 22673 - RNA, 19 nt, Artificial Sequence
  Description of Artificial Sequence: Synthetic oligonucleotide
  Antisense strand to SEQ ID NO: 22672
uaauuuaugcuucugccaa

SEQ ID NO: 22674 - RNA, 19 nt, Artificial Sequence
  Description of Artificial Sequence: Synthetic oligonucleotide
  Sense strand starting at position 1390 of SEQ ID NO: 249
gaucauagguuucuguaaa

SEQ ID NO: 22675 - RNA, 19 nt, Artificial Sequence
  Description of Artificial Sequence: Synthetic oligonucleotide
  Antisense strand to SEQ ID NO: 22674
uuuacagaaaccuaugauc

SEQ ID NO: 22676 - RNA, 19 nt, Artificial Sequence
  Description of Artificial Sequence: Synthetic oligonucleotide
  Sense strand starting at position 1378 of SEQ ID NO: 249
ggaagaagauaggaucaua

SEQ ID NO: 22677 - RNA, 19 nt, Artificial Sequence
  Description of Artificial Sequence: Synthetic oligonucleotide
  Antisense strand to SEQ ID NO: 22676
uaugauccuaucuucuucc

SEQ ID NO: 22678 - RNA, 19 nt, Artificial Sequence
  Description of Artificial Sequence: Synthetic oligonucleotide
  Sense strand starting at position 1339 of SEQ ID NO: 249
agaguaugagcuuacacua

SEQ ID NO: 22679 - RNA, 19 nt, Artificial Sequence
  Description of Artificial Sequence: Synthetic oligonucleotide
  Antisense strand to SEQ ID NO: 22678
uaguguaagcucauacucu

SEQ ID NO: 22680 - RNA, 19 nt, Artificial Sequence
  Description of Artificial Sequence: Synthetic oligonucleotide
  Sense strand starting at position 1202 of SEQ ID NO: 249
agcagaaucggcaguggua

SEQ ID NO: 22681 - RNA, 19 nt, Artificial Sequence
  Description of Artificial Sequence: Synthetic oligonucleotide
  Antisense strand to SEQ ID NO: 22680
uaccacugccgauucugcu

SEQ ID NO: 22682 - RNA, 19 nt, Artificial Sequence
  Description of Artificial Sequence: Synthetic oligonucleotide
  Sense strand starting at position 1161 of SEQ ID NO: 249
ugaggaaucugagccauga

SEQ ID NO: 22683 - RNA, 19 nt, Artificial Sequence
  Description of Artificial Sequence: Synthetic oligonucleotide
  Antisense strand to SEQ ID NO: 22682
ucauggcucagauuccuca

SEQ ID NO: 22684 - RNA, 19 nt, Artificial Sequence
  Description of Artificial Sequence: Synthetic oligonucleotide
  Sense strand starting at position 1114 of SEQ ID NO: 249
uagaucaugcaaugucaga

SEQ ID NO: 22685 - RNA, 19 nt, Artificial Sequence
  Description of Artificial Sequence: Synthetic oligonucleotide
  Antisense strand to SEQ ID NO: 22684
ucugacauugcaugaucua

SEQ ID NO: 22686 - RNA, 19 nt, Artificial Sequence
  Description of Artificial Sequence: Synthetic oligonucleotide
  Sense strand starting at position 826 of SEQ ID NO: 249
uuguaugcaucccugauuu

SEQ ID NO: 22687 - RNA, 19 nt, Artificial Sequence
  Description of Artificial Sequence: Synthetic oligonucleotide
  Antisense strand to SEQ ID NO: 22686
aaaucagggaugcauacaa

SEQ ID NO: 22688 - RNA, 19 nt, Artificial Sequence
  Description of Artificial Sequence: Synthetic oligonucleotide
  Sense strand starting at position 758 of SEQ ID NO: 249
cugauagaauuguuuccau

SEQ ID NO: 22689 - RNA, 19 nt, Artificial Sequence
  Description of Artificial Sequence: Synthetic oligonucleotide
  Antisense strand to SEQ ID NO: 22688
auggaaacaauucuaucag

SEQ ID NO: 22690 - RNA, 19 nt, Artificial Sequence
  Description of Artificial Sequence: Synthetic oligonucleotide
  Sense strand starting at position 712 of SEQ ID NO: 249
ccauuauagcuauguacua

SEQ ID NO: 22691 - RNA, 19 nt, Artificial Sequence
  Description of Artificial Sequence: Synthetic oligonucleotide
  Antisense strand to SEQ ID NO: 22690
uaguacauagcuauaaugg

SEQ ID NO: 22692 - RNA, 19 nt, Artificial Sequence
  Description of Artificial Sequence: Synthetic oligonucleotide
  Sense strand starting at position 704 of SEQ ID NO: 249
aggucuuuccauuauagcu

SEQ ID NO: 22693 - RNA, 19 nt, Artificial Sequence
  Description of Artificial Sequence: Synthetic oligonucleotide
  Antisense strand to SEQ ID NO: 22692
agcuauaauggaaagaccu

SEQ ID NO: 22694 - RNA, 19 nt, Artificial Sequence
  Description of Artificial Sequence: Synthetic oligonucleotide
  Sense strand starting at position 698 of SEQ ID NO: 249
ggugauaggucuuuccauu

SEQ ID NO: 22695 - RNA, 19 nt, Artificial Sequence
  Description of Artificial Sequence: Synthetic oligonucleotide
  Antisense strand to SEQ ID NO: 22694
aauggaaagaccuaucacc

SEQ ID NO: 22696 - RNA, 19 nt, Artificial Sequence
  Description of Artificial Sequence: Synthetic oligonucleotide
  Sense strand starting at position 561 of SEQ ID NO: 249
gucagacuuccaugcauuu

SEQ ID NO: 22697 - RNA, 19 nt, Artificial Sequence
  Description of Artificial Sequence: Synthetic oligonucleotide
  Antisense strand to SEQ ID NO: 22696
aaaugcauggaagucugac

SEQ ID NO: 22698 - RNA, 19 nt, Artificial Sequence
  Description of Artificial Sequence: Synthetic oligonucleotide
  Sense strand starting at position 458 of SEQ ID NO: 249
uuguuuaggcuuuauauca

SEQ ID NO: 22699 - RNA, 19 nt, Artificial Sequence
  Description of Artificial Sequence: Synthetic oligonucleotide
  Antisense strand to SEQ ID NO: 22698
ugauauaaagccuaaacaa

SEQ ID NO: 22700 - RNA, 19 nt, Artificial Sequence
  Description of Artificial Sequence: Synthetic oligonucleotide
  Sense strand starting at position 367 of SEQ ID NO: 249
ugacaaacuugcucuugga

SEQ ID NO: 22701 - RNA, 19 nt, Artificial Sequence
  Description of Artificial Sequence: Synthetic oligonucleotide
  Antisense strand to SEQ ID NO: 22700
uccaagagcaaguuuguca

SEQ ID NO: 22702 - RNA, 19 nt, Artificial Sequence
  Description of Artificial Sequence: Synthetic oligonucleotide
  Sense strand starting at position 346 of SEQ ID NO: 249
cuggcauugcuacauaaac

SEQ ID NO: 22703 - RNA, 19 nt, Artificial Sequence
  Description of Artificial Sequence: Synthetic oligonucleotide
  Antisense strand to SEQ ID NO: 22702
guuuauguagcaaugccag

SEQ ID NO: 22704 - RNA, 19 nt, Artificial Sequence
  Description of Artificial Sequence: Synthetic oligonucleotide
  Sense strand starting at position 316 of SEQ ID NO: 249
cugggucugauguaucaau

SEQ ID NO: 22705 - RNA, 19 nt, Artificial Sequence
  Description of Artificial Sequence: Synthetic oligonucleotide
  Antisense strand to SEQ ID NO: 22704
auugauacaucagacccag

SEQ ID NO: 22706 - RNA, 19 nt, Artificial Sequence
  Description of Artificial Sequence: Synthetic oligonucleotide
  Sense strand starting at position 240 of SEQ ID NO: 249
uaaauuugcuugguaagca

SEQ ID NO: 22707 - RNA, 19 nt, Artificial Sequence
  Description of Artificial Sequence: Synthetic oligonucleotide
  Antisense strand to SEQ ID NO: 22706
ugcuuaccaagcaaauuua

SEQ ID NO: 22708 - RNA, 19 nt, Artificial Sequence
  Description of Artificial Sequence: Synthetic oligonucleotide
  Sense strand starting at position 148 of SEQ ID NO: 249
gauguauaagccgaaauaa

SEQ ID NO: 22709 - RNA, 19 nt, Artificial Sequence
  Description of Artificial Sequence: Synthetic oligonucleotide
  Antisense strand to SEQ ID NO: 22708
uuauuucggcuuauacauc

SEQ ID NO: 22710 - RNA, 19 nt, Artificial Sequence
  Description of Artificial Sequence: Synthetic oligonucleotide
  Sense strand starting at position 147 of SEQ ID NO: 249
ugauguauaagccgaaaua

SEQ ID NO: 22711 - RNA, 19 nt, Artificial Sequence
  Description of Artificial Sequence: Synthetic oligonucleotide
  Antisense strand to SEQ ID NO: 22710
uauuucggcuuauacauca

SEQ ID NO: 22712 - RNA, 19 nt, Artificial Sequence
  Description of Artificial Sequence: Synthetic oligonucleotide
  Sense strand starting at position 145 of SEQ ID NO: 249
acugauguauaagccgaaa

SEQ ID NO: 22713 - RNA, 19 nt, Artificial Sequence
  Description of Artificial Sequence: Synthetic oligonucleotide
  Antisense strand to SEQ ID NO: 22712
uuucggcuuauacaucagu

SEQ ID NO: 22714 - RNA, 19 nt, Artificial Sequence
  Description of Artificial Sequence: Synthetic oligonucleotide
  Sense strand starting at position 2974 of SEQ ID NO: 250
ucauguugguccuaaguau

SEQ ID NO: 22715 - RNA, 19 nt, Artificial Sequence
  Description of Artificial Sequence: Synthetic oligonucleotide
  Antisense strand to SEQ ID NO: 22714
auacuuaggaccaacauga

SEQ ID NO: 22716 - RNA, 19 nt, Artificial Sequence
  Description of Artificial Sequence: Synthetic oligonucleotide
  Sense strand starting at position 2858 of SEQ ID NO: 250
uuugauuccuuggaccaga

SEQ ID NO: 22717 - RNA, 19 nt, Artificial Sequence
  Description of Artificial Sequence: Synthetic oligonucleotide
  Antisense strand to SEQ ID NO: 22716
ucugguccaaggaaucaaa

SEQ ID NO: 22718 - RNA, 19 nt, Artificial Sequence
  Description of Artificial Sequence: Synthetic oligonucleotide
  Sense strand starting at position 2640 of SEQ ID NO: 250
guccuaugccuccauggua

SEQ ID NO: 22719 - RNA, 19 nt, Artificial Sequence
  Description of Artificial Sequence: Synthetic oligonucleotide
  Antisense strand to SEQ ID NO: 22718
uaccauggaggcauaggac

SEQ ID NO: 22720 - RNA, 19 nt, Artificial Sequence
  Description of Artificial Sequence: Synthetic oligonucleotide
  Sense strand starting at position 2146 of SEQ ID NO: 250
gcgacauucucuuggccau

SEQ ID NO: 22721 - RNA, 19 nt, Artificial Sequence
  Description of Artificial Sequence: Synthetic oligonucleotide
  Antisense strand to SEQ ID NO: 22720
auggccaagagaaugucgc

SEQ ID NO: 22722 - RNA, 19 nt, Artificial Sequence
  Description of Artificial Sequence: Synthetic oligonucleotide
  Sense strand starting at position 2135 of SEQ ID NO: 250
gugcaagaugagcgacauu

SEQ ID NO: 22723 - RNA, 19 nt, Artificial Sequence
  Description of Artificial Sequence: Synthetic oligonucleotide
  Antisense strand to SEQ ID NO: 22722
aaugucgcucaucuugcac

SEQ ID NO: 22724 - RNA, 19 nt, Artificial Sequence
  Description of Artificial Sequence: Synthetic oligonucleotide
  Sense strand starting at position 1860 of SEQ ID NO: 250
guuuccugcccucauggau

SEQ ID NO: 22725 - RNA, 19 nt, Artificial Sequence
  Description of Artificial Sequence: Synthetic oligonucleotide
  Antisense strand to SEQ ID NO: 22724
auccaugagggcaggaaac

SEQ ID NO: 22726 - RNA, 19 nt, Artificial Sequence
  Description of Artificial Sequence: Synthetic oligonucleotide
  Sense strand starting at position 1726 of SEQ ID NO: 250
cggagcucuucgguccauu

SEQ ID NO: 22727 - RNA, 19 nt, Artificial Sequence
  Description of Artificial Sequence: Synthetic oligonucleotide
  Antisense strand to SEQ ID NO: 22726
aauggaccgaagagcuccg

SEQ ID NO: 22728 - RNA, 19 nt, Artificial Sequence
  Description of Artificial Sequence: Synthetic oligonucleotide
  Sense strand starting at position 1625 of SEQ ID NO: 250
gcagacuccuaaccaagaa

SEQ ID NO: 22729 - RNA, 19 nt, Artificial Sequence
  Description of Artificial Sequence: Synthetic oligonucleotide
  Antisense strand to SEQ ID NO: 22728
uucuugguuaggagucugc

SEQ ID NO: 22730 - RNA, 19 nt, Artificial Sequence
  Description of Artificial Sequence: Synthetic oligonucleotide
  Sense strand starting at position 1622 of SEQ ID NO: 250
agcgcagacuccuaaccaa

SEQ ID NO: 22731 - RNA, 19 nt, Artificial Sequence
  Description of Artificial Sequence: Synthetic oligonucleotide
  Antisense strand to SEQ ID NO: 22730
uugguuaggagucugcgcu

SEQ ID NO: 22732 - RNA, 19 nt, Artificial Sequence
  Description of Artificial Sequence: Synthetic oligonucleotide
  Sense strand starting at position 1438 of SEQ ID NO: 250
guaaaugcacauugaauaa

SEQ ID NO: 22733 - RNA, 19 nt, Artificial Sequence
  Description of Artificial Sequence: Synthetic oligonucleotide
  Antisense strand to SEQ ID NO: 22732
uuauucaaugugcauuuac

SEQ ID NO: 22734 - RNA, 19 nt, Artificial Sequence
  Description of Artificial Sequence: Synthetic oligonucleotide
  Sense strand starting at position 1435 of SEQ ID NO: 250
cuuguaaaugcacauugaa

SEQ ID NO: 22735 - RNA, 19 nt, Artificial Sequence
  Description of Artificial Sequence: Synthetic oligonucleotide
  Antisense strand to SEQ ID NO: 22734
uucaaugugcauuuacaag

SEQ ID NO: 22736 - RNA, 19 nt, Artificial Sequence
  Description of Artificial Sequence: Synthetic oligonucleotide
  Sense strand starting at position 1318 of SEQ ID NO: 250
guguauuucucccuccagu

SEQ ID NO: 22737 - RNA, 19 nt, Artificial Sequence
  Description of Artificial Sequence: Synthetic oligonucleotide
  Antisense strand to SEQ ID NO: 22736
acuggagggagaaauacac

SEQ ID NO: 22738 - RNA, 19 nt, Artificial Sequence
  Description of Artificial Sequence: Synthetic oligonucleotide
  Sense strand starting at position 1124 of SEQ ID NO: 250
ccuggcugcuccuccaaau

SEQ ID NO: 22739 - RNA, 19 nt, Artificial Sequence
  Description of Artificial Sequence: Synthetic oligonucleotide
  Antisense strand to SEQ ID NO: 22738
auuuggaggagcagccagg

SEQ ID NO: 22740 - RNA, 19 nt, Artificial Sequence
  Description of Artificial Sequence: Synthetic oligonucleotide
  Sense strand starting at position 1051 of SEQ ID NO: 250
aaaucuggcugccaguuau

SEQ ID NO: 22741 - RNA, 19 nt, Artificial Sequence
  Description of Artificial Sequence: Synthetic oligonucleotide
  Antisense strand to SEQ ID NO: 22740
auaacuggcagccagauuu

SEQ ID NO: 22742 - RNA, 19 nt, Artificial Sequence
  Description of Artificial Sequence: Synthetic oligonucleotide
  Sense strand starting at position 699 of SEQ ID NO: 250
gcucaauagcugcaagaua

SEQ ID NO: 22743 - RNA, 19 nt, Artificial Sequence
  Description of Artificial Sequence: Synthetic oligonucleotide
  Antisense strand to SEQ ID NO: 22742
uaucuugcagcuauugagc

SEQ ID NO: 22744 - RNA, 19 nt, Artificial Sequence
  Description of Artificial Sequence: Synthetic oligonucleotide
  Sense strand starting at position 673 of SEQ ID NO: 250
gucugcuuuccagcugcaa

SEQ ID NO: 22745 - RNA, 19 nt, Artificial Sequence
  Description of Artificial Sequence: Synthetic oligonucleotide
  Antisense strand to SEQ ID NO: 22744
uugcagcuggaaagcagac

SEQ ID NO: 22746 - RNA, 19 nt, Artificial Sequence
  Description of Artificial Sequence: Synthetic oligonucleotide
  Sense strand starting at position 619 of SEQ ID NO: 250
ggucuauuaugugaauaaa

SEQ ID NO: 22747 - RNA, 19 nt, Artificial Sequence
  Description of Artificial Sequence: Synthetic oligonucleotide
  Antisense strand to SEQ ID NO: 22746
uuuauucacauaauagacc

SEQ ID NO: 22748 - RNA, 19 nt, Artificial Sequence
  Description of Artificial Sequence: Synthetic oligonucleotide
  Sense strand starting at position 617 of SEQ ID NO: 250
guggucuauuaugugaaua

SEQ ID NO: 22749 - RNA, 19 nt, Artificial Sequence
  Description of Artificial Sequence: Synthetic oligonucleotide
  Antisense strand to SEQ ID NO: 22748
uauucacauaauagaccac

SEQ ID NO: 22750 - RNA, 19 nt, Artificial Sequence
  Description of Artificial Sequence: Synthetic oligonucleotide
  Sense strand starting at position 616 of SEQ ID NO: 250
aguggucuauuaugugaau

SEQ ID NO: 22751 - RNA, 19 nt, Artificial Sequence
  Description of Artificial Sequence: Synthetic oligonucleotide
  Antisense strand to SEQ ID NO: 22750
auucacauaauagaccacu

SEQ ID NO: 22752 - RNA, 19 nt, Artificial Sequence
  Description of Artificial Sequence: Synthetic oligonucleotide
  Sense strand starting at position 611 of SEQ ID NO: 250
gggccaguggucuauuaug

SEQ ID NO: 22753 - RNA, 19 nt, Artificial Sequence
  Description of Artificial Sequence: Synthetic oligonucleotide
  Antisense strand to SEQ ID NO: 22752
cauaauagaccacuggccc

SEQ ID NO: 22754 - RNA, 19 nt, Artificial Sequence
  Description of Artificial Sequence: Synthetic oligonucleotide
  Sense strand starting at position 609 of SEQ ID NO: 250
cugggccaguggucuauua

SEQ ID NO: 22755 - RNA, 19 nt, Artificial Sequence
  Description of Artificial Sequence: Synthetic oligonucleotide
  Antisense strand to SEQ ID NO: 22754
uaauagaccacuggcccag

SEQ ID NO: 22756 - RNA, 19 nt, Artificial Sequence
  Description of Artificial Sequence: Synthetic oligonucleotide
  Sense strand starting at position 586 of SEQ ID NO: 250
gccagagguuagcaaauua

SEQ ID NO: 22757 - RNA, 19 nt, Artificial Sequence
  Description of Artificial Sequence: Synthetic oligonucleotide
  Antisense strand to SEQ ID NO: 22756
uaauuugcuaaccucuggc

SEQ ID NO: 22758 - RNA, 19 nt, Artificial Sequence
  Description of Artificial Sequence: Synthetic oligonucleotide
  Sense strand starting at position 578 of SEQ ID NO: 250
ggcuguaggccagagguua

SEQ ID NO: 22759 - RNA, 19 nt, Artificial Sequence
  Description of Artificial Sequence: Synthetic oligonucleotide
  Antisense strand to SEQ ID NO: 22758
uaaccucuggccuacagcc

SEQ ID NO: 22760 - RNA, 19 nt, Artificial Sequence
  Description of Artificial Sequence: Synthetic oligonucleotide
  Sense strand starting at position 169 of SEQ ID NO: 250
gcaucucagcauuaauaug

SEQ ID NO: 22761 - RNA, 19 nt, Artificial Sequence
  Description of Artificial Sequence: Synthetic oligonucleotide
  Antisense strand to SEQ ID NO: 22760
cauauuaaugcugagaugc

SEQ ID NO: 22762 - RNA, 19 nt, Artificial Sequence
  Description of Artificial Sequence: Synthetic oligonucleotide
  Sense strand starting at position 165 of SEQ ID NO: 250
acaggcaucucagcauuaa

SEQ ID NO: 22763 - RNA, 19 nt, Artificial Sequence
  Description of Artificial Sequence: Synthetic oligonucleotide
  Antisense strand to SEQ ID NO: 22762
uuaaugcugagaugccugu

SEQ ID NO: 22764 - RNA, 19 nt, Artificial Sequence
  Description of Artificial Sequence: Synthetic oligonucleotide
  Sense strand starting at position 147 of SEQ ID NO: 250
cgccuacccggaugucuaa

SEQ ID NO: 22765 - RNA, 19 nt, Artificial Sequence
  Description of Artificial Sequence: Synthetic oligonucleotide
  Antisense strand to SEQ ID NO: 22764
uuagacauccggguaggcg

SEQ ID NO: 22766 - RNA, 19 nt, Artificial Sequence
  Description of Artificial Sequence: Synthetic oligonucleotide
  Sense strand starting at position 106 of SEQ ID NO: 250
ugcauacaggucugaacau

SEQ ID NO: 22767 - RNA, 19 nt, Artificial Sequence
  Description of Artificial Sequence: Synthetic oligonucleotide
  Antisense strand to SEQ ID NO: 22766
auguucagaccuguaugca

SEQ ID NO: 22768 - RNA, 19 nt, Artificial Sequence
  Description of Artificial Sequence: Synthetic oligonucleotide
  Sense strand starting at position 98 of SEQ ID NO: 250
ggcugaucugcauacaggu

SEQ ID NO: 22769 - RNA, 19 nt, Artificial Sequence
  Description of Artificial Sequence: Synthetic oligonucleotide
  Antisense strand to SEQ ID NO: 22768
accuguaugcagaucagcc

SEQ ID NO: 22770 - RNA, 19 nt, Artificial Sequence
  Description of Artificial Sequence: Synthetic oligonucleotide
  Sense strand starting at position 47 of SEQ ID NO: 250
auauuaaguguccagguca

SEQ ID NO: 22771 - RNA, 19 nt, Artificial Sequence
  Description of Artificial Sequence: Synthetic oligonucleotide
  Antisense strand to SEQ ID NO: 22770
ugaccuggacacuuaauau

SEQ ID NO: 22772 - RNA, 19 nt, Artificial Sequence
  Description of Artificial Sequence: Synthetic oligonucleotide
  Sense strand starting at position 187 of SEQ ID NO: 251
uauaguuggcacugacaca

SEQ ID NO: 22773 - RNA, 19 nt, Artificial Sequence
  Description of Artificial Sequence: Synthetic oligonucleotide
  Antisense strand to SEQ ID NO: 22772
ugugucagugccaacuaua

SEQ ID NO: 22774 - RNA, 19 nt, Artificial Sequence
  Description of Artificial Sequence: Synthetic oligonucleotide
  Sense strand starting at position 238 of SEQ ID NO: 251
guaugauacugagcaagug

SEQ ID NO: 22775 - RNA, 19 nt, Artificial Sequence
  Description of Artificial Sequence: Synthetic oligonucleotide
  Antisense strand to SEQ ID NO: 22774
cacuugcucaguaucauac

SEQ ID NO: 22776 - RNA, 19 nt, Artificial Sequence
  Description of Artificial Sequence: Synthetic oligonucleotide
  Sense strand starting at position 252 of SEQ ID NO: 251
aagugauaacauugucagu

SEQ ID NO: 22777 - RNA, 19 nt, Artificial Sequence
  Description of Artificial Sequence: Synthetic oligonucleotide
  Antisense strand to SEQ ID NO: 22776
acugacaauguuaucacuu

SEQ ID NO: 22778 - RNA, 19 nt, Artificial Sequence
  Description of Artificial Sequence: Synthetic oligonucleotide
  Sense strand starting at position 257 of SEQ ID NO: 251
auaacauugucaguuaccu

SEQ ID NO: 22779 - RNA, 19 nt, Artificial Sequence
  Description of Artificial Sequence: Synthetic oligonucleotide
  Antisense strand to SEQ ID NO: 22778
agguaacugacaauguuau

SEQ ID NO: 22780 - RNA, 19 nt, Artificial Sequence
  Description of Artificial Sequence: Synthetic oligonucleotide
  Sense strand starting at position 310 of SEQ ID NO: 251
acuguauugucaucagaua

SEQ ID NO: 22781 - RNA, 19 nt, Artificial Sequence
  Description of Artificial Sequence: Synthetic oligonucleotide
  Antisense strand to SEQ ID NO: 22780
uaucugaugacaauacagu

SEQ ID NO: 22782 - RNA, 19 nt, Artificial Sequence
  Description of Artificial Sequence: Synthetic oligonucleotide
  Sense strand starting at position 311 of SEQ ID NO: 251
cuguauugucaucagauaa

SEQ ID NO: 22783 - RNA, 19 nt, Artificial Sequence
  Description of Artificial Sequence: Synthetic oligonucleotide
  Antisense strand to SEQ ID NO: 22782
uuaucugaugacaauacag

SEQ ID NO: 22784 - RNA, 19 nt, Artificial Sequence
  Description of Artificial Sequence: Synthetic oligonucleotide
  Sense strand starting at position 603 of SEQ ID NO: 251
gcccuuugcccugagacaa

SEQ ID NO: 22785 - RNA, 19 nt, Artificial Sequence
  Description of Artificial Sequence: Synthetic oligonucleotide
  Antisense strand to SEQ ID NO: 22784
uugucucagggcaaagggc

SEQ ID NO: 22786 - RNA, 19 nt, Artificial Sequence
  Description of Artificial Sequence: Synthetic oligonucleotide
  Sense strand starting at position 678 of SEQ ID NO: 251
accaaacuugugggugaga

SEQ ID NO: 22787 - RNA, 19 nt, Artificial Sequence
  Description of Artificial Sequence: Synthetic oligonucleotide
  Antisense strand to SEQ ID NO: 22786
ucucacccacaaguuuggu

SEQ ID NO: 22788 - RNA, 19 nt, Artificial Sequence
  Description of Artificial Sequence: Synthetic oligonucleotide
  Sense strand starting at position 880 of SEQ ID NO: 251
ggaagauguggucagucag

SEQ ID NO: 22789 - RNA, 19 nt, Artificial Sequence
  Description of Artificial Sequence: Synthetic oligonucleotide
  Antisense strand to SEQ ID NO: 22788
cugacugaccacaucuucc

SEQ ID NO: 22790 - RNA, 19 nt, Artificial Sequence
  Description of Artificial Sequence: Synthetic oligonucleotide
  Sense strand starting at position 899 of SEQ ID NO: 251
gcaagacgucuccaacugu

SEQ ID NO: 22791 - RNA, 19 nt, Artificial Sequence
  Description of Artificial Sequence: Synthetic oligonucleotide
  Antisense strand to SEQ ID NO: 22790
acaguuggagacgucuugc

SEQ ID NO: 22792 - RNA, 19 nt, Artificial Sequence
  Description of Artificial Sequence: Synthetic oligonucleotide
  Sense strand starting at position 1042 of SEQ ID NO: 251
cucuuucaugagugaggga

SEQ ID NO: 22793 - RNA, 19 nt, Artificial Sequence
  Description of Artificial Sequence: Synthetic oligonucleotide
  Antisense strand to SEQ ID NO: 22792
ucccucacucaugaaagag

SEQ ID NO: 22794 - RNA, 19 nt, Artificial Sequence
  Description of Artificial Sequence: Synthetic oligonucleotide
  Sense strand starting at position 1522 of SEQ ID NO: 251
ggaggaacuuguccugcaa

SEQ ID NO: 22795 - RNA, 19 nt, Artificial Sequence
  Description of Artificial Sequence: Synthetic oligonucleotide
  Antisense strand to SEQ ID NO: 22794
uugcaggacaaguuccucc

SEQ ID NO: 22796 - RNA, 19 nt, Artificial Sequence
  Description of Artificial Sequence: Synthetic oligonucleotide
  Sense strand starting at position 1593 of SEQ ID NO: 251
auugcuuuccuccaaggca

SEQ ID NO: 22797 - RNA, 19 nt, Artificial Sequence
  Description of Artificial Sequence: Synthetic oligonucleotide
  Antisense strand to SEQ ID NO: 22796
ugccuuggaggaaagcaau

SEQ ID NO: 22798 - RNA, 19 nt, Artificial Sequence
  Description of Artificial Sequence: Synthetic oligonucleotide
  Sense strand starting at position 1938 of SEQ ID NO: 251
gggcauuugugcccaggca

SEQ ID NO: 22799 - RNA, 19 nt, Artificial Sequence
  Description of Artificial Sequence: Synthetic oligonucleotide
  Antisense strand to SEQ ID NO: 22798
ugccugggcacaaaugccc

SEQ ID NO: 22800 - RNA, 19 nt, Artificial Sequence
  Description of Artificial Sequence: Synthetic oligonucleotide
  Sense strand starting at position 2062 of SEQ ID NO: 251
gcagacggcuacuuaauuu

SEQ ID NO: 22801 - RNA, 19 nt, Artificial Sequence
  Description of Artificial Sequence: Synthetic oligonucleotide
  Antisense strand to SEQ ID NO: 22800
aaauuaaguagccgucugc

SEQ ID NO: 22802 - RNA, 19 nt, Artificial Sequence
  Description of Artificial Sequence: Synthetic oligonucleotide
  Sense strand starting at position 2560 of SEQ ID NO: 251
gucucagagagaugguaac

SEQ ID NO: 22803 - RNA, 19 nt, Artificial Sequence
  Description of Artificial Sequence: Synthetic oligonucleotide
  Antisense strand to SEQ ID NO: 22802
guuaccaucucucugagac

SEQ ID NO: 22804 - RNA, 19 nt, Artificial Sequence
  Description of Artificial Sequence: Synthetic oligonucleotide
  Sense strand starting at position 2628 of SEQ ID NO: 251
ccagaucuggcugacucua

SEQ ID NO: 22805 - RNA, 19 nt, Artificial Sequence
  Description of Artificial Sequence: Synthetic oligonucleotide
  Antisense strand to SEQ ID NO: 22804
uagagucagccagaucugg

SEQ ID NO: 22806 - RNA, 19 nt, Artificial Sequence
  Description of Artificial Sequence: Synthetic oligonucleotide
  Sense strand starting at position 2630 of SEQ ID NO: 251
agaucuggcugacucuaaa

SEQ ID NO: 22807 - RNA, 19 nt, Artificial Sequence
  Description of Artificial Sequence: Synthetic oligonucleotide
  Antisense strand to SEQ ID NO: 22806
uuuagagucagccagaucu

SEQ ID NO: 22808 - RNA, 19 nt, Artificial Sequence
  Description of Artificial Sequence: Synthetic oligonucleotide
  Sense strand starting at position 2823 of SEQ ID NO: 251
uuugucaaguucuuagaaa

SEQ ID NO: 22809 - RNA, 19 nt, Artificial Sequence
  Description of Artificial Sequence: Synthetic oligonucleotide
  Antisense strand to SEQ ID NO: 22808
uuucuaagaacuugacaaa

SEQ ID NO: 22810 - RNA, 19 nt, Artificial Sequence
  Description of Artificial Sequence: Synthetic oligonucleotide
  Sense strand starting at position 2945 of SEQ ID NO: 251
accagagcugccugggaau

SEQ ID NO: 22811 - RNA, 19 nt, Artificial Sequence
  Description of Artificial Sequence: Synthetic oligonucleotide
  Antisense strand to SEQ ID NO: 22810
auucccaggcagcucuggu

SEQ ID NO: 22812 - RNA, 19 nt, Artificial Sequence
  Description of Artificial Sequence: Synthetic oligonucleotide
  Sense strand starting at position 3050 of SEQ ID NO: 251
gccuuugaggucuauguau

SEQ ID NO: 22813 - RNA, 19 nt, Artificial Sequence
  Description of Artificial Sequence: Synthetic oligonucleotide
  Antisense strand to SEQ ID NO: 22812
auacauagaccucaaaggc

SEQ ID NO: 22814 - RNA, 19 nt, Artificial Sequence
  Description of Artificial Sequence: Synthetic oligonucleotide
  Sense strand starting at position 3171 of SEQ ID NO: 251
ucacucuuaccuuguguaa

SEQ ID NO: 22815 - RNA, 19 nt, Artificial Sequence
  Description of Artificial Sequence: Synthetic oligonucleotide
  Antisense strand to SEQ ID NO: 22814
uuacacaagguaagaguga

SEQ ID NO: 22816 - RNA, 19 nt, Artificial Sequence
  Description of Artificial Sequence: Synthetic oligonucleotide
  Sense strand starting at position 3180 of SEQ ID NO: 251
ccuuguguaaucgugcuga

SEQ ID NO: 22817 - RNA, 19 nt, Artificial Sequence
  Description of Artificial Sequence: Synthetic oligonucleotide
  Antisense strand to SEQ ID NO: 22816
ucagcacgauuacacaagg

SEQ ID NO: 22818 - RNA, 19 nt, Artificial Sequence
  Description of Artificial Sequence: Synthetic oligonucleotide
  Sense strand starting at position 3185 of SEQ ID NO: 251
uguaaucgugcugauauuu

SEQ ID NO: 22819 - RNA, 19 nt, Artificial Sequence
  Description of Artificial Sequence: Synthetic oligonucleotide
  Antisense strand to SEQ ID NO: 22818
aaauaucagcacgauuaca

SEQ ID NO: 22820 - RNA, 19 nt, Artificial Sequence
  Description of Artificial Sequence: Synthetic oligonucleotide
  Sense strand starting at position 3222 of SEQ ID NO: 251
augacaugccauugaauua

SEQ ID NO: 22821 - RNA, 19 nt, Artificial Sequence
  Description of Artificial Sequence: Synthetic oligonucleotide
  Antisense strand to SEQ ID NO: 22820
uaauucaauggcaugucau

SEQ ID NO: 22822 - RNA, 19 nt, Artificial Sequence
  Description of Artificial Sequence: Synthetic oligonucleotide
  Sense strand starting at position 3248 of SEQ ID NO: 251
gguagcacuuucuugacuu

SEQ ID NO: 22823 - RNA, 19 nt, Artificial Sequence
  Description of Artificial Sequence: Synthetic oligonucleotide
  Antisense strand to SEQ ID NO: 22822
aagucaagaaagugcuacc

SEQ ID NO: 22824 - RNA, 19 nt, Artificial Sequence
  Description of Artificial Sequence: Synthetic oligonucleotide
  Sense strand starting at position 3397 of SEQ ID NO: 251
cuccuauguguauaaguuu

SEQ ID NO: 22825 - RNA, 19 nt, Artificial Sequence
  Description of Artificial Sequence: Synthetic oligonucleotide
  Antisense strand to SEQ ID NO: 22824
aaacuuauacacauaggag

SEQ ID NO: 22826 - RNA, 19 nt, Artificial Sequence
  Description of Artificial Sequence: Synthetic oligonucleotide
  Sense strand starting at position 3431 of SEQ ID NO: 251
gaggaagcucucgggagaa

SEQ ID NO: 22827 - RNA, 19 nt, Artificial Sequence
  Description of Artificial Sequence: Synthetic oligonucleotide
  Antisense strand to SEQ ID NO: 22826
uucucccgagagcuuccuc

SEQ ID NO: 22828 - RNA, 19 nt, Artificial Sequence
  Description of Artificial Sequence: Synthetic oligonucleotide
  Sense strand starting at position 3474 of SEQ ID NO: 251
acugauaauugggcuguca

SEQ ID NO: 22829 - RNA, 19 nt, Artificial Sequence
  Description of Artificial Sequence: Synthetic oligonucleotide
  Antisense strand to SEQ ID NO: 22828
ugacagcccaauuaucagu

SEQ ID NO: 22830 - RNA, 19 nt, Artificial Sequence
  Description of Artificial Sequence: Synthetic oligonucleotide
  Sense strand starting at position 3476 of SEQ ID NO: 251
ugauaauugggcugucaaa

SEQ ID NO: 22831 - RNA, 19 nt, Artificial Sequence
  Description of Artificial Sequence: Synthetic oligonucleotide
  Antisense strand to SEQ ID NO: 22830
uuugacagcccaauuauca

SEQ ID NO: 22832 - RNA, 19 nt, Artificial Sequence
  Description of Artificial Sequence: Synthetic oligonucleotide
  Sense strand starting at position 3597 of SEQ ID NO: 251
cugggaggucugcgcauuu

SEQ ID NO: 22833 - RNA, 19 nt, Artificial Sequence
  Description of Artificial Sequence: Synthetic oligonucleotide
  Antisense strand to SEQ ID NO: 22832
aaaugcgcagaccucccag

SEQ ID NO: 22834 - RNA, 19 nt, Artificial Sequence
  Description of Artificial Sequence: Synthetic oligonucleotide
  Sense strand starting at position 3646 of SEQ ID NO: 251
gguccuaggcacuaaucau

SEQ ID NO: 22835 - RNA, 19 nt, Artificial Sequence
  Description of Artificial Sequence: Synthetic oligonucleotide
  Antisense strand to SEQ ID NO: 22834
augauuagugccuaggacc

SEQ ID NO: 22836 - RNA, 19 nt, Artificial Sequence
  Description of Artificial Sequence: Synthetic oligonucleotide
  Sense strand starting at position 3700 of SEQ ID NO: 251
cggcuuaagagcuaugacu

SEQ ID NO: 22837 - RNA, 19 nt, Artificial Sequence
  Description of Artificial Sequence: Synthetic oligonucleotide
  Antisense strand to SEQ ID NO: 22836
agucauagcucuuaagccg

SEQ ID NO: 22838 - RNA, 19 nt, Artificial Sequence
  Description of Artificial Sequence: Synthetic oligonucleotide
  Sense strand starting at position 3702 of SEQ ID NO: 251
gcuuaagagcuaugacucu

SEQ ID NO: 22839 - RNA, 19 nt, Artificial Sequence
  Description of Artificial Sequence: Synthetic oligonucleotide
  Antisense strand to SEQ ID NO: 22838
agagucauagcucuuaagc

SEQ ID NO: 22840 - RNA, 19 nt, Artificial Sequence
  Description of Artificial Sequence: Synthetic oligonucleotide
  Sense strand starting at position 3714 of SEQ ID NO: 251
ugacucuuggaauggcaga

SEQ ID NO: 22841 - RNA, 19 nt, Artificial Sequence
  Description of Artificial Sequence: Synthetic oligonucleotide
  Antisense strand to SEQ ID NO: 22840
ucugccauuccaagaguca

SEQ ID NO: 22842 - RNA, 19 nt, Artificial Sequence
  Description of Artificial Sequence: Synthetic oligonucleotide
  Sense strand starting at position 3813 of SEQ ID NO: 251
cucugagauguauguuucu

SEQ ID NO: 22843 - RNA, 19 nt, Artificial Sequence
  Description of Artificial Sequence: Synthetic oligonucleotide
  Antisense strand to SEQ ID NO: 22842
agaaacauacaucucagag

SEQ ID NO: 22844 - RNA, 19 nt, Artificial Sequence
  Description of Artificial Sequence: Synthetic oligonucleotide
  Sense strand starting at position 3816 of SEQ ID NO: 251
ugagauguauguuucucau

SEQ ID NO: 22845 - RNA, 19 nt, Artificial Sequence
  Description of Artificial Sequence: Synthetic oligonucleotide
  Antisense strand to SEQ ID NO: 22844
augagaaacauacaucuca

SEQ ID NO: 22846 - RNA, 19 nt, Artificial Sequence
  Description of Artificial Sequence: Synthetic oligonucleotide
  Sense strand starting at position 3818 of SEQ ID NO: 251
agauguauguuucucaucu

SEQ ID NO: 22847 - RNA, 19 nt, Artificial Sequence
  Description of Artificial Sequence: Synthetic oligonucleotide
  Antisense strand to SEQ ID NO: 22846
agaugagaaacauacaucu

SEQ ID NO: 22848 - RNA, 19 nt, Artificial Sequence
  Description of Artificial Sequence: Synthetic oligonucleotide
  Sense strand starting at position 3819 of SEQ ID NO: 251
gauguauguuucucaucug

SEQ ID NO: 22849 - RNA, 19 nt, Artificial Sequence
  Description of Artificial Sequence: Synthetic oligonucleotide
  Antisense strand to SEQ ID NO: 22848
cagaugagaaacauacauc

SEQ ID NO: 22850 - RNA, 19 nt, Artificial Sequence
  Description of Artificial Sequence: Synthetic oligonucleotide
  Sense strand starting at position 3902 of SEQ ID NO: 251
uaggguugcuuagcaauga

SEQ ID NO: 22851 - RNA, 19 nt, Artificial Sequence
  Description of Artificial Sequence: Synthetic oligonucleotide
  Antisense strand to SEQ ID NO: 22850
ucauugcuaagcaacccua

SEQ ID NO: 22852 - RNA, 19 nt, Artificial Sequence
  Description of Artificial Sequence: Synthetic oligonucleotide
  Sense strand starting at position 358 of SEQ ID NO: 252
caguaaagguaauuauguu

SEQ ID NO: 22853 - RNA, 19 nt, Artificial Sequence
  Description of Artificial Sequence: Synthetic oligonucleotide
  Antisense strand to SEQ ID NO: 22852
aacauaauuaccuuuacug

SEQ ID NO: 22854 - RNA, 19 nt, Artificial Sequence
  Description of Artificial Sequence: Synthetic oligonucleotide
  Sense strand starting at position 461 of SEQ ID NO: 252
acagacauguacuauauuu

SEQ ID NO: 22855 - RNA, 19 nt, Artificial Sequence
  Description of Artificial Sequence: Synthetic oligonucleotide
  Antisense strand to SEQ ID NO: 22854
aaauauaguacaugucugu

SEQ ID NO: 22856 - RNA, 19 nt, Artificial Sequence
  Description of Artificial Sequence: Synthetic oligonucleotide
  Sense strand starting at position 562 of SEQ ID NO: 252
caguacuguugaguuugua

SEQ ID NO: 22857 - RNA, 19 nt, Artificial Sequence
  Description of Artificial Sequence: Synthetic oligonucleotide
  Antisense strand to SEQ ID NO: 22856
uacaaacucaacaguacug

SEQ ID NO: 22858 - RNA, 19 nt, Artificial Sequence
  Description of Artificial Sequence: Synthetic oligonucleotide
  Sense strand starting at position 565 of SEQ ID NO: 252
uacuguugaguuuguaaca

SEQ ID NO: 22859 - RNA, 19 nt, Artificial Sequence
  Description of Artificial Sequence: Synthetic oligonucleotide
  Antisense strand to SEQ ID NO: 22858
uguuacaaacucaacagua

SEQ ID NO: 22860 - RNA, 19 nt, Artificial Sequence
  Description of Artificial Sequence: Synthetic oligonucleotide
  Sense strand starting at position 566 of SEQ ID NO: 252
acuguugaguuuguaacau

SEQ ID NO: 22861 - RNA, 19 nt, Artificial Sequence
  Description of Artificial Sequence: Synthetic oligonucleotide
  Antisense strand to SEQ ID NO: 22860
auguuacaaacucaacagu

SEQ ID NO: 22862 - RNA, 19 nt, Artificial Sequence
  Description of Artificial Sequence: Synthetic oligonucleotide
  Sense strand starting at position 570 of SEQ ID NO: 252
uugaguuuguaacauuauc

SEQ ID NO: 22863 - RNA, 19 nt, Artificial Sequence
  Description of Artificial Sequence: Synthetic oligonucleotide
  Antisense strand to SEQ ID NO: 22862
gauaauguuacaaacucaa

SEQ ID NO: 22864 - RNA, 19 nt, Artificial Sequence
  Description of Artificial Sequence: Synthetic oligonucleotide
  Sense strand starting at position 575 of SEQ ID NO: 252
uuuguaacauuaucagaug

SEQ ID NO: 22865 - RNA, 19 nt, Artificial Sequence
  Description of Artificial Sequence: Synthetic oligonucleotide
  Antisense strand to SEQ ID NO: 22864
caucugauaauguuacaaa

SEQ ID NO: 22866 - RNA, 19 nt, Artificial Sequence
  Description of Artificial Sequence: Synthetic oligonucleotide
  Sense strand starting at position 576 of SEQ ID NO: 252
uuguaacauuaucagaugu

SEQ ID NO: 22867 - RNA, 19 nt, Artificial Sequence
  Description of Artificial Sequence: Synthetic oligonucleotide
  Antisense strand to SEQ ID NO: 22866
acaucugauaauguuacaa

SEQ ID NO: 22868 - RNA, 19 nt, Artificial Sequence
  Description of Artificial Sequence: Synthetic oligonucleotide
  Sense strand starting at position 578 of SEQ ID NO: 252
guaacauuaucagauguaa

SEQ ID NO: 22869 - RNA, 19 nt, Artificial Sequence
  Description of Artificial Sequence: Synthetic oligonucleotide
  Antisense strand to SEQ ID NO: 22868
uuacaucugauaauguuac

SEQ ID NO: 22870 - RNA, 19 nt, Artificial Sequence
  Description of Artificial Sequence: Synthetic oligonucleotide
  Sense strand starting at position 643 of SEQ ID NO: 252
ucuguaucacuuggaauua

SEQ ID NO: 22871 - RNA, 19 nt, Artificial Sequence
  Description of Artificial Sequence: Synthetic oligonucleotide
  Antisense strand to SEQ ID NO: 22870
uaauuccaagugauacaga

SEQ ID NO: 22872 - RNA, 19 nt, Artificial Sequence
  Description of Artificial Sequence: Synthetic oligonucleotide
  Sense strand starting at position 644 of SEQ ID NO: 252
cuguaucacuuggaauuaa

SEQ ID NO: 22873 - RNA, 19 nt, Artificial Sequence
  Description of Artificial Sequence: Synthetic oligonucleotide
  Antisense strand to SEQ ID NO: 22872
uuaauuccaagugauacag

SEQ ID NO: 22874 - RNA, 19 nt, Artificial Sequence
  Description of Artificial Sequence: Synthetic oligonucleotide
  Sense strand starting at position 674 of SEQ ID NO: 252
ucugaagcuuaagauguau

SEQ ID NO: 22875 - RNA, 19 nt, Artificial Sequence
  Description of Artificial Sequence: Synthetic oligonucleotide
  Antisense strand to SEQ ID NO: 22874
auacaucuuaagcuucaga

SEQ ID NO: 22876 - RNA, 19 nt, Artificial Sequence
  Description of Artificial Sequence: Synthetic oligonucleotide
  Sense strand starting at position 683 of SEQ ID NO: 252
uaagauguauauggagaau

SEQ ID NO: 22877 - RNA, 19 nt, Artificial Sequence
  Description of Artificial Sequence: Synthetic oligonucleotide
  Antisense strand to SEQ ID NO: 22876
auucuccauauacaucuua

SEQ ID NO: 22878 - RNA, 19 nt, Artificial Sequence
  Description of Artificial Sequence: Synthetic oligonucleotide
  Sense strand starting at position 692 of SEQ ID NO: 252
uauggagaauaugaagauu

SEQ ID NO: 22879 - RNA, 19 nt, Artificial Sequence
  Description of Artificial Sequence: Synthetic oligonucleotide
  Antisense strand to SEQ ID NO: 22878
aaucuucauauucuccaua

SEQ ID NO: 22880 - RNA, 19 nt, Artificial Sequence
  Description of Artificial Sequence: Synthetic oligonucleotide
  Sense strand starting at position 701 of SEQ ID NO: 252
uaugaagauuaagcuguau

SEQ ID NO: 22881 - RNA, 19 nt, Artificial Sequence
  Description of Artificial Sequence: Synthetic oligonucleotide
  Antisense strand to SEQ ID NO: 22880
auacagcuuaaucuucaua

SEQ ID NO: 22882 - RNA, 19 nt, Artificial Sequence
  Description of Artificial Sequence: Synthetic oligonucleotide
  Sense strand starting at position 707 of SEQ ID NO: 252
gauuaagcuguauacggua

SEQ ID NO: 22883 - RNA, 19 nt, Artificial Sequence
  Description of Artificial Sequence: Synthetic oligonucleotide
  Antisense strand to SEQ ID NO: 22882
uaccguauacagcuuaauc

SEQ ID NO: 22884 - RNA, 19 nt, Artificial Sequence
  Description of Artificial Sequence: Synthetic oligonucleotide
  Sense strand starting at position 709 of SEQ ID NO: 252
uuaagcuguauacgguaaa

SEQ ID NO: 22885 - RNA, 19 nt, Artificial Sequence
  Description of Artificial Sequence: Synthetic oligonucleotide
  Antisense strand to SEQ ID NO: 22884
uuuaccguauacagcuuaa

SEQ ID NO: 22886 - RNA, 19 nt, Artificial Sequence
  Description of Artificial Sequence: Synthetic oligonucleotide
  Sense strand starting at position 891 of SEQ ID NO: 252
cuaacuacaguguaucaau

SEQ ID NO: 22887 - RNA, 19 nt, Artificial Sequence
  Description of Artificial Sequence: Synthetic oligonucleotide
  Antisense strand to SEQ ID NO: 22886
auugauacacuguaguuag

SEQ ID NO: 22888 - RNA, 19 nt, Artificial Sequence
  Description of Artificial Sequence: Synthetic oligonucleotide
  Sense strand starting at position 894 of SEQ ID NO: 252
acuacaguguaucaauaau

SEQ ID NO: 22889 - RNA, 19 nt, Artificial Sequence
  Description of Artificial Sequence: Synthetic oligonucleotide
  Antisense strand to SEQ ID NO: 22888
auuauugauacacuguagu

SEQ ID NO: 22890 - RNA, 19 nt, Artificial Sequence
  Description of Artificial Sequence: Synthetic oligonucleotide
  Sense strand starting at position 913 of SEQ ID NO: 252
auuaaaugugcaugggcua

SEQ ID NO: 22891 - RNA, 19 nt, Artificial Sequence
  Description of Artificial Sequence: Synthetic oligonucleotide
  Antisense strand to SEQ ID NO: 22890
uagcccaugcacauuuaau

SEQ ID NO: 22892 - RNA, 19 nt, Artificial Sequence
  Description of Artificial Sequence: Synthetic oligonucleotide
  Sense strand starting at position 982 of SEQ ID NO: 252
ccaaguauaugugccuaca

SEQ ID NO: 22893 - RNA, 19 nt, Artificial Sequence
  Description of Artificial Sequence: Synthetic oligonucleotide
  Antisense strand to SEQ ID NO: 22892
uguaggcacauauacuugg

SEQ ID NO: 22894 - RNA, 19 nt, Artificial Sequence
  Description of Artificial Sequence: Synthetic oligonucleotide
  Sense strand starting at position 985 of SEQ ID NO: 252
aguauaugugccuacagga

SEQ ID NO: 22895 - RNA, 19 nt, Artificial Sequence
  Description of Artificial Sequence: Synthetic oligonucleotide
  Antisense strand to SEQ ID NO: 22894
uccuguaggcacauauacu

SEQ ID NO: 22896 - RNA, 19 nt, Artificial Sequence
  Description of Artificial Sequence: Synthetic oligonucleotide
  Sense strand starting at position 1290 of SEQ ID NO: 252
gaggucacuugcuguguga

SEQ ID NO: 22897 - RNA, 19 nt, Artificial Sequence
  Description of Artificial Sequence: Synthetic oligonucleotide
  Antisense strand to SEQ ID NO: 22896
ucacacagcaagugaccuc

SEQ ID NO: 22898 - RNA, 19 nt, Artificial Sequence
  Description of Artificial Sequence: Synthetic oligonucleotide
  Sense strand starting at position 1301 of SEQ ID NO: 252
cugugugacguccauugga

SEQ ID NO: 22899 - RNA, 19 nt, Artificial Sequence
  Description of Artificial Sequence: Synthetic oligonucleotide
  Antisense strand to SEQ ID NO: 22898
uccaauggacgucacacag

SEQ ID NO: 22900 - RNA, 19 nt, Artificial Sequence
  Description of Artificial Sequence: Synthetic oligonucleotide
  Sense strand starting at position 2017 of SEQ ID NO: 252
gcacccucgucaugugauu

SEQ ID NO: 22901 - RNA, 19 nt, Artificial Sequence
  Description of Artificial Sequence: Synthetic oligonucleotide
  Antisense strand to SEQ ID NO: 22900
aaucacaugacgagggugc

SEQ ID NO: 22902 - RNA, 19 nt, Artificial Sequence
  Description of Artificial Sequence: Synthetic oligonucleotide
  Sense strand starting at position 2052 of SEQ ID NO: 252
ccguguuggcucuuucgua

SEQ ID NO: 22903 - RNA, 19 nt, Artificial Sequence
  Description of Artificial Sequence: Synthetic oligonucleotide
  Antisense strand to SEQ ID NO: 22902
uacgaaagagccaacacgg

SEQ ID NO: 22904 - RNA, 19 nt, Artificial Sequence
  Description of Artificial Sequence: Synthetic oligonucleotide
  Sense strand starting at position 2053 of SEQ ID NO: 252
cguguuggcucuuucguaa

SEQ ID NO: 22905 - RNA, 19 nt, Artificial Sequence
  Description of Artificial Sequence: Synthetic oligonucleotide
  Antisense strand to SEQ ID NO: 22904
uuacgaaagagccaacacg

SEQ ID NO: 22906 - RNA, 19 nt, Artificial Sequence
  Description of Artificial Sequence: Synthetic oligonucleotide
  Sense strand starting at position 2466 of SEQ ID NO: 252
gccuguggccgcuauguuu

SEQ ID NO: 22907 - RNA, 19 nt, Artificial Sequence
  Description of Artificial Sequence: Synthetic oligonucleotide
  Antisense strand to SEQ ID NO: 22906
aaacauagcggccacaggc

SEQ ID NO: 22908 - RNA, 19 nt, Artificial Sequence
  Description of Artificial Sequence: Synthetic oligonucleotide
  Sense strand starting at position 2529 of SEQ ID NO: 252
gccucuuuggcgccaugua

SEQ ID NO: 22909 - RNA, 19 nt, Artificial Sequence
  Description of Artificial Sequence: Synthetic oligonucleotide
  Antisense strand to SEQ ID NO: 22908
uacauggcgccaaagaggc

SEQ ID NO: 22910 - RNA, 19 nt, Artificial Sequence
  Description of Artificial Sequence: Synthetic oligonucleotide
  Sense strand starting at position 3200 of SEQ ID NO: 252
ugcugugaugcguccucuu

SEQ ID NO: 22911 - RNA, 19 nt, Artificial Sequence
  Description of Artificial Sequence: Synthetic oligonucleotide
  Antisense strand to SEQ ID NO: 22910
aagaggacgcaucacagca

SEQ ID NO: 22912 - RNA, 19 nt, Artificial Sequence
  Description of Artificial Sequence: Synthetic oligonucleotide
  Sense strand starting at position 3230 of SEQ ID NO: 252
gagggagguguuuguaaag

SEQ ID NO: 22913 - RNA, 19 nt, Artificial Sequence
  Description of Artificial Sequence: Synthetic oligonucleotide
  Antisense strand to SEQ ID NO: 22912
cuuuacaaacaccucccuc

SEQ ID NO: 22914 - RNA, 19 nt, Artificial Sequence
  Description of Artificial Sequence: Synthetic oligonucleotide
  Sense strand starting at position 3233 of SEQ ID NO: 252
ggagguguuuguaaagcug

SEQ ID NO: 22915 - RNA, 19 nt, Artificial Sequence
  Description of Artificial Sequence: Synthetic oligonucleotide
  Antisense strand to SEQ ID NO: 22914
cagcuuuacaaacaccucc

SEQ ID NO: 22916 - RNA, 19 nt, Artificial Sequence
  Description of Artificial Sequence: Synthetic oligonucleotide
  Sense strand starting at position 3890 of SEQ ID NO: 252
gcacacuguucuguucuua

SEQ ID NO: 22917 - RNA, 19 nt, Artificial Sequence
  Description of Artificial Sequence: Synthetic oligonucleotide
  Antisense strand to SEQ ID NO: 22916
uaagaacagaacagugugc

SEQ ID NO: 22918 - RNA, 19 nt, Artificial Sequence
  Description of Artificial Sequence: Synthetic oligonucleotide
  Sense strand starting at position 3894 of SEQ ID NO: 252
acuguucuguucuuaagaa

SEQ ID NO: 22919 - RNA, 19 nt, Artificial Sequence
  Description of Artificial Sequence: Synthetic oligonucleotide
  Antisense strand to SEQ ID NO: 22918
uucuuaagaacagaacagu

SEQ ID NO: 22920 - RNA, 19 nt, Artificial Sequence
  Description of Artificial Sequence: Synthetic oligonucleotide
  Sense strand starting at position 3895 of SEQ ID NO: 252
cuguucuguucuuaagaau

SEQ ID NO: 22921 - RNA, 19 nt, Artificial Sequence
  Description of Artificial Sequence: Synthetic oligonucleotide
  Antisense strand to SEQ ID NO: 22920
auucuuaagaacagaacag

SEQ ID NO: 22922 - RNA, 19 nt, Artificial Sequence
  Description of Artificial Sequence: Synthetic oligonucleotide
  Sense strand starting at position 3960 of SEQ ID NO: 252
ucaaguucucugggcucua

SEQ ID NO: 22923 - RNA, 19 nt, Artificial Sequence
  Description of Artificial Sequence: Synthetic oligonucleotide
  Antisense strand to SEQ ID NO: 22922
uagagcccagagaacuuga

SEQ ID NO: 22924 - RNA, 19 nt, Artificial Sequence
  Description of Artificial Sequence: Synthetic oligonucleotide
  Sense strand starting at position 3979 of SEQ ID NO: 252
ggaugugugucuucagaaa

SEQ ID NO: 22925 - RNA, 19 nt, Artificial Sequence
  Description of Artificial Sequence: Synthetic oligonucleotide
  Antisense strand to SEQ ID NO: 22924
uuucugaagacacacaucc

SEQ ID NO: 22926 - RNA, 19 nt, Artificial Sequence
  Description of Artificial Sequence: Synthetic oligonucleotide
  Sense strand starting at position 3871 of SEQ ID NO: 253
ugagucagcucugcagcaa

SEQ ID NO: 22927 - RNA, 19 nt, Artificial Sequence
  Description of Artificial Sequence: Synthetic oligonucleotide
  Antisense strand to SEQ ID NO: 22926
uugcugcagagcugacuca

SEQ ID NO: 22928 - RNA, 19 nt, Artificial Sequence
  Description of Artificial Sequence: Synthetic oligonucleotide
  Sense strand starting at position 3727 of SEQ ID NO: 253
cagacaugccugcagcuau

SEQ ID NO: 22929 - RNA, 19 nt, Artificial Sequence
  Description of Artificial Sequence: Synthetic oligonucleotide
  Antisense strand to SEQ ID NO: 22928
auagcugcaggcaugucug

SEQ ID NO: 22930 - RNA, 19 nt, Artificial Sequence
  Description of Artificial Sequence: Synthetic oligonucleotide
  Sense strand starting at position 3641 of SEQ ID NO: 253
gugucaacaagguguggau

SEQ ID NO: 22931 - RNA, 19 nt, Artificial Sequence
  Description of Artificial Sequence: Synthetic oligonucleotide
  Antisense strand to SEQ ID NO: 22930
auccacaccuuguugacac

SEQ ID NO: 22932 - RNA, 19 nt, Artificial Sequence
  Description of Artificial Sequence: Synthetic oligonucleotide
  Sense strand starting at position 3610 of SEQ ID NO: 253
gacuguggcuuccuggaaa

SEQ ID NO: 22933 - RNA, 19 nt, Artificial Sequence
  Description of Artificial Sequence: Synthetic oligonucleotide
  Antisense strand to SEQ ID NO: 22932
uuuccaggaagccacaguc

SEQ ID NO: 22934 - RNA, 19 nt, Artificial Sequence
  Description of Artificial Sequence: Synthetic oligonucleotide
  Sense strand starting at position 3584 of SEQ ID NO: 253
uuuccucuucugugacaug

SEQ ID NO: 22935 - RNA, 19 nt, Artificial Sequence
  Description of Artificial Sequence: Synthetic oligonucleotide
  Antisense strand to SEQ ID NO: 22934
caugucacagaagaggaaa

SEQ ID NO: 22936 - RNA, 19 nt, Artificial Sequence
  Description of Artificial Sequence: Synthetic oligonucleotide
  Sense strand starting at position 3560 of SEQ ID NO: 253
gcaaguuacccuugccaac

SEQ ID NO: 22937 - RNA, 19 nt, Artificial Sequence
  Description of Artificial Sequence: Synthetic oligonucleotide
  Antisense strand to SEQ ID NO: 22936
guuggcaaggguaacuugc

SEQ ID NO: 22938 - RNA, 19 nt, Artificial Sequence
  Description of Artificial Sequence: Synthetic oligonucleotide
  Sense strand starting at position 3470 of SEQ ID NO: 253
acaugcaucuggucaaacu

SEQ ID NO: 22939 - RNA, 19 nt, Artificial Sequence
  Description of Artificial Sequence: Synthetic oligonucleotide
  Antisense strand to SEQ ID NO: 22938
aguuugaccagaugcaugu

SEQ ID NO: 22940 - RNA, 19 nt, Artificial Sequence
  Description of Artificial Sequence: Synthetic oligonucleotide
  Sense strand starting at position 3325 of SEQ ID NO: 253
agcucaauuggaggucauu

SEQ ID NO: 22941 - RNA, 19 nt, Artificial Sequence
  Description of Artificial Sequence: Synthetic oligonucleotide
  Antisense strand to SEQ ID NO: 22940
aaugaccuccaauugagcu

SEQ ID NO: 22942 - RNA, 19 nt, Artificial Sequence
  Description of Artificial Sequence: Synthetic oligonucleotide
  Sense strand starting at position 3301 of SEQ ID NO: 253
guaauacucuuggcacaca

SEQ ID NO: 22943 - RNA, 19 nt, Artificial Sequence
  Description of Artificial Sequence: Synthetic oligonucleotide
  Antisense strand to SEQ ID NO: 22942
ugugugccaagaguauuac

SEQ ID NO: 22944 - RNA, 19 nt, Artificial Sequence
  Description of Artificial Sequence: Synthetic oligonucleotide
  Sense strand starting at position 3293 of SEQ ID NO: 253
ugauuuagguaauacucuu

SEQ ID NO: 22945 - RNA, 19 nt, Artificial Sequence
  Description of Artificial Sequence: Synthetic oligonucleotide
  Antisense strand to SEQ ID NO: 22944
aagaguauuaccuaaauca

SEQ ID NO: 22946 - RNA, 19 nt, Artificial Sequence
  Description of Artificial Sequence: Synthetic oligonucleotide
  Sense strand starting at position 3288 of SEQ ID NO: 253
ugaccugauuuagguaaua

SEQ ID NO: 22947 - RNA, 19 nt, Artificial Sequence
  Description of Artificial Sequence: Synthetic oligonucleotide
  Antisense strand to SEQ ID NO: 22946
uauuaccuaaaucagguca

SEQ ID NO: 22948 - RNA, 19 nt, Artificial Sequence
  Description of Artificial Sequence: Synthetic oligonucleotide
  Sense strand starting at position 3213 of SEQ ID NO: 253
gucacagcauuaucaguuu

SEQ ID NO: 22949 - RNA, 19 nt, Artificial Sequence
  Description of Artificial Sequence: Synthetic oligonucleotide
  Antisense strand to SEQ ID NO: 22948
aaacugauaaugcugugac

SEQ ID NO: 22950 - RNA, 19 nt, Artificial Sequence
  Description of Artificial Sequence: Synthetic oligonucleotide
  Sense strand starting at position 3211 of SEQ ID NO: 253
gagucacagcauuaucagu

SEQ ID NO: 22951 - RNA, 19 nt, Artificial Sequence
  Description of Artificial Sequence: Synthetic oligonucleotide
  Antisense strand to SEQ ID NO: 22950
acugauaaugcugugacuc

SEQ ID NO: 22952 - RNA, 19 nt, Artificial Sequence
  Description of Artificial Sequence: Synthetic oligonucleotide
  Sense strand starting at position 3146 of SEQ ID NO: 253
ugggucaucuaagcagacu

SEQ ID NO: 22953 - RNA, 19 nt, Artificial Sequence
  Description of Artificial Sequence: Synthetic oligonucleotide
  Antisense strand to SEQ ID NO: 22952
agucugcuuagaugaccca

SEQ ID NO: 22954 - RNA, 19 nt, Artificial Sequence
  Description of Artificial Sequence: Synthetic oligonucleotide
  Sense strand starting at position 3135 of SEQ ID NO: 253
aacggaaagccugggucau

SEQ ID NO: 22955 - RNA, 19 nt, Artificial Sequence
  Description of Artificial Sequence: Synthetic oligonucleotide
  Antisense strand to SEQ ID NO: 22954
augacccaggcuuuccguu

SEQ ID NO: 22956 - RNA, 19 nt, Artificial Sequence
  Description of Artificial Sequence: Synthetic oligonucleotide
  Sense strand starting at position 2982 of SEQ ID NO: 253
ccaagcugguaguuagaua

SEQ ID NO: 22957 - RNA, 19 nt, Artificial Sequence
  Description of Artificial Sequence: Synthetic oligonucleotide
  Antisense strand to SEQ ID NO: 22956
uaucuaacuaccagcuugg

SEQ ID NO: 22958 - RNA, 19 nt, Artificial Sequence
  Description of Artificial Sequence: Synthetic oligonucleotide
  Sense strand starting at position 2801 of SEQ ID NO: 253
ugaucuucccaaggaucuu

SEQ ID NO: 22959 - RNA, 19 nt, Artificial Sequence
  Description of Artificial Sequence: Synthetic oligonucleotide
  Antisense strand to SEQ ID NO: 22958
aagauccuugggaagauca

SEQ ID NO: 22960 - RNA, 19 nt, Artificial Sequence
  Description of Artificial Sequence: Synthetic oligonucleotide
  Sense strand starting at position 2777 of SEQ ID NO: 253
ucuaauuucucucacgaug

SEQ ID NO: 22961 - RNA, 19 nt, Artificial Sequence
  Description of Artificial Sequence: Synthetic oligonucleotide
  Antisense strand to SEQ ID NO: 22960
caucgugagagaaauuaga

SEQ ID NO: 22962 - RNA, 19 nt, Artificial Sequence
  Description of Artificial Sequence: Synthetic oligonucleotide
  Sense strand starting at position 2763 of SEQ ID NO: 253
augcucugagauugucuaa

SEQ ID NO: 22963 - RNA, 19 nt, Artificial Sequence
  Description of Artificial Sequence: Synthetic oligonucleotide
  Antisense strand to SEQ ID NO: 22962
uuagacaaucucagagcau

SEQ ID NO: 22964 - RNA, 19 nt, Artificial Sequence
  Description of Artificial Sequence: Synthetic oligonucleotide
  Sense strand starting at position 2757 of SEQ ID NO: 253
acagccaugcucugagauu

SEQ ID NO: 22965 - RNA, 19 nt, Artificial Sequence
  Description of Artificial Sequence: Synthetic oligonucleotide
  Antisense strand to SEQ ID NO: 22964
aaucucagagcauggcugu

SEQ ID NO: 22966 - RNA, 19 nt, Artificial Sequence
  Description of Artificial Sequence: Synthetic oligonucleotide
  Sense strand starting at position 2676 of SEQ ID NO: 253
aaaggaauugaggguaugu

SEQ ID NO: 22967 - RNA, 19 nt, Artificial Sequence
  Description of Artificial Sequence: Synthetic oligonucleotide
  Antisense strand to SEQ ID NO: 22966
acauacccucaauuccuuu

SEQ ID NO: 22968 - RNA, 19 nt, Artificial Sequence
  Description of Artificial Sequence: Synthetic oligonucleotide
  Sense strand starting at position 2654 of SEQ ID NO: 253
auggaugacuuuccaagua

SEQ ID NO: 22969 - RNA, 19 nt, Artificial Sequence
  Description of Artificial Sequence: Synthetic oligonucleotide
  Antisense strand to SEQ ID NO: 22968
uacuuggaaagucauccau

SEQ ID NO: 22970 - RNA, 19 nt, Artificial Sequence
  Description of Artificial Sequence: Synthetic oligonucleotide
  Sense strand starting at position 2647 of SEQ ID NO: 253
gaagcauauggaugacuuu

SEQ ID NO: 22971 - RNA, 19 nt, Artificial Sequence
  Description of Artificial Sequence: Synthetic oligonucleotide
  Antisense strand to SEQ ID NO: 22970
aaagucauccauaugcuuc

SEQ ID NO: 22972 - RNA, 19 nt, Artificial Sequence
  Description of Artificial Sequence: Synthetic oligonucleotide
  Sense strand starting at position 2622 of SEQ ID NO: 253
ggaggagaauuccaaacuc

SEQ ID NO: 22973 - RNA, 19 nt, Artificial Sequence
  Description of Artificial Sequence: Synthetic oligonucleotide
  Antisense strand to SEQ ID NO: 22972
gaguuuggaauucuccucc

SEQ ID NO: 22974 - RNA, 19 nt, Artificial Sequence
  Description of Artificial Sequence: Synthetic oligonucleotide
  Sense strand starting at position 2553 of SEQ ID NO: 253
uggucaggucuaugagaga

SEQ ID NO: 22975 - RNA, 19 nt, Artificial Sequence
  Description of Artificial Sequence: Synthetic oligonucleotide
  Antisense strand to SEQ ID NO: 22974
ucucucauagaccugacca

SEQ ID NO: 22976 - RNA, 19 nt, Artificial Sequence
  Description of Artificial Sequence: Synthetic oligonucleotide
  Sense strand starting at position 2551 of SEQ ID NO: 253
uauggucaggucuaugaga

SEQ ID NO: 22977 - RNA, 19 nt, Artificial Sequence
  Description of Artificial Sequence: Synthetic oligonucleotide
  Antisense strand to SEQ ID NO: 22976
ucucauagaccugaccaua

SEQ ID NO: 22978 - RNA, 19 nt, Artificial Sequence
  Description of Artificial Sequence: Synthetic oligonucleotide
  Sense strand starting at position 2200 of SEQ ID NO: 253
ucugauuucuggcuuuauc

SEQ ID NO: 22979 - RNA, 19 nt, Artificial Sequence
  Description of Artificial Sequence: Synthetic oligonucleotide
  Antisense strand to SEQ ID NO: 22978
gauaaagccagaaaucaga

SEQ ID NO: 22980 - RNA, 19 nt, Artificial Sequence
  Description of Artificial Sequence: Synthetic oligonucleotide
  Sense strand starting at position 2191 of SEQ ID NO: 253
ggaaguguuucugauuucu

SEQ ID NO: 22981 - RNA, 19 nt, Artificial Sequence
  Description of Artificial Sequence: Synthetic oligonucleotide
  Antisense strand to SEQ ID NO: 22980
agaaaucagaaacacuucc

SEQ ID NO: 22982 - RNA, 19 nt, Artificial Sequence
  Description of Artificial Sequence: Synthetic oligonucleotide
  Sense strand starting at position 2176 of SEQ ID NO: 253
acagucauuuguugaggaa

SEQ ID NO: 22983 - RNA, 19 nt, Artificial Sequence
  Description of Artificial Sequence: Synthetic oligonucleotide
  Antisense strand to SEQ ID NO: 22982
uuccucaacaaaugacugu

SEQ ID NO: 22984 - RNA, 19 nt, Artificial Sequence
  Description of Artificial Sequence: Synthetic oligonucleotide
  Sense strand starting at position 2171 of SEQ ID NO: 253
gucuuacagucauuuguug

SEQ ID NO: 22985 - RNA, 19 nt, Artificial Sequence
  Description of Artificial Sequence: Synthetic oligonucleotide
  Antisense strand to SEQ ID NO: 22984
caacaaaugacuguaagac

SEQ ID NO: 22986 - RNA, 19 nt, Artificial Sequence
  Description of Artificial Sequence: Synthetic oligonucleotide
  Sense strand starting at position 1610 of SEQ ID NO: 253
agaacucacuuagauggua

SEQ ID NO: 22987 - RNA, 19 nt, Artificial Sequence
  Description of Artificial Sequence: Synthetic oligonucleotide
  Antisense strand to SEQ ID NO: 22986
uaccaucuaagugaguucu

SEQ ID NO: 22988 - RNA, 19 nt, Artificial Sequence
  Description of Artificial Sequence: Synthetic oligonucleotide
  Sense strand starting at position 1585 of SEQ ID NO: 253
guaagugcucuugaaaugg

SEQ ID NO: 22989 - RNA, 19 nt, Artificial Sequence
  Description of Artificial Sequence: Synthetic oligonucleotide
  Antisense strand to SEQ ID NO: 22988
ccauuucaagagcacuuac

SEQ ID NO: 22990 - RNA, 19 nt, Artificial Sequence
  Description of Artificial Sequence: Synthetic oligonucleotide
  Sense strand starting at position 1366 of SEQ ID NO: 253
agcaaacuccaugaguaca

SEQ ID NO: 22991 - RNA, 19 nt, Artificial Sequence
  Description of Artificial Sequence: Synthetic oligonucleotide
  Antisense strand to SEQ ID NO: 22990
uguacucauggaguuugcu

SEQ ID NO: 22992 - RNA, 19 nt, Artificial Sequence
  Description of Artificial Sequence: Synthetic oligonucleotide
  Sense strand starting at position 1365 of SEQ ID NO: 253
gagcaaacuccaugaguac

SEQ ID NO: 22993 - RNA, 19 nt, Artificial Sequence
  Description of Artificial Sequence: Synthetic oligonucleotide
  Antisense strand to SEQ ID NO: 22992
guacucauggaguuugcuc

SEQ ID NO: 22994 - RNA, 19 nt, Artificial Sequence
  Description of Artificial Sequence: Synthetic oligonucleotide
  Sense strand starting at position 810 of SEQ ID NO: 253
gucccucguuuaucaaaca

SEQ ID NO: 22995 - RNA, 19 nt, Artificial Sequence
  Description of Artificial Sequence: Synthetic oligonucleotide
  Antisense strand to SEQ ID NO: 22994
uguuugauaaacgagggac

SEQ ID NO: 22996 - RNA, 19 nt, Artificial Sequence
  Description of Artificial Sequence: Synthetic oligonucleotide
  Sense strand starting at position 776 of SEQ ID NO: 253
agagguagucagugcacaa

SEQ ID NO: 22997 - RNA, 19 nt, Artificial Sequence
  Description of Artificial Sequence: Synthetic oligonucleotide
  Antisense strand to SEQ ID NO: 22996
uugugcacugacuaccucu

SEQ ID NO: 22998 - RNA, 19 nt, Artificial Sequence
  Description of Artificial Sequence: Synthetic oligonucleotide
  Sense strand starting at position 712 of SEQ ID NO: 253
cgugacauccucuaucacu

SEQ ID NO: 22999 - RNA, 19 nt, Artificial Sequence
  Description of Artificial Sequence: Synthetic oligonucleotide
  Antisense strand to SEQ ID NO: 22998
agugauagaggaugucacg

SEQ ID NO: 23000 - RNA, 19 nt, Artificial Sequence
  Description of Artificial Sequence: Synthetic oligonucleotide
  Sense strand starting at position 550 of SEQ ID NO: 253
uguggucagagcugugaca

SEQ ID NO: 23001 - RNA, 19 nt, Artificial Sequence
  Description of Artificial Sequence: Synthetic oligonucleotide
  Antisense strand to SEQ ID NO: 23000
ugucacagcucugaccaca

SEQ ID NO: 23002 - RNA, 19 nt, Artificial Sequence
  Description of Artificial Sequence: Synthetic oligonucleotide
  Sense strand starting at position 248 of SEQ ID NO: 253
gaugguguuccuuaaagga

SEQ ID NO: 23003 - RNA, 19 nt, Artificial Sequence
  Description of Artificial Sequence: Synthetic oligonucleotide
  Antisense strand to SEQ ID NO: 23002
uccuuuaaggaacaccauc

SEQ ID NO: 23004 - RNA, 19 nt, Artificial Sequence
  Description of Artificial Sequence: Synthetic oligonucleotide
  Sense strand starting at position 244 of SEQ ID NO: 253
gcacgaugguguuccuuaa

SEQ ID NO: 23005 - RNA, 19 nt, Artificial Sequence
  Description of Artificial Sequence: Synthetic oligonucleotide
  Antisense strand to SEQ ID NO: 23004
uuaaggaacaccaucgugc

SEQ ID NO: 23006 - RNA, 19 nt, Artificial Sequence
  Description of Artificial Sequence: Synthetic oligonucleotide
  Sense strand starting at position 3831 of SEQ ID NO: 254
cucgaugaucuauaaaugu

SEQ ID NO: 23007 - RNA, 19 nt, Artificial Sequence
  Description of Artificial Sequence: Synthetic oligonucleotide
  Antisense strand to SEQ ID NO: 23006
acauuuauagaucaucgag

SEQ ID NO: 23008 - RNA, 19 nt, Artificial Sequence
  Description of Artificial Sequence: Synthetic oligonucleotide
  Sense strand starting at position 3825 of SEQ ID NO: 254
uuuauucucgaugaucuau

SEQ ID NO: 23009 - RNA, 19 nt, Artificial Sequence
  Description of Artificial Sequence: Synthetic oligonucleotide
  Antisense strand to SEQ ID NO: 23008
auagaucaucgagaauaaa

SEQ ID NO: 23010 - RNA, 19 nt, Artificial Sequence
  Description of Artificial Sequence: Synthetic oligonucleotide
  Sense strand starting at position 3808 of SEQ ID NO: 254
gucagcuuauuugacauuu

SEQ ID NO: 23011 - RNA, 19 nt, Artificial Sequence
  Description of Artificial Sequence: Synthetic oligonucleotide
  Antisense strand to SEQ ID NO: 23010
aaaugucaaauaagcugac

SEQ ID NO: 23012 - RNA, 19 nt, Artificial Sequence
  Description of Artificial Sequence: Synthetic oligonucleotide
  Sense strand starting at position 3775 of SEQ ID NO: 254
ucuuuaacucuuuggagua

SEQ ID NO: 23013 - RNA, 19 nt, Artificial Sequence
  Description of Artificial Sequence: Synthetic oligonucleotide
  Antisense strand to SEQ ID NO: 23012
uacuccaaagaguuaaaga

SEQ ID NO: 23014 - RNA, 19 nt, Artificial Sequence
  Description of Artificial Sequence: Synthetic oligonucleotide
  Sense strand starting at position 3774 of SEQ ID NO: 254
uucuuuaacucuuuggagu

SEQ ID NO: 23015 - RNA, 19 nt, Artificial Sequence
  Description of Artificial Sequence: Synthetic oligonucleotide
  Antisense strand to SEQ ID NO: 23014
acuccaaagaguuaaagaa

SEQ ID NO: 23016 - RNA, 19 nt, Artificial Sequence
  Description of Artificial Sequence: Synthetic oligonucleotide
  Sense strand starting at position 3753 of SEQ ID NO: 254
ucaagaauaucuguuguua

SEQ ID NO: 23017 - RNA, 19 nt, Artificial Sequence
  Description of Artificial Sequence: Synthetic oligonucleotide
  Antisense strand to SEQ ID NO: 23016
uaacaacagauauucuuga

SEQ ID NO: 23018 - RNA, 19 nt, Artificial Sequence
  Description of Artificial Sequence: Synthetic oligonucleotide
  Sense strand starting at position 3606 of SEQ ID NO: 254
cuguaaugucagcaaauuc

SEQ ID NO: 23019 - RNA, 19 nt, Artificial Sequence
  Description of Artificial Sequence: Synthetic oligonucleotide
  Antisense strand to SEQ ID NO: 23018
gaauuugcugacauuacag

SEQ ID NO: 23020 - RNA, 19 nt, Artificial Sequence
  Description of Artificial Sequence: Synthetic oligonucleotide
  Sense strand starting at position 3464 of SEQ ID NO: 254
cugaaauuaguaggugauu

SEQ ID NO: 23021 - RNA, 19 nt, Artificial Sequence
  Description of Artificial Sequence: Synthetic oligonucleotide
  Antisense strand to SEQ ID NO: 23020
aaucaccuacuaauuucag

SEQ ID NO: 23022 - RNA, 19 nt, Artificial Sequence
  Description of Artificial Sequence: Synthetic oligonucleotide
  Sense strand starting at position 2997 of SEQ ID NO: 254
auacuaugacauuggguuu

SEQ ID NO: 23023 - RNA, 19 nt, Artificial Sequence
  Description of Artificial Sequence: Synthetic oligonucleotide
  Antisense strand to SEQ ID NO: 23022
aaacccaaugucauaguau

SEQ ID NO: 23024 - RNA, 19 nt, Artificial Sequence
  Description of Artificial Sequence: Synthetic oligonucleotide
  Sense strand starting at position 2982 of SEQ ID NO: 254
augugauugcagcaaauac

SEQ ID NO: 23025 - RNA, 19 nt, Artificial Sequence
  Description of Artificial Sequence: Synthetic oligonucleotide
  Antisense strand to SEQ ID NO: 23024
guauuugcugcaaucacau

SEQ ID NO: 23026 - RNA, 19 nt, Artificial Sequence
  Description of Artificial Sequence: Synthetic oligonucleotide
  Sense strand starting at position 2558 of SEQ ID NO: 254
ugaguagucagguaggcua

SEQ ID NO: 23027 - RNA, 19 nt, Artificial Sequence
  Description of Artificial Sequence: Synthetic oligonucleotide
  Antisense strand to SEQ ID NO: 23026
uagccuaccugacuacuca

SEQ ID NO: 23028 - RNA, 19 nt, Artificial Sequence
  Description of Artificial Sequence: Synthetic oligonucleotide
  Sense strand starting at position 2542 of SEQ ID NO: 254
aaucuaaucgcuuauguga

SEQ ID NO: 23029 - RNA, 19 nt, Artificial Sequence
  Description of Artificial Sequence: Synthetic oligonucleotide
  Antisense strand to SEQ ID NO: 23028
ucacauaagcgauuagauu

SEQ ID NO: 23030 - RNA, 19 nt, Artificial Sequence
  Description of Artificial Sequence: Synthetic oligonucleotide
  Sense strand starting at position 2529 of SEQ ID NO: 254
auguacauucuguaaucua

SEQ ID NO: 23031 - RNA, 19 nt, Artificial Sequence
  Description of Artificial Sequence: Synthetic oligonucleotide
  Antisense strand to SEQ ID NO: 23030
uagauuacagaauguacau

SEQ ID NO: 23032 - RNA, 19 nt, Artificial Sequence
  Description of Artificial Sequence: Synthetic oligonucleotide
  Sense strand starting at position 2514 of SEQ ID NO: 254
cucgaugaacuguaaaugu

SEQ ID NO: 23033 - RNA, 19 nt, Artificial Sequence
  Description of Artificial Sequence: Synthetic oligonucleotide
  Antisense strand to SEQ ID NO: 23032
acauuuacaguucaucgag

SEQ ID NO: 23034 - RNA, 19 nt, Artificial Sequence
  Description of Artificial Sequence: Synthetic oligonucleotide
  Sense strand starting at position 2508 of SEQ ID NO: 254
uuuauucucgaugaacugu

SEQ ID NO: 23035 - RNA, 19 nt, Artificial Sequence
  Description of Artificial Sequence: Synthetic oligonucleotide
  Antisense strand to SEQ ID NO: 23034
acaguucaucgagaauaaa

SEQ ID NO: 23036 - RNA, 19 nt, Artificial Sequence
  Description of Artificial Sequence: Synthetic oligonucleotide
  Sense strand starting at position 2451 of SEQ ID NO: 254
gcguucugaaauuauagau

SEQ ID NO: 23037 - RNA, 19 nt, Artificial Sequence
  Description of Artificial Sequence: Synthetic oligonucleotide
  Antisense strand to SEQ ID NO: 23036
aucuauaauuucagaacgc

SEQ ID NO: 23038 - RNA, 19 nt, Artificial Sequence
  Description of Artificial Sequence: Synthetic oligonucleotide
  Sense strand starting at position 2125 of SEQ ID NO: 254
uuggaagccacguauugau

SEQ ID NO: 23039 - RNA, 19 nt, Artificial Sequence
  Description of Artificial Sequence: Synthetic oligonucleotide
  Antisense strand to SEQ ID NO: 23038
aucaauacguggcuuccaa

SEQ ID NO: 23040 - RNA, 19 nt, Artificial Sequence
  Description of Artificial Sequence: Synthetic oligonucleotide
  Sense strand starting at position 1995 of SEQ ID NO: 254
aagccauaugacugaguuc

SEQ ID NO: 23041 - RNA, 19 nt, Artificial Sequence
  Description of Artificial Sequence: Synthetic oligonucleotide
  Antisense strand to SEQ ID NO: 23040
gaacucagucauauggcuu

SEQ ID NO: 23042 - RNA, 19 nt, Artificial Sequence
  Description of Artificial Sequence: Synthetic oligonucleotide
  Sense strand starting at position 1994 of SEQ ID NO: 254
gaagccauaugacugaguu

SEQ ID NO: 23043 - RNA, 19 nt, Artificial Sequence
  Description of Artificial Sequence: Synthetic oligonucleotide
  Antisense strand to SEQ ID NO: 23042
aacucagucauauggcuuc

SEQ ID NO: 23044 - RNA, 19 nt, Artificial Sequence
  Description of Artificial Sequence: Synthetic oligonucleotide
  Sense strand starting at position 1991 of SEQ ID NO: 254
ggugaagccauaugacuga

SEQ ID NO: 23045 - RNA, 19 nt, Artificial Sequence
  Description of Artificial Sequence: Synthetic oligonucleotide
  Antisense strand to SEQ ID NO: 23044
ucagucauauggcuucacc

SEQ ID NO: 23046 - RNA, 19 nt, Artificial Sequence
  Description of Artificial Sequence: Synthetic oligonucleotide
  Sense strand starting at position 1977 of SEQ ID NO: 254
uucucauaccuuuagguga

SEQ ID NO: 23047 - RNA, 19 nt, Artificial Sequence
  Description of Artificial Sequence: Synthetic oligonucleotide
  Antisense strand to SEQ ID NO: 23046
ucaccuaaagguaugagaa

SEQ ID NO: 23048 - RNA, 19 nt, Artificial Sequence
  Description of Artificial Sequence: Synthetic oligonucleotide
  Sense strand starting at position 1904 of SEQ ID NO: 254
uagauuucugguuguucgu

SEQ ID NO: 23049 - RNA, 19 nt, Artificial Sequence
  Description of Artificial Sequence: Synthetic oligonucleotide
  Antisense strand to SEQ ID NO: 23048
acgaacaaccagaaaucua

SEQ ID NO: 23050 - RNA, 19 nt, Artificial Sequence
  Description of Artificial Sequence: Synthetic oligonucleotide
  Sense strand starting at position 1767 of SEQ ID NO: 254
aacaguauccguuaaauug

SEQ ID NO: 23051 - RNA, 19 nt, Artificial Sequence
  Description of Artificial Sequence: Synthetic oligonucleotide
  Antisense strand to SEQ ID NO: 23050
caauuuaacggauacuguu

SEQ ID NO: 23052 - RNA, 19 nt, Artificial Sequence
  Description of Artificial Sequence: Synthetic oligonucleotide
  Sense strand starting at position 1763 of SEQ ID NO: 254
uaugaacaguauccguuaa

SEQ ID NO: 23053 - RNA, 19 nt, Artificial Sequence
  Description of Artificial Sequence: Synthetic oligonucleotide
  Antisense strand to SEQ ID NO: 23052
uuaacggauacuguucaua

SEQ ID NO: 23054 - RNA, 19 nt, Artificial Sequence
  Description of Artificial Sequence: Synthetic oligonucleotide
  Sense strand starting at position 1520 of SEQ ID NO: 254
uuaugauucuugguaaaga

SEQ ID NO: 23055 - RNA, 19 nt, Artificial Sequence
  Description of Artificial Sequence: Synthetic oligonucleotide
  Antisense strand to SEQ ID NO: 23054
ucuuuaccaagaaucauaa

SEQ ID NO: 23056 - RNA, 19 nt, Artificial Sequence
  Description of Artificial Sequence: Synthetic oligonucleotide
  Sense strand starting at position 1417 of SEQ ID NO: 254
augagcuuagcauacaaau

SEQ ID NO: 23057 - RNA, 19 nt, Artificial Sequence
  Description of Artificial Sequence: Synthetic oligonucleotide
  Antisense strand to SEQ ID NO: 23056
auuuguaugcuaagcucau

SEQ ID NO: 23058 - RNA, 19 nt, Artificial Sequence
  Description of Artificial Sequence: Synthetic oligonucleotide
  Sense strand starting at position 1299 of SEQ ID NO: 254
aggacuagauaauaaugaa

SEQ ID NO: 23059 - RNA, 19 nt, Artificial Sequence
  Description of Artificial Sequence: Synthetic oligonucleotide
  Antisense strand to SEQ ID NO: 23058
uucauuauuaucuaguccu

SEQ ID NO: 23060 - RNA, 19 nt, Artificial Sequence
  Description of Artificial Sequence: Synthetic oligonucleotide
  Sense strand starting at position 1154 of SEQ ID NO: 254
guucucugacaauaaugca

SEQ ID NO: 23061 - RNA, 19 nt, Artificial Sequence
  Description of Artificial Sequence: Synthetic oligonucleotide
  Antisense strand to SEQ ID NO: 23060
ugcauuauugucagagaac

SEQ ID NO: 23062 - RNA, 19 nt, Artificial Sequence
  Description of Artificial Sequence: Synthetic oligonucleotide
  Sense strand starting at position 532 of SEQ ID NO: 254
agauuaaccagucgugaug

SEQ ID NO: 23063 - RNA, 19 nt, Artificial Sequence
  Description of Artificial Sequence: Synthetic oligonucleotide
  Antisense strand to SEQ ID NO: 23062
caucacgacugguuaaucu

SEQ ID NO: 23064 - RNA, 19 nt, Artificial Sequence
  Description of Artificial Sequence: Synthetic oligonucleotide
  Sense strand starting at position 301 of SEQ ID NO: 254
ggaucuuaauguucucacu

SEQ ID NO: 23065 - RNA, 19 nt, Artificial Sequence
  Description of Artificial Sequence: Synthetic oligonucleotide
  Antisense strand to SEQ ID NO: 23064
agugagaacauuaagaucc

SEQ ID NO: 23066 - RNA, 19 nt, Artificial Sequence
  Description of Artificial Sequence: Synthetic oligonucleotide
  Sense strand starting at position 289 of SEQ ID NO: 254
auuauauuggauggaucuu

SEQ ID NO: 23067 - RNA, 19 nt, Artificial Sequence
  Description of Artificial Sequence: Synthetic oligonucleotide
  Antisense strand to SEQ ID NO: 23066
aagauccauccaauauaau

SEQ ID NO: 23068 - RNA, 19 nt, Artificial Sequence
  Description of Artificial Sequence: Synthetic oligonucleotide
  Sense strand starting at position 288 of SEQ ID NO: 254
uauuauauuggauggaucu

SEQ ID NO: 23069 - RNA, 19 nt, Artificial Sequence
  Description of Artificial Sequence: Synthetic oligonucleotide
  Antisense strand to SEQ ID NO: 23068
agauccauccaauauaaua

SEQ ID NO: 23070 - RNA, 19 nt, Artificial Sequence
  Description of Artificial Sequence: Synthetic oligonucleotide
  Sense strand starting at position 256 of SEQ ID NO: 254
cuaacuggaucugugaacu

SEQ ID NO: 23071 - RNA, 19 nt, Artificial Sequence
  Description of Artificial Sequence: Synthetic oligonucleotide
  Antisense strand to SEQ ID NO: 23070
aguucacagauccaguuag

SEQ ID NO: 23072 - RNA, 19 nt, Artificial Sequence
  Description of Artificial Sequence: Synthetic oligonucleotide
  Sense strand starting at position 195 of SEQ ID NO: 254
guauguaaaguggaccaua

SEQ ID NO: 23073 - RNA, 19 nt, Artificial Sequence
  Description of Artificial Sequence: Synthetic oligonucleotide
  Antisense strand to SEQ ID NO: 23072
uaugguccacuuuacauac

SEQ ID NO: 23074 - RNA, 19 nt, Artificial Sequence
  Description of Artificial Sequence: Synthetic oligonucleotide
  Sense strand starting at position 166 of SEQ ID NO: 254
gaaauauaugcagggcuga

SEQ ID NO: 23075 - RNA, 19 nt, Artificial Sequence
  Description of Artificial Sequence: Synthetic oligonucleotide
  Antisense strand to SEQ ID NO: 23074
ucagcccugcauauauuuc

SEQ ID NO: 23076 - RNA, 19 nt, Artificial Sequence
  Description of Artificial Sequence: Synthetic oligonucleotide
  Sense strand starting at position 68 of SEQ ID NO: 254
agcaaauacgugugaaaca

SEQ ID NO: 23077 - RNA, 19 nt, Artificial Sequence
  Description of Artificial Sequence: Synthetic oligonucleotide
  Antisense strand to SEQ ID NO: 23076
uguuucacacguauuugcu

SEQ ID NO: 23078 - RNA, 19 nt, Artificial Sequence
  Description of Artificial Sequence: Synthetic oligonucleotide
  Sense strand starting at position 55 of SEQ ID NO: 254
auaucuguugaacagcaaa

SEQ ID NO: 23079 - RNA, 19 nt, Artificial Sequence
  Description of Artificial Sequence: Synthetic oligonucleotide
  Antisense strand to SEQ ID NO: 23078
uuugcuguucaacagauau

SEQ ID NO: 23080 - RNA, 19 nt, Artificial Sequence
  Description of Artificial Sequence: Synthetic oligonucleotide
  Sense strand starting at position 33 of SEQ ID NO: 254
agugguuuaguccaaucaa

SEQ ID NO: 23081 - RNA, 19 nt, Artificial Sequence
  Description of Artificial Sequence: Synthetic oligonucleotide
  Antisense strand to SEQ ID NO: 23080
uugauuggacuaaaccacu

SEQ ID NO: 23082 - RNA, 19 nt, Artificial Sequence
  Description of Artificial Sequence: Synthetic oligonucleotide
  Sense strand starting at position 30 of SEQ ID NO: 254
auaagugguuuaguccaau

SEQ ID NO: 23083 - RNA, 19 nt, Artificial Sequence
  Description of Artificial Sequence: Synthetic oligonucleotide
  Antisense strand to SEQ ID NO: 23082
auuggacuaaaccacuuau

SEQ ID NO: 23084 - RNA, 19 nt, Artificial Sequence
  Description of Artificial Sequence: Synthetic oligonucleotide
  Sense strand starting at position 15 of SEQ ID NO: 254
agguuuaugcuguauauaa

SEQ ID NO: 23085 - RNA, 19 nt, Artificial Sequence
  Description of Artificial Sequence: Synthetic oligonucleotide
  Antisense strand to SEQ ID NO: 23084
uuauauacagcauaaaccu

SEQ ID NO: 23086 - RNA, 19 nt, Artificial Sequence
  Description of Artificial Sequence: Synthetic oligonucleotide
  Sense strand starting at position 3535 of SEQ ID NO: 255
aggacacgugccugugaaa

SEQ ID NO: 23087 - RNA, 19 nt, Artificial Sequence
  Description of Artificial Sequence: Synthetic oligonucleotide
  Antisense strand to SEQ ID NO: 23086
uuucacaggcacguguccu

SEQ ID NO: 23088 - RNA, 19 nt, Artificial Sequence
  Description of Artificial Sequence: Synthetic oligonucleotide
  Sense strand starting at position 3499 of SEQ ID NO: 255
ugauguugaacuggguaau

SEQ ID NO: 23089 - RNA, 19 nt, Artificial Sequence
  Description of Artificial Sequence: Synthetic oligonucleotide
  Antisense strand to SEQ ID NO: 23088
auuacccaguucaacauca

SEQ ID NO: 23090 - RNA, 19 nt, Artificial Sequence
  Description of Artificial Sequence: Synthetic oligonucleotide
  Sense strand starting at position 3487 of SEQ ID NO: 255
cgguaaaguaggugauguu

SEQ ID NO: 23091 - RNA, 19 nt, Artificial Sequence
  Description of Artificial Sequence: Synthetic oligonucleotide
  Antisense strand to SEQ ID NO: 23090
aacaucaccuacuuuaccg

SEQ ID NO: 23092 - RNA, 19 nt, Artificial Sequence
  Description of Artificial Sequence: Synthetic oligonucleotide
  Sense strand starting at position 3478 of SEQ ID NO: 255
aaaguacuccgguaaagua

SEQ ID NO: 23093 - RNA, 19 nt, Artificial Sequence
  Description of Artificial Sequence: Synthetic oligonucleotide
  Antisense strand to SEQ ID NO: 23092
uacuuuaccggaguacuuu

SEQ ID NO: 23094 - RNA, 19 nt, Artificial Sequence
  Description of Artificial Sequence: Synthetic oligonucleotide
  Sense strand starting at position 3475 of SEQ ID NO: 255
cccaaaguacuccgguaaa

SEQ ID NO: 23095 - RNA, 19 nt, Artificial Sequence
  Description of Artificial Sequence: Synthetic oligonucleotide
  Antisense strand to SEQ ID NO: 23094
uuuaccggaguacuuuggg

SEQ ID NO: 23096 - RNA, 19 nt, Artificial Sequence
  Description of Artificial Sequence: Synthetic oligonucleotide
  Sense strand starting at position 3443 of SEQ ID NO: 255
uagccuucgaagcggaaau

SEQ ID NO: 23097 - RNA, 19 nt, Artificial Sequence
  Description of Artificial Sequence: Synthetic oligonucleotide
  Antisense strand to SEQ ID NO: 23096
auuuccgcuucgaaggcua

SEQ ID NO: 23098 - RNA, 19 nt, Artificial Sequence
  Description of Artificial Sequence: Synthetic oligonucleotide
  Sense strand starting at position 3421 of SEQ ID NO: 255
cucuuagcugaugacaaau

SEQ ID NO: 23099 - RNA, 19 nt, Artificial Sequence
  Description of Artificial Sequence: Synthetic oligonucleotide
  Antisense strand to SEQ ID NO: 23098
auuugucaucagcuaagag

SEQ ID NO: 23100 - RNA, 19 nt, Artificial Sequence
  Description of Artificial Sequence: Synthetic oligonucleotide
  Sense strand starting at position 3369 of SEQ ID NO: 255
ucaacugaccucugccaga

SEQ ID NO: 23101 - RNA, 19 nt, Artificial Sequence
  Description of Artificial Sequence: Synthetic oligonucleotide
  Antisense strand to SEQ ID NO: 23100
ucuggcagaggucaguuga

SEQ ID NO: 23102 - RNA, 19 nt, Artificial Sequence
  Description of Artificial Sequence: Synthetic oligonucleotide
  Sense strand starting at position 3273 of SEQ ID NO: 255
uagaaagugccucaugcaa

SEQ ID NO: 23103 - RNA, 19 nt, Artificial Sequence
  Description of Artificial Sequence: Synthetic oligonucleotide
  Antisense strand to SEQ ID NO: 23102
uugcaugaggcacuuucua

SEQ ID NO: 23104 - RNA, 19 nt, Artificial Sequence
  Description of Artificial Sequence: Synthetic oligonucleotide
  Sense strand starting at position 3181 of SEQ ID NO: 255
acuugauuauugucagccu

SEQ ID NO: 23105 - RNA, 19 nt, Artificial Sequence
  Description of Artificial Sequence: Synthetic oligonucleotide
  Antisense strand to SEQ ID NO: 23104
aggcugacaauaaucaagu

SEQ ID NO: 23106 - RNA, 19 nt, Artificial Sequence
  Description of Artificial Sequence: Synthetic oligonucleotide
  Sense strand starting at position 3153 of SEQ ID NO: 255
ugaagucaccuugaucauu

SEQ ID NO: 23107 - RNA, 19 nt, Artificial Sequence
  Description of Artificial Sequence: Synthetic oligonucleotide
  Antisense strand to SEQ ID NO: 23106
aaugaucaaggugacuuca

SEQ ID NO: 23108 - RNA, 19 nt, Artificial Sequence
  Description of Artificial Sequence: Synthetic oligonucleotide
  Sense strand starting at position 3140 of SEQ ID NO: 255
aucuauuaguaucugaagu

SEQ ID NO: 23109 - RNA, 19 nt, Artificial Sequence
  Description of Artificial Sequence: Synthetic oligonucleotide
  Antisense strand to SEQ ID NO: 23108
acuucagauacuaauagau

SEQ ID NO: 23110 - RNA, 19 nt, Artificial Sequence
  Description of Artificial Sequence: Synthetic oligonucleotide
  Sense strand starting at position 3137 of SEQ ID NO: 255
cucaucuauuaguaucuga

SEQ ID NO: 23111 - RNA, 19 nt, Artificial Sequence
  Description of Artificial Sequence: Synthetic oligonucleotide
  Antisense strand to SEQ ID NO: 23110
ucagauacuaauagaugag

SEQ ID NO: 23112 - RNA, 19 nt, Artificial Sequence
  Description of Artificial Sequence: Synthetic oligonucleotide
  Sense strand starting at position 2884 of SEQ ID NO: 255
cagaguuucucagagguau

SEQ ID NO: 23113 - RNA, 19 nt, Artificial Sequence
  Description of Artificial Sequence: Synthetic oligonucleotide
  Antisense strand to SEQ ID NO: 23112
auaccucugagaaacucug

SEQ ID NO: 23114 - RNA, 19 nt, Artificial Sequence
  Description of Artificial Sequence: Synthetic oligonucleotide
  Sense strand starting at position 2843 of SEQ ID NO: 255
uauugagauucccgagaga

SEQ ID NO: 23115 - RNA, 19 nt, Artificial Sequence
  Description of Artificial Sequence: Synthetic oligonucleotide
  Antisense strand to SEQ ID NO: 23114
ucucucgggaaucucaaua

SEQ ID NO: 23116 - RNA, 19 nt, Artificial Sequence
  Description of Artificial Sequence: Synthetic oligonucleotide
  Sense strand starting at position 2825 of SEQ ID NO: 255
ggagguucuuguuccaagu

SEQ ID NO: 23117 - RNA, 19 nt, Artificial Sequence
  Description of Artificial Sequence: Synthetic oligonucleotide
  Antisense strand to SEQ ID NO: 23116
acuuggaacaagaaccucc

SEQ ID NO: 23118 - RNA, 19 nt, Artificial Sequence
  Description of Artificial Sequence: Synthetic oligonucleotide
  Sense strand starting at position 2769 of SEQ ID NO: 255
ucucuaguccuggaaccua

SEQ ID NO: 23119 - RNA, 19 nt, Artificial Sequence
  Description of Artificial Sequence: Synthetic oligonucleotide
  Antisense strand to SEQ ID NO: 23118
uagguuccaggacuagaga

SEQ ID NO: 23120 - RNA, 19 nt, Artificial Sequence
  Description of Artificial Sequence: Synthetic oligonucleotide
  Sense strand starting at position 2738 of SEQ ID NO: 255
gggugagauuguucaugga

SEQ ID NO: 23121 - RNA, 19 nt, Artificial Sequence
  Description of Artificial Sequence: Synthetic oligonucleotide
  Antisense strand to SEQ ID NO: 23120
uccaugaacaaucucaccc

SEQ ID NO: 23122 - RNA, 19 nt, Artificial Sequence
  Description of Artificial Sequence: Synthetic oligonucleotide
  Sense strand starting at position 2729 of SEQ ID NO: 255
agaguaauugggugagauu

SEQ ID NO: 23123 - RNA, 19 nt, Artificial Sequence
  Description of Artificial Sequence: Synthetic oligonucleotide
  Antisense strand to SEQ ID NO: 23122
aaucucacccaauuacucu

SEQ ID NO: 23124 - RNA, 19 nt, Artificial Sequence
  Description of Artificial Sequence: Synthetic oligonucleotide
  Sense strand starting at position 2728 of SEQ ID NO: 255
cagaguaauugggugagau

SEQ ID NO: 23125 - RNA, 19 nt, Artificial Sequence
  Description of Artificial Sequence: Synthetic oligonucleotide
  Antisense strand to SEQ ID NO: 23124
aucucacccaauuacucug

SEQ ID NO: 23126 - RNA, 19 nt, Artificial Sequence
  Description of Artificial Sequence: Synthetic oligonucleotide
  Sense strand starting at position 2718 of SEQ ID NO: 255
cuuaccugagcagaguaau

SEQ ID NO: 23127 - RNA, 19 nt, Artificial Sequence
  Description of Artificial Sequence: Synthetic oligonucleotide
  Antisense strand to SEQ ID NO: 23126
auuacucugcucagguaag

SEQ ID NO: 23128 - RNA, 19 nt, Artificial Sequence
  Description of Artificial Sequence: Synthetic oligonucleotide
  Sense strand starting at position 2716 of SEQ ID NO: 255
gucuuaccugagcagagua

SEQ ID NO: 23129 - RNA, 19 nt, Artificial Sequence
  Description of Artificial Sequence: Synthetic oligonucleotide
  Antisense strand to SEQ ID NO: 23128
uacucugcucagguaagac

SEQ ID NO: 23130 - RNA, 19 nt, Artificial Sequence
  Description of Artificial Sequence: Synthetic oligonucleotide
  Sense strand starting at position 2715 of SEQ ID NO: 255
ggucuuaccugagcagagu

SEQ ID NO: 23131 - RNA, 19 nt, Artificial Sequence
  Description of Artificial Sequence: Synthetic oligonucleotide
  Antisense strand to SEQ ID NO: 23130
acucugcucagguaagacc

SEQ ID NO: 23132 - RNA, 19 nt, Artificial Sequence
  Description of Artificial Sequence: Synthetic oligonucleotide
  Sense strand starting at position 2713 of SEQ ID NO: 255
uuggucuuaccugagcaga

SEQ ID NO: 23133 - RNA, 19 nt, Artificial Sequence
  Description of Artificial Sequence: Synthetic oligonucleotide
  Antisense strand to SEQ ID NO: 23132
ucugcucagguaagaccaa

SEQ ID NO: 23134 - RNA, 19 nt, Artificial Sequence
  Description of Artificial Sequence: Synthetic oligonucleotide
  Sense strand starting at position 2688 of SEQ ID NO: 255
ccauuuguauuguucuagu

SEQ ID NO: 23135 - RNA, 19 nt, Artificial Sequence
  Description of Artificial Sequence: Synthetic oligonucleotide
  Antisense strand to SEQ ID NO: 23134
acuagaacaauacaaaugg

SEQ ID NO: 23136 - RNA, 19 nt, Artificial Sequence
  Description of Artificial Sequence: Synthetic oligonucleotide
  Sense strand starting at position 2565 of SEQ ID NO: 255
ucacuuaagcuagggaagu

SEQ ID NO: 23137 - RNA, 19 nt, Artificial Sequence
  Description of Artificial Sequence: Synthetic oligonucleotide
  Antisense strand to SEQ ID NO: 23136
acuucccuagcuuaaguga

SEQ ID NO: 23138 - RNA, 19 nt, Artificial Sequence
  Description of Artificial Sequence: Synthetic oligonucleotide
  Sense strand starting at position 2322 of SEQ ID NO: 255
agaacucagugaucagacu

SEQ ID NO: 23139 - RNA, 19 nt, Artificial Sequence
  Description of Artificial Sequence: Synthetic oligonucleotide
  Antisense strand to SEQ ID NO: 23138
agucugaucacugaguucu

SEQ ID NO: 23140 - RNA, 19 nt, Artificial Sequence
  Description of Artificial Sequence: Synthetic oligonucleotide
  Sense strand starting at position 2319 of SEQ ID NO: 255
uuaagaacucagugaucag

SEQ ID NO: 23141 - RNA, 19 nt, Artificial Sequence
  Description of Artificial Sequence: Synthetic oligonucleotide
  Antisense strand to SEQ ID NO: 23140
cugaucacugaguucuuaa

SEQ ID NO: 23142 - RNA, 19 nt, Artificial Sequence
  Description of Artificial Sequence: Synthetic oligonucleotide
  Sense strand starting at position 2311 of SEQ ID NO: 255
ggaguuguuuaagaacuca

SEQ ID NO: 23143 - RNA, 19 nt, Artificial Sequence
  Description of Artificial Sequence: Synthetic oligonucleotide
  Antisense strand to SEQ ID NO: 23142
ugaguucuuaaacaacucc

SEQ ID NO: 23144 - RNA, 19 nt, Artificial Sequence
  Description of Artificial Sequence: Synthetic oligonucleotide
  Sense strand starting at position 2267 of SEQ ID NO: 255
gagccucaucugugaaaca

SEQ ID NO: 23145 - RNA, 19 nt, Artificial Sequence
  Description of Artificial Sequence: Synthetic oligonucleotide
  Antisense strand to SEQ ID NO: 23144
uguuucacagaugaggcuc

SEQ ID NO: 23146 - RNA, 19 nt, Artificial Sequence
  Description of Artificial Sequence: Synthetic oligonucleotide
  Sense strand starting at position 2263 of SEQ ID NO: 255
uucugagccucaucuguga

SEQ ID NO: 23147 - RNA, 19 nt, Artificial Sequence
  Description of Artificial Sequence: Synthetic oligonucleotide
  Antisense strand to SEQ ID NO: 23146
ucacagaugaggcucagaa

SEQ ID NO: 23148 - RNA, 19 nt, Artificial Sequence
  Description of Artificial Sequence: Synthetic oligonucleotide
  Sense strand starting at position 2235 of SEQ ID NO: 255
cugugaucuuaggacaaac

SEQ ID NO: 23149 - RNA, 19 nt, Artificial Sequence
  Description of Artificial Sequence: Synthetic oligonucleotide
  Antisense strand to SEQ ID NO: 23148
guuuguccuaagaucacag

SEQ ID NO: 23150 - RNA, 19 nt, Artificial Sequence
  Description of Artificial Sequence: Synthetic oligonucleotide
  Sense strand starting at position 1149 of SEQ ID NO: 255
ugggcuuauuuguaccuga

SEQ ID NO: 23151 - RNA, 19 nt, Artificial Sequence
  Description of Artificial Sequence: Synthetic oligonucleotide
  Antisense strand to SEQ ID NO: 23150
ucagguacaaauaagccca

SEQ ID NO: 23152 - RNA, 19 nt, Artificial Sequence
  Description of Artificial Sequence: Synthetic oligonucleotide
  Sense strand starting at position 964 of SEQ ID NO: 255
ggguuaccuugugucauac

SEQ ID NO: 23153 - RNA, 19 nt, Artificial Sequence
  Description of Artificial Sequence: Synthetic oligonucleotide
  Antisense strand to SEQ ID NO: 23152
guaugacacaagguaaccc

SEQ ID NO: 23154 - RNA, 19 nt, Artificial Sequence
  Description of Artificial Sequence: Synthetic oligonucleotide
  Sense strand starting at position 923 of SEQ ID NO: 255
acuuucuauguauggaaac

SEQ ID NO: 23155 - RNA, 19 nt, Artificial Sequence
  Description of Artificial Sequence: Synthetic oligonucleotide
  Antisense strand to SEQ ID NO: 23154
guuuccauacauagaaagu

SEQ ID NO: 23156 - RNA, 19 nt, Artificial Sequence
  Description of Artificial Sequence: Synthetic oligonucleotide
  Sense strand starting at position 920 of SEQ ID NO: 255
guaacuuucuauguaugga

SEQ ID NO: 23157 - RNA, 19 nt, Artificial Sequence
  Description of Artificial Sequence: Synthetic oligonucleotide
  Antisense strand to SEQ ID NO: 23156
uccauacauagaaaguuac

SEQ ID NO: 23158 - RNA, 19 nt, Artificial Sequence
  Description of Artificial Sequence: Synthetic oligonucleotide
  Sense strand starting at position 916 of SEQ ID NO: 255
agcuguaacuuucuaugua

SEQ ID NO: 23159 - RNA, 19 nt, Artificial Sequence
  Description of Artificial Sequence: Synthetic oligonucleotide
  Antisense strand to SEQ ID NO: 23158
uacauagaaaguuacagcu

SEQ ID NO: 23160 - RNA, 19 nt, Artificial Sequence
  Description of Artificial Sequence: Synthetic oligonucleotide
  Sense strand starting at position 775 of SEQ ID NO: 255
uuaagaccuuguuuagucu

SEQ ID NO: 23161 - RNA, 19 nt, Artificial Sequence
  Description of Artificial Sequence: Synthetic oligonucleotide
  Antisense strand to SEQ ID NO: 23160
agacuaaacaaggucuuaa

SEQ ID NO: 23162 - RNA, 19 nt, Artificial Sequence
  Description of Artificial Sequence: Synthetic oligonucleotide
  Sense strand starting at position 772 of SEQ ID NO: 255
cuauuaagaccuuguuuag

SEQ ID NO: 23163 - RNA, 19 nt, Artificial Sequence
  Description of Artificial Sequence: Synthetic oligonucleotide
  Antisense strand to SEQ ID NO: 23162
cuaaacaaggucuuaauag

SEQ ID NO: 23164 - RNA, 19 nt, Artificial Sequence
  Description of Artificial Sequence: Synthetic oligonucleotide
  Sense strand starting at position 638 of SEQ ID NO: 255
ucuuuaugccuuuggacua

SEQ ID NO: 23165 - RNA, 19 nt, Artificial Sequence
  Description of Artificial Sequence: Synthetic oligonucleotide
  Antisense strand to SEQ ID NO: 23164
uaguccaaaggcauaaaga

SEQ ID NO: 23166 - RNA, 19 nt, Artificial Sequence
  Description of Artificial Sequence: Synthetic oligonucleotide
  Sense strand starting at position 55 of SEQ ID NO: 256
aggcaucagugcuuauuua

SEQ ID NO: 23167 - RNA, 19 nt, Artificial Sequence
  Description of Artificial Sequence: Synthetic oligonucleotide
  Antisense strand to SEQ ID NO: 23166
uaaauaagcacugaugccu

SEQ ID NO: 23168 - RNA, 19 nt, Artificial Sequence
  Description of Artificial Sequence: Synthetic oligonucleotide
  Sense strand starting at position 939 of SEQ ID NO: 256
ggcaacaaauacuugaauu

SEQ ID NO: 23169 - RNA, 19 nt, Artificial Sequence
  Description of Artificial Sequence: Synthetic oligonucleotide
  Antisense strand to SEQ ID NO: 23168
aauucaaguauuuguugcc

SEQ ID NO: 23170 - RNA, 19 nt, Artificial Sequence
  Description of Artificial Sequence: Synthetic oligonucleotide
  Sense strand starting at position 1057 of SEQ ID NO: 256
cuaagaggcugaucucauu

SEQ ID NO: 23171 - RNA, 19 nt, Artificial Sequence
  Description of Artificial Sequence: Synthetic oligonucleotide
  Antisense strand to SEQ ID NO: 23170
aaugagaucagccucuuag

SEQ ID NO: 23172 - RNA, 19 nt, Artificial Sequence
  Description of Artificial Sequence: Synthetic oligonucleotide
  Sense strand starting at position 1282 of SEQ ID NO: 256
aaagguaguucuguugauc

SEQ ID NO: 23173 - RNA, 19 nt, Artificial Sequence
  Description of Artificial Sequence: Synthetic oligonucleotide
  Antisense strand to SEQ ID NO: 23172
gaucaacagaacuaccuuu

SEQ ID NO: 23174 - RNA, 19 nt, Artificial Sequence
  Description of Artificial Sequence: Synthetic oligonucleotide
  Sense strand starting at position 1750 of SEQ ID NO: 256
auaccuacuguguacuaga

SEQ ID NO: 23175 - RNA, 19 nt, Artificial Sequence
  Description of Artificial Sequence: Synthetic oligonucleotide
  Antisense strand to SEQ ID NO: 23174
ucuaguacacaguagguau

SEQ ID NO: 23176 - RNA, 19 nt, Artificial Sequence
  Description of Artificial Sequence: Synthetic oligonucleotide
  Sense strand starting at position 2008 of SEQ ID NO: 256
agguuucaguagucauagu

SEQ ID NO: 23177 - RNA, 19 nt, Artificial Sequence
  Description of Artificial Sequence: Synthetic oligonucleotide
  Antisense strand to SEQ ID NO: 23176
acuaugacuacugaaaccu

SEQ ID NO: 23178 - RNA, 19 nt, Artificial Sequence
  Description of Artificial Sequence: Synthetic oligonucleotide
  Sense strand starting at position 2099 of SEQ ID NO: 256
uugagagaauccuuguucu

SEQ ID NO: 23179 - RNA, 19 nt, Artificial Sequence
  Description of Artificial Sequence: Synthetic oligonucleotide
  Antisense strand to SEQ ID NO: 23178
agaacaaggauucucucaa

SEQ ID NO: 23180 - RNA, 19 nt, Artificial Sequence
  Description of Artificial Sequence: Synthetic oligonucleotide
  Sense strand starting at position 2102 of SEQ ID NO: 256
agagaauccuuguucugca

SEQ ID NO: 23181 - RNA, 19 nt, Artificial Sequence
  Description of Artificial Sequence: Synthetic oligonucleotide
  Antisense strand to SEQ ID NO: 23180
ugcagaacaaggauucucu

SEQ ID NO: 23182 - RNA, 19 nt, Artificial Sequence
  Description of Artificial Sequence: Synthetic oligonucleotide
  Sense strand starting at position 2193 of SEQ ID NO: 256
ucccaaggaguauguguau

SEQ ID NO: 23183 - RNA, 19 nt, Artificial Sequence
  Description of Artificial Sequence: Synthetic oligonucleotide
  Antisense strand to SEQ ID NO: 23182
auacacauacuccuuggga

SEQ ID NO: 23184 - RNA, 19 nt, Artificial Sequence
  Description of Artificial Sequence: Synthetic oligonucleotide
  Sense strand starting at position 2269 of SEQ ID NO: 256
ugcccuauacccuguuaga

SEQ ID NO: 23185 - RNA, 19 nt, Artificial Sequence
  Description of Artificial Sequence: Synthetic oligonucleotide
  Antisense strand to SEQ ID NO: 23184
ucuaacaggguauagggca

SEQ ID NO: 23186 - RNA, 19 nt, Artificial Sequence
  Description of Artificial Sequence: Synthetic oligonucleotide
  Sense strand starting at position 2280 of SEQ ID NO: 256
cuguuagaaaugugcagau

SEQ ID NO: 23187 - RNA, 19 nt, Artificial Sequence
  Description of Artificial Sequence: Synthetic oligonucleotide
  Antisense strand to SEQ ID NO: 23186
aucugcacauuucuaacag

SEQ ID NO: 23188 - RNA, 19 nt, Artificial Sequence
  Description of Artificial Sequence: Synthetic oligonucleotide
  Sense strand starting at position 2282 of SEQ ID NO: 256
guuagaaaugugcagauaa

SEQ ID NO: 23189 - RNA, 19 nt, Artificial Sequence
  Description of Artificial Sequence: Synthetic oligonucleotide
  Antisense strand to SEQ ID NO: 23188
uuaucugcacauuucuaac

SEQ ID NO: 23190 - RNA, 19 nt, Artificial Sequence
  Description of Artificial Sequence: Synthetic oligonucleotide
  Sense strand starting at position 2423 of SEQ ID NO: 256
gggaaaccauuccuuccua

SEQ ID NO: 23191 - RNA, 19 nt, Artificial Sequence
  Description of Artificial Sequence: Synthetic oligonucleotide
  Antisense strand to SEQ ID NO: 23190
uaggaaggaaugguuuccc

SEQ ID NO: 23192 - RNA, 19 nt, Artificial Sequence
  Description of Artificial Sequence: Synthetic oligonucleotide
  Sense strand starting at position 2444 of SEQ ID NO: 256
gucacauagccuggcagau

SEQ ID NO: 23193 - RNA, 19 nt, Artificial Sequence
  Description of Artificial Sequence: Synthetic oligonucleotide
  Antisense strand to SEQ ID NO: 23192
aucugccaggcuaugugac

SEQ ID NO: 23194 - RNA, 19 nt, Artificial Sequence
  Description of Artificial Sequence: Synthetic oligonucleotide
  Sense strand starting at position 2448 of SEQ ID NO: 256
cauagccuggcagauuaua

SEQ ID NO: 23195 - RNA, 19 nt, Artificial Sequence
  Description of Artificial Sequence: Synthetic oligonucleotide
  Antisense strand to SEQ ID NO: 23194
uauaaucugccaggcuaug

SEQ ID NO: 23196 - RNA, 19 nt, Artificial Sequence
  Description of Artificial Sequence: Synthetic oligonucleotide
  Sense strand starting at position 2499 of SEQ ID NO: 256
uauuaaugagaguguggaa

SEQ ID NO: 23197 - RNA, 19 nt, Artificial Sequence
  Description of Artificial Sequence: Synthetic oligonucleotide
  Antisense strand to SEQ ID NO: 23196
uuccacacucucauuaaua

SEQ ID NO: 23198 - RNA, 19 nt, Artificial Sequence
  Description of Artificial Sequence: Synthetic oligonucleotide
  Sense strand starting at position 2520 of SEQ ID NO: 256
aaaguagauccuugcaugu

SEQ ID NO: 23199 - RNA, 19 nt, Artificial Sequence
  Description of Artificial Sequence: Synthetic oligonucleotide
  Antisense strand to SEQ ID NO: 23198
acaugcaaggaucuacuuu

SEQ ID NO: 23200 - RNA, 19 nt, Artificial Sequence
  Description of Artificial Sequence: Synthetic oligonucleotide
  Sense strand starting at position 2767 of SEQ ID NO: 256
gaaggugaacuauggcuga

SEQ ID NO: 23201 - RNA, 19 nt, Artificial Sequence
  Description of Artificial Sequence: Synthetic oligonucleotide
  Antisense strand to SEQ ID NO: 23200
ucagccauaguucaccuuc

SEQ ID NO: 23202 - RNA, 19 nt, Artificial Sequence
  Description of Artificial Sequence: Synthetic oligonucleotide
  Sense strand starting at position 2770 of SEQ ID NO: 256
ggugaacuauggcugaaac

SEQ ID NO: 23203 - RNA, 19 nt, Artificial Sequence
  Description of Artificial Sequence: Synthetic oligonucleotide
  Antisense strand to SEQ ID NO: 23202
guuucagccauaguucacc

SEQ ID NO: 23204 - RNA, 19 nt, Artificial Sequence
  Description of Artificial Sequence: Synthetic oligonucleotide
  Sense strand starting at position 2781 of SEQ ID NO: 256
gcugaaaccaagugaagau

SEQ ID NO: 23205 - RNA, 19 nt, Artificial Sequence
  Description of Artificial Sequence: Synthetic oligonucleotide
  Antisense strand to SEQ ID NO: 23204
aucuucacuugguuucagc

SEQ ID NO: 23206 - RNA, 19 nt, Artificial Sequence
  Description of Artificial Sequence: Synthetic oligonucleotide
  Sense strand starting at position 2877 of SEQ ID NO: 256
agucuuagccaauguucua

SEQ ID NO: 23207 - RNA, 19 nt, Artificial Sequence
  Description of Artificial Sequence: Synthetic oligonucleotide
  Antisense strand to SEQ ID NO: 23206
uagaacauuggcuaagacu

SEQ ID NO: 23208 - RNA, 19 nt, Artificial Sequence
  Description of Artificial Sequence: Synthetic oligonucleotide
  Sense strand starting at position 2942 of SEQ ID NO: 256
cucuaagaacucuggauac

SEQ ID NO: 23209 - RNA, 19 nt, Artificial Sequence
  Description of Artificial Sequence: Synthetic oligonucleotide
  Antisense strand to SEQ ID NO: 23208
guauccagaguucuuagag

SEQ ID NO: 23210 - RNA, 19 nt, Artificial Sequence
  Description of Artificial Sequence: Synthetic oligonucleotide
  Sense strand starting at position 3026 of SEQ ID NO: 256
gcagccugucuugcacauu

SEQ ID NO: 23211 - RNA, 19 nt, Artificial Sequence
  Description of Artificial Sequence: Synthetic oligonucleotide
  Antisense strand to SEQ ID NO: 23210
aaugugcaagacaggcugc

SEQ ID NO: 23212 - RNA, 19 nt, Artificial Sequence
  Description of Artificial Sequence: Synthetic oligonucleotide
  Sense strand starting at position 3057 of SEQ ID NO: 256
cuuaaucuacggcaagagu

SEQ ID NO: 23213 - RNA, 19 nt, Artificial Sequence
  Description of Artificial Sequence: Synthetic oligonucleotide
  Antisense strand to SEQ ID NO: 23212
acucuugccguagauuaag

SEQ ID NO: 23214 - RNA, 19 nt, Artificial Sequence
  Description of Artificial Sequence: Synthetic oligonucleotide
  Sense strand starting at position 3087 of SEQ ID NO: 256
gucacagaguacucuccaa

SEQ ID NO: 23215 - RNA, 19 nt, Artificial Sequence
  Description of Artificial Sequence: Synthetic oligonucleotide
  Antisense strand to SEQ ID NO: 23214
uuggagaguacucugugac

SEQ ID NO: 23216 - RNA, 19 nt, Artificial Sequence
  Description of Artificial Sequence: Synthetic oligonucleotide
  Sense strand starting at position 3091 of SEQ ID NO: 256
cagaguacucuccaaugug

SEQ ID NO: 23217 - RNA, 19 nt, Artificial Sequence
  Description of Artificial Sequence: Synthetic oligonucleotide
  Antisense strand to SEQ ID NO: 23216
cacauuggagaguacucug

SEQ ID NO: 23218 - RNA, 19 nt, Artificial Sequence
  Description of Artificial Sequence: Synthetic oligonucleotide
  Sense strand starting at position 3094 of SEQ ID NO: 256
aguacucuccaauguguua

SEQ ID NO: 23219 - RNA, 19 nt, Artificial Sequence
  Description of Artificial Sequence: Synthetic oligonucleotide
  Antisense strand to SEQ ID NO: 23218
uaacacauuggagaguacu

SEQ ID NO: 23220 - RNA, 19 nt, Artificial Sequence
  Description of Artificial Sequence: Synthetic oligonucleotide
  Sense strand starting at position 3107 of SEQ ID NO: 256
guguuauaguuauccuuaa

SEQ ID NO: 23221 - RNA, 19 nt, Artificial Sequence
  Description of Artificial Sequence: Synthetic oligonucleotide
  Antisense strand to SEQ ID NO: 23220
uuaaggauaacuauaacac

SEQ ID NO: 23222 - RNA, 19 nt, Artificial Sequence
  Description of Artificial Sequence: Synthetic oligonucleotide
  Sense strand starting at position 3177 of SEQ ID NO: 256
ggagguaugucaccuggau

SEQ ID NO: 23223 - RNA, 19 nt, Artificial Sequence
  Description of Artificial Sequence: Synthetic oligonucleotide
  Antisense strand to SEQ ID NO: 23222
auccaggugacauaccucc

SEQ ID NO: 23224 - RNA, 19 nt, Artificial Sequence
  Description of Artificial Sequence: Synthetic oligonucleotide
  Sense strand starting at position 3181 of SEQ ID NO: 256
guaugucaccuggaugguu

SEQ ID NO: 23225 - RNA, 19 nt, Artificial Sequence
  Description of Artificial Sequence: Synthetic oligonucleotide
  Antisense strand to SEQ ID NO: 23224
aaccauccaggugacauac

SEQ ID NO: 23226 - RNA, 19 nt, Artificial Sequence
  Description of Artificial Sequence: Synthetic oligonucleotide
  Sense strand starting at position 3273 of SEQ ID NO: 256
gugcuuuaacccugaagaa

SEQ ID NO: 23227 - RNA, 19 nt, Artificial Sequence
  Description of Artificial Sequence: Synthetic oligonucleotide
  Antisense strand to SEQ ID NO: 23226
uucuucaggguuaaagcac

SEQ ID NO: 23228 - RNA, 19 nt, Artificial Sequence
  Description of Artificial Sequence: Synthetic oligonucleotide
  Sense strand starting at position 3274 of SEQ ID NO: 256
ugcuuuaacccugaagaac

SEQ ID NO: 23229 - RNA, 19 nt, Artificial Sequence
  Description of Artificial Sequence: Synthetic oligonucleotide
  Antisense strand to SEQ ID NO: 23228
guucuucaggguuaaagca

SEQ ID NO: 23230 - RNA, 19 nt, Artificial Sequence
  Description of Artificial Sequence: Synthetic oligonucleotide
  Sense strand starting at position 3339 of SEQ ID NO: 256
gggcuuaucccaggccaua

SEQ ID NO: 23231 - RNA, 19 nt, Artificial Sequence
  Description of Artificial Sequence: Synthetic oligonucleotide
  Antisense strand to SEQ ID NO: 23230
uauggccugggauaagccc

SEQ ID NO: 23232 - RNA, 19 nt, Artificial Sequence
  Description of Artificial Sequence: Synthetic oligonucleotide
  Sense strand starting at position 3353 of SEQ ID NO: 256
ccauaaaugcagcaauagu

SEQ ID NO: 23233 - RNA, 19 nt, Artificial Sequence
  Description of Artificial Sequence: Synthetic oligonucleotide
  Antisense strand to SEQ ID NO: 23232
acuauugcugcauuuaugg

SEQ ID NO: 23234 - RNA, 19 nt, Artificial Sequence
  Description of Artificial Sequence: Synthetic oligonucleotide
  Sense strand starting at position 3377 of SEQ ID NO: 256
auaguuauuuguguccuau

SEQ ID NO: 23235 - RNA, 19 nt, Artificial Sequence
  Description of Artificial Sequence: Synthetic oligonucleotide
  Antisense strand to SEQ ID NO: 23234
auaggacacaaauaacuau

SEQ ID NO: 23236 - RNA, 19 nt, Artificial Sequence
  Description of Artificial Sequence: Synthetic oligonucleotide
  Sense strand starting at position 3379 of SEQ ID NO: 256
aguuauuuguguccuaucu

SEQ ID NO: 23237 - RNA, 19 nt, Artificial Sequence
  Description of Artificial Sequence: Synthetic oligonucleotide
  Antisense strand to SEQ ID NO: 23236
agauaggacacaaauaacu

SEQ ID NO: 23238 - RNA, 19 nt, Artificial Sequence
  Description of Artificial Sequence: Synthetic oligonucleotide
  Sense strand starting at position 3388 of SEQ ID NO: 256
uguccuaucuguccuauuu

SEQ ID NO: 23239 - RNA, 19 nt, Artificial Sequence
  Description of Artificial Sequence: Synthetic oligonucleotide
  Antisense strand to SEQ ID NO: 23238
aaauaggacagauaggaca

SEQ ID NO: 23240 - RNA, 19 nt, Artificial Sequence
  Description of Artificial Sequence: Synthetic oligonucleotide
  Sense strand starting at position 3427 of SEQ ID NO: 256
cccaucuaguagcuuagaa

SEQ ID NO: 23241 - RNA, 19 nt, Artificial Sequence
  Description of Artificial Sequence: Synthetic oligonucleotide
  Antisense strand to SEQ ID NO: 23240
uucuaagcuacuagauggg

SEQ ID NO: 23242 - RNA, 19 nt, Artificial Sequence
  Description of Artificial Sequence: Synthetic oligonucleotide
  Sense strand starting at position 3759 of SEQ ID NO: 256
ugggcauggucacuuauac

SEQ ID NO: 23243 - RNA, 19 nt, Artificial Sequence
  Description of Artificial Sequence: Synthetic oligonucleotide
  Antisense strand to SEQ ID NO: 23242
guauaagugaccaugccca

SEQ ID NO: 23244 - RNA, 19 nt, Artificial Sequence
  Description of Artificial Sequence: Synthetic oligonucleotide
  Sense strand starting at position 3766 of SEQ ID NO: 256
ggucacuuauaccuguaau

SEQ ID NO: 23245 - RNA, 19 nt, Artificial Sequence
  Description of Artificial Sequence: Synthetic oligonucleotide
  Antisense strand to SEQ ID NO: 23244
auuacagguauaagugacc

SEQ ID NO: 23246 - RNA, 19 nt, Artificial Sequence
  Description of Artificial Sequence: Synthetic oligonucleotide
  Sense strand starting at position 54 of SEQ ID NO: 257
cuacuagaguuccuugaca

SEQ ID NO: 23247 - RNA, 19 nt, Artificial Sequence
  Description of Artificial Sequence: Synthetic oligonucleotide
  Antisense strand to SEQ ID NO: 23246
ugucaaggaacucuaguag

SEQ ID NO: 23248 - RNA, 19 nt, Artificial Sequence
  Description of Artificial Sequence: Synthetic oligonucleotide
  Sense strand starting at position 56 of SEQ ID NO: 257
acuagaguuccuugacagc

SEQ ID NO: 23249 - RNA, 19 nt, Artificial Sequence
  Description of Artificial Sequence: Synthetic oligonucleotide
  Antisense strand to SEQ ID NO: 23248
gcugucaaggaacucuagu

SEQ ID NO: 23250 - RNA, 19 nt, Artificial Sequence
  Description of Artificial Sequence: Synthetic oligonucleotide
  Sense strand starting at position 118 of SEQ ID NO: 257
gagugucuggcuuauagua

SEQ ID NO: 23251 - RNA, 19 nt, Artificial Sequence
  Description of Artificial Sequence: Synthetic oligonucleotide
  Antisense strand to SEQ ID NO: 23250
uacuauaagccagacacuc

SEQ ID NO: 23252 - RNA, 19 nt, Artificial Sequence
  Description of Artificial Sequence: Synthetic oligonucleotide
  Sense strand starting at position 268 of SEQ ID NO: 257
cgaaaucaguguccaccau

SEQ ID NO: 23253 - RNA, 19 nt, Artificial Sequence
  Description of Artificial Sequence: Synthetic oligonucleotide
  Antisense strand to SEQ ID NO: 23252
augguggacacugauuucg

SEQ ID NO: 23254 - RNA, 19 nt, Artificial Sequence
  Description of Artificial Sequence: Synthetic oligonucleotide
  Sense strand starting at position 316 of SEQ ID NO: 257
ugugguguuaaccagaaga

SEQ ID NO: 23255 - RNA, 19 nt, Artificial Sequence
  Description of Artificial Sequence: Synthetic oligonucleotide
  Antisense strand to SEQ ID NO: 23254
ucuucugguuaacaccaca

SEQ ID NO: 23256 - RNA, 19 nt, Artificial Sequence
  Description of Artificial Sequence: Synthetic oligonucleotide
  Sense strand starting at position 344 of SEQ ID NO: 257
ugugaacacagauguguaa

SEQ ID NO: 23257 - RNA, 19 nt, Artificial Sequence
  Description of Artificial Sequence: Synthetic oligonucleotide
  Antisense strand to SEQ ID NO: 23256
uuacacaucuguguucaca

SEQ ID NO: 23258 - RNA, 19 nt, Artificial Sequence
  Description of Artificial Sequence: Synthetic oligonucleotide
  Sense strand starting at position 346 of SEQ ID NO: 257
ugaacacagauguguaaag

SEQ ID NO: 23259 - RNA, 19 nt, Artificial Sequence
  Description of Artificial Sequence: Synthetic oligonucleotide
  Antisense strand to SEQ ID NO: 23258
cuuuacacaucuguguuca

SEQ ID NO: 23260 - RNA, 19 nt, Artificial Sequence
  Description of Artificial Sequence: Synthetic oligonucleotide
  Sense strand starting at position 348 of SEQ ID NO: 257
aacacagauguguaaagca

SEQ ID NO: 23261 - RNA, 19 nt, Artificial Sequence
  Description of Artificial Sequence: Synthetic oligonucleotide
  Antisense strand to SEQ ID NO: 23260
ugcuuuacacaucuguguu

SEQ ID NO: 23262 - RNA, 19 nt, Artificial Sequence
  Description of Artificial Sequence: Synthetic oligonucleotide
  Sense strand starting at position 385 of SEQ ID NO: 257
agaggauucucucccacuc

SEQ ID NO: 23263 - RNA, 19 nt, Artificial Sequence
  Description of Artificial Sequence: Synthetic oligonucleotide
  Antisense strand to SEQ ID NO: 23262
gagugggagagaauccucu

SEQ ID NO: 23264 - RNA, 19 nt, Artificial Sequence
  Description of Artificial Sequence: Synthetic oligonucleotide
  Sense strand starting at position 467 of SEQ ID NO: 257
ugggcacugccauaacuua

SEQ ID NO: 23265 - RNA, 19 nt, Artificial Sequence
  Description of Artificial Sequence: Synthetic oligonucleotide
  Antisense strand to SEQ ID NO: 23264
uaaguuauggcagugccca

SEQ ID NO: 23266 - RNA, 19 nt, Artificial Sequence
  Description of Artificial Sequence: Synthetic oligonucleotide
  Sense strand starting at position 517 of SEQ ID NO: 257
cuuguuccucuagacuaga

SEQ ID NO: 23267 - RNA, 19 nt, Artificial Sequence
  Description of Artificial Sequence: Synthetic oligonucleotide
  Antisense strand to SEQ ID NO: 23266
ucuagucuagaggaacaag

SEQ ID NO: 23268 - RNA, 19 nt, Artificial Sequence
  Description of Artificial Sequence: Synthetic oligonucleotide
  Sense strand starting at position 520 of SEQ ID NO: 257
guuccucuagacuagaacu

SEQ ID NO: 23269 - RNA, 19 nt, Artificial Sequence
  Description of Artificial Sequence: Synthetic oligonucleotide
  Antisense strand to SEQ ID NO: 23268
aguucuagucuagaggaac

SEQ ID NO: 23270 - RNA, 19 nt, Artificial Sequence
  Description of Artificial Sequence: Synthetic oligonucleotide
  Sense strand starting at position 577 of SEQ ID NO: 257
ccgacuugaauauggagau

SEQ ID NO: 23271 - RNA, 19 nt, Artificial Sequence
  Description of Artificial Sequence: Synthetic oligonucleotide
  Antisense strand to SEQ ID NO: 23270
aucuccauauucaagucgg

SEQ ID NO: 23272 - RNA, 19 nt, Artificial Sequence
  Description of Artificial Sequence: Synthetic oligonucleotide
  Sense strand starting at position 644 of SEQ ID NO: 257
ucaccagaguccuuuaugu

SEQ ID NO: 23273 - RNA, 19 nt, Artificial Sequence
  Description of Artificial Sequence: Synthetic oligonucleotide
  Antisense strand to SEQ ID NO: 23272
acauaaaggacucugguga

SEQ ID NO: 23274 - RNA, 19 nt, Artificial Sequence
  Description of Artificial Sequence: Synthetic oligonucleotide
  Sense strand starting at position 646 of SEQ ID NO: 257
accagaguccuuuauguua

SEQ ID NO: 23275 - RNA, 19 nt, Artificial Sequence
  Description of Artificial Sequence: Synthetic oligonucleotide
  Antisense strand to SEQ ID NO: 23274
uaacauaaaggacucuggu

SEQ ID NO: 23276 - RNA, 19 nt, Artificial Sequence
  Description of Artificial Sequence: Synthetic oligonucleotide
  Sense strand starting at position 713 of SEQ ID NO: 257
cugggaaucugcgcaagaa

SEQ ID NO: 23277 - RNA, 19 nt, Artificial Sequence
  Description of Artificial Sequence: Synthetic oligonucleotide
  Antisense strand to SEQ ID NO: 23276
uucuugcgcagauucccag

SEQ ID NO: 23278 - RNA, 19 nt, Artificial Sequence
  Description of Artificial Sequence: Synthetic oligonucleotide
  Sense strand starting at position 714 of SEQ ID NO: 257
ugggaaucugcgcaagaaa

SEQ ID NO: 23279 - RNA, 19 nt, Artificial Sequence
  Description of Artificial Sequence: Synthetic oligonucleotide
  Antisense strand to SEQ ID NO: 23278
uuucuugcgcagauuccca

SEQ ID NO: 23280 - RNA, 19 nt, Artificial Sequence
  Description of Artificial Sequence: Synthetic oligonucleotide
  Sense strand starting at position 754 of SEQ ID NO: 257
caguucuccuaaguaggaa

SEQ ID NO: 23281 - RNA, 19 nt, Artificial Sequence
  Description of Artificial Sequence: Synthetic oligonucleotide
  Antisense strand to SEQ ID NO: 23280
uuccuacuuaggagaacug

SEQ ID NO: 23282 - RNA, 19 nt, Artificial Sequence
  Description of Artificial Sequence: Synthetic oligonucleotide
  Sense strand starting at position 767 of SEQ ID NO: 257
uaggaaucaucguuaucua

SEQ ID NO: 23283 - RNA, 19 nt, Artificial Sequence
  Description of Artificial Sequence: Synthetic oligonucleotide
  Antisense strand to SEQ ID NO: 23282
uagauaacgaugauuccua

SEQ ID NO: 23284 - RNA, 19 nt, Artificial Sequence
  Description of Artificial Sequence: Synthetic oligonucleotide
  Sense strand starting at position 768 of SEQ ID NO: 257
aggaaucaucguuaucuaa

SEQ ID NO: 23285 - RNA, 19 nt, Artificial Sequence
  Description of Artificial Sequence: Synthetic oligonucleotide
  Antisense strand to SEQ ID NO: 23284
uuagauaacgaugauuccu

SEQ ID NO: 23286 - RNA, 19 nt, Artificial Sequence
  Description of Artificial Sequence: Synthetic oligonucleotide
  Sense strand starting at position 770 of SEQ ID NO: 257
gaaucaucguuaucuaaug

SEQ ID NO: 23287 - RNA, 19 nt, Artificial Sequence
  Description of Artificial Sequence: Synthetic oligonucleotide
  Antisense strand to SEQ ID NO: 23286
cauuagauaacgaugauuc

SEQ ID NO: 23288 - RNA, 19 nt, Artificial Sequence
  Description of Artificial Sequence: Synthetic oligonucleotide
  Sense strand starting at position 878 of SEQ ID NO: 257
gccucacuggcauaagauc

SEQ ID NO: 23289 - RNA, 19 nt, Artificial Sequence
  Description of Artificial Sequence: Synthetic oligonucleotide
  Antisense strand to SEQ ID NO: 23288
gaucuuaugccagugaggc

SEQ ID NO: 23290 - RNA, 19 nt, Artificial Sequence
  Description of Artificial Sequence: Synthetic oligonucleotide
  Sense strand starting at position 944 of SEQ ID NO: 257
cccagccaucuaugacaga

SEQ ID NO: 23291 - RNA, 19 nt, Artificial Sequence
  Description of Artificial Sequence: Synthetic oligonucleotide
  Antisense strand to SEQ ID NO: 23290
ucugucauagauggcuggg

SEQ ID NO: 23292 - RNA, 19 nt, Artificial Sequence
  Description of Artificial Sequence: Synthetic oligonucleotide
  Sense strand starting at position 1059 of SEQ ID NO: 257
gggcccgagacuuggaauu

SEQ ID NO: 23293 - RNA, 19 nt, Artificial Sequence
  Description of Artificial Sequence: Synthetic oligonucleotide
  Antisense strand to SEQ ID NO: 23292
aauuccaagucucgggccc

SEQ ID NO: 23294 - RNA, 19 nt, Artificial Sequence
  Description of Artificial Sequence: Synthetic oligonucleotide
  Sense strand starting at position 1734 of SEQ ID NO: 257
guaagaucuccaggagugg

SEQ ID NO: 23295 - RNA, 19 nt, Artificial Sequence
  Description of Artificial Sequence: Synthetic oligonucleotide
  Antisense strand to SEQ ID NO: 23294
ccacuccuggagaucuuac

SEQ ID NO: 23296 - RNA, 19 nt, Artificial Sequence
  Description of Artificial Sequence: Synthetic oligonucleotide
  Sense strand starting at position 1806 of SEQ ID NO: 257
gggugaucucuccaucuuc

SEQ ID NO: 23297 - RNA, 19 nt, Artificial Sequence
  Description of Artificial Sequence: Synthetic oligonucleotide
  Antisense strand to SEQ ID NO: 23296
gaagauggagagaucaccc

SEQ ID NO: 23298 - RNA, 19 nt, Artificial Sequence
  Description of Artificial Sequence: Synthetic oligonucleotide
  Sense strand starting at position 1907 of SEQ ID NO: 257
gaaauuuguuggcuggcuu

SEQ ID NO: 23299 - RNA, 19 nt, Artificial Sequence
  Description of Artificial Sequence: Synthetic oligonucleotide
  Antisense strand to SEQ ID NO: 23298
aagccagccaacaaauuuc

SEQ ID NO: 23300 - RNA, 19 nt, Artificial Sequence
  Description of Artificial Sequence: Synthetic oligonucleotide
  Sense strand starting at position 2906 of SEQ ID NO: 257
guaucagagcgaagugguu

SEQ ID NO: 23301 - RNA, 19 nt, Artificial Sequence
  Description of Artificial Sequence: Synthetic oligonucleotide
  Antisense strand to SEQ ID NO: 23300
aaccacuucgcucugauac

SEQ ID NO: 23302 - RNA, 19 nt, Artificial Sequence
  Description of Artificial Sequence: Synthetic oligonucleotide
  Sense strand starting at position 2959 of SEQ ID NO: 257
ggagaugugcgagagggau

SEQ ID NO: 23303 - RNA, 19 nt, Artificial Sequence
  Description of Artificial Sequence: Synthetic oligonucleotide
  Antisense strand to SEQ ID NO: 23302
aucccucucgcacaucucc

SEQ ID NO: 23304 - RNA, 19 nt, Artificial Sequence
  Description of Artificial Sequence: Synthetic oligonucleotide
  Sense strand starting at position 3077 of SEQ ID NO: 257
cuauguuuaguguaccuga

SEQ ID NO: 23305 - RNA, 19 nt, Artificial Sequence
  Description of Artificial Sequence: Synthetic oligonucleotide
  Antisense strand to SEQ ID NO: 23304
ucagguacacuaaacauag

SEQ ID NO: 23306 - RNA, 19 nt, Artificial Sequence
  Description of Artificial Sequence: Synthetic oligonucleotide
  Sense strand starting at position 3082 of SEQ ID NO: 257
uuuaguguaccugacagua

SEQ ID NO: 23307 - RNA, 19 nt, Artificial Sequence
  Description of Artificial Sequence: Synthetic oligonucleotide
  Antisense strand to SEQ ID NO: 23306
uacugucagguacacuaaa

SEQ ID NO: 23308 - RNA, 19 nt, Artificial Sequence
  Description of Artificial Sequence: Synthetic oligonucleotide
  Sense strand starting at position 3160 of SEQ ID NO: 257
agucuccuucucugacuua

SEQ ID NO: 23309 - RNA, 19 nt, Artificial Sequence
  Description of Artificial Sequence: Synthetic oligonucleotide
  Antisense strand to SEQ ID NO: 23308
uaagucagagaaggagacu

SEQ ID NO: 23310 - RNA, 19 nt, Artificial Sequence
  Description of Artificial Sequence: Synthetic oligonucleotide
  Sense strand starting at position 3233 of SEQ ID NO: 257
gacaauagguagucaaucu

SEQ ID NO: 23311 - RNA, 19 nt, Artificial Sequence
  Description of Artificial Sequence: Synthetic oligonucleotide
  Antisense strand to SEQ ID NO: 23310
agauugacuaccuauuguc

SEQ ID NO: 23312 - RNA, 19 nt, Artificial Sequence
  Description of Artificial Sequence: Synthetic oligonucleotide
  Sense strand starting at position 3240 of SEQ ID NO: 257
gguagucaaucucuuauaa

SEQ ID NO: 23313 - RNA, 19 nt, Artificial Sequence
  Description of Artificial Sequence: Synthetic oligonucleotide
  Antisense strand to SEQ ID NO: 23312
uuauaagagauugacuacc

SEQ ID NO: 23314 - RNA, 19 nt, Artificial Sequence
  Description of Artificial Sequence: Synthetic oligonucleotide
  Sense strand starting at position 3278 of SEQ ID NO: 257
agucaucuuggaggaacau

SEQ ID NO: 23315 - RNA, 19 nt, Artificial Sequence
  Description of Artificial Sequence: Synthetic oligonucleotide
  Antisense strand to SEQ ID NO: 23314
auguuccuccaagaugacu

SEQ ID NO: 23316 - RNA, 19 nt, Artificial Sequence
  Description of Artificial Sequence: Synthetic oligonucleotide
  Sense strand starting at position 3458 of SEQ ID NO: 257
uucugugaaaugugaagga

SEQ ID NO: 23317 - RNA, 19 nt, Artificial Sequence
  Description of Artificial Sequence: Synthetic oligonucleotide
  Antisense strand to SEQ ID NO: 23316
uccuucacauuucacagaa

SEQ ID NO: 23318 - RNA, 19 nt, Artificial Sequence
  Description of Artificial Sequence: Synthetic oligonucleotide
  Sense strand starting at position 3462 of SEQ ID NO: 257
gugaaaugugaaggacuuc

SEQ ID NO: 23319 - RNA, 19 nt, Artificial Sequence
  Description of Artificial Sequence: Synthetic oligonucleotide
  Antisense strand to SEQ ID NO: 23318
gaaguccuucacauuucac

SEQ ID NO: 23320 - RNA, 19 nt, Artificial Sequence
  Description of Artificial Sequence: Synthetic oligonucleotide
  Sense strand starting at position 3748 of SEQ ID NO: 257
gugaacugauuggcaacaa

SEQ ID NO: 23321 - RNA, 19 nt, Artificial Sequence
  Description of Artificial Sequence: Synthetic oligonucleotide
  Antisense strand to SEQ ID NO: 23320
uuguugccaaucaguucac

SEQ ID NO: 23322 - RNA, 19 nt, Artificial Sequence
  Description of Artificial Sequence: Synthetic oligonucleotide
  Sense strand starting at position 3795 of SEQ ID NO: 257
uaaagauguucugugucua

SEQ ID NO: 23323 - RNA, 19 nt, Artificial Sequence
  Description of Artificial Sequence: Synthetic oligonucleotide
  Antisense strand to SEQ ID NO: 23322
uagacacagaacaucuuua

SEQ ID NO: 23324 - RNA, 19 nt, Artificial Sequence
  Description of Artificial Sequence: Synthetic oligonucleotide
  Sense strand starting at position 3821 of SEQ ID NO: 257
gcaggucauaaagaaguca

SEQ ID NO: 23325 - RNA, 19 nt, Artificial Sequence
  Description of Artificial Sequence: Synthetic oligonucleotide
  Antisense strand to SEQ ID NO: 23324
ugacuucuuuaugaccugc

SEQ ID NO: 23326 - RNA, 19 nt, Artificial Sequence
  Description of Artificial Sequence: Synthetic oligonucleotide
  Sense strand starting at position 6 of SEQ ID NO: 258
ugaaaugucuucuuguaga

SEQ ID NO: 23327 - RNA, 19 nt, Artificial Sequence
  Description of Artificial Sequence: Synthetic oligonucleotide
  Antisense strand to SEQ ID NO: 23326
ucuacaagaagacauuuca

SEQ ID NO: 23328 - RNA, 19 nt, Artificial Sequence
  Description of Artificial Sequence: Synthetic oligonucleotide
  Sense strand starting at position 11 of SEQ ID NO: 258
ugucuucuuguagaaacaa

SEQ ID NO: 23329 - RNA, 19 nt, Artificial Sequence
  Description of Artificial Sequence: Synthetic oligonucleotide
  Antisense strand to SEQ ID NO: 23328
uuguuucuacaagaagaca

SEQ ID NO: 23330 - RNA, 19 nt, Artificial Sequence
  Description of Artificial Sequence: Synthetic oligonucleotide
  Sense strand starting at position 47 of SEQ ID NO: 258
agccuaugguuucuacaag

SEQ ID NO: 23331 - RNA, 19 nt, Artificial Sequence
  Description of Artificial Sequence: Synthetic oligonucleotide
  Antisense strand to SEQ ID NO: 23330
cuuguagaaaccauaggcu

SEQ ID NO: 23332 - RNA, 19 nt, Artificial Sequence
  Description of Artificial Sequence: Synthetic oligonucleotide
  Sense strand starting at position 53 of SEQ ID NO: 258
ugguuucuacaagguuaua

SEQ ID NO: 23333 - RNA, 19 nt, Artificial Sequence
  Description of Artificial Sequence: Synthetic oligonucleotide
  Antisense strand to SEQ ID NO: 23332
uauaaccuuguagaaacca

SEQ ID NO: 23334 - RNA, 19 nt, Artificial Sequence
  Description of Artificial Sequence: Synthetic oligonucleotide
  Sense strand starting at position 130 of SEQ ID NO: 258
auagaaagaugagucuagu

SEQ ID NO: 23335 - RNA, 19 nt, Artificial Sequence
  Description of Artificial Sequence: Synthetic oligonucleotide
  Antisense strand to SEQ ID NO: 23334
acuagacucaucuuucuau

SEQ ID NO: 23336 - RNA, 19 nt, Artificial Sequence
  Description of Artificial Sequence: Synthetic oligonucleotide
  Sense strand starting at position 133 of SEQ ID NO: 258
gaaagaugagucuagugug

SEQ ID NO: 23337 - RNA, 19 nt, Artificial Sequence
  Description of Artificial Sequence: Synthetic oligonucleotide
  Antisense strand to SEQ ID NO: 23336
cacacuagacucaucuuuc

SEQ ID NO: 23338 - RNA, 19 nt, Artificial Sequence
  Description of Artificial Sequence: Synthetic oligonucleotide
  Sense strand starting at position 167 of SEQ ID NO: 258
agauuacgaagcuguccau

SEQ ID NO: 23339 - RNA, 19 nt, Artificial Sequence
  Description of Artificial Sequence: Synthetic oligonucleotide
  Antisense strand to SEQ ID NO: 23338
auggacagcuucguaaucu

SEQ ID NO: 23340 - RNA, 19 nt, Artificial Sequence
  Description of Artificial Sequence: Synthetic oligonucleotide
  Sense strand starting at position 339 of SEQ ID NO: 258
gagaaacauguaugacuuu

SEQ ID NO: 23341 - RNA, 19 nt, Artificial Sequence
  Description of Artificial Sequence: Synthetic oligonucleotide
  Antisense strand to SEQ ID NO: 23340
aaagucauacauguuucuc

SEQ ID NO: 23342 - RNA, 19 nt, Artificial Sequence
  Description of Artificial Sequence: Synthetic oligonucleotide
  Sense strand starting at position 388 of SEQ ID NO: 258
guccuaaugaucuggguga

SEQ ID NO: 23343 - RNA, 19 nt, Artificial Sequence
  Description of Artificial Sequence: Synthetic oligonucleotide
  Antisense strand to SEQ ID NO: 23342
ucacccagaucauuaggac

SEQ ID NO: 23344 - RNA, 19 nt, Artificial Sequence
  Description of Artificial Sequence: Synthetic oligonucleotide
  Sense strand starting at position 392 of SEQ ID NO: 258
uaaugaucugggugaccuu

SEQ ID NO: 23345 - RNA, 19 nt, Artificial Sequence
  Description of Artificial Sequence: Synthetic oligonucleotide
  Antisense strand to SEQ ID NO: 23344
aaggucacccagaucauua

SEQ ID NO: 23346 - RNA, 19 nt, Artificial Sequence
  Description of Artificial Sequence: Synthetic oligonucleotide
  Sense strand starting at position 416 of SEQ ID NO: 258
auggcucacuuucucgaaa

SEQ ID NO: 23347 - RNA, 19 nt, Artificial Sequence
  Description of Artificial Sequence: Synthetic oligonucleotide
  Antisense strand to SEQ ID NO: 23346
uuucgagaaagugagccau

SEQ ID NO: 23348 - RNA, 19 nt, Artificial Sequence
  Description of Artificial Sequence: Synthetic oligonucleotide
  Sense strand starting at position 417 of SEQ ID NO: 258
uggcucacuuucucgaaau

SEQ ID NO: 23349 - RNA, 19 nt, Artificial Sequence
  Description of Artificial Sequence: Synthetic oligonucleotide
  Antisense strand to SEQ ID NO: 23348
auuucgagaaagugagcca

SEQ ID NO: 23350 - RNA, 19 nt, Artificial Sequence
  Description of Artificial Sequence: Synthetic oligonucleotide
  Sense strand starting at position 608 of SEQ ID NO: 258
cucagaaugccugggagua

SEQ ID NO: 23351 - RNA, 19 nt, Artificial Sequence
  Description of Artificial Sequence: Synthetic oligonucleotide
  Antisense strand to SEQ ID NO: 23350
uacucccaggcauucugag

SEQ ID NO: 23352 - RNA, 19 nt, Artificial Sequence
  Description of Artificial Sequence: Synthetic oligonucleotide
  Sense strand starting at position 623 of SEQ ID NO: 258
aguacagacccaugagcaa

SEQ ID NO: 23353 - RNA, 19 nt, Artificial Sequence
  Description of Artificial Sequence: Synthetic oligonucleotide
  Antisense strand to SEQ ID NO: 23352
uugcucaugggucuguacu

SEQ ID NO: 23354 - RNA, 19 nt, Artificial Sequence
  Description of Artificial Sequence: Synthetic oligonucleotide
  Sense strand starting at position 696 of SEQ ID NO: 258
aagcuaggugccugggaua

SEQ ID NO: 23355 - RNA, 19 nt, Artificial Sequence
  Description of Artificial Sequence: Synthetic oligonucleotide
  Antisense strand to SEQ ID NO: 23354
uaucccaggcaccuagcuu

SEQ ID NO: 23356 - RNA, 19 nt, Artificial Sequence
  Description of Artificial Sequence: Synthetic oligonucleotide
  Sense strand starting at position 1008 of SEQ ID NO: 258
uguacaauucugggacauu

SEQ ID NO: 23357 - RNA, 19 nt, Artificial Sequence
  Description of Artificial Sequence: Synthetic oligonucleotide
  Antisense strand to SEQ ID NO: 23356
aaugucccagaauuguaca

SEQ ID NO: 23358 - RNA, 19 nt, Artificial Sequence
  Description of Artificial Sequence: Synthetic oligonucleotide
  Sense strand starting at position 1375 of SEQ ID NO: 258
uuucuaaaugcuugcauga

SEQ ID NO: 23359 - RNA, 19 nt, Artificial Sequence
  Description of Artificial Sequence: Synthetic oligonucleotide
  Antisense strand to SEQ ID NO: 23358
ucaugcaagcauuuagaaa

SEQ ID NO: 23360 - RNA, 19 nt, Artificial Sequence
  Description of Artificial Sequence: Synthetic oligonucleotide
  Sense strand starting at position 1390 of SEQ ID NO: 258
augagugguucuccaucuu

SEQ ID NO: 23361 - RNA, 19 nt, Artificial Sequence
  Description of Artificial Sequence: Synthetic oligonucleotide
  Antisense strand to SEQ ID NO: 23360
aagauggagaaccacucau

SEQ ID NO: 23362 - RNA, 19 nt, Artificial Sequence
  Description of Artificial Sequence: Synthetic oligonucleotide
  Sense strand starting at position 1602 of SEQ ID NO: 258
gaagaucgcuguuugagau

SEQ ID NO: 23363 - RNA, 19 nt, Artificial Sequence
  Description of Artificial Sequence: Synthetic oligonucleotide
  Antisense strand to SEQ ID NO: 23362
aucucaaacagcgaucuuc

SEQ ID NO: 23364 - RNA, 19 nt, Artificial Sequence
  Description of Artificial Sequence: Synthetic oligonucleotide
  Sense strand starting at position 1656 of SEQ ID NO: 258
cuuccaggucaaugagaga

SEQ ID NO: 23365 - RNA, 19 nt, Artificial Sequence
  Description of Artificial Sequence: Synthetic oligonucleotide
  Antisense strand to SEQ ID NO: 23364
ucucucauugaccuggaag

SEQ ID NO: 23366 - RNA, 19 nt, Artificial Sequence
  Description of Artificial Sequence: Synthetic oligonucleotide
  Sense strand starting at position 1683 of SEQ ID NO: 258
uucuaugaccuaugagaua

SEQ ID NO: 23367 - RNA, 19 nt, Artificial Sequence
  Description of Artificial Sequence: Synthetic oligonucleotide
  Antisense strand to SEQ ID NO: 23366
uaucucauaggucauagaa

SEQ ID NO: 23368 - RNA, 19 nt, Artificial Sequence
  Description of Artificial Sequence: Synthetic oligonucleotide
  Sense strand starting at position 1704 of SEQ ID NO: 258
ggguuuguuauaggaauua

SEQ ID NO: 23369 - RNA, 19 nt, Artificial Sequence
  Description of Artificial Sequence: Synthetic oligonucleotide
  Antisense strand to SEQ ID NO: 23368
uaauuccuauaacaaaccc

SEQ ID NO: 23370 - RNA, 19 nt, Artificial Sequence
  Description of Artificial Sequence: Synthetic oligonucleotide
  Sense strand starting at position 1715 of SEQ ID NO: 258
aggaauuaguucuuaugca

SEQ ID NO: 23371 - RNA, 19 nt, Artificial Sequence
  Description of Artificial Sequence: Synthetic oligonucleotide
  Antisense strand to SEQ ID NO: 23370
ugcauaagaacuaauuccu

SEQ ID NO: 23372 - RNA, 19 nt, Artificial Sequence
  Description of Artificial Sequence: Synthetic oligonucleotide
  Sense strand starting at position 2115 of SEQ ID NO: 258
guaguuccagcuuaaccaa

SEQ ID NO: 23373 - RNA, 19 nt, Artificial Sequence
  Description of Artificial Sequence: Synthetic oligonucleotide
  Antisense strand to SEQ ID NO: 23372
uugguuaagcuggaacuac

SEQ ID NO: 23374 - RNA, 19 nt, Artificial Sequence
  Description of Artificial Sequence: Synthetic oligonucleotide
  Sense strand starting at position 2295 of SEQ ID NO: 258
cucagaucaucagcugaga

SEQ ID NO: 23375 - RNA, 19 nt, Artificial Sequence
  Description of Artificial Sequence: Synthetic oligonucleotide
  Antisense strand to SEQ ID NO: 23374
ucucagcugaugaucugag

SEQ ID NO: 23376 - RNA, 19 nt, Artificial Sequence
  Description of Artificial Sequence: Synthetic oligonucleotide
  Sense strand starting at position 2975 of SEQ ID NO: 258
uugugauccugagcaagug

SEQ ID NO: 23377 - RNA, 19 nt, Artificial Sequence
  Description of Artificial Sequence: Synthetic oligonucleotide
  Antisense strand to SEQ ID NO: 23376
cacuugcucaggaucacaa

SEQ ID NO: 23378 - RNA, 19 nt, Artificial Sequence
  Description of Artificial Sequence: Synthetic oligonucleotide
  Sense strand starting at position 3012 of SEQ ID NO: 258
cuauauugucuacaagagu

SEQ ID NO: 23379 - RNA, 19 nt, Artificial Sequence
  Description of Artificial Sequence: Synthetic oligonucleotide
  Antisense strand to SEQ ID NO: 23378
acucuuguagacaauauag

SEQ ID NO: 23380 - RNA, 19 nt, Artificial Sequence
  Description of Artificial Sequence: Synthetic oligonucleotide
  Sense strand starting at position 3202 of SEQ ID NO: 258
acgugaaucgucucuuugu

SEQ ID NO: 23381 - RNA, 19 nt, Artificial Sequence
  Description of Artificial Sequence: Synthetic oligonucleotide
  Antisense strand to SEQ ID NO: 23380
acaaagagacgauucacgu

SEQ ID NO: 23382 - RNA, 19 nt, Artificial Sequence
  Description of Artificial Sequence: Synthetic oligonucleotide
  Sense strand starting at position 3250 of SEQ ID NO: 258
gcucauuggucacuuagga

SEQ ID NO: 23383 - RNA, 19 nt, Artificial Sequence
  Description of Artificial Sequence: Synthetic oligonucleotide
  Antisense strand to SEQ ID NO: 23382
uccuaagugaccaaugagc

SEQ ID NO: 23384 - RNA, 19 nt, Artificial Sequence
  Description of Artificial Sequence: Synthetic oligonucleotide
  Sense strand starting at position 3371 of SEQ ID NO: 258
aggauauguacucagcugu

SEQ ID NO: 23385 - RNA, 19 nt, Artificial Sequence
  Description of Artificial Sequence: Synthetic oligonucleotide
  Antisense strand to SEQ ID NO: 23384
acagcugaguacauauccu

SEQ ID NO: 23386 - RNA, 19 nt, Artificial Sequence
  Description of Artificial Sequence: Synthetic oligonucleotide
  Sense strand starting at position 3439 of SEQ ID NO: 258
ugaggccauguguaauaaa

SEQ ID NO: 23387 - RNA, 19 nt, Artificial Sequence
  Description of Artificial Sequence: Synthetic oligonucleotide
  Antisense strand to SEQ ID NO: 23386
uuuauuacacauggccuca

SEQ ID NO: 23388 - RNA, 19 nt, Artificial Sequence
  Description of Artificial Sequence: Synthetic oligonucleotide
  Sense strand starting at position 3455 of SEQ ID NO: 258
aaacuucuggcaggugaaa

SEQ ID NO: 23389 - RNA, 19 nt, Artificial Sequence
  Description of Artificial Sequence: Synthetic oligonucleotide
  Antisense strand to SEQ ID NO: 23388
uuucaccugccagaaguuu

SEQ ID NO: 23390 - RNA, 19 nt, Artificial Sequence
  Description of Artificial Sequence: Synthetic oligonucleotide
  Sense strand starting at position 3457 of SEQ ID NO: 258
acuucuggcaggugaaaua

SEQ ID NO: 23391 - RNA, 19 nt, Artificial Sequence
  Description of Artificial Sequence: Synthetic oligonucleotide
  Antisense strand to SEQ ID NO: 23390
uauuucaccugccagaagu

SEQ ID NO: 23392 - RNA, 19 nt, Artificial Sequence
  Description of Artificial Sequence: Synthetic oligonucleotide
  Sense strand starting at position 3467 of SEQ ID NO: 258
ggugaaauauuauugugcu

SEQ ID NO: 23393 - RNA, 19 nt, Artificial Sequence
  Description of Artificial Sequence: Synthetic oligonucleotide
  Antisense strand to SEQ ID NO: 23392
agcacaauaauauuucacc

SEQ ID NO: 23394 - RNA, 19 nt, Artificial Sequence
  Description of Artificial Sequence: Synthetic oligonucleotide
  Sense strand starting at position 3496 of SEQ ID NO: 258
aauaguugugccuggacau

SEQ ID NO: 23395 - RNA, 19 nt, Artificial Sequence
  Description of Artificial Sequence: Synthetic oligonucleotide
  Antisense strand to SEQ ID NO: 23394
auguccaggcacaacuauu

SEQ ID NO: 23396 - RNA, 19 nt, Artificial Sequence
  Description of Artificial Sequence: Synthetic oligonucleotide
  Sense strand starting at position 3497 of SEQ ID NO: 258
auaguugugccuggacaug

SEQ ID NO: 23397 - RNA, 19 nt, Artificial Sequence
  Description of Artificial Sequence: Synthetic oligonucleotide
  Antisense strand to SEQ ID NO: 23396
cauguccaggcacaacuau

SEQ ID NO: 23398 - RNA, 19 nt, Artificial Sequence
  Description of Artificial Sequence: Synthetic oligonucleotide
  Sense strand starting at position 3508 of SEQ ID NO: 258
uggacaugccuagggagua

SEQ ID NO: 23399 - RNA, 19 nt, Artificial Sequence
  Description of Artificial Sequence: Synthetic oligonucleotide
  Antisense strand to SEQ ID NO: 23398
uacucccuaggcaugucca

SEQ ID NO: 23400 - RNA, 19 nt, Artificial Sequence
  Description of Artificial Sequence: Synthetic oligonucleotide
  Sense strand starting at position 3571 of SEQ ID NO: 258
gguuuaaccugaucauauu

SEQ ID NO: 23401 - RNA, 19 nt, Artificial Sequence
  Description of Artificial Sequence: Synthetic oligonucleotide
  Antisense strand to SEQ ID NO: 23400
aauaugaucagguuaaacc

SEQ ID NO: 23402 - RNA, 19 nt, Artificial Sequence
  Description of Artificial Sequence: Synthetic oligonucleotide
  Sense strand starting at position 3945 of SEQ ID NO: 258
cuagacuugcuuuaaaguc

SEQ ID NO: 23403 - RNA, 19 nt, Artificial Sequence
  Description of Artificial Sequence: Synthetic oligonucleotide
  Antisense strand to SEQ ID NO: 23402
gacuuuaaagcaagucuag

SEQ ID NO: 23404 - RNA, 19 nt, Artificial Sequence
  Description of Artificial Sequence: Synthetic oligonucleotide
  Sense strand starting at position 3954 of SEQ ID NO: 258
cuuuaaagucuuuagaguc

SEQ ID NO: 23405 - RNA, 19 nt, Artificial Sequence
  Description of Artificial Sequence: Synthetic oligonucleotide
  Antisense strand to SEQ ID NO: 23404
gacucuaaagacuuuaaag

SEQ ID NO: 23406 - RNA, 19 nt, Artificial Sequence
  Description of Artificial Sequence: Synthetic oligonucleotide
  Sense strand starting at position 14 of SEQ ID NO: 259
ccuccuuaucuuggaagac

SEQ ID NO: 23407 - RNA, 19 nt, Artificial Sequence
  Description of Artificial Sequence: Synthetic oligonucleotide
  Antisense strand to SEQ ID NO: 23406
gucuuccaagauaaggagg

SEQ ID NO: 23408 - RNA, 19 nt, Artificial Sequence
  Description of Artificial Sequence: Synthetic oligonucleotide
  Sense strand starting at position 225 of SEQ ID NO: 259
aguagcagagcuggauuaa

SEQ ID NO: 23409 - RNA, 19 nt, Artificial Sequence
  Description of Artificial Sequence: Synthetic oligonucleotide
  Antisense strand to SEQ ID NO: 23408
uuaauccagcucugcuacu

SEQ ID NO: 23410 - RNA, 19 nt, Artificial Sequence
  Description of Artificial Sequence: Synthetic oligonucleotide
  Sense strand starting at position 226 of SEQ ID NO: 259
guagcagagcuggauuaaa

SEQ ID NO: 23411 - RNA, 19 nt, Artificial Sequence
  Description of Artificial Sequence: Synthetic oligonucleotide
  Antisense strand to SEQ ID NO: 23410
uuuaauccagcucugcuac

SEQ ID NO: 23412 - RNA, 19 nt, Artificial Sequence
  Description of Artificial Sequence: Synthetic oligonucleotide
  Sense strand starting at position 312 of SEQ ID NO: 259
cgggagaagucucuggagu

SEQ ID NO: 23413 - RNA, 19 nt, Artificial Sequence
  Description of Artificial Sequence: Synthetic oligonucleotide
  Antisense strand to SEQ ID NO: 23412
acuccagagacuucucccg

SEQ ID NO: 23414 - RNA, 19 nt, Artificial Sequence
  Description of Artificial Sequence: Synthetic oligonucleotide
  Sense strand starting at position 313 of SEQ ID NO: 259
gggagaagucucuggaguc

SEQ ID NO: 23415 - RNA, 19 nt, Artificial Sequence
  Description of Artificial Sequence: Synthetic oligonucleotide
  Antisense strand to SEQ ID NO: 23414
gacuccagagacuucuccc

SEQ ID NO: 23416 - RNA, 19 nt, Artificial Sequence
  Description of Artificial Sequence: Synthetic oligonucleotide
  Sense strand starting at position 357 of SEQ ID NO: 259
gauggagguucuuuaacga

SEQ ID NO: 23417 - RNA, 19 nt, Artificial Sequence
  Description of Artificial Sequence: Synthetic oligonucleotide
  Antisense strand to SEQ ID NO: 23416
ucguuaaagaaccuccauc

SEQ ID NO: 23418 - RNA, 19 nt, Artificial Sequence
  Description of Artificial Sequence: Synthetic oligonucleotide
  Sense strand starting at position 1507 of SEQ ID NO: 259
gcgcggugagcugcagaua

SEQ ID NO: 23419 - RNA, 19 nt, Artificial Sequence
  Description of Artificial Sequence: Synthetic oligonucleotide
  Antisense strand to SEQ ID NO: 23418
uaucugcagcucaccgcgc

SEQ ID NO: 23420 - RNA, 19 nt, Artificial Sequence
  Description of Artificial Sequence: Synthetic oligonucleotide
  Sense strand starting at position 1699 of SEQ ID NO: 259
ggcaguucgacguuugcaa

SEQ ID NO: 23421 - RNA, 19 nt, Artificial Sequence
  Description of Artificial Sequence: Synthetic oligonucleotide
  Antisense strand to SEQ ID NO: 23420
uugcaaacgucgaacugcc

SEQ ID NO: 23422 - RNA, 19 nt, Artificial Sequence
  Description of Artificial Sequence: Synthetic oligonucleotide
  Sense strand starting at position 1700 of SEQ ID NO: 259
gcaguucgacguuugcaaa

SEQ ID NO: 23423 - RNA, 19 nt, Artificial Sequence
  Description of Artificial Sequence: Synthetic oligonucleotide
  Antisense strand to SEQ ID NO: 23422
uuugcaaacgucgaacugc

SEQ ID NO: 23424 - RNA, 19 nt, Artificial Sequence
  Description of Artificial Sequence: Synthetic oligonucleotide
  Sense strand starting at position 1776 of SEQ ID NO: 259
gggccaggguuuguaauuu

SEQ ID NO: 23425 - RNA, 19 nt, Artificial Sequence
  Description of Artificial Sequence: Synthetic oligonucleotide
  Antisense strand to SEQ ID NO: 23424
aaauuacaaacccuggccc

SEQ ID NO: 23426 - RNA, 19 nt, Artificial Sequence
  Description of Artificial Sequence: Synthetic oligonucleotide
  Sense strand starting at position 1975 of SEQ ID NO: 259
uugccuggauaguucugaa

SEQ ID NO: 23427 - RNA, 19 nt, Artificial Sequence
  Description of Artificial Sequence: Synthetic oligonucleotide
  Antisense strand to SEQ ID NO: 23426
uucagaacuauccaggcaa

SEQ ID NO: 23428 - RNA, 19 nt, Artificial Sequence
  Description of Artificial Sequence: Synthetic oligonucleotide
  Sense strand starting at position 2033 of SEQ ID NO: 259
gugagauggccucaucuuc

SEQ ID NO: 23429 - RNA, 19 nt, Artificial Sequence
  Description of Artificial Sequence: Synthetic oligonucleotide
  Antisense strand to SEQ ID NO: 23428
gaagaugaggccaucucac

SEQ ID NO: 23430 - RNA, 19 nt, Artificial Sequence
  Description of Artificial Sequence: Synthetic oligonucleotide
  Sense strand starting at position 2190 of SEQ ID NO: 259
caguaaguggcggauuauu

SEQ ID NO: 23431 - RNA, 19 nt, Artificial Sequence
  Description of Artificial Sequence: Synthetic oligonucleotide
  Antisense strand to SEQ ID NO: 23430
aauaauccgccacuuacug

SEQ ID NO: 23432 - RNA, 19 nt, Artificial Sequence
  Description of Artificial Sequence: Synthetic oligonucleotide
  Sense strand starting at position 2202 of SEQ ID NO: 259
gauuauuuaugagaccgga

SEQ ID NO: 23433 - RNA, 19 nt, Artificial Sequence
  Description of Artificial Sequence: Synthetic oligonucleotide
  Antisense strand to SEQ ID NO: 23432
uccggucucauaaauaauc

SEQ ID NO: 23434 - RNA, 19 nt, Artificial Sequence
  Description of Artificial Sequence: Synthetic oligonucleotide
  Sense strand starting at position 2243 of SEQ ID NO: 259
guaugaucuucuguuugag

SEQ ID NO: 23435 - RNA, 19 nt, Artificial Sequence
  Description of Artificial Sequence: Synthetic oligonucleotide
  Antisense strand to SEQ ID NO: 23434
cucaaacagaagaucauac

SEQ ID NO: 23436 - RNA, 19 nt, Artificial Sequence
  Description of Artificial Sequence: Synthetic oligonucleotide
  Sense strand starting at position 2267 of SEQ ID NO: 259
gcuagagaagcucaauaca

SEQ ID NO: 23437 - RNA, 19 nt, Artificial Sequence
  Description of Artificial Sequence: Synthetic oligonucleotide
  Antisense strand to SEQ ID NO: 23436
uguauugagcuucucuagc

SEQ ID NO: 23438 - RNA, 19 nt, Artificial Sequence
  Description of Artificial Sequence: Synthetic oligonucleotide
  Sense strand starting at position 2419 of SEQ ID NO: 259
cuuagaaacuuggucucau

SEQ ID NO: 23439 - RNA, 19 nt, Artificial Sequence
  Description of Artificial Sequence: Synthetic oligonucleotide
  Antisense strand to SEQ ID NO: 23438
augagaccaaguuucuaag

SEQ ID NO: 23440 - RNA, 19 nt, Artificial Sequence
  Description of Artificial Sequence: Synthetic oligonucleotide
  Sense strand starting at position 2420 of SEQ ID NO: 259
uuagaaacuuggucucaug

SEQ ID NO: 23441 - RNA, 19 nt, Artificial Sequence
  Description of Artificial Sequence: Synthetic oligonucleotide
  Antisense strand to SEQ ID NO: 23440
caugagaccaaguuucuaa

SEQ ID NO: 23442 - RNA, 19 nt, Artificial Sequence
  Description of Artificial Sequence: Synthetic oligonucleotide
  Sense strand starting at position 2457 of SEQ ID NO: 259
uggaaauaauuguugcuuu

SEQ ID NO: 23443 - RNA, 19 nt, Artificial Sequence
  Description of Artificial Sequence: Synthetic oligonucleotide
  Antisense strand to SEQ ID NO: 23442
aaagcaacaauuauuucca

SEQ ID NO: 23444 - RNA, 19 nt, Artificial Sequence
  Description of Artificial Sequence: Synthetic oligonucleotide
  Sense strand starting at position 2511 of SEQ ID NO: 259
ugggucuggcaauaauuga

SEQ ID NO: 23445 - RNA, 19 nt, Artificial Sequence
  Description of Artificial Sequence: Synthetic oligonucleotide
  Antisense strand to SEQ ID NO: 23444
ucaauuauugccagaccca

SEQ ID NO: 23446 - RNA, 19 nt, Artificial Sequence
  Description of Artificial Sequence: Synthetic oligonucleotide
  Sense strand starting at position 2518 of SEQ ID NO: 259
ggcaauaauugauugucaa

SEQ ID NO: 23447 - RNA, 19 nt, Artificial Sequence
  Description of Artificial Sequence: Synthetic oligonucleotide
  Antisense strand to SEQ ID NO: 23446
uugacaaucaauuauugcc

SEQ ID NO: 23448 - RNA, 19 nt, Artificial Sequence
  Description of Artificial Sequence: Synthetic oligonucleotide
  Sense strand starting at position 2519 of SEQ ID NO: 259
gcaauaauugauugucaaa

SEQ ID NO: 23449 - RNA, 19 nt, Artificial Sequence
  Description of Artificial Sequence: Synthetic oligonucleotide
  Antisense strand to SEQ ID NO: 23448
uuugacaaucaauuauugc

SEQ ID NO: 23450 - RNA, 19 nt, Artificial Sequence
  Description of Artificial Sequence: Synthetic oligonucleotide
  Sense strand starting at position 2589 of SEQ ID NO: 259
guauguaaaguccaugauc

SEQ ID NO: 23451 - RNA, 19 nt, Artificial Sequence
  Description of Artificial Sequence: Synthetic oligonucleotide
  Antisense strand to SEQ ID NO: 23450
gaucauggacuuuacauac

SEQ ID NO: 23452 - RNA, 19 nt, Artificial Sequence
  Description of Artificial Sequence: Synthetic oligonucleotide
  Sense strand starting at position 2591 of SEQ ID NO: 259
auguaaaguccaugaucug

SEQ ID NO: 23453 - RNA, 19 nt, Artificial Sequence
  Description of Artificial Sequence: Synthetic oligonucleotide
  Antisense strand to SEQ ID NO: 23452
cagaucauggacuuuacau

SEQ ID NO: 23454 - RNA, 19 nt, Artificial Sequence
  Description of Artificial Sequence: Synthetic oligonucleotide
  Sense strand starting at position 2667 of SEQ ID NO: 259
ggaauuaaaguauggcucu

SEQ ID NO: 23455 - RNA, 19 nt, Artificial Sequence
  Description of Artificial Sequence: Synthetic oligonucleotide
  Antisense strand to SEQ ID NO: 23454
agagccauacuuuaauucc

SEQ ID NO: 23456 - RNA, 19 nt, Artificial Sequence
  Description of Artificial Sequence: Synthetic oligonucleotide
  Sense strand starting at position 2686 of SEQ ID NO: 259
aacagaugacuuggcugaa

SEQ ID NO: 23457 - RNA, 19 nt, Artificial Sequence
  Description of Artificial Sequence: Synthetic oligonucleotide
  Antisense strand to SEQ ID NO: 23456
uucagccaagucaucuguu

SEQ ID NO: 23458 - RNA, 19 nt, Artificial Sequence
  Description of Artificial Sequence: Synthetic oligonucleotide
  Sense strand starting at position 2687 of SEQ ID NO: 259
acagaugacuuggcugaaa

SEQ ID NO: 23459 - RNA, 19 nt, Artificial Sequence
  Description of Artificial Sequence: Synthetic oligonucleotide
  Antisense strand to SEQ ID NO: 23458
uuucagccaagucaucugu

SEQ ID NO: 23460 - RNA, 19 nt, Artificial Sequence
  Description of Artificial Sequence: Synthetic oligonucleotide
  Sense strand starting at position 2689 of SEQ ID NO: 259
agaugacuuggcugaaauu

SEQ ID NO: 23461 - RNA, 19 nt, Artificial Sequence
  Description of Artificial Sequence: Synthetic oligonucleotide
  Antisense strand to SEQ ID NO: 23460
aauuucagccaagucaucu

SEQ ID NO: 23462 - RNA, 19 nt, Artificial Sequence
  Description of Artificial Sequence: Synthetic oligonucleotide
  Sense strand starting at position 2734 of SEQ ID NO: 259
uuaucuacuccuggaggga

SEQ ID NO: 23463 - RNA, 19 nt, Artificial Sequence
  Description of Artificial Sequence: Synthetic oligonucleotide
  Antisense strand to SEQ ID NO: 23462
ucccuccaggaguagauaa

SEQ ID NO: 23464 - RNA, 19 nt, Artificial Sequence
  Description of Artificial Sequence: Synthetic oligonucleotide
  Sense strand starting at position 3098 of SEQ ID NO: 259
ccaaauauguaauuagguu

SEQ ID NO: 23465 - RNA, 19 nt, Artificial Sequence
  Description of Artificial Sequence: Synthetic oligonucleotide
  Antisense strand to SEQ ID NO: 23464
aaccuaauuacauauuugg

SEQ ID NO: 23466 - RNA, 19 nt, Artificial Sequence
  Description of Artificial Sequence: Synthetic oligonucleotide
  Sense strand starting at position 3111 of SEQ ID NO: 259
uagguuacauggucugaau

SEQ ID NO: 23467 - RNA, 19 nt, Artificial Sequence
  Description of Artificial Sequence: Synthetic oligonucleotide
  Antisense strand to SEQ ID NO: 23466
auucagaccauguaaccua

SEQ ID NO: 23468 - RNA, 19 nt, Artificial Sequence
  Description of Artificial Sequence: Synthetic oligonucleotide
  Sense strand starting at position 3156 of SEQ ID NO: 259
uugaaaugcuaacugguaa

SEQ ID NO: 23469 - RNA, 19 nt, Artificial Sequence
  Description of Artificial Sequence: Synthetic oligonucleotide
  Antisense strand to SEQ ID NO: 23468
uuaccaguuagcauuucaa

SEQ ID NO: 23470 - RNA, 19 nt, Artificial Sequence
  Description of Artificial Sequence: Synthetic oligonucleotide
  Sense strand starting at position 3213 of SEQ ID NO: 259
gggcaaagcccucaugagu

SEQ ID NO: 23471 - RNA, 19 nt, Artificial Sequence
  Description of Artificial Sequence: Synthetic oligonucleotide
  Antisense strand to SEQ ID NO: 23470
acucaugagggcuuugccc

SEQ ID NO: 23472 - RNA, 19 nt, Artificial Sequence
  Description of Artificial Sequence: Synthetic oligonucleotide
  Sense strand starting at position 3388 of SEQ ID NO: 259
cuuccaggucugugagaaa

SEQ ID NO: 23473 - RNA, 19 nt, Artificial Sequence
  Description of Artificial Sequence: Synthetic oligonucleotide
  Antisense strand to SEQ ID NO: 23472
uuucucacagaccuggaag

SEQ ID NO: 23474 - RNA, 19 nt, Artificial Sequence
  Description of Artificial Sequence: Synthetic oligonucleotide
  Sense strand starting at position 3706 of SEQ ID NO: 259
acagcaagcucucucauga

SEQ ID NO: 23475 - RNA, 19 nt, Artificial Sequence
  Description of Artificial Sequence: Synthetic oligonucleotide
  Antisense strand to SEQ ID NO: 23474
ucaugagagagcuugcugu

SEQ ID NO: 23476 - RNA, 19 nt, Artificial Sequence
  Description of Artificial Sequence: Synthetic oligonucleotide
  Sense strand starting at position 3866 of SEQ ID NO: 259
ggacacaaguguuuagucu

SEQ ID NO: 23477 - RNA, 19 nt, Artificial Sequence
  Description of Artificial Sequence: Synthetic oligonucleotide
  Antisense strand to SEQ ID NO: 23476
agacuaaacacuugugucc

SEQ ID NO: 23478 - RNA, 19 nt, Artificial Sequence
  Description of Artificial Sequence: Synthetic oligonucleotide
  Sense strand starting at position 3884 of SEQ ID NO: 259
uguaacaucuucuuaggua

SEQ ID NO: 23479 - RNA, 19 nt, Artificial Sequence
  Description of Artificial Sequence: Synthetic oligonucleotide
  Antisense strand to SEQ ID NO: 23478
uaccuaagaagauguuaca

SEQ ID NO: 23480 - RNA, 19 nt, Artificial Sequence
  Description of Artificial Sequence: Synthetic oligonucleotide
  Sense strand starting at position 3888 of SEQ ID NO: 259
acaucuucuuagguaagaa

SEQ ID NO: 23481 - RNA, 19 nt, Artificial Sequence
  Description of Artificial Sequence: Synthetic oligonucleotide
  Antisense strand to SEQ ID NO: 23480
uucuuaccuaagaagaugu

SEQ ID NO: 23482 - RNA, 19 nt, Artificial Sequence
  Description of Artificial Sequence: Synthetic oligonucleotide
  Sense strand starting at position 3898 of SEQ ID NO: 259
agguaagaauuuggaugga

SEQ ID NO: 23483 - RNA, 19 nt, Artificial Sequence
  Description of Artificial Sequence: Synthetic oligonucleotide
  Antisense strand to SEQ ID NO: 23482
uccauccaaauucuuaccu

SEQ ID NO: 23484 - RNA, 19 nt, Artificial Sequence
  Description of Artificial Sequence: Synthetic oligonucleotide
  Sense strand starting at position 3928 of SEQ ID NO: 259
uuaucuuucuuugugaaug

SEQ ID NO: 23485 - RNA, 19 nt, Artificial Sequence
  Description of Artificial Sequence: Synthetic oligonucleotide
  Antisense strand to SEQ ID NO: 23484
cauucacaaagaaagauaa

SEQ ID NO: 23486 - RNA, 19 nt, Artificial Sequence
  Description of Artificial Sequence: Synthetic oligonucleotide
  Sense strand starting at position 167 of SEQ ID NO: 261
ugcuuucugggucaccaua

SEQ ID NO: 23487 - RNA, 19 nt, Artificial Sequence
  Description of Artificial Sequence: Synthetic oligonucleotide
  Antisense strand to SEQ ID NO: 23486
uauggugacccagaaagca

SEQ ID NO: 23488 - RNA, 19 nt, Artificial Sequence
  Description of Artificial Sequence: Synthetic oligonucleotide
  Sense strand starting at position 225 of SEQ ID NO: 261
ggcuauuaccacuagauau

SEQ ID NO: 23489 - RNA, 19 nt, Artificial Sequence
  Description of Artificial Sequence: Synthetic oligonucleotide
  Antisense strand to SEQ ID NO: 23488
auaucuagugguaauagcc

SEQ ID NO: 23490 - RNA, 19 nt, Artificial Sequence
  Description of Artificial Sequence: Synthetic oligonucleotide
  Sense strand starting at position 306 of SEQ ID NO: 261
gagggcccuggcuaagaau

SEQ ID NO: 23491 - RNA, 19 nt, Artificial Sequence
  Description of Artificial Sequence: Synthetic oligonucleotide
  Antisense strand to SEQ ID NO: 23490
auucuuagccagggcccuc

SEQ ID NO: 23492 - RNA, 19 nt, Artificial Sequence
  Description of Artificial Sequence: Synthetic oligonucleotide
  Sense strand starting at position 606 of SEQ ID NO: 261
ucggcaauagcuuacuaaa

SEQ ID NO: 23493 - RNA, 19 nt, Artificial Sequence
  Description of Artificial Sequence: Synthetic oligonucleotide
  Antisense strand to SEQ ID NO: 23492
uuuaguaagcuauugccga

SEQ ID NO: 23494 - RNA, 19 nt, Artificial Sequence
  Description of Artificial Sequence: Synthetic oligonucleotide
  Sense strand starting at position 608 of SEQ ID NO: 261
ggcaauagcuuacuaaaua

SEQ ID NO: 23495 - RNA, 19 nt, Artificial Sequence
  Description of Artificial Sequence: Synthetic oligonucleotide
  Antisense strand to SEQ ID NO: 23494
uauuuaguaagcuauugcc

SEQ ID NO: 23496 - RNA, 19 nt, Artificial Sequence
  Description of Artificial Sequence: Synthetic oligonucleotide
  Sense strand starting at position 668 of SEQ ID NO: 261
aucugaacccuugggcaau

SEQ ID NO: 23497 - RNA, 19 nt, Artificial Sequence
  Description of Artificial Sequence: Synthetic oligonucleotide
  Antisense strand to SEQ ID NO: 23496
auugcccaaggguucagau

SEQ ID NO: 23498 - RNA, 19 nt, Artificial Sequence
  Description of Artificial Sequence: Synthetic oligonucleotide
  Sense strand starting at position 778 of SEQ ID NO: 261
ggaugagggcucugaucag

SEQ ID NO: 23499 - RNA, 19 nt, Artificial Sequence
  Description of Artificial Sequence: Synthetic oligonucleotide
  Antisense strand to SEQ ID NO: 23498
cugaucagagcccucaucc

SEQ ID NO: 23500 - RNA, 19 nt, Artificial Sequence
  Description of Artificial Sequence: Synthetic oligonucleotide
  Sense strand starting at position 782 of SEQ ID NO: 261
gagggcucugaucagcaau

SEQ ID NO: 23501 - RNA, 19 nt, Artificial Sequence
  Description of Artificial Sequence: Synthetic oligonucleotide
  Antisense strand to SEQ ID NO: 23500
auugcugaucagagcccuc

SEQ ID NO: 23502 - RNA, 19 nt, Artificial Sequence
  Description of Artificial Sequence: Synthetic oligonucleotide
  Sense strand starting at position 784 of SEQ ID NO: 261
gggcucugaucagcaauga

SEQ ID NO: 23503 - RNA, 19 nt, Artificial Sequence
  Description of Artificial Sequence: Synthetic oligonucleotide
  Antisense strand to SEQ ID NO: 23502
ucauugcugaucagagccc

SEQ ID NO: 23504 - RNA, 19 nt, Artificial Sequence
  Description of Artificial Sequence: Synthetic oligonucleotide
  Sense strand starting at position 785 of SEQ ID NO: 261
ggcucugaucagcaaugau

SEQ ID NO: 23505 - RNA, 19 nt, Artificial Sequence
  Description of Artificial Sequence: Synthetic oligonucleotide
  Antisense strand to SEQ ID NO: 23504
aucauugcugaucagagcc

SEQ ID NO: 23506 - RNA, 19 nt, Artificial Sequence
  Description of Artificial Sequence: Synthetic oligonucleotide
  Sense strand starting at position 793 of SEQ ID NO: 261
ucagcaaugauguggacaa

SEQ ID NO: 23507 - RNA, 19 nt, Artificial Sequence
  Description of Artificial Sequence: Synthetic oligonucleotide
  Antisense strand to SEQ ID NO: 23506
uuguccacaucauugcuga

SEQ ID NO: 23508 - RNA, 19 nt, Artificial Sequence
  Description of Artificial Sequence: Synthetic oligonucleotide
  Sense strand starting at position 795 of SEQ ID NO: 261
agcaaugauguggacaagu

SEQ ID NO: 23509 - RNA, 19 nt, Artificial Sequence
  Description of Artificial Sequence: Synthetic oligonucleotide
  Antisense strand to SEQ ID NO: 23508
acuuguccacaucauugcu

SEQ ID NO: 23510 - RNA, 19 nt, Artificial Sequence
  Description of Artificial Sequence: Synthetic oligonucleotide
  Sense strand starting at position 825 of SEQ ID NO: 261
aaacaagugccuugaggua

SEQ ID NO: 23511 - RNA, 19 nt, Artificial Sequence
  Description of Artificial Sequence: Synthetic oligonucleotide
  Antisense strand to SEQ ID NO: 23510
uaccucaaggcacuuguuu

SEQ ID NO: 23512 - RNA, 19 nt, Artificial Sequence
  Description of Artificial Sequence: Synthetic oligonucleotide
  Sense strand starting at position 992 of SEQ ID NO: 261
auuucugucccuuggguua

SEQ ID NO: 23513 - RNA, 19 nt, Artificial Sequence
  Description of Artificial Sequence: Synthetic oligonucleotide
  Antisense strand to SEQ ID NO: 23512
uaacccaagggacagaaau

SEQ ID NO: 23514 - RNA, 19 nt, Artificial Sequence
  Description of Artificial Sequence: Synthetic oligonucleotide
  Sense strand starting at position 1134 of SEQ ID NO: 261
ugauaaugaugagaagaag

SEQ ID NO: 23515 - RNA, 19 nt, Artificial Sequence
  Description of Artificial Sequence: Synthetic oligonucleotide
  Antisense strand to SEQ ID NO: 23514
cuucuucucaucauuauca

SEQ ID NO: 23516 - RNA, 19 nt, Artificial Sequence
  Description of Artificial Sequence: Synthetic oligonucleotide
  Sense strand starting at position 1168 of SEQ ID NO: 261
gaauuagugauccacguug

SEQ ID NO: 23517 - RNA, 19 nt, Artificial Sequence
  Description of Artificial Sequence: Synthetic oligonucleotide
  Antisense strand to SEQ ID NO: 23516
caacguggaucacuaauuc

SEQ ID NO: 23518 - RNA, 19 nt, Artificial Sequence
  Description of Artificial Sequence: Synthetic oligonucleotide
  Sense strand starting at position 1185 of SEQ ID NO: 261
ugggaugaauuagcuaaau

SEQ ID NO: 23519 - RNA, 19 nt, Artificial Sequence
  Description of Artificial Sequence: Synthetic oligonucleotide
  Antisense strand to SEQ ID NO: 23518
auuuagcuaauucauccca

SEQ ID NO: 23520 - RNA, 19 nt, Artificial Sequence
  Description of Artificial Sequence: Synthetic oligonucleotide
  Sense strand starting at position 1195 of SEQ ID NO: 261
uagcuaaauggaugucuau

SEQ ID NO: 23521 - RNA, 19 nt, Artificial Sequence
  Description of Artificial Sequence: Synthetic oligonucleotide
  Antisense strand to SEQ ID NO: 23520
auagacauccauuuagcua

SEQ ID NO: 23522 - RNA, 19 nt, Artificial Sequence
  Description of Artificial Sequence: Synthetic oligonucleotide
  Sense strand starting at position 1204 of SEQ ID NO: 261
ggaugucuaugucuaucaa

SEQ ID NO: 23523 - RNA, 19 nt, Artificial Sequence
  Description of Artificial Sequence: Synthetic oligonucleotide
  Antisense strand to SEQ ID NO: 23522
uugauagacauagacaucc

SEQ ID NO: 23524 - RNA, 19 nt, Artificial Sequence
  Description of Artificial Sequence: Synthetic oligonucleotide
  Sense strand starting at position 1356 of SEQ ID NO: 261
ccgggaguccuagacaaug

SEQ ID NO: 23525 - RNA, 19 nt, Artificial Sequence
  Description of Artificial Sequence: Synthetic oligonucleotide
  Antisense strand to SEQ ID NO: 23524
cauugucuaggacucccgg

SEQ ID NO: 23526 - RNA, 19 nt, Artificial Sequence
  Description of Artificial Sequence: Synthetic oligonucleotide
  Sense strand starting at position 1401 of SEQ ID NO: 261
ggcagaaagcacuacuacu

SEQ ID NO: 23527 - RNA, 19 nt, Artificial Sequence
  Description of Artificial Sequence: Synthetic oligonucleotide
  Antisense strand to SEQ ID NO: 23526
aguaguagugcuuucugcc

SEQ ID NO: 23528 - RNA, 19 nt, Artificial Sequence
  Description of Artificial Sequence: Synthetic oligonucleotide
  Sense strand starting at position 1540 of SEQ ID NO: 261
gucuucugaguccaucaaa

SEQ ID NO: 23529 - RNA, 19 nt, Artificial Sequence
  Description of Artificial Sequence: Synthetic oligonucleotide
  Antisense strand to SEQ ID NO: 23528
uuugauggacucagaagac

SEQ ID NO: 23530 - RNA, 19 nt, Artificial Sequence
  Description of Artificial Sequence: Synthetic oligonucleotide
  Sense strand starting at position 1632 of SEQ ID NO: 261
cuuuguuucccaggagaaa

SEQ ID NO: 23531 - RNA, 19 nt, Artificial Sequence
  Description of Artificial Sequence: Synthetic oligonucleotide
  Antisense strand to SEQ ID NO: 23530
uuucuccugggaaacaaag

SEQ ID NO: 23532 - RNA, 19 nt, Artificial Sequence
  Description of Artificial Sequence: Synthetic oligonucleotide
  Sense strand starting at position 1697 of SEQ ID NO: 261
cgagaauaagucugaaauu

SEQ ID NO: 23533 - RNA, 19 nt, Artificial Sequence
  Description of Artificial Sequence: Synthetic oligonucleotide
  Antisense strand to SEQ ID NO: 23532
aauuucagacuuauucucg

SEQ ID NO: 23534 - RNA, 19 nt, Artificial Sequence
  Description of Artificial Sequence: Synthetic oligonucleotide
  Sense strand starting at position 1847 of SEQ ID NO: 261
ugaucagauugcucccuca

SEQ ID NO: 23535 - RNA, 19 nt, Artificial Sequence
  Description of Artificial Sequence: Synthetic oligonucleotide
  Antisense strand to SEQ ID NO: 23534
ugagggagcaaucugauca

SEQ ID NO: 23536 - RNA, 19 nt, Artificial Sequence
  Description of Artificial Sequence: Synthetic oligonucleotide
  Sense strand starting at position 2232 of SEQ ID NO: 261
gggcauggaucagcagaau

SEQ ID NO: 23537 - RNA, 19 nt, Artificial Sequence
  Description of Artificial Sequence: Synthetic oligonucleotide
  Antisense strand to SEQ ID NO: 23536
auucugcugauccaugccc

SEQ ID NO: 23538 - RNA, 19 nt, Artificial Sequence
  Description of Artificial Sequence: Synthetic oligonucleotide
  Sense strand starting at position 2699 of SEQ ID NO: 261
uugggugauacaggcuaaa

SEQ ID NO: 23539 - RNA, 19 nt, Artificial Sequence
  Description of Artificial Sequence: Synthetic oligonucleotide
  Antisense strand to SEQ ID NO: 23538
uuuagccuguaucacccaa

SEQ ID NO: 23540 - RNA, 19 nt, Artificial Sequence
  Description of Artificial Sequence: Synthetic oligonucleotide
  Sense strand starting at position 2738 of SEQ ID NO: 261
cggagaucauauccauauc

SEQ ID NO: 23541 - RNA, 19 nt, Artificial Sequence
  Description of Artificial Sequence: Synthetic oligonucleotide
  Antisense strand to SEQ ID NO: 23540
gauauggauaugaucuccg

SEQ ID NO: 23542 - RNA, 19 nt, Artificial Sequence
  Description of Artificial Sequence: Synthetic oligonucleotide
  Sense strand starting at position 2773 of SEQ ID NO: 261
ugauuuauguccuuccgua

SEQ ID NO: 23543 - RNA, 19 nt, Artificial Sequence
  Description of Artificial Sequence: Synthetic oligonucleotide
  Antisense strand to SEQ ID NO: 23542
uacggaaggacauaaauca

SEQ ID NO: 23544 - RNA, 19 nt, Artificial Sequence
  Description of Artificial Sequence: Synthetic oligonucleotide
  Sense strand starting at position 2789 of SEQ ID NO: 261
guaaguaucccuggauaac

SEQ ID NO: 23545 - RNA, 19 nt, Artificial Sequence
  Description of Artificial Sequence: Synthetic oligonucleotide
  Antisense strand to SEQ ID NO: 23544
guuauccagggauacuuac

SEQ ID NO: 23546 - RNA, 19 nt, Artificial Sequence
  Description of Artificial Sequence: Synthetic oligonucleotide
  Sense strand starting at position 3086 of SEQ ID NO: 261
ggaggucagucuuugaacu

SEQ ID NO: 23547 - RNA, 19 nt, Artificial Sequence
  Description of Artificial Sequence: Synthetic oligonucleotide
  Antisense strand to SEQ ID NO: 23546
aguucaaagacugaccucc

SEQ ID NO: 23548 - RNA, 19 nt, Artificial Sequence
  Description of Artificial Sequence: Synthetic oligonucleotide
  Sense strand starting at position 3168 of SEQ ID NO: 261
ggaaggaagugugugauga

SEQ ID NO: 23549 - RNA, 19 nt, Artificial Sequence
  Description of Artificial Sequence: Synthetic oligonucleotide
  Antisense strand to SEQ ID NO: 23548
ucaucacacacuuccuucc

SEQ ID NO: 23550 - RNA, 19 nt, Artificial Sequence
  Description of Artificial Sequence: Synthetic oligonucleotide
  Sense strand starting at position 3169 of SEQ ID NO: 261
gaaggaagugugugaugac

SEQ ID NO: 23551 - RNA, 19 nt, Artificial Sequence
  Description of Artificial Sequence: Synthetic oligonucleotide
  Antisense strand to SEQ ID NO: 23550
gucaucacacacuuccuuc

SEQ ID NO: 23552 - RNA, 19 nt, Artificial Sequence
  Description of Artificial Sequence: Synthetic oligonucleotide
  Sense strand starting at position 3243 of SEQ ID NO: 261
gccuuuguccgcuucucua

SEQ ID NO: 23553 - RNA, 19 nt, Artificial Sequence
  Description of Artificial Sequence: Synthetic oligonucleotide
  Antisense strand to SEQ ID NO: 23552
uagagaagcggacaaaggc

SEQ ID NO: 23554 - RNA, 19 nt, Artificial Sequence
  Description of Artificial Sequence: Synthetic oligonucleotide
  Sense strand starting at position 3314 of SEQ ID NO: 261
cuuugagaauaugugaaua

SEQ ID NO: 23555 - RNA, 19 nt, Artificial Sequence
  Description of Artificial Sequence: Synthetic oligonucleotide
  Antisense strand to SEQ ID NO: 23554
uauucacauauucucaaag

SEQ ID NO: 23556 - RNA, 19 nt, Artificial Sequence
  Description of Artificial Sequence: Synthetic oligonucleotide
  Sense strand starting at position 3769 of SEQ ID NO: 261
uggguuaagcugcauuaaa

SEQ ID NO: 23557 - RNA, 19 nt, Artificial Sequence
  Description of Artificial Sequence: Synthetic oligonucleotide
  Antisense strand to SEQ ID NO: 23556
uuuaaugcagcuuaaccca

SEQ ID NO: 23558 - RNA, 19 nt, Artificial Sequence
  Description of Artificial Sequence: Synthetic oligonucleotide
  Sense strand starting at position 3779 of SEQ ID NO: 261
ugcauuaaaguguaucaaa

SEQ ID NO: 23559 - RNA, 19 nt, Artificial Sequence
  Description of Artificial Sequence: Synthetic oligonucleotide
  Antisense strand to SEQ ID NO: 23558
uuugauacacuuuaaugca

SEQ ID NO: 23560 - RNA, 19 nt, Artificial Sequence
  Description of Artificial Sequence: Synthetic oligonucleotide
  Sense strand starting at position 3889 of SEQ ID NO: 261
cuguaaugguauuugcuua

SEQ ID NO: 23561 - RNA, 19 nt, Artificial Sequence
  Description of Artificial Sequence: Synthetic oligonucleotide
  Antisense strand to SEQ ID NO: 23560
uaagcaaauaccauuacag

SEQ ID NO: 23562 - RNA, 19 nt, Artificial Sequence
  Description of Artificial Sequence: Synthetic oligonucleotide
  Sense strand starting at position 3903 of SEQ ID NO: 261
gcuuaugauccugacuucu

SEQ ID NO: 23563 - RNA, 19 nt, Artificial Sequence
  Description of Artificial Sequence: Synthetic oligonucleotide
  Antisense strand to SEQ ID NO: 23562
agaagucaggaucauaagc

SEQ ID NO: 23564 - RNA, 19 nt, Artificial Sequence
  Description of Artificial Sequence: Synthetic oligonucleotide
  Sense strand starting at position 3905 of SEQ ID NO: 261
uuaugauccugacuucuga

SEQ ID NO: 23565 - RNA, 19 nt, Artificial Sequence
  Description of Artificial Sequence: Synthetic oligonucleotide
  Antisense strand to SEQ ID NO: 23564
ucagaagucaggaucauaa

SEQ ID NO: 23566 - RNA, 19 nt, Artificial Sequence
  Description of Artificial Sequence: Synthetic oligonucleotide
  Sense strand starting at position 4 of SEQ ID NO: 260
ugggcucuucuaugacaug

SEQ ID NO: 23567 - RNA, 19 nt, Artificial Sequence
  Description of Artificial Sequence: Synthetic oligonucleotide
  Antisense strand to SEQ ID NO: 23566
caugucauagaagagccca

SEQ ID NO: 23568 - RNA, 19 nt, Artificial Sequence
  Description of Artificial Sequence: Synthetic oligonucleotide
  Sense strand starting at position 48 of SEQ ID NO: 260
uagauauucuuagcuggac

SEQ ID NO: 23569 - RNA, 19 nt, Artificial Sequence
  Description of Artificial Sequence: Synthetic oligonucleotide
  Antisense strand to SEQ ID NO: 23568
guccagcuaagaauaucua

SEQ ID NO: 23570 - RNA, 19 nt, Artificial Sequence
  Description of Artificial Sequence: Synthetic oligonucleotide
  Sense strand starting at position 49 of SEQ ID NO: 260
agauauucuuagcuggaca

SEQ ID NO: 23571 - RNA, 19 nt, Artificial Sequence
  Description of Artificial Sequence: Synthetic oligonucleotide
  Antisense strand to SEQ ID NO: 23570
uguccagcuaagaauaucu

SEQ ID NO: 23572 - RNA, 19 nt, Artificial Sequence
  Description of Artificial Sequence: Synthetic oligonucleotide
  Sense strand starting at position 130 of SEQ ID NO: 260
ugucauauuuauucgugac

SEQ ID NO: 23573 - RNA, 19 nt, Artificial Sequence
  Description of Artificial Sequence: Synthetic oligonucleotide
  Antisense strand to SEQ ID NO: 23572
gucacgaauaaauaugaca

SEQ ID NO: 23574 - RNA, 19 nt, Artificial Sequence
  Description of Artificial Sequence: Synthetic oligonucleotide
  Sense strand starting at position 140 of SEQ ID NO: 260
auucgugacucuuccaaag

SEQ ID NO: 23575 - RNA, 19 nt, Artificial Sequence
  Description of Artificial Sequence: Synthetic oligonucleotide
  Antisense strand to SEQ ID NO: 23574
cuuuggaagagucacgaau

SEQ ID NO: 23576 - RNA, 19 nt, Artificial Sequence
  Description of Artificial Sequence: Synthetic oligonucleotide
  Sense strand starting at position 318 of SEQ ID NO: 260
uggcaaagccaucagaauu

SEQ ID NO: 23577 - RNA, 19 nt, Artificial Sequence
  Description of Artificial Sequence: Synthetic oligonucleotide
  Antisense strand to SEQ ID NO: 23576
aauucugauggcuuugcca

SEQ ID NO: 23578 - RNA, 19 nt, Artificial Sequence
  Description of Artificial Sequence: Synthetic oligonucleotide
  Sense strand starting at position 420 of SEQ ID NO: 260
cacauuaaaguggguuuau

SEQ ID NO: 23579 - RNA, 19 nt, Artificial Sequence
  Description of Artificial Sequence: Synthetic oligonucleotide
  Antisense strand to SEQ ID NO: 23578
auaaacccacuuuaaugug

SEQ ID NO: 23580 - RNA, 19 nt, Artificial Sequence
  Description of Artificial Sequence: Synthetic oligonucleotide
  Sense strand starting at position 429 of SEQ ID NO: 260
guggguuuaugaccaugaa

SEQ ID NO: 23581 - RNA, 19 nt, Artificial Sequence
  Description of Artificial Sequence: Synthetic oligonucleotide
  Antisense strand to SEQ ID NO: 23580
uucauggucauaaacccac

SEQ ID NO: 23582 - RNA, 19 nt, Artificial Sequence
  Description of Artificial Sequence: Synthetic oligonucleotide
  Sense strand starting at position 432 of SEQ ID NO: 260
gguuuaugaccaugaacac

SEQ ID NO: 23583 - RNA, 19 nt, Artificial Sequence
  Description of Artificial Sequence: Synthetic oligonucleotide
  Antisense strand to SEQ ID NO: 23582
guguucauggucauaaacc

SEQ ID NO: 23584 - RNA, 19 nt, Artificial Sequence
  Description of Artificial Sequence: Synthetic oligonucleotide
  Sense strand starting at position 441 of SEQ ID NO: 260
ccaugaacacuucguauua

SEQ ID NO: 23585 - RNA, 19 nt, Artificial Sequence
  Description of Artificial Sequence: Synthetic oligonucleotide
  Antisense strand to SEQ ID NO: 23584
uaauacgaaguguucaugg

SEQ ID NO: 23586 - RNA, 19 nt, Artificial Sequence
  Description of Artificial Sequence: Synthetic oligonucleotide
  Sense strand starting at position 529 of SEQ ID NO: 260
uccacaacuuccucggaaa

SEQ ID NO: 23587 - RNA, 19 nt, Artificial Sequence
  Description of Artificial Sequence: Synthetic oligonucleotide
  Antisense strand to SEQ ID NO: 23586
uuuccgaggaaguugugga

SEQ ID NO: 23588 - RNA, 19 nt, Artificial Sequence
  Description of Artificial Sequence: Synthetic oligonucleotide
  Sense strand starting at position 790 of SEQ ID NO: 260
ugggucaucccugagcuuu

SEQ ID NO: 23589 - RNA, 19 nt, Artificial Sequence
  Description of Artificial Sequence: Synthetic oligonucleotide
  Antisense strand to SEQ ID NO: 23588
aaagcucagggaugaccca

SEQ ID NO: 23590 - RNA, 19 nt, Artificial Sequence
  Description of Artificial Sequence: Synthetic oligonucleotide
  Sense strand starting at position 898 of SEQ ID NO: 260
cuguuauguggccaagacu

SEQ ID NO: 23591 - RNA, 19 nt, Artificial Sequence
  Description of Artificial Sequence: Synthetic oligonucleotide
  Antisense strand to SEQ ID NO: 23590
agucuuggccacauaacag

SEQ ID NO: 23592 - RNA, 19 nt, Artificial Sequence
  Description of Artificial Sequence: Synthetic oligonucleotide
  Sense strand starting at position 1047 of SEQ ID NO: 260
ccuccuuaucuuggaagac

SEQ ID NO: 23593 - RNA, 19 nt, Artificial Sequence
  Description of Artificial Sequence: Synthetic oligonucleotide
  Antisense strand to SEQ ID NO: 23592
gucuuccaagauaaggagg

SEQ ID NO: 23594 - RNA, 19 nt, Artificial Sequence
  Description of Artificial Sequence: Synthetic oligonucleotide
  Sense strand starting at position 1258 of SEQ ID NO: 260
aguagcagagcuggauuaa

SEQ ID NO: 23595 - RNA, 19 nt, Artificial Sequence
  Description of Artificial Sequence: Synthetic oligonucleotide
  Antisense strand to SEQ ID NO: 23594
uuaauccagcucugcuacu

SEQ ID NO: 23596 - RNA, 19 nt, Artificial Sequence
  Description of Artificial Sequence: Synthetic oligonucleotide
  Sense strand starting at position 1259 of SEQ ID NO: 260
guagcagagcuggauuaaa

SEQ ID NO: 23597 - RNA, 19 nt, Artificial Sequence
  Description of Artificial Sequence: Synthetic oligonucleotide
  Antisense strand to SEQ ID NO: 23596
uuuaauccagcucugcuac

SEQ ID NO: 23598 - RNA, 19 nt, Artificial Sequence
  Description of Artificial Sequence: Synthetic oligonucleotide
  Sense strand starting at position 1345 of SEQ ID NO: 260
cgggagaagucucuggagu

SEQ ID NO: 23599 - RNA, 19 nt, Artificial Sequence
  Description of Artificial Sequence: Synthetic oligonucleotide
  Antisense strand to SEQ ID NO: 23598
acuccagagacuucucccg

SEQ ID NO: 23600 - RNA, 19 nt, Artificial Sequence
  Description of Artificial Sequence: Synthetic oligonucleotide
  Sense strand starting at position 1346 of SEQ ID NO: 260
gggagaagucucuggaguc

SEQ ID NO: 23601 - RNA, 19 nt, Artificial Sequence
  Description of Artificial Sequence: Synthetic oligonucleotide
  Antisense strand to SEQ ID NO: 23600
gacuccagagacuucuccc

SEQ ID NO: 23602 - RNA, 19 nt, Artificial Sequence
  Description of Artificial Sequence: Synthetic oligonucleotide
  Sense strand starting at position 1390 of SEQ ID NO: 260
gauggagguucuuuaacga

SEQ ID NO: 23603 - RNA, 19 nt, Artificial Sequence
  Description of Artificial Sequence: Synthetic oligonucleotide
  Antisense strand to SEQ ID NO: 23602
ucguuaaagaaccuccauc

SEQ ID NO: 23604 - RNA, 19 nt, Artificial Sequence
  Description of Artificial Sequence: Synthetic oligonucleotide
  Sense strand starting at position 2540 of SEQ ID NO: 260
gcgcggugagcugcagaua

SEQ ID NO: 23605 - RNA, 19 nt, Artificial Sequence
  Description of Artificial Sequence: Synthetic oligonucleotide
  Antisense strand to SEQ ID NO: 23604
uaucugcagcucaccgcgc

SEQ ID NO: 23606 - RNA, 19 nt, Artificial Sequence
  Description of Artificial Sequence: Synthetic oligonucleotide
  Sense strand starting at position 2732 of SEQ ID NO: 260
ggcaguucgacguuugcaa

SEQ ID NO: 23607 - RNA, 19 nt, Artificial Sequence
  Description of Artificial Sequence: Synthetic oligonucleotide
  Antisense strand to SEQ ID NO: 23606
uugcaaacgucgaacugcc

SEQ ID NO: 23608 - RNA, 19 nt, Artificial Sequence
  Description of Artificial Sequence: Synthetic oligonucleotide
  Sense strand starting at position 2733 of SEQ ID NO: 260
gcaguucgacguuugcaaa

SEQ ID NO: 23609 - RNA, 19 nt, Artificial Sequence
  Description of Artificial Sequence: Synthetic oligonucleotide
  Antisense strand to SEQ ID NO: 23608
uuugcaaacgucgaacugc

SEQ ID NO: 23610 - RNA, 19 nt, Artificial Sequence
  Description of Artificial Sequence: Synthetic oligonucleotide
  Sense strand starting at position 2809 of SEQ ID NO: 260
gggccaggguuuguaauuu

SEQ ID NO: 23611 - RNA, 19 nt, Artificial Sequence
  Description of Artificial Sequence: Synthetic oligonucleotide
  Antisense strand to SEQ ID NO: 23610
aaauuacaaacccuggccc

SEQ ID NO: 23612 - RNA, 19 nt, Artificial Sequence
  Description of Artificial Sequence: Synthetic oligonucleotide
  Sense strand starting at position 3066 of SEQ ID NO: 260
gugagauggccucaucuuc

SEQ ID NO: 23613 - RNA, 19 nt, Artificial Sequence
  Description of Artificial Sequence: Synthetic oligonucleotide
  Antisense strand to SEQ ID NO: 23612
gaagaugaggccaucucac

SEQ ID NO: 23614 - RNA, 19 nt, Artificial Sequence
  Description of Artificial Sequence: Synthetic oligonucleotide
  Sense strand starting at position 3223 of SEQ ID NO: 260
caguaaguggcggauuauu

SEQ ID NO: 23615 - RNA, 19 nt, Artificial Sequence
  Description of Artificial Sequence: Synthetic oligonucleotide
  Antisense strand to SEQ ID NO: 23614
aauaauccgccacuuacug

SEQ ID NO: 23616 - RNA, 19 nt, Artificial Sequence
  Description of Artificial Sequence: Synthetic oligonucleotide
  Sense strand starting at position 3235 of SEQ ID NO: 260
gauuauuuaugagaccgga

SEQ ID NO: 23617 - RNA, 19 nt, Artificial Sequence
  Description of Artificial Sequence: Synthetic oligonucleotide
  Antisense strand to SEQ ID NO: 23616
uccggucucauaaauaauc

SEQ ID NO: 23618 - RNA, 19 nt, Artificial Sequence
  Description of Artificial Sequence: Synthetic oligonucleotide
  Sense strand starting at position 3300 of SEQ ID NO: 260
gcuagagaagcucaauaca

SEQ ID NO: 23619 - RNA, 19 nt, Artificial Sequence
  Description of Artificial Sequence: Synthetic oligonucleotide
  Antisense strand to SEQ ID NO: 23618
uguauugagcuucucuagc

SEQ ID NO: 23620 - RNA, 19 nt, Artificial Sequence
  Description of Artificial Sequence: Synthetic oligonucleotide
  Sense strand starting at position 3452 of SEQ ID NO: 260
cuuagaaacuuggucucau

SEQ ID NO: 23621 - RNA, 19 nt, Artificial Sequence
  Description of Artificial Sequence: Synthetic oligonucleotide
  Antisense strand to SEQ ID NO: 23620
augagaccaaguuucuaag

SEQ ID NO: 23622 - RNA, 19 nt, Artificial Sequence
  Description of Artificial Sequence: Synthetic oligonucleotide
  Sense strand starting at position 3453 of SEQ ID NO: 260
uuagaaacuuggucucaug

SEQ ID NO: 23623 - RNA, 19 nt, Artificial Sequence
  Description of Artificial Sequence: Synthetic oligonucleotide
  Antisense strand to SEQ ID NO: 23622
caugagaccaaguuucuaa

SEQ ID NO: 23624 - RNA, 19 nt, Artificial Sequence
  Description of Artificial Sequence: Synthetic oligonucleotide
  Sense strand starting at position 3490 of SEQ ID NO: 260
uggaaauaauuguugcuuu

SEQ ID NO: 23625 - RNA, 19 nt, Artificial Sequence
  Description of Artificial Sequence: Synthetic oligonucleotide
  Antisense strand to SEQ ID NO: 23624
aaagcaacaauuauuucca

SEQ ID NO: 23626 - RNA, 19 nt, Artificial Sequence
  Description of Artificial Sequence: Synthetic oligonucleotide
  Sense strand starting at position 3544 of SEQ ID NO: 260
ugggucuggcaauaauuga

SEQ ID NO: 23627 - RNA, 19 nt, Artificial Sequence
  Description of Artificial Sequence: Synthetic oligonucleotide
  Antisense strand to SEQ ID NO: 23626
ucaauuauugccagaccca

SEQ ID NO: 23628 - RNA, 19 nt, Artificial Sequence
  Description of Artificial Sequence: Synthetic oligonucleotide
  Sense strand starting at position 3551 of SEQ ID NO: 260
ggcaauaauugauugucaa

SEQ ID NO: 23629 - RNA, 19 nt, Artificial Sequence
  Description of Artificial Sequence: Synthetic oligonucleotide
  Antisense strand to SEQ ID NO: 23628
uugacaaucaauuauugcc

SEQ ID NO: 23630 - RNA, 19 nt, Artificial Sequence
  Description of Artificial Sequence: Synthetic oligonucleotide
  Sense strand starting at position 3552 of SEQ ID NO: 260
gcaauaauugauugucaaa

SEQ ID NO: 23631 - RNA, 19 nt, Artificial Sequence
  Description of Artificial Sequence: Synthetic oligonucleotide
  Antisense strand to SEQ ID NO: 23630
uuugacaaucaauuauugc

SEQ ID NO: 23632 - RNA, 19 nt, Artificial Sequence
  Description of Artificial Sequence: Synthetic oligonucleotide
  Sense strand starting at position 3622 of SEQ ID NO: 260
guauguaaaguccaugauc

SEQ ID NO: 23633 - RNA, 19 nt, Artificial Sequence
  Description of Artificial Sequence: Synthetic oligonucleotide
  Antisense strand to SEQ ID NO: 23632
gaucauggacuuuacauac

SEQ ID NO: 23634 - RNA, 19 nt, Artificial Sequence
  Description of Artificial Sequence: Synthetic oligonucleotide
  Sense strand starting at position 3624 of SEQ ID NO: 260
auguaaaguccaugaucug

SEQ ID NO: 23635 - RNA, 19 nt, Artificial Sequence
  Description of Artificial Sequence: Synthetic oligonucleotide
  Antisense strand to SEQ ID NO: 23634
cagaucauggacuuuacau

SEQ ID NO: 23636 - RNA, 19 nt, Artificial Sequence
  Description of Artificial Sequence: Synthetic oligonucleotide
  Sense strand starting at position 3700 of SEQ ID NO: 260
ggaauuaaaguauggcucu

SEQ ID NO: 23637 - RNA, 19 nt, Artificial Sequence
  Description of Artificial Sequence: Synthetic oligonucleotide
  Antisense strand to SEQ ID NO: 23636
agagccauacuuuaauucc

SEQ ID NO: 23638 - RNA, 19 nt, Artificial Sequence
  Description of Artificial Sequence: Synthetic oligonucleotide
  Sense strand starting at position 3719 of SEQ ID NO: 260
aacagaugacuuggcugaa

SEQ ID NO: 23639 - RNA, 19 nt, Artificial Sequence
  Description of Artificial Sequence: Synthetic oligonucleotide
  Antisense strand to SEQ ID NO: 23638
uucagccaagucaucuguu

SEQ ID NO: 23640 - RNA, 19 nt, Artificial Sequence
  Description of Artificial Sequence: Synthetic oligonucleotide
  Sense strand starting at position 3720 of SEQ ID NO: 260
acagaugacuuggcugaaa

SEQ ID NO: 23641 - RNA, 19 nt, Artificial Sequence
  Description of Artificial Sequence: Synthetic oligonucleotide
  Antisense strand to SEQ ID NO: 23640
uuucagccaagucaucugu

SEQ ID NO: 23642 - RNA, 19 nt, Artificial Sequence
  Description of Artificial Sequence: Synthetic oligonucleotide
  Sense strand starting at position 3722 of SEQ ID NO: 260
agaugacuuggcugaaauu

SEQ ID NO: 23643 - RNA, 19 nt, Artificial Sequence
  Description of Artificial Sequence: Synthetic oligonucleotide
  Antisense strand to SEQ ID NO: 23642
aauuucagccaagucaucu

SEQ ID NO: 23644 - RNA, 19 nt, Artificial Sequence
  Description of Artificial Sequence: Synthetic oligonucleotide
  Sense strand starting at position 3767 of SEQ ID NO: 260
uuaucuacuccuggaggga

SEQ ID NO: 23645 - RNA, 19 nt, Artificial Sequence
  Description of Artificial Sequence: Synthetic oligonucleotide
  Antisense strand to SEQ ID NO: 23644
ucccuccaggaguagauaa

SEQ ID NO: 23646 - RNA, 19 nt, Artificial Sequence
  Description of Artificial Sequence: Synthetic oligonucleotide
  Sense strand starting at position 45 of SEQ ID NO: 262
auaucaugacaagguguuu

SEQ ID NO: 23647 - RNA, 19 nt, Artificial Sequence
  Description of Artificial Sequence: Synthetic oligonucleotide
  Antisense strand to SEQ ID NO: 23646
aaacaccuugucaugauau

SEQ ID NO: 23648 - RNA, 19 nt, Artificial Sequence
  Description of Artificial Sequence: Synthetic oligonucleotide
  Sense strand starting at position 50 of SEQ ID NO: 262
augacaagguguuuaacaa

SEQ ID NO: 23649 - RNA, 19 nt, Artificial Sequence
  Description of Artificial Sequence: Synthetic oligonucleotide
  Antisense strand to SEQ ID NO: 23648
uuguuaaacaccuugucau

SEQ ID NO: 23650 - RNA, 19 nt, Artificial Sequence
  Description of Artificial Sequence: Synthetic oligonucleotide
  Sense strand starting at position 293 of SEQ ID NO: 262
cagaaugggcucugcacaa

SEQ ID NO: 23651 - RNA, 19 nt, Artificial Sequence
  Description of Artificial Sequence: Synthetic oligonucleotide
  Antisense strand to SEQ ID NO: 23650
uugugcagagcccauucug

SEQ ID NO: 23652 - RNA, 19 nt, Artificial Sequence
  Description of Artificial Sequence: Synthetic oligonucleotide
  Sense strand starting at position 398 of SEQ ID NO: 262
uuaccauacucuccgaguu

SEQ ID NO: 23653 - RNA, 19 nt, Artificial Sequence
  Description of Artificial Sequence: Synthetic oligonucleotide
  Antisense strand to SEQ ID NO: 23652
aacucggagaguaugguaa

SEQ ID NO: 23654 - RNA, 19 nt, Artificial Sequence
  Description of Artificial Sequence: Synthetic oligonucleotide
  Sense strand starting at position 408 of SEQ ID NO: 262
cuccgaguuccauaauaua

SEQ ID NO: 23655 - RNA, 19 nt, Artificial Sequence
  Description of Artificial Sequence: Synthetic oligonucleotide
  Antisense strand to SEQ ID NO: 23654
uauauuauggaacucggag

SEQ ID NO: 23656 - RNA, 19 nt, Artificial Sequence
  Description of Artificial Sequence: Synthetic oligonucleotide
  Sense strand starting at position 700 of SEQ ID NO: 262
gcacuuugucgguuccuca

SEQ ID NO: 23657 - RNA, 19 nt, Artificial Sequence
  Description of Artificial Sequence: Synthetic oligonucleotide
  Antisense strand to SEQ ID NO: 23656
ugaggaaccgacaaagugc

SEQ ID NO: 23658 - RNA, 19 nt, Artificial Sequence
  Description of Artificial Sequence: Synthetic oligonucleotide
  Sense strand starting at position 786 of SEQ ID NO: 262
uuguauguuguucagagga

SEQ ID NO: 23659 - RNA, 19 nt, Artificial Sequence
  Description of Artificial Sequence: Synthetic oligonucleotide
  Antisense strand to SEQ ID NO: 23658
uccucugaacaacauacaa

SEQ ID NO: 23660 - RNA, 19 nt, Artificial Sequence
  Description of Artificial Sequence: Synthetic oligonucleotide
  Sense strand starting at position 971 of SEQ ID NO: 262
acgucucaauguuucuuua

SEQ ID NO: 23661 - RNA, 19 nt, Artificial Sequence
  Description of Artificial Sequence: Synthetic oligonucleotide
  Antisense strand to SEQ ID NO: 23660
uaaagaaacauugagacgu

SEQ ID NO: 23662 - RNA, 19 nt, Artificial Sequence
  Description of Artificial Sequence: Synthetic oligonucleotide
  Sense strand starting at position 973 of SEQ ID NO: 262
gucucaauguuucuuuauu

SEQ ID NO: 23663 - RNA, 19 nt, Artificial Sequence
  Description of Artificial Sequence: Synthetic oligonucleotide
  Antisense strand to SEQ ID NO: 23662
aauaaagaaacauugagac

SEQ ID NO: 23664 - RNA, 19 nt, Artificial Sequence
  Description of Artificial Sequence: Synthetic oligonucleotide
  Sense strand starting at position 975 of SEQ ID NO: 262
cucaauguuucuuuauugu

SEQ ID NO: 23665 - RNA, 19 nt, Artificial Sequence
  Description of Artificial Sequence: Synthetic oligonucleotide
  Antisense strand to SEQ ID NO: 23664
acaauaaagaaacauugag

SEQ ID NO: 23666 - RNA, 19 nt, Artificial Sequence
  Description of Artificial Sequence: Synthetic oligonucleotide
  Sense strand starting at position 1034 of SEQ ID NO: 262
acaauucguccagacagac

SEQ ID NO: 23667 - RNA, 19 nt, Artificial Sequence
  Description of Artificial Sequence: Synthetic oligonucleotide
  Antisense strand to SEQ ID NO: 23666
gucugucuggacgaauugu

SEQ ID NO: 23668 - RNA, 19 nt, Artificial Sequence
  Description of Artificial Sequence: Synthetic oligonucleotide
  Sense strand starting at position 1256 of SEQ ID NO: 262
cgcauuuccuuagggaaau

SEQ ID NO: 23669 - RNA, 19 nt, Artificial Sequence
  Description of Artificial Sequence: Synthetic oligonucleotide
  Antisense strand to SEQ ID NO: 23668
auuucccuaaggaaaugcg

SEQ ID NO: 23670 - RNA, 19 nt, Artificial Sequence
  Description of Artificial Sequence: Synthetic oligonucleotide
  Sense strand starting at position 1257 of SEQ ID NO: 262
gcauuuccuuagggaaaug

SEQ ID NO: 23671 - RNA, 19 nt, Artificial Sequence
  Description of Artificial Sequence: Synthetic oligonucleotide
  Antisense strand to SEQ ID NO: 23670
cauuucccuaaggaaaugc

SEQ ID NO: 23672 - RNA, 19 nt, Artificial Sequence
  Description of Artificial Sequence: Synthetic oligonucleotide
  Sense strand starting at position 1594 of SEQ ID NO: 262
ugacguucugcgucgggua

SEQ ID NO: 23673 - RNA, 19 nt, Artificial Sequence
  Description of Artificial Sequence: Synthetic oligonucleotide
  Antisense strand to SEQ ID NO: 23672
uacccgacgcagaacguca

SEQ ID NO: 23674 - RNA, 19 nt, Artificial Sequence
  Description of Artificial Sequence: Synthetic oligonucleotide
  Sense strand starting at position 1670 of SEQ ID NO: 262
ggcguccucucuguggaaa

SEQ ID NO: 23675 - RNA, 19 nt, Artificial Sequence
  Description of Artificial Sequence: Synthetic oligonucleotide
  Antisense strand to SEQ ID NO: 23674
uuuccacagagaggacgcc

SEQ ID NO: 23676 - RNA, 19 nt, Artificial Sequence
  Description of Artificial Sequence: Synthetic oligonucleotide
  Sense strand starting at position 1822 of SEQ ID NO: 262
gaccuacuguccuuuguga

SEQ ID NO: 23677 - RNA, 19 nt, Artificial Sequence
  Description of Artificial Sequence: Synthetic oligonucleotide
  Antisense strand to SEQ ID NO: 23676
ucacaaaggacaguagguc

SEQ ID NO: 23678 - RNA, 19 nt, Artificial Sequence
  Description of Artificial Sequence: Synthetic oligonucleotide
  Sense strand starting at position 2025 of SEQ ID NO: 262
cugaccuugcucgagcaau

SEQ ID NO: 23679 - RNA, 19 nt, Artificial Sequence
  Description of Artificial Sequence: Synthetic oligonucleotide
  Antisense strand to SEQ ID NO: 23678
auugcucgagcaaggucag

SEQ ID NO: 23680 - RNA, 19 nt, Artificial Sequence
  Description of Artificial Sequence: Synthetic oligonucleotide
  Sense strand starting at position 2120 of SEQ ID NO: 262
cuacuagacuuguucuauu

SEQ ID NO: 23681 - RNA, 19 nt, Artificial Sequence
  Description of Artificial Sequence: Synthetic oligonucleotide
  Antisense strand to SEQ ID NO: 23680
aauagaacaagucuaguag

SEQ ID NO: 23682 - RNA, 19 nt, Artificial Sequence
  Description of Artificial Sequence: Synthetic oligonucleotide
  Sense strand starting at position 2165 of SEQ ID NO: 262
aguuauuagcacuauucuu

SEQ ID NO: 23683 - RNA, 19 nt, Artificial Sequence
  Description of Artificial Sequence: Synthetic oligonucleotide
  Antisense strand to SEQ ID NO: 23682
aagaauagugcuaauaacu

SEQ ID NO: 23684 - RNA, 19 nt, Artificial Sequence
  Description of Artificial Sequence: Synthetic oligonucleotide
  Sense strand starting at position 2274 of SEQ ID NO: 262
gcuuacagucuagacaaga

SEQ ID NO: 23685 - RNA, 19 nt, Artificial Sequence
  Description of Artificial Sequence: Synthetic oligonucleotide
  Antisense strand to SEQ ID NO: 23684
ucuugucuagacuguaagc

SEQ ID NO: 23686 - RNA, 19 nt, Artificial Sequence
  Description of Artificial Sequence: Synthetic oligonucleotide
  Sense strand starting at position 2853 of SEQ ID NO: 262
gucucuuagcccuggaaca

SEQ ID NO: 23687 - RNA, 19 nt, Artificial Sequence
  Description of Artificial Sequence: Synthetic oligonucleotide
  Antisense strand to SEQ ID NO: 23686
uguuccagggcuaagagac

SEQ ID NO: 23688 - RNA, 19 nt, Artificial Sequence
  Description of Artificial Sequence: Synthetic oligonucleotide
  Sense strand starting at position 2996 of SEQ ID NO: 262
gcucaauagggucaagauc

SEQ ID NO: 23689 - RNA, 19 nt, Artificial Sequence
  Description of Artificial Sequence: Synthetic oligonucleotide
  Antisense strand to SEQ ID NO: 23688
gaucuugacccuauugagc

SEQ ID NO: 23690 - RNA, 19 nt, Artificial Sequence
  Description of Artificial Sequence: Synthetic oligonucleotide
  Sense strand starting at position 3011 of SEQ ID NO: 262
gaucguacccacugaucuu

SEQ ID NO: 23691 - RNA, 19 nt, Artificial Sequence
  Description of Artificial Sequence: Synthetic oligonucleotide
  Antisense strand to SEQ ID NO: 23690
aagaucaguggguacgauc

SEQ ID NO: 23692 - RNA, 19 nt, Artificial Sequence
  Description of Artificial Sequence: Synthetic oligonucleotide
  Sense strand starting at position 3224 of SEQ ID NO: 262
gccacugugcacugauaca

SEQ ID NO: 23693 - RNA, 19 nt, Artificial Sequence
  Description of Artificial Sequence: Synthetic oligonucleotide
  Antisense strand to SEQ ID NO: 23692
uguaucagugcacaguggc

SEQ ID NO: 23694 - RNA, 19 nt, Artificial Sequence
  Description of Artificial Sequence: Synthetic oligonucleotide
  Sense strand starting at position 3246 of SEQ ID NO: 262
caucaucugcucuggagau

SEQ ID NO: 23695 - RNA, 19 nt, Artificial Sequence
  Description of Artificial Sequence: Synthetic oligonucleotide
  Antisense strand to SEQ ID NO: 23694
aucuccagagcagaugaug

SEQ ID NO: 23696 - RNA, 19 nt, Artificial Sequence
  Description of Artificial Sequence: Synthetic oligonucleotide
  Sense strand starting at position 3248 of SEQ ID NO: 262
ucaucugcucuggagauau

SEQ ID NO: 23697 - RNA, 19 nt, Artificial Sequence
  Description of Artificial Sequence: Synthetic oligonucleotide
  Antisense strand to SEQ ID NO: 23696
auaucuccagagcagauga

SEQ ID NO: 23698 - RNA, 19 nt, Artificial Sequence
  Description of Artificial Sequence: Synthetic oligonucleotide
  Sense strand starting at position 3475 of SEQ ID NO: 262
cugugaaagagaugcaaga

SEQ ID NO: 23699 - RNA, 19 nt, Artificial Sequence
  Description of Artificial Sequence: Synthetic oligonucleotide
  Antisense strand to SEQ ID NO: 23698
ucuugcaucucuuucacag

SEQ ID NO: 23700 - RNA, 19 nt, Artificial Sequence
  Description of Artificial Sequence: Synthetic oligonucleotide
  Sense strand starting at position 3550 of SEQ ID NO: 262
ggaaauauguacgcucucu

SEQ ID NO: 23701 - RNA, 19 nt, Artificial Sequence
  Description of Artificial Sequence: Synthetic oligonucleotide
  Antisense strand to SEQ ID NO: 23700
agagagcguacauauuucc

SEQ ID NO: 23702 - RNA, 19 nt, Artificial Sequence
  Description of Artificial Sequence: Synthetic oligonucleotide
  Sense strand starting at position 3642 of SEQ ID NO: 262
gcucuauuauucuuuguuu

SEQ ID NO: 23703 - RNA, 19 nt, Artificial Sequence
  Description of Artificial Sequence: Synthetic oligonucleotide
  Antisense strand to SEQ ID NO: 23702
aaacaaagaauaauagagc

SEQ ID NO: 23704 - RNA, 19 nt, Artificial Sequence
  Description of Artificial Sequence: Synthetic oligonucleotide
  Sense strand starting at position 3645 of SEQ ID NO: 262
cuauuauucuuuguuugac

SEQ ID NO: 23705 - RNA, 19 nt, Artificial Sequence
  Description of Artificial Sequence: Synthetic oligonucleotide
  Antisense strand to SEQ ID NO: 23704
gucaaacaaagaauaauag

SEQ ID NO: 23706 - RNA, 19 nt, Artificial Sequence
  Description of Artificial Sequence: Synthetic oligonucleotide
  Sense strand starting at position 3648 of SEQ ID NO: 262
uuauucuuuguuugacuga

SEQ ID NO: 23707 - RNA, 19 nt, Artificial Sequence
  Description of Artificial Sequence: Synthetic oligonucleotide
  Antisense strand to SEQ ID NO: 23706
ucagucaaacaaagaauaa

SEQ ID NO: 23708 - RNA, 19 nt, Artificial Sequence
  Description of Artificial Sequence: Synthetic oligonucleotide
  Sense strand starting at position 3651 of SEQ ID NO: 262
uucuuuguuugacugaaua

SEQ ID NO: 23709 - RNA, 19 nt, Artificial Sequence
  Description of Artificial Sequence: Synthetic oligonucleotide
  Antisense strand to SEQ ID NO: 23708
uauucagucaaacaaagaa

SEQ ID NO: 23710 - RNA, 19 nt, Artificial Sequence
  Description of Artificial Sequence: Synthetic oligonucleotide
  Sense strand starting at position 3673 of SEQ ID NO: 262
ucagcuucucuauguacua

SEQ ID NO: 23711 - RNA, 19 nt, Artificial Sequence
  Description of Artificial Sequence: Synthetic oligonucleotide
  Antisense strand to SEQ ID NO: 23710
uaguacauagagaagcuga

SEQ ID NO: 23712 - RNA, 19 nt, Artificial Sequence
  Description of Artificial Sequence: Synthetic oligonucleotide
  Sense strand starting at position 3728 of SEQ ID NO: 262
gcccaugaaagguauaugu

SEQ ID NO: 23713 - RNA, 19 nt, Artificial Sequence
  Description of Artificial Sequence: Synthetic oligonucleotide
  Antisense strand to SEQ ID NO: 23712
acauauaccuuucaugggc

SEQ ID NO: 23714 - RNA, 19 nt, Artificial Sequence
  Description of Artificial Sequence: Synthetic oligonucleotide
  Sense strand starting at position 3732 of SEQ ID NO: 262
augaaagguauauguuagu

SEQ ID NO: 23715 - RNA, 19 nt, Artificial Sequence
  Description of Artificial Sequence: Synthetic oligonucleotide
  Antisense strand to SEQ ID NO: 23714
acuaacauauaccuuucau

SEQ ID NO: 23716 - RNA, 19 nt, Artificial Sequence
  Description of Artificial Sequence: Synthetic oligonucleotide
  Sense strand starting at position 3741 of SEQ ID NO: 262
auauguuaguauucccuuu

SEQ ID NO: 23717 - RNA, 19 nt, Artificial Sequence
  Description of Artificial Sequence: Synthetic oligonucleotide
  Antisense strand to SEQ ID NO: 23716
aaagggaauacuaacauau

SEQ ID NO: 23718 - RNA, 19 nt, Artificial Sequence
  Description of Artificial Sequence: Synthetic oligonucleotide
  Sense strand starting at position 3789 of SEQ ID NO: 262
ggguaagccacuugccuua

SEQ ID NO: 23719 - RNA, 19 nt, Artificial Sequence
  Description of Artificial Sequence: Synthetic oligonucleotide
  Antisense strand to SEQ ID NO: 23718
uaaggcaaguggcuuaccc

SEQ ID NO: 23720 - RNA, 19 nt, Artificial Sequence
  Description of Artificial Sequence: Synthetic oligonucleotide
  Sense strand starting at position 3870 of SEQ ID NO: 262
ccuccaaauucgccauagu

SEQ ID NO: 23721 - RNA, 19 nt, Artificial Sequence
  Description of Artificial Sequence: Synthetic oligonucleotide
  Antisense strand to SEQ ID NO: 23720
acuauggcgaauuuggagg

SEQ ID NO: 23722 - RNA, 19 nt, Artificial Sequence
  Description of Artificial Sequence: Synthetic oligonucleotide
  Sense strand starting at position 3871 of SEQ ID NO: 262
cuccaaauucgccauagua

SEQ ID NO: 23723 - RNA, 19 nt, Artificial Sequence
  Description of Artificial Sequence: Synthetic oligonucleotide
  Antisense strand to SEQ ID NO: 23722
uacuauggcgaauuuggag

SEQ ID NO: 23724 - RNA, 19 nt, Artificial Sequence
  Description of Artificial Sequence: Synthetic oligonucleotide
  Sense strand starting at position 3873 of SEQ ID NO: 262
ccaaauucgccauaguacu

SEQ ID NO: 23725 - RNA, 19 nt, Artificial Sequence
  Description of Artificial Sequence: Synthetic oligonucleotide
  Antisense strand to SEQ ID NO: 23724
aguacuauggcgaauuugg

SEQ ID NO: 23726 - RNA, 19 nt, Artificial Sequence
  Description of Artificial Sequence: Synthetic oligonucleotide
  Sense strand starting at position 3862 of SEQ ID NO: 263
ggacacagcugauggauuu

SEQ ID NO: 23727 - RNA, 19 nt, Artificial Sequence
  Description of Artificial Sequence: Synthetic oligonucleotide
  Antisense strand to SEQ ID NO: 23726
aaauccaucagcugugucc

SEQ ID NO: 23728 - RNA, 19 nt, Artificial Sequence
  Description of Artificial Sequence: Synthetic oligonucleotide
  Sense strand starting at position 3801 of SEQ ID NO: 263
acucaaauuugguagaauu

SEQ ID NO: 23729 - RNA, 19 nt, Artificial Sequence
  Description of Artificial Sequence: Synthetic oligonucleotide
  Antisense strand to SEQ ID NO: 23728
aauucuaccaaauuugagu

SEQ ID NO: 23730 - RNA, 19 nt, Artificial Sequence
  Description of Artificial Sequence: Synthetic oligonucleotide
  Sense strand starting at position 3739 of SEQ ID NO: 263
gccugacacaugggugaga

SEQ ID NO: 23731 - RNA, 19 nt, Artificial Sequence
  Description of Artificial Sequence: Synthetic oligonucleotide
  Antisense strand to SEQ ID NO: 23730
ucucacccaugugucaggc

SEQ ID NO: 23732 - RNA, 19 nt, Artificial Sequence
  Description of Artificial Sequence: Synthetic oligonucleotide
  Sense strand starting at position 3668 of SEQ ID NO: 263
accucauaagcuugugaaa

SEQ ID NO: 23733 - RNA, 19 nt, Artificial Sequence
  Description of Artificial Sequence: Synthetic oligonucleotide
  Antisense strand to SEQ ID NO: 23732
uuucacaagcuuaugaggu

SEQ ID NO: 23734 - RNA, 19 nt, Artificial Sequence
  Description of Artificial Sequence: Synthetic oligonucleotide
  Sense strand starting at position 3651 of SEQ ID NO: 263
ugauaaugaucguuccuac

SEQ ID NO: 23735 - RNA, 19 nt, Artificial Sequence
  Description of Artificial Sequence: Synthetic oligonucleotide
  Antisense strand to SEQ ID NO: 23734
guaggaacgaucauuauca

SEQ ID NO: 23736 - RNA, 19 nt, Artificial Sequence
  Description of Artificial Sequence: Synthetic oligonucleotide
  Sense strand starting at position 3646 of SEQ ID NO: 263
ggcauugauaaugaucguu

SEQ ID NO: 23737 - RNA, 19 nt, Artificial Sequence
  Description of Artificial Sequence: Synthetic oligonucleotide
  Antisense strand to SEQ ID NO: 23736
aacgaucauuaucaaugcc

SEQ ID NO: 23738 - RNA, 19 nt, Artificial Sequence
  Description of Artificial Sequence: Synthetic oligonucleotide
  Sense strand starting at position 3639 of SEQ ID NO: 263
cuguaaaggcauugauaau

SEQ ID NO: 23739 - RNA, 19 nt, Artificial Sequence
  Description of Artificial Sequence: Synthetic oligonucleotide
  Antisense strand to SEQ ID NO: 23738
auuaucaaugccuuuacag

SEQ ID NO: 23740 - RNA, 19 nt, Artificial Sequence
  Description of Artificial Sequence: Synthetic oligonucleotide
  Sense strand starting at position 3254 of SEQ ID NO: 263
cuaguaucccacuguuguu

SEQ ID NO: 23741 - RNA, 19 nt, Artificial Sequence
  Description of Artificial Sequence: Synthetic oligonucleotide
  Antisense strand to SEQ ID NO: 23740
aacaacagugggauacuag

SEQ ID NO: 23742 - RNA, 19 nt, Artificial Sequence
  Description of Artificial Sequence: Synthetic oligonucleotide
  Sense strand starting at position 3177 of SEQ ID NO: 263
acuaaugucuaggaaauug

SEQ ID NO: 23743 - RNA, 19 nt, Artificial Sequence
  Description of Artificial Sequence: Synthetic oligonucleotide
  Antisense strand to SEQ ID NO: 23742
caauuuccuagacauuagu

SEQ ID NO: 23744 - RNA, 19 nt, Artificial Sequence
  Description of Artificial Sequence: Synthetic oligonucleotide
  Sense strand starting at position 3159 of SEQ ID NO: 263
augaguuaguaaucaacca

SEQ ID NO: 23745 - RNA, 19 nt, Artificial Sequence
  Description of Artificial Sequence: Synthetic oligonucleotide
  Antisense strand to SEQ ID NO: 23744
ugguugauuacuaacucau

SEQ ID NO: 23746 - RNA, 19 nt, Artificial Sequence
  Description of Artificial Sequence: Synthetic oligonucleotide
  Sense strand starting at position 3155 of SEQ ID NO: 263
ugaaaugaguuaguaauca

SEQ ID NO: 23747 - RNA, 19 nt, Artificial Sequence
  Description of Artificial Sequence: Synthetic oligonucleotide
  Antisense strand to SEQ ID NO: 23746
ugauuacuaacucauuuca

SEQ ID NO: 23748 - RNA, 19 nt, Artificial Sequence
  Description of Artificial Sequence: Synthetic oligonucleotide
  Sense strand starting at position 3035 of SEQ ID NO: 263
gcggauuaugcacaaacca

SEQ ID NO: 23749 - RNA, 19 nt, Artificial Sequence
  Description of Artificial Sequence: Synthetic oligonucleotide
  Antisense strand to SEQ ID NO: 23748
ugguuugugcauaauccgc

SEQ ID NO: 23750 - RNA, 19 nt, Artificial Sequence
  Description of Artificial Sequence: Synthetic oligonucleotide
  Sense strand starting at position 2893 of SEQ ID NO: 263
auugauagccuuuggaugu

SEQ ID NO: 23751 - RNA, 19 nt, Artificial Sequence
  Description of Artificial Sequence: Synthetic oligonucleotide
  Antisense strand to SEQ ID NO: 23750
acauccaaaggcuaucaau

SEQ ID NO: 23752 - RNA, 19 nt, Artificial Sequence
  Description of Artificial Sequence: Synthetic oligonucleotide
  Sense strand starting at position 2861 of SEQ ID NO: 263
guuucuugugugcaccuaa

SEQ ID NO: 23753 - RNA, 19 nt, Artificial Sequence
  Description of Artificial Sequence: Synthetic oligonucleotide
  Antisense strand to SEQ ID NO: 23752
uuaggugcacacaagaaac

SEQ ID NO: 23754 - RNA, 19 nt, Artificial Sequence
  Description of Artificial Sequence: Synthetic oligonucleotide
  Sense strand starting at position 2734 of SEQ ID NO: 263
cggagugguccagagagau

SEQ ID NO: 23755 - RNA, 19 nt, Artificial Sequence
  Description of Artificial Sequence: Synthetic oligonucleotide
  Antisense strand to SEQ ID NO: 23754
aucucucuggaccacuccg

SEQ ID NO: 23756 - RNA, 19 nt, Artificial Sequence
  Description of Artificial Sequence: Synthetic oligonucleotide
  Sense strand starting at position 2590 of SEQ ID NO: 263
cggcgccugcaagauuaau

SEQ ID NO: 23757 - RNA, 19 nt, Artificial Sequence
  Description of Artificial Sequence: Synthetic oligonucleotide
  Antisense strand to SEQ ID NO: 23756
auuaaucuugcaggcgccg

SEQ ID NO: 23758 - RNA, 19 nt, Artificial Sequence
  Description of Artificial Sequence: Synthetic oligonucleotide
  Sense strand starting at position 1191 of SEQ ID NO: 263
agcaaaggauccuaaauug

SEQ ID NO: 23759 - RNA, 19 nt, Artificial Sequence
  Description of Artificial Sequence: Synthetic oligonucleotide
  Antisense strand to SEQ ID NO: 23758
caauuuaggauccuuugcu

SEQ ID NO: 23760 - RNA, 19 nt, Artificial Sequence
  Description of Artificial Sequence: Synthetic oligonucleotide
  Sense strand starting at position 1181 of SEQ ID NO: 263
uuggauacuuagcaaagga

SEQ ID NO: 23761 - RNA, 19 nt, Artificial Sequence
  Description of Artificial Sequence: Synthetic oligonucleotide
  Antisense strand to SEQ ID NO: 23760
uccuuugcuaaguauccaa

SEQ ID NO: 23762 - RNA, 19 nt, Artificial Sequence
  Description of Artificial Sequence: Synthetic oligonucleotide
  Sense strand starting at position 1177 of SEQ ID NO: 263
ggacuuggauacuuagcaa

SEQ ID NO: 23763 - RNA, 19 nt, Artificial Sequence
  Description of Artificial Sequence: Synthetic oligonucleotide
  Antisense strand to SEQ ID NO: 23762
uugcuaaguauccaagucc

SEQ ID NO: 23764 - RNA, 19 nt, Artificial Sequence
  Description of Artificial Sequence: Synthetic oligonucleotide
  Sense strand starting at position 1036 of SEQ ID NO: 263
ucgcaugggcacgaauaau

SEQ ID NO: 23765 - RNA, 19 nt, Artificial Sequence
  Description of Artificial Sequence: Synthetic oligonucleotide
  Antisense strand to SEQ ID NO: 23764
auuauucgugcccaugcga

SEQ ID NO: 23766 - RNA, 19 nt, Artificial Sequence
  Description of Artificial Sequence: Synthetic oligonucleotide
  Sense strand starting at position 1001 of SEQ ID NO: 263
uuucguguacaauaaccaa

SEQ ID NO: 23767 - RNA, 19 nt, Artificial Sequence
  Description of Artificial Sequence: Synthetic oligonucleotide
  Antisense strand to SEQ ID NO: 23766
uugguuauuguacacgaaa

SEQ ID NO: 23768 - RNA, 19 nt, Artificial Sequence
  Description of Artificial Sequence: Synthetic oligonucleotide
  Sense strand starting at position 998 of SEQ ID NO: 263
cuguuucguguacaauaac

SEQ ID NO: 23769 - RNA, 19 nt, Artificial Sequence
  Description of Artificial Sequence: Synthetic oligonucleotide
  Antisense strand to SEQ ID NO: 23768
guuauuguacacgaaacag

SEQ ID NO: 23770 - RNA, 19 nt, Artificial Sequence
  Description of Artificial Sequence: Synthetic oligonucleotide
  Sense strand starting at position 996 of SEQ ID NO: 263
aucuguuucguguacaaua

SEQ ID NO: 23771 - RNA, 19 nt, Artificial Sequence
  Description of Artificial Sequence: Synthetic oligonucleotide
  Antisense strand to SEQ ID NO: 23770
uauuguacacgaaacagau

SEQ ID NO: 23772 - RNA, 19 nt, Artificial Sequence
  Description of Artificial Sequence: Synthetic oligonucleotide
  Sense strand starting at position 993 of SEQ ID NO: 263
gaaaucuguuucguguaca

SEQ ID NO: 23773 - RNA, 19 nt, Artificial Sequence
  Description of Artificial Sequence: Synthetic oligonucleotide
  Antisense strand to SEQ ID NO: 23772
uguacacgaaacagauuuc

SEQ ID NO: 23774 - RNA, 19 nt, Artificial Sequence
  Description of Artificial Sequence: Synthetic oligonucleotide
  Sense strand starting at position 705 of SEQ ID NO: 263
uuuaucuuuggccaugcaa

SEQ ID NO: 23775 - RNA, 19 nt, Artificial Sequence
  Description of Artificial Sequence: Synthetic oligonucleotide
  Antisense strand to SEQ ID NO: 23774
uugcauggccaaagauaaa

SEQ ID NO: 23776 - RNA, 19 nt, Artificial Sequence
  Description of Artificial Sequence: Synthetic oligonucleotide
  Sense strand starting at position 674 of SEQ ID NO: 263
cagaauuaaugcguguuua

SEQ ID NO: 23777 - RNA, 19 nt, Artificial Sequence
  Description of Artificial Sequence: Synthetic oligonucleotide
  Antisense strand to SEQ ID NO: 23776
uaaacacgcauuaauucug

SEQ ID NO: 23778 - RNA, 19 nt, Artificial Sequence
  Description of Artificial Sequence: Synthetic oligonucleotide
  Sense strand starting at position 673 of SEQ ID NO: 263
ucagaauuaaugcguguuu

SEQ ID NO: 23779 - RNA, 19 nt, Artificial Sequence
  Description of Artificial Sequence: Synthetic oligonucleotide
  Antisense strand to SEQ ID NO: 23778
aaacacgcauuaauucuga

SEQ ID NO: 23780 - RNA, 19 nt, Artificial Sequence
  Description of Artificial Sequence: Synthetic oligonucleotide
  Sense strand starting at position 661 of SEQ ID NO: 263
gcuugccgucucucagaau

SEQ ID NO: 23781 - RNA, 19 nt, Artificial Sequence
  Description of Artificial Sequence: Synthetic oligonucleotide
  Antisense strand to SEQ ID NO: 23780
auucugagagacggcaagc

SEQ ID NO: 23782 - RNA, 19 nt, Artificial Sequence
  Description of Artificial Sequence: Synthetic oligonucleotide
  Sense strand starting at position 457 of SEQ ID NO: 263
cuacgugugucuuuacuga

SEQ ID NO: 23783 - RNA, 19 nt, Artificial Sequence
  Description of Artificial Sequence: Synthetic oligonucleotide
  Antisense strand to SEQ ID NO: 23782
ucaguaaagacacacguag

SEQ ID NO: 23784 - RNA, 19 nt, Artificial Sequence
  Description of Artificial Sequence: Synthetic oligonucleotide
  Sense strand starting at position 414 of SEQ ID NO: 263
gaaucuauggugugucagu

SEQ ID NO: 23785 - RNA, 19 nt, Artificial Sequence
  Description of Artificial Sequence: Synthetic oligonucleotide
  Antisense strand to SEQ ID NO: 23784
acugacacaccauagauuc

SEQ ID NO: 23786 - RNA, 19 nt, Artificial Sequence
  Description of Artificial Sequence: Synthetic oligonucleotide
  Sense strand starting at position 359 of SEQ ID NO: 263
ucuggacagucuccuacaa

SEQ ID NO: 23787 - RNA, 19 nt, Artificial Sequence
  Description of Artificial Sequence: Synthetic oligonucleotide
  Antisense strand to SEQ ID NO: 23786
uuguaggagacuguccaga

SEQ ID NO: 23788 - RNA, 19 nt, Artificial Sequence
  Description of Artificial Sequence: Synthetic oligonucleotide
  Sense strand starting at position 319 of SEQ ID NO: 263
acaucugucuguguaauga

SEQ ID NO: 23789 - RNA, 19 nt, Artificial Sequence
  Description of Artificial Sequence: Synthetic oligonucleotide
  Antisense strand to SEQ ID NO: 23788
ucauuacacagacagaugu

SEQ ID NO: 23790 - RNA, 19 nt, Artificial Sequence
  Description of Artificial Sequence: Synthetic oligonucleotide
  Sense strand starting at position 318 of SEQ ID NO: 263
uacaucugucuguguaaug

SEQ ID NO: 23791 - RNA, 19 nt, Artificial Sequence
  Description of Artificial Sequence: Synthetic oligonucleotide
  Antisense strand to SEQ ID NO: 23790
cauuacacagacagaugua

SEQ ID NO: 23792 - RNA, 19 nt, Artificial Sequence
  Description of Artificial Sequence: Synthetic oligonucleotide
  Sense strand starting at position 317 of SEQ ID NO: 263
uuacaucugucuguguaau

SEQ ID NO: 23793 - RNA, 19 nt, Artificial Sequence
  Description of Artificial Sequence: Synthetic oligonucleotide
  Antisense strand to SEQ ID NO: 23792
auuacacagacagauguaa

SEQ ID NO: 23794 - RNA, 19 nt, Artificial Sequence
  Description of Artificial Sequence: Synthetic oligonucleotide
  Sense strand starting at position 316 of SEQ ID NO: 263
auuacaucugucuguguaa

SEQ ID NO: 23795 - RNA, 19 nt, Artificial Sequence
  Description of Artificial Sequence: Synthetic oligonucleotide
  Antisense strand to SEQ ID NO: 23794
uuacacagacagauguaau

SEQ ID NO: 23796 - RNA, 19 nt, Artificial Sequence
  Description of Artificial Sequence: Synthetic oligonucleotide
  Sense strand starting at position 315 of SEQ ID NO: 263
cauuacaucugucugugua

SEQ ID NO: 23797 - RNA, 19 nt, Artificial Sequence
  Description of Artificial Sequence: Synthetic oligonucleotide
  Antisense strand to SEQ ID NO: 23796
uacacagacagauguaaug

SEQ ID NO: 23798 - RNA, 19 nt, Artificial Sequence
  Description of Artificial Sequence: Synthetic oligonucleotide
  Sense strand starting at position 222 of SEQ ID NO: 263
uguuucuauccugguacau

SEQ ID NO: 23799 - RNA, 19 nt, Artificial Sequence
  Description of Artificial Sequence: Synthetic oligonucleotide
  Antisense strand to SEQ ID NO: 23798
auguaccaggauagaaaca

SEQ ID NO: 23800 - RNA, 19 nt, Artificial Sequence
  Description of Artificial Sequence: Synthetic oligonucleotide
  Sense strand starting at position 219 of SEQ ID NO: 263
guuuguuucuauccuggua

SEQ ID NO: 23801 - RNA, 19 nt, Artificial Sequence
  Description of Artificial Sequence: Synthetic oligonucleotide
  Antisense strand to SEQ ID NO: 23800
uaccaggauagaaacaaac

SEQ ID NO: 23802 - RNA, 19 nt, Artificial Sequence
  Description of Artificial Sequence: Synthetic oligonucleotide
  Sense strand starting at position 211 of SEQ ID NO: 263
ccaccuauguuuguuucua

SEQ ID NO: 23803 - RNA, 19 nt, Artificial Sequence
  Description of Artificial Sequence: Synthetic oligonucleotide
  Antisense strand to SEQ ID NO: 23802
uagaaacaaacauaggugg

SEQ ID NO: 23804 - RNA, 19 nt, Artificial Sequence
  Description of Artificial Sequence: Synthetic oligonucleotide
  Sense strand starting at position 71 of SEQ ID NO: 263
auguucuauugauccuaca

SEQ ID NO: 23805 - RNA, 19 nt, Artificial Sequence
  Description of Artificial Sequence: Synthetic oligonucleotide
  Antisense strand to SEQ ID NO: 23804
uguaggaucaauagaacau

SEQ ID NO: 23806 - RNA, 19 nt, Artificial Sequence
  Description of Artificial Sequence: Synthetic oligonucleotide
  Sense strand starting at position 28 of SEQ ID NO: 264
ccaguaagguaaguauaaa

SEQ ID NO: 23807 - RNA, 19 nt, Artificial Sequence
  Description of Artificial Sequence: Synthetic oligonucleotide
  Antisense strand to SEQ ID NO: 23806
uuuauacuuaccuuacugg

SEQ ID NO: 23808 - RNA, 19 nt, Artificial Sequence
  Description of Artificial Sequence: Synthetic oligonucleotide
  Sense strand starting at position 211 of SEQ ID NO: 264
cagcaauugcuuggagcua

SEQ ID NO: 23809 - RNA, 19 nt, Artificial Sequence
  Description of Artificial Sequence: Synthetic oligonucleotide
  Antisense strand to SEQ ID NO: 23808
uagcuccaagcaauugcug

SEQ ID NO: 23810 - RNA, 19 nt, Artificial Sequence
  Description of Artificial Sequence: Synthetic oligonucleotide
  Sense strand starting at position 315 of SEQ ID NO: 264
uggcccuucuaaguugaaa

SEQ ID NO: 23811 - RNA, 19 nt, Artificial Sequence
  Description of Artificial Sequence: Synthetic oligonucleotide
  Antisense strand to SEQ ID NO: 23810
uuucaacuuagaagggcca

SEQ ID NO: 23812 - RNA, 19 nt, Artificial Sequence
  Description of Artificial Sequence: Synthetic oligonucleotide
  Sense strand starting at position 428 of SEQ ID NO: 264
ggcucaagccagggaguau

SEQ ID NO: 23813 - RNA, 19 nt, Artificial Sequence
  Description of Artificial Sequence: Synthetic oligonucleotide
  Antisense strand to SEQ ID NO: 23812
auacucccuggcuugagcc

SEQ ID NO: 23814 - RNA, 19 nt, Artificial Sequence
  Description of Artificial Sequence: Synthetic oligonucleotide
  Sense strand starting at position 458 of SEQ ID NO: 264
ucaccugaaucaggaaauu

SEQ ID NO: 23815 - RNA, 19 nt, Artificial Sequence
  Description of Artificial Sequence: Synthetic oligonucleotide
  Antisense strand to SEQ ID NO: 23814
aauuuccugauucagguga

SEQ ID NO: 23816 - RNA, 19 nt, Artificial Sequence
  Description of Artificial Sequence: Synthetic oligonucleotide
  Sense strand starting at position 617 of SEQ ID NO: 264
gggaguaucuagaggagga

SEQ ID NO: 23817 - RNA, 19 nt, Artificial Sequence
  Description of Artificial Sequence: Synthetic oligonucleotide
  Antisense strand to SEQ ID NO: 23816
uccuccucuagauacuccc

SEQ ID NO: 23818 - RNA, 19 nt, Artificial Sequence
  Description of Artificial Sequence: Synthetic oligonucleotide
  Sense strand starting at position 636 of SEQ ID NO: 264
gcaugaaaguuagaaguac

SEQ ID NO: 23819 - RNA, 19 nt, Artificial Sequence
  Description of Artificial Sequence: Synthetic oligonucleotide
  Antisense strand to SEQ ID NO: 23818
guacuucuaacuuucaugc

SEQ ID NO: 23820 - RNA, 19 nt, Artificial Sequence
  Description of Artificial Sequence: Synthetic oligonucleotide
  Sense strand starting at position 644 of SEQ ID NO: 264
guuagaaguaccuggcaga

SEQ ID NO: 23821 - RNA, 19 nt, Artificial Sequence
  Description of Artificial Sequence: Synthetic oligonucleotide
  Antisense strand to SEQ ID NO: 23820
ucugccagguacuucuaac

SEQ ID NO: 23822 - RNA, 19 nt, Artificial Sequence
  Description of Artificial Sequence: Synthetic oligonucleotide
  Sense strand starting at position 743 of SEQ ID NO: 264
ggaaguacuuaggagagaa

SEQ ID NO: 23823 - RNA, 19 nt, Artificial Sequence
  Description of Artificial Sequence: Synthetic oligonucleotide
  Antisense strand to SEQ ID NO: 23822
uucucuccuaaguacuucc

SEQ ID NO: 23824 - RNA, 19 nt, Artificial Sequence
  Description of Artificial Sequence: Synthetic oligonucleotide
  Sense strand starting at position 776 of SEQ ID NO: 264
cccaguauauucuuugaua

SEQ ID NO: 23825 - RNA, 19 nt, Artificial Sequence
  Description of Artificial Sequence: Synthetic oligonucleotide
  Antisense strand to SEQ ID NO: 23824
uaucaaagaauauacuggg

SEQ ID NO: 23826 - RNA, 19 nt, Artificial Sequence
  Description of Artificial Sequence: Synthetic oligonucleotide
  Sense strand starting at position 777 of SEQ ID NO: 264
ccaguauauucuuugauac

SEQ ID NO: 23827 - RNA, 19 nt, Artificial Sequence
  Description of Artificial Sequence: Synthetic oligonucleotide
  Antisense strand to SEQ ID NO: 23826
guaucaaagaauauacugg

SEQ ID NO: 23828 - RNA, 19 nt, Artificial Sequence
  Description of Artificial Sequence: Synthetic oligonucleotide
  Sense strand starting at position 863 of SEQ ID NO: 264
cuaaacaucucuggaauga

SEQ ID NO: 23829 - RNA, 19 nt, Artificial Sequence
  Description of Artificial Sequence: Synthetic oligonucleotide
  Antisense strand to SEQ ID NO: 23828
ucauuccagagauguuuag

SEQ ID NO: 23830 - RNA, 19 nt, Artificial Sequence
  Description of Artificial Sequence: Synthetic oligonucleotide
  Sense strand starting at position 1020 of SEQ ID NO: 264
ccaucacuagccugguuaa

SEQ ID NO: 23831 - RNA, 19 nt, Artificial Sequence
  Description of Artificial Sequence: Synthetic oligonucleotide
  Antisense strand to SEQ ID NO: 23830
uuaaccaggcuagugaugg

SEQ ID NO: 23832 - RNA, 19 nt, Artificial Sequence
  Description of Artificial Sequence: Synthetic oligonucleotide
  Sense strand starting at position 1259 of SEQ ID NO: 264
gagguugucccuggaccua

SEQ ID NO: 23833 - RNA, 19 nt, Artificial Sequence
  Description of Artificial Sequence: Synthetic oligonucleotide
  Antisense strand to SEQ ID NO: 23832
uagguccagggacaaccuc

SEQ ID NO: 23834 - RNA, 19 nt, Artificial Sequence
  Description of Artificial Sequence: Synthetic oligonucleotide
  Sense strand starting at position 1417 of SEQ ID NO: 264
caguguggugcuugugaaa

SEQ ID NO: 23835 - RNA, 19 nt, Artificial Sequence
  Description of Artificial Sequence: Synthetic oligonucleotide
  Antisense strand to SEQ ID NO: 23834
uuucacaagcaccacacug

SEQ ID NO: 23836 - RNA, 19 nt, Artificial Sequence
  Description of Artificial Sequence: Synthetic oligonucleotide
  Sense strand starting at position 1445 of SEQ ID NO: 264
ggagcgugagagugaauau

SEQ ID NO: 23837 - RNA, 19 nt, Artificial Sequence
  Description of Artificial Sequence: Synthetic oligonucleotide
  Antisense strand to SEQ ID NO: 23836
auauucacucucacgcucc

SEQ ID NO: 23838 - RNA, 19 nt, Artificial Sequence
  Description of Artificial Sequence: Synthetic oligonucleotide
  Sense strand starting at position 1446 of SEQ ID NO: 264
gagcgugagagugaauaua

SEQ ID NO: 23839 - RNA, 19 nt, Artificial Sequence
  Description of Artificial Sequence: Synthetic oligonucleotide
  Antisense strand to SEQ ID NO: 23838
uauauucacucucacgcuc

SEQ ID NO: 23840 - RNA, 19 nt, Artificial Sequence
  Description of Artificial Sequence: Synthetic oligonucleotide
  Sense strand starting at position 1564 of SEQ ID NO: 264
augagaauguguuacacug

SEQ ID NO: 23841 - RNA, 19 nt, Artificial Sequence
  Description of Artificial Sequence: Synthetic oligonucleotide
  Antisense strand to SEQ ID NO: 23840
caguguaacacauucucau

SEQ ID NO: 23842 - RNA, 19 nt, Artificial Sequence
  Description of Artificial Sequence: Synthetic oligonucleotide
  Sense strand starting at position 1570 of SEQ ID NO: 264
auguguuacacuggaauga

SEQ ID NO: 23843 - RNA, 19 nt, Artificial Sequence
  Description of Artificial Sequence: Synthetic oligonucleotide
  Antisense strand to SEQ ID NO: 23842
ucauuccaguguaacacau

SEQ ID NO: 23844 - RNA, 19 nt, Artificial Sequence
  Description of Artificial Sequence: Synthetic oligonucleotide
  Sense strand starting at position 1599 of SEQ ID NO: 264
auuugacguuucuaagguu

SEQ ID NO: 23845 - RNA, 19 nt, Artificial Sequence
  Description of Artificial Sequence: Synthetic oligonucleotide
  Antisense strand to SEQ ID NO: 23844
aaccuuagaaacgucaaau

SEQ ID NO: 23846 - RNA, 19 nt, Artificial Sequence
  Description of Artificial Sequence: Synthetic oligonucleotide
  Sense strand starting at position 1645 of SEQ ID NO: 264
ugugaauucuucccaagaa

SEQ ID NO: 23847 - RNA, 19 nt, Artificial Sequence
  Description of Artificial Sequence: Synthetic oligonucleotide
  Antisense strand to SEQ ID NO: 23846
uucuugggaagaauucaca

SEQ ID NO: 23848 - RNA, 19 nt, Artificial Sequence
  Description of Artificial Sequence: Synthetic oligonucleotide
  Sense strand starting at position 1646 of SEQ ID NO: 264
gugaauucuucccaagaag

SEQ ID NO: 23849 - RNA, 19 nt, Artificial Sequence
  Description of Artificial Sequence: Synthetic oligonucleotide
  Antisense strand to SEQ ID NO: 23848
cuucuugggaagaauucac

SEQ ID NO: 23850 - RNA, 19 nt, Artificial Sequence
  Description of Artificial Sequence: Synthetic oligonucleotide
  Sense strand starting at position 1948 of SEQ ID NO: 264
ugcacaauccgcggaguaa

SEQ ID NO: 23851 - RNA, 19 nt, Artificial Sequence
  Description of Artificial Sequence: Synthetic oligonucleotide
  Antisense strand to SEQ ID NO: 23850
uuacuccgcggauugugca

SEQ ID NO: 23852 - RNA, 19 nt, Artificial Sequence
  Description of Artificial Sequence: Synthetic oligonucleotide
  Sense strand starting at position 2137 of SEQ ID NO: 264
agaacuuuauggguguaga

SEQ ID NO: 23853 - RNA, 19 nt, Artificial Sequence
  Description of Artificial Sequence: Synthetic oligonucleotide
  Antisense strand to SEQ ID NO: 23852
ucuacacccauaaaguucu

SEQ ID NO: 23854 - RNA, 19 nt, Artificial Sequence
  Description of Artificial Sequence: Synthetic oligonucleotide
  Sense strand starting at position 2138 of SEQ ID NO: 264
gaacuuuauggguguagac

SEQ ID NO: 23855 - RNA, 19 nt, Artificial Sequence
  Description of Artificial Sequence: Synthetic oligonucleotide
  Antisense strand to SEQ ID NO: 23854
gucuacacccauaaaguuc

SEQ ID NO: 23856 - RNA, 19 nt, Artificial Sequence
  Description of Artificial Sequence: Synthetic oligonucleotide
  Sense strand starting at position 2173 of SEQ ID NO: 264
aaugcuugcgguuuguaca

SEQ ID NO: 23857 - RNA, 19 nt, Artificial Sequence
  Description of Artificial Sequence: Synthetic oligonucleotide
  Antisense strand to SEQ ID NO: 23856
uguacaaaccgcaagcauu

SEQ ID NO: 23858 - RNA, 19 nt, Artificial Sequence
  Description of Artificial Sequence: Synthetic oligonucleotide
  Sense strand starting at position 2251 of SEQ ID NO: 264
ugcucagguugauaaacaa

SEQ ID NO: 23859 - RNA, 19 nt, Artificial Sequence
  Description of Artificial Sequence: Synthetic oligonucleotide
  Antisense strand to SEQ ID NO: 23858
uuguuuaucaaccugagca

SEQ ID NO: 23860 - RNA, 19 nt, Artificial Sequence
  Description of Artificial Sequence: Synthetic oligonucleotide
  Sense strand starting at position 2288 of SEQ ID NO: 264
guacaaaguccagaguuga

SEQ ID NO: 23861 - RNA, 19 nt, Artificial Sequence
  Description of Artificial Sequence: Synthetic oligonucleotide
  Antisense strand to SEQ ID NO: 23860
ucaacucuggacuuuguac

SEQ ID NO: 23862 - RNA, 19 nt, Artificial Sequence
  Description of Artificial Sequence: Synthetic oligonucleotide
  Sense strand starting at position 2365 of SEQ ID NO: 264
gcauucuuuccaggcaaag

SEQ ID NO: 23863 - RNA, 19 nt, Artificial Sequence
  Description of Artificial Sequence: Synthetic oligonucleotide
  Antisense strand to SEQ ID NO: 23862
cuuugccuggaaagaaugc

SEQ ID NO: 23864 - RNA, 19 nt, Artificial Sequence
  Description of Artificial Sequence: Synthetic oligonucleotide
  Sense strand starting at position 2605 of SEQ ID NO: 264
ggaaucaccuucccugagu

SEQ ID NO: 23865 - RNA, 19 nt, Artificial Sequence
  Description of Artificial Sequence: Synthetic oligonucleotide
  Antisense strand to SEQ ID NO: 23864
acucagggaaggugauucc

SEQ ID NO: 23866 - RNA, 19 nt, Artificial Sequence
  Description of Artificial Sequence: Synthetic oligonucleotide
  Sense strand starting at position 2674 of SEQ ID NO: 264
gucgcagcauuccucauua

SEQ ID NO: 23867 - RNA, 19 nt, Artificial Sequence
  Description of Artificial Sequence: Synthetic oligonucleotide
  Antisense strand to SEQ ID NO: 23866
uaaugaggaaugcugcgac

SEQ ID NO: 23868 - RNA, 19 nt, Artificial Sequence
  Description of Artificial Sequence: Synthetic oligonucleotide
  Sense strand starting at position 2696 of SEQ ID NO: 264
ugugauuauucgcucuccu

SEQ ID NO: 23869 - RNA, 19 nt, Artificial Sequence
  Description of Artificial Sequence: Synthetic oligonucleotide
  Antisense strand to SEQ ID NO: 23868
aggagagcgaauaaucaca

SEQ ID NO: 23870 - RNA, 19 nt, Artificial Sequence
  Description of Artificial Sequence: Synthetic oligonucleotide
  Sense strand starting at position 3021 of SEQ ID NO: 264
ugguaaugcucaccuguag

SEQ ID NO: 23871 - RNA, 19 nt, Artificial Sequence
  Description of Artificial Sequence: Synthetic oligonucleotide
  Antisense strand to SEQ ID NO: 23870
cuacaggugagcauuacca

SEQ ID NO: 23872 - RNA, 19 nt, Artificial Sequence
  Description of Artificial Sequence: Synthetic oligonucleotide
  Sense strand starting at position 3106 of SEQ ID NO: 264
ccaugauugcgccaucaca

SEQ ID NO: 23873 - RNA, 19 nt, Artificial Sequence
  Description of Artificial Sequence: Synthetic oligonucleotide
  Antisense strand to SEQ ID NO: 23872
ugugauggcgcaaucaugg

SEQ ID NO: 23874 - RNA, 19 nt, Artificial Sequence
  Description of Artificial Sequence: Synthetic oligonucleotide
  Sense strand starting at position 3246 of SEQ ID NO: 264
cccugaagaucuuaggaug

SEQ ID NO: 23875 - RNA, 19 nt, Artificial Sequence
  Description of Artificial Sequence: Synthetic oligonucleotide
  Antisense strand to SEQ ID NO: 23874
cauccuaagaucuucaggg

SEQ ID NO: 23876 - RNA, 19 nt, Artificial Sequence
  Description of Artificial Sequence: Synthetic oligonucleotide
  Sense strand starting at position 3249 of SEQ ID NO: 264
ugaagaucuuaggaugaaa

SEQ ID NO: 23877 - RNA, 19 nt, Artificial Sequence
  Description of Artificial Sequence: Synthetic oligonucleotide
  Antisense strand to SEQ ID NO: 23876
uuucauccuaagaucuuca

SEQ ID NO: 23878 - RNA, 19 nt, Artificial Sequence
  Description of Artificial Sequence: Synthetic oligonucleotide
  Sense strand starting at position 3832 of SEQ ID NO: 264
accuguaaacucugggaau

SEQ ID NO: 23879 - RNA, 19 nt, Artificial Sequence
  Description of Artificial Sequence: Synthetic oligonucleotide
  Antisense strand to SEQ ID NO: 23878
auucccagaguuuacaggu

SEQ ID NO: 23880 - RNA, 19 nt, Artificial Sequence
  Description of Artificial Sequence: Synthetic oligonucleotide
  Sense strand starting at position 3835 of SEQ ID NO: 264
uguaaacucugggaaugga

SEQ ID NO: 23881 - RNA, 19 nt, Artificial Sequence
  Description of Artificial Sequence: Synthetic oligonucleotide
  Antisense strand to SEQ ID NO: 23880
uccauucccagaguuuaca

SEQ ID NO: 23882 - RNA, 19 nt, Artificial Sequence
  Description of Artificial Sequence: Synthetic oligonucleotide
  Sense strand starting at position 3858 of SEQ ID NO: 264
gcaucugucuuguuuccau

SEQ ID NO: 23883 - RNA, 19 nt, Artificial Sequence
  Description of Artificial Sequence: Synthetic oligonucleotide
  Antisense strand to SEQ ID NO: 23882
auggaaacaagacagaugc

SEQ ID NO: 23884 - RNA, 19 nt, Artificial Sequence
  Description of Artificial Sequence: Synthetic oligonucleotide
  Sense strand starting at position 3861 of SEQ ID NO: 264
ucugucuuguuuccaucau

SEQ ID NO: 23885 - RNA, 19 nt, Artificial Sequence
  Description of Artificial Sequence: Synthetic oligonucleotide
  Antisense strand to SEQ ID NO: 23884
augauggaaacaagacaga

SEQ ID NO: 23886 - RNA, 19 nt, Artificial Sequence
  Description of Artificial Sequence: Synthetic oligonucleotide
  Sense strand starting at position 66 of SEQ ID NO: 265
ccaguaagguaaguauaaa

SEQ ID NO: 23887 - RNA, 19 nt, Artificial Sequence
  Description of Artificial Sequence: Synthetic oligonucleotide
  Antisense strand to SEQ ID NO: 23886
uuuauacuuaccuuacugg

SEQ ID NO: 23888 - RNA, 19 nt, Artificial Sequence
  Description of Artificial Sequence: Synthetic oligonucleotide
  Sense strand starting at position 249 of SEQ ID NO: 265
cagcaauugcuuggagcua

SEQ ID NO: 23889 - RNA, 19 nt, Artificial Sequence
  Description of Artificial Sequence: Synthetic oligonucleotide
  Antisense strand to SEQ ID NO: 23888
uagcuccaagcaauugcug

SEQ ID NO: 23890 - RNA, 19 nt, Artificial Sequence
  Description of Artificial Sequence: Synthetic oligonucleotide
  Sense strand starting at position 353 of SEQ ID NO: 265
uggcccuucuaaguugaaa

SEQ ID NO: 23891 - RNA, 19 nt, Artificial Sequence
  Description of Artificial Sequence: Synthetic oligonucleotide
  Antisense strand to SEQ ID NO: 23890
uuucaacuuagaagggcca

SEQ ID NO: 23892 - RNA, 19 nt, Artificial Sequence
  Description of Artificial Sequence: Synthetic oligonucleotide
  Sense strand starting at position 466 of SEQ ID NO: 265
ggcucaagccagggaguau

SEQ ID NO: 23893 - RNA, 19 nt, Artificial Sequence
  Description of Artificial Sequence: Synthetic oligonucleotide
  Antisense strand to SEQ ID NO: 23892
auacucccuggcuugagcc

SEQ ID NO: 23894 - RNA, 19 nt, Artificial Sequence
  Description of Artificial Sequence: Synthetic oligonucleotide
  Sense strand starting at position 496 of SEQ ID NO: 265
ucaccugaaucaggaaauu

SEQ ID NO: 23895 - RNA, 19 nt, Artificial Sequence
  Description of Artificial Sequence: Synthetic oligonucleotide
  Antisense strand to SEQ ID NO: 23894
aauuuccugauucagguga

SEQ ID NO: 23896 - RNA, 19 nt, Artificial Sequence
  Description of Artificial Sequence: Synthetic oligonucleotide
  Sense strand starting at position 655 of SEQ ID NO: 265
gggaguaucuagaggagga

SEQ ID NO: 23897 - RNA, 19 nt, Artificial Sequence
  Description of Artificial Sequence: Synthetic oligonucleotide
  Antisense strand to SEQ ID NO: 23896
uccuccucuagauacuccc

SEQ ID NO: 23898 - RNA, 19 nt, Artificial Sequence
  Description of Artificial Sequence: Synthetic oligonucleotide
  Sense strand starting at position 674 of SEQ ID NO: 265
gcaugaaaguuagaaguac

SEQ ID NO: 23899 - RNA, 19 nt, Artificial Sequence
  Description of Artificial Sequence: Synthetic oligonucleotide
  Antisense strand to SEQ ID NO: 23898
guacuucuaacuuucaugc

SEQ ID NO: 23900 - RNA, 19 nt, Artificial Sequence
  Description of Artificial Sequence: Synthetic oligonucleotide
  Sense strand starting at position 682 of SEQ ID NO: 265
guuagaaguaccuggcaga

SEQ ID NO: 23901 - RNA, 19 nt, Artificial Sequence
  Description of Artificial Sequence: Synthetic oligonucleotide
  Antisense strand to SEQ ID NO: 23900
ucugccagguacuucuaac

SEQ ID NO: 23902 - RNA, 19 nt, Artificial Sequence
  Description of Artificial Sequence: Synthetic oligonucleotide
  Sense strand starting at position 781 of SEQ ID NO: 265
ggaaguacuuaggagagaa

SEQ ID NO: 23903 - RNA, 19 nt, Artificial Sequence
  Description of Artificial Sequence: Synthetic oligonucleotide
  Antisense strand to SEQ ID NO: 23902
uucucuccuaaguacuucc

SEQ ID NO: 23904 - RNA, 19 nt, Artificial Sequence
  Description of Artificial Sequence: Synthetic oligonucleotide
  Sense strand starting at position 814 of SEQ ID NO: 265
cccaguauauucuuugaua

SEQ ID NO: 23905 - RNA, 19 nt, Artificial Sequence
  Description of Artificial Sequence: Synthetic oligonucleotide
  Antisense strand to SEQ ID NO: 23904
uaucaaagaauauacuggg

SEQ ID NO: 23906 - RNA, 19 nt, Artificial Sequence
  Description of Artificial Sequence: Synthetic oligonucleotide
  Sense strand starting at position 815 of SEQ ID NO: 265
ccaguauauucuuugauac

SEQ ID NO: 23907 - RNA, 19 nt, Artificial Sequence
  Description of Artificial Sequence: Synthetic oligonucleotide
  Antisense strand to SEQ ID NO: 23906
guaucaaagaauauacugg

SEQ ID NO: 23908 - RNA, 19 nt, Artificial Sequence
  Description of Artificial Sequence: Synthetic oligonucleotide
  Sense strand starting at position 901 of SEQ ID NO: 265
cuaaacaucucuggaauga

SEQ ID NO: 23909 - RNA, 19 nt, Artificial Sequence
  Description of Artificial Sequence: Synthetic oligonucleotide
  Antisense strand to SEQ ID NO: 23908
ucauuccagagauguuuag

SEQ ID NO: 23910 - RNA, 19 nt, Artificial Sequence
  Description of Artificial Sequence: Synthetic oligonucleotide
  Sense strand starting at position 1058 of SEQ ID NO: 265
ccaucacuagccugguuaa

SEQ ID NO: 23911 - RNA, 19 nt, Artificial Sequence
  Description of Artificial Sequence: Synthetic oligonucleotide
  Antisense strand to SEQ ID NO: 23910
uuaaccaggcuagugaugg

SEQ ID NO: 23912 - RNA, 19 nt, Artificial Sequence
  Description of Artificial Sequence: Synthetic oligonucleotide
  Sense strand starting at position 1297 of SEQ ID NO: 265
gagguugucccuggaccua

SEQ ID NO: 23913 - RNA, 19 nt, Artificial Sequence
  Description of Artificial Sequence: Synthetic oligonucleotide
  Antisense strand to SEQ ID NO: 23912
uagguccagggacaaccuc

SEQ ID NO: 23914 - RNA, 19 nt, Artificial Sequence
  Description of Artificial Sequence: Synthetic oligonucleotide
  Sense strand starting at position 1455 of SEQ ID NO: 265
caguguggugcuugugaaa

SEQ ID NO: 23915 - RNA, 19 nt, Artificial Sequence
  Description of Artificial Sequence: Synthetic oligonucleotide
  Antisense strand to SEQ ID NO: 23914
uuucacaagcaccacacug

SEQ ID NO: 23916 - RNA, 19 nt, Artificial Sequence
  Description of Artificial Sequence: Synthetic oligonucleotide
  Sense strand starting at position 1483 of SEQ ID NO: 265
ggagcgugagagugaauau

SEQ ID NO: 23917 - RNA, 19 nt, Artificial Sequence
  Description of Artificial Sequence: Synthetic oligonucleotide
  Antisense strand to SEQ ID NO: 23916
auauucacucucacgcucc

SEQ ID NO: 23918 - RNA, 19 nt, Artificial Sequence
  Description of Artificial Sequence: Synthetic oligonucleotide
  Sense strand starting at position 1484 of SEQ ID NO: 265
gagcgugagagugaauaua

SEQ ID NO: 23919 - RNA, 19 nt, Artificial Sequence
  Description of Artificial Sequence: Synthetic oligonucleotide
  Antisense strand to SEQ ID NO: 23918
uauauucacucucacgcuc

SEQ ID NO: 23920 - RNA, 19 nt, Artificial Sequence
  Description of Artificial Sequence: Synthetic oligonucleotide
  Sense strand starting at position 1602 of SEQ ID NO: 265
augagaauguguuacacug

SEQ ID NO: 23921 - RNA, 19 nt, Artificial Sequence
  Description of Artificial Sequence: Synthetic oligonucleotide
  Antisense strand to SEQ ID NO: 23920
caguguaacacauucucau

SEQ ID NO: 23922 - RNA, 19 nt, Artificial Sequence
  Description of Artificial Sequence: Synthetic oligonucleotide
  Sense strand starting at position 1608 of SEQ ID NO: 265
auguguuacacuggaauga

SEQ ID NO: 23923 - RNA, 19 nt, Artificial Sequence
  Description of Artificial Sequence: Synthetic oligonucleotide
  Antisense strand to SEQ ID NO: 23922
ucauuccaguguaacacau

SEQ ID NO: 23924 - RNA, 19 nt, Artificial Sequence
  Description of Artificial Sequence: Synthetic oligonucleotide
  Sense strand starting at position 1637 of SEQ ID NO: 265
auuugacguuucuaagguu

SEQ ID NO: 23925 - RNA, 19 nt, Artificial Sequence
  Description of Artificial Sequence: Synthetic oligonucleotide
  Antisense strand to SEQ ID NO: 23924
aaccuuagaaacgucaaau

SEQ ID NO: 23926 - RNA, 19 nt, Artificial Sequence
  Description of Artificial Sequence: Synthetic oligonucleotide
  Sense strand starting at position 1683 of SEQ ID NO: 265
ugugaauucuucccaagaa

SEQ ID NO: 23927 - RNA, 19 nt, Artificial Sequence
  Description of Artificial Sequence: Synthetic oligonucleotide
  Antisense strand to SEQ ID NO: 23926
uucuugggaagaauucaca

SEQ ID NO: 23928 - RNA, 19 nt, Artificial Sequence
  Description of Artificial Sequence: Synthetic oligonucleotide
  Sense strand starting at position 1684 of SEQ ID NO: 265
gugaauucuucccaagaag

SEQ ID NO: 23929 - RNA, 19 nt, Artificial Sequence
  Description of Artificial Sequence: Synthetic oligonucleotide
  Antisense strand to SEQ ID NO: 23928
cuucuugggaagaauucac

SEQ ID NO: 23930 - RNA, 19 nt, Artificial Sequence
  Description of Artificial Sequence: Synthetic oligonucleotide
  Sense strand starting at position 1986 of SEQ ID NO: 265
ugcacaauccgcggaguaa

SEQ ID NO: 23931 - RNA, 19 nt, Artificial Sequence
  Description of Artificial Sequence: Synthetic oligonucleotide
  Antisense strand to SEQ ID NO: 23930
uuacuccgcggauugugca

SEQ ID NO: 23932 - RNA, 19 nt, Artificial Sequence
  Description of Artificial Sequence: Synthetic oligonucleotide
  Sense strand starting at position 2175 of SEQ ID NO: 265
agaacuuuauggguguaga

SEQ ID NO: 23933 - RNA, 19 nt, Artificial Sequence
  Description of Artificial Sequence: Synthetic oligonucleotide
  Antisense strand to SEQ ID NO: 23932
ucuacacccauaaaguucu

SEQ ID NO: 23934 - RNA, 19 nt, Artificial Sequence
  Description of Artificial Sequence: Synthetic oligonucleotide
  Sense strand starting at position 2176 of SEQ ID NO: 265
gaacuuuauggguguagac

SEQ ID NO: 23935 - RNA, 19 nt, Artificial Sequence
  Description of Artificial Sequence: Synthetic oligonucleotide
  Antisense strand to SEQ ID NO: 23934
gucuacacccauaaaguuc

SEQ ID NO: 23936 - RNA, 19 nt, Artificial Sequence
  Description of Artificial Sequence: Synthetic oligonucleotide
  Sense strand starting at position 2211 of SEQ ID NO: 265
aaugcuugcgguuuguaca

SEQ ID NO: 23937 - RNA, 19 nt, Artificial Sequence
  Description of Artificial Sequence: Synthetic oligonucleotide
  Antisense strand to SEQ ID NO: 23936
uguacaaaccgcaagcauu

SEQ ID NO: 23938 - RNA, 19 nt, Artificial Sequence
  Description of Artificial Sequence: Synthetic oligonucleotide
  Sense strand starting at position 2289 of SEQ ID NO: 265
ugcucagguugauaaacaa

SEQ ID NO: 23939 - RNA, 19 nt, Artificial Sequence
  Description of Artificial Sequence: Synthetic oligonucleotide
  Antisense strand to SEQ ID NO: 23938
uuguuuaucaaccugagca

SEQ ID NO: 23940 - RNA, 19 nt, Artificial Sequence
  Description of Artificial Sequence: Synthetic oligonucleotide
  Sense strand starting at position 2326 of SEQ ID NO: 265
guacaaaguccagaguuga

SEQ ID NO: 23941 - RNA, 19 nt, Artificial Sequence
  Description of Artificial Sequence: Synthetic oligonucleotide
  Antisense strand to SEQ ID NO: 23940
ucaacucuggacuuuguac

SEQ ID NO: 23942 - RNA, 19 nt, Artificial Sequence
  Description of Artificial Sequence: Synthetic oligonucleotide
  Sense strand starting at position 2403 of SEQ ID NO: 265
gcauucuuuccaggcaaag

SEQ ID NO: 23943 - RNA, 19 nt, Artificial Sequence
  Description of Artificial Sequence: Synthetic oligonucleotide
  Antisense strand to SEQ ID NO: 23942
cuuugccuggaaagaaugc

SEQ ID NO: 23944 - RNA, 19 nt, Artificial Sequence
  Description of Artificial Sequence: Synthetic oligonucleotide
  Sense strand starting at position 2643 of SEQ ID NO: 265
ggaaucaccuucccugagu

SEQ ID NO: 23945 - RNA, 19 nt, Artificial Sequence
  Description of Artificial Sequence: Synthetic oligonucleotide
  Antisense strand to SEQ ID NO: 23944
acucagggaaggugauucc

SEQ ID NO: 23946 - RNA, 19 nt, Artificial Sequence
  Description of Artificial Sequence: Synthetic oligonucleotide
  Sense strand starting at position 2712 of SEQ ID NO: 265
gucgcagcauuccucauua

SEQ ID NO: 23947 - RNA, 19 nt, Artificial Sequence
  Description of Artificial Sequence: Synthetic oligonucleotide
  Antisense strand to SEQ ID NO: 23946
uaaugaggaaugcugcgac

SEQ ID NO: 23948 - RNA, 19 nt, Artificial Sequence
  Description of Artificial Sequence: Synthetic oligonucleotide
  Sense strand starting at position 2734 of SEQ ID NO: 265
ugugauuauucgcucuccu

SEQ ID NO: 23949 - RNA, 19 nt, Artificial Sequence
  Description of Artificial Sequence: Synthetic oligonucleotide
  Antisense strand to SEQ ID NO: 23948
aggagagcgaauaaucaca

SEQ ID NO: 23950 - RNA, 19 nt, Artificial Sequence
  Description of Artificial Sequence: Synthetic oligonucleotide
  Sense strand starting at position 3059 of SEQ ID NO: 265
ugguaaugcucaccuguag

SEQ ID NO: 23951 - RNA, 19 nt, Artificial Sequence
  Description of Artificial Sequence: Synthetic oligonucleotide
  Antisense strand to SEQ ID NO: 23950
cuacaggugagcauuacca

SEQ ID NO: 23952 - RNA, 19 nt, Artificial Sequence
  Description of Artificial Sequence: Synthetic oligonucleotide
  Sense strand starting at position 3144 of SEQ ID NO: 265
ccaugauugcgccaucaca

SEQ ID NO: 23953 - RNA, 19 nt, Artificial Sequence
  Description of Artificial Sequence: Synthetic oligonucleotide
  Antisense strand to SEQ ID NO: 23952
ugugauggcgcaaucaugg

SEQ ID NO: 23954 - RNA, 19 nt, Artificial Sequence
  Description of Artificial Sequence: Synthetic oligonucleotide
  Sense strand starting at position 3284 of SEQ ID NO: 265
cccugaagaucuuaggaug

SEQ ID NO: 23955 - RNA, 19 nt, Artificial Sequence
  Description of Artificial Sequence: Synthetic oligonucleotide
  Antisense strand to SEQ ID NO: 23954
cauccuaagaucuucaggg

SEQ ID NO: 23956 - RNA, 19 nt, Artificial Sequence
  Description of Artificial Sequence: Synthetic oligonucleotide
  Sense strand starting at position 3287 of SEQ ID NO: 265
ugaagaucuuaggaugaaa

SEQ ID NO: 23957 - RNA, 19 nt, Artificial Sequence
  Description of Artificial Sequence: Synthetic oligonucleotide
  Antisense strand to SEQ ID NO: 23956
uuucauccuaagaucuuca

SEQ ID NO: 23958 - RNA, 19 nt, Artificial Sequence
  Description of Artificial Sequence: Synthetic oligonucleotide
  Sense strand starting at position 3870 of SEQ ID NO: 265
accuguaaacucugggaau

SEQ ID NO: 23959 - RNA, 19 nt, Artificial Sequence
  Description of Artificial Sequence: Synthetic oligonucleotide
  Antisense strand to SEQ ID NO: 23958
auucccagaguuuacaggu

SEQ ID NO: 23960 - RNA, 19 nt, Artificial Sequence
  Description of Artificial Sequence: Synthetic oligonucleotide
  Sense strand starting at position 3873 of SEQ ID NO: 265
uguaaacucugggaaugga

SEQ ID NO: 23961 - RNA, 19 nt, Artificial Sequence
  Description of Artificial Sequence: Synthetic oligonucleotide
  Antisense strand to SEQ ID NO: 23960
uccauucccagaguuuaca

SEQ ID NO: 23962 - RNA, 19 nt, Artificial Sequence
  Description of Artificial Sequence: Synthetic oligonucleotide
  Sense strand starting at position 3896 of SEQ ID NO: 265
gcaucugucuuguuuccau

SEQ ID NO: 23963 - RNA, 19 nt, Artificial Sequence
  Description of Artificial Sequence: Synthetic oligonucleotide
  Antisense strand to SEQ ID NO: 23962
auggaaacaagacagaugc

SEQ ID NO: 23964 - RNA, 19 nt, Artificial Sequence
  Description of Artificial Sequence: Synthetic oligonucleotide
  Sense strand starting at position 3899 of SEQ ID NO: 265
ucugucuuguuuccaucau

SEQ ID NO: 23965 - RNA, 19 nt, Artificial Sequence
  Description of Artificial Sequence: Synthetic oligonucleotide
  Antisense strand to SEQ ID NO: 23964
augauggaaacaagacaga

SEQ ID NO: 23966 - RNA, 19 nt, Artificial Sequence
  Description of Artificial Sequence: Synthetic oligonucleotide
  Sense strand starting at position 184 of SEQ ID NO: 266
gcaaacugcccagagaucu

SEQ ID NO: 23967 - RNA, 19 nt, Artificial Sequence
  Description of Artificial Sequence: Synthetic oligonucleotide
  Antisense strand to SEQ ID NO: 23966
agaucucugggcaguuugc

SEQ ID NO: 23968 - RNA, 19 nt, Artificial Sequence
  Description of Artificial Sequence: Synthetic oligonucleotide
  Sense strand starting at position 229 of SEQ ID NO: 266
guauuccuuuggccuacaa

SEQ ID NO: 23969 - RNA, 19 nt, Artificial Sequence
  Description of Artificial Sequence: Synthetic oligonucleotide
  Antisense strand to SEQ ID NO: 23968
uuguaggccaaaggaauac

SEQ ID NO: 23970 - RNA, 19 nt, Artificial Sequence
  Description of Artificial Sequence: Synthetic oligonucleotide
  Sense strand starting at position 440 of SEQ ID NO: 266
cuggguauacacugucuua

SEQ ID NO: 23971 - RNA, 19 nt, Artificial Sequence
  Description of Artificial Sequence: Synthetic oligonucleotide
  Antisense strand to SEQ ID NO: 23970
uaagacaguguauacccag

SEQ ID NO: 23972 - RNA, 19 nt, Artificial Sequence
  Description of Artificial Sequence: Synthetic oligonucleotide
  Sense strand starting at position 489 of SEQ ID NO: 266
ggucgacgaucagugaaug

SEQ ID NO: 23973 - RNA, 19 nt, Artificial Sequence
  Description of Artificial Sequence: Synthetic oligonucleotide
  Antisense strand to SEQ ID NO: 23972
cauucacugaucgucgacc

SEQ ID NO: 23974 - RNA, 19 nt, Artificial Sequence
  Description of Artificial Sequence: Synthetic oligonucleotide
  Sense strand starting at position 494 of SEQ ID NO: 266
acgaucagugaaugucuau

SEQ ID NO: 23975 - RNA, 19 nt, Artificial Sequence
  Description of Artificial Sequence: Synthetic oligonucleotide
  Antisense strand to SEQ ID NO: 23974
auagacauucacugaucgu

SEQ ID NO: 23976 - RNA, 19 nt, Artificial Sequence
  Description of Artificial Sequence: Synthetic oligonucleotide
  Sense strand starting at position 557 of SEQ ID NO: 266
uuuguaaucuggcuuggac

SEQ ID NO: 23977 - RNA, 19 nt, Artificial Sequence
  Description of Artificial Sequence: Synthetic oligonucleotide
  Antisense strand to SEQ ID NO: 23976
guccaagccagauuacaaa

SEQ ID NO: 23978 - RNA, 19 nt, Artificial Sequence
  Description of Artificial Sequence: Synthetic oligonucleotide
  Sense strand starting at position 570 of SEQ ID NO: 266
uuggaccuccuguauauau

SEQ ID NO: 23979 - RNA, 19 nt, Artificial Sequence
  Description of Artificial Sequence: Synthetic oligonucleotide
  Antisense strand to SEQ ID NO: 23978
auauauacaggagguccaa

SEQ ID NO: 23980 - RNA, 19 nt, Artificial Sequence
  Description of Artificial Sequence: Synthetic oligonucleotide
  Sense strand starting at position 842 of SEQ ID NO: 266
ucccaaugccucuggaaca

SEQ ID NO: 23981 - RNA, 19 nt, Artificial Sequence
  Description of Artificial Sequence: Synthetic oligonucleotide
  Antisense strand to SEQ ID NO: 23980
uguuccagaggcauuggga

SEQ ID NO: 23982 - RNA, 19 nt, Artificial Sequence
  Description of Artificial Sequence: Synthetic oligonucleotide
  Sense strand starting at position 1111 of SEQ ID NO: 266
cagcaaugggcagagaagu

SEQ ID NO: 23983 - RNA, 19 nt, Artificial Sequence
  Description of Artificial Sequence: Synthetic oligonucleotide
  Antisense strand to SEQ ID NO: 23982
acuucucugcccauugcug

SEQ ID NO: 23984 - RNA, 19 nt, Artificial Sequence
  Description of Artificial Sequence: Synthetic oligonucleotide
  Sense strand starting at position 1146 of SEQ ID NO: 266
uaggaacaguucguuucua

SEQ ID NO: 23985 - RNA, 19 nt, Artificial Sequence
  Description of Artificial Sequence: Synthetic oligonucleotide
  Antisense strand to SEQ ID NO: 23984
uagaaacgaacuguuccua

SEQ ID NO: 23986 - RNA, 19 nt, Artificial Sequence
  Description of Artificial Sequence: Synthetic oligonucleotide
  Sense strand starting at position 1147 of SEQ ID NO: 266
aggaacaguucguuucuaa

SEQ ID NO: 23987 - RNA, 19 nt, Artificial Sequence
  Description of Artificial Sequence: Synthetic oligonucleotide
  Antisense strand to SEQ ID NO: 23986
uuagaaacgaacuguuccu

SEQ ID NO: 23988 - RNA, 19 nt, Artificial Sequence
  Description of Artificial Sequence: Synthetic oligonucleotide
  Sense strand starting at position 1290 of SEQ ID NO: 266
aucacaggguucucagaga

SEQ ID NO: 23989 - RNA, 19 nt, Artificial Sequence
  Description of Artificial Sequence: Synthetic oligonucleotide
  Antisense strand to SEQ ID NO: 23988
ucucugagaacccugugau

SEQ ID NO: 23990 - RNA, 19 nt, Artificial Sequence
  Description of Artificial Sequence: Synthetic oligonucleotide
  Sense strand starting at position 1897 of SEQ ID NO: 266
agugaaaucugauuaguca

SEQ ID NO: 23991 - RNA, 19 nt, Artificial Sequence
  Description of Artificial Sequence: Synthetic oligonucleotide
  Antisense strand to SEQ ID NO: 23990
ugacuaaucagauuucacu

SEQ ID NO: 23992 - RNA, 19 nt, Artificial Sequence
  Description of Artificial Sequence: Synthetic oligonucleotide
  Sense strand starting at position 1898 of SEQ ID NO: 266
gugaaaucugauuagucac

SEQ ID NO: 23993 - RNA, 19 nt, Artificial Sequence
  Description of Artificial Sequence: Synthetic oligonucleotide
  Antisense strand to SEQ ID NO: 23992
gugacuaaucagauuucac

SEQ ID NO: 23994 - RNA, 19 nt, Artificial Sequence
  Description of Artificial Sequence: Synthetic oligonucleotide
  Sense strand starting at position 1904 of SEQ ID NO: 266
ucugauuagucaccaccuu

SEQ ID NO: 23995 - RNA, 19 nt, Artificial Sequence
  Description of Artificial Sequence: Synthetic oligonucleotide
  Antisense strand to SEQ ID NO: 23994
aagguggugacuaaucaga

SEQ ID NO: 23996 - RNA, 19 nt, Artificial Sequence
  Description of Artificial Sequence: Synthetic oligonucleotide
  Sense strand starting at position 2144 of SEQ ID NO: 266
ucagaucucuucucggaga

SEQ ID NO: 23997 - RNA, 19 nt, Artificial Sequence
  Description of Artificial Sequence: Synthetic oligonucleotide
  Antisense strand to SEQ ID NO: 23996
ucuccgagaagagaucuga

SEQ ID NO: 23998 - RNA, 19 nt, Artificial Sequence
  Description of Artificial Sequence: Synthetic oligonucleotide
  Sense strand starting at position 2146 of SEQ ID NO: 266
agaucucuucucggagaga

SEQ ID NO: 23999 - RNA, 19 nt, Artificial Sequence
  Description of Artificial Sequence: Synthetic oligonucleotide
  Antisense strand to SEQ ID NO: 23998
ucucuccgagaagagaucu

SEQ ID NO: 24000 - RNA, 19 nt, Artificial Sequence
  Description of Artificial Sequence: Synthetic oligonucleotide
  Sense strand starting at position 2149 of SEQ ID NO: 266
ucucuucucggagagaucu

SEQ ID NO: 24001 - RNA, 19 nt, Artificial Sequence
  Description of Artificial Sequence: Synthetic oligonucleotide
  Antisense strand to SEQ ID NO: 24000
agaucucuccgagaagaga

SEQ ID NO: 24002 - RNA, 19 nt, Artificial Sequence
  Description of Artificial Sequence: Synthetic oligonucleotide
  Sense strand starting at position 2160 of SEQ ID NO: 266
agagaucucugacucccua

SEQ ID NO: 24003 - RNA, 19 nt, Artificial Sequence
  Description of Artificial Sequence: Synthetic oligonucleotide
  Antisense strand to SEQ ID NO: 24002
uagggagucagagaucucu

SEQ ID NO: 24004 - RNA, 19 nt, Artificial Sequence
  Description of Artificial Sequence: Synthetic oligonucleotide
  Sense strand starting at position 2263 of SEQ ID NO: 266
uugugcuuacuugacuaaa

SEQ ID NO: 24005 - RNA, 19 nt, Artificial Sequence
  Description of Artificial Sequence: Synthetic oligonucleotide
  Antisense strand to SEQ ID NO: 24004
uuuagucaaguaagcacaa

SEQ ID NO: 24006 - RNA, 19 nt, Artificial Sequence
  Description of Artificial Sequence: Synthetic oligonucleotide
  Sense strand starting at position 2265 of SEQ ID NO: 266
gugcuuacuugacuaaagu

SEQ ID NO: 24007 - RNA, 19 nt, Artificial Sequence
  Description of Artificial Sequence: Synthetic oligonucleotide
  Antisense strand to SEQ ID NO: 24006
acuuuagucaaguaagcac

SEQ ID NO: 24008 - RNA, 19 nt, Artificial Sequence
  Description of Artificial Sequence: Synthetic oligonucleotide
  Sense strand starting at position 2692 of SEQ ID NO: 266
cacccaugaugccugugaa

SEQ ID NO: 24009 - RNA, 19 nt, Artificial Sequence
  Description of Artificial Sequence: Synthetic oligonucleotide
  Antisense strand to SEQ ID NO: 24008
uucacaggcaucaugggug

SEQ ID NO: 24010 - RNA, 19 nt, Artificial Sequence
  Description of Artificial Sequence: Synthetic oligonucleotide
  Sense strand starting at position 2693 of SEQ ID NO: 266
acccaugaugccugugaag

SEQ ID NO: 24011 - RNA, 19 nt, Artificial Sequence
  Description of Artificial Sequence: Synthetic oligonucleotide
  Antisense strand to SEQ ID NO: 24010
cuucacaggcaucaugggu

SEQ ID NO: 24012 - RNA, 19 nt, Artificial Sequence
  Description of Artificial Sequence: Synthetic oligonucleotide
  Sense strand starting at position 2695 of SEQ ID NO: 266
ccaugaugccugugaagug

SEQ ID NO: 24013 - RNA, 19 nt, Artificial Sequence
  Description of Artificial Sequence: Synthetic oligonucleotide
  Antisense strand to SEQ ID NO: 24012
cacuucacaggcaucaugg

SEQ ID NO: 24014 - RNA, 19 nt, Artificial Sequence
  Description of Artificial Sequence: Synthetic oligonucleotide
  Sense strand starting at position 2739 of SEQ ID NO: 266
ggaggaacagcgugauaaa

SEQ ID NO: 24015 - RNA, 19 nt, Artificial Sequence
  Description of Artificial Sequence: Synthetic oligonucleotide
  Antisense strand to SEQ ID NO: 24014
uuuaucacgcuguuccucc

SEQ ID NO: 24016 - RNA, 19 nt, Artificial Sequence
  Description of Artificial Sequence: Synthetic oligonucleotide
  Sense strand starting at position 2782 of SEQ ID NO: 266
aguggauucuucucagagc

SEQ ID NO: 24017 - RNA, 19 nt, Artificial Sequence
  Description of Artificial Sequence: Synthetic oligonucleotide
  Antisense strand to SEQ ID NO: 24016
gcucugagaagaauccacu

SEQ ID NO: 24018 - RNA, 19 nt, Artificial Sequence
  Description of Artificial Sequence: Synthetic oligonucleotide
  Sense strand starting at position 2893 of SEQ ID NO: 266
ucaguaauugcugacccua

SEQ ID NO: 24019 - RNA, 19 nt, Artificial Sequence
  Description of Artificial Sequence: Synthetic oligonucleotide
  Antisense strand to SEQ ID NO: 24018
uagggucagcaauuacuga

SEQ ID NO: 24020 - RNA, 19 nt, Artificial Sequence
  Description of Artificial Sequence: Synthetic oligonucleotide
  Sense strand starting at position 2895 of SEQ ID NO: 266
aguaauugcugacccuaau

SEQ ID NO: 24021 - RNA, 19 nt, Artificial Sequence
  Description of Artificial Sequence: Synthetic oligonucleotide
  Antisense strand to SEQ ID NO: 24020
auuagggucagcaauuacu

SEQ ID NO: 24022 - RNA, 19 nt, Artificial Sequence
  Description of Artificial Sequence: Synthetic oligonucleotide
  Sense strand starting at position 2967 of SEQ ID NO: 266
ccuagagacuaauuggcaa

SEQ ID NO: 24023 - RNA, 19 nt, Artificial Sequence
  Description of Artificial Sequence: Synthetic oligonucleotide
  Antisense strand to SEQ ID NO: 24022
uugccaauuagucucuagg

SEQ ID NO: 24024 - RNA, 19 nt, Artificial Sequence
  Description of Artificial Sequence: Synthetic oligonucleotide
  Sense strand starting at position 3406 of SEQ ID NO: 266
gcaugcaucacgucagcua

SEQ ID NO: 24025 - RNA, 19 nt, Artificial Sequence
  Description of Artificial Sequence: Synthetic oligonucleotide
  Antisense strand to SEQ ID NO: 24024
uagcugacgugaugcaugc

SEQ ID NO: 24026 - RNA, 19 nt, Artificial Sequence
  Description of Artificial Sequence: Synthetic oligonucleotide
  Sense strand starting at position 3585 of SEQ ID NO: 266
uuuggugaucuaggguuau

SEQ ID NO: 24027 - RNA, 19 nt, Artificial Sequence
  Description of Artificial Sequence: Synthetic oligonucleotide
  Antisense strand to SEQ ID NO: 24026
auaacccuagaucaccaaa

SEQ ID NO: 24028 - RNA, 19 nt, Artificial Sequence
  Description of Artificial Sequence: Synthetic oligonucleotide
  Sense strand starting at position 3603 of SEQ ID NO: 266
ugcaguucugcccagacca

SEQ ID NO: 24029 - RNA, 19 nt, Artificial Sequence
  Description of Artificial Sequence: Synthetic oligonucleotide
  Antisense strand to SEQ ID NO: 24028
uggucugggcagaacugca

SEQ ID NO: 24030 - RNA, 19 nt, Artificial Sequence
  Description of Artificial Sequence: Synthetic oligonucleotide
  Sense strand starting at position 3626 of SEQ ID NO: 266
gccauaaagucaucaauug

SEQ ID NO: 24031 - RNA, 19 nt, Artificial Sequence
  Description of Artificial Sequence: Synthetic oligonucleotide
  Antisense strand to SEQ ID NO: 24030
caauugaugacuuuauggc

SEQ ID NO: 24032 - RNA, 19 nt, Artificial Sequence
  Description of Artificial Sequence: Synthetic oligonucleotide
  Sense strand starting at position 3627 of SEQ ID NO: 266
ccauaaagucaucaauugu

SEQ ID NO: 24033 - RNA, 19 nt, Artificial Sequence
  Description of Artificial Sequence: Synthetic oligonucleotide
  Antisense strand to SEQ ID NO: 24032
acaauugaugacuuuaugg

SEQ ID NO: 24034 - RNA, 19 nt, Artificial Sequence
  Description of Artificial Sequence: Synthetic oligonucleotide
  Sense strand starting at position 3644 of SEQ ID NO: 266
guuuguucugcccagaaua

SEQ ID NO: 24035 - RNA, 19 nt, Artificial Sequence
  Description of Artificial Sequence: Synthetic oligonucleotide
  Antisense strand to SEQ ID NO: 24034
uauucugggcagaacaaac

SEQ ID NO: 24036 - RNA, 19 nt, Artificial Sequence
  Description of Artificial Sequence: Synthetic oligonucleotide
  Sense strand starting at position 3702 of SEQ ID NO: 266
uuaaccaugugggucaaau

SEQ ID NO: 24037 - RNA, 19 nt, Artificial Sequence
  Description of Artificial Sequence: Synthetic oligonucleotide
  Antisense strand to SEQ ID NO: 24036
auuugacccacaugguuaa

SEQ ID NO: 24038 - RNA, 19 nt, Artificial Sequence
  Description of Artificial Sequence: Synthetic oligonucleotide
  Sense strand starting at position 3770 of SEQ ID NO: 266
cagaguccuucucugggau

SEQ ID NO: 24039 - RNA, 19 nt, Artificial Sequence
  Description of Artificial Sequence: Synthetic oligonucleotide
  Antisense strand to SEQ ID NO: 24038
aucccagagaaggacucug

SEQ ID NO: 24040 - RNA, 19 nt, Artificial Sequence
  Description of Artificial Sequence: Synthetic oligonucleotide
  Sense strand starting at position 3773 of SEQ ID NO: 266
aguccuucucugggaucuu

SEQ ID NO: 24041 - RNA, 19 nt, Artificial Sequence
  Description of Artificial Sequence: Synthetic oligonucleotide
  Antisense strand to SEQ ID NO: 24040
aagaucccagagaaggacu

SEQ ID NO: 24042 - RNA, 19 nt, Artificial Sequence
  Description of Artificial Sequence: Synthetic oligonucleotide
  Sense strand starting at position 3913 of SEQ ID NO: 266
agccuaacuugaguggaau

SEQ ID NO: 24043 - RNA, 19 nt, Artificial Sequence
  Description of Artificial Sequence: Synthetic oligonucleotide
  Antisense strand to SEQ ID NO: 24042
auuccacucaaguuaggcu

SEQ ID NO: 24044 - RNA, 19 nt, Artificial Sequence
  Description of Artificial Sequence: Synthetic oligonucleotide
  Sense strand starting at position 3914 of SEQ ID NO: 266
gccuaacuugaguggaauu

SEQ ID NO: 24045 - RNA, 19 nt, Artificial Sequence
  Description of Artificial Sequence: Synthetic oligonucleotide
  Antisense strand to SEQ ID NO: 24044
aauuccacucaaguuaggc

SEQ ID NO: 24046 - RNA, 19 nt, Artificial Sequence
  Description of Artificial Sequence: Synthetic oligonucleotide
  Sense strand starting at position 3919 of SEQ ID NO: 267
ugucaaggugauuaguaaa

SEQ ID NO: 24047 - RNA, 19 nt, Artificial Sequence
  Description of Artificial Sequence: Synthetic oligonucleotide
  Antisense strand to SEQ ID NO: 24046
uuuacuaaucaccuugaca

SEQ ID NO: 24048 - RNA, 19 nt, Artificial Sequence
  Description of Artificial Sequence: Synthetic oligonucleotide
  Sense strand starting at position 3918 of SEQ ID NO: 267
cugucaaggugauuaguaa

SEQ ID NO: 24049 - RNA, 19 nt, Artificial Sequence
  Description of Artificial Sequence: Synthetic oligonucleotide
  Antisense strand to SEQ ID NO: 24048
uuacuaaucaccuugacag

SEQ ID NO: 24050 - RNA, 19 nt, Artificial Sequence
  Description of Artificial Sequence: Synthetic oligonucleotide
  Sense strand starting at position 3916 of SEQ ID NO: 267
accugucaaggugauuagu

SEQ ID NO: 24051 - RNA, 19 nt, Artificial Sequence
  Description of Artificial Sequence: Synthetic oligonucleotide
  Antisense strand to SEQ ID NO: 24050
acuaaucaccuugacaggu

SEQ ID NO: 24052 - RNA, 19 nt, Artificial Sequence
  Description of Artificial Sequence: Synthetic oligonucleotide
  Sense strand starting at position 3913 of SEQ ID NO: 267
aacaccugucaaggugauu

SEQ ID NO: 24053 - RNA, 19 nt, Artificial Sequence
  Description of Artificial Sequence: Synthetic oligonucleotide
  Antisense strand to SEQ ID NO: 24052
aaucaccuugacagguguu

SEQ ID NO: 24054 - RNA, 19 nt, Artificial Sequence
  Description of Artificial Sequence: Synthetic oligonucleotide
  Sense strand starting at position 3848 of SEQ ID NO: 267
uccuuauugguuuaaagug

SEQ ID NO: 24055 - RNA, 19 nt, Artificial Sequence
  Description of Artificial Sequence: Synthetic oligonucleotide
  Antisense strand to SEQ ID NO: 24054
cacuuuaaaccaauaagga

SEQ ID NO: 24056 - RNA, 19 nt, Artificial Sequence
  Description of Artificial Sequence: Synthetic oligonucleotide
  Sense strand starting at position 3846 of SEQ ID NO: 267
ucuccuuauugguuuaaag

SEQ ID NO: 24057 - RNA, 19 nt, Artificial Sequence
  Description of Artificial Sequence: Synthetic oligonucleotide
  Antisense strand to SEQ ID NO: 24056
cuuuaaaccaauaaggaga

SEQ ID NO: 24058 - RNA, 19 nt, Artificial Sequence
  Description of Artificial Sequence: Synthetic oligonucleotide
  Sense strand starting at position 3775 of SEQ ID NO: 267
aaugaaacuguacgaaaug

SEQ ID NO: 24059 - RNA, 19 nt, Artificial Sequence
  Description of Artificial Sequence: Synthetic oligonucleotide
  Antisense strand to SEQ ID NO: 24058
cauuucguacaguuucauu

SEQ ID NO: 24060 - RNA, 19 nt, Artificial Sequence
  Description of Artificial Sequence: Synthetic oligonucleotide
  Sense strand starting at position 3645 of SEQ ID NO: 267
gcacaauuugccugucagg

SEQ ID NO: 24061 - RNA, 19 nt, Artificial Sequence
  Description of Artificial Sequence: Synthetic oligonucleotide
  Antisense strand to SEQ ID NO: 24060
ccugacaggcaaauugugc

SEQ ID NO: 24062 - RNA, 19 nt, Artificial Sequence
  Description of Artificial Sequence: Synthetic oligonucleotide
  Sense strand starting at position 3599 of SEQ ID NO: 267
ccugaugauucuccuaagu

SEQ ID NO: 24063 - RNA, 19 nt, Artificial Sequence
  Description of Artificial Sequence: Synthetic oligonucleotide
  Antisense strand to SEQ ID NO: 24062
acuuaggagaaucaucagg

SEQ ID NO: 24064 - RNA, 19 nt, Artificial Sequence
  Description of Artificial Sequence: Synthetic oligonucleotide
  Sense strand starting at position 3598 of SEQ ID NO: 267
uccugaugauucuccuaag

SEQ ID NO: 24065 - RNA, 19 nt, Artificial Sequence
  Description of Artificial Sequence: Synthetic oligonucleotide
  Antisense strand to SEQ ID NO: 24064
cuuaggagaaucaucagga

SEQ ID NO: 24066 - RNA, 19 nt, Artificial Sequence
  Description of Artificial Sequence: Synthetic oligonucleotide
  Sense strand starting at position 3359 of SEQ ID NO: 267
cuagguaugccauauucua

SEQ ID NO: 24067 - RNA, 19 nt, Artificial Sequence
  Description of Artificial Sequence: Synthetic oligonucleotide
  Antisense strand to SEQ ID NO: 24066
uagaauauggcauaccuag

SEQ ID NO: 24068 - RNA, 19 nt, Artificial Sequence
  Description of Artificial Sequence: Synthetic oligonucleotide
  Sense strand starting at position 3322 of SEQ ID NO: 267
gugguuucaguggugcuau

SEQ ID NO: 24069 - RNA, 19 nt, Artificial Sequence
  Description of Artificial Sequence: Synthetic oligonucleotide
  Antisense strand to SEQ ID NO: 24068
auagcaccacugaaaccac

SEQ ID NO: 24070 - RNA, 19 nt, Artificial Sequence
  Description of Artificial Sequence: Synthetic oligonucleotide
  Sense strand starting at position 3172 of SEQ ID NO: 267
ugugaacaccucugcuaag

SEQ ID NO: 24071 - RNA, 19 nt, Artificial Sequence
  Description of Artificial Sequence: Synthetic oligonucleotide
  Antisense strand to SEQ ID NO: 24070
cuuagcagagguguucaca

SEQ ID NO: 24072 - RNA, 19 nt, Artificial Sequence
  Description of Artificial Sequence: Synthetic oligonucleotide
  Sense strand starting at position 3132 of SEQ ID NO: 267
aggagaucgcucgaucauu

SEQ ID NO: 24073 - RNA, 19 nt, Artificial Sequence
  Description of Artificial Sequence: Synthetic oligonucleotide
  Antisense strand to SEQ ID NO: 24072
aaugaucgagcgaucuccu

SEQ ID NO: 24074 - RNA, 19 nt, Artificial Sequence
  Description of Artificial Sequence: Synthetic oligonucleotide
  Sense strand starting at position 3023 of SEQ ID NO: 267
ggaaauccagcucagucau

SEQ ID NO: 24075 - RNA, 19 nt, Artificial Sequence
  Description of Artificial Sequence: Synthetic oligonucleotide
  Antisense strand to SEQ ID NO: 24074
augacugagcuggauuucc

SEQ ID NO: 24076 - RNA, 19 nt, Artificial Sequence
  Description of Artificial Sequence: Synthetic oligonucleotide
  Sense strand starting at position 2935 of SEQ ID NO: 267
cuuaaagguuuguuauuga

SEQ ID NO: 24077 - RNA, 19 nt, Artificial Sequence
  Description of Artificial Sequence: Synthetic oligonucleotide
  Antisense strand to SEQ ID NO: 24076
ucaauaacaaaccuuuaag

SEQ ID NO: 24078 - RNA, 19 nt, Artificial Sequence
  Description of Artificial Sequence: Synthetic oligonucleotide
  Sense strand starting at position 2860 of SEQ ID NO: 267
agcugugcucaauacagau

SEQ ID NO: 24079 - RNA, 19 nt, Artificial Sequence
  Description of Artificial Sequence: Synthetic oligonucleotide
  Antisense strand to SEQ ID NO: 24078
aucuguauugagcacagcu

SEQ ID NO: 24080 - RNA, 19 nt, Artificial Sequence
  Description of Artificial Sequence: Synthetic oligonucleotide
  Sense strand starting at position 2773 of SEQ ID NO: 267
aacccauuagguuguaaag

SEQ ID NO: 24081 - RNA, 19 nt, Artificial Sequence
  Description of Artificial Sequence: Synthetic oligonucleotide
  Antisense strand to SEQ ID NO: 24080
cuuuacaaccuaauggguu

SEQ ID NO: 24082 - RNA, 19 nt, Artificial Sequence
  Description of Artificial Sequence: Synthetic oligonucleotide
  Sense strand starting at position 2755 of SEQ ID NO: 267
cucaaagagcuggguauaa

SEQ ID NO: 24083 - RNA, 19 nt, Artificial Sequence
  Description of Artificial Sequence: Synthetic oligonucleotide
  Antisense strand to SEQ ID NO: 24082
uuauacccagcucuuugag

SEQ ID NO: 24084 - RNA, 19 nt, Artificial Sequence
  Description of Artificial Sequence: Synthetic oligonucleotide
  Sense strand starting at position 2754 of SEQ ID NO: 267
acucaaagagcuggguaua

SEQ ID NO: 24085 - RNA, 19 nt, Artificial Sequence
  Description of Artificial Sequence: Synthetic oligonucleotide
  Antisense strand to SEQ ID NO: 24084
uauacccagcucuuugagu

SEQ ID NO: 24086 - RNA, 19 nt, Artificial Sequence
  Description of Artificial Sequence: Synthetic oligonucleotide
  Sense strand starting at position 2726 of SEQ ID NO: 267
uagggauccucuuuggcuu

SEQ ID NO: 24087 - RNA, 19 nt, Artificial Sequence
  Description of Artificial Sequence: Synthetic oligonucleotide
  Antisense strand to SEQ ID NO: 24086
aagccaaagaggaucccua

SEQ ID NO: 24088 - RNA, 19 nt, Artificial Sequence
  Description of Artificial Sequence: Synthetic oligonucleotide
  Sense strand starting at position 2685 of SEQ ID NO: 267
ggaacagcugccuauauau

SEQ ID NO: 24089 - RNA, 19 nt, Artificial Sequence
  Description of Artificial Sequence: Synthetic oligonucleotide
  Antisense strand to SEQ ID NO: 24088
auauauaggcagcuguucc

SEQ ID NO: 24090 - RNA, 19 nt, Artificial Sequence
  Description of Artificial Sequence: Synthetic oligonucleotide
  Sense strand starting at position 2684 of SEQ ID NO: 267
uggaacagcugccuauaua

SEQ ID NO: 24091 - RNA, 19 nt, Artificial Sequence
  Description of Artificial Sequence: Synthetic oligonucleotide
  Antisense strand to SEQ ID NO: 24090
uauauaggcagcuguucca

SEQ ID NO: 24092 - RNA, 19 nt, Artificial Sequence
  Description of Artificial Sequence: Synthetic oligonucleotide
  Sense strand starting at position 2673 of SEQ ID NO: 267
gcuauagaucauggaacag

SEQ ID NO: 24093 - RNA, 19 nt, Artificial Sequence
  Description of Artificial Sequence: Synthetic oligonucleotide
  Antisense strand to SEQ ID NO: 24092
cuguuccaugaucuauagc

SEQ ID NO: 24094 - RNA, 19 nt, Artificial Sequence
  Description of Artificial Sequence: Synthetic oligonucleotide
  Sense strand starting at position 2649 of SEQ ID NO: 267
gggcucuguccacaacuuu

SEQ ID NO: 24095 - RNA, 19 nt, Artificial Sequence
  Description of Artificial Sequence: Synthetic oligonucleotide
  Antisense strand to SEQ ID NO: 24094
aaaguuguggacagagccc

SEQ ID NO: 24096 - RNA, 19 nt, Artificial Sequence
  Description of Artificial Sequence: Synthetic oligonucleotide
  Sense strand starting at position 2514 of SEQ ID NO: 267
ggugguacauggaaggaua

SEQ ID NO: 24097 - RNA, 19 nt, Artificial Sequence
  Description of Artificial Sequence: Synthetic oligonucleotide
  Antisense strand to SEQ ID NO: 24096
uauccuuccauguaccacc

SEQ ID NO: 24098 - RNA, 19 nt, Artificial Sequence
  Description of Artificial Sequence: Synthetic oligonucleotide
  Sense strand starting at position 2463 of SEQ ID NO: 267
cgaggaucccaaugaacau

SEQ ID NO: 24099 - RNA, 19 nt, Artificial Sequence
  Description of Artificial Sequence: Synthetic oligonucleotide
  Antisense strand to SEQ ID NO: 24098
auguucauugggauccucg

SEQ ID NO: 24100 - RNA, 19 nt, Artificial Sequence
  Description of Artificial Sequence: Synthetic oligonucleotide
  Sense strand starting at position 2415 of SEQ ID NO: 267
cagaaucaguucguaccaa

SEQ ID NO: 24101 - RNA, 19 nt, Artificial Sequence
  Description of Artificial Sequence: Synthetic oligonucleotide
  Antisense strand to SEQ ID NO: 24100
uugguacgaacugauucug

SEQ ID NO: 24102 - RNA, 19 nt, Artificial Sequence
  Description of Artificial Sequence: Synthetic oligonucleotide
  Sense strand starting at position 2294 of SEQ ID NO: 267
cacugaaggccaugaguau

SEQ ID NO: 24103 - RNA, 19 nt, Artificial Sequence
  Description of Artificial Sequence: Synthetic oligonucleotide
  Antisense strand to SEQ ID NO: 24102
auacucauggccuucagug

SEQ ID NO: 24104 - RNA, 19 nt, Artificial Sequence
  Description of Artificial Sequence: Synthetic oligonucleotide
  Sense strand starting at position 2153 of SEQ ID NO: 267
cgcccuuuggaguaaagaa

SEQ ID NO: 24105 - RNA, 19 nt, Artificial Sequence
  Description of Artificial Sequence: Synthetic oligonucleotide
  Antisense strand to SEQ ID NO: 24104
uucuuuacuccaaagggcg

SEQ ID NO: 24106 - RNA, 19 nt, Artificial Sequence
  Description of Artificial Sequence: Synthetic oligonucleotide
  Sense strand starting at position 2050 of SEQ ID NO: 267
ccaaguuaaucagugacua

SEQ ID NO: 24107 - RNA, 19 nt, Artificial Sequence
  Description of Artificial Sequence: Synthetic oligonucleotide
  Antisense strand to SEQ ID NO: 24106
uagucacugauuaacuugg

SEQ ID NO: 24108 - RNA, 19 nt, Artificial Sequence
  Description of Artificial Sequence: Synthetic oligonucleotide
  Sense strand starting at position 1166 of SEQ ID NO: 267
uuaucugcaggauggaaau

SEQ ID NO: 24109 - RNA, 19 nt, Artificial Sequence
  Description of Artificial Sequence: Synthetic oligonucleotide
  Antisense strand to SEQ ID NO: 24108
auuuccauccugcagauaa

SEQ ID NO: 24110 - RNA, 19 nt, Artificial Sequence
  Description of Artificial Sequence: Synthetic oligonucleotide
  Sense strand starting at position 1163 of SEQ ID NO: 267
gaguuaucugcaggaugga

SEQ ID NO: 24111 - RNA, 19 nt, Artificial Sequence
  Description of Artificial Sequence: Synthetic oligonucleotide
  Antisense strand to SEQ ID NO: 24110
uccauccugcagauaacuc

SEQ ID NO: 24112 - RNA, 19 nt, Artificial Sequence
  Description of Artificial Sequence: Synthetic oligonucleotide
  Sense strand starting at position 1161 of SEQ ID NO: 267
gugaguuaucugcaggaug

SEQ ID NO: 24113 - RNA, 19 nt, Artificial Sequence
  Description of Artificial Sequence: Synthetic oligonucleotide
  Antisense strand to SEQ ID NO: 24112
cauccugcagauaacucac

SEQ ID NO: 24114 - RNA, 19 nt, Artificial Sequence
  Description of Artificial Sequence: Synthetic oligonucleotide
  Sense strand starting at position 1140 of SEQ ID NO: 267
auuuacuuugucugucuga

SEQ ID NO: 24115 - RNA, 19 nt, Artificial Sequence
  Description of Artificial Sequence: Synthetic oligonucleotide
  Antisense strand to SEQ ID NO: 24114
ucagacagacaaaguaaau

SEQ ID NO: 24116 - RNA, 19 nt, Artificial Sequence
  Description of Artificial Sequence: Synthetic oligonucleotide
  Sense strand starting at position 1119 of SEQ ID NO: 267
cuaucuuugugaccucaag

SEQ ID NO: 24117 - RNA, 19 nt, Artificial Sequence
  Description of Artificial Sequence: Synthetic oligonucleotide
  Antisense strand to SEQ ID NO: 24116
cuugaggucacaaagauag

SEQ ID NO: 24118 - RNA, 19 nt, Artificial Sequence
  Description of Artificial Sequence: Synthetic oligonucleotide
  Sense strand starting at position 798 of SEQ ID NO: 267
gauagagaccgcuggugaa

SEQ ID NO: 24119 - RNA, 19 nt, Artificial Sequence
  Description of Artificial Sequence: Synthetic oligonucleotide
  Antisense strand to SEQ ID NO: 24118
uucaccagcggucucuauc

SEQ ID NO: 24120 - RNA, 19 nt, Artificial Sequence
  Description of Artificial Sequence: Synthetic oligonucleotide
  Sense strand starting at position 776 of SEQ ID NO: 267
agugcuggccucuagaaga

SEQ ID NO: 24121 - RNA, 19 nt, Artificial Sequence
  Description of Artificial Sequence: Synthetic oligonucleotide
  Antisense strand to SEQ ID NO: 24120
ucuucuagaggccagcacu

SEQ ID NO: 24122 - RNA, 19 nt, Artificial Sequence
  Description of Artificial Sequence: Synthetic oligonucleotide
  Sense strand starting at position 697 of SEQ ID NO: 267
gcacauaggccuuagcaau

SEQ ID NO: 24123 - RNA, 19 nt, Artificial Sequence
  Description of Artificial Sequence: Synthetic oligonucleotide
  Antisense strand to SEQ ID NO: 24122
auugcuaaggccuaugugc

SEQ ID NO: 24124 - RNA, 19 nt, Artificial Sequence
  Description of Artificial Sequence: Synthetic oligonucleotide
  Sense strand starting at position 541 of SEQ ID NO: 267
aggacugaccuguaagguu

SEQ ID NO: 24125 - RNA, 19 nt, Artificial Sequence
  Description of Artificial Sequence: Synthetic oligonucleotide
  Antisense strand to SEQ ID NO: 24124
aaccuuacaggucaguccu

SEQ ID NO: 24126 - RNA, 19 nt, Artificial Sequence
  Description of Artificial Sequence: Synthetic oligonucleotide
  Sense strand starting at position 3871 of SEQ ID NO: 268
acauucuucucucugggua

SEQ ID NO: 24127 - RNA, 19 nt, Artificial Sequence
  Description of Artificial Sequence: Synthetic oligonucleotide
  Antisense strand to SEQ ID NO: 24126
uacccagagagaagaaugu

SEQ ID NO: 24128 - RNA, 19 nt, Artificial Sequence
  Description of Artificial Sequence: Synthetic oligonucleotide
  Sense strand starting at position 3139 of SEQ ID NO: 268
ggacauaguguuuauaacu

SEQ ID NO: 24129 - RNA, 19 nt, Artificial Sequence
  Description of Artificial Sequence: Synthetic oligonucleotide
  Antisense strand to SEQ ID NO: 24128
aguuauaaacacuaugucc

SEQ ID NO: 24130 - RNA, 19 nt, Artificial Sequence
  Description of Artificial Sequence: Synthetic oligonucleotide
  Sense strand starting at position 3138 of SEQ ID NO: 268
aggacauaguguuuauaac

SEQ ID NO: 24131 - RNA, 19 nt, Artificial Sequence
  Description of Artificial Sequence: Synthetic oligonucleotide
  Antisense strand to SEQ ID NO: 24130
guuauaaacacuauguccu

SEQ ID NO: 24132 - RNA, 19 nt, Artificial Sequence
  Description of Artificial Sequence: Synthetic oligonucleotide
  Sense strand starting at position 3017 of SEQ ID NO: 268
aauaguauugaguaagcca

SEQ ID NO: 24133 - RNA, 19 nt, Artificial Sequence
  Description of Artificial Sequence: Synthetic oligonucleotide
  Antisense strand to SEQ ID NO: 24132
uggcuuacucaauacuauu

SEQ ID NO: 24134 - RNA, 19 nt, Artificial Sequence
  Description of Artificial Sequence: Synthetic oligonucleotide
  Sense strand starting at position 2998 of SEQ ID NO: 268
ugacuuaagcaaugagcaa

SEQ ID NO: 24135 - RNA, 19 nt, Artificial Sequence
  Description of Artificial Sequence: Synthetic oligonucleotide
  Antisense strand to SEQ ID NO: 24134
uugcucauugcuuaaguca

SEQ ID NO: 24136 - RNA, 19 nt, Artificial Sequence
  Description of Artificial Sequence: Synthetic oligonucleotide
  Sense strand starting at position 2928 of SEQ ID NO: 268
guuguuauaggacaagcga

SEQ ID NO: 24137 - RNA, 19 nt, Artificial Sequence
  Description of Artificial Sequence: Synthetic oligonucleotide
  Antisense strand to SEQ ID NO: 24136
ucgcuuguccuauaacaac

SEQ ID NO: 24138 - RNA, 19 nt, Artificial Sequence
  Description of Artificial Sequence: Synthetic oligonucleotide
  Sense strand starting at position 2606 of SEQ ID NO: 268
ggaaucauguucucccauu

SEQ ID NO: 24139 - RNA, 19 nt, Artificial Sequence
  Description of Artificial Sequence: Synthetic oligonucleotide
  Antisense strand to SEQ ID NO: 24138
aaugggagaacaugauucc

SEQ ID NO: 24140 - RNA, 19 nt, Artificial Sequence
  Description of Artificial Sequence: Synthetic oligonucleotide
  Sense strand starting at position 2580 of SEQ ID NO: 268
ccaggcuaucugggaggaa

SEQ ID NO: 24141 - RNA, 19 nt, Artificial Sequence
  Description of Artificial Sequence: Synthetic oligonucleotide
  Antisense strand to SEQ ID NO: 24140
uuccucccagauagccugg

SEQ ID NO: 24142 - RNA, 19 nt, Artificial Sequence
  Description of Artificial Sequence: Synthetic oligonucleotide
  Sense strand starting at position 2456 of SEQ ID NO: 268
agcugaugcccagacucau

SEQ ID NO: 24143 - RNA, 19 nt, Artificial Sequence
  Description of Artificial Sequence: Synthetic oligonucleotide
  Antisense strand to SEQ ID NO: 24142
augagucugggcaucagcu

SEQ ID NO: 24144 - RNA, 19 nt, Artificial Sequence
  Description of Artificial Sequence: Synthetic oligonucleotide
  Sense strand starting at position 2227 of SEQ ID NO: 268
agaaaugugaugggucaag

SEQ ID NO: 24145 - RNA, 19 nt, Artificial Sequence
  Description of Artificial Sequence: Synthetic oligonucleotide
  Antisense strand to SEQ ID NO: 24144
cuugacccaucacauuucu

SEQ ID NO: 24146 - RNA, 19 nt, Artificial Sequence
  Description of Artificial Sequence: Synthetic oligonucleotide
  Sense strand starting at position 2226 of SEQ ID NO: 268
gagaaaugugaugggucaa

SEQ ID NO: 24147 - RNA, 19 nt, Artificial Sequence
  Description of Artificial Sequence: Synthetic oligonucleotide
  Antisense strand to SEQ ID NO: 24146
uugacccaucacauuucuc

SEQ ID NO: 24148 - RNA, 19 nt, Artificial Sequence
  Description of Artificial Sequence: Synthetic oligonucleotide
  Sense strand starting at position 2212 of SEQ ID NO: 268
gaaguuggcagucggagaa

SEQ ID NO: 24149 - RNA, 19 nt, Artificial Sequence
  Description of Artificial Sequence: Synthetic oligonucleotide
  Antisense strand to SEQ ID NO: 24148
uucuccgacugccaacuuc

SEQ ID NO: 24150 - RNA, 19 nt, Artificial Sequence
  Description of Artificial Sequence: Synthetic oligonucleotide
  Sense strand starting at position 2132 of SEQ ID NO: 268
gagagauucugccucccau

SEQ ID NO: 24151 - RNA, 19 nt, Artificial Sequence
  Description of Artificial Sequence: Synthetic oligonucleotide
  Antisense strand to SEQ ID NO: 24150
augggaggcagaaucucuc

SEQ ID NO: 24152 - RNA, 19 nt, Artificial Sequence
  Description of Artificial Sequence: Synthetic oligonucleotide
  Sense strand starting at position 1869 of SEQ ID NO: 268
aucuuaccuguccgagaaa

SEQ ID NO: 24153 - RNA, 19 nt, Artificial Sequence
  Description of Artificial Sequence: Synthetic oligonucleotide
  Antisense strand to SEQ ID NO: 24152
uuucucggacagguaagau

SEQ ID NO: 24154 - RNA, 19 nt, Artificial Sequence
  Description of Artificial Sequence: Synthetic oligonucleotide
  Sense strand starting at position 1868 of SEQ ID NO: 268
uaucuuaccuguccgagaa

SEQ ID NO: 24155 - RNA, 19 nt, Artificial Sequence
  Description of Artificial Sequence: Synthetic oligonucleotide
  Antisense strand to SEQ ID NO: 24154
uucucggacagguaagaua

SEQ ID NO: 24156 - RNA, 19 nt, Artificial Sequence
  Description of Artificial Sequence: Synthetic oligonucleotide
  Sense strand starting at position 1839 of SEQ ID NO: 268
ggauguaagucauccacaa

SEQ ID NO: 24157 - RNA, 19 nt, Artificial Sequence
  Description of Artificial Sequence: Synthetic oligonucleotide
  Antisense strand to SEQ ID NO: 24156
uuguggaugacuuacaucc

SEQ ID NO: 24158 - RNA, 19 nt, Artificial Sequence
  Description of Artificial Sequence: Synthetic oligonucleotide
  Sense strand starting at position 1711 of SEQ ID NO: 268
ggacuagaggcuugauggu

SEQ ID NO: 24159 - RNA, 19 nt, Artificial Sequence
  Description of Artificial Sequence: Synthetic oligonucleotide
  Antisense strand to SEQ ID NO: 24158
accaucaagccucuagucc

SEQ ID NO: 24160 - RNA, 19 nt, Artificial Sequence
  Description of Artificial Sequence: Synthetic oligonucleotide
  Sense strand starting at position 1628 of SEQ ID NO: 268
uaucccuaugucugaggau

SEQ ID NO: 24161 - RNA, 19 nt, Artificial Sequence
  Description of Artificial Sequence: Synthetic oligonucleotide
  Antisense strand to SEQ ID NO: 24160
auccucagacauagggaua

SEQ ID NO: 24162 - RNA, 19 nt, Artificial Sequence
  Description of Artificial Sequence: Synthetic oligonucleotide
  Sense strand starting at position 1560 of SEQ ID NO: 268
ugaggucagacccggauaa

SEQ ID NO: 24163 - RNA, 19 nt, Artificial Sequence
  Description of Artificial Sequence: Synthetic oligonucleotide
  Antisense strand to SEQ ID NO: 24162
uuauccgggucugaccuca

SEQ ID NO: 24164 - RNA, 19 nt, Artificial Sequence
  Description of Artificial Sequence: Synthetic oligonucleotide
  Sense strand starting at position 1393 of SEQ ID NO: 268
gcacgauaguaggcauuua

SEQ ID NO: 24165 - RNA, 19 nt, Artificial Sequence
  Description of Artificial Sequence: Synthetic oligonucleotide
  Antisense strand to SEQ ID NO: 24164
uaaaugccuacuaucgugc

SEQ ID NO: 24166 - RNA, 19 nt, Artificial Sequence
  Description of Artificial Sequence: Synthetic oligonucleotide
  Sense strand starting at position 1385 of SEQ ID NO: 268
agggucuugcacgauagua

SEQ ID NO: 24167 - RNA, 19 nt, Artificial Sequence
  Description of Artificial Sequence: Synthetic oligonucleotide
  Antisense strand to SEQ ID NO: 24166
uacuaucgugcaagacccu

SEQ ID NO: 24168 - RNA, 19 nt, Artificial Sequence
  Description of Artificial Sequence: Synthetic oligonucleotide
  Sense strand starting at position 1300 of SEQ ID NO: 268
guaaauacaccuugucuua

SEQ ID NO: 24169 - RNA, 19 nt, Artificial Sequence
  Description of Artificial Sequence: Synthetic oligonucleotide
  Antisense strand to SEQ ID NO: 24168
uaagacaagguguauuuac

SEQ ID NO: 24170 - RNA, 19 nt, Artificial Sequence
  Description of Artificial Sequence: Synthetic oligonucleotide
  Sense strand starting at position 1233 of SEQ ID NO: 268
cugaauucuuaaguaaugu

SEQ ID NO: 24171 - RNA, 19 nt, Artificial Sequence
  Description of Artificial Sequence: Synthetic oligonucleotide
  Antisense strand to SEQ ID NO: 24170
acauuacuuaagaauucag

SEQ ID NO: 24172 - RNA, 19 nt, Artificial Sequence
  Description of Artificial Sequence: Synthetic oligonucleotide
  Sense strand starting at position 1095 of SEQ ID NO: 268
ugucaaggugauuaguaaa

SEQ ID NO: 24173 - RNA, 19 nt, Artificial Sequence
  Description of Artificial Sequence: Synthetic oligonucleotide
  Antisense strand to SEQ ID NO: 24172
uuuacuaaucaccuugaca

SEQ ID NO: 24174 - RNA, 19 nt, Artificial Sequence
  Description of Artificial Sequence: Synthetic oligonucleotide
  Sense strand starting at position 1094 of SEQ ID NO: 268
cugucaaggugauuaguaa

SEQ ID NO: 24175 - RNA, 19 nt, Artificial Sequence
  Description of Artificial Sequence: Synthetic oligonucleotide
  Antisense strand to SEQ ID NO: 24174
uuacuaaucaccuugacag

SEQ ID NO: 24176 - RNA, 19 nt, Artificial Sequence
  Description of Artificial Sequence: Synthetic oligonucleotide
  Sense strand starting at position 1092 of SEQ ID NO: 268
accugucaaggugauuagu

SEQ ID NO: 24177 - RNA, 19 nt, Artificial Sequence
  Description of Artificial Sequence: Synthetic oligonucleotide
  Antisense strand to SEQ ID NO: 24176
acuaaucaccuugacaggu

SEQ ID NO: 24178 - RNA, 19 nt, Artificial Sequence
  Description of Artificial Sequence: Synthetic oligonucleotide
  Sense strand starting at position 1089 of SEQ ID NO: 268
aacaccugucaaggugauu

SEQ ID NO: 24179 - RNA, 19 nt, Artificial Sequence
  Description of Artificial Sequence: Synthetic oligonucleotide
  Antisense strand to SEQ ID NO: 24178
aaucaccuugacagguguu

SEQ ID NO: 24180 - RNA, 19 nt, Artificial Sequence
  Description of Artificial Sequence: Synthetic oligonucleotide
  Sense strand starting at position 1024 of SEQ ID NO: 268
uccuuauugguuuaaagug

SEQ ID NO: 24181 - RNA, 19 nt, Artificial Sequence
  Description of Artificial Sequence: Synthetic oligonucleotide
  Antisense strand to SEQ ID NO: 24180
cacuuuaaaccaauaagga

SEQ ID NO: 24182 - RNA, 19 nt, Artificial Sequence
  Description of Artificial Sequence: Synthetic oligonucleotide
  Sense strand starting at position 1022 of SEQ ID NO: 268
ucuccuuauugguuuaaag

SEQ ID NO: 24183 - RNA, 19 nt, Artificial Sequence
  Description of Artificial Sequence: Synthetic oligonucleotide
  Antisense strand to SEQ ID NO: 24182
cuuuaaaccaauaaggaga

SEQ ID NO: 24184 - RNA, 19 nt, Artificial Sequence
  Description of Artificial Sequence: Synthetic oligonucleotide
  Sense strand starting at position 951 of SEQ ID NO: 268
aaugaaacuguacgaaaug

SEQ ID NO: 24185 - RNA, 19 nt, Artificial Sequence
  Description of Artificial Sequence: Synthetic oligonucleotide
  Antisense strand to SEQ ID NO: 24184
cauuucguacaguuucauu

SEQ ID NO: 24186 - RNA, 19 nt, Artificial Sequence
  Description of Artificial Sequence: Synthetic oligonucleotide
  Sense strand starting at position 821 of SEQ ID NO: 268
gcacaauuugccugucagg

SEQ ID NO: 24187 - RNA, 19 nt, Artificial Sequence
  Description of Artificial Sequence: Synthetic oligonucleotide
  Antisense strand to SEQ ID NO: 24186
ccugacaggcaaauugugc

SEQ ID NO: 24188 - RNA, 19 nt, Artificial Sequence
  Description of Artificial Sequence: Synthetic oligonucleotide
  Sense strand starting at position 775 of SEQ ID NO: 268
ccugaugauucuccuaagu

SEQ ID NO: 24189 - RNA, 19 nt, Artificial Sequence
  Description of Artificial Sequence: Synthetic oligonucleotide
  Antisense strand to SEQ ID NO: 24188
acuuaggagaaucaucagg

SEQ ID NO: 24190 - RNA, 19 nt, Artificial Sequence
  Description of Artificial Sequence: Synthetic oligonucleotide
  Sense strand starting at position 774 of SEQ ID NO: 268
uccugaugauucuccuaag

SEQ ID NO: 24191 - RNA, 19 nt, Artificial Sequence
  Description of Artificial Sequence: Synthetic oligonucleotide
  Antisense strand to SEQ ID NO: 24190
cuuaggagaaucaucagga

SEQ ID NO: 24192 - RNA, 19 nt, Artificial Sequence
  Description of Artificial Sequence: Synthetic oligonucleotide
  Sense strand starting at position 535 of SEQ ID NO: 268
cuagguaugccauauucua

SEQ ID NO: 24193 - RNA, 19 nt, Artificial Sequence
  Description of Artificial Sequence: Synthetic oligonucleotide
  Antisense strand to SEQ ID NO: 24192
uagaauauggcauaccuag

SEQ ID NO: 24194 - RNA, 19 nt, Artificial Sequence
  Description of Artificial Sequence: Synthetic oligonucleotide
  Sense strand starting at position 498 of SEQ ID NO: 268
gugguuucaguggugcuau

SEQ ID NO: 24195 - RNA, 19 nt, Artificial Sequence
  Description of Artificial Sequence: Synthetic oligonucleotide
  Antisense strand to SEQ ID NO: 24194
auagcaccacugaaaccac

SEQ ID NO: 24196 - RNA, 19 nt, Artificial Sequence
  Description of Artificial Sequence: Synthetic oligonucleotide
  Sense strand starting at position 348 of SEQ ID NO: 268
ugugaacaccucugcuaag

SEQ ID NO: 24197 - RNA, 19 nt, Artificial Sequence
  Description of Artificial Sequence: Synthetic oligonucleotide
  Antisense strand to SEQ ID NO: 24196
cuuagcagagguguucaca

SEQ ID NO: 24198 - RNA, 19 nt, Artificial Sequence
  Description of Artificial Sequence: Synthetic oligonucleotide
  Sense strand starting at position 308 of SEQ ID NO: 268
aggagaucgcucgaucauu

SEQ ID NO: 24199 - RNA, 19 nt, Artificial Sequence
  Description of Artificial Sequence: Synthetic oligonucleotide
  Antisense strand to SEQ ID NO: 24198
aaugaucgagcgaucuccu

SEQ ID NO: 24200 - RNA, 19 nt, Artificial Sequence
  Description of Artificial Sequence: Synthetic oligonucleotide
  Sense strand starting at position 199 of SEQ ID NO: 268
ggaaauccagcucagucau

SEQ ID NO: 24201 - RNA, 19 nt, Artificial Sequence
  Description of Artificial Sequence: Synthetic oligonucleotide
  Antisense strand to SEQ ID NO: 24200
augacugagcuggauuucc

SEQ ID NO: 24202 - RNA, 19 nt, Artificial Sequence
  Description of Artificial Sequence: Synthetic oligonucleotide
  Sense strand starting at position 111 of SEQ ID NO: 268
cuuaaagguuuguuauuga

SEQ ID NO: 24203 - RNA, 19 nt, Artificial Sequence
  Description of Artificial Sequence: Synthetic oligonucleotide
  Antisense strand to SEQ ID NO: 24202
ucaauaacaaaccuuuaag

SEQ ID NO: 24204 - RNA, 19 nt, Artificial Sequence
  Description of Artificial Sequence: Synthetic oligonucleotide
  Sense strand starting at position 36 of SEQ ID NO: 268
agcugugcucaauacagau

SEQ ID NO: 24205 - RNA, 19 nt, Artificial Sequence
  Description of Artificial Sequence: Synthetic oligonucleotide
  Antisense strand to SEQ ID NO: 24204
aucuguauugagcacagcu

SEQ ID NO: 24206 - RNA, 19 nt, Artificial Sequence
  Description of Artificial Sequence: Synthetic oligonucleotide
  Sense strand starting at position 3789 of SEQ ID NO: 269
auuccuccacugugaaaug

SEQ ID NO: 24207 - RNA, 19 nt, Artificial Sequence
  Description of Artificial Sequence: Synthetic oligonucleotide
  Antisense strand to SEQ ID NO: 24206
cauuucacaguggaggaau

SEQ ID NO: 24208 - RNA, 19 nt, Artificial Sequence
  Description of Artificial Sequence: Synthetic oligonucleotide
  Sense strand starting at position 3787 of SEQ ID NO: 269
agauuccuccacugugaaa

SEQ ID NO: 24209 - RNA, 19 nt, Artificial Sequence
  Description of Artificial Sequence: Synthetic oligonucleotide
  Antisense strand to SEQ ID NO: 24208
uuucacaguggaggaaucu

SEQ ID NO: 24210 - RNA, 19 nt, Artificial Sequence
  Description of Artificial Sequence: Synthetic oligonucleotide
  Sense strand starting at position 3784 of SEQ ID NO: 269
cugagauuccuccacugug

SEQ ID NO: 24211 - RNA, 19 nt, Artificial Sequence
  Description of Artificial Sequence: Synthetic oligonucleotide
  Antisense strand to SEQ ID NO: 24210
cacaguggaggaaucucag

SEQ ID NO: 24212 - RNA, 19 nt, Artificial Sequence
  Description of Artificial Sequence: Synthetic oligonucleotide
  Sense strand starting at position 3782 of SEQ ID NO: 269
gccugagauuccuccacug

SEQ ID NO: 24213 - RNA, 19 nt, Artificial Sequence
  Description of Artificial Sequence: Synthetic oligonucleotide
  Antisense strand to SEQ ID NO: 24212
caguggaggaaucucaggc

SEQ ID NO: 24214 - RNA, 19 nt, Artificial Sequence
  Description of Artificial Sequence: Synthetic oligonucleotide
  Sense strand starting at position 3773 of SEQ ID NO: 269
ccucccugagccugagauu

SEQ ID NO: 24215 - RNA, 19 nt, Artificial Sequence
  Description of Artificial Sequence: Synthetic oligonucleotide
  Antisense strand to SEQ ID NO: 24214
aaucucaggcucagggagg

SEQ ID NO: 24216 - RNA, 19 nt, Artificial Sequence
  Description of Artificial Sequence: Synthetic oligonucleotide
  Sense strand starting at position 3746 of SEQ ID NO: 269
guuauaugucuuuggcaag

SEQ ID NO: 24217 - RNA, 19 nt, Artificial Sequence
  Description of Artificial Sequence: Synthetic oligonucleotide
  Antisense strand to SEQ ID NO: 24216
cuugccaaagacauauaac

SEQ ID NO: 24218 - RNA, 19 nt, Artificial Sequence
  Description of Artificial Sequence: Synthetic oligonucleotide
  Sense strand starting at position 3745 of SEQ ID NO: 269
aguuauaugucuuuggcaa

SEQ ID NO: 24219 - RNA, 19 nt, Artificial Sequence
  Description of Artificial Sequence: Synthetic oligonucleotide
  Antisense strand to SEQ ID NO: 24218
uugccaaagacauauaacu

SEQ ID NO: 24220 - RNA, 19 nt, Artificial Sequence
  Description of Artificial Sequence: Synthetic oligonucleotide
  Sense strand starting at position 3242 of SEQ ID NO: 269
gcagaagggccuugaagua

SEQ ID NO: 24221 - RNA, 19 nt, Artificial Sequence
  Description of Artificial Sequence: Synthetic oligonucleotide
  Antisense strand to SEQ ID NO: 24220
uacuucaaggcccuucugc

SEQ ID NO: 24222 - RNA, 19 nt, Artificial Sequence
  Description of Artificial Sequence: Synthetic oligonucleotide
  Sense strand starting at position 3213 of SEQ ID NO: 269
uggaaaguuuggucucucu

SEQ ID NO: 24223 - RNA, 19 nt, Artificial Sequence
  Description of Artificial Sequence: Synthetic oligonucleotide
  Antisense strand to SEQ ID NO: 24222
agagagaccaaacuuucca

SEQ ID NO: 24224 - RNA, 19 nt, Artificial Sequence
  Description of Artificial Sequence: Synthetic oligonucleotide
  Sense strand starting at position 3176 of SEQ ID NO: 269
cauccaugacagugugagu

SEQ ID NO: 24225 - RNA, 19 nt, Artificial Sequence
  Description of Artificial Sequence: Synthetic oligonucleotide
  Antisense strand to SEQ ID NO: 24224
acucacacugucauggaug

SEQ ID NO: 24226 - RNA, 19 nt, Artificial Sequence
  Description of Artificial Sequence: Synthetic oligonucleotide
  Sense strand starting at position 3072 of SEQ ID NO: 269
gagugaguucaguaauugg

SEQ ID NO: 24227 - RNA, 19 nt, Artificial Sequence
  Description of Artificial Sequence: Synthetic oligonucleotide
  Antisense strand to SEQ ID NO: 24226
ccaauuacugaacucacuc

SEQ ID NO: 24228 - RNA, 19 nt, Artificial Sequence
  Description of Artificial Sequence: Synthetic oligonucleotide
  Sense strand starting at position 3040 of SEQ ID NO: 269
ccaucuggagauuguguaa

SEQ ID NO: 24229 - RNA, 19 nt, Artificial Sequence
  Description of Artificial Sequence: Synthetic oligonucleotide
  Antisense strand to SEQ ID NO: 24228
uuacacaaucuccagaugg

SEQ ID NO: 24230 - RNA, 19 nt, Artificial Sequence
  Description of Artificial Sequence: Synthetic oligonucleotide
  Sense strand starting at position 2945 of SEQ ID NO: 269
ggauuaccuuugguaagcu

SEQ ID NO: 24231 - RNA, 19 nt, Artificial Sequence
  Description of Artificial Sequence: Synthetic oligonucleotide
  Antisense strand to SEQ ID NO: 24230
agcuuaccaaagguaaucc

SEQ ID NO: 24232 - RNA, 19 nt, Artificial Sequence
  Description of Artificial Sequence: Synthetic oligonucleotide
  Sense strand starting at position 2943 of SEQ ID NO: 269
cuggauuaccuuugguaag

SEQ ID NO: 24233 - RNA, 19 nt, Artificial Sequence
  Description of Artificial Sequence: Synthetic oligonucleotide
  Antisense strand to SEQ ID NO: 24232
cuuaccaaagguaauccag

SEQ ID NO: 24234 - RNA, 19 nt, Artificial Sequence
  Description of Artificial Sequence: Synthetic oligonucleotide
  Sense strand starting at position 2932 of SEQ ID NO: 269
uccuuuaggagcuggauua

SEQ ID NO: 24235 - RNA, 19 nt, Artificial Sequence
  Description of Artificial Sequence: Synthetic oligonucleotide
  Antisense strand to SEQ ID NO: 24234
uaauccagcuccuaaagga

SEQ ID NO: 24236 - RNA, 19 nt, Artificial Sequence
  Description of Artificial Sequence: Synthetic oligonucleotide
  Sense strand starting at position 2923 of SEQ ID NO: 269
cugacuccuuccuuuagga

SEQ ID NO: 24237 - RNA, 19 nt, Artificial Sequence
  Description of Artificial Sequence: Synthetic oligonucleotide
  Antisense strand to SEQ ID NO: 24236
uccuaaaggaaggagucag

SEQ ID NO: 24238 - RNA, 19 nt, Artificial Sequence
  Description of Artificial Sequence: Synthetic oligonucleotide
  Sense strand starting at position 2904 of SEQ ID NO: 269
guagaacucgacugaaauc

SEQ ID NO: 24239 - RNA, 19 nt, Artificial Sequence
  Description of Artificial Sequence: Synthetic oligonucleotide
  Antisense strand to SEQ ID NO: 24238
gauuucagucgaguucuac

SEQ ID NO: 24240 - RNA, 19 nt, Artificial Sequence
  Description of Artificial Sequence: Synthetic oligonucleotide
  Sense strand starting at position 2901 of SEQ ID NO: 269
cggguagaacucgacugaa

SEQ ID NO: 24241 - RNA, 19 nt, Artificial Sequence
  Description of Artificial Sequence: Synthetic oligonucleotide
  Antisense strand to SEQ ID NO: 24240
uucagucgaguucuacccg

SEQ ID NO: 24242 - RNA, 19 nt, Artificial Sequence
  Description of Artificial Sequence: Synthetic oligonucleotide
  Sense strand starting at position 2900 of SEQ ID NO: 269
ucggguagaacucgacuga

SEQ ID NO: 24243 - RNA, 19 nt, Artificial Sequence
  Description of Artificial Sequence: Synthetic oligonucleotide
  Antisense strand to SEQ ID NO: 24242
ucagucgaguucuacccga

SEQ ID NO: 24244 - RNA, 19 nt, Artificial Sequence
  Description of Artificial Sequence: Synthetic oligonucleotide
  Sense strand starting at position 2725 of SEQ ID NO: 269
gauuccuuuguuugggauu

SEQ ID NO: 24245 - RNA, 19 nt, Artificial Sequence
  Description of Artificial Sequence: Synthetic oligonucleotide
  Antisense strand to SEQ ID NO: 24244
aaucccaaacaaaggaauc

SEQ ID NO: 24246 - RNA, 19 nt, Artificial Sequence
  Description of Artificial Sequence: Synthetic oligonucleotide
  Sense strand starting at position 2724 of SEQ ID NO: 269
ugauuccuuuguuugggau

SEQ ID NO: 24247 - RNA, 19 nt, Artificial Sequence
  Description of Artificial Sequence: Synthetic oligonucleotide
  Antisense strand to SEQ ID NO: 24246
aucccaaacaaaggaauca

SEQ ID NO: 24248 - RNA, 19 nt, Artificial Sequence
  Description of Artificial Sequence: Synthetic oligonucleotide
  Sense strand starting at position 2723 of SEQ ID NO: 269
cugauuccuuuguuuggga

SEQ ID NO: 24249 - RNA, 19 nt, Artificial Sequence
  Description of Artificial Sequence: Synthetic oligonucleotide
  Antisense strand to SEQ ID NO: 24248
ucccaaacaaaggaaucag

SEQ ID NO: 24250 - RNA, 19 nt, Artificial Sequence
  Description of Artificial Sequence: Synthetic oligonucleotide
  Sense strand starting at position 2349 of SEQ ID NO: 269
ggacuacaccaucgagauc

SEQ ID NO: 24251 - RNA, 19 nt, Artificial Sequence
  Description of Artificial Sequence: Synthetic oligonucleotide
  Antisense strand to SEQ ID NO: 24250
gaucucgaugguguagucc

SEQ ID NO: 24252 - RNA, 19 nt, Artificial Sequence
  Description of Artificial Sequence: Synthetic oligonucleotide
  Sense strand starting at position 1997 of SEQ ID NO: 269
gccucucaccuacaugaga

SEQ ID NO: 24253 - RNA, 19 nt, Artificial Sequence
  Description of Artificial Sequence: Synthetic oligonucleotide
  Antisense strand to SEQ ID NO: 24252
ucucauguaggugagaggc

SEQ ID NO: 24254 - RNA, 19 nt, Artificial Sequence
  Description of Artificial Sequence: Synthetic oligonucleotide
  Sense strand starting at position 1629 of SEQ ID NO: 269
ggcacauaguauguaaaua

SEQ ID NO: 24255 - RNA, 19 nt, Artificial Sequence
  Description of Artificial Sequence: Synthetic oligonucleotide
  Antisense strand to SEQ ID NO: 24254
uauuuacauacuaugugcc

SEQ ID NO: 24256 - RNA, 19 nt, Artificial Sequence
  Description of Artificial Sequence: Synthetic oligonucleotide
  Sense strand starting at position 1628 of SEQ ID NO: 269
uggcacauaguauguaaau

SEQ ID NO: 24257 - RNA, 19 nt, Artificial Sequence
  Description of Artificial Sequence: Synthetic oligonucleotide
  Antisense strand to SEQ ID NO: 24256
auuuacauacuaugugcca

SEQ ID NO: 24258 - RNA, 19 nt, Artificial Sequence
  Description of Artificial Sequence: Synthetic oligonucleotide
  Sense strand starting at position 1617 of SEQ ID NO: 269
uguaaauaugcuggcacau

SEQ ID NO: 24259 - RNA, 19 nt, Artificial Sequence
  Description of Artificial Sequence: Synthetic oligonucleotide
  Antisense strand to SEQ ID NO: 24258
augugccagcauauuuaca

SEQ ID NO: 24260 - RNA, 19 nt, Artificial Sequence
  Description of Artificial Sequence: Synthetic oligonucleotide
  Sense strand starting at position 1523 of SEQ ID NO: 269
cccguuaagacaugggaga

SEQ ID NO: 24261 - RNA, 19 nt, Artificial Sequence
  Description of Artificial Sequence: Synthetic oligonucleotide
  Antisense strand to SEQ ID NO: 24260
ucucccaugucuuaacggg

SEQ ID NO: 24262 - RNA, 19 nt, Artificial Sequence
  Description of Artificial Sequence: Synthetic oligonucleotide
  Sense strand starting at position 1516 of SEQ ID NO: 269
ucccucucccguuaagaca

SEQ ID NO: 24263 - RNA, 19 nt, Artificial Sequence
  Description of Artificial Sequence: Synthetic oligonucleotide
  Antisense strand to SEQ ID NO: 24262
ugucuuaacgggagaggga

SEQ ID NO: 24264 - RNA, 19 nt, Artificial Sequence
  Description of Artificial Sequence: Synthetic oligonucleotide
  Sense strand starting at position 1454 of SEQ ID NO: 269
cuuacucuucuguaguauu

SEQ ID NO: 24265 - RNA, 19 nt, Artificial Sequence
  Description of Artificial Sequence: Synthetic oligonucleotide
  Antisense strand to SEQ ID NO: 24264
aauacuacagaagaguaag

SEQ ID NO: 24266 - RNA, 19 nt, Artificial Sequence
  Description of Artificial Sequence: Synthetic oligonucleotide
  Sense strand starting at position 601 of SEQ ID NO: 269
gcuauaagugucuaaggaa

SEQ ID NO: 24267 - RNA, 19 nt, Artificial Sequence
  Description of Artificial Sequence: Synthetic oligonucleotide
  Antisense strand to SEQ ID NO: 24266
uuccuuagacacuuauagc

SEQ ID NO: 24268 - RNA, 19 nt, Artificial Sequence
  Description of Artificial Sequence: Synthetic oligonucleotide
  Sense strand starting at position 600 of SEQ ID NO: 269
agcuauaagugucuaagga

SEQ ID NO: 24269 - RNA, 19 nt, Artificial Sequence
  Description of Artificial Sequence: Synthetic oligonucleotide
  Antisense strand to SEQ ID NO: 24268
uccuuagacacuuauagcu

SEQ ID NO: 24270 - RNA, 19 nt, Artificial Sequence
  Description of Artificial Sequence: Synthetic oligonucleotide
  Sense strand starting at position 394 of SEQ ID NO: 269
uccaguuaggcauauccaa

SEQ ID NO: 24271 - RNA, 19 nt, Artificial Sequence
  Description of Artificial Sequence: Synthetic oligonucleotide
  Antisense strand to SEQ ID NO: 24270
uuggauaugccuaacugga

SEQ ID NO: 24272 - RNA, 19 nt, Artificial Sequence
  Description of Artificial Sequence: Synthetic oligonucleotide
  Sense strand starting at position 388 of SEQ ID NO: 269
gcgaacuccaguuaggcau

SEQ ID NO: 24273 - RNA, 19 nt, Artificial Sequence
  Description of Artificial Sequence: Synthetic oligonucleotide
  Antisense strand to SEQ ID NO: 24272
augccuaacuggaguucgc

SEQ ID NO: 24274 - RNA, 19 nt, Artificial Sequence
  Description of Artificial Sequence: Synthetic oligonucleotide
  Sense strand starting at position 374 of SEQ ID NO: 269
guuagacuuaucuggcgaa

SEQ ID NO: 24275 - RNA, 19 nt, Artificial Sequence
  Description of Artificial Sequence: Synthetic oligonucleotide
  Antisense strand to SEQ ID NO: 24274
uucgccagauaagucuaac

SEQ ID NO: 24276 - RNA, 19 nt, Artificial Sequence
  Description of Artificial Sequence: Synthetic oligonucleotide
  Sense strand starting at position 288 of SEQ ID NO: 269
acacuuacucccugggcaa

SEQ ID NO: 24277 - RNA, 19 nt, Artificial Sequence
  Description of Artificial Sequence: Synthetic oligonucleotide
  Antisense strand to SEQ ID NO: 24276
uugcccagggaguaagugu

SEQ ID NO: 24278 - RNA, 19 nt, Artificial Sequence
  Description of Artificial Sequence: Synthetic oligonucleotide
  Sense strand starting at position 272 of SEQ ID NO: 269
ggucucuucugacucuaca

SEQ ID NO: 24279 - RNA, 19 nt, Artificial Sequence
  Description of Artificial Sequence: Synthetic oligonucleotide
  Antisense strand to SEQ ID NO: 24278
uguagagucagaagagacc

SEQ ID NO: 24280 - RNA, 19 nt, Artificial Sequence
  Description of Artificial Sequence: Synthetic oligonucleotide
  Sense strand starting at position 103 of SEQ ID NO: 269
uuacuugauuagucauaag

SEQ ID NO: 24281 - RNA, 19 nt, Artificial Sequence
  Description of Artificial Sequence: Synthetic oligonucleotide
  Antisense strand to SEQ ID NO: 24280
cuuaugacuaaucaaguaa

SEQ ID NO: 24282 - RNA, 19 nt, Artificial Sequence
  Description of Artificial Sequence: Synthetic oligonucleotide
  Sense strand starting at position 70 of SEQ ID NO: 269
uucuaaauccaguggauuc

SEQ ID NO: 24283 - RNA, 19 nt, Artificial Sequence
  Description of Artificial Sequence: Synthetic oligonucleotide
  Antisense strand to SEQ ID NO: 24282
gaauccacuggauuuagaa

SEQ ID NO: 24284 - RNA, 19 nt, Artificial Sequence
  Description of Artificial Sequence: Synthetic oligonucleotide
  Sense strand starting at position 42 of SEQ ID NO: 269
uuguaaaggucaccaacaa

SEQ ID NO: 24285 - RNA, 19 nt, Artificial Sequence
  Description of Artificial Sequence: Synthetic oligonucleotide
  Antisense strand to SEQ ID NO: 24284
uuguuggugaccuuuacaa

SEQ ID NO: 24286 - RNA, 19 nt, Artificial Sequence
  Description of Artificial Sequence: Synthetic oligonucleotide
  Sense strand starting at position 200 of SEQ ID NO: 270
ggacauaugugggaaagag

SEQ ID NO: 24287 - RNA, 19 nt, Artificial Sequence
  Description of Artificial Sequence: Synthetic oligonucleotide
  Antisense strand to SEQ ID NO: 24286
cucuuucccacauaugucc

SEQ ID NO: 24288 - RNA, 19 nt, Artificial Sequence
  Description of Artificial Sequence: Synthetic oligonucleotide
  Sense strand starting at position 253 of SEQ ID NO: 270
gcgugagacauccauggga

SEQ ID NO: 24289 - RNA, 19 nt, Artificial Sequence
  Description of Artificial Sequence: Synthetic oligonucleotide
  Antisense strand to SEQ ID NO: 24288
ucccauggaugucucacgc

SEQ ID NO: 24290 - RNA, 19 nt, Artificial Sequence
  Description of Artificial Sequence: Synthetic oligonucleotide
  Sense strand starting at position 414 of SEQ ID NO: 270
cgcauuucaguccggauaa

SEQ ID NO: 24291 - RNA, 19 nt, Artificial Sequence
  Description of Artificial Sequence: Synthetic oligonucleotide
  Antisense strand to SEQ ID NO: 24290
uuauccggacugaaaugcg

SEQ ID NO: 24292 - RNA, 19 nt, Artificial Sequence
  Description of Artificial Sequence: Synthetic oligonucleotide
  Sense strand starting at position 432 of SEQ ID NO: 270
agguaaagaucuuaaauag

SEQ ID NO: 24293 - RNA, 19 nt, Artificial Sequence
  Description of Artificial Sequence: Synthetic oligonucleotide
  Antisense strand to SEQ ID NO: 24292
cuauuuaagaucuuuaccu

SEQ ID NO: 24294 - RNA, 19 nt, Artificial Sequence
  Description of Artificial Sequence: Synthetic oligonucleotide
  Sense strand starting at position 460 of SEQ ID NO: 270
acgccuuugcuagaggaaa

SEQ ID NO: 24295 - RNA, 19 nt, Artificial Sequence
  Description of Artificial Sequence: Synthetic oligonucleotide
  Antisense strand to SEQ ID NO: 24294
uuuccucuagcaaaggcgu

SEQ ID NO: 24296 - RNA, 19 nt, Artificial Sequence
  Description of Artificial Sequence: Synthetic oligonucleotide
  Sense strand starting at position 462 of SEQ ID NO: 270
gccuuugcuagaggaaauu

SEQ ID NO: 24297 - RNA, 19 nt, Artificial Sequence
  Description of Artificial Sequence: Synthetic oligonucleotide
  Antisense strand to SEQ ID NO: 24296
aauuuccucuagcaaaggc

SEQ ID NO: 24298 - RNA, 19 nt, Artificial Sequence
  Description of Artificial Sequence: Synthetic oligonucleotide
  Sense strand starting at position 506 of SEQ ID NO: 270
cuuauuaaaugagucacga

SEQ ID NO: 24299 - RNA, 19 nt, Artificial Sequence
  Description of Artificial Sequence: Synthetic oligonucleotide
  Antisense strand to SEQ ID NO: 24298
ucgugacucauuuaauaag

SEQ ID NO: 24300 - RNA, 19 nt, Artificial Sequence
  Description of Artificial Sequence: Synthetic oligonucleotide
  Sense strand starting at position 675 of SEQ ID NO: 270
ccgguuaaacugugauucu

SEQ ID NO: 24301 - RNA, 19 nt, Artificial Sequence
  Description of Artificial Sequence: Synthetic oligonucleotide
  Antisense strand to SEQ ID NO: 24300
agaaucacaguuuaaccgg

SEQ ID NO: 24302 - RNA, 19 nt, Artificial Sequence
  Description of Artificial Sequence: Synthetic oligonucleotide
  Sense strand starting at position 678 of SEQ ID NO: 270
guuaaacugugauucucuu

SEQ ID NO: 24303 - RNA, 19 nt, Artificial Sequence
  Description of Artificial Sequence: Synthetic oligonucleotide
  Antisense strand to SEQ ID NO: 24302
aagagaaucacaguuuaac

SEQ ID NO: 24304 - RNA, 19 nt, Artificial Sequence
  Description of Artificial Sequence: Synthetic oligonucleotide
  Sense strand starting at position 1432 of SEQ ID NO: 270
gcuucugcucccgaagacu

SEQ ID NO: 24305 - RNA, 19 nt, Artificial Sequence
  Description of Artificial Sequence: Synthetic oligonucleotide
  Antisense strand to SEQ ID NO: 24304
agucuucgggagcagaagc

SEQ ID NO: 24306 - RNA, 19 nt, Artificial Sequence
  Description of Artificial Sequence: Synthetic oligonucleotide
  Sense strand starting at position 2039 of SEQ ID NO: 270
gccugaguccuggacaggu

SEQ ID NO: 24307 - RNA, 19 nt, Artificial Sequence
  Description of Artificial Sequence: Synthetic oligonucleotide
  Antisense strand to SEQ ID NO: 24306
accuguccaggacucaggc

SEQ ID NO: 24308 - RNA, 19 nt, Artificial Sequence
  Description of Artificial Sequence: Synthetic oligonucleotide
  Sense strand starting at position 2043 of SEQ ID NO: 270
gaguccuggacaggugauu

SEQ ID NO: 24309 - RNA, 19 nt, Artificial Sequence
  Description of Artificial Sequence: Synthetic oligonucleotide
  Antisense strand to SEQ ID NO: 24308
aaucaccuguccaggacuc

SEQ ID NO: 24310 - RNA, 19 nt, Artificial Sequence
  Description of Artificial Sequence: Synthetic oligonucleotide
  Sense strand starting at position 2054 of SEQ ID NO: 270
aggugauuggcaggugaau

SEQ ID NO: 24311 - RNA, 19 nt, Artificial Sequence
  Description of Artificial Sequence: Synthetic oligonucleotide
  Antisense strand to SEQ ID NO: 24310
auucaccugccaaucaccu

SEQ ID NO: 24312 - RNA, 19 nt, Artificial Sequence
  Description of Artificial Sequence: Synthetic oligonucleotide
  Sense strand starting at position 2056 of SEQ ID NO: 270
gugauuggcaggugaauga

SEQ ID NO: 24313 - RNA, 19 nt, Artificial Sequence
  Description of Artificial Sequence: Synthetic oligonucleotide
  Antisense strand to SEQ ID NO: 24312
ucauucaccugccaaucac

SEQ ID NO: 24314 - RNA, 19 nt, Artificial Sequence
  Description of Artificial Sequence: Synthetic oligonucleotide
  Sense strand starting at position 2282 of SEQ ID NO: 270
acaucuuucugacuuugua

SEQ ID NO: 24315 - RNA, 19 nt, Artificial Sequence
  Description of Artificial Sequence: Synthetic oligonucleotide
  Antisense strand to SEQ ID NO: 24314
uacaaagucagaaagaugu

SEQ ID NO: 24316 - RNA, 19 nt, Artificial Sequence
  Description of Artificial Sequence: Synthetic oligonucleotide
  Sense strand starting at position 2286 of SEQ ID NO: 270
cuuucugacuuuguacgaa

SEQ ID NO: 24317 - RNA, 19 nt, Artificial Sequence
  Description of Artificial Sequence: Synthetic oligonucleotide
  Antisense strand to SEQ ID NO: 24316
uucguacaaagucagaaag

SEQ ID NO: 24318 - RNA, 19 nt, Artificial Sequence
  Description of Artificial Sequence: Synthetic oligonucleotide
  Sense strand starting at position 2289 of SEQ ID NO: 270
ucugacuuuguacgaaacu

SEQ ID NO: 24319 - RNA, 19 nt, Artificial Sequence
  Description of Artificial Sequence: Synthetic oligonucleotide
  Antisense strand to SEQ ID NO: 24318
aguuucguacaaagucaga

SEQ ID NO: 24320 - RNA, 19 nt, Artificial Sequence
  Description of Artificial Sequence: Synthetic oligonucleotide
  Sense strand starting at position 2417 of SEQ ID NO: 270
gcgaaacaucuggaccuca

SEQ ID NO: 24321 - RNA, 19 nt, Artificial Sequence
  Description of Artificial Sequence: Synthetic oligonucleotide
  Antisense strand to SEQ ID NO: 24320
ugagguccagauguuucgc

SEQ ID NO: 24322 - RNA, 19 nt, Artificial Sequence
  Description of Artificial Sequence: Synthetic oligonucleotide
  Sense strand starting at position 2442 of SEQ ID NO: 270
cucagagaacuuugugcau

SEQ ID NO: 24323 - RNA, 19 nt, Artificial Sequence
  Description of Artificial Sequence: Synthetic oligonucleotide
  Antisense strand to SEQ ID NO: 24322
augcacaaaguucucugag

SEQ ID NO: 24324 - RNA, 19 nt, Artificial Sequence
  Description of Artificial Sequence: Synthetic oligonucleotide
  Sense strand starting at position 2559 of SEQ ID NO: 270
ugauguuuguucucuggga

SEQ ID NO: 24325 - RNA, 19 nt, Artificial Sequence
  Description of Artificial Sequence: Synthetic oligonucleotide
  Antisense strand to SEQ ID NO: 24324
ucccagagaacaaacauca

SEQ ID NO: 24326 - RNA, 19 nt, Artificial Sequence
  Description of Artificial Sequence: Synthetic oligonucleotide
  Sense strand starting at position 2560 of SEQ ID NO: 270
gauguuuguucucugggac

SEQ ID NO: 24327 - RNA, 19 nt, Artificial Sequence
  Description of Artificial Sequence: Synthetic oligonucleotide
  Antisense strand to SEQ ID NO: 24326
gucccagagaacaaacauc

SEQ ID NO: 24328 - RNA, 19 nt, Artificial Sequence
  Description of Artificial Sequence: Synthetic oligonucleotide
  Sense strand starting at position 2563 of SEQ ID NO: 270
guuuguucucugggaccca

SEQ ID NO: 24329 - RNA, 19 nt, Artificial Sequence
  Description of Artificial Sequence: Synthetic oligonucleotide
  Antisense strand to SEQ ID NO: 24328
ugggucccagagaacaaac

SEQ ID NO: 24330 - RNA, 19 nt, Artificial Sequence
  Description of Artificial Sequence: Synthetic oligonucleotide
  Sense strand starting at position 2661 of SEQ ID NO: 270
ggcucuuaacuguaacaac

SEQ ID NO: 24331 - RNA, 19 nt, Artificial Sequence
  Description of Artificial Sequence: Synthetic oligonucleotide
  Antisense strand to SEQ ID NO: 24330
guuguuacaguuaagagcc

SEQ ID NO: 24332 - RNA, 19 nt, Artificial Sequence
  Description of Artificial Sequence: Synthetic oligonucleotide
  Sense strand starting at position 2679 of SEQ ID NO: 270
ccuggaucuggccacuaga

SEQ ID NO: 24333 - RNA, 19 nt, Artificial Sequence
  Description of Artificial Sequence: Synthetic oligonucleotide
  Antisense strand to SEQ ID NO: 24332
ucuaguggccagauccagg

SEQ ID NO: 24334 - RNA, 19 nt, Artificial Sequence
  Description of Artificial Sequence: Synthetic oligonucleotide
  Sense strand starting at position 2744 of SEQ ID NO: 270
cuagccauggccugaugaa

SEQ ID NO: 24335 - RNA, 19 nt, Artificial Sequence
  Description of Artificial Sequence: Synthetic oligonucleotide
  Antisense strand to SEQ ID NO: 24334
uucaucaggccauggcuag

SEQ ID NO: 24336 - RNA, 19 nt, Artificial Sequence
  Description of Artificial Sequence: Synthetic oligonucleotide
  Sense strand starting at position 2763 of SEQ ID NO: 270
cagugaucucugggcagga

SEQ ID NO: 24337 - RNA, 19 nt, Artificial Sequence
  Description of Artificial Sequence: Synthetic oligonucleotide
  Antisense strand to SEQ ID NO: 24336
uccugcccagagaucacug

SEQ ID NO: 24338 - RNA, 19 nt, Artificial Sequence
  Description of Artificial Sequence: Synthetic oligonucleotide
  Sense strand starting at position 2765 of SEQ ID NO: 270
gugaucucugggcaggaga

SEQ ID NO: 24339 - RNA, 19 nt, Artificial Sequence
  Description of Artificial Sequence: Synthetic oligonucleotide
  Antisense strand to SEQ ID NO: 24338
ucuccugcccagagaucac

SEQ ID NO: 24340 - RNA, 19 nt, Artificial Sequence
  Description of Artificial Sequence: Synthetic oligonucleotide
  Sense strand starting at position 2793 of SEQ ID NO: 270
ggaaauaucuccgcccucu

SEQ ID NO: 24341 - RNA, 19 nt, Artificial Sequence
  Description of Artificial Sequence: Synthetic oligonucleotide
  Antisense strand to SEQ ID NO: 24340
agagggcggagauauuucc

SEQ ID NO: 24342 - RNA, 19 nt, Artificial Sequence
  Description of Artificial Sequence: Synthetic oligonucleotide
  Sense strand starting at position 2899 of SEQ ID NO: 270
ggagacugugaccgggaaa

SEQ ID NO: 24343 - RNA, 19 nt, Artificial Sequence
  Description of Artificial Sequence: Synthetic oligonucleotide
  Antisense strand to SEQ ID NO: 24342
uuucccggucacagucucc

SEQ ID NO: 24344 - RNA, 19 nt, Artificial Sequence
  Description of Artificial Sequence: Synthetic oligonucleotide
  Sense strand starting at position 3167 of SEQ ID NO: 270
uuuccauguccauaguaaa

SEQ ID NO: 24345 - RNA, 19 nt, Artificial Sequence
  Description of Artificial Sequence: Synthetic oligonucleotide
  Antisense strand to SEQ ID NO: 24344
uuuacuauggacauggaaa

SEQ ID NO: 24346 - RNA, 19 nt, Artificial Sequence
  Description of Artificial Sequence: Synthetic oligonucleotide
  Sense strand starting at position 3217 of SEQ ID NO: 270
ucacauguugucuguggaa

SEQ ID NO: 24347 - RNA, 19 nt, Artificial Sequence
  Description of Artificial Sequence: Synthetic oligonucleotide
  Antisense strand to SEQ ID NO: 24346
uuccacagacaacauguga

SEQ ID NO: 24348 - RNA, 19 nt, Artificial Sequence
  Description of Artificial Sequence: Synthetic oligonucleotide
  Sense strand starting at position 3267 of SEQ ID NO: 270
guccuugagacggaugcau

SEQ ID NO: 24349 - RNA, 19 nt, Artificial Sequence
  Description of Artificial Sequence: Synthetic oligonucleotide
  Antisense strand to SEQ ID NO: 24348
augcauccgucucaaggac

SEQ ID NO: 24350 - RNA, 19 nt, Artificial Sequence
  Description of Artificial Sequence: Synthetic oligonucleotide
  Sense strand starting at position 3347 of SEQ ID NO: 270
ugagcacugucugcugaga

SEQ ID NO: 24351 - RNA, 19 nt, Artificial Sequence
  Description of Artificial Sequence: Synthetic oligonucleotide
  Antisense strand to SEQ ID NO: 24350
ucucagcagacagugcuca

SEQ ID NO: 24352 - RNA, 19 nt, Artificial Sequence
  Description of Artificial Sequence: Synthetic oligonucleotide
  Sense strand starting at position 3416 of SEQ ID NO: 270
gcuggugugccuguaaagu

SEQ ID NO: 24353 - RNA, 19 nt, Artificial Sequence
  Description of Artificial Sequence: Synthetic oligonucleotide
  Antisense strand to SEQ ID NO: 24352
acuuuacaggcacaccagc

SEQ ID NO: 24354 - RNA, 19 nt, Artificial Sequence
  Description of Artificial Sequence: Synthetic oligonucleotide
  Sense strand starting at position 3509 of SEQ ID NO: 270
ugaccaucucccuggcaga

SEQ ID NO: 24355 - RNA, 19 nt, Artificial Sequence
  Description of Artificial Sequence: Synthetic oligonucleotide
  Antisense strand to SEQ ID NO: 24354
ucugccagggagaugguca

SEQ ID NO: 24356 - RNA, 19 nt, Artificial Sequence
  Description of Artificial Sequence: Synthetic oligonucleotide
  Sense strand starting at position 3524 of SEQ ID NO: 270
cagagaucccagugccuga

SEQ ID NO: 24357 - RNA, 19 nt, Artificial Sequence
  Description of Artificial Sequence: Synthetic oligonucleotide
  Antisense strand to SEQ ID NO: 24356
ucaggcacugggaucucug

SEQ ID NO: 24358 - RNA, 19 nt, Artificial Sequence
  Description of Artificial Sequence: Synthetic oligonucleotide
  Sense strand starting at position 3541 of SEQ ID NO: 270
gauucuggccaguaggaau

SEQ ID NO: 24359 - RNA, 19 nt, Artificial Sequence
  Description of Artificial Sequence: Synthetic oligonucleotide
  Antisense strand to SEQ ID NO: 24358
auuccuacuggccagaauc

SEQ ID NO: 24360 - RNA, 19 nt, Artificial Sequence
  Description of Artificial Sequence: Synthetic oligonucleotide
  Sense strand starting at position 3706 of SEQ ID NO: 270
gcucaaugccuucgagaga

SEQ ID NO: 24361 - RNA, 19 nt, Artificial Sequence
  Description of Artificial Sequence: Synthetic oligonucleotide
  Antisense strand to SEQ ID NO: 24360
ucucucgaaggcauugagc

SEQ ID NO: 24362 - RNA, 19 nt, Artificial Sequence
  Description of Artificial Sequence: Synthetic oligonucleotide
  Sense strand starting at position 3846 of SEQ ID NO: 270
gguuaaaguucccugagca

SEQ ID NO: 24363 - RNA, 19 nt, Artificial Sequence
  Description of Artificial Sequence: Synthetic oligonucleotide
  Antisense strand to SEQ ID NO: 24362
ugcucagggaacuuuaacc

SEQ ID NO: 24364 - RNA, 19 nt, Artificial Sequence
  Description of Artificial Sequence: Synthetic oligonucleotide
  Sense strand starting at position 3847 of SEQ ID NO: 270
guuaaaguucccugagcag

SEQ ID NO: 24365 - RNA, 19 nt, Artificial Sequence
  Description of Artificial Sequence: Synthetic oligonucleotide
  Antisense strand to SEQ ID NO: 24364
cugcucagggaacuuuaac

SEQ ID NO: 24366 - RNA, 19 nt, Artificial Sequence
  Description of Artificial Sequence: Synthetic oligonucleotide
  Sense strand starting at position 61 of SEQ ID NO: 271
auggguguuuggccaguga

SEQ ID NO: 24367 - RNA, 19 nt, Artificial Sequence
  Description of Artificial Sequence: Synthetic oligonucleotide
  Antisense strand to SEQ ID NO: 24366
ucacuggccaaacacccau

SEQ ID NO: 24368 - RNA, 19 nt, Artificial Sequence
  Description of Artificial Sequence: Synthetic oligonucleotide
  Sense strand starting at position 253 of SEQ ID NO: 271
ggcauugucugggccggau

SEQ ID NO: 24369 - RNA, 19 nt, Artificial Sequence
  Description of Artificial Sequence: Synthetic oligonucleotide
  Antisense strand to SEQ ID NO: 24368
auccggcccagacaaugcc

SEQ ID NO: 24370 - RNA, 19 nt, Artificial Sequence
  Description of Artificial Sequence: Synthetic oligonucleotide
  Sense strand starting at position 307 of SEQ ID NO: 271
gguggugcugucagucaca

SEQ ID NO: 24371 - RNA, 19 nt, Artificial Sequence
  Description of Artificial Sequence: Synthetic oligonucleotide
  Antisense strand to SEQ ID NO: 24370
ugugacugacagcaccacc

SEQ ID NO: 24372 - RNA, 19 nt, Artificial Sequence
  Description of Artificial Sequence: Synthetic oligonucleotide
  Sense strand starting at position 393 of SEQ ID NO: 271
gcucaaggccgguaucuaa

SEQ ID NO: 24373 - RNA, 19 nt, Artificial Sequence
  Description of Artificial Sequence: Synthetic oligonucleotide
  Antisense strand to SEQ ID NO: 24372
uuagauaccggccuugagc

SEQ ID NO: 24374 - RNA, 19 nt, Artificial Sequence
  Description of Artificial Sequence: Synthetic oligonucleotide
  Sense strand starting at position 734 of SEQ ID NO: 271
ggguguuggcuccugcagu

SEQ ID NO: 24375 - RNA, 19 nt, Artificial Sequence
  Description of Artificial Sequence: Synthetic oligonucleotide
  Antisense strand to SEQ ID NO: 24374
acugcaggagccaacaccc

SEQ ID NO: 24376 - RNA, 19 nt, Artificial Sequence
  Description of Artificial Sequence: Synthetic oligonucleotide
  Sense strand starting at position 845 of SEQ ID NO: 271
agcacagugaccgagcaau

SEQ ID NO: 24377 - RNA, 19 nt, Artificial Sequence
  Description of Artificial Sequence: Synthetic oligonucleotide
  Antisense strand to SEQ ID NO: 24376
auugcucggucacugugcu

SEQ ID NO: 24378 - RNA, 19 nt, Artificial Sequence
  Description of Artificial Sequence: Synthetic oligonucleotide
  Sense strand starting at position 867 of SEQ ID NO: 271
gacggucugucugggacaa

SEQ ID NO: 24379 - RNA, 19 nt, Artificial Sequence
  Description of Artificial Sequence: Synthetic oligonucleotide
  Antisense strand to SEQ ID NO: 24378
uugucccagacagaccguc

SEQ ID NO: 24380 - RNA, 19 nt, Artificial Sequence
  Description of Artificial Sequence: Synthetic oligonucleotide
  Sense strand starting at position 868 of SEQ ID NO: 271
acggucugucugggacaau

SEQ ID NO: 24381 - RNA, 19 nt, Artificial Sequence
  Description of Artificial Sequence: Synthetic oligonucleotide
  Antisense strand to SEQ ID NO: 24380
auugucccagacagaccgu

SEQ ID NO: 24382 - RNA, 19 nt, Artificial Sequence
  Description of Artificial Sequence: Synthetic oligonucleotide
  Sense strand starting at position 869 of SEQ ID NO: 271
cggucugucugggacaauu

SEQ ID NO: 24383 - RNA, 19 nt, Artificial Sequence
  Description of Artificial Sequence: Synthetic oligonucleotide
  Antisense strand to SEQ ID NO: 24382
aauugucccagacagaccg

SEQ ID NO: 24384 - RNA, 19 nt, Artificial Sequence
  Description of Artificial Sequence: Synthetic oligonucleotide
  Sense strand starting at position 1071 of SEQ ID NO: 271
ggaaagggcgugugaugau

SEQ ID NO: 24385 - RNA, 19 nt, Artificial Sequence
  Description of Artificial Sequence: Synthetic oligonucleotide
  Antisense strand to SEQ ID NO: 24384
aucaucacacgcccuuucc

SEQ ID NO: 24386 - RNA, 19 nt, Artificial Sequence
  Description of Artificial Sequence: Synthetic oligonucleotide
  Sense strand starting at position 1080 of SEQ ID NO: 271
gugugaugaugccaaagug

SEQ ID NO: 24387 - RNA, 19 nt, Artificial Sequence
  Description of Artificial Sequence: Synthetic oligonucleotide
  Antisense strand to SEQ ID NO: 24386
cacuuuggcaucaucacac

SEQ ID NO: 24388 - RNA, 19 nt, Artificial Sequence
  Description of Artificial Sequence: Synthetic oligonucleotide
  Sense strand starting at position 1280 of SEQ ID NO: 271
gcaugagguucucggugau

SEQ ID NO: 24389 - RNA, 19 nt, Artificial Sequence
  Description of Artificial Sequence: Synthetic oligonucleotide
  Antisense strand to SEQ ID NO: 24388
aucaccgagaaccucaugc

SEQ ID NO: 24390 - RNA, 19 nt, Artificial Sequence
  Description of Artificial Sequence: Synthetic oligonucleotide
  Sense strand starting at position 1283 of SEQ ID NO: 271
ugagguucucggugaugua

SEQ ID NO: 24391 - RNA, 19 nt, Artificial Sequence
  Description of Artificial Sequence: Synthetic oligonucleotide
  Antisense strand to SEQ ID NO: 24390
uacaucaccgagaaccuca

SEQ ID NO: 24392 - RNA, 19 nt, Artificial Sequence
  Description of Artificial Sequence: Synthetic oligonucleotide
  Sense strand starting at position 1284 of SEQ ID NO: 271
gagguucucggugauguag

SEQ ID NO: 24393 - RNA, 19 nt, Artificial Sequence
  Description of Artificial Sequence: Synthetic oligonucleotide
  Antisense strand to SEQ ID NO: 24392
cuacaucaccgagaaccuc

SEQ ID NO: 24394 - RNA, 19 nt, Artificial Sequence
  Description of Artificial Sequence: Synthetic oligonucleotide
  Sense strand starting at position 2375 of SEQ ID NO: 271
gggacuucgugcuuuacga

SEQ ID NO: 24395 - RNA, 19 nt, Artificial Sequence
  Description of Artificial Sequence: Synthetic oligonucleotide
  Antisense strand to SEQ ID NO: 24394
ucguaaagcacgaaguccc

SEQ ID NO: 24396 - RNA, 19 nt, Artificial Sequence
  Description of Artificial Sequence: Synthetic oligonucleotide
  Sense strand starting at position 2594 of SEQ ID NO: 271
agaugagacuucgcaaggu

SEQ ID NO: 24397 - RNA, 19 nt, Artificial Sequence
  Description of Artificial Sequence: Synthetic oligonucleotide
  Antisense strand to SEQ ID NO: 24396
accuugcgaagucucaucu

SEQ ID NO: 24398 - RNA, 19 nt, Artificial Sequence
  Description of Artificial Sequence: Synthetic oligonucleotide
  Sense strand starting at position 2598 of SEQ ID NO: 271
gagacuucgcaaggugaga

SEQ ID NO: 24399 - RNA, 19 nt, Artificial Sequence
  Description of Artificial Sequence: Synthetic oligonucleotide
  Antisense strand to SEQ ID NO: 24398
ucucaccuugcgaagucuc

SEQ ID NO: 24400 - RNA, 19 nt, Artificial Sequence
  Description of Artificial Sequence: Synthetic oligonucleotide
  Sense strand starting at position 3192 of SEQ ID NO: 271
ucacgaauuccuggucauc

SEQ ID NO: 24401 - RNA, 19 nt, Artificial Sequence
  Description of Artificial Sequence: Synthetic oligonucleotide
  Antisense strand to SEQ ID NO: 24400
gaugaccaggaauucguga

SEQ ID NO: 24402 - RNA, 19 nt, Artificial Sequence
  Description of Artificial Sequence: Synthetic oligonucleotide
  Sense strand starting at position 3194 of SEQ ID NO: 271
acgaauuccuggucaucuu

SEQ ID NO: 24403 - RNA, 19 nt, Artificial Sequence
  Description of Artificial Sequence: Synthetic oligonucleotide
  Antisense strand to SEQ ID NO: 24402
aagaugaccaggaauucgu

SEQ ID NO: 24404 - RNA, 19 nt, Artificial Sequence
  Description of Artificial Sequence: Synthetic oligonucleotide
  Sense strand starting at position 3682 of SEQ ID NO: 271
gagccuggaugaugguaua

SEQ ID NO: 24405 - RNA, 19 nt, Artificial Sequence
  Description of Artificial Sequence: Synthetic oligonucleotide
  Antisense strand to SEQ ID NO: 24404
uauaccaucauccaggcuc

SEQ ID NO: 24406 - RNA, 19 nt, Artificial Sequence
  Description of Artificial Sequence: Synthetic oligonucleotide
  Sense strand starting at position 3717 of SEQ ID NO: 271
ccaacuaucuuggcauguu

SEQ ID NO: 24407 - RNA, 19 nt, Artificial Sequence
  Description of Artificial Sequence: Synthetic oligonucleotide
  Antisense strand to SEQ ID NO: 24406
aacaugccaagauaguugg

SEQ ID NO: 24408 - RNA, 19 nt, Artificial Sequence
  Description of Artificial Sequence: Synthetic oligonucleotide
  Sense strand starting at position 3729 of SEQ ID NO: 271
gcauguuggccugaggaca

SEQ ID NO: 24409 - RNA, 19 nt, Artificial Sequence
  Description of Artificial Sequence: Synthetic oligonucleotide
  Antisense strand to SEQ ID NO: 24408
uguccucaggccaacaugc

SEQ ID NO: 24410 - RNA, 19 nt, Artificial Sequence
  Description of Artificial Sequence: Synthetic oligonucleotide
  Sense strand starting at position 3927 of SEQ ID NO: 271
ccucgaggccuuugcugaa

SEQ ID NO: 24411 - RNA, 19 nt, Artificial Sequence
  Description of Artificial Sequence: Synthetic oligonucleotide
  Antisense strand to SEQ ID NO: 24410
uucagcaaaggccucgagg

SEQ ID NO: 24412 - RNA, 19 nt, Artificial Sequence
  Description of Artificial Sequence: Synthetic oligonucleotide
  Sense strand starting at position 175 of SEQ ID NO: 272
gcaaguaucccauggagac

SEQ ID NO: 24413 - RNA, 19 nt, Artificial Sequence
  Description of Artificial Sequence: Synthetic oligonucleotide
  Antisense strand to SEQ ID NO: 24412
gucuccaugggauacuugc

SEQ ID NO: 24414 - RNA, 19 nt, Artificial Sequence
  Description of Artificial Sequence: Synthetic oligonucleotide
  Sense strand starting at position 176 of SEQ ID NO: 272
caaguaucccauggagacu

SEQ ID NO: 24415 - RNA, 19 nt, Artificial Sequence
  Description of Artificial Sequence: Synthetic oligonucleotide
  Antisense strand to SEQ ID NO: 24414
agucuccaugggauacuug

SEQ ID NO: 24416 - RNA, 19 nt, Artificial Sequence
  Description of Artificial Sequence: Synthetic oligonucleotide
  Sense strand starting at position 185 of SEQ ID NO: 272
cauggagacuccuaaagag

SEQ ID NO: 24417 - RNA, 19 nt, Artificial Sequence
  Description of Artificial Sequence: Synthetic oligonucleotide
  Antisense strand to SEQ ID NO: 24416
cucuuuaggagucuccaug

SEQ ID NO: 24418 - RNA, 19 nt, Artificial Sequence
  Description of Artificial Sequence: Synthetic oligonucleotide
  Sense strand starting at position 336 of SEQ ID NO: 272
gccgcauaacaauaauaau

SEQ ID NO: 24419 - RNA, 19 nt, Artificial Sequence
  Description of Artificial Sequence: Synthetic oligonucleotide
  Antisense strand to SEQ ID NO: 24418
auuauuauuguuaugcggc

SEQ ID NO: 24420 - RNA, 19 nt, Artificial Sequence
  Description of Artificial Sequence: Synthetic oligonucleotide
  Sense strand starting at position 385 of SEQ ID NO: 272
gugccagacucuuugacag

SEQ ID NO: 24421 - RNA, 19 nt, Artificial Sequence
  Description of Artificial Sequence: Synthetic oligonucleotide
  Antisense strand to SEQ ID NO: 24420
cugucaaagagucuggcac

SEQ ID NO: 24422 - RNA, 19 nt, Artificial Sequence
  Description of Artificial Sequence: Synthetic oligonucleotide
  Sense strand starting at position 407 of SEQ ID NO: 272
guuugaaagcauuaucuca

SEQ ID NO: 24423 - RNA, 19 nt, Artificial Sequence
  Description of Artificial Sequence: Synthetic oligonucleotide
  Antisense strand to SEQ ID NO: 24422
ugagauaaugcuuucaaac

SEQ ID NO: 24424 - RNA, 19 nt, Artificial Sequence
  Description of Artificial Sequence: Synthetic oligonucleotide
  Sense strand starting at position 409 of SEQ ID NO: 272
uugaaagcauuaucucaug

SEQ ID NO: 24425 - RNA, 19 nt, Artificial Sequence
  Description of Artificial Sequence: Synthetic oligonucleotide
  Antisense strand to SEQ ID NO: 24424
caugagauaaugcuuucaa

SEQ ID NO: 24426 - RNA, 19 nt, Artificial Sequence
  Description of Artificial Sequence: Synthetic oligonucleotide
  Sense strand starting at position 434 of SEQ ID NO: 272
ucacaauagccaggugaug

SEQ ID NO: 24427 - RNA, 19 nt, Artificial Sequence
  Description of Artificial Sequence: Synthetic oligonucleotide
  Antisense strand to SEQ ID NO: 24426
caucaccuggcuauuguga

SEQ ID NO: 24428 - RNA, 19 nt, Artificial Sequence
  Description of Artificial Sequence: Synthetic oligonucleotide
  Sense strand starting at position 436 of SEQ ID NO: 272
acaauagccaggugaugua

SEQ ID NO: 24429 - RNA, 19 nt, Artificial Sequence
  Description of Artificial Sequence: Synthetic oligonucleotide
  Antisense strand to SEQ ID NO: 24428
uacaucaccuggcuauugu

SEQ ID NO: 24430 - RNA, 19 nt, Artificial Sequence
  Description of Artificial Sequence: Synthetic oligonucleotide
  Sense strand starting at position 581 of SEQ ID NO: 272
guuauacuagcccaucuau

SEQ ID NO: 24431 - RNA, 19 nt, Artificial Sequence
  Description of Artificial Sequence: Synthetic oligonucleotide
  Antisense strand to SEQ ID NO: 24430
auagaugggcuaguauaac

SEQ ID NO: 24432 - RNA, 19 nt, Artificial Sequence
  Description of Artificial Sequence: Synthetic oligonucleotide
  Sense strand starting at position 592 of SEQ ID NO: 272
ccaucuauuggucaccuga

SEQ ID NO: 24433 - RNA, 19 nt, Artificial Sequence
  Description of Artificial Sequence: Synthetic oligonucleotide
  Antisense strand to SEQ ID NO: 24432
ucaggugaccaauagaugg

SEQ ID NO: 24434 - RNA, 19 nt, Artificial Sequence
  Description of Artificial Sequence: Synthetic oligonucleotide
  Sense strand starting at position 594 of SEQ ID NO: 272
aucuauuggucaccugaua

SEQ ID NO: 24435 - RNA, 19 nt, Artificial Sequence
  Description of Artificial Sequence: Synthetic oligonucleotide
  Antisense strand to SEQ ID NO: 24434
uaucaggugaccaauagau

SEQ ID NO: 24436 - RNA, 19 nt, Artificial Sequence
  Description of Artificial Sequence: Synthetic oligonucleotide
  Sense strand starting at position 621 of SEQ ID NO: 272
gaagguaacuuuguuuaau

SEQ ID NO: 24437 - RNA, 19 nt, Artificial Sequence
  Description of Artificial Sequence: Synthetic oligonucleotide
  Antisense strand to SEQ ID NO: 24436
auuaaacaaaguuaccuuc

SEQ ID NO: 24438 - RNA, 19 nt, Artificial Sequence
  Description of Artificial Sequence: Synthetic oligonucleotide
  Sense strand starting at position 667 of SEQ ID NO: 272
gacucuguauaguuagaca

SEQ ID NO: 24439 - RNA, 19 nt, Artificial Sequence
  Description of Artificial Sequence: Synthetic oligonucleotide
  Antisense strand to SEQ ID NO: 24438
ugucuaacuauacagaguc

SEQ ID NO: 24440 - RNA, 19 nt, Artificial Sequence
  Description of Artificial Sequence: Synthetic oligonucleotide
  Sense strand starting at position 1288 of SEQ ID NO: 272
cagugaagacaucagcuuu

SEQ ID NO: 24441 - RNA, 19 nt, Artificial Sequence
  Description of Artificial Sequence: Synthetic oligonucleotide
  Antisense strand to SEQ ID NO: 24440
aaagcugaugucuucacug

SEQ ID NO: 24442 - RNA, 19 nt, Artificial Sequence
  Description of Artificial Sequence: Synthetic oligonucleotide
  Sense strand starting at position 1681 of SEQ ID NO: 272
aagagauauuuguagacca

SEQ ID NO: 24443 - RNA, 19 nt, Artificial Sequence
  Description of Artificial Sequence: Synthetic oligonucleotide
  Antisense strand to SEQ ID NO: 24442
uggucuacaaauaucucuu

SEQ ID NO: 24444 - RNA, 19 nt, Artificial Sequence
  Description of Artificial Sequence: Synthetic oligonucleotide
  Sense strand starting at position 1922 of SEQ ID NO: 272
augagcuaucuacaauagu

SEQ ID NO: 24445 - RNA, 19 nt, Artificial Sequence
  Description of Artificial Sequence: Synthetic oligonucleotide
  Antisense strand to SEQ ID NO: 24444
acuauuguagauagcucau

SEQ ID NO: 24446 - RNA, 19 nt, Artificial Sequence
  Description of Artificial Sequence: Synthetic oligonucleotide
  Sense strand starting at position 1994 of SEQ ID NO: 272
ggcaaauguagucauuguu

SEQ ID NO: 24447 - RNA, 19 nt, Artificial Sequence
  Description of Artificial Sequence: Synthetic oligonucleotide
  Antisense strand to SEQ ID NO: 24446
aacaaugacuacauuugcc

SEQ ID NO: 24448 - RNA, 19 nt, Artificial Sequence
  Description of Artificial Sequence: Synthetic oligonucleotide
  Sense strand starting at position 2001 of SEQ ID NO: 272
guagucauuguuuaaugua

SEQ ID NO: 24449 - RNA, 19 nt, Artificial Sequence
  Description of Artificial Sequence: Synthetic oligonucleotide
  Antisense strand to SEQ ID NO: 24448
uacauuaaacaaugacuac

SEQ ID NO: 24450 - RNA, 19 nt, Artificial Sequence
  Description of Artificial Sequence: Synthetic oligonucleotide
  Sense strand starting at position 2044 of SEQ ID NO: 272
aauucuggagauuguuuau

SEQ ID NO: 24451 - RNA, 19 nt, Artificial Sequence
  Description of Artificial Sequence: Synthetic oligonucleotide
  Antisense strand to SEQ ID NO: 24450
auaaacaaucuccagaauu

SEQ ID NO: 24452 - RNA, 19 nt, Artificial Sequence
  Description of Artificial Sequence: Synthetic oligonucleotide
  Sense strand starting at position 2047 of SEQ ID NO: 272
ucuggagauuguuuaugca

SEQ ID NO: 24453 - RNA, 19 nt, Artificial Sequence
  Description of Artificial Sequence: Synthetic oligonucleotide
  Antisense strand to SEQ ID NO: 24452
ugcauaaacaaucuccaga

SEQ ID NO: 24454 - RNA, 19 nt, Artificial Sequence
  Description of Artificial Sequence: Synthetic oligonucleotide
  Sense strand starting at position 2051 of SEQ ID NO: 272
gagauuguuuaugcaacaa

SEQ ID NO: 24455 - RNA, 19 nt, Artificial Sequence
  Description of Artificial Sequence: Synthetic oligonucleotide
  Antisense strand to SEQ ID NO: 24454
uuguugcauaaacaaucuc

SEQ ID NO: 24456 - RNA, 19 nt, Artificial Sequence
  Description of Artificial Sequence: Synthetic oligonucleotide
  Sense strand starting at position 2109 of SEQ ID NO: 272
ugguuaggaucauaaauuu

SEQ ID NO: 24457 - RNA, 19 nt, Artificial Sequence
  Description of Artificial Sequence: Synthetic oligonucleotide
  Antisense strand to SEQ ID NO: 24456
aaauuuaugauccuaacca

SEQ ID NO: 24458 - RNA, 19 nt, Artificial Sequence
  Description of Artificial Sequence: Synthetic oligonucleotide
  Sense strand starting at position 2404 of SEQ ID NO: 272
auagaaucaugccuugcua

SEQ ID NO: 24459 - RNA, 19 nt, Artificial Sequence
  Description of Artificial Sequence: Synthetic oligonucleotide
  Antisense strand to SEQ ID NO: 24458
uagcaaggcaugauucuau

SEQ ID NO: 24460 - RNA, 19 nt, Artificial Sequence
  Description of Artificial Sequence: Synthetic oligonucleotide
  Sense strand starting at position 2432 of SEQ ID NO: 272
cucacugaacgaugggaua

SEQ ID NO: 24461 - RNA, 19 nt, Artificial Sequence
  Description of Artificial Sequence: Synthetic oligonucleotide
  Antisense strand to SEQ ID NO: 24460
uaucccaucguucagugag

SEQ ID NO: 24462 - RNA, 19 nt, Artificial Sequence
  Description of Artificial Sequence: Synthetic oligonucleotide
  Sense strand starting at position 2549 of SEQ ID NO: 272
ggcuauaugguauagugua

SEQ ID NO: 24463 - RNA, 19 nt, Artificial Sequence
  Description of Artificial Sequence: Synthetic oligonucleotide
  Antisense strand to SEQ ID NO: 24462
uacacuauaccauauagcc

SEQ ID NO: 24464 - RNA, 19 nt, Artificial Sequence
  Description of Artificial Sequence: Synthetic oligonucleotide
  Sense strand starting at position 2702 of SEQ ID NO: 272
cagucuguuguugauggaa

SEQ ID NO: 24465 - RNA, 19 nt, Artificial Sequence
  Description of Artificial Sequence: Synthetic oligonucleotide
  Antisense strand to SEQ ID NO: 24464
uuccaucaacaacagacug

SEQ ID NO: 24466 - RNA, 19 nt, Artificial Sequence
  Description of Artificial Sequence: Synthetic oligonucleotide
  Sense strand starting at position 2705 of SEQ ID NO: 272
ucuguuguugauggaaaca

SEQ ID NO: 24467 - RNA, 19 nt, Artificial Sequence
  Description of Artificial Sequence: Synthetic oligonucleotide
  Antisense strand to SEQ ID NO: 24466
uguuuccaucaacaacaga

SEQ ID NO: 24468 - RNA, 19 nt, Artificial Sequence
  Description of Artificial Sequence: Synthetic oligonucleotide
  Sense strand starting at position 2710 of SEQ ID NO: 272
uguugauggaaacauuguu

SEQ ID NO: 24469 - RNA, 19 nt, Artificial Sequence
  Description of Artificial Sequence: Synthetic oligonucleotide
  Antisense strand to SEQ ID NO: 24468
aacaauguuuccaucaaca

SEQ ID NO: 24470 - RNA, 19 nt, Artificial Sequence
  Description of Artificial Sequence: Synthetic oligonucleotide
  Sense strand starting at position 2908 of SEQ ID NO: 272
gcuggcauuacagaugcaa

SEQ ID NO: 24471 - RNA, 19 nt, Artificial Sequence
  Description of Artificial Sequence: Synthetic oligonucleotide
  Antisense strand to SEQ ID NO: 24470
uugcaucuguaaugccagc

SEQ ID NO: 24472 - RNA, 19 nt, Artificial Sequence
  Description of Artificial Sequence: Synthetic oligonucleotide
  Sense strand starting at position 2910 of SEQ ID NO: 272
uggcauuacagaugcaagu

SEQ ID NO: 24473 - RNA, 19 nt, Artificial Sequence
  Description of Artificial Sequence: Synthetic oligonucleotide
  Antisense strand to SEQ ID NO: 24472
acuugcaucuguaaugcca

SEQ ID NO: 24474 - RNA, 19 nt, Artificial Sequence
  Description of Artificial Sequence: Synthetic oligonucleotide
  Sense strand starting at position 2959 of SEQ ID NO: 272
guuaguucuccuuuaucgu

SEQ ID NO: 24475 - RNA, 19 nt, Artificial Sequence
  Description of Artificial Sequence: Synthetic oligonucleotide
  Antisense strand to SEQ ID NO: 24474
acgauaaaggagaacuaac

SEQ ID NO: 24476 - RNA, 19 nt, Artificial Sequence
  Description of Artificial Sequence: Synthetic oligonucleotide
  Sense strand starting at position 2981 of SEQ ID NO: 272
uacguauaaccugagauac

SEQ ID NO: 24477 - RNA, 19 nt, Artificial Sequence
  Description of Artificial Sequence: Synthetic oligonucleotide
  Antisense strand to SEQ ID NO: 24476
guaucucagguuauacgua

SEQ ID NO: 24478 - RNA, 19 nt, Artificial Sequence
  Description of Artificial Sequence: Synthetic oligonucleotide
  Sense strand starting at position 2992 of SEQ ID NO: 272
ugagauacacaguguugaa

SEQ ID NO: 24479 - RNA, 19 nt, Artificial Sequence
  Description of Artificial Sequence: Synthetic oligonucleotide
  Antisense strand to SEQ ID NO: 24478
uucaacacuguguaucuca

SEQ ID NO: 24480 - RNA, 19 nt, Artificial Sequence
  Description of Artificial Sequence: Synthetic oligonucleotide
  Sense strand starting at position 3011 of SEQ ID NO: 272
guuaaaucuguacacauac

SEQ ID NO: 24481 - RNA, 19 nt, Artificial Sequence
  Description of Artificial Sequence: Synthetic oligonucleotide
  Antisense strand to SEQ ID NO: 24480
guauguguacagauuuaac

SEQ ID NO: 24482 - RNA, 19 nt, Artificial Sequence
  Description of Artificial Sequence: Synthetic oligonucleotide
  Sense strand starting at position 3041 of SEQ ID NO: 272
cuagaaugcuuuccugaaa

SEQ ID NO: 24483 - RNA, 19 nt, Artificial Sequence
  Description of Artificial Sequence: Synthetic oligonucleotide
  Antisense strand to SEQ ID NO: 24482
uuucaggaaagcauucuag

SEQ ID NO: 24484 - RNA, 19 nt, Artificial Sequence
  Description of Artificial Sequence: Synthetic oligonucleotide
  Sense strand starting at position 3044 of SEQ ID NO: 272
gaaugcuuuccugaaagua

SEQ ID NO: 24485 - RNA, 19 nt, Artificial Sequence
  Description of Artificial Sequence: Synthetic oligonucleotide
  Antisense strand to SEQ ID NO: 24484
uacuuucaggaaagcauuc

SEQ ID NO: 24486 - RNA, 19 nt, Artificial Sequence
  Description of Artificial Sequence: Synthetic oligonucleotide
  Sense strand starting at position 3072 of SEQ ID NO: 272
ggucaaaggguauguaugu

SEQ ID NO: 24487 - RNA, 19 nt, Artificial Sequence
  Description of Artificial Sequence: Synthetic oligonucleotide
  Antisense strand to SEQ ID NO: 24486
acauacauacccuuugacc

SEQ ID NO: 24488 - RNA, 19 nt, Artificial Sequence
  Description of Artificial Sequence: Synthetic oligonucleotide
  Sense strand starting at position 3243 of SEQ ID NO: 272
gcuguuucuucuguauuua

SEQ ID NO: 24489 - RNA, 19 nt, Artificial Sequence
  Description of Artificial Sequence: Synthetic oligonucleotide
  Antisense strand to SEQ ID NO: 24488
uaaauacagaagaaacagc

SEQ ID NO: 24490 - RNA, 19 nt, Artificial Sequence
  Description of Artificial Sequence: Synthetic oligonucleotide
  Sense strand starting at position 3675 of SEQ ID NO: 272
ggccaacauuauguauuau

SEQ ID NO: 24491 - RNA, 19 nt, Artificial Sequence
  Description of Artificial Sequence: Synthetic oligonucleotide
  Antisense strand to SEQ ID NO: 24490
auaauacauaauguuggcc

SEQ ID NO: 24492 - RNA, 19 nt, Artificial Sequence
  Description of Artificial Sequence: Synthetic oligonucleotide
  Sense strand starting at position 3834 of SEQ ID NO: 273
uuggaaaguuuacacauuu

SEQ ID NO: 24493 - RNA, 19 nt, Artificial Sequence
  Description of Artificial Sequence: Synthetic oligonucleotide
  Antisense strand to SEQ ID NO: 24492
aaauguguaaacuuuccaa

SEQ ID NO: 24494 - RNA, 19 nt, Artificial Sequence
  Description of Artificial Sequence: Synthetic oligonucleotide
  Sense strand starting at position 3787 of SEQ ID NO: 273
uuacauguuccugauacua

SEQ ID NO: 24495 - RNA, 19 nt, Artificial Sequence
  Description of Artificial Sequence: Synthetic oligonucleotide
  Antisense strand to SEQ ID NO: 24494
uaguaucaggaacauguaa

SEQ ID NO: 24496 - RNA, 19 nt, Artificial Sequence
  Description of Artificial Sequence: Synthetic oligonucleotide
  Sense strand starting at position 3724 of SEQ ID NO: 273
cccagagcugaguauagua

SEQ ID NO: 24497 - RNA, 19 nt, Artificial Sequence
  Description of Artificial Sequence: Synthetic oligonucleotide
  Antisense strand to SEQ ID NO: 24496
uacuauacucagcucuggg

SEQ ID NO: 24498 - RNA, 19 nt, Artificial Sequence
  Description of Artificial Sequence: Synthetic oligonucleotide
  Sense strand starting at position 3721 of SEQ ID NO: 273
gaucccagagcugaguaua

SEQ ID NO: 24499 - RNA, 19 nt, Artificial Sequence
  Description of Artificial Sequence: Synthetic oligonucleotide
  Antisense strand to SEQ ID NO: 24498
uauacucagcucugggauc

SEQ ID NO: 24500 - RNA, 19 nt, Artificial Sequence
  Description of Artificial Sequence: Synthetic oligonucleotide
  Sense strand starting at position 3711 of SEQ ID NO: 273
uuaguucucugaucccaga

SEQ ID NO: 24501 - RNA, 19 nt, Artificial Sequence
  Description of Artificial Sequence: Synthetic oligonucleotide
  Antisense strand to SEQ ID NO: 24500
ucugggaucagagaacuaa

SEQ ID NO: 24502 - RNA, 19 nt, Artificial Sequence
  Description of Artificial Sequence: Synthetic oligonucleotide
  Sense strand starting at position 3633 of SEQ ID NO: 273
ugcuaaguugacuggaaau

SEQ ID NO: 24503 - RNA, 19 nt, Artificial Sequence
  Description of Artificial Sequence: Synthetic oligonucleotide
  Antisense strand to SEQ ID NO: 24502
auuuccagucaacuuagca

SEQ ID NO: 24504 - RNA, 19 nt, Artificial Sequence
  Description of Artificial Sequence: Synthetic oligonucleotide
  Sense strand starting at position 3632 of SEQ ID NO: 273
uugcuaaguugacuggaaa

SEQ ID NO: 24505 - RNA, 19 nt, Artificial Sequence
  Description of Artificial Sequence: Synthetic oligonucleotide
  Antisense strand to SEQ ID NO: 24504
uuuccagucaacuuagcaa

SEQ ID NO: 24506 - RNA, 19 nt, Artificial Sequence
  Description of Artificial Sequence: Synthetic oligonucleotide
  Sense strand starting at position 3574 of SEQ ID NO: 273
caaacuucccguuaaugug

SEQ ID NO: 24507 - RNA, 19 nt, Artificial Sequence
  Description of Artificial Sequence: Synthetic oligonucleotide
  Antisense strand to SEQ ID NO: 24506
cacauuaacgggaaguuug

SEQ ID NO: 24508 - RNA, 19 nt, Artificial Sequence
  Description of Artificial Sequence: Synthetic oligonucleotide
  Sense strand starting at position 3509 of SEQ ID NO: 273
acaauaauggcuugaacau

SEQ ID NO: 24509 - RNA, 19 nt, Artificial Sequence
  Description of Artificial Sequence: Synthetic oligonucleotide
  Antisense strand to SEQ ID NO: 24508
auguucaagccauuauugu

SEQ ID NO: 24510 - RNA, 19 nt, Artificial Sequence
  Description of Artificial Sequence: Synthetic oligonucleotide
  Sense strand starting at position 3507 of SEQ ID NO: 273
ugacaauaauggcuugaac

SEQ ID NO: 24511 - RNA, 19 nt, Artificial Sequence
  Description of Artificial Sequence: Synthetic oligonucleotide
  Antisense strand to SEQ ID NO: 24510
guucaagccauuauuguca

SEQ ID NO: 24512 - RNA, 19 nt, Artificial Sequence
  Description of Artificial Sequence: Synthetic oligonucleotide
  Sense strand starting at position 3482 of SEQ ID NO: 273
guaggccuuuaaguaagaa

SEQ ID NO: 24513 - RNA, 19 nt, Artificial Sequence
  Description of Artificial Sequence: Synthetic oligonucleotide
  Antisense strand to SEQ ID NO: 24512
uucuuacuuaaaggccuac

SEQ ID NO: 24514 - RNA, 19 nt, Artificial Sequence
  Description of Artificial Sequence: Synthetic oligonucleotide
  Sense strand starting at position 3479 of SEQ ID NO: 273
aaaguaggccuuuaaguaa

SEQ ID NO: 24515 - RNA, 19 nt, Artificial Sequence
  Description of Artificial Sequence: Synthetic oligonucleotide
  Antisense strand to SEQ ID NO: 24514
uuacuuaaaggccuacuuu

SEQ ID NO: 24516 - RNA, 19 nt, Artificial Sequence
  Description of Artificial Sequence: Synthetic oligonucleotide
  Sense strand starting at position 3432 of SEQ ID NO: 273
aaaguuggaguuugauaga

SEQ ID NO: 24517 - RNA, 19 nt, Artificial Sequence
  Description of Artificial Sequence: Synthetic oligonucleotide
  Antisense strand to SEQ ID NO: 24516
ucuaucaaacuccaacuuu

SEQ ID NO: 24518 - RNA, 19 nt, Artificial Sequence
  Description of Artificial Sequence: Synthetic oligonucleotide
  Sense strand starting at position 3389 of SEQ ID NO: 273
gaaugugcaguacauaaau

SEQ ID NO: 24519 - RNA, 19 nt, Artificial Sequence
  Description of Artificial Sequence: Synthetic oligonucleotide
  Antisense strand to SEQ ID NO: 24518
auuuauguacugcacauuc

SEQ ID NO: 24520 - RNA, 19 nt, Artificial Sequence
  Description of Artificial Sequence: Synthetic oligonucleotide
  Sense strand starting at position 3387 of SEQ ID NO: 273
gugaaugugcaguacauaa

SEQ ID NO: 24521 - RNA, 19 nt, Artificial Sequence
  Description of Artificial Sequence: Synthetic oligonucleotide
  Antisense strand to SEQ ID NO: 24520
uuauguacugcacauucac

SEQ ID NO: 24522 - RNA, 19 nt, Artificial Sequence
  Description of Artificial Sequence: Synthetic oligonucleotide
  Sense strand starting at position 3351 of SEQ ID NO: 273
aaugaauauuaggugcaua

SEQ ID NO: 24523 - RNA, 19 nt, Artificial Sequence
  Description of Artificial Sequence: Synthetic oligonucleotide
  Antisense strand to SEQ ID NO: 24522
uaugcaccuaauauucauu

SEQ ID NO: 24524 - RNA, 19 nt, Artificial Sequence
  Description of Artificial Sequence: Synthetic oligonucleotide
  Sense strand starting at position 3332 of SEQ ID NO: 273
cgaaucagauguuuacaaa

SEQ ID NO: 24525 - RNA, 19 nt, Artificial Sequence
  Description of Artificial Sequence: Synthetic oligonucleotide
  Antisense strand to SEQ ID NO: 24524
uuuguaaacaucugauucg

SEQ ID NO: 24526 - RNA, 19 nt, Artificial Sequence
  Description of Artificial Sequence: Synthetic oligonucleotide
  Sense strand starting at position 3189 of SEQ ID NO: 273
ccuagaguaccuuauaugu

SEQ ID NO: 24527 - RNA, 19 nt, Artificial Sequence
  Description of Artificial Sequence: Synthetic oligonucleotide
  Antisense strand to SEQ ID NO: 24526
acauauaagguacucuagg

SEQ ID NO: 24528 - RNA, 19 nt, Artificial Sequence
  Description of Artificial Sequence: Synthetic oligonucleotide
  Sense strand starting at position 3179 of SEQ ID NO: 273
ucucucuaagccuagagua

SEQ ID NO: 24529 - RNA, 19 nt, Artificial Sequence
  Description of Artificial Sequence: Synthetic oligonucleotide
  Antisense strand to SEQ ID NO: 24528
uacucuaggcuuagagaga

SEQ ID NO: 24530 - RNA, 19 nt, Artificial Sequence
  Description of Artificial Sequence: Synthetic oligonucleotide
  Sense strand starting at position 3028 of SEQ ID NO: 273
cuccuuacaguuugauaag

SEQ ID NO: 24531 - RNA, 19 nt, Artificial Sequence
  Description of Artificial Sequence: Synthetic oligonucleotide
  Antisense strand to SEQ ID NO: 24530
cuuaucaaacuguaaggag

SEQ ID NO: 24532 - RNA, 19 nt, Artificial Sequence
  Description of Artificial Sequence: Synthetic oligonucleotide
  Sense strand starting at position 2823 of SEQ ID NO: 273
ucagcaauccgagaucgau

SEQ ID NO: 24533 - RNA, 19 nt, Artificial Sequence
  Description of Artificial Sequence: Synthetic oligonucleotide
  Antisense strand to SEQ ID NO: 24532
aucgaucucggauugcuga

SEQ ID NO: 24534 - RNA, 19 nt, Artificial Sequence
  Description of Artificial Sequence: Synthetic oligonucleotide
  Sense strand starting at position 1765 of SEQ ID NO: 273
cuacacuuaggcugacuua

SEQ ID NO: 24535 - RNA, 19 nt, Artificial Sequence
  Description of Artificial Sequence: Synthetic oligonucleotide
  Antisense strand to SEQ ID NO: 24534
uaagucagccuaaguguag

SEQ ID NO: 24536 - RNA, 19 nt, Artificial Sequence
  Description of Artificial Sequence: Synthetic oligonucleotide
  Sense strand starting at position 1681 of SEQ ID NO: 273
agugacuguccauaugguu

SEQ ID NO: 24537 - RNA, 19 nt, Artificial Sequence
  Description of Artificial Sequence: Synthetic oligonucleotide
  Antisense strand to SEQ ID NO: 24536
aaccauauggacagucacu

SEQ ID NO: 24538 - RNA, 19 nt, Artificial Sequence
  Description of Artificial Sequence: Synthetic oligonucleotide
  Sense strand starting at position 1632 of SEQ ID NO: 273
uuagguacgccguuucaca

SEQ ID NO: 24539 - RNA, 19 nt, Artificial Sequence
  Description of Artificial Sequence: Synthetic oligonucleotide
  Antisense strand to SEQ ID NO: 24538
ugugaaacggcguaccuaa

SEQ ID NO: 24540 - RNA, 19 nt, Artificial Sequence
  Description of Artificial Sequence: Synthetic oligonucleotide
  Sense strand starting at position 1578 of SEQ ID NO: 273
uaaauucccggguacugaa

SEQ ID NO: 24541 - RNA, 19 nt, Artificial Sequence
  Description of Artificial Sequence: Synthetic oligonucleotide
  Antisense strand to SEQ ID NO: 24540
uucaguacccgggaauuua

SEQ ID NO: 24542 - RNA, 19 nt, Artificial Sequence
  Description of Artificial Sequence: Synthetic oligonucleotide
  Sense strand starting at position 1560 of SEQ ID NO: 273
agaauuaacccggguccuu

SEQ ID NO: 24543 - RNA, 19 nt, Artificial Sequence
  Description of Artificial Sequence: Synthetic oligonucleotide
  Antisense strand to SEQ ID NO: 24542
aaggacccggguuaauucu

SEQ ID NO: 24544 - RNA, 19 nt, Artificial Sequence
  Description of Artificial Sequence: Synthetic oligonucleotide
  Sense strand starting at position 1401 of SEQ ID NO: 273
ucuguuacuguagaaauua

SEQ ID NO: 24545 - RNA, 19 nt, Artificial Sequence
  Description of Artificial Sequence: Synthetic oligonucleotide
  Antisense strand to SEQ ID NO: 24544
uaauuucuacaguaacaga

SEQ ID NO: 24546 - RNA, 19 nt, Artificial Sequence
  Description of Artificial Sequence: Synthetic oligonucleotide
  Sense strand starting at position 1092 of SEQ ID NO: 273
uuaagcuccgcuguugauu

SEQ ID NO: 24547 - RNA, 19 nt, Artificial Sequence
  Description of Artificial Sequence: Synthetic oligonucleotide
  Antisense strand to SEQ ID NO: 24546
aaucaacagcggagcuuaa

SEQ ID NO: 24548 - RNA, 19 nt, Artificial Sequence
  Description of Artificial Sequence: Synthetic oligonucleotide
  Sense strand starting at position 1005 of SEQ ID NO: 273
gggcuuaggacauagcaua

SEQ ID NO: 24549 - RNA, 19 nt, Artificial Sequence
  Description of Artificial Sequence: Synthetic oligonucleotide
  Antisense strand to SEQ ID NO: 24548
uaugcuauguccuaagccc

SEQ ID NO: 24550 - RNA, 19 nt, Artificial Sequence
  Description of Artificial Sequence: Synthetic oligonucleotide
  Sense strand starting at position 939 of SEQ ID NO: 273
cugugaaucuaaguacaga

SEQ ID NO: 24551 - RNA, 19 nt, Artificial Sequence
  Description of Artificial Sequence: Synthetic oligonucleotide
  Antisense strand to SEQ ID NO: 24550
ucuguacuuagauucacag

SEQ ID NO: 24552 - RNA, 19 nt, Artificial Sequence
  Description of Artificial Sequence: Synthetic oligonucleotide
  Sense strand starting at position 772 of SEQ ID NO: 273
gccuuauagggucauaauu

SEQ ID NO: 24553 - RNA, 19 nt, Artificial Sequence
  Description of Artificial Sequence: Synthetic oligonucleotide
  Antisense strand to SEQ ID NO: 24552
aauuaugacccuauaaggc

SEQ ID NO: 24554 - RNA, 19 nt, Artificial Sequence
  Description of Artificial Sequence: Synthetic oligonucleotide
  Sense strand starting at position 526 of SEQ ID NO: 273
ugauuacaucuguaucauu

SEQ ID NO: 24555 - RNA, 19 nt, Artificial Sequence
  Description of Artificial Sequence: Synthetic oligonucleotide
  Antisense strand to SEQ ID NO: 24554
aaugauacagauguaauca

SEQ ID NO: 24556 - RNA, 19 nt, Artificial Sequence
  Description of Artificial Sequence: Synthetic oligonucleotide
  Sense strand starting at position 525 of SEQ ID NO: 273
augauuacaucuguaucau

SEQ ID NO: 24557 - RNA, 19 nt, Artificial Sequence
  Description of Artificial Sequence: Synthetic oligonucleotide
  Antisense strand to SEQ ID NO: 24556
augauacagauguaaucau

SEQ ID NO: 24558 - RNA, 19 nt, Artificial Sequence
  Description of Artificial Sequence: Synthetic oligonucleotide
  Sense strand starting at position 403 of SEQ ID NO: 273
uguagucaaccauacuuua

SEQ ID NO: 24559 - RNA, 19 nt, Artificial Sequence
  Description of Artificial Sequence: Synthetic oligonucleotide
  Antisense strand to SEQ ID NO: 24558
uaaaguaugguugacuaca

SEQ ID NO: 24560 - RNA, 19 nt, Artificial Sequence
  Description of Artificial Sequence: Synthetic oligonucleotide
  Sense strand starting at position 344 of SEQ ID NO: 273
augaaaucugauugaaugu

SEQ ID NO: 24561 - RNA, 19 nt, Artificial Sequence
  Description of Artificial Sequence: Synthetic oligonucleotide
  Antisense strand to SEQ ID NO: 24560
acauucaaucagauuucau

SEQ ID NO: 24562 - RNA, 19 nt, Artificial Sequence
  Description of Artificial Sequence: Synthetic oligonucleotide
  Sense strand starting at position 298 of SEQ ID NO: 273
uguguaagaaacugaaugu

SEQ ID NO: 24563 - RNA, 19 nt, Artificial Sequence
  Description of Artificial Sequence: Synthetic oligonucleotide
  Antisense strand to SEQ ID NO: 24562
acauucaguuucuuacaca

SEQ ID NO: 24564 - RNA, 19 nt, Artificial Sequence
  Description of Artificial Sequence: Synthetic oligonucleotide
  Sense strand starting at position 289 of SEQ ID NO: 273
ccauauuaauguguaagaa

SEQ ID NO: 24565 - RNA, 19 nt, Artificial Sequence
  Description of Artificial Sequence: Synthetic oligonucleotide
  Antisense strand to SEQ ID NO: 24564
uucuuacacauuaauaugg

SEQ ID NO: 24566 - RNA, 19 nt, Artificial Sequence
  Description of Artificial Sequence: Synthetic oligonucleotide
  Sense strand starting at position 121 of SEQ ID NO: 273
uuaguaaugccuuaaggua

SEQ ID NO: 24567 - RNA, 19 nt, Artificial Sequence
  Description of Artificial Sequence: Synthetic oligonucleotide
  Antisense strand to SEQ ID NO: 24566
uaccuuaaggcauuacuaa

SEQ ID NO: 24568 - RNA, 19 nt, Artificial Sequence
  Description of Artificial Sequence: Synthetic oligonucleotide
  Sense strand starting at position 65 of SEQ ID NO: 273
aggaaugcuugucuaaaua

SEQ ID NO: 24569 - RNA, 19 nt, Artificial Sequence
  Description of Artificial Sequence: Synthetic oligonucleotide
  Antisense strand to SEQ ID NO: 24568
uauuuagacaagcauuccu

SEQ ID NO: 24570 - RNA, 19 nt, Artificial Sequence
  Description of Artificial Sequence: Synthetic oligonucleotide
  Sense strand starting at position 64 of SEQ ID NO: 273
uaggaaugcuugucuaaau

SEQ ID NO: 24571 - RNA, 19 nt, Artificial Sequence
  Description of Artificial Sequence: Synthetic oligonucleotide
  Antisense strand to SEQ ID NO: 24570
auuuagacaagcauuccua

SEQ ID NO: 24572 - RNA, 19 nt, Artificial Sequence
  Description of Artificial Sequence: Synthetic oligonucleotide
  Sense strand starting at position 10 of SEQ ID NO: 274
gggcauaccucucaggaga

SEQ ID NO: 24573 - RNA, 19 nt, Artificial Sequence
  Description of Artificial Sequence: Synthetic oligonucleotide
  Antisense strand to SEQ ID NO: 24572
ucuccugagagguaugccc

SEQ ID NO: 24574 - RNA, 19 nt, Artificial Sequence
  Description of Artificial Sequence: Synthetic oligonucleotide
  Sense strand starting at position 12 of SEQ ID NO: 274
gcauaccucucaggagaug

SEQ ID NO: 24575 - RNA, 19 nt, Artificial Sequence
  Description of Artificial Sequence: Synthetic oligonucleotide
  Antisense strand to SEQ ID NO: 24574
caucuccugagagguaugc

SEQ ID NO: 24576 - RNA, 19 nt, Artificial Sequence
  Description of Artificial Sequence: Synthetic oligonucleotide
  Sense strand starting at position 246 of SEQ ID NO: 274
acaagugcgucuuuaaauc

SEQ ID NO: 24577 - RNA, 19 nt, Artificial Sequence
  Description of Artificial Sequence: Synthetic oligonucleotide
  Antisense strand to SEQ ID NO: 24576
gauuuaaagacgcacuugu

SEQ ID NO: 24578 - RNA, 19 nt, Artificial Sequence
  Description of Artificial Sequence: Synthetic oligonucleotide
  Sense strand starting at position 316 of SEQ ID NO: 274
guggcuacguggguuagaa

SEQ ID NO: 24579 - RNA, 19 nt, Artificial Sequence
  Description of Artificial Sequence: Synthetic oligonucleotide
  Antisense strand to SEQ ID NO: 24578
uucuaacccacguagccac

SEQ ID NO: 24580 - RNA, 19 nt, Artificial Sequence
  Description of Artificial Sequence: Synthetic oligonucleotide
  Sense strand starting at position 856 of SEQ ID NO: 274
gcgagcucugcggaggagu

SEQ ID NO: 24581 - RNA, 19 nt, Artificial Sequence
  Description of Artificial Sequence: Synthetic oligonucleotide
  Antisense strand to SEQ ID NO: 24580
acuccuccgcagagcucgc

SEQ ID NO: 24582 - RNA, 19 nt, Artificial Sequence
  Description of Artificial Sequence: Synthetic oligonucleotide
  Sense strand starting at position 1021 of SEQ ID NO: 274
ccuuguccucucgggacau

SEQ ID NO: 24583 - RNA, 19 nt, Artificial Sequence
  Description of Artificial Sequence: Synthetic oligonucleotide
  Antisense strand to SEQ ID NO: 24582
augucccgagaggacaagg

SEQ ID NO: 24584 - RNA, 19 nt, Artificial Sequence
  Description of Artificial Sequence: Synthetic oligonucleotide
  Sense strand starting at position 1314 of SEQ ID NO: 274
ggaguuaccuccuugcuca

SEQ ID NO: 24585 - RNA, 19 nt, Artificial Sequence
  Description of Artificial Sequence: Synthetic oligonucleotide
  Antisense strand to SEQ ID NO: 24584
ugagcaaggagguaacucc

SEQ ID NO: 24586 - RNA, 19 nt, Artificial Sequence
  Description of Artificial Sequence: Synthetic oligonucleotide
  Sense strand starting at position 1357 of SEQ ID NO: 274
ucuuguagccacugcgaga

SEQ ID NO: 24587 - RNA, 19 nt, Artificial Sequence
  Description of Artificial Sequence: Synthetic oligonucleotide
  Antisense strand to SEQ ID NO: 24586
ucucgcaguggcuacaaga

SEQ ID NO: 24588 - RNA, 19 nt, Artificial Sequence
  Description of Artificial Sequence: Synthetic oligonucleotide
  Sense strand starting at position 1816 of SEQ ID NO: 274
gguaguucucccgcugcuu

SEQ ID NO: 24589 - RNA, 19 nt, Artificial Sequence
  Description of Artificial Sequence: Synthetic oligonucleotide
  Antisense strand to SEQ ID NO: 24588
aagcagcgggagaacuacc

SEQ ID NO: 24590 - RNA, 19 nt, Artificial Sequence
  Description of Artificial Sequence: Synthetic oligonucleotide
  Sense strand starting at position 2162 of SEQ ID NO: 274
gccucugaacuggaaguuu

SEQ ID NO: 24591 - RNA, 19 nt, Artificial Sequence
  Description of Artificial Sequence: Synthetic oligonucleotide
  Antisense strand to SEQ ID NO: 24590
aaacuuccaguucagaggc

SEQ ID NO: 24592 - RNA, 19 nt, Artificial Sequence
  Description of Artificial Sequence: Synthetic oligonucleotide
  Sense strand starting at position 2305 of SEQ ID NO: 274
cccggucucuacucaaaua

SEQ ID NO: 24593 - RNA, 19 nt, Artificial Sequence
  Description of Artificial Sequence: Synthetic oligonucleotide
  Antisense strand to SEQ ID NO: 24592
uauuugaguagagaccggg

SEQ ID NO: 24594 - RNA, 19 nt, Artificial Sequence
  Description of Artificial Sequence: Synthetic oligonucleotide
  Sense strand starting at position 2638 of SEQ ID NO: 274
acaagaugcgccuaguuaa

SEQ ID NO: 24595 - RNA, 19 nt, Artificial Sequence
  Description of Artificial Sequence: Synthetic oligonucleotide
  Antisense strand to SEQ ID NO: 24594
uuaacuaggcgcaucuugu

SEQ ID NO: 24596 - RNA, 19 nt, Artificial Sequence
  Description of Artificial Sequence: Synthetic oligonucleotide
  Sense strand starting at position 2662 of SEQ ID NO: 274
ccaauuggucacugcuagu

SEQ ID NO: 24597 - RNA, 19 nt, Artificial Sequence
  Description of Artificial Sequence: Synthetic oligonucleotide
  Antisense strand to SEQ ID NO: 24596
acuagcagugaccaauugg

SEQ ID NO: 24598 - RNA, 19 nt, Artificial Sequence
  Description of Artificial Sequence: Synthetic oligonucleotide
  Sense strand starting at position 2675 of SEQ ID NO: 274
gcuagucgcgauuccauau

SEQ ID NO: 24599 - RNA, 19 nt, Artificial Sequence
  Description of Artificial Sequence: Synthetic oligonucleotide
  Antisense strand to SEQ ID NO: 24598
auauggaaucgcgacuagc

SEQ ID NO: 24600 - RNA, 19 nt, Artificial Sequence
  Description of Artificial Sequence: Synthetic oligonucleotide
  Sense strand starting at position 2685 of SEQ ID NO: 274
auuccauaucgggagcuua

SEQ ID NO: 24601 - RNA, 19 nt, Artificial Sequence
  Description of Artificial Sequence: Synthetic oligonucleotide
  Antisense strand to SEQ ID NO: 24600
uaagcucccgauauggaau

SEQ ID NO: 24602 - RNA, 19 nt, Artificial Sequence
  Description of Artificial Sequence: Synthetic oligonucleotide
  Sense strand starting at position 2727 of SEQ ID NO: 274
uguggaauuucugaguauu

SEQ ID NO: 24603 - RNA, 19 nt, Artificial Sequence
  Description of Artificial Sequence: Synthetic oligonucleotide
  Antisense strand to SEQ ID NO: 24602
aauacucagaaauuccaca

SEQ ID NO: 24604 - RNA, 19 nt, Artificial Sequence
  Description of Artificial Sequence: Synthetic oligonucleotide
  Sense strand starting at position 2735 of SEQ ID NO: 274
uucugaguauuacccagua

SEQ ID NO: 24605 - RNA, 19 nt, Artificial Sequence
  Description of Artificial Sequence: Synthetic oligonucleotide
  Antisense strand to SEQ ID NO: 24604
uacuggguaauacucagaa

SEQ ID NO: 24606 - RNA, 19 nt, Artificial Sequence
  Description of Artificial Sequence: Synthetic oligonucleotide
  Sense strand starting at position 2740 of SEQ ID NO: 274
aguauuacccaguaaacuu

SEQ ID NO: 24607 - RNA, 19 nt, Artificial Sequence
  Description of Artificial Sequence: Synthetic oligonucleotide
  Antisense strand to SEQ ID NO: 24606
aaguuuacuggguaauacu

SEQ ID NO: 24608 - RNA, 19 nt, Artificial Sequence
  Description of Artificial Sequence: Synthetic oligonucleotide
  Sense strand starting at position 2748 of SEQ ID NO: 274
ccaguaaacuucuggauga

SEQ ID NO: 24609 - RNA, 19 nt, Artificial Sequence
  Description of Artificial Sequence: Synthetic oligonucleotide
  Antisense strand to SEQ ID NO: 24608
ucauccagaaguuuacugg

SEQ ID NO: 24610 - RNA, 19 nt, Artificial Sequence
  Description of Artificial Sequence: Synthetic oligonucleotide
  Sense strand starting at position 2749 of SEQ ID NO: 274
caguaaacuucuggaugaa

SEQ ID NO: 24611 - RNA, 19 nt, Artificial Sequence
  Description of Artificial Sequence: Synthetic oligonucleotide
  Antisense strand to SEQ ID NO: 24610
uucauccagaaguuuacug

SEQ ID NO: 24612 - RNA, 19 nt, Artificial Sequence
  Description of Artificial Sequence: Synthetic oligonucleotide
  Sense strand starting at position 2803 of SEQ ID NO: 274
cuaucccugccguguuaaa

SEQ ID NO: 24613 - RNA, 19 nt, Artificial Sequence
  Description of Artificial Sequence: Synthetic oligonucleotide
  Antisense strand to SEQ ID NO: 24612
uuuaacacggcagggauag

SEQ ID NO: 24614 - RNA, 19 nt, Artificial Sequence
  Description of Artificial Sequence: Synthetic oligonucleotide
  Sense strand starting at position 2937 of SEQ ID NO: 274
agcuuucuacugugugaag

SEQ ID NO: 24615 - RNA, 19 nt, Artificial Sequence
  Description of Artificial Sequence: Synthetic oligonucleotide
  Antisense strand to SEQ ID NO: 24614
cuucacacaguagaaagcu

SEQ ID NO: 24616 - RNA, 19 nt, Artificial Sequence
  Description of Artificial Sequence: Synthetic oligonucleotide
  Sense strand starting at position 2968 of SEQ ID NO: 274
aagucugcagucuggaaga

SEQ ID NO: 24617 - RNA, 19 nt, Artificial Sequence
  Description of Artificial Sequence: Synthetic oligonucleotide
  Antisense strand to SEQ ID NO: 24616
ucuuccagacugcagacuu

SEQ ID NO: 24618 - RNA, 19 nt, Artificial Sequence
  Description of Artificial Sequence: Synthetic oligonucleotide
  Sense strand starting at position 2970 of SEQ ID NO: 274
gucugcagucuggaagaaa

SEQ ID NO: 24619 - RNA, 19 nt, Artificial Sequence
  Description of Artificial Sequence: Synthetic oligonucleotide
  Antisense strand to SEQ ID NO: 24618
uuucuuccagacugcagac

SEQ ID NO: 24620 - RNA, 19 nt, Artificial Sequence
  Description of Artificial Sequence: Synthetic oligonucleotide
  Sense strand starting at position 3071 of SEQ ID NO: 274
cccagugcugacugagaaa

SEQ ID NO: 24621 - RNA, 19 nt, Artificial Sequence
  Description of Artificial Sequence: Synthetic oligonucleotide
  Antisense strand to SEQ ID NO: 24620
uuucucagucagcacuggg

SEQ ID NO: 24622 - RNA, 19 nt, Artificial Sequence
  Description of Artificial Sequence: Synthetic oligonucleotide
  Sense strand starting at position 3108 of SEQ ID NO: 274
cugugacuucgccaacugu

SEQ ID NO: 24623 - RNA, 19 nt, Artificial Sequence
  Description of Artificial Sequence: Synthetic oligonucleotide
  Antisense strand to SEQ ID NO: 24622
acaguuggcgaagucacag

SEQ ID NO: 24624 - RNA, 19 nt, Artificial Sequence
  Description of Artificial Sequence: Synthetic oligonucleotide
  Sense strand starting at position 3114 of SEQ ID NO: 274
cuucgccaacuguauaauu

SEQ ID NO: 24625 - RNA, 19 nt, Artificial Sequence
  Description of Artificial Sequence: Synthetic oligonucleotide
  Antisense strand to SEQ ID NO: 24624
aauuauacaguuggcgaag

SEQ ID NO: 24626 - RNA, 19 nt, Artificial Sequence
  Description of Artificial Sequence: Synthetic oligonucleotide
  Sense strand starting at position 3124 of SEQ ID NO: 274
uguauaauuuccucugcag

SEQ ID NO: 24627 - RNA, 19 nt, Artificial Sequence
  Description of Artificial Sequence: Synthetic oligonucleotide
  Antisense strand to SEQ ID NO: 24626
cugcagaggaaauuauaca

SEQ ID NO: 24628 - RNA, 19 nt, Artificial Sequence
  Description of Artificial Sequence: Synthetic oligonucleotide
  Sense strand starting at position 3153 of SEQ ID NO: 274
gagccauagccaugaacgu

SEQ ID NO: 24629 - RNA, 19 nt, Artificial Sequence
  Description of Artificial Sequence: Synthetic oligonucleotide
  Antisense strand to SEQ ID NO: 24628
acguucauggcuauggcuc

SEQ ID NO: 24630 - RNA, 19 nt, Artificial Sequence
  Description of Artificial Sequence: Synthetic oligonucleotide
  Sense strand starting at position 3372 of SEQ ID NO: 274
gaauaaaugcucugggcga

SEQ ID NO: 24631 - RNA, 19 nt, Artificial Sequence
  Description of Artificial Sequence: Synthetic oligonucleotide
  Antisense strand to SEQ ID NO: 24630
ucgcccagagcauuuauuc

SEQ ID NO: 24632 - RNA, 19 nt, Artificial Sequence
  Description of Artificial Sequence: Synthetic oligonucleotide
  Sense strand starting at position 3374 of SEQ ID NO: 274
auaaaugcucugggcgaau

SEQ ID NO: 24633 - RNA, 19 nt, Artificial Sequence
  Description of Artificial Sequence: Synthetic oligonucleotide
  Antisense strand to SEQ ID NO: 24632
auucgcccagagcauuuau

SEQ ID NO: 24634 - RNA, 19 nt, Artificial Sequence
  Description of Artificial Sequence: Synthetic oligonucleotide
  Sense strand starting at position 3376 of SEQ ID NO: 274
aaaugcucugggcgaauca

SEQ ID NO: 24635 - RNA, 19 nt, Artificial Sequence
  Description of Artificial Sequence: Synthetic oligonucleotide
  Antisense strand to SEQ ID NO: 24634
ugauucgcccagagcauuu

SEQ ID NO: 24636 - RNA, 19 nt, Artificial Sequence
  Description of Artificial Sequence: Synthetic oligonucleotide
  Sense strand starting at position 3402 of SEQ ID NO: 274
augcucaaucuguagaauc

SEQ ID NO: 24637 - RNA, 19 nt, Artificial Sequence
  Description of Artificial Sequence: Synthetic oligonucleotide
  Antisense strand to SEQ ID NO: 24636
gauucuacagauugagcau

SEQ ID NO: 24638 - RNA, 19 nt, Artificial Sequence
  Description of Artificial Sequence: Synthetic oligonucleotide
  Sense strand starting at position 3404 of SEQ ID NO: 274
gcucaaucuguagaauccu

SEQ ID NO: 24639 - RNA, 19 nt, Artificial Sequence
  Description of Artificial Sequence: Synthetic oligonucleotide
  Antisense strand to SEQ ID NO: 24638
aggauucuacagauugagc

SEQ ID NO: 24640 - RNA, 19 nt, Artificial Sequence
  Description of Artificial Sequence: Synthetic oligonucleotide
  Sense strand starting at position 3528 of SEQ ID NO: 274
ucuacuguccugugggaaa

SEQ ID NO: 24641 - RNA, 19 nt, Artificial Sequence
  Description of Artificial Sequence: Synthetic oligonucleotide
  Antisense strand to SEQ ID NO: 24640
uuucccacaggacaguaga

SEQ ID NO: 24642 - RNA, 19 nt, Artificial Sequence
  Description of Artificial Sequence: Synthetic oligonucleotide
  Sense strand starting at position 3530 of SEQ ID NO: 274
uacuguccugugggaaauu

SEQ ID NO: 24643 - RNA, 19 nt, Artificial Sequence
  Description of Artificial Sequence: Synthetic oligonucleotide
  Antisense strand to SEQ ID NO: 24642
aauuucccacaggacagua

SEQ ID NO: 24644 - RNA, 19 nt, Artificial Sequence
  Description of Artificial Sequence: Synthetic oligonucleotide
  Sense strand starting at position 3531 of SEQ ID NO: 274
acuguccugugggaaauuu

SEQ ID NO: 24645 - RNA, 19 nt, Artificial Sequence
  Description of Artificial Sequence: Synthetic oligonucleotide
  Antisense strand to SEQ ID NO: 24644
aaauuucccacaggacagu

SEQ ID NO: 24646 - RNA, 19 nt, Artificial Sequence
  Description of Artificial Sequence: Synthetic oligonucleotide
  Sense strand starting at position 3539 of SEQ ID NO: 274
gugggaaauuucuguuucu

SEQ ID NO: 24647 - RNA, 19 nt, Artificial Sequence
  Description of Artificial Sequence: Synthetic oligonucleotide
  Antisense strand to SEQ ID NO: 24646
agaaacagaaauuucccac

SEQ ID NO: 24648 - RNA, 19 nt, Artificial Sequence
  Description of Artificial Sequence: Synthetic oligonucleotide
  Sense strand starting at position 3608 of SEQ ID NO: 274
acacgucuggcucaucuau

SEQ ID NO: 24649 - RNA, 19 nt, Artificial Sequence
  Description of Artificial Sequence: Synthetic oligonucleotide
  Antisense strand to SEQ ID NO: 24648
auagaugagccagacgugu

SEQ ID NO: 24650 - RNA, 19 nt, Artificial Sequence
  Description of Artificial Sequence: Synthetic oligonucleotide
  Sense strand starting at position 3955 of SEQ ID NO: 274
gggcaacugugaggaugaa

SEQ ID NO: 24651 - RNA, 19 nt, Artificial Sequence
  Description of Artificial Sequence: Synthetic oligonucleotide
  Antisense strand to SEQ ID NO: 24650
uucauccucacaguugccc

SEQ ID NO: 24652 - RNA, 19 nt, Artificial Sequence
  Description of Artificial Sequence: Synthetic oligonucleotide
  Sense strand starting at position 280 of SEQ ID NO: 275
aagggaagcaggugucuuu

SEQ ID NO: 24653 - RNA, 19 nt, Artificial Sequence
  Description of Artificial Sequence: Synthetic oligonucleotide
  Antisense strand to SEQ ID NO: 24652
aaagacaccugcuucccuu

SEQ ID NO: 24654 - RNA, 19 nt, Artificial Sequence
  Description of Artificial Sequence: Synthetic oligonucleotide
  Sense strand starting at position 330 of SEQ ID NO: 275
ugagaguggcagugggaua

SEQ ID NO: 24655 - RNA, 19 nt, Artificial Sequence
  Description of Artificial Sequence: Synthetic oligonucleotide
  Antisense strand to SEQ ID NO: 24654
uaucccacugccacucuca

SEQ ID NO: 24656 - RNA, 19 nt, Artificial Sequence
  Description of Artificial Sequence: Synthetic oligonucleotide
  Sense strand starting at position 335 of SEQ ID NO: 275
guggcagugggauagcaau

SEQ ID NO: 24657 - RNA, 19 nt, Artificial Sequence
  Description of Artificial Sequence: Synthetic oligonucleotide
  Antisense strand to SEQ ID NO: 24656
auugcuaucccacugccac

SEQ ID NO: 24658 - RNA, 19 nt, Artificial Sequence
  Description of Artificial Sequence: Synthetic oligonucleotide
  Sense strand starting at position 341 of SEQ ID NO: 275
gugggauagcaauaauucu

SEQ ID NO: 24659 - RNA, 19 nt, Artificial Sequence
  Description of Artificial Sequence: Synthetic oligonucleotide
  Antisense strand to SEQ ID NO: 24658
agaauuauugcuaucccac

SEQ ID NO: 24660 - RNA, 19 nt, Artificial Sequence
  Description of Artificial Sequence: Synthetic oligonucleotide
  Sense strand starting at position 367 of SEQ ID NO: 275
aaauguuggguuugagaug

SEQ ID NO: 24661 - RNA, 19 nt, Artificial Sequence
  Description of Artificial Sequence: Synthetic oligonucleotide
  Antisense strand to SEQ ID NO: 24660
caucucaaacccaacauuu

SEQ ID NO: 24662 - RNA, 19 nt, Artificial Sequence
  Description of Artificial Sequence: Synthetic oligonucleotide
  Sense strand starting at position 372 of SEQ ID NO: 275
uuggguuugagaugucuac

SEQ ID NO: 24663 - RNA, 19 nt, Artificial Sequence
  Description of Artificial Sequence: Synthetic oligonucleotide
  Antisense strand to SEQ ID NO: 24662
guagacaucucaaacccaa

SEQ ID NO: 24664 - RNA, 19 nt, Artificial Sequence
  Description of Artificial Sequence: Synthetic oligonucleotide
  Sense strand starting at position 376 of SEQ ID NO: 275
guuugagaugucuacuaca

SEQ ID NO: 24665 - RNA, 19 nt, Artificial Sequence
  Description of Artificial Sequence: Synthetic oligonucleotide
  Antisense strand to SEQ ID NO: 24664
uguaguagacaucucaaac

SEQ ID NO: 24666 - RNA, 19 nt, Artificial Sequence
  Description of Artificial Sequence: Synthetic oligonucleotide
  Sense strand starting at position 413 of SEQ ID NO: 275
agguaaucaguuggcaaua

SEQ ID NO: 24667 - RNA, 19 nt, Artificial Sequence
  Description of Artificial Sequence: Synthetic oligonucleotide
  Antisense strand to SEQ ID NO: 24666
uauugccaacugauuaccu

SEQ ID NO: 24668 - RNA, 19 nt, Artificial Sequence
  Description of Artificial Sequence: Synthetic oligonucleotide
  Sense strand starting at position 414 of SEQ ID NO: 275
gguaaucaguuggcaauau

SEQ ID NO: 24669 - RNA, 19 nt, Artificial Sequence
  Description of Artificial Sequence: Synthetic oligonucleotide
  Antisense strand to SEQ ID NO: 24668
auauugccaacugauuacc

SEQ ID NO: 24670 - RNA, 19 nt, Artificial Sequence
  Description of Artificial Sequence: Synthetic oligonucleotide
  Sense strand starting at position 418 of SEQ ID NO: 275
aucaguuggcaauauaugu

SEQ ID NO: 24671 - RNA, 19 nt, Artificial Sequence
  Description of Artificial Sequence: Synthetic oligonucleotide
  Antisense strand to SEQ ID NO: 24670
acauauauugccaacugau

SEQ ID NO: 24672 - RNA, 19 nt, Artificial Sequence
  Description of Artificial Sequence: Synthetic oligonucleotide
  Sense strand starting at position 735 of SEQ ID NO: 275
aacacuggguaguuuaaga

SEQ ID NO: 24673 - RNA, 19 nt, Artificial Sequence
  Description of Artificial Sequence: Synthetic oligonucleotide
  Antisense strand to SEQ ID NO: 24672
ucuuaaacuacccaguguu

SEQ ID NO: 24674 - RNA, 19 nt, Artificial Sequence
  Description of Artificial Sequence: Synthetic oligonucleotide
  Sense strand starting at position 1000 of SEQ ID NO: 275
ucuggagaaguauguuuaa

SEQ ID NO: 24675 - RNA, 19 nt, Artificial Sequence
  Description of Artificial Sequence: Synthetic oligonucleotide
  Antisense strand to SEQ ID NO: 24674
uuaaacauacuucuccaga

SEQ ID NO: 24676 - RNA, 19 nt, Artificial Sequence
  Description of Artificial Sequence: Synthetic oligonucleotide
  Sense strand starting at position 1003 of SEQ ID NO: 275
ggagaaguauguuuaacuu

SEQ ID NO: 24677 - RNA, 19 nt, Artificial Sequence
  Description of Artificial Sequence: Synthetic oligonucleotide
  Antisense strand to SEQ ID NO: 24676
aaguuaaacauacuucucc

SEQ ID NO: 24678 - RNA, 19 nt, Artificial Sequence
  Description of Artificial Sequence: Synthetic oligonucleotide
  Sense strand starting at position 1273 of SEQ ID NO: 275
aagcaaggccguuaugaug

SEQ ID NO: 24679 - RNA, 19 nt, Artificial Sequence
  Description of Artificial Sequence: Synthetic oligonucleotide
  Antisense strand to SEQ ID NO: 24678
caucauaacggccuugcuu

SEQ ID NO: 24680 - RNA, 19 nt, Artificial Sequence
  Description of Artificial Sequence: Synthetic oligonucleotide
  Sense strand starting at position 1330 of SEQ ID NO: 275
gucugugcucuagcguuaa

SEQ ID NO: 24681 - RNA, 19 nt, Artificial Sequence
  Description of Artificial Sequence: Synthetic oligonucleotide
  Antisense strand to SEQ ID NO: 24680
uuaacgcuagagcacagac

SEQ ID NO: 24682 - RNA, 19 nt, Artificial Sequence
  Description of Artificial Sequence: Synthetic oligonucleotide
  Sense strand starting at position 1332 of SEQ ID NO: 275
cugugcucuagcguuaaag

SEQ ID NO: 24683 - RNA, 19 nt, Artificial Sequence
  Description of Artificial Sequence: Synthetic oligonucleotide
  Antisense strand to SEQ ID NO: 24682
cuuuaacgcuagagcacag

SEQ ID NO: 24684 - RNA, 19 nt, Artificial Sequence
  Description of Artificial Sequence: Synthetic oligonucleotide
  Sense strand starting at position 1343 of SEQ ID NO: 275
cguuaaagggaggguucua

SEQ ID NO: 24685 - RNA, 19 nt, Artificial Sequence
  Description of Artificial Sequence: Synthetic oligonucleotide
  Antisense strand to SEQ ID NO: 24684
uagaacccucccuuuaacg

SEQ ID NO: 24686 - RNA, 19 nt, Artificial Sequence
  Description of Artificial Sequence: Synthetic oligonucleotide
  Sense strand starting at position 1490 of SEQ ID NO: 275
gggucucuacuggguaaga

SEQ ID NO: 24687 - RNA, 19 nt, Artificial Sequence
  Description of Artificial Sequence: Synthetic oligonucleotide
  Antisense strand to SEQ ID NO: 24686
ucuuacccaguagagaccc

SEQ ID NO: 24688 - RNA, 19 nt, Artificial Sequence
  Description of Artificial Sequence: Synthetic oligonucleotide
  Sense strand starting at position 1491 of SEQ ID NO: 275
ggucucuacuggguaagau

SEQ ID NO: 24689 - RNA, 19 nt, Artificial Sequence
  Description of Artificial Sequence: Synthetic oligonucleotide
  Antisense strand to SEQ ID NO: 24688
aucuuacccaguagagacc

SEQ ID NO: 24690 - RNA, 19 nt, Artificial Sequence
  Description of Artificial Sequence: Synthetic oligonucleotide
  Sense strand starting at position 1492 of SEQ ID NO: 275
gucucuacuggguaagaug

SEQ ID NO: 24691 - RNA, 19 nt, Artificial Sequence
  Description of Artificial Sequence: Synthetic oligonucleotide
  Antisense strand to SEQ ID NO: 24690
caucuuacccaguagagac

SEQ ID NO: 24692 - RNA, 19 nt, Artificial Sequence
  Description of Artificial Sequence: Synthetic oligonucleotide
  Sense strand starting at position 2769 of SEQ ID NO: 275
uggugugcgaaggauuaau

SEQ ID NO: 24693 - RNA, 19 nt, Artificial Sequence
  Description of Artificial Sequence: Synthetic oligonucleotide
  Antisense strand to SEQ ID NO: 24692
auuaauccuucgcacacca

SEQ ID NO: 24694 - RNA, 19 nt, Artificial Sequence
  Description of Artificial Sequence: Synthetic oligonucleotide
  Sense strand starting at position 2780 of SEQ ID NO: 275
ggauuaauuuguuccggcu

SEQ ID NO: 24695 - RNA, 19 nt, Artificial Sequence
  Description of Artificial Sequence: Synthetic oligonucleotide
  Antisense strand to SEQ ID NO: 24694
agccggaacaaauuaaucc

SEQ ID NO: 24696 - RNA, 19 nt, Artificial Sequence
  Description of Artificial Sequence: Synthetic oligonucleotide
  Sense strand starting at position 2950 of SEQ ID NO: 275
caguucuuggaauauguuu

SEQ ID NO: 24697 - RNA, 19 nt, Artificial Sequence
  Description of Artificial Sequence: Synthetic oligonucleotide
  Antisense strand to SEQ ID NO: 24696
aaacauauuccaagaacug

SEQ ID NO: 24698 - RNA, 19 nt, Artificial Sequence
  Description of Artificial Sequence: Synthetic oligonucleotide
  Sense strand starting at position 3060 of SEQ ID NO: 275
ggguguauuuacgcuuaag

SEQ ID NO: 24699 - RNA, 19 nt, Artificial Sequence
  Description of Artificial Sequence: Synthetic oligonucleotide
  Antisense strand to SEQ ID NO: 24698
cuuaagcguaaauacaccc

SEQ ID NO: 24700 - RNA, 19 nt, Artificial Sequence
  Description of Artificial Sequence: Synthetic oligonucleotide
  Sense strand starting at position 3435 of SEQ ID NO: 275
ggugauggacauuacuagu

SEQ ID NO: 24701 - RNA, 19 nt, Artificial Sequence
  Description of Artificial Sequence: Synthetic oligonucleotide
  Antisense strand to SEQ ID NO: 24700
acuaguaauguccaucacc

SEQ ID NO: 24702 - RNA, 19 nt, Artificial Sequence
  Description of Artificial Sequence: Synthetic oligonucleotide
  Sense strand starting at position 3453 of SEQ ID NO: 275
uaaccagcguuucuagaga

SEQ ID NO: 24703 - RNA, 19 nt, Artificial Sequence
  Description of Artificial Sequence: Synthetic oligonucleotide
  Antisense strand to SEQ ID NO: 24702
ucucuagaaacgcugguua

SEQ ID NO: 24704 - RNA, 19 nt, Artificial Sequence
  Description of Artificial Sequence: Synthetic oligonucleotide
  Sense strand starting at position 3458 of SEQ ID NO: 275
agcguuucuagagaauuaa

SEQ ID NO: 24705 - RNA, 19 nt, Artificial Sequence
  Description of Artificial Sequence: Synthetic oligonucleotide
  Antisense strand to SEQ ID NO: 24704
uuaauucucuagaaacgcu

SEQ ID NO: 24706 - RNA, 19 nt, Artificial Sequence
  Description of Artificial Sequence: Synthetic oligonucleotide
  Sense strand starting at position 3487 of SEQ ID NO: 275
cuguguaucaguugauaaa

SEQ ID NO: 24707 - RNA, 19 nt, Artificial Sequence
  Description of Artificial Sequence: Synthetic oligonucleotide
  Antisense strand to SEQ ID NO: 24706
uuuaucaacugauacacag

SEQ ID NO: 24708 - RNA, 19 nt, Artificial Sequence
  Description of Artificial Sequence: Synthetic oligonucleotide
  Sense strand starting at position 3513 of SEQ ID NO: 275
ugagaucugucuccauugu

SEQ ID NO: 24709 - RNA, 19 nt, Artificial Sequence
  Description of Artificial Sequence: Synthetic oligonucleotide
  Antisense strand to SEQ ID NO: 24708
acaauggagacagaucuca

SEQ ID NO: 24710 - RNA, 19 nt, Artificial Sequence
  Description of Artificial Sequence: Synthetic oligonucleotide
  Sense strand starting at position 3514 of SEQ ID NO: 275
gagaucugucuccauugua

SEQ ID NO: 24711 - RNA, 19 nt, Artificial Sequence
  Description of Artificial Sequence: Synthetic oligonucleotide
  Antisense strand to SEQ ID NO: 24710
uacaauggagacagaucuc

SEQ ID NO: 24712 - RNA, 19 nt, Artificial Sequence
  Description of Artificial Sequence: Synthetic oligonucleotide
  Sense strand starting at position 3638 of SEQ ID NO: 275
agacuaucucaaugauugu

SEQ ID NO: 24713 - RNA, 19 nt, Artificial Sequence
  Description of Artificial Sequence: Synthetic oligonucleotide
  Antisense strand to SEQ ID NO: 24712
acaaucauugagauagucu

SEQ ID NO: 24714 - RNA, 19 nt, Artificial Sequence
  Description of Artificial Sequence: Synthetic oligonucleotide
  Sense strand starting at position 3649 of SEQ ID NO: 275
augauuguuuccuuuguga

SEQ ID NO: 24715 - RNA, 19 nt, Artificial Sequence
  Description of Artificial Sequence: Synthetic oligonucleotide
  Antisense strand to SEQ ID NO: 24714
ucacaaaggaaacaaucau

SEQ ID NO: 24716 - RNA, 19 nt, Artificial Sequence
  Description of Artificial Sequence: Synthetic oligonucleotide
  Sense strand starting at position 3652 of SEQ ID NO: 275
auuguuuccuuugugaaug

SEQ ID NO: 24717 - RNA, 19 nt, Artificial Sequence
  Description of Artificial Sequence: Synthetic oligonucleotide
  Antisense strand to SEQ ID NO: 24716
cauucacaaaggaaacaau

SEQ ID NO: 24718 - RNA, 19 nt, Artificial Sequence
  Description of Artificial Sequence: Synthetic oligonucleotide
  Sense strand starting at position 3657 of SEQ ID NO: 275
uuccuuugugaaugggaaa

SEQ ID NO: 24719 - RNA, 19 nt, Artificial Sequence
  Description of Artificial Sequence: Synthetic oligonucleotide
  Antisense strand to SEQ ID NO: 24718
uuucccauucacaaaggaa

SEQ ID NO: 24720 - RNA, 19 nt, Artificial Sequence
  Description of Artificial Sequence: Synthetic oligonucleotide
  Sense strand starting at position 3658 of SEQ ID NO: 275
uccuuugugaaugggaaau

SEQ ID NO: 24721 - RNA, 19 nt, Artificial Sequence
  Description of Artificial Sequence: Synthetic oligonucleotide
  Antisense strand to SEQ ID NO: 24720
auuucccauucacaaagga

SEQ ID NO: 24722 - RNA, 19 nt, Artificial Sequence
  Description of Artificial Sequence: Synthetic oligonucleotide
  Sense strand starting at position 3671 of SEQ ID NO: 275
ggaaauauugcuggcacau

SEQ ID NO: 24723 - RNA, 19 nt, Artificial Sequence
  Description of Artificial Sequence: Synthetic oligonucleotide
  Antisense strand to SEQ ID NO: 24722
augugccagcaauauuucc

SEQ ID NO: 24724 - RNA, 19 nt, Artificial Sequence
  Description of Artificial Sequence: Synthetic oligonucleotide
  Sense strand starting at position 3755 of SEQ ID NO: 275
auguccuaacugggaagua

SEQ ID NO: 24725 - RNA, 19 nt, Artificial Sequence
  Description of Artificial Sequence: Synthetic oligonucleotide
  Antisense strand to SEQ ID NO: 24724
uacuucccaguuaggacau

SEQ ID NO: 24726 - RNA, 19 nt, Artificial Sequence
  Description of Artificial Sequence: Synthetic oligonucleotide
  Sense strand starting at position 3841 of SEQ ID NO: 275
agaaauuaguuguucuguu

SEQ ID NO: 24727 - RNA, 19 nt, Artificial Sequence
  Description of Artificial Sequence: Synthetic oligonucleotide
  Antisense strand to SEQ ID NO: 24726
aacagaacaacuaauuucu

SEQ ID NO: 24728 - RNA, 19 nt, Artificial Sequence
  Description of Artificial Sequence: Synthetic oligonucleotide
  Sense strand starting at position 3842 of SEQ ID NO: 275
gaaauuaguuguucuguua

SEQ ID NO: 24729 - RNA, 19 nt, Artificial Sequence
  Description of Artificial Sequence: Synthetic oligonucleotide
  Antisense strand to SEQ ID NO: 24728
uaacagaacaacuaauuuc

SEQ ID NO: 24730 - RNA, 19 nt, Artificial Sequence
  Description of Artificial Sequence: Synthetic oligonucleotide
  Sense strand starting at position 3853 of SEQ ID NO: 275
uucuguuagagguagcaaa

SEQ ID NO: 24731 - RNA, 19 nt, Artificial Sequence
  Description of Artificial Sequence: Synthetic oligonucleotide
  Antisense strand to SEQ ID NO: 24730
uuugcuaccucuaacagaa

SEQ ID NO: 24732 - RNA, 19 nt, Artificial Sequence
  Description of Artificial Sequence: Synthetic oligonucleotide
  Sense strand starting at position 3953 of SEQ ID NO: 276
ugaagccugcccuaaguau

SEQ ID NO: 24733 - RNA, 19 nt, Artificial Sequence
  Description of Artificial Sequence: Synthetic oligonucleotide
  Antisense strand to SEQ ID NO: 24732
auacuuagggcaggcuuca

SEQ ID NO: 24734 - RNA, 19 nt, Artificial Sequence
  Description of Artificial Sequence: Synthetic oligonucleotide
  Sense strand starting at position 3900 of SEQ ID NO: 276
gggagacucuagcuuuauc

SEQ ID NO: 24735 - RNA, 19 nt, Artificial Sequence
  Description of Artificial Sequence: Synthetic oligonucleotide
  Antisense strand to SEQ ID NO: 24734
gauaaagcuagagucuccc

SEQ ID NO: 24736 - RNA, 19 nt, Artificial Sequence
  Description of Artificial Sequence: Synthetic oligonucleotide
  Sense strand starting at position 3789 of SEQ ID NO: 276
guaauuaaaugcucgacua

SEQ ID NO: 24737 - RNA, 19 nt, Artificial Sequence
  Description of Artificial Sequence: Synthetic oligonucleotide
  Antisense strand to SEQ ID NO: 24736
uagucgagcauuuaauuac

SEQ ID NO: 24738 - RNA, 19 nt, Artificial Sequence
  Description of Artificial Sequence: Synthetic oligonucleotide
  Sense strand starting at position 3774 of SEQ ID NO: 276
ccaguucuuguacaaguaa

SEQ ID NO: 24739 - RNA, 19 nt, Artificial Sequence
  Description of Artificial Sequence: Synthetic oligonucleotide
  Antisense strand to SEQ ID NO: 24738
uuacuuguacaagaacugg

SEQ ID NO: 24740 - RNA, 19 nt, Artificial Sequence
  Description of Artificial Sequence: Synthetic oligonucleotide
  Sense strand starting at position 3690 of SEQ ID NO: 276
uugcguuaugucuuugguu

SEQ ID NO: 24741 - RNA, 19 nt, Artificial Sequence
  Description of Artificial Sequence: Synthetic oligonucleotide
  Antisense strand to SEQ ID NO: 24740
aaccaaagacauaacgcaa

SEQ ID NO: 24742 - RNA, 19 nt, Artificial Sequence
  Description of Artificial Sequence: Synthetic oligonucleotide
  Sense strand starting at position 3647 of SEQ ID NO: 276
uuccuaguuacucggaaga

SEQ ID NO: 24743 - RNA, 19 nt, Artificial Sequence
  Description of Artificial Sequence: Synthetic oligonucleotide
  Antisense strand to SEQ ID NO: 24742
ucuuccgaguaacuaggaa

SEQ ID NO: 24744 - RNA, 19 nt, Artificial Sequence
  Description of Artificial Sequence: Synthetic oligonucleotide
  Sense strand starting at position 3555 of SEQ ID NO: 276
uucgauucgaucuaaagag

SEQ ID NO: 24745 - RNA, 19 nt, Artificial Sequence
  Description of Artificial Sequence: Synthetic oligonucleotide
  Antisense strand to SEQ ID NO: 24744
cucuuuagaucgaaucgaa

SEQ ID NO: 24746 - RNA, 19 nt, Artificial Sequence
  Description of Artificial Sequence: Synthetic oligonucleotide
  Sense strand starting at position 3550 of SEQ ID NO: 276
agaccuucgauucgaucua

SEQ ID NO: 24747 - RNA, 19 nt, Artificial Sequence
  Description of Artificial Sequence: Synthetic oligonucleotide
  Antisense strand to SEQ ID NO: 24746
uagaucgaaucgaaggucu

SEQ ID NO: 24748 - RNA, 19 nt, Artificial Sequence
  Description of Artificial Sequence: Synthetic oligonucleotide
  Sense strand starting at position 3512 of SEQ ID NO: 276
agaguugugcauuauaucu

SEQ ID NO: 24749 - RNA, 19 nt, Artificial Sequence
  Description of Artificial Sequence: Synthetic oligonucleotide
  Antisense strand to SEQ ID NO: 24748
agauauaaugcacaacucu

SEQ ID NO: 24750 - RNA, 19 nt, Artificial Sequence
  Description of Artificial Sequence: Synthetic oligonucleotide
  Sense strand starting at position 3509 of SEQ ID NO: 276
gaaagaguugugcauuaua

SEQ ID NO: 24751 - RNA, 19 nt, Artificial Sequence
  Description of Artificial Sequence: Synthetic oligonucleotide
  Antisense strand to SEQ ID NO: 24750
uauaaugcacaacucuuuc

SEQ ID NO: 24752 - RNA, 19 nt, Artificial Sequence
  Description of Artificial Sequence: Synthetic oligonucleotide
  Sense strand starting at position 3505 of SEQ ID NO: 276
gggagaaagaguugugcau

SEQ ID NO: 24753 - RNA, 19 nt, Artificial Sequence
  Description of Artificial Sequence: Synthetic oligonucleotide
  Antisense strand to SEQ ID NO: 24752
augcacaacucuuucuccc

SEQ ID NO: 24754 - RNA, 19 nt, Artificial Sequence
  Description of Artificial Sequence: Synthetic oligonucleotide
  Sense strand starting at position 3432 of SEQ ID NO: 276
acgcauuugcccuaaucuu

SEQ ID NO: 24755 - RNA, 19 nt, Artificial Sequence
  Description of Artificial Sequence: Synthetic oligonucleotide
  Antisense strand to SEQ ID NO: 24754
aagauuagggcaaaugcgu

SEQ ID NO: 24756 - RNA, 19 nt, Artificial Sequence
  Description of Artificial Sequence: Synthetic oligonucleotide
  Sense strand starting at position 3084 of SEQ ID NO: 276
cuaguagcggucuacaaua

SEQ ID NO: 24757 - RNA, 19 nt, Artificial Sequence
  Description of Artificial Sequence: Synthetic oligonucleotide
  Antisense strand to SEQ ID NO: 24756
uauuguagaccgcuacuag

SEQ ID NO: 24758 - RNA, 19 nt, Artificial Sequence
  Description of Artificial Sequence: Synthetic oligonucleotide
  Sense strand starting at position 2675 of SEQ ID NO: 276
aagagauggagcuggaguu

SEQ ID NO: 24759 - RNA, 19 nt, Artificial Sequence
  Description of Artificial Sequence: Synthetic oligonucleotide
  Antisense strand to SEQ ID NO: 24758
aacuccagcuccaucucuu

SEQ ID NO: 24760 - RNA, 19 nt, Artificial Sequence
  Description of Artificial Sequence: Synthetic oligonucleotide
  Sense strand starting at position 2035 of SEQ ID NO: 276
gucaguucgacugagcaag

SEQ ID NO: 24761 - RNA, 19 nt, Artificial Sequence
  Description of Artificial Sequence: Synthetic oligonucleotide
  Antisense strand to SEQ ID NO: 24760
cuugcucagucgaacugac

SEQ ID NO: 24762 - RNA, 19 nt, Artificial Sequence
  Description of Artificial Sequence: Synthetic oligonucleotide
  Sense strand starting at position 2033 of SEQ ID NO: 276
gcgucaguucgacugagca

SEQ ID NO: 24763 - RNA, 19 nt, Artificial Sequence
  Description of Artificial Sequence: Synthetic oligonucleotide
  Antisense strand to SEQ ID NO: 24762
ugcucagucgaacugacgc

SEQ ID NO: 24764 - RNA, 19 nt, Artificial Sequence
  Description of Artificial Sequence: Synthetic oligonucleotide
  Sense strand starting at position 1577 of SEQ ID NO: 276
cgugaacgaagaugguuau

SEQ ID NO: 24765 - RNA, 19 nt, Artificial Sequence
  Description of Artificial Sequence: Synthetic oligonucleotide
  Antisense strand to SEQ ID NO: 24764
auaaccaucuucguucacg

SEQ ID NO: 24766 - RNA, 19 nt, Artificial Sequence
  Description of Artificial Sequence: Synthetic oligonucleotide
  Sense strand starting at position 1546 of SEQ ID NO: 276
ugaggucugagccgaaaga

SEQ ID NO: 24767 - RNA, 19 nt, Artificial Sequence
  Description of Artificial Sequence: Synthetic oligonucleotide
  Antisense strand to SEQ ID NO: 24766
ucuuucggcucagaccuca

SEQ ID NO: 24768 - RNA, 19 nt, Artificial Sequence
  Description of Artificial Sequence: Synthetic oligonucleotide
  Sense strand starting at position 1484 of SEQ ID NO: 276
ucggcuuuacucgucugua

SEQ ID NO: 24769 - RNA, 19 nt, Artificial Sequence
  Description of Artificial Sequence: Synthetic oligonucleotide
  Antisense strand to SEQ ID NO: 24768
uacagacgaguaaagccga

SEQ ID NO: 24770 - RNA, 19 nt, Artificial Sequence
  Description of Artificial Sequence: Synthetic oligonucleotide
  Sense strand starting at position 1441 of SEQ ID NO: 276
cccagaaggucauucgaau

SEQ ID NO: 24771 - RNA, 19 nt, Artificial Sequence
  Description of Artificial Sequence: Synthetic oligonucleotide
  Antisense strand to SEQ ID NO: 24770
auucgaaugaccuucuggg

SEQ ID NO: 24772 - RNA, 19 nt, Artificial Sequence
  Description of Artificial Sequence: Synthetic oligonucleotide
  Sense strand starting at position 1413 of SEQ ID NO: 276
ucaaguugcaguuagagga

SEQ ID NO: 24773 - RNA, 19 nt, Artificial Sequence
  Description of Artificial Sequence: Synthetic oligonucleotide
  Antisense strand to SEQ ID NO: 24772
uccucuaacugcaacuuga

SEQ ID NO: 24774 - RNA, 19 nt, Artificial Sequence
  Description of Artificial Sequence: Synthetic oligonucleotide
  Sense strand starting at position 1397 of SEQ ID NO: 276
ggaagauuaugggcacuca

SEQ ID NO: 24775 - RNA, 19 nt, Artificial Sequence
  Description of Artificial Sequence: Synthetic oligonucleotide
  Antisense strand to SEQ ID NO: 24774
ugagugcccauaaucuucc

SEQ ID NO: 24776 - RNA, 19 nt, Artificial Sequence
  Description of Artificial Sequence: Synthetic oligonucleotide
  Sense strand starting at position 1378 of SEQ ID NO: 276
guguaaaccuucccacgaa

SEQ ID NO: 24777 - RNA, 19 nt, Artificial Sequence
  Description of Artificial Sequence: Synthetic oligonucleotide
  Antisense strand to SEQ ID NO: 24776
uucgugggaagguuuacac

SEQ ID NO: 24778 - RNA, 19 nt, Artificial Sequence
  Description of Artificial Sequence: Synthetic oligonucleotide
  Sense strand starting at position 1369 of SEQ ID NO: 276
uaaaguguuguguaaaccu

SEQ ID NO: 24779 - RNA, 19 nt, Artificial Sequence
  Description of Artificial Sequence: Synthetic oligonucleotide
  Antisense strand to SEQ ID NO: 24778
agguuuacacaacacuuua

SEQ ID NO: 24780 - RNA, 19 nt, Artificial Sequence
  Description of Artificial Sequence: Synthetic oligonucleotide
  Sense strand starting at position 1291 of SEQ ID NO: 276
uugugucaaaugggaagaa

SEQ ID NO: 24781 - RNA, 19 nt, Artificial Sequence
  Description of Artificial Sequence: Synthetic oligonucleotide
  Antisense strand to SEQ ID NO: 24780
uucuucccauuugacacaa

SEQ ID NO: 24782 - RNA, 19 nt, Artificial Sequence
  Description of Artificial Sequence: Synthetic oligonucleotide
  Sense strand starting at position 1289 of SEQ ID NO: 276
cuuugugucaaaugggaag

SEQ ID NO: 24783 - RNA, 19 nt, Artificial Sequence
  Description of Artificial Sequence: Synthetic oligonucleotide
  Antisense strand to SEQ ID NO: 24782
cuucccauuugacacaaag

SEQ ID NO: 24784 - RNA, 19 nt, Artificial Sequence
  Description of Artificial Sequence: Synthetic oligonucleotide
  Sense strand starting at position 1264 of SEQ ID NO: 276
ccuugaaacuucccgaaga

SEQ ID NO: 24785 - RNA, 19 nt, Artificial Sequence
  Description of Artificial Sequence: Synthetic oligonucleotide
  Antisense strand to SEQ ID NO: 24784
ucuucgggaaguuucaagg

SEQ ID NO: 24786 - RNA, 19 nt, Artificial Sequence
  Description of Artificial Sequence: Synthetic oligonucleotide
  Sense strand starting at position 1200 of SEQ ID NO: 276
gcuagaagauguuuaaacu

SEQ ID NO: 24787 - RNA, 19 nt, Artificial Sequence
  Description of Artificial Sequence: Synthetic oligonucleotide
  Antisense strand to SEQ ID NO: 24786
aguuuaaacaucuucuagc

SEQ ID NO: 24788 - RNA, 19 nt, Artificial Sequence
  Description of Artificial Sequence: Synthetic oligonucleotide
  Sense strand starting at position 1156 of SEQ ID NO: 276
ggaauacuguguuuaauga

SEQ ID NO: 24789 - RNA, 19 nt, Artificial Sequence
  Description of Artificial Sequence: Synthetic oligonucleotide
  Antisense strand to SEQ ID NO: 24788
ucauuaaacacaguauucc

SEQ ID NO: 24790 - RNA, 19 nt, Artificial Sequence
  Description of Artificial Sequence: Synthetic oligonucleotide
  Sense strand starting at position 1154 of SEQ ID NO: 276
ugggaauacuguguuuaau

SEQ ID NO: 24791 - RNA, 19 nt, Artificial Sequence
  Description of Artificial Sequence: Synthetic oligonucleotide
  Antisense strand to SEQ ID NO: 24790
auuaaacacaguauuccca

SEQ ID NO: 24792 - RNA, 19 nt, Artificial Sequence
  Description of Artificial Sequence: Synthetic oligonucleotide
  Sense strand starting at position 1153 of SEQ ID NO: 276
uugggaauacuguguuuaa

SEQ ID NO: 24793 - RNA, 19 nt, Artificial Sequence
  Description of Artificial Sequence: Synthetic oligonucleotide
  Antisense strand to SEQ ID NO: 24792
uuaaacacaguauucccaa

SEQ ID NO: 24794 - RNA, 19 nt, Artificial Sequence
  Description of Artificial Sequence: Synthetic oligonucleotide
  Sense strand starting at position 1143 of SEQ ID NO: 276
aacacugggcuugggaaua

SEQ ID NO: 24795 - RNA, 19 nt, Artificial Sequence
  Description of Artificial Sequence: Synthetic oligonucleotide
  Antisense strand to SEQ ID NO: 24794
uauucccaagcccaguguu

SEQ ID NO: 24796 - RNA, 19 nt, Artificial Sequence
  Description of Artificial Sequence: Synthetic oligonucleotide
  Sense strand starting at position 1059 of SEQ ID NO: 276
auacucauguguccaaacu

SEQ ID NO: 24797 - RNA, 19 nt, Artificial Sequence
  Description of Artificial Sequence: Synthetic oligonucleotide
  Antisense strand to SEQ ID NO: 24796
aguuuggacacaugaguau

SEQ ID NO: 24798 - RNA, 19 nt, Artificial Sequence
  Description of Artificial Sequence: Synthetic oligonucleotide
  Sense strand starting at position 1052 of SEQ ID NO: 276
gggauuaauacucaugugu

SEQ ID NO: 24799 - RNA, 19 nt, Artificial Sequence
  Description of Artificial Sequence: Synthetic oligonucleotide
  Antisense strand to SEQ ID NO: 24798
acacaugaguauuaauccc

SEQ ID NO: 24800 - RNA, 19 nt, Artificial Sequence
  Description of Artificial Sequence: Synthetic oligonucleotide
  Sense strand starting at position 1008 of SEQ ID NO: 276
gaaguaaucugccuuaagu

SEQ ID NO: 24801 - RNA, 19 nt, Artificial Sequence
  Description of Artificial Sequence: Synthetic oligonucleotide
  Antisense strand to SEQ ID NO: 24800
acuuaaggcagauuacuuc

SEQ ID NO: 24802 - RNA, 19 nt, Artificial Sequence
  Description of Artificial Sequence: Synthetic oligonucleotide
  Sense strand starting at position 819 of SEQ ID NO: 276
gggccaugauaaucuuuaa

SEQ ID NO: 24803 - RNA, 19 nt, Artificial Sequence
  Description of Artificial Sequence: Synthetic oligonucleotide
  Antisense strand to SEQ ID NO: 24802
uuaaagauuaucauggccc

SEQ ID NO: 24804 - RNA, 19 nt, Artificial Sequence
  Description of Artificial Sequence: Synthetic oligonucleotide
  Sense strand starting at position 800 of SEQ ID NO: 276
uaguguauacagggauaag

SEQ ID NO: 24805 - RNA, 19 nt, Artificial Sequence
  Description of Artificial Sequence: Synthetic oligonucleotide
  Antisense strand to SEQ ID NO: 24804
cuuaucccuguauacacua

SEQ ID NO: 24806 - RNA, 19 nt, Artificial Sequence
  Description of Artificial Sequence: Synthetic oligonucleotide
  Sense strand starting at position 643 of SEQ ID NO: 276
gcuuucugcguaucugaau

SEQ ID NO: 24807 - RNA, 19 nt, Artificial Sequence
  Description of Artificial Sequence: Synthetic oligonucleotide
  Antisense strand to SEQ ID NO: 24806
auucagauacgcagaaagc

SEQ ID NO: 24808 - RNA, 19 nt, Artificial Sequence
  Description of Artificial Sequence: Synthetic oligonucleotide
  Sense strand starting at position 547 of SEQ ID NO: 276
ucugauuaacuagaugcau

SEQ ID NO: 24809 - RNA, 19 nt, Artificial Sequence
  Description of Artificial Sequence: Synthetic oligonucleotide
  Antisense strand to SEQ ID NO: 24808
augcaucuaguuaaucaga

SEQ ID NO: 24810 - RNA, 19 nt, Artificial Sequence
  Description of Artificial Sequence: Synthetic oligonucleotide
  Sense strand starting at position 302 of SEQ ID NO: 276
auuuguuugucucuaaagu

SEQ ID NO: 24811 - RNA, 19 nt, Artificial Sequence
  Description of Artificial Sequence: Synthetic oligonucleotide
  Antisense strand to SEQ ID NO: 24810
acuuuagagacaaacaaau

SEQ ID NO: 24812 - RNA, 19 nt, Artificial Sequence
  Description of Artificial Sequence: Synthetic oligonucleotide
  Sense strand starting at position 6 of SEQ ID NO: 277
agacgaaauuaugcuauua

SEQ ID NO: 24813 - RNA, 19 nt, Artificial Sequence
  Description of Artificial Sequence: Synthetic oligonucleotide
  Antisense strand to SEQ ID NO: 24812
uaauagcauaauuucgucu

SEQ ID NO: 24814 - RNA, 19 nt, Artificial Sequence
  Description of Artificial Sequence: Synthetic oligonucleotide
  Sense strand starting at position 57 of SEQ ID NO: 277
uccuauuacuauguaguaa

SEQ ID NO: 24815 - RNA, 19 nt, Artificial Sequence
  Description of Artificial Sequence: Synthetic oligonucleotide
  Antisense strand to SEQ ID NO: 24814
uuacuacauaguaauagga

SEQ ID NO: 24816 - RNA, 19 nt, Artificial Sequence
  Description of Artificial Sequence: Synthetic oligonucleotide
  Sense strand starting at position 68 of SEQ ID NO: 277
uguaguaaugcucaguuaa

SEQ ID NO: 24817 - RNA, 19 nt, Artificial Sequence
  Description of Artificial Sequence: Synthetic oligonucleotide
  Antisense strand to SEQ ID NO: 24816
uuaacugagcauuacuaca

SEQ ID NO: 24818 - RNA, 19 nt, Artificial Sequence
  Description of Artificial Sequence: Synthetic oligonucleotide
  Sense strand starting at position 119 of SEQ ID NO: 277
gcacaacugcuuuaauaga

SEQ ID NO: 24819 - RNA, 19 nt, Artificial Sequence
  Description of Artificial Sequence: Synthetic oligonucleotide
  Antisense strand to SEQ ID NO: 24818
ucuauuaaagcaguugugc

SEQ ID NO: 24820 - RNA, 19 nt, Artificial Sequence
  Description of Artificial Sequence: Synthetic oligonucleotide
  Sense strand starting at position 648 of SEQ ID NO: 277
cuacuacuagcugagcuau

SEQ ID NO: 24821 - RNA, 19 nt, Artificial Sequence
  Description of Artificial Sequence: Synthetic oligonucleotide
  Antisense strand to SEQ ID NO: 24820
auagcucagcuaguaguag

SEQ ID NO: 24822 - RNA, 19 nt, Artificial Sequence
  Description of Artificial Sequence: Synthetic oligonucleotide
  Sense strand starting at position 685 of SEQ ID NO: 277
gccaaauauguaugaucuu

SEQ ID NO: 24823 - RNA, 19 nt, Artificial Sequence
  Description of Artificial Sequence: Synthetic oligonucleotide
  Antisense strand to SEQ ID NO: 24822
aagaucauacauauuuggc

SEQ ID NO: 24824 - RNA, 19 nt, Artificial Sequence
  Description of Artificial Sequence: Synthetic oligonucleotide
  Sense strand starting at position 709 of SEQ ID NO: 277
aaagcagagcaguaaguau

SEQ ID NO: 24825 - RNA, 19 nt, Artificial Sequence
  Description of Artificial Sequence: Synthetic oligonucleotide
  Antisense strand to SEQ ID NO: 24824
auacuuacugcucugcuuu

SEQ ID NO: 24826 - RNA, 19 nt, Artificial Sequence
  Description of Artificial Sequence: Synthetic oligonucleotide
  Sense strand starting at position 716 of SEQ ID NO: 277
agcaguaaguauccaaaga

SEQ ID NO: 24827 - RNA, 19 nt, Artificial Sequence
  Description of Artificial Sequence: Synthetic oligonucleotide
  Antisense strand to SEQ ID NO: 24826
ucuuuggauacuuacugcu

SEQ ID NO: 24828 - RNA, 19 nt, Artificial Sequence
  Description of Artificial Sequence: Synthetic oligonucleotide
  Sense strand starting at position 735 of SEQ ID NO: 277
ccaucaaauuaguuuguca

SEQ ID NO: 24829 - RNA, 19 nt, Artificial Sequence
  Description of Artificial Sequence: Synthetic oligonucleotide
  Antisense strand to SEQ ID NO: 24828
ugacaaacuaauuugaugg

SEQ ID NO: 24830 - RNA, 19 nt, Artificial Sequence
  Description of Artificial Sequence: Synthetic oligonucleotide
  Sense strand starting at position 908 of SEQ ID NO: 277
ggagcaucaucaccauugu

SEQ ID NO: 24831 - RNA, 19 nt, Artificial Sequence
  Description of Artificial Sequence: Synthetic oligonucleotide
  Antisense strand to SEQ ID NO: 24830
acaauggugaugaugcucc

SEQ ID NO: 24832 - RNA, 19 nt, Artificial Sequence
  Description of Artificial Sequence: Synthetic oligonucleotide
  Sense strand starting at position 1218 of SEQ ID NO: 277
gccaaaggguucccuauau

SEQ ID NO: 24833 - RNA, 19 nt, Artificial Sequence
  Description of Artificial Sequence: Synthetic oligonucleotide
  Antisense strand to SEQ ID NO: 24832
auauagggaacccuuuggc

SEQ ID NO: 24834 - RNA, 19 nt, Artificial Sequence
  Description of Artificial Sequence: Synthetic oligonucleotide
  Sense strand starting at position 1460 of SEQ ID NO: 277
agguuugggucuccucaca

SEQ ID NO: 24835 - RNA, 19 nt, Artificial Sequence
  Description of Artificial Sequence: Synthetic oligonucleotide
  Antisense strand to SEQ ID NO: 24834
ugugaggagacccaaaccu

SEQ ID NO: 24836 - RNA, 19 nt, Artificial Sequence
  Description of Artificial Sequence: Synthetic oligonucleotide
  Sense strand starting at position 1758 of SEQ ID NO: 277
gcgagucacgcuccuaaac

SEQ ID NO: 24837 - RNA, 19 nt, Artificial Sequence
  Description of Artificial Sequence: Synthetic oligonucleotide
  Antisense strand to SEQ ID NO: 24836
guuuaggagcgugacucgc

SEQ ID NO: 24838 - RNA, 19 nt, Artificial Sequence
  Description of Artificial Sequence: Synthetic oligonucleotide
  Sense strand starting at position 2212 of SEQ ID NO: 277
gaaguucugagccagggau

SEQ ID NO: 24839 - RNA, 19 nt, Artificial Sequence
  Description of Artificial Sequence: Synthetic oligonucleotide
  Antisense strand to SEQ ID NO: 24838
aucccuggcucagaacuuc

SEQ ID NO: 24840 - RNA, 19 nt, Artificial Sequence
  Description of Artificial Sequence: Synthetic oligonucleotide
  Sense strand starting at position 2236 of SEQ ID NO: 277
ccaaacuuccugcauucga

SEQ ID NO: 24841 - RNA, 19 nt, Artificial Sequence
  Description of Artificial Sequence: Synthetic oligonucleotide
  Antisense strand to SEQ ID NO: 24840
ucgaaugcaggaaguuugg

SEQ ID NO: 24842 - RNA, 19 nt, Artificial Sequence
  Description of Artificial Sequence: Synthetic oligonucleotide
  Sense strand starting at position 2399 of SEQ ID NO: 277
cuagguugucauggaagac

SEQ ID NO: 24843 - RNA, 19 nt, Artificial Sequence
  Description of Artificial Sequence: Synthetic oligonucleotide
  Antisense strand to SEQ ID NO: 24842
gucuuccaugacaaccuag

SEQ ID NO: 24844 - RNA, 19 nt, Artificial Sequence
  Description of Artificial Sequence: Synthetic oligonucleotide
  Sense strand starting at position 2486 of SEQ ID NO: 277
ucugaauagcuuugacaaa

SEQ ID NO: 24845 - RNA, 19 nt, Artificial Sequence
  Description of Artificial Sequence: Synthetic oligonucleotide
  Antisense strand to SEQ ID NO: 24844
uuugucaaagcuauucaga

SEQ ID NO: 24846 - RNA, 19 nt, Artificial Sequence
  Description of Artificial Sequence: Synthetic oligonucleotide
  Sense strand starting at position 2589 of SEQ ID NO: 277
ccauauggcccuuaaaugu

SEQ ID NO: 24847 - RNA, 19 nt, Artificial Sequence
  Description of Artificial Sequence: Synthetic oligonucleotide
  Antisense strand to SEQ ID NO: 24846
acauuuaagggccauaugg

SEQ ID NO: 24848 - RNA, 19 nt, Artificial Sequence
  Description of Artificial Sequence: Synthetic oligonucleotide
  Sense strand starting at position 2609 of SEQ ID NO: 277
gguguuucccaacauauug

SEQ ID NO: 24849 - RNA, 19 nt, Artificial Sequence
  Description of Artificial Sequence: Synthetic oligonucleotide
  Antisense strand to SEQ ID NO: 24848
caauauguugggaaacacc

SEQ ID NO: 24850 - RNA, 19 nt, Artificial Sequence
  Description of Artificial Sequence: Synthetic oligonucleotide
  Sense strand starting at position 2726 of SEQ ID NO: 277
ucccaaaucugggugucua

SEQ ID NO: 24851 - RNA, 19 nt, Artificial Sequence
  Description of Artificial Sequence: Synthetic oligonucleotide
  Antisense strand to SEQ ID NO: 24850
uagacacccagauuuggga

SEQ ID NO: 24852 - RNA, 19 nt, Artificial Sequence
  Description of Artificial Sequence: Synthetic oligonucleotide
  Sense strand starting at position 2727 of SEQ ID NO: 277
cccaaaucugggugucuaa

SEQ ID NO: 24853 - RNA, 19 nt, Artificial Sequence
  Description of Artificial Sequence: Synthetic oligonucleotide
  Antisense strand to SEQ ID NO: 24852
uuagacacccagauuuggg

SEQ ID NO: 24854 - RNA, 19 nt, Artificial Sequence
  Description of Artificial Sequence: Synthetic oligonucleotide
  Sense strand starting at position 2734 of SEQ ID NO: 277
cugggugucuaaucccaau

SEQ ID NO: 24855 - RNA, 19 nt, Artificial Sequence
  Description of Artificial Sequence: Synthetic oligonucleotide
  Antisense strand to SEQ ID NO: 24854
auugggauuagacacccag

SEQ ID NO: 24856 - RNA, 19 nt, Artificial Sequence
  Description of Artificial Sequence: Synthetic oligonucleotide
  Sense strand starting at position 2896 of SEQ ID NO: 277
ugguaaaugguguaaccau

SEQ ID NO: 24857 - RNA, 19 nt, Artificial Sequence
  Description of Artificial Sequence: Synthetic oligonucleotide
  Antisense strand to SEQ ID NO: 24856
augguuacaccauuuacca

SEQ ID NO: 24858 - RNA, 19 nt, Artificial Sequence
  Description of Artificial Sequence: Synthetic oligonucleotide
  Sense strand starting at position 2948 of SEQ ID NO: 277
auuccuucuggugaacuaa

SEQ ID NO: 24859 - RNA, 19 nt, Artificial Sequence
  Description of Artificial Sequence: Synthetic oligonucleotide
  Antisense strand to SEQ ID NO: 24858
uuaguucaccagaaggaau

SEQ ID NO: 24860 - RNA, 19 nt, Artificial Sequence
  Description of Artificial Sequence: Synthetic oligonucleotide
  Sense strand starting at position 2988 of SEQ ID NO: 277
aguuguuaucaguguauuu

SEQ ID NO: 24861 - RNA, 19 nt, Artificial Sequence
  Description of Artificial Sequence: Synthetic oligonucleotide
  Antisense strand to SEQ ID NO: 24860
aaauacacugauaacaacu

SEQ ID NO: 24862 - RNA, 19 nt, Artificial Sequence
  Description of Artificial Sequence: Synthetic oligonucleotide
  Sense strand starting at position 3065 of SEQ ID NO: 277
ccauuccucccuggaagua

SEQ ID NO: 24863 - RNA, 19 nt, Artificial Sequence
  Description of Artificial Sequence: Synthetic oligonucleotide
  Antisense strand to SEQ ID NO: 24862
uacuuccagggaggaaugg

SEQ ID NO: 24864 - RNA, 19 nt, Artificial Sequence
  Description of Artificial Sequence: Synthetic oligonucleotide
  Sense strand starting at position 3171 of SEQ ID NO: 277
gacugugcuuugcucauuu

SEQ ID NO: 24865 - RNA, 19 nt, Artificial Sequence
  Description of Artificial Sequence: Synthetic oligonucleotide
  Antisense strand to SEQ ID NO: 24864
aaaugagcaaagcacaguc

SEQ ID NO: 24866 - RNA, 19 nt, Artificial Sequence
  Description of Artificial Sequence: Synthetic oligonucleotide
  Sense strand starting at position 3221 of SEQ ID NO: 277
cacagagcagaugguuaau

SEQ ID NO: 24867 - RNA, 19 nt, Artificial Sequence
  Description of Artificial Sequence: Synthetic oligonucleotide
  Antisense strand to SEQ ID NO: 24866
auuaaccaucugcucugug

SEQ ID NO: 24868 - RNA, 19 nt, Artificial Sequence
  Description of Artificial Sequence: Synthetic oligonucleotide
  Sense strand starting at position 3223 of SEQ ID NO: 277
cagagcagaugguuaauaa

SEQ ID NO: 24869 - RNA, 19 nt, Artificial Sequence
  Description of Artificial Sequence: Synthetic oligonucleotide
  Antisense strand to SEQ ID NO: 24868
uuauuaaccaucugcucug

SEQ ID NO: 24870 - RNA, 19 nt, Artificial Sequence
  Description of Artificial Sequence: Synthetic oligonucleotide
  Sense strand starting at position 3421 of SEQ ID NO: 277
cccucagguugguuugaua

SEQ ID NO: 24871 - RNA, 19 nt, Artificial Sequence
  Description of Artificial Sequence: Synthetic oligonucleotide
  Antisense strand to SEQ ID NO: 24870
uaucaaaccaaccugaggg

SEQ ID NO: 24872 - RNA, 19 nt, Artificial Sequence
  Description of Artificial Sequence: Synthetic oligonucleotide
  Sense strand starting at position 3607 of SEQ ID NO: 277
uugugaacaguaugaacuu

SEQ ID NO: 24873 - RNA, 19 nt, Artificial Sequence
  Description of Artificial Sequence: Synthetic oligonucleotide
  Antisense strand to SEQ ID NO: 24872
aaguucauacuguucacaa

SEQ ID NO: 24874 - RNA, 19 nt, Artificial Sequence
  Description of Artificial Sequence: Synthetic oligonucleotide
  Sense strand starting at position 3644 of SEQ ID NO: 277
gacaguaugcauggaauac

SEQ ID NO: 24875 - RNA, 19 nt, Artificial Sequence
  Description of Artificial Sequence: Synthetic oligonucleotide
  Antisense strand to SEQ ID NO: 24874
guauuccaugcauacuguc

SEQ ID NO: 24876 - RNA, 19 nt, Artificial Sequence
  Description of Artificial Sequence: Synthetic oligonucleotide
  Sense strand starting at position 3719 of SEQ ID NO: 277
gccauauaggcacaguuaa

SEQ ID NO: 24877 - RNA, 19 nt, Artificial Sequence
  Description of Artificial Sequence: Synthetic oligonucleotide
  Antisense strand to SEQ ID NO: 24876
uuaacugugccuauauggc

SEQ ID NO: 24878 - RNA, 19 nt, Artificial Sequence
  Description of Artificial Sequence: Synthetic oligonucleotide
  Sense strand starting at position 3769 of SEQ ID NO: 277
uccagaagcugagcugaua

SEQ ID NO: 24879 - RNA, 19 nt, Artificial Sequence
  Description of Artificial Sequence: Synthetic oligonucleotide
  Antisense strand to SEQ ID NO: 24878
uaucagcucagcuucugga

SEQ ID NO: 24880 - RNA, 19 nt, Artificial Sequence
  Description of Artificial Sequence: Synthetic oligonucleotide
  Sense strand starting at position 3772 of SEQ ID NO: 277
agaagcugagcugauacau

SEQ ID NO: 24881 - RNA, 19 nt, Artificial Sequence
  Description of Artificial Sequence: Synthetic oligonucleotide
  Antisense strand to SEQ ID NO: 24880
auguaucagcucagcuucu

SEQ ID NO: 24882 - RNA, 19 nt, Artificial Sequence
  Description of Artificial Sequence: Synthetic oligonucleotide
  Sense strand starting at position 3784 of SEQ ID NO: 277
gauacauugugacccaaag

SEQ ID NO: 24883 - RNA, 19 nt, Artificial Sequence
  Description of Artificial Sequence: Synthetic oligonucleotide
  Antisense strand to SEQ ID NO: 24882
cuuugggucacaauguauc

SEQ ID NO: 24884 - RNA, 19 nt, Artificial Sequence
  Description of Artificial Sequence: Synthetic oligonucleotide
  Sense strand starting at position 3802 of SEQ ID NO: 277
gucccaugggcauacauau

SEQ ID NO: 24885 - RNA, 19 nt, Artificial Sequence
  Description of Artificial Sequence: Synthetic oligonucleotide
  Antisense strand to SEQ ID NO: 24884
auauguaugcccaugggac

SEQ ID NO: 24886 - RNA, 19 nt, Artificial Sequence
  Description of Artificial Sequence: Synthetic oligonucleotide
  Sense strand starting at position 3911 of SEQ ID NO: 277
acuuacuuauuacugagua

SEQ ID NO: 24887 - RNA, 19 nt, Artificial Sequence
  Description of Artificial Sequence: Synthetic oligonucleotide
  Antisense strand to SEQ ID NO: 24886
uacucaguaauaaguaagu

SEQ ID NO: 24888 - RNA, 19 nt, Artificial Sequence
  Description of Artificial Sequence: Synthetic oligonucleotide
  Sense strand starting at position 3933 of SEQ ID NO: 277
cugacacucugagugacuu

SEQ ID NO: 24889 - RNA, 19 nt, Artificial Sequence
  Description of Artificial Sequence: Synthetic oligonucleotide
  Antisense strand to SEQ ID NO: 24888
aagucacucagagugucag

SEQ ID NO: 24890 - RNA, 19 nt, Artificial Sequence
  Description of Artificial Sequence: Synthetic oligonucleotide
  Sense strand starting at position 3934 of SEQ ID NO: 277
ugacacucugagugacuuu

SEQ ID NO: 24891 - RNA, 19 nt, Artificial Sequence
  Description of Artificial Sequence: Synthetic oligonucleotide
  Antisense strand to SEQ ID NO: 24890
aaagucacucagaguguca

SEQ ID NO: 24892 - RNA, 19 nt, Artificial Sequence
  Description of Artificial Sequence: Synthetic oligonucleotide
  Sense strand starting at position 3975 of SEQ ID NO: 278
cagauuauuugguaaggag

SEQ ID NO: 24893 - RNA, 19 nt, Artificial Sequence
  Description of Artificial Sequence: Synthetic oligonucleotide
  Antisense strand to SEQ ID NO: 24892
cuccuuaccaaauaaucug

SEQ ID NO: 24894 - RNA, 19 nt, Artificial Sequence
  Description of Artificial Sequence: Synthetic oligonucleotide
  Sense strand starting at position 3855 of SEQ ID NO: 278
uugaauucguagguucaag

SEQ ID NO: 24895 - RNA, 19 nt, Artificial Sequence
  Description of Artificial Sequence: Synthetic oligonucleotide
  Antisense strand to SEQ ID NO: 24894
cuugaaccuacgaauucaa

SEQ ID NO: 24896 - RNA, 19 nt, Artificial Sequence
  Description of Artificial Sequence: Synthetic oligonucleotide
  Sense strand starting at position 3481 of SEQ ID NO: 278
auaagaugccauggagcua

SEQ ID NO: 24897 - RNA, 19 nt, Artificial Sequence
  Description of Artificial Sequence: Synthetic oligonucleotide
  Antisense strand to SEQ ID NO: 24896
uagcuccauggcaucuuau

SEQ ID NO: 24898 - RNA, 19 nt, Artificial Sequence
  Description of Artificial Sequence: Synthetic oligonucleotide
  Sense strand starting at position 3470 of SEQ ID NO: 278
auuuacaugugauaagaug

SEQ ID NO: 24899 - RNA, 19 nt, Artificial Sequence
  Description of Artificial Sequence: Synthetic oligonucleotide
  Antisense strand to SEQ ID NO: 24898
caucuuaucacauguaaau

SEQ ID NO: 24900 - RNA, 19 nt, Artificial Sequence
  Description of Artificial Sequence: Synthetic oligonucleotide
  Sense strand starting at position 3444 of SEQ ID NO: 278
guaucuugacuaugaugau

SEQ ID NO: 24901 - RNA, 19 nt, Artificial Sequence
  Description of Artificial Sequence: Synthetic oligonucleotide
  Antisense strand to SEQ ID NO: 24900
aucaucauagucaagauac

SEQ ID NO: 24902 - RNA, 19 nt, Artificial Sequence
  Description of Artificial Sequence: Synthetic oligonucleotide
  Sense strand starting at position 3415 of SEQ ID NO: 278
agagaucuuguagguaaca

SEQ ID NO: 24903 - RNA, 19 nt, Artificial Sequence
  Description of Artificial Sequence: Synthetic oligonucleotide
  Antisense strand to SEQ ID NO: 24902
uguuaccuacaagaucucu

SEQ ID NO: 24904 - RNA, 19 nt, Artificial Sequence
  Description of Artificial Sequence: Synthetic oligonucleotide
  Sense strand starting at position 3339 of SEQ ID NO: 278
gaguacauauuguuacaug

SEQ ID NO: 24905 - RNA, 19 nt, Artificial Sequence
  Description of Artificial Sequence: Synthetic oligonucleotide
  Antisense strand to SEQ ID NO: 24904
cauguaacaauauguacuc

SEQ ID NO: 24906 - RNA, 19 nt, Artificial Sequence
  Description of Artificial Sequence: Synthetic oligonucleotide
  Sense strand starting at position 3202 of SEQ ID NO: 278
acuaauaggccaugacauc

SEQ ID NO: 24907 - RNA, 19 nt, Artificial Sequence
  Description of Artificial Sequence: Synthetic oligonucleotide
  Antisense strand to SEQ ID NO: 24906
gaugucauggccuauuagu

SEQ ID NO: 24908 - RNA, 19 nt, Artificial Sequence
  Description of Artificial Sequence: Synthetic oligonucleotide
  Sense strand starting at position 3094 of SEQ ID NO: 278
aaugaacaacugugauguu

SEQ ID NO: 24909 - RNA, 19 nt, Artificial Sequence
  Description of Artificial Sequence: Synthetic oligonucleotide
  Antisense strand to SEQ ID NO: 24908
aacaucacaguuguucauu

SEQ ID NO: 24910 - RNA, 19 nt, Artificial Sequence
  Description of Artificial Sequence: Synthetic oligonucleotide
  Sense strand starting at position 3047 of SEQ ID NO: 278
ccuagagaaagcuguggaa

SEQ ID NO: 24911 - RNA, 19 nt, Artificial Sequence
  Description of Artificial Sequence: Synthetic oligonucleotide
  Antisense strand to SEQ ID NO: 24910
uuccacagcuuucucuagg

SEQ ID NO: 24912 - RNA, 19 nt, Artificial Sequence
  Description of Artificial Sequence: Synthetic oligonucleotide
  Sense strand starting at position 2998 of SEQ ID NO: 278
uguuaaguaaucugaggag

SEQ ID NO: 24913 - RNA, 19 nt, Artificial Sequence
  Description of Artificial Sequence: Synthetic oligonucleotide
  Antisense strand to SEQ ID NO: 24912
cuccucagauuacuuaaca

SEQ ID NO: 24914 - RNA, 19 nt, Artificial Sequence
  Description of Artificial Sequence: Synthetic oligonucleotide
  Sense strand starting at position 2992 of SEQ ID NO: 278
ggagacuguuaaguaaucu

SEQ ID NO: 24915 - RNA, 19 nt, Artificial Sequence
  Description of Artificial Sequence: Synthetic oligonucleotide
  Antisense strand to SEQ ID NO: 24914
agauuacuuaacagucucc

SEQ ID NO: 24916 - RNA, 19 nt, Artificial Sequence
  Description of Artificial Sequence: Synthetic oligonucleotide
  Sense strand starting at position 2877 of SEQ ID NO: 278
guaggaggugauugaaaca

SEQ ID NO: 24917 - RNA, 19 nt, Artificial Sequence
  Description of Artificial Sequence: Synthetic oligonucleotide
  Antisense strand to SEQ ID NO: 24916
uguuucaaucaccuccuac

SEQ ID NO: 24918 - RNA, 19 nt, Artificial Sequence
  Description of Artificial Sequence: Synthetic oligonucleotide
  Sense strand starting at position 2873 of SEQ ID NO: 278
cuuaguaggaggugauuga

SEQ ID NO: 24919 - RNA, 19 nt, Artificial Sequence
  Description of Artificial Sequence: Synthetic oligonucleotide
  Antisense strand to SEQ ID NO: 24918
ucaaucaccuccuacuaag

SEQ ID NO: 24920 - RNA, 19 nt, Artificial Sequence
  Description of Artificial Sequence: Synthetic oligonucleotide
  Sense strand starting at position 2871 of SEQ ID NO: 278
aucuuaguaggaggugauu

SEQ ID NO: 24921 - RNA, 19 nt, Artificial Sequence
  Description of Artificial Sequence: Synthetic oligonucleotide
  Antisense strand to SEQ ID NO: 24920
aaucaccuccuacuaagau

SEQ ID NO: 24922 - RNA, 19 nt, Artificial Sequence
  Description of Artificial Sequence: Synthetic oligonucleotide
  Sense strand starting at position 2865 of SEQ ID NO: 278
ucuuaaaucuuaguaggag

SEQ ID NO: 24923 - RNA, 19 nt, Artificial Sequence
  Description of Artificial Sequence: Synthetic oligonucleotide
  Antisense strand to SEQ ID NO: 24922
cuccuacuaagauuuaaga

SEQ ID NO: 24924 - RNA, 19 nt, Artificial Sequence
  Description of Artificial Sequence: Synthetic oligonucleotide
  Sense strand starting at position 2558 of SEQ ID NO: 278
ucuugauaccgucacauaa

SEQ ID NO: 24925 - RNA, 19 nt, Artificial Sequence
  Description of Artificial Sequence: Synthetic oligonucleotide
  Antisense strand to SEQ ID NO: 24924
uuaugugacgguaucaaga

SEQ ID NO: 24926 - RNA, 19 nt, Artificial Sequence
  Description of Artificial Sequence: Synthetic oligonucleotide
  Sense strand starting at position 2534 of SEQ ID NO: 278
cuccuuucugauggaugaa

SEQ ID NO: 24927 - RNA, 19 nt, Artificial Sequence
  Description of Artificial Sequence: Synthetic oligonucleotide
  Antisense strand to SEQ ID NO: 24926
uucauccaucagaaaggag

SEQ ID NO: 24928 - RNA, 19 nt, Artificial Sequence
  Description of Artificial Sequence: Synthetic oligonucleotide
  Sense strand starting at position 2364 of SEQ ID NO: 278
aguguuuccagguaguaug

SEQ ID NO: 24929 - RNA, 19 nt, Artificial Sequence
  Description of Artificial Sequence: Synthetic oligonucleotide
  Antisense strand to SEQ ID NO: 24928
cauacuaccuggaaacacu

SEQ ID NO: 24930 - RNA, 19 nt, Artificial Sequence
  Description of Artificial Sequence: Synthetic oligonucleotide
  Sense strand starting at position 2315 of SEQ ID NO: 278
agacccgagguuugugaau

SEQ ID NO: 24931 - RNA, 19 nt, Artificial Sequence
  Description of Artificial Sequence: Synthetic oligonucleotide
  Antisense strand to SEQ ID NO: 24930
auucacaaaccucgggucu

SEQ ID NO: 24932 - RNA, 19 nt, Artificial Sequence
  Description of Artificial Sequence: Synthetic oligonucleotide
  Sense strand starting at position 2273 of SEQ ID NO: 278
guauaaucuccacaacugu

SEQ ID NO: 24933 - RNA, 19 nt, Artificial Sequence
  Description of Artificial Sequence: Synthetic oligonucleotide
  Antisense strand to SEQ ID NO: 24932
acaguuguggagauuauac

SEQ ID NO: 24934 - RNA, 19 nt, Artificial Sequence
  Description of Artificial Sequence: Synthetic oligonucleotide
  Sense strand starting at position 1219 of SEQ ID NO: 278
gaaucacuggauugcuaag

SEQ ID NO: 24935 - RNA, 19 nt, Artificial Sequence
  Description of Artificial Sequence: Synthetic oligonucleotide
  Antisense strand to SEQ ID NO: 24934
cuuagcaauccagugauuc

SEQ ID NO: 24936 - RNA, 19 nt, Artificial Sequence
  Description of Artificial Sequence: Synthetic oligonucleotide
  Sense strand starting at position 1137 of SEQ ID NO: 278
uccguuaagaguuaagaga

SEQ ID NO: 24937 - RNA, 19 nt, Artificial Sequence
  Description of Artificial Sequence: Synthetic oligonucleotide
  Antisense strand to SEQ ID NO: 24936
ucucuuaacucuuaacgga

SEQ ID NO: 24938 - RNA, 19 nt, Artificial Sequence
  Description of Artificial Sequence: Synthetic oligonucleotide
  Sense strand starting at position 1107 of SEQ ID NO: 278
cuacaaaugccagauugua

SEQ ID NO: 24939 - RNA, 19 nt, Artificial Sequence
  Description of Artificial Sequence: Synthetic oligonucleotide
  Antisense strand to SEQ ID NO: 24938
uacaaucuggcauuuguag

SEQ ID NO: 24940 - RNA, 19 nt, Artificial Sequence
  Description of Artificial Sequence: Synthetic oligonucleotide
  Sense strand starting at position 1095 of SEQ ID NO: 278
acagcugagugucuacaaa

SEQ ID NO: 24941 - RNA, 19 nt, Artificial Sequence
  Description of Artificial Sequence: Synthetic oligonucleotide
  Antisense strand to SEQ ID NO: 24940
uuuguagacacucagcugu

SEQ ID NO: 24942 - RNA, 19 nt, Artificial Sequence
  Description of Artificial Sequence: Synthetic oligonucleotide
  Sense strand starting at position 733 of SEQ ID NO: 278
agcacuugaaugggucaga

SEQ ID NO: 24943 - RNA, 19 nt, Artificial Sequence
  Description of Artificial Sequence: Synthetic oligonucleotide
  Antisense strand to SEQ ID NO: 24942
ucugacccauucaagugcu

SEQ ID NO: 24944 - RNA, 19 nt, Artificial Sequence
  Description of Artificial Sequence: Synthetic oligonucleotide
  Sense strand starting at position 698 of SEQ ID NO: 278
gccagucacuuccuaauga

SEQ ID NO: 24945 - RNA, 19 nt, Artificial Sequence
  Description of Artificial Sequence: Synthetic oligonucleotide
  Antisense strand to SEQ ID NO: 24944
ucauuaggaagugacuggc

SEQ ID NO: 24946 - RNA, 19 nt, Artificial Sequence
  Description of Artificial Sequence: Synthetic oligonucleotide
  Sense strand starting at position 573 of SEQ ID NO: 278
ugguguuugcucuaaggag

SEQ ID NO: 24947 - RNA, 19 nt, Artificial Sequence
  Description of Artificial Sequence: Synthetic oligonucleotide
  Antisense strand to SEQ ID NO: 24946
cuccuuagagcaaacacca

SEQ ID NO: 24948 - RNA, 19 nt, Artificial Sequence
  Description of Artificial Sequence: Synthetic oligonucleotide
  Sense strand starting at position 452 of SEQ ID NO: 278
uggucaccuggauagucau

SEQ ID NO: 24949 - RNA, 19 nt, Artificial Sequence
  Description of Artificial Sequence: Synthetic oligonucleotide
  Antisense strand to SEQ ID NO: 24948
augacuauccaggugacca

SEQ ID NO: 24950 - RNA, 19 nt, Artificial Sequence
  Description of Artificial Sequence: Synthetic oligonucleotide
  Sense strand starting at position 446 of SEQ ID NO: 278
uacuuauggucaccuggau

SEQ ID NO: 24951 - RNA, 19 nt, Artificial Sequence
  Description of Artificial Sequence: Synthetic oligonucleotide
  Antisense strand to SEQ ID NO: 24950
auccaggugaccauaagua

SEQ ID NO: 24952 - RNA, 19 nt, Artificial Sequence
  Description of Artificial Sequence: Synthetic oligonucleotide
  Sense strand starting at position 431 of SEQ ID NO: 278
guuauuuacugggcuuacu

SEQ ID NO: 24953 - RNA, 19 nt, Artificial Sequence
  Description of Artificial Sequence: Synthetic oligonucleotide
  Antisense strand to SEQ ID NO: 24952
aguaagcccaguaaauaac

SEQ ID NO: 24954 - RNA, 19 nt, Artificial Sequence
  Description of Artificial Sequence: Synthetic oligonucleotide
  Sense strand starting at position 420 of SEQ ID NO: 278
acaagcagcuuguuauuua

SEQ ID NO: 24955 - RNA, 19 nt, Artificial Sequence
  Description of Artificial Sequence: Synthetic oligonucleotide
  Antisense strand to SEQ ID NO: 24954
uaaauaacaagcugcuugu

SEQ ID NO: 24956 - RNA, 19 nt, Artificial Sequence
  Description of Artificial Sequence: Synthetic oligonucleotide
  Sense strand starting at position 361 of SEQ ID NO: 278
ugcuuugaggcuggaagaa

SEQ ID NO: 24957 - RNA, 19 nt, Artificial Sequence
  Description of Artificial Sequence: Synthetic oligonucleotide
  Antisense strand to SEQ ID NO: 24956
uucuuccagccucaaagca

SEQ ID NO: 24958 - RNA, 19 nt, Artificial Sequence
  Description of Artificial Sequence: Synthetic oligonucleotide
  Sense strand starting at position 360 of SEQ ID NO: 278
cugcuuugaggcuggaaga

SEQ ID NO: 24959 - RNA, 19 nt, Artificial Sequence
  Description of Artificial Sequence: Synthetic oligonucleotide
  Antisense strand to SEQ ID NO: 24958
ucuuccagccucaaagcag

SEQ ID NO: 24960 - RNA, 19 nt, Artificial Sequence
  Description of Artificial Sequence: Synthetic oligonucleotide
  Sense strand starting at position 306 of SEQ ID NO: 278
gagcaagaugcucagugau

SEQ ID NO: 24961 - RNA, 19 nt, Artificial Sequence
  Description of Artificial Sequence: Synthetic oligonucleotide
  Antisense strand to SEQ ID NO: 24960
aucacugagcaucuugcuc

SEQ ID NO: 24962 - RNA, 19 nt, Artificial Sequence
  Description of Artificial Sequence: Synthetic oligonucleotide
  Sense strand starting at position 289 of SEQ ID NO: 278
cugacaguuugacuggaga

SEQ ID NO: 24963 - RNA, 19 nt, Artificial Sequence
  Description of Artificial Sequence: Synthetic oligonucleotide
  Antisense strand to SEQ ID NO: 24962
ucuccagucaaacugucag

SEQ ID NO: 24964 - RNA, 19 nt, Artificial Sequence
  Description of Artificial Sequence: Synthetic oligonucleotide
  Sense strand starting at position 238 of SEQ ID NO: 278
guaaaugagccucacguaa

SEQ ID NO: 24965 - RNA, 19 nt, Artificial Sequence
  Description of Artificial Sequence: Synthetic oligonucleotide
  Antisense strand to SEQ ID NO: 24964
uuacgugaggcucauuuac

SEQ ID NO: 24966 - RNA, 19 nt, Artificial Sequence
  Description of Artificial Sequence: Synthetic oligonucleotide
  Sense strand starting at position 109 of SEQ ID NO: 278
gagggcaauuaucuggcaa

SEQ ID NO: 24967 - RNA, 19 nt, Artificial Sequence
  Description of Artificial Sequence: Synthetic oligonucleotide
  Antisense strand to SEQ ID NO: 24966
uugccagauaauugcccuc

SEQ ID NO: 24968 - RNA, 19 nt, Artificial Sequence
  Description of Artificial Sequence: Synthetic oligonucleotide
  Sense strand starting at position 102 of SEQ ID NO: 278
gucuucugagggcaauuau

SEQ ID NO: 24969 - RNA, 19 nt, Artificial Sequence
  Description of Artificial Sequence: Synthetic oligonucleotide
  Antisense strand to SEQ ID NO: 24968
auaauugcccucagaagac

SEQ ID NO: 24970 - RNA, 19 nt, Artificial Sequence
  Description of Artificial Sequence: Synthetic oligonucleotide
  Sense strand starting at position 100 of SEQ ID NO: 278
gagucuucugagggcaauu

SEQ ID NO: 24971 - RNA, 19 nt, Artificial Sequence
  Description of Artificial Sequence: Synthetic oligonucleotide
  Antisense strand to SEQ ID NO: 24970
aauugcccucagaagacuc

SEQ ID NO: 24972 - RNA, 19 nt, Artificial Sequence
  Description of Artificial Sequence: Synthetic oligonucleotide
  Sense strand starting at position 3928 of SEQ ID NO: 279
cguguaaaucuauacaauc

SEQ ID NO: 24973 - RNA, 19 nt, Artificial Sequence
  Description of Artificial Sequence: Synthetic oligonucleotide
  Antisense strand to SEQ ID NO: 24972
gauuguauagauuuacacg

SEQ ID NO: 24974 - RNA, 19 nt, Artificial Sequence
  Description of Artificial Sequence: Synthetic oligonucleotide
  Sense strand starting at position 3920 of SEQ ID NO: 279
ccagccuccguguaaaucu

SEQ ID NO: 24975 - RNA, 19 nt, Artificial Sequence
  Description of Artificial Sequence: Synthetic oligonucleotide
  Antisense strand to SEQ ID NO: 24974
agauuuacacggaggcugg

SEQ ID NO: 24976 - RNA, 19 nt, Artificial Sequence
  Description of Artificial Sequence: Synthetic oligonucleotide
  Sense strand starting at position 3917 of SEQ ID NO: 279
ugaccagccuccguguaaa

SEQ ID NO: 24977 - RNA, 19 nt, Artificial Sequence
  Description of Artificial Sequence: Synthetic oligonucleotide
  Antisense strand to SEQ ID NO: 24976
uuuacacggaggcugguca

SEQ ID NO: 24978 - RNA, 19 nt, Artificial Sequence
  Description of Artificial Sequence: Synthetic oligonucleotide
  Sense strand starting at position 3604 of SEQ ID NO: 279
ggugacuuuccauguaaau

SEQ ID NO: 24979 - RNA, 19 nt, Artificial Sequence
  Description of Artificial Sequence: Synthetic oligonucleotide
  Antisense strand to SEQ ID NO: 24978
auuuacauggaaagucacc

SEQ ID NO: 24980 - RNA, 19 nt, Artificial Sequence
  Description of Artificial Sequence: Synthetic oligonucleotide
  Sense strand starting at position 3574 of SEQ ID NO: 279
cucuuagucucauuaggga

SEQ ID NO: 24981 - RNA, 19 nt, Artificial Sequence
  Description of Artificial Sequence: Synthetic oligonucleotide
  Antisense strand to SEQ ID NO: 24980
ucccuaaugagacuaagag

SEQ ID NO: 24982 - RNA, 19 nt, Artificial Sequence
  Description of Artificial Sequence: Synthetic oligonucleotide
  Sense strand starting at position 3166 of SEQ ID NO: 279
acaugagaauugucucauu

SEQ ID NO: 24983 - RNA, 19 nt, Artificial Sequence
  Description of Artificial Sequence: Synthetic oligonucleotide
  Antisense strand to SEQ ID NO: 24982
aaugagacaauucucaugu

SEQ ID NO: 24984 - RNA, 19 nt, Artificial Sequence
  Description of Artificial Sequence: Synthetic oligonucleotide
  Sense strand starting at position 2853 of SEQ ID NO: 279
gugguaacagcucaaugga

SEQ ID NO: 24985 - RNA, 19 nt, Artificial Sequence
  Description of Artificial Sequence: Synthetic oligonucleotide
  Antisense strand to SEQ ID NO: 24984
uccauugagcuguuaccac

SEQ ID NO: 24986 - RNA, 19 nt, Artificial Sequence
  Description of Artificial Sequence: Synthetic oligonucleotide
  Sense strand starting at position 2829 of SEQ ID NO: 279
uccugucaauggucagaag

SEQ ID NO: 24987 - RNA, 19 nt, Artificial Sequence
  Description of Artificial Sequence: Synthetic oligonucleotide
  Antisense strand to SEQ ID NO: 24986
cuucugaccauugacagga

SEQ ID NO: 24988 - RNA, 19 nt, Artificial Sequence
  Description of Artificial Sequence: Synthetic oligonucleotide
  Sense strand starting at position 2782 of SEQ ID NO: 279
augcaagugucuguggaaa

SEQ ID NO: 24989 - RNA, 19 nt, Artificial Sequence
  Description of Artificial Sequence: Synthetic oligonucleotide
  Antisense strand to SEQ ID NO: 24988
uuuccacagacacuugcau

SEQ ID NO: 24990 - RNA, 19 nt, Artificial Sequence
  Description of Artificial Sequence: Synthetic oligonucleotide
  Sense strand starting at position 2781 of SEQ ID NO: 279
uaugcaagugucuguggaa

SEQ ID NO: 24991 - RNA, 19 nt, Artificial Sequence
  Description of Artificial Sequence: Synthetic oligonucleotide
  Antisense strand to SEQ ID NO: 24990
uuccacagacacuugcaua

SEQ ID NO: 24992 - RNA, 19 nt, Artificial Sequence
  Description of Artificial Sequence: Synthetic oligonucleotide
  Sense strand starting at position 2740 of SEQ ID NO: 279
guuaauaaguaucugcuca

SEQ ID NO: 24993 - RNA, 19 nt, Artificial Sequence
  Description of Artificial Sequence: Synthetic oligonucleotide
  Antisense strand to SEQ ID NO: 24992
ugagcagauacuuauuaac

SEQ ID NO: 24994 - RNA, 19 nt, Artificial Sequence
  Description of Artificial Sequence: Synthetic oligonucleotide
  Sense strand starting at position 2733 of SEQ ID NO: 279
aagggaaguuaauaaguau

SEQ ID NO: 24995 - RNA, 19 nt, Artificial Sequence
  Description of Artificial Sequence: Synthetic oligonucleotide
  Antisense strand to SEQ ID NO: 24994
auacuuauuaacuucccuu

SEQ ID NO: 24996 - RNA, 19 nt, Artificial Sequence
  Description of Artificial Sequence: Synthetic oligonucleotide
  Sense strand starting at position 2725 of SEQ ID NO: 279
uuguucuuaagggaaguua

SEQ ID NO: 24997 - RNA, 19 nt, Artificial Sequence
  Description of Artificial Sequence: Synthetic oligonucleotide
  Antisense strand to SEQ ID NO: 24996
uaacuucccuuaagaacaa

SEQ ID NO: 24998 - RNA, 19 nt, Artificial Sequence
  Description of Artificial Sequence: Synthetic oligonucleotide
  Sense strand starting at position 2724 of SEQ ID NO: 279
uuuguucuuaagggaaguu

SEQ ID NO: 24999 - RNA, 19 nt, Artificial Sequence
  Description of Artificial Sequence: Synthetic oligonucleotide
  Antisense strand to SEQ ID NO: 24998
aacuucccuuaagaacaaa

SEQ ID NO: 25000 - RNA, 19 nt, Artificial Sequence
  Description of Artificial Sequence: Synthetic oligonucleotide
  Sense strand starting at position 2688 of SEQ ID NO: 279
gcuuauaggcaagggaaua

SEQ ID NO: 25001 - RNA, 19 nt, Artificial Sequence
  Description of Artificial Sequence: Synthetic oligonucleotide
  Antisense strand to SEQ ID NO: 25000
uauucccuugccuauaagc

SEQ ID NO: 25002 - RNA, 19 nt, Artificial Sequence
  Description of Artificial Sequence: Synthetic oligonucleotide
  Sense strand starting at position 2667 of SEQ ID NO: 279
uagugugauaggcaauuga

SEQ ID NO: 25003 - RNA, 19 nt, Artificial Sequence
  Description of Artificial Sequence: Synthetic oligonucleotide
  Antisense strand to SEQ ID NO: 25002
ucaauugccuaucacacua

SEQ ID NO: 25004 - RNA, 19 nt, Artificial Sequence
  Description of Artificial Sequence: Synthetic oligonucleotide
  Sense strand starting at position 2665 of SEQ ID NO: 279
ccuagugugauaggcaauu

SEQ ID NO: 25005 - RNA, 19 nt, Artificial Sequence
  Description of Artificial Sequence: Synthetic oligonucleotide
  Antisense strand to SEQ ID NO: 25004
aauugccuaucacacuagg

SEQ ID NO: 25006 - RNA, 19 nt, Artificial Sequence
  Description of Artificial Sequence: Synthetic oligonucleotide
  Sense strand starting at position 2559 of SEQ ID NO: 279
guccuacagguguagaguu

SEQ ID NO: 25007 - RNA, 19 nt, Artificial Sequence
  Description of Artificial Sequence: Synthetic oligonucleotide
  Antisense strand to SEQ ID NO: 25006
aacucuacaccuguaggac

SEQ ID NO: 25008 - RNA, 19 nt, Artificial Sequence
  Description of Artificial Sequence: Synthetic oligonucleotide
  Sense strand starting at position 2487 of SEQ ID NO: 279
agucucuuucccugcuaca

SEQ ID NO: 25009 - RNA, 19 nt, Artificial Sequence
  Description of Artificial Sequence: Synthetic oligonucleotide
  Antisense strand to SEQ ID NO: 25008
uguagcagggaaagagacu

SEQ ID NO: 25010 - RNA, 19 nt, Artificial Sequence
  Description of Artificial Sequence: Synthetic oligonucleotide
  Sense strand starting at position 2093 of SEQ ID NO: 279
guuauuuccuuucugguaa

SEQ ID NO: 25011 - RNA, 19 nt, Artificial Sequence
  Description of Artificial Sequence: Synthetic oligonucleotide
  Antisense strand to SEQ ID NO: 25010
uuaccagaaaggaaauaac

SEQ ID NO: 25012 - RNA, 19 nt, Artificial Sequence
  Description of Artificial Sequence: Synthetic oligonucleotide
  Sense strand starting at position 2081 of SEQ ID NO: 279
cagccauggucaguuauuu

SEQ ID NO: 25013 - RNA, 19 nt, Artificial Sequence
  Description of Artificial Sequence: Synthetic oligonucleotide
  Antisense strand to SEQ ID NO: 25012
aaauaacugaccauggcug

SEQ ID NO: 25014 - RNA, 19 nt, Artificial Sequence
  Description of Artificial Sequence: Synthetic oligonucleotide
  Sense strand starting at position 2030 of SEQ ID NO: 279
aucauugucugacuuaaag

SEQ ID NO: 25015 - RNA, 19 nt, Artificial Sequence
  Description of Artificial Sequence: Synthetic oligonucleotide
  Antisense strand to SEQ ID NO: 25014
cuuuaagucagacaaugau

SEQ ID NO: 25016 - RNA, 19 nt, Artificial Sequence
  Description of Artificial Sequence: Synthetic oligonucleotide
  Sense strand starting at position 2027 of SEQ ID NO: 279
cccaucauugucugacuua

SEQ ID NO: 25017 - RNA, 19 nt, Artificial Sequence
  Description of Artificial Sequence: Synthetic oligonucleotide
  Antisense strand to SEQ ID NO: 25016
uaagucagacaaugauggg

SEQ ID NO: 25018 - RNA, 19 nt, Artificial Sequence
  Description of Artificial Sequence: Synthetic oligonucleotide
  Sense strand starting at position 1621 of SEQ ID NO: 279
ugacuagaucuccgguuac

SEQ ID NO: 25019 - RNA, 19 nt, Artificial Sequence
  Description of Artificial Sequence: Synthetic oligonucleotide
  Antisense strand to SEQ ID NO: 25018
guaaccggagaucuaguca

SEQ ID NO: 25020 - RNA, 19 nt, Artificial Sequence
  Description of Artificial Sequence: Synthetic oligonucleotide
  Sense strand starting at position 1620 of SEQ ID NO: 279
cugacuagaucuccgguua

SEQ ID NO: 25021 - RNA, 19 nt, Artificial Sequence
  Description of Artificial Sequence: Synthetic oligonucleotide
  Antisense strand to SEQ ID NO: 25020
uaaccggagaucuagucag

SEQ ID NO: 25022 - RNA, 19 nt, Artificial Sequence
  Description of Artificial Sequence: Synthetic oligonucleotide
  Sense strand starting at position 1205 of SEQ ID NO: 279
ccauccuccuuguuugaca

SEQ ID NO: 25023 - RNA, 19 nt, Artificial Sequence
  Description of Artificial Sequence: Synthetic oligonucleotide
  Antisense strand to SEQ ID NO: 25022
ugucaaacaaggaggaugg

SEQ ID NO: 25024 - RNA, 19 nt, Artificial Sequence
  Description of Artificial Sequence: Synthetic oligonucleotide
  Sense strand starting at position 1160 of SEQ ID NO: 279
gagaacugagcucaguguu

SEQ ID NO: 25025 - RNA, 19 nt, Artificial Sequence
  Description of Artificial Sequence: Synthetic oligonucleotide
  Antisense strand to SEQ ID NO: 25024
aacacugagcucaguucuc

SEQ ID NO: 25026 - RNA, 19 nt, Artificial Sequence
  Description of Artificial Sequence: Synthetic oligonucleotide
  Sense strand starting at position 1042 of SEQ ID NO: 279
ccaauucucugggaaagga

SEQ ID NO: 25027 - RNA, 19 nt, Artificial Sequence
  Description of Artificial Sequence: Synthetic oligonucleotide
  Antisense strand to SEQ ID NO: 25026
uccuuucccagagaauugg

SEQ ID NO: 25028 - RNA, 19 nt, Artificial Sequence
  Description of Artificial Sequence: Synthetic oligonucleotide
  Sense strand starting at position 1039 of SEQ ID NO: 279
ucuccaauucucugggaaa

SEQ ID NO: 25029 - RNA, 19 nt, Artificial Sequence
  Description of Artificial Sequence: Synthetic oligonucleotide
  Antisense strand to SEQ ID NO: 25028
uuucccagagaauuggaga

SEQ ID NO: 25030 - RNA, 19 nt, Artificial Sequence
  Description of Artificial Sequence: Synthetic oligonucleotide
  Sense strand starting at position 1038 of SEQ ID NO: 279
uucuccaauucucugggaa

SEQ ID NO: 25031 - RNA, 19 nt, Artificial Sequence
  Description of Artificial Sequence: Synthetic oligonucleotide
  Antisense strand to SEQ ID NO: 25030
uucccagagaauuggagaa

SEQ ID NO: 25032 - RNA, 19 nt, Artificial Sequence
  Description of Artificial Sequence: Synthetic oligonucleotide
  Sense strand starting at position 1007 of SEQ ID NO: 279
acuucugugucuuuacuaa

SEQ ID NO: 25033 - RNA, 19 nt, Artificial Sequence
  Description of Artificial Sequence: Synthetic oligonucleotide
  Antisense strand to SEQ ID NO: 25032
uuaguaaagacacagaagu

SEQ ID NO: 25034 - RNA, 19 nt, Artificial Sequence
  Description of Artificial Sequence: Synthetic oligonucleotide
  Sense strand starting at position 781 of SEQ ID NO: 279
cuuugauaugacuggauca

SEQ ID NO: 25035 - RNA, 19 nt, Artificial Sequence
  Description of Artificial Sequence: Synthetic oligonucleotide
  Antisense strand to SEQ ID NO: 25034
ugauccagucauaucaaag

SEQ ID NO: 25036 - RNA, 19 nt, Artificial Sequence
  Description of Artificial Sequence: Synthetic oligonucleotide
  Sense strand starting at position 731 of SEQ ID NO: 279
ugacccaucucuguuaguu

SEQ ID NO: 25037 - RNA, 19 nt, Artificial Sequence
  Description of Artificial Sequence: Synthetic oligonucleotide
  Antisense strand to SEQ ID NO: 25036
aacuaacagagauggguca

SEQ ID NO: 25038 - RNA, 19 nt, Artificial Sequence
  Description of Artificial Sequence: Synthetic oligonucleotide
  Sense strand starting at position 567 of SEQ ID NO: 279
cuguauuugugagacaucu

SEQ ID NO: 25039 - RNA, 19 nt, Artificial Sequence
  Description of Artificial Sequence: Synthetic oligonucleotide
  Antisense strand to SEQ ID NO: 25038
agaugucucacaaauacag

SEQ ID NO: 25040 - RNA, 19 nt, Artificial Sequence
  Description of Artificial Sequence: Synthetic oligonucleotide
  Sense strand starting at position 565 of SEQ ID NO: 279
uacuguauuugugagacau

SEQ ID NO: 25041 - RNA, 19 nt, Artificial Sequence
  Description of Artificial Sequence: Synthetic oligonucleotide
  Antisense strand to SEQ ID NO: 25040
augucucacaaauacagua

SEQ ID NO: 25042 - RNA, 19 nt, Artificial Sequence
  Description of Artificial Sequence: Synthetic oligonucleotide
  Sense strand starting at position 546 of SEQ ID NO: 279
uuuaguaugcuccagaucu

SEQ ID NO: 25043 - RNA, 19 nt, Artificial Sequence
  Description of Artificial Sequence: Synthetic oligonucleotide
  Antisense strand to SEQ ID NO: 25042
agaucuggagcauacuaaa

SEQ ID NO: 25044 - RNA, 19 nt, Artificial Sequence
  Description of Artificial Sequence: Synthetic oligonucleotide
  Sense strand starting at position 394 of SEQ ID NO: 279
uguaaugaggccuguuacu

SEQ ID NO: 25045 - RNA, 19 nt, Artificial Sequence
  Description of Artificial Sequence: Synthetic oligonucleotide
  Antisense strand to SEQ ID NO: 25044
aguaacaggccucauuaca

SEQ ID NO: 25046 - RNA, 19 nt, Artificial Sequence
  Description of Artificial Sequence: Synthetic oligonucleotide
  Sense strand starting at position 383 of SEQ ID NO: 279
ggauccauaucuguaauga

SEQ ID NO: 25047 - RNA, 19 nt, Artificial Sequence
  Description of Artificial Sequence: Synthetic oligonucleotide
  Antisense strand to SEQ ID NO: 25046
ucauuacagauauggaucc

SEQ ID NO: 25048 - RNA, 19 nt, Artificial Sequence
  Description of Artificial Sequence: Synthetic oligonucleotide
  Sense strand starting at position 382 of SEQ ID NO: 279
gggauccauaucuguaaug

SEQ ID NO: 25049 - RNA, 19 nt, Artificial Sequence
  Description of Artificial Sequence: Synthetic oligonucleotide
  Antisense strand to SEQ ID NO: 25048
cauuacagauauggauccc

SEQ ID NO: 25050 - RNA, 19 nt, Artificial Sequence
  Description of Artificial Sequence: Synthetic oligonucleotide
  Sense strand starting at position 381 of SEQ ID NO: 279
ugggauccauaucuguaau

SEQ ID NO: 25051 - RNA, 19 nt, Artificial Sequence
  Description of Artificial Sequence: Synthetic oligonucleotide
  Antisense strand to SEQ ID NO: 25050
auuacagauauggauccca

SEQ ID NO: 25052 - RNA, 19 nt, Artificial Sequence
  Description of Artificial Sequence: Synthetic oligonucleotide
  Sense strand starting at position 3681 of SEQ ID NO: 281
acaugagaauugucucauu

SEQ ID NO: 25053 - RNA, 19 nt, Artificial Sequence
  Description of Artificial Sequence: Synthetic oligonucleotide
  Antisense strand to SEQ ID NO: 25052
aaugagacaauucucaugu

SEQ ID NO: 25054 - RNA, 19 nt, Artificial Sequence
  Description of Artificial Sequence: Synthetic oligonucleotide
  Sense strand starting at position 3368 of SEQ ID NO: 281
gugguaacagcucaaugga

SEQ ID NO: 25055 - RNA, 19 nt, Artificial Sequence
  Description of Artificial Sequence: Synthetic oligonucleotide
  Antisense strand to SEQ ID NO: 25054
uccauugagcuguuaccac

SEQ ID NO: 25056 - RNA, 19 nt, Artificial Sequence
  Description of Artificial Sequence: Synthetic oligonucleotide
  Sense strand starting at position 3347 of SEQ ID NO: 281
ugucaauggucagaagaug

SEQ ID NO: 25057 - RNA, 19 nt, Artificial Sequence
  Description of Artificial Sequence: Synthetic oligonucleotide
  Antisense strand to SEQ ID NO: 25056
caucuucugaccauugaca

SEQ ID NO: 25058 - RNA, 19 nt, Artificial Sequence
  Description of Artificial Sequence: Synthetic oligonucleotide
  Sense strand starting at position 3344 of SEQ ID NO: 281
uccugucaauggucagaag

SEQ ID NO: 25059 - RNA, 19 nt, Artificial Sequence
  Description of Artificial Sequence: Synthetic oligonucleotide
  Antisense strand to SEQ ID NO: 25058
cuucugaccauugacagga

SEQ ID NO: 25060 - RNA, 19 nt, Artificial Sequence
  Description of Artificial Sequence: Synthetic oligonucleotide
  Sense strand starting at position 3297 of SEQ ID NO: 281
augcaagugucuguggaaa

SEQ ID NO: 25061 - RNA, 19 nt, Artificial Sequence
  Description of Artificial Sequence: Synthetic oligonucleotide
  Antisense strand to SEQ ID NO: 25060
uuuccacagacacuugcau

SEQ ID NO: 25062 - RNA, 19 nt, Artificial Sequence
  Description of Artificial Sequence: Synthetic oligonucleotide
  Sense strand starting at position 3296 of SEQ ID NO: 281
uaugcaagugucuguggaa

SEQ ID NO: 25063 - RNA, 19 nt, Artificial Sequence
  Description of Artificial Sequence: Synthetic oligonucleotide
  Antisense strand to SEQ ID NO: 25062
uuccacagacacuugcaua

SEQ ID NO: 25064 - RNA, 19 nt, Artificial Sequence
  Description of Artificial Sequence: Synthetic oligonucleotide
  Sense strand starting at position 3255 of SEQ ID NO: 281
guuaauaaguaucugcuca

SEQ ID NO: 25065 - RNA, 19 nt, Artificial Sequence
  Description of Artificial Sequence: Synthetic oligonucleotide
  Antisense strand to SEQ ID NO: 25064
ugagcagauacuuauuaac

SEQ ID NO: 25066 - RNA, 19 nt, Artificial Sequence
  Description of Artificial Sequence: Synthetic oligonucleotide
  Sense strand starting at position 3248 of SEQ ID NO: 281
aagggaaguuaauaaguau

SEQ ID NO: 25067 - RNA, 19 nt, Artificial Sequence
  Description of Artificial Sequence: Synthetic oligonucleotide
  Antisense strand to SEQ ID NO: 25066
auacuuauuaacuucccuu

SEQ ID NO: 25068 - RNA, 19 nt, Artificial Sequence
  Description of Artificial Sequence: Synthetic oligonucleotide
  Sense strand starting at position 3240 of SEQ ID NO: 281
uuguucuuaagggaaguua

SEQ ID NO: 25069 - RNA, 19 nt, Artificial Sequence
  Description of Artificial Sequence: Synthetic oligonucleotide
  Antisense strand to SEQ ID NO: 25068
uaacuucccuuaagaacaa

SEQ ID NO: 25070 - RNA, 19 nt, Artificial Sequence
  Description of Artificial Sequence: Synthetic oligonucleotide
  Sense strand starting at position 3239 of SEQ ID NO: 281
uuuguucuuaagggaaguu

SEQ ID NO: 25071 - RNA, 19 nt, Artificial Sequence
  Description of Artificial Sequence: Synthetic oligonucleotide
  Antisense strand to SEQ ID NO: 25070
aacuucccuuaagaacaaa

SEQ ID NO: 25072 - RNA, 19 nt, Artificial Sequence
  Description of Artificial Sequence: Synthetic oligonucleotide
  Sense strand starting at position 3203 of SEQ ID NO: 281
gcuuauaggcaagggaaua

SEQ ID NO: 25073 - RNA, 19 nt, Artificial Sequence
  Description of Artificial Sequence: Synthetic oligonucleotide
  Antisense strand to SEQ ID NO: 25072
uauucccuugccuauaagc

SEQ ID NO: 25074 - RNA, 19 nt, Artificial Sequence
  Description of Artificial Sequence: Synthetic oligonucleotide
  Sense strand starting at position 3182 of SEQ ID NO: 281
uagugugauaggcaauuga

SEQ ID NO: 25075 - RNA, 19 nt, Artificial Sequence
  Description of Artificial Sequence: Synthetic oligonucleotide
  Antisense strand to SEQ ID NO: 25074
ucaauugccuaucacacua

SEQ ID NO: 25076 - RNA, 19 nt, Artificial Sequence
  Description of Artificial Sequence: Synthetic oligonucleotide
  Sense strand starting at position 3180 of SEQ ID NO: 281
ccuagugugauaggcaauu

SEQ ID NO: 25077 - RNA, 19 nt, Artificial Sequence
  Description of Artificial Sequence: Synthetic oligonucleotide
  Antisense strand to SEQ ID NO: 25076
aauugccuaucacacuagg

SEQ ID NO: 25078 - RNA, 19 nt, Artificial Sequence
  Description of Artificial Sequence: Synthetic oligonucleotide
  Sense strand starting at position 3074 of SEQ ID NO: 281
guccuacagguguagaguu

SEQ ID NO: 25079 - RNA, 19 nt, Artificial Sequence
  Description of Artificial Sequence: Synthetic oligonucleotide
  Antisense strand to SEQ ID NO: 25078
aacucuacaccuguaggac

SEQ ID NO: 25080 - RNA, 19 nt, Artificial Sequence
  Description of Artificial Sequence: Synthetic oligonucleotide
  Sense strand starting at position 3002 of SEQ ID NO: 281
agucucuuucccugcuaca

SEQ ID NO: 25081 - RNA, 19 nt, Artificial Sequence
  Description of Artificial Sequence: Synthetic oligonucleotide
  Antisense strand to SEQ ID NO: 25080
uguagcagggaaagagacu

SEQ ID NO: 25082 - RNA, 19 nt, Artificial Sequence
  Description of Artificial Sequence: Synthetic oligonucleotide
  Sense strand starting at position 2608 of SEQ ID NO: 281
guuauuuccuuucugguaa

SEQ ID NO: 25083 - RNA, 19 nt, Artificial Sequence
  Description of Artificial Sequence: Synthetic oligonucleotide
  Antisense strand to SEQ ID NO: 25082
uuaccagaaaggaaauaac

SEQ ID NO: 25084 - RNA, 19 nt, Artificial Sequence
  Description of Artificial Sequence: Synthetic oligonucleotide
  Sense strand starting at position 2596 of SEQ ID NO: 281
cagccauggucaguuauuu

SEQ ID NO: 25085 - RNA, 19 nt, Artificial Sequence
  Description of Artificial Sequence: Synthetic oligonucleotide
  Antisense strand to SEQ ID NO: 25084
aaauaacugaccauggcug

SEQ ID NO: 25086 - RNA, 19 nt, Artificial Sequence
  Description of Artificial Sequence: Synthetic oligonucleotide
  Sense strand starting at position 2545 of SEQ ID NO: 281
aucauugucugacuuaaag

SEQ ID NO: 25087 - RNA, 19 nt, Artificial Sequence
  Description of Artificial Sequence: Synthetic oligonucleotide
  Antisense strand to SEQ ID NO: 25086
cuuuaagucagacaaugau

SEQ ID NO: 25088 - RNA, 19 nt, Artificial Sequence
  Description of Artificial Sequence: Synthetic oligonucleotide
  Sense strand starting at position 2542 of SEQ ID NO: 281
cccaucauugucugacuua

SEQ ID NO: 25089 - RNA, 19 nt, Artificial Sequence
  Description of Artificial Sequence: Synthetic oligonucleotide
  Antisense strand to SEQ ID NO: 25088
uaagucagacaaugauggg

SEQ ID NO: 25090 - RNA, 19 nt, Artificial Sequence
  Description of Artificial Sequence: Synthetic oligonucleotide
  Sense strand starting at position 2136 of SEQ ID NO: 281
ugacuagaucuccgguuac

SEQ ID NO: 25091 - RNA, 19 nt, Artificial Sequence
  Description of Artificial Sequence: Synthetic oligonucleotide
  Antisense strand to SEQ ID NO: 25090
guaaccggagaucuaguca

SEQ ID NO: 25092 - RNA, 19 nt, Artificial Sequence
  Description of Artificial Sequence: Synthetic oligonucleotide
  Sense strand starting at position 2135 of SEQ ID NO: 281
cugacuagaucuccgguua

SEQ ID NO: 25093 - RNA, 19 nt, Artificial Sequence
  Description of Artificial Sequence: Synthetic oligonucleotide
  Antisense strand to SEQ ID NO: 25092
uaaccggagaucuagucag

SEQ ID NO: 25094 - RNA, 19 nt, Artificial Sequence
  Description of Artificial Sequence: Synthetic oligonucleotide
  Sense strand starting at position 1720 of SEQ ID NO: 281
ccauccuccuuguuugaca

SEQ ID NO: 25095 - RNA, 19 nt, Artificial Sequence
  Description of Artificial Sequence: Synthetic oligonucleotide
  Antisense strand to SEQ ID NO: 25094
ugucaaacaaggaggaugg

SEQ ID NO: 25096 - RNA, 19 nt, Artificial Sequence
  Description of Artificial Sequence: Synthetic oligonucleotide
  Sense strand starting at position 1675 of SEQ ID NO: 281
gagaacugagcucaguguu

SEQ ID NO: 25097 - RNA, 19 nt, Artificial Sequence
  Description of Artificial Sequence: Synthetic oligonucleotide
  Antisense strand to SEQ ID NO: 25096
aacacugagcucaguucuc

SEQ ID NO: 25098 - RNA, 19 nt, Artificial Sequence
  Description of Artificial Sequence: Synthetic oligonucleotide
  Sense strand starting at position 1655 of SEQ ID NO: 281
guucaacuuccguggugau

SEQ ID NO: 25099 - RNA, 19 nt, Artificial Sequence
  Description of Artificial Sequence: Synthetic oligonucleotide
  Antisense strand to SEQ ID NO: 25098
aucaccacggaaguugaac

SEQ ID NO: 25100 - RNA, 19 nt, Artificial Sequence
  Description of Artificial Sequence: Synthetic oligonucleotide
  Sense strand starting at position 1557 of SEQ ID NO: 281
ccaauucucugggaaagga

SEQ ID NO: 25101 - RNA, 19 nt, Artificial Sequence
  Description of Artificial Sequence: Synthetic oligonucleotide
  Antisense strand to SEQ ID NO: 25100
uccuuucccagagaauugg

SEQ ID NO: 25102 - RNA, 19 nt, Artificial Sequence
  Description of Artificial Sequence: Synthetic oligonucleotide
  Sense strand starting at position 1554 of SEQ ID NO: 281
ucuccaauucucugggaaa

SEQ ID NO: 25103 - RNA, 19 nt, Artificial Sequence
  Description of Artificial Sequence: Synthetic oligonucleotide
  Antisense strand to SEQ ID NO: 25102
uuucccagagaauuggaga

SEQ ID NO: 25104 - RNA, 19 nt, Artificial Sequence
  Description of Artificial Sequence: Synthetic oligonucleotide
  Sense strand starting at position 1553 of SEQ ID NO: 281
uucuccaauucucugggaa

SEQ ID NO: 25105 - RNA, 19 nt, Artificial Sequence
  Description of Artificial Sequence: Synthetic oligonucleotide
  Antisense strand to SEQ ID NO: 25104
uucccagagaauuggagaa

SEQ ID NO: 25106 - RNA, 19 nt, Artificial Sequence
  Description of Artificial Sequence: Synthetic oligonucleotide
  Sense strand starting at position 1522 of SEQ ID NO: 281
acuucugugucuuuacuaa

SEQ ID NO: 25107 - RNA, 19 nt, Artificial Sequence
  Description of Artificial Sequence: Synthetic oligonucleotide
  Antisense strand to SEQ ID NO: 25106
uuaguaaagacacagaagu

SEQ ID NO: 25108 - RNA, 19 nt, Artificial Sequence
  Description of Artificial Sequence: Synthetic oligonucleotide
  Sense strand starting at position 1296 of SEQ ID NO: 281
cuuugauaugacuggauca

SEQ ID NO: 25109 - RNA, 19 nt, Artificial Sequence
  Description of Artificial Sequence: Synthetic oligonucleotide
  Antisense strand to SEQ ID NO: 25108
ugauccagucauaucaaag

SEQ ID NO: 25110 - RNA, 19 nt, Artificial Sequence
  Description of Artificial Sequence: Synthetic oligonucleotide
  Sense strand starting at position 1246 of SEQ ID NO: 281
ugacccaucucuguuaguu

SEQ ID NO: 25111 - RNA, 19 nt, Artificial Sequence
  Description of Artificial Sequence: Synthetic oligonucleotide
  Antisense strand to SEQ ID NO: 25110
aacuaacagagauggguca

SEQ ID NO: 25112 - RNA, 19 nt, Artificial Sequence
  Description of Artificial Sequence: Synthetic oligonucleotide
  Sense strand starting at position 1082 of SEQ ID NO: 281
cuguauuugugagacaucu

SEQ ID NO: 25113 - RNA, 19 nt, Artificial Sequence
  Description of Artificial Sequence: Synthetic oligonucleotide
  Antisense strand to SEQ ID NO: 25112
agaugucucacaaauacag

SEQ ID NO: 25114 - RNA, 19 nt, Artificial Sequence
  Description of Artificial Sequence: Synthetic oligonucleotide
  Sense strand starting at position 1080 of SEQ ID NO: 281
uacuguauuugugagacau

SEQ ID NO: 25115 - RNA, 19 nt, Artificial Sequence
  Description of Artificial Sequence: Synthetic oligonucleotide
  Antisense strand to SEQ ID NO: 25114
augucucacaaauacagua

SEQ ID NO: 25116 - RNA, 19 nt, Artificial Sequence
  Description of Artificial Sequence: Synthetic oligonucleotide
  Sense strand starting at position 1071 of SEQ ID NO: 281
uccagaucuuacuguauuu

SEQ ID NO: 25117 - RNA, 19 nt, Artificial Sequence
  Description of Artificial Sequence: Synthetic oligonucleotide
  Antisense strand to SEQ ID NO: 25116
aaauacaguaagaucugga

SEQ ID NO: 25118 - RNA, 19 nt, Artificial Sequence
  Description of Artificial Sequence: Synthetic oligonucleotide
  Sense strand starting at position 1061 of SEQ ID NO: 281
uuuaguaugcuccagaucu

SEQ ID NO: 25119 - RNA, 19 nt, Artificial Sequence
  Description of Artificial Sequence: Synthetic oligonucleotide
  Antisense strand to SEQ ID NO: 25118
agaucuggagcauacuaaa

SEQ ID NO: 25120 - RNA, 19 nt, Artificial Sequence
  Description of Artificial Sequence: Synthetic oligonucleotide
  Sense strand starting at position 909 of SEQ ID NO: 281
uguaaugaggccuguuacu

SEQ ID NO: 25121 - RNA, 19 nt, Artificial Sequence
  Description of Artificial Sequence: Synthetic oligonucleotide
  Antisense strand to SEQ ID NO: 25120
aguaacaggccucauuaca

SEQ ID NO: 25122 - RNA, 19 nt, Artificial Sequence
  Description of Artificial Sequence: Synthetic oligonucleotide
  Sense strand starting at position 898 of SEQ ID NO: 281
ggauccauaucuguaauga

SEQ ID NO: 25123 - RNA, 19 nt, Artificial Sequence
  Description of Artificial Sequence: Synthetic oligonucleotide
  Antisense strand to SEQ ID NO: 25122
ucauuacagauauggaucc

SEQ ID NO: 25124 - RNA, 19 nt, Artificial Sequence
  Description of Artificial Sequence: Synthetic oligonucleotide
  Sense strand starting at position 897 of SEQ ID NO: 281
gggauccauaucuguaaug

SEQ ID NO: 25125 - RNA, 19 nt, Artificial Sequence
  Description of Artificial Sequence: Synthetic oligonucleotide
  Antisense strand to SEQ ID NO: 25124
cauuacagauauggauccc

SEQ ID NO: 25126 - RNA, 19 nt, Artificial Sequence
  Description of Artificial Sequence: Synthetic oligonucleotide
  Sense strand starting at position 896 of SEQ ID NO: 281
ugggauccauaucuguaau

SEQ ID NO: 25127 - RNA, 19 nt, Artificial Sequence
  Description of Artificial Sequence: Synthetic oligonucleotide
  Antisense strand to SEQ ID NO: 25126
auuacagauauggauccca

SEQ ID NO: 25128 - RNA, 19 nt, Artificial Sequence
  Description of Artificial Sequence: Synthetic oligonucleotide
  Sense strand starting at position 556 of SEQ ID NO: 281
agcaaagucucagaacuaa

SEQ ID NO: 25129 - RNA, 19 nt, Artificial Sequence
  Description of Artificial Sequence: Synthetic oligonucleotide
  Antisense strand to SEQ ID NO: 25128
uuaguucugagacuuugcu

SEQ ID NO: 25130 - RNA, 19 nt, Artificial Sequence
  Description of Artificial Sequence: Synthetic oligonucleotide
  Sense strand starting at position 161 of SEQ ID NO: 281
cgcccagcccaucauaaau

SEQ ID NO: 25131 - RNA, 19 nt, Artificial Sequence
  Description of Artificial Sequence: Synthetic oligonucleotide
  Antisense strand to SEQ ID NO: 25130
auuuaugaugggcugggcg

SEQ ID NO: 25132 - RNA, 19 nt, Artificial Sequence
  Description of Artificial Sequence: Synthetic oligonucleotide
  Sense strand starting at position 3662 of SEQ ID NO: 280
acaugagaauugucucauu

SEQ ID NO: 25133 - RNA, 19 nt, Artificial Sequence
  Description of Artificial Sequence: Synthetic oligonucleotide
  Antisense strand to SEQ ID NO: 25132
aaugagacaauucucaugu

SEQ ID NO: 25134 - RNA, 19 nt, Artificial Sequence
  Description of Artificial Sequence: Synthetic oligonucleotide
  Sense strand starting at position 3349 of SEQ ID NO: 280
gugguaacagcucaaugga

SEQ ID NO: 25135 - RNA, 19 nt, Artificial Sequence
  Description of Artificial Sequence: Synthetic oligonucleotide
  Antisense strand to SEQ ID NO: 25134
uccauugagcuguuaccac

SEQ ID NO: 25136 - RNA, 19 nt, Artificial Sequence
  Description of Artificial Sequence: Synthetic oligonucleotide
  Sense strand starting at position 3328 of SEQ ID NO: 280
ugucaauggucagaagaug

SEQ ID NO: 25137 - RNA, 19 nt, Artificial Sequence
  Description of Artificial Sequence: Synthetic oligonucleotide
  Antisense strand to SEQ ID NO: 25136
caucuucugaccauugaca

SEQ ID NO: 25138 - RNA, 19 nt, Artificial Sequence
  Description of Artificial Sequence: Synthetic oligonucleotide
  Sense strand starting at position 3325 of SEQ ID NO: 280
uccugucaauggucagaag

SEQ ID NO: 25139 - RNA, 19 nt, Artificial Sequence
  Description of Artificial Sequence: Synthetic oligonucleotide
  Antisense strand to SEQ ID NO: 25138
cuucugaccauugacagga

SEQ ID NO: 25140 - RNA, 19 nt, Artificial Sequence
  Description of Artificial Sequence: Synthetic oligonucleotide
  Sense strand starting at position 3278 of SEQ ID NO: 280
augcaagugucuguggaaa

SEQ ID NO: 25141 - RNA, 19 nt, Artificial Sequence
  Description of Artificial Sequence: Synthetic oligonucleotide
  Antisense strand to SEQ ID NO: 25140
uuuccacagacacuugcau

SEQ ID NO: 25142 - RNA, 19 nt, Artificial Sequence
  Description of Artificial Sequence: Synthetic oligonucleotide
  Sense strand starting at position 3277 of SEQ ID NO: 280
uaugcaagugucuguggaa

SEQ ID NO: 25143 - RNA, 19 nt, Artificial Sequence
  Description of Artificial Sequence: Synthetic oligonucleotide
  Antisense strand to SEQ ID NO: 25142
uuccacagacacuugcaua

SEQ ID NO: 25144 - RNA, 19 nt, Artificial Sequence
  Description of Artificial Sequence: Synthetic oligonucleotide
  Sense strand starting at position 3236 of SEQ ID NO: 280
guuaauaaguaucugcuca

SEQ ID NO: 25145 - RNA, 19 nt, Artificial Sequence
  Description of Artificial Sequence: Synthetic oligonucleotide
  Antisense strand to SEQ ID NO: 25144
ugagcagauacuuauuaac

SEQ ID NO: 25146 - RNA, 19 nt, Artificial Sequence
  Description of Artificial Sequence: Synthetic oligonucleotide
  Sense strand starting at position 3229 of SEQ ID NO: 280
aagggaaguuaauaaguau

SEQ ID NO: 25147 - RNA, 19 nt, Artificial Sequence
  Description of Artificial Sequence: Synthetic oligonucleotide
  Antisense strand to SEQ ID NO: 25146
auacuuauuaacuucccuu

SEQ ID NO: 25148 - RNA, 19 nt, Artificial Sequence
  Description of Artificial Sequence: Synthetic oligonucleotide
  Sense strand starting at position 3221 of SEQ ID NO: 280
uuguucuuaagggaaguua

SEQ ID NO: 25149 - RNA, 19 nt, Artificial Sequence
  Description of Artificial Sequence: Synthetic oligonucleotide
  Antisense strand to SEQ ID NO: 25148
uaacuucccuuaagaacaa

SEQ ID NO: 25150 - RNA, 19 nt, Artificial Sequence
  Description of Artificial Sequence: Synthetic oligonucleotide
  Sense strand starting at position 3220 of SEQ ID NO: 280
uuuguucuuaagggaaguu

SEQ ID NO: 25151 - RNA, 19 nt, Artificial Sequence
  Description of Artificial Sequence: Synthetic oligonucleotide
  Antisense strand to SEQ ID NO: 25150
aacuucccuuaagaacaaa

SEQ ID NO: 25152 - RNA, 19 nt, Artificial Sequence
  Description of Artificial Sequence: Synthetic oligonucleotide
  Sense strand starting at position 3184 of SEQ ID NO: 280
gcuuauaggcaagggaaua

SEQ ID NO: 25153 - RNA, 19 nt, Artificial Sequence
  Description of Artificial Sequence: Synthetic oligonucleotide
  Antisense strand to SEQ ID NO: 25152
uauucccuugccuauaagc

SEQ ID NO: 25154 - RNA, 19 nt, Artificial Sequence
  Description of Artificial Sequence: Synthetic oligonucleotide
  Sense strand starting at position 3163 of SEQ ID NO: 280
uagugugauaggcaauuga

SEQ ID NO: 25155 - RNA, 19 nt, Artificial Sequence
  Description of Artificial Sequence: Synthetic oligonucleotide
  Antisense strand to SEQ ID NO: 25154
ucaauugccuaucacacua

SEQ ID NO: 25156 - RNA, 19 nt, Artificial Sequence
  Description of Artificial Sequence: Synthetic oligonucleotide
  Sense strand starting at position 3161 of SEQ ID NO: 280
ccuagugugauaggcaauu

SEQ ID NO: 25157 - RNA, 19 nt, Artificial Sequence
  Description of Artificial Sequence: Synthetic oligonucleotide
  Antisense strand to SEQ ID NO: 25156
aauugccuaucacacuagg

SEQ ID NO: 25158 - RNA, 19 nt, Artificial Sequence
  Description of Artificial Sequence: Synthetic oligonucleotide
  Sense strand starting at position 3055 of SEQ ID NO: 280
guccuacagguguagaguu

SEQ ID NO: 25159 - RNA, 19 nt, Artificial Sequence
  Description of Artificial Sequence: Synthetic oligonucleotide
  Antisense strand to SEQ ID NO: 25158
aacucuacaccuguaggac

SEQ ID NO: 25160 - RNA, 19 nt, Artificial Sequence
  Description of Artificial Sequence: Synthetic oligonucleotide
  Sense strand starting at position 2983 of SEQ ID NO: 280
agucucuuucccugcuaca

SEQ ID NO: 25161 - RNA, 19 nt, Artificial Sequence
  Description of Artificial Sequence: Synthetic oligonucleotide
  Antisense strand to SEQ ID NO: 25160
uguagcagggaaagagacu

SEQ ID NO: 25162 - RNA, 19 nt, Artificial Sequence
  Description of Artificial Sequence: Synthetic oligonucleotide
  Sense strand starting at position 2589 of SEQ ID NO: 280
guuauuuccuuucugguaa

SEQ ID NO: 25163 - RNA, 19 nt, Artificial Sequence
  Description of Artificial Sequence: Synthetic oligonucleotide
  Antisense strand to SEQ ID NO: 25162
uuaccagaaaggaaauaac

SEQ ID NO: 25164 - RNA, 19 nt, Artificial Sequence
  Description of Artificial Sequence: Synthetic oligonucleotide
  Sense strand starting at position 2577 of SEQ ID NO: 280
cagccauggucaguuauuu

SEQ ID NO: 25165 - RNA, 19 nt, Artificial Sequence
  Description of Artificial Sequence: Synthetic oligonucleotide
  Antisense strand to SEQ ID NO: 25164
aaauaacugaccauggcug

SEQ ID NO: 25166 - RNA, 19 nt, Artificial Sequence
  Description of Artificial Sequence: Synthetic oligonucleotide
  Sense strand starting at position 2526 of SEQ ID NO: 280
aucauugucugacuuaaag

SEQ ID NO: 25167 - RNA, 19 nt, Artificial Sequence
  Description of Artificial Sequence: Synthetic oligonucleotide
  Antisense strand to SEQ ID NO: 25166
cuuuaagucagacaaugau

SEQ ID NO: 25168 - RNA, 19 nt, Artificial Sequence
  Description of Artificial Sequence: Synthetic oligonucleotide
  Sense strand starting at position 2523 of SEQ ID NO: 280
cccaucauugucugacuua

SEQ ID NO: 25169 - RNA, 19 nt, Artificial Sequence
  Description of Artificial Sequence: Synthetic oligonucleotide
  Antisense strand to SEQ ID NO: 25168
uaagucagacaaugauggg

SEQ ID NO: 25170 - RNA, 19 nt, Artificial Sequence
  Description of Artificial Sequence: Synthetic oligonucleotide
  Sense strand starting at position 2117 of SEQ ID NO: 280
ugacuagaucuccgguuac

SEQ ID NO: 25171 - RNA, 19 nt, Artificial Sequence
  Description of Artificial Sequence: Synthetic oligonucleotide
  Antisense strand to SEQ ID NO: 25170
guaaccggagaucuaguca

SEQ ID NO: 25172 - RNA, 19 nt, Artificial Sequence
  Description of Artificial Sequence: Synthetic oligonucleotide
  Sense strand starting at position 2116 of SEQ ID NO: 280
cugacuagaucuccgguua

SEQ ID NO: 25173 - RNA, 19 nt, Artificial Sequence
  Description of Artificial Sequence: Synthetic oligonucleotide
  Antisense strand to SEQ ID NO: 25172
uaaccggagaucuagucag

SEQ ID NO: 25174 - RNA, 19 nt, Artificial Sequence
  Description of Artificial Sequence: Synthetic oligonucleotide
  Sense strand starting at position 1701 of SEQ ID NO: 280
ccauccuccuuguuugaca

SEQ ID NO: 25175 - RNA, 19 nt, Artificial Sequence
  Description of Artificial Sequence: Synthetic oligonucleotide
  Antisense strand to SEQ ID NO: 25174
ugucaaacaaggaggaugg

SEQ ID NO: 25176 - RNA, 19 nt, Artificial Sequence
  Description of Artificial Sequence: Synthetic oligonucleotide
  Sense strand starting at position 1656 of SEQ ID NO: 280
gagaacugagcucaguguu

SEQ ID NO: 25177 - RNA, 19 nt, Artificial Sequence
  Description of Artificial Sequence: Synthetic oligonucleotide
  Antisense strand to SEQ ID NO: 25176
aacacugagcucaguucuc

SEQ ID NO: 25178 - RNA, 19 nt, Artificial Sequence
  Description of Artificial Sequence: Synthetic oligonucleotide
  Sense strand starting at position 1636 of SEQ ID NO: 280
guucaacuuccguggugau

SEQ ID NO: 25179 - RNA, 19 nt, Artificial Sequence
  Description of Artificial Sequence: Synthetic oligonucleotide
  Antisense strand to SEQ ID NO: 25178
aucaccacggaaguugaac

SEQ ID NO: 25180 - RNA, 19 nt, Artificial Sequence
  Description of Artificial Sequence: Synthetic oligonucleotide
  Sense strand starting at position 1538 of SEQ ID NO: 280
ccaauucucugggaaagga

SEQ ID NO: 25181 - RNA, 19 nt, Artificial Sequence
  Description of Artificial Sequence: Synthetic oligonucleotide
  Antisense strand to SEQ ID NO: 25180
uccuuucccagagaauugg

SEQ ID NO: 25182 - RNA, 19 nt, Artificial Sequence
  Description of Artificial Sequence: Synthetic oligonucleotide
  Sense strand starting at position 1535 of SEQ ID NO: 280
ucuccaauucucugggaaa

SEQ ID NO: 25183 - RNA, 19 nt, Artificial Sequence
  Description of Artificial Sequence: Synthetic oligonucleotide
  Antisense strand to SEQ ID NO: 25182
uuucccagagaauuggaga

SEQ ID NO: 25184 - RNA, 19 nt, Artificial Sequence
  Description of Artificial Sequence: Synthetic oligonucleotide
  Sense strand starting at position 1534 of SEQ ID NO: 280
uucuccaauucucugggaa

SEQ ID NO: 25185 - RNA, 19 nt, Artificial Sequence
  Description of Artificial Sequence: Synthetic oligonucleotide
  Antisense strand to SEQ ID NO: 25184
uucccagagaauuggagaa

SEQ ID NO: 25186 - RNA, 19 nt, Artificial Sequence
  Description of Artificial Sequence: Synthetic oligonucleotide
  Sense strand starting at position 1503 of SEQ ID NO: 280
acuucugugucuuuacuaa

SEQ ID NO: 25187 - RNA, 19 nt, Artificial Sequence
  Description of Artificial Sequence: Synthetic oligonucleotide
  Antisense strand to SEQ ID NO: 25186
uuaguaaagacacagaagu

SEQ ID NO: 25188 - RNA, 19 nt, Artificial Sequence
  Description of Artificial Sequence: Synthetic oligonucleotide
  Sense strand starting at position 1277 of SEQ ID NO: 280
cuuugauaugacuggauca

SEQ ID NO: 25189 - RNA, 19 nt, Artificial Sequence
  Description of Artificial Sequence: Synthetic oligonucleotide
  Antisense strand to SEQ ID NO: 25188
ugauccagucauaucaaag

SEQ ID NO: 25190 - RNA, 19 nt, Artificial Sequence
  Description of Artificial Sequence: Synthetic oligonucleotide
  Sense strand starting at position 1227 of SEQ ID NO: 280
ugacccaucucuguuaguu

SEQ ID NO: 25191 - RNA, 19 nt, Artificial Sequence
  Description of Artificial Sequence: Synthetic oligonucleotide
  Antisense strand to SEQ ID NO: 25190
aacuaacagagauggguca

SEQ ID NO: 25192 - RNA, 19 nt, Artificial Sequence
  Description of Artificial Sequence: Synthetic oligonucleotide
  Sense strand starting at position 1063 of SEQ ID NO: 280
cuguauuugugagacaucu

SEQ ID NO: 25193 - RNA, 19 nt, Artificial Sequence
  Description of Artificial Sequence: Synthetic oligonucleotide
  Antisense strand to SEQ ID NO: 25192
agaugucucacaaauacag

SEQ ID NO: 25194 - RNA, 19 nt, Artificial Sequence
  Description of Artificial Sequence: Synthetic oligonucleotide
  Sense strand starting at position 1061 of SEQ ID NO: 280
uacuguauuugugagacau

SEQ ID NO: 25195 - RNA, 19 nt, Artificial Sequence
  Description of Artificial Sequence: Synthetic oligonucleotide
  Antisense strand to SEQ ID NO: 25194
augucucacaaauacagua

SEQ ID NO: 25196 - RNA, 19 nt, Artificial Sequence
  Description of Artificial Sequence: Synthetic oligonucleotide
  Sense strand starting at position 1052 of SEQ ID NO: 280
uccagaucuuacuguauuu

SEQ ID NO: 25197 - RNA, 19 nt, Artificial Sequence
  Description of Artificial Sequence: Synthetic oligonucleotide
  Antisense strand to SEQ ID NO: 25196
aaauacaguaagaucugga

SEQ ID NO: 25198 - RNA, 19 nt, Artificial Sequence
  Description of Artificial Sequence: Synthetic oligonucleotide
  Sense strand starting at position 1042 of SEQ ID NO: 280
uuuaguaugcuccagaucu

SEQ ID NO: 25199 - RNA, 19 nt, Artificial Sequence
  Description of Artificial Sequence: Synthetic oligonucleotide
  Antisense strand to SEQ ID NO: 25198
agaucuggagcauacuaaa

SEQ ID NO: 25200 - RNA, 19 nt, Artificial Sequence
  Description of Artificial Sequence: Synthetic oligonucleotide
  Sense strand starting at position 890 of SEQ ID NO: 280
uguaaugaggccuguuacu

SEQ ID NO: 25201 - RNA, 19 nt, Artificial Sequence
  Description of Artificial Sequence: Synthetic oligonucleotide
  Antisense strand to SEQ ID NO: 25200
aguaacaggccucauuaca

SEQ ID NO: 25202 - RNA, 19 nt, Artificial Sequence
  Description of Artificial Sequence: Synthetic oligonucleotide
  Sense strand starting at position 879 of SEQ ID NO: 280
ggauccauaucuguaauga

SEQ ID NO: 25203 - RNA, 19 nt, Artificial Sequence
  Description of Artificial Sequence: Synthetic oligonucleotide
  Antisense strand to SEQ ID NO: 25202
ucauuacagauauggaucc

SEQ ID NO: 25204 - RNA, 19 nt, Artificial Sequence
  Description of Artificial Sequence: Synthetic oligonucleotide
  Sense strand starting at position 878 of SEQ ID NO: 280
gggauccauaucuguaaug

SEQ ID NO: 25205 - RNA, 19 nt, Artificial Sequence
  Description of Artificial Sequence: Synthetic oligonucleotide
  Antisense strand to SEQ ID NO: 25204
cauuacagauauggauccc

SEQ ID NO: 25206 - RNA, 19 nt, Artificial Sequence
  Description of Artificial Sequence: Synthetic oligonucleotide
  Sense strand starting at position 877 of SEQ ID NO: 280
ugggauccauaucuguaau

SEQ ID NO: 25207 - RNA, 19 nt, Artificial Sequence
  Description of Artificial Sequence: Synthetic oligonucleotide
  Antisense strand to SEQ ID NO: 25206
auuacagauauggauccca

SEQ ID NO: 25208 - RNA, 19 nt, Artificial Sequence
  Description of Artificial Sequence: Synthetic oligonucleotide
  Sense strand starting at position 537 of SEQ ID NO: 280
agcaaagucucagaacuaa

SEQ ID NO: 25209 - RNA, 19 nt, Artificial Sequence
  Description of Artificial Sequence: Synthetic oligonucleotide
  Antisense strand to SEQ ID NO: 25208
uuaguucugagacuuugcu

SEQ ID NO: 25210 - RNA, 19 nt, Artificial Sequence
  Description of Artificial Sequence: Synthetic oligonucleotide
  Sense strand starting at position 142 of SEQ ID NO: 280
cgcccagcccaucauaaau

SEQ ID NO: 25211 - RNA, 19 nt, Artificial Sequence
  Description of Artificial Sequence: Synthetic oligonucleotide
  Antisense strand to SEQ ID NO: 25210
auuuaugaugggcugggcg

SEQ ID NO: 25212 - RNA, 19 nt, Artificial Sequence
  Description of Artificial Sequence: Synthetic oligonucleotide
  Sense strand starting at position 3877 of SEQ ID NO: 282
aguccuuguuccuagaacu

SEQ ID NO: 25213 - RNA, 19 nt, Artificial Sequence
  Description of Artificial Sequence: Synthetic oligonucleotide
  Antisense strand to SEQ ID NO: 25212
aguucuaggaacaaggacu

SEQ ID NO: 25214 - RNA, 19 nt, Artificial Sequence
  Description of Artificial Sequence: Synthetic oligonucleotide
  Sense strand starting at position 3876 of SEQ ID NO: 282
gaguccuuguuccuagaac

SEQ ID NO: 25215 - RNA, 19 nt, Artificial Sequence
  Description of Artificial Sequence: Synthetic oligonucleotide
  Antisense strand to SEQ ID NO: 25214
guucuaggaacaaggacuc

SEQ ID NO: 25216 - RNA, 19 nt, Artificial Sequence
  Description of Artificial Sequence: Synthetic oligonucleotide
  Sense strand starting at position 3874 of SEQ ID NO: 282
aggaguccuuguuccuaga

SEQ ID NO: 25217 - RNA, 19 nt, Artificial Sequence
  Description of Artificial Sequence: Synthetic oligonucleotide
  Antisense strand to SEQ ID NO: 25216
ucuaggaacaaggacuccu

SEQ ID NO: 25218 - RNA, 19 nt, Artificial Sequence
  Description of Artificial Sequence: Synthetic oligonucleotide
  Sense strand starting at position 3829 of SEQ ID NO: 282
ggagaaagaucuuaaucuu

SEQ ID NO: 25219 - RNA, 19 nt, Artificial Sequence
  Description of Artificial Sequence: Synthetic oligonucleotide
  Antisense strand to SEQ ID NO: 25218
aagauuaagaucuuucucc

SEQ ID NO: 25220 - RNA, 19 nt, Artificial Sequence
  Description of Artificial Sequence: Synthetic oligonucleotide
  Sense strand starting at position 3801 of SEQ ID NO: 282
agugguuaaggcuagaaag

SEQ ID NO: 25221 - RNA, 19 nt, Artificial Sequence
  Description of Artificial Sequence: Synthetic oligonucleotide
  Antisense strand to SEQ ID NO: 25220
cuuucuagccuuaaccacu

SEQ ID NO: 25222 - RNA, 19 nt, Artificial Sequence
  Description of Artificial Sequence: Synthetic oligonucleotide
  Sense strand starting at position 3798 of SEQ ID NO: 282
uagagugguuaaggcuaga

SEQ ID NO: 25223 - RNA, 19 nt, Artificial Sequence
  Description of Artificial Sequence: Synthetic oligonucleotide
  Antisense strand to SEQ ID NO: 25222
ucuagccuuaaccacucua

SEQ ID NO: 25224 - RNA, 19 nt, Artificial Sequence
  Description of Artificial Sequence: Synthetic oligonucleotide
  Sense strand starting at position 3791 of SEQ ID NO: 282
guagaaguagagugguuaa

SEQ ID NO: 25225 - RNA, 19 nt, Artificial Sequence
  Description of Artificial Sequence: Synthetic oligonucleotide
  Antisense strand to SEQ ID NO: 25224
uuaaccacucuacuucuac

SEQ ID NO: 25226 - RNA, 19 nt, Artificial Sequence
  Description of Artificial Sequence: Synthetic oligonucleotide
  Sense strand starting at position 3607 of SEQ ID NO: 282
ugugaaacucacugucuga

SEQ ID NO: 25227 - RNA, 19 nt, Artificial Sequence
  Description of Artificial Sequence: Synthetic oligonucleotide
  Antisense strand to SEQ ID NO: 25226
ucagacagugaguuucaca

SEQ ID NO: 25228 - RNA, 19 nt, Artificial Sequence
  Description of Artificial Sequence: Synthetic oligonucleotide
  Sense strand starting at position 3594 of SEQ ID NO: 282
cuuuauucuuaagugugaa

SEQ ID NO: 25229 - RNA, 19 nt, Artificial Sequence
  Description of Artificial Sequence: Synthetic oligonucleotide
  Antisense strand to SEQ ID NO: 25228
uucacacuuaagaauaaag

SEQ ID NO: 25230 - RNA, 19 nt, Artificial Sequence
  Description of Artificial Sequence: Synthetic oligonucleotide
  Sense strand starting at position 3591 of SEQ ID NO: 282
aggcuuuauucuuaagugu

SEQ ID NO: 25231 - RNA, 19 nt, Artificial Sequence
  Description of Artificial Sequence: Synthetic oligonucleotide
  Antisense strand to SEQ ID NO: 25230
acacuuaagaauaaagccu

SEQ ID NO: 25232 - RNA, 19 nt, Artificial Sequence
  Description of Artificial Sequence: Synthetic oligonucleotide
  Sense strand starting at position 3560 of SEQ ID NO: 282
aguagagauuggcuuuaca

SEQ ID NO: 25233 - RNA, 19 nt, Artificial Sequence
  Description of Artificial Sequence: Synthetic oligonucleotide
  Antisense strand to SEQ ID NO: 25232
uguaaagccaaucucuacu

SEQ ID NO: 25234 - RNA, 19 nt, Artificial Sequence
  Description of Artificial Sequence: Synthetic oligonucleotide
  Sense strand starting at position 3428 of SEQ ID NO: 282
auucuuguuggaugcagua

SEQ ID NO: 25235 - RNA, 19 nt, Artificial Sequence
  Description of Artificial Sequence: Synthetic oligonucleotide
  Antisense strand to SEQ ID NO: 25234
uacugcauccaacaagaau

SEQ ID NO: 25236 - RNA, 19 nt, Artificial Sequence
  Description of Artificial Sequence: Synthetic oligonucleotide
  Sense strand starting at position 3361 of SEQ ID NO: 282
ugugauuauuccuuuauuc

SEQ ID NO: 25237 - RNA, 19 nt, Artificial Sequence
  Description of Artificial Sequence: Synthetic oligonucleotide
  Antisense strand to SEQ ID NO: 25236
gaauaaaggaauaaucaca

SEQ ID NO: 25238 - RNA, 19 nt, Artificial Sequence
  Description of Artificial Sequence: Synthetic oligonucleotide
  Sense strand starting at position 3360 of SEQ ID NO: 282
cugugauuauuccuuuauu

SEQ ID NO: 25239 - RNA, 19 nt, Artificial Sequence
  Description of Artificial Sequence: Synthetic oligonucleotide
  Antisense strand to SEQ ID NO: 25238
aauaaaggaauaaucacag

SEQ ID NO: 25240 - RNA, 19 nt, Artificial Sequence
  Description of Artificial Sequence: Synthetic oligonucleotide
  Sense strand starting at position 3351 of SEQ ID NO: 282
uccucugcacugugauuau

SEQ ID NO: 25241 - RNA, 19 nt, Artificial Sequence
  Description of Artificial Sequence: Synthetic oligonucleotide
  Antisense strand to SEQ ID NO: 25240
auaaucacagugcagagga

SEQ ID NO: 25242 - RNA, 19 nt, Artificial Sequence
  Description of Artificial Sequence: Synthetic oligonucleotide
  Sense strand starting at position 3349 of SEQ ID NO: 282
ucuccucugcacugugauu

SEQ ID NO: 25243 - RNA, 19 nt, Artificial Sequence
  Description of Artificial Sequence: Synthetic oligonucleotide
  Antisense strand to SEQ ID NO: 25242
aaucacagugcagaggaga

SEQ ID NO: 25244 - RNA, 19 nt, Artificial Sequence
  Description of Artificial Sequence: Synthetic oligonucleotide
  Sense strand starting at position 3342 of SEQ ID NO: 282
gucugaaucuccucugcac

SEQ ID NO: 25245 - RNA, 19 nt, Artificial Sequence
  Description of Artificial Sequence: Synthetic oligonucleotide
  Antisense strand to SEQ ID NO: 25244
gugcagaggagauucagac

SEQ ID NO: 25246 - RNA, 19 nt, Artificial Sequence
  Description of Artificial Sequence: Synthetic oligonucleotide
  Sense strand starting at position 3325 of SEQ ID NO: 282
ccuaauuucuagggccagu

SEQ ID NO: 25247 - RNA, 19 nt, Artificial Sequence
  Description of Artificial Sequence: Synthetic oligonucleotide
  Antisense strand to SEQ ID NO: 25246
acuggcccuagaaauuagg

SEQ ID NO: 25248 - RNA, 19 nt, Artificial Sequence
  Description of Artificial Sequence: Synthetic oligonucleotide
  Sense strand starting at position 3234 of SEQ ID NO: 282
gaugauuggguugagucau

SEQ ID NO: 25249 - RNA, 19 nt, Artificial Sequence
  Description of Artificial Sequence: Synthetic oligonucleotide
  Antisense strand to SEQ ID NO: 25248
augacucaacccaaucauc

SEQ ID NO: 25250 - RNA, 19 nt, Artificial Sequence
  Description of Artificial Sequence: Synthetic oligonucleotide
  Sense strand starting at position 3233 of SEQ ID NO: 282
agaugauuggguugaguca

SEQ ID NO: 25251 - RNA, 19 nt, Artificial Sequence
  Description of Artificial Sequence: Synthetic oligonucleotide
  Antisense strand to SEQ ID NO: 25250
ugacucaacccaaucaucu

SEQ ID NO: 25252 - RNA, 19 nt, Artificial Sequence
  Description of Artificial Sequence: Synthetic oligonucleotide
  Sense strand starting at position 3231 of SEQ ID NO: 282
cuagaugauuggguugagu

SEQ ID NO: 25253 - RNA, 19 nt, Artificial Sequence
  Description of Artificial Sequence: Synthetic oligonucleotide
  Antisense strand to SEQ ID NO: 25252
acucaacccaaucaucuag

SEQ ID NO: 25254 - RNA, 19 nt, Artificial Sequence
  Description of Artificial Sequence: Synthetic oligonucleotide
  Sense strand starting at position 2165 of SEQ ID NO: 282
gugaaagagucguucacuu

SEQ ID NO: 25255 - RNA, 19 nt, Artificial Sequence
  Description of Artificial Sequence: Synthetic oligonucleotide
  Antisense strand to SEQ ID NO: 25254
aagugaacgacucuuucac

SEQ ID NO: 25256 - RNA, 19 nt, Artificial Sequence
  Description of Artificial Sequence: Synthetic oligonucleotide
  Sense strand starting at position 2120 of SEQ ID NO: 282
cggcaagaacucugccaga

SEQ ID NO: 25257 - RNA, 19 nt, Artificial Sequence
  Description of Artificial Sequence: Synthetic oligonucleotide
  Antisense strand to SEQ ID NO: 25256
ucuggcagaguucuugccg

SEQ ID NO: 25258 - RNA, 19 nt, Artificial Sequence
  Description of Artificial Sequence: Synthetic oligonucleotide
  Sense strand starting at position 815 of SEQ ID NO: 282
cagguaagucaguaacagu

SEQ ID NO: 25259 - RNA, 19 nt, Artificial Sequence
  Description of Artificial Sequence: Synthetic oligonucleotide
  Antisense strand to SEQ ID NO: 25258
acuguuacugacuuaccug

SEQ ID NO: 25260 - RNA, 19 nt, Artificial Sequence
  Description of Artificial Sequence: Synthetic oligonucleotide
  Sense strand starting at position 789 of SEQ ID NO: 282
accaaugcauguuaugaau

SEQ ID NO: 25261 - RNA, 19 nt, Artificial Sequence
  Description of Artificial Sequence: Synthetic oligonucleotide
  Antisense strand to SEQ ID NO: 25260
auucauaacaugcauuggu

SEQ ID NO: 25262 - RNA, 19 nt, Artificial Sequence
  Description of Artificial Sequence: Synthetic oligonucleotide
  Sense strand starting at position 760 of SEQ ID NO: 282
gguggaaucaauggcuaac

SEQ ID NO: 25263 - RNA, 19 nt, Artificial Sequence
  Description of Artificial Sequence: Synthetic oligonucleotide
  Antisense strand to SEQ ID NO: 25262
guuagccauugauuccacc

SEQ ID NO: 25264 - RNA, 19 nt, Artificial Sequence
  Description of Artificial Sequence: Synthetic oligonucleotide
  Sense strand starting at position 735 of SEQ ID NO: 282
accaguaguugcucaauaa

SEQ ID NO: 25265 - RNA, 19 nt, Artificial Sequence
  Description of Artificial Sequence: Synthetic oligonucleotide
  Antisense strand to SEQ ID NO: 25264
uuauugagcaacuacuggu

SEQ ID NO: 25266 - RNA, 19 nt, Artificial Sequence
  Description of Artificial Sequence: Synthetic oligonucleotide
  Sense strand starting at position 688 of SEQ ID NO: 282
ggucaauaaucaccuaaug

SEQ ID NO: 25267 - RNA, 19 nt, Artificial Sequence
  Description of Artificial Sequence: Synthetic oligonucleotide
  Antisense strand to SEQ ID NO: 25266
cauuaggugauuauugacc

SEQ ID NO: 25268 - RNA, 19 nt, Artificial Sequence
  Description of Artificial Sequence: Synthetic oligonucleotide
  Sense strand starting at position 640 of SEQ ID NO: 282
ugaaacucuugucuugaaa

SEQ ID NO: 25269 - RNA, 19 nt, Artificial Sequence
  Description of Artificial Sequence: Synthetic oligonucleotide
  Antisense strand to SEQ ID NO: 25268
uuucaagacaagaguuuca

SEQ ID NO: 25270 - RNA, 19 nt, Artificial Sequence
  Description of Artificial Sequence: Synthetic oligonucleotide
  Sense strand starting at position 639 of SEQ ID NO: 282
gugaaacucuugucuugaa

SEQ ID NO: 25271 - RNA, 19 nt, Artificial Sequence
  Description of Artificial Sequence: Synthetic oligonucleotide
  Antisense strand to SEQ ID NO: 25270
uucaagacaagaguuucac

SEQ ID NO: 25272 - RNA, 19 nt, Artificial Sequence
  Description of Artificial Sequence: Synthetic oligonucleotide
  Sense strand starting at position 331 of SEQ ID NO: 282
cgagaucuugucugugaaa

SEQ ID NO: 25273 - RNA, 19 nt, Artificial Sequence
  Description of Artificial Sequence: Synthetic oligonucleotide
  Antisense strand to SEQ ID NO: 25272
uuucacagacaagaucucg

SEQ ID NO: 25274 - RNA, 19 nt, Artificial Sequence
  Description of Artificial Sequence: Synthetic oligonucleotide
  Sense strand starting at position 330 of SEQ ID NO: 282
gcgagaucuugucugugaa

SEQ ID NO: 25275 - RNA, 19 nt, Artificial Sequence
  Description of Artificial Sequence: Synthetic oligonucleotide
  Antisense strand to SEQ ID NO: 25274
uucacagacaagaucucgc

SEQ ID NO: 25276 - RNA, 19 nt, Artificial Sequence
  Description of Artificial Sequence: Synthetic oligonucleotide
  Sense strand starting at position 183 of SEQ ID NO: 282
cagccugagugaugagaga

SEQ ID NO: 25277 - RNA, 19 nt, Artificial Sequence
  Description of Artificial Sequence: Synthetic oligonucleotide
  Antisense strand to SEQ ID NO: 25276
ucucucaucacucaggcug

SEQ ID NO: 25278 - RNA, 19 nt, Artificial Sequence
  Description of Artificial Sequence: Synthetic oligonucleotide
  Sense strand starting at position 54 of SEQ ID NO: 282
gcgagaucuuguuagccag

SEQ ID NO: 25279 - RNA, 19 nt, Artificial Sequence
  Description of Artificial Sequence: Synthetic oligonucleotide
  Antisense strand to SEQ ID NO: 25278
cuggcuaacaagaucucgc

SEQ ID NO: 25280 - RNA, 19 nt, Artificial Sequence
  Description of Artificial Sequence: Synthetic oligonucleotide
  Sense strand starting at position 48 of SEQ ID NO: 283
caucucugucgugaccuau

SEQ ID NO: 25281 - RNA, 19 nt, Artificial Sequence
  Description of Artificial Sequence: Synthetic oligonucleotide
  Antisense strand to SEQ ID NO: 25280
auaggucacgacagagaug

SEQ ID NO: 25282 - RNA, 19 nt, Artificial Sequence
  Description of Artificial Sequence: Synthetic oligonucleotide
  Sense strand starting at position 82 of SEQ ID NO: 283
ccaaguauaucucucagga

SEQ ID NO: 25283 - RNA, 19 nt, Artificial Sequence
  Description of Artificial Sequence: Synthetic oligonucleotide
  Antisense strand to SEQ ID NO: 25282
uccugagagauauacuugg

SEQ ID NO: 25284 - RNA, 19 nt, Artificial Sequence
  Description of Artificial Sequence: Synthetic oligonucleotide
  Sense strand starting at position 98 of SEQ ID NO: 283
ggauccuguagugaucaau

SEQ ID NO: 25285 - RNA, 19 nt, Artificial Sequence
  Description of Artificial Sequence: Synthetic oligonucleotide
  Antisense strand to SEQ ID NO: 25284
auugaucacuacaggaucc

SEQ ID NO: 25286 - RNA, 19 nt, Artificial Sequence
  Description of Artificial Sequence: Synthetic oligonucleotide
  Sense strand starting at position 174 of SEQ ID NO: 283
auuaguguuggguaugaac

SEQ ID NO: 25287 - RNA, 19 nt, Artificial Sequence
  Description of Artificial Sequence: Synthetic oligonucleotide
  Antisense strand to SEQ ID NO: 25286
guucauacccaacacuaau

SEQ ID NO: 25288 - RNA, 19 nt, Artificial Sequence
  Description of Artificial Sequence: Synthetic oligonucleotide
  Sense strand starting at position 209 of SEQ ID NO: 283
auagucuuaucuucccaga

SEQ ID NO: 25289 - RNA, 19 nt, Artificial Sequence
  Description of Artificial Sequence: Synthetic oligonucleotide
  Antisense strand to SEQ ID NO: 25288
ucugggaagauaagacuau

SEQ ID NO: 25290 - RNA, 19 nt, Artificial Sequence
  Description of Artificial Sequence: Synthetic oligonucleotide
  Sense strand starting at position 353 of SEQ ID NO: 283
ggguaagcuggugaauucu

SEQ ID NO: 25291 - RNA, 19 nt, Artificial Sequence
  Description of Artificial Sequence: Synthetic oligonucleotide
  Antisense strand to SEQ ID NO: 25290
agaauucaccagcuuaccc

SEQ ID NO: 25292 - RNA, 19 nt, Artificial Sequence
  Description of Artificial Sequence: Synthetic oligonucleotide
  Sense strand starting at position 359 of SEQ ID NO: 283
gcuggugaauucuuccauc

SEQ ID NO: 25293 - RNA, 19 nt, Artificial Sequence
  Description of Artificial Sequence: Synthetic oligonucleotide
  Antisense strand to SEQ ID NO: 25292
gauggaagaauucaccagc

SEQ ID NO: 25294 - RNA, 19 nt, Artificial Sequence
  Description of Artificial Sequence: Synthetic oligonucleotide
  Sense strand starting at position 594 of SEQ ID NO: 283
agggaugucucagucugaa

SEQ ID NO: 25295 - RNA, 19 nt, Artificial Sequence
  Description of Artificial Sequence: Synthetic oligonucleotide
  Antisense strand to SEQ ID NO: 25294
uucagacugagacaucccu

SEQ ID NO: 25296 - RNA, 19 nt, Artificial Sequence
  Description of Artificial Sequence: Synthetic oligonucleotide
  Sense strand starting at position 597 of SEQ ID NO: 283
gaugucucagucugaaauu

SEQ ID NO: 25297 - RNA, 19 nt, Artificial Sequence
  Description of Artificial Sequence: Synthetic oligonucleotide
  Antisense strand to SEQ ID NO: 25296
aauuucagacugagacauc

SEQ ID NO: 25298 - RNA, 19 nt, Artificial Sequence
  Description of Artificial Sequence: Synthetic oligonucleotide
  Sense strand starting at position 973 of SEQ ID NO: 283
ucuugucucccagaaagca

SEQ ID NO: 25299 - RNA, 19 nt, Artificial Sequence
  Description of Artificial Sequence: Synthetic oligonucleotide
  Antisense strand to SEQ ID NO: 25298
ugcuuucugggagacaaga

SEQ ID NO: 25300 - RNA, 19 nt, Artificial Sequence
  Description of Artificial Sequence: Synthetic oligonucleotide
  Sense strand starting at position 1042 of SEQ ID NO: 283
ccuggccuuccguaggaaa

SEQ ID NO: 25301 - RNA, 19 nt, Artificial Sequence
  Description of Artificial Sequence: Synthetic oligonucleotide
  Antisense strand to SEQ ID NO: 25300
uuuccuacggaaggccagg

SEQ ID NO: 25302 - RNA, 19 nt, Artificial Sequence
  Description of Artificial Sequence: Synthetic oligonucleotide
  Sense strand starting at position 1116 of SEQ ID NO: 283
cuccauuagauggguguga

SEQ ID NO: 25303 - RNA, 19 nt, Artificial Sequence
  Description of Artificial Sequence: Synthetic oligonucleotide
  Antisense strand to SEQ ID NO: 25302
ucacacccaucuaauggag

SEQ ID NO: 25304 - RNA, 19 nt, Artificial Sequence
  Description of Artificial Sequence: Synthetic oligonucleotide
  Sense strand starting at position 1117 of SEQ ID NO: 283
uccauuagaugggugugaa

SEQ ID NO: 25305 - RNA, 19 nt, Artificial Sequence
  Description of Artificial Sequence: Synthetic oligonucleotide
  Antisense strand to SEQ ID NO: 25304
uucacacccaucuaaugga

SEQ ID NO: 25306 - RNA, 19 nt, Artificial Sequence
  Description of Artificial Sequence: Synthetic oligonucleotide
  Sense strand starting at position 1118 of SEQ ID NO: 283
ccauuagaugggugugaag

SEQ ID NO: 25307 - RNA, 19 nt, Artificial Sequence
  Description of Artificial Sequence: Synthetic oligonucleotide
  Antisense strand to SEQ ID NO: 25306
cuucacacccaucuaaugg

SEQ ID NO: 25308 - RNA, 19 nt, Artificial Sequence
  Description of Artificial Sequence: Synthetic oligonucleotide
  Sense strand starting at position 1360 of SEQ ID NO: 283
gcccaagucccucagacuu

SEQ ID NO: 25309 - RNA, 19 nt, Artificial Sequence
  Description of Artificial Sequence: Synthetic oligonucleotide
  Antisense strand to SEQ ID NO: 25308
aagucugagggacuugggc

SEQ ID NO: 25310 - RNA, 19 nt, Artificial Sequence
  Description of Artificial Sequence: Synthetic oligonucleotide
  Sense strand starting at position 1393 of SEQ ID NO: 283
agcugaagucucuagguca

SEQ ID NO: 25311 - RNA, 19 nt, Artificial Sequence
  Description of Artificial Sequence: Synthetic oligonucleotide
  Antisense strand to SEQ ID NO: 25310
ugaccuagagacuucagcu

SEQ ID NO: 25312 - RNA, 19 nt, Artificial Sequence
  Description of Artificial Sequence: Synthetic oligonucleotide
  Sense strand starting at position 1396 of SEQ ID NO: 283
ugaagucucuaggucagaa

SEQ ID NO: 25313 - RNA, 19 nt, Artificial Sequence
  Description of Artificial Sequence: Synthetic oligonucleotide
  Antisense strand to SEQ ID NO: 25312
uucugaccuagagacuuca

SEQ ID NO: 25314 - RNA, 19 nt, Artificial Sequence
  Description of Artificial Sequence: Synthetic oligonucleotide
  Sense strand starting at position 1858 of SEQ ID NO: 283
uccauuagccaguagguaa

SEQ ID NO: 25315 - RNA, 19 nt, Artificial Sequence
  Description of Artificial Sequence: Synthetic oligonucleotide
  Antisense strand to SEQ ID NO: 25314
uuaccuacuggcuaaugga

SEQ ID NO: 25316 - RNA, 19 nt, Artificial Sequence
  Description of Artificial Sequence: Synthetic oligonucleotide
  Sense strand starting at position 2092 of SEQ ID NO: 283
guagcaucugucuauccau

SEQ ID NO: 25317 - RNA, 19 nt, Artificial Sequence
  Description of Artificial Sequence: Synthetic oligonucleotide
  Antisense strand to SEQ ID NO: 25316
auggauagacagaugcuac

SEQ ID NO: 25318 - RNA, 19 nt, Artificial Sequence
  Description of Artificial Sequence: Synthetic oligonucleotide
  Sense strand starting at position 2111 of SEQ ID NO: 283
ucaggaauuucgcuugccu

SEQ ID NO: 25319 - RNA, 19 nt, Artificial Sequence
  Description of Artificial Sequence: Synthetic oligonucleotide
  Antisense strand to SEQ ID NO: 25318
aggcaagcgaaauuccuga

SEQ ID NO: 25320 - RNA, 19 nt, Artificial Sequence
  Description of Artificial Sequence: Synthetic oligonucleotide
  Sense strand starting at position 2404 of SEQ ID NO: 283
gagaaagggugugauggaa

SEQ ID NO: 25321 - RNA, 19 nt, Artificial Sequence
  Description of Artificial Sequence: Synthetic oligonucleotide
  Antisense strand to SEQ ID NO: 25320
uuccaucacacccuuucuc

SEQ ID NO: 25322 - RNA, 19 nt, Artificial Sequence
  Description of Artificial Sequence: Synthetic oligonucleotide
  Sense strand starting at position 2418 of SEQ ID NO: 283
uggaaagacucggucccua

SEQ ID NO: 25323 - RNA, 19 nt, Artificial Sequence
  Description of Artificial Sequence: Synthetic oligonucleotide
  Antisense strand to SEQ ID NO: 25322
uagggaccgagucuuucca

SEQ ID NO: 25324 - RNA, 19 nt, Artificial Sequence
  Description of Artificial Sequence: Synthetic oligonucleotide
  Sense strand starting at position 2447 of SEQ ID NO: 283
uuuaauucgcuuuggaacu

SEQ ID NO: 25325 - RNA, 19 nt, Artificial Sequence
  Description of Artificial Sequence: Synthetic oligonucleotide
  Antisense strand to SEQ ID NO: 25324
aguuccaaagcgaauuaaa

SEQ ID NO: 25326 - RNA, 19 nt, Artificial Sequence
  Description of Artificial Sequence: Synthetic oligonucleotide
  Sense strand starting at position 2454 of SEQ ID NO: 283
cgcuuuggaacuugauaga

SEQ ID NO: 25327 - RNA, 19 nt, Artificial Sequence
  Description of Artificial Sequence: Synthetic oligonucleotide
  Antisense strand to SEQ ID NO: 25326
ucuaucaaguuccaaagcg

SEQ ID NO: 25328 - RNA, 19 nt, Artificial Sequence
  Description of Artificial Sequence: Synthetic oligonucleotide
  Sense strand starting at position 2465 of SEQ ID NO: 283
uugauagagugauuaagug

SEQ ID NO: 25329 - RNA, 19 nt, Artificial Sequence
  Description of Artificial Sequence: Synthetic oligonucleotide
  Antisense strand to SEQ ID NO: 25328
cacuuaaucacucuaucaa

SEQ ID NO: 25330 - RNA, 19 nt, Artificial Sequence
  Description of Artificial Sequence: Synthetic oligonucleotide
  Sense strand starting at position 2475 of SEQ ID NO: 283
gauuaagugguguguggag

SEQ ID NO: 25331 - RNA, 19 nt, Artificial Sequence
  Description of Artificial Sequence: Synthetic oligonucleotide
  Antisense strand to SEQ ID NO: 25330
cuccacacaccacuuaauc

SEQ ID NO: 25332 - RNA, 19 nt, Artificial Sequence
  Description of Artificial Sequence: Synthetic oligonucleotide
  Sense strand starting at position 2516 of SEQ ID NO: 283
gagucaugagaaggugaca

SEQ ID NO: 25333 - RNA, 19 nt, Artificial Sequence
  Description of Artificial Sequence: Synthetic oligonucleotide
  Antisense strand to SEQ ID NO: 25332
ugucaccuucucaugacuc

SEQ ID NO: 25334 - RNA, 19 nt, Artificial Sequence
  Description of Artificial Sequence: Synthetic oligonucleotide
  Sense strand starting at position 2531 of SEQ ID NO: 283
gacacaguuugccauuuga

SEQ ID NO: 25335 - RNA, 19 nt, Artificial Sequence
  Description of Artificial Sequence: Synthetic oligonucleotide
  Antisense strand to SEQ ID NO: 25334
ucaaauggcaaacuguguc

SEQ ID NO: 25336 - RNA, 19 nt, Artificial Sequence
  Description of Artificial Sequence: Synthetic oligonucleotide
  Sense strand starting at position 2603 of SEQ ID NO: 283
cggucagcuuaacuaauca

SEQ ID NO: 25337 - RNA, 19 nt, Artificial Sequence
  Description of Artificial Sequence: Synthetic oligonucleotide
  Antisense strand to SEQ ID NO: 25336
ugauuaguuaagcugaccg

SEQ ID NO: 25338 - RNA, 19 nt, Artificial Sequence
  Description of Artificial Sequence: Synthetic oligonucleotide
  Sense strand starting at position 2626 of SEQ ID NO: 283
uccagaucuuacuugugaa

SEQ ID NO: 25339 - RNA, 19 nt, Artificial Sequence
  Description of Artificial Sequence: Synthetic oligonucleotide
  Antisense strand to SEQ ID NO: 25338
uucacaaguaagaucugga

SEQ ID NO: 25340 - RNA, 19 nt, Artificial Sequence
  Description of Artificial Sequence: Synthetic oligonucleotide
  Sense strand starting at position 2662 of SEQ ID NO: 283
gaagaugaaggcugagagu

SEQ ID NO: 25341 - RNA, 19 nt, Artificial Sequence
  Description of Artificial Sequence: Synthetic oligonucleotide
  Antisense strand to SEQ ID NO: 25340
acucucagccuucaucuuc

SEQ ID NO: 25342 - RNA, 19 nt, Artificial Sequence
  Description of Artificial Sequence: Synthetic oligonucleotide
  Sense strand starting at position 2838 of SEQ ID NO: 283
ccgauauuugguggaagcu

SEQ ID NO: 25343 - RNA, 19 nt, Artificial Sequence
  Description of Artificial Sequence: Synthetic oligonucleotide
  Antisense strand to SEQ ID NO: 25342
agcuuccaccaaauaucgg

SEQ ID NO: 25344 - RNA, 19 nt, Artificial Sequence
  Description of Artificial Sequence: Synthetic oligonucleotide
  Sense strand starting at position 2999 of SEQ ID NO: 283
gcuaaugaaguuugucuca

SEQ ID NO: 25345 - RNA, 19 nt, Artificial Sequence
  Description of Artificial Sequence: Synthetic oligonucleotide
  Antisense strand to SEQ ID NO: 25344
ugagacaaacuucauuagc

SEQ ID NO: 25346 - RNA, 19 nt, Artificial Sequence
  Description of Artificial Sequence: Synthetic oligonucleotide
  Sense strand starting at position 3250 of SEQ ID NO: 283
aucccuaagcucugaauga

SEQ ID NO: 25347 - RNA, 19 nt, Artificial Sequence
  Description of Artificial Sequence: Synthetic oligonucleotide
  Antisense strand to SEQ ID NO: 25346
ucauucagagcuuagggau

SEQ ID NO: 25348 - RNA, 19 nt, Artificial Sequence
  Description of Artificial Sequence: Synthetic oligonucleotide
  Sense strand starting at position 3254 of SEQ ID NO: 283
cuaagcucugaaugaggga

SEQ ID NO: 25349 - RNA, 19 nt, Artificial Sequence
  Description of Artificial Sequence: Synthetic oligonucleotide
  Antisense strand to SEQ ID NO: 25348
ucccucauucagagcuuag

SEQ ID NO: 25350 - RNA, 19 nt, Artificial Sequence
  Description of Artificial Sequence: Synthetic oligonucleotide
  Sense strand starting at position 3612 of SEQ ID NO: 283
gcuggaagacauugaguuc

SEQ ID NO: 25351 - RNA, 19 nt, Artificial Sequence
  Description of Artificial Sequence: Synthetic oligonucleotide
  Antisense strand to SEQ ID NO: 25350
gaacucaaugucuuccagc

SEQ ID NO: 25352 - RNA, 19 nt, Artificial Sequence
  Description of Artificial Sequence: Synthetic oligonucleotide
  Sense strand starting at position 3621 of SEQ ID NO: 283
cauugaguuccuugucuag

SEQ ID NO: 25353 - RNA, 19 nt, Artificial Sequence
  Description of Artificial Sequence: Synthetic oligonucleotide
  Antisense strand to SEQ ID NO: 25352
cuagacaaggaacucaaug

SEQ ID NO: 25354 - RNA, 19 nt, Artificial Sequence
  Description of Artificial Sequence: Synthetic oligonucleotide
  Sense strand starting at position 3624 of SEQ ID NO: 283
ugaguuccuugucuaggga

SEQ ID NO: 25355 - RNA, 19 nt, Artificial Sequence
  Description of Artificial Sequence: Synthetic oligonucleotide
  Antisense strand to SEQ ID NO: 25354
ucccuagacaaggaacuca

SEQ ID NO: 25356 - RNA, 19 nt, Artificial Sequence
  Description of Artificial Sequence: Synthetic oligonucleotide
  Sense strand starting at position 3701 of SEQ ID NO: 283
cugggacguguccagcaau

SEQ ID NO: 25357 - RNA, 19 nt, Artificial Sequence
  Description of Artificial Sequence: Synthetic oligonucleotide
  Antisense strand to SEQ ID NO: 25356
auugcuggacacgucccag

SEQ ID NO: 25358 - RNA, 19 nt, Artificial Sequence
  Description of Artificial Sequence: Synthetic oligonucleotide
  Sense strand starting at position 3704 of SEQ ID NO: 283
ggacguguccagcaaucca

SEQ ID NO: 25359 - RNA, 19 nt, Artificial Sequence
  Description of Artificial Sequence: Synthetic oligonucleotide
  Antisense strand to SEQ ID NO: 25358
uggauugcuggacacgucc

SEQ ID NO: 25360 - RNA, 19 nt, Artificial Sequence
  Description of Artificial Sequence: Synthetic oligonucleotide
  Sense strand starting at position 3520 of SEQ ID NO: 284
caaagauguccacgccuua

SEQ ID NO: 25361 - RNA, 19 nt, Artificial Sequence
  Description of Artificial Sequence: Synthetic oligonucleotide
  Antisense strand to SEQ ID NO: 25360
uaaggcguggacaucuuug

SEQ ID NO: 25362 - RNA, 19 nt, Artificial Sequence
  Description of Artificial Sequence: Synthetic oligonucleotide
  Sense strand starting at position 3508 of SEQ ID NO: 284
caaguuggccgccaaagau

SEQ ID NO: 25363 - RNA, 19 nt, Artificial Sequence
  Description of Artificial Sequence: Synthetic oligonucleotide
  Antisense strand to SEQ ID NO: 25362
aucuuuggcggccaacuug

SEQ ID NO: 25364 - RNA, 19 nt, Artificial Sequence
  Description of Artificial Sequence: Synthetic oligonucleotide
  Sense strand starting at position 3436 of SEQ ID NO: 284
gaaauuugguauugcuaua

SEQ ID NO: 25365 - RNA, 19 nt, Artificial Sequence
  Description of Artificial Sequence: Synthetic oligonucleotide
  Antisense strand to SEQ ID NO: 25364
uauagcaauaccaaauuuc

SEQ ID NO: 25366 - RNA, 19 nt, Artificial Sequence
  Description of Artificial Sequence: Synthetic oligonucleotide
  Sense strand starting at position 3433 of SEQ ID NO: 284
aaggaaauuugguauugcu

SEQ ID NO: 25367 - RNA, 19 nt, Artificial Sequence
  Description of Artificial Sequence: Synthetic oligonucleotide
  Antisense strand to SEQ ID NO: 25366
agcaauaccaaauuuccuu

SEQ ID NO: 25368 - RNA, 19 nt, Artificial Sequence
  Description of Artificial Sequence: Synthetic oligonucleotide
  Sense strand starting at position 3400 of SEQ ID NO: 284
gcuacuggcccagaugaaa

SEQ ID NO: 25369 - RNA, 19 nt, Artificial Sequence
  Description of Artificial Sequence: Synthetic oligonucleotide
  Antisense strand to SEQ ID NO: 25368
uuucaucugggccaguagc

SEQ ID NO: 25370 - RNA, 19 nt, Artificial Sequence
  Description of Artificial Sequence: Synthetic oligonucleotide
  Sense strand starting at position 3164 of SEQ ID NO: 284
gugauucuccuguguaaac

SEQ ID NO: 25371 - RNA, 19 nt, Artificial Sequence
  Description of Artificial Sequence: Synthetic oligonucleotide
  Antisense strand to SEQ ID NO: 25370
guuuacacaggagaaucac

SEQ ID NO: 25372 - RNA, 19 nt, Artificial Sequence
  Description of Artificial Sequence: Synthetic oligonucleotide
  Sense strand starting at position 3162 of SEQ ID NO: 284
cagugauucuccuguguaa

SEQ ID NO: 25373 - RNA, 19 nt, Artificial Sequence
  Description of Artificial Sequence: Synthetic oligonucleotide
  Antisense strand to SEQ ID NO: 25372
uuacacaggagaaucacug

SEQ ID NO: 25374 - RNA, 19 nt, Artificial Sequence
  Description of Artificial Sequence: Synthetic oligonucleotide
  Sense strand starting at position 2343 of SEQ ID NO: 284
ucacauguccuugaaguca

SEQ ID NO: 25375 - RNA, 19 nt, Artificial Sequence
  Description of Artificial Sequence: Synthetic oligonucleotide
  Antisense strand to SEQ ID NO: 25374
ugacuucaaggacauguga

SEQ ID NO: 25376 - RNA, 19 nt, Artificial Sequence
  Description of Artificial Sequence: Synthetic oligonucleotide
  Sense strand starting at position 2326 of SEQ ID NO: 284
acguaaugcuacuuaauuc

SEQ ID NO: 25377 - RNA, 19 nt, Artificial Sequence
  Description of Artificial Sequence: Synthetic oligonucleotide
  Antisense strand to SEQ ID NO: 25376
gaauuaaguagcauuacgu

SEQ ID NO: 25378 - RNA, 19 nt, Artificial Sequence
  Description of Artificial Sequence: Synthetic oligonucleotide
  Sense strand starting at position 2315 of SEQ ID NO: 284
cuaggaacuauacguaaug

SEQ ID NO: 25379 - RNA, 19 nt, Artificial Sequence
  Description of Artificial Sequence: Synthetic oligonucleotide
  Antisense strand to SEQ ID NO: 25378
cauuacguauaguuccuag

SEQ ID NO: 25380 - RNA, 19 nt, Artificial Sequence
  Description of Artificial Sequence: Synthetic oligonucleotide
  Sense strand starting at position 2205 of SEQ ID NO: 284
gcagcugcuuccugauuua

SEQ ID NO: 25381 - RNA, 19 nt, Artificial Sequence
  Description of Artificial Sequence: Synthetic oligonucleotide
  Antisense strand to SEQ ID NO: 25380
uaaaucaggaagcagcugc

SEQ ID NO: 25382 - RNA, 19 nt, Artificial Sequence
  Description of Artificial Sequence: Synthetic oligonucleotide
  Sense strand starting at position 2135 of SEQ ID NO: 284
gauuauuguuggcucaaug

SEQ ID NO: 25383 - RNA, 19 nt, Artificial Sequence
  Description of Artificial Sequence: Synthetic oligonucleotide
  Antisense strand to SEQ ID NO: 25382
cauugagccaacaauaauc

SEQ ID NO: 25384 - RNA, 19 nt, Artificial Sequence
  Description of Artificial Sequence: Synthetic oligonucleotide
  Sense strand starting at position 2134 of SEQ ID NO: 284
ggauuauuguuggcucaau

SEQ ID NO: 25385 - RNA, 19 nt, Artificial Sequence
  Description of Artificial Sequence: Synthetic oligonucleotide
  Antisense strand to SEQ ID NO: 25384
auugagccaacaauaaucc

SEQ ID NO: 25386 - RNA, 19 nt, Artificial Sequence
  Description of Artificial Sequence: Synthetic oligonucleotide
  Sense strand starting at position 2133 of SEQ ID NO: 284
aggauuauuguuggcucaa

SEQ ID NO: 25387 - RNA, 19 nt, Artificial Sequence
  Description of Artificial Sequence: Synthetic oligonucleotide
  Antisense strand to SEQ ID NO: 25386
uugagccaacaauaauccu

SEQ ID NO: 25388 - RNA, 19 nt, Artificial Sequence
  Description of Artificial Sequence: Synthetic oligonucleotide
  Sense strand starting at position 2132 of SEQ ID NO: 284
caggauuauuguuggcuca

SEQ ID NO: 25389 - RNA, 19 nt, Artificial Sequence
  Description of Artificial Sequence: Synthetic oligonucleotide
  Antisense strand to SEQ ID NO: 25388
ugagccaacaauaauccug

SEQ ID NO: 25390 - RNA, 19 nt, Artificial Sequence
  Description of Artificial Sequence: Synthetic oligonucleotide
  Sense strand starting at position 2120 of SEQ ID NO: 284
ggguuaugucaacaggauu

SEQ ID NO: 25391 - RNA, 19 nt, Artificial Sequence
  Description of Artificial Sequence: Synthetic oligonucleotide
  Antisense strand to SEQ ID NO: 25390
aauccuguugacauaaccc

SEQ ID NO: 25392 - RNA, 19 nt, Artificial Sequence
  Description of Artificial Sequence: Synthetic oligonucleotide
  Sense strand starting at position 2106 of SEQ ID NO: 284
cgcuuugaucaacaggguu

SEQ ID NO: 25393 - RNA, 19 nt, Artificial Sequence
  Description of Artificial Sequence: Synthetic oligonucleotide
  Antisense strand to SEQ ID NO: 25392
aacccuguugaucaaagcg

SEQ ID NO: 25394 - RNA, 19 nt, Artificial Sequence
  Description of Artificial Sequence: Synthetic oligonucleotide
  Sense strand starting at position 2045 of SEQ ID NO: 284
cggauucucugagugcauu

SEQ ID NO: 25395 - RNA, 19 nt, Artificial Sequence
  Description of Artificial Sequence: Synthetic oligonucleotide
  Antisense strand to SEQ ID NO: 25394
aaugcacucagagaauccg

SEQ ID NO: 25396 - RNA, 19 nt, Artificial Sequence
  Description of Artificial Sequence: Synthetic oligonucleotide
  Sense strand starting at position 2043 of SEQ ID NO: 284
uccggauucucugagugca

SEQ ID NO: 25397 - RNA, 19 nt, Artificial Sequence
  Description of Artificial Sequence: Synthetic oligonucleotide
  Antisense strand to SEQ ID NO: 25396
ugcacucagagaauccgga

SEQ ID NO: 25398 - RNA, 19 nt, Artificial Sequence
  Description of Artificial Sequence: Synthetic oligonucleotide
  Sense strand starting at position 1454 of SEQ ID NO: 284
uagcauguuugccaucaga

SEQ ID NO: 25399 - RNA, 19 nt, Artificial Sequence
  Description of Artificial Sequence: Synthetic oligonucleotide
  Antisense strand to SEQ ID NO: 25398
ucugauggcaaacaugcua

SEQ ID NO: 25400 - RNA, 19 nt, Artificial Sequence
  Description of Artificial Sequence: Synthetic oligonucleotide
  Sense strand starting at position 1450 of SEQ ID NO: 284
gagguagcauguuugccau

SEQ ID NO: 25401 - RNA, 19 nt, Artificial Sequence
  Description of Artificial Sequence: Synthetic oligonucleotide
  Antisense strand to SEQ ID NO: 25400
auggcaaacaugcuaccuc

SEQ ID NO: 25402 - RNA, 19 nt, Artificial Sequence
  Description of Artificial Sequence: Synthetic oligonucleotide
  Sense strand starting at position 1416 of SEQ ID NO: 284
ccgcccuuggcuggagaau

SEQ ID NO: 25403 - RNA, 19 nt, Artificial Sequence
  Description of Artificial Sequence: Synthetic oligonucleotide
  Antisense strand to SEQ ID NO: 25402
auucuccagccaagggcgg

SEQ ID NO: 25404 - RNA, 19 nt, Artificial Sequence
  Description of Artificial Sequence: Synthetic oligonucleotide
  Sense strand starting at position 1389 of SEQ ID NO: 284
uuggcuagcacaggaaaua

SEQ ID NO: 25405 - RNA, 19 nt, Artificial Sequence
  Description of Artificial Sequence: Synthetic oligonucleotide
  Antisense strand to SEQ ID NO: 25404
uauuuccugugcuagccaa

SEQ ID NO: 25406 - RNA, 19 nt, Artificial Sequence
  Description of Artificial Sequence: Synthetic oligonucleotide
  Sense strand starting at position 1368 of SEQ ID NO: 284
ggaagcuuauguucuagua

SEQ ID NO: 25407 - RNA, 19 nt, Artificial Sequence
  Description of Artificial Sequence: Synthetic oligonucleotide
  Antisense strand to SEQ ID NO: 25406
uacuagaacauaagcuucc

SEQ ID NO: 25408 - RNA, 19 nt, Artificial Sequence
  Description of Artificial Sequence: Synthetic oligonucleotide
  Sense strand starting at position 1365 of SEQ ID NO: 284
gaaggaagcuuauguucua

SEQ ID NO: 25409 - RNA, 19 nt, Artificial Sequence
  Description of Artificial Sequence: Synthetic oligonucleotide
  Antisense strand to SEQ ID NO: 25408
uagaacauaagcuuccuuc

SEQ ID NO: 25410 - RNA, 19 nt, Artificial Sequence
  Description of Artificial Sequence: Synthetic oligonucleotide
  Sense strand starting at position 1333 of SEQ ID NO: 284
agcuacgugcugugaaaca

SEQ ID NO: 25411 - RNA, 19 nt, Artificial Sequence
  Description of Artificial Sequence: Synthetic oligonucleotide
  Antisense strand to SEQ ID NO: 25410
uguuucacagcacguagcu

SEQ ID NO: 25412 - RNA, 19 nt, Artificial Sequence
  Description of Artificial Sequence: Synthetic oligonucleotide
  Sense strand starting at position 1250 of SEQ ID NO: 284
gcaauuguaucugaaucca

SEQ ID NO: 25413 - RNA, 19 nt, Artificial Sequence
  Description of Artificial Sequence: Synthetic oligonucleotide
  Antisense strand to SEQ ID NO: 25412
uggauucagauacaauugc

SEQ ID NO: 25414 - RNA, 19 nt, Artificial Sequence
  Description of Artificial Sequence: Synthetic oligonucleotide
  Sense strand starting at position 1248 of SEQ ID NO: 284
gagcaauuguaucugaauc

SEQ ID NO: 25415 - RNA, 19 nt, Artificial Sequence
  Description of Artificial Sequence: Synthetic oligonucleotide
  Antisense strand to SEQ ID NO: 25414
gauucagauacaauugcuc

SEQ ID NO: 25416 - RNA, 19 nt, Artificial Sequence
  Description of Artificial Sequence: Synthetic oligonucleotide
  Sense strand starting at position 1238 of SEQ ID NO: 284
gcaggugucugagcaauug

SEQ ID NO: 25417 - RNA, 19 nt, Artificial Sequence
  Description of Artificial Sequence: Synthetic oligonucleotide
  Antisense strand to SEQ ID NO: 25416
caauugcucagacaccugc

SEQ ID NO: 25418 - RNA, 19 nt, Artificial Sequence
  Description of Artificial Sequence: Synthetic oligonucleotide
  Sense strand starting at position 1235 of SEQ ID NO: 284
gaagcaggugucugagcaa

SEQ ID NO: 25419 - RNA, 19 nt, Artificial Sequence
  Description of Artificial Sequence: Synthetic oligonucleotide
  Antisense strand to SEQ ID NO: 25418
uugcucagacaccugcuuc

SEQ ID NO: 25420 - RNA, 19 nt, Artificial Sequence
  Description of Artificial Sequence: Synthetic oligonucleotide
  Sense strand starting at position 1128 of SEQ ID NO: 284
cucagagaaucccaucagu

SEQ ID NO: 25421 - RNA, 19 nt, Artificial Sequence
  Description of Artificial Sequence: Synthetic oligonucleotide
  Antisense strand to SEQ ID NO: 25420
acugaugggauucucugag

SEQ ID NO: 25422 - RNA, 19 nt, Artificial Sequence
  Description of Artificial Sequence: Synthetic oligonucleotide
  Sense strand starting at position 953 of SEQ ID NO: 284
gccaauucugcugguccau

SEQ ID NO: 25423 - RNA, 19 nt, Artificial Sequence
  Description of Artificial Sequence: Synthetic oligonucleotide
  Antisense strand to SEQ ID NO: 25422
auggaccagcagaauuggc

SEQ ID NO: 25424 - RNA, 19 nt, Artificial Sequence
  Description of Artificial Sequence: Synthetic oligonucleotide
  Sense strand starting at position 733 of SEQ ID NO: 284
gguuuaaguguauggacuu

SEQ ID NO: 25425 - RNA, 19 nt, Artificial Sequence
  Description of Artificial Sequence: Synthetic oligonucleotide
  Antisense strand to SEQ ID NO: 25424
aaguccauacacuuaaacc

SEQ ID NO: 25426 - RNA, 19 nt, Artificial Sequence
  Description of Artificial Sequence: Synthetic oligonucleotide
  Sense strand starting at position 721 of SEQ ID NO: 284
gaggacagucaggguuuaa

SEQ ID NO: 25427 - RNA, 19 nt, Artificial Sequence
  Description of Artificial Sequence: Synthetic oligonucleotide
  Antisense strand to SEQ ID NO: 25426
uuaaacccugacuguccuc

SEQ ID NO: 25428 - RNA, 19 nt, Artificial Sequence
  Description of Artificial Sequence: Synthetic oligonucleotide
  Sense strand starting at position 720 of SEQ ID NO: 284
ggaggacagucaggguuua

SEQ ID NO: 25429 - RNA, 19 nt, Artificial Sequence
  Description of Artificial Sequence: Synthetic oligonucleotide
  Antisense strand to SEQ ID NO: 25428
uaaacccugacuguccucc

SEQ ID NO: 25430 - RNA, 19 nt, Artificial Sequence
  Description of Artificial Sequence: Synthetic oligonucleotide
  Sense strand starting at position 696 of SEQ ID NO: 284
uggauugguugauacacca

SEQ ID NO: 25431 - RNA, 19 nt, Artificial Sequence
  Description of Artificial Sequence: Synthetic oligonucleotide
  Antisense strand to SEQ ID NO: 25430
ugguguaucaaccaaucca

SEQ ID NO: 25432 - RNA, 19 nt, Artificial Sequence
  Description of Artificial Sequence: Synthetic oligonucleotide
  Sense strand starting at position 691 of SEQ ID NO: 284
ucaacuggauugguugaua

SEQ ID NO: 25433 - RNA, 19 nt, Artificial Sequence
  Description of Artificial Sequence: Synthetic oligonucleotide
  Antisense strand to SEQ ID NO: 25432
uaucaaccaauccaguuga

SEQ ID NO: 25434 - RNA, 19 nt, Artificial Sequence
  Description of Artificial Sequence: Synthetic oligonucleotide
  Sense strand starting at position 647 of SEQ ID NO: 284
ggacaugguuuccugaauu

SEQ ID NO: 25435 - RNA, 19 nt, Artificial Sequence
  Description of Artificial Sequence: Synthetic oligonucleotide
  Antisense strand to SEQ ID NO: 25434
aauucaggaaaccaugucc

SEQ ID NO: 25436 - RNA, 19 nt, Artificial Sequence
  Description of Artificial Sequence: Synthetic oligonucleotide
  Sense strand starting at position 646 of SEQ ID NO: 284
gggacaugguuuccugaau

SEQ ID NO: 25437 - RNA, 19 nt, Artificial Sequence
  Description of Artificial Sequence: Synthetic oligonucleotide
  Antisense strand to SEQ ID NO: 25436
auucaggaaaccauguccc

SEQ ID NO: 25438 - RNA, 19 nt, Artificial Sequence
  Description of Artificial Sequence: Synthetic oligonucleotide
  Sense strand starting at position 601 of SEQ ID NO: 284
cccaaucaguacuggaauu

SEQ ID NO: 25439 - RNA, 19 nt, Artificial Sequence
  Description of Artificial Sequence: Synthetic oligonucleotide
  Antisense strand to SEQ ID NO: 25438
aauuccaguacugauuggg

SEQ ID NO: 25440 - RNA, 19 nt, Artificial Sequence
  Description of Artificial Sequence: Synthetic oligonucleotide
  Sense strand starting at position 3972 of SEQ ID NO: 285
auggcauuguccuugaauc

SEQ ID NO: 25441 - RNA, 19 nt, Artificial Sequence
  Description of Artificial Sequence: Synthetic oligonucleotide
  Antisense strand to SEQ ID NO: 25440
gauucaaggacaaugccau

SEQ ID NO: 25442 - RNA, 19 nt, Artificial Sequence
  Description of Artificial Sequence: Synthetic oligonucleotide
  Sense strand starting at position 3726 of SEQ ID NO: 285
agaugagcacugugugaua

SEQ ID NO: 25443 - RNA, 19 nt, Artificial Sequence
  Description of Artificial Sequence: Synthetic oligonucleotide
  Antisense strand to SEQ ID NO: 25442
uaucacacagugcucaucu

SEQ ID NO: 25444 - RNA, 19 nt, Artificial Sequence
  Description of Artificial Sequence: Synthetic oligonucleotide
  Sense strand starting at position 3724 of SEQ ID NO: 285
ccagaugagcacuguguga

SEQ ID NO: 25445 - RNA, 19 nt, Artificial Sequence
  Description of Artificial Sequence: Synthetic oligonucleotide
  Antisense strand to SEQ ID NO: 25444
ucacacagugcucaucugg

SEQ ID NO: 25446 - RNA, 19 nt, Artificial Sequence
  Description of Artificial Sequence: Synthetic oligonucleotide
  Sense strand starting at position 3195 of SEQ ID NO: 285
gugaucugucucuaaugaa

SEQ ID NO: 25447 - RNA, 19 nt, Artificial Sequence
  Description of Artificial Sequence: Synthetic oligonucleotide
  Antisense strand to SEQ ID NO: 25446
uucauuagagacagaucac

SEQ ID NO: 25448 - RNA, 19 nt, Artificial Sequence
  Description of Artificial Sequence: Synthetic oligonucleotide
  Sense strand starting at position 3194 of SEQ ID NO: 285
ugugaucugucucuaauga

SEQ ID NO: 25449 - RNA, 19 nt, Artificial Sequence
  Description of Artificial Sequence: Synthetic oligonucleotide
  Antisense strand to SEQ ID NO: 25448
ucauuagagacagaucaca

SEQ ID NO: 25450 - RNA, 19 nt, Artificial Sequence
  Description of Artificial Sequence: Synthetic oligonucleotide
  Sense strand starting at position 3180 of SEQ ID NO: 285
augagugaugccuauguga

SEQ ID NO: 25451 - RNA, 19 nt, Artificial Sequence
  Description of Artificial Sequence: Synthetic oligonucleotide
  Antisense strand to SEQ ID NO: 25450
ucacauaggcaucacucau

SEQ ID NO: 25452 - RNA, 19 nt, Artificial Sequence
  Description of Artificial Sequence: Synthetic oligonucleotide
  Sense strand starting at position 3134 of SEQ ID NO: 285
uguucccuuccucaggaaa

SEQ ID NO: 25453 - RNA, 19 nt, Artificial Sequence
  Description of Artificial Sequence: Synthetic oligonucleotide
  Antisense strand to SEQ ID NO: 25452
uuuccugaggaagggaaca

SEQ ID NO: 25454 - RNA, 19 nt, Artificial Sequence
  Description of Artificial Sequence: Synthetic oligonucleotide
  Sense strand starting at position 3118 of SEQ ID NO: 285
cuagauaaaugauuccugu

SEQ ID NO: 25455 - RNA, 19 nt, Artificial Sequence
  Description of Artificial Sequence: Synthetic oligonucleotide
  Antisense strand to SEQ ID NO: 25454
acaggaaucauuuaucuag

SEQ ID NO: 25456 - RNA, 19 nt, Artificial Sequence
  Description of Artificial Sequence: Synthetic oligonucleotide
  Sense strand starting at position 2916 of SEQ ID NO: 285
agaagucagugaucugaaa

SEQ ID NO: 25457 - RNA, 19 nt, Artificial Sequence
  Description of Artificial Sequence: Synthetic oligonucleotide
  Antisense strand to SEQ ID NO: 25456
uuucagaucacugacuucu

SEQ ID NO: 25458 - RNA, 19 nt, Artificial Sequence
  Description of Artificial Sequence: Synthetic oligonucleotide
  Sense strand starting at position 2886 of SEQ ID NO: 285
acccucuuugcugauagga

SEQ ID NO: 25459 - RNA, 19 nt, Artificial Sequence
  Description of Artificial Sequence: Synthetic oligonucleotide
  Antisense strand to SEQ ID NO: 25458
uccuaucagcaaagagggu

SEQ ID NO: 25460 - RNA, 19 nt, Artificial Sequence
  Description of Artificial Sequence: Synthetic oligonucleotide
  Sense strand starting at position 2863 of SEQ ID NO: 285
guccuuaucccguauagag

SEQ ID NO: 25461 - RNA, 19 nt, Artificial Sequence
  Description of Artificial Sequence: Synthetic oligonucleotide
  Antisense strand to SEQ ID NO: 25460
cucuauacgggauaaggac

SEQ ID NO: 25462 - RNA, 19 nt, Artificial Sequence
  Description of Artificial Sequence: Synthetic oligonucleotide
  Sense strand starting at position 2655 of SEQ ID NO: 285
gagccaguucucuaaaguc

SEQ ID NO: 25463 - RNA, 19 nt, Artificial Sequence
  Description of Artificial Sequence: Synthetic oligonucleotide
  Antisense strand to SEQ ID NO: 25462
gacuuuagagaacuggcuc

SEQ ID NO: 25464 - RNA, 19 nt, Artificial Sequence
  Description of Artificial Sequence: Synthetic oligonucleotide
  Sense strand starting at position 2654 of SEQ ID NO: 285
ggagccaguucucuaaagu

SEQ ID NO: 25465 - RNA, 19 nt, Artificial Sequence
  Description of Artificial Sequence: Synthetic oligonucleotide
  Antisense strand to SEQ ID NO: 25464
acuuuagagaacuggcucc

SEQ ID NO: 25466 - RNA, 19 nt, Artificial Sequence
  Description of Artificial Sequence: Synthetic oligonucleotide
  Sense strand starting at position 2653 of SEQ ID NO: 285
gggagccaguucucuaaag

SEQ ID NO: 25467 - RNA, 19 nt, Artificial Sequence
  Description of Artificial Sequence: Synthetic oligonucleotide
  Antisense strand to SEQ ID NO: 25466
cuuuagagaacuggcuccc

SEQ ID NO: 25468 - RNA, 19 nt, Artificial Sequence
  Description of Artificial Sequence: Synthetic oligonucleotide
  Sense strand starting at position 2583 of SEQ ID NO: 285
cuaaucaguuggccucauu

SEQ ID NO: 25469 - RNA, 19 nt, Artificial Sequence
  Description of Artificial Sequence: Synthetic oligonucleotide
  Antisense strand to SEQ ID NO: 25468
aaugaggccaacugauuag

SEQ ID NO: 25470 - RNA, 19 nt, Artificial Sequence
  Description of Artificial Sequence: Synthetic oligonucleotide
  Sense strand starting at position 2375 of SEQ ID NO: 285
gcugcucccagaugauuga

SEQ ID NO: 25471 - RNA, 19 nt, Artificial Sequence
  Description of Artificial Sequence: Synthetic oligonucleotide
  Antisense strand to SEQ ID NO: 25470
ucaaucaucugggagcagc

SEQ ID NO: 25472 - RNA, 19 nt, Artificial Sequence
  Description of Artificial Sequence: Synthetic oligonucleotide
  Sense strand starting at position 2368 of SEQ ID NO: 285
ggaaauugcugcucccaga

SEQ ID NO: 25473 - RNA, 19 nt, Artificial Sequence
  Description of Artificial Sequence: Synthetic oligonucleotide
  Antisense strand to SEQ ID NO: 25472
ucugggagcagcaauuucc

SEQ ID NO: 25474 - RNA, 19 nt, Artificial Sequence
  Description of Artificial Sequence: Synthetic oligonucleotide
  Sense strand starting at position 2355 of SEQ ID NO: 285
ugaauuacccuuuggaaau

SEQ ID NO: 25475 - RNA, 19 nt, Artificial Sequence
  Description of Artificial Sequence: Synthetic oligonucleotide
  Antisense strand to SEQ ID NO: 25474
auuuccaaaggguaauuca

SEQ ID NO: 25476 - RNA, 19 nt, Artificial Sequence
  Description of Artificial Sequence: Synthetic oligonucleotide
  Sense strand starting at position 2110 of SEQ ID NO: 285
aagcaaggcuuucuugaga

SEQ ID NO: 25477 - RNA, 19 nt, Artificial Sequence
  Description of Artificial Sequence: Synthetic oligonucleotide
  Antisense strand to SEQ ID NO: 25476
ucucaagaaagccuugcuu

SEQ ID NO: 25478 - RNA, 19 nt, Artificial Sequence
  Description of Artificial Sequence: Synthetic oligonucleotide
  Sense strand starting at position 986 of SEQ ID NO: 285
gcagaagagugccugauag

SEQ ID NO: 25479 - RNA, 19 nt, Artificial Sequence
  Description of Artificial Sequence: Synthetic oligonucleotide
  Antisense strand to SEQ ID NO: 25478
cuaucaggcacucuucugc

SEQ ID NO: 25480 - RNA, 19 nt, Artificial Sequence
  Description of Artificial Sequence: Synthetic oligonucleotide
  Sense strand starting at position 945 of SEQ ID NO: 285
ucuuuccucuagcugagaa

SEQ ID NO: 25481 - RNA, 19 nt, Artificial Sequence
  Description of Artificial Sequence: Synthetic oligonucleotide
  Antisense strand to SEQ ID NO: 25480
uucucagcuagaggaaaga

SEQ ID NO: 25482 - RNA, 19 nt, Artificial Sequence
  Description of Artificial Sequence: Synthetic oligonucleotide
  Sense strand starting at position 942 of SEQ ID NO: 285
agaucuuuccucuagcuga

SEQ ID NO: 25483 - RNA, 19 nt, Artificial Sequence
  Description of Artificial Sequence: Synthetic oligonucleotide
  Antisense strand to SEQ ID NO: 25482
ucagcuagaggaaagaucu

SEQ ID NO: 25484 - RNA, 19 nt, Artificial Sequence
  Description of Artificial Sequence: Synthetic oligonucleotide
  Sense strand starting at position 928 of SEQ ID NO: 285
guucauguucgugcagauc

SEQ ID NO: 25485 - RNA, 19 nt, Artificial Sequence
  Description of Artificial Sequence: Synthetic oligonucleotide
  Antisense strand to SEQ ID NO: 25484
gaucugcacgaacaugaac

SEQ ID NO: 25486 - RNA, 19 nt, Artificial Sequence
  Description of Artificial Sequence: Synthetic oligonucleotide
  Sense strand starting at position 843 of SEQ ID NO: 285
uucuaacuugcgugggaaa

SEQ ID NO: 25487 - RNA, 19 nt, Artificial Sequence
  Description of Artificial Sequence: Synthetic oligonucleotide
  Antisense strand to SEQ ID NO: 25486
uuucccacgcaaguuagaa

SEQ ID NO: 25488 - RNA, 19 nt, Artificial Sequence
  Description of Artificial Sequence: Synthetic oligonucleotide
  Sense strand starting at position 776 of SEQ ID NO: 285
ugcucugaggcucaucaaa

SEQ ID NO: 25489 - RNA, 19 nt, Artificial Sequence
  Description of Artificial Sequence: Synthetic oligonucleotide
  Antisense strand to SEQ ID NO: 25488
uuugaugagccucagagca

SEQ ID NO: 25490 - RNA, 19 nt, Artificial Sequence
  Description of Artificial Sequence: Synthetic oligonucleotide
  Sense strand starting at position 685 of SEQ ID NO: 285
gaccaugaccagugauacu

SEQ ID NO: 25491 - RNA, 19 nt, Artificial Sequence
  Description of Artificial Sequence: Synthetic oligonucleotide
  Antisense strand to SEQ ID NO: 25490
aguaucacuggucaugguc

SEQ ID NO: 25492 - RNA, 19 nt, Artificial Sequence
  Description of Artificial Sequence: Synthetic oligonucleotide
  Sense strand starting at position 511 of SEQ ID NO: 285
caggacugaccuggugaau

SEQ ID NO: 25493 - RNA, 19 nt, Artificial Sequence
  Description of Artificial Sequence: Synthetic oligonucleotide
  Antisense strand to SEQ ID NO: 25492
auucaccaggucaguccug

SEQ ID NO: 25494 - RNA, 19 nt, Artificial Sequence
  Description of Artificial Sequence: Synthetic oligonucleotide
  Sense strand starting at position 510 of SEQ ID NO: 285
ccaggacugaccuggugaa

SEQ ID NO: 25495 - RNA, 19 nt, Artificial Sequence
  Description of Artificial Sequence: Synthetic oligonucleotide
  Antisense strand to SEQ ID NO: 25494
uucaccaggucaguccugg

SEQ ID NO: 25496 - RNA, 19 nt, Artificial Sequence
  Description of Artificial Sequence: Synthetic oligonucleotide
  Sense strand starting at position 491 of SEQ ID NO: 285
ggagauggcucacuuacua

SEQ ID NO: 25497 - RNA, 19 nt, Artificial Sequence
  Description of Artificial Sequence: Synthetic oligonucleotide
  Antisense strand to SEQ ID NO: 25496
uaguaagugagccaucucc

SEQ ID NO: 25498 - RNA, 19 nt, Artificial Sequence
  Description of Artificial Sequence: Synthetic oligonucleotide
  Sense strand starting at position 401 of SEQ ID NO: 285
cuagcuaagcaauggagaa

SEQ ID NO: 25499 - RNA, 19 nt, Artificial Sequence
  Description of Artificial Sequence: Synthetic oligonucleotide
  Antisense strand to SEQ ID NO: 25498
uucuccauugcuuagcuag

SEQ ID NO: 25500 - RNA, 19 nt, Artificial Sequence
  Description of Artificial Sequence: Synthetic oligonucleotide
  Sense strand starting at position 359 of SEQ ID NO: 285
uggaaucuuuaguuacaaa

SEQ ID NO: 25501 - RNA, 19 nt, Artificial Sequence
  Description of Artificial Sequence: Synthetic oligonucleotide
  Antisense strand to SEQ ID NO: 25500
uuuguaacuaaagauucca

SEQ ID NO: 25502 - RNA, 19 nt, Artificial Sequence
  Description of Artificial Sequence: Synthetic oligonucleotide
  Sense strand starting at position 358 of SEQ ID NO: 285
uuggaaucuuuaguuacaa

SEQ ID NO: 25503 - RNA, 19 nt, Artificial Sequence
  Description of Artificial Sequence: Synthetic oligonucleotide
  Antisense strand to SEQ ID NO: 25502
uuguaacuaaagauuccaa

SEQ ID NO: 25504 - RNA, 19 nt, Artificial Sequence
  Description of Artificial Sequence: Synthetic oligonucleotide
  Sense strand starting at position 187 of SEQ ID NO: 285
ucaagaugaucuucugcua

SEQ ID NO: 25505 - RNA, 19 nt, Artificial Sequence
  Description of Artificial Sequence: Synthetic oligonucleotide
  Antisense strand to SEQ ID NO: 25504
uagcagaagaucaucuuga

SEQ ID NO: 25506 - RNA, 19 nt, Artificial Sequence
  Description of Artificial Sequence: Synthetic oligonucleotide
  Sense strand starting at position 175 of SEQ ID NO: 285
gcagcagaguagucaagau

SEQ ID NO: 25507 - RNA, 19 nt, Artificial Sequence
  Description of Artificial Sequence: Synthetic oligonucleotide
  Antisense strand to SEQ ID NO: 25506
aucuugacuacucugcugc

SEQ ID NO: 25508 - RNA, 19 nt, Artificial Sequence
  Description of Artificial Sequence: Synthetic oligonucleotide
  Sense strand starting at position 149 of SEQ ID NO: 285
agauacagguguuuagaca

SEQ ID NO: 25509 - RNA, 19 nt, Artificial Sequence
  Description of Artificial Sequence: Synthetic oligonucleotide
  Antisense strand to SEQ ID NO: 25508
ugucuaaacaccuguaucu

SEQ ID NO: 25510 - RNA, 19 nt, Artificial Sequence
  Description of Artificial Sequence: Synthetic oligonucleotide
  Sense strand starting at position 146 of SEQ ID NO: 285
uggagauacagguguuuag

SEQ ID NO: 25511 - RNA, 19 nt, Artificial Sequence
  Description of Artificial Sequence: Synthetic oligonucleotide
  Antisense strand to SEQ ID NO: 25510
cuaaacaccuguaucucca

SEQ ID NO: 25512 - RNA, 19 nt, Artificial Sequence
  Description of Artificial Sequence: Synthetic oligonucleotide
  Sense strand starting at position 144 of SEQ ID NO: 285
uguggagauacagguguuu

SEQ ID NO: 25513 - RNA, 19 nt, Artificial Sequence
  Description of Artificial Sequence: Synthetic oligonucleotide
  Antisense strand to SEQ ID NO: 25512
aaacaccuguaucuccaca

SEQ ID NO: 25514 - RNA, 19 nt, Artificial Sequence
  Description of Artificial Sequence: Synthetic oligonucleotide
  Sense strand starting at position 126 of SEQ ID NO: 285
aagggauauugugcuguuu

SEQ ID NO: 25515 - RNA, 19 nt, Artificial Sequence
  Description of Artificial Sequence: Synthetic oligonucleotide
  Antisense strand to SEQ ID NO: 25514
aaacagcacaauaucccuu

SEQ ID NO: 25516 - RNA, 19 nt, Artificial Sequence
  Description of Artificial Sequence: Synthetic oligonucleotide
  Sense strand starting at position 93 of SEQ ID NO: 285
gugacugggcuguaaguuu

SEQ ID NO: 25517 - RNA, 19 nt, Artificial Sequence
  Description of Artificial Sequence: Synthetic oligonucleotide
  Antisense strand to SEQ ID NO: 25516
aaacuuacagcccagucac

SEQ ID NO: 25518 - RNA, 19 nt, Artificial Sequence
  Description of Artificial Sequence: Synthetic oligonucleotide
  Sense strand starting at position 78 of SEQ ID NO: 285
cugaguggguuuccaguga

SEQ ID NO: 25519 - RNA, 19 nt, Artificial Sequence
  Description of Artificial Sequence: Synthetic oligonucleotide
  Antisense strand to SEQ ID NO: 25518
ucacuggaaacccacucag

SEQ ID NO: 25520 - RNA, 19 nt, Artificial Sequence
  Description of Artificial Sequence: Synthetic oligonucleotide
  Sense strand starting at position 160 of SEQ ID NO: 286
cagcauugugccuuagugu

SEQ ID NO: 25521 - RNA, 19 nt, Artificial Sequence
  Description of Artificial Sequence: Synthetic oligonucleotide
  Antisense strand to SEQ ID NO: 25520
acacuaaggcacaaugcug

SEQ ID NO: 25522 - RNA, 19 nt, Artificial Sequence
  Description of Artificial Sequence: Synthetic oligonucleotide
  Sense strand starting at position 192 of SEQ ID NO: 286
ggaauuggcaguugagaug

SEQ ID NO: 25523 - RNA, 19 nt, Artificial Sequence
  Description of Artificial Sequence: Synthetic oligonucleotide
  Antisense strand to SEQ ID NO: 25522
caucucaacugccaauucc

SEQ ID NO: 25524 - RNA, 19 nt, Artificial Sequence
  Description of Artificial Sequence: Synthetic oligonucleotide
  Sense strand starting at position 198 of SEQ ID NO: 286
ggcaguugagaugauuauu

SEQ ID NO: 25525 - RNA, 19 nt, Artificial Sequence
  Description of Artificial Sequence: Synthetic oligonucleotide
  Antisense strand to SEQ ID NO: 25524
aauaaucaucucaacugcc

SEQ ID NO: 25526 - RNA, 19 nt, Artificial Sequence
  Description of Artificial Sequence: Synthetic oligonucleotide
  Sense strand starting at position 372 of SEQ ID NO: 286
ucucccagguguuuagaau

SEQ ID NO: 25527 - RNA, 19 nt, Artificial Sequence
  Description of Artificial Sequence: Synthetic oligonucleotide
  Antisense strand to SEQ ID NO: 25526
auucuaaacaccugggaga

SEQ ID NO: 25528 - RNA, 19 nt, Artificial Sequence
  Description of Artificial Sequence: Synthetic oligonucleotide
  Sense strand starting at position 465 of SEQ ID NO: 286
augagauccgggcagugaa

SEQ ID NO: 25529 - RNA, 19 nt, Artificial Sequence
  Description of Artificial Sequence: Synthetic oligonucleotide
  Antisense strand to SEQ ID NO: 25528
uucacugcccggaucucau

SEQ ID NO: 25530 - RNA, 19 nt, Artificial Sequence
  Description of Artificial Sequence: Synthetic oligonucleotide
  Sense strand starting at position 488 of SEQ ID NO: 286
cguaguggagucagagcua

SEQ ID NO: 25531 - RNA, 19 nt, Artificial Sequence
  Description of Artificial Sequence: Synthetic oligonucleotide
  Antisense strand to SEQ ID NO: 25530
uagcucugacuccacuacg

SEQ ID NO: 25532 - RNA, 19 nt, Artificial Sequence
  Description of Artificial Sequence: Synthetic oligonucleotide
  Sense strand starting at position 583 of SEQ ID NO: 286
cagauuccagucugaggaa

SEQ ID NO: 25533 - RNA, 19 nt, Artificial Sequence
  Description of Artificial Sequence: Synthetic oligonucleotide
  Antisense strand to SEQ ID NO: 25532
uuccucagacuggaaucug

SEQ ID NO: 25534 - RNA, 19 nt, Artificial Sequence
  Description of Artificial Sequence: Synthetic oligonucleotide
  Sense strand starting at position 626 of SEQ ID NO: 286
agagauaagucccucugca

SEQ ID NO: 25535 - RNA, 19 nt, Artificial Sequence
  Description of Artificial Sequence: Synthetic oligonucleotide
  Antisense strand to SEQ ID NO: 25534
ugcagagggacuuaucucu

SEQ ID NO: 25536 - RNA, 19 nt, Artificial Sequence
  Description of Artificial Sequence: Synthetic oligonucleotide
  Sense strand starting at position 878 of SEQ ID NO: 286
uccagauagcucuggagcu

SEQ ID NO: 25537 - RNA, 19 nt, Artificial Sequence
  Description of Artificial Sequence: Synthetic oligonucleotide
  Antisense strand to SEQ ID NO: 25536
agcuccagagcuaucugga

SEQ ID NO: 25538 - RNA, 19 nt, Artificial Sequence
  Description of Artificial Sequence: Synthetic oligonucleotide
  Sense strand starting at position 1060 of SEQ ID NO: 286
cggugaugacaugagaucu

SEQ ID NO: 25539 - RNA, 19 nt, Artificial Sequence
  Description of Artificial Sequence: Synthetic oligonucleotide
  Antisense strand to SEQ ID NO: 25538
agaucucaugucaucaccg

SEQ ID NO: 25540 - RNA, 19 nt, Artificial Sequence
  Description of Artificial Sequence: Synthetic oligonucleotide
  Sense strand starting at position 1203 of SEQ ID NO: 286
uccuguuaaaucgcgguau

SEQ ID NO: 25541 - RNA, 19 nt, Artificial Sequence
  Description of Artificial Sequence: Synthetic oligonucleotide
  Antisense strand to SEQ ID NO: 25540
auaccgcgauuuaacagga

SEQ ID NO: 25542 - RNA, 19 nt, Artificial Sequence
  Description of Artificial Sequence: Synthetic oligonucleotide
  Sense strand starting at position 1206 of SEQ ID NO: 286
uguuaaaucgcgguaucuu

SEQ ID NO: 25543 - RNA, 19 nt, Artificial Sequence
  Description of Artificial Sequence: Synthetic oligonucleotide
  Antisense strand to SEQ ID NO: 25542
aagauaccgcgauuuaaca

SEQ ID NO: 25544 - RNA, 19 nt, Artificial Sequence
  Description of Artificial Sequence: Synthetic oligonucleotide
  Sense strand starting at position 1286 of SEQ ID NO: 286
caccgaugcugcuugauuu

SEQ ID NO: 25545 - RNA, 19 nt, Artificial Sequence
  Description of Artificial Sequence: Synthetic oligonucleotide
  Antisense strand to SEQ ID NO: 25544
aaaucaagcagcaucggug

SEQ ID NO: 25546 - RNA, 19 nt, Artificial Sequence
  Description of Artificial Sequence: Synthetic oligonucleotide
  Sense strand starting at position 1311 of SEQ ID NO: 286
uugacuuggucucccucaa

SEQ ID NO: 25547 - RNA, 19 nt, Artificial Sequence
  Description of Artificial Sequence: Synthetic oligonucleotide
  Antisense strand to SEQ ID NO: 25546
uugagggagaccaagucaa

SEQ ID NO: 25548 - RNA, 19 nt, Artificial Sequence
  Description of Artificial Sequence: Synthetic oligonucleotide
  Sense strand starting at position 1350 of SEQ ID NO: 286
cuagccuuauagcuagauu

SEQ ID NO: 25549 - RNA, 19 nt, Artificial Sequence
  Description of Artificial Sequence: Synthetic oligonucleotide
  Antisense strand to SEQ ID NO: 25548
aaucuagcuauaaggcuag

SEQ ID NO: 25550 - RNA, 19 nt, Artificial Sequence
  Description of Artificial Sequence: Synthetic oligonucleotide
  Sense strand starting at position 1424 of SEQ ID NO: 286
guucaaaccguagggaauu

SEQ ID NO: 25551 - RNA, 19 nt, Artificial Sequence
  Description of Artificial Sequence: Synthetic oligonucleotide
  Antisense strand to SEQ ID NO: 25550
aauucccuacgguuugaac

SEQ ID NO: 25552 - RNA, 19 nt, Artificial Sequence
  Description of Artificial Sequence: Synthetic oligonucleotide
  Sense strand starting at position 1560 of SEQ ID NO: 286
cucuucccgccagagaaua

SEQ ID NO: 25553 - RNA, 19 nt, Artificial Sequence
  Description of Artificial Sequence: Synthetic oligonucleotide
  Antisense strand to SEQ ID NO: 25552
uauucucuggcgggaagag

SEQ ID NO: 25554 - RNA, 19 nt, Artificial Sequence
  Description of Artificial Sequence: Synthetic oligonucleotide
  Sense strand starting at position 1568 of SEQ ID NO: 286
gccagagaauaguuauaag

SEQ ID NO: 25555 - RNA, 19 nt, Artificial Sequence
  Description of Artificial Sequence: Synthetic oligonucleotide
  Antisense strand to SEQ ID NO: 25554
cuuauaacuauucucuggc

SEQ ID NO: 25556 - RNA, 19 nt, Artificial Sequence
  Description of Artificial Sequence: Synthetic oligonucleotide
  Sense strand starting at position 1675 of SEQ ID NO: 286
acugcagaaggguaguauu

SEQ ID NO: 25557 - RNA, 19 nt, Artificial Sequence
  Description of Artificial Sequence: Synthetic oligonucleotide
  Antisense strand to SEQ ID NO: 25556
aauacuacccuucugcagu

SEQ ID NO: 25558 - RNA, 19 nt, Artificial Sequence
  Description of Artificial Sequence: Synthetic oligonucleotide
  Sense strand starting at position 1719 of SEQ ID NO: 286
cuuucuguccgacaucaag

SEQ ID NO: 25559 - RNA, 19 nt, Artificial Sequence
  Description of Artificial Sequence: Synthetic oligonucleotide
  Antisense strand to SEQ ID NO: 25558
cuugaugucggacagaaag

SEQ ID NO: 25560 - RNA, 19 nt, Artificial Sequence
  Description of Artificial Sequence: Synthetic oligonucleotide
  Sense strand starting at position 1751 of SEQ ID NO: 286
ugagauuucuccgauccac

SEQ ID NO: 25561 - RNA, 19 nt, Artificial Sequence
  Description of Artificial Sequence: Synthetic oligonucleotide
  Antisense strand to SEQ ID NO: 25560
guggaucggagaaaucuca

SEQ ID NO: 25562 - RNA, 19 nt, Artificial Sequence
  Description of Artificial Sequence: Synthetic oligonucleotide
  Sense strand starting at position 1787 of SEQ ID NO: 286
auguuauagugauuugcua

SEQ ID NO: 25563 - RNA, 19 nt, Artificial Sequence
  Description of Artificial Sequence: Synthetic oligonucleotide
  Antisense strand to SEQ ID NO: 25562
uagcaaaucacuauaacau

SEQ ID NO: 25564 - RNA, 19 nt, Artificial Sequence
  Description of Artificial Sequence: Synthetic oligonucleotide
  Sense strand starting at position 1801 of SEQ ID NO: 286
ugcuaaaugaggcauaagu

SEQ ID NO: 25565 - RNA, 19 nt, Artificial Sequence
  Description of Artificial Sequence: Synthetic oligonucleotide
  Antisense strand to SEQ ID NO: 25564
acuuaugccucauuuagca

SEQ ID NO: 25566 - RNA, 19 nt, Artificial Sequence
  Description of Artificial Sequence: Synthetic oligonucleotide
  Sense strand starting at position 1803 of SEQ ID NO: 286
cuaaaugaggcauaagucu

SEQ ID NO: 25567 - RNA, 19 nt, Artificial Sequence
  Description of Artificial Sequence: Synthetic oligonucleotide
  Antisense strand to SEQ ID NO: 25566
agacuuaugccucauuuag

SEQ ID NO: 25568 - RNA, 19 nt, Artificial Sequence
  Description of Artificial Sequence: Synthetic oligonucleotide
  Sense strand starting at position 2201 of SEQ ID NO: 286
ggcggaaguaaacgagaaa

SEQ ID NO: 25569 - RNA, 19 nt, Artificial Sequence
  Description of Artificial Sequence: Synthetic oligonucleotide
  Antisense strand to SEQ ID NO: 25568
uuucucguuuacuuccgcc

SEQ ID NO: 25570 - RNA, 19 nt, Artificial Sequence
  Description of Artificial Sequence: Synthetic oligonucleotide
  Sense strand starting at position 2286 of SEQ ID NO: 286
guguuaugacgucuggugu

SEQ ID NO: 25571 - RNA, 19 nt, Artificial Sequence
  Description of Artificial Sequence: Synthetic oligonucleotide
  Antisense strand to SEQ ID NO: 25570
acaccagacgucauaacac

SEQ ID NO: 25572 - RNA, 19 nt, Artificial Sequence
  Description of Artificial Sequence: Synthetic oligonucleotide
  Sense strand starting at position 2303 of SEQ ID NO: 286
gucccacuugacugggaau

SEQ ID NO: 25573 - RNA, 19 nt, Artificial Sequence
  Description of Artificial Sequence: Synthetic oligonucleotide
  Antisense strand to SEQ ID NO: 25572
auucccagucaagugggac

SEQ ID NO: 25574 - RNA, 19 nt, Artificial Sequence
  Description of Artificial Sequence: Synthetic oligonucleotide
  Sense strand starting at position 2356 of SEQ ID NO: 286
uuugauuugugucugugga

SEQ ID NO: 25575 - RNA, 19 nt, Artificial Sequence
  Description of Artificial Sequence: Synthetic oligonucleotide
  Antisense strand to SEQ ID NO: 25574
uccacagacacaaaucaaa

SEQ ID NO: 25576 - RNA, 19 nt, Artificial Sequence
  Description of Artificial Sequence: Synthetic oligonucleotide
  Sense strand starting at position 2357 of SEQ ID NO: 286
uugauuugugucuguggaa

SEQ ID NO: 25577 - RNA, 19 nt, Artificial Sequence
  Description of Artificial Sequence: Synthetic oligonucleotide
  Antisense strand to SEQ ID NO: 25576
uuccacagacacaaaucaa

SEQ ID NO: 25578 - RNA, 19 nt, Artificial Sequence
  Description of Artificial Sequence: Synthetic oligonucleotide
  Sense strand starting at position 2420 of SEQ ID NO: 286
gcagaauagccucaccugu

SEQ ID NO: 25579 - RNA, 19 nt, Artificial Sequence
  Description of Artificial Sequence: Synthetic oligonucleotide
  Antisense strand to SEQ ID NO: 25578
acaggugaggcuauucugc

SEQ ID NO: 25580 - RNA, 19 nt, Artificial Sequence
  Description of Artificial Sequence: Synthetic oligonucleotide
  Sense strand starting at position 2705 of SEQ ID NO: 286
ccagucaggucauuacaaa

SEQ ID NO: 25581 - RNA, 19 nt, Artificial Sequence
  Description of Artificial Sequence: Synthetic oligonucleotide
  Antisense strand to SEQ ID NO: 25580
uuuguaaugaccugacugg

SEQ ID NO: 25582 - RNA, 19 nt, Artificial Sequence
  Description of Artificial Sequence: Synthetic oligonucleotide
  Sense strand starting at position 2898 of SEQ ID NO: 286
guugucacuccuggaucua

SEQ ID NO: 25583 - RNA, 19 nt, Artificial Sequence
  Description of Artificial Sequence: Synthetic oligonucleotide
  Antisense strand to SEQ ID NO: 25582
uagauccaggagugacaac

SEQ ID NO: 25584 - RNA, 19 nt, Artificial Sequence
  Description of Artificial Sequence: Synthetic oligonucleotide
  Sense strand starting at position 2899 of SEQ ID NO: 286
uugucacuccuggaucuau

SEQ ID NO: 25585 - RNA, 19 nt, Artificial Sequence
  Description of Artificial Sequence: Synthetic oligonucleotide
  Antisense strand to SEQ ID NO: 25584
auagauccaggagugacaa

SEQ ID NO: 25586 - RNA, 19 nt, Artificial Sequence
  Description of Artificial Sequence: Synthetic oligonucleotide
  Sense strand starting at position 3049 of SEQ ID NO: 286
gagaguagaaaguagucuu

SEQ ID NO: 25587 - RNA, 19 nt, Artificial Sequence
  Description of Artificial Sequence: Synthetic oligonucleotide
  Antisense strand to SEQ ID NO: 25586
aagacuacuuucuacucuc

SEQ ID NO: 25588 - RNA, 19 nt, Artificial Sequence
  Description of Artificial Sequence: Synthetic oligonucleotide
  Sense strand starting at position 3052 of SEQ ID NO: 286
aguagaaaguagucuucua

SEQ ID NO: 25589 - RNA, 19 nt, Artificial Sequence
  Description of Artificial Sequence: Synthetic oligonucleotide
  Antisense strand to SEQ ID NO: 25588
uagaagacuacuuucuacu

SEQ ID NO: 25590 - RNA, 19 nt, Artificial Sequence
  Description of Artificial Sequence: Synthetic oligonucleotide
  Sense strand starting at position 3435 of SEQ ID NO: 286
gaacuaaucuuguuuggug

SEQ ID NO: 25591 - RNA, 19 nt, Artificial Sequence
  Description of Artificial Sequence: Synthetic oligonucleotide
  Antisense strand to SEQ ID NO: 25590
caccaaacaagauuaguuc

SEQ ID NO: 25592 - RNA, 19 nt, Artificial Sequence
  Description of Artificial Sequence: Synthetic oligonucleotide
  Sense strand starting at position 3639 of SEQ ID NO: 286
aagagugcugagggugauu

SEQ ID NO: 25593 - RNA, 19 nt, Artificial Sequence
  Description of Artificial Sequence: Synthetic oligonucleotide
  Antisense strand to SEQ ID NO: 25592
aaucacccucagcacucuu

SEQ ID NO: 25594 - RNA, 19 nt, Artificial Sequence
  Description of Artificial Sequence: Synthetic oligonucleotide
  Sense strand starting at position 3642 of SEQ ID NO: 286
agugcugagggugauuaga

SEQ ID NO: 25595 - RNA, 19 nt, Artificial Sequence
  Description of Artificial Sequence: Synthetic oligonucleotide
  Antisense strand to SEQ ID NO: 25594
ucuaaucacccucagcacu

SEQ ID NO: 25596 - RNA, 19 nt, Artificial Sequence
  Description of Artificial Sequence: Synthetic oligonucleotide
  Sense strand starting at position 3908 of SEQ ID NO: 286
gauauagacuggcccagau

SEQ ID NO: 25597 - RNA, 19 nt, Artificial Sequence
  Description of Artificial Sequence: Synthetic oligonucleotide
  Antisense strand to SEQ ID NO: 25596
aucugggccagucuauauc

SEQ ID NO: 25598 - RNA, 19 nt, Artificial Sequence
  Description of Artificial Sequence: Synthetic oligonucleotide
  Sense strand starting at position 3971 of SEQ ID NO: 286
ugaguucccacguagagau

SEQ ID NO: 25599 - RNA, 19 nt, Artificial Sequence
  Description of Artificial Sequence: Synthetic oligonucleotide
  Antisense strand to SEQ ID NO: 25598
aucucuacgugggaacuca

SEQ ID NO: 25600 - RNA, 19 nt, Artificial Sequence
  Description of Artificial Sequence: Synthetic oligonucleotide
  Sense strand starting at position 122 of SEQ ID NO: 287
cuccaucugccagagugua

SEQ ID NO: 25601 - RNA, 19 nt, Artificial Sequence
  Description of Artificial Sequence: Synthetic oligonucleotide
  Antisense strand to SEQ ID NO: 25600
uacacucuggcagauggag

SEQ ID NO: 25602 - RNA, 19 nt, Artificial Sequence
  Description of Artificial Sequence: Synthetic oligonucleotide
  Sense strand starting at position 130 of SEQ ID NO: 287
gccagaguguaagucauau

SEQ ID NO: 25603 - RNA, 19 nt, Artificial Sequence
  Description of Artificial Sequence: Synthetic oligonucleotide
  Antisense strand to SEQ ID NO: 25602
auaugacuuacacucuggc

SEQ ID NO: 25604 - RNA, 19 nt, Artificial Sequence
  Description of Artificial Sequence: Synthetic oligonucleotide
  Sense strand starting at position 228 of SEQ ID NO: 287
aagaaaguguugcuaaaug

SEQ ID NO: 25605 - RNA, 19 nt, Artificial Sequence
  Description of Artificial Sequence: Synthetic oligonucleotide
  Antisense strand to SEQ ID NO: 25604
cauuuagcaacacuuucuu

SEQ ID NO: 25606 - RNA, 19 nt, Artificial Sequence
  Description of Artificial Sequence: Synthetic oligonucleotide
  Sense strand starting at position 233 of SEQ ID NO: 287
aguguugcuaaauggcaaa

SEQ ID NO: 25607 - RNA, 19 nt, Artificial Sequence
  Description of Artificial Sequence: Synthetic oligonucleotide
  Antisense strand to SEQ ID NO: 25606
uuugccauuuagcaacacu

SEQ ID NO: 25608 - RNA, 19 nt, Artificial Sequence
  Description of Artificial Sequence: Synthetic oligonucleotide
  Sense strand starting at position 244 of SEQ ID NO: 287
auggcaaaugguugaauga

SEQ ID NO: 25609 - RNA, 19 nt, Artificial Sequence
  Description of Artificial Sequence: Synthetic oligonucleotide
  Antisense strand to SEQ ID NO: 25608
ucauucaaccauuugccau

SEQ ID NO: 25610 - RNA, 19 nt, Artificial Sequence
  Description of Artificial Sequence: Synthetic oligonucleotide
  Sense strand starting at position 342 of SEQ ID NO: 287
ggugcauauucaucgucga

SEQ ID NO: 25611 - RNA, 19 nt, Artificial Sequence
  Description of Artificial Sequence: Synthetic oligonucleotide
  Antisense strand to SEQ ID NO: 25610
ucgacgaugaauaugcacc

SEQ ID NO: 25612 - RNA, 19 nt, Artificial Sequence
  Description of Artificial Sequence: Synthetic oligonucleotide
  Sense strand starting at position 343 of SEQ ID NO: 287
gugcauauucaucgucgau

SEQ ID NO: 25613 - RNA, 19 nt, Artificial Sequence
  Description of Artificial Sequence: Synthetic oligonucleotide
  Antisense strand to SEQ ID NO: 25612
aucgacgaugaauaugcac

SEQ ID NO: 25614 - RNA, 19 nt, Artificial Sequence
  Description of Artificial Sequence: Synthetic oligonucleotide
  Sense strand starting at position 583 of SEQ ID NO: 287
gcuggaugccugugcuuaa

SEQ ID NO: 25615 - RNA, 19 nt, Artificial Sequence
  Description of Artificial Sequence: Synthetic oligonucleotide
  Antisense strand to SEQ ID NO: 25614
uuaagcacaggcauccagc

SEQ ID NO: 25616 - RNA, 19 nt, Artificial Sequence
  Description of Artificial Sequence: Synthetic oligonucleotide
  Sense strand starting at position 647 of SEQ ID NO: 287
ugagcucuuuccgauuucu

SEQ ID NO: 25617 - RNA, 19 nt, Artificial Sequence
  Description of Artificial Sequence: Synthetic oligonucleotide
  Antisense strand to SEQ ID NO: 25616
agaaaucggaaagagcuca

SEQ ID NO: 25618 - RNA, 19 nt, Artificial Sequence
  Description of Artificial Sequence: Synthetic oligonucleotide
  Sense strand starting at position 761 of SEQ ID NO: 287
uccaaugaaucagugaugu

SEQ ID NO: 25619 - RNA, 19 nt, Artificial Sequence
  Description of Artificial Sequence: Synthetic oligonucleotide
  Antisense strand to SEQ ID NO: 25618
acaucacugauucauugga

SEQ ID NO: 25620 - RNA, 19 nt, Artificial Sequence
  Description of Artificial Sequence: Synthetic oligonucleotide
  Sense strand starting at position 771 of SEQ ID NO: 287
cagugauguuguuccaaga

SEQ ID NO: 25621 - RNA, 19 nt, Artificial Sequence
  Description of Artificial Sequence: Synthetic oligonucleotide
  Antisense strand to SEQ ID NO: 25620
ucuuggaacaacaucacug

SEQ ID NO: 25622 - RNA, 19 nt, Artificial Sequence
  Description of Artificial Sequence: Synthetic oligonucleotide
  Sense strand starting at position 811 of SEQ ID NO: 287
aggauauggucuucccaaa

SEQ ID NO: 25623 - RNA, 19 nt, Artificial Sequence
  Description of Artificial Sequence: Synthetic oligonucleotide
  Antisense strand to SEQ ID NO: 25622
uuugggaagaccauauccu

SEQ ID NO: 25624 - RNA, 19 nt, Artificial Sequence
  Description of Artificial Sequence: Synthetic oligonucleotide
  Sense strand starting at position 1004 of SEQ ID NO: 287
acccucuaauugggaugaa

SEQ ID NO: 25625 - RNA, 19 nt, Artificial Sequence
  Description of Artificial Sequence: Synthetic oligonucleotide
  Antisense strand to SEQ ID NO: 25624
uucaucccaauuagagggu

SEQ ID NO: 25626 - RNA, 19 nt, Artificial Sequence
  Description of Artificial Sequence: Synthetic oligonucleotide
  Sense strand starting at position 1007 of SEQ ID NO: 287
cucuaauugggaugaacuc

SEQ ID NO: 25627 - RNA, 19 nt, Artificial Sequence
  Description of Artificial Sequence: Synthetic oligonucleotide
  Antisense strand to SEQ ID NO: 25626
gaguucaucccaauuagag

SEQ ID NO: 25628 - RNA, 19 nt, Artificial Sequence
  Description of Artificial Sequence: Synthetic oligonucleotide
  Sense strand starting at position 1235 of SEQ ID NO: 287
cacauagugcaguguggaa

SEQ ID NO: 25629 - RNA, 19 nt, Artificial Sequence
  Description of Artificial Sequence: Synthetic oligonucleotide
  Antisense strand to SEQ ID NO: 25628
uuccacacugcacuaugug

SEQ ID NO: 25630 - RNA, 19 nt, Artificial Sequence
  Description of Artificial Sequence: Synthetic oligonucleotide
  Sense strand starting at position 1237 of SEQ ID NO: 287
cauagugcaguguggaauu

SEQ ID NO: 25631 - RNA, 19 nt, Artificial Sequence
  Description of Artificial Sequence: Synthetic oligonucleotide
  Antisense strand to SEQ ID NO: 25630
aauuccacacugcacuaug

SEQ ID NO: 25632 - RNA, 19 nt, Artificial Sequence
  Description of Artificial Sequence: Synthetic oligonucleotide
  Sense strand starting at position 1259 of SEQ ID NO: 287
gcccacugcccguauauga

SEQ ID NO: 25633 - RNA, 19 nt, Artificial Sequence
  Description of Artificial Sequence: Synthetic oligonucleotide
  Antisense strand to SEQ ID NO: 25632
ucauauacgggcagugggc

SEQ ID NO: 25634 - RNA, 19 nt, Artificial Sequence
  Description of Artificial Sequence: Synthetic oligonucleotide
  Sense strand starting at position 1409 of SEQ ID NO: 287
cuuggaaagugcuggacaa

SEQ ID NO: 25635 - RNA, 19 nt, Artificial Sequence
  Description of Artificial Sequence: Synthetic oligonucleotide
  Antisense strand to SEQ ID NO: 25634
uuguccagcacuuuccaag

SEQ ID NO: 25636 - RNA, 19 nt, Artificial Sequence
  Description of Artificial Sequence: Synthetic oligonucleotide
  Sense strand starting at position 1410 of SEQ ID NO: 287
uuggaaagugcuggacaaa

SEQ ID NO: 25637 - RNA, 19 nt, Artificial Sequence
  Description of Artificial Sequence: Synthetic oligonucleotide
  Antisense strand to SEQ ID NO: 25636
uuuguccagcacuuuccaa

SEQ ID NO: 25638 - RNA, 19 nt, Artificial Sequence
  Description of Artificial Sequence: Synthetic oligonucleotide
  Sense strand starting at position 1788 of SEQ ID NO: 287
aggguagcguuuccugaaa

SEQ ID NO: 25639 - RNA, 19 nt, Artificial Sequence
  Description of Artificial Sequence: Synthetic oligonucleotide
  Antisense strand to SEQ ID NO: 25638
uuucaggaaacgcuacccu

SEQ ID NO: 25640 - RNA, 19 nt, Artificial Sequence
  Description of Artificial Sequence: Synthetic oligonucleotide
  Sense strand starting at position 2123 of SEQ ID NO: 287
caggaaacgucagucucuu

SEQ ID NO: 25641 - RNA, 19 nt, Artificial Sequence
  Description of Artificial Sequence: Synthetic oligonucleotide
  Antisense strand to SEQ ID NO: 25640
aagagacugacguuuccug

SEQ ID NO: 25642 - RNA, 19 nt, Artificial Sequence
  Description of Artificial Sequence: Synthetic oligonucleotide
  Sense strand starting at position 2156 of SEQ ID NO: 287
uuaauauggucacaagauu

SEQ ID NO: 25643 - RNA, 19 nt, Artificial Sequence
  Description of Artificial Sequence: Synthetic oligonucleotide
  Antisense strand to SEQ ID NO: 25642
aaucuugugaccauauuaa

SEQ ID NO: 25644 - RNA, 19 nt, Artificial Sequence
  Description of Artificial Sequence: Synthetic oligonucleotide
  Sense strand starting at position 2259 of SEQ ID NO: 287
uuaagaggaacgugaaauc

SEQ ID NO: 25645 - RNA, 19 nt, Artificial Sequence
  Description of Artificial Sequence: Synthetic oligonucleotide
  Antisense strand to SEQ ID NO: 25644
gauuucacguuccucuuaa

SEQ ID NO: 25646 - RNA, 19 nt, Artificial Sequence
  Description of Artificial Sequence: Synthetic oligonucleotide
  Sense strand starting at position 2332 of SEQ ID NO: 287
aguacauugccuuaaguuc

SEQ ID NO: 25647 - RNA, 19 nt, Artificial Sequence
  Description of Artificial Sequence: Synthetic oligonucleotide
  Antisense strand to SEQ ID NO: 25646
gaacuuaaggcaauguacu

SEQ ID NO: 25648 - RNA, 19 nt, Artificial Sequence
  Description of Artificial Sequence: Synthetic oligonucleotide
  Sense strand starting at position 2414 of SEQ ID NO: 287
guucuucuucccuguggaa

SEQ ID NO: 25649 - RNA, 19 nt, Artificial Sequence
  Description of Artificial Sequence: Synthetic oligonucleotide
  Antisense strand to SEQ ID NO: 25648
uuccacagggaagaagaac

SEQ ID NO: 25650 - RNA, 19 nt, Artificial Sequence
  Description of Artificial Sequence: Synthetic oligonucleotide
  Sense strand starting at position 2416 of SEQ ID NO: 287
ucuucuucccuguggaaca

SEQ ID NO: 25651 - RNA, 19 nt, Artificial Sequence
  Description of Artificial Sequence: Synthetic oligonucleotide
  Antisense strand to SEQ ID NO: 25650
uguuccacagggaagaaga

SEQ ID NO: 25652 - RNA, 19 nt, Artificial Sequence
  Description of Artificial Sequence: Synthetic oligonucleotide
  Sense strand starting at position 2429 of SEQ ID NO: 287
ggaacaaugugguucuucu

SEQ ID NO: 25653 - RNA, 19 nt, Artificial Sequence
  Description of Artificial Sequence: Synthetic oligonucleotide
  Antisense strand to SEQ ID NO: 25652
agaagaaccacauuguucc

SEQ ID NO: 25654 - RNA, 19 nt, Artificial Sequence
  Description of Artificial Sequence: Synthetic oligonucleotide
  Sense strand starting at position 2711 of SEQ ID NO: 287
cccuguaaucccgguggca

SEQ ID NO: 25655 - RNA, 19 nt, Artificial Sequence
  Description of Artificial Sequence: Synthetic oligonucleotide
  Antisense strand to SEQ ID NO: 25654
ugccaccgggauuacaggg

SEQ ID NO: 25656 - RNA, 19 nt, Artificial Sequence
  Description of Artificial Sequence: Synthetic oligonucleotide
  Sense strand starting at position 2776 of SEQ ID NO: 287
cuugaauccggguaguaga

SEQ ID NO: 25657 - RNA, 19 nt, Artificial Sequence
  Description of Artificial Sequence: Synthetic oligonucleotide
  Antisense strand to SEQ ID NO: 25656
ucuacuacccggauucaag

SEQ ID NO: 25658 - RNA, 19 nt, Artificial Sequence
  Description of Artificial Sequence: Synthetic oligonucleotide
  Sense strand starting at position 3004 of SEQ ID NO: 287
cugagaggccuuggugagu

SEQ ID NO: 25659 - RNA, 19 nt, Artificial Sequence
  Description of Artificial Sequence: Synthetic oligonucleotide
  Antisense strand to SEQ ID NO: 25658
acucaccaaggccucucag

SEQ ID NO: 25660 - RNA, 19 nt, Artificial Sequence
  Description of Artificial Sequence: Synthetic oligonucleotide
  Sense strand starting at position 3015 of SEQ ID NO: 287
uggugaguggaucacuuaa

SEQ ID NO: 25661 - RNA, 19 nt, Artificial Sequence
  Description of Artificial Sequence: Synthetic oligonucleotide
  Antisense strand to SEQ ID NO: 25660
uuaagugauccacucacca

SEQ ID NO: 25662 - RNA, 19 nt, Artificial Sequence
  Description of Artificial Sequence: Synthetic oligonucleotide
  Sense strand starting at position 3680 of SEQ ID NO: 287
gugcacaaagguuaggaua

SEQ ID NO: 25663 - RNA, 19 nt, Artificial Sequence
  Description of Artificial Sequence: Synthetic oligonucleotide
  Antisense strand to SEQ ID NO: 25662
uauccuaaccuuugugcac

SEQ ID NO: 25664 - RNA, 19 nt, Artificial Sequence
  Description of Artificial Sequence: Synthetic oligonucleotide
  Sense strand starting at position 3752 of SEQ ID NO: 287
aauguuuaugaagagcuua

SEQ ID NO: 25665 - RNA, 19 nt, Artificial Sequence
  Description of Artificial Sequence: Synthetic oligonucleotide
  Antisense strand to SEQ ID NO: 25664
uaagcucuucauaaacauu

SEQ ID NO: 25666 - RNA, 19 nt, Artificial Sequence
  Description of Artificial Sequence: Synthetic oligonucleotide
  Sense strand starting at position 3880 of SEQ ID NO: 287
ugcuaauagcgguuguauu

SEQ ID NO: 25667 - RNA, 19 nt, Artificial Sequence
  Description of Artificial Sequence: Synthetic oligonucleotide
  Antisense strand to SEQ ID NO: 25666
aauacaaccgcuauuagca

SEQ ID NO: 25668 - RNA, 19 nt, Artificial Sequence
  Description of Artificial Sequence: Synthetic oligonucleotide
  Sense strand starting at position 3881 of SEQ ID NO: 287
gcuaauagcgguuguauuu

SEQ ID NO: 25669 - RNA, 19 nt, Artificial Sequence
  Description of Artificial Sequence: Synthetic oligonucleotide
  Antisense strand to SEQ ID NO: 25668
aaauacaaccgcuauuagc

SEQ ID NO: 25670 - RNA, 19 nt, Artificial Sequence
  Description of Artificial Sequence: Synthetic oligonucleotide
  Sense strand starting at position 3888 of SEQ ID NO: 287
gcgguuguauuuaaguagu

SEQ ID NO: 25671 - RNA, 19 nt, Artificial Sequence
  Description of Artificial Sequence: Synthetic oligonucleotide
  Antisense strand to SEQ ID NO: 25670
acuacuuaaauacaaccgc

SEQ ID NO: 25672 - RNA, 19 nt, Artificial Sequence
  Description of Artificial Sequence: Synthetic oligonucleotide
  Sense strand starting at position 3890 of SEQ ID NO: 287
gguuguauuuaaguagugu

SEQ ID NO: 25673 - RNA, 19 nt, Artificial Sequence
  Description of Artificial Sequence: Synthetic oligonucleotide
  Antisense strand to SEQ ID NO: 25672
acacuacuuaaauacaacc

SEQ ID NO: 25674 - RNA, 19 nt, Artificial Sequence
  Description of Artificial Sequence: Synthetic oligonucleotide
  Sense strand starting at position 3891 of SEQ ID NO: 287
guuguauuuaaguagugua

SEQ ID NO: 25675 - RNA, 19 nt, Artificial Sequence
  Description of Artificial Sequence: Synthetic oligonucleotide
  Antisense strand to SEQ ID NO: 25674
uacacuacuuaaauacaac

SEQ ID NO: 25676 - RNA, 19 nt, Artificial Sequence
  Description of Artificial Sequence: Synthetic oligonucleotide
  Sense strand starting at position 3894 of SEQ ID NO: 287
guauuuaaguaguguaucu

SEQ ID NO: 25677 - RNA, 19 nt, Artificial Sequence
  Description of Artificial Sequence: Synthetic oligonucleotide
  Antisense strand to SEQ ID NO: 25676
agauacacuacuuaaauac

SEQ ID NO: 25678 - RNA, 19 nt, Artificial Sequence
  Description of Artificial Sequence: Synthetic oligonucleotide
  Sense strand starting at position 3899 of SEQ ID NO: 287
uaaguaguguaucuauagu

SEQ ID NO: 25679 - RNA, 19 nt, Artificial Sequence
  Description of Artificial Sequence: Synthetic oligonucleotide
  Antisense strand to SEQ ID NO: 25678
acuauagauacacuacuua

SEQ ID NO: 25680 - RNA, 19 nt, Artificial Sequence
  Description of Artificial Sequence: Synthetic oligonucleotide
  Sense strand starting at position 262 of SEQ ID NO: 290
gcaggugccgugccaauua

SEQ ID NO: 25681 - RNA, 19 nt, Artificial Sequence
  Description of Artificial Sequence: Synthetic oligonucleotide
  Antisense strand to SEQ ID NO: 25680
uaauuggcacggcaccugc

SEQ ID NO: 25682 - RNA, 19 nt, Artificial Sequence
  Description of Artificial Sequence: Synthetic oligonucleotide
  Sense strand starting at position 614 of SEQ ID NO: 290
ggcguccugucccaguuua

SEQ ID NO: 25683 - RNA, 19 nt, Artificial Sequence
  Description of Artificial Sequence: Synthetic oligonucleotide
  Antisense strand to SEQ ID NO: 25682
uaaacugggacaggacgcc

SEQ ID NO: 25684 - RNA, 19 nt, Artificial Sequence
  Description of Artificial Sequence: Synthetic oligonucleotide
  Sense strand starting at position 624 of SEQ ID NO: 290
cccaguuuaucugugucca

SEQ ID NO: 25685 - RNA, 19 nt, Artificial Sequence
  Description of Artificial Sequence: Synthetic oligonucleotide
  Antisense strand to SEQ ID NO: 25684
uggacacagauaaacuggg

SEQ ID NO: 25686 - RNA, 19 nt, Artificial Sequence
  Description of Artificial Sequence: Synthetic oligonucleotide
  Sense strand starting at position 625 of SEQ ID NO: 290
ccaguuuaucuguguccag

SEQ ID NO: 25687 - RNA, 19 nt, Artificial Sequence
  Description of Artificial Sequence: Synthetic oligonucleotide
  Antisense strand to SEQ ID NO: 25686
cuggacacagauaaacugg

SEQ ID NO: 25688 - RNA, 19 nt, Artificial Sequence
  Description of Artificial Sequence: Synthetic oligonucleotide
  Sense strand starting at position 626 of SEQ ID NO: 290
caguuuaucuguguccagu

SEQ ID NO: 25689 - RNA, 19 nt, Artificial Sequence
  Description of Artificial Sequence: Synthetic oligonucleotide
  Antisense strand to SEQ ID NO: 25688
acuggacacagauaaacug

SEQ ID NO: 25690 - RNA, 19 nt, Artificial Sequence
  Description of Artificial Sequence: Synthetic oligonucleotide
  Sense strand starting at position 635 of SEQ ID NO: 290
uguguccaguccgauugau

SEQ ID NO: 25691 - RNA, 19 nt, Artificial Sequence
  Description of Artificial Sequence: Synthetic oligonucleotide
  Antisense strand to SEQ ID NO: 25690
aucaaucggacuggacaca

SEQ ID NO: 25692 - RNA, 19 nt, Artificial Sequence
  Description of Artificial Sequence: Synthetic oligonucleotide
  Sense strand starting at position 643 of SEQ ID NO: 290
guccgauugaugggcucau

SEQ ID NO: 25693 - RNA, 19 nt, Artificial Sequence
  Description of Artificial Sequence: Synthetic oligonucleotide
  Antisense strand to SEQ ID NO: 25692
augagcccaucaaucggac

SEQ ID NO: 25694 - RNA, 19 nt, Artificial Sequence
  Description of Artificial Sequence: Synthetic oligonucleotide
  Sense strand starting at position 664 of SEQ ID NO: 290
auuggaaagcugugacaga

SEQ ID NO: 25695 - RNA, 19 nt, Artificial Sequence
  Description of Artificial Sequence: Synthetic oligonucleotide
  Antisense strand to SEQ ID NO: 25694
ucugucacagcuuuccaau

SEQ ID NO: 25696 - RNA, 19 nt, Artificial Sequence
  Description of Artificial Sequence: Synthetic oligonucleotide
  Sense strand starting at position 711 of SEQ ID NO: 290
acuguuuaacuccagugaa

SEQ ID NO: 25697 - RNA, 19 nt, Artificial Sequence
  Description of Artificial Sequence: Synthetic oligonucleotide
  Antisense strand to SEQ ID NO: 25696
uucacuggaguuaaacagu

SEQ ID NO: 25698 - RNA, 19 nt, Artificial Sequence
  Description of Artificial Sequence: Synthetic oligonucleotide
  Sense strand starting at position 790 of SEQ ID NO: 290
gggugugauucugagacua

SEQ ID NO: 25699 - RNA, 19 nt, Artificial Sequence
  Description of Artificial Sequence: Synthetic oligonucleotide
  Antisense strand to SEQ ID NO: 25698
uagucucagaaucacaccc

SEQ ID NO: 25700 - RNA, 19 nt, Artificial Sequence
  Description of Artificial Sequence: Synthetic oligonucleotide
  Sense strand starting at position 792 of SEQ ID NO: 290
gugugauucugagacuaag

SEQ ID NO: 25701 - RNA, 19 nt, Artificial Sequence
  Description of Artificial Sequence: Synthetic oligonucleotide
  Antisense strand to SEQ ID NO: 25700
cuuagucucagaaucacac

SEQ ID NO: 25702 - RNA, 19 nt, Artificial Sequence
  Description of Artificial Sequence: Synthetic oligonucleotide
  Sense strand starting at position 1240 of SEQ ID NO: 290
gagacuugcccagggacaa

SEQ ID NO: 25703 - RNA, 19 nt, Artificial Sequence
  Description of Artificial Sequence: Synthetic oligonucleotide
  Antisense strand to SEQ ID NO: 25702
uugucccugggcaagucuc

SEQ ID NO: 25704 - RNA, 19 nt, Artificial Sequence
  Description of Artificial Sequence: Synthetic oligonucleotide
  Sense strand starting at position 1241 of SEQ ID NO: 290
agacuugcccagggacaaa

SEQ ID NO: 25705 - RNA, 19 nt, Artificial Sequence
  Description of Artificial Sequence: Synthetic oligonucleotide
  Antisense strand to SEQ ID NO: 25704
uuugucccugggcaagucu

SEQ ID NO: 25706 - RNA, 19 nt, Artificial Sequence
  Description of Artificial Sequence: Synthetic oligonucleotide
  Sense strand starting at position 1290 of SEQ ID NO: 290
ggcacuguuuccugucgaa

SEQ ID NO: 25707 - RNA, 19 nt, Artificial Sequence
  Description of Artificial Sequence: Synthetic oligonucleotide
  Antisense strand to SEQ ID NO: 25706
uucgacaggaaacagugcc

SEQ ID NO: 25708 - RNA, 19 nt, Artificial Sequence
  Description of Artificial Sequence: Synthetic oligonucleotide
  Sense strand starting at position 1347 of SEQ ID NO: 290
gguguuguauucuggaaug

SEQ ID NO: 25709 - RNA, 19 nt, Artificial Sequence
  Description of Artificial Sequence: Synthetic oligonucleotide
  Antisense strand to SEQ ID NO: 25708
cauuccagaauacaacacc

SEQ ID NO: 25710 - RNA, 19 nt, Artificial Sequence
  Description of Artificial Sequence: Synthetic oligonucleotide
  Sense strand starting at position 1349 of SEQ ID NO: 290
uguuguauucuggaaugga

SEQ ID NO: 25711 - RNA, 19 nt, Artificial Sequence
  Description of Artificial Sequence: Synthetic oligonucleotide
  Antisense strand to SEQ ID NO: 25710
uccauuccagaauacaaca

SEQ ID NO: 25712 - RNA, 19 nt, Artificial Sequence
  Description of Artificial Sequence: Synthetic oligonucleotide
  Sense strand starting at position 1581 of SEQ ID NO: 290
ugggcguggucugguagau

SEQ ID NO: 25713 - RNA, 19 nt, Artificial Sequence
  Description of Artificial Sequence: Synthetic oligonucleotide
  Antisense strand to SEQ ID NO: 25712
aucuaccagaccacgccca

SEQ ID NO: 25714 - RNA, 19 nt, Artificial Sequence
  Description of Artificial Sequence: Synthetic oligonucleotide
  Sense strand starting at position 1583 of SEQ ID NO: 290
ggcguggucugguagauaa

SEQ ID NO: 25715 - RNA, 19 nt, Artificial Sequence
  Description of Artificial Sequence: Synthetic oligonucleotide
  Antisense strand to SEQ ID NO: 25714
uuaucuaccagaccacgcc

SEQ ID NO: 25716 - RNA, 19 nt, Artificial Sequence
  Description of Artificial Sequence: Synthetic oligonucleotide
  Sense strand starting at position 1585 of SEQ ID NO: 290
cguggucugguagauaacu

SEQ ID NO: 25717 - RNA, 19 nt, Artificial Sequence
  Description of Artificial Sequence: Synthetic oligonucleotide
  Antisense strand to SEQ ID NO: 25716
aguuaucuaccagaccacg

SEQ ID NO: 25718 - RNA, 19 nt, Artificial Sequence
  Description of Artificial Sequence: Synthetic oligonucleotide
  Sense strand starting at position 1900 of SEQ ID NO: 290
ggagcagccguguuuccua

SEQ ID NO: 25719 - RNA, 19 nt, Artificial Sequence
  Description of Artificial Sequence: Synthetic oligonucleotide
  Antisense strand to SEQ ID NO: 25718
uaggaaacacggcugcucc

SEQ ID NO: 25720 - RNA, 19 nt, Artificial Sequence
  Description of Artificial Sequence: Synthetic oligonucleotide
  Sense strand starting at position 1907 of SEQ ID NO: 290
ccguguuuccuacagugga

SEQ ID NO: 25721 - RNA, 19 nt, Artificial Sequence
  Description of Artificial Sequence: Synthetic oligonucleotide
  Antisense strand to SEQ ID NO: 25720
uccacuguaggaaacacgg

SEQ ID NO: 25722 - RNA, 19 nt, Artificial Sequence
  Description of Artificial Sequence: Synthetic oligonucleotide
  Sense strand starting at position 1910 of SEQ ID NO: 290
uguuuccuacaguggagaa

SEQ ID NO: 25723 - RNA, 19 nt, Artificial Sequence
  Description of Artificial Sequence: Synthetic oligonucleotide
  Antisense strand to SEQ ID NO: 25722
uucuccacuguaggaaaca

SEQ ID NO: 25724 - RNA, 19 nt, Artificial Sequence
  Description of Artificial Sequence: Synthetic oligonucleotide
  Sense strand starting at position 2132 of SEQ ID NO: 290
ggucgaggccucagcgauu

SEQ ID NO: 25725 - RNA, 19 nt, Artificial Sequence
  Description of Artificial Sequence: Synthetic oligonucleotide
  Antisense strand to SEQ ID NO: 25724
aaucgcugaggccucgacc

SEQ ID NO: 25726 - RNA, 19 nt, Artificial Sequence
  Description of Artificial Sequence: Synthetic oligonucleotide
  Sense strand starting at position 2663 of SEQ ID NO: 290
auccaaacuuguuguuaac

SEQ ID NO: 25727 - RNA, 19 nt, Artificial Sequence
  Description of Artificial Sequence: Synthetic oligonucleotide
  Antisense strand to SEQ ID NO: 25726
guuaacaacaaguuuggau

SEQ ID NO: 25728 - RNA, 19 nt, Artificial Sequence
  Description of Artificial Sequence: Synthetic oligonucleotide
  Sense strand starting at position 2665 of SEQ ID NO: 290
ccaaacuuguuguuaacuu

SEQ ID NO: 25729 - RNA, 19 nt, Artificial Sequence
  Description of Artificial Sequence: Synthetic oligonucleotide
  Antisense strand to SEQ ID NO: 25728
aaguuaacaacaaguuugg

SEQ ID NO: 25730 - RNA, 19 nt, Artificial Sequence
  Description of Artificial Sequence: Synthetic oligonucleotide
  Sense strand starting at position 2722 of SEQ ID NO: 290
auuacucauggcgacaaga

SEQ ID NO: 25731 - RNA, 19 nt, Artificial Sequence
  Description of Artificial Sequence: Synthetic oligonucleotide
  Antisense strand to SEQ ID NO: 25730
ucuugucgccaugaguaau

SEQ ID NO: 25732 - RNA, 19 nt, Artificial Sequence
  Description of Artificial Sequence: Synthetic oligonucleotide
  Sense strand starting at position 2902 of SEQ ID NO: 290
gcccuuuggagucacgaau

SEQ ID NO: 25733 - RNA, 19 nt, Artificial Sequence
  Description of Artificial Sequence: Synthetic oligonucleotide
  Antisense strand to SEQ ID NO: 25732
auucgugacuccaaagggc

SEQ ID NO: 25734 - RNA, 19 nt, Artificial Sequence
  Description of Artificial Sequence: Synthetic oligonucleotide
  Sense strand starting at position 2913 of SEQ ID NO: 290
ucacgaaugugccuguuua

SEQ ID NO: 25735 - RNA, 19 nt, Artificial Sequence
  Description of Artificial Sequence: Synthetic oligonucleotide
  Antisense strand to SEQ ID NO: 25734
uaaacaggcacauucguga

SEQ ID NO: 25736 - RNA, 19 nt, Artificial Sequence
  Description of Artificial Sequence: Synthetic oligonucleotide
  Sense strand starting at position 2914 of SEQ ID NO: 290
cacgaaugugccuguuuau

SEQ ID NO: 25737 - RNA, 19 nt, Artificial Sequence
  Description of Artificial Sequence: Synthetic oligonucleotide
  Antisense strand to SEQ ID NO: 25736
auaaacaggcacauucgug

SEQ ID NO: 25738 - RNA, 19 nt, Artificial Sequence
  Description of Artificial Sequence: Synthetic oligonucleotide
  Sense strand starting at position 2917 of SEQ ID NO: 290
gaaugugccuguuuaugua

SEQ ID NO: 25739 - RNA, 19 nt, Artificial Sequence
  Description of Artificial Sequence: Synthetic oligonucleotide
  Antisense strand to SEQ ID NO: 25738
uacauaaacaggcacauuc

SEQ ID NO: 25740 - RNA, 19 nt, Artificial Sequence
  Description of Artificial Sequence: Synthetic oligonucleotide
  Sense strand starting at position 3137 of SEQ ID NO: 290
ugaaucgauuccgcuuauu

SEQ ID NO: 25741 - RNA, 19 nt, Artificial Sequence
  Description of Artificial Sequence: Synthetic oligonucleotide
  Antisense strand to SEQ ID NO: 25740
aauaagcggaaucgauuca

SEQ ID NO: 25742 - RNA, 19 nt, Artificial Sequence
  Description of Artificial Sequence: Synthetic oligonucleotide
  Sense strand starting at position 3513 of SEQ ID NO: 290
cccgaaagcuuaucccaca

SEQ ID NO: 25743 - RNA, 19 nt, Artificial Sequence
  Description of Artificial Sequence: Synthetic oligonucleotide
  Antisense strand to SEQ ID NO: 25742
ugugggauaagcuuucggg

SEQ ID NO: 25744 - RNA, 19 nt, Artificial Sequence
  Description of Artificial Sequence: Synthetic oligonucleotide
  Sense strand starting at position 3591 of SEQ ID NO: 290
ucgacuuacccucgucuau

SEQ ID NO: 25745 - RNA, 19 nt, Artificial Sequence
  Description of Artificial Sequence: Synthetic oligonucleotide
  Antisense strand to SEQ ID NO: 25744
auagacgaggguaagucga

SEQ ID NO: 25746 - RNA, 19 nt, Artificial Sequence
  Description of Artificial Sequence: Synthetic oligonucleotide
  Sense strand starting at position 3684 of SEQ ID NO: 290
cugccagcucucuagaaca

SEQ ID NO: 25747 - RNA, 19 nt, Artificial Sequence
  Description of Artificial Sequence: Synthetic oligonucleotide
  Antisense strand to SEQ ID NO: 25746
uguucuagagagcuggcag

SEQ ID NO: 25748 - RNA, 19 nt, Artificial Sequence
  Description of Artificial Sequence: Synthetic oligonucleotide
  Sense strand starting at position 3744 of SEQ ID NO: 290
uguagucaacuccacagaa

SEQ ID NO: 25749 - RNA, 19 nt, Artificial Sequence
  Description of Artificial Sequence: Synthetic oligonucleotide
  Antisense strand to SEQ ID NO: 25748
uucuguggaguugacuaca

SEQ ID NO: 25750 - RNA, 19 nt, Artificial Sequence
  Description of Artificial Sequence: Synthetic oligonucleotide
  Sense strand starting at position 3899 of SEQ ID NO: 290
gcuggauccugagccaaca

SEQ ID NO: 25751 - RNA, 19 nt, Artificial Sequence
  Description of Artificial Sequence: Synthetic oligonucleotide
  Antisense strand to SEQ ID NO: 25750
uguuggcucaggauccagc

SEQ ID NO: 25752 - RNA, 19 nt, Artificial Sequence
  Description of Artificial Sequence: Synthetic oligonucleotide
  Sense strand starting at position 176 of SEQ ID NO: 288
ucgcauucccgagcuguuu

SEQ ID NO: 25753 - RNA, 19 nt, Artificial Sequence
  Description of Artificial Sequence: Synthetic oligonucleotide
  Antisense strand to SEQ ID NO: 25752
aaacagcucgggaaugcga

SEQ ID NO: 25754 - RNA, 19 nt, Artificial Sequence
  Description of Artificial Sequence: Synthetic oligonucleotide
  Sense strand starting at position 380 of SEQ ID NO: 288
caguuuggguuaucuuguu

SEQ ID NO: 25755 - RNA, 19 nt, Artificial Sequence
  Description of Artificial Sequence: Synthetic oligonucleotide
  Antisense strand to SEQ ID NO: 25754
aacaagauaacccaaacug

SEQ ID NO: 25756 - RNA, 19 nt, Artificial Sequence
  Description of Artificial Sequence: Synthetic oligonucleotide
  Sense strand starting at position 385 of SEQ ID NO: 288
uggguuaucuuguuagcaa

SEQ ID NO: 25757 - RNA, 19 nt, Artificial Sequence
  Description of Artificial Sequence: Synthetic oligonucleotide
  Antisense strand to SEQ ID NO: 25756
uugcuaacaagauaaccca

SEQ ID NO: 25758 - RNA, 19 nt, Artificial Sequence
  Description of Artificial Sequence: Synthetic oligonucleotide
  Sense strand starting at position 386 of SEQ ID NO: 288
ggguuaucuuguuagcaaa

SEQ ID NO: 25759 - RNA, 19 nt, Artificial Sequence
  Description of Artificial Sequence: Synthetic oligonucleotide
  Antisense strand to SEQ ID NO: 25758
uuugcuaacaagauaaccc

SEQ ID NO: 25760 - RNA, 19 nt, Artificial Sequence
  Description of Artificial Sequence: Synthetic oligonucleotide
  Sense strand starting at position 735 of SEQ ID NO: 288
ccaccuuuccagugugaaa

SEQ ID NO: 25761 - RNA, 19 nt, Artificial Sequence
  Description of Artificial Sequence: Synthetic oligonucleotide
  Antisense strand to SEQ ID NO: 25760
uuucacacuggaaaggugg

SEQ ID NO: 25762 - RNA, 19 nt, Artificial Sequence
  Description of Artificial Sequence: Synthetic oligonucleotide
  Sense strand starting at position 737 of SEQ ID NO: 288
accuuuccagugugaaaca

SEQ ID NO: 25763 - RNA, 19 nt, Artificial Sequence
  Description of Artificial Sequence: Synthetic oligonucleotide
  Antisense strand to SEQ ID NO: 25762
uguuucacacuggaaaggu

SEQ ID NO: 25764 - RNA, 19 nt, Artificial Sequence
  Description of Artificial Sequence: Synthetic oligonucleotide
  Sense strand starting at position 870 of SEQ ID NO: 288
gcgaacuccuucuggcaca

SEQ ID NO: 25765 - RNA, 19 nt, Artificial Sequence
  Description of Artificial Sequence: Synthetic oligonucleotide
  Antisense strand to SEQ ID NO: 25764
ugugccagaaggaguucgc

SEQ ID NO: 25766 - RNA, 19 nt, Artificial Sequence
  Description of Artificial Sequence: Synthetic oligonucleotide
  Sense strand starting at position 1567 of SEQ ID NO: 288
gguggguggguggaaauau

SEQ ID NO: 25767 - RNA, 19 nt, Artificial Sequence
  Description of Artificial Sequence: Synthetic oligonucleotide
  Antisense strand to SEQ ID NO: 25766
auauuuccacccacccacc

SEQ ID NO: 25768 - RNA, 19 nt, Artificial Sequence
  Description of Artificial Sequence: Synthetic oligonucleotide
  Sense strand starting at position 2376 of SEQ ID NO: 288
guaaauaaagcuugaaauc

SEQ ID NO: 25769 - RNA, 19 nt, Artificial Sequence
  Description of Artificial Sequence: Synthetic oligonucleotide
  Antisense strand to SEQ ID NO: 25768
gauuucaagcuuuauuuac

SEQ ID NO: 25770 - RNA, 19 nt, Artificial Sequence
  Description of Artificial Sequence: Synthetic oligonucleotide
  Sense strand starting at position 2987 of SEQ ID NO: 288
auagguugguguucaggga

SEQ ID NO: 25771 - RNA, 19 nt, Artificial Sequence
  Description of Artificial Sequence: Synthetic oligonucleotide
  Antisense strand to SEQ ID NO: 25770
ucccugaacaccaaccuau

SEQ ID NO: 25772 - RNA, 19 nt, Artificial Sequence
  Description of Artificial Sequence: Synthetic oligonucleotide
  Sense strand starting at position 2988 of SEQ ID NO: 288
uagguugguguucagggaa

SEQ ID NO: 25773 - RNA, 19 nt, Artificial Sequence
  Description of Artificial Sequence: Synthetic oligonucleotide
  Antisense strand to SEQ ID NO: 25772
uucccugaacaccaaccua

SEQ ID NO: 25774 - RNA, 19 nt, Artificial Sequence
  Description of Artificial Sequence: Synthetic oligonucleotide
  Sense strand starting at position 3133 of SEQ ID NO: 288
ggcccuucgacuugaguga

SEQ ID NO: 25775 - RNA, 19 nt, Artificial Sequence
  Description of Artificial Sequence: Synthetic oligonucleotide
  Antisense strand to SEQ ID NO: 25774
ucacucaagucgaagggcc

SEQ ID NO: 25776 - RNA, 19 nt, Artificial Sequence
  Description of Artificial Sequence: Synthetic oligonucleotide
  Sense strand starting at position 3413 of SEQ ID NO: 288
cugggucuuuccuggaaau

SEQ ID NO: 25777 - RNA, 19 nt, Artificial Sequence
  Description of Artificial Sequence: Synthetic oligonucleotide
  Antisense strand to SEQ ID NO: 25776
auuuccaggaaagacccag

SEQ ID NO: 25778 - RNA, 19 nt, Artificial Sequence
  Description of Artificial Sequence: Synthetic oligonucleotide
  Sense strand starting at position 3414 of SEQ ID NO: 288
ugggucuuuccuggaaaug

SEQ ID NO: 25779 - RNA, 19 nt, Artificial Sequence
  Description of Artificial Sequence: Synthetic oligonucleotide
  Antisense strand to SEQ ID NO: 25778
cauuuccaggaaagaccca

SEQ ID NO: 25780 - RNA, 19 nt, Artificial Sequence
  Description of Artificial Sequence: Synthetic oligonucleotide
  Sense strand starting at position 3415 of SEQ ID NO: 288
gggucuuuccuggaaaugu

SEQ ID NO: 25781 - RNA, 19 nt, Artificial Sequence
  Description of Artificial Sequence: Synthetic oligonucleotide
  Antisense strand to SEQ ID NO: 25780
acauuuccaggaaagaccc

SEQ ID NO: 25782 - RNA, 19 nt, Artificial Sequence
  Description of Artificial Sequence: Synthetic oligonucleotide
  Sense strand starting at position 3424 of SEQ ID NO: 288
cuggaaaugucaccauggu

SEQ ID NO: 25783 - RNA, 19 nt, Artificial Sequence
  Description of Artificial Sequence: Synthetic oligonucleotide
  Antisense strand to SEQ ID NO: 25782
accauggugacauuuccag

SEQ ID NO: 25784 - RNA, 19 nt, Artificial Sequence
  Description of Artificial Sequence: Synthetic oligonucleotide
  Sense strand starting at position 3425 of SEQ ID NO: 288
uggaaaugucaccaugguc

SEQ ID NO: 25785 - RNA, 19 nt, Artificial Sequence
  Description of Artificial Sequence: Synthetic oligonucleotide
  Antisense strand to SEQ ID NO: 25784
gaccauggugacauuucca

SEQ ID NO: 25786 - RNA, 19 nt, Artificial Sequence
  Description of Artificial Sequence: Synthetic oligonucleotide
  Sense strand starting at position 149 of SEQ ID NO: 289
gguaaaguguggucccaga

SEQ ID NO: 25787 - RNA, 19 nt, Artificial Sequence
  Description of Artificial Sequence: Synthetic oligonucleotide
  Antisense strand to SEQ ID NO: 25786
ucugggaccacacuuuacc

SEQ ID NO: 25788 - RNA, 19 nt, Artificial Sequence
  Description of Artificial Sequence: Synthetic oligonucleotide
  Sense strand starting at position 1483 of SEQ ID NO: 289
agagcaagcuucugaugua

SEQ ID NO: 25789 - RNA, 19 nt, Artificial Sequence
  Description of Artificial Sequence: Synthetic oligonucleotide
  Antisense strand to SEQ ID NO: 25788
uacaucagaagcuugcucu

SEQ ID NO: 25790 - RNA, 19 nt, Artificial Sequence
  Description of Artificial Sequence: Synthetic oligonucleotide
  Sense strand starting at position 1484 of SEQ ID NO: 289
gagcaagcuucugauguag

SEQ ID NO: 25791 - RNA, 19 nt, Artificial Sequence
  Description of Artificial Sequence: Synthetic oligonucleotide
  Antisense strand to SEQ ID NO: 25790
cuacaucagaagcuugcuc

SEQ ID NO: 25792 - RNA, 19 nt, Artificial Sequence
  Description of Artificial Sequence: Synthetic oligonucleotide
  Sense strand starting at position 1863 of SEQ ID NO: 289
acgucauugccgccuggaa

SEQ ID NO: 25793 - RNA, 19 nt, Artificial Sequence
  Description of Artificial Sequence: Synthetic oligonucleotide
  Antisense strand to SEQ ID NO: 25792
uuccaggcggcaaugacgu

SEQ ID NO: 25794 - RNA, 19 nt, Artificial Sequence
  Description of Artificial Sequence: Synthetic oligonucleotide
  Sense strand starting at position 1864 of SEQ ID NO: 289
cgucauugccgccuggaau

SEQ ID NO: 25795 - RNA, 19 nt, Artificial Sequence
  Description of Artificial Sequence: Synthetic oligonucleotide
  Antisense strand to SEQ ID NO: 25794
auuccaggcggcaaugacg

SEQ ID NO: 25796 - RNA, 19 nt, Artificial Sequence
  Description of Artificial Sequence: Synthetic oligonucleotide
  Sense strand starting at position 1950 of SEQ ID NO: 289
ggguguaaguuccaagaac

SEQ ID NO: 25797 - RNA, 19 nt, Artificial Sequence
  Description of Artificial Sequence: Synthetic oligonucleotide
  Antisense strand to SEQ ID NO: 25796
guucuuggaacuuacaccc

SEQ ID NO: 25798 - RNA, 19 nt, Artificial Sequence
  Description of Artificial Sequence: Synthetic oligonucleotide
  Sense strand starting at position 1999 of SEQ ID NO: 289
ucucguugccuggaggaca

SEQ ID NO: 25799 - RNA, 19 nt, Artificial Sequence
  Description of Artificial Sequence: Synthetic oligonucleotide
  Antisense strand to SEQ ID NO: 25798
uguccuccaggcaacgaga

SEQ ID NO: 25800 - RNA, 19 nt, Artificial Sequence
  Description of Artificial Sequence: Synthetic oligonucleotide
  Sense strand starting at position 2413 of SEQ ID NO: 289
gggcgguugccugagaaag

SEQ ID NO: 25801 - RNA, 19 nt, Artificial Sequence
  Description of Artificial Sequence: Synthetic oligonucleotide
  Antisense strand to SEQ ID NO: 25800
cuuucucaggcaaccgccc

SEQ ID NO: 25802 - RNA, 19 nt, Artificial Sequence
  Description of Artificial Sequence: Synthetic oligonucleotide
  Sense strand starting at position 2667 of SEQ ID NO: 289
uggccgaguccguggagaa

SEQ ID NO: 25803 - RNA, 19 nt, Artificial Sequence
  Description of Artificial Sequence: Synthetic oligonucleotide
  Antisense strand to SEQ ID NO: 25802
uucuccacggacucggcca

SEQ ID NO: 25804 - RNA, 19 nt, Artificial Sequence
  Description of Artificial Sequence: Synthetic oligonucleotide
  Sense strand starting at position 2668 of SEQ ID NO: 289
ggccgaguccguggagaaa

SEQ ID NO: 25805 - RNA, 19 nt, Artificial Sequence
  Description of Artificial Sequence: Synthetic oligonucleotide
  Antisense strand to SEQ ID NO: 25804
uuucuccacggacucggcc

SEQ ID NO: 25806 - RNA, 19 nt, Artificial Sequence
  Description of Artificial Sequence: Synthetic oligonucleotide
  Sense strand starting at position 2715 of SEQ ID NO: 289
gggugccaccucugagaaa

SEQ ID NO: 25807 - RNA, 19 nt, Artificial Sequence
  Description of Artificial Sequence: Synthetic oligonucleotide
  Antisense strand to SEQ ID NO: 25806
uuucucagagguggcaccc

SEQ ID NO: 25808 - RNA, 19 nt, Artificial Sequence
  Description of Artificial Sequence: Synthetic oligonucleotide
  Sense strand starting at position 2728 of SEQ ID NO: 289
gagaaacucugcccuguuu

SEQ ID NO: 25809 - RNA, 19 nt, Artificial Sequence
  Description of Artificial Sequence: Synthetic oligonucleotide
  Antisense strand to SEQ ID NO: 25808
aaacagggcagaguuucuc

SEQ ID NO: 25810 - RNA, 19 nt, Artificial Sequence
  Description of Artificial Sequence: Synthetic oligonucleotide
  Sense strand starting at position 2848 of SEQ ID NO: 289
gcagaagugucauugggcu

SEQ ID NO: 25811 - RNA, 19 nt, Artificial Sequence
  Description of Artificial Sequence: Synthetic oligonucleotide
  Antisense strand to SEQ ID NO: 25810
agcccaaugacacuucugc

SEQ ID NO: 25812 - RNA, 19 nt, Artificial Sequence
  Description of Artificial Sequence: Synthetic oligonucleotide
  Sense strand starting at position 2850 of SEQ ID NO: 289
agaagugucauugggcuca

SEQ ID NO: 25813 - RNA, 19 nt, Artificial Sequence
  Description of Artificial Sequence: Synthetic oligonucleotide
  Antisense strand to SEQ ID NO: 25812
ugagcccaaugacacuucu

SEQ ID NO: 25814 - RNA, 19 nt, Artificial Sequence
  Description of Artificial Sequence: Synthetic oligonucleotide
  Sense strand starting at position 3252 of SEQ ID NO: 289
ggugcuaaauccuggaaca

SEQ ID NO: 25815 - RNA, 19 nt, Artificial Sequence
  Description of Artificial Sequence: Synthetic oligonucleotide
  Antisense strand to SEQ ID NO: 25814
uguuccaggauuuagcacc

SEQ ID NO: 25816 - RNA, 19 nt, Artificial Sequence
  Description of Artificial Sequence: Synthetic oligonucleotide
  Sense strand starting at position 3253 of SEQ ID NO: 289
gugcuaaauccuggaacau

SEQ ID NO: 25817 - RNA, 19 nt, Artificial Sequence
  Description of Artificial Sequence: Synthetic oligonucleotide
  Antisense strand to SEQ ID NO: 25816
auguuccaggauuuagcac

SEQ ID NO: 25818 - RNA, 19 nt, Artificial Sequence
  Description of Artificial Sequence: Synthetic oligonucleotide
  Sense strand starting at position 3254 of SEQ ID NO: 289
ugcuaaauccuggaacauc

SEQ ID NO: 25819 - RNA, 19 nt, Artificial Sequence
  Description of Artificial Sequence: Synthetic oligonucleotide
  Antisense strand to SEQ ID NO: 25818
gauguuccaggauuuagca

SEQ ID NO: 25820 - RNA, 19 nt, Artificial Sequence
  Description of Artificial Sequence: Synthetic oligonucleotide
  Sense strand starting at position 3305 of SEQ ID NO: 289
acaccauuguucucagggu

SEQ ID NO: 25821 - RNA, 19 nt, Artificial Sequence
  Description of Artificial Sequence: Synthetic oligonucleotide
  Antisense strand to SEQ ID NO: 25820
acccugagaacaauggugu

SEQ ID NO: 25822 - RNA, 19 nt, Artificial Sequence
  Description of Artificial Sequence: Synthetic oligonucleotide
  Sense strand starting at position 3309 of SEQ ID NO: 289
cauuguucucaggguggca

SEQ ID NO: 25823 - RNA, 19 nt, Artificial Sequence
  Description of Artificial Sequence: Synthetic oligonucleotide
  Antisense strand to SEQ ID NO: 25822
ugccacccugagaacaaug

SEQ ID NO: 25824 - RNA, 19 nt, Artificial Sequence
  Description of Artificial Sequence: Synthetic oligonucleotide
  Sense strand starting at position 3431 of SEQ ID NO: 289
gacauagagcccuguguag

SEQ ID NO: 25825 - RNA, 19 nt, Artificial Sequence
  Description of Artificial Sequence: Synthetic oligonucleotide
  Antisense strand to SEQ ID NO: 25824
cuacacagggcucuauguc

SEQ ID NO: 25826 - RNA, 19 nt, Artificial Sequence
  Description of Artificial Sequence: Synthetic oligonucleotide
  Sense strand starting at position 3475 of SEQ ID NO: 289
gcucgcaugccuuauguaa

SEQ ID NO: 25827 - RNA, 19 nt, Artificial Sequence
  Description of Artificial Sequence: Synthetic oligonucleotide
  Antisense strand to SEQ ID NO: 25826
uuacauaaggcaugcgagc

SEQ ID NO: 25828 - RNA, 19 nt, Artificial Sequence
  Description of Artificial Sequence: Synthetic oligonucleotide
  Sense strand starting at position 3920 of SEQ ID NO: 289
gcccuuccacccugagaaa

SEQ ID NO: 25829 - RNA, 19 nt, Artificial Sequence
  Description of Artificial Sequence: Synthetic oligonucleotide
  Antisense strand to SEQ ID NO: 25828
uuucucaggguggaagggc

SEQ ID NO: 25830 - RNA, 19 nt, Artificial Sequence
  Description of Artificial Sequence: Synthetic oligonucleotide
  Sense strand starting at position 98 of SEQ ID NO: 291
acuagcuauuacuuaugga

SEQ ID NO: 25831 - RNA, 19 nt, Artificial Sequence
  Description of Artificial Sequence: Synthetic oligonucleotide
  Antisense strand to SEQ ID NO: 25830
uccauaaguaauagcuagu

SEQ ID NO: 25832 - RNA, 19 nt, Artificial Sequence
  Description of Artificial Sequence: Synthetic oligonucleotide
  Sense strand starting at position 179 of SEQ ID NO: 291
guaagaaagagcuagucau

SEQ ID NO: 25833 - RNA, 19 nt, Artificial Sequence
  Description of Artificial Sequence: Synthetic oligonucleotide
  Antisense strand to SEQ ID NO: 25832
augacuagcucuuucuuac

SEQ ID NO: 25834 - RNA, 19 nt, Artificial Sequence
  Description of Artificial Sequence: Synthetic oligonucleotide
  Sense strand starting at position 207 of SEQ ID NO: 291
ugcugaaacaucuggugaa

SEQ ID NO: 25835 - RNA, 19 nt, Artificial Sequence
  Description of Artificial Sequence: Synthetic oligonucleotide
  Antisense strand to SEQ ID NO: 25834
uucaccagauguuucagca

SEQ ID NO: 25836 - RNA, 19 nt, Artificial Sequence
  Description of Artificial Sequence: Synthetic oligonucleotide
  Sense strand starting at position 227 of SEQ ID NO: 291
auuagaaauacaggagugu

SEQ ID NO: 25837 - RNA, 19 nt, Artificial Sequence
  Description of Artificial Sequence: Synthetic oligonucleotide
  Antisense strand to SEQ ID NO: 25836
acacuccuguauuucuaau

SEQ ID NO: 25838 - RNA, 19 nt, Artificial Sequence
  Description of Artificial Sequence: Synthetic oligonucleotide
  Sense strand starting at position 231 of SEQ ID NO: 291
gaaauacaggagugucauc

SEQ ID NO: 25839 - RNA, 19 nt, Artificial Sequence
  Description of Artificial Sequence: Synthetic oligonucleotide
  Antisense strand to SEQ ID NO: 25838
gaugacacuccuguauuuc

SEQ ID NO: 25840 - RNA, 19 nt, Artificial Sequence
  Description of Artificial Sequence: Synthetic oligonucleotide
  Sense strand starting at position 250 of SEQ ID NO: 291
ucuuaaaugugacucugau

SEQ ID NO: 25841 - RNA, 19 nt, Artificial Sequence
  Description of Artificial Sequence: Synthetic oligonucleotide
  Antisense strand to SEQ ID NO: 25840
aucagagucacauuuaaga

SEQ ID NO: 25842 - RNA, 19 nt, Artificial Sequence
  Description of Artificial Sequence: Synthetic oligonucleotide
  Sense strand starting at position 262 of SEQ ID NO: 291
cucugauggguuuggaaua

SEQ ID NO: 25843 - RNA, 19 nt, Artificial Sequence
  Description of Artificial Sequence: Synthetic oligonucleotide
  Antisense strand to SEQ ID NO: 25842
uauuccaaacccaucagag

SEQ ID NO: 25844 - RNA, 19 nt, Artificial Sequence
  Description of Artificial Sequence: Synthetic oligonucleotide
  Sense strand starting at position 289 of SEQ ID NO: 291
agaucuuagccaugaucug

SEQ ID NO: 25845 - RNA, 19 nt, Artificial Sequence
  Description of Artificial Sequence: Synthetic oligonucleotide
  Antisense strand to SEQ ID NO: 25844
cagaucauggcuaagaucu

SEQ ID NO: 25846 - RNA, 19 nt, Artificial Sequence
  Description of Artificial Sequence: Synthetic oligonucleotide
  Sense strand starting at position 290 of SEQ ID NO: 291
gaucuuagccaugaucuga

SEQ ID NO: 25847 - RNA, 19 nt, Artificial Sequence
  Description of Artificial Sequence: Synthetic oligonucleotide
  Antisense strand to SEQ ID NO: 25846
ucagaucauggcuaagauc

SEQ ID NO: 25848 - RNA, 19 nt, Artificial Sequence
  Description of Artificial Sequence: Synthetic oligonucleotide
  Sense strand starting at position 294 of SEQ ID NO: 291
uuagccaugaucugagaag

SEQ ID NO: 25849 - RNA, 19 nt, Artificial Sequence
  Description of Artificial Sequence: Synthetic oligonucleotide
  Antisense strand to SEQ ID NO: 25848
cuucucagaucauggcuaa

SEQ ID NO: 25850 - RNA, 19 nt, Artificial Sequence
  Description of Artificial Sequence: Synthetic oligonucleotide
  Sense strand starting at position 445 of SEQ ID NO: 291
guacaugugguagauuaca

SEQ ID NO: 25851 - RNA, 19 nt, Artificial Sequence
  Description of Artificial Sequence: Synthetic oligonucleotide
  Antisense strand to SEQ ID NO: 25850
uguaaucuaccacauguac

SEQ ID NO: 25852 - RNA, 19 nt, Artificial Sequence
  Description of Artificial Sequence: Synthetic oligonucleotide
  Sense strand starting at position 459 of SEQ ID NO: 291
uuacaagcccgaugagaaa

SEQ ID NO: 25853 - RNA, 19 nt, Artificial Sequence
  Description of Artificial Sequence: Synthetic oligonucleotide
  Antisense strand to SEQ ID NO: 25852
uuucucaucgggcuuguaa

SEQ ID NO: 25854 - RNA, 19 nt, Artificial Sequence
  Description of Artificial Sequence: Synthetic oligonucleotide
  Sense strand starting at position 508 of SEQ ID NO: 291
ugucgcaaugcucauauuu

SEQ ID NO: 25855 - RNA, 19 nt, Artificial Sequence
  Description of Artificial Sequence: Synthetic oligonucleotide
  Antisense strand to SEQ ID NO: 25854
aaauaugagcauugcgaca

SEQ ID NO: 25856 - RNA, 19 nt, Artificial Sequence
  Description of Artificial Sequence: Synthetic oligonucleotide
  Sense strand starting at position 776 of SEQ ID NO: 291
uucuccacgagguauugaa

SEQ ID NO: 25857 - RNA, 19 nt, Artificial Sequence
  Description of Artificial Sequence: Synthetic oligonucleotide
  Antisense strand to SEQ ID NO: 25856
uucaauaccucguggagaa

SEQ ID NO: 25858 - RNA, 19 nt, Artificial Sequence
  Description of Artificial Sequence: Synthetic oligonucleotide
  Sense strand starting at position 1170 of SEQ ID NO: 291
cuaagaggucuguacagca

SEQ ID NO: 25859 - RNA, 19 nt, Artificial Sequence
  Description of Artificial Sequence: Synthetic oligonucleotide
  Antisense strand to SEQ ID NO: 25858
ugcuguacagaccucuuag

SEQ ID NO: 25860 - RNA, 19 nt, Artificial Sequence
  Description of Artificial Sequence: Synthetic oligonucleotide
  Sense strand starting at position 1240 of SEQ ID NO: 291
auggaauuccagugagguc

SEQ ID NO: 25861 - RNA, 19 nt, Artificial Sequence
  Description of Artificial Sequence: Synthetic oligonucleotide
  Antisense strand to SEQ ID NO: 25860
gaccucacuggaauuccau

SEQ ID NO: 25862 - RNA, 19 nt, Artificial Sequence
  Description of Artificial Sequence: Synthetic oligonucleotide
  Sense strand starting at position 1241 of SEQ ID NO: 291
uggaauuccagugagguca

SEQ ID NO: 25863 - RNA, 19 nt, Artificial Sequence
  Description of Artificial Sequence: Synthetic oligonucleotide
  Antisense strand to SEQ ID NO: 25862
ugaccucacuggaauucca

SEQ ID NO: 25864 - RNA, 19 nt, Artificial Sequence
  Description of Artificial Sequence: Synthetic oligonucleotide
  Sense strand starting at position 1271 of SEQ ID NO: 291
agggcauuagugggacaua

SEQ ID NO: 25865 - RNA, 19 nt, Artificial Sequence
  Description of Artificial Sequence: Synthetic oligonucleotide
  Antisense strand to SEQ ID NO: 25864
uaugucccacuaaugcccu

SEQ ID NO: 25866 - RNA, 19 nt, Artificial Sequence
  Description of Artificial Sequence: Synthetic oligonucleotide
  Sense strand starting at position 1330 of SEQ ID NO: 291
uuaugagaucaggguaauu

SEQ ID NO: 25867 - RNA, 19 nt, Artificial Sequence
  Description of Artificial Sequence: Synthetic oligonucleotide
  Antisense strand to SEQ ID NO: 25866
aauuacccugaucucauaa

SEQ ID NO: 25868 - RNA, 19 nt, Artificial Sequence
  Description of Artificial Sequence: Synthetic oligonucleotide
  Sense strand starting at position 1496 of SEQ ID NO: 291
gguguuuaaacagagugau

SEQ ID NO: 25869 - RNA, 19 nt, Artificial Sequence
  Description of Artificial Sequence: Synthetic oligonucleotide
  Antisense strand to SEQ ID NO: 25868
aucacucuguuuaaacacc

SEQ ID NO: 25870 - RNA, 19 nt, Artificial Sequence
  Description of Artificial Sequence: Synthetic oligonucleotide
  Sense strand starting at position 1883 of SEQ ID NO: 291
ccugauugcccggagagaa

SEQ ID NO: 25871 - RNA, 19 nt, Artificial Sequence
  Description of Artificial Sequence: Synthetic oligonucleotide
  Antisense strand to SEQ ID NO: 25870
uucucuccgggcaaucagg

SEQ ID NO: 25872 - RNA, 19 nt, Artificial Sequence
  Description of Artificial Sequence: Synthetic oligonucleotide
  Sense strand starting at position 2207 of SEQ ID NO: 291
uucucuguuccucagagau

SEQ ID NO: 25873 - RNA, 19 nt, Artificial Sequence
  Description of Artificial Sequence: Synthetic oligonucleotide
  Antisense strand to SEQ ID NO: 25872
aucucugaggaacagagaa

SEQ ID NO: 25874 - RNA, 19 nt, Artificial Sequence
  Description of Artificial Sequence: Synthetic oligonucleotide
  Sense strand starting at position 2300 of SEQ ID NO: 291
ucauuucccuuugugaguu

SEQ ID NO: 25875 - RNA, 19 nt, Artificial Sequence
  Description of Artificial Sequence: Synthetic oligonucleotide
  Antisense strand to SEQ ID NO: 25874
aacucacaaagggaaauga

SEQ ID NO: 25876 - RNA, 19 nt, Artificial Sequence
  Description of Artificial Sequence: Synthetic oligonucleotide
  Sense strand starting at position 2313 of SEQ ID NO: 291
ugaguuugcacauaguuga

SEQ ID NO: 25877 - RNA, 19 nt, Artificial Sequence
  Description of Artificial Sequence: Synthetic oligonucleotide
  Antisense strand to SEQ ID NO: 25876
ucaacuaugugcaaacuca

SEQ ID NO: 25878 - RNA, 19 nt, Artificial Sequence
  Description of Artificial Sequence: Synthetic oligonucleotide
  Sense strand starting at position 2368 of SEQ ID NO: 291
acuguauggcuugaguaaa

SEQ ID NO: 25879 - RNA, 19 nt, Artificial Sequence
  Description of Artificial Sequence: Synthetic oligonucleotide
  Antisense strand to SEQ ID NO: 25878
uuuacucaagccauacagu

SEQ ID NO: 25880 - RNA, 19 nt, Artificial Sequence
  Description of Artificial Sequence: Synthetic oligonucleotide
  Sense strand starting at position 2810 of SEQ ID NO: 291
uaauaauaacguugaguac

SEQ ID NO: 25881 - RNA, 19 nt, Artificial Sequence
  Description of Artificial Sequence: Synthetic oligonucleotide
  Antisense strand to SEQ ID NO: 25880
guacucaacguuauuauua

SEQ ID NO: 25882 - RNA, 19 nt, Artificial Sequence
  Description of Artificial Sequence: Synthetic oligonucleotide
  Sense strand starting at position 2811 of SEQ ID NO: 291
aauaauaacguugaguacu

SEQ ID NO: 25883 - RNA, 19 nt, Artificial Sequence
  Description of Artificial Sequence: Synthetic oligonucleotide
  Antisense strand to SEQ ID NO: 25882
aguacucaacguuauuauu

SEQ ID NO: 25884 - RNA, 19 nt, Artificial Sequence
  Description of Artificial Sequence: Synthetic oligonucleotide
  Sense strand starting at position 2836 of SEQ ID NO: 291
augccagaucccuaugaca

SEQ ID NO: 25885 - RNA, 19 nt, Artificial Sequence
  Description of Artificial Sequence: Synthetic oligonucleotide
  Antisense strand to SEQ ID NO: 25884
ugucauagggaucuggcau

SEQ ID NO: 25886 - RNA, 19 nt, Artificial Sequence
  Description of Artificial Sequence: Synthetic oligonucleotide
  Sense strand starting at position 2838 of SEQ ID NO: 291
gccagaucccuaugacaag

SEQ ID NO: 25887 - RNA, 19 nt, Artificial Sequence
  Description of Artificial Sequence: Synthetic oligonucleotide
  Antisense strand to SEQ ID NO: 25886
cuugucauagggaucuggc

SEQ ID NO: 25888 - RNA, 19 nt, Artificial Sequence
  Description of Artificial Sequence: Synthetic oligonucleotide
  Sense strand starting at position 3089 of SEQ ID NO: 291
acgguauuguuauuugcau

SEQ ID NO: 25889 - RNA, 19 nt, Artificial Sequence
  Description of Artificial Sequence: Synthetic oligonucleotide
  Antisense strand to SEQ ID NO: 25888
augcaaauaacaauaccgu

SEQ ID NO: 25890 - RNA, 19 nt, Artificial Sequence
  Description of Artificial Sequence: Synthetic oligonucleotide
  Sense strand starting at position 3169 of SEQ ID NO: 291
ugcuuuacaggugaauaua

SEQ ID NO: 25891 - RNA, 19 nt, Artificial Sequence
  Description of Artificial Sequence: Synthetic oligonucleotide
  Antisense strand to SEQ ID NO: 25890
uauauucaccuguaaagca

SEQ ID NO: 25892 - RNA, 19 nt, Artificial Sequence
  Description of Artificial Sequence: Synthetic oligonucleotide
  Sense strand starting at position 3283 of SEQ ID NO: 291
ugauauagaaaguguuaag

SEQ ID NO: 25893 - RNA, 19 nt, Artificial Sequence
  Description of Artificial Sequence: Synthetic oligonucleotide
  Antisense strand to SEQ ID NO: 25892
cuuaacacuuucuauauca

SEQ ID NO: 25894 - RNA, 19 nt, Artificial Sequence
  Description of Artificial Sequence: Synthetic oligonucleotide
  Sense strand starting at position 3362 of SEQ ID NO: 291
ccagaucagucuucccaag

SEQ ID NO: 25895 - RNA, 19 nt, Artificial Sequence
  Description of Artificial Sequence: Synthetic oligonucleotide
  Antisense strand to SEQ ID NO: 25894
cuugggaagacugaucugg

SEQ ID NO: 25896 - RNA, 19 nt, Artificial Sequence
  Description of Artificial Sequence: Synthetic oligonucleotide
  Sense strand starting at position 3521 of SEQ ID NO: 291
gcuuguuaugcugcaucca

SEQ ID NO: 25897 - RNA, 19 nt, Artificial Sequence
  Description of Artificial Sequence: Synthetic oligonucleotide
  Antisense strand to SEQ ID NO: 25896
uggaugcagcauaacaagc

SEQ ID NO: 25898 - RNA, 19 nt, Artificial Sequence
  Description of Artificial Sequence: Synthetic oligonucleotide
  Sense strand starting at position 3628 of SEQ ID NO: 291
uccauuucucacuguguca

SEQ ID NO: 25899 - RNA, 19 nt, Artificial Sequence
  Description of Artificial Sequence: Synthetic oligonucleotide
  Antisense strand to SEQ ID NO: 25898
ugacacagugagaaaugga

SEQ ID NO: 25900 - RNA, 19 nt, Artificial Sequence
  Description of Artificial Sequence: Synthetic oligonucleotide
  Sense strand starting at position 3656 of SEQ ID NO: 291
uccauucuuuaaguuggau

SEQ ID NO: 25901 - RNA, 19 nt, Artificial Sequence
  Description of Artificial Sequence: Synthetic oligonucleotide
  Antisense strand to SEQ ID NO: 25900
auccaacuuaaagaaugga

SEQ ID NO: 25902 - RNA, 19 nt, Artificial Sequence
  Description of Artificial Sequence: Synthetic oligonucleotide
  Sense strand starting at position 3675 of SEQ ID NO: 291
cucaaaugauaugugaacu

SEQ ID NO: 25903 - RNA, 19 nt, Artificial Sequence
  Description of Artificial Sequence: Synthetic oligonucleotide
  Antisense strand to SEQ ID NO: 25902
aguucacauaucauuugag

SEQ ID NO: 25904 - RNA, 19 nt, Artificial Sequence
  Description of Artificial Sequence: Synthetic oligonucleotide
  Sense strand starting at position 3740 of SEQ ID NO: 291
uguaaucuugggcaaauca

SEQ ID NO: 25905 - RNA, 19 nt, Artificial Sequence
  Description of Artificial Sequence: Synthetic oligonucleotide
  Antisense strand to SEQ ID NO: 25904
ugauuugcccaagauuaca

SEQ ID NO: 25906 - RNA, 19 nt, Artificial Sequence
  Description of Artificial Sequence: Synthetic oligonucleotide
  Sense strand starting at position 3747 of SEQ ID NO: 291
uugggcaaaucacuuaaca

SEQ ID NO: 25907 - RNA, 19 nt, Artificial Sequence
  Description of Artificial Sequence: Synthetic oligonucleotide
  Antisense strand to SEQ ID NO: 25906
uguuaagugauuugcccaa

SEQ ID NO: 25908 - RNA, 19 nt, Artificial Sequence
  Description of Artificial Sequence: Synthetic oligonucleotide
  Sense strand starting at position 3912 of SEQ ID NO: 291
ggauuccagagcugaaagu

SEQ ID NO: 25909 - RNA, 19 nt, Artificial Sequence
  Description of Artificial Sequence: Synthetic oligonucleotide
  Antisense strand to SEQ ID NO: 25908
acuuucagcucuggaaucc

SEQ ID NO: 25910 - RNA, 19 nt, Artificial Sequence
  Description of Artificial Sequence: Synthetic oligonucleotide
  Sense strand starting at position 3874 of SEQ ID NO: 293
aagcuauguccauauggua

SEQ ID NO: 25911 - RNA, 19 nt, Artificial Sequence
  Description of Artificial Sequence: Synthetic oligonucleotide
  Antisense strand to SEQ ID NO: 25910
uaccauauggacauagcuu

SEQ ID NO: 25912 - RNA, 19 nt, Artificial Sequence
  Description of Artificial Sequence: Synthetic oligonucleotide
  Sense strand starting at position 3869 of SEQ ID NO: 293
guauaaagcuauguccaua

SEQ ID NO: 25913 - RNA, 19 nt, Artificial Sequence
  Description of Artificial Sequence: Synthetic oligonucleotide
  Antisense strand to SEQ ID NO: 25912
uauggacauagcuuuauac

SEQ ID NO: 25914 - RNA, 19 nt, Artificial Sequence
  Description of Artificial Sequence: Synthetic oligonucleotide
  Sense strand starting at position 3868 of SEQ ID NO: 293
aguauaaagcuauguccau

SEQ ID NO: 25915 - RNA, 19 nt, Artificial Sequence
  Description of Artificial Sequence: Synthetic oligonucleotide
  Antisense strand to SEQ ID NO: 25914
auggacauagcuuuauacu

SEQ ID NO: 25916 - RNA, 19 nt, Artificial Sequence
  Description of Artificial Sequence: Synthetic oligonucleotide
  Sense strand starting at position 3591 of SEQ ID NO: 293
uggcuaacaccuuaagcuu

SEQ ID NO: 25917 - RNA, 19 nt, Artificial Sequence
  Description of Artificial Sequence: Synthetic oligonucleotide
  Antisense strand to SEQ ID NO: 25916
aagcuuaagguguuagcca

SEQ ID NO: 25918 - RNA, 19 nt, Artificial Sequence
  Description of Artificial Sequence: Synthetic oligonucleotide
  Sense strand starting at position 3581 of SEQ ID NO: 293
ggcauuugguuggcuaaca

SEQ ID NO: 25919 - RNA, 19 nt, Artificial Sequence
  Description of Artificial Sequence: Synthetic oligonucleotide
  Antisense strand to SEQ ID NO: 25918
uguuagccaaccaaaugcc

SEQ ID NO: 25920 - RNA, 19 nt, Artificial Sequence
  Description of Artificial Sequence: Synthetic oligonucleotide
  Sense strand starting at position 3579 of SEQ ID NO: 293
uuggcauuugguuggcuaa

SEQ ID NO: 25921 - RNA, 19 nt, Artificial Sequence
  Description of Artificial Sequence: Synthetic oligonucleotide
  Antisense strand to SEQ ID NO: 25920
uuagccaaccaaaugccaa

SEQ ID NO: 25922 - RNA, 19 nt, Artificial Sequence
  Description of Artificial Sequence: Synthetic oligonucleotide
  Sense strand starting at position 3520 of SEQ ID NO: 293
gugaucauuucugaugaaa

SEQ ID NO: 25923 - RNA, 19 nt, Artificial Sequence
  Description of Artificial Sequence: Synthetic oligonucleotide
  Antisense strand to SEQ ID NO: 25922
uuucaucagaaaugaucac

SEQ ID NO: 25924 - RNA, 19 nt, Artificial Sequence
  Description of Artificial Sequence: Synthetic oligonucleotide
  Sense strand starting at position 3416 of SEQ ID NO: 293
aauugaagauguguuccuu

SEQ ID NO: 25925 - RNA, 19 nt, Artificial Sequence
  Description of Artificial Sequence: Synthetic oligonucleotide
  Antisense strand to SEQ ID NO: 25924
aaggaacacaucuucaauu

SEQ ID NO: 25926 - RNA, 19 nt, Artificial Sequence
  Description of Artificial Sequence: Synthetic oligonucleotide
  Sense strand starting at position 3356 of SEQ ID NO: 293
ggaaauguuuacucuaaau

SEQ ID NO: 25927 - RNA, 19 nt, Artificial Sequence
  Description of Artificial Sequence: Synthetic oligonucleotide
  Antisense strand to SEQ ID NO: 25926
auuuagaguaaacauuucc

SEQ ID NO: 25928 - RNA, 19 nt, Artificial Sequence
  Description of Artificial Sequence: Synthetic oligonucleotide
  Sense strand starting at position 3355 of SEQ ID NO: 293
uggaaauguuuacucuaaa

SEQ ID NO: 25929 - RNA, 19 nt, Artificial Sequence
  Description of Artificial Sequence: Synthetic oligonucleotide
  Antisense strand to SEQ ID NO: 25928
uuuagaguaaacauuucca

SEQ ID NO: 25930 - RNA, 19 nt, Artificial Sequence
  Description of Artificial Sequence: Synthetic oligonucleotide
  Sense strand starting at position 3353 of SEQ ID NO: 293
ccuggaaauguuuacucua

SEQ ID NO: 25931 - RNA, 19 nt, Artificial Sequence
  Description of Artificial Sequence: Synthetic oligonucleotide
  Antisense strand to SEQ ID NO: 25930
uagaguaaacauuuccagg

SEQ ID NO: 25932 - RNA, 19 nt, Artificial Sequence
  Description of Artificial Sequence: Synthetic oligonucleotide
  Sense strand starting at position 3276 of SEQ ID NO: 293
gguauacuguauguaaagu

SEQ ID NO: 25933 - RNA, 19 nt, Artificial Sequence
  Description of Artificial Sequence: Synthetic oligonucleotide
  Antisense strand to SEQ ID NO: 25932
acuuuacauacaguauacc

SEQ ID NO: 25934 - RNA, 19 nt, Artificial Sequence
  Description of Artificial Sequence: Synthetic oligonucleotide
  Sense strand starting at position 3275 of SEQ ID NO: 293
ugguauacuguauguaaag

SEQ ID NO: 25935 - RNA, 19 nt, Artificial Sequence
  Description of Artificial Sequence: Synthetic oligonucleotide
  Antisense strand to SEQ ID NO: 25934
cuuuacauacaguauacca

SEQ ID NO: 25936 - RNA, 19 nt, Artificial Sequence
  Description of Artificial Sequence: Synthetic oligonucleotide
  Sense strand starting at position 3273 of SEQ ID NO: 293
aaugguauacuguauguaa

SEQ ID NO: 25937 - RNA, 19 nt, Artificial Sequence
  Description of Artificial Sequence: Synthetic oligonucleotide
  Antisense strand to SEQ ID NO: 25936
uuacauacaguauaccauu

SEQ ID NO: 25938 - RNA, 19 nt, Artificial Sequence
  Description of Artificial Sequence: Synthetic oligonucleotide
  Sense strand starting at position 3224 of SEQ ID NO: 293
auguuucuggcacauagua

SEQ ID NO: 25939 - RNA, 19 nt, Artificial Sequence
  Description of Artificial Sequence: Synthetic oligonucleotide
  Antisense strand to SEQ ID NO: 25938
uacuaugugccagaaacau

SEQ ID NO: 25940 - RNA, 19 nt, Artificial Sequence
  Description of Artificial Sequence: Synthetic oligonucleotide
  Sense strand starting at position 3140 of SEQ ID NO: 293
ggccgacuucuuugaggag

SEQ ID NO: 25941 - RNA, 19 nt, Artificial Sequence
  Description of Artificial Sequence: Synthetic oligonucleotide
  Antisense strand to SEQ ID NO: 25940
cuccucaaagaagucggcc

SEQ ID NO: 25942 - RNA, 19 nt, Artificial Sequence
  Description of Artificial Sequence: Synthetic oligonucleotide
  Sense strand starting at position 2952 of SEQ ID NO: 293
cgaguaaagcagcaauaau

SEQ ID NO: 25943 - RNA, 19 nt, Artificial Sequence
  Description of Artificial Sequence: Synthetic oligonucleotide
  Antisense strand to SEQ ID NO: 25942
auuauugcugcuuuacucg

SEQ ID NO: 25944 - RNA, 19 nt, Artificial Sequence
  Description of Artificial Sequence: Synthetic oligonucleotide
  Sense strand starting at position 2925 of SEQ ID NO: 293
aggagagaucgaugcaaac

SEQ ID NO: 25945 - RNA, 19 nt, Artificial Sequence
  Description of Artificial Sequence: Synthetic oligonucleotide
  Antisense strand to SEQ ID NO: 25944
guuugcaucgaucucuccu

SEQ ID NO: 25946 - RNA, 19 nt, Artificial Sequence
  Description of Artificial Sequence: Synthetic oligonucleotide
  Sense strand starting at position 2923 of SEQ ID NO: 293
cgaggagagaucgaugcaa

SEQ ID NO: 25947 - RNA, 19 nt, Artificial Sequence
  Description of Artificial Sequence: Synthetic oligonucleotide
  Antisense strand to SEQ ID NO: 25946
uugcaucgaucucuccucg

SEQ ID NO: 25948 - RNA, 19 nt, Artificial Sequence
  Description of Artificial Sequence: Synthetic oligonucleotide
  Sense strand starting at position 2914 of SEQ ID NO: 293
guauacuagcgaggagaga

SEQ ID NO: 25949 - RNA, 19 nt, Artificial Sequence
  Description of Artificial Sequence: Synthetic oligonucleotide
  Antisense strand to SEQ ID NO: 25948
ucucuccucgcuaguauac

SEQ ID NO: 25950 - RNA, 19 nt, Artificial Sequence
  Description of Artificial Sequence: Synthetic oligonucleotide
  Sense strand starting at position 2912 of SEQ ID NO: 293
cuguauacuagcgaggaga

SEQ ID NO: 25951 - RNA, 19 nt, Artificial Sequence
  Description of Artificial Sequence: Synthetic oligonucleotide
  Antisense strand to SEQ ID NO: 25950
ucuccucgcuaguauacag

SEQ ID NO: 25952 - RNA, 19 nt, Artificial Sequence
  Description of Artificial Sequence: Synthetic oligonucleotide
  Sense strand starting at position 2748 of SEQ ID NO: 293
ucauuuccgagcuguguga

SEQ ID NO: 25953 - RNA, 19 nt, Artificial Sequence
  Description of Artificial Sequence: Synthetic oligonucleotide
  Antisense strand to SEQ ID NO: 25952
ucacacagcucggaaauga

SEQ ID NO: 25954 - RNA, 19 nt, Artificial Sequence
  Description of Artificial Sequence: Synthetic oligonucleotide
  Sense strand starting at position 2288 of SEQ ID NO: 293
auuaaagcucgugaaauua

SEQ ID NO: 25955 - RNA, 19 nt, Artificial Sequence
  Description of Artificial Sequence: Synthetic oligonucleotide
  Antisense strand to SEQ ID NO: 25954
uaauuucacgagcuuuaau

SEQ ID NO: 25956 - RNA, 19 nt, Artificial Sequence
  Description of Artificial Sequence: Synthetic oligonucleotide
  Sense strand starting at position 2285 of SEQ ID NO: 293
ccuauuaaagcucgugaaa

SEQ ID NO: 25957 - RNA, 19 nt, Artificial Sequence
  Description of Artificial Sequence: Synthetic oligonucleotide
  Antisense strand to SEQ ID NO: 25956
uuucacgagcuuuaauagg

SEQ ID NO: 25958 - RNA, 19 nt, Artificial Sequence
  Description of Artificial Sequence: Synthetic oligonucleotide
  Sense strand starting at position 2005 of SEQ ID NO: 293
ggaauucuuucuguggguu

SEQ ID NO: 25959 - RNA, 19 nt, Artificial Sequence
  Description of Artificial Sequence: Synthetic oligonucleotide
  Antisense strand to SEQ ID NO: 25958
aacccacagaaagaauucc

SEQ ID NO: 25960 - RNA, 19 nt, Artificial Sequence
  Description of Artificial Sequence: Synthetic oligonucleotide
  Sense strand starting at position 835 of SEQ ID NO: 293
gguacuuacucuucuugaa

SEQ ID NO: 25961 - RNA, 19 nt, Artificial Sequence
  Description of Artificial Sequence: Synthetic oligonucleotide
  Antisense strand to SEQ ID NO: 25960
uucaagaagaguaaguacc

SEQ ID NO: 25962 - RNA, 19 nt, Artificial Sequence
  Description of Artificial Sequence: Synthetic oligonucleotide
  Sense strand starting at position 692 of SEQ ID NO: 293
ucuauaaagcuuggacaaa

SEQ ID NO: 25963 - RNA, 19 nt, Artificial Sequence
  Description of Artificial Sequence: Synthetic oligonucleotide
  Antisense strand to SEQ ID NO: 25962
uuuguccaagcuuuauaga

SEQ ID NO: 25964 - RNA, 19 nt, Artificial Sequence
  Description of Artificial Sequence: Synthetic oligonucleotide
  Sense strand starting at position 691 of SEQ ID NO: 293
uucuauaaagcuuggacaa

SEQ ID NO: 25965 - RNA, 19 nt, Artificial Sequence
  Description of Artificial Sequence: Synthetic oligonucleotide
  Antisense strand to SEQ ID NO: 25964
uuguccaagcuuuauagaa

SEQ ID NO: 25966 - RNA, 19 nt, Artificial Sequence
  Description of Artificial Sequence: Synthetic oligonucleotide
  Sense strand starting at position 631 of SEQ ID NO: 293
ccuggaauauagcccuaau

SEQ ID NO: 25967 - RNA, 19 nt, Artificial Sequence
  Description of Artificial Sequence: Synthetic oligonucleotide
  Antisense strand to SEQ ID NO: 25966
auuagggcuauauuccagg

SEQ ID NO: 25968 - RNA, 19 nt, Artificial Sequence
  Description of Artificial Sequence: Synthetic oligonucleotide
  Sense strand starting at position 594 of SEQ ID NO: 293
ugagaaaugucugcuuaac

SEQ ID NO: 25969 - RNA, 19 nt, Artificial Sequence
  Description of Artificial Sequence: Synthetic oligonucleotide
  Antisense strand to SEQ ID NO: 25968
guuaagcagacauuucuca

SEQ ID NO: 25970 - RNA, 19 nt, Artificial Sequence
  Description of Artificial Sequence: Synthetic oligonucleotide
  Sense strand starting at position 593 of SEQ ID NO: 293
augagaaaugucugcuuaa

SEQ ID NO: 25971 - RNA, 19 nt, Artificial Sequence
  Description of Artificial Sequence: Synthetic oligonucleotide
  Antisense strand to SEQ ID NO: 25970
uuaagcagacauuucucau

SEQ ID NO: 25972 - RNA, 19 nt, Artificial Sequence
  Description of Artificial Sequence: Synthetic oligonucleotide
  Sense strand starting at position 583 of SEQ ID NO: 293
ugcguuuaggaugagaaau

SEQ ID NO: 25973 - RNA, 19 nt, Artificial Sequence
  Description of Artificial Sequence: Synthetic oligonucleotide
  Antisense strand to SEQ ID NO: 25972
auuucucauccuaaacgca

SEQ ID NO: 25974 - RNA, 19 nt, Artificial Sequence
  Description of Artificial Sequence: Synthetic oligonucleotide
  Sense strand starting at position 582 of SEQ ID NO: 293
augcguuuaggaugagaaa

SEQ ID NO: 25975 - RNA, 19 nt, Artificial Sequence
  Description of Artificial Sequence: Synthetic oligonucleotide
  Antisense strand to SEQ ID NO: 25974
uuucucauccuaaacgcau

SEQ ID NO: 25976 - RNA, 19 nt, Artificial Sequence
  Description of Artificial Sequence: Synthetic oligonucleotide
  Sense strand starting at position 445 of SEQ ID NO: 293
ccaucagacucauccaugu

SEQ ID NO: 25977 - RNA, 19 nt, Artificial Sequence
  Description of Artificial Sequence: Synthetic oligonucleotide
  Antisense strand to SEQ ID NO: 25976
acauggaugagucugaugg

SEQ ID NO: 25978 - RNA, 19 nt, Artificial Sequence
  Description of Artificial Sequence: Synthetic oligonucleotide
  Sense strand starting at position 339 of SEQ ID NO: 293
gugccuucccaguaaauau

SEQ ID NO: 25979 - RNA, 19 nt, Artificial Sequence
  Description of Artificial Sequence: Synthetic oligonucleotide
  Antisense strand to SEQ ID NO: 25978
auauuuacugggaaggcac

SEQ ID NO: 25980 - RNA, 19 nt, Artificial Sequence
  Description of Artificial Sequence: Synthetic oligonucleotide
  Sense strand starting at position 320 of SEQ ID NO: 293
auguccucugaauauguca

SEQ ID NO: 25981 - RNA, 19 nt, Artificial Sequence
  Description of Artificial Sequence: Synthetic oligonucleotide
  Antisense strand to SEQ ID NO: 25980
ugacauauucagaggacau

SEQ ID NO: 25982 - RNA, 19 nt, Artificial Sequence
  Description of Artificial Sequence: Synthetic oligonucleotide
  Sense strand starting at position 312 of SEQ ID NO: 293
uuucuauuauguccucuga

SEQ ID NO: 25983 - RNA, 19 nt, Artificial Sequence
  Description of Artificial Sequence: Synthetic oligonucleotide
  Antisense strand to SEQ ID NO: 25982
ucagaggacauaauagaaa

SEQ ID NO: 25984 - RNA, 19 nt, Artificial Sequence
  Description of Artificial Sequence: Synthetic oligonucleotide
  Sense strand starting at position 241 of SEQ ID NO: 293
cuguguuucccagacacag

SEQ ID NO: 25985 - RNA, 19 nt, Artificial Sequence
  Description of Artificial Sequence: Synthetic oligonucleotide
  Antisense strand to SEQ ID NO: 25984
cugugucugggaaacacag

SEQ ID NO: 25986 - RNA, 19 nt, Artificial Sequence
  Description of Artificial Sequence: Synthetic oligonucleotide
  Sense strand starting at position 209 of SEQ ID NO: 293
ccaacuuugcccugaugga

SEQ ID NO: 25987 - RNA, 19 nt, Artificial Sequence
  Description of Artificial Sequence: Synthetic oligonucleotide
  Antisense strand to SEQ ID NO: 25986
uccaucagggcaaaguugg

SEQ ID NO: 25988 - RNA, 19 nt, Artificial Sequence
  Description of Artificial Sequence: Synthetic oligonucleotide
  Sense strand starting at position 38 of SEQ ID NO: 293
ugggaacauuaauuaaguu

SEQ ID NO: 25989 - RNA, 19 nt, Artificial Sequence
  Description of Artificial Sequence: Synthetic oligonucleotide
  Antisense strand to SEQ ID NO: 25988
aacuuaauuaauguuccca

SEQ ID NO: 25990 - RNA, 19 nt, Artificial Sequence
  Description of Artificial Sequence: Synthetic oligonucleotide
  Sense strand starting at position 3854 of SEQ ID NO: 292
ccgggauuucggcgcuugu

SEQ ID NO: 25991 - RNA, 19 nt, Artificial Sequence
  Description of Artificial Sequence: Synthetic oligonucleotide
  Antisense strand to SEQ ID NO: 25990
acaagcgccgaaaucccgg

SEQ ID NO: 25992 - RNA, 19 nt, Artificial Sequence
  Description of Artificial Sequence: Synthetic oligonucleotide
  Sense strand starting at position 3638 of SEQ ID NO: 292
ggcggacacuugguucauu

SEQ ID NO: 25993 - RNA, 19 nt, Artificial Sequence
  Description of Artificial Sequence: Synthetic oligonucleotide
  Antisense strand to SEQ ID NO: 25992
aaugaaccaaguguccgcc

SEQ ID NO: 25994 - RNA, 19 nt, Artificial Sequence
  Description of Artificial Sequence: Synthetic oligonucleotide
  Sense strand starting at position 3600 of SEQ ID NO: 292
agucauuuccgagagcgca

SEQ ID NO: 25995 - RNA, 19 nt, Artificial Sequence
  Description of Artificial Sequence: Synthetic oligonucleotide
  Antisense strand to SEQ ID NO: 25994
ugcgcucucggaaaugacu

SEQ ID NO: 25996 - RNA, 19 nt, Artificial Sequence
  Description of Artificial Sequence: Synthetic oligonucleotide
  Sense strand starting at position 3593 of SEQ ID NO: 292
uggagcgagucauuuccga

SEQ ID NO: 25997 - RNA, 19 nt, Artificial Sequence
  Description of Artificial Sequence: Synthetic oligonucleotide
  Antisense strand to SEQ ID NO: 25996
ucggaaaugacucgcucca

SEQ ID NO: 25998 - RNA, 19 nt, Artificial Sequence
  Description of Artificial Sequence: Synthetic oligonucleotide
  Sense strand starting at position 3587 of SEQ ID NO: 292
cgggauuggagcgagucau

SEQ ID NO: 25999 - RNA, 19 nt, Artificial Sequence
  Description of Artificial Sequence: Synthetic oligonucleotide
  Antisense strand to SEQ ID NO: 25998
augacucgcuccaaucccg

SEQ ID NO: 26000 - RNA, 19 nt, Artificial Sequence
  Description of Artificial Sequence: Synthetic oligonucleotide
  Sense strand starting at position 3520 of SEQ ID NO: 292
cggcuccggagugauuaau

SEQ ID NO: 26001 - RNA, 19 nt, Artificial Sequence
  Description of Artificial Sequence: Synthetic oligonucleotide
  Antisense strand to SEQ ID NO: 26000
auuaaucacuccggagccg

SEQ ID NO: 26002 - RNA, 19 nt, Artificial Sequence
  Description of Artificial Sequence: Synthetic oligonucleotide
  Sense strand starting at position 3418 of SEQ ID NO: 292
gguuuaucuggagguggag

SEQ ID NO: 26003 - RNA, 19 nt, Artificial Sequence
  Description of Artificial Sequence: Synthetic oligonucleotide
  Antisense strand to SEQ ID NO: 26002
cuccaccuccagauaaacc

SEQ ID NO: 26004 - RNA, 19 nt, Artificial Sequence
  Description of Artificial Sequence: Synthetic oligonucleotide
  Sense strand starting at position 3417 of SEQ ID NO: 292
ugguuuaucuggaggugga

SEQ ID NO: 26005 - RNA, 19 nt, Artificial Sequence
  Description of Artificial Sequence: Synthetic oligonucleotide
  Antisense strand to SEQ ID NO: 26004
uccaccuccagauaaacca

SEQ ID NO: 26006 - RNA, 19 nt, Artificial Sequence
  Description of Artificial Sequence: Synthetic oligonucleotide
  Sense strand starting at position 3408 of SEQ ID NO: 292
uguaauuugugguuuaucu

SEQ ID NO: 26007 - RNA, 19 nt, Artificial Sequence
  Description of Artificial Sequence: Synthetic oligonucleotide
  Antisense strand to SEQ ID NO: 26006
agauaaaccacaaauuaca

SEQ ID NO: 26008 - RNA, 19 nt, Artificial Sequence
  Description of Artificial Sequence: Synthetic oligonucleotide
  Sense strand starting at position 3403 of SEQ ID NO: 292
uuagauguaauuugugguu

SEQ ID NO: 26009 - RNA, 19 nt, Artificial Sequence
  Description of Artificial Sequence: Synthetic oligonucleotide
  Antisense strand to SEQ ID NO: 26008
aaccacaaauuacaucuaa

SEQ ID NO: 26010 - RNA, 19 nt, Artificial Sequence
  Description of Artificial Sequence: Synthetic oligonucleotide
  Sense strand starting at position 3313 of SEQ ID NO: 292
guauuaaugggugauguua

SEQ ID NO: 26011 - RNA, 19 nt, Artificial Sequence
  Description of Artificial Sequence: Synthetic oligonucleotide
  Antisense strand to SEQ ID NO: 26010
uaacaucacccauuaauac

SEQ ID NO: 26012 - RNA, 19 nt, Artificial Sequence
  Description of Artificial Sequence: Synthetic oligonucleotide
  Sense strand starting at position 3312 of SEQ ID NO: 292
uguauuaaugggugauguu

SEQ ID NO: 26013 - RNA, 19 nt, Artificial Sequence
  Description of Artificial Sequence: Synthetic oligonucleotide
  Antisense strand to SEQ ID NO: 26012
aacaucacccauuaauaca

SEQ ID NO: 26014 - RNA, 19 nt, Artificial Sequence
  Description of Artificial Sequence: Synthetic oligonucleotide
  Sense strand starting at position 3311 of SEQ ID NO: 292
guguauuaaugggugaugu

SEQ ID NO: 26015 - RNA, 19 nt, Artificial Sequence
  Description of Artificial Sequence: Synthetic oligonucleotide
  Antisense strand to SEQ ID NO: 26014
acaucacccauuaauacac

SEQ ID NO: 26016 - RNA, 19 nt, Artificial Sequence
  Description of Artificial Sequence: Synthetic oligonucleotide
  Sense strand starting at position 3310 of SEQ ID NO: 292
gguguauuaaugggugaug

SEQ ID NO: 26017 - RNA, 19 nt, Artificial Sequence
  Description of Artificial Sequence: Synthetic oligonucleotide
  Antisense strand to SEQ ID NO: 26016
caucacccauuaauacacc

SEQ ID NO: 26018 - RNA, 19 nt, Artificial Sequence
  Description of Artificial Sequence: Synthetic oligonucleotide
  Sense strand starting at position 3309 of SEQ ID NO: 292
ggguguauuaaugggugau

SEQ ID NO: 26019 - RNA, 19 nt, Artificial Sequence
  Description of Artificial Sequence: Synthetic oligonucleotide
  Antisense strand to SEQ ID NO: 26018
aucacccauuaauacaccc

SEQ ID NO: 26020 - RNA, 19 nt, Artificial Sequence
  Description of Artificial Sequence: Synthetic oligonucleotide
  Sense strand starting at position 3125 of SEQ ID NO: 292
ccaagaucagcugguaaga

SEQ ID NO: 26021 - RNA, 19 nt, Artificial Sequence
  Description of Artificial Sequence: Synthetic oligonucleotide
  Antisense strand to SEQ ID NO: 26020
ucuuaccagcugaucuugg

SEQ ID NO: 26022 - RNA, 19 nt, Artificial Sequence
  Description of Artificial Sequence: Synthetic oligonucleotide
  Sense strand starting at position 2779 of SEQ ID NO: 292
agaaguaggauccgauuau

SEQ ID NO: 26023 - RNA, 19 nt, Artificial Sequence
  Description of Artificial Sequence: Synthetic oligonucleotide
  Antisense strand to SEQ ID NO: 26022
auaaucggauccuacuucu

SEQ ID NO: 26024 - RNA, 19 nt, Artificial Sequence
  Description of Artificial Sequence: Synthetic oligonucleotide
  Sense strand starting at position 2714 of SEQ ID NO: 292
gcucacguccuugggaaga

SEQ ID NO: 26025 - RNA, 19 nt, Artificial Sequence
  Description of Artificial Sequence: Synthetic oligonucleotide
  Antisense strand to SEQ ID NO: 26024
ucuucccaaggacgugagc

SEQ ID NO: 26026 - RNA, 19 nt, Artificial Sequence
  Description of Artificial Sequence: Synthetic oligonucleotide
  Sense strand starting at position 2593 of SEQ ID NO: 292
cggagaagccuggaguaga

SEQ ID NO: 26027 - RNA, 19 nt, Artificial Sequence
  Description of Artificial Sequence: Synthetic oligonucleotide
  Antisense strand to SEQ ID NO: 26026
ucuacuccaggcuucuccg

SEQ ID NO: 26028 - RNA, 19 nt, Artificial Sequence
  Description of Artificial Sequence: Synthetic oligonucleotide
  Sense strand starting at position 2553 of SEQ ID NO: 292
gagaguuuggcguagacag

SEQ ID NO: 26029 - RNA, 19 nt, Artificial Sequence
  Description of Artificial Sequence: Synthetic oligonucleotide
  Antisense strand to SEQ ID NO: 26028
cugucuacgccaaacucuc

SEQ ID NO: 26030 - RNA, 19 nt, Artificial Sequence
  Description of Artificial Sequence: Synthetic oligonucleotide
  Sense strand starting at position 2541 of SEQ ID NO: 292
uucccucucgccgagaguu

SEQ ID NO: 26031 - RNA, 19 nt, Artificial Sequence
  Description of Artificial Sequence: Synthetic oligonucleotide
  Antisense strand to SEQ ID NO: 26030
aacucucggcgagagggaa

SEQ ID NO: 26032 - RNA, 19 nt, Artificial Sequence
  Description of Artificial Sequence: Synthetic oligonucleotide
  Sense strand starting at position 2193 of SEQ ID NO: 292
ccuuccuuggauggaaauu

SEQ ID NO: 26033 - RNA, 19 nt, Artificial Sequence
  Description of Artificial Sequence: Synthetic oligonucleotide
  Antisense strand to SEQ ID NO: 26032
aauuuccauccaaggaagg

SEQ ID NO: 26034 - RNA, 19 nt, Artificial Sequence
  Description of Artificial Sequence: Synthetic oligonucleotide
  Sense strand starting at position 2192 of SEQ ID NO: 292
cccuuccuuggauggaaau

SEQ ID NO: 26035 - RNA, 19 nt, Artificial Sequence
  Description of Artificial Sequence: Synthetic oligonucleotide
  Antisense strand to SEQ ID NO: 26034
auuuccauccaaggaaggg

SEQ ID NO: 26036 - RNA, 19 nt, Artificial Sequence
  Description of Artificial Sequence: Synthetic oligonucleotide
  Sense strand starting at position 1591 of SEQ ID NO: 292
aguuccuuucucuggagga

SEQ ID NO: 26037 - RNA, 19 nt, Artificial Sequence
  Description of Artificial Sequence: Synthetic oligonucleotide
  Antisense strand to SEQ ID NO: 26036
uccuccagagaaaggaacu

SEQ ID NO: 26038 - RNA, 19 nt, Artificial Sequence
  Description of Artificial Sequence: Synthetic oligonucleotide
  Sense strand starting at position 1464 of SEQ ID NO: 292
agcaaaguucuggagcuga

SEQ ID NO: 26039 - RNA, 19 nt, Artificial Sequence
  Description of Artificial Sequence: Synthetic oligonucleotide
  Antisense strand to SEQ ID NO: 26038
ucagcuccagaacuuugcu

SEQ ID NO: 26040 - RNA, 19 nt, Artificial Sequence
  Description of Artificial Sequence: Synthetic oligonucleotide
  Sense strand starting at position 1296 of SEQ ID NO: 292
ccaaauagaucagagagca

SEQ ID NO: 26041 - RNA, 19 nt, Artificial Sequence
  Description of Artificial Sequence: Synthetic oligonucleotide
  Antisense strand to SEQ ID NO: 26040
ugcucucugaucuauuugg

SEQ ID NO: 26042 - RNA, 19 nt, Artificial Sequence
  Description of Artificial Sequence: Synthetic oligonucleotide
  Sense strand starting at position 1151 of SEQ ID NO: 292
gacgguaucaguuacgugu

SEQ ID NO: 26043 - RNA, 19 nt, Artificial Sequence
  Description of Artificial Sequence: Synthetic oligonucleotide
  Antisense strand to SEQ ID NO: 26042
acacguaacugauaccguc

SEQ ID NO: 26044 - RNA, 19 nt, Artificial Sequence
  Description of Artificial Sequence: Synthetic oligonucleotide
  Sense strand starting at position 1144 of SEQ ID NO: 292
gcugucugacgguaucagu

SEQ ID NO: 26045 - RNA, 19 nt, Artificial Sequence
  Description of Artificial Sequence: Synthetic oligonucleotide
  Antisense strand to SEQ ID NO: 26044
acugauaccgucagacagc

SEQ ID NO: 26046 - RNA, 19 nt, Artificial Sequence
  Description of Artificial Sequence: Synthetic oligonucleotide
  Sense strand starting at position 1134 of SEQ ID NO: 292
ggugauuaucgcugucuga

SEQ ID NO: 26047 - RNA, 19 nt, Artificial Sequence
  Description of Artificial Sequence: Synthetic oligonucleotide
  Antisense strand to SEQ ID NO: 26046
ucagacagcgauaaucacc

SEQ ID NO: 26048 - RNA, 19 nt, Artificial Sequence
  Description of Artificial Sequence: Synthetic oligonucleotide
  Sense strand starting at position 1110 of SEQ ID NO: 292
guagcaugccgguucuuca

SEQ ID NO: 26049 - RNA, 19 nt, Artificial Sequence
  Description of Artificial Sequence: Synthetic oligonucleotide
  Antisense strand to SEQ ID NO: 26048
ugaagaaccggcaugcuac

SEQ ID NO: 26050 - RNA, 19 nt, Artificial Sequence
  Description of Artificial Sequence: Synthetic oligonucleotide
  Sense strand starting at position 1002 of SEQ ID NO: 292
ggucuuuauccaugucuca

SEQ ID NO: 26051 - RNA, 19 nt, Artificial Sequence
  Description of Artificial Sequence: Synthetic oligonucleotide
  Antisense strand to SEQ ID NO: 26050
ugagacauggauaaagacc

SEQ ID NO: 26052 - RNA, 19 nt, Artificial Sequence
  Description of Artificial Sequence: Synthetic oligonucleotide
  Sense strand starting at position 904 of SEQ ID NO: 292
cugugcacuagguguauau

SEQ ID NO: 26053 - RNA, 19 nt, Artificial Sequence
  Description of Artificial Sequence: Synthetic oligonucleotide
  Antisense strand to SEQ ID NO: 26052
auauacaccuagugcacag

SEQ ID NO: 26054 - RNA, 19 nt, Artificial Sequence
  Description of Artificial Sequence: Synthetic oligonucleotide
  Sense strand starting at position 713 of SEQ ID NO: 292
ugagcaucuugcuuaauuu

SEQ ID NO: 26055 - RNA, 19 nt, Artificial Sequence
  Description of Artificial Sequence: Synthetic oligonucleotide
  Antisense strand to SEQ ID NO: 26054
aaauuaagcaagaugcuca

SEQ ID NO: 26056 - RNA, 19 nt, Artificial Sequence
  Description of Artificial Sequence: Synthetic oligonucleotide
  Sense strand starting at position 712 of SEQ ID NO: 292
cugagcaucuugcuuaauu

SEQ ID NO: 26057 - RNA, 19 nt, Artificial Sequence
  Description of Artificial Sequence: Synthetic oligonucleotide
  Antisense strand to SEQ ID NO: 26056
aauuaagcaagaugcucag

SEQ ID NO: 26058 - RNA, 19 nt, Artificial Sequence
  Description of Artificial Sequence: Synthetic oligonucleotide
  Sense strand starting at position 551 of SEQ ID NO: 292
auggcugccuugcuuaauu

SEQ ID NO: 26059 - RNA, 19 nt, Artificial Sequence
  Description of Artificial Sequence: Synthetic oligonucleotide
  Antisense strand to SEQ ID NO: 26058
aauuaagcaaggcagccau

SEQ ID NO: 26060 - RNA, 19 nt, Artificial Sequence
  Description of Artificial Sequence: Synthetic oligonucleotide
  Sense strand starting at position 510 of SEQ ID NO: 292
gccugugcucacuauacca

SEQ ID NO: 26061 - RNA, 19 nt, Artificial Sequence
  Description of Artificial Sequence: Synthetic oligonucleotide
  Antisense strand to SEQ ID NO: 26060
ugguauagugagcacaggc

SEQ ID NO: 26062 - RNA, 19 nt, Artificial Sequence
  Description of Artificial Sequence: Synthetic oligonucleotide
  Sense strand starting at position 507 of SEQ ID NO: 292
cuugccugugcucacuaua

SEQ ID NO: 26063 - RNA, 19 nt, Artificial Sequence
  Description of Artificial Sequence: Synthetic oligonucleotide
  Antisense strand to SEQ ID NO: 26062
uauagugagcacaggcaag

SEQ ID NO: 26064 - RNA, 19 nt, Artificial Sequence
  Description of Artificial Sequence: Synthetic oligonucleotide
  Sense strand starting at position 368 of SEQ ID NO: 292
cucacuggcuaagaauaaa

SEQ ID NO: 26065 - RNA, 19 nt, Artificial Sequence
  Description of Artificial Sequence: Synthetic oligonucleotide
  Antisense strand to SEQ ID NO: 26064
uuuauucuuagccagugag

SEQ ID NO: 26066 - RNA, 19 nt, Artificial Sequence
  Description of Artificial Sequence: Synthetic oligonucleotide
  Sense strand starting at position 145 of SEQ ID NO: 292
acagauauguaccauggga

SEQ ID NO: 26067 - RNA, 19 nt, Artificial Sequence
  Description of Artificial Sequence: Synthetic oligonucleotide
  Antisense strand to SEQ ID NO: 26066
ucccaugguacauaucugu

SEQ ID NO: 26068 - RNA, 19 nt, Artificial Sequence
  Description of Artificial Sequence: Synthetic oligonucleotide
  Sense strand starting at position 120 of SEQ ID NO: 292
ugguguccugauuagaagu

SEQ ID NO: 26069 - RNA, 19 nt, Artificial Sequence
  Description of Artificial Sequence: Synthetic oligonucleotide
  Antisense strand to SEQ ID NO: 26068
acuucuaaucaggacacca

SEQ ID NO: 26070 - RNA, 19 nt, Artificial Sequence
  Description of Artificial Sequence: Synthetic oligonucleotide
  Sense strand starting at position 3983 of SEQ ID NO: 294
ccacuaaucagugguagag

SEQ ID NO: 26071 - RNA, 19 nt, Artificial Sequence
  Description of Artificial Sequence: Synthetic oligonucleotide
  Antisense strand to SEQ ID NO: 26070
cucuaccacugauuagugg

SEQ ID NO: 26072 - RNA, 19 nt, Artificial Sequence
  Description of Artificial Sequence: Synthetic oligonucleotide
  Sense strand starting at position 3982 of SEQ ID NO: 294
cccacuaaucagugguaga

SEQ ID NO: 26073 - RNA, 19 nt, Artificial Sequence
  Description of Artificial Sequence: Synthetic oligonucleotide
  Antisense strand to SEQ ID NO: 26072
ucuaccacugauuaguggg

SEQ ID NO: 26074 - RNA, 19 nt, Artificial Sequence
  Description of Artificial Sequence: Synthetic oligonucleotide
  Sense strand starting at position 3778 of SEQ ID NO: 294
guuaacuauuugcagauuu

SEQ ID NO: 26075 - RNA, 19 nt, Artificial Sequence
  Description of Artificial Sequence: Synthetic oligonucleotide
  Antisense strand to SEQ ID NO: 26074
aaaucugcaaauaguuaac

SEQ ID NO: 26076 - RNA, 19 nt, Artificial Sequence
  Description of Artificial Sequence: Synthetic oligonucleotide
  Sense strand starting at position 3758 of SEQ ID NO: 294
ggacuugagcaaugacuac

SEQ ID NO: 26077 - RNA, 19 nt, Artificial Sequence
  Description of Artificial Sequence: Synthetic oligonucleotide
  Antisense strand to SEQ ID NO: 26076
guagucauugcucaagucc

SEQ ID NO: 26078 - RNA, 19 nt, Artificial Sequence
  Description of Artificial Sequence: Synthetic oligonucleotide
  Sense strand starting at position 3745 of SEQ ID NO: 294
gcgauacucaaagggacuu

SEQ ID NO: 26079 - RNA, 19 nt, Artificial Sequence
  Description of Artificial Sequence: Synthetic oligonucleotide
  Antisense strand to SEQ ID NO: 26078
aagucccuuugaguaucgc

SEQ ID NO: 26080 - RNA, 19 nt, Artificial Sequence
  Description of Artificial Sequence: Synthetic oligonucleotide
  Sense strand starting at position 3644 of SEQ ID NO: 294
gaauguugcagcugugaug

SEQ ID NO: 26081 - RNA, 19 nt, Artificial Sequence
  Description of Artificial Sequence: Synthetic oligonucleotide
  Antisense strand to SEQ ID NO: 26080
caucacagcugcaacauuc

SEQ ID NO: 26082 - RNA, 19 nt, Artificial Sequence
  Description of Artificial Sequence: Synthetic oligonucleotide
  Sense strand starting at position 3577 of SEQ ID NO: 294
ucaagaaucuaagaaauga

SEQ ID NO: 26083 - RNA, 19 nt, Artificial Sequence
  Description of Artificial Sequence: Synthetic oligonucleotide
  Antisense strand to SEQ ID NO: 26082
ucauuucuuagauucuuga

SEQ ID NO: 26084 - RNA, 19 nt, Artificial Sequence
  Description of Artificial Sequence: Synthetic oligonucleotide
  Sense strand starting at position 3463 of SEQ ID NO: 294
aguuacuguguugguuaaa

SEQ ID NO: 26085 - RNA, 19 nt, Artificial Sequence
  Description of Artificial Sequence: Synthetic oligonucleotide
  Antisense strand to SEQ ID NO: 26084
uuuaaccaacacaguaacu

SEQ ID NO: 26086 - RNA, 19 nt, Artificial Sequence
  Description of Artificial Sequence: Synthetic oligonucleotide
  Sense strand starting at position 3460 of SEQ ID NO: 294
uggaguuacuguguugguu

SEQ ID NO: 26087 - RNA, 19 nt, Artificial Sequence
  Description of Artificial Sequence: Synthetic oligonucleotide
  Antisense strand to SEQ ID NO: 26086
aaccaacacaguaacucca

SEQ ID NO: 26088 - RNA, 19 nt, Artificial Sequence
  Description of Artificial Sequence: Synthetic oligonucleotide
  Sense strand starting at position 3433 of SEQ ID NO: 294
gaagaacucgcuuagccuu

SEQ ID NO: 26089 - RNA, 19 nt, Artificial Sequence
  Description of Artificial Sequence: Synthetic oligonucleotide
  Antisense strand to SEQ ID NO: 26088
aaggcuaagcgaguucuuc

SEQ ID NO: 26090 - RNA, 19 nt, Artificial Sequence
  Description of Artificial Sequence: Synthetic oligonucleotide
  Sense strand starting at position 3419 of SEQ ID NO: 294
accuguauggcuuagaaga

SEQ ID NO: 26091 - RNA, 19 nt, Artificial Sequence
  Description of Artificial Sequence: Synthetic oligonucleotide
  Antisense strand to SEQ ID NO: 26090
ucuucuaagccauacaggu

SEQ ID NO: 26092 - RNA, 19 nt, Artificial Sequence
  Description of Artificial Sequence: Synthetic oligonucleotide
  Sense strand starting at position 3417 of SEQ ID NO: 294
aaaccuguauggcuuagaa

SEQ ID NO: 26093 - RNA, 19 nt, Artificial Sequence
  Description of Artificial Sequence: Synthetic oligonucleotide
  Antisense strand to SEQ ID NO: 26092
uucuaagccauacagguuu

SEQ ID NO: 26094 - RNA, 19 nt, Artificial Sequence
  Description of Artificial Sequence: Synthetic oligonucleotide
  Sense strand starting at position 3362 of SEQ ID NO: 294
agguuuggcagucagaaga

SEQ ID NO: 26095 - RNA, 19 nt, Artificial Sequence
  Description of Artificial Sequence: Synthetic oligonucleotide
  Antisense strand to SEQ ID NO: 26094
ucuucugacugccaaaccu

SEQ ID NO: 26096 - RNA, 19 nt, Artificial Sequence
  Description of Artificial Sequence: Synthetic oligonucleotide
  Sense strand starting at position 3349 of SEQ ID NO: 294
gagucauuagcuuagguuu

SEQ ID NO: 26097 - RNA, 19 nt, Artificial Sequence
  Description of Artificial Sequence: Synthetic oligonucleotide
  Antisense strand to SEQ ID NO: 26096
aaaccuaagcuaaugacuc

SEQ ID NO: 26098 - RNA, 19 nt, Artificial Sequence
  Description of Artificial Sequence: Synthetic oligonucleotide
  Sense strand starting at position 3347 of SEQ ID NO: 294
acgagucauuagcuuaggu

SEQ ID NO: 26099 - RNA, 19 nt, Artificial Sequence
  Description of Artificial Sequence: Synthetic oligonucleotide
  Antisense strand to SEQ ID NO: 26098
accuaagcuaaugacucgu

SEQ ID NO: 26100 - RNA, 19 nt, Artificial Sequence
  Description of Artificial Sequence: Synthetic oligonucleotide
  Sense strand starting at position 3343 of SEQ ID NO: 294
acacacgagucauuagcuu

SEQ ID NO: 26101 - RNA, 19 nt, Artificial Sequence
  Description of Artificial Sequence: Synthetic oligonucleotide
  Antisense strand to SEQ ID NO: 26100
aagcuaaugacucgugugu

SEQ ID NO: 26102 - RNA, 19 nt, Artificial Sequence
  Description of Artificial Sequence: Synthetic oligonucleotide
  Sense strand starting at position 3239 of SEQ ID NO: 294
uguauaagucucugaauaa

SEQ ID NO: 26103 - RNA, 19 nt, Artificial Sequence
  Description of Artificial Sequence: Synthetic oligonucleotide
  Antisense strand to SEQ ID NO: 26102
uuauucagagacuuauaca

SEQ ID NO: 26104 - RNA, 19 nt, Artificial Sequence
  Description of Artificial Sequence: Synthetic oligonucleotide
  Sense strand starting at position 3238 of SEQ ID NO: 294
uuguauaagucucugaaua

SEQ ID NO: 26105 - RNA, 19 nt, Artificial Sequence
  Description of Artificial Sequence: Synthetic oligonucleotide
  Antisense strand to SEQ ID NO: 26104
uauucagagacuuauacaa

SEQ ID NO: 26106 - RNA, 19 nt, Artificial Sequence
  Description of Artificial Sequence: Synthetic oligonucleotide
  Sense strand starting at position 3214 of SEQ ID NO: 294
uggguuauuguauacuuau

SEQ ID NO: 26107 - RNA, 19 nt, Artificial Sequence
  Description of Artificial Sequence: Synthetic oligonucleotide
  Antisense strand to SEQ ID NO: 26106
auaaguauacaauaaccca

SEQ ID NO: 26108 - RNA, 19 nt, Artificial Sequence
  Description of Artificial Sequence: Synthetic oligonucleotide
  Sense strand starting at position 3209 of SEQ ID NO: 294
gaacauggguuauuguaua

SEQ ID NO: 26109 - RNA, 19 nt, Artificial Sequence
  Description of Artificial Sequence: Synthetic oligonucleotide
  Antisense strand to SEQ ID NO: 26108
uauacaauaacccauguuc

SEQ ID NO: 26110 - RNA, 19 nt, Artificial Sequence
  Description of Artificial Sequence: Synthetic oligonucleotide
  Sense strand starting at position 3107 of SEQ ID NO: 294
gucagcaaaucgucugaau

SEQ ID NO: 26111 - RNA, 19 nt, Artificial Sequence
  Description of Artificial Sequence: Synthetic oligonucleotide
  Antisense strand to SEQ ID NO: 26110
auucagacgauuugcugac

SEQ ID NO: 26112 - RNA, 19 nt, Artificial Sequence
  Description of Artificial Sequence: Synthetic oligonucleotide
  Sense strand starting at position 3091 of SEQ ID NO: 294
cggaauuauccagacaguc

SEQ ID NO: 26113 - RNA, 19 nt, Artificial Sequence
  Description of Artificial Sequence: Synthetic oligonucleotide
  Antisense strand to SEQ ID NO: 26112
gacugucuggauaauuccg

SEQ ID NO: 26114 - RNA, 19 nt, Artificial Sequence
  Description of Artificial Sequence: Synthetic oligonucleotide
  Sense strand starting at position 3079 of SEQ ID NO: 294
gguuaaaggcuucggaauu

SEQ ID NO: 26115 - RNA, 19 nt, Artificial Sequence
  Description of Artificial Sequence: Synthetic oligonucleotide
  Antisense strand to SEQ ID NO: 26114
aauuccgaagccuuuaacc

SEQ ID NO: 26116 - RNA, 19 nt, Artificial Sequence
  Description of Artificial Sequence: Synthetic oligonucleotide
  Sense strand starting at position 3037 of SEQ ID NO: 294
aaaguaaacggaugaaagu

SEQ ID NO: 26117 - RNA, 19 nt, Artificial Sequence
  Description of Artificial Sequence: Synthetic oligonucleotide
  Antisense strand to SEQ ID NO: 26116
acuuucauccguuuacuuu

SEQ ID NO: 26118 - RNA, 19 nt, Artificial Sequence
  Description of Artificial Sequence: Synthetic oligonucleotide
  Sense strand starting at position 2979 of SEQ ID NO: 294
ugagguccuguuugaauuc

SEQ ID NO: 26119 - RNA, 19 nt, Artificial Sequence
  Description of Artificial Sequence: Synthetic oligonucleotide
  Antisense strand to SEQ ID NO: 26118
gaauucaaacaggaccuca

SEQ ID NO: 26120 - RNA, 19 nt, Artificial Sequence
  Description of Artificial Sequence: Synthetic oligonucleotide
  Sense strand starting at position 2927 of SEQ ID NO: 294
cgccgucuggcguuaauaa

SEQ ID NO: 26121 - RNA, 19 nt, Artificial Sequence
  Description of Artificial Sequence: Synthetic oligonucleotide
  Antisense strand to SEQ ID NO: 26120
uuauuaacgccagacggcg

SEQ ID NO: 26122 - RNA, 19 nt, Artificial Sequence
  Description of Artificial Sequence: Synthetic oligonucleotide
  Sense strand starting at position 2926 of SEQ ID NO: 294
gcgccgucuggcguuaaua

SEQ ID NO: 26123 - RNA, 19 nt, Artificial Sequence
  Description of Artificial Sequence: Synthetic oligonucleotide
  Antisense strand to SEQ ID NO: 26122
uauuaacgccagacggcgc

SEQ ID NO: 26124 - RNA, 19 nt, Artificial Sequence
  Description of Artificial Sequence: Synthetic oligonucleotide
  Sense strand starting at position 2892 of SEQ ID NO: 294
ccgacguggugguuaaaga

SEQ ID NO: 26125 - RNA, 19 nt, Artificial Sequence
  Description of Artificial Sequence: Synthetic oligonucleotide
  Antisense strand to SEQ ID NO: 26124
ucuuuaaccaccacgucgg

SEQ ID NO: 26126 - RNA, 19 nt, Artificial Sequence
  Description of Artificial Sequence: Synthetic oligonucleotide
  Sense strand starting at position 2698 of SEQ ID NO: 294
cagagaucggaucgauaau

SEQ ID NO: 26127 - RNA, 19 nt, Artificial Sequence
  Description of Artificial Sequence: Synthetic oligonucleotide
  Antisense strand to SEQ ID NO: 26126
auuaucgauccgaucucug

SEQ ID NO: 26128 - RNA, 19 nt, Artificial Sequence
  Description of Artificial Sequence: Synthetic oligonucleotide
  Sense strand starting at position 2386 of SEQ ID NO: 294
agccuuuggccagggacau

SEQ ID NO: 26129 - RNA, 19 nt, Artificial Sequence
  Description of Artificial Sequence: Synthetic oligonucleotide
  Antisense strand to SEQ ID NO: 26128
augucccuggccaaaggcu

SEQ ID NO: 26130 - RNA, 19 nt, Artificial Sequence
  Description of Artificial Sequence: Synthetic oligonucleotide
  Sense strand starting at position 2336 of SEQ ID NO: 294
ggcugacaccgucgggaaa

SEQ ID NO: 26131 - RNA, 19 nt, Artificial Sequence
  Description of Artificial Sequence: Synthetic oligonucleotide
  Antisense strand to SEQ ID NO: 26130
uuucccgacggugucagcc

SEQ ID NO: 26132 - RNA, 19 nt, Artificial Sequence
  Description of Artificial Sequence: Synthetic oligonucleotide
  Sense strand starting at position 1436 of SEQ ID NO: 294
caacauuggccgcaaaguu

SEQ ID NO: 26133 - RNA, 19 nt, Artificial Sequence
  Description of Artificial Sequence: Synthetic oligonucleotide
  Antisense strand to SEQ ID NO: 26132
aacuuugcggccaauguug

SEQ ID NO: 26134 - RNA, 19 nt, Artificial Sequence
  Description of Artificial Sequence: Synthetic oligonucleotide
  Sense strand starting at position 1139 of SEQ ID NO: 294
ggagacucuggcuagaguu

SEQ ID NO: 26135 - RNA, 19 nt, Artificial Sequence
  Description of Artificial Sequence: Synthetic oligonucleotide
  Antisense strand to SEQ ID NO: 26134
aacucuagccagagucucc

SEQ ID NO: 26136 - RNA, 19 nt, Artificial Sequence
  Description of Artificial Sequence: Synthetic oligonucleotide
  Sense strand starting at position 1138 of SEQ ID NO: 294
aggagacucuggcuagagu

SEQ ID NO: 26137 - RNA, 19 nt, Artificial Sequence
  Description of Artificial Sequence: Synthetic oligonucleotide
  Antisense strand to SEQ ID NO: 26136
acucuagccagagucuccu

SEQ ID NO: 26138 - RNA, 19 nt, Artificial Sequence
  Description of Artificial Sequence: Synthetic oligonucleotide
  Sense strand starting at position 962 of SEQ ID NO: 294
cggaguccugcacagaauu

SEQ ID NO: 26139 - RNA, 19 nt, Artificial Sequence
  Description of Artificial Sequence: Synthetic oligonucleotide
  Antisense strand to SEQ ID NO: 26138
aauucugugcaggacuccg

SEQ ID NO: 26140 - RNA, 19 nt, Artificial Sequence
  Description of Artificial Sequence: Synthetic oligonucleotide
  Sense strand starting at position 960 of SEQ ID NO: 294
gccggaguccugcacagaa

SEQ ID NO: 26141 - RNA, 19 nt, Artificial Sequence
  Description of Artificial Sequence: Synthetic oligonucleotide
  Antisense strand to SEQ ID NO: 26140
uucugugcaggacuccggc

SEQ ID NO: 26142 - RNA, 19 nt, Artificial Sequence
  Description of Artificial Sequence: Synthetic oligonucleotide
  Sense strand starting at position 586 of SEQ ID NO: 294
gcgaggagaccgugagaaa

SEQ ID NO: 26143 - RNA, 19 nt, Artificial Sequence
  Description of Artificial Sequence: Synthetic oligonucleotide
  Antisense strand to SEQ ID NO: 26142
uuucucacggucuccucgc

SEQ ID NO: 26144 - RNA, 19 nt, Artificial Sequence
  Description of Artificial Sequence: Synthetic oligonucleotide
  Sense strand starting at position 338 of SEQ ID NO: 294
ugucuaaaugugcaaagag

SEQ ID NO: 26145 - RNA, 19 nt, Artificial Sequence
  Description of Artificial Sequence: Synthetic oligonucleotide
  Antisense strand to SEQ ID NO: 26144
cucuuugcacauuuagaca

SEQ ID NO: 26146 - RNA, 19 nt, Artificial Sequence
  Description of Artificial Sequence: Synthetic oligonucleotide
  Sense strand starting at position 337 of SEQ ID NO: 294
gugucuaaaugugcaaaga

SEQ ID NO: 26147 - RNA, 19 nt, Artificial Sequence
  Description of Artificial Sequence: Synthetic oligonucleotide
  Antisense strand to SEQ ID NO: 26146
ucuuugcacauuuagacac

SEQ ID NO: 26148 - RNA, 19 nt, Artificial Sequence
  Description of Artificial Sequence: Synthetic oligonucleotide
  Sense strand starting at position 330 of SEQ ID NO: 294
ccuugcagugucuaaaugu

SEQ ID NO: 26149 - RNA, 19 nt, Artificial Sequence
  Description of Artificial Sequence: Synthetic oligonucleotide
  Antisense strand to SEQ ID NO: 26148
acauuuagacacugcaagg

SEQ ID NO: 26150 - RNA, 19 nt, Artificial Sequence
  Description of Artificial Sequence: Synthetic oligonucleotide
  Sense strand starting at position 3972 of SEQ ID NO: 295
uguucuaucgcucaguaaa

SEQ ID NO: 26151 - RNA, 19 nt, Artificial Sequence
  Description of Artificial Sequence: Synthetic oligonucleotide
  Antisense strand to SEQ ID NO: 26150
uuuacugagcgauagaaca

SEQ ID NO: 26152 - RNA, 19 nt, Artificial Sequence
  Description of Artificial Sequence: Synthetic oligonucleotide
  Sense strand starting at position 3969 of SEQ ID NO: 295
agcuguucuaucgcucagu

SEQ ID NO: 26153 - RNA, 19 nt, Artificial Sequence
  Description of Artificial Sequence: Synthetic oligonucleotide
  Antisense strand to SEQ ID NO: 26152
acugagcgauagaacagcu

SEQ ID NO: 26154 - RNA, 19 nt, Artificial Sequence
  Description of Artificial Sequence: Synthetic oligonucleotide
  Sense strand starting at position 3817 of SEQ ID NO: 295
ucuucugagagcuggaaag

SEQ ID NO: 26155 - RNA, 19 nt, Artificial Sequence
  Description of Artificial Sequence: Synthetic oligonucleotide
  Antisense strand to SEQ ID NO: 26154
cuuuccagcucucagaaga

SEQ ID NO: 26156 - RNA, 19 nt, Artificial Sequence
  Description of Artificial Sequence: Synthetic oligonucleotide
  Sense strand starting at position 3808 of SEQ ID NO: 295
ggucuucccucuucugaga

SEQ ID NO: 26157 - RNA, 19 nt, Artificial Sequence
  Description of Artificial Sequence: Synthetic oligonucleotide
  Antisense strand to SEQ ID NO: 26156
ucucagaagagggaagacc

SEQ ID NO: 26158 - RNA, 19 nt, Artificial Sequence
  Description of Artificial Sequence: Synthetic oligonucleotide
  Sense strand starting at position 3582 of SEQ ID NO: 295
gggaacuuaugguguauuu

SEQ ID NO: 26159 - RNA, 19 nt, Artificial Sequence
  Description of Artificial Sequence: Synthetic oligonucleotide
  Antisense strand to SEQ ID NO: 26158
aaauacaccauaaguuccc

SEQ ID NO: 26160 - RNA, 19 nt, Artificial Sequence
  Description of Artificial Sequence: Synthetic oligonucleotide
  Sense strand starting at position 3241 of SEQ ID NO: 295
cugaucuuagagcaaaguu

SEQ ID NO: 26161 - RNA, 19 nt, Artificial Sequence
  Description of Artificial Sequence: Synthetic oligonucleotide
  Antisense strand to SEQ ID NO: 26160
aacuuugcucuaagaucag

SEQ ID NO: 26162 - RNA, 19 nt, Artificial Sequence
  Description of Artificial Sequence: Synthetic oligonucleotide
  Sense strand starting at position 3233 of SEQ ID NO: 295
cgcccacucugaucuuaga

SEQ ID NO: 26163 - RNA, 19 nt, Artificial Sequence
  Description of Artificial Sequence: Synthetic oligonucleotide
  Antisense strand to SEQ ID NO: 26162
ucuaagaucagagugggcg

SEQ ID NO: 26164 - RNA, 19 nt, Artificial Sequence
  Description of Artificial Sequence: Synthetic oligonucleotide
  Sense strand starting at position 2550 of SEQ ID NO: 295
acacuuagucacuagcuuu

SEQ ID NO: 26165 - RNA, 19 nt, Artificial Sequence
  Description of Artificial Sequence: Synthetic oligonucleotide
  Antisense strand to SEQ ID NO: 26164
aaagcuagugacuaagugu

SEQ ID NO: 26166 - RNA, 19 nt, Artificial Sequence
  Description of Artificial Sequence: Synthetic oligonucleotide
  Sense strand starting at position 2545 of SEQ ID NO: 295
ggugaacacuuagucacua

SEQ ID NO: 26167 - RNA, 19 nt, Artificial Sequence
  Description of Artificial Sequence: Synthetic oligonucleotide
  Antisense strand to SEQ ID NO: 26166
uagugacuaaguguucacc

SEQ ID NO: 26168 - RNA, 19 nt, Artificial Sequence
  Description of Artificial Sequence: Synthetic oligonucleotide
  Sense strand starting at position 2481 of SEQ ID NO: 295
gguccuauaucaucugauu

SEQ ID NO: 26169 - RNA, 19 nt, Artificial Sequence
  Description of Artificial Sequence: Synthetic oligonucleotide
  Antisense strand to SEQ ID NO: 26168
aaucagaugauauaggacc

SEQ ID NO: 26170 - RNA, 19 nt, Artificial Sequence
  Description of Artificial Sequence: Synthetic oligonucleotide
  Sense strand starting at position 2415 of SEQ ID NO: 295
guugcaugucuuugggaaa

SEQ ID NO: 26171 - RNA, 19 nt, Artificial Sequence
  Description of Artificial Sequence: Synthetic oligonucleotide
  Antisense strand to SEQ ID NO: 26170
uuucccaaagacaugcaac

SEQ ID NO: 26172 - RNA, 19 nt, Artificial Sequence
  Description of Artificial Sequence: Synthetic oligonucleotide
  Sense strand starting at position 2414 of SEQ ID NO: 295
aguugcaugucuuugggaa

SEQ ID NO: 26173 - RNA, 19 nt, Artificial Sequence
  Description of Artificial Sequence: Synthetic oligonucleotide
  Antisense strand to SEQ ID NO: 26172
uucccaaagacaugcaacu

SEQ ID NO: 26174 - RNA, 19 nt, Artificial Sequence
  Description of Artificial Sequence: Synthetic oligonucleotide
  Sense strand starting at position 2384 of SEQ ID NO: 295
agcaaucuguuucuagacu

SEQ ID NO: 26175 - RNA, 19 nt, Artificial Sequence
  Description of Artificial Sequence: Synthetic oligonucleotide
  Antisense strand to SEQ ID NO: 26174
agucuagaaacagauugcu

SEQ ID NO: 26176 - RNA, 19 nt, Artificial Sequence
  Description of Artificial Sequence: Synthetic oligonucleotide
  Sense strand starting at position 2382 of SEQ ID NO: 295
acagcaaucuguuucuaga

SEQ ID NO: 26177 - RNA, 19 nt, Artificial Sequence
  Description of Artificial Sequence: Synthetic oligonucleotide
  Antisense strand to SEQ ID NO: 26176
ucuagaaacagauugcugu

SEQ ID NO: 26178 - RNA, 19 nt, Artificial Sequence
  Description of Artificial Sequence: Synthetic oligonucleotide
  Sense strand starting at position 2357 of SEQ ID NO: 295
aacagugcauuggugagaa

SEQ ID NO: 26179 - RNA, 19 nt, Artificial Sequence
  Description of Artificial Sequence: Synthetic oligonucleotide
  Antisense strand to SEQ ID NO: 26178
uucucaccaaugcacuguu

SEQ ID NO: 26180 - RNA, 19 nt, Artificial Sequence
  Description of Artificial Sequence: Synthetic oligonucleotide
  Sense strand starting at position 2301 of SEQ ID NO: 295
uuaugaaagugacaugcaa

SEQ ID NO: 26181 - RNA, 19 nt, Artificial Sequence
  Description of Artificial Sequence: Synthetic oligonucleotide
  Antisense strand to SEQ ID NO: 26180
uugcaugucacuuucauaa

SEQ ID NO: 26182 - RNA, 19 nt, Artificial Sequence
  Description of Artificial Sequence: Synthetic oligonucleotide
  Sense strand starting at position 2272 of SEQ ID NO: 295
aaaucugucccuuguagga

SEQ ID NO: 26183 - RNA, 19 nt, Artificial Sequence
  Description of Artificial Sequence: Synthetic oligonucleotide
  Antisense strand to SEQ ID NO: 26182
uccuacaagggacagauuu

SEQ ID NO: 26184 - RNA, 19 nt, Artificial Sequence
  Description of Artificial Sequence: Synthetic oligonucleotide
  Sense strand starting at position 2110 of SEQ ID NO: 295
ucagcaagacugggacauu

SEQ ID NO: 26185 - RNA, 19 nt, Artificial Sequence
  Description of Artificial Sequence: Synthetic oligonucleotide
  Antisense strand to SEQ ID NO: 26184
aaugucccagucuugcuga

SEQ ID NO: 26186 - RNA, 19 nt, Artificial Sequence
  Description of Artificial Sequence: Synthetic oligonucleotide
  Sense strand starting at position 2080 of SEQ ID NO: 295
gaagcucaccagggacauu

SEQ ID NO: 26187 - RNA, 19 nt, Artificial Sequence
  Description of Artificial Sequence: Synthetic oligonucleotide
  Antisense strand to SEQ ID NO: 26186
aaugucccuggugagcuuc

SEQ ID NO: 26188 - RNA, 19 nt, Artificial Sequence
  Description of Artificial Sequence: Synthetic oligonucleotide
  Sense strand starting at position 1809 of SEQ ID NO: 295
uagaaucaggcacaguuau

SEQ ID NO: 26189 - RNA, 19 nt, Artificial Sequence
  Description of Artificial Sequence: Synthetic oligonucleotide
  Antisense strand to SEQ ID NO: 26188
auaacugugccugauucua

SEQ ID NO: 26190 - RNA, 19 nt, Artificial Sequence
  Description of Artificial Sequence: Synthetic oligonucleotide
  Sense strand starting at position 1744 of SEQ ID NO: 295
gaguuaaggucccuccacu

SEQ ID NO: 26191 - RNA, 19 nt, Artificial Sequence
  Description of Artificial Sequence: Synthetic oligonucleotide
  Antisense strand to SEQ ID NO: 26190
aguggagggaccuuaacuc

SEQ ID NO: 26192 - RNA, 19 nt, Artificial Sequence
  Description of Artificial Sequence: Synthetic oligonucleotide
  Sense strand starting at position 1691 of SEQ ID NO: 295
aguuguuaggucuaacuca

SEQ ID NO: 26193 - RNA, 19 nt, Artificial Sequence
  Description of Artificial Sequence: Synthetic oligonucleotide
  Antisense strand to SEQ ID NO: 26192
ugaguuagaccuaacaacu

SEQ ID NO: 26194 - RNA, 19 nt, Artificial Sequence
  Description of Artificial Sequence: Synthetic oligonucleotide
  Sense strand starting at position 1638 of SEQ ID NO: 295
ugguuucuuauguguuaug

SEQ ID NO: 26195 - RNA, 19 nt, Artificial Sequence
  Description of Artificial Sequence: Synthetic oligonucleotide
  Antisense strand to SEQ ID NO: 26194
cauaacacauaagaaacca

SEQ ID NO: 26196 - RNA, 19 nt, Artificial Sequence
  Description of Artificial Sequence: Synthetic oligonucleotide
  Sense strand starting at position 1637 of SEQ ID NO: 295
cugguuucuuauguguuau

SEQ ID NO: 26197 - RNA, 19 nt, Artificial Sequence
  Description of Artificial Sequence: Synthetic oligonucleotide
  Antisense strand to SEQ ID NO: 26196
auaacacauaagaaaccag

SEQ ID NO: 26198 - RNA, 19 nt, Artificial Sequence
  Description of Artificial Sequence: Synthetic oligonucleotide
  Sense strand starting at position 1430 of SEQ ID NO: 295
gcgccugcuccuuauuuaa

SEQ ID NO: 26199 - RNA, 19 nt, Artificial Sequence
  Description of Artificial Sequence: Synthetic oligonucleotide
  Antisense strand to SEQ ID NO: 26198
uuaaauaaggagcaggcgc

SEQ ID NO: 26200 - RNA, 19 nt, Artificial Sequence
  Description of Artificial Sequence: Synthetic oligonucleotide
  Sense strand starting at position 1429 of SEQ ID NO: 295
agcgccugcuccuuauuua

SEQ ID NO: 26201 - RNA, 19 nt, Artificial Sequence
  Description of Artificial Sequence: Synthetic oligonucleotide
  Antisense strand to SEQ ID NO: 26200
uaaauaaggagcaggcgcu

SEQ ID NO: 26202 - RNA, 19 nt, Artificial Sequence
  Description of Artificial Sequence: Synthetic oligonucleotide
  Sense strand starting at position 1007 of SEQ ID NO: 295
caugaugccucuguggaga

SEQ ID NO: 26203 - RNA, 19 nt, Artificial Sequence
  Description of Artificial Sequence: Synthetic oligonucleotide
  Antisense strand to SEQ ID NO: 26202
ucuccacagaggcaucaug

SEQ ID NO: 26204 - RNA, 19 nt, Artificial Sequence
  Description of Artificial Sequence: Synthetic oligonucleotide
  Sense strand starting at position 1006 of SEQ ID NO: 295
ccaugaugccucuguggag

SEQ ID NO: 26205 - RNA, 19 nt, Artificial Sequence
  Description of Artificial Sequence: Synthetic oligonucleotide
  Antisense strand to SEQ ID NO: 26204
cuccacagaggcaucaugg

SEQ ID NO: 26206 - RNA, 19 nt, Artificial Sequence
  Description of Artificial Sequence: Synthetic oligonucleotide
  Sense strand starting at position 487 of SEQ ID NO: 295
aguggcuccugagucuaaa

SEQ ID NO: 26207 - RNA, 19 nt, Artificial Sequence
  Description of Artificial Sequence: Synthetic oligonucleotide
  Antisense strand to SEQ ID NO: 26206
uuuagacucaggagccacu

SEQ ID NO: 26208 - RNA, 19 nt, Artificial Sequence
  Description of Artificial Sequence: Synthetic oligonucleotide
  Sense strand starting at position 456 of SEQ ID NO: 295
caauaacuugcuugagguc

SEQ ID NO: 26209 - RNA, 19 nt, Artificial Sequence
  Description of Artificial Sequence: Synthetic oligonucleotide
  Antisense strand to SEQ ID NO: 26208
gaccucaagcaaguuauug

SEQ ID NO: 26210 - RNA, 19 nt, Artificial Sequence
  Description of Artificial Sequence: Synthetic oligonucleotide
  Sense strand starting at position 455 of SEQ ID NO: 295
ccaauaacuugcuugaggu

SEQ ID NO: 26211 - RNA, 19 nt, Artificial Sequence
  Description of Artificial Sequence: Synthetic oligonucleotide
  Antisense strand to SEQ ID NO: 26210
accucaagcaaguuauugg

SEQ ID NO: 26212 - RNA, 19 nt, Artificial Sequence
  Description of Artificial Sequence: Synthetic oligonucleotide
  Sense strand starting at position 278 of SEQ ID NO: 295
uuucuucuagaaugugagu

SEQ ID NO: 26213 - RNA, 19 nt, Artificial Sequence
  Description of Artificial Sequence: Synthetic oligonucleotide
  Antisense strand to SEQ ID NO: 26212
acucacauucuagaagaaa

SEQ ID NO: 26214 - RNA, 19 nt, Artificial Sequence
  Description of Artificial Sequence: Synthetic oligonucleotide
  Sense strand starting at position 275 of SEQ ID NO: 295
gccuuucuucuagaaugug

SEQ ID NO: 26215 - RNA, 19 nt, Artificial Sequence
  Description of Artificial Sequence: Synthetic oligonucleotide
  Antisense strand to SEQ ID NO: 26214
cacauucuagaagaaaggc

SEQ ID NO: 26216 - RNA, 19 nt, Artificial Sequence
  Description of Artificial Sequence: Synthetic oligonucleotide
  Sense strand starting at position 271 of SEQ ID NO: 295
ccuggccuuucuucuagaa

SEQ ID NO: 26217 - RNA, 19 nt, Artificial Sequence
  Description of Artificial Sequence: Synthetic oligonucleotide
  Antisense strand to SEQ ID NO: 26216
uucuagaagaaaggccagg

SEQ ID NO: 26218 - RNA, 19 nt, Artificial Sequence
  Description of Artificial Sequence: Synthetic oligonucleotide
  Sense strand starting at position 183 of SEQ ID NO: 295
ucuggucugcuuuggacua

SEQ ID NO: 26219 - RNA, 19 nt, Artificial Sequence
  Description of Artificial Sequence: Synthetic oligonucleotide
  Antisense strand to SEQ ID NO: 26218
uaguccaaagcagaccaga

SEQ ID NO: 26220 - RNA, 19 nt, Artificial Sequence
  Description of Artificial Sequence: Synthetic oligonucleotide
  Sense strand starting at position 162 of SEQ ID NO: 295
ugcaaaugucuaugugauc

SEQ ID NO: 26221 - RNA, 19 nt, Artificial Sequence
  Description of Artificial Sequence: Synthetic oligonucleotide
  Antisense strand to SEQ ID NO: 26220
gaucacauagacauuugca

SEQ ID NO: 26222 - RNA, 19 nt, Artificial Sequence
  Description of Artificial Sequence: Synthetic oligonucleotide
  Sense strand starting at position 160 of SEQ ID NO: 295
acugcaaaugucuauguga

SEQ ID NO: 26223 - RNA, 19 nt, Artificial Sequence
  Description of Artificial Sequence: Synthetic oligonucleotide
  Antisense strand to SEQ ID NO: 26222
ucacauagacauuugcagu

SEQ ID NO: 26224 - RNA, 19 nt, Artificial Sequence
  Description of Artificial Sequence: Synthetic oligonucleotide
  Sense strand starting at position 152 of SEQ ID NO: 295
ugcaaauuacugcaaaugu

SEQ ID NO: 26225 - RNA, 19 nt, Artificial Sequence
  Description of Artificial Sequence: Synthetic oligonucleotide
  Antisense strand to SEQ ID NO: 26224
acauuugcaguaauuugca

SEQ ID NO: 26226 - RNA, 19 nt, Artificial Sequence
  Description of Artificial Sequence: Synthetic oligonucleotide
  Sense strand starting at position 138 of SEQ ID NO: 295
guaggaugcccggaugcaa

SEQ ID NO: 26227 - RNA, 19 nt, Artificial Sequence
  Description of Artificial Sequence: Synthetic oligonucleotide
  Antisense strand to SEQ ID NO: 26226
uugcauccgggcauccuac

SEQ ID NO: 26228 - RNA, 19 nt, Artificial Sequence
  Description of Artificial Sequence: Synthetic oligonucleotide
  Sense strand starting at position 26 of SEQ ID NO: 295
cugggaaaugcauggaacu

SEQ ID NO: 26229 - RNA, 19 nt, Artificial Sequence
  Description of Artificial Sequence: Synthetic oligonucleotide
  Antisense strand to SEQ ID NO: 26228
aguuccaugcauuucccag

SEQ ID NO: 26230 - RNA, 19 nt, Artificial Sequence
  Description of Artificial Sequence: Synthetic oligonucleotide
  Sense strand starting at position 3878 of SEQ ID NO: 296
cagcucuucgucuugcuaa

SEQ ID NO: 26231 - RNA, 19 nt, Artificial Sequence
  Description of Artificial Sequence: Synthetic oligonucleotide
  Antisense strand to SEQ ID NO: 26230
uuagcaagacgaagagcug

SEQ ID NO: 26232 - RNA, 19 nt, Artificial Sequence
  Description of Artificial Sequence: Synthetic oligonucleotide
  Sense strand starting at position 3283 of SEQ ID NO: 296
ggucucugagcucagucaa

SEQ ID NO: 26233 - RNA, 19 nt, Artificial Sequence
  Description of Artificial Sequence: Synthetic oligonucleotide
  Antisense strand to SEQ ID NO: 26232
uugacugagcucagagacc

SEQ ID NO: 26234 - RNA, 19 nt, Artificial Sequence
  Description of Artificial Sequence: Synthetic oligonucleotide
  Sense strand starting at position 3218 of SEQ ID NO: 296
guggaaauuaaguguuaac

SEQ ID NO: 26235 - RNA, 19 nt, Artificial Sequence
  Description of Artificial Sequence: Synthetic oligonucleotide
  Antisense strand to SEQ ID NO: 26234
guuaacacuuaauuuccac

SEQ ID NO: 26236 - RNA, 19 nt, Artificial Sequence
  Description of Artificial Sequence: Synthetic oligonucleotide
  Sense strand starting at position 3217 of SEQ ID NO: 296
gguggaaauuaaguguuaa

SEQ ID NO: 26237 - RNA, 19 nt, Artificial Sequence
  Description of Artificial Sequence: Synthetic oligonucleotide
  Antisense strand to SEQ ID NO: 26236
uuaacacuuaauuuccacc

SEQ ID NO: 26238 - RNA, 19 nt, Artificial Sequence
  Description of Artificial Sequence: Synthetic oligonucleotide
  Sense strand starting at position 3209 of SEQ ID NO: 296
ugcagcuugguggaaauua

SEQ ID NO: 26239 - RNA, 19 nt, Artificial Sequence
  Description of Artificial Sequence: Synthetic oligonucleotide
  Antisense strand to SEQ ID NO: 26238
uaauuuccaccaagcugca

SEQ ID NO: 26240 - RNA, 19 nt, Artificial Sequence
  Description of Artificial Sequence: Synthetic oligonucleotide
  Sense strand starting at position 3175 of SEQ ID NO: 296
gugcuuggagauggaaauu

SEQ ID NO: 26241 - RNA, 19 nt, Artificial Sequence
  Description of Artificial Sequence: Synthetic oligonucleotide
  Antisense strand to SEQ ID NO: 26240
aauuuccaucuccaagcac

SEQ ID NO: 26242 - RNA, 19 nt, Artificial Sequence
  Description of Artificial Sequence: Synthetic oligonucleotide
  Sense strand starting at position 3174 of SEQ ID NO: 296
ugugcuuggagauggaaau

SEQ ID NO: 26243 - RNA, 19 nt, Artificial Sequence
  Description of Artificial Sequence: Synthetic oligonucleotide
  Antisense strand to SEQ ID NO: 26242
auuuccaucuccaagcaca

SEQ ID NO: 26244 - RNA, 19 nt, Artificial Sequence
  Description of Artificial Sequence: Synthetic oligonucleotide
  Sense strand starting at position 3169 of SEQ ID NO: 296
acaucugugcuuggagaug

SEQ ID NO: 26245 - RNA, 19 nt, Artificial Sequence
  Description of Artificial Sequence: Synthetic oligonucleotide
  Antisense strand to SEQ ID NO: 26244
caucuccaagcacagaugu

SEQ ID NO: 26246 - RNA, 19 nt, Artificial Sequence
  Description of Artificial Sequence: Synthetic oligonucleotide
  Sense strand starting at position 3168 of SEQ ID NO: 296
gacaucugugcuuggagau

SEQ ID NO: 26247 - RNA, 19 nt, Artificial Sequence
  Description of Artificial Sequence: Synthetic oligonucleotide
  Antisense strand to SEQ ID NO: 26246
aucuccaagcacagauguc

SEQ ID NO: 26248 - RNA, 19 nt, Artificial Sequence
  Description of Artificial Sequence: Synthetic oligonucleotide
  Sense strand starting at position 3167 of SEQ ID NO: 296
ugacaucugugcuuggaga

SEQ ID NO: 26249 - RNA, 19 nt, Artificial Sequence
  Description of Artificial Sequence: Synthetic oligonucleotide
  Antisense strand to SEQ ID NO: 26248
ucuccaagcacagauguca

SEQ ID NO: 26250 - RNA, 19 nt, Artificial Sequence
  Description of Artificial Sequence: Synthetic oligonucleotide
  Sense strand starting at position 2752 of SEQ ID NO: 296
cuggaaucacgccaaguua

SEQ ID NO: 26251 - RNA, 19 nt, Artificial Sequence
  Description of Artificial Sequence: Synthetic oligonucleotide
  Antisense strand to SEQ ID NO: 26250
uaacuuggcgugauuccag

SEQ ID NO: 26252 - RNA, 19 nt, Artificial Sequence
  Description of Artificial Sequence: Synthetic oligonucleotide
  Sense strand starting at position 2742 of SEQ ID NO: 296
cuucucgauccuggaauca

SEQ ID NO: 26253 - RNA, 19 nt, Artificial Sequence
  Description of Artificial Sequence: Synthetic oligonucleotide
  Antisense strand to SEQ ID NO: 26252
ugauuccaggaucgagaag

SEQ ID NO: 26254 - RNA, 19 nt, Artificial Sequence
  Description of Artificial Sequence: Synthetic oligonucleotide
  Sense strand starting at position 2512 of SEQ ID NO: 296
ggcugugcacguguucauu

SEQ ID NO: 26255 - RNA, 19 nt, Artificial Sequence
  Description of Artificial Sequence: Synthetic oligonucleotide
  Antisense strand to SEQ ID NO: 26254
aaugaacacgugcacagcc

SEQ ID NO: 26256 - RNA, 19 nt, Artificial Sequence
  Description of Artificial Sequence: Synthetic oligonucleotide
  Sense strand starting at position 2418 of SEQ ID NO: 296
uuguaccugcucuacagau

SEQ ID NO: 26257 - RNA, 19 nt, Artificial Sequence
  Description of Artificial Sequence: Synthetic oligonucleotide
  Antisense strand to SEQ ID NO: 26256
aucuguagagcagguacaa

SEQ ID NO: 26258 - RNA, 19 nt, Artificial Sequence
  Description of Artificial Sequence: Synthetic oligonucleotide
  Sense strand starting at position 2364 of SEQ ID NO: 296
uguguugucagucaaggga

SEQ ID NO: 26259 - RNA, 19 nt, Artificial Sequence
  Description of Artificial Sequence: Synthetic oligonucleotide
  Antisense strand to SEQ ID NO: 26258
ucccuugacugacaacaca

SEQ ID NO: 26260 - RNA, 19 nt, Artificial Sequence
  Description of Artificial Sequence: Synthetic oligonucleotide
  Sense strand starting at position 1733 of SEQ ID NO: 296
gucccauaggucugggauu

SEQ ID NO: 26261 - RNA, 19 nt, Artificial Sequence
  Description of Artificial Sequence: Synthetic oligonucleotide
  Antisense strand to SEQ ID NO: 26260
aaucccagaccuaugggac

SEQ ID NO: 26262 - RNA, 19 nt, Artificial Sequence
  Description of Artificial Sequence: Synthetic oligonucleotide
  Sense strand starting at position 1569 of SEQ ID NO: 296
aggugacuugcccaagaua

SEQ ID NO: 26263 - RNA, 19 nt, Artificial Sequence
  Description of Artificial Sequence: Synthetic oligonucleotide
  Antisense strand to SEQ ID NO: 26262
uaucuugggcaagucaccu

SEQ ID NO: 26264 - RNA, 19 nt, Artificial Sequence
  Description of Artificial Sequence: Synthetic oligonucleotide
  Sense strand starting at position 1526 of SEQ ID NO: 296
gaaagauucuguucucugu

SEQ ID NO: 26265 - RNA, 19 nt, Artificial Sequence
  Description of Artificial Sequence: Synthetic oligonucleotide
  Antisense strand to SEQ ID NO: 26264
acagagaacagaaucuuuc

SEQ ID NO: 26266 - RNA, 19 nt, Artificial Sequence
  Description of Artificial Sequence: Synthetic oligonucleotide
  Sense strand starting at position 1524 of SEQ ID NO: 296
cugaaagauucuguucucu

SEQ ID NO: 26267 - RNA, 19 nt, Artificial Sequence
  Description of Artificial Sequence: Synthetic oligonucleotide
  Antisense strand to SEQ ID NO: 26266
agagaacagaaucuuucag

SEQ ID NO: 26268 - RNA, 19 nt, Artificial Sequence
  Description of Artificial Sequence: Synthetic oligonucleotide
  Sense strand starting at position 1514 of SEQ ID NO: 296
cacagcagugcugaaagau

SEQ ID NO: 26269 - RNA, 19 nt, Artificial Sequence
  Description of Artificial Sequence: Synthetic oligonucleotide
  Antisense strand to SEQ ID NO: 26268
aucuuucagcacugcugug

SEQ ID NO: 26270 - RNA, 19 nt, Artificial Sequence
  Description of Artificial Sequence: Synthetic oligonucleotide
  Sense strand starting at position 1497 of SEQ ID NO: 296
cuugaucuccuguaaggca

SEQ ID NO: 26271 - RNA, 19 nt, Artificial Sequence
  Description of Artificial Sequence: Synthetic oligonucleotide
  Antisense strand to SEQ ID NO: 26270
ugccuuacaggagaucaag

SEQ ID NO: 26272 - RNA, 19 nt, Artificial Sequence
  Description of Artificial Sequence: Synthetic oligonucleotide
  Sense strand starting at position 1416 of SEQ ID NO: 296
gagcgacuggcuuauaauc

SEQ ID NO: 26273 - RNA, 19 nt, Artificial Sequence
  Description of Artificial Sequence: Synthetic oligonucleotide
  Antisense strand to SEQ ID NO: 26272
gauuauaagccagucgcuc

SEQ ID NO: 26274 - RNA, 19 nt, Artificial Sequence
  Description of Artificial Sequence: Synthetic oligonucleotide
  Sense strand starting at position 1296 of SEQ ID NO: 296
cugagaacucaucguaacu

SEQ ID NO: 26275 - RNA, 19 nt, Artificial Sequence
  Description of Artificial Sequence: Synthetic oligonucleotide
  Antisense strand to SEQ ID NO: 26274
aguuacgaugaguucucag

SEQ ID NO: 26276 - RNA, 19 nt, Artificial Sequence
  Description of Artificial Sequence: Synthetic oligonucleotide
  Sense strand starting at position 1286 of SEQ ID NO: 296
ucaguacuagcugagaacu

SEQ ID NO: 26277 - RNA, 19 nt, Artificial Sequence
  Description of Artificial Sequence: Synthetic oligonucleotide
  Antisense strand to SEQ ID NO: 26276
aguucucagcuaguacuga

SEQ ID NO: 26278 - RNA, 19 nt, Artificial Sequence
  Description of Artificial Sequence: Synthetic oligonucleotide
  Sense strand starting at position 1205 of SEQ ID NO: 296
aggcgcuuagaagaaauaa

SEQ ID NO: 26279 - RNA, 19 nt, Artificial Sequence
  Description of Artificial Sequence: Synthetic oligonucleotide
  Antisense strand to SEQ ID NO: 26278
uuauuucuucuaagcgccu

SEQ ID NO: 26280 - RNA, 19 nt, Artificial Sequence
  Description of Artificial Sequence: Synthetic oligonucleotide
  Sense strand starting at position 1200 of SEQ ID NO: 296
ggagaaggcgcuuagaaga

SEQ ID NO: 26281 - RNA, 19 nt, Artificial Sequence
  Description of Artificial Sequence: Synthetic oligonucleotide
  Antisense strand to SEQ ID NO: 26280
ucuucuaagcgccuucucc

SEQ ID NO: 26282 - RNA, 19 nt, Artificial Sequence
  Description of Artificial Sequence: Synthetic oligonucleotide
  Sense strand starting at position 928 of SEQ ID NO: 296
uggguuagggcuuacaacu

SEQ ID NO: 26283 - RNA, 19 nt, Artificial Sequence
  Description of Artificial Sequence: Synthetic oligonucleotide
  Antisense strand to SEQ ID NO: 26282
aguuguaagcccuaaccca

SEQ ID NO: 26284 - RNA, 19 nt, Artificial Sequence
  Description of Artificial Sequence: Synthetic oligonucleotide
  Sense strand starting at position 735 of SEQ ID NO: 296
gaaagacuguguuuagagg

SEQ ID NO: 26285 - RNA, 19 nt, Artificial Sequence
  Description of Artificial Sequence: Synthetic oligonucleotide
  Antisense strand to SEQ ID NO: 26284
ccucuaaacacagucuuuc

SEQ ID NO: 26286 - RNA, 19 nt, Artificial Sequence
  Description of Artificial Sequence: Synthetic oligonucleotide
  Sense strand starting at position 733 of SEQ ID NO: 296
uugaaagacuguguuuaga

SEQ ID NO: 26287 - RNA, 19 nt, Artificial Sequence
  Description of Artificial Sequence: Synthetic oligonucleotide
  Antisense strand to SEQ ID NO: 26286
ucuaaacacagucuuucaa

SEQ ID NO: 26288 - RNA, 19 nt, Artificial Sequence
  Description of Artificial Sequence: Synthetic oligonucleotide
  Sense strand starting at position 732 of SEQ ID NO: 296
uuugaaagacuguguuuag

SEQ ID NO: 26289 - RNA, 19 nt, Artificial Sequence
  Description of Artificial Sequence: Synthetic oligonucleotide
  Antisense strand to SEQ ID NO: 26288
cuaaacacagucuuucaaa

SEQ ID NO: 26290 - RNA, 19 nt, Artificial Sequence
  Description of Artificial Sequence: Synthetic oligonucleotide
  Sense strand starting at position 676 of SEQ ID NO: 296
uccugagugguugaacaga

SEQ ID NO: 26291 - RNA, 19 nt, Artificial Sequence
  Description of Artificial Sequence: Synthetic oligonucleotide
  Antisense strand to SEQ ID NO: 26290
ucuguucaaccacucagga

SEQ ID NO: 26292 - RNA, 19 nt, Artificial Sequence
  Description of Artificial Sequence: Synthetic oligonucleotide
  Sense strand starting at position 674 of SEQ ID NO: 296
auuccugagugguugaaca

SEQ ID NO: 26293 - RNA, 19 nt, Artificial Sequence
  Description of Artificial Sequence: Synthetic oligonucleotide
  Antisense strand to SEQ ID NO: 26292
uguucaaccacucaggaau

SEQ ID NO: 26294 - RNA, 19 nt, Artificial Sequence
  Description of Artificial Sequence: Synthetic oligonucleotide
  Sense strand starting at position 671 of SEQ ID NO: 296
agaauuccugagugguuga

SEQ ID NO: 26295 - RNA, 19 nt, Artificial Sequence
  Description of Artificial Sequence: Synthetic oligonucleotide
  Antisense strand to SEQ ID NO: 26294
ucaaccacucaggaauucu

SEQ ID NO: 26296 - RNA, 19 nt, Artificial Sequence
  Description of Artificial Sequence: Synthetic oligonucleotide
  Sense strand starting at position 670 of SEQ ID NO: 296
aagaauuccugagugguug

SEQ ID NO: 26297 - RNA, 19 nt, Artificial Sequence
  Description of Artificial Sequence: Synthetic oligonucleotide
  Antisense strand to SEQ ID NO: 26296
caaccacucaggaauucuu

SEQ ID NO: 26298 - RNA, 19 nt, Artificial Sequence
  Description of Artificial Sequence: Synthetic oligonucleotide
  Sense strand starting at position 668 of SEQ ID NO: 296
ccaagaauuccugaguggu

SEQ ID NO: 26299 - RNA, 19 nt, Artificial Sequence
  Description of Artificial Sequence: Synthetic oligonucleotide
  Antisense strand to SEQ ID NO: 26298
accacucaggaauucuugg

SEQ ID NO: 26300 - RNA, 19 nt, Artificial Sequence
  Description of Artificial Sequence: Synthetic oligonucleotide
  Sense strand starting at position 476 of SEQ ID NO: 296
cugcuucuuagcuaaggga

SEQ ID NO: 26301 - RNA, 19 nt, Artificial Sequence
  Description of Artificial Sequence: Synthetic oligonucleotide
  Antisense strand to SEQ ID NO: 26300
ucccuuagcuaagaagcag

SEQ ID NO: 26302 - RNA, 19 nt, Artificial Sequence
  Description of Artificial Sequence: Synthetic oligonucleotide
  Sense strand starting at position 376 of SEQ ID NO: 296
cgaugauugcugcucuugu

SEQ ID NO: 26303 - RNA, 19 nt, Artificial Sequence
  Description of Artificial Sequence: Synthetic oligonucleotide
  Antisense strand to SEQ ID NO: 26302
acaagagcagcaaucaucg

SEQ ID NO: 26304 - RNA, 19 nt, Artificial Sequence
  Description of Artificial Sequence: Synthetic oligonucleotide
  Sense strand starting at position 224 of SEQ ID NO: 296
acucaauguuauguuaaga

SEQ ID NO: 26305 - RNA, 19 nt, Artificial Sequence
  Description of Artificial Sequence: Synthetic oligonucleotide
  Antisense strand to SEQ ID NO: 26304
ucuuaacauaacauugagu

SEQ ID NO: 26306 - RNA, 19 nt, Artificial Sequence
  Description of Artificial Sequence: Synthetic oligonucleotide
  Sense strand starting at position 150 of SEQ ID NO: 296
gggcaagcaccuugauaaa

SEQ ID NO: 26307 - RNA, 19 nt, Artificial Sequence
  Description of Artificial Sequence: Synthetic oligonucleotide
  Antisense strand to SEQ ID NO: 26306
uuuaucaaggugcuugccc

SEQ ID NO: 26308 - RNA, 19 nt, Artificial Sequence
  Description of Artificial Sequence: Synthetic oligonucleotide
  Sense strand starting at position 15 of SEQ ID NO: 296
uaauaaguuggguacguau

SEQ ID NO: 26309 - RNA, 19 nt, Artificial Sequence
  Description of Artificial Sequence: Synthetic oligonucleotide
  Antisense strand to SEQ ID NO: 26308
auacguacccaacuuauua

SEQ ID NO: 26310 - RNA, 19 nt, Artificial Sequence
  Description of Artificial Sequence: Synthetic oligonucleotide
  Sense strand starting at position 3870 of SEQ ID NO: 297
guguguucugggugagcga

SEQ ID NO: 26311 - RNA, 19 nt, Artificial Sequence
  Description of Artificial Sequence: Synthetic oligonucleotide
  Antisense strand to SEQ ID NO: 26310
ucgcucacccagaacacac

SEQ ID NO: 26312 - RNA, 19 nt, Artificial Sequence
  Description of Artificial Sequence: Synthetic oligonucleotide
  Sense strand starting at position 3820 of SEQ ID NO: 297
acguuagguucccgaagac

SEQ ID NO: 26313 - RNA, 19 nt, Artificial Sequence
  Description of Artificial Sequence: Synthetic oligonucleotide
  Antisense strand to SEQ ID NO: 26312
gucuucgggaaccuaacgu

SEQ ID NO: 26314 - RNA, 19 nt, Artificial Sequence
  Description of Artificial Sequence: Synthetic oligonucleotide
  Sense strand starting at position 3819 of SEQ ID NO: 297
cacguuagguucccgaaga

SEQ ID NO: 26315 - RNA, 19 nt, Artificial Sequence
  Description of Artificial Sequence: Synthetic oligonucleotide
  Antisense strand to SEQ ID NO: 26314
ucuucgggaaccuaacgug

SEQ ID NO: 26316 - RNA, 19 nt, Artificial Sequence
  Description of Artificial Sequence: Synthetic oligonucleotide
  Sense strand starting at position 3795 of SEQ ID NO: 297
caucaauggccguggaaug

SEQ ID NO: 26317 - RNA, 19 nt, Artificial Sequence
  Description of Artificial Sequence: Synthetic oligonucleotide
  Antisense strand to SEQ ID NO: 26316
cauuccacggccauugaug

SEQ ID NO: 26318 - RNA, 19 nt, Artificial Sequence
  Description of Artificial Sequence: Synthetic oligonucleotide
  Sense strand starting at position 3099 of SEQ ID NO: 297
gcacaacacacgugugaug

SEQ ID NO: 26319 - RNA, 19 nt, Artificial Sequence
  Description of Artificial Sequence: Synthetic oligonucleotide
  Antisense strand to SEQ ID NO: 26318
caucacacguguguugugc

SEQ ID NO: 26320 - RNA, 19 nt, Artificial Sequence
  Description of Artificial Sequence: Synthetic oligonucleotide
  Sense strand starting at position 2959 of SEQ ID NO: 297
augagauucuagggaugaa

SEQ ID NO: 26321 - RNA, 19 nt, Artificial Sequence
  Description of Artificial Sequence: Synthetic oligonucleotide
  Antisense strand to SEQ ID NO: 26320
uucaucccuagaaucucau

SEQ ID NO: 26322 - RNA, 19 nt, Artificial Sequence
  Description of Artificial Sequence: Synthetic oligonucleotide
  Sense strand starting at position 2523 of SEQ ID NO: 297
agccuuguucuagaaacuu

SEQ ID NO: 26323 - RNA, 19 nt, Artificial Sequence
  Description of Artificial Sequence: Synthetic oligonucleotide
  Antisense strand to SEQ ID NO: 26322
aaguuucuagaacaaggcu

SEQ ID NO: 26324 - RNA, 19 nt, Artificial Sequence
  Description of Artificial Sequence: Synthetic oligonucleotide
  Sense strand starting at position 2518 of SEQ ID NO: 297
uugcaagccuuguucuaga

SEQ ID NO: 26325 - RNA, 19 nt, Artificial Sequence
  Description of Artificial Sequence: Synthetic oligonucleotide
  Antisense strand to SEQ ID NO: 26324
ucuagaacaaggcuugcaa

SEQ ID NO: 26326 - RNA, 19 nt, Artificial Sequence
  Description of Artificial Sequence: Synthetic oligonucleotide
  Sense strand starting at position 2516 of SEQ ID NO: 297
aguugcaagccuuguucua

SEQ ID NO: 26327 - RNA, 19 nt, Artificial Sequence
  Description of Artificial Sequence: Synthetic oligonucleotide
  Antisense strand to SEQ ID NO: 26326
uagaacaaggcuugcaacu

SEQ ID NO: 26328 - RNA, 19 nt, Artificial Sequence
  Description of Artificial Sequence: Synthetic oligonucleotide
  Sense strand starting at position 2317 of SEQ ID NO: 297
auuugcuuugccugagacu

SEQ ID NO: 26329 - RNA, 19 nt, Artificial Sequence
  Description of Artificial Sequence: Synthetic oligonucleotide
  Antisense strand to SEQ ID NO: 26328
agucucaggcaaagcaaau

SEQ ID NO: 26330 - RNA, 19 nt, Artificial Sequence
  Description of Artificial Sequence: Synthetic oligonucleotide
  Sense strand starting at position 2315 of SEQ ID NO: 297
gcauuugcuuugccugaga

SEQ ID NO: 26331 - RNA, 19 nt, Artificial Sequence
  Description of Artificial Sequence: Synthetic oligonucleotide
  Antisense strand to SEQ ID NO: 26330
ucucaggcaaagcaaaugc

SEQ ID NO: 26332 - RNA, 19 nt, Artificial Sequence
  Description of Artificial Sequence: Synthetic oligonucleotide
  Sense strand starting at position 2166 of SEQ ID NO: 297
caguguccgaaaugaggaa

SEQ ID NO: 26333 - RNA, 19 nt, Artificial Sequence
  Description of Artificial Sequence: Synthetic oligonucleotide
  Antisense strand to SEQ ID NO: 26332
uuccucauuucggacacug

SEQ ID NO: 26334 - RNA, 19 nt, Artificial Sequence
  Description of Artificial Sequence: Synthetic oligonucleotide
  Sense strand starting at position 2162 of SEQ ID NO: 297
cagucaguguccgaaauga

SEQ ID NO: 26335 - RNA, 19 nt, Artificial Sequence
  Description of Artificial Sequence: Synthetic oligonucleotide
  Antisense strand to SEQ ID NO: 26334
ucauuucggacacugacug

SEQ ID NO: 26336 - RNA, 19 nt, Artificial Sequence
  Description of Artificial Sequence: Synthetic oligonucleotide
  Sense strand starting at position 2161 of SEQ ID NO: 297
gcagucaguguccgaaaug

SEQ ID NO: 26337 - RNA, 19 nt, Artificial Sequence
  Description of Artificial Sequence: Synthetic oligonucleotide
  Antisense strand to SEQ ID NO: 26336
cauuucggacacugacugc

SEQ ID NO: 26338 - RNA, 19 nt, Artificial Sequence
  Description of Artificial Sequence: Synthetic oligonucleotide
  Sense strand starting at position 2160 of SEQ ID NO: 297
ggcagucaguguccgaaau

SEQ ID NO: 26339 - RNA, 19 nt, Artificial Sequence
  Description of Artificial Sequence: Synthetic oligonucleotide
  Antisense strand to SEQ ID NO: 26338
auuucggacacugacugcc

SEQ ID NO: 26340 - RNA, 19 nt, Artificial Sequence
  Description of Artificial Sequence: Synthetic oligonucleotide
  Sense strand starting at position 1986 of SEQ ID NO: 297
cggugucugaguggucaga

SEQ ID NO: 26341 - RNA, 19 nt, Artificial Sequence
  Description of Artificial Sequence: Synthetic oligonucleotide
  Antisense strand to SEQ ID NO: 26340
ucugaccacucagacaccg

SEQ ID NO: 26342 - RNA, 19 nt, Artificial Sequence
  Description of Artificial Sequence: Synthetic oligonucleotide
  Sense strand starting at position 1101 of SEQ ID NO: 297
agaagacuuucccugcacu

SEQ ID NO: 26343 - RNA, 19 nt, Artificial Sequence
  Description of Artificial Sequence: Synthetic oligonucleotide
  Antisense strand to SEQ ID NO: 26342
agugcagggaaagucuucu

SEQ ID NO: 26344 - RNA, 19 nt, Artificial Sequence
  Description of Artificial Sequence: Synthetic oligonucleotide
  Sense strand starting at position 1036 of SEQ ID NO: 297
agucgugcauuggauauau

SEQ ID NO: 26345 - RNA, 19 nt, Artificial Sequence
  Description of Artificial Sequence: Synthetic oligonucleotide
  Antisense strand to SEQ ID NO: 26344
auauauccaaugcacgacu

SEQ ID NO: 26346 - RNA, 19 nt, Artificial Sequence
  Description of Artificial Sequence: Synthetic oligonucleotide
  Sense strand starting at position 1034 of SEQ ID NO: 297
gcagucgugcauuggauau

SEQ ID NO: 26347 - RNA, 19 nt, Artificial Sequence
  Description of Artificial Sequence: Synthetic oligonucleotide
  Antisense strand to SEQ ID NO: 26346
auauccaaugcacgacugc

SEQ ID NO: 26348 - RNA, 19 nt, Artificial Sequence
  Description of Artificial Sequence: Synthetic oligonucleotide
  Sense strand starting at position 804 of SEQ ID NO: 297
gagcauggauaucugauaa

SEQ ID NO: 26349 - RNA, 19 nt, Artificial Sequence
  Description of Artificial Sequence: Synthetic oligonucleotide
  Antisense strand to SEQ ID NO: 26348
uuaucagauauccaugcuc

SEQ ID NO: 26350 - RNA, 19 nt, Artificial Sequence
  Description of Artificial Sequence: Synthetic oligonucleotide
  Sense strand starting at position 798 of SEQ ID NO: 297
ggaggugagcauggauauc

SEQ ID NO: 26351 - RNA, 19 nt, Artificial Sequence
  Description of Artificial Sequence: Synthetic oligonucleotide
  Antisense strand to SEQ ID NO: 26350
gauauccaugcucaccucc

SEQ ID NO: 26352 - RNA, 19 nt, Artificial Sequence
  Description of Artificial Sequence: Synthetic oligonucleotide
  Sense strand starting at position 692 of SEQ ID NO: 297
cuucucuuaugccaaggau

SEQ ID NO: 26353 - RNA, 19 nt, Artificial Sequence
  Description of Artificial Sequence: Synthetic oligonucleotide
  Antisense strand to SEQ ID NO: 26352
auccuuggcauaagagaag

SEQ ID NO: 26354 - RNA, 19 nt, Artificial Sequence
  Description of Artificial Sequence: Synthetic oligonucleotide
  Sense strand starting at position 439 of SEQ ID NO: 297
cuggaauguuggugccauu

SEQ ID NO: 26355 - RNA, 19 nt, Artificial Sequence
  Description of Artificial Sequence: Synthetic oligonucleotide
  Antisense strand to SEQ ID NO: 26354
aauggcaccaacauuccag

SEQ ID NO: 26356 - RNA, 19 nt, Artificial Sequence
  Description of Artificial Sequence: Synthetic oligonucleotide
  Sense strand starting at position 430 of SEQ ID NO: 297
gaauuccuucuggaauguu

SEQ ID NO: 26357 - RNA, 19 nt, Artificial Sequence
  Description of Artificial Sequence: Synthetic oligonucleotide
  Antisense strand to SEQ ID NO: 26356
aacauuccagaaggaauuc

SEQ ID NO: 26358 - RNA, 19 nt, Artificial Sequence
  Description of Artificial Sequence: Synthetic oligonucleotide
  Sense strand starting at position 429 of SEQ ID NO: 297
agaauuccuucuggaaugu

SEQ ID NO: 26359 - RNA, 19 nt, Artificial Sequence
  Description of Artificial Sequence: Synthetic oligonucleotide
  Antisense strand to SEQ ID NO: 26358
acauuccagaaggaauucu

SEQ ID NO: 26360 - RNA, 19 nt, Artificial Sequence
  Description of Artificial Sequence: Synthetic oligonucleotide
  Sense strand starting at position 428 of SEQ ID NO: 297
gagaauuccuucuggaaug

SEQ ID NO: 26361 - RNA, 19 nt, Artificial Sequence
  Description of Artificial Sequence: Synthetic oligonucleotide
  Antisense strand to SEQ ID NO: 26360
cauuccagaaggaauucuc

SEQ ID NO: 26362 - RNA, 19 nt, Artificial Sequence
  Description of Artificial Sequence: Synthetic oligonucleotide
  Sense strand starting at position 393 of SEQ ID NO: 297
gagcuuugagcucacccua

SEQ ID NO: 26363 - RNA, 19 nt, Artificial Sequence
  Description of Artificial Sequence: Synthetic oligonucleotide
  Antisense strand to SEQ ID NO: 26362
uagggugagcucaaagcuc

SEQ ID NO: 26364 - RNA, 19 nt, Artificial Sequence
  Description of Artificial Sequence: Synthetic oligonucleotide
  Sense strand starting at position 169 of SEQ ID NO: 297
guugcucaaucucucugaa

SEQ ID NO: 26365 - RNA, 19 nt, Artificial Sequence
  Description of Artificial Sequence: Synthetic oligonucleotide
  Antisense strand to SEQ ID NO: 26364
uucagagagauugagcaac

SEQ ID NO: 26366 - RNA, 19 nt, Artificial Sequence
  Description of Artificial Sequence: Synthetic oligonucleotide
  Sense strand starting at position 163 of SEQ ID NO: 297
ggacaaguugcucaaucuc

SEQ ID NO: 26367 - RNA, 19 nt, Artificial Sequence
  Description of Artificial Sequence: Synthetic oligonucleotide
  Antisense strand to SEQ ID NO: 26366
gagauugagcaacuugucc

SEQ ID NO: 26368 - RNA, 19 nt, Artificial Sequence
  Description of Artificial Sequence: Synthetic oligonucleotide
  Sense strand starting at position 162 of SEQ ID NO: 297
uggacaaguugcucaaucu

SEQ ID NO: 26369 - RNA, 19 nt, Artificial Sequence
  Description of Artificial Sequence: Synthetic oligonucleotide
  Antisense strand to SEQ ID NO: 26368
agauugagcaacuugucca

SEQ ID NO: 26370 - RNA, 19 nt, Artificial Sequence
  Description of Artificial Sequence: Synthetic oligonucleotide
  Sense strand starting at position 140 of SEQ ID NO: 297
acaggaucccacuguguga

SEQ ID NO: 26371 - RNA, 19 nt, Artificial Sequence
  Description of Artificial Sequence: Synthetic oligonucleotide
  Antisense strand to SEQ ID NO: 26370
ucacacagugggauccugu

SEQ ID NO: 26372 - RNA, 19 nt, Artificial Sequence
  Description of Artificial Sequence: Synthetic oligonucleotide
  Sense strand starting at position 21 of SEQ ID NO: 297
gucucauccuucgugaugu

SEQ ID NO: 26373 - RNA, 19 nt, Artificial Sequence
  Description of Artificial Sequence: Synthetic oligonucleotide
  Antisense strand to SEQ ID NO: 26372
acaucacgaaggaugagac

SEQ ID NO: 26374 - RNA, 19 nt, Artificial Sequence
  Description of Artificial Sequence: Synthetic oligonucleotide
  Sense strand starting at position 20 of SEQ ID NO: 297
cgucucauccuucgugaug

SEQ ID NO: 26375 - RNA, 19 nt, Artificial Sequence
  Description of Artificial Sequence: Synthetic oligonucleotide
  Antisense strand to SEQ ID NO: 26374
caucacgaaggaugagacg

SEQ ID NO: 26376 - RNA, 19 nt, Artificial Sequence
  Description of Artificial Sequence: Synthetic oligonucleotide
  Sense strand starting at position 19 of SEQ ID NO: 297
gcgucucauccuucgugau

SEQ ID NO: 26377 - RNA, 19 nt, Artificial Sequence
  Description of Artificial Sequence: Synthetic oligonucleotide
  Antisense strand to SEQ ID NO: 26376
aucacgaaggaugagacgc

SEQ ID NO: 26378 - RNA, 19 nt, Artificial Sequence
  Description of Artificial Sequence: Synthetic oligonucleotide
  Sense strand starting at position 536 of SEQ ID NO: 298
agaggagucagaggugagu

SEQ ID NO: 26379 - RNA, 19 nt, Artificial Sequence
  Description of Artificial Sequence: Synthetic oligonucleotide
  Antisense strand to SEQ ID NO: 26378
acucaccucugacuccucu

SEQ ID NO: 26380 - RNA, 19 nt, Artificial Sequence
  Description of Artificial Sequence: Synthetic oligonucleotide
  Sense strand starting at position 743 of SEQ ID NO: 298
ucccacugguacuaaagau

SEQ ID NO: 26381 - RNA, 19 nt, Artificial Sequence
  Description of Artificial Sequence: Synthetic oligonucleotide
  Antisense strand to SEQ ID NO: 26380
aucuuuaguaccaguggga

SEQ ID NO: 26382 - RNA, 19 nt, Artificial Sequence
  Description of Artificial Sequence: Synthetic oligonucleotide
  Sense strand starting at position 813 of SEQ ID NO: 298
aggguacuauuaggacaaa

SEQ ID NO: 26383 - RNA, 19 nt, Artificial Sequence
  Description of Artificial Sequence: Synthetic oligonucleotide
  Antisense strand to SEQ ID NO: 26382
uuuguccuaauaguacccu

SEQ ID NO: 26384 - RNA, 19 nt, Artificial Sequence
  Description of Artificial Sequence: Synthetic oligonucleotide
  Sense strand starting at position 814 of SEQ ID NO: 298
ggguacuauuaggacaaau

SEQ ID NO: 26385 - RNA, 19 nt, Artificial Sequence
  Description of Artificial Sequence: Synthetic oligonucleotide
  Antisense strand to SEQ ID NO: 26384
auuuguccuaauaguaccc

SEQ ID NO: 26386 - RNA, 19 nt, Artificial Sequence
  Description of Artificial Sequence: Synthetic oligonucleotide
  Sense strand starting at position 834 of SEQ ID NO: 298
ggauaauaaccgcauuaua

SEQ ID NO: 26387 - RNA, 19 nt, Artificial Sequence
  Description of Artificial Sequence: Synthetic oligonucleotide
  Antisense strand to SEQ ID NO: 26386
uauaaugcgguuauuaucc

SEQ ID NO: 26388 - RNA, 19 nt, Artificial Sequence
  Description of Artificial Sequence: Synthetic oligonucleotide
  Sense strand starting at position 1531 of SEQ ID NO: 298
gccucaggcccugaaacuu

SEQ ID NO: 26389 - RNA, 19 nt, Artificial Sequence
  Description of Artificial Sequence: Synthetic oligonucleotide
  Antisense strand to SEQ ID NO: 26388
aaguuucagggccugaggc

SEQ ID NO: 26390 - RNA, 19 nt, Artificial Sequence
  Description of Artificial Sequence: Synthetic oligonucleotide
  Sense strand starting at position 1592 of SEQ ID NO: 298
cagcgcaguccuuauggga

SEQ ID NO: 26391 - RNA, 19 nt, Artificial Sequence
  Description of Artificial Sequence: Synthetic oligonucleotide
  Antisense strand to SEQ ID NO: 26390
ucccauaaggacugcgcug

SEQ ID NO: 26392 - RNA, 19 nt, Artificial Sequence
  Description of Artificial Sequence: Synthetic oligonucleotide
  Sense strand starting at position 1874 of SEQ ID NO: 298
ugaaguccaucuucuguaa

SEQ ID NO: 26393 - RNA, 19 nt, Artificial Sequence
  Description of Artificial Sequence: Synthetic oligonucleotide
  Antisense strand to SEQ ID NO: 26392
uuacagaagauggacuuca

SEQ ID NO: 26394 - RNA, 19 nt, Artificial Sequence
  Description of Artificial Sequence: Synthetic oligonucleotide
  Sense strand starting at position 1967 of SEQ ID NO: 298
gugacuugcagugaucagu

SEQ ID NO: 26395 - RNA, 19 nt, Artificial Sequence
  Description of Artificial Sequence: Synthetic oligonucleotide
  Antisense strand to SEQ ID NO: 26394
acugaucacugcaagucac

SEQ ID NO: 26396 - RNA, 19 nt, Artificial Sequence
  Description of Artificial Sequence: Synthetic oligonucleotide
  Sense strand starting at position 1976 of SEQ ID NO: 298
agugaucaguugucugcau

SEQ ID NO: 26397 - RNA, 19 nt, Artificial Sequence
  Description of Artificial Sequence: Synthetic oligonucleotide
  Antisense strand to SEQ ID NO: 26396
augcagacaacugaucacu

SEQ ID NO: 26398 - RNA, 19 nt, Artificial Sequence
  Description of Artificial Sequence: Synthetic oligonucleotide
  Sense strand starting at position 1978 of SEQ ID NO: 298
ugaucaguugucugcauua

SEQ ID NO: 26399 - RNA, 19 nt, Artificial Sequence
  Description of Artificial Sequence: Synthetic oligonucleotide
  Antisense strand to SEQ ID NO: 26398
uaaugcagacaacugauca

SEQ ID NO: 26400 - RNA, 19 nt, Artificial Sequence
  Description of Artificial Sequence: Synthetic oligonucleotide
  Sense strand starting at position 1980 of SEQ ID NO: 298
aucaguugucugcauuauu

SEQ ID NO: 26401 - RNA, 19 nt, Artificial Sequence
  Description of Artificial Sequence: Synthetic oligonucleotide
  Antisense strand to SEQ ID NO: 26400
aauaaugcagacaacugau

SEQ ID NO: 26402 - RNA, 19 nt, Artificial Sequence
  Description of Artificial Sequence: Synthetic oligonucleotide
  Sense strand starting at position 1991 of SEQ ID NO: 298
gcauuauucuggcuaauag

SEQ ID NO: 26403 - RNA, 19 nt, Artificial Sequence
  Description of Artificial Sequence: Synthetic oligonucleotide
  Antisense strand to SEQ ID NO: 26402
cuauuagccagaauaaugc

SEQ ID NO: 26404 - RNA, 19 nt, Artificial Sequence
  Description of Artificial Sequence: Synthetic oligonucleotide
  Sense strand starting at position 2001 of SEQ ID NO: 298
ggcuaauaguucucugaau

SEQ ID NO: 26405 - RNA, 19 nt, Artificial Sequence
  Description of Artificial Sequence: Synthetic oligonucleotide
  Antisense strand to SEQ ID NO: 26404
auucagagaacuauuagcc

SEQ ID NO: 26406 - RNA, 19 nt, Artificial Sequence
  Description of Artificial Sequence: Synthetic oligonucleotide
  Sense strand starting at position 2002 of SEQ ID NO: 298
gcuaauaguucucugaauu

SEQ ID NO: 26407 - RNA, 19 nt, Artificial Sequence
  Description of Artificial Sequence: Synthetic oligonucleotide
  Antisense strand to SEQ ID NO: 26406
aauucagagaacuauuagc

SEQ ID NO: 26408 - RNA, 19 nt, Artificial Sequence
  Description of Artificial Sequence: Synthetic oligonucleotide
  Sense strand starting at position 2016 of SEQ ID NO: 298
gaauuauuguggcuaaagg

SEQ ID NO: 26409 - RNA, 19 nt, Artificial Sequence
  Description of Artificial Sequence: Synthetic oligonucleotide
  Antisense strand to SEQ ID NO: 26408
ccuuuagccacaauaauuc

SEQ ID NO: 26410 - RNA, 19 nt, Artificial Sequence
  Description of Artificial Sequence: Synthetic oligonucleotide
  Sense strand starting at position 2118 of SEQ ID NO: 298
guccuccaucccugacaga

SEQ ID NO: 26411 - RNA, 19 nt, Artificial Sequence
  Description of Artificial Sequence: Synthetic oligonucleotide
  Antisense strand to SEQ ID NO: 26410
ucugucagggauggaggac

SEQ ID NO: 26412 - RNA, 19 nt, Artificial Sequence
  Description of Artificial Sequence: Synthetic oligonucleotide
  Sense strand starting at position 2378 of SEQ ID NO: 298
cccucuauuuaugugguua

SEQ ID NO: 26413 - RNA, 19 nt, Artificial Sequence
  Description of Artificial Sequence: Synthetic oligonucleotide
  Antisense strand to SEQ ID NO: 26412
uaaccacauaaauagaggg

SEQ ID NO: 26414 - RNA, 19 nt, Artificial Sequence
  Description of Artificial Sequence: Synthetic oligonucleotide
  Sense strand starting at position 2380 of SEQ ID NO: 298
cucuauuuaugugguuauu

SEQ ID NO: 26415 - RNA, 19 nt, Artificial Sequence
  Description of Artificial Sequence: Synthetic oligonucleotide
  Antisense strand to SEQ ID NO: 26414
aauaaccacauaaauagag

SEQ ID NO: 26416 - RNA, 19 nt, Artificial Sequence
  Description of Artificial Sequence: Synthetic oligonucleotide
  Sense strand starting at position 2462 of SEQ ID NO: 298
guacucagucaggauguau

SEQ ID NO: 26417 - RNA, 19 nt, Artificial Sequence
  Description of Artificial Sequence: Synthetic oligonucleotide
  Antisense strand to SEQ ID NO: 26416
auacauccugacugaguac

SEQ ID NO: 26418 - RNA, 19 nt, Artificial Sequence
  Description of Artificial Sequence: Synthetic oligonucleotide
  Sense strand starting at position 2471 of SEQ ID NO: 298
caggauguauuugaugagu

SEQ ID NO: 26419 - RNA, 19 nt, Artificial Sequence
  Description of Artificial Sequence: Synthetic oligonucleotide
  Antisense strand to SEQ ID NO: 26418
acucaucaaauacauccug

SEQ ID NO: 26420 - RNA, 19 nt, Artificial Sequence
  Description of Artificial Sequence: Synthetic oligonucleotide
  Sense strand starting at position 2473 of SEQ ID NO: 298
ggauguauuugaugaguga

SEQ ID NO: 26421 - RNA, 19 nt, Artificial Sequence
  Description of Artificial Sequence: Synthetic oligonucleotide
  Antisense strand to SEQ ID NO: 26420
ucacucaucaaauacaucc

SEQ ID NO: 26422 - RNA, 19 nt, Artificial Sequence
  Description of Artificial Sequence: Synthetic oligonucleotide
  Sense strand starting at position 2582 of SEQ ID NO: 298
agaauagagagcugucuaa

SEQ ID NO: 26423 - RNA, 19 nt, Artificial Sequence
  Description of Artificial Sequence: Synthetic oligonucleotide
  Antisense strand to SEQ ID NO: 26422
uuagacagcucucuauucu

SEQ ID NO: 26424 - RNA, 19 nt, Artificial Sequence
  Description of Artificial Sequence: Synthetic oligonucleotide
  Sense strand starting at position 2698 of SEQ ID NO: 298
gucaucuaauacuugaaga

SEQ ID NO: 26425 - RNA, 19 nt, Artificial Sequence
  Description of Artificial Sequence: Synthetic oligonucleotide
  Antisense strand to SEQ ID NO: 26424
ucuucaaguauuagaugac

SEQ ID NO: 26426 - RNA, 19 nt, Artificial Sequence
  Description of Artificial Sequence: Synthetic oligonucleotide
  Sense strand starting at position 2832 of SEQ ID NO: 298
cuuggagugcugcaguauu

SEQ ID NO: 26427 - RNA, 19 nt, Artificial Sequence
  Description of Artificial Sequence: Synthetic oligonucleotide
  Antisense strand to SEQ ID NO: 26426
aauacugcagcacuccaag

SEQ ID NO: 26428 - RNA, 19 nt, Artificial Sequence
  Description of Artificial Sequence: Synthetic oligonucleotide
  Sense strand starting at position 2852 of SEQ ID NO: 298
auugcuuugucaucaguca

SEQ ID NO: 26429 - RNA, 19 nt, Artificial Sequence
  Description of Artificial Sequence: Synthetic oligonucleotide
  Antisense strand to SEQ ID NO: 26428
ugacugaugacaaagcaau

SEQ ID NO: 26430 - RNA, 19 nt, Artificial Sequence
  Description of Artificial Sequence: Synthetic oligonucleotide
  Sense strand starting at position 2906 of SEQ ID NO: 298
cugugugaccucuagcaug

SEQ ID NO: 26431 - RNA, 19 nt, Artificial Sequence
  Description of Artificial Sequence: Synthetic oligonucleotide
  Antisense strand to SEQ ID NO: 26430
caugcuagaggucacacag

SEQ ID NO: 26432 - RNA, 19 nt, Artificial Sequence
  Description of Artificial Sequence: Synthetic oligonucleotide
  Sense strand starting at position 2911 of SEQ ID NO: 298
ugaccucuagcauguaacu

SEQ ID NO: 26433 - RNA, 19 nt, Artificial Sequence
  Description of Artificial Sequence: Synthetic oligonucleotide
  Antisense strand to SEQ ID NO: 26432
aguuacaugcuagagguca

SEQ ID NO: 26434 - RNA, 19 nt, Artificial Sequence
  Description of Artificial Sequence: Synthetic oligonucleotide
  Sense strand starting at position 2984 of SEQ ID NO: 298
cagaguugguaugaggauu

SEQ ID NO: 26435 - RNA, 19 nt, Artificial Sequence
  Description of Artificial Sequence: Synthetic oligonucleotide
  Antisense strand to SEQ ID NO: 26434
aauccucauaccaacucug

SEQ ID NO: 26436 - RNA, 19 nt, Artificial Sequence
  Description of Artificial Sequence: Synthetic oligonucleotide
  Sense strand starting at position 3097 of SEQ ID NO: 298
ugacuuccauaauaagaag

SEQ ID NO: 26437 - RNA, 19 nt, Artificial Sequence
  Description of Artificial Sequence: Synthetic oligonucleotide
  Antisense strand to SEQ ID NO: 26436
cuucuuauuauggaaguca

SEQ ID NO: 26438 - RNA, 19 nt, Artificial Sequence
  Description of Artificial Sequence: Synthetic oligonucleotide
  Sense strand starting at position 3174 of SEQ ID NO: 298
uucucuuuaggcuagucaa

SEQ ID NO: 26439 - RNA, 19 nt, Artificial Sequence
  Description of Artificial Sequence: Synthetic oligonucleotide
  Antisense strand to SEQ ID NO: 26438
uugacuagccuaaagagaa

SEQ ID NO: 26440 - RNA, 19 nt, Artificial Sequence
  Description of Artificial Sequence: Synthetic oligonucleotide
  Sense strand starting at position 3491 of SEQ ID NO: 298
ggaaauaguuuauugucau

SEQ ID NO: 26441 - RNA, 19 nt, Artificial Sequence
  Description of Artificial Sequence: Synthetic oligonucleotide
  Antisense strand to SEQ ID NO: 26440
augacaauaaacuauuucc

SEQ ID NO: 26442 - RNA, 19 nt, Artificial Sequence
  Description of Artificial Sequence: Synthetic oligonucleotide
  Sense strand starting at position 3519 of SEQ ID NO: 298
ggcuauggccuccauuaca

SEQ ID NO: 26443 - RNA, 19 nt, Artificial Sequence
  Description of Artificial Sequence: Synthetic oligonucleotide
  Antisense strand to SEQ ID NO: 26442
uguaauggaggccauagcc

SEQ ID NO: 26444 - RNA, 19 nt, Artificial Sequence
  Description of Artificial Sequence: Synthetic oligonucleotide
  Sense strand starting at position 3619 of SEQ ID NO: 298
uuaggaagcauguggucua

SEQ ID NO: 26445 - RNA, 19 nt, Artificial Sequence
  Description of Artificial Sequence: Synthetic oligonucleotide
  Antisense strand to SEQ ID NO: 26444
uagaccacaugcuuccuaa

SEQ ID NO: 26446 - RNA, 19 nt, Artificial Sequence
  Description of Artificial Sequence: Synthetic oligonucleotide
  Sense strand starting at position 3622 of SEQ ID NO: 298
ggaagcauguggucuaggu

SEQ ID NO: 26447 - RNA, 19 nt, Artificial Sequence
  Description of Artificial Sequence: Synthetic oligonucleotide
  Antisense strand to SEQ ID NO: 26446
accuagaccacaugcuucc

SEQ ID NO: 26448 - RNA, 19 nt, Artificial Sequence
  Description of Artificial Sequence: Synthetic oligonucleotide
  Sense strand starting at position 3626 of SEQ ID NO: 298
gcauguggucuagguacua

SEQ ID NO: 26449 - RNA, 19 nt, Artificial Sequence
  Description of Artificial Sequence: Synthetic oligonucleotide
  Antisense strand to SEQ ID NO: 26448
uaguaccuagaccacaugc

SEQ ID NO: 26450 - RNA, 19 nt, Artificial Sequence
  Description of Artificial Sequence: Synthetic oligonucleotide
  Sense strand starting at position 3679 of SEQ ID NO: 298
ugcugaauuugugcacaac

SEQ ID NO: 26451 - RNA, 19 nt, Artificial Sequence
  Description of Artificial Sequence: Synthetic oligonucleotide
  Antisense strand to SEQ ID NO: 26450
guugugcacaaauucagca

SEQ ID NO: 26452 - RNA, 19 nt, Artificial Sequence
  Description of Artificial Sequence: Synthetic oligonucleotide
  Sense strand starting at position 3781 of SEQ ID NO: 298
cuagcauaugccugaagcu

SEQ ID NO: 26453 - RNA, 19 nt, Artificial Sequence
  Description of Artificial Sequence: Synthetic oligonucleotide
  Antisense strand to SEQ ID NO: 26452
agcuucaggcauaugcuag

SEQ ID NO: 26454 - RNA, 19 nt, Artificial Sequence
  Description of Artificial Sequence: Synthetic oligonucleotide
  Sense strand starting at position 3788 of SEQ ID NO: 298
augccugaagcugaauauu

SEQ ID NO: 26455 - RNA, 19 nt, Artificial Sequence
  Description of Artificial Sequence: Synthetic oligonucleotide
  Antisense strand to SEQ ID NO: 26454
aauauucagcuucaggcau

SEQ ID NO: 26456 - RNA, 19 nt, Artificial Sequence
  Description of Artificial Sequence: Synthetic oligonucleotide
  Sense strand starting at position 3829 of SEQ ID NO: 298
uuacauagacucugucauc

SEQ ID NO: 26457 - RNA, 19 nt, Artificial Sequence
  Description of Artificial Sequence: Synthetic oligonucleotide
  Antisense strand to SEQ ID NO: 26456
gaugacagagucuauguaa

SEQ ID NO: 26458 - RNA, 19 nt, Artificial Sequence
  Description of Artificial Sequence: Synthetic oligonucleotide
  Sense strand starting at position 3979 of SEQ ID NO: 299
guuugauuaguugacaggu

SEQ ID NO: 26459 - RNA, 19 nt, Artificial Sequence
  Description of Artificial Sequence: Synthetic oligonucleotide
  Antisense strand to SEQ ID NO: 26458
accugucaacuaaucaaac

SEQ ID NO: 26460 - RNA, 19 nt, Artificial Sequence
  Description of Artificial Sequence: Synthetic oligonucleotide
  Sense strand starting at position 3976 of SEQ ID NO: 299
aauguuugauuaguugaca

SEQ ID NO: 26461 - RNA, 19 nt, Artificial Sequence
  Description of Artificial Sequence: Synthetic oligonucleotide
  Antisense strand to SEQ ID NO: 26460
ugucaacuaaucaaacauu

SEQ ID NO: 26462 - RNA, 19 nt, Artificial Sequence
  Description of Artificial Sequence: Synthetic oligonucleotide
  Sense strand starting at position 3915 of SEQ ID NO: 299
ucugguucucgggaauaaa

SEQ ID NO: 26463 - RNA, 19 nt, Artificial Sequence
  Description of Artificial Sequence: Synthetic oligonucleotide
  Antisense strand to SEQ ID NO: 26462
uuuauucccgagaaccaga

SEQ ID NO: 26464 - RNA, 19 nt, Artificial Sequence
  Description of Artificial Sequence: Synthetic oligonucleotide
  Sense strand starting at position 3911 of SEQ ID NO: 299
gaccucugguucucgggaa

SEQ ID NO: 26465 - RNA, 19 nt, Artificial Sequence
  Description of Artificial Sequence: Synthetic oligonucleotide
  Antisense strand to SEQ ID NO: 26464
uucccgagaaccagagguc

SEQ ID NO: 26466 - RNA, 19 nt, Artificial Sequence
  Description of Artificial Sequence: Synthetic oligonucleotide
  Sense strand starting at position 3777 of SEQ ID NO: 299
agacuuacuuucuuagguu

SEQ ID NO: 26467 - RNA, 19 nt, Artificial Sequence
  Description of Artificial Sequence: Synthetic oligonucleotide
  Antisense strand to SEQ ID NO: 26466
aaccuaagaaaguaagucu

SEQ ID NO: 26468 - RNA, 19 nt, Artificial Sequence
  Description of Artificial Sequence: Synthetic oligonucleotide
  Sense strand starting at position 3756 of SEQ ID NO: 299
cugauuacucuccgaaacu

SEQ ID NO: 26469 - RNA, 19 nt, Artificial Sequence
  Description of Artificial Sequence: Synthetic oligonucleotide
  Antisense strand to SEQ ID NO: 26468
aguuucggagaguaaucag

SEQ ID NO: 26470 - RNA, 19 nt, Artificial Sequence
  Description of Artificial Sequence: Synthetic oligonucleotide
  Sense strand starting at position 3755 of SEQ ID NO: 299
ucugauuacucuccgaaac

SEQ ID NO: 26471 - RNA, 19 nt, Artificial Sequence
  Description of Artificial Sequence: Synthetic oligonucleotide
  Antisense strand to SEQ ID NO: 26470
guuucggagaguaaucaga

SEQ ID NO: 26472 - RNA, 19 nt, Artificial Sequence
  Description of Artificial Sequence: Synthetic oligonucleotide
  Sense strand starting at position 3533 of SEQ ID NO: 299
uuuggcuuccaugacacua

SEQ ID NO: 26473 - RNA, 19 nt, Artificial Sequence
  Description of Artificial Sequence: Synthetic oligonucleotide
  Antisense strand to SEQ ID NO: 26472
uagugucauggaagccaaa

SEQ ID NO: 26474 - RNA, 19 nt, Artificial Sequence
  Description of Artificial Sequence: Synthetic oligonucleotide
  Sense strand starting at position 3204 of SEQ ID NO: 299
ggagaauuguuucuucuuu

SEQ ID NO: 26475 - RNA, 19 nt, Artificial Sequence
  Description of Artificial Sequence: Synthetic oligonucleotide
  Antisense strand to SEQ ID NO: 26474
aaagaagaaacaauucucc

SEQ ID NO: 26476 - RNA, 19 nt, Artificial Sequence
  Description of Artificial Sequence: Synthetic oligonucleotide
  Sense strand starting at position 3201 of SEQ ID NO: 299
cgaggagaauuguuucuuc

SEQ ID NO: 26477 - RNA, 19 nt, Artificial Sequence
  Description of Artificial Sequence: Synthetic oligonucleotide
  Antisense strand to SEQ ID NO: 26476
gaagaaacaauucuccucg

SEQ ID NO: 26478 - RNA, 19 nt, Artificial Sequence
  Description of Artificial Sequence: Synthetic oligonucleotide
  Sense strand starting at position 3192 of SEQ ID NO: 299
uccucauuccgaggagaau

SEQ ID NO: 26479 - RNA, 19 nt, Artificial Sequence
  Description of Artificial Sequence: Synthetic oligonucleotide
  Antisense strand to SEQ ID NO: 26478
auucuccucggaaugagga

SEQ ID NO: 26480 - RNA, 19 nt, Artificial Sequence
  Description of Artificial Sequence: Synthetic oligonucleotide
  Sense strand starting at position 3086 of SEQ ID NO: 299
gucaccaaauugucacauu

SEQ ID NO: 26481 - RNA, 19 nt, Artificial Sequence
  Description of Artificial Sequence: Synthetic oligonucleotide
  Antisense strand to SEQ ID NO: 26480
aaugugacaauuuggugac

SEQ ID NO: 26482 - RNA, 19 nt, Artificial Sequence
  Description of Artificial Sequence: Synthetic oligonucleotide
  Sense strand starting at position 2997 of SEQ ID NO: 299
gcugcuauuucuuuaaagu

SEQ ID NO: 26483 - RNA, 19 nt, Artificial Sequence
  Description of Artificial Sequence: Synthetic oligonucleotide
  Antisense strand to SEQ ID NO: 26482
acuuuaaagaaauagcagc

SEQ ID NO: 26484 - RNA, 19 nt, Artificial Sequence
  Description of Artificial Sequence: Synthetic oligonucleotide
  Sense strand starting at position 2965 of SEQ ID NO: 299
gagacuaaauuggaagaaa

SEQ ID NO: 26485 - RNA, 19 nt, Artificial Sequence
  Description of Artificial Sequence: Synthetic oligonucleotide
  Antisense strand to SEQ ID NO: 26484
uuucuuccaauuuagucuc

SEQ ID NO: 26486 - RNA, 19 nt, Artificial Sequence
  Description of Artificial Sequence: Synthetic oligonucleotide
  Sense strand starting at position 2953 of SEQ ID NO: 299
uugcacagucuugagacua

SEQ ID NO: 26487 - RNA, 19 nt, Artificial Sequence
  Description of Artificial Sequence: Synthetic oligonucleotide
  Antisense strand to SEQ ID NO: 26486
uagucucaagacugugcaa

SEQ ID NO: 26488 - RNA, 19 nt, Artificial Sequence
  Description of Artificial Sequence: Synthetic oligonucleotide
  Sense strand starting at position 2812 of SEQ ID NO: 299
uacagaagaugugagauuu

SEQ ID NO: 26489 - RNA, 19 nt, Artificial Sequence
  Description of Artificial Sequence: Synthetic oligonucleotide
  Antisense strand to SEQ ID NO: 26488
aaaucucacaucuucugua

SEQ ID NO: 26490 - RNA, 19 nt, Artificial Sequence
  Description of Artificial Sequence: Synthetic oligonucleotide
  Sense strand starting at position 2791 of SEQ ID NO: 299
ugaguuaaucaaggaaguu

SEQ ID NO: 26491 - RNA, 19 nt, Artificial Sequence
  Description of Artificial Sequence: Synthetic oligonucleotide
  Antisense strand to SEQ ID NO: 26490
aacuuccuugauuaacuca

SEQ ID NO: 26492 - RNA, 19 nt, Artificial Sequence
  Description of Artificial Sequence: Synthetic oligonucleotide
  Sense strand starting at position 2779 of SEQ ID NO: 299
acuacaacagguugaguua

SEQ ID NO: 26493 - RNA, 19 nt, Artificial Sequence
  Description of Artificial Sequence: Synthetic oligonucleotide
  Antisense strand to SEQ ID NO: 26492
uaacucaaccuguuguagu

SEQ ID NO: 26494 - RNA, 19 nt, Artificial Sequence
  Description of Artificial Sequence: Synthetic oligonucleotide
  Sense strand starting at position 2701 of SEQ ID NO: 299
aggcaauucuuucugagaa

SEQ ID NO: 26495 - RNA, 19 nt, Artificial Sequence
  Description of Artificial Sequence: Synthetic oligonucleotide
  Antisense strand to SEQ ID NO: 26494
uucucagaaagaauugccu

SEQ ID NO: 26496 - RNA, 19 nt, Artificial Sequence
  Description of Artificial Sequence: Synthetic oligonucleotide
  Sense strand starting at position 2681 of SEQ ID NO: 299
cucagaagauugcuauuaa

SEQ ID NO: 26497 - RNA, 19 nt, Artificial Sequence
  Description of Artificial Sequence: Synthetic oligonucleotide
  Antisense strand to SEQ ID NO: 26496
uuaauagcaaucuucugag

SEQ ID NO: 26498 - RNA, 19 nt, Artificial Sequence
  Description of Artificial Sequence: Synthetic oligonucleotide
  Sense strand starting at position 2667 of SEQ ID NO: 299
uuaagauuugugugcucag

SEQ ID NO: 26499 - RNA, 19 nt, Artificial Sequence
  Description of Artificial Sequence: Synthetic oligonucleotide
  Antisense strand to SEQ ID NO: 26498
cugagcacacaaaucuuaa

SEQ ID NO: 26500 - RNA, 19 nt, Artificial Sequence
  Description of Artificial Sequence: Synthetic oligonucleotide
  Sense strand starting at position 2650 of SEQ ID NO: 299
gcuacuaauccucaagguu

SEQ ID NO: 26501 - RNA, 19 nt, Artificial Sequence
  Description of Artificial Sequence: Synthetic oligonucleotide
  Antisense strand to SEQ ID NO: 26500
aaccuugaggauuaguagc

SEQ ID NO: 26502 - RNA, 19 nt, Artificial Sequence
  Description of Artificial Sequence: Synthetic oligonucleotide
  Sense strand starting at position 2470 of SEQ ID NO: 299
cugaguuaucuagaacgua

SEQ ID NO: 26503 - RNA, 19 nt, Artificial Sequence
  Description of Artificial Sequence: Synthetic oligonucleotide
  Antisense strand to SEQ ID NO: 26502
uacguucuagauaacucag

SEQ ID NO: 26504 - RNA, 19 nt, Artificial Sequence
  Description of Artificial Sequence: Synthetic oligonucleotide
  Sense strand starting at position 2468 of SEQ ID NO: 299
ugcugaguuaucuagaacg

SEQ ID NO: 26505 - RNA, 19 nt, Artificial Sequence
  Description of Artificial Sequence: Synthetic oligonucleotide
  Antisense strand to SEQ ID NO: 26504
cguucuagauaacucagca

SEQ ID NO: 26506 - RNA, 19 nt, Artificial Sequence
  Description of Artificial Sequence: Synthetic oligonucleotide
  Sense strand starting at position 2378 of SEQ ID NO: 299
gauauucuugcccagagcu

SEQ ID NO: 26507 - RNA, 19 nt, Artificial Sequence
  Description of Artificial Sequence: Synthetic oligonucleotide
  Antisense strand to SEQ ID NO: 26506
agcucugggcaagaauauc

SEQ ID NO: 26508 - RNA, 19 nt, Artificial Sequence
  Description of Artificial Sequence: Synthetic oligonucleotide
  Sense strand starting at position 2376 of SEQ ID NO: 299
cugauauucuugcccagag

SEQ ID NO: 26509 - RNA, 19 nt, Artificial Sequence
  Description of Artificial Sequence: Synthetic oligonucleotide
  Antisense strand to SEQ ID NO: 26508
cucugggcaagaauaucag

SEQ ID NO: 26510 - RNA, 19 nt, Artificial Sequence
  Description of Artificial Sequence: Synthetic oligonucleotide
  Sense strand starting at position 2061 of SEQ ID NO: 299
gggcccaaugaaugauuaa

SEQ ID NO: 26511 - RNA, 19 nt, Artificial Sequence
  Description of Artificial Sequence: Synthetic oligonucleotide
  Antisense strand to SEQ ID NO: 26510
uuaaucauucauugggccc

SEQ ID NO: 26512 - RNA, 19 nt, Artificial Sequence
  Description of Artificial Sequence: Synthetic oligonucleotide
  Sense strand starting at position 1831 of SEQ ID NO: 299
accuuugguaguugaggaa

SEQ ID NO: 26513 - RNA, 19 nt, Artificial Sequence
  Description of Artificial Sequence: Synthetic oligonucleotide
  Antisense strand to SEQ ID NO: 26512
uuccucaacuaccaaaggu

SEQ ID NO: 26514 - RNA, 19 nt, Artificial Sequence
  Description of Artificial Sequence: Synthetic oligonucleotide
  Sense strand starting at position 1830 of SEQ ID NO: 299
gaccuuugguaguugagga

SEQ ID NO: 26515 - RNA, 19 nt, Artificial Sequence
  Description of Artificial Sequence: Synthetic oligonucleotide
  Antisense strand to SEQ ID NO: 26514
uccucaacuaccaaagguc

SEQ ID NO: 26516 - RNA, 19 nt, Artificial Sequence
  Description of Artificial Sequence: Synthetic oligonucleotide
  Sense strand starting at position 1381 of SEQ ID NO: 299
uggagugguuaaucaaauc

SEQ ID NO: 26517 - RNA, 19 nt, Artificial Sequence
  Description of Artificial Sequence: Synthetic oligonucleotide
  Antisense strand to SEQ ID NO: 26516
gauuugauuaaccacucca

SEQ ID NO: 26518 - RNA, 19 nt, Artificial Sequence
  Description of Artificial Sequence: Synthetic oligonucleotide
  Sense strand starting at position 1362 of SEQ ID NO: 299
gucagugguggaggagauu

SEQ ID NO: 26519 - RNA, 19 nt, Artificial Sequence
  Description of Artificial Sequence: Synthetic oligonucleotide
  Antisense strand to SEQ ID NO: 26518
aaucuccuccaccacugac

SEQ ID NO: 26520 - RNA, 19 nt, Artificial Sequence
  Description of Artificial Sequence: Synthetic oligonucleotide
  Sense strand starting at position 1233 of SEQ ID NO: 299
aaggaaggguuaucagcau

SEQ ID NO: 26521 - RNA, 19 nt, Artificial Sequence
  Description of Artificial Sequence: Synthetic oligonucleotide
  Antisense strand to SEQ ID NO: 26520
augcugauaacccuuccuu

SEQ ID NO: 26522 - RNA, 19 nt, Artificial Sequence
  Description of Artificial Sequence: Synthetic oligonucleotide
  Sense strand starting at position 1118 of SEQ ID NO: 299
uuaccauauuuagagauag

SEQ ID NO: 26523 - RNA, 19 nt, Artificial Sequence
  Description of Artificial Sequence: Synthetic oligonucleotide
  Antisense strand to SEQ ID NO: 26522
cuaucucuaaauaugguaa

SEQ ID NO: 26524 - RNA, 19 nt, Artificial Sequence
  Description of Artificial Sequence: Synthetic oligonucleotide
  Sense strand starting at position 469 of SEQ ID NO: 299
uuucuccuuccaugagaag

SEQ ID NO: 26525 - RNA, 19 nt, Artificial Sequence
  Description of Artificial Sequence: Synthetic oligonucleotide
  Antisense strand to SEQ ID NO: 26524
cuucucauggaaggagaaa

SEQ ID NO: 26526 - RNA, 19 nt, Artificial Sequence
  Description of Artificial Sequence: Synthetic oligonucleotide
  Sense strand starting at position 365 of SEQ ID NO: 299
ucaagaacuuuagucagca

SEQ ID NO: 26527 - RNA, 19 nt, Artificial Sequence
  Description of Artificial Sequence: Synthetic oligonucleotide
  Antisense strand to SEQ ID NO: 26526
ugcugacuaaaguucuuga

SEQ ID NO: 26528 - RNA, 19 nt, Artificial Sequence
  Description of Artificial Sequence: Synthetic oligonucleotide
  Sense strand starting at position 271 of SEQ ID NO: 299
ucuguaacugcucacugaa

SEQ ID NO: 26529 - RNA, 19 nt, Artificial Sequence
  Description of Artificial Sequence: Synthetic oligonucleotide
  Antisense strand to SEQ ID NO: 26528
uucagugagcaguuacaga

SEQ ID NO: 26530 - RNA, 19 nt, Artificial Sequence
  Description of Artificial Sequence: Synthetic oligonucleotide
  Sense strand starting at position 208 of SEQ ID NO: 299
ggauaucaguucccuccau

SEQ ID NO: 26531 - RNA, 19 nt, Artificial Sequence
  Description of Artificial Sequence: Synthetic oligonucleotide
  Antisense strand to SEQ ID NO: 26530
auggagggaacugauaucc

SEQ ID NO: 26532 - RNA, 19 nt, Artificial Sequence
  Description of Artificial Sequence: Synthetic oligonucleotide
  Sense strand starting at position 199 of SEQ ID NO: 299
cagcuucuuggauaucagu

SEQ ID NO: 26533 - RNA, 19 nt, Artificial Sequence
  Description of Artificial Sequence: Synthetic oligonucleotide
  Antisense strand to SEQ ID NO: 26532
acugauauccaagaagcug

SEQ ID NO: 26534 - RNA, 19 nt, Artificial Sequence
  Description of Artificial Sequence: Synthetic oligonucleotide
  Sense strand starting at position 177 of SEQ ID NO: 299
ugugaucuugaagaagcua

SEQ ID NO: 26535 - RNA, 19 nt, Artificial Sequence
  Description of Artificial Sequence: Synthetic oligonucleotide
  Antisense strand to SEQ ID NO: 26534
uagcuucuucaagaucaca

SEQ ID NO: 26536 - RNA, 19 nt, Artificial Sequence
  Description of Artificial Sequence: Synthetic oligonucleotide
  Sense strand starting at position 170 of SEQ ID NO: 299
cuaagucugugaucuugaa

SEQ ID NO: 26537 - RNA, 19 nt, Artificial Sequence
  Description of Artificial Sequence: Synthetic oligonucleotide
  Antisense strand to SEQ ID NO: 26536
uucaagaucacagacuuag

SEQ ID NO: 26538 - RNA, 19 nt, Artificial Sequence
  Description of Artificial Sequence: Synthetic oligonucleotide
  Sense strand starting at position 3862 of SEQ ID NO: 301
guaagcacccucuaagaca

SEQ ID NO: 26539 - RNA, 19 nt, Artificial Sequence
  Description of Artificial Sequence: Synthetic oligonucleotide
  Antisense strand to SEQ ID NO: 26538
ugucuuagagggugcuuac

SEQ ID NO: 26540 - RNA, 19 nt, Artificial Sequence
  Description of Artificial Sequence: Synthetic oligonucleotide
  Sense strand starting at position 3652 of SEQ ID NO: 301
guauuuguauucccuucca

SEQ ID NO: 26541 - RNA, 19 nt, Artificial Sequence
  Description of Artificial Sequence: Synthetic oligonucleotide
  Antisense strand to SEQ ID NO: 26540
uggaagggaauacaaauac

SEQ ID NO: 26542 - RNA, 19 nt, Artificial Sequence
  Description of Artificial Sequence: Synthetic oligonucleotide
  Sense strand starting at position 3637 of SEQ ID NO: 301
guuugugucugauuuguau

SEQ ID NO: 26543 - RNA, 19 nt, Artificial Sequence
  Description of Artificial Sequence: Synthetic oligonucleotide
  Antisense strand to SEQ ID NO: 26542
auacaaaucagacacaaac

SEQ ID NO: 26544 - RNA, 19 nt, Artificial Sequence
  Description of Artificial Sequence: Synthetic oligonucleotide
  Sense strand starting at position 3634 of SEQ ID NO: 301
aggguuugugucugauuug

SEQ ID NO: 26545 - RNA, 19 nt, Artificial Sequence
  Description of Artificial Sequence: Synthetic oligonucleotide
  Antisense strand to SEQ ID NO: 26544
caaaucagacacaaacccu

SEQ ID NO: 26546 - RNA, 19 nt, Artificial Sequence
  Description of Artificial Sequence: Synthetic oligonucleotide
  Sense strand starting at position 3633 of SEQ ID NO: 301
caggguuugugucugauuu

SEQ ID NO: 26547 - RNA, 19 nt, Artificial Sequence
  Description of Artificial Sequence: Synthetic oligonucleotide
  Antisense strand to SEQ ID NO: 26546
aaaucagacacaaacccug

SEQ ID NO: 26548 - RNA, 19 nt, Artificial Sequence
  Description of Artificial Sequence: Synthetic oligonucleotide
  Sense strand starting at position 3536 of SEQ ID NO: 301
gucuaauuugcagguccca

SEQ ID NO: 26549 - RNA, 19 nt, Artificial Sequence
  Description of Artificial Sequence: Synthetic oligonucleotide
  Antisense strand to SEQ ID NO: 26548
ugggaccugcaaauuagac

SEQ ID NO: 26550 - RNA, 19 nt, Artificial Sequence
  Description of Artificial Sequence: Synthetic oligonucleotide
  Sense strand starting at position 3530 of SEQ ID NO: 301
gucuuagucuaauuugcag

SEQ ID NO: 26551 - RNA, 19 nt, Artificial Sequence
  Description of Artificial Sequence: Synthetic oligonucleotide
  Antisense strand to SEQ ID NO: 26550
cugcaaauuagacuaagac

SEQ ID NO: 26552 - RNA, 19 nt, Artificial Sequence
  Description of Artificial Sequence: Synthetic oligonucleotide
  Sense strand starting at position 3457 of SEQ ID NO: 301
auuacuuaucacugaguuu

SEQ ID NO: 26553 - RNA, 19 nt, Artificial Sequence
  Description of Artificial Sequence: Synthetic oligonucleotide
  Antisense strand to SEQ ID NO: 26552
aaacucagugauaaguaau

SEQ ID NO: 26554 - RNA, 19 nt, Artificial Sequence
  Description of Artificial Sequence: Synthetic oligonucleotide
  Sense strand starting at position 2882 of SEQ ID NO: 301
gagauaagguugccauaaa

SEQ ID NO: 26555 - RNA, 19 nt, Artificial Sequence
  Description of Artificial Sequence: Synthetic oligonucleotide
  Antisense strand to SEQ ID NO: 26554
uuuauggcaaccuuaucuc

SEQ ID NO: 26556 - RNA, 19 nt, Artificial Sequence
  Description of Artificial Sequence: Synthetic oligonucleotide
  Sense strand starting at position 2880 of SEQ ID NO: 301
uggagauaagguugccaua

SEQ ID NO: 26557 - RNA, 19 nt, Artificial Sequence
  Description of Artificial Sequence: Synthetic oligonucleotide
  Antisense strand to SEQ ID NO: 26556
uauggcaaccuuaucucca

SEQ ID NO: 26558 - RNA, 19 nt, Artificial Sequence
  Description of Artificial Sequence: Synthetic oligonucleotide
  Sense strand starting at position 2869 of SEQ ID NO: 301
ggcagcaaccuuggagaua

SEQ ID NO: 26559 - RNA, 19 nt, Artificial Sequence
  Description of Artificial Sequence: Synthetic oligonucleotide
  Antisense strand to SEQ ID NO: 26558
uaucuccaagguugcugcc

SEQ ID NO: 26560 - RNA, 19 nt, Artificial Sequence
  Description of Artificial Sequence: Synthetic oligonucleotide
  Sense strand starting at position 2733 of SEQ ID NO: 301
ugucuuucuccugaaagga

SEQ ID NO: 26561 - RNA, 19 nt, Artificial Sequence
  Description of Artificial Sequence: Synthetic oligonucleotide
  Antisense strand to SEQ ID NO: 26560
uccuuucaggagaaagaca

SEQ ID NO: 26562 - RNA, 19 nt, Artificial Sequence
  Description of Artificial Sequence: Synthetic oligonucleotide
  Sense strand starting at position 2717 of SEQ ID NO: 301
ugugaugauuaaucuaugu

SEQ ID NO: 26563 - RNA, 19 nt, Artificial Sequence
  Description of Artificial Sequence: Synthetic oligonucleotide
  Antisense strand to SEQ ID NO: 26562
acauagauuaaucaucaca

SEQ ID NO: 26564 - RNA, 19 nt, Artificial Sequence
  Description of Artificial Sequence: Synthetic oligonucleotide
  Sense strand starting at position 2714 of SEQ ID NO: 301
guuugugaugauuaaucua

SEQ ID NO: 26565 - RNA, 19 nt, Artificial Sequence
  Description of Artificial Sequence: Synthetic oligonucleotide
  Antisense strand to SEQ ID NO: 26564
uagauuaaucaucacaaac

SEQ ID NO: 26566 - RNA, 19 nt, Artificial Sequence
  Description of Artificial Sequence: Synthetic oligonucleotide
  Sense strand starting at position 2711 of SEQ ID NO: 301
acuguuugugaugauuaau

SEQ ID NO: 26567 - RNA, 19 nt, Artificial Sequence
  Description of Artificial Sequence: Synthetic oligonucleotide
  Antisense strand to SEQ ID NO: 26566
auuaaucaucacaaacagu

SEQ ID NO: 26568 - RNA, 19 nt, Artificial Sequence
  Description of Artificial Sequence: Synthetic oligonucleotide
  Sense strand starting at position 2706 of SEQ ID NO: 301
uuacuacuguuugugauga

SEQ ID NO: 26569 - RNA, 19 nt, Artificial Sequence
  Description of Artificial Sequence: Synthetic oligonucleotide
  Antisense strand to SEQ ID NO: 26568
ucaucacaaacaguaguaa

SEQ ID NO: 26570 - RNA, 19 nt, Artificial Sequence
  Description of Artificial Sequence: Synthetic oligonucleotide
  Sense strand starting at position 2557 of SEQ ID NO: 301
cuugcuugugacuacuaua

SEQ ID NO: 26571 - RNA, 19 nt, Artificial Sequence
  Description of Artificial Sequence: Synthetic oligonucleotide
  Antisense strand to SEQ ID NO: 26570
uauaguagucacaagcaag

SEQ ID NO: 26572 - RNA, 19 nt, Artificial Sequence
  Description of Artificial Sequence: Synthetic oligonucleotide
  Sense strand starting at position 2494 of SEQ ID NO: 301
aggagaaugcuuuggucuc

SEQ ID NO: 26573 - RNA, 19 nt, Artificial Sequence
  Description of Artificial Sequence: Synthetic oligonucleotide
  Antisense strand to SEQ ID NO: 26572
gagaccaaagcauucuccu

SEQ ID NO: 26574 - RNA, 19 nt, Artificial Sequence
  Description of Artificial Sequence: Synthetic oligonucleotide
  Sense strand starting at position 2263 of SEQ ID NO: 301
acgaaagcucaaggaagua

SEQ ID NO: 26575 - RNA, 19 nt, Artificial Sequence
  Description of Artificial Sequence: Synthetic oligonucleotide
  Antisense strand to SEQ ID NO: 26574
uacuuccuugagcuuucgu

SEQ ID NO: 26576 - RNA, 19 nt, Artificial Sequence
  Description of Artificial Sequence: Synthetic oligonucleotide
  Sense strand starting at position 2149 of SEQ ID NO: 301
aagagaacgggcugucaau

SEQ ID NO: 26577 - RNA, 19 nt, Artificial Sequence
  Description of Artificial Sequence: Synthetic oligonucleotide
  Antisense strand to SEQ ID NO: 26576
auugacagcccguucucuu

SEQ ID NO: 26578 - RNA, 19 nt, Artificial Sequence
  Description of Artificial Sequence: Synthetic oligonucleotide
  Sense strand starting at position 2115 of SEQ ID NO: 301
guccaacuucuguaacucu

SEQ ID NO: 26579 - RNA, 19 nt, Artificial Sequence
  Description of Artificial Sequence: Synthetic oligonucleotide
  Antisense strand to SEQ ID NO: 26578
agaguuacagaaguuggac

SEQ ID NO: 26580 - RNA, 19 nt, Artificial Sequence
  Description of Artificial Sequence: Synthetic oligonucleotide
  Sense strand starting at position 1989 of SEQ ID NO: 301
gguuucugggaaugcaaau

SEQ ID NO: 26581 - RNA, 19 nt, Artificial Sequence
  Description of Artificial Sequence: Synthetic oligonucleotide
  Antisense strand to SEQ ID NO: 26580
auuugcauucccagaaacc

SEQ ID NO: 26582 - RNA, 19 nt, Artificial Sequence
  Description of Artificial Sequence: Synthetic oligonucleotide
  Sense strand starting at position 1463 of SEQ ID NO: 301
caggguuaucauuaaaugu

SEQ ID NO: 26583 - RNA, 19 nt, Artificial Sequence
  Description of Artificial Sequence: Synthetic oligonucleotide
  Antisense strand to SEQ ID NO: 26582
acauuuaaugauaacccug

SEQ ID NO: 26584 - RNA, 19 nt, Artificial Sequence
  Description of Artificial Sequence: Synthetic oligonucleotide
  Sense strand starting at position 1459 of SEQ ID NO: 301
agaucaggguuaucauuaa

SEQ ID NO: 26585 - RNA, 19 nt, Artificial Sequence
  Description of Artificial Sequence: Synthetic oligonucleotide
  Antisense strand to SEQ ID NO: 26584
uuaaugauaacccugaucu

SEQ ID NO: 26586 - RNA, 19 nt, Artificial Sequence
  Description of Artificial Sequence: Synthetic oligonucleotide
  Sense strand starting at position 1053 of SEQ ID NO: 301
ccaaguacucuguauucua

SEQ ID NO: 26587 - RNA, 19 nt, Artificial Sequence
  Description of Artificial Sequence: Synthetic oligonucleotide
  Antisense strand to SEQ ID NO: 26586
uagaauacagaguacuugg

SEQ ID NO: 26588 - RNA, 19 nt, Artificial Sequence
  Description of Artificial Sequence: Synthetic oligonucleotide
  Sense strand starting at position 1021 of SEQ ID NO: 301
cuggauuauugauccugau

SEQ ID NO: 26589 - RNA, 19 nt, Artificial Sequence
  Description of Artificial Sequence: Synthetic oligonucleotide
  Antisense strand to SEQ ID NO: 26588
aucaggaucaauaauccag

SEQ ID NO: 26590 - RNA, 19 nt, Artificial Sequence
  Description of Artificial Sequence: Synthetic oligonucleotide
  Sense strand starting at position 924 of SEQ ID NO: 301
agugcucugcuggaagaaa

SEQ ID NO: 26591 - RNA, 19 nt, Artificial Sequence
  Description of Artificial Sequence: Synthetic oligonucleotide
  Antisense strand to SEQ ID NO: 26590
uuucuuccagcagagcacu

SEQ ID NO: 26592 - RNA, 19 nt, Artificial Sequence
  Description of Artificial Sequence: Synthetic oligonucleotide
  Sense strand starting at position 695 of SEQ ID NO: 301
guaggaugugaaggaguaa

SEQ ID NO: 26593 - RNA, 19 nt, Artificial Sequence
  Description of Artificial Sequence: Synthetic oligonucleotide
  Antisense strand to SEQ ID NO: 26592
uuacuccuucacauccuac

SEQ ID NO: 26594 - RNA, 19 nt, Artificial Sequence
  Description of Artificial Sequence: Synthetic oligonucleotide
  Sense strand starting at position 540 of SEQ ID NO: 301
ggaauugauucuguuaauu

SEQ ID NO: 26595 - RNA, 19 nt, Artificial Sequence
  Description of Artificial Sequence: Synthetic oligonucleotide
  Antisense strand to SEQ ID NO: 26594
aauuaacagaaucaauucc

SEQ ID NO: 26596 - RNA, 19 nt, Artificial Sequence
  Description of Artificial Sequence: Synthetic oligonucleotide
  Sense strand starting at position 408 of SEQ ID NO: 301
cucuucugucguuuguaua

SEQ ID NO: 26597 - RNA, 19 nt, Artificial Sequence
  Description of Artificial Sequence: Synthetic oligonucleotide
  Antisense strand to SEQ ID NO: 26596
uauacaaacgacagaagag

SEQ ID NO: 26598 - RNA, 19 nt, Artificial Sequence
  Description of Artificial Sequence: Synthetic oligonucleotide
  Sense strand starting at position 394 of SEQ ID NO: 301
augagugaauuugacucuu

SEQ ID NO: 26599 - RNA, 19 nt, Artificial Sequence
  Description of Artificial Sequence: Synthetic oligonucleotide
  Antisense strand to SEQ ID NO: 26598
aagagucaaauucacucau

SEQ ID NO: 26600 - RNA, 19 nt, Artificial Sequence
  Description of Artificial Sequence: Synthetic oligonucleotide
  Sense strand starting at position 386 of SEQ ID NO: 301
gagucuauaugagugaauu

SEQ ID NO: 26601 - RNA, 19 nt, Artificial Sequence
  Description of Artificial Sequence: Synthetic oligonucleotide
  Antisense strand to SEQ ID NO: 26600
aauucacucauauagacuc

SEQ ID NO: 26602 - RNA, 19 nt, Artificial Sequence
  Description of Artificial Sequence: Synthetic oligonucleotide
  Sense strand starting at position 351 of SEQ ID NO: 301
uuaucauguguggauaauu

SEQ ID NO: 26603 - RNA, 19 nt, Artificial Sequence
  Description of Artificial Sequence: Synthetic oligonucleotide
  Antisense strand to SEQ ID NO: 26602
aauuauccacacaugauaa

SEQ ID NO: 26604 - RNA, 19 nt, Artificial Sequence
  Description of Artificial Sequence: Synthetic oligonucleotide
  Sense strand starting at position 349 of SEQ ID NO: 301
gauuaucauguguggauaa

SEQ ID NO: 26605 - RNA, 19 nt, Artificial Sequence
  Description of Artificial Sequence: Synthetic oligonucleotide
  Antisense strand to SEQ ID NO: 26604
uuauccacacaugauaauc

SEQ ID NO: 26606 - RNA, 19 nt, Artificial Sequence
  Description of Artificial Sequence: Synthetic oligonucleotide
  Sense strand starting at position 348 of SEQ ID NO: 301
agauuaucauguguggaua

SEQ ID NO: 26607 - RNA, 19 nt, Artificial Sequence
  Description of Artificial Sequence: Synthetic oligonucleotide
  Antisense strand to SEQ ID NO: 26606
uauccacacaugauaaucu

SEQ ID NO: 26608 - RNA, 19 nt, Artificial Sequence
  Description of Artificial Sequence: Synthetic oligonucleotide
  Sense strand starting at position 276 of SEQ ID NO: 301
guuauaugauaggugaaau

SEQ ID NO: 26609 - RNA, 19 nt, Artificial Sequence
  Description of Artificial Sequence: Synthetic oligonucleotide
  Antisense strand to SEQ ID NO: 26608
auuucaccuaucauauaac

SEQ ID NO: 26610 - RNA, 19 nt, Artificial Sequence
  Description of Artificial Sequence: Synthetic oligonucleotide
  Sense strand starting at position 275 of SEQ ID NO: 301
aguuauaugauaggugaaa

SEQ ID NO: 26611 - RNA, 19 nt, Artificial Sequence
  Description of Artificial Sequence: Synthetic oligonucleotide
  Antisense strand to SEQ ID NO: 26610
uuucaccuaucauauaacu

SEQ ID NO: 26612 - RNA, 19 nt, Artificial Sequence
  Description of Artificial Sequence: Synthetic oligonucleotide
  Sense strand starting at position 40 of SEQ ID NO: 301
auaugaguuugguuauaug

SEQ ID NO: 26613 - RNA, 19 nt, Artificial Sequence
  Description of Artificial Sequence: Synthetic oligonucleotide
  Antisense strand to SEQ ID NO: 26612
cauauaaccaaacucauau

SEQ ID NO: 26614 - RNA, 19 nt, Artificial Sequence
  Description of Artificial Sequence: Synthetic oligonucleotide
  Sense strand starting at position 37 of SEQ ID NO: 301
gauauaugaguuugguuau

SEQ ID NO: 26615 - RNA, 19 nt, Artificial Sequence
  Description of Artificial Sequence: Synthetic oligonucleotide
  Antisense strand to SEQ ID NO: 26614
auaaccaaacucauauauc

SEQ ID NO: 26616 - RNA, 19 nt, Artificial Sequence
  Description of Artificial Sequence: Synthetic oligonucleotide
  Sense strand starting at position 34 of SEQ ID NO: 301
agggauauaugaguuuggu

SEQ ID NO: 26617 - RNA, 19 nt, Artificial Sequence
  Description of Artificial Sequence: Synthetic oligonucleotide
  Antisense strand to SEQ ID NO: 26616
accaaacucauauaucccu

SEQ ID NO: 26618 - RNA, 19 nt, Artificial Sequence
  Description of Artificial Sequence: Synthetic oligonucleotide
  Sense strand starting at position 3958 of SEQ ID NO: 302
ccaggaauccauugagcau

SEQ ID NO: 26619 - RNA, 19 nt, Artificial Sequence
  Description of Artificial Sequence: Synthetic oligonucleotide
  Antisense strand to SEQ ID NO: 26618
augcucaauggauuccugg

SEQ ID NO: 26620 - RNA, 19 nt, Artificial Sequence
  Description of Artificial Sequence: Synthetic oligonucleotide
  Sense strand starting at position 3706 of SEQ ID NO: 302
guuaauauccuacagagua

SEQ ID NO: 26621 - RNA, 19 nt, Artificial Sequence
  Description of Artificial Sequence: Synthetic oligonucleotide
  Antisense strand to SEQ ID NO: 26620
uacucuguaggauauuaac

SEQ ID NO: 26622 - RNA, 19 nt, Artificial Sequence
  Description of Artificial Sequence: Synthetic oligonucleotide
  Sense strand starting at position 3643 of SEQ ID NO: 302
gaaugcauauagucaguca

SEQ ID NO: 26623 - RNA, 19 nt, Artificial Sequence
  Description of Artificial Sequence: Synthetic oligonucleotide
  Antisense strand to SEQ ID NO: 26622
ugacugacuauaugcauuc

SEQ ID NO: 26624 - RNA, 19 nt, Artificial Sequence
  Description of Artificial Sequence: Synthetic oligonucleotide
  Sense strand starting at position 3490 of SEQ ID NO: 302
guaagcacccucuaagaca

SEQ ID NO: 26625 - RNA, 19 nt, Artificial Sequence
  Description of Artificial Sequence: Synthetic oligonucleotide
  Antisense strand to SEQ ID NO: 26624
ugucuuagagggugcuuac

SEQ ID NO: 26626 - RNA, 19 nt, Artificial Sequence
  Description of Artificial Sequence: Synthetic oligonucleotide
  Sense strand starting at position 3280 of SEQ ID NO: 302
guauuuguauucccuucca

SEQ ID NO: 26627 - RNA, 19 nt, Artificial Sequence
  Description of Artificial Sequence: Synthetic oligonucleotide
  Antisense strand to SEQ ID NO: 26626
uggaagggaauacaaauac

SEQ ID NO: 26628 - RNA, 19 nt, Artificial Sequence
  Description of Artificial Sequence: Synthetic oligonucleotide
  Sense strand starting at position 3269 of SEQ ID NO: 302
gugucugauuuguauuugu

SEQ ID NO: 26629 - RNA, 19 nt, Artificial Sequence
  Description of Artificial Sequence: Synthetic oligonucleotide
  Antisense strand to SEQ ID NO: 26628
acaaauacaaaucagacac

SEQ ID NO: 26630 - RNA, 19 nt, Artificial Sequence
  Description of Artificial Sequence: Synthetic oligonucleotide
  Sense strand starting at position 3265 of SEQ ID NO: 302
guuugugucugauuuguau

SEQ ID NO: 26631 - RNA, 19 nt, Artificial Sequence
  Description of Artificial Sequence: Synthetic oligonucleotide
  Antisense strand to SEQ ID NO: 26630
auacaaaucagacacaaac

SEQ ID NO: 26632 - RNA, 19 nt, Artificial Sequence
  Description of Artificial Sequence: Synthetic oligonucleotide
  Sense strand starting at position 3262 of SEQ ID NO: 302
aggguuugugucugauuug

SEQ ID NO: 26633 - RNA, 19 nt, Artificial Sequence
  Description of Artificial Sequence: Synthetic oligonucleotide
  Antisense strand to SEQ ID NO: 26632
caaaucagacacaaacccu

SEQ ID NO: 26634 - RNA, 19 nt, Artificial Sequence
  Description of Artificial Sequence: Synthetic oligonucleotide
  Sense strand starting at position 3261 of SEQ ID NO: 302
caggguuugugucugauuu

SEQ ID NO: 26635 - RNA, 19 nt, Artificial Sequence
  Description of Artificial Sequence: Synthetic oligonucleotide
  Antisense strand to SEQ ID NO: 26634
aaaucagacacaaacccug

SEQ ID NO: 26636 - RNA, 19 nt, Artificial Sequence
  Description of Artificial Sequence: Synthetic oligonucleotide
  Sense strand starting at position 3164 of SEQ ID NO: 302
gucuaauuugcagguccca

SEQ ID NO: 26637 - RNA, 19 nt, Artificial Sequence
  Description of Artificial Sequence: Synthetic oligonucleotide
  Antisense strand to SEQ ID NO: 26636
ugggaccugcaaauuagac

SEQ ID NO: 26638 - RNA, 19 nt, Artificial Sequence
  Description of Artificial Sequence: Synthetic oligonucleotide
  Sense strand starting at position 3158 of SEQ ID NO: 302
gucuuagucuaauuugcag

SEQ ID NO: 26639 - RNA, 19 nt, Artificial Sequence
  Description of Artificial Sequence: Synthetic oligonucleotide
  Antisense strand to SEQ ID NO: 26638
cugcaaauuagacuaagac

SEQ ID NO: 26640 - RNA, 19 nt, Artificial Sequence
  Description of Artificial Sequence: Synthetic oligonucleotide
  Sense strand starting at position 3104 of SEQ ID NO: 302
ucccacauguacucaaguu

SEQ ID NO: 26641 - RNA, 19 nt, Artificial Sequence
  Description of Artificial Sequence: Synthetic oligonucleotide
  Antisense strand to SEQ ID NO: 26640
aacuugaguacauguggga

SEQ ID NO: 26642 - RNA, 19 nt, Artificial Sequence
  Description of Artificial Sequence: Synthetic oligonucleotide
  Sense strand starting at position 3085 of SEQ ID NO: 302
auuacuuaucacugaguuu

SEQ ID NO: 26643 - RNA, 19 nt, Artificial Sequence
  Description of Artificial Sequence: Synthetic oligonucleotide
  Antisense strand to SEQ ID NO: 26642
aaacucagugauaaguaau

SEQ ID NO: 26644 - RNA, 19 nt, Artificial Sequence
  Description of Artificial Sequence: Synthetic oligonucleotide
  Sense strand starting at position 2510 of SEQ ID NO: 302
gagauaagguugccauaaa

SEQ ID NO: 26645 - RNA, 19 nt, Artificial Sequence
  Description of Artificial Sequence: Synthetic oligonucleotide
  Antisense strand to SEQ ID NO: 26644
uuuauggcaaccuuaucuc

SEQ ID NO: 26646 - RNA, 19 nt, Artificial Sequence
  Description of Artificial Sequence: Synthetic oligonucleotide
  Sense strand starting at position 2508 of SEQ ID NO: 302
uggagauaagguugccaua

SEQ ID NO: 26647 - RNA, 19 nt, Artificial Sequence
  Description of Artificial Sequence: Synthetic oligonucleotide
  Antisense strand to SEQ ID NO: 26646
uauggcaaccuuaucucca

SEQ ID NO: 26648 - RNA, 19 nt, Artificial Sequence
  Description of Artificial Sequence: Synthetic oligonucleotide
  Sense strand starting at position 2497 of SEQ ID NO: 302
ggcagcaaccuuggagaua

SEQ ID NO: 26649 - RNA, 19 nt, Artificial Sequence
  Description of Artificial Sequence: Synthetic oligonucleotide
  Antisense strand to SEQ ID NO: 26648
uaucuccaagguugcugcc

SEQ ID NO: 26650 - RNA, 19 nt, Artificial Sequence
  Description of Artificial Sequence: Synthetic oligonucleotide
  Sense strand starting at position 2476 of SEQ ID NO: 302
ggcuuuccuuaucugacua

SEQ ID NO: 26651 - RNA, 19 nt, Artificial Sequence
  Description of Artificial Sequence: Synthetic oligonucleotide
  Antisense strand to SEQ ID NO: 26650
uagucagauaaggaaagcc

SEQ ID NO: 26652 - RNA, 19 nt, Artificial Sequence
  Description of Artificial Sequence: Synthetic oligonucleotide
  Sense strand starting at position 2475 of SEQ ID NO: 302
gggcuuuccuuaucugacu

SEQ ID NO: 26653 - RNA, 19 nt, Artificial Sequence
  Description of Artificial Sequence: Synthetic oligonucleotide
  Antisense strand to SEQ ID NO: 26652
agucagauaaggaaagccc

SEQ ID NO: 26654 - RNA, 19 nt, Artificial Sequence
  Description of Artificial Sequence: Synthetic oligonucleotide
  Sense strand starting at position 2361 of SEQ ID NO: 302
ugucuuucuccugaaagga

SEQ ID NO: 26655 - RNA, 19 nt, Artificial Sequence
  Description of Artificial Sequence: Synthetic oligonucleotide
  Antisense strand to SEQ ID NO: 26654
uccuuucaggagaaagaca

SEQ ID NO: 26656 - RNA, 19 nt, Artificial Sequence
  Description of Artificial Sequence: Synthetic oligonucleotide
  Sense strand starting at position 2345 of SEQ ID NO: 302
ugugaugauuaaucuaugu

SEQ ID NO: 26657 - RNA, 19 nt, Artificial Sequence
  Description of Artificial Sequence: Synthetic oligonucleotide
  Antisense strand to SEQ ID NO: 26656
acauagauuaaucaucaca

SEQ ID NO: 26658 - RNA, 19 nt, Artificial Sequence
  Description of Artificial Sequence: Synthetic oligonucleotide
  Sense strand starting at position 2342 of SEQ ID NO: 302
guuugugaugauuaaucua

SEQ ID NO: 26659 - RNA, 19 nt, Artificial Sequence
  Description of Artificial Sequence: Synthetic oligonucleotide
  Antisense strand to SEQ ID NO: 26658
uagauuaaucaucacaaac

SEQ ID NO: 26660 - RNA, 19 nt, Artificial Sequence
  Description of Artificial Sequence: Synthetic oligonucleotide
  Sense strand starting at position 2339 of SEQ ID NO: 302
acuguuugugaugauuaau

SEQ ID NO: 26661 - RNA, 19 nt, Artificial Sequence
  Description of Artificial Sequence: Synthetic oligonucleotide
  Antisense strand to SEQ ID NO: 26660
auuaaucaucacaaacagu

SEQ ID NO: 26662 - RNA, 19 nt, Artificial Sequence
  Description of Artificial Sequence: Synthetic oligonucleotide
  Sense strand starting at position 2334 of SEQ ID NO: 302
uuacuacuguuugugauga

SEQ ID NO: 26663 - RNA, 19 nt, Artificial Sequence
  Description of Artificial Sequence: Synthetic oligonucleotide
  Antisense strand to SEQ ID NO: 26662
ucaucacaaacaguaguaa

SEQ ID NO: 26664 - RNA, 19 nt, Artificial Sequence
  Description of Artificial Sequence: Synthetic oligonucleotide
  Sense strand starting at position 2185 of SEQ ID NO: 302
cuugcuugugacuacuaua

SEQ ID NO: 26665 - RNA, 19 nt, Artificial Sequence
  Description of Artificial Sequence: Synthetic oligonucleotide
  Antisense strand to SEQ ID NO: 26664
uauaguagucacaagcaag

SEQ ID NO: 26666 - RNA, 19 nt, Artificial Sequence
  Description of Artificial Sequence: Synthetic oligonucleotide
  Sense strand starting at position 2122 of SEQ ID NO: 302
aggagaaugcuuuggucuc

SEQ ID NO: 26667 - RNA, 19 nt, Artificial Sequence
  Description of Artificial Sequence: Synthetic oligonucleotide
  Antisense strand to SEQ ID NO: 26666
gagaccaaagcauucuccu

SEQ ID NO: 26668 - RNA, 19 nt, Artificial Sequence
  Description of Artificial Sequence: Synthetic oligonucleotide
  Sense strand starting at position 1891 of SEQ ID NO: 302
acgaaagcucaaggaagua

SEQ ID NO: 26669 - RNA, 19 nt, Artificial Sequence
  Description of Artificial Sequence: Synthetic oligonucleotide
  Antisense strand to SEQ ID NO: 26668
uacuuccuugagcuuucgu

SEQ ID NO: 26670 - RNA, 19 nt, Artificial Sequence
  Description of Artificial Sequence: Synthetic oligonucleotide
  Sense strand starting at position 1777 of SEQ ID NO: 302
aagagaacgggcugucaau

SEQ ID NO: 26671 - RNA, 19 nt, Artificial Sequence
  Description of Artificial Sequence: Synthetic oligonucleotide
  Antisense strand to SEQ ID NO: 26670
auugacagcccguucucuu

SEQ ID NO: 26672 - RNA, 19 nt, Artificial Sequence
  Description of Artificial Sequence: Synthetic oligonucleotide
  Sense strand starting at position 1743 of SEQ ID NO: 302
guccaacuucuguaacucu

SEQ ID NO: 26673 - RNA, 19 nt, Artificial Sequence
  Description of Artificial Sequence: Synthetic oligonucleotide
  Antisense strand to SEQ ID NO: 26672
agaguuacagaaguuggac

SEQ ID NO: 26674 - RNA, 19 nt, Artificial Sequence
  Description of Artificial Sequence: Synthetic oligonucleotide
  Sense strand starting at position 1617 of SEQ ID NO: 302
gguuucugggaaugcaaau

SEQ ID NO: 26675 - RNA, 19 nt, Artificial Sequence
  Description of Artificial Sequence: Synthetic oligonucleotide
  Antisense strand to SEQ ID NO: 26674
auuugcauucccagaaacc

SEQ ID NO: 26676 - RNA, 19 nt, Artificial Sequence
  Description of Artificial Sequence: Synthetic oligonucleotide
  Sense strand starting at position 1246 of SEQ ID NO: 302
ccuguaagcugaguugaag

SEQ ID NO: 26677 - RNA, 19 nt, Artificial Sequence
  Description of Artificial Sequence: Synthetic oligonucleotide
  Antisense strand to SEQ ID NO: 26676
cuucaacucagcuuacagg

SEQ ID NO: 26678 - RNA, 19 nt, Artificial Sequence
  Description of Artificial Sequence: Synthetic oligonucleotide
  Sense strand starting at position 1091 of SEQ ID NO: 302
caggguuaucauuaaaugu

SEQ ID NO: 26679 - RNA, 19 nt, Artificial Sequence
  Description of Artificial Sequence: Synthetic oligonucleotide
  Antisense strand to SEQ ID NO: 26678
acauuuaaugauaacccug

SEQ ID NO: 26680 - RNA, 19 nt, Artificial Sequence
  Description of Artificial Sequence: Synthetic oligonucleotide
  Sense strand starting at position 1087 of SEQ ID NO: 302
agaucaggguuaucauuaa

SEQ ID NO: 26681 - RNA, 19 nt, Artificial Sequence
  Description of Artificial Sequence: Synthetic oligonucleotide
  Antisense strand to SEQ ID NO: 26680
uuaaugauaacccugaucu

SEQ ID NO: 26682 - RNA, 19 nt, Artificial Sequence
  Description of Artificial Sequence: Synthetic oligonucleotide
  Sense strand starting at position 681 of SEQ ID NO: 302
ccaaguacucuguauucua

SEQ ID NO: 26683 - RNA, 19 nt, Artificial Sequence
  Description of Artificial Sequence: Synthetic oligonucleotide
  Antisense strand to SEQ ID NO: 26682
uagaauacagaguacuugg

SEQ ID NO: 26684 - RNA, 19 nt, Artificial Sequence
  Description of Artificial Sequence: Synthetic oligonucleotide
  Sense strand starting at position 649 of SEQ ID NO: 302
cuggauuauugauccugau

SEQ ID NO: 26685 - RNA, 19 nt, Artificial Sequence
  Description of Artificial Sequence: Synthetic oligonucleotide
  Antisense strand to SEQ ID NO: 26684
aucaggaucaauaauccag

SEQ ID NO: 26686 - RNA, 19 nt, Artificial Sequence
  Description of Artificial Sequence: Synthetic oligonucleotide
  Sense strand starting at position 552 of SEQ ID NO: 302
agugcucugcuggaagaaa

SEQ ID NO: 26687 - RNA, 19 nt, Artificial Sequence
  Description of Artificial Sequence: Synthetic oligonucleotide
  Antisense strand to SEQ ID NO: 26686
uuucuuccagcagagcacu

SEQ ID NO: 26688 - RNA, 19 nt, Artificial Sequence
  Description of Artificial Sequence: Synthetic oligonucleotide
  Sense strand starting at position 323 of SEQ ID NO: 302
guaggaugugaaggaguaa

SEQ ID NO: 26689 - RNA, 19 nt, Artificial Sequence
  Description of Artificial Sequence: Synthetic oligonucleotide
  Antisense strand to SEQ ID NO: 26688
uuacuccuucacauccuac

SEQ ID NO: 26690 - RNA, 19 nt, Artificial Sequence
  Description of Artificial Sequence: Synthetic oligonucleotide
  Sense strand starting at position 168 of SEQ ID NO: 302
ggaauugauucuguuaauu

SEQ ID NO: 26691 - RNA, 19 nt, Artificial Sequence
  Description of Artificial Sequence: Synthetic oligonucleotide
  Antisense strand to SEQ ID NO: 26690
aauuaacagaaucaauucc

SEQ ID NO: 26692 - RNA, 19 nt, Artificial Sequence
  Description of Artificial Sequence: Synthetic oligonucleotide
  Sense strand starting at position 36 of SEQ ID NO: 302
cucuucugucguuuguaua

SEQ ID NO: 26693 - RNA, 19 nt, Artificial Sequence
  Description of Artificial Sequence: Synthetic oligonucleotide
  Antisense strand to SEQ ID NO: 26692
uauacaaacgacagaagag

SEQ ID NO: 26694 - RNA, 19 nt, Artificial Sequence
  Description of Artificial Sequence: Synthetic oligonucleotide
  Sense strand starting at position 22 of SEQ ID NO: 302
augagugaauuugacucuu

SEQ ID NO: 26695 - RNA, 19 nt, Artificial Sequence
  Description of Artificial Sequence: Synthetic oligonucleotide
  Antisense strand to SEQ ID NO: 26694
aagagucaaauucacucau

SEQ ID NO: 26696 - RNA, 19 nt, Artificial Sequence
  Description of Artificial Sequence: Synthetic oligonucleotide
  Sense strand starting at position 14 of SEQ ID NO: 302
gagucuauaugagugaauu

SEQ ID NO: 26697 - RNA, 19 nt, Artificial Sequence
  Description of Artificial Sequence: Synthetic oligonucleotide
  Antisense strand to SEQ ID NO: 26696
aauucacucauauagacuc

SEQ ID NO: 26698 - RNA, 19 nt, Artificial Sequence
  Description of Artificial Sequence: Synthetic oligonucleotide
  Sense strand starting at position 3906 of SEQ ID NO: 300
guaagcacccucuaagaca

SEQ ID NO: 26699 - RNA, 19 nt, Artificial Sequence
  Description of Artificial Sequence: Synthetic oligonucleotide
  Antisense strand to SEQ ID NO: 26698
ugucuuagagggugcuuac

SEQ ID NO: 26700 - RNA, 19 nt, Artificial Sequence
  Description of Artificial Sequence: Synthetic oligonucleotide
  Sense strand starting at position 3696 of SEQ ID NO: 300
guauuuguauucccuucca

SEQ ID NO: 26701 - RNA, 19 nt, Artificial Sequence
  Description of Artificial Sequence: Synthetic oligonucleotide
  Antisense strand to SEQ ID NO: 26700
uggaagggaauacaaauac

SEQ ID NO: 26702 - RNA, 19 nt, Artificial Sequence
  Description of Artificial Sequence: Synthetic oligonucleotide
  Sense strand starting at position 3681 of SEQ ID NO: 300
guuugugucugauuuguau

SEQ ID NO: 26703 - RNA, 19 nt, Artificial Sequence
  Description of Artificial Sequence: Synthetic oligonucleotide
  Antisense strand to SEQ ID NO: 26702
auacaaaucagacacaaac

SEQ ID NO: 26704 - RNA, 19 nt, Artificial Sequence
  Description of Artificial Sequence: Synthetic oligonucleotide
  Sense strand starting at position 3678 of SEQ ID NO: 300
aggguuugugucugauuug

SEQ ID NO: 26705 - RNA, 19 nt, Artificial Sequence
  Description of Artificial Sequence: Synthetic oligonucleotide
  Antisense strand to SEQ ID NO: 26704
caaaucagacacaaacccu

SEQ ID NO: 26706 - RNA, 19 nt, Artificial Sequence
  Description of Artificial Sequence: Synthetic oligonucleotide
  Sense strand starting at position 3677 of SEQ ID NO: 300
caggguuugugucugauuu

SEQ ID NO: 26707 - RNA, 19 nt, Artificial Sequence
  Description of Artificial Sequence: Synthetic oligonucleotide
  Antisense strand to SEQ ID NO: 26706
aaaucagacacaaacccug

SEQ ID NO: 26708 - RNA, 19 nt, Artificial Sequence
  Description of Artificial Sequence: Synthetic oligonucleotide
  Sense strand starting at position 3580 of SEQ ID NO: 300
gucuaauuugcagguccca

SEQ ID NO: 26709 - RNA, 19 nt, Artificial Sequence
  Description of Artificial Sequence: Synthetic oligonucleotide
  Antisense strand to SEQ ID NO: 26708
ugggaccugcaaauuagac

SEQ ID NO: 26710 - RNA, 19 nt, Artificial Sequence
  Description of Artificial Sequence: Synthetic oligonucleotide
  Sense strand starting at position 3574 of SEQ ID NO: 300
gucuuagucuaauuugcag

SEQ ID NO: 26711 - RNA, 19 nt, Artificial Sequence
  Description of Artificial Sequence: Synthetic oligonucleotide
  Antisense strand to SEQ ID NO: 26710
cugcaaauuagacuaagac

SEQ ID NO: 26712 - RNA, 19 nt, Artificial Sequence
  Description of Artificial Sequence: Synthetic oligonucleotide
  Sense strand starting at position 3501 of SEQ ID NO: 300
auuacuuaucacugaguuu

SEQ ID NO: 26713 - RNA, 19 nt, Artificial Sequence
  Description of Artificial Sequence: Synthetic oligonucleotide
  Antisense strand to SEQ ID NO: 26712
aaacucagugauaaguaau

SEQ ID NO: 26714 - RNA, 19 nt, Artificial Sequence
  Description of Artificial Sequence: Synthetic oligonucleotide
  Sense strand starting at position 2926 of SEQ ID NO: 300
gagauaagguugccauaaa

SEQ ID NO: 26715 - RNA, 19 nt, Artificial Sequence
  Description of Artificial Sequence: Synthetic oligonucleotide
  Antisense strand to SEQ ID NO: 26714
uuuauggcaaccuuaucuc

SEQ ID NO: 26716 - RNA, 19 nt, Artificial Sequence
  Description of Artificial Sequence: Synthetic oligonucleotide
  Sense strand starting at position 2924 of SEQ ID NO: 300
uggagauaagguugccaua

SEQ ID NO: 26717 - RNA, 19 nt, Artificial Sequence
  Description of Artificial Sequence: Synthetic oligonucleotide
  Antisense strand to SEQ ID NO: 26716
uauggcaaccuuaucucca

SEQ ID NO: 26718 - RNA, 19 nt, Artificial Sequence
  Description of Artificial Sequence: Synthetic oligonucleotide
  Sense strand starting at position 2913 of SEQ ID NO: 300
ggcagcaaccuuggagaua

SEQ ID NO: 26719 - RNA, 19 nt, Artificial Sequence
  Description of Artificial Sequence: Synthetic oligonucleotide
  Antisense strand to SEQ ID NO: 26718
uaucuccaagguugcugcc

SEQ ID NO: 26720 - RNA, 19 nt, Artificial Sequence
  Description of Artificial Sequence: Synthetic oligonucleotide
  Sense strand starting at position 2777 of SEQ ID NO: 300
ugucuuucuccugaaagga

SEQ ID NO: 26721 - RNA, 19 nt, Artificial Sequence
  Description of Artificial Sequence: Synthetic oligonucleotide
  Antisense strand to SEQ ID NO: 26720
uccuuucaggagaaagaca

SEQ ID NO: 26722 - RNA, 19 nt, Artificial Sequence
  Description of Artificial Sequence: Synthetic oligonucleotide
  Sense strand starting at position 2761 of SEQ ID NO: 300
ugugaugauuaaucuaugu

SEQ ID NO: 26723 - RNA, 19 nt, Artificial Sequence
  Description of Artificial Sequence: Synthetic oligonucleotide
  Antisense strand to SEQ ID NO: 26722
acauagauuaaucaucaca

SEQ ID NO: 26724 - RNA, 19 nt, Artificial Sequence
  Description of Artificial Sequence: Synthetic oligonucleotide
  Sense strand starting at position 2758 of SEQ ID NO: 300
guuugugaugauuaaucua

SEQ ID NO: 26725 - RNA, 19 nt, Artificial Sequence
  Description of Artificial Sequence: Synthetic oligonucleotide
  Antisense strand to SEQ ID NO: 26724
uagauuaaucaucacaaac

SEQ ID NO: 26726 - RNA, 19 nt, Artificial Sequence
  Description of Artificial Sequence: Synthetic oligonucleotide
  Sense strand starting at position 2755 of SEQ ID NO: 300
acuguuugugaugauuaau

SEQ ID NO: 26727 - RNA, 19 nt, Artificial Sequence
  Description of Artificial Sequence: Synthetic oligonucleotide
  Antisense strand to SEQ ID NO: 26726
auuaaucaucacaaacagu

SEQ ID NO: 26728 - RNA, 19 nt, Artificial Sequence
  Description of Artificial Sequence: Synthetic oligonucleotide
  Sense strand starting at position 2750 of SEQ ID NO: 300
uuacuacuguuugugauga

SEQ ID NO: 26729 - RNA, 19 nt, Artificial Sequence
  Description of Artificial Sequence: Synthetic oligonucleotide
  Antisense strand to SEQ ID NO: 26728
ucaucacaaacaguaguaa

SEQ ID NO: 26730 - RNA, 19 nt, Artificial Sequence
  Description of Artificial Sequence: Synthetic oligonucleotide
  Sense strand starting at position 2601 of SEQ ID NO: 300
cuugcuugugacuacuaua

SEQ ID NO: 26731 - RNA, 19 nt, Artificial Sequence
  Description of Artificial Sequence: Synthetic oligonucleotide
  Antisense strand to SEQ ID NO: 26730
uauaguagucacaagcaag

SEQ ID NO: 26732 - RNA, 19 nt, Artificial Sequence
  Description of Artificial Sequence: Synthetic oligonucleotide
  Sense strand starting at position 2538 of SEQ ID NO: 300
aggagaaugcuuuggucuc

SEQ ID NO: 26733 - RNA, 19 nt, Artificial Sequence
  Description of Artificial Sequence: Synthetic oligonucleotide
  Antisense strand to SEQ ID NO: 26732
gagaccaaagcauucuccu

SEQ ID NO: 26734 - RNA, 19 nt, Artificial Sequence
  Description of Artificial Sequence: Synthetic oligonucleotide
  Sense strand starting at position 2307 of SEQ ID NO: 300
acgaaagcucaaggaagua

SEQ ID NO: 26735 - RNA, 19 nt, Artificial Sequence
  Description of Artificial Sequence: Synthetic oligonucleotide
  Antisense strand to SEQ ID NO: 26734
uacuuccuugagcuuucgu

SEQ ID NO: 26736 - RNA, 19 nt, Artificial Sequence
  Description of Artificial Sequence: Synthetic oligonucleotide
  Sense strand starting at position 2193 of SEQ ID NO: 300
aagagaacgggcugucaau

SEQ ID NO: 26737 - RNA, 19 nt, Artificial Sequence
  Description of Artificial Sequence: Synthetic oligonucleotide
  Antisense strand to SEQ ID NO: 26736
auugacagcccguucucuu

SEQ ID NO: 26738 - RNA, 19 nt, Artificial Sequence
  Description of Artificial Sequence: Synthetic oligonucleotide
  Sense strand starting at position 2159 of SEQ ID NO: 300
guccaacuucuguaacucu

SEQ ID NO: 26739 - RNA, 19 nt, Artificial Sequence
  Description of Artificial Sequence: Synthetic oligonucleotide
  Antisense strand to SEQ ID NO: 26738
agaguuacagaaguuggac

SEQ ID NO: 26740 - RNA, 19 nt, Artificial Sequence
  Description of Artificial Sequence: Synthetic oligonucleotide
  Sense strand starting at position 2033 of SEQ ID NO: 300
gguuucugggaaugcaaau

SEQ ID NO: 26741 - RNA, 19 nt, Artificial Sequence
  Description of Artificial Sequence: Synthetic oligonucleotide
  Antisense strand to SEQ ID NO: 26740
auuugcauucccagaaacc

SEQ ID NO: 26742 - RNA, 19 nt, Artificial Sequence
  Description of Artificial Sequence: Synthetic oligonucleotide
  Sense strand starting at position 1507 of SEQ ID NO: 300
caggguuaucauuaaaugu

SEQ ID NO: 26743 - RNA, 19 nt, Artificial Sequence
  Description of Artificial Sequence: Synthetic oligonucleotide
  Antisense strand to SEQ ID NO: 26742
acauuuaaugauaacccug

SEQ ID NO: 26744 - RNA, 19 nt, Artificial Sequence
  Description of Artificial Sequence: Synthetic oligonucleotide
  Sense strand starting at position 1503 of SEQ ID NO: 300
agaucaggguuaucauuaa

SEQ ID NO: 26745 - RNA, 19 nt, Artificial Sequence
  Description of Artificial Sequence: Synthetic oligonucleotide
  Antisense strand to SEQ ID NO: 26744
uuaaugauaacccugaucu

SEQ ID NO: 26746 - RNA, 19 nt, Artificial Sequence
  Description of Artificial Sequence: Synthetic oligonucleotide
  Sense strand starting at position 1097 of SEQ ID NO: 300
ccaaguacucuguauucua

SEQ ID NO: 26747 - RNA, 19 nt, Artificial Sequence
  Description of Artificial Sequence: Synthetic oligonucleotide
  Antisense strand to SEQ ID NO: 26746
uagaauacagaguacuugg

SEQ ID NO: 26748 - RNA, 19 nt, Artificial Sequence
  Description of Artificial Sequence: Synthetic oligonucleotide
  Sense strand starting at position 1065 of SEQ ID NO: 300
cuggauuauugauccugau

SEQ ID NO: 26749 - RNA, 19 nt, Artificial Sequence
  Description of Artificial Sequence: Synthetic oligonucleotide
  Antisense strand to SEQ ID NO: 26748
aucaggaucaauaauccag

SEQ ID NO: 26750 - RNA, 19 nt, Artificial Sequence
  Description of Artificial Sequence: Synthetic oligonucleotide
  Sense strand starting at position 968 of SEQ ID NO: 300
agugcucugcuggaagaaa

SEQ ID NO: 26751 - RNA, 19 nt, Artificial Sequence
  Description of Artificial Sequence: Synthetic oligonucleotide
  Antisense strand to SEQ ID NO: 26750
uuucuuccagcagagcacu

SEQ ID NO: 26752 - RNA, 19 nt, Artificial Sequence
  Description of Artificial Sequence: Synthetic oligonucleotide
  Sense strand starting at position 739 of SEQ ID NO: 300
guaggaugugaaggaguaa

SEQ ID NO: 26753 - RNA, 19 nt, Artificial Sequence
  Description of Artificial Sequence: Synthetic oligonucleotide
  Antisense strand to SEQ ID NO: 26752
uuacuccuucacauccuac

SEQ ID NO: 26754 - RNA, 19 nt, Artificial Sequence
  Description of Artificial Sequence: Synthetic oligonucleotide
  Sense strand starting at position 584 of SEQ ID NO: 300
ggaauugauucuguuaauu

SEQ ID NO: 26755 - RNA, 19 nt, Artificial Sequence
  Description of Artificial Sequence: Synthetic oligonucleotide
  Antisense strand to SEQ ID NO: 26754
aauuaacagaaucaauucc

SEQ ID NO: 26756 - RNA, 19 nt, Artificial Sequence
  Description of Artificial Sequence: Synthetic oligonucleotide
  Sense strand starting at position 452 of SEQ ID NO: 300
cucuucugucguuuguaua

SEQ ID NO: 26757 - RNA, 19 nt, Artificial Sequence
  Description of Artificial Sequence: Synthetic oligonucleotide
  Antisense strand to SEQ ID NO: 26756
uauacaaacgacagaagag

SEQ ID NO: 26758 - RNA, 19 nt, Artificial Sequence
  Description of Artificial Sequence: Synthetic oligonucleotide
  Sense strand starting at position 438 of SEQ ID NO: 300
augagugaauuugacucuu

SEQ ID NO: 26759 - RNA, 19 nt, Artificial Sequence
  Description of Artificial Sequence: Synthetic oligonucleotide
  Antisense strand to SEQ ID NO: 26758
aagagucaaauucacucau

SEQ ID NO: 26760 - RNA, 19 nt, Artificial Sequence
  Description of Artificial Sequence: Synthetic oligonucleotide
  Sense strand starting at position 430 of SEQ ID NO: 300
gagucuauaugagugaauu

SEQ ID NO: 26761 - RNA, 19 nt, Artificial Sequence
  Description of Artificial Sequence: Synthetic oligonucleotide
  Antisense strand to SEQ ID NO: 26760
aauucacucauauagacuc

SEQ ID NO: 26762 - RNA, 19 nt, Artificial Sequence
  Description of Artificial Sequence: Synthetic oligonucleotide
  Sense strand starting at position 395 of SEQ ID NO: 300
uuaucauguguggauaauu

SEQ ID NO: 26763 - RNA, 19 nt, Artificial Sequence
  Description of Artificial Sequence: Synthetic oligonucleotide
  Antisense strand to SEQ ID NO: 26762
aauuauccacacaugauaa

SEQ ID NO: 26764 - RNA, 19 nt, Artificial Sequence
  Description of Artificial Sequence: Synthetic oligonucleotide
  Sense strand starting at position 393 of SEQ ID NO: 300
gauuaucauguguggauaa

SEQ ID NO: 26765 - RNA, 19 nt, Artificial Sequence
  Description of Artificial Sequence: Synthetic oligonucleotide
  Antisense strand to SEQ ID NO: 26764
uuauccacacaugauaauc

SEQ ID NO: 26766 - RNA, 19 nt, Artificial Sequence
  Description of Artificial Sequence: Synthetic oligonucleotide
  Sense strand starting at position 392 of SEQ ID NO: 300
agauuaucauguguggaua

SEQ ID NO: 26767 - RNA, 19 nt, Artificial Sequence
  Description of Artificial Sequence: Synthetic oligonucleotide
  Antisense strand to SEQ ID NO: 26766
uauccacacaugauaaucu

SEQ ID NO: 26768 - RNA, 19 nt, Artificial Sequence
  Description of Artificial Sequence: Synthetic oligonucleotide
  Sense strand starting at position 320 of SEQ ID NO: 300
guuauaugauaggugaaau

SEQ ID NO: 26769 - RNA, 19 nt, Artificial Sequence
  Description of Artificial Sequence: Synthetic oligonucleotide
  Antisense strand to SEQ ID NO: 26768
auuucaccuaucauauaac

SEQ ID NO: 26770 - RNA, 19 nt, Artificial Sequence
  Description of Artificial Sequence: Synthetic oligonucleotide
  Sense strand starting at position 319 of SEQ ID NO: 300
aguuauaugauaggugaaa

SEQ ID NO: 26771 - RNA, 19 nt, Artificial Sequence
  Description of Artificial Sequence: Synthetic oligonucleotide
  Antisense strand to SEQ ID NO: 26770
uuucaccuaucauauaacu

SEQ ID NO: 26772 - RNA, 19 nt, Artificial Sequence
  Description of Artificial Sequence: Synthetic oligonucleotide
  Sense strand starting at position 84 of SEQ ID NO: 300
auaugaguuugguuauaug

SEQ ID NO: 26773 - RNA, 19 nt, Artificial Sequence
  Description of Artificial Sequence: Synthetic oligonucleotide
  Antisense strand to SEQ ID NO: 26772
cauauaaccaaacucauau

SEQ ID NO: 26774 - RNA, 19 nt, Artificial Sequence
  Description of Artificial Sequence: Synthetic oligonucleotide
  Sense strand starting at position 81 of SEQ ID NO: 300
gauauaugaguuugguuau

SEQ ID NO: 26775 - RNA, 19 nt, Artificial Sequence
  Description of Artificial Sequence: Synthetic oligonucleotide
  Antisense strand to SEQ ID NO: 26774
auaaccaaacucauauauc

SEQ ID NO: 26776 - RNA, 19 nt, Artificial Sequence
  Description of Artificial Sequence: Synthetic oligonucleotide
  Sense strand starting at position 78 of SEQ ID NO: 300
agggauauaugaguuuggu

SEQ ID NO: 26777 - RNA, 19 nt, Artificial Sequence
  Description of Artificial Sequence: Synthetic oligonucleotide
  Antisense strand to SEQ ID NO: 26776
accaaacucauauaucccu

SEQ ID NO: 26778 - RNA, 19 nt, Artificial Sequence
  Description of Artificial Sequence: Synthetic oligonucleotide
  Sense strand starting at position 3910 of SEQ ID NO: 303
gucuuugauccauaucagg

SEQ ID NO: 26779 - RNA, 19 nt, Artificial Sequence
  Description of Artificial Sequence: Synthetic oligonucleotide
  Antisense strand to SEQ ID NO: 26778
ccugauauggaucaaagac

SEQ ID NO: 26780 - RNA, 19 nt, Artificial Sequence
  Description of Artificial Sequence: Synthetic oligonucleotide
  Sense strand starting at position 3781 of SEQ ID NO: 303
ccucaauggcuuuaggacu

SEQ ID NO: 26781 - RNA, 19 nt, Artificial Sequence
  Description of Artificial Sequence: Synthetic oligonucleotide
  Antisense strand to SEQ ID NO: 26780
aguccuaaagccauugagg

SEQ ID NO: 26782 - RNA, 19 nt, Artificial Sequence
  Description of Artificial Sequence: Synthetic oligonucleotide
  Sense strand starting at position 3395 of SEQ ID NO: 303
ggaaguguagcucaaguuc

SEQ ID NO: 26783 - RNA, 19 nt, Artificial Sequence
  Description of Artificial Sequence: Synthetic oligonucleotide
  Antisense strand to SEQ ID NO: 26782
gaacuugagcuacacuucc

SEQ ID NO: 26784 - RNA, 19 nt, Artificial Sequence
  Description of Artificial Sequence: Synthetic oligonucleotide
  Sense strand starting at position 3268 of SEQ ID NO: 303
ggguauucuaucuggacac

SEQ ID NO: 26785 - RNA, 19 nt, Artificial Sequence
  Description of Artificial Sequence: Synthetic oligonucleotide
  Antisense strand to SEQ ID NO: 26784
guguccagauagaauaccc

SEQ ID NO: 26786 - RNA, 19 nt, Artificial Sequence
  Description of Artificial Sequence: Synthetic oligonucleotide
  Sense strand starting at position 3267 of SEQ ID NO: 303
aggguauucuaucuggaca

SEQ ID NO: 26787 - RNA, 19 nt, Artificial Sequence
  Description of Artificial Sequence: Synthetic oligonucleotide
  Antisense strand to SEQ ID NO: 26786
uguccagauagaauacccu

SEQ ID NO: 26788 - RNA, 19 nt, Artificial Sequence
  Description of Artificial Sequence: Synthetic oligonucleotide
  Sense strand starting at position 3099 of SEQ ID NO: 303
cugugauuucugugucucu

SEQ ID NO: 26789 - RNA, 19 nt, Artificial Sequence
  Description of Artificial Sequence: Synthetic oligonucleotide
  Antisense strand to SEQ ID NO: 26788
agagacacagaaaucacag

SEQ ID NO: 26790 - RNA, 19 nt, Artificial Sequence
  Description of Artificial Sequence: Synthetic oligonucleotide
  Sense strand starting at position 3005 of SEQ ID NO: 303
ggcaccaaauuguuaucau

SEQ ID NO: 26791 - RNA, 19 nt, Artificial Sequence
  Description of Artificial Sequence: Synthetic oligonucleotide
  Antisense strand to SEQ ID NO: 26790
augauaacaauuuggugcc

SEQ ID NO: 26792 - RNA, 19 nt, Artificial Sequence
  Description of Artificial Sequence: Synthetic oligonucleotide
  Sense strand starting at position 2946 of SEQ ID NO: 303
gaaugacuuguaugcuuaa

SEQ ID NO: 26793 - RNA, 19 nt, Artificial Sequence
  Description of Artificial Sequence: Synthetic oligonucleotide
  Antisense strand to SEQ ID NO: 26792
uuaagcauacaagucauuc

SEQ ID NO: 26794 - RNA, 19 nt, Artificial Sequence
  Description of Artificial Sequence: Synthetic oligonucleotide
  Sense strand starting at position 2905 of SEQ ID NO: 303
guaguaucauuacugaucu

SEQ ID NO: 26795 - RNA, 19 nt, Artificial Sequence
  Description of Artificial Sequence: Synthetic oligonucleotide
  Antisense strand to SEQ ID NO: 26794
agaucaguaaugauacuac

SEQ ID NO: 26796 - RNA, 19 nt, Artificial Sequence
  Description of Artificial Sequence: Synthetic oligonucleotide
  Sense strand starting at position 2902 of SEQ ID NO: 303
ccaguaguaucauuacuga

SEQ ID NO: 26797 - RNA, 19 nt, Artificial Sequence
  Description of Artificial Sequence: Synthetic oligonucleotide
  Antisense strand to SEQ ID NO: 26796
ucaguaaugauacuacugg

SEQ ID NO: 26798 - RNA, 19 nt, Artificial Sequence
  Description of Artificial Sequence: Synthetic oligonucleotide
  Sense strand starting at position 2894 of SEQ ID NO: 303
aggacuguccaguaguauc

SEQ ID NO: 26799 - RNA, 19 nt, Artificial Sequence
  Description of Artificial Sequence: Synthetic oligonucleotide
  Antisense strand to SEQ ID NO: 26798
gauacuacuggacaguccu

SEQ ID NO: 26800 - RNA, 19 nt, Artificial Sequence
  Description of Artificial Sequence: Synthetic oligonucleotide
  Sense strand starting at position 2867 of SEQ ID NO: 303
ugggaauauuuagauucuc

SEQ ID NO: 26801 - RNA, 19 nt, Artificial Sequence
  Description of Artificial Sequence: Synthetic oligonucleotide
  Antisense strand to SEQ ID NO: 26800
gagaaucuaaauauuccca

SEQ ID NO: 26802 - RNA, 19 nt, Artificial Sequence
  Description of Artificial Sequence: Synthetic oligonucleotide
  Sense strand starting at position 2856 of SEQ ID NO: 303
cucaauauccuugggaaua

SEQ ID NO: 26803 - RNA, 19 nt, Artificial Sequence
  Description of Artificial Sequence: Synthetic oligonucleotide
  Antisense strand to SEQ ID NO: 26802
uauucccaaggauauugag

SEQ ID NO: 26804 - RNA, 19 nt, Artificial Sequence
  Description of Artificial Sequence: Synthetic oligonucleotide
  Sense strand starting at position 2855 of SEQ ID NO: 303
ucucaauauccuugggaau

SEQ ID NO: 26805 - RNA, 19 nt, Artificial Sequence
  Description of Artificial Sequence: Synthetic oligonucleotide
  Antisense strand to SEQ ID NO: 26804
auucccaaggauauugaga

SEQ ID NO: 26806 - RNA, 19 nt, Artificial Sequence
  Description of Artificial Sequence: Synthetic oligonucleotide
  Sense strand starting at position 2854 of SEQ ID NO: 303
gucucaauauccuugggaa

SEQ ID NO: 26807 - RNA, 19 nt, Artificial Sequence
  Description of Artificial Sequence: Synthetic oligonucleotide
  Antisense strand to SEQ ID NO: 26806
uucccaaggauauugagac

SEQ ID NO: 26808 - RNA, 19 nt, Artificial Sequence
  Description of Artificial Sequence: Synthetic oligonucleotide
  Sense strand starting at position 2480 of SEQ ID NO: 303
aggguaucuguuuauugag

SEQ ID NO: 26809 - RNA, 19 nt, Artificial Sequence
  Description of Artificial Sequence: Synthetic oligonucleotide
  Antisense strand to SEQ ID NO: 26808
cucaauaaacagauacccu

SEQ ID NO: 26810 - RNA, 19 nt, Artificial Sequence
  Description of Artificial Sequence: Synthetic oligonucleotide
  Sense strand starting at position 2479 of SEQ ID NO: 303
caggguaucuguuuauuga

SEQ ID NO: 26811 - RNA, 19 nt, Artificial Sequence
  Description of Artificial Sequence: Synthetic oligonucleotide
  Antisense strand to SEQ ID NO: 26810
ucaauaaacagauacccug

SEQ ID NO: 26812 - RNA, 19 nt, Artificial Sequence
  Description of Artificial Sequence: Synthetic oligonucleotide
  Sense strand starting at position 2475 of SEQ ID NO: 303
gauccaggguaucuguuua

SEQ ID NO: 26813 - RNA, 19 nt, Artificial Sequence
  Description of Artificial Sequence: Synthetic oligonucleotide
  Antisense strand to SEQ ID NO: 26812
uaaacagauacccuggauc

SEQ ID NO: 26814 - RNA, 19 nt, Artificial Sequence
  Description of Artificial Sequence: Synthetic oligonucleotide
  Sense strand starting at position 2469 of SEQ ID NO: 303
cauugagauccaggguauc

SEQ ID NO: 26815 - RNA, 19 nt, Artificial Sequence
  Description of Artificial Sequence: Synthetic oligonucleotide
  Antisense strand to SEQ ID NO: 26814
gauacccuggaucucaaug

SEQ ID NO: 26816 - RNA, 19 nt, Artificial Sequence
  Description of Artificial Sequence: Synthetic oligonucleotide
  Sense strand starting at position 2412 of SEQ ID NO: 303
ccugaaauauauguguaau

SEQ ID NO: 26817 - RNA, 19 nt, Artificial Sequence
  Description of Artificial Sequence: Synthetic oligonucleotide
  Antisense strand to SEQ ID NO: 26816
auuacacauauauuucagg

SEQ ID NO: 26818 - RNA, 19 nt, Artificial Sequence
  Description of Artificial Sequence: Synthetic oligonucleotide
  Sense strand starting at position 2369 of SEQ ID NO: 303
ccauuacaugaagguucua

SEQ ID NO: 26819 - RNA, 19 nt, Artificial Sequence
  Description of Artificial Sequence: Synthetic oligonucleotide
  Antisense strand to SEQ ID NO: 26818
uagaaccuucauguaaugg

SEQ ID NO: 26820 - RNA, 19 nt, Artificial Sequence
  Description of Artificial Sequence: Synthetic oligonucleotide
  Sense strand starting at position 2308 of SEQ ID NO: 303
aggcuaauauugguauauc

SEQ ID NO: 26821 - RNA, 19 nt, Artificial Sequence
  Description of Artificial Sequence: Synthetic oligonucleotide
  Antisense strand to SEQ ID NO: 26820
gauauaccaauauuagccu

SEQ ID NO: 26822 - RNA, 19 nt, Artificial Sequence
  Description of Artificial Sequence: Synthetic oligonucleotide
  Sense strand starting at position 2232 of SEQ ID NO: 303
ucuagaauuccuggucuuu

SEQ ID NO: 26823 - RNA, 19 nt, Artificial Sequence
  Description of Artificial Sequence: Synthetic oligonucleotide
  Antisense strand to SEQ ID NO: 26822
aaagaccaggaauucuaga

SEQ ID NO: 26824 - RNA, 19 nt, Artificial Sequence
  Description of Artificial Sequence: Synthetic oligonucleotide
  Sense strand starting at position 2058 of SEQ ID NO: 303
gguauugauuaccuaaaua

SEQ ID NO: 26825 - RNA, 19 nt, Artificial Sequence
  Description of Artificial Sequence: Synthetic oligonucleotide
  Antisense strand to SEQ ID NO: 26824
uauuuagguaaucaauacc

SEQ ID NO: 26826 - RNA, 19 nt, Artificial Sequence
  Description of Artificial Sequence: Synthetic oligonucleotide
  Sense strand starting at position 2057 of SEQ ID NO: 303
ggguauugauuaccuaaau

SEQ ID NO: 26827 - RNA, 19 nt, Artificial Sequence
  Description of Artificial Sequence: Synthetic oligonucleotide
  Antisense strand to SEQ ID NO: 26826
auuuagguaaucaauaccc

SEQ ID NO: 26828 - RNA, 19 nt, Artificial Sequence
  Description of Artificial Sequence: Synthetic oligonucleotide
  Sense strand starting at position 1654 of SEQ ID NO: 303
ccuccacaggaguaguaau

SEQ ID NO: 26829 - RNA, 19 nt, Artificial Sequence
  Description of Artificial Sequence: Synthetic oligonucleotide
  Antisense strand to SEQ ID NO: 26828
auuacuacuccuguggagg

SEQ ID NO: 26830 - RNA, 19 nt, Artificial Sequence
  Description of Artificial Sequence: Synthetic oligonucleotide
  Sense strand starting at position 1584 of SEQ ID NO: 303
gcauuagagcugugauuua

SEQ ID NO: 26831 - RNA, 19 nt, Artificial Sequence
  Description of Artificial Sequence: Synthetic oligonucleotide
  Antisense strand to SEQ ID NO: 26830
uaaaucacagcucuaaugc

SEQ ID NO: 26832 - RNA, 19 nt, Artificial Sequence
  Description of Artificial Sequence: Synthetic oligonucleotide
  Sense strand starting at position 1437 of SEQ ID NO: 303
acuauaagcugaguacauu

SEQ ID NO: 26833 - RNA, 19 nt, Artificial Sequence
  Description of Artificial Sequence: Synthetic oligonucleotide
  Antisense strand to SEQ ID NO: 26832
aauguacucagcuuauagu

SEQ ID NO: 26834 - RNA, 19 nt, Artificial Sequence
  Description of Artificial Sequence: Synthetic oligonucleotide
  Sense strand starting at position 1435 of SEQ ID NO: 303
cuacuauaagcugaguaca

SEQ ID NO: 26835 - RNA, 19 nt, Artificial Sequence
  Description of Artificial Sequence: Synthetic oligonucleotide
  Antisense strand to SEQ ID NO: 26834
uguacucagcuuauaguag

SEQ ID NO: 26836 - RNA, 19 nt, Artificial Sequence
  Description of Artificial Sequence: Synthetic oligonucleotide
  Sense strand starting at position 1419 of SEQ ID NO: 303
gucauuuauuaagugucua

SEQ ID NO: 26837 - RNA, 19 nt, Artificial Sequence
  Description of Artificial Sequence: Synthetic oligonucleotide
  Antisense strand to SEQ ID NO: 26836
uagacacuuaauaaaugac

SEQ ID NO: 26838 - RNA, 19 nt, Artificial Sequence
  Description of Artificial Sequence: Synthetic oligonucleotide
  Sense strand starting at position 1059 of SEQ ID NO: 303
agcuaucccgaaggugaaa

SEQ ID NO: 26839 - RNA, 19 nt, Artificial Sequence
  Description of Artificial Sequence: Synthetic oligonucleotide
  Antisense strand to SEQ ID NO: 26838
uuucaccuucgggauagcu

SEQ ID NO: 26840 - RNA, 19 nt, Artificial Sequence
  Description of Artificial Sequence: Synthetic oligonucleotide
  Sense strand starting at position 1044 of SEQ ID NO: 303
cagggauugcuuuaaagcu

SEQ ID NO: 26841 - RNA, 19 nt, Artificial Sequence
  Description of Artificial Sequence: Synthetic oligonucleotide
  Antisense strand to SEQ ID NO: 26840
agcuuuaaagcaaucccug

SEQ ID NO: 26842 - RNA, 19 nt, Artificial Sequence
  Description of Artificial Sequence: Synthetic oligonucleotide
  Sense strand starting at position 1039 of SEQ ID NO: 303
ggagacagggauugcuuua

SEQ ID NO: 26843 - RNA, 19 nt, Artificial Sequence
  Description of Artificial Sequence: Synthetic oligonucleotide
  Antisense strand to SEQ ID NO: 26842
uaaagcaaucccugucucc

SEQ ID NO: 26844 - RNA, 19 nt, Artificial Sequence
  Description of Artificial Sequence: Synthetic oligonucleotide
  Sense strand starting at position 1025 of SEQ ID NO: 303
aucuuuaauguuugggaga

SEQ ID NO: 26845 - RNA, 19 nt, Artificial Sequence
  Description of Artificial Sequence: Synthetic oligonucleotide
  Antisense strand to SEQ ID NO: 26844
ucucccaaacauuaaagau

SEQ ID NO: 26846 - RNA, 19 nt, Artificial Sequence
  Description of Artificial Sequence: Synthetic oligonucleotide
  Sense strand starting at position 775 of SEQ ID NO: 303
gaauaucucggcggagauu

SEQ ID NO: 26847 - RNA, 19 nt, Artificial Sequence
  Description of Artificial Sequence: Synthetic oligonucleotide
  Antisense strand to SEQ ID NO: 26846
aaucuccgccgagauauuc

SEQ ID NO: 26848 - RNA, 19 nt, Artificial Sequence
  Description of Artificial Sequence: Synthetic oligonucleotide
  Sense strand starting at position 774 of SEQ ID NO: 303
agaauaucucggcggagau

SEQ ID NO: 26849 - RNA, 19 nt, Artificial Sequence
  Description of Artificial Sequence: Synthetic oligonucleotide
  Antisense strand to SEQ ID NO: 26848
aucuccgccgagauauucu

SEQ ID NO: 26850 - RNA, 19 nt, Artificial Sequence
  Description of Artificial Sequence: Synthetic oligonucleotide
  Sense strand starting at position 773 of SEQ ID NO: 303
aagaauaucucggcggaga

SEQ ID NO: 26851 - RNA, 19 nt, Artificial Sequence
  Description of Artificial Sequence: Synthetic oligonucleotide
  Antisense strand to SEQ ID NO: 26850
ucuccgccgagauauucuu

SEQ ID NO: 26852 - RNA, 19 nt, Artificial Sequence
  Description of Artificial Sequence: Synthetic oligonucleotide
  Sense strand starting at position 360 of SEQ ID NO: 303
acugaaugauuacuaggua

SEQ ID NO: 26853 - RNA, 19 nt, Artificial Sequence
  Description of Artificial Sequence: Synthetic oligonucleotide
  Antisense strand to SEQ ID NO: 26852
uaccuaguaaucauucagu

SEQ ID NO: 26854 - RNA, 19 nt, Artificial Sequence
  Description of Artificial Sequence: Synthetic oligonucleotide
  Sense strand starting at position 276 of SEQ ID NO: 303
gucugauuauugucaacca

SEQ ID NO: 26855 - RNA, 19 nt, Artificial Sequence
  Description of Artificial Sequence: Synthetic oligonucleotide
  Antisense strand to SEQ ID NO: 26854
ugguugacaauaaucagac

SEQ ID NO: 26856 - RNA, 19 nt, Artificial Sequence
  Description of Artificial Sequence: Synthetic oligonucleotide
  Sense strand starting at position 247 of SEQ ID NO: 303
ugccaauuggcauauuaua

SEQ ID NO: 26857 - RNA, 19 nt, Artificial Sequence
  Description of Artificial Sequence: Synthetic oligonucleotide
  Antisense strand to SEQ ID NO: 26856
uauaauaugccaauuggca

SEQ ID NO: 26858 - RNA, 19 nt, Artificial Sequence
  Description of Artificial Sequence: Synthetic oligonucleotide
  Sense strand starting at position 21 of SEQ ID NO: 304
ugauguuguagugacaauu

SEQ ID NO: 26859 - RNA, 19 nt, Artificial Sequence
  Description of Artificial Sequence: Synthetic oligonucleotide
  Antisense strand to SEQ ID NO: 26858
aauugucacuacaacauca

SEQ ID NO: 26860 - RNA, 19 nt, Artificial Sequence
  Description of Artificial Sequence: Synthetic oligonucleotide
  Sense strand starting at position 116 of SEQ ID NO: 304
uauauauuugaucguguca

SEQ ID NO: 26861 - RNA, 19 nt, Artificial Sequence
  Description of Artificial Sequence: Synthetic oligonucleotide
  Antisense strand to SEQ ID NO: 26860
ugacacgaucaaauauaua

SEQ ID NO: 26862 - RNA, 19 nt, Artificial Sequence
  Description of Artificial Sequence: Synthetic oligonucleotide
  Sense strand starting at position 167 of SEQ ID NO: 304
augcauuguggugaggaua

SEQ ID NO: 26863 - RNA, 19 nt, Artificial Sequence
  Description of Artificial Sequence: Synthetic oligonucleotide
  Antisense strand to SEQ ID NO: 26862
uauccucaccacaaugcau

SEQ ID NO: 26864 - RNA, 19 nt, Artificial Sequence
  Description of Artificial Sequence: Synthetic oligonucleotide
  Sense strand starting at position 486 of SEQ ID NO: 304
cccuguagagcugaucauu

SEQ ID NO: 26865 - RNA, 19 nt, Artificial Sequence
  Description of Artificial Sequence: Synthetic oligonucleotide
  Antisense strand to SEQ ID NO: 26864
aaugaucagcucuacaggg

SEQ ID NO: 26866 - RNA, 19 nt, Artificial Sequence
  Description of Artificial Sequence: Synthetic oligonucleotide
  Sense strand starting at position 640 of SEQ ID NO: 304
ggcacaaugcuauagauag

SEQ ID NO: 26867 - RNA, 19 nt, Artificial Sequence
  Description of Artificial Sequence: Synthetic oligonucleotide
  Antisense strand to SEQ ID NO: 26866
cuaucuauagcauugugcc

SEQ ID NO: 26868 - RNA, 19 nt, Artificial Sequence
  Description of Artificial Sequence: Synthetic oligonucleotide
  Sense strand starting at position 650 of SEQ ID NO: 304
uauagauaggguugcuaug

SEQ ID NO: 26869 - RNA, 19 nt, Artificial Sequence
  Description of Artificial Sequence: Synthetic oligonucleotide
  Antisense strand to SEQ ID NO: 26868
cauagcaacccuaucuaua

SEQ ID NO: 26870 - RNA, 19 nt, Artificial Sequence
  Description of Artificial Sequence: Synthetic oligonucleotide
  Sense strand starting at position 680 of SEQ ID NO: 304
uccuccauuccggagacau

SEQ ID NO: 26871 - RNA, 19 nt, Artificial Sequence
  Description of Artificial Sequence: Synthetic oligonucleotide
  Antisense strand to SEQ ID NO: 26870
augucuccggaauggagga

SEQ ID NO: 26872 - RNA, 19 nt, Artificial Sequence
  Description of Artificial Sequence: Synthetic oligonucleotide
  Sense strand starting at position 783 of SEQ ID NO: 304
ggaguuucuugaucauccu

SEQ ID NO: 26873 - RNA, 19 nt, Artificial Sequence
  Description of Artificial Sequence: Synthetic oligonucleotide
  Antisense strand to SEQ ID NO: 26872
aggaugaucaagaaacucc

SEQ ID NO: 26874 - RNA, 19 nt, Artificial Sequence
  Description of Artificial Sequence: Synthetic oligonucleotide
  Sense strand starting at position 821 of SEQ ID NO: 304
guggccaauagauagugaa

SEQ ID NO: 26875 - RNA, 19 nt, Artificial Sequence
  Description of Artificial Sequence: Synthetic oligonucleotide
  Antisense strand to SEQ ID NO: 26874
uucacuaucuauuggccac

SEQ ID NO: 26876 - RNA, 19 nt, Artificial Sequence
  Description of Artificial Sequence: Synthetic oligonucleotide
  Sense strand starting at position 933 of SEQ ID NO: 304
gugaaagguuuguucagau

SEQ ID NO: 26877 - RNA, 19 nt, Artificial Sequence
  Description of Artificial Sequence: Synthetic oligonucleotide
  Antisense strand to SEQ ID NO: 26876
aucugaacaaaccuuucac

SEQ ID NO: 26878 - RNA, 19 nt, Artificial Sequence
  Description of Artificial Sequence: Synthetic oligonucleotide
  Sense strand starting at position 1127 of SEQ ID NO: 304
uugagcucccacuaggaua

SEQ ID NO: 26879 - RNA, 19 nt, Artificial Sequence
  Description of Artificial Sequence: Synthetic oligonucleotide
  Antisense strand to SEQ ID NO: 26878
uauccuagugggagcucaa

SEQ ID NO: 26880 - RNA, 19 nt, Artificial Sequence
  Description of Artificial Sequence: Synthetic oligonucleotide
  Sense strand starting at position 1129 of SEQ ID NO: 304
gagcucccacuaggauauu

SEQ ID NO: 26881 - RNA, 19 nt, Artificial Sequence
  Description of Artificial Sequence: Synthetic oligonucleotide
  Antisense strand to SEQ ID NO: 26880
aauauccuagugggagcuc

SEQ ID NO: 26882 - RNA, 19 nt, Artificial Sequence
  Description of Artificial Sequence: Synthetic oligonucleotide
  Sense strand starting at position 1192 of SEQ ID NO: 304
ugaaauaaaucagccagca

SEQ ID NO: 26883 - RNA, 19 nt, Artificial Sequence
  Description of Artificial Sequence: Synthetic oligonucleotide
  Antisense strand to SEQ ID NO: 26882
ugcuggcugauuuauuuca

SEQ ID NO: 26884 - RNA, 19 nt, Artificial Sequence
  Description of Artificial Sequence: Synthetic oligonucleotide
  Sense strand starting at position 1435 of SEQ ID NO: 304
ggaggcuuuguucagaaua

SEQ ID NO: 26885 - RNA, 19 nt, Artificial Sequence
  Description of Artificial Sequence: Synthetic oligonucleotide
  Antisense strand to SEQ ID NO: 26884
uauucugaacaaagccucc

SEQ ID NO: 26886 - RNA, 19 nt, Artificial Sequence
  Description of Artificial Sequence: Synthetic oligonucleotide
  Sense strand starting at position 1506 of SEQ ID NO: 304
aguuucuuacaggaacuuu

SEQ ID NO: 26887 - RNA, 19 nt, Artificial Sequence
  Description of Artificial Sequence: Synthetic oligonucleotide
  Antisense strand to SEQ ID NO: 26886
aaaguuccuguaagaaacu

SEQ ID NO: 26888 - RNA, 19 nt, Artificial Sequence
  Description of Artificial Sequence: Synthetic oligonucleotide
  Sense strand starting at position 1572 of SEQ ID NO: 304
gauaguauguuaucagaug

SEQ ID NO: 26889 - RNA, 19 nt, Artificial Sequence
  Description of Artificial Sequence: Synthetic oligonucleotide
  Antisense strand to SEQ ID NO: 26888
caucugauaacauacuauc

SEQ ID NO: 26890 - RNA, 19 nt, Artificial Sequence
  Description of Artificial Sequence: Synthetic oligonucleotide
  Sense strand starting at position 1581 of SEQ ID NO: 304
uuaucagaugcaugcaaau

SEQ ID NO: 26891 - RNA, 19 nt, Artificial Sequence
  Description of Artificial Sequence: Synthetic oligonucleotide
  Antisense strand to SEQ ID NO: 26890
auuugcaugcaucugauaa

SEQ ID NO: 26892 - RNA, 19 nt, Artificial Sequence
  Description of Artificial Sequence: Synthetic oligonucleotide
  Sense strand starting at position 1593 of SEQ ID NO: 304
ugcaaauugccuuaagaga

SEQ ID NO: 26893 - RNA, 19 nt, Artificial Sequence
  Description of Artificial Sequence: Synthetic oligonucleotide
  Antisense strand to SEQ ID NO: 26892
ucucuuaaggcaauuugca

SEQ ID NO: 26894 - RNA, 19 nt, Artificial Sequence
  Description of Artificial Sequence: Synthetic oligonucleotide
  Sense strand starting at position 1639 of SEQ ID NO: 304
aagagauggucagcaucau

SEQ ID NO: 26895 - RNA, 19 nt, Artificial Sequence
  Description of Artificial Sequence: Synthetic oligonucleotide
  Antisense strand to SEQ ID NO: 26894
augaugcugaccaucucuu

SEQ ID NO: 26896 - RNA, 19 nt, Artificial Sequence
  Description of Artificial Sequence: Synthetic oligonucleotide
  Sense strand starting at position 1672 of SEQ ID NO: 304
ccugucauauuauugauca

SEQ ID NO: 26897 - RNA, 19 nt, Artificial Sequence
  Description of Artificial Sequence: Synthetic oligonucleotide
  Antisense strand to SEQ ID NO: 26896
ugaucaauaauaugacagg

SEQ ID NO: 26898 - RNA, 19 nt, Artificial Sequence
  Description of Artificial Sequence: Synthetic oligonucleotide
  Sense strand starting at position 1786 of SEQ ID NO: 304
gcccauguccuggaauucu

SEQ ID NO: 26899 - RNA, 19 nt, Artificial Sequence
  Description of Artificial Sequence: Synthetic oligonucleotide
  Antisense strand to SEQ ID NO: 26898
agaauuccaggacaugggc

SEQ ID NO: 26900 - RNA, 19 nt, Artificial Sequence
  Description of Artificial Sequence: Synthetic oligonucleotide
  Sense strand starting at position 2067 of SEQ ID NO: 304
cuauuagugagguggcaag

SEQ ID NO: 26901 - RNA, 19 nt, Artificial Sequence
  Description of Artificial Sequence: Synthetic oligonucleotide
  Antisense strand to SEQ ID NO: 26900
cuugccaccucacuaauag

SEQ ID NO: 26902 - RNA, 19 nt, Artificial Sequence
  Description of Artificial Sequence: Synthetic oligonucleotide
  Sense strand starting at position 2273 of SEQ ID NO: 304
uugcuaaguggugagaauu

SEQ ID NO: 26903 - RNA, 19 nt, Artificial Sequence
  Description of Artificial Sequence: Synthetic oligonucleotide
  Antisense strand to SEQ ID NO: 26902
aauucucaccacuuagcaa

SEQ ID NO: 26904 - RNA, 19 nt, Artificial Sequence
  Description of Artificial Sequence: Synthetic oligonucleotide
  Sense strand starting at position 2283 of SEQ ID NO: 304
gugagaauuaaacacguua

SEQ ID NO: 26905 - RNA, 19 nt, Artificial Sequence
  Description of Artificial Sequence: Synthetic oligonucleotide
  Antisense strand to SEQ ID NO: 26904
uaacguguuuaauucucac

SEQ ID NO: 26906 - RNA, 19 nt, Artificial Sequence
  Description of Artificial Sequence: Synthetic oligonucleotide
  Sense strand starting at position 2297 of SEQ ID NO: 304
cguuaauauaaggaaaugu

SEQ ID NO: 26907 - RNA, 19 nt, Artificial Sequence
  Description of Artificial Sequence: Synthetic oligonucleotide
  Antisense strand to SEQ ID NO: 26906
acauuuccuuauauuaacg

SEQ ID NO: 26908 - RNA, 19 nt, Artificial Sequence
  Description of Artificial Sequence: Synthetic oligonucleotide
  Sense strand starting at position 2340 of SEQ ID NO: 304
ucagauaugucagcuauua

SEQ ID NO: 26909 - RNA, 19 nt, Artificial Sequence
  Description of Artificial Sequence: Synthetic oligonucleotide
  Antisense strand to SEQ ID NO: 26908
uaauagcugacauaucuga

SEQ ID NO: 26910 - RNA, 19 nt, Artificial Sequence
  Description of Artificial Sequence: Synthetic oligonucleotide
  Sense strand starting at position 2432 of SEQ ID NO: 304
caugauguugagcaaguca

SEQ ID NO: 26911 - RNA, 19 nt, Artificial Sequence
  Description of Artificial Sequence: Synthetic oligonucleotide
  Antisense strand to SEQ ID NO: 26910
ugacuugcucaacaucaug

SEQ ID NO: 26912 - RNA, 19 nt, Artificial Sequence
  Description of Artificial Sequence: Synthetic oligonucleotide
  Sense strand starting at position 2750 of SEQ ID NO: 304
augugcacucucuauaagu

SEQ ID NO: 26913 - RNA, 19 nt, Artificial Sequence
  Description of Artificial Sequence: Synthetic oligonucleotide
  Antisense strand to SEQ ID NO: 26912
acuuauagagagugcacau

SEQ ID NO: 26914 - RNA, 19 nt, Artificial Sequence
  Description of Artificial Sequence: Synthetic oligonucleotide
  Sense strand starting at position 2752 of SEQ ID NO: 304
gugcacucucuauaaguga

SEQ ID NO: 26915 - RNA, 19 nt, Artificial Sequence
  Description of Artificial Sequence: Synthetic oligonucleotide
  Antisense strand to SEQ ID NO: 26914
ucacuuauagagagugcac

SEQ ID NO: 26916 - RNA, 19 nt, Artificial Sequence
  Description of Artificial Sequence: Synthetic oligonucleotide
  Sense strand starting at position 2780 of SEQ ID NO: 304
uuuauugacugucucugau

SEQ ID NO: 26917 - RNA, 19 nt, Artificial Sequence
  Description of Artificial Sequence: Synthetic oligonucleotide
  Antisense strand to SEQ ID NO: 26916
aucagagacagucaauaaa

SEQ ID NO: 26918 - RNA, 19 nt, Artificial Sequence
  Description of Artificial Sequence: Synthetic oligonucleotide
  Sense strand starting at position 2873 of SEQ ID NO: 304
cuaaauguguaauuguuga

SEQ ID NO: 26919 - RNA, 19 nt, Artificial Sequence
  Description of Artificial Sequence: Synthetic oligonucleotide
  Antisense strand to SEQ ID NO: 26918
ucaacaauuacacauuuag

SEQ ID NO: 26920 - RNA, 19 nt, Artificial Sequence
  Description of Artificial Sequence: Synthetic oligonucleotide
  Sense strand starting at position 2878 of SEQ ID NO: 304
uguguaauuguugaacaaa

SEQ ID NO: 26921 - RNA, 19 nt, Artificial Sequence
  Description of Artificial Sequence: Synthetic oligonucleotide
  Antisense strand to SEQ ID NO: 26920
uuuguucaacaauuacaca

SEQ ID NO: 26922 - RNA, 19 nt, Artificial Sequence
  Description of Artificial Sequence: Synthetic oligonucleotide
  Sense strand starting at position 3448 of SEQ ID NO: 304
ugcagaugugggugaggaa

SEQ ID NO: 26923 - RNA, 19 nt, Artificial Sequence
  Description of Artificial Sequence: Synthetic oligonucleotide
  Antisense strand to SEQ ID NO: 26922
uuccucacccacaucugca

SEQ ID NO: 26924 - RNA, 19 nt, Artificial Sequence
  Description of Artificial Sequence: Synthetic oligonucleotide
  Sense strand starting at position 3546 of SEQ ID NO: 304
guuacagaguuucucuaag

SEQ ID NO: 26925 - RNA, 19 nt, Artificial Sequence
  Description of Artificial Sequence: Synthetic oligonucleotide
  Antisense strand to SEQ ID NO: 26924
cuuagagaaacucuguaac

SEQ ID NO: 26926 - RNA, 19 nt, Artificial Sequence
  Description of Artificial Sequence: Synthetic oligonucleotide
  Sense strand starting at position 3758 of SEQ ID NO: 304
guccucucacauuaauugu

SEQ ID NO: 26927 - RNA, 19 nt, Artificial Sequence
  Description of Artificial Sequence: Synthetic oligonucleotide
  Antisense strand to SEQ ID NO: 26926
acaauuaaugugagaggac

SEQ ID NO: 26928 - RNA, 19 nt, Artificial Sequence
  Description of Artificial Sequence: Synthetic oligonucleotide
  Sense strand starting at position 3845 of SEQ ID NO: 304
ggugcaagacuccauguca

SEQ ID NO: 26929 - RNA, 19 nt, Artificial Sequence
  Description of Artificial Sequence: Synthetic oligonucleotide
  Antisense strand to SEQ ID NO: 26928
ugacauggagucuugcacc

SEQ ID NO: 26930 - RNA, 19 nt, Artificial Sequence
  Description of Artificial Sequence: Synthetic oligonucleotide
  Sense strand starting at position 3865 of SEQ ID NO: 304
cguugucccaaaggaugaa

SEQ ID NO: 26931 - RNA, 19 nt, Artificial Sequence
  Description of Artificial Sequence: Synthetic oligonucleotide
  Antisense strand to SEQ ID NO: 26930
uucauccuuugggacaacg

SEQ ID NO: 26932 - RNA, 19 nt, Artificial Sequence
  Description of Artificial Sequence: Synthetic oligonucleotide
  Sense strand starting at position 3907 of SEQ ID NO: 304
gauuguggugguuaaucau

SEQ ID NO: 26933 - RNA, 19 nt, Artificial Sequence
  Description of Artificial Sequence: Synthetic oligonucleotide
  Antisense strand to SEQ ID NO: 26932
augauuaaccaccacaauc

SEQ ID NO: 26934 - RNA, 19 nt, Artificial Sequence
  Description of Artificial Sequence: Synthetic oligonucleotide
  Sense strand starting at position 3953 of SEQ ID NO: 304
aagaaagauccauguccug

SEQ ID NO: 26935 - RNA, 19 nt, Artificial Sequence
  Description of Artificial Sequence: Synthetic oligonucleotide
  Antisense strand to SEQ ID NO: 26934
caggacauggaucuuucuu

SEQ ID NO: 26936 - RNA, 19 nt, Artificial Sequence
  Description of Artificial Sequence: Synthetic oligonucleotide
  Sense strand starting at position 3979 of SEQ ID NO: 304
ucugccugccuuuaagaga

SEQ ID NO: 26937 - RNA, 19 nt, Artificial Sequence
  Description of Artificial Sequence: Synthetic oligonucleotide
  Antisense strand to SEQ ID NO: 26936
ucucuuaaaggcaggcaga

SEQ ID NO: 26938 - RNA, 19 nt, Artificial Sequence
  Description of Artificial Sequence: Synthetic oligonucleotide
  Sense strand starting at position 3960 of SEQ ID NO: 305
cccuccuuucuaggacaga

SEQ ID NO: 26939 - RNA, 19 nt, Artificial Sequence
  Description of Artificial Sequence: Synthetic oligonucleotide
  Antisense strand to SEQ ID NO: 26938
ucuguccuagaaaggaggg

SEQ ID NO: 26940 - RNA, 19 nt, Artificial Sequence
  Description of Artificial Sequence: Synthetic oligonucleotide
  Sense strand starting at position 3937 of SEQ ID NO: 305
uuaugcuucccagacgaca

SEQ ID NO: 26941 - RNA, 19 nt, Artificial Sequence
  Description of Artificial Sequence: Synthetic oligonucleotide
  Antisense strand to SEQ ID NO: 26940
ugucgucugggaagcauaa

SEQ ID NO: 26942 - RNA, 19 nt, Artificial Sequence
  Description of Artificial Sequence: Synthetic oligonucleotide
  Sense strand starting at position 3905 of SEQ ID NO: 305
ccugaucuugggugagcaa

SEQ ID NO: 26943 - RNA, 19 nt, Artificial Sequence
  Description of Artificial Sequence: Synthetic oligonucleotide
  Antisense strand to SEQ ID NO: 26942
uugcucacccaagaucagg

SEQ ID NO: 26944 - RNA, 19 nt, Artificial Sequence
  Description of Artificial Sequence: Synthetic oligonucleotide
  Sense strand starting at position 3904 of SEQ ID NO: 305
cccugaucuugggugagca

SEQ ID NO: 26945 - RNA, 19 nt, Artificial Sequence
  Description of Artificial Sequence: Synthetic oligonucleotide
  Antisense strand to SEQ ID NO: 26944
ugcucacccaagaucaggg

SEQ ID NO: 26946 - RNA, 19 nt, Artificial Sequence
  Description of Artificial Sequence: Synthetic oligonucleotide
  Sense strand starting at position 3879 of SEQ ID NO: 305
auaucuuagccuggaauca

SEQ ID NO: 26947 - RNA, 19 nt, Artificial Sequence
  Description of Artificial Sequence: Synthetic oligonucleotide
  Antisense strand to SEQ ID NO: 26946
ugauuccaggcuaagauau

SEQ ID NO: 26948 - RNA, 19 nt, Artificial Sequence
  Description of Artificial Sequence: Synthetic oligonucleotide
  Sense strand starting at position 3802 of SEQ ID NO: 305
ugguuccuucugggaggua

SEQ ID NO: 26949 - RNA, 19 nt, Artificial Sequence
  Description of Artificial Sequence: Synthetic oligonucleotide
  Antisense strand to SEQ ID NO: 26948
uaccucccagaaggaacca

SEQ ID NO: 26950 - RNA, 19 nt, Artificial Sequence
  Description of Artificial Sequence: Synthetic oligonucleotide
  Sense strand starting at position 3752 of SEQ ID NO: 305
cuggcucgucuaugaauuu

SEQ ID NO: 26951 - RNA, 19 nt, Artificial Sequence
  Description of Artificial Sequence: Synthetic oligonucleotide
  Antisense strand to SEQ ID NO: 26950
aaauucauagacgagccag

SEQ ID NO: 26952 - RNA, 19 nt, Artificial Sequence
  Description of Artificial Sequence: Synthetic oligonucleotide
  Sense strand starting at position 3663 of SEQ ID NO: 305
ugaccucugccggaacaga

SEQ ID NO: 26953 - RNA, 19 nt, Artificial Sequence
  Description of Artificial Sequence: Synthetic oligonucleotide
  Antisense strand to SEQ ID NO: 26952
ucuguuccggcagagguca

SEQ ID NO: 26954 - RNA, 19 nt, Artificial Sequence
  Description of Artificial Sequence: Synthetic oligonucleotide
  Sense strand starting at position 3605 of SEQ ID NO: 305
cagagacaucuugguauga

SEQ ID NO: 26955 - RNA, 19 nt, Artificial Sequence
  Description of Artificial Sequence: Synthetic oligonucleotide
  Antisense strand to SEQ ID NO: 26954
ucauaccaagaugucucug

SEQ ID NO: 26956 - RNA, 19 nt, Artificial Sequence
  Description of Artificial Sequence: Synthetic oligonucleotide
  Sense strand starting at position 3445 of SEQ ID NO: 305
ccuaucacccucugaguua

SEQ ID NO: 26957 - RNA, 19 nt, Artificial Sequence
  Description of Artificial Sequence: Synthetic oligonucleotide
  Antisense strand to SEQ ID NO: 26956
uaacucagagggugauagg

SEQ ID NO: 26958 - RNA, 19 nt, Artificial Sequence
  Description of Artificial Sequence: Synthetic oligonucleotide
  Sense strand starting at position 3388 of SEQ ID NO: 305
cugugauugaucugcaaag

SEQ ID NO: 26959 - RNA, 19 nt, Artificial Sequence
  Description of Artificial Sequence: Synthetic oligonucleotide
  Antisense strand to SEQ ID NO: 26958
cuuugcagaucaaucacag

SEQ ID NO: 26960 - RNA, 19 nt, Artificial Sequence
  Description of Artificial Sequence: Synthetic oligonucleotide
  Sense strand starting at position 3386 of SEQ ID NO: 305
cccugugauugaucugcaa

SEQ ID NO: 26961 - RNA, 19 nt, Artificial Sequence
  Description of Artificial Sequence: Synthetic oligonucleotide
  Antisense strand to SEQ ID NO: 26960
uugcagaucaaucacaggg

SEQ ID NO: 26962 - RNA, 19 nt, Artificial Sequence
  Description of Artificial Sequence: Synthetic oligonucleotide
  Sense strand starting at position 3327 of SEQ ID NO: 305
aaugcaugugcuggaucau

SEQ ID NO: 26963 - RNA, 19 nt, Artificial Sequence
  Description of Artificial Sequence: Synthetic oligonucleotide
  Antisense strand to SEQ ID NO: 26962
augauccagcacaugcauu

SEQ ID NO: 26964 - RNA, 19 nt, Artificial Sequence
  Description of Artificial Sequence: Synthetic oligonucleotide
  Sense strand starting at position 3115 of SEQ ID NO: 305
cucguuagagaaugugaaa

SEQ ID NO: 26965 - RNA, 19 nt, Artificial Sequence
  Description of Artificial Sequence: Synthetic oligonucleotide
  Antisense strand to SEQ ID NO: 26964
uuucacauucucuaacgag

SEQ ID NO: 26966 - RNA, 19 nt, Artificial Sequence
  Description of Artificial Sequence: Synthetic oligonucleotide
  Sense strand starting at position 3108 of SEQ ID NO: 305
uaaaucccucguuagagaa

SEQ ID NO: 26967 - RNA, 19 nt, Artificial Sequence
  Description of Artificial Sequence: Synthetic oligonucleotide
  Antisense strand to SEQ ID NO: 26966
uucucuaacgagggauuua

SEQ ID NO: 26968 - RNA, 19 nt, Artificial Sequence
  Description of Artificial Sequence: Synthetic oligonucleotide
  Sense strand starting at position 3107 of SEQ ID NO: 305
cuaaaucccucguuagaga

SEQ ID NO: 26969 - RNA, 19 nt, Artificial Sequence
  Description of Artificial Sequence: Synthetic oligonucleotide
  Antisense strand to SEQ ID NO: 26968
ucucuaacgagggauuuag

SEQ ID NO: 26970 - RNA, 19 nt, Artificial Sequence
  Description of Artificial Sequence: Synthetic oligonucleotide
  Sense strand starting at position 3105 of SEQ ID NO: 305
uccuaaaucccucguuaga

SEQ ID NO: 26971 - RNA, 19 nt, Artificial Sequence
  Description of Artificial Sequence: Synthetic oligonucleotide
  Antisense strand to SEQ ID NO: 26970
ucuaacgagggauuuagga

SEQ ID NO: 26972 - RNA, 19 nt, Artificial Sequence
  Description of Artificial Sequence: Synthetic oligonucleotide
  Sense strand starting at position 3087 of SEQ ID NO: 305
ucccgauuggaauguacau

SEQ ID NO: 26973 - RNA, 19 nt, Artificial Sequence
  Description of Artificial Sequence: Synthetic oligonucleotide
  Antisense strand to SEQ ID NO: 26972
auguacauuccaaucggga

SEQ ID NO: 26974 - RNA, 19 nt, Artificial Sequence
  Description of Artificial Sequence: Synthetic oligonucleotide
  Sense strand starting at position 3047 of SEQ ID NO: 305
aggaaugugaacugauguu

SEQ ID NO: 26975 - RNA, 19 nt, Artificial Sequence
  Description of Artificial Sequence: Synthetic oligonucleotide
  Antisense strand to SEQ ID NO: 26974
aacaucaguucacauuccu

SEQ ID NO: 26976 - RNA, 19 nt, Artificial Sequence
  Description of Artificial Sequence: Synthetic oligonucleotide
  Sense strand starting at position 2909 of SEQ ID NO: 305
gagaccaugugauccagau

SEQ ID NO: 26977 - RNA, 19 nt, Artificial Sequence
  Description of Artificial Sequence: Synthetic oligonucleotide
  Antisense strand to SEQ ID NO: 26976
aucuggaucacauggucuc

SEQ ID NO: 26978 - RNA, 19 nt, Artificial Sequence
  Description of Artificial Sequence: Synthetic oligonucleotide
  Sense strand starting at position 2835 of SEQ ID NO: 305
gagagacuuuaggaacaau

SEQ ID NO: 26979 - RNA, 19 nt, Artificial Sequence
  Description of Artificial Sequence: Synthetic oligonucleotide
  Antisense strand to SEQ ID NO: 26978
auuguuccuaaagucucuc

SEQ ID NO: 26980 - RNA, 19 nt, Artificial Sequence
  Description of Artificial Sequence: Synthetic oligonucleotide
  Sense strand starting at position 2649 of SEQ ID NO: 305
cguuguuugcuggauaaag

SEQ ID NO: 26981 - RNA, 19 nt, Artificial Sequence
  Description of Artificial Sequence: Synthetic oligonucleotide
  Antisense strand to SEQ ID NO: 26980
cuuuauccagcaaacaacg

SEQ ID NO: 26982 - RNA, 19 nt, Artificial Sequence
  Description of Artificial Sequence: Synthetic oligonucleotide
  Sense strand starting at position 2537 of SEQ ID NO: 305
ggagaacucaucuggagca

SEQ ID NO: 26983 - RNA, 19 nt, Artificial Sequence
  Description of Artificial Sequence: Synthetic oligonucleotide
  Antisense strand to SEQ ID NO: 26982
ugcuccagaugaguucucc

SEQ ID NO: 26984 - RNA, 19 nt, Artificial Sequence
  Description of Artificial Sequence: Synthetic oligonucleotide
  Sense strand starting at position 2424 of SEQ ID NO: 305
ggagauauauaacaagaag

SEQ ID NO: 26985 - RNA, 19 nt, Artificial Sequence
  Description of Artificial Sequence: Synthetic oligonucleotide
  Antisense strand to SEQ ID NO: 26984
cuucuuguuauauaucucc

SEQ ID NO: 26986 - RNA, 19 nt, Artificial Sequence
  Description of Artificial Sequence: Synthetic oligonucleotide
  Sense strand starting at position 2216 of SEQ ID NO: 305
auggguguucccuggagca

SEQ ID NO: 26987 - RNA, 19 nt, Artificial Sequence
  Description of Artificial Sequence: Synthetic oligonucleotide
  Antisense strand to SEQ ID NO: 26986
ugcuccagggaacacccau

SEQ ID NO: 26988 - RNA, 19 nt, Artificial Sequence
  Description of Artificial Sequence: Synthetic oligonucleotide
  Sense strand starting at position 2200 of SEQ ID NO: 305
cacagaugcuguuuagaug

SEQ ID NO: 26989 - RNA, 19 nt, Artificial Sequence
  Description of Artificial Sequence: Synthetic oligonucleotide
  Antisense strand to SEQ ID NO: 26988
caucuaaacagcaucugug

SEQ ID NO: 26990 - RNA, 19 nt, Artificial Sequence
  Description of Artificial Sequence: Synthetic oligonucleotide
  Sense strand starting at position 2064 of SEQ ID NO: 305
gugaacagcuccuuaaaua

SEQ ID NO: 26991 - RNA, 19 nt, Artificial Sequence
  Description of Artificial Sequence: Synthetic oligonucleotide
  Antisense strand to SEQ ID NO: 26990
uauuuaaggagcuguucac

SEQ ID NO: 26992 - RNA, 19 nt, Artificial Sequence
  Description of Artificial Sequence: Synthetic oligonucleotide
  Sense strand starting at position 1287 of SEQ ID NO: 305
uuuggaggaguuuguaaau

SEQ ID NO: 26993 - RNA, 19 nt, Artificial Sequence
  Description of Artificial Sequence: Synthetic oligonucleotide
  Antisense strand to SEQ ID NO: 26992
auuuacaaacuccuccaaa

SEQ ID NO: 26994 - RNA, 19 nt, Artificial Sequence
  Description of Artificial Sequence: Synthetic oligonucleotide
  Sense strand starting at position 1212 of SEQ ID NO: 305
ugaguugggcaggaaguau

SEQ ID NO: 26995 - RNA, 19 nt, Artificial Sequence
  Description of Artificial Sequence: Synthetic oligonucleotide
  Antisense strand to SEQ ID NO: 26994
auacuuccugcccaacuca

SEQ ID NO: 26996 - RNA, 19 nt, Artificial Sequence
  Description of Artificial Sequence: Synthetic oligonucleotide
  Sense strand starting at position 1211 of SEQ ID NO: 305
cugaguugggcaggaagua

SEQ ID NO: 26997 - RNA, 19 nt, Artificial Sequence
  Description of Artificial Sequence: Synthetic oligonucleotide
  Antisense strand to SEQ ID NO: 26996
uacuuccugcccaacucag

SEQ ID NO: 26998 - RNA, 19 nt, Artificial Sequence
  Description of Artificial Sequence: Synthetic oligonucleotide
  Sense strand starting at position 1071 of SEQ ID NO: 305
cugaaaguccuuuguaaac

SEQ ID NO: 26999 - RNA, 19 nt, Artificial Sequence
  Description of Artificial Sequence: Synthetic oligonucleotide
  Antisense strand to SEQ ID NO: 26998
guuuacaaaggacuuucag

SEQ ID NO: 27000 - RNA, 19 nt, Artificial Sequence
  Description of Artificial Sequence: Synthetic oligonucleotide
  Sense strand starting at position 1069 of SEQ ID NO: 305
uccugaaaguccuuuguaa

SEQ ID NO: 27001 - RNA, 19 nt, Artificial Sequence
  Description of Artificial Sequence: Synthetic oligonucleotide
  Antisense strand to SEQ ID NO: 27000
uuacaaaggacuuucagga

SEQ ID NO: 27002 - RNA, 19 nt, Artificial Sequence
  Description of Artificial Sequence: Synthetic oligonucleotide
  Sense strand starting at position 986 of SEQ ID NO: 305
aaaugaggucuaggaguuc

SEQ ID NO: 27003 - RNA, 19 nt, Artificial Sequence
  Description of Artificial Sequence: Synthetic oligonucleotide
  Antisense strand to SEQ ID NO: 27002
gaacuccuagaccucauuu

SEQ ID NO: 27004 - RNA, 19 nt, Artificial Sequence
  Description of Artificial Sequence: Synthetic oligonucleotide
  Sense strand starting at position 730 of SEQ ID NO: 305
cucccuggucuguaaaggu

SEQ ID NO: 27005 - RNA, 19 nt, Artificial Sequence
  Description of Artificial Sequence: Synthetic oligonucleotide
  Antisense strand to SEQ ID NO: 27004
accuuuacagaccagggag

SEQ ID NO: 27006 - RNA, 19 nt, Artificial Sequence
  Description of Artificial Sequence: Synthetic oligonucleotide
  Sense strand starting at position 528 of SEQ ID NO: 305
ugguuuaugcugcaauauu

SEQ ID NO: 27007 - RNA, 19 nt, Artificial Sequence
  Description of Artificial Sequence: Synthetic oligonucleotide
  Antisense strand to SEQ ID NO: 27006
aauauugcagcauaaacca

SEQ ID NO: 27008 - RNA, 19 nt, Artificial Sequence
  Description of Artificial Sequence: Synthetic oligonucleotide
  Sense strand starting at position 384 of SEQ ID NO: 305
aagcauuguguguagagaa

SEQ ID NO: 27009 - RNA, 19 nt, Artificial Sequence
  Description of Artificial Sequence: Synthetic oligonucleotide
  Antisense strand to SEQ ID NO: 27008
uucucuacacacaaugcuu

SEQ ID NO: 27010 - RNA, 19 nt, Artificial Sequence
  Description of Artificial Sequence: Synthetic oligonucleotide
  Sense strand starting at position 383 of SEQ ID NO: 305
gaagcauuguguguagaga

SEQ ID NO: 27011 - RNA, 19 nt, Artificial Sequence
  Description of Artificial Sequence: Synthetic oligonucleotide
  Antisense strand to SEQ ID NO: 27010
ucucuacacacaaugcuuc

SEQ ID NO: 27012 - RNA, 19 nt, Artificial Sequence
  Description of Artificial Sequence: Synthetic oligonucleotide
  Sense strand starting at position 226 of SEQ ID NO: 305
ucccauuagcucuagagga

SEQ ID NO: 27013 - RNA, 19 nt, Artificial Sequence
  Description of Artificial Sequence: Synthetic oligonucleotide
  Antisense strand to SEQ ID NO: 27012
uccucuagagcuaauggga

SEQ ID NO: 27014 - RNA, 19 nt, Artificial Sequence
  Description of Artificial Sequence: Synthetic oligonucleotide
  Sense strand starting at position 145 of SEQ ID NO: 305
ggagauuauuccuuugcuu

SEQ ID NO: 27015 - RNA, 19 nt, Artificial Sequence
  Description of Artificial Sequence: Synthetic oligonucleotide
  Antisense strand to SEQ ID NO: 27014
aagcaaaggaauaaucucc

SEQ ID NO: 27016 - RNA, 19 nt, Artificial Sequence
  Description of Artificial Sequence: Synthetic oligonucleotide
  Sense strand starting at position 144 of SEQ ID NO: 305
gggagauuauuccuuugcu

SEQ ID NO: 27017 - RNA, 19 nt, Artificial Sequence
  Description of Artificial Sequence: Synthetic oligonucleotide
  Antisense strand to SEQ ID NO: 27016
agcaaaggaauaaucuccc

SEQ ID NO: 27018 - RNA, 19 nt, Artificial Sequence
  Description of Artificial Sequence: Synthetic oligonucleotide
  Sense strand starting at position 3693 of SEQ ID NO: 306
gugauuuaucauugccacc

SEQ ID NO: 27019 - RNA, 19 nt, Artificial Sequence
  Description of Artificial Sequence: Synthetic oligonucleotide
  Antisense strand to SEQ ID NO: 27018
gguggcaaugauaaaucac

SEQ ID NO: 27020 - RNA, 19 nt, Artificial Sequence
  Description of Artificial Sequence: Synthetic oligonucleotide
  Sense strand starting at position 3601 of SEQ ID NO: 306
aauaaaugugccugcagua

SEQ ID NO: 27021 - RNA, 19 nt, Artificial Sequence
  Description of Artificial Sequence: Synthetic oligonucleotide
  Antisense strand to SEQ ID NO: 27020
uacugcaggcacauuuauu

SEQ ID NO: 27022 - RNA, 19 nt, Artificial Sequence
  Description of Artificial Sequence: Synthetic oligonucleotide
  Sense strand starting at position 3600 of SEQ ID NO: 306
caauaaaugugccugcagu

SEQ ID NO: 27023 - RNA, 19 nt, Artificial Sequence
  Description of Artificial Sequence: Synthetic oligonucleotide
  Antisense strand to SEQ ID NO: 27022
acugcaggcacauuuauug

SEQ ID NO: 27024 - RNA, 19 nt, Artificial Sequence
  Description of Artificial Sequence: Synthetic oligonucleotide
  Sense strand starting at position 3591 of SEQ ID NO: 306
gggauucggcaauaaaugu

SEQ ID NO: 27025 - RNA, 19 nt, Artificial Sequence
  Description of Artificial Sequence: Synthetic oligonucleotide
  Antisense strand to SEQ ID NO: 27024
acauuuauugccgaauccc

SEQ ID NO: 27026 - RNA, 19 nt, Artificial Sequence
  Description of Artificial Sequence: Synthetic oligonucleotide
  Sense strand starting at position 3148 of SEQ ID NO: 306
cugcuaacugugugaccau

SEQ ID NO: 27027 - RNA, 19 nt, Artificial Sequence
  Description of Artificial Sequence: Synthetic oligonucleotide
  Antisense strand to SEQ ID NO: 27026
auggucacacaguuagcag

SEQ ID NO: 27028 - RNA, 19 nt, Artificial Sequence
  Description of Artificial Sequence: Synthetic oligonucleotide
  Sense strand starting at position 3074 of SEQ ID NO: 306
cugaaagaaucucagagag

SEQ ID NO: 27029 - RNA, 19 nt, Artificial Sequence
  Description of Artificial Sequence: Synthetic oligonucleotide
  Antisense strand to SEQ ID NO: 27028
cucucugagauucuuucag

SEQ ID NO: 27030 - RNA, 19 nt, Artificial Sequence
  Description of Artificial Sequence: Synthetic oligonucleotide
  Sense strand starting at position 3043 of SEQ ID NO: 306
gcuggaaacuuccauuucu

SEQ ID NO: 27031 - RNA, 19 nt, Artificial Sequence
  Description of Artificial Sequence: Synthetic oligonucleotide
  Antisense strand to SEQ ID NO: 27030
agaaauggaaguuuccagc

SEQ ID NO: 27032 - RNA, 19 nt, Artificial Sequence
  Description of Artificial Sequence: Synthetic oligonucleotide
  Sense strand starting at position 3005 of SEQ ID NO: 306
gucauuuaauagggaacau

SEQ ID NO: 27033 - RNA, 19 nt, Artificial Sequence
  Description of Artificial Sequence: Synthetic oligonucleotide
  Antisense strand to SEQ ID NO: 27032
auguucccuauuaaaugac

SEQ ID NO: 27034 - RNA, 19 nt, Artificial Sequence
  Description of Artificial Sequence: Synthetic oligonucleotide
  Sense strand starting at position 3002 of SEQ ID NO: 306
acugucauuuaauagggaa

SEQ ID NO: 27035 - RNA, 19 nt, Artificial Sequence
  Description of Artificial Sequence: Synthetic oligonucleotide
  Antisense strand to SEQ ID NO: 27034
uucccuauuaaaugacagu

SEQ ID NO: 27036 - RNA, 19 nt, Artificial Sequence
  Description of Artificial Sequence: Synthetic oligonucleotide
  Sense strand starting at position 2955 of SEQ ID NO: 306
gauguuagcggugaacgua

SEQ ID NO: 27037 - RNA, 19 nt, Artificial Sequence
  Description of Artificial Sequence: Synthetic oligonucleotide
  Antisense strand to SEQ ID NO: 27036
uacguucaccgcuaacauc

SEQ ID NO: 27038 - RNA, 19 nt, Artificial Sequence
  Description of Artificial Sequence: Synthetic oligonucleotide
  Sense strand starting at position 2702 of SEQ ID NO: 306
cuagacagucccugaaauu

SEQ ID NO: 27039 - RNA, 19 nt, Artificial Sequence
  Description of Artificial Sequence: Synthetic oligonucleotide
  Antisense strand to SEQ ID NO: 27038
aauuucagggacugucuag

SEQ ID NO: 27040 - RNA, 19 nt, Artificial Sequence
  Description of Artificial Sequence: Synthetic oligonucleotide
  Sense strand starting at position 2701 of SEQ ID NO: 306
gcuagacagucccugaaau

SEQ ID NO: 27041 - RNA, 19 nt, Artificial Sequence
  Description of Artificial Sequence: Synthetic oligonucleotide
  Antisense strand to SEQ ID NO: 27040
auuucagggacugucuagc

SEQ ID NO: 27042 - RNA, 19 nt, Artificial Sequence
  Description of Artificial Sequence: Synthetic oligonucleotide
  Sense strand starting at position 2599 of SEQ ID NO: 306
uggauuuguucugacaccu

SEQ ID NO: 27043 - RNA, 19 nt, Artificial Sequence
  Description of Artificial Sequence: Synthetic oligonucleotide
  Antisense strand to SEQ ID NO: 27042
aggugucagaacaaaucca

SEQ ID NO: 27044 - RNA, 19 nt, Artificial Sequence
  Description of Artificial Sequence: Synthetic oligonucleotide
  Sense strand starting at position 2543 of SEQ ID NO: 306
auuccaaugugugccuuua

SEQ ID NO: 27045 - RNA, 19 nt, Artificial Sequence
  Description of Artificial Sequence: Synthetic oligonucleotide
  Antisense strand to SEQ ID NO: 27044
uaaaggcacacauuggaau

SEQ ID NO: 27046 - RNA, 19 nt, Artificial Sequence
  Description of Artificial Sequence: Synthetic oligonucleotide
  Sense strand starting at position 2499 of SEQ ID NO: 306
uccuuaaaccagugguuga

SEQ ID NO: 27047 - RNA, 19 nt, Artificial Sequence
  Description of Artificial Sequence: Synthetic oligonucleotide
  Antisense strand to SEQ ID NO: 27046
ucaaccacugguuuaagga

SEQ ID NO: 27048 - RNA, 19 nt, Artificial Sequence
  Description of Artificial Sequence: Synthetic oligonucleotide
  Sense strand starting at position 2491 of SEQ ID NO: 306
cgguccucuccuuaaacca

SEQ ID NO: 27049 - RNA, 19 nt, Artificial Sequence
  Description of Artificial Sequence: Synthetic oligonucleotide
  Antisense strand to SEQ ID NO: 27048
ugguuuaaggagaggaccg

SEQ ID NO: 27050 - RNA, 19 nt, Artificial Sequence
  Description of Artificial Sequence: Synthetic oligonucleotide
  Sense strand starting at position 2470 of SEQ ID NO: 306
ccuccauguuuggacauuu

SEQ ID NO: 27051 - RNA, 19 nt, Artificial Sequence
  Description of Artificial Sequence: Synthetic oligonucleotide
  Antisense strand to SEQ ID NO: 27050
aaauguccaaacauggagg

SEQ ID NO: 27052 - RNA, 19 nt, Artificial Sequence
  Description of Artificial Sequence: Synthetic oligonucleotide
  Sense strand starting at position 2193 of SEQ ID NO: 306
guuguucagugucuuagga

SEQ ID NO: 27053 - RNA, 19 nt, Artificial Sequence
  Description of Artificial Sequence: Synthetic oligonucleotide
  Antisense strand to SEQ ID NO: 27052
uccuaagacacugaacaac

SEQ ID NO: 27054 - RNA, 19 nt, Artificial Sequence
  Description of Artificial Sequence: Synthetic oligonucleotide
  Sense strand starting at position 1467 of SEQ ID NO: 306
cuggccauccugugaaaug

SEQ ID NO: 27055 - RNA, 19 nt, Artificial Sequence
  Description of Artificial Sequence: Synthetic oligonucleotide
  Antisense strand to SEQ ID NO: 27054
cauuucacaggauggccag

SEQ ID NO: 27056 - RNA, 19 nt, Artificial Sequence
  Description of Artificial Sequence: Synthetic oligonucleotide
  Sense strand starting at position 1317 of SEQ ID NO: 306
aaaucaggaguuugugaag

SEQ ID NO: 27057 - RNA, 19 nt, Artificial Sequence
  Description of Artificial Sequence: Synthetic oligonucleotide
  Antisense strand to SEQ ID NO: 27056
cuucacaaacuccugauuu

SEQ ID NO: 27058 - RNA, 19 nt, Artificial Sequence
  Description of Artificial Sequence: Synthetic oligonucleotide
  Sense strand starting at position 1167 of SEQ ID NO: 306
ugagguuaccgagagucuu

SEQ ID NO: 27059 - RNA, 19 nt, Artificial Sequence
  Description of Artificial Sequence: Synthetic oligonucleotide
  Antisense strand to SEQ ID NO: 27058
aagacucucgguaaccuca

SEQ ID NO: 27060 - RNA, 19 nt, Artificial Sequence
  Description of Artificial Sequence: Synthetic oligonucleotide
  Sense strand starting at position 1156 of SEQ ID NO: 306
agcaccuuccgugagguua

SEQ ID NO: 27061 - RNA, 19 nt, Artificial Sequence
  Description of Artificial Sequence: Synthetic oligonucleotide
  Antisense strand to SEQ ID NO: 27060
uaaccucacggaaggugcu

SEQ ID NO: 27062 - RNA, 19 nt, Artificial Sequence
  Description of Artificial Sequence: Synthetic oligonucleotide
  Sense strand starting at position 1094 of SEQ ID NO: 306
agauguucuggguaaacug

SEQ ID NO: 27063 - RNA, 19 nt, Artificial Sequence
  Description of Artificial Sequence: Synthetic oligonucleotide
  Antisense strand to SEQ ID NO: 27062
caguuuacccagaacaucu

SEQ ID NO: 27064 - RNA, 19 nt, Artificial Sequence
  Description of Artificial Sequence: Synthetic oligonucleotide
  Sense strand starting at position 1092 of SEQ ID NO: 306
caagauguucuggguaaac

SEQ ID NO: 27065 - RNA, 19 nt, Artificial Sequence
  Description of Artificial Sequence: Synthetic oligonucleotide
  Antisense strand to SEQ ID NO: 27064
guuuacccagaacaucuug

SEQ ID NO: 27066 - RNA, 19 nt, Artificial Sequence
  Description of Artificial Sequence: Synthetic oligonucleotide
  Sense strand starting at position 1083 of SEQ ID NO: 306
uccuuaugucaagauguuc

SEQ ID NO: 27067 - RNA, 19 nt, Artificial Sequence
  Description of Artificial Sequence: Synthetic oligonucleotide
  Antisense strand to SEQ ID NO: 27066
gaacaucuugacauaagga

SEQ ID NO: 27068 - RNA, 19 nt, Artificial Sequence
  Description of Artificial Sequence: Synthetic oligonucleotide
  Sense strand starting at position 1078 of SEQ ID NO: 306
cuggguccuuaugucaaga

SEQ ID NO: 27069 - RNA, 19 nt, Artificial Sequence
  Description of Artificial Sequence: Synthetic oligonucleotide
  Antisense strand to SEQ ID NO: 27068
ucuugacauaaggacccag

SEQ ID NO: 27070 - RNA, 19 nt, Artificial Sequence
  Description of Artificial Sequence: Synthetic oligonucleotide
  Sense strand starting at position 616 of SEQ ID NO: 306
cuguuuaguguccacaaag

SEQ ID NO: 27071 - RNA, 19 nt, Artificial Sequence
  Description of Artificial Sequence: Synthetic oligonucleotide
  Antisense strand to SEQ ID NO: 27070
cuuuguggacacuaaacag

SEQ ID NO: 27072 - RNA, 19 nt, Artificial Sequence
  Description of Artificial Sequence: Synthetic oligonucleotide
  Sense strand starting at position 615 of SEQ ID NO: 306
gcuguuuaguguccacaaa

SEQ ID NO: 27073 - RNA, 19 nt, Artificial Sequence
  Description of Artificial Sequence: Synthetic oligonucleotide
  Antisense strand to SEQ ID NO: 27072
uuuguggacacuaaacagc

SEQ ID NO: 27074 - RNA, 19 nt, Artificial Sequence
  Description of Artificial Sequence: Synthetic oligonucleotide
  Sense strand starting at position 583 of SEQ ID NO: 306
ggaagaagcucuccucacu

SEQ ID NO: 27075 - RNA, 19 nt, Artificial Sequence
  Description of Artificial Sequence: Synthetic oligonucleotide
  Antisense strand to SEQ ID NO: 27074
agugaggagagcuucuucc

SEQ ID NO: 27076 - RNA, 19 nt, Artificial Sequence
  Description of Artificial Sequence: Synthetic oligonucleotide
  Sense strand starting at position 489 of SEQ ID NO: 306
gcagauguuugucucacuu

SEQ ID NO: 27077 - RNA, 19 nt, Artificial Sequence
  Description of Artificial Sequence: Synthetic oligonucleotide
  Antisense strand to SEQ ID NO: 27076
aagugagacaaacaucugc

SEQ ID NO: 27078 - RNA, 19 nt, Artificial Sequence
  Description of Artificial Sequence: Synthetic oligonucleotide
  Sense strand starting at position 488 of SEQ ID NO: 306
agcagauguuugucucacu

SEQ ID NO: 27079 - RNA, 19 nt, Artificial Sequence
  Description of Artificial Sequence: Synthetic oligonucleotide
  Antisense strand to SEQ ID NO: 27078
agugagacaaacaucugcu

SEQ ID NO: 27080 - RNA, 19 nt, Artificial Sequence
  Description of Artificial Sequence: Synthetic oligonucleotide
  Sense strand starting at position 486 of SEQ ID NO: 306
gaagcagauguuugucuca

SEQ ID NO: 27081 - RNA, 19 nt, Artificial Sequence
  Description of Artificial Sequence: Synthetic oligonucleotide
  Antisense strand to SEQ ID NO: 27080
ugagacaaacaucugcuuc

SEQ ID NO: 27082 - RNA, 19 nt, Artificial Sequence
  Description of Artificial Sequence: Synthetic oligonucleotide
  Sense strand starting at position 482 of SEQ ID NO: 306
gcaggaagcagauguuugu

SEQ ID NO: 27083 - RNA, 19 nt, Artificial Sequence
  Description of Artificial Sequence: Synthetic oligonucleotide
  Antisense strand to SEQ ID NO: 27082
acaaacaucugcuuccugc

SEQ ID NO: 27084 - RNA, 19 nt, Artificial Sequence
  Description of Artificial Sequence: Synthetic oligonucleotide
  Sense strand starting at position 403 of SEQ ID NO: 306
uccguugcccuugacuuaa

SEQ ID NO: 27085 - RNA, 19 nt, Artificial Sequence
  Description of Artificial Sequence: Synthetic oligonucleotide
  Antisense strand to SEQ ID NO: 27084
uuaagucaagggcaacgga

SEQ ID NO: 27086 - RNA, 19 nt, Artificial Sequence
  Description of Artificial Sequence: Synthetic oligonucleotide
  Sense strand starting at position 323 of SEQ ID NO: 306
guguaagaucacuguccuc

SEQ ID NO: 27087 - RNA, 19 nt, Artificial Sequence
  Description of Artificial Sequence: Synthetic oligonucleotide
  Antisense strand to SEQ ID NO: 27086
gaggacagugaucuuacac

SEQ ID NO: 27088 - RNA, 19 nt, Artificial Sequence
  Description of Artificial Sequence: Synthetic oligonucleotide
  Sense strand starting at position 312 of SEQ ID NO: 306
ggcacugccauguguaaga

SEQ ID NO: 27089 - RNA, 19 nt, Artificial Sequence
  Description of Artificial Sequence: Synthetic oligonucleotide
  Antisense strand to SEQ ID NO: 27088
ucuuacacauggcagugcc

SEQ ID NO: 27090 - RNA, 19 nt, Artificial Sequence
  Description of Artificial Sequence: Synthetic oligonucleotide
  Sense strand starting at position 310 of SEQ ID NO: 306
gaggcacugccauguguaa

SEQ ID NO: 27091 - RNA, 19 nt, Artificial Sequence
  Description of Artificial Sequence: Synthetic oligonucleotide
  Antisense strand to SEQ ID NO: 27090
uuacacauggcagugccuc

SEQ ID NO: 27092 - RNA, 19 nt, Artificial Sequence
  Description of Artificial Sequence: Synthetic oligonucleotide
  Sense strand starting at position 160 of SEQ ID NO: 306
ccuaguaguuucccaggaa

SEQ ID NO: 27093 - RNA, 19 nt, Artificial Sequence
  Description of Artificial Sequence: Synthetic oligonucleotide
  Antisense strand to SEQ ID NO: 27092
uuccugggaaacuacuagg

SEQ ID NO: 27094 - RNA, 19 nt, Artificial Sequence
  Description of Artificial Sequence: Synthetic oligonucleotide
  Sense strand starting at position 17 of SEQ ID NO: 306
guuuguaaucaaggcaauu

SEQ ID NO: 27095 - RNA, 19 nt, Artificial Sequence
  Description of Artificial Sequence: Synthetic oligonucleotide
  Antisense strand to SEQ ID NO: 27094
aauugccuugauuacaaac

SEQ ID NO: 27096 - RNA, 19 nt, Artificial Sequence
  Description of Artificial Sequence: Synthetic oligonucleotide
  Sense strand starting at position 14 of SEQ ID NO: 306
uugguuuguaaucaaggca

SEQ ID NO: 27097 - RNA, 19 nt, Artificial Sequence
  Description of Artificial Sequence: Synthetic oligonucleotide
  Antisense strand to SEQ ID NO: 27096
ugccuugauuacaaaccaa

SEQ ID NO: 27098 - RNA, 19 nt, Artificial Sequence
  Description of Artificial Sequence: Synthetic oligonucleotide
  Sense strand starting at position 3955 of SEQ ID NO: 307
guccuacauuuccaaagua

SEQ ID NO: 27099 - RNA, 19 nt, Artificial Sequence
  Description of Artificial Sequence: Synthetic oligonucleotide
  Antisense strand to SEQ ID NO: 27098
uacuuuggaaauguaggac

SEQ ID NO: 27100 - RNA, 19 nt, Artificial Sequence
  Description of Artificial Sequence: Synthetic oligonucleotide
  Sense strand starting at position 3938 of SEQ ID NO: 307
agaagaggucagugcuugu

SEQ ID NO: 27101 - RNA, 19 nt, Artificial Sequence
  Description of Artificial Sequence: Synthetic oligonucleotide
  Antisense strand to SEQ ID NO: 27100
acaagcacugaccucuucu

SEQ ID NO: 27102 - RNA, 19 nt, Artificial Sequence
  Description of Artificial Sequence: Synthetic oligonucleotide
  Sense strand starting at position 3922 of SEQ ID NO: 307
ggauuaccuuuauauuaga

SEQ ID NO: 27103 - RNA, 19 nt, Artificial Sequence
  Description of Artificial Sequence: Synthetic oligonucleotide
  Antisense strand to SEQ ID NO: 27102
ucuaauauaaagguaaucc

SEQ ID NO: 27104 - RNA, 19 nt, Artificial Sequence
  Description of Artificial Sequence: Synthetic oligonucleotide
  Sense strand starting at position 3908 of SEQ ID NO: 307
cauuguguccaccaggauu

SEQ ID NO: 27105 - RNA, 19 nt, Artificial Sequence
  Description of Artificial Sequence: Synthetic oligonucleotide
  Antisense strand to SEQ ID NO: 27104
aauccugguggacacaaug

SEQ ID NO: 27106 - RNA, 19 nt, Artificial Sequence
  Description of Artificial Sequence: Synthetic oligonucleotide
  Sense strand starting at position 3803 of SEQ ID NO: 307
ggguuacagugagccauaa

SEQ ID NO: 27107 - RNA, 19 nt, Artificial Sequence
  Description of Artificial Sequence: Synthetic oligonucleotide
  Antisense strand to SEQ ID NO: 27106
uuauggcucacuguaaccc

SEQ ID NO: 27108 - RNA, 19 nt, Artificial Sequence
  Description of Artificial Sequence: Synthetic oligonucleotide
  Sense strand starting at position 3640 of SEQ ID NO: 307
ggugggaugguuugagcuu

SEQ ID NO: 27109 - RNA, 19 nt, Artificial Sequence
  Description of Artificial Sequence: Synthetic oligonucleotide
  Antisense strand to SEQ ID NO: 27108
aagcucaaaccaucccacc

SEQ ID NO: 27110 - RNA, 19 nt, Artificial Sequence
  Description of Artificial Sequence: Synthetic oligonucleotide
  Sense strand starting at position 3525 of SEQ ID NO: 307
auuaaauguugugucacau

SEQ ID NO: 27111 - RNA, 19 nt, Artificial Sequence
  Description of Artificial Sequence: Synthetic oligonucleotide
  Antisense strand to SEQ ID NO: 27110
augugacacaacauuuaau

SEQ ID NO: 27112 - RNA, 19 nt, Artificial Sequence
  Description of Artificial Sequence: Synthetic oligonucleotide
  Sense strand starting at position 3515 of SEQ ID NO: 307
aguuccagugauuaaaugu

SEQ ID NO: 27113 - RNA, 19 nt, Artificial Sequence
  Description of Artificial Sequence: Synthetic oligonucleotide
  Antisense strand to SEQ ID NO: 27112
acauuuaaucacuggaacu

SEQ ID NO: 27114 - RNA, 19 nt, Artificial Sequence
  Description of Artificial Sequence: Synthetic oligonucleotide
  Sense strand starting at position 3514 of SEQ ID NO: 307
aaguuccagugauuaaaug

SEQ ID NO: 27115 - RNA, 19 nt, Artificial Sequence
  Description of Artificial Sequence: Synthetic oligonucleotide
  Antisense strand to SEQ ID NO: 27114
cauuuaaucacuggaacuu

SEQ ID NO: 27116 - RNA, 19 nt, Artificial Sequence
  Description of Artificial Sequence: Synthetic oligonucleotide
  Sense strand starting at position 3475 of SEQ ID NO: 307
gacuguguuccucaagaaa

SEQ ID NO: 27117 - RNA, 19 nt, Artificial Sequence
  Description of Artificial Sequence: Synthetic oligonucleotide
  Antisense strand to SEQ ID NO: 27116
uuucuugaggaacacaguc

SEQ ID NO: 27118 - RNA, 19 nt, Artificial Sequence
  Description of Artificial Sequence: Synthetic oligonucleotide
  Sense strand starting at position 3473 of SEQ ID NO: 307
gagacuguguuccucaaga

SEQ ID NO: 27119 - RNA, 19 nt, Artificial Sequence
  Description of Artificial Sequence: Synthetic oligonucleotide
  Antisense strand to SEQ ID NO: 27118
ucuugaggaacacagucuc

SEQ ID NO: 27120 - RNA, 19 nt, Artificial Sequence
  Description of Artificial Sequence: Synthetic oligonucleotide
  Sense strand starting at position 3471 of SEQ ID NO: 307
cagagacuguguuccucaa

SEQ ID NO: 27121 - RNA, 19 nt, Artificial Sequence
  Description of Artificial Sequence: Synthetic oligonucleotide
  Antisense strand to SEQ ID NO: 27120
uugaggaacacagucucug

SEQ ID NO: 27122 - RNA, 19 nt, Artificial Sequence
  Description of Artificial Sequence: Synthetic oligonucleotide
  Sense strand starting at position 3441 of SEQ ID NO: 307
gguugagacuugcuagaaa

SEQ ID NO: 27123 - RNA, 19 nt, Artificial Sequence
  Description of Artificial Sequence: Synthetic oligonucleotide
  Antisense strand to SEQ ID NO: 27122
uuucuagcaagucucaacc

SEQ ID NO: 27124 - RNA, 19 nt, Artificial Sequence
  Description of Artificial Sequence: Synthetic oligonucleotide
  Sense strand starting at position 3218 of SEQ ID NO: 307
gucaguauaucuuuccauu

SEQ ID NO: 27125 - RNA, 19 nt, Artificial Sequence
  Description of Artificial Sequence: Synthetic oligonucleotide
  Antisense strand to SEQ ID NO: 27124
aauggaaagauauacugac

SEQ ID NO: 27126 - RNA, 19 nt, Artificial Sequence
  Description of Artificial Sequence: Synthetic oligonucleotide
  Sense strand starting at position 3205 of SEQ ID NO: 307
ugaguaugcccaggucagu

SEQ ID NO: 27127 - RNA, 19 nt, Artificial Sequence
  Description of Artificial Sequence: Synthetic oligonucleotide
  Antisense strand to SEQ ID NO: 27126
acugaccugggcauacuca

SEQ ID NO: 27128 - RNA, 19 nt, Artificial Sequence
  Description of Artificial Sequence: Synthetic oligonucleotide
  Sense strand starting at position 3120 of SEQ ID NO: 307
ggucccaggccucauagaa

SEQ ID NO: 27129 - RNA, 19 nt, Artificial Sequence
  Description of Artificial Sequence: Synthetic oligonucleotide
  Antisense strand to SEQ ID NO: 27128
uucuaugaggccugggacc

SEQ ID NO: 27130 - RNA, 19 nt, Artificial Sequence
  Description of Artificial Sequence: Synthetic oligonucleotide
  Sense strand starting at position 3046 of SEQ ID NO: 307
acaucugaucagugucuca

SEQ ID NO: 27131 - RNA, 19 nt, Artificial Sequence
  Description of Artificial Sequence: Synthetic oligonucleotide
  Antisense strand to SEQ ID NO: 27130
ugagacacugaucagaugu

SEQ ID NO: 27132 - RNA, 19 nt, Artificial Sequence
  Description of Artificial Sequence: Synthetic oligonucleotide
  Sense strand starting at position 2896 of SEQ ID NO: 307
uuggaagucuuggucucaa

SEQ ID NO: 27133 - RNA, 19 nt, Artificial Sequence
  Description of Artificial Sequence: Synthetic oligonucleotide
  Antisense strand to SEQ ID NO: 27132
uugagaccaagacuuccaa

SEQ ID NO: 27134 - RNA, 19 nt, Artificial Sequence
  Description of Artificial Sequence: Synthetic oligonucleotide
  Sense strand starting at position 2895 of SEQ ID NO: 307
uuuggaagucuuggucuca

SEQ ID NO: 27135 - RNA, 19 nt, Artificial Sequence
  Description of Artificial Sequence: Synthetic oligonucleotide
  Antisense strand to SEQ ID NO: 27134
ugagaccaagacuuccaaa

SEQ ID NO: 27136 - RNA, 19 nt, Artificial Sequence
  Description of Artificial Sequence: Synthetic oligonucleotide
  Sense strand starting at position 2845 of SEQ ID NO: 307
aauaaauguucuucugggu

SEQ ID NO: 27137 - RNA, 19 nt, Artificial Sequence
  Description of Artificial Sequence: Synthetic oligonucleotide
  Antisense strand to SEQ ID NO: 27136
acccagaagaacauuuauu

SEQ ID NO: 27138 - RNA, 19 nt, Artificial Sequence
  Description of Artificial Sequence: Synthetic oligonucleotide
  Sense strand starting at position 2731 of SEQ ID NO: 307
cacggucauccggagcuua

SEQ ID NO: 27139 - RNA, 19 nt, Artificial Sequence
  Description of Artificial Sequence: Synthetic oligonucleotide
  Antisense strand to SEQ ID NO: 27138
uaagcuccggaugaccgug

SEQ ID NO: 27140 - RNA, 19 nt, Artificial Sequence
  Description of Artificial Sequence: Synthetic oligonucleotide
  Sense strand starting at position 2668 of SEQ ID NO: 307
guaucuuguuccuuuccau

SEQ ID NO: 27141 - RNA, 19 nt, Artificial Sequence
  Description of Artificial Sequence: Synthetic oligonucleotide
  Antisense strand to SEQ ID NO: 27140
auggaaaggaacaagauac

SEQ ID NO: 27142 - RNA, 19 nt, Artificial Sequence
  Description of Artificial Sequence: Synthetic oligonucleotide
  Sense strand starting at position 2591 of SEQ ID NO: 307
gacaguaaugccuguggcu

SEQ ID NO: 27143 - RNA, 19 nt, Artificial Sequence
  Description of Artificial Sequence: Synthetic oligonucleotide
  Antisense strand to SEQ ID NO: 27142
agccacaggcauuacuguc

SEQ ID NO: 27144 - RNA, 19 nt, Artificial Sequence
  Description of Artificial Sequence: Synthetic oligonucleotide
  Sense strand starting at position 1230 of SEQ ID NO: 307
agaaucacguccucugaau

SEQ ID NO: 27145 - RNA, 19 nt, Artificial Sequence
  Description of Artificial Sequence: Synthetic oligonucleotide
  Antisense strand to SEQ ID NO: 27144
auucagaggacgugauucu

SEQ ID NO: 27146 - RNA, 19 nt, Artificial Sequence
  Description of Artificial Sequence: Synthetic oligonucleotide
  Sense strand starting at position 1214 of SEQ ID NO: 307
ccagauacuuagcauaaga

SEQ ID NO: 27147 - RNA, 19 nt, Artificial Sequence
  Description of Artificial Sequence: Synthetic oligonucleotide
  Antisense strand to SEQ ID NO: 27146
ucuuaugcuaaguaucugg

SEQ ID NO: 27148 - RNA, 19 nt, Artificial Sequence
  Description of Artificial Sequence: Synthetic oligonucleotide
  Sense strand starting at position 1213 of SEQ ID NO: 307
accagauacuuagcauaag

SEQ ID NO: 27149 - RNA, 19 nt, Artificial Sequence
  Description of Artificial Sequence: Synthetic oligonucleotide
  Antisense strand to SEQ ID NO: 27148
cuuaugcuaaguaucuggu

SEQ ID NO: 27150 - RNA, 19 nt, Artificial Sequence
  Description of Artificial Sequence: Synthetic oligonucleotide
  Sense strand starting at position 1141 of SEQ ID NO: 307
cuagguacucuuugaacau

SEQ ID NO: 27151 - RNA, 19 nt, Artificial Sequence
  Description of Artificial Sequence: Synthetic oligonucleotide
  Antisense strand to SEQ ID NO: 27150
auguucaaagaguaccuag

SEQ ID NO: 27152 - RNA, 19 nt, Artificial Sequence
  Description of Artificial Sequence: Synthetic oligonucleotide
  Sense strand starting at position 1065 of SEQ ID NO: 307
caggcaauuugauguauua

SEQ ID NO: 27153 - RNA, 19 nt, Artificial Sequence
  Description of Artificial Sequence: Synthetic oligonucleotide
  Antisense strand to SEQ ID NO: 27152
uaauacaucaaauugccug

SEQ ID NO: 27154 - RNA, 19 nt, Artificial Sequence
  Description of Artificial Sequence: Synthetic oligonucleotide
  Sense strand starting at position 1046 of SEQ ID NO: 307
gagcuacuugaacgaagaa

SEQ ID NO: 27155 - RNA, 19 nt, Artificial Sequence
  Description of Artificial Sequence: Synthetic oligonucleotide
  Antisense strand to SEQ ID NO: 27154
uucuucguucaaguagcuc

SEQ ID NO: 27156 - RNA, 19 nt, Artificial Sequence
  Description of Artificial Sequence: Synthetic oligonucleotide
  Sense strand starting at position 887 of SEQ ID NO: 307
guuuaucauuaaucucguu

SEQ ID NO: 27157 - RNA, 19 nt, Artificial Sequence
  Description of Artificial Sequence: Synthetic oligonucleotide
  Antisense strand to SEQ ID NO: 27156
aacgagauuaaugauaaac

SEQ ID NO: 27158 - RNA, 19 nt, Artificial Sequence
  Description of Artificial Sequence: Synthetic oligonucleotide
  Sense strand starting at position 878 of SEQ ID NO: 307
gaugguagaguuuaucauu

SEQ ID NO: 27159 - RNA, 19 nt, Artificial Sequence
  Description of Artificial Sequence: Synthetic oligonucleotide
  Antisense strand to SEQ ID NO: 27158
aaugauaaacucuaccauc

SEQ ID NO: 27160 - RNA, 19 nt, Artificial Sequence
  Description of Artificial Sequence: Synthetic oligonucleotide
  Sense strand starting at position 812 of SEQ ID NO: 307
auuuacgagucaugaacuu

SEQ ID NO: 27161 - RNA, 19 nt, Artificial Sequence
  Description of Artificial Sequence: Synthetic oligonucleotide
  Antisense strand to SEQ ID NO: 27160
aaguucaugacucguaaau

SEQ ID NO: 27162 - RNA, 19 nt, Artificial Sequence
  Description of Artificial Sequence: Synthetic oligonucleotide
  Sense strand starting at position 806 of SEQ ID NO: 307
auacuaauuuacgagucau

SEQ ID NO: 27163 - RNA, 19 nt, Artificial Sequence
  Description of Artificial Sequence: Synthetic oligonucleotide
  Antisense strand to SEQ ID NO: 27162
augacucguaaauuaguau

SEQ ID NO: 27164 - RNA, 19 nt, Artificial Sequence
  Description of Artificial Sequence: Synthetic oligonucleotide
  Sense strand starting at position 786 of SEQ ID NO: 307
aagcaugaugugugaaaca

SEQ ID NO: 27165 - RNA, 19 nt, Artificial Sequence
  Description of Artificial Sequence: Synthetic oligonucleotide
  Antisense strand to SEQ ID NO: 27164
uguuucacacaucaugcuu

SEQ ID NO: 27166 - RNA, 19 nt, Artificial Sequence
  Description of Artificial Sequence: Synthetic oligonucleotide
  Sense strand starting at position 785 of SEQ ID NO: 307
aaagcaugaugugugaaac

SEQ ID NO: 27167 - RNA, 19 nt, Artificial Sequence
  Description of Artificial Sequence: Synthetic oligonucleotide
  Antisense strand to SEQ ID NO: 27166
guuucacacaucaugcuuu

SEQ ID NO: 27168 - RNA, 19 nt, Artificial Sequence
  Description of Artificial Sequence: Synthetic oligonucleotide
  Sense strand starting at position 686 of SEQ ID NO: 307
ccuuucuagcugggagaaa

SEQ ID NO: 27169 - RNA, 19 nt, Artificial Sequence
  Description of Artificial Sequence: Synthetic oligonucleotide
  Antisense strand to SEQ ID NO: 27168
uuucucccagcuagaaagg

SEQ ID NO: 27170 - RNA, 19 nt, Artificial Sequence
  Description of Artificial Sequence: Synthetic oligonucleotide
  Sense strand starting at position 685 of SEQ ID NO: 307
cccuuucuagcugggagaa

SEQ ID NO: 27171 - RNA, 19 nt, Artificial Sequence
  Description of Artificial Sequence: Synthetic oligonucleotide
  Antisense strand to SEQ ID NO: 27170
uucucccagcuagaaaggg

SEQ ID NO: 27172 - RNA, 19 nt, Artificial Sequence
  Description of Artificial Sequence: Synthetic oligonucleotide
  Sense strand starting at position 684 of SEQ ID NO: 307
acccuuucuagcugggaga

SEQ ID NO: 27173 - RNA, 19 nt, Artificial Sequence
  Description of Artificial Sequence: Synthetic oligonucleotide
  Antisense strand to SEQ ID NO: 27172
ucucccagcuagaaagggu

SEQ ID NO: 27174 - RNA, 19 nt, Artificial Sequence
  Description of Artificial Sequence: Synthetic oligonucleotide
  Sense strand starting at position 308 of SEQ ID NO: 307
gcggauuccuacuccaguu

SEQ ID NO: 27175 - RNA, 19 nt, Artificial Sequence
  Description of Artificial Sequence: Synthetic oligonucleotide
  Antisense strand to SEQ ID NO: 27174
aacuggaguaggaauccgc

SEQ ID NO: 27176 - RNA, 19 nt, Artificial Sequence
  Description of Artificial Sequence: Synthetic oligonucleotide
  Sense strand starting at position 102 of SEQ ID NO: 307
gugguuugaacucaagucu

SEQ ID NO: 27177 - RNA, 19 nt, Artificial Sequence
  Description of Artificial Sequence: Synthetic oligonucleotide
  Antisense strand to SEQ ID NO: 27176
agacuugaguucaaaccac

SEQ ID NO: 27178 - RNA, 19 nt, Artificial Sequence
  Description of Artificial Sequence: Synthetic oligonucleotide
  Sense strand starting at position 3480 of SEQ ID NO: 308
ugagaaaucaccuguugga

SEQ ID NO: 27179 - RNA, 19 nt, Artificial Sequence
  Description of Artificial Sequence: Synthetic oligonucleotide
  Antisense strand to SEQ ID NO: 27178
uccaacaggugauuucuca

SEQ ID NO: 27180 - RNA, 19 nt, Artificial Sequence
  Description of Artificial Sequence: Synthetic oligonucleotide
  Sense strand starting at position 3448 of SEQ ID NO: 308
cuguuugucccugacuacu

SEQ ID NO: 27181 - RNA, 19 nt, Artificial Sequence
  Description of Artificial Sequence: Synthetic oligonucleotide
  Antisense strand to SEQ ID NO: 27180
aguagucagggacaaacag

SEQ ID NO: 27182 - RNA, 19 nt, Artificial Sequence
  Description of Artificial Sequence: Synthetic oligonucleotide
  Sense strand starting at position 3319 of SEQ ID NO: 308
cucugucucucuuuggaaa

SEQ ID NO: 27183 - RNA, 19 nt, Artificial Sequence
  Description of Artificial Sequence: Synthetic oligonucleotide
  Antisense strand to SEQ ID NO: 27182
uuuccaaagagagacagag

SEQ ID NO: 27184 - RNA, 19 nt, Artificial Sequence
  Description of Artificial Sequence: Synthetic oligonucleotide
  Sense strand starting at position 3298 of SEQ ID NO: 308
uccuaaauacgauacaguu

SEQ ID NO: 27185 - RNA, 19 nt, Artificial Sequence
  Description of Artificial Sequence: Synthetic oligonucleotide
  Antisense strand to SEQ ID NO: 27184
aacuguaucguauuuagga

SEQ ID NO: 27186 - RNA, 19 nt, Artificial Sequence
  Description of Artificial Sequence: Synthetic oligonucleotide
  Sense strand starting at position 3271 of SEQ ID NO: 308
gcacaagucuuacuccaag

SEQ ID NO: 27187 - RNA, 19 nt, Artificial Sequence
  Description of Artificial Sequence: Synthetic oligonucleotide
  Antisense strand to SEQ ID NO: 27186
cuuggaguaagacuugugc

SEQ ID NO: 27188 - RNA, 19 nt, Artificial Sequence
  Description of Artificial Sequence: Synthetic oligonucleotide
  Sense strand starting at position 3215 of SEQ ID NO: 308
gguggaauaaauugccaga

SEQ ID NO: 27189 - RNA, 19 nt, Artificial Sequence
  Description of Artificial Sequence: Synthetic oligonucleotide
  Antisense strand to SEQ ID NO: 27188
ucuggcaauuuauuccacc

SEQ ID NO: 27190 - RNA, 19 nt, Artificial Sequence
  Description of Artificial Sequence: Synthetic oligonucleotide
  Sense strand starting at position 3205 of SEQ ID NO: 308
ggcuuagagagguggaaua

SEQ ID NO: 27191 - RNA, 19 nt, Artificial Sequence
  Description of Artificial Sequence: Synthetic oligonucleotide
  Antisense strand to SEQ ID NO: 27190
uauuccaccucucuaagcc

SEQ ID NO: 27192 - RNA, 19 nt, Artificial Sequence
  Description of Artificial Sequence: Synthetic oligonucleotide
  Sense strand starting at position 3157 of SEQ ID NO: 308
auaggagguacguaucuuu

SEQ ID NO: 27193 - RNA, 19 nt, Artificial Sequence
  Description of Artificial Sequence: Synthetic oligonucleotide
  Antisense strand to SEQ ID NO: 27192
aaagauacguaccuccuau

SEQ ID NO: 27194 - RNA, 19 nt, Artificial Sequence
  Description of Artificial Sequence: Synthetic oligonucleotide
  Sense strand starting at position 3022 of SEQ ID NO: 308
cucccucuccuugauguua

SEQ ID NO: 27195 - RNA, 19 nt, Artificial Sequence
  Description of Artificial Sequence: Synthetic oligonucleotide
  Antisense strand to SEQ ID NO: 27194
uaacaucaaggagagggag

SEQ ID NO: 27196 - RNA, 19 nt, Artificial Sequence
  Description of Artificial Sequence: Synthetic oligonucleotide
  Sense strand starting at position 2925 of SEQ ID NO: 308
ccagguuccagccaucgaa

SEQ ID NO: 27197 - RNA, 19 nt, Artificial Sequence
  Description of Artificial Sequence: Synthetic oligonucleotide
  Antisense strand to SEQ ID NO: 27196
uucgauggcuggaaccugg

SEQ ID NO: 27198 - RNA, 19 nt, Artificial Sequence
  Description of Artificial Sequence: Synthetic oligonucleotide
  Sense strand starting at position 2676 of SEQ ID NO: 308
ggcggcugcggugauuuau

SEQ ID NO: 27199 - RNA, 19 nt, Artificial Sequence
  Description of Artificial Sequence: Synthetic oligonucleotide
  Antisense strand to SEQ ID NO: 27198
auaaaucaccgcagccgcc

SEQ ID NO: 27200 - RNA, 19 nt, Artificial Sequence
  Description of Artificial Sequence: Synthetic oligonucleotide
  Sense strand starting at position 1671 of SEQ ID NO: 308
gaagaagaguugguguauu

SEQ ID NO: 27201 - RNA, 19 nt, Artificial Sequence
  Description of Artificial Sequence: Synthetic oligonucleotide
  Antisense strand to SEQ ID NO: 27200
aauacaccaacucuucuuc

SEQ ID NO: 27202 - RNA, 19 nt, Artificial Sequence
  Description of Artificial Sequence: Synthetic oligonucleotide
  Sense strand starting at position 1670 of SEQ ID NO: 308
ggaagaagaguugguguau

SEQ ID NO: 27203 - RNA, 19 nt, Artificial Sequence
  Description of Artificial Sequence: Synthetic oligonucleotide
  Antisense strand to SEQ ID NO: 27202
auacaccaacucuucuucc

SEQ ID NO: 27204 - RNA, 19 nt, Artificial Sequence
  Description of Artificial Sequence: Synthetic oligonucleotide
  Sense strand starting at position 1571 of SEQ ID NO: 308
ggcgcugguacucagaaga

SEQ ID NO: 27205 - RNA, 19 nt, Artificial Sequence
  Description of Artificial Sequence: Synthetic oligonucleotide
  Antisense strand to SEQ ID NO: 27204
ucuucugaguaccagcgcc

SEQ ID NO: 27206 - RNA, 19 nt, Artificial Sequence
  Description of Artificial Sequence: Synthetic oligonucleotide
  Sense strand starting at position 1546 of SEQ ID NO: 308
acuggagaauccuugacga

SEQ ID NO: 27207 - RNA, 19 nt, Artificial Sequence
  Description of Artificial Sequence: Synthetic oligonucleotide
  Antisense strand to SEQ ID NO: 27206
ucgucaaggauucuccagu

SEQ ID NO: 27208 - RNA, 19 nt, Artificial Sequence
  Description of Artificial Sequence: Synthetic oligonucleotide
  Sense strand starting at position 1514 of SEQ ID NO: 308
augugugcaaauuagagaa

SEQ ID NO: 27209 - RNA, 19 nt, Artificial Sequence
  Description of Artificial Sequence: Synthetic oligonucleotide
  Antisense strand to SEQ ID NO: 27208
uucucuaauuugcacacau

SEQ ID NO: 27210 - RNA, 19 nt, Artificial Sequence
  Description of Artificial Sequence: Synthetic oligonucleotide
  Sense strand starting at position 1509 of SEQ ID NO: 308
gggaaaugugugcaaauua

SEQ ID NO: 27211 - RNA, 19 nt, Artificial Sequence
  Description of Artificial Sequence: Synthetic oligonucleotide
  Antisense strand to SEQ ID NO: 27210
uaauuugcacacauuuccc

SEQ ID NO: 27212 - RNA, 19 nt, Artificial Sequence
  Description of Artificial Sequence: Synthetic oligonucleotide
  Sense strand starting at position 1508 of SEQ ID NO: 308
ugggaaaugugugcaaauu

SEQ ID NO: 27213 - RNA, 19 nt, Artificial Sequence
  Description of Artificial Sequence: Synthetic oligonucleotide
  Antisense strand to SEQ ID NO: 27212
aauuugcacacauuuccca

SEQ ID NO: 27214 - RNA, 19 nt, Artificial Sequence
  Description of Artificial Sequence: Synthetic oligonucleotide
  Sense strand starting at position 1507 of SEQ ID NO: 308
augggaaaugugugcaaau

SEQ ID NO: 27215 - RNA, 19 nt, Artificial Sequence
  Description of Artificial Sequence: Synthetic oligonucleotide
  Antisense strand to SEQ ID NO: 27214
auuugcacacauuucccau

SEQ ID NO: 27216 - RNA, 19 nt, Artificial Sequence
  Description of Artificial Sequence: Synthetic oligonucleotide
  Sense strand starting at position 1190 of SEQ ID NO: 308
ucgggagucuacccagaau

SEQ ID NO: 27217 - RNA, 19 nt, Artificial Sequence
  Description of Artificial Sequence: Synthetic oligonucleotide
  Antisense strand to SEQ ID NO: 27216
auucuggguagacucccga

SEQ ID NO: 27218 - RNA, 19 nt, Artificial Sequence
  Description of Artificial Sequence: Synthetic oligonucleotide
  Sense strand starting at position 1179 of SEQ ID NO: 308
caggauuagagucgggagu

SEQ ID NO: 27219 - RNA, 19 nt, Artificial Sequence
  Description of Artificial Sequence: Synthetic oligonucleotide
  Antisense strand to SEQ ID NO: 27218
acucccgacucuaauccug

SEQ ID NO: 27220 - RNA, 19 nt, Artificial Sequence
  Description of Artificial Sequence: Synthetic oligonucleotide
  Sense strand starting at position 1142 of SEQ ID NO: 308
gcaggauaugcggaaagca

SEQ ID NO: 27221 - RNA, 19 nt, Artificial Sequence
  Description of Artificial Sequence: Synthetic oligonucleotide
  Antisense strand to SEQ ID NO: 27220
ugcuuuccgcauauccugc

SEQ ID NO: 27222 - RNA, 19 nt, Artificial Sequence
  Description of Artificial Sequence: Synthetic oligonucleotide
  Sense strand starting at position 950 of SEQ ID NO: 308
ugaguaacaucaucaggau

SEQ ID NO: 27223 - RNA, 19 nt, Artificial Sequence
  Description of Artificial Sequence: Synthetic oligonucleotide
  Antisense strand to SEQ ID NO: 27222
auccugaugauguuacuca

SEQ ID NO: 27224 - RNA, 19 nt, Artificial Sequence
  Description of Artificial Sequence: Synthetic oligonucleotide
  Sense strand starting at position 829 of SEQ ID NO: 308
cugggaaugucaucucaac

SEQ ID NO: 27225 - RNA, 19 nt, Artificial Sequence
  Description of Artificial Sequence: Synthetic oligonucleotide
  Antisense strand to SEQ ID NO: 27224
guugagaugacauucccag

SEQ ID NO: 27226 - RNA, 19 nt, Artificial Sequence
  Description of Artificial Sequence: Synthetic oligonucleotide
  Sense strand starting at position 776 of SEQ ID NO: 308
guguaagagaaugguguua

SEQ ID NO: 27227 - RNA, 19 nt, Artificial Sequence
  Description of Artificial Sequence: Synthetic oligonucleotide
  Antisense strand to SEQ ID NO: 27226
uaacaccauucucuuacac

SEQ ID NO: 27228 - RNA, 19 nt, Artificial Sequence
  Description of Artificial Sequence: Synthetic oligonucleotide
  Sense strand starting at position 765 of SEQ ID NO: 308
auuguuagaauguguaaga

SEQ ID NO: 27229 - RNA, 19 nt, Artificial Sequence
  Description of Artificial Sequence: Synthetic oligonucleotide
  Antisense strand to SEQ ID NO: 27228
ucuuacacauucuaacaau

SEQ ID NO: 27230 - RNA, 19 nt, Artificial Sequence
  Description of Artificial Sequence: Synthetic oligonucleotide
  Sense strand starting at position 714 of SEQ ID NO: 308
gaacgcauucuuggaaacu

SEQ ID NO: 27231 - RNA, 19 nt, Artificial Sequence
  Description of Artificial Sequence: Synthetic oligonucleotide
  Antisense strand to SEQ ID NO: 27230
aguuuccaagaaugcguuc

SEQ ID NO: 27232 - RNA, 19 nt, Artificial Sequence
  Description of Artificial Sequence: Synthetic oligonucleotide
  Sense strand starting at position 712 of SEQ ID NO: 308
aagaacgcauucuuggaaa

SEQ ID NO: 27233 - RNA, 19 nt, Artificial Sequence
  Description of Artificial Sequence: Synthetic oligonucleotide
  Antisense strand to SEQ ID NO: 27232
uuuccaagaaugcguucuu

SEQ ID NO: 27234 - RNA, 19 nt, Artificial Sequence
  Description of Artificial Sequence: Synthetic oligonucleotide
  Sense strand starting at position 679 of SEQ ID NO: 308
gucacaguaggauggaaau

SEQ ID NO: 27235 - RNA, 19 nt, Artificial Sequence
  Description of Artificial Sequence: Synthetic oligonucleotide
  Antisense strand to SEQ ID NO: 27234
auuuccauccuacugugac

SEQ ID NO: 27236 - RNA, 19 nt, Artificial Sequence
  Description of Artificial Sequence: Synthetic oligonucleotide
  Sense strand starting at position 426 of SEQ ID NO: 308
guggaacuuuccucaagaa

SEQ ID NO: 27237 - RNA, 19 nt, Artificial Sequence
  Description of Artificial Sequence: Synthetic oligonucleotide
  Antisense strand to SEQ ID NO: 27236
uucuugaggaaaguuccac

SEQ ID NO: 27238 - RNA, 19 nt, Artificial Sequence
  Description of Artificial Sequence: Synthetic oligonucleotide
  Sense strand starting at position 425 of SEQ ID NO: 308
uguggaacuuuccucaaga

SEQ ID NO: 27239 - RNA, 19 nt, Artificial Sequence
  Description of Artificial Sequence: Synthetic oligonucleotide
  Antisense strand to SEQ ID NO: 27238
ucuugaggaaaguuccaca

SEQ ID NO: 27240 - RNA, 19 nt, Artificial Sequence
  Description of Artificial Sequence: Synthetic oligonucleotide
  Sense strand starting at position 415 of SEQ ID NO: 308
agagaaggucuguggaacu

SEQ ID NO: 27241 - RNA, 19 nt, Artificial Sequence
  Description of Artificial Sequence: Synthetic oligonucleotide
  Antisense strand to SEQ ID NO: 27240
aguuccacagaccuucucu

SEQ ID NO: 27242 - RNA, 19 nt, Artificial Sequence
  Description of Artificial Sequence: Synthetic oligonucleotide
  Sense strand starting at position 234 of SEQ ID NO: 308
ggcauaguugaaugaugca

SEQ ID NO: 27243 - RNA, 19 nt, Artificial Sequence
  Description of Artificial Sequence: Synthetic oligonucleotide
  Antisense strand to SEQ ID NO: 27242
ugcaucauucaacuaugcc

SEQ ID NO: 27244 - RNA, 19 nt, Artificial Sequence
  Description of Artificial Sequence: Synthetic oligonucleotide
  Sense strand starting at position 226 of SEQ ID NO: 308
gaaagaucggcauaguuga

SEQ ID NO: 27245 - RNA, 19 nt, Artificial Sequence
  Description of Artificial Sequence: Synthetic oligonucleotide
  Antisense strand to SEQ ID NO: 27244
ucaacuaugccgaucuuuc

SEQ ID NO: 27246 - RNA, 19 nt, Artificial Sequence
  Description of Artificial Sequence: Synthetic oligonucleotide
  Sense strand starting at position 224 of SEQ ID NO: 308
cugaaagaucggcauaguu

SEQ ID NO: 27247 - RNA, 19 nt, Artificial Sequence
  Description of Artificial Sequence: Synthetic oligonucleotide
  Antisense strand to SEQ ID NO: 27246
aacuaugccgaucuuucag

SEQ ID NO: 27248 - RNA, 19 nt, Artificial Sequence
  Description of Artificial Sequence: Synthetic oligonucleotide
  Sense strand starting at position 223 of SEQ ID NO: 308
ccugaaagaucggcauagu

SEQ ID NO: 27249 - RNA, 19 nt, Artificial Sequence
  Description of Artificial Sequence: Synthetic oligonucleotide
  Antisense strand to SEQ ID NO: 27248
acuaugccgaucuuucagg

SEQ ID NO: 27250 - RNA, 19 nt, Artificial Sequence
  Description of Artificial Sequence: Synthetic oligonucleotide
  Sense strand starting at position 84 of SEQ ID NO: 308
gugcucugaauggaaauau

SEQ ID NO: 27251 - RNA, 19 nt, Artificial Sequence
  Description of Artificial Sequence: Synthetic oligonucleotide
  Antisense strand to SEQ ID NO: 27250
auauuuccauucagagcac

SEQ ID NO: 27252 - RNA, 19 nt, Artificial Sequence
  Description of Artificial Sequence: Synthetic oligonucleotide
  Sense strand starting at position 83 of SEQ ID NO: 308
ugugcucugaauggaaaua

SEQ ID NO: 27253 - RNA, 19 nt, Artificial Sequence
  Description of Artificial Sequence: Synthetic oligonucleotide
  Antisense strand to SEQ ID NO: 27252
uauuuccauucagagcaca

SEQ ID NO: 27254 - RNA, 19 nt, Artificial Sequence
  Description of Artificial Sequence: Synthetic oligonucleotide
  Sense strand starting at position 82 of SEQ ID NO: 308
uugugcucugaauggaaau

SEQ ID NO: 27255 - RNA, 19 nt, Artificial Sequence
  Description of Artificial Sequence: Synthetic oligonucleotide
  Antisense strand to SEQ ID NO: 27254
auuuccauucagagcacaa

SEQ ID NO: 27256 - RNA, 19 nt, Artificial Sequence
  Description of Artificial Sequence: Synthetic oligonucleotide
  Sense strand starting at position 76 of SEQ ID NO: 308
auacaauugugcucugaau

SEQ ID NO: 27257 - RNA, 19 nt, Artificial Sequence
  Description of Artificial Sequence: Synthetic oligonucleotide
  Antisense strand to SEQ ID NO: 27256
auucagagcacaauuguau

SEQ ID NO: 27258 - RNA, 19 nt, Artificial Sequence
  Description of Artificial Sequence: Synthetic oligonucleotide
  Sense strand starting at position 3583 of SEQ ID NO: 309
uggugaguuaugggcuaaa

SEQ ID NO: 27259 - RNA, 19 nt, Artificial Sequence
  Description of Artificial Sequence: Synthetic oligonucleotide
  Antisense strand to SEQ ID NO: 27258
uuuagcccauaacucacca

SEQ ID NO: 27260 - RNA, 19 nt, Artificial Sequence
  Description of Artificial Sequence: Synthetic oligonucleotide
  Sense strand starting at position 3531 of SEQ ID NO: 309
ccgguuccgcuguaggaaa

SEQ ID NO: 27261 - RNA, 19 nt, Artificial Sequence
  Description of Artificial Sequence: Synthetic oligonucleotide
  Antisense strand to SEQ ID NO: 27260
uuuccuacagcggaaccgg

SEQ ID NO: 27262 - RNA, 19 nt, Artificial Sequence
  Description of Artificial Sequence: Synthetic oligonucleotide
  Sense strand starting at position 3114 of SEQ ID NO: 309
ccaaguaaugccgagaaga

SEQ ID NO: 27263 - RNA, 19 nt, Artificial Sequence
  Description of Artificial Sequence: Synthetic oligonucleotide
  Antisense strand to SEQ ID NO: 27262
ucuucucggcauuacuugg

SEQ ID NO: 27264 - RNA, 19 nt, Artificial Sequence
  Description of Artificial Sequence: Synthetic oligonucleotide
  Sense strand starting at position 3048 of SEQ ID NO: 309
cuugauuuauguggccaaa

SEQ ID NO: 27265 - RNA, 19 nt, Artificial Sequence
  Description of Artificial Sequence: Synthetic oligonucleotide
  Antisense strand to SEQ ID NO: 27264
uuuggccacauaaaucaag

SEQ ID NO: 27266 - RNA, 19 nt, Artificial Sequence
  Description of Artificial Sequence: Synthetic oligonucleotide
  Sense strand starting at position 3041 of SEQ ID NO: 309
uugccuucuugauuuaugu

SEQ ID NO: 27267 - RNA, 19 nt, Artificial Sequence
  Description of Artificial Sequence: Synthetic oligonucleotide
  Antisense strand to SEQ ID NO: 27266
acauaaaucaagaaggcaa

SEQ ID NO: 27268 - RNA, 19 nt, Artificial Sequence
  Description of Artificial Sequence: Synthetic oligonucleotide
  Sense strand starting at position 3039 of SEQ ID NO: 309
gcuugccuucuugauuuau

SEQ ID NO: 27269 - RNA, 19 nt, Artificial Sequence
  Description of Artificial Sequence: Synthetic oligonucleotide
  Antisense strand to SEQ ID NO: 27268
auaaaucaagaaggcaagc

SEQ ID NO: 27270 - RNA, 19 nt, Artificial Sequence
  Description of Artificial Sequence: Synthetic oligonucleotide
  Sense strand starting at position 3035 of SEQ ID NO: 309
gcuggcuugccuucuugau

SEQ ID NO: 27271 - RNA, 19 nt, Artificial Sequence
  Description of Artificial Sequence: Synthetic oligonucleotide
  Antisense strand to SEQ ID NO: 27270
aucaagaaggcaagccagc

SEQ ID NO: 27272 - RNA, 19 nt, Artificial Sequence
  Description of Artificial Sequence: Synthetic oligonucleotide
  Sense strand starting at position 3015 of SEQ ID NO: 309
ggagguuccuggaagguga

SEQ ID NO: 27273 - RNA, 19 nt, Artificial Sequence
  Description of Artificial Sequence: Synthetic oligonucleotide
  Antisense strand to SEQ ID NO: 27272
ucaccuuccaggaaccucc

SEQ ID NO: 27274 - RNA, 19 nt, Artificial Sequence
  Description of Artificial Sequence: Synthetic oligonucleotide
  Sense strand starting at position 2587 of SEQ ID NO: 309
gcuagaaguugagcagcau

SEQ ID NO: 27275 - RNA, 19 nt, Artificial Sequence
  Description of Artificial Sequence: Synthetic oligonucleotide
  Antisense strand to SEQ ID NO: 27274
augcugcucaacuucuagc

SEQ ID NO: 27276 - RNA, 19 nt, Artificial Sequence
  Description of Artificial Sequence: Synthetic oligonucleotide
  Sense strand starting at position 2578 of SEQ ID NO: 309
ugcgcuugggcuagaaguu

SEQ ID NO: 27277 - RNA, 19 nt, Artificial Sequence
  Description of Artificial Sequence: Synthetic oligonucleotide
  Antisense strand to SEQ ID NO: 27276
aacuucuagcccaagcgca

SEQ ID NO: 27278 - RNA, 19 nt, Artificial Sequence
  Description of Artificial Sequence: Synthetic oligonucleotide
  Sense strand starting at position 2577 of SEQ ID NO: 309
cugcgcuugggcuagaagu

SEQ ID NO: 27279 - RNA, 19 nt, Artificial Sequence
  Description of Artificial Sequence: Synthetic oligonucleotide
  Antisense strand to SEQ ID NO: 27278
acuucuagcccaagcgcag

SEQ ID NO: 27280 - RNA, 19 nt, Artificial Sequence
  Description of Artificial Sequence: Synthetic oligonucleotide
  Sense strand starting at position 2421 of SEQ ID NO: 309
gucuuuauaucugccagca

SEQ ID NO: 27281 - RNA, 19 nt, Artificial Sequence
  Description of Artificial Sequence: Synthetic oligonucleotide
  Antisense strand to SEQ ID NO: 27280
ugcuggcagauauaaagac

SEQ ID NO: 27282 - RNA, 19 nt, Artificial Sequence
  Description of Artificial Sequence: Synthetic oligonucleotide
  Sense strand starting at position 2413 of SEQ ID NO: 309
agacuugggucuuuauauc

SEQ ID NO: 27283 - RNA, 19 nt, Artificial Sequence
  Description of Artificial Sequence: Synthetic oligonucleotide
  Antisense strand to SEQ ID NO: 27282
gauauaaagacccaagucu

SEQ ID NO: 27284 - RNA, 19 nt, Artificial Sequence
  Description of Artificial Sequence: Synthetic oligonucleotide
  Sense strand starting at position 2407 of SEQ ID NO: 309
ccgcgaagacuugggucuu

SEQ ID NO: 27285 - RNA, 19 nt, Artificial Sequence
  Description of Artificial Sequence: Synthetic oligonucleotide
  Antisense strand to SEQ ID NO: 27284
aagacccaagucuucgcgg

SEQ ID NO: 27286 - RNA, 19 nt, Artificial Sequence
  Description of Artificial Sequence: Synthetic oligonucleotide
  Sense strand starting at position 2396 of SEQ ID NO: 309
aagaaauuccaccgcgaag

SEQ ID NO: 27287 - RNA, 19 nt, Artificial Sequence
  Description of Artificial Sequence: Synthetic oligonucleotide
  Antisense strand to SEQ ID NO: 27286
cuucgcgguggaauuucuu

SEQ ID NO: 27288 - RNA, 19 nt, Artificial Sequence
  Description of Artificial Sequence: Synthetic oligonucleotide
  Sense strand starting at position 2248 of SEQ ID NO: 309
uagguaacaguuuggugau

SEQ ID NO: 27289 - RNA, 19 nt, Artificial Sequence
  Description of Artificial Sequence: Synthetic oligonucleotide
  Antisense strand to SEQ ID NO: 27288
aucaccaaacuguuaccua

SEQ ID NO: 27290 - RNA, 19 nt, Artificial Sequence
  Description of Artificial Sequence: Synthetic oligonucleotide
  Sense strand starting at position 2166 of SEQ ID NO: 309
ggaguaggcugcucuucaa

SEQ ID NO: 27291 - RNA, 19 nt, Artificial Sequence
  Description of Artificial Sequence: Synthetic oligonucleotide
  Antisense strand to SEQ ID NO: 27290
uugaagagcagccuacucc

SEQ ID NO: 27292 - RNA, 19 nt, Artificial Sequence
  Description of Artificial Sequence: Synthetic oligonucleotide
  Sense strand starting at position 1516 of SEQ ID NO: 309
aguuauggugggcaagaaa

SEQ ID NO: 27293 - RNA, 19 nt, Artificial Sequence
  Description of Artificial Sequence: Synthetic oligonucleotide
  Antisense strand to SEQ ID NO: 27292
uuucuugcccaccauaacu

SEQ ID NO: 27294 - RNA, 19 nt, Artificial Sequence
  Description of Artificial Sequence: Synthetic oligonucleotide
  Sense strand starting at position 1515 of SEQ ID NO: 309
gaguuauggugggcaagaa

SEQ ID NO: 27295 - RNA, 19 nt, Artificial Sequence
  Description of Artificial Sequence: Synthetic oligonucleotide
  Antisense strand to SEQ ID NO: 27294
uucuugcccaccauaacuc

SEQ ID NO: 27296 - RNA, 19 nt, Artificial Sequence
  Description of Artificial Sequence: Synthetic oligonucleotide
  Sense strand starting at position 1514 of SEQ ID NO: 309
ggaguuauggugggcaaga

SEQ ID NO: 27297 - RNA, 19 nt, Artificial Sequence
  Description of Artificial Sequence: Synthetic oligonucleotide
  Antisense strand to SEQ ID NO: 27296
ucuugcccaccauaacucc

SEQ ID NO: 27298 - RNA, 19 nt, Artificial Sequence
  Description of Artificial Sequence: Synthetic oligonucleotide
  Sense strand starting at position 1513 of SEQ ID NO: 309
gggaguuauggugggcaag

SEQ ID NO: 27299 - RNA, 19 nt, Artificial Sequence
  Description of Artificial Sequence: Synthetic oligonucleotide
  Antisense strand to SEQ ID NO: 27298
cuugcccaccauaacuccc

SEQ ID NO: 27300 - RNA, 19 nt, Artificial Sequence
  Description of Artificial Sequence: Synthetic oligonucleotide
  Sense strand starting at position 1408 of SEQ ID NO: 309
cgaagagugugcuucagca

SEQ ID NO: 27301 - RNA, 19 nt, Artificial Sequence
  Description of Artificial Sequence: Synthetic oligonucleotide
  Antisense strand to SEQ ID NO: 27300
ugcugaagcacacucuucg

SEQ ID NO: 27302 - RNA, 19 nt, Artificial Sequence
  Description of Artificial Sequence: Synthetic oligonucleotide
  Sense strand starting at position 1397 of SEQ ID NO: 309
cuuagaugcaccgaagagu

SEQ ID NO: 27303 - RNA, 19 nt, Artificial Sequence
  Description of Artificial Sequence: Synthetic oligonucleotide
  Antisense strand to SEQ ID NO: 27302
acucuucggugcaucuaag

SEQ ID NO: 27304 - RNA, 19 nt, Artificial Sequence
  Description of Artificial Sequence: Synthetic oligonucleotide
  Sense strand starting at position 1171 of SEQ ID NO: 309
gagaauuaauuaugaaagg

SEQ ID NO: 27305 - RNA, 19 nt, Artificial Sequence
  Description of Artificial Sequence: Synthetic oligonucleotide
  Antisense strand to SEQ ID NO: 27304
ccuuucauaauuaauucuc

SEQ ID NO: 27306 - RNA, 19 nt, Artificial Sequence
  Description of Artificial Sequence: Synthetic oligonucleotide
  Sense strand starting at position 1140 of SEQ ID NO: 309
ggcagaguggcuggcuuaa

SEQ ID NO: 27307 - RNA, 19 nt, Artificial Sequence
  Description of Artificial Sequence: Synthetic oligonucleotide
  Antisense strand to SEQ ID NO: 27306
uuaagccagccacucugcc

SEQ ID NO: 27308 - RNA, 19 nt, Artificial Sequence
  Description of Artificial Sequence: Synthetic oligonucleotide
  Sense strand starting at position 1050 of SEQ ID NO: 309
cugggaacuucugaacuga

SEQ ID NO: 27309 - RNA, 19 nt, Artificial Sequence
  Description of Artificial Sequence: Synthetic oligonucleotide
  Antisense strand to SEQ ID NO: 27308
ucaguucagaaguucccag

SEQ ID NO: 27310 - RNA, 19 nt, Artificial Sequence
  Description of Artificial Sequence: Synthetic oligonucleotide
  Sense strand starting at position 855 of SEQ ID NO: 309
gcucuuucuuggcugagag

SEQ ID NO: 27311 - RNA, 19 nt, Artificial Sequence
  Description of Artificial Sequence: Synthetic oligonucleotide
  Antisense strand to SEQ ID NO: 27310
cucucagccaagaaagagc

SEQ ID NO: 27312 - RNA, 19 nt, Artificial Sequence
  Description of Artificial Sequence: Synthetic oligonucleotide
  Sense strand starting at position 854 of SEQ ID NO: 309
ugcucuuucuuggcugaga

SEQ ID NO: 27313 - RNA, 19 nt, Artificial Sequence
  Description of Artificial Sequence: Synthetic oligonucleotide
  Antisense strand to SEQ ID NO: 27312
ucucagccaagaaagagca

SEQ ID NO: 27314 - RNA, 19 nt, Artificial Sequence
  Description of Artificial Sequence: Synthetic oligonucleotide
  Sense strand starting at position 778 of SEQ ID NO: 309
gagcaaucagcugggucaa

SEQ ID NO: 27315 - RNA, 19 nt, Artificial Sequence
  Description of Artificial Sequence: Synthetic oligonucleotide
  Antisense strand to SEQ ID NO: 27314
uugacccagcugauugcuc

SEQ ID NO: 27316 - RNA, 19 nt, Artificial Sequence
  Description of Artificial Sequence: Synthetic oligonucleotide
  Sense strand starting at position 777 of SEQ ID NO: 309
agagcaaucagcuggguca

SEQ ID NO: 27317 - RNA, 19 nt, Artificial Sequence
  Description of Artificial Sequence: Synthetic oligonucleotide
  Antisense strand to SEQ ID NO: 27316
ugacccagcugauugcucu

SEQ ID NO: 27318 - RNA, 19 nt, Artificial Sequence
  Description of Artificial Sequence: Synthetic oligonucleotide
  Sense strand starting at position 720 of SEQ ID NO: 309
cuggccucagcggaugaau

SEQ ID NO: 27319 - RNA, 19 nt, Artificial Sequence
  Description of Artificial Sequence: Synthetic oligonucleotide
  Antisense strand to SEQ ID NO: 27318
auucauccgcugaggccag

SEQ ID NO: 27320 - RNA, 19 nt, Artificial Sequence
  Description of Artificial Sequence: Synthetic oligonucleotide
  Sense strand starting at position 579 of SEQ ID NO: 309
ggugcacuugauuaaaccu

SEQ ID NO: 27321 - RNA, 19 nt, Artificial Sequence
  Description of Artificial Sequence: Synthetic oligonucleotide
  Antisense strand to SEQ ID NO: 27320
agguuuaaucaagugcacc

SEQ ID NO: 27322 - RNA, 19 nt, Artificial Sequence
  Description of Artificial Sequence: Synthetic oligonucleotide
  Sense strand starting at position 576 of SEQ ID NO: 309
uuuggugcacuugauuaaa

SEQ ID NO: 27323 - RNA, 19 nt, Artificial Sequence
  Description of Artificial Sequence: Synthetic oligonucleotide
  Antisense strand to SEQ ID NO: 27322
uuuaaucaagugcaccaaa

SEQ ID NO: 27324 - RNA, 19 nt, Artificial Sequence
  Description of Artificial Sequence: Synthetic oligonucleotide
  Sense strand starting at position 523 of SEQ ID NO: 309
guccaauccuuagugaaga

SEQ ID NO: 27325 - RNA, 19 nt, Artificial Sequence
  Description of Artificial Sequence: Synthetic oligonucleotide
  Antisense strand to SEQ ID NO: 27324
ucuucacuaaggauuggac

SEQ ID NO: 27326 - RNA, 19 nt, Artificial Sequence
  Description of Artificial Sequence: Synthetic oligonucleotide
  Sense strand starting at position 521 of SEQ ID NO: 309
gcguccaauccuuagugaa

SEQ ID NO: 27327 - RNA, 19 nt, Artificial Sequence
  Description of Artificial Sequence: Synthetic oligonucleotide
  Antisense strand to SEQ ID NO: 27326
uucacuaaggauuggacgc

SEQ ID NO: 27328 - RNA, 19 nt, Artificial Sequence
  Description of Artificial Sequence: Synthetic oligonucleotide
  Sense strand starting at position 520 of SEQ ID NO: 309
ggcguccaauccuuaguga

SEQ ID NO: 27329 - RNA, 19 nt, Artificial Sequence
  Description of Artificial Sequence: Synthetic oligonucleotide
  Antisense strand to SEQ ID NO: 27328
ucacuaaggauuggacgcc

SEQ ID NO: 27330 - RNA, 19 nt, Artificial Sequence
  Description of Artificial Sequence: Synthetic oligonucleotide
  Sense strand starting at position 112 of SEQ ID NO: 309
gcuccuucguuucuaauga

SEQ ID NO: 27331 - RNA, 19 nt, Artificial Sequence
  Description of Artificial Sequence: Synthetic oligonucleotide
  Antisense strand to SEQ ID NO: 27330
ucauuagaaacgaaggagc

SEQ ID NO: 27332 - RNA, 19 nt, Artificial Sequence
  Description of Artificial Sequence: Synthetic oligonucleotide
  Sense strand starting at position 109 of SEQ ID NO: 309
gaugcuccuucguuucuaa

SEQ ID NO: 27333 - RNA, 19 nt, Artificial Sequence
  Description of Artificial Sequence: Synthetic oligonucleotide
  Antisense strand to SEQ ID NO: 27332
uuagaaacgaaggagcauc

SEQ ID NO: 27334 - RNA, 19 nt, Artificial Sequence
  Description of Artificial Sequence: Synthetic oligonucleotide
  Sense strand starting at position 105 of SEQ ID NO: 309
uagagaugcuccuucguuu

SEQ ID NO: 27335 - RNA, 19 nt, Artificial Sequence
  Description of Artificial Sequence: Synthetic oligonucleotide
  Antisense strand to SEQ ID NO: 27334
aaacgaaggagcaucucua

SEQ ID NO: 27336 - RNA, 19 nt, Artificial Sequence
  Description of Artificial Sequence: Synthetic oligonucleotide
  Sense strand starting at position 90 of SEQ ID NO: 309
ggaagaauaucugcuuaga

SEQ ID NO: 27337 - RNA, 19 nt, Artificial Sequence
  Description of Artificial Sequence: Synthetic oligonucleotide
  Antisense strand to SEQ ID NO: 27336
ucuaagcagauauucuucc

SEQ ID NO: 27338 - RNA, 19 nt, Artificial Sequence
  Description of Artificial Sequence: Synthetic oligonucleotide
  Sense strand starting at position 54 of SEQ ID NO: 310
gagccaugacuuuggcaga

SEQ ID NO: 27339 - RNA, 19 nt, Artificial Sequence
  Description of Artificial Sequence: Synthetic oligonucleotide
  Antisense strand to SEQ ID NO: 27338
ucugccaaagucauggcuc

SEQ ID NO: 27340 - RNA, 19 nt, Artificial Sequence
  Description of Artificial Sequence: Synthetic oligonucleotide
  Sense strand starting at position 68 of SEQ ID NO: 310
gcagauucuggccaaucca

SEQ ID NO: 27341 - RNA, 19 nt, Artificial Sequence
  Description of Artificial Sequence: Synthetic oligonucleotide
  Antisense strand to SEQ ID NO: 27340
uggauuggccagaaucugc

SEQ ID NO: 27342 - RNA, 19 nt, Artificial Sequence
  Description of Artificial Sequence: Synthetic oligonucleotide
  Sense strand starting at position 115 of SEQ ID NO: 310
gaggguaaggguugaugca

SEQ ID NO: 27343 - RNA, 19 nt, Artificial Sequence
  Description of Artificial Sequence: Synthetic oligonucleotide
  Antisense strand to SEQ ID NO: 27342
ugcaucaacccuuacccuc

SEQ ID NO: 27344 - RNA, 19 nt, Artificial Sequence
  Description of Artificial Sequence: Synthetic oligonucleotide
  Sense strand starting at position 142 of SEQ ID NO: 310
uugagaacucacugaguag

SEQ ID NO: 27345 - RNA, 19 nt, Artificial Sequence
  Description of Artificial Sequence: Synthetic oligonucleotide
  Antisense strand to SEQ ID NO: 27344
cuacucagugaguucucaa

SEQ ID NO: 27346 - RNA, 19 nt, Artificial Sequence
  Description of Artificial Sequence: Synthetic oligonucleotide
  Sense strand starting at position 417 of SEQ ID NO: 310
guaguugggcuugacagaa

SEQ ID NO: 27347 - RNA, 19 nt, Artificial Sequence
  Description of Artificial Sequence: Synthetic oligonucleotide
  Antisense strand to SEQ ID NO: 27346
uucugucaagcccaacuac

SEQ ID NO: 27348 - RNA, 19 nt, Artificial Sequence
  Description of Artificial Sequence: Synthetic oligonucleotide
  Sense strand starting at position 451 of SEQ ID NO: 310
cccaguaaccuccaguguu

SEQ ID NO: 27349 - RNA, 19 nt, Artificial Sequence
  Description of Artificial Sequence: Synthetic oligonucleotide
  Antisense strand to SEQ ID NO: 27348
aacacuggagguuacuggg

SEQ ID NO: 27350 - RNA, 19 nt, Artificial Sequence
  Description of Artificial Sequence: Synthetic oligonucleotide
  Sense strand starting at position 454 of SEQ ID NO: 310
aguaaccuccaguguuuga

SEQ ID NO: 27351 - RNA, 19 nt, Artificial Sequence
  Description of Artificial Sequence: Synthetic oligonucleotide
  Antisense strand to SEQ ID NO: 27350
ucaaacacuggagguuacu

SEQ ID NO: 27352 - RNA, 19 nt, Artificial Sequence
  Description of Artificial Sequence: Synthetic oligonucleotide
  Sense strand starting at position 457 of SEQ ID NO: 310
aaccuccaguguuugagaa

SEQ ID NO: 27353 - RNA, 19 nt, Artificial Sequence
  Description of Artificial Sequence: Synthetic oligonucleotide
  Antisense strand to SEQ ID NO: 27352
uucucaaacacuggagguu

SEQ ID NO: 27354 - RNA, 19 nt, Artificial Sequence
  Description of Artificial Sequence: Synthetic oligonucleotide
  Sense strand starting at position 458 of SEQ ID NO: 310
accuccaguguuugagaaa

SEQ ID NO: 27355 - RNA, 19 nt, Artificial Sequence
  Description of Artificial Sequence: Synthetic oligonucleotide
  Antisense strand to SEQ ID NO: 27354
uuucucaaacacuggaggu

SEQ ID NO: 27356 - RNA, 19 nt, Artificial Sequence
  Description of Artificial Sequence: Synthetic oligonucleotide
  Sense strand starting at position 537 of SEQ ID NO: 310
cagaguaaaccugauugca

SEQ ID NO: 27357 - RNA, 19 nt, Artificial Sequence
  Description of Artificial Sequence: Synthetic oligonucleotide
  Antisense strand to SEQ ID NO: 27356
ugcaaucagguuuacucug

SEQ ID NO: 27358 - RNA, 19 nt, Artificial Sequence
  Description of Artificial Sequence: Synthetic oligonucleotide
  Sense strand starting at position 539 of SEQ ID NO: 310
gaguaaaccugauugcaga

SEQ ID NO: 27359 - RNA, 19 nt, Artificial Sequence
  Description of Artificial Sequence: Synthetic oligonucleotide
  Antisense strand to SEQ ID NO: 27358
ucugcaaucagguuuacuc

SEQ ID NO: 27360 - RNA, 19 nt, Artificial Sequence
  Description of Artificial Sequence: Synthetic oligonucleotide
  Sense strand starting at position 540 of SEQ ID NO: 310
aguaaaccugauugcagaa

SEQ ID NO: 27361 - RNA, 19 nt, Artificial Sequence
  Description of Artificial Sequence: Synthetic oligonucleotide
  Antisense strand to SEQ ID NO: 27360
uucugcaaucagguuuacu

SEQ ID NO: 27362 - RNA, 19 nt, Artificial Sequence
  Description of Artificial Sequence: Synthetic oligonucleotide
  Sense strand starting at position 891 of SEQ ID NO: 310
gcaaacauagcaugaguuu

SEQ ID NO: 27363 - RNA, 19 nt, Artificial Sequence
  Description of Artificial Sequence: Synthetic oligonucleotide
  Antisense strand to SEQ ID NO: 27362
aaacucaugcuauguuugc

SEQ ID NO: 27364 - RNA, 19 nt, Artificial Sequence
  Description of Artificial Sequence: Synthetic oligonucleotide
  Sense strand starting at position 932 of SEQ ID NO: 310
gcacgucugagcuagaaca

SEQ ID NO: 27365 - RNA, 19 nt, Artificial Sequence
  Description of Artificial Sequence: Synthetic oligonucleotide
  Antisense strand to SEQ ID NO: 27364
uguucuagcucagacgugc

SEQ ID NO: 27366 - RNA, 19 nt, Artificial Sequence
  Description of Artificial Sequence: Synthetic oligonucleotide
  Sense strand starting at position 1200 of SEQ ID NO: 310
ccaugauaauguggauuug

SEQ ID NO: 27367 - RNA, 19 nt, Artificial Sequence
  Description of Artificial Sequence: Synthetic oligonucleotide
  Antisense strand to SEQ ID NO: 27366
caaauccacauuaucaugg

SEQ ID NO: 27368 - RNA, 19 nt, Artificial Sequence
  Description of Artificial Sequence: Synthetic oligonucleotide
  Sense strand starting at position 1280 of SEQ ID NO: 310
cugguugucauccaggacu

SEQ ID NO: 27369 - RNA, 19 nt, Artificial Sequence
  Description of Artificial Sequence: Synthetic oligonucleotide
  Antisense strand to SEQ ID NO: 27368
aguccuggaugacaaccag

SEQ ID NO: 27370 - RNA, 19 nt, Artificial Sequence
  Description of Artificial Sequence: Synthetic oligonucleotide
  Sense strand starting at position 1282 of SEQ ID NO: 310
gguugucauccaggacuug

SEQ ID NO: 27371 - RNA, 19 nt, Artificial Sequence
  Description of Artificial Sequence: Synthetic oligonucleotide
  Antisense strand to SEQ ID NO: 27370
caaguccuggaugacaacc

SEQ ID NO: 27372 - RNA, 19 nt, Artificial Sequence
  Description of Artificial Sequence: Synthetic oligonucleotide
  Sense strand starting at position 1481 of SEQ ID NO: 310
ucacucaauucugugaguu

SEQ ID NO: 27373 - RNA, 19 nt, Artificial Sequence
  Description of Artificial Sequence: Synthetic oligonucleotide
  Antisense strand to SEQ ID NO: 27372
aacucacagaauugaguga

SEQ ID NO: 27374 - RNA, 19 nt, Artificial Sequence
  Description of Artificial Sequence: Synthetic oligonucleotide
  Sense strand starting at position 1610 of SEQ ID NO: 310
ccugaaggauacuuccauu

SEQ ID NO: 27375 - RNA, 19 nt, Artificial Sequence
  Description of Artificial Sequence: Synthetic oligonucleotide
  Antisense strand to SEQ ID NO: 27374
aauggaaguauccuucagg

SEQ ID NO: 27376 - RNA, 19 nt, Artificial Sequence
  Description of Artificial Sequence: Synthetic oligonucleotide
  Sense strand starting at position 2039 of SEQ ID NO: 310
gccagugacuucccaaucu

SEQ ID NO: 27377 - RNA, 19 nt, Artificial Sequence
  Description of Artificial Sequence: Synthetic oligonucleotide
  Antisense strand to SEQ ID NO: 27376
agauugggaagucacuggc

SEQ ID NO: 27378 - RNA, 19 nt, Artificial Sequence
  Description of Artificial Sequence: Synthetic oligonucleotide
  Sense strand starting at position 2181 of SEQ ID NO: 310
auagguagccuuggauaug

SEQ ID NO: 27379 - RNA, 19 nt, Artificial Sequence
  Description of Artificial Sequence: Synthetic oligonucleotide
  Antisense strand to SEQ ID NO: 27378
cauauccaaggcuaccuau

SEQ ID NO: 27380 - RNA, 19 nt, Artificial Sequence
  Description of Artificial Sequence: Synthetic oligonucleotide
  Sense strand starting at position 2184 of SEQ ID NO: 310
gguagccuuggauauggaa

SEQ ID NO: 27381 - RNA, 19 nt, Artificial Sequence
  Description of Artificial Sequence: Synthetic oligonucleotide
  Antisense strand to SEQ ID NO: 27380
uuccauauccaaggcuacc

SEQ ID NO: 27382 - RNA, 19 nt, Artificial Sequence
  Description of Artificial Sequence: Synthetic oligonucleotide
  Sense strand starting at position 2259 of SEQ ID NO: 310
ccaugacauugucuggaga

SEQ ID NO: 27383 - RNA, 19 nt, Artificial Sequence
  Description of Artificial Sequence: Synthetic oligonucleotide
  Antisense strand to SEQ ID NO: 27382
ucuccagacaaugucaugg

SEQ ID NO: 27384 - RNA, 19 nt, Artificial Sequence
  Description of Artificial Sequence: Synthetic oligonucleotide
  Sense strand starting at position 2260 of SEQ ID NO: 310
caugacauugucuggagaa

SEQ ID NO: 27385 - RNA, 19 nt, Artificial Sequence
  Description of Artificial Sequence: Synthetic oligonucleotide
  Antisense strand to SEQ ID NO: 27384
uucuccagacaaugucaug

SEQ ID NO: 27386 - RNA, 19 nt, Artificial Sequence
  Description of Artificial Sequence: Synthetic oligonucleotide
  Sense strand starting at position 2544 of SEQ ID NO: 310
aaagguugugugcauuauc

SEQ ID NO: 27387 - RNA, 19 nt, Artificial Sequence
  Description of Artificial Sequence: Synthetic oligonucleotide
  Antisense strand to SEQ ID NO: 27386
gauaaugcacacaaccuuu

SEQ ID NO: 27388 - RNA, 19 nt, Artificial Sequence
  Description of Artificial Sequence: Synthetic oligonucleotide
  Sense strand starting at position 2553 of SEQ ID NO: 310
gugcauuaucucugggacu

SEQ ID NO: 27389 - RNA, 19 nt, Artificial Sequence
  Description of Artificial Sequence: Synthetic oligonucleotide
  Antisense strand to SEQ ID NO: 27388
agucccagagauaaugcac

SEQ ID NO: 27390 - RNA, 19 nt, Artificial Sequence
  Description of Artificial Sequence: Synthetic oligonucleotide
  Sense strand starting at position 2555 of SEQ ID NO: 310
gcauuaucucugggacucu

SEQ ID NO: 27391 - RNA, 19 nt, Artificial Sequence
  Description of Artificial Sequence: Synthetic oligonucleotide
  Antisense strand to SEQ ID NO: 27390
agagucccagagauaaugc

SEQ ID NO: 27392 - RNA, 19 nt, Artificial Sequence
  Description of Artificial Sequence: Synthetic oligonucleotide
  Sense strand starting at position 2601 of SEQ ID NO: 310
guacuaugcucccuguaaa

SEQ ID NO: 27393 - RNA, 19 nt, Artificial Sequence
  Description of Artificial Sequence: Synthetic oligonucleotide
  Antisense strand to SEQ ID NO: 27392
uuuacagggagcauaguac

SEQ ID NO: 27394 - RNA, 19 nt, Artificial Sequence
  Description of Artificial Sequence: Synthetic oligonucleotide
  Sense strand starting at position 2604 of SEQ ID NO: 310
cuaugcucccuguaaaugu

SEQ ID NO: 27395 - RNA, 19 nt, Artificial Sequence
  Description of Artificial Sequence: Synthetic oligonucleotide
  Antisense strand to SEQ ID NO: 27394
acauuuacagggagcauag

SEQ ID NO: 27396 - RNA, 19 nt, Artificial Sequence
  Description of Artificial Sequence: Synthetic oligonucleotide
  Sense strand starting at position 2938 of SEQ ID NO: 310
ugaggauagccacgguaau

SEQ ID NO: 27397 - RNA, 19 nt, Artificial Sequence
  Description of Artificial Sequence: Synthetic oligonucleotide
  Antisense strand to SEQ ID NO: 27396
auuaccguggcuauccuca

SEQ ID NO: 27398 - RNA, 19 nt, Artificial Sequence
  Description of Artificial Sequence: Synthetic oligonucleotide
  Sense strand starting at position 2939 of SEQ ID NO: 310
gaggauagccacgguaauc

SEQ ID NO: 27399 - RNA, 19 nt, Artificial Sequence
  Description of Artificial Sequence: Synthetic oligonucleotide
  Antisense strand to SEQ ID NO: 27398
gauuaccguggcuauccuc

SEQ ID NO: 27400 - RNA, 19 nt, Artificial Sequence
  Description of Artificial Sequence: Synthetic oligonucleotide
  Sense strand starting at position 3027 of SEQ ID NO: 310
uggugaaacccgcauucua

SEQ ID NO: 27401 - RNA, 19 nt, Artificial Sequence
  Description of Artificial Sequence: Synthetic oligonucleotide
  Antisense strand to SEQ ID NO: 27400
uagaaugcggguuucacca

SEQ ID NO: 27402 - RNA, 19 nt, Artificial Sequence
  Description of Artificial Sequence: Synthetic oligonucleotide
  Sense strand starting at position 3152 of SEQ ID NO: 310
gugagcagggauugaauca

SEQ ID NO: 27403 - RNA, 19 nt, Artificial Sequence
  Description of Artificial Sequence: Synthetic oligonucleotide
  Antisense strand to SEQ ID NO: 27402
ugauucaaucccugcucac

SEQ ID NO: 27404 - RNA, 19 nt, Artificial Sequence
  Description of Artificial Sequence: Synthetic oligonucleotide
  Sense strand starting at position 3159 of SEQ ID NO: 310
gggauugaaucacugcacu

SEQ ID NO: 27405 - RNA, 19 nt, Artificial Sequence
  Description of Artificial Sequence: Synthetic oligonucleotide
  Antisense strand to SEQ ID NO: 27404
agugcagugauucaauccc

SEQ ID NO: 27406 - RNA, 19 nt, Artificial Sequence
  Description of Artificial Sequence: Synthetic oligonucleotide
  Sense strand starting at position 3236 of SEQ ID NO: 310
cauugaacgccugagcuaa

SEQ ID NO: 27407 - RNA, 19 nt, Artificial Sequence
  Description of Artificial Sequence: Synthetic oligonucleotide
  Antisense strand to SEQ ID NO: 27406
uuagcucaggcguucaaug

SEQ ID NO: 27408 - RNA, 19 nt, Artificial Sequence
  Description of Artificial Sequence: Synthetic oligonucleotide
  Sense strand starting at position 3266 of SEQ ID NO: 310
cuuaaaugugcugagcuaa

SEQ ID NO: 27409 - RNA, 19 nt, Artificial Sequence
  Description of Artificial Sequence: Synthetic oligonucleotide
  Antisense strand to SEQ ID NO: 27408
uuagcucagcacauuuaag

SEQ ID NO: 27410 - RNA, 19 nt, Artificial Sequence
  Description of Artificial Sequence: Synthetic oligonucleotide
  Sense strand starting at position 3681 of SEQ ID NO: 310
gguuccuuucucgaggagu

SEQ ID NO: 27411 - RNA, 19 nt, Artificial Sequence
  Description of Artificial Sequence: Synthetic oligonucleotide
  Antisense strand to SEQ ID NO: 27410
acuccucgagaaaggaacc

SEQ ID NO: 27412 - RNA, 19 nt, Artificial Sequence
  Description of Artificial Sequence: Synthetic oligonucleotide
  Sense strand starting at position 3683 of SEQ ID NO: 310
uuccuuucucgaggaguaa

SEQ ID NO: 27413 - RNA, 19 nt, Artificial Sequence
  Description of Artificial Sequence: Synthetic oligonucleotide
  Antisense strand to SEQ ID NO: 27412
uuacuccucgagaaaggaa

SEQ ID NO: 27414 - RNA, 19 nt, Artificial Sequence
  Description of Artificial Sequence: Synthetic oligonucleotide
  Sense strand starting at position 3684 of SEQ ID NO: 310
uccuuucucgaggaguaag

SEQ ID NO: 27415 - RNA, 19 nt, Artificial Sequence
  Description of Artificial Sequence: Synthetic oligonucleotide
  Antisense strand to SEQ ID NO: 27414
cuuacuccucgagaaagga

SEQ ID NO: 27416 - RNA, 19 nt, Artificial Sequence
  Description of Artificial Sequence: Synthetic oligonucleotide
  Sense strand starting at position 3711 of SEQ ID NO: 310
caaagaagucgcuaguauc

SEQ ID NO: 27417 - RNA, 19 nt, Artificial Sequence
  Description of Artificial Sequence: Synthetic oligonucleotide
  Antisense strand to SEQ ID NO: 27416
gauacuagcgacuucuuug

SEQ ID NO: 27418 - RNA, 19 nt, Artificial Sequence
  Description of Artificial Sequence: Synthetic oligonucleotide
  Sense strand starting at position 3949 of SEQ ID NO: 312
uaaugugaacuugaguguu

SEQ ID NO: 27419 - RNA, 19 nt, Artificial Sequence
  Description of Artificial Sequence: Synthetic oligonucleotide
  Antisense strand to SEQ ID NO: 27418
aacacucaaguucacauua

SEQ ID NO: 27420 - RNA, 19 nt, Artificial Sequence
  Description of Artificial Sequence: Synthetic oligonucleotide
  Sense strand starting at position 3937 of SEQ ID NO: 312
guacaaacuccuuaaugug

SEQ ID NO: 27421 - RNA, 19 nt, Artificial Sequence
  Description of Artificial Sequence: Synthetic oligonucleotide
  Antisense strand to SEQ ID NO: 27420
cacauuaaggaguuuguac

SEQ ID NO: 27422 - RNA, 19 nt, Artificial Sequence
  Description of Artificial Sequence: Synthetic oligonucleotide
  Sense strand starting at position 3936 of SEQ ID NO: 312
aguacaaacuccuuaaugu

SEQ ID NO: 27423 - RNA, 19 nt, Artificial Sequence
  Description of Artificial Sequence: Synthetic oligonucleotide
  Antisense strand to SEQ ID NO: 27422
acauuaaggaguuuguacu

SEQ ID NO: 27424 - RNA, 19 nt, Artificial Sequence
  Description of Artificial Sequence: Synthetic oligonucleotide
  Sense strand starting at position 3916 of SEQ ID NO: 312
uccuauuaggcuuagaaua

SEQ ID NO: 27425 - RNA, 19 nt, Artificial Sequence
  Description of Artificial Sequence: Synthetic oligonucleotide
  Antisense strand to SEQ ID NO: 27424
uauucuaagccuaauagga

SEQ ID NO: 27426 - RNA, 19 nt, Artificial Sequence
  Description of Artificial Sequence: Synthetic oligonucleotide
  Sense strand starting at position 3854 of SEQ ID NO: 312
agagcagcucgagauaucu

SEQ ID NO: 27427 - RNA, 19 nt, Artificial Sequence
  Description of Artificial Sequence: Synthetic oligonucleotide
  Antisense strand to SEQ ID NO: 27426
agauaucucgagcugcucu

SEQ ID NO: 27428 - RNA, 19 nt, Artificial Sequence
  Description of Artificial Sequence: Synthetic oligonucleotide
  Sense strand starting at position 3766 of SEQ ID NO: 312
gguccaagucaucauuauu

SEQ ID NO: 27429 - RNA, 19 nt, Artificial Sequence
  Description of Artificial Sequence: Synthetic oligonucleotide
  Antisense strand to SEQ ID NO: 27428
aauaaugaugacuuggacc

SEQ ID NO: 27430 - RNA, 19 nt, Artificial Sequence
  Description of Artificial Sequence: Synthetic oligonucleotide
  Sense strand starting at position 3765 of SEQ ID NO: 312
agguccaagucaucauuau

SEQ ID NO: 27431 - RNA, 19 nt, Artificial Sequence
  Description of Artificial Sequence: Synthetic oligonucleotide
  Antisense strand to SEQ ID NO: 27430
auaaugaugacuuggaccu

SEQ ID NO: 27432 - RNA, 19 nt, Artificial Sequence
  Description of Artificial Sequence: Synthetic oligonucleotide
  Sense strand starting at position 3412 of SEQ ID NO: 312
cugucuauaccuggaauaa

SEQ ID NO: 27433 - RNA, 19 nt, Artificial Sequence
  Description of Artificial Sequence: Synthetic oligonucleotide
  Antisense strand to SEQ ID NO: 27432
uuauuccagguauagacag

SEQ ID NO: 27434 - RNA, 19 nt, Artificial Sequence
  Description of Artificial Sequence: Synthetic oligonucleotide
  Sense strand starting at position 3410 of SEQ ID NO: 312
cccugucuauaccuggaau

SEQ ID NO: 27435 - RNA, 19 nt, Artificial Sequence
  Description of Artificial Sequence: Synthetic oligonucleotide
  Antisense strand to SEQ ID NO: 27434
auuccagguauagacaggg

SEQ ID NO: 27436 - RNA, 19 nt, Artificial Sequence
  Description of Artificial Sequence: Synthetic oligonucleotide
  Sense strand starting at position 3385 of SEQ ID NO: 312
acguaauacccucauguga

SEQ ID NO: 27437 - RNA, 19 nt, Artificial Sequence
  Description of Artificial Sequence: Synthetic oligonucleotide
  Antisense strand to SEQ ID NO: 27436
ucacaugaggguauuacgu

SEQ ID NO: 27438 - RNA, 19 nt, Artificial Sequence
  Description of Artificial Sequence: Synthetic oligonucleotide
  Sense strand starting at position 3330 of SEQ ID NO: 312
agaacauaugcaggaaugu

SEQ ID NO: 27439 - RNA, 19 nt, Artificial Sequence
  Description of Artificial Sequence: Synthetic oligonucleotide
  Antisense strand to SEQ ID NO: 27438
acauuccugcauauguucu

SEQ ID NO: 27440 - RNA, 19 nt, Artificial Sequence
  Description of Artificial Sequence: Synthetic oligonucleotide
  Sense strand starting at position 3139 of SEQ ID NO: 312
auaccugagucuucuaucu

SEQ ID NO: 27441 - RNA, 19 nt, Artificial Sequence
  Description of Artificial Sequence: Synthetic oligonucleotide
  Antisense strand to SEQ ID NO: 27440
agauagaagacucagguau

SEQ ID NO: 27442 - RNA, 19 nt, Artificial Sequence
  Description of Artificial Sequence: Synthetic oligonucleotide
  Sense strand starting at position 3133 of SEQ ID NO: 312
ggacucauaccugagucuu

SEQ ID NO: 27443 - RNA, 19 nt, Artificial Sequence
  Description of Artificial Sequence: Synthetic oligonucleotide
  Antisense strand to SEQ ID NO: 27442
aagacucagguaugagucc

SEQ ID NO: 27444 - RNA, 19 nt, Artificial Sequence
  Description of Artificial Sequence: Synthetic oligonucleotide
  Sense strand starting at position 3084 of SEQ ID NO: 312
gaccuaaugcagugaacag

SEQ ID NO: 27445 - RNA, 19 nt, Artificial Sequence
  Description of Artificial Sequence: Synthetic oligonucleotide
  Antisense strand to SEQ ID NO: 27444
cuguucacugcauuagguc

SEQ ID NO: 27446 - RNA, 19 nt, Artificial Sequence
  Description of Artificial Sequence: Synthetic oligonucleotide
  Sense strand starting at position 2963 of SEQ ID NO: 312
gucaaaguucaugggauga

SEQ ID NO: 27447 - RNA, 19 nt, Artificial Sequence
  Description of Artificial Sequence: Synthetic oligonucleotide
  Antisense strand to SEQ ID NO: 27446
ucaucccaugaacuuugac

SEQ ID NO: 27448 - RNA, 19 nt, Artificial Sequence
  Description of Artificial Sequence: Synthetic oligonucleotide
  Sense strand starting at position 2924 of SEQ ID NO: 312
ugcccagguaauggaaaua

SEQ ID NO: 27449 - RNA, 19 nt, Artificial Sequence
  Description of Artificial Sequence: Synthetic oligonucleotide
  Antisense strand to SEQ ID NO: 27448
uauuuccauuaccugggca

SEQ ID NO: 27450 - RNA, 19 nt, Artificial Sequence
  Description of Artificial Sequence: Synthetic oligonucleotide
  Sense strand starting at position 2863 of SEQ ID NO: 312
cguauauuuauguacguag

SEQ ID NO: 27451 - RNA, 19 nt, Artificial Sequence
  Description of Artificial Sequence: Synthetic oligonucleotide
  Antisense strand to SEQ ID NO: 27450
cuacguacauaaauauacg

SEQ ID NO: 27452 - RNA, 19 nt, Artificial Sequence
  Description of Artificial Sequence: Synthetic oligonucleotide
  Sense strand starting at position 2862 of SEQ ID NO: 312
acguauauuuauguacgua

SEQ ID NO: 27453 - RNA, 19 nt, Artificial Sequence
  Description of Artificial Sequence: Synthetic oligonucleotide
  Antisense strand to SEQ ID NO: 27452
uacguacauaaauauacgu

SEQ ID NO: 27454 - RNA, 19 nt, Artificial Sequence
  Description of Artificial Sequence: Synthetic oligonucleotide
  Sense strand starting at position 2840 of SEQ ID NO: 312
uagaaaucucauugaguug

SEQ ID NO: 27455 - RNA, 19 nt, Artificial Sequence
  Description of Artificial Sequence: Synthetic oligonucleotide
  Antisense strand to SEQ ID NO: 27454
caacucaaugagauuucua

SEQ ID NO: 27456 - RNA, 19 nt, Artificial Sequence
  Description of Artificial Sequence: Synthetic oligonucleotide
  Sense strand starting at position 2839 of SEQ ID NO: 312
uuagaaaucucauugaguu

SEQ ID NO: 27457 - RNA, 19 nt, Artificial Sequence
  Description of Artificial Sequence: Synthetic oligonucleotide
  Antisense strand to SEQ ID NO: 27456
aacucaaugagauuucuaa

SEQ ID NO: 27458 - RNA, 19 nt, Artificial Sequence
  Description of Artificial Sequence: Synthetic oligonucleotide
  Sense strand starting at position 2745 of SEQ ID NO: 312
ggaggacaaugacaugaaa

SEQ ID NO: 27459 - RNA, 19 nt, Artificial Sequence
  Description of Artificial Sequence: Synthetic oligonucleotide
  Antisense strand to SEQ ID NO: 27458
uuucaugucauuguccucc

SEQ ID NO: 27460 - RNA, 19 nt, Artificial Sequence
  Description of Artificial Sequence: Synthetic oligonucleotide
  Sense strand starting at position 2624 of SEQ ID NO: 312
acgcaacaugcgugaauuu

SEQ ID NO: 27461 - RNA, 19 nt, Artificial Sequence
  Description of Artificial Sequence: Synthetic oligonucleotide
  Antisense strand to SEQ ID NO: 27460
aaauucacgcauguugcgu

SEQ ID NO: 27462 - RNA, 19 nt, Artificial Sequence
  Description of Artificial Sequence: Synthetic oligonucleotide
  Sense strand starting at position 2581 of SEQ ID NO: 312
guaguaaagaaucggaagu

SEQ ID NO: 27463 - RNA, 19 nt, Artificial Sequence
  Description of Artificial Sequence: Synthetic oligonucleotide
  Antisense strand to SEQ ID NO: 27462
acuuccgauucuuuacuac

SEQ ID NO: 27464 - RNA, 19 nt, Artificial Sequence
  Description of Artificial Sequence: Synthetic oligonucleotide
  Sense strand starting at position 2569 of SEQ ID NO: 312
ugaccauuaucuguaguaa

SEQ ID NO: 27465 - RNA, 19 nt, Artificial Sequence
  Description of Artificial Sequence: Synthetic oligonucleotide
  Antisense strand to SEQ ID NO: 27464
uuacuacagauaaugguca

SEQ ID NO: 27466 - RNA, 19 nt, Artificial Sequence
  Description of Artificial Sequence: Synthetic oligonucleotide
  Sense strand starting at position 2483 of SEQ ID NO: 312
cgcgcacucagcuuuauag

SEQ ID NO: 27467 - RNA, 19 nt, Artificial Sequence
  Description of Artificial Sequence: Synthetic oligonucleotide
  Antisense strand to SEQ ID NO: 27466
cuauaaagcugagugcgcg

SEQ ID NO: 27468 - RNA, 19 nt, Artificial Sequence
  Description of Artificial Sequence: Synthetic oligonucleotide
  Sense strand starting at position 2482 of SEQ ID NO: 312
gcgcgcacucagcuuuaua

SEQ ID NO: 27469 - RNA, 19 nt, Artificial Sequence
  Description of Artificial Sequence: Synthetic oligonucleotide
  Antisense strand to SEQ ID NO: 27468
uauaaagcugagugcgcgc

SEQ ID NO: 27470 - RNA, 19 nt, Artificial Sequence
  Description of Artificial Sequence: Synthetic oligonucleotide
  Sense strand starting at position 2427 of SEQ ID NO: 312
gcgcgcacucagcuuuaca

SEQ ID NO: 27471 - RNA, 19 nt, Artificial Sequence
  Description of Artificial Sequence: Synthetic oligonucleotide
  Antisense strand to SEQ ID NO: 27470
uguaaagcugagugcgcgc

SEQ ID NO: 27472 - RNA, 19 nt, Artificial Sequence
  Description of Artificial Sequence: Synthetic oligonucleotide
  Sense strand starting at position 2273 of SEQ ID NO: 312
ggugaaaugucuucuggag

SEQ ID NO: 27473 - RNA, 19 nt, Artificial Sequence
  Description of Artificial Sequence: Synthetic oligonucleotide
  Antisense strand to SEQ ID NO: 27472
cuccagaagacauuucacc

SEQ ID NO: 27474 - RNA, 19 nt, Artificial Sequence
  Description of Artificial Sequence: Synthetic oligonucleotide
  Sense strand starting at position 2231 of SEQ ID NO: 312
uuggauucgguauaaguga

SEQ ID NO: 27475 - RNA, 19 nt, Artificial Sequence
  Description of Artificial Sequence: Synthetic oligonucleotide
  Antisense strand to SEQ ID NO: 27474
ucacuuauaccgaauccaa

SEQ ID NO: 27476 - RNA, 19 nt, Artificial Sequence
  Description of Artificial Sequence: Synthetic oligonucleotide
  Sense strand starting at position 2145 of SEQ ID NO: 312
ucagucauggacuguugaa

SEQ ID NO: 27477 - RNA, 19 nt, Artificial Sequence
  Description of Artificial Sequence: Synthetic oligonucleotide
  Antisense strand to SEQ ID NO: 27476
uucaacaguccaugacuga

SEQ ID NO: 27478 - RNA, 19 nt, Artificial Sequence
  Description of Artificial Sequence: Synthetic oligonucleotide
  Sense strand starting at position 1732 of SEQ ID NO: 312
ccggaaauaacguaccgau

SEQ ID NO: 27479 - RNA, 19 nt, Artificial Sequence
  Description of Artificial Sequence: Synthetic oligonucleotide
  Antisense strand to SEQ ID NO: 27478
aucgguacguuauuuccgg

SEQ ID NO: 27480 - RNA, 19 nt, Artificial Sequence
  Description of Artificial Sequence: Synthetic oligonucleotide
  Sense strand starting at position 879 of SEQ ID NO: 312
ccagcuuugcuugaaugaa

SEQ ID NO: 27481 - RNA, 19 nt, Artificial Sequence
  Description of Artificial Sequence: Synthetic oligonucleotide
  Antisense strand to SEQ ID NO: 27480
uucauucaagcaaagcugg

SEQ ID NO: 27482 - RNA, 19 nt, Artificial Sequence
  Description of Artificial Sequence: Synthetic oligonucleotide
  Sense strand starting at position 815 of SEQ ID NO: 312
agugcuagcacugagaacu

SEQ ID NO: 27483 - RNA, 19 nt, Artificial Sequence
  Description of Artificial Sequence: Synthetic oligonucleotide
  Antisense strand to SEQ ID NO: 27482
aguucucagugcuagcacu

SEQ ID NO: 27484 - RNA, 19 nt, Artificial Sequence
  Description of Artificial Sequence: Synthetic oligonucleotide
  Sense strand starting at position 717 of SEQ ID NO: 312
cuaugaaauggaugcuacu

SEQ ID NO: 27485 - RNA, 19 nt, Artificial Sequence
  Description of Artificial Sequence: Synthetic oligonucleotide
  Antisense strand to SEQ ID NO: 27484
aguagcauccauuucauag

SEQ ID NO: 27486 - RNA, 19 nt, Artificial Sequence
  Description of Artificial Sequence: Synthetic oligonucleotide
  Sense strand starting at position 471 of SEQ ID NO: 312
ccacuuacgccaggaaaug

SEQ ID NO: 27487 - RNA, 19 nt, Artificial Sequence
  Description of Artificial Sequence: Synthetic oligonucleotide
  Antisense strand to SEQ ID NO: 27486
cauuuccuggcguaagugg

SEQ ID NO: 27488 - RNA, 19 nt, Artificial Sequence
  Description of Artificial Sequence: Synthetic oligonucleotide
  Sense strand starting at position 187 of SEQ ID NO: 312
gaggacuaacacugagcua

SEQ ID NO: 27489 - RNA, 19 nt, Artificial Sequence
  Description of Artificial Sequence: Synthetic oligonucleotide
  Antisense strand to SEQ ID NO: 27488
uagcucaguguuaguccuc

SEQ ID NO: 27490 - RNA, 19 nt, Artificial Sequence
  Description of Artificial Sequence: Synthetic oligonucleotide
  Sense strand starting at position 165 of SEQ ID NO: 312
ugagaacgaucucuacuuu

SEQ ID NO: 27491 - RNA, 19 nt, Artificial Sequence
  Description of Artificial Sequence: Synthetic oligonucleotide
  Antisense strand to SEQ ID NO: 27490
aaaguagagaucguucuca

SEQ ID NO: 27492 - RNA, 19 nt, Artificial Sequence
  Description of Artificial Sequence: Synthetic oligonucleotide
  Sense strand starting at position 143 of SEQ ID NO: 312
guauauuucuaagugccua

SEQ ID NO: 27493 - RNA, 19 nt, Artificial Sequence
  Description of Artificial Sequence: Synthetic oligonucleotide
  Antisense strand to SEQ ID NO: 27492
uaggcacuuagaaauauac

SEQ ID NO: 27494 - RNA, 19 nt, Artificial Sequence
  Description of Artificial Sequence: Synthetic oligonucleotide
  Sense strand starting at position 28 of SEQ ID NO: 312
ugcacuacacugugaauau

SEQ ID NO: 27495 - RNA, 19 nt, Artificial Sequence
  Description of Artificial Sequence: Synthetic oligonucleotide
  Antisense strand to SEQ ID NO: 27494
auauucacaguguagugca

SEQ ID NO: 27496 - RNA, 19 nt, Artificial Sequence
  Description of Artificial Sequence: Synthetic oligonucleotide
  Sense strand starting at position 18 of SEQ ID NO: 312
uggugauggcugcacuaca

SEQ ID NO: 27497 - RNA, 19 nt, Artificial Sequence
  Description of Artificial Sequence: Synthetic oligonucleotide
  Antisense strand to SEQ ID NO: 27496
uguagugcagccaucacca

SEQ ID NO: 27498 - RNA, 19 nt, Artificial Sequence
  Description of Artificial Sequence: Synthetic oligonucleotide
  Sense strand starting at position 3733 of SEQ ID NO: 311
cugucuauaccuggaauaa

SEQ ID NO: 27499 - RNA, 19 nt, Artificial Sequence
  Description of Artificial Sequence: Synthetic oligonucleotide
  Antisense strand to SEQ ID NO: 27498
uuauuccagguauagacag

SEQ ID NO: 27500 - RNA, 19 nt, Artificial Sequence
  Description of Artificial Sequence: Synthetic oligonucleotide
  Sense strand starting at position 3731 of SEQ ID NO: 311
cccugucuauaccuggaau

SEQ ID NO: 27501 - RNA, 19 nt, Artificial Sequence
  Description of Artificial Sequence: Synthetic oligonucleotide
  Antisense strand to SEQ ID NO: 27500
auuccagguauagacaggg

SEQ ID NO: 27502 - RNA, 19 nt, Artificial Sequence
  Description of Artificial Sequence: Synthetic oligonucleotide
  Sense strand starting at position 3706 of SEQ ID NO: 311
acguaauacccucauguga

SEQ ID NO: 27503 - RNA, 19 nt, Artificial Sequence
  Description of Artificial Sequence: Synthetic oligonucleotide
  Antisense strand to SEQ ID NO: 27502
ucacaugaggguauuacgu

SEQ ID NO: 27504 - RNA, 19 nt, Artificial Sequence
  Description of Artificial Sequence: Synthetic oligonucleotide
  Sense strand starting at position 3660 of SEQ ID NO: 311
gcaggaaugucucuaacuu

SEQ ID NO: 27505 - RNA, 19 nt, Artificial Sequence
  Description of Artificial Sequence: Synthetic oligonucleotide
  Antisense strand to SEQ ID NO: 27504
aaguuagagacauuccugc

SEQ ID NO: 27506 - RNA, 19 nt, Artificial Sequence
  Description of Artificial Sequence: Synthetic oligonucleotide
  Sense strand starting at position 3651 of SEQ ID NO: 311
agaacauaugcaggaaugu

SEQ ID NO: 27507 - RNA, 19 nt, Artificial Sequence
  Description of Artificial Sequence: Synthetic oligonucleotide
  Antisense strand to SEQ ID NO: 27506
acauuccugcauauguucu

SEQ ID NO: 27508 - RNA, 19 nt, Artificial Sequence
  Description of Artificial Sequence: Synthetic oligonucleotide
  Sense strand starting at position 3460 of SEQ ID NO: 311
auaccugagucuucuaucu

SEQ ID NO: 27509 - RNA, 19 nt, Artificial Sequence
  Description of Artificial Sequence: Synthetic oligonucleotide
  Antisense strand to SEQ ID NO: 27508
agauagaagacucagguau

SEQ ID NO: 27510 - RNA, 19 nt, Artificial Sequence
  Description of Artificial Sequence: Synthetic oligonucleotide
  Sense strand starting at position 3454 of SEQ ID NO: 311
ggacucauaccugagucuu

SEQ ID NO: 27511 - RNA, 19 nt, Artificial Sequence
  Description of Artificial Sequence: Synthetic oligonucleotide
  Antisense strand to SEQ ID NO: 27510
aagacucagguaugagucc

SEQ ID NO: 27512 - RNA, 19 nt, Artificial Sequence
  Description of Artificial Sequence: Synthetic oligonucleotide
  Sense strand starting at position 3434 of SEQ ID NO: 311
cucuuaauugcucaggcua

SEQ ID NO: 27513 - RNA, 19 nt, Artificial Sequence
  Description of Artificial Sequence: Synthetic oligonucleotide
  Antisense strand to SEQ ID NO: 27512
uagccugagcaauuaagag

SEQ ID NO: 27514 - RNA, 19 nt, Artificial Sequence
  Description of Artificial Sequence: Synthetic oligonucleotide
  Sense strand starting at position 3405 of SEQ ID NO: 311
gaccuaaugcagugaacag

SEQ ID NO: 27515 - RNA, 19 nt, Artificial Sequence
  Description of Artificial Sequence: Synthetic oligonucleotide
  Antisense strand to SEQ ID NO: 27514
cuguucacugcauuagguc

SEQ ID NO: 27516 - RNA, 19 nt, Artificial Sequence
  Description of Artificial Sequence: Synthetic oligonucleotide
  Sense strand starting at position 3284 of SEQ ID NO: 311
gucaaaguucaugggauga

SEQ ID NO: 27517 - RNA, 19 nt, Artificial Sequence
  Description of Artificial Sequence: Synthetic oligonucleotide
  Antisense strand to SEQ ID NO: 27516
ucaucccaugaacuuugac

SEQ ID NO: 27518 - RNA, 19 nt, Artificial Sequence
  Description of Artificial Sequence: Synthetic oligonucleotide
  Sense strand starting at position 3245 of SEQ ID NO: 311
ugcccagguaauggaaaua

SEQ ID NO: 27519 - RNA, 19 nt, Artificial Sequence
  Description of Artificial Sequence: Synthetic oligonucleotide
  Antisense strand to SEQ ID NO: 27518
uauuuccauuaccugggca

SEQ ID NO: 27520 - RNA, 19 nt, Artificial Sequence
  Description of Artificial Sequence: Synthetic oligonucleotide
  Sense strand starting at position 3184 of SEQ ID NO: 311
cguauauuuauguacguag

SEQ ID NO: 27521 - RNA, 19 nt, Artificial Sequence
  Description of Artificial Sequence: Synthetic oligonucleotide
  Antisense strand to SEQ ID NO: 27520
cuacguacauaaauauacg

SEQ ID NO: 27522 - RNA, 19 nt, Artificial Sequence
  Description of Artificial Sequence: Synthetic oligonucleotide
  Sense strand starting at position 3183 of SEQ ID NO: 311
acguauauuuauguacgua

SEQ ID NO: 27523 - RNA, 19 nt, Artificial Sequence
  Description of Artificial Sequence: Synthetic oligonucleotide
  Antisense strand to SEQ ID NO: 27522
uacguacauaaauauacgu

SEQ ID NO: 27524 - RNA, 19 nt, Artificial Sequence
  Description of Artificial Sequence: Synthetic oligonucleotide
  Sense strand starting at position 3161 of SEQ ID NO: 311
uagaaaucucauugaguug

SEQ ID NO: 27525 - RNA, 19 nt, Artificial Sequence
  Description of Artificial Sequence: Synthetic oligonucleotide
  Antisense strand to SEQ ID NO: 27524
caacucaaugagauuucua

SEQ ID NO: 27526 - RNA, 19 nt, Artificial Sequence
  Description of Artificial Sequence: Synthetic oligonucleotide
  Sense strand starting at position 3160 of SEQ ID NO: 311
uuagaaaucucauugaguu

SEQ ID NO: 27527 - RNA, 19 nt, Artificial Sequence
  Description of Artificial Sequence: Synthetic oligonucleotide
  Antisense strand to SEQ ID NO: 27526
aacucaaugagauuucuaa

SEQ ID NO: 27528 - RNA, 19 nt, Artificial Sequence
  Description of Artificial Sequence: Synthetic oligonucleotide
  Sense strand starting at position 3110 of SEQ ID NO: 311
cagguaauguuucuugauu

SEQ ID NO: 27529 - RNA, 19 nt, Artificial Sequence
  Description of Artificial Sequence: Synthetic oligonucleotide
  Antisense strand to SEQ ID NO: 27528
aaucaagaaacauuaccug

SEQ ID NO: 27530 - RNA, 19 nt, Artificial Sequence
  Description of Artificial Sequence: Synthetic oligonucleotide
  Sense strand starting at position 3066 of SEQ ID NO: 311
ggaggacaaugacaugaaa

SEQ ID NO: 27531 - RNA, 19 nt, Artificial Sequence
  Description of Artificial Sequence: Synthetic oligonucleotide
  Antisense strand to SEQ ID NO: 27530
uuucaugucauuguccucc

SEQ ID NO: 27532 - RNA, 19 nt, Artificial Sequence
  Description of Artificial Sequence: Synthetic oligonucleotide
  Sense strand starting at position 2945 of SEQ ID NO: 311
acgcaacaugcgugaauuu

SEQ ID NO: 27533 - RNA, 19 nt, Artificial Sequence
  Description of Artificial Sequence: Synthetic oligonucleotide
  Antisense strand to SEQ ID NO: 27532
aaauucacgcauguugcgu

SEQ ID NO: 27534 - RNA, 19 nt, Artificial Sequence
  Description of Artificial Sequence: Synthetic oligonucleotide
  Sense strand starting at position 2902 of SEQ ID NO: 311
guaguaaagaaucggaagu

SEQ ID NO: 27535 - RNA, 19 nt, Artificial Sequence
  Description of Artificial Sequence: Synthetic oligonucleotide
  Antisense strand to SEQ ID NO: 27534
acuuccgauucuuuacuac

SEQ ID NO: 27536 - RNA, 19 nt, Artificial Sequence
  Description of Artificial Sequence: Synthetic oligonucleotide
  Sense strand starting at position 2890 of SEQ ID NO: 311
ugaccauuaucuguaguaa

SEQ ID NO: 27537 - RNA, 19 nt, Artificial Sequence
  Description of Artificial Sequence: Synthetic oligonucleotide
  Antisense strand to SEQ ID NO: 27536
uuacuacagauaaugguca

SEQ ID NO: 27538 - RNA, 19 nt, Artificial Sequence
  Description of Artificial Sequence: Synthetic oligonucleotide
  Sense strand starting at position 2804 of SEQ ID NO: 311
cgcgcacucagcuuuauag

SEQ ID NO: 27539 - RNA, 19 nt, Artificial Sequence
  Description of Artificial Sequence: Synthetic oligonucleotide
  Antisense strand to SEQ ID NO: 27538
cuauaaagcugagugcgcg

SEQ ID NO: 27540 - RNA, 19 nt, Artificial Sequence
  Description of Artificial Sequence: Synthetic oligonucleotide
  Sense strand starting at position 2803 of SEQ ID NO: 311
gcgcgcacucagcuuuaua

SEQ ID NO: 27541 - RNA, 19 nt, Artificial Sequence
  Description of Artificial Sequence: Synthetic oligonucleotide
  Antisense strand to SEQ ID NO: 27540
uauaaagcugagugcgcgc

SEQ ID NO: 27542 - RNA, 19 nt, Artificial Sequence
  Description of Artificial Sequence: Synthetic oligonucleotide
  Sense strand starting at position 2748 of SEQ ID NO: 311
gcgcgcacucagcuuuaca

SEQ ID NO: 27543 - RNA, 19 nt, Artificial Sequence
  Description of Artificial Sequence: Synthetic oligonucleotide
  Antisense strand to SEQ ID NO: 27542
uguaaagcugagugcgcgc

SEQ ID NO: 27544 - RNA, 19 nt, Artificial Sequence
  Description of Artificial Sequence: Synthetic oligonucleotide
  Sense strand starting at position 2594 of SEQ ID NO: 311
ggugaaaugucuucuggag

SEQ ID NO: 27545 - RNA, 19 nt, Artificial Sequence
  Description of Artificial Sequence: Synthetic oligonucleotide
  Antisense strand to SEQ ID NO: 27544
cuccagaagacauuucacc

SEQ ID NO: 27546 - RNA, 19 nt, Artificial Sequence
  Description of Artificial Sequence: Synthetic oligonucleotide
  Sense strand starting at position 2552 of SEQ ID NO: 311
uuggauucgguauaaguga

SEQ ID NO: 27547 - RNA, 19 nt, Artificial Sequence
  Description of Artificial Sequence: Synthetic oligonucleotide
  Antisense strand to SEQ ID NO: 27546
ucacuuauaccgaauccaa

SEQ ID NO: 27548 - RNA, 19 nt, Artificial Sequence
  Description of Artificial Sequence: Synthetic oligonucleotide
  Sense strand starting at position 2466 of SEQ ID NO: 311
ucagucauggacuguugaa

SEQ ID NO: 27549 - RNA, 19 nt, Artificial Sequence
  Description of Artificial Sequence: Synthetic oligonucleotide
  Antisense strand to SEQ ID NO: 27548
uucaacaguccaugacuga

SEQ ID NO: 27550 - RNA, 19 nt, Artificial Sequence
  Description of Artificial Sequence: Synthetic oligonucleotide
  Sense strand starting at position 2053 of SEQ ID NO: 311
ccggaaauaacguaccgau

SEQ ID NO: 27551 - RNA, 19 nt, Artificial Sequence
  Description of Artificial Sequence: Synthetic oligonucleotide
  Antisense strand to SEQ ID NO: 27550
aucgguacguuauuuccgg

SEQ ID NO: 27552 - RNA, 19 nt, Artificial Sequence
  Description of Artificial Sequence: Synthetic oligonucleotide
  Sense strand starting at position 1212 of SEQ ID NO: 311
gaaugaagcuuccugucca

SEQ ID NO: 27553 - RNA, 19 nt, Artificial Sequence
  Description of Artificial Sequence: Synthetic oligonucleotide
  Antisense strand to SEQ ID NO: 27552
uggacaggaagcuucauuc

SEQ ID NO: 27554 - RNA, 19 nt, Artificial Sequence
  Description of Artificial Sequence: Synthetic oligonucleotide
  Sense strand starting at position 1200 of SEQ ID NO: 311
ccagcuuugcuugaaugaa

SEQ ID NO: 27555 - RNA, 19 nt, Artificial Sequence
  Description of Artificial Sequence: Synthetic oligonucleotide
  Antisense strand to SEQ ID NO: 27554
uucauucaagcaaagcugg

SEQ ID NO: 27556 - RNA, 19 nt, Artificial Sequence
  Description of Artificial Sequence: Synthetic oligonucleotide
  Sense strand starting at position 1136 of SEQ ID NO: 311
agugcuagcacugagaacu

SEQ ID NO: 27557 - RNA, 19 nt, Artificial Sequence
  Description of Artificial Sequence: Synthetic oligonucleotide
  Antisense strand to SEQ ID NO: 27556
aguucucagugcuagcacu

SEQ ID NO: 27558 - RNA, 19 nt, Artificial Sequence
  Description of Artificial Sequence: Synthetic oligonucleotide
  Sense strand starting at position 1038 of SEQ ID NO: 311
cuaugaaauggaugcuacu

SEQ ID NO: 27559 - RNA, 19 nt, Artificial Sequence
  Description of Artificial Sequence: Synthetic oligonucleotide
  Antisense strand to SEQ ID NO: 27558
aguagcauccauuucauag

SEQ ID NO: 27560 - RNA, 19 nt, Artificial Sequence
  Description of Artificial Sequence: Synthetic oligonucleotide
  Sense strand starting at position 792 of SEQ ID NO: 311
ccacuuacgccaggaaaug

SEQ ID NO: 27561 - RNA, 19 nt, Artificial Sequence
  Description of Artificial Sequence: Synthetic oligonucleotide
  Antisense strand to SEQ ID NO: 27560
cauuuccuggcguaagugg

SEQ ID NO: 27562 - RNA, 19 nt, Artificial Sequence
  Description of Artificial Sequence: Synthetic oligonucleotide
  Sense strand starting at position 508 of SEQ ID NO: 311
gaggacuaacacugagcua

SEQ ID NO: 27563 - RNA, 19 nt, Artificial Sequence
  Description of Artificial Sequence: Synthetic oligonucleotide
  Antisense strand to SEQ ID NO: 27562
uagcucaguguuaguccuc

SEQ ID NO: 27564 - RNA, 19 nt, Artificial Sequence
  Description of Artificial Sequence: Synthetic oligonucleotide
  Sense strand starting at position 486 of SEQ ID NO: 311
ugagaacgaucucuacuuu

SEQ ID NO: 27565 - RNA, 19 nt, Artificial Sequence
  Description of Artificial Sequence: Synthetic oligonucleotide
  Antisense strand to SEQ ID NO: 27564
aaaguagagaucguucuca

SEQ ID NO: 27566 - RNA, 19 nt, Artificial Sequence
  Description of Artificial Sequence: Synthetic oligonucleotide
  Sense strand starting at position 464 of SEQ ID NO: 311
guauauuucuaagugccua

SEQ ID NO: 27567 - RNA, 19 nt, Artificial Sequence
  Description of Artificial Sequence: Synthetic oligonucleotide
  Antisense strand to SEQ ID NO: 27566
uaggcacuuagaaauauac

SEQ ID NO: 27568 - RNA, 19 nt, Artificial Sequence
  Description of Artificial Sequence: Synthetic oligonucleotide
  Sense strand starting at position 349 of SEQ ID NO: 311
ugcacuacacugugaauau

SEQ ID NO: 27569 - RNA, 19 nt, Artificial Sequence
  Description of Artificial Sequence: Synthetic oligonucleotide
  Antisense strand to SEQ ID NO: 27568
auauucacaguguagugca

SEQ ID NO: 27570 - RNA, 19 nt, Artificial Sequence
  Description of Artificial Sequence: Synthetic oligonucleotide
  Sense strand starting at position 339 of SEQ ID NO: 311
uggugauggcugcacuaca

SEQ ID NO: 27571 - RNA, 19 nt, Artificial Sequence
  Description of Artificial Sequence: Synthetic oligonucleotide
  Antisense strand to SEQ ID NO: 27570
uguagugcagccaucacca

SEQ ID NO: 27572 - RNA, 19 nt, Artificial Sequence
  Description of Artificial Sequence: Synthetic oligonucleotide
  Sense strand starting at position 266 of SEQ ID NO: 311
augggaagcaauuguuuaa

SEQ ID NO: 27573 - RNA, 19 nt, Artificial Sequence
  Description of Artificial Sequence: Synthetic oligonucleotide
  Antisense strand to SEQ ID NO: 27572
uuaaacaauugcuucccau

SEQ ID NO: 27574 - RNA, 19 nt, Artificial Sequence
  Description of Artificial Sequence: Synthetic oligonucleotide
  Sense strand starting at position 230 of SEQ ID NO: 311
guacaagaugaguaguugu

SEQ ID NO: 27575 - RNA, 19 nt, Artificial Sequence
  Description of Artificial Sequence: Synthetic oligonucleotide
  Antisense strand to SEQ ID NO: 27574
acaacuacucaucuuguac

SEQ ID NO: 27576 - RNA, 19 nt, Artificial Sequence
  Description of Artificial Sequence: Synthetic oligonucleotide
  Sense strand starting at position 51 of SEQ ID NO: 311
gugccacaugcauauaaua

SEQ ID NO: 27577 - RNA, 19 nt, Artificial Sequence
  Description of Artificial Sequence: Synthetic oligonucleotide
  Antisense strand to SEQ ID NO: 27576
uauuauaugcauguggcac

SEQ ID NO: 27578 - RNA, 19 nt, Artificial Sequence
  Description of Artificial Sequence: Synthetic oligonucleotide
  Sense strand starting at position 3956 of SEQ ID NO: 314
uguugauaucuuggaaucu

SEQ ID NO: 27579 - RNA, 19 nt, Artificial Sequence
  Description of Artificial Sequence: Synthetic oligonucleotide
  Antisense strand to SEQ ID NO: 27578
agauuccaagauaucaaca

SEQ ID NO: 27580 - RNA, 19 nt, Artificial Sequence
  Description of Artificial Sequence: Synthetic oligonucleotide
  Sense strand starting at position 3953 of SEQ ID NO: 314
guuuguugauaucuuggaa

SEQ ID NO: 27581 - RNA, 19 nt, Artificial Sequence
  Description of Artificial Sequence: Synthetic oligonucleotide
  Antisense strand to SEQ ID NO: 27580
uuccaagauaucaacaaac

SEQ ID NO: 27582 - RNA, 19 nt, Artificial Sequence
  Description of Artificial Sequence: Synthetic oligonucleotide
  Sense strand starting at position 3945 of SEQ ID NO: 314
cuccuaggguuuguugaua

SEQ ID NO: 27583 - RNA, 19 nt, Artificial Sequence
  Description of Artificial Sequence: Synthetic oligonucleotide
  Antisense strand to SEQ ID NO: 27582
uaucaacaaacccuaggag

SEQ ID NO: 27584 - RNA, 19 nt, Artificial Sequence
  Description of Artificial Sequence: Synthetic oligonucleotide
  Sense strand starting at position 3913 of SEQ ID NO: 314
ugauauaucucagugacuc

SEQ ID NO: 27585 - RNA, 19 nt, Artificial Sequence
  Description of Artificial Sequence: Synthetic oligonucleotide
  Antisense strand to SEQ ID NO: 27584
gagucacugagauauauca

SEQ ID NO: 27586 - RNA, 19 nt, Artificial Sequence
  Description of Artificial Sequence: Synthetic oligonucleotide
  Sense strand starting at position 3902 of SEQ ID NO: 314
cuugccugacuugauauau

SEQ ID NO: 27587 - RNA, 19 nt, Artificial Sequence
  Description of Artificial Sequence: Synthetic oligonucleotide
  Antisense strand to SEQ ID NO: 27586
auauaucaagucaggcaag

SEQ ID NO: 27588 - RNA, 19 nt, Artificial Sequence
  Description of Artificial Sequence: Synthetic oligonucleotide
  Sense strand starting at position 3899 of SEQ ID NO: 314
ugacuugccugacuugaua

SEQ ID NO: 27589 - RNA, 19 nt, Artificial Sequence
  Description of Artificial Sequence: Synthetic oligonucleotide
  Antisense strand to SEQ ID NO: 27588
uaucaagucaggcaaguca

SEQ ID NO: 27590 - RNA, 19 nt, Artificial Sequence
  Description of Artificial Sequence: Synthetic oligonucleotide
  Sense strand starting at position 3873 of SEQ ID NO: 314
ggaaguguugaccaucuuu

SEQ ID NO: 27591 - RNA, 19 nt, Artificial Sequence
  Description of Artificial Sequence: Synthetic oligonucleotide
  Antisense strand to SEQ ID NO: 27590
aaagauggucaacacuucc

SEQ ID NO: 27592 - RNA, 19 nt, Artificial Sequence
  Description of Artificial Sequence: Synthetic oligonucleotide
  Sense strand starting at position 3844 of SEQ ID NO: 314
gugccuggauaguuaagau

SEQ ID NO: 27593 - RNA, 19 nt, Artificial Sequence
  Description of Artificial Sequence: Synthetic oligonucleotide
  Antisense strand to SEQ ID NO: 27592
aucuuaacuauccaggcac

SEQ ID NO: 27594 - RNA, 19 nt, Artificial Sequence
  Description of Artificial Sequence: Synthetic oligonucleotide
  Sense strand starting at position 3784 of SEQ ID NO: 314
guuguuagaguugaugguu

SEQ ID NO: 27595 - RNA, 19 nt, Artificial Sequence
  Description of Artificial Sequence: Synthetic oligonucleotide
  Antisense strand to SEQ ID NO: 27594
aaccaucaacucuaacaac

SEQ ID NO: 27596 - RNA, 19 nt, Artificial Sequence
  Description of Artificial Sequence: Synthetic oligonucleotide
  Sense strand starting at position 3740 of SEQ ID NO: 314
ccuucuggauugucaggau

SEQ ID NO: 27597 - RNA, 19 nt, Artificial Sequence
  Description of Artificial Sequence: Synthetic oligonucleotide
  Antisense strand to SEQ ID NO: 27596
auccugacaauccagaagg

SEQ ID NO: 27598 - RNA, 19 nt, Artificial Sequence
  Description of Artificial Sequence: Synthetic oligonucleotide
  Sense strand starting at position 3665 of SEQ ID NO: 314
cuugguuaccaguaaaguc

SEQ ID NO: 27599 - RNA, 19 nt, Artificial Sequence
  Description of Artificial Sequence: Synthetic oligonucleotide
  Antisense strand to SEQ ID NO: 27598
gacuuuacugguaaccaag

SEQ ID NO: 27600 - RNA, 19 nt, Artificial Sequence
  Description of Artificial Sequence: Synthetic oligonucleotide
  Sense strand starting at position 3661 of SEQ ID NO: 314
aguacuugguuaccaguaa

SEQ ID NO: 27601 - RNA, 19 nt, Artificial Sequence
  Description of Artificial Sequence: Synthetic oligonucleotide
  Antisense strand to SEQ ID NO: 27600
uuacugguaaccaaguacu

SEQ ID NO: 27602 - RNA, 19 nt, Artificial Sequence
  Description of Artificial Sequence: Synthetic oligonucleotide
  Sense strand starting at position 3655 of SEQ ID NO: 314
guggaaaguacuugguuac

SEQ ID NO: 27603 - RNA, 19 nt, Artificial Sequence
  Description of Artificial Sequence: Synthetic oligonucleotide
  Antisense strand to SEQ ID NO: 27602
guaaccaaguacuuuccac

SEQ ID NO: 27604 - RNA, 19 nt, Artificial Sequence
  Description of Artificial Sequence: Synthetic oligonucleotide
  Sense strand starting at position 3654 of SEQ ID NO: 314
uguggaaaguacuugguua

SEQ ID NO: 27605 - RNA, 19 nt, Artificial Sequence
  Description of Artificial Sequence: Synthetic oligonucleotide
  Antisense strand to SEQ ID NO: 27604
uaaccaaguacuuuccaca

SEQ ID NO: 27606 - RNA, 19 nt, Artificial Sequence
  Description of Artificial Sequence: Synthetic oligonucleotide
  Sense strand starting at position 3620 of SEQ ID NO: 314
augucucugucacccagaa

SEQ ID NO: 27607 - RNA, 19 nt, Artificial Sequence
  Description of Artificial Sequence: Synthetic oligonucleotide
  Antisense strand to SEQ ID NO: 27606
uucugggugacagagacau

SEQ ID NO: 27608 - RNA, 19 nt, Artificial Sequence
  Description of Artificial Sequence: Synthetic oligonucleotide
  Sense strand starting at position 3602 of SEQ ID NO: 314
cccucugugauguaguuaa

SEQ ID NO: 27609 - RNA, 19 nt, Artificial Sequence
  Description of Artificial Sequence: Synthetic oligonucleotide
  Antisense strand to SEQ ID NO: 27608
uuaacuacaucacagaggg

SEQ ID NO: 27610 - RNA, 19 nt, Artificial Sequence
  Description of Artificial Sequence: Synthetic oligonucleotide
  Sense strand starting at position 3567 of SEQ ID NO: 314
gguaaucuuuccuucuuga

SEQ ID NO: 27611 - RNA, 19 nt, Artificial Sequence
  Description of Artificial Sequence: Synthetic oligonucleotide
  Antisense strand to SEQ ID NO: 27610
ucaagaaggaaagauuacc

SEQ ID NO: 27612 - RNA, 19 nt, Artificial Sequence
  Description of Artificial Sequence: Synthetic oligonucleotide
  Sense strand starting at position 3566 of SEQ ID NO: 314
ggguaaucuuuccuucuug

SEQ ID NO: 27613 - RNA, 19 nt, Artificial Sequence
  Description of Artificial Sequence: Synthetic oligonucleotide
  Antisense strand to SEQ ID NO: 27612
caagaaggaaagauuaccc

SEQ ID NO: 27614 - RNA, 19 nt, Artificial Sequence
  Description of Artificial Sequence: Synthetic oligonucleotide
  Sense strand starting at position 3556 of SEQ ID NO: 314
cuuaauguuuggguaaucu

SEQ ID NO: 27615 - RNA, 19 nt, Artificial Sequence
  Description of Artificial Sequence: Synthetic oligonucleotide
  Antisense strand to SEQ ID NO: 27614
agauuacccaaacauuaag

SEQ ID NO: 27616 - RNA, 19 nt, Artificial Sequence
  Description of Artificial Sequence: Synthetic oligonucleotide
  Sense strand starting at position 3553 of SEQ ID NO: 314
auccuuaauguuuggguaa

SEQ ID NO: 27617 - RNA, 19 nt, Artificial Sequence
  Description of Artificial Sequence: Synthetic oligonucleotide
  Antisense strand to SEQ ID NO: 27616
uuacccaaacauuaaggau

SEQ ID NO: 27618 - RNA, 19 nt, Artificial Sequence
  Description of Artificial Sequence: Synthetic oligonucleotide
  Sense strand starting at position 3552 of SEQ ID NO: 314
aauccuuaauguuugggua

SEQ ID NO: 27619 - RNA, 19 nt, Artificial Sequence
  Description of Artificial Sequence: Synthetic oligonucleotide
  Antisense strand to SEQ ID NO: 27618
uacccaaacauuaaggauu

SEQ ID NO: 27620 - RNA, 19 nt, Artificial Sequence
  Description of Artificial Sequence: Synthetic oligonucleotide
  Sense strand starting at position 3546 of SEQ ID NO: 314
ugggcuaauccuuaauguu

SEQ ID NO: 27621 - RNA, 19 nt, Artificial Sequence
  Description of Artificial Sequence: Synthetic oligonucleotide
  Antisense strand to SEQ ID NO: 27620
aacauuaaggauuagccca

SEQ ID NO: 27622 - RNA, 19 nt, Artificial Sequence
  Description of Artificial Sequence: Synthetic oligonucleotide
  Sense strand starting at position 3432 of SEQ ID NO: 314
uuuaaagugucuuccaauc

SEQ ID NO: 27623 - RNA, 19 nt, Artificial Sequence
  Description of Artificial Sequence: Synthetic oligonucleotide
  Antisense strand to SEQ ID NO: 27622
gauuggaagacacuuuaaa

SEQ ID NO: 27624 - RNA, 19 nt, Artificial Sequence
  Description of Artificial Sequence: Synthetic oligonucleotide
  Sense strand starting at position 3153 of SEQ ID NO: 314
auucuuugugacugaguau

SEQ ID NO: 27625 - RNA, 19 nt, Artificial Sequence
  Description of Artificial Sequence: Synthetic oligonucleotide
  Antisense strand to SEQ ID NO: 27624
auacucagucacaaagaau

SEQ ID NO: 27626 - RNA, 19 nt, Artificial Sequence
  Description of Artificial Sequence: Synthetic oligonucleotide
  Sense strand starting at position 3152 of SEQ ID NO: 314
cauucuuugugacugagua

SEQ ID NO: 27627 - RNA, 19 nt, Artificial Sequence
  Description of Artificial Sequence: Synthetic oligonucleotide
  Antisense strand to SEQ ID NO: 27626
uacucagucacaaagaaug

SEQ ID NO: 27628 - RNA, 19 nt, Artificial Sequence
  Description of Artificial Sequence: Synthetic oligonucleotide
  Sense strand starting at position 3143 of SEQ ID NO: 314
gguguuugccauucuuugu

SEQ ID NO: 27629 - RNA, 19 nt, Artificial Sequence
  Description of Artificial Sequence: Synthetic oligonucleotide
  Antisense strand to SEQ ID NO: 27628
acaaagaauggcaaacacc

SEQ ID NO: 27630 - RNA, 19 nt, Artificial Sequence
  Description of Artificial Sequence: Synthetic oligonucleotide
  Sense strand starting at position 2987 of SEQ ID NO: 314
guuaguaagguucauggau

SEQ ID NO: 27631 - RNA, 19 nt, Artificial Sequence
  Description of Artificial Sequence: Synthetic oligonucleotide
  Antisense strand to SEQ ID NO: 27630
auccaugaaccuuacuaac

SEQ ID NO: 27632 - RNA, 19 nt, Artificial Sequence
  Description of Artificial Sequence: Synthetic oligonucleotide
  Sense strand starting at position 2977 of SEQ ID NO: 314
ucaaguuugaguuaguaag

SEQ ID NO: 27633 - RNA, 19 nt, Artificial Sequence
  Description of Artificial Sequence: Synthetic oligonucleotide
  Antisense strand to SEQ ID NO: 27632
cuuacuaacucaaacuuga

SEQ ID NO: 27634 - RNA, 19 nt, Artificial Sequence
  Description of Artificial Sequence: Synthetic oligonucleotide
  Sense strand starting at position 2972 of SEQ ID NO: 314
ccaucucaaguuugaguua

SEQ ID NO: 27635 - RNA, 19 nt, Artificial Sequence
  Description of Artificial Sequence: Synthetic oligonucleotide
  Antisense strand to SEQ ID NO: 27634
uaacucaaacuugagaugg

SEQ ID NO: 27636 - RNA, 19 nt, Artificial Sequence
  Description of Artificial Sequence: Synthetic oligonucleotide
  Sense strand starting at position 2722 of SEQ ID NO: 314
ggcaaucucccuugaaagg

SEQ ID NO: 27637 - RNA, 19 nt, Artificial Sequence
  Description of Artificial Sequence: Synthetic oligonucleotide
  Antisense strand to SEQ ID NO: 27636
ccuuucaagggagauugcc

SEQ ID NO: 27638 - RNA, 19 nt, Artificial Sequence
  Description of Artificial Sequence: Synthetic oligonucleotide
  Sense strand starting at position 2610 of SEQ ID NO: 314
accuguccaguggauaauu

SEQ ID NO: 27639 - RNA, 19 nt, Artificial Sequence
  Description of Artificial Sequence: Synthetic oligonucleotide
  Antisense strand to SEQ ID NO: 27638
aauuauccacuggacaggu

SEQ ID NO: 27640 - RNA, 19 nt, Artificial Sequence
  Description of Artificial Sequence: Synthetic oligonucleotide
  Sense strand starting at position 2608 of SEQ ID NO: 314
acaccuguccaguggauaa

SEQ ID NO: 27641 - RNA, 19 nt, Artificial Sequence
  Description of Artificial Sequence: Synthetic oligonucleotide
  Antisense strand to SEQ ID NO: 27640
uuauccacuggacaggugu

SEQ ID NO: 27642 - RNA, 19 nt, Artificial Sequence
  Description of Artificial Sequence: Synthetic oligonucleotide
  Sense strand starting at position 2451 of SEQ ID NO: 314
acaucucuccaguggauaa

SEQ ID NO: 27643 - RNA, 19 nt, Artificial Sequence
  Description of Artificial Sequence: Synthetic oligonucleotide
  Antisense strand to SEQ ID NO: 27642
uuauccacuggagagaugu

SEQ ID NO: 27644 - RNA, 19 nt, Artificial Sequence
  Description of Artificial Sequence: Synthetic oligonucleotide
  Sense strand starting at position 1098 of SEQ ID NO: 314
uaccacugccagggauauu

SEQ ID NO: 27645 - RNA, 19 nt, Artificial Sequence
  Description of Artificial Sequence: Synthetic oligonucleotide
  Antisense strand to SEQ ID NO: 27644
aauaucccuggcaguggua

SEQ ID NO: 27646 - RNA, 19 nt, Artificial Sequence
  Description of Artificial Sequence: Synthetic oligonucleotide
  Sense strand starting at position 1097 of SEQ ID NO: 314
cuaccacugccagggauau

SEQ ID NO: 27647 - RNA, 19 nt, Artificial Sequence
  Description of Artificial Sequence: Synthetic oligonucleotide
  Antisense strand to SEQ ID NO: 27646
auaucccuggcagugguag

SEQ ID NO: 27648 - RNA, 19 nt, Artificial Sequence
  Description of Artificial Sequence: Synthetic oligonucleotide
  Sense strand starting at position 969 of SEQ ID NO: 314
cagugcuuagcccaggaaa

SEQ ID NO: 27649 - RNA, 19 nt, Artificial Sequence
  Description of Artificial Sequence: Synthetic oligonucleotide
  Antisense strand to SEQ ID NO: 27648
uuuccugggcuaagcacug

SEQ ID NO: 27650 - RNA, 19 nt, Artificial Sequence
  Description of Artificial Sequence: Synthetic oligonucleotide
  Sense strand starting at position 744 of SEQ ID NO: 314
guuaguagccuuuaagaaa

SEQ ID NO: 27651 - RNA, 19 nt, Artificial Sequence
  Description of Artificial Sequence: Synthetic oligonucleotide
  Antisense strand to SEQ ID NO: 27650
uuucuuaaaggcuacuaac

SEQ ID NO: 27652 - RNA, 19 nt, Artificial Sequence
  Description of Artificial Sequence: Synthetic oligonucleotide
  Sense strand starting at position 251 of SEQ ID NO: 314
cuuuaucacgauggagaca

SEQ ID NO: 27653 - RNA, 19 nt, Artificial Sequence
  Description of Artificial Sequence: Synthetic oligonucleotide
  Antisense strand to SEQ ID NO: 27652
ugucuccaucgugauaaag

SEQ ID NO: 27654 - RNA, 19 nt, Artificial Sequence
  Description of Artificial Sequence: Synthetic oligonucleotide
  Sense strand starting at position 250 of SEQ ID NO: 314
ccuuuaucacgauggagac

SEQ ID NO: 27655 - RNA, 19 nt, Artificial Sequence
  Description of Artificial Sequence: Synthetic oligonucleotide
  Antisense strand to SEQ ID NO: 27654
gucuccaucgugauaaagg

SEQ ID NO: 27656 - RNA, 19 nt, Artificial Sequence
  Description of Artificial Sequence: Synthetic oligonucleotide
  Sense strand starting at position 161 of SEQ ID NO: 314
gggaguuugauggguagag

SEQ ID NO: 27657 - RNA, 19 nt, Artificial Sequence
  Description of Artificial Sequence: Synthetic oligonucleotide
  Antisense strand to SEQ ID NO: 27656
cucuacccaucaaacuccc

SEQ ID NO: 27658 - RNA, 19 nt, Artificial Sequence
  Description of Artificial Sequence: Synthetic oligonucleotide
  Sense strand starting at position 3919 of SEQ ID NO: 313
uguugauaucuuggaaucu

SEQ ID NO: 27659 - RNA, 19 nt, Artificial Sequence
  Description of Artificial Sequence: Synthetic oligonucleotide
  Antisense strand to SEQ ID NO: 27658
agauuccaagauaucaaca

SEQ ID NO: 27660 - RNA, 19 nt, Artificial Sequence
  Description of Artificial Sequence: Synthetic oligonucleotide
  Sense strand starting at position 3916 of SEQ ID NO: 313
guuuguugauaucuuggaa

SEQ ID NO: 27661 - RNA, 19 nt, Artificial Sequence
  Description of Artificial Sequence: Synthetic oligonucleotide
  Antisense strand to SEQ ID NO: 27660
uuccaagauaucaacaaac

SEQ ID NO: 27662 - RNA, 19 nt, Artificial Sequence
  Description of Artificial Sequence: Synthetic oligonucleotide
  Sense strand starting at position 3908 of SEQ ID NO: 313
cuccuaggguuuguugaua

SEQ ID NO: 27663 - RNA, 19 nt, Artificial Sequence
  Description of Artificial Sequence: Synthetic oligonucleotide
  Antisense strand to SEQ ID NO: 27662
uaucaacaaacccuaggag

SEQ ID NO: 27664 - RNA, 19 nt, Artificial Sequence
  Description of Artificial Sequence: Synthetic oligonucleotide
  Sense strand starting at position 3876 of SEQ ID NO: 313
ugauauaucucagugacuc

SEQ ID NO: 27665 - RNA, 19 nt, Artificial Sequence
  Description of Artificial Sequence: Synthetic oligonucleotide
  Antisense strand to SEQ ID NO: 27664
gagucacugagauauauca

SEQ ID NO: 27666 - RNA, 19 nt, Artificial Sequence
  Description of Artificial Sequence: Synthetic oligonucleotide
  Sense strand starting at position 3865 of SEQ ID NO: 313
cuugccugacuugauauau

SEQ ID NO: 27667 - RNA, 19 nt, Artificial Sequence
  Description of Artificial Sequence: Synthetic oligonucleotide
  Antisense strand to SEQ ID NO: 27666
auauaucaagucaggcaag

SEQ ID NO: 27668 - RNA, 19 nt, Artificial Sequence
  Description of Artificial Sequence: Synthetic oligonucleotide
  Sense strand starting at position 3862 of SEQ ID NO: 313
ugacuugccugacuugaua

SEQ ID NO: 27669 - RNA, 19 nt, Artificial Sequence
  Description of Artificial Sequence: Synthetic oligonucleotide
  Antisense strand to SEQ ID NO: 27668
uaucaagucaggcaaguca

SEQ ID NO: 27670 - RNA, 19 nt, Artificial Sequence
  Description of Artificial Sequence: Synthetic oligonucleotide
  Sense strand starting at position 3836 of SEQ ID NO: 313
ggaaguguugaccaucuuu

SEQ ID NO: 27671 - RNA, 19 nt, Artificial Sequence
  Description of Artificial Sequence: Synthetic oligonucleotide
  Antisense strand to SEQ ID NO: 27670
aaagauggucaacacuucc

SEQ ID NO: 27672 - RNA, 19 nt, Artificial Sequence
  Description of Artificial Sequence: Synthetic oligonucleotide
  Sense strand starting at position 3807 of SEQ ID NO: 313
gugccuggauaguuaagau

SEQ ID NO: 27673 - RNA, 19 nt, Artificial Sequence
  Description of Artificial Sequence: Synthetic oligonucleotide
  Antisense strand to SEQ ID NO: 27672
aucuuaacuauccaggcac

SEQ ID NO: 27674 - RNA, 19 nt, Artificial Sequence
  Description of Artificial Sequence: Synthetic oligonucleotide
  Sense strand starting at position 3747 of SEQ ID NO: 313
guuguuagaguugaugguu

SEQ ID NO: 27675 - RNA, 19 nt, Artificial Sequence
  Description of Artificial Sequence: Synthetic oligonucleotide
  Antisense strand to SEQ ID NO: 27674
aaccaucaacucuaacaac

SEQ ID NO: 27676 - RNA, 19 nt, Artificial Sequence
  Description of Artificial Sequence: Synthetic oligonucleotide
  Sense strand starting at position 3703 of SEQ ID NO: 313
ccuucuggauugucaggau

SEQ ID NO: 27677 - RNA, 19 nt, Artificial Sequence
  Description of Artificial Sequence: Synthetic oligonucleotide
  Antisense strand to SEQ ID NO: 27676
auccugacaauccagaagg

SEQ ID NO: 27678 - RNA, 19 nt, Artificial Sequence
  Description of Artificial Sequence: Synthetic oligonucleotide
  Sense strand starting at position 3628 of SEQ ID NO: 313
cuugguuaccaguaaaguc

SEQ ID NO: 27679 - RNA, 19 nt, Artificial Sequence
  Description of Artificial Sequence: Synthetic oligonucleotide
  Antisense strand to SEQ ID NO: 27678
gacuuuacugguaaccaag

SEQ ID NO: 27680 - RNA, 19 nt, Artificial Sequence
  Description of Artificial Sequence: Synthetic oligonucleotide
  Sense strand starting at position 3624 of SEQ ID NO: 313
aguacuugguuaccaguaa

SEQ ID NO: 27681 - RNA, 19 nt, Artificial Sequence
  Description of Artificial Sequence: Synthetic oligonucleotide
  Antisense strand to SEQ ID NO: 27680
uuacugguaaccaaguacu

SEQ ID NO: 27682 - RNA, 19 nt, Artificial Sequence
  Description of Artificial Sequence: Synthetic oligonucleotide
  Sense strand starting at position 3618 of SEQ ID NO: 313
guggaaaguacuugguuac

SEQ ID NO: 27683 - RNA, 19 nt, Artificial Sequence
  Description of Artificial Sequence: Synthetic oligonucleotide
  Antisense strand to SEQ ID NO: 27682
guaaccaaguacuuuccac

SEQ ID NO: 27684 - RNA, 19 nt, Artificial Sequence
  Description of Artificial Sequence: Synthetic oligonucleotide
  Sense strand starting at position 3617 of SEQ ID NO: 313
uguggaaaguacuugguua

SEQ ID NO: 27685 - RNA, 19 nt, Artificial Sequence
  Description of Artificial Sequence: Synthetic oligonucleotide
  Antisense strand to SEQ ID NO: 27684
uaaccaaguacuuuccaca

SEQ ID NO: 27686 - RNA, 19 nt, Artificial Sequence
  Description of Artificial Sequence: Synthetic oligonucleotide
  Sense strand starting at position 3583 of SEQ ID NO: 313
augucucugucacccagaa

SEQ ID NO: 27687 - RNA, 19 nt, Artificial Sequence
  Description of Artificial Sequence: Synthetic oligonucleotide
  Antisense strand to SEQ ID NO: 27686
uucugggugacagagacau

SEQ ID NO: 27688 - RNA, 19 nt, Artificial Sequence
  Description of Artificial Sequence: Synthetic oligonucleotide
  Sense strand starting at position 3565 of SEQ ID NO: 313
cccucugugauguaguuaa

SEQ ID NO: 27689 - RNA, 19 nt, Artificial Sequence
  Description of Artificial Sequence: Synthetic oligonucleotide
  Antisense strand to SEQ ID NO: 27688
uuaacuacaucacagaggg

SEQ ID NO: 27690 - RNA, 19 nt, Artificial Sequence
  Description of Artificial Sequence: Synthetic oligonucleotide
  Sense strand starting at position 3530 of SEQ ID NO: 313
gguaaucuuuccuucuuga

SEQ ID NO: 27691 - RNA, 19 nt, Artificial Sequence
  Description of Artificial Sequence: Synthetic oligonucleotide
  Antisense strand to SEQ ID NO: 27690
ucaagaaggaaagauuacc

SEQ ID NO: 27692 - RNA, 19 nt, Artificial Sequence
  Description of Artificial Sequence: Synthetic oligonucleotide
  Sense strand starting at position 3529 of SEQ ID NO: 313
ggguaaucuuuccuucuug

SEQ ID NO: 27693 - RNA, 19 nt, Artificial Sequence
  Description of Artificial Sequence: Synthetic oligonucleotide
  Antisense strand to SEQ ID NO: 27692
caagaaggaaagauuaccc

SEQ ID NO: 27694 - RNA, 19 nt, Artificial Sequence
  Description of Artificial Sequence: Synthetic oligonucleotide
  Sense strand starting at position 3519 of SEQ ID NO: 313
cuuaauguuuggguaaucu

SEQ ID NO: 27695 - RNA, 19 nt, Artificial Sequence
  Description of Artificial Sequence: Synthetic oligonucleotide
  Antisense strand to SEQ ID NO: 27694
agauuacccaaacauuaag

SEQ ID NO: 27696 - RNA, 19 nt, Artificial Sequence
  Description of Artificial Sequence: Synthetic oligonucleotide
  Sense strand starting at position 3516 of SEQ ID NO: 313
auccuuaauguuuggguaa

SEQ ID NO: 27697 - RNA, 19 nt, Artificial Sequence
  Description of Artificial Sequence: Synthetic oligonucleotide
  Antisense strand to SEQ ID NO: 27696
uuacccaaacauuaaggau

SEQ ID NO: 27698 - RNA, 19 nt, Artificial Sequence
  Description of Artificial Sequence: Synthetic oligonucleotide
  Sense strand starting at position 3515 of SEQ ID NO: 313
aauccuuaauguuugggua

SEQ ID NO: 27699 - RNA, 19 nt, Artificial Sequence
  Description of Artificial Sequence: Synthetic oligonucleotide
  Antisense strand to SEQ ID NO: 27698
uacccaaacauuaaggauu

SEQ ID NO: 27700 - RNA, 19 nt, Artificial Sequence
  Description of Artificial Sequence: Synthetic oligonucleotide
  Sense strand starting at position 3509 of SEQ ID NO: 313
ugggcuaauccuuaauguu

SEQ ID NO: 27701 - RNA, 19 nt, Artificial Sequence
  Description of Artificial Sequence: Synthetic oligonucleotide
  Antisense strand to SEQ ID NO: 27700
aacauuaaggauuagccca

SEQ ID NO: 27702 - RNA, 19 nt, Artificial Sequence
  Description of Artificial Sequence: Synthetic oligonucleotide
  Sense strand starting at position 3395 of SEQ ID NO: 313
uuuaaagugucuuccaauc

SEQ ID NO: 27703 - RNA, 19 nt, Artificial Sequence
  Description of Artificial Sequence: Synthetic oligonucleotide
  Antisense strand to SEQ ID NO: 27702
gauuggaagacacuuuaaa

SEQ ID NO: 27704 - RNA, 19 nt, Artificial Sequence
  Description of Artificial Sequence: Synthetic oligonucleotide
  Sense strand starting at position 3116 of SEQ ID NO: 313
auucuuugugacugaguau

SEQ ID NO: 27705 - RNA, 19 nt, Artificial Sequence
  Description of Artificial Sequence: Synthetic oligonucleotide
  Antisense strand to SEQ ID NO: 27704
auacucagucacaaagaau

SEQ ID NO: 27706 - RNA, 19 nt, Artificial Sequence
  Description of Artificial Sequence: Synthetic oligonucleotide
  Sense strand starting at position 3115 of SEQ ID NO: 313
cauucuuugugacugagua

SEQ ID NO: 27707 - RNA, 19 nt, Artificial Sequence
  Description of Artificial Sequence: Synthetic oligonucleotide
  Antisense strand to SEQ ID NO: 27706
uacucagucacaaagaaug

SEQ ID NO: 27708 - RNA, 19 nt, Artificial Sequence
  Description of Artificial Sequence: Synthetic oligonucleotide
  Sense strand starting at position 3106 of SEQ ID NO: 313
gguguuugccauucuuugu

SEQ ID NO: 27709 - RNA, 19 nt, Artificial Sequence
  Description of Artificial Sequence: Synthetic oligonucleotide
  Antisense strand to SEQ ID NO: 27708
acaaagaauggcaaacacc

SEQ ID NO: 27710 - RNA, 19 nt, Artificial Sequence
  Description of Artificial Sequence: Synthetic oligonucleotide
  Sense strand starting at position 2950 of SEQ ID NO: 313
guuaguaagguucauggau

SEQ ID NO: 27711 - RNA, 19 nt, Artificial Sequence
  Description of Artificial Sequence: Synthetic oligonucleotide
  Antisense strand to SEQ ID NO: 27710
auccaugaaccuuacuaac

SEQ ID NO: 27712 - RNA, 19 nt, Artificial Sequence
  Description of Artificial Sequence: Synthetic oligonucleotide
  Sense strand starting at position 2940 of SEQ ID NO: 313
ucaaguuugaguuaguaag

SEQ ID NO: 27713 - RNA, 19 nt, Artificial Sequence
  Description of Artificial Sequence: Synthetic oligonucleotide
  Antisense strand to SEQ ID NO: 27712
cuuacuaacucaaacuuga

SEQ ID NO: 27714 - RNA, 19 nt, Artificial Sequence
  Description of Artificial Sequence: Synthetic oligonucleotide
  Sense strand starting at position 2935 of SEQ ID NO: 313
ccaucucaaguuugaguua

SEQ ID NO: 27715 - RNA, 19 nt, Artificial Sequence
  Description of Artificial Sequence: Synthetic oligonucleotide
  Antisense strand to SEQ ID NO: 27714
uaacucaaacuugagaugg

SEQ ID NO: 27716 - RNA, 19 nt, Artificial Sequence
  Description of Artificial Sequence: Synthetic oligonucleotide
  Sense strand starting at position 2685 of SEQ ID NO: 313
ggcaaucucccuugaaagg

SEQ ID NO: 27717 - RNA, 19 nt, Artificial Sequence
  Description of Artificial Sequence: Synthetic oligonucleotide
  Antisense strand to SEQ ID NO: 27716
ccuuucaagggagauugcc

SEQ ID NO: 27718 - RNA, 19 nt, Artificial Sequence
  Description of Artificial Sequence: Synthetic oligonucleotide
  Sense strand starting at position 2573 of SEQ ID NO: 313
accuguccaguggauaauu

SEQ ID NO: 27719 - RNA, 19 nt, Artificial Sequence
  Description of Artificial Sequence: Synthetic oligonucleotide
  Antisense strand to SEQ ID NO: 27718
aauuauccacuggacaggu

SEQ ID NO: 27720 - RNA, 19 nt, Artificial Sequence
  Description of Artificial Sequence: Synthetic oligonucleotide
  Sense strand starting at position 2571 of SEQ ID NO: 313
acaccuguccaguggauaa

SEQ ID NO: 27721 - RNA, 19 nt, Artificial Sequence
  Description of Artificial Sequence: Synthetic oligonucleotide
  Antisense strand to SEQ ID NO: 27720
uuauccacuggacaggugu

SEQ ID NO: 27722 - RNA, 19 nt, Artificial Sequence
  Description of Artificial Sequence: Synthetic oligonucleotide
  Sense strand starting at position 2414 of SEQ ID NO: 313
acaucucuccaguggauaa

SEQ ID NO: 27723 - RNA, 19 nt, Artificial Sequence
  Description of Artificial Sequence: Synthetic oligonucleotide
  Antisense strand to SEQ ID NO: 27722
uuauccacuggagagaugu

SEQ ID NO: 27724 - RNA, 19 nt, Artificial Sequence
  Description of Artificial Sequence: Synthetic oligonucleotide
  Sense strand starting at position 1061 of SEQ ID NO: 313
uaccacugccagggauauu

SEQ ID NO: 27725 - RNA, 19 nt, Artificial Sequence
  Description of Artificial Sequence: Synthetic oligonucleotide
  Antisense strand to SEQ ID NO: 27724
aauaucccuggcaguggua

SEQ ID NO: 27726 - RNA, 19 nt, Artificial Sequence
  Description of Artificial Sequence: Synthetic oligonucleotide
  Sense strand starting at position 1060 of SEQ ID NO: 313
cuaccacugccagggauau

SEQ ID NO: 27727 - RNA, 19 nt, Artificial Sequence
  Description of Artificial Sequence: Synthetic oligonucleotide
  Antisense strand to SEQ ID NO: 27726
auaucccuggcagugguag

SEQ ID NO: 27728 - RNA, 19 nt, Artificial Sequence
  Description of Artificial Sequence: Synthetic oligonucleotide
  Sense strand starting at position 932 of SEQ ID NO: 313
cagugcuuagcccaggaaa

SEQ ID NO: 27729 - RNA, 19 nt, Artificial Sequence
  Description of Artificial Sequence: Synthetic oligonucleotide
  Antisense strand to SEQ ID NO: 27728
uuuccugggcuaagcacug

SEQ ID NO: 27730 - RNA, 19 nt, Artificial Sequence
  Description of Artificial Sequence: Synthetic oligonucleotide
  Sense strand starting at position 707 of SEQ ID NO: 313
guuaguagccuuuaagaaa

SEQ ID NO: 27731 - RNA, 19 nt, Artificial Sequence
  Description of Artificial Sequence: Synthetic oligonucleotide
  Antisense strand to SEQ ID NO: 27730
uuucuuaaaggcuacuaac

SEQ ID NO: 27732 - RNA, 19 nt, Artificial Sequence
  Description of Artificial Sequence: Synthetic oligonucleotide
  Sense strand starting at position 214 of SEQ ID NO: 313
cuuuaucacgauggagaca

SEQ ID NO: 27733 - RNA, 19 nt, Artificial Sequence
  Description of Artificial Sequence: Synthetic oligonucleotide
  Antisense strand to SEQ ID NO: 27732
ugucuccaucgugauaaag

SEQ ID NO: 27734 - RNA, 19 nt, Artificial Sequence
  Description of Artificial Sequence: Synthetic oligonucleotide
  Sense strand starting at position 213 of SEQ ID NO: 313
ccuuuaucacgauggagac

SEQ ID NO: 27735 - RNA, 19 nt, Artificial Sequence
  Description of Artificial Sequence: Synthetic oligonucleotide
  Antisense strand to SEQ ID NO: 27734
gucuccaucgugauaaagg

SEQ ID NO: 27736 - RNA, 19 nt, Artificial Sequence
  Description of Artificial Sequence: Synthetic oligonucleotide
  Sense strand starting at position 124 of SEQ ID NO: 313
gggaguuugauggguagag

SEQ ID NO: 27737 - RNA, 19 nt, Artificial Sequence
  Description of Artificial Sequence: Synthetic oligonucleotide
  Antisense strand to SEQ ID NO: 27736
cucuacccaucaaacuccc

SEQ ID NO: 27738 - RNA, 19 nt, Artificial Sequence
  Description of Artificial Sequence: Synthetic oligonucleotide
  Sense strand starting at position 3433 of SEQ ID NO: 315
agcagaucucuagaaccuu

SEQ ID NO: 27739 - RNA, 19 nt, Artificial Sequence
  Description of Artificial Sequence: Synthetic oligonucleotide
  Antisense strand to SEQ ID NO: 27738
aagguucuagagaucugcu

SEQ ID NO: 27740 - RNA, 19 nt, Artificial Sequence
  Description of Artificial Sequence: Synthetic oligonucleotide
  Sense strand starting at position 3423 of SEQ ID NO: 315
ccaguuaugcagcagaucu

SEQ ID NO: 27741 - RNA, 19 nt, Artificial Sequence
  Description of Artificial Sequence: Synthetic oligonucleotide
  Antisense strand to SEQ ID NO: 27740
agaucugcugcauaacugg

SEQ ID NO: 27742 - RNA, 19 nt, Artificial Sequence
  Description of Artificial Sequence: Synthetic oligonucleotide
  Sense strand starting at position 3415 of SEQ ID NO: 315
ggccguacccaguuaugca

SEQ ID NO: 27743 - RNA, 19 nt, Artificial Sequence
  Description of Artificial Sequence: Synthetic oligonucleotide
  Antisense strand to SEQ ID NO: 27742
ugcauaacuggguacggcc

SEQ ID NO: 27744 - RNA, 19 nt, Artificial Sequence
  Description of Artificial Sequence: Synthetic oligonucleotide
  Sense strand starting at position 3403 of SEQ ID NO: 315
aguuguguucauggccgua

SEQ ID NO: 27745 - RNA, 19 nt, Artificial Sequence
  Description of Artificial Sequence: Synthetic oligonucleotide
  Antisense strand to SEQ ID NO: 27744
uacggccaugaacacaacu

SEQ ID NO: 27746 - RNA, 19 nt, Artificial Sequence
  Description of Artificial Sequence: Synthetic oligonucleotide
  Sense strand starting at position 2977 of SEQ ID NO: 315
gucucuucugaucaccgaa

SEQ ID NO: 27747 - RNA, 19 nt, Artificial Sequence
  Description of Artificial Sequence: Synthetic oligonucleotide
  Antisense strand to SEQ ID NO: 27746
uucggugaucagaagagac

SEQ ID NO: 27748 - RNA, 19 nt, Artificial Sequence
  Description of Artificial Sequence: Synthetic oligonucleotide
  Sense strand starting at position 2971 of SEQ ID NO: 315
ucuugugucucuucugauc

SEQ ID NO: 27749 - RNA, 19 nt, Artificial Sequence
  Description of Artificial Sequence: Synthetic oligonucleotide
  Antisense strand to SEQ ID NO: 27748
gaucagaagagacacaaga

SEQ ID NO: 27750 - RNA, 19 nt, Artificial Sequence
  Description of Artificial Sequence: Synthetic oligonucleotide
  Sense strand starting at position 2906 of SEQ ID NO: 315
cuguguggccuucggacau

SEQ ID NO: 27751 - RNA, 19 nt, Artificial Sequence
  Description of Artificial Sequence: Synthetic oligonucleotide
  Antisense strand to SEQ ID NO: 27750
auguccgaaggccacacag

SEQ ID NO: 27752 - RNA, 19 nt, Artificial Sequence
  Description of Artificial Sequence: Synthetic oligonucleotide
  Sense strand starting at position 2692 of SEQ ID NO: 315
gggcuuacgagugaaacuc

SEQ ID NO: 27753 - RNA, 19 nt, Artificial Sequence
  Description of Artificial Sequence: Synthetic oligonucleotide
  Antisense strand to SEQ ID NO: 27752
gaguuucacucguaagccc

SEQ ID NO: 27754 - RNA, 19 nt, Artificial Sequence
  Description of Artificial Sequence: Synthetic oligonucleotide
  Sense strand starting at position 2691 of SEQ ID NO: 315
ugggcuuacgagugaaacu

SEQ ID NO: 27755 - RNA, 19 nt, Artificial Sequence
  Description of Artificial Sequence: Synthetic oligonucleotide
  Antisense strand to SEQ ID NO: 27754
aguuucacucguaagccca

SEQ ID NO: 27756 - RNA, 19 nt, Artificial Sequence
  Description of Artificial Sequence: Synthetic oligonucleotide
  Sense strand starting at position 2685 of SEQ ID NO: 315
uccugaugggcuuacgagu

SEQ ID NO: 27757 - RNA, 19 nt, Artificial Sequence
  Description of Artificial Sequence: Synthetic oligonucleotide
  Antisense strand to SEQ ID NO: 27756
acucguaagcccaucagga

SEQ ID NO: 27758 - RNA, 19 nt, Artificial Sequence
  Description of Artificial Sequence: Synthetic oligonucleotide
  Sense strand starting at position 2667 of SEQ ID NO: 315
cccugaagguuccagacau

SEQ ID NO: 27759 - RNA, 19 nt, Artificial Sequence
  Description of Artificial Sequence: Synthetic oligonucleotide
  Antisense strand to SEQ ID NO: 27758
augucuggaaccuucaggg

SEQ ID NO: 27760 - RNA, 19 nt, Artificial Sequence
  Description of Artificial Sequence: Synthetic oligonucleotide
  Sense strand starting at position 2647 of SEQ ID NO: 315
cugacauuccugggccaca

SEQ ID NO: 27761 - RNA, 19 nt, Artificial Sequence
  Description of Artificial Sequence: Synthetic oligonucleotide
  Antisense strand to SEQ ID NO: 27760
uguggcccaggaaugucag

SEQ ID NO: 27762 - RNA, 19 nt, Artificial Sequence
  Description of Artificial Sequence: Synthetic oligonucleotide
  Sense strand starting at position 2636 of SEQ ID NO: 315
gcuuccagcgucugacauu

SEQ ID NO: 27763 - RNA, 19 nt, Artificial Sequence
  Description of Artificial Sequence: Synthetic oligonucleotide
  Antisense strand to SEQ ID NO: 27762
aaugucagacgcuggaagc

SEQ ID NO: 27764 - RNA, 19 nt, Artificial Sequence
  Description of Artificial Sequence: Synthetic oligonucleotide
  Sense strand starting at position 2121 of SEQ ID NO: 315
ccuugauggcaugaagagu

SEQ ID NO: 27765 - RNA, 19 nt, Artificial Sequence
  Description of Artificial Sequence: Synthetic oligonucleotide
  Antisense strand to SEQ ID NO: 27764
acucuucaugccaucaagg

SEQ ID NO: 27766 - RNA, 19 nt, Artificial Sequence
  Description of Artificial Sequence: Synthetic oligonucleotide
  Sense strand starting at position 2047 of SEQ ID NO: 315
aggcaagagugugaggauu

SEQ ID NO: 27767 - RNA, 19 nt, Artificial Sequence
  Description of Artificial Sequence: Synthetic oligonucleotide
  Antisense strand to SEQ ID NO: 27766
aauccucacacucuugccu

SEQ ID NO: 27768 - RNA, 19 nt, Artificial Sequence
  Description of Artificial Sequence: Synthetic oligonucleotide
  Sense strand starting at position 1512 of SEQ ID NO: 315
aucacuuaccagugagauu

SEQ ID NO: 27769 - RNA, 19 nt, Artificial Sequence
  Description of Artificial Sequence: Synthetic oligonucleotide
  Antisense strand to SEQ ID NO: 27768
aaucucacugguaagugau

SEQ ID NO: 27770 - RNA, 19 nt, Artificial Sequence
  Description of Artificial Sequence: Synthetic oligonucleotide
  Sense strand starting at position 1499 of SEQ ID NO: 315
gucccaugcugucaucacu

SEQ ID NO: 27771 - RNA, 19 nt, Artificial Sequence
  Description of Artificial Sequence: Synthetic oligonucleotide
  Antisense strand to SEQ ID NO: 27770
agugaugacagcaugggac

SEQ ID NO: 27772 - RNA, 19 nt, Artificial Sequence
  Description of Artificial Sequence: Synthetic oligonucleotide
  Sense strand starting at position 1216 of SEQ ID NO: 315
uccagauuccaagagccuu

SEQ ID NO: 27773 - RNA, 19 nt, Artificial Sequence
  Description of Artificial Sequence: Synthetic oligonucleotide
  Antisense strand to SEQ ID NO: 27772
aaggcucuuggaaucugga

SEQ ID NO: 27774 - RNA, 19 nt, Artificial Sequence
  Description of Artificial Sequence: Synthetic oligonucleotide
  Sense strand starting at position 493 of SEQ ID NO: 315
caaggugagugguaagaga

SEQ ID NO: 27775 - RNA, 19 nt, Artificial Sequence
  Description of Artificial Sequence: Synthetic oligonucleotide
  Antisense strand to SEQ ID NO: 27774
ucucuuaccacucaccuug

SEQ ID NO: 27776 - RNA, 19 nt, Artificial Sequence
  Description of Artificial Sequence: Synthetic oligonucleotide
  Sense strand starting at position 489 of SEQ ID NO: 315
cuuucaaggugagugguaa

SEQ ID NO: 27777 - RNA, 19 nt, Artificial Sequence
  Description of Artificial Sequence: Synthetic oligonucleotide
  Antisense strand to SEQ ID NO: 27776
uuaccacucaccuugaaag

SEQ ID NO: 27778 - RNA, 19 nt, Artificial Sequence
  Description of Artificial Sequence: Synthetic oligonucleotide
  Sense strand starting at position 484 of SEQ ID NO: 315
gcagccuuucaaggugagu

SEQ ID NO: 27779 - RNA, 19 nt, Artificial Sequence
  Description of Artificial Sequence: Synthetic oligonucleotide
  Antisense strand to SEQ ID NO: 27778
acucaccuugaaaggcugc

SEQ ID NO: 27780 - RNA, 19 nt, Artificial Sequence
  Description of Artificial Sequence: Synthetic oligonucleotide
  Sense strand starting at position 3792 of SEQ ID NO: 316
gcccuugugaauggaauca

SEQ ID NO: 27781 - RNA, 19 nt, Artificial Sequence
  Description of Artificial Sequence: Synthetic oligonucleotide
  Antisense strand to SEQ ID NO: 27780
ugauuccauucacaagggc

SEQ ID NO: 27782 - RNA, 19 nt, Artificial Sequence
  Description of Artificial Sequence: Synthetic oligonucleotide
  Sense strand starting at position 3768 of SEQ ID NO: 316
aggugaugaagucaugagu

SEQ ID NO: 27783 - RNA, 19 nt, Artificial Sequence
  Description of Artificial Sequence: Synthetic oligonucleotide
  Antisense strand to SEQ ID NO: 27782
acucaugacuucaucaccu

SEQ ID NO: 27784 - RNA, 19 nt, Artificial Sequence
  Description of Artificial Sequence: Synthetic oligonucleotide
  Sense strand starting at position 3505 of SEQ ID NO: 316
gggaaaguggcuuaaccuu

SEQ ID NO: 27785 - RNA, 19 nt, Artificial Sequence
  Description of Artificial Sequence: Synthetic oligonucleotide
  Antisense strand to SEQ ID NO: 27784
aagguuaagccacuuuccc

SEQ ID NO: 27786 - RNA, 19 nt, Artificial Sequence
  Description of Artificial Sequence: Synthetic oligonucleotide
  Sense strand starting at position 3475 of SEQ ID NO: 316
ugggucuuccauugacaga

SEQ ID NO: 27787 - RNA, 19 nt, Artificial Sequence
  Description of Artificial Sequence: Synthetic oligonucleotide
  Antisense strand to SEQ ID NO: 27786
ucugucaauggaagaccca

SEQ ID NO: 27788 - RNA, 19 nt, Artificial Sequence
  Description of Artificial Sequence: Synthetic oligonucleotide
  Sense strand starting at position 3453 of SEQ ID NO: 316
gaagacuucuagguuggau

SEQ ID NO: 27789 - RNA, 19 nt, Artificial Sequence
  Description of Artificial Sequence: Synthetic oligonucleotide
  Antisense strand to SEQ ID NO: 27788
auccaaccuagaagucuuc

SEQ ID NO: 27790 - RNA, 19 nt, Artificial Sequence
  Description of Artificial Sequence: Synthetic oligonucleotide
  Sense strand starting at position 3452 of SEQ ID NO: 316
ggaagacuucuagguugga

SEQ ID NO: 27791 - RNA, 19 nt, Artificial Sequence
  Description of Artificial Sequence: Synthetic oligonucleotide
  Antisense strand to SEQ ID NO: 27790
uccaaccuagaagucuucc

SEQ ID NO: 27792 - RNA, 19 nt, Artificial Sequence
  Description of Artificial Sequence: Synthetic oligonucleotide
  Sense strand starting at position 3421 of SEQ ID NO: 316
ggugcaguaggauaguuaa

SEQ ID NO: 27793 - RNA, 19 nt, Artificial Sequence
  Description of Artificial Sequence: Synthetic oligonucleotide
  Antisense strand to SEQ ID NO: 27792
uuaacuauccuacugcacc

SEQ ID NO: 27794 - RNA, 19 nt, Artificial Sequence
  Description of Artificial Sequence: Synthetic oligonucleotide
  Sense strand starting at position 3285 of SEQ ID NO: 316
gacauugcccucuauaggu

SEQ ID NO: 27795 - RNA, 19 nt, Artificial Sequence
  Description of Artificial Sequence: Synthetic oligonucleotide
  Antisense strand to SEQ ID NO: 27794
accuauagagggcaauguc

SEQ ID NO: 27796 - RNA, 19 nt, Artificial Sequence
  Description of Artificial Sequence: Synthetic oligonucleotide
  Sense strand starting at position 3272 of SEQ ID NO: 316
gucccuugacccugacauu

SEQ ID NO: 27797 - RNA, 19 nt, Artificial Sequence
  Description of Artificial Sequence: Synthetic oligonucleotide
  Antisense strand to SEQ ID NO: 27796
aaugucagggucaagggac

SEQ ID NO: 27798 - RNA, 19 nt, Artificial Sequence
  Description of Artificial Sequence: Synthetic oligonucleotide
  Sense strand starting at position 3080 of SEQ ID NO: 316
cuguuuaauuugucuucca

SEQ ID NO: 27799 - RNA, 19 nt, Artificial Sequence
  Description of Artificial Sequence: Synthetic oligonucleotide
  Antisense strand to SEQ ID NO: 27798
uggaagacaaauuaaacag

SEQ ID NO: 27800 - RNA, 19 nt, Artificial Sequence
  Description of Artificial Sequence: Synthetic oligonucleotide
  Sense strand starting at position 3072 of SEQ ID NO: 316
uguguugccuguuuaauuu

SEQ ID NO: 27801 - RNA, 19 nt, Artificial Sequence
  Description of Artificial Sequence: Synthetic oligonucleotide
  Antisense strand to SEQ ID NO: 27800
aaauuaaacaggcaacaca

SEQ ID NO: 27802 - RNA, 19 nt, Artificial Sequence
  Description of Artificial Sequence: Synthetic oligonucleotide
  Sense strand starting at position 3071 of SEQ ID NO: 316
uuguguugccuguuuaauu

SEQ ID NO: 27803 - RNA, 19 nt, Artificial Sequence
  Description of Artificial Sequence: Synthetic oligonucleotide
  Antisense strand to SEQ ID NO: 27802
aauuaaacaggcaacacaa

SEQ ID NO: 27804 - RNA, 19 nt, Artificial Sequence
  Description of Artificial Sequence: Synthetic oligonucleotide
  Sense strand starting at position 2907 of SEQ ID NO: 316
ggguuaucaugcucaaccu

SEQ ID NO: 27805 - RNA, 19 nt, Artificial Sequence
  Description of Artificial Sequence: Synthetic oligonucleotide
  Antisense strand to SEQ ID NO: 27804
agguugagcaugauaaccc

SEQ ID NO: 27806 - RNA, 19 nt, Artificial Sequence
  Description of Artificial Sequence: Synthetic oligonucleotide
  Sense strand starting at position 2842 of SEQ ID NO: 316
guuaccaucuacucacaga

SEQ ID NO: 27807 - RNA, 19 nt, Artificial Sequence
  Description of Artificial Sequence: Synthetic oligonucleotide
  Antisense strand to SEQ ID NO: 27806
ucugugaguagaugguaac

SEQ ID NO: 27808 - RNA, 19 nt, Artificial Sequence
  Description of Artificial Sequence: Synthetic oligonucleotide
  Sense strand starting at position 2690 of SEQ ID NO: 316
cucuguuuccuguacucau

SEQ ID NO: 27809 - RNA, 19 nt, Artificial Sequence
  Description of Artificial Sequence: Synthetic oligonucleotide
  Antisense strand to SEQ ID NO: 27808
augaguacaggaaacagag

SEQ ID NO: 27810 - RNA, 19 nt, Artificial Sequence
  Description of Artificial Sequence: Synthetic oligonucleotide
  Sense strand starting at position 2560 of SEQ ID NO: 316
ggucucacucaguaucuuu

SEQ ID NO: 27811 - RNA, 19 nt, Artificial Sequence
  Description of Artificial Sequence: Synthetic oligonucleotide
  Antisense strand to SEQ ID NO: 27810
aaagauacugagugagacc

SEQ ID NO: 27812 - RNA, 19 nt, Artificial Sequence
  Description of Artificial Sequence: Synthetic oligonucleotide
  Sense strand starting at position 2354 of SEQ ID NO: 316
agaagcuuucuaggauugu

SEQ ID NO: 27813 - RNA, 19 nt, Artificial Sequence
  Description of Artificial Sequence: Synthetic oligonucleotide
  Antisense strand to SEQ ID NO: 27812
acaauccuagaaagcuucu

SEQ ID NO: 27814 - RNA, 19 nt, Artificial Sequence
  Description of Artificial Sequence: Synthetic oligonucleotide
  Sense strand starting at position 2351 of SEQ ID NO: 316
cagagaagcuuucuaggau

SEQ ID NO: 27815 - RNA, 19 nt, Artificial Sequence
  Description of Artificial Sequence: Synthetic oligonucleotide
  Antisense strand to SEQ ID NO: 27814
auccuagaaagcuucucug

SEQ ID NO: 27816 - RNA, 19 nt, Artificial Sequence
  Description of Artificial Sequence: Synthetic oligonucleotide
  Sense strand starting at position 2318 of SEQ ID NO: 316
cauuauccugaauggguga

SEQ ID NO: 27817 - RNA, 19 nt, Artificial Sequence
  Description of Artificial Sequence: Synthetic oligonucleotide
  Antisense strand to SEQ ID NO: 27816
ucacccauucaggauaaug

SEQ ID NO: 27818 - RNA, 19 nt, Artificial Sequence
  Description of Artificial Sequence: Synthetic oligonucleotide
  Sense strand starting at position 1996 of SEQ ID NO: 316
gcuccagugcuuuaacaau

SEQ ID NO: 27819 - RNA, 19 nt, Artificial Sequence
  Description of Artificial Sequence: Synthetic oligonucleotide
  Antisense strand to SEQ ID NO: 27818
auuguuaaagcacuggagc

SEQ ID NO: 27820 - RNA, 19 nt, Artificial Sequence
  Description of Artificial Sequence: Synthetic oligonucleotide
  Sense strand starting at position 1809 of SEQ ID NO: 316
ugaaauaaaugcccaaguu

SEQ ID NO: 27821 - RNA, 19 nt, Artificial Sequence
  Description of Artificial Sequence: Synthetic oligonucleotide
  Antisense strand to SEQ ID NO: 27820
aacuugggcauuuauuuca

SEQ ID NO: 27822 - RNA, 19 nt, Artificial Sequence
  Description of Artificial Sequence: Synthetic oligonucleotide
  Sense strand starting at position 1594 of SEQ ID NO: 316
gagccuugucccuagaaug

SEQ ID NO: 27823 - RNA, 19 nt, Artificial Sequence
  Description of Artificial Sequence: Synthetic oligonucleotide
  Antisense strand to SEQ ID NO: 27822
cauucuagggacaaggcuc

SEQ ID NO: 27824 - RNA, 19 nt, Artificial Sequence
  Description of Artificial Sequence: Synthetic oligonucleotide
  Sense strand starting at position 1593 of SEQ ID NO: 316
agagccuugucccuagaau

SEQ ID NO: 27825 - RNA, 19 nt, Artificial Sequence
  Description of Artificial Sequence: Synthetic oligonucleotide
  Antisense strand to SEQ ID NO: 27824
auucuagggacaaggcucu

SEQ ID NO: 27826 - RNA, 19 nt, Artificial Sequence
  Description of Artificial Sequence: Synthetic oligonucleotide
  Sense strand starting at position 1539 of SEQ ID NO: 316
aagagaguuggagguccua

SEQ ID NO: 27827 - RNA, 19 nt, Artificial Sequence
  Description of Artificial Sequence: Synthetic oligonucleotide
  Antisense strand to SEQ ID NO: 27826
uaggaccuccaacucucuu

SEQ ID NO: 27828 - RNA, 19 nt, Artificial Sequence
  Description of Artificial Sequence: Synthetic oligonucleotide
  Sense strand starting at position 1290 of SEQ ID NO: 316
cugcguucugcaucuuaac

SEQ ID NO: 27829 - RNA, 19 nt, Artificial Sequence
  Description of Artificial Sequence: Synthetic oligonucleotide
  Antisense strand to SEQ ID NO: 27828
guuaagaugcagaacgcag

SEQ ID NO: 27830 - RNA, 19 nt, Artificial Sequence
  Description of Artificial Sequence: Synthetic oligonucleotide
  Sense strand starting at position 1253 of SEQ ID NO: 316
gaaggaagcugucuuguga

SEQ ID NO: 27831 - RNA, 19 nt, Artificial Sequence
  Description of Artificial Sequence: Synthetic oligonucleotide
  Antisense strand to SEQ ID NO: 27830
ucacaagacagcuuccuuc

SEQ ID NO: 27832 - RNA, 19 nt, Artificial Sequence
  Description of Artificial Sequence: Synthetic oligonucleotide
  Sense strand starting at position 1106 of SEQ ID NO: 316
gucaaaguuacguggagag

SEQ ID NO: 27833 - RNA, 19 nt, Artificial Sequence
  Description of Artificial Sequence: Synthetic oligonucleotide
  Antisense strand to SEQ ID NO: 27832
cucuccacguaacuuugac

SEQ ID NO: 27834 - RNA, 19 nt, Artificial Sequence
  Description of Artificial Sequence: Synthetic oligonucleotide
  Sense strand starting at position 1095 of SEQ ID NO: 316
aauguuugugcgucaaagu

SEQ ID NO: 27835 - RNA, 19 nt, Artificial Sequence
  Description of Artificial Sequence: Synthetic oligonucleotide
  Antisense strand to SEQ ID NO: 27834
acuuugacgcacaaacauu

SEQ ID NO: 27836 - RNA, 19 nt, Artificial Sequence
  Description of Artificial Sequence: Synthetic oligonucleotide
  Sense strand starting at position 1082 of SEQ ID NO: 316
gagccucaggguuaauguu

SEQ ID NO: 27837 - RNA, 19 nt, Artificial Sequence
  Description of Artificial Sequence: Synthetic oligonucleotide
  Antisense strand to SEQ ID NO: 27836
aacauuaacccugaggcuc

SEQ ID NO: 27838 - RNA, 19 nt, Artificial Sequence
  Description of Artificial Sequence: Synthetic oligonucleotide
  Sense strand starting at position 985 of SEQ ID NO: 316
ggcuuuccucaugaucaau

SEQ ID NO: 27839 - RNA, 19 nt, Artificial Sequence
  Description of Artificial Sequence: Synthetic oligonucleotide
  Antisense strand to SEQ ID NO: 27838
auugaucaugaggaaagcc

SEQ ID NO: 27840 - RNA, 19 nt, Artificial Sequence
  Description of Artificial Sequence: Synthetic oligonucleotide
  Sense strand starting at position 982 of SEQ ID NO: 316
agaggcuuuccucaugauc

SEQ ID NO: 27841 - RNA, 19 nt, Artificial Sequence
  Description of Artificial Sequence: Synthetic oligonucleotide
  Antisense strand to SEQ ID NO: 27840
gaucaugaggaaagccucu

SEQ ID NO: 27842 - RNA, 19 nt, Artificial Sequence
  Description of Artificial Sequence: Synthetic oligonucleotide
  Sense strand starting at position 746 of SEQ ID NO: 316
cguccuaaagaugauuaau

SEQ ID NO: 27843 - RNA, 19 nt, Artificial Sequence
  Description of Artificial Sequence: Synthetic oligonucleotide
  Antisense strand to SEQ ID NO: 27842
auuaaucaucuuuaggacg

SEQ ID NO: 27844 - RNA, 19 nt, Artificial Sequence
  Description of Artificial Sequence: Synthetic oligonucleotide
  Sense strand starting at position 734 of SEQ ID NO: 316
aucugaugggaucguccua

SEQ ID NO: 27845 - RNA, 19 nt, Artificial Sequence
  Description of Artificial Sequence: Synthetic oligonucleotide
  Antisense strand to SEQ ID NO: 27844
uaggacgaucccaucagau

SEQ ID NO: 27846 - RNA, 19 nt, Artificial Sequence
  Description of Artificial Sequence: Synthetic oligonucleotide
  Sense strand starting at position 530 of SEQ ID NO: 316
ucugaagagugcucuuaau

SEQ ID NO: 27847 - RNA, 19 nt, Artificial Sequence
  Description of Artificial Sequence: Synthetic oligonucleotide
  Antisense strand to SEQ ID NO: 27846
auuaagagcacucuucaga

SEQ ID NO: 27848 - RNA, 19 nt, Artificial Sequence
  Description of Artificial Sequence: Synthetic oligonucleotide
  Sense strand starting at position 524 of SEQ ID NO: 316
guacuuucugaagagugcu

SEQ ID NO: 27849 - RNA, 19 nt, Artificial Sequence
  Description of Artificial Sequence: Synthetic oligonucleotide
  Antisense strand to SEQ ID NO: 27848
agcacucuucagaaaguac

SEQ ID NO: 27850 - RNA, 19 nt, Artificial Sequence
  Description of Artificial Sequence: Synthetic oligonucleotide
  Sense strand starting at position 516 of SEQ ID NO: 316
cccaaagaguacuuucuga

SEQ ID NO: 27851 - RNA, 19 nt, Artificial Sequence
  Description of Artificial Sequence: Synthetic oligonucleotide
  Antisense strand to SEQ ID NO: 27850
ucagaaaguacucuuuggg

SEQ ID NO: 27852 - RNA, 19 nt, Artificial Sequence
  Description of Artificial Sequence: Synthetic oligonucleotide
  Sense strand starting at position 369 of SEQ ID NO: 316
aacacauggcucggacaau

SEQ ID NO: 27853 - RNA, 19 nt, Artificial Sequence
  Description of Artificial Sequence: Synthetic oligonucleotide
  Antisense strand to SEQ ID NO: 27852
auuguccgagccauguguu

SEQ ID NO: 27854 - RNA, 19 nt, Artificial Sequence
  Description of Artificial Sequence: Synthetic oligonucleotide
  Sense strand starting at position 343 of SEQ ID NO: 316
ccuaacgucugacugauua

SEQ ID NO: 27855 - RNA, 19 nt, Artificial Sequence
  Description of Artificial Sequence: Synthetic oligonucleotide
  Antisense strand to SEQ ID NO: 27854
uaaucagucagacguuagg

SEQ ID NO: 27856 - RNA, 19 nt, Artificial Sequence
  Description of Artificial Sequence: Synthetic oligonucleotide
  Sense strand starting at position 340 of SEQ ID NO: 316
aauccuaacgucugacuga

SEQ ID NO: 27857 - RNA, 19 nt, Artificial Sequence
  Description of Artificial Sequence: Synthetic oligonucleotide
  Antisense strand to SEQ ID NO: 27856
ucagucagacguuaggauu

SEQ ID NO: 27858 - RNA, 19 nt, Artificial Sequence
  Description of Artificial Sequence: Synthetic oligonucleotide
  Sense strand starting at position 150 of SEQ ID NO: 316
agcugagguacugauaagu

SEQ ID NO: 27859 - RNA, 19 nt, Artificial Sequence
  Description of Artificial Sequence: Synthetic oligonucleotide
  Antisense strand to SEQ ID NO: 27858
acuuaucaguaccucagcu

SEQ ID NO: 27860 - RNA, 19 nt, Artificial Sequence
  Description of Artificial Sequence: Synthetic oligonucleotide
  Sense strand starting at position 125 of SEQ ID NO: 317
cucuuaccgucucgacuua

SEQ ID NO: 27861 - RNA, 19 nt, Artificial Sequence
  Description of Artificial Sequence: Synthetic oligonucleotide
  Antisense strand to SEQ ID NO: 27860
uaagucgagacgguaagag

SEQ ID NO: 27862 - RNA, 19 nt, Artificial Sequence
  Description of Artificial Sequence: Synthetic oligonucleotide
  Sense strand starting at position 656 of SEQ ID NO: 317
gcgagugcagcugugacua

SEQ ID NO: 27863 - RNA, 19 nt, Artificial Sequence
  Description of Artificial Sequence: Synthetic oligonucleotide
  Antisense strand to SEQ ID NO: 27862
uagucacagcugcacucgc

SEQ ID NO: 27864 - RNA, 19 nt, Artificial Sequence
  Description of Artificial Sequence: Synthetic oligonucleotide
  Sense strand starting at position 866 of SEQ ID NO: 317
aagggauuccgucaggucu

SEQ ID NO: 27865 - RNA, 19 nt, Artificial Sequence
  Description of Artificial Sequence: Synthetic oligonucleotide
  Antisense strand to SEQ ID NO: 27864
agaccugacggaaucccuu

SEQ ID NO: 27866 - RNA, 19 nt, Artificial Sequence
  Description of Artificial Sequence: Synthetic oligonucleotide
  Sense strand starting at position 868 of SEQ ID NO: 317
gggauuccgucaggucuga

SEQ ID NO: 27867 - RNA, 19 nt, Artificial Sequence
  Description of Artificial Sequence: Synthetic oligonucleotide
  Antisense strand to SEQ ID NO: 27866
ucagaccugacggaauccc

SEQ ID NO: 27868 - RNA, 19 nt, Artificial Sequence
  Description of Artificial Sequence: Synthetic oligonucleotide
  Sense strand starting at position 1957 of SEQ ID NO: 317
gcgagcugcgaggagaaau

SEQ ID NO: 27869 - RNA, 19 nt, Artificial Sequence
  Description of Artificial Sequence: Synthetic oligonucleotide
  Antisense strand to SEQ ID NO: 27868
auuucuccucgcagcucgc

SEQ ID NO: 27870 - RNA, 19 nt, Artificial Sequence
  Description of Artificial Sequence: Synthetic oligonucleotide
  Sense strand starting at position 2871 of SEQ ID NO: 317
gcucauuauccucgccgga

SEQ ID NO: 27871 - RNA, 19 nt, Artificial Sequence
  Description of Artificial Sequence: Synthetic oligonucleotide
  Antisense strand to SEQ ID NO: 27870
uccggcgaggauaaugagc

SEQ ID NO: 27872 - RNA, 19 nt, Artificial Sequence
  Description of Artificial Sequence: Synthetic oligonucleotide
  Sense strand starting at position 2912 of SEQ ID NO: 317
uggagaccgucuuugcuua

SEQ ID NO: 27873 - RNA, 19 nt, Artificial Sequence
  Description of Artificial Sequence: Synthetic oligonucleotide
  Antisense strand to SEQ ID NO: 27872
uaagcaaagacggucucca

SEQ ID NO: 27874 - RNA, 19 nt, Artificial Sequence
  Description of Artificial Sequence: Synthetic oligonucleotide
  Sense strand starting at position 2917 of SEQ ID NO: 317
accgucuuugcuuaguaga

SEQ ID NO: 27875 - RNA, 19 nt, Artificial Sequence
  Description of Artificial Sequence: Synthetic oligonucleotide
  Antisense strand to SEQ ID NO: 27874
ucuacuaagcaaagacggu

SEQ ID NO: 27876 - RNA, 19 nt, Artificial Sequence
  Description of Artificial Sequence: Synthetic oligonucleotide
  Sense strand starting at position 3147 of SEQ ID NO: 317
ugguauaacaucuggugga

SEQ ID NO: 27877 - RNA, 19 nt, Artificial Sequence
  Description of Artificial Sequence: Synthetic oligonucleotide
  Antisense strand to SEQ ID NO: 27876
uccaccagauguuauacca

SEQ ID NO: 27878 - RNA, 19 nt, Artificial Sequence
  Description of Artificial Sequence: Synthetic oligonucleotide
  Sense strand starting at position 3278 of SEQ ID NO: 317
caauguggcagguggaaua

SEQ ID NO: 27879 - RNA, 19 nt, Artificial Sequence
  Description of Artificial Sequence: Synthetic oligonucleotide
  Antisense strand to SEQ ID NO: 27878
uauuccaccugccacauug

SEQ ID NO: 27880 - RNA, 19 nt, Artificial Sequence
  Description of Artificial Sequence: Synthetic oligonucleotide
  Sense strand starting at position 3294 of SEQ ID NO: 317
auaagcaugucccuuggau

SEQ ID NO: 27881 - RNA, 19 nt, Artificial Sequence
  Description of Artificial Sequence: Synthetic oligonucleotide
  Antisense strand to SEQ ID NO: 27880
auccaagggacaugcuuau

SEQ ID NO: 27882 - RNA, 19 nt, Artificial Sequence
  Description of Artificial Sequence: Synthetic oligonucleotide
  Sense strand starting at position 3341 of SEQ ID NO: 317
ugguuugcugacuguguga

SEQ ID NO: 27883 - RNA, 19 nt, Artificial Sequence
  Description of Artificial Sequence: Synthetic oligonucleotide
  Antisense strand to SEQ ID NO: 27882
ucacacagucagcaaacca

SEQ ID NO: 27884 - RNA, 19 nt, Artificial Sequence
  Description of Artificial Sequence: Synthetic oligonucleotide
  Sense strand starting at position 3369 of SEQ ID NO: 317
ggucaucucuccucucuga

SEQ ID NO: 27885 - RNA, 19 nt, Artificial Sequence
  Description of Artificial Sequence: Synthetic oligonucleotide
  Antisense strand to SEQ ID NO: 27884
ucagagaggagagaugacc

SEQ ID NO: 27886 - RNA, 19 nt, Artificial Sequence
  Description of Artificial Sequence: Synthetic oligonucleotide
  Sense strand starting at position 3402 of SEQ ID NO: 317
agcugucaaauggguauau

SEQ ID NO: 27887 - RNA, 19 nt, Artificial Sequence
  Description of Artificial Sequence: Synthetic oligonucleotide
  Antisense strand to SEQ ID NO: 27886
auauacccauuugacagcu

SEQ ID NO: 27888 - RNA, 19 nt, Artificial Sequence
  Description of Artificial Sequence: Synthetic oligonucleotide
  Sense strand starting at position 3498 of SEQ ID NO: 317
guggaugugcaauagacau

SEQ ID NO: 27889 - RNA, 19 nt, Artificial Sequence
  Description of Artificial Sequence: Synthetic oligonucleotide
  Antisense strand to SEQ ID NO: 27888
augucuauugcacauccac

SEQ ID NO: 27890 - RNA, 19 nt, Artificial Sequence
  Description of Artificial Sequence: Synthetic oligonucleotide
  Sense strand starting at position 3528 of SEQ ID NO: 317
cuuaaugagugagaaagaa

SEQ ID NO: 27891 - RNA, 19 nt, Artificial Sequence
  Description of Artificial Sequence: Synthetic oligonucleotide
  Antisense strand to SEQ ID NO: 27890
uucuuucucacucauuaag

SEQ ID NO: 27892 - RNA, 19 nt, Artificial Sequence
  Description of Artificial Sequence: Synthetic oligonucleotide
  Sense strand starting at position 3578 of SEQ ID NO: 317
ccacaugagcugggagaau

SEQ ID NO: 27893 - RNA, 19 nt, Artificial Sequence
  Description of Artificial Sequence: Synthetic oligonucleotide
  Antisense strand to SEQ ID NO: 27892
auucucccagcucaugugg

SEQ ID NO: 27894 - RNA, 19 nt, Artificial Sequence
  Description of Artificial Sequence: Synthetic oligonucleotide
  Sense strand starting at position 3590 of SEQ ID NO: 317
ggagaauccuuagagauga

SEQ ID NO: 27895 - RNA, 19 nt, Artificial Sequence
  Description of Artificial Sequence: Synthetic oligonucleotide
  Antisense strand to SEQ ID NO: 27894
ucaucucuaaggauucucc

SEQ ID NO: 27896 - RNA, 19 nt, Artificial Sequence
  Description of Artificial Sequence: Synthetic oligonucleotide
  Sense strand starting at position 3679 of SEQ ID NO: 317
acaguuugucgauggcaga

SEQ ID NO: 27897 - RNA, 19 nt, Artificial Sequence
  Description of Artificial Sequence: Synthetic oligonucleotide
  Antisense strand to SEQ ID NO: 27896
ucugccaucgacaaacugu

SEQ ID NO: 27898 - RNA, 19 nt, Artificial Sequence
  Description of Artificial Sequence: Synthetic oligonucleotide
  Sense strand starting at position 3680 of SEQ ID NO: 317
caguuugucgauggcagaa

SEQ ID NO: 27899 - RNA, 19 nt, Artificial Sequence
  Description of Artificial Sequence: Synthetic oligonucleotide
  Antisense strand to SEQ ID NO: 27898
uucugccaucgacaaacug

SEQ ID NO: 27900 - RNA, 19 nt, Artificial Sequence
  Description of Artificial Sequence: Synthetic oligonucleotide
  Sense strand starting at position 3776 of SEQ ID NO: 317
cuuugagguuagugccaaa

SEQ ID NO: 27901 - RNA, 19 nt, Artificial Sequence
  Description of Artificial Sequence: Synthetic oligonucleotide
  Antisense strand to SEQ ID NO: 27900
uuuggcacuaaccucaaag

SEQ ID NO: 27902 - RNA, 19 nt, Artificial Sequence
  Description of Artificial Sequence: Synthetic oligonucleotide
  Sense strand starting at position 3822 of SEQ ID NO: 317
cguaacaagcaggaugaua

SEQ ID NO: 27903 - RNA, 19 nt, Artificial Sequence
  Description of Artificial Sequence: Synthetic oligonucleotide
  Antisense strand to SEQ ID NO: 27902
uaucauccugcuuguuacg

SEQ ID NO: 27904 - RNA, 19 nt, Artificial Sequence
  Description of Artificial Sequence: Synthetic oligonucleotide
  Sense strand starting at position 3835 of SEQ ID NO: 317
augauaaaguuccaagaag

SEQ ID NO: 27905 - RNA, 19 nt, Artificial Sequence
  Description of Artificial Sequence: Synthetic oligonucleotide
  Antisense strand to SEQ ID NO: 27904
cuucuuggaacuuuaucau

SEQ ID NO: 27906 - RNA, 19 nt, Artificial Sequence
  Description of Artificial Sequence: Synthetic oligonucleotide
  Sense strand starting at position 3954 of SEQ ID NO: 317
gacguugcaucccuguuua

SEQ ID NO: 27907 - RNA, 19 nt, Artificial Sequence
  Description of Artificial Sequence: Synthetic oligonucleotide
  Antisense strand to SEQ ID NO: 27906
uaaacagggaugcaacguc

SEQ ID NO: 27908 - RNA, 19 nt, Artificial Sequence
  Description of Artificial Sequence: Synthetic oligonucleotide
  Sense strand starting at position 3966 of SEQ ID NO: 317
cuguuuaacugacauagca

SEQ ID NO: 27909 - RNA, 19 nt, Artificial Sequence
  Description of Artificial Sequence: Synthetic oligonucleotide
  Antisense strand to SEQ ID NO: 27908
ugcuaugucaguuaaacag

SEQ ID NO: 27910 - RNA, 19 nt, Artificial Sequence
  Description of Artificial Sequence: Synthetic oligonucleotide
  Sense strand starting at position 3656 of SEQ ID NO: 318
guauaucuccagcagcuau

SEQ ID NO: 27911 - RNA, 19 nt, Artificial Sequence
  Description of Artificial Sequence: Synthetic oligonucleotide
  Antisense strand to SEQ ID NO: 27910
auagcugcuggagauauac

SEQ ID NO: 27912 - RNA, 19 nt, Artificial Sequence
  Description of Artificial Sequence: Synthetic oligonucleotide
  Sense strand starting at position 3604 of SEQ ID NO: 318
uggcaauaaucaguuacuu

SEQ ID NO: 27913 - RNA, 19 nt, Artificial Sequence
  Description of Artificial Sequence: Synthetic oligonucleotide
  Antisense strand to SEQ ID NO: 27912
aaguaacugauuauugcca

SEQ ID NO: 27914 - RNA, 19 nt, Artificial Sequence
  Description of Artificial Sequence: Synthetic oligonucleotide
  Sense strand starting at position 3559 of SEQ ID NO: 318
ggagcacccuguucuuauu

SEQ ID NO: 27915 - RNA, 19 nt, Artificial Sequence
  Description of Artificial Sequence: Synthetic oligonucleotide
  Antisense strand to SEQ ID NO: 27914
aauaagaacagggugcucc

SEQ ID NO: 27916 - RNA, 19 nt, Artificial Sequence
  Description of Artificial Sequence: Synthetic oligonucleotide
  Sense strand starting at position 3470 of SEQ ID NO: 318
guagucacuuccuccauga

SEQ ID NO: 27917 - RNA, 19 nt, Artificial Sequence
  Description of Artificial Sequence: Synthetic oligonucleotide
  Antisense strand to SEQ ID NO: 27916
ucauggaggaagugacuac

SEQ ID NO: 27918 - RNA, 19 nt, Artificial Sequence
  Description of Artificial Sequence: Synthetic oligonucleotide
  Sense strand starting at position 3382 of SEQ ID NO: 318
gagcaugccuucucagauc

SEQ ID NO: 27919 - RNA, 19 nt, Artificial Sequence
  Description of Artificial Sequence: Synthetic oligonucleotide
  Antisense strand to SEQ ID NO: 27918
gaucugagaaggcaugcuc

SEQ ID NO: 27920 - RNA, 19 nt, Artificial Sequence
  Description of Artificial Sequence: Synthetic oligonucleotide
  Sense strand starting at position 3161 of SEQ ID NO: 318
cuccaaaccuguguuaauu

SEQ ID NO: 27921 - RNA, 19 nt, Artificial Sequence
  Description of Artificial Sequence: Synthetic oligonucleotide
  Antisense strand to SEQ ID NO: 27920
aauuaacacagguuuggag

SEQ ID NO: 27922 - RNA, 19 nt, Artificial Sequence
  Description of Artificial Sequence: Synthetic oligonucleotide
  Sense strand starting at position 3158 of SEQ ID NO: 318
gggcuccaaaccuguguua

SEQ ID NO: 27923 - RNA, 19 nt, Artificial Sequence
  Description of Artificial Sequence: Synthetic oligonucleotide
  Antisense strand to SEQ ID NO: 27922
uaacacagguuuggagccc

SEQ ID NO: 27924 - RNA, 19 nt, Artificial Sequence
  Description of Artificial Sequence: Synthetic oligonucleotide
  Sense strand starting at position 3110 of SEQ ID NO: 318
aguugauuaggucauacau

SEQ ID NO: 27925 - RNA, 19 nt, Artificial Sequence
  Description of Artificial Sequence: Synthetic oligonucleotide
  Antisense strand to SEQ ID NO: 27924
auguaugaccuaaucaacu

SEQ ID NO: 27926 - RNA, 19 nt, Artificial Sequence
  Description of Artificial Sequence: Synthetic oligonucleotide
  Sense strand starting at position 3108 of SEQ ID NO: 318
ggaguugauuaggucauac

SEQ ID NO: 27927 - RNA, 19 nt, Artificial Sequence
  Description of Artificial Sequence: Synthetic oligonucleotide
  Antisense strand to SEQ ID NO: 27926
guaugaccuaaucaacucc

SEQ ID NO: 27928 - RNA, 19 nt, Artificial Sequence
  Description of Artificial Sequence: Synthetic oligonucleotide
  Sense strand starting at position 3105 of SEQ ID NO: 318
gguggaguugauuagguca

SEQ ID NO: 27929 - RNA, 19 nt, Artificial Sequence
  Description of Artificial Sequence: Synthetic oligonucleotide
  Antisense strand to SEQ ID NO: 27928
ugaccuaaucaacuccacc

SEQ ID NO: 27930 - RNA, 19 nt, Artificial Sequence
  Description of Artificial Sequence: Synthetic oligonucleotide
  Sense strand starting at position 3084 of SEQ ID NO: 318
gcugauuguccacgaaaga

SEQ ID NO: 27931 - RNA, 19 nt, Artificial Sequence
  Description of Artificial Sequence: Synthetic oligonucleotide
  Antisense strand to SEQ ID NO: 27930
ucuuucguggacaaucagc

SEQ ID NO: 27932 - RNA, 19 nt, Artificial Sequence
  Description of Artificial Sequence: Synthetic oligonucleotide
  Sense strand starting at position 3081 of SEQ ID NO: 318
auugcugauuguccacgaa

SEQ ID NO: 27933 - RNA, 19 nt, Artificial Sequence
  Description of Artificial Sequence: Synthetic oligonucleotide
  Antisense strand to SEQ ID NO: 27932
uucguggacaaucagcaau

SEQ ID NO: 27934 - RNA, 19 nt, Artificial Sequence
  Description of Artificial Sequence: Synthetic oligonucleotide
  Sense strand starting at position 3071 of SEQ ID NO: 318
gguagaugucauugcugau

SEQ ID NO: 27935 - RNA, 19 nt, Artificial Sequence
  Description of Artificial Sequence: Synthetic oligonucleotide
  Antisense strand to SEQ ID NO: 27934
aucagcaaugacaucuacc

SEQ ID NO: 27936 - RNA, 19 nt, Artificial Sequence
  Description of Artificial Sequence: Synthetic oligonucleotide
  Sense strand starting at position 3055 of SEQ ID NO: 318
cgcaauaauccugagaggu

SEQ ID NO: 27937 - RNA, 19 nt, Artificial Sequence
  Description of Artificial Sequence: Synthetic oligonucleotide
  Antisense strand to SEQ ID NO: 27936
accucucaggauuauugcg

SEQ ID NO: 27938 - RNA, 19 nt, Artificial Sequence
  Description of Artificial Sequence: Synthetic oligonucleotide
  Sense strand starting at position 3043 of SEQ ID NO: 318
ucauuuagcccucgcaaua

SEQ ID NO: 27939 - RNA, 19 nt, Artificial Sequence
  Description of Artificial Sequence: Synthetic oligonucleotide
  Antisense strand to SEQ ID NO: 27938
uauugcgagggcuaaauga

SEQ ID NO: 27940 - RNA, 19 nt, Artificial Sequence
  Description of Artificial Sequence: Synthetic oligonucleotide
  Sense strand starting at position 2941 of SEQ ID NO: 318
uucguauucuacuuacaca

SEQ ID NO: 27941 - RNA, 19 nt, Artificial Sequence
  Description of Artificial Sequence: Synthetic oligonucleotide
  Antisense strand to SEQ ID NO: 27940
uguguaaguagaauacgaa

SEQ ID NO: 27942 - RNA, 19 nt, Artificial Sequence
  Description of Artificial Sequence: Synthetic oligonucleotide
  Sense strand starting at position 2918 of SEQ ID NO: 318
gagggagaggccuggcaau

SEQ ID NO: 27943 - RNA, 19 nt, Artificial Sequence
  Description of Artificial Sequence: Synthetic oligonucleotide
  Antisense strand to SEQ ID NO: 27942
auugccaggccucucccuc

SEQ ID NO: 27944 - RNA, 19 nt, Artificial Sequence
  Description of Artificial Sequence: Synthetic oligonucleotide
  Sense strand starting at position 2829 of SEQ ID NO: 318
gaguacucgcuucagugga

SEQ ID NO: 27945 - RNA, 19 nt, Artificial Sequence
  Description of Artificial Sequence: Synthetic oligonucleotide
  Antisense strand to SEQ ID NO: 27944
uccacugaagcgaguacuc

SEQ ID NO: 27946 - RNA, 19 nt, Artificial Sequence
  Description of Artificial Sequence: Synthetic oligonucleotide
  Sense strand starting at position 2815 of SEQ ID NO: 318
uaaucaucgcucuggagua

SEQ ID NO: 27947 - RNA, 19 nt, Artificial Sequence
  Description of Artificial Sequence: Synthetic oligonucleotide
  Antisense strand to SEQ ID NO: 27946
uacuccagagcgaugauua

SEQ ID NO: 27948 - RNA, 19 nt, Artificial Sequence
  Description of Artificial Sequence: Synthetic oligonucleotide
  Sense strand starting at position 2537 of SEQ ID NO: 318
ucaguaauguccuuguaau

SEQ ID NO: 27949 - RNA, 19 nt, Artificial Sequence
  Description of Artificial Sequence: Synthetic oligonucleotide
  Antisense strand to SEQ ID NO: 27948
auuacaaggacauuacuga

SEQ ID NO: 27950 - RNA, 19 nt, Artificial Sequence
  Description of Artificial Sequence: Synthetic oligonucleotide
  Sense strand starting at position 2529 of SEQ ID NO: 318
cugucuuaucaguaauguc

SEQ ID NO: 27951 - RNA, 19 nt, Artificial Sequence
  Description of Artificial Sequence: Synthetic oligonucleotide
  Antisense strand to SEQ ID NO: 27950
gacauuacugauaagacag

SEQ ID NO: 27952 - RNA, 19 nt, Artificial Sequence
  Description of Artificial Sequence: Synthetic oligonucleotide
  Sense strand starting at position 2150 of SEQ ID NO: 318
caacaaucacguuguggaa

SEQ ID NO: 27953 - RNA, 19 nt, Artificial Sequence
  Description of Artificial Sequence: Synthetic oligonucleotide
  Antisense strand to SEQ ID NO: 27952
uuccacaacgugauuguug

SEQ ID NO: 27954 - RNA, 19 nt, Artificial Sequence
  Description of Artificial Sequence: Synthetic oligonucleotide
  Sense strand starting at position 1474 of SEQ ID NO: 318
ucccuuaaccuguacgaga

SEQ ID NO: 27955 - RNA, 19 nt, Artificial Sequence
  Description of Artificial Sequence: Synthetic oligonucleotide
  Antisense strand to SEQ ID NO: 27954
ucucguacagguuaaggga

SEQ ID NO: 27956 - RNA, 19 nt, Artificial Sequence
  Description of Artificial Sequence: Synthetic oligonucleotide
  Sense strand starting at position 1258 of SEQ ID NO: 318
ggcagaaauguacgcaaca

SEQ ID NO: 27957 - RNA, 19 nt, Artificial Sequence
  Description of Artificial Sequence: Synthetic oligonucleotide
  Antisense strand to SEQ ID NO: 27956
uguugcguacauuucugcc

SEQ ID NO: 27958 - RNA, 19 nt, Artificial Sequence
  Description of Artificial Sequence: Synthetic oligonucleotide
  Sense strand starting at position 1221 of SEQ ID NO: 318
ucagauuucuugguggugu

SEQ ID NO: 27959 - RNA, 19 nt, Artificial Sequence
  Description of Artificial Sequence: Synthetic oligonucleotide
  Antisense strand to SEQ ID NO: 27958
acaccaccaagaaaucuga

SEQ ID NO: 27960 - RNA, 19 nt, Artificial Sequence
  Description of Artificial Sequence: Synthetic oligonucleotide
  Sense strand starting at position 802 of SEQ ID NO: 318
ggguuauggagggaguguu

SEQ ID NO: 27961 - RNA, 19 nt, Artificial Sequence
  Description of Artificial Sequence: Synthetic oligonucleotide
  Antisense strand to SEQ ID NO: 27960
aacacucccuccauaaccc

SEQ ID NO: 27962 - RNA, 19 nt, Artificial Sequence
  Description of Artificial Sequence: Synthetic oligonucleotide
  Sense strand starting at position 790 of SEQ ID NO: 318
uuugcaaagacuggguuau

SEQ ID NO: 27963 - RNA, 19 nt, Artificial Sequence
  Description of Artificial Sequence: Synthetic oligonucleotide
  Antisense strand to SEQ ID NO: 27962
auaacccagucuuugcaaa

SEQ ID NO: 27964 - RNA, 19 nt, Artificial Sequence
  Description of Artificial Sequence: Synthetic oligonucleotide
  Sense strand starting at position 680 of SEQ ID NO: 318
acagaagcaucuuccaaug

SEQ ID NO: 27965 - RNA, 19 nt, Artificial Sequence
  Description of Artificial Sequence: Synthetic oligonucleotide
  Antisense strand to SEQ ID NO: 27964
cauuggaagaugcuucugu

SEQ ID NO: 27966 - RNA, 19 nt, Artificial Sequence
  Description of Artificial Sequence: Synthetic oligonucleotide
  Sense strand starting at position 580 of SEQ ID NO: 318
gugaguacuagggaacuuu

SEQ ID NO: 27967 - RNA, 19 nt, Artificial Sequence
  Description of Artificial Sequence: Synthetic oligonucleotide
  Antisense strand to SEQ ID NO: 27966
aaaguucccuaguacucac

SEQ ID NO: 27968 - RNA, 19 nt, Artificial Sequence
  Description of Artificial Sequence: Synthetic oligonucleotide
  Sense strand starting at position 578 of SEQ ID NO: 318
uugugaguacuagggaacu

SEQ ID NO: 27969 - RNA, 19 nt, Artificial Sequence
  Description of Artificial Sequence: Synthetic oligonucleotide
  Antisense strand to SEQ ID NO: 27968
aguucccuaguacucacaa

SEQ ID NO: 27970 - RNA, 19 nt, Artificial Sequence
  Description of Artificial Sequence: Synthetic oligonucleotide
  Sense strand starting at position 576 of SEQ ID NO: 318
auuugugaguacuagggaa

SEQ ID NO: 27971 - RNA, 19 nt, Artificial Sequence
  Description of Artificial Sequence: Synthetic oligonucleotide
  Antisense strand to SEQ ID NO: 27970
uucccuaguacucacaaau

SEQ ID NO: 27972 - RNA, 19 nt, Artificial Sequence
  Description of Artificial Sequence: Synthetic oligonucleotide
  Sense strand starting at position 570 of SEQ ID NO: 318
guggaaauuugugaguacu

SEQ ID NO: 27973 - RNA, 19 nt, Artificial Sequence
  Description of Artificial Sequence: Synthetic oligonucleotide
  Antisense strand to SEQ ID NO: 27972
aguacucacaaauuuccac

SEQ ID NO: 27974 - RNA, 19 nt, Artificial Sequence
  Description of Artificial Sequence: Synthetic oligonucleotide
  Sense strand starting at position 454 of SEQ ID NO: 318
uacucagcuguguaaguuu

SEQ ID NO: 27975 - RNA, 19 nt, Artificial Sequence
  Description of Artificial Sequence: Synthetic oligonucleotide
  Antisense strand to SEQ ID NO: 27974
aaacuuacacagcugagua

SEQ ID NO: 27976 - RNA, 19 nt, Artificial Sequence
  Description of Artificial Sequence: Synthetic oligonucleotide
  Sense strand starting at position 427 of SEQ ID NO: 318
uuaaguaggauguguaagu

SEQ ID NO: 27977 - RNA, 19 nt, Artificial Sequence
  Description of Artificial Sequence: Synthetic oligonucleotide
  Antisense strand to SEQ ID NO: 27976
acuuacacauccuacuuaa

SEQ ID NO: 27978 - RNA, 19 nt, Artificial Sequence
  Description of Artificial Sequence: Synthetic oligonucleotide
  Sense strand starting at position 215 of SEQ ID NO: 318
ugaguuacgcuagacauuc

SEQ ID NO: 27979 - RNA, 19 nt, Artificial Sequence
  Description of Artificial Sequence: Synthetic oligonucleotide
  Antisense strand to SEQ ID NO: 27978
gaaugucuagcguaacuca

SEQ ID NO: 27980 - RNA, 19 nt, Artificial Sequence
  Description of Artificial Sequence: Synthetic oligonucleotide
  Sense strand starting at position 203 of SEQ ID NO: 318
uguuucuuccuaugaguua

SEQ ID NO: 27981 - RNA, 19 nt, Artificial Sequence
  Description of Artificial Sequence: Synthetic oligonucleotide
  Antisense strand to SEQ ID NO: 27980
uaacucauaggaagaaaca

SEQ ID NO: 27982 - RNA, 19 nt, Artificial Sequence
  Description of Artificial Sequence: Synthetic oligonucleotide
  Sense strand starting at position 200 of SEQ ID NO: 318
uuguguuucuuccuaugag

SEQ ID NO: 27983 - RNA, 19 nt, Artificial Sequence
  Description of Artificial Sequence: Synthetic oligonucleotide
  Antisense strand to SEQ ID NO: 27982
cucauaggaagaaacacaa

SEQ ID NO: 27984 - RNA, 19 nt, Artificial Sequence
  Description of Artificial Sequence: Synthetic oligonucleotide
  Sense strand starting at position 100 of SEQ ID NO: 318
ggcuucagugugcugcuua

SEQ ID NO: 27985 - RNA, 19 nt, Artificial Sequence
  Description of Artificial Sequence: Synthetic oligonucleotide
  Antisense strand to SEQ ID NO: 27984
uaagcagcacacugaagcc

SEQ ID NO: 27986 - RNA, 19 nt, Artificial Sequence
  Description of Artificial Sequence: Synthetic oligonucleotide
  Sense strand starting at position 61 of SEQ ID NO: 318
gcacuuaaauagccuugau

SEQ ID NO: 27987 - RNA, 19 nt, Artificial Sequence
  Description of Artificial Sequence: Synthetic oligonucleotide
  Antisense strand to SEQ ID NO: 27986
aucaaggcuauuuaagugc

SEQ ID NO: 27988 - RNA, 19 nt, Artificial Sequence
  Description of Artificial Sequence: Synthetic oligonucleotide
  Sense strand starting at position 16 of SEQ ID NO: 318
ccacauaggugacuaugua

SEQ ID NO: 27989 - RNA, 19 nt, Artificial Sequence
  Description of Artificial Sequence: Synthetic oligonucleotide
  Antisense strand to SEQ ID NO: 27988
uacauagucaccuaugugg

SEQ ID NO: 27990 - RNA, 19 nt, Artificial Sequence
  Description of Artificial Sequence: Synthetic oligonucleotide
  Sense strand starting at position 3866 of SEQ ID NO: 319
gguaguuguagacaucaga

SEQ ID NO: 27991 - RNA, 19 nt, Artificial Sequence
  Description of Artificial Sequence: Synthetic oligonucleotide
  Antisense strand to SEQ ID NO: 27990
ucugaugucuacaacuacc

SEQ ID NO: 27992 - RNA, 19 nt, Artificial Sequence
  Description of Artificial Sequence: Synthetic oligonucleotide
  Sense strand starting at position 3859 of SEQ ID NO: 319
acauuaugguaguuguaga

SEQ ID NO: 27993 - RNA, 19 nt, Artificial Sequence
  Description of Artificial Sequence: Synthetic oligonucleotide
  Antisense strand to SEQ ID NO: 27992
ucuacaacuaccauaaugu

SEQ ID NO: 27994 - RNA, 19 nt, Artificial Sequence
  Description of Artificial Sequence: Synthetic oligonucleotide
  Sense strand starting at position 3820 of SEQ ID NO: 319
uuggguauuuaguaaauug

SEQ ID NO: 27995 - RNA, 19 nt, Artificial Sequence
  Description of Artificial Sequence: Synthetic oligonucleotide
  Antisense strand to SEQ ID NO: 27994
caauuuacuaaauacccaa

SEQ ID NO: 27996 - RNA, 19 nt, Artificial Sequence
  Description of Artificial Sequence: Synthetic oligonucleotide
  Sense strand starting at position 3765 of SEQ ID NO: 319
ggaucacuguacuuaacua

SEQ ID NO: 27997 - RNA, 19 nt, Artificial Sequence
  Description of Artificial Sequence: Synthetic oligonucleotide
  Antisense strand to SEQ ID NO: 27996
uaguuaaguacagugaucc

SEQ ID NO: 27998 - RNA, 19 nt, Artificial Sequence
  Description of Artificial Sequence: Synthetic oligonucleotide
  Sense strand starting at position 3696 of SEQ ID NO: 319
cugggaaucuguucuaagg

SEQ ID NO: 27999 - RNA, 19 nt, Artificial Sequence
  Description of Artificial Sequence: Synthetic oligonucleotide
  Antisense strand to SEQ ID NO: 27998
ccuuagaacagauucccag

SEQ ID NO: 28000 - RNA, 19 nt, Artificial Sequence
  Description of Artificial Sequence: Synthetic oligonucleotide
  Sense strand starting at position 3609 of SEQ ID NO: 319
uuaguauauuccuuucgaa

SEQ ID NO: 28001 - RNA, 19 nt, Artificial Sequence
  Description of Artificial Sequence: Synthetic oligonucleotide
  Antisense strand to SEQ ID NO: 28000
uucgaaaggaauauacuaa

SEQ ID NO: 28002 - RNA, 19 nt, Artificial Sequence
  Description of Artificial Sequence: Synthetic oligonucleotide
  Sense strand starting at position 3608 of SEQ ID NO: 319
auuaguauauuccuuucga

SEQ ID NO: 28003 - RNA, 19 nt, Artificial Sequence
  Description of Artificial Sequence: Synthetic oligonucleotide
  Antisense strand to SEQ ID NO: 28002
ucgaaaggaauauacuaau

SEQ ID NO: 28004 - RNA, 19 nt, Artificial Sequence
  Description of Artificial Sequence: Synthetic oligonucleotide
  Sense strand starting at position 3564 of SEQ ID NO: 319
uguggagaaacggauucuu

SEQ ID NO: 28005 - RNA, 19 nt, Artificial Sequence
  Description of Artificial Sequence: Synthetic oligonucleotide
  Antisense strand to SEQ ID NO: 28004
aagaauccguuucuccaca

SEQ ID NO: 28006 - RNA, 19 nt, Artificial Sequence
  Description of Artificial Sequence: Synthetic oligonucleotide
  Sense strand starting at position 3557 of SEQ ID NO: 319
cgauuuguguggagaaacg

SEQ ID NO: 28007 - RNA, 19 nt, Artificial Sequence
  Description of Artificial Sequence: Synthetic oligonucleotide
  Antisense strand to SEQ ID NO: 28006
cguuucuccacacaaaucg

SEQ ID NO: 28008 - RNA, 19 nt, Artificial Sequence
  Description of Artificial Sequence: Synthetic oligonucleotide
  Sense strand starting at position 3526 of SEQ ID NO: 319
cgauuagcauucuuaauag

SEQ ID NO: 28009 - RNA, 19 nt, Artificial Sequence
  Description of Artificial Sequence: Synthetic oligonucleotide
  Antisense strand to SEQ ID NO: 28008
cuauuaagaaugcuaaucg

SEQ ID NO: 28010 - RNA, 19 nt, Artificial Sequence
  Description of Artificial Sequence: Synthetic oligonucleotide
  Sense strand starting at position 3386 of SEQ ID NO: 319
aaguaagaaugucuuaggu

SEQ ID NO: 28011 - RNA, 19 nt, Artificial Sequence
  Description of Artificial Sequence: Synthetic oligonucleotide
  Antisense strand to SEQ ID NO: 28010
accuaagacauucuuacuu

SEQ ID NO: 28012 - RNA, 19 nt, Artificial Sequence
  Description of Artificial Sequence: Synthetic oligonucleotide
  Sense strand starting at position 3335 of SEQ ID NO: 319
acugaauucugugccaauc

SEQ ID NO: 28013 - RNA, 19 nt, Artificial Sequence
  Description of Artificial Sequence: Synthetic oligonucleotide
  Antisense strand to SEQ ID NO: 28012
gauuggcacagaauucagu

SEQ ID NO: 28014 - RNA, 19 nt, Artificial Sequence
  Description of Artificial Sequence: Synthetic oligonucleotide
  Sense strand starting at position 3313 of SEQ ID NO: 319
uggcauuaagauugacugu

SEQ ID NO: 28015 - RNA, 19 nt, Artificial Sequence
  Description of Artificial Sequence: Synthetic oligonucleotide
  Antisense strand to SEQ ID NO: 28014
acagucaaucuuaaugcca

SEQ ID NO: 28016 - RNA, 19 nt, Artificial Sequence
  Description of Artificial Sequence: Synthetic oligonucleotide
  Sense strand starting at position 3307 of SEQ ID NO: 319
guguucuggcauuaagauu

SEQ ID NO: 28017 - RNA, 19 nt, Artificial Sequence
  Description of Artificial Sequence: Synthetic oligonucleotide
  Antisense strand to SEQ ID NO: 28016
aaucuuaaugccagaacac

SEQ ID NO: 28018 - RNA, 19 nt, Artificial Sequence
  Description of Artificial Sequence: Synthetic oligonucleotide
  Sense strand starting at position 3300 of SEQ ID NO: 319
cguucaaguguucuggcau

SEQ ID NO: 28019 - RNA, 19 nt, Artificial Sequence
  Description of Artificial Sequence: Synthetic oligonucleotide
  Antisense strand to SEQ ID NO: 28018
augccagaacacuugaacg

SEQ ID NO: 28020 - RNA, 19 nt, Artificial Sequence
  Description of Artificial Sequence: Synthetic oligonucleotide
  Sense strand starting at position 3265 of SEQ ID NO: 319
guuggugacaacuagcaaa

SEQ ID NO: 28021 - RNA, 19 nt, Artificial Sequence
  Description of Artificial Sequence: Synthetic oligonucleotide
  Antisense strand to SEQ ID NO: 28020
uuugcuaguugucaccaac

SEQ ID NO: 28022 - RNA, 19 nt, Artificial Sequence
  Description of Artificial Sequence: Synthetic oligonucleotide
  Sense strand starting at position 3259 of SEQ ID NO: 319
gcuacuguuggugacaacu

SEQ ID NO: 28023 - RNA, 19 nt, Artificial Sequence
  Description of Artificial Sequence: Synthetic oligonucleotide
  Antisense strand to SEQ ID NO: 28022
aguugucaccaacaguagc

SEQ ID NO: 28024 - RNA, 19 nt, Artificial Sequence
  Description of Artificial Sequence: Synthetic oligonucleotide
  Sense strand starting at position 3208 of SEQ ID NO: 319
uacgguuugcaguaagaac

SEQ ID NO: 28025 - RNA, 19 nt, Artificial Sequence
  Description of Artificial Sequence: Synthetic oligonucleotide
  Antisense strand to SEQ ID NO: 28024
guucuuacugcaaaccgua

SEQ ID NO: 28026 - RNA, 19 nt, Artificial Sequence
  Description of Artificial Sequence: Synthetic oligonucleotide
  Sense strand starting at position 3191 of SEQ ID NO: 319
cccucaaugugaucuugua

SEQ ID NO: 28027 - RNA, 19 nt, Artificial Sequence
  Description of Artificial Sequence: Synthetic oligonucleotide
  Antisense strand to SEQ ID NO: 28026
uacaagaucacauugaggg

SEQ ID NO: 28028 - RNA, 19 nt, Artificial Sequence
  Description of Artificial Sequence: Synthetic oligonucleotide
  Sense strand starting at position 3098 of SEQ ID NO: 319
gcagguaauaccggaaaca

SEQ ID NO: 28029 - RNA, 19 nt, Artificial Sequence
  Description of Artificial Sequence: Synthetic oligonucleotide
  Antisense strand to SEQ ID NO: 28028
uguuuccgguauuaccugc

SEQ ID NO: 28030 - RNA, 19 nt, Artificial Sequence
  Description of Artificial Sequence: Synthetic oligonucleotide
  Sense strand starting at position 3062 of SEQ ID NO: 319
ccucucuccggagaaagua

SEQ ID NO: 28031 - RNA, 19 nt, Artificial Sequence
  Description of Artificial Sequence: Synthetic oligonucleotide
  Antisense strand to SEQ ID NO: 28030
uacuuucuccggagagagg

SEQ ID NO: 28032 - RNA, 19 nt, Artificial Sequence
  Description of Artificial Sequence: Synthetic oligonucleotide
  Sense strand starting at position 2203 of SEQ ID NO: 319
uugauugggcgucacuaca

SEQ ID NO: 28033 - RNA, 19 nt, Artificial Sequence
  Description of Artificial Sequence: Synthetic oligonucleotide
  Antisense strand to SEQ ID NO: 28032
uguagugacgcccaaucaa

SEQ ID NO: 28034 - RNA, 19 nt, Artificial Sequence
  Description of Artificial Sequence: Synthetic oligonucleotide
  Sense strand starting at position 1001 of SEQ ID NO: 319
gcaagaguaggaugugaac

SEQ ID NO: 28035 - RNA, 19 nt, Artificial Sequence
  Description of Artificial Sequence: Synthetic oligonucleotide
  Antisense strand to SEQ ID NO: 28034
guucacauccuacucuugc

SEQ ID NO: 28036 - RNA, 19 nt, Artificial Sequence
  Description of Artificial Sequence: Synthetic oligonucleotide
  Sense strand starting at position 940 of SEQ ID NO: 319
uggagauccucacuugcca

SEQ ID NO: 28037 - RNA, 19 nt, Artificial Sequence
  Description of Artificial Sequence: Synthetic oligonucleotide
  Antisense strand to SEQ ID NO: 28036
uggcaagugaggaucucca

SEQ ID NO: 28038 - RNA, 19 nt, Artificial Sequence
  Description of Artificial Sequence: Synthetic oligonucleotide
  Sense strand starting at position 715 of SEQ ID NO: 319
gugucugcuuuccuauuua

SEQ ID NO: 28039 - RNA, 19 nt, Artificial Sequence
  Description of Artificial Sequence: Synthetic oligonucleotide
  Antisense strand to SEQ ID NO: 28038
uaaauaggaaagcagacac

SEQ ID NO: 28040 - RNA, 19 nt, Artificial Sequence
  Description of Artificial Sequence: Synthetic oligonucleotide
  Sense strand starting at position 714 of SEQ ID NO: 319
agugucugcuuuccuauuu

SEQ ID NO: 28041 - RNA, 19 nt, Artificial Sequence
  Description of Artificial Sequence: Synthetic oligonucleotide
  Antisense strand to SEQ ID NO: 28040
aaauaggaaagcagacacu

SEQ ID NO: 28042 - RNA, 19 nt, Artificial Sequence
  Description of Artificial Sequence: Synthetic oligonucleotide
  Sense strand starting at position 695 of SEQ ID NO: 319
guaugcaugaucuggaaga

SEQ ID NO: 28043 - RNA, 19 nt, Artificial Sequence
  Description of Artificial Sequence: Synthetic oligonucleotide
  Antisense strand to SEQ ID NO: 28042
ucuuccagaucaugcauac

SEQ ID NO: 28044 - RNA, 19 nt, Artificial Sequence
  Description of Artificial Sequence: Synthetic oligonucleotide
  Sense strand starting at position 693 of SEQ ID NO: 319
gaguaugcaugaucuggaa

SEQ ID NO: 28045 - RNA, 19 nt, Artificial Sequence
  Description of Artificial Sequence: Synthetic oligonucleotide
  Antisense strand to SEQ ID NO: 28044
uuccagaucaugcauacuc

SEQ ID NO: 28046 - RNA, 19 nt, Artificial Sequence
  Description of Artificial Sequence: Synthetic oligonucleotide
  Sense strand starting at position 686 of SEQ ID NO: 319
aguguaagaguaugcauga

SEQ ID NO: 28047 - RNA, 19 nt, Artificial Sequence
  Description of Artificial Sequence: Synthetic oligonucleotide
  Antisense strand to SEQ ID NO: 28046
ucaugcauacucuuacacu

SEQ ID NO: 28048 - RNA, 19 nt, Artificial Sequence
  Description of Artificial Sequence: Synthetic oligonucleotide
  Sense strand starting at position 648 of SEQ ID NO: 319
aaggguauuuaggaaauga

SEQ ID NO: 28049 - RNA, 19 nt, Artificial Sequence
  Description of Artificial Sequence: Synthetic oligonucleotide
  Antisense strand to SEQ ID NO: 28048
ucauuuccuaaauacccuu

SEQ ID NO: 28050 - RNA, 19 nt, Artificial Sequence
  Description of Artificial Sequence: Synthetic oligonucleotide
  Sense strand starting at position 638 of SEQ ID NO: 319
gggcaacucaaaggguauu

SEQ ID NO: 28051 - RNA, 19 nt, Artificial Sequence
  Description of Artificial Sequence: Synthetic oligonucleotide
  Antisense strand to SEQ ID NO: 28050
aauacccuuugaguugccc

SEQ ID NO: 28052 - RNA, 19 nt, Artificial Sequence
  Description of Artificial Sequence: Synthetic oligonucleotide
  Sense strand starting at position 613 of SEQ ID NO: 319
uccaguugucuccauaaga

SEQ ID NO: 28053 - RNA, 19 nt, Artificial Sequence
  Description of Artificial Sequence: Synthetic oligonucleotide
  Antisense strand to SEQ ID NO: 28052
ucuuauggagacaacugga

SEQ ID NO: 28054 - RNA, 19 nt, Artificial Sequence
  Description of Artificial Sequence: Synthetic oligonucleotide
  Sense strand starting at position 564 of SEQ ID NO: 319
agaacaagucaguguagac

SEQ ID NO: 28055 - RNA, 19 nt, Artificial Sequence
  Description of Artificial Sequence: Synthetic oligonucleotide
  Antisense strand to SEQ ID NO: 28054
gucuacacugacuuguucu

SEQ ID NO: 28056 - RNA, 19 nt, Artificial Sequence
  Description of Artificial Sequence: Synthetic oligonucleotide
  Sense strand starting at position 563 of SEQ ID NO: 319
gagaacaagucaguguaga

SEQ ID NO: 28057 - RNA, 19 nt, Artificial Sequence
  Description of Artificial Sequence: Synthetic oligonucleotide
  Antisense strand to SEQ ID NO: 28056
ucuacacugacuuguucuc

SEQ ID NO: 28058 - RNA, 19 nt, Artificial Sequence
  Description of Artificial Sequence: Synthetic oligonucleotide
  Sense strand starting at position 371 of SEQ ID NO: 319
gugucaacugaugaagguu

SEQ ID NO: 28059 - RNA, 19 nt, Artificial Sequence
  Description of Artificial Sequence: Synthetic oligonucleotide
  Antisense strand to SEQ ID NO: 28058
aaccuucaucaguugacac

SEQ ID NO: 28060 - RNA, 19 nt, Artificial Sequence
  Description of Artificial Sequence: Synthetic oligonucleotide
  Sense strand starting at position 367 of SEQ ID NO: 319
gguagugucaacugaugaa

SEQ ID NO: 28061 - RNA, 19 nt, Artificial Sequence
  Description of Artificial Sequence: Synthetic oligonucleotide
  Antisense strand to SEQ ID NO: 28060
uucaucaguugacacuacc

SEQ ID NO: 28062 - RNA, 19 nt, Artificial Sequence
  Description of Artificial Sequence: Synthetic oligonucleotide
  Sense strand starting at position 287 of SEQ ID NO: 319
gacaaagucugguucucac

SEQ ID NO: 28063 - RNA, 19 nt, Artificial Sequence
  Description of Artificial Sequence: Synthetic oligonucleotide
  Antisense strand to SEQ ID NO: 28062
gugagaaccagacuuuguc

SEQ ID NO: 28064 - RNA, 19 nt, Artificial Sequence
  Description of Artificial Sequence: Synthetic oligonucleotide
  Sense strand starting at position 266 of SEQ ID NO: 319
aggacucuugaguguggga

SEQ ID NO: 28065 - RNA, 19 nt, Artificial Sequence
  Description of Artificial Sequence: Synthetic oligonucleotide
  Antisense strand to SEQ ID NO: 28064
ucccacacucaagaguccu

SEQ ID NO: 28066 - RNA, 19 nt, Artificial Sequence
  Description of Artificial Sequence: Synthetic oligonucleotide
  Sense strand starting at position 212 of SEQ ID NO: 319
ggauaugaguucucucaaa

SEQ ID NO: 28067 - RNA, 19 nt, Artificial Sequence
  Description of Artificial Sequence: Synthetic oligonucleotide
  Antisense strand to SEQ ID NO: 28066
uuugagagaacucauaucc

SEQ ID NO: 28068 - RNA, 19 nt, Artificial Sequence
  Description of Artificial Sequence: Synthetic oligonucleotide
  Sense strand starting at position 162 of SEQ ID NO: 319
guaacaggcucacuaaaua

SEQ ID NO: 28069 - RNA, 19 nt, Artificial Sequence
  Description of Artificial Sequence: Synthetic oligonucleotide
  Antisense strand to SEQ ID NO: 28068
uauuuagugagccuguuac

SEQ ID NO: 28070 - RNA, 19 nt, Artificial Sequence
  Description of Artificial Sequence: Synthetic oligonucleotide
  Sense strand starting at position 3883 of SEQ ID NO: 320
uuaagaauauccgucacau

SEQ ID NO: 28071 - RNA, 19 nt, Artificial Sequence
  Description of Artificial Sequence: Synthetic oligonucleotide
  Antisense strand to SEQ ID NO: 28070
augugacggauauucuuaa

SEQ ID NO: 28072 - RNA, 19 nt, Artificial Sequence
  Description of Artificial Sequence: Synthetic oligonucleotide
  Sense strand starting at position 3731 of SEQ ID NO: 320
gcaguaauguaugugaaac

SEQ ID NO: 28073 - RNA, 19 nt, Artificial Sequence
  Description of Artificial Sequence: Synthetic oligonucleotide
  Antisense strand to SEQ ID NO: 28072
guuucacauacauuacugc

SEQ ID NO: 28074 - RNA, 19 nt, Artificial Sequence
  Description of Artificial Sequence: Synthetic oligonucleotide
  Sense strand starting at position 3730 of SEQ ID NO: 320
agcaguaauguaugugaaa

SEQ ID NO: 28075 - RNA, 19 nt, Artificial Sequence
  Description of Artificial Sequence: Synthetic oligonucleotide
  Antisense strand to SEQ ID NO: 28074
uuucacauacauuacugcu

SEQ ID NO: 28076 - RNA, 19 nt, Artificial Sequence
  Description of Artificial Sequence: Synthetic oligonucleotide
  Sense strand starting at position 3728 of SEQ ID NO: 320
gaagcaguaauguauguga

SEQ ID NO: 28077 - RNA, 19 nt, Artificial Sequence
  Description of Artificial Sequence: Synthetic oligonucleotide
  Antisense strand to SEQ ID NO: 28076
ucacauacauuacugcuuc

SEQ ID NO: 28078 - RNA, 19 nt, Artificial Sequence
  Description of Artificial Sequence: Synthetic oligonucleotide
  Sense strand starting at position 3673 of SEQ ID NO: 320
ugaagaaaguuuccucauc

SEQ ID NO: 28079 - RNA, 19 nt, Artificial Sequence
  Description of Artificial Sequence: Synthetic oligonucleotide
  Antisense strand to SEQ ID NO: 28078
gaugaggaaacuuucuuca

SEQ ID NO: 28080 - RNA, 19 nt, Artificial Sequence
  Description of Artificial Sequence: Synthetic oligonucleotide
  Sense strand starting at position 3549 of SEQ ID NO: 320
ggacauaaucuuugacucu

SEQ ID NO: 28081 - RNA, 19 nt, Artificial Sequence
  Description of Artificial Sequence: Synthetic oligonucleotide
  Antisense strand to SEQ ID NO: 28080
agagucaaagauuaugucc

SEQ ID NO: 28082 - RNA, 19 nt, Artificial Sequence
  Description of Artificial Sequence: Synthetic oligonucleotide
  Sense strand starting at position 3381 of SEQ ID NO: 320
gguuacuuuggacggguua

SEQ ID NO: 28083 - RNA, 19 nt, Artificial Sequence
  Description of Artificial Sequence: Synthetic oligonucleotide
  Antisense strand to SEQ ID NO: 28082
uaacccguccaaaguaacc

SEQ ID NO: 28084 - RNA, 19 nt, Artificial Sequence
  Description of Artificial Sequence: Synthetic oligonucleotide
  Sense strand starting at position 3367 of SEQ ID NO: 320
ucagacuuuggucagguua

SEQ ID NO: 28085 - RNA, 19 nt, Artificial Sequence
  Description of Artificial Sequence: Synthetic oligonucleotide
  Antisense strand to SEQ ID NO: 28084
uaaccugaccaaagucuga

SEQ ID NO: 28086 - RNA, 19 nt, Artificial Sequence
  Description of Artificial Sequence: Synthetic oligonucleotide
  Sense strand starting at position 3366 of SEQ ID NO: 320
gucagacuuuggucagguu

SEQ ID NO: 28087 - RNA, 19 nt, Artificial Sequence
  Description of Artificial Sequence: Synthetic oligonucleotide
  Antisense strand to SEQ ID NO: 28086
aaccugaccaaagucugac

SEQ ID NO: 28088 - RNA, 19 nt, Artificial Sequence
  Description of Artificial Sequence: Synthetic oligonucleotide
  Sense strand starting at position 3304 of SEQ ID NO: 320
ggugaaugccucuggaucu

SEQ ID NO: 28089 - RNA, 19 nt, Artificial Sequence
  Description of Artificial Sequence: Synthetic oligonucleotide
  Antisense strand to SEQ ID NO: 28088
agauccagaggcauucacc

SEQ ID NO: 28090 - RNA, 19 nt, Artificial Sequence
  Description of Artificial Sequence: Synthetic oligonucleotide
  Sense strand starting at position 3187 of SEQ ID NO: 320
gucagaaaguaacuguuga

SEQ ID NO: 28091 - RNA, 19 nt, Artificial Sequence
  Description of Artificial Sequence: Synthetic oligonucleotide
  Antisense strand to SEQ ID NO: 28090
ucaacaguuacuuucugac

SEQ ID NO: 28092 - RNA, 19 nt, Artificial Sequence
  Description of Artificial Sequence: Synthetic oligonucleotide
  Sense strand starting at position 3174 of SEQ ID NO: 320
auaacuugccaaggucaga

SEQ ID NO: 28093 - RNA, 19 nt, Artificial Sequence
  Description of Artificial Sequence: Synthetic oligonucleotide
  Antisense strand to SEQ ID NO: 28092
ucugaccuuggcaaguuau

SEQ ID NO: 28094 - RNA, 19 nt, Artificial Sequence
  Description of Artificial Sequence: Synthetic oligonucleotide
  Sense strand starting at position 2991 of SEQ ID NO: 320
cguuaugugccagagucaa

SEQ ID NO: 28095 - RNA, 19 nt, Artificial Sequence
  Description of Artificial Sequence: Synthetic oligonucleotide
  Antisense strand to SEQ ID NO: 28094
uugacucuggcacauaacg

SEQ ID NO: 28096 - RNA, 19 nt, Artificial Sequence
  Description of Artificial Sequence: Synthetic oligonucleotide
  Sense strand starting at position 2988 of SEQ ID NO: 320
aggcguuaugugccagagu

SEQ ID NO: 28097 - RNA, 19 nt, Artificial Sequence
  Description of Artificial Sequence: Synthetic oligonucleotide
  Antisense strand to SEQ ID NO: 28096
acucuggcacauaacgccu

SEQ ID NO: 28098 - RNA, 19 nt, Artificial Sequence
  Description of Artificial Sequence: Synthetic oligonucleotide
  Sense strand starting at position 2878 of SEQ ID NO: 320
cggucauuauccucccaca

SEQ ID NO: 28099 - RNA, 19 nt, Artificial Sequence
  Description of Artificial Sequence: Synthetic oligonucleotide
  Antisense strand to SEQ ID NO: 28098
ugugggaggauaaugaccg

SEQ ID NO: 28100 - RNA, 19 nt, Artificial Sequence
  Description of Artificial Sequence: Synthetic oligonucleotide
  Sense strand starting at position 2843 of SEQ ID NO: 320
cgaucuuuguucccucaag

SEQ ID NO: 28101 - RNA, 19 nt, Artificial Sequence
  Description of Artificial Sequence: Synthetic oligonucleotide
  Antisense strand to SEQ ID NO: 28100
cuugagggaacaaagaucg

SEQ ID NO: 28102 - RNA, 19 nt, Artificial Sequence
  Description of Artificial Sequence: Synthetic oligonucleotide
  Sense strand starting at position 2561 of SEQ ID NO: 320
guguucugugaccauagau

SEQ ID NO: 28103 - RNA, 19 nt, Artificial Sequence
  Description of Artificial Sequence: Synthetic oligonucleotide
  Antisense strand to SEQ ID NO: 28102
aucuauggucacagaacac

SEQ ID NO: 28104 - RNA, 19 nt, Artificial Sequence
  Description of Artificial Sequence: Synthetic oligonucleotide
  Sense strand starting at position 2560 of SEQ ID NO: 320
uguguucugugaccauaga

SEQ ID NO: 28105 - RNA, 19 nt, Artificial Sequence
  Description of Artificial Sequence: Synthetic oligonucleotide
  Antisense strand to SEQ ID NO: 28104
ucuauggucacagaacaca

SEQ ID NO: 28106 - RNA, 19 nt, Artificial Sequence
  Description of Artificial Sequence: Synthetic oligonucleotide
  Sense strand starting at position 2401 of SEQ ID NO: 320
gcaauuagucuggacauug

SEQ ID NO: 28107 - RNA, 19 nt, Artificial Sequence
  Description of Artificial Sequence: Synthetic oligonucleotide
  Antisense strand to SEQ ID NO: 28106
caauguccagacuaauugc

SEQ ID NO: 28108 - RNA, 19 nt, Artificial Sequence
  Description of Artificial Sequence: Synthetic oligonucleotide
  Sense strand starting at position 2399 of SEQ ID NO: 320
aggcaauuagucuggacau

SEQ ID NO: 28109 - RNA, 19 nt, Artificial Sequence
  Description of Artificial Sequence: Synthetic oligonucleotide
  Antisense strand to SEQ ID NO: 28108
auguccagacuaauugccu

SEQ ID NO: 28110 - RNA, 19 nt, Artificial Sequence
  Description of Artificial Sequence: Synthetic oligonucleotide
  Sense strand starting at position 2207 of SEQ ID NO: 320
cugucaguuuggucucaau

SEQ ID NO: 28111 - RNA, 19 nt, Artificial Sequence
  Description of Artificial Sequence: Synthetic oligonucleotide
  Antisense strand to SEQ ID NO: 28110
auugagaccaaacugacag

SEQ ID NO: 28112 - RNA, 19 nt, Artificial Sequence
  Description of Artificial Sequence: Synthetic oligonucleotide
  Sense strand starting at position 2194 of SEQ ID NO: 320
gugaccaguuccucuguca

SEQ ID NO: 28113 - RNA, 19 nt, Artificial Sequence
  Description of Artificial Sequence: Synthetic oligonucleotide
  Antisense strand to SEQ ID NO: 28112
ugacagaggaacuggucac

SEQ ID NO: 28114 - RNA, 19 nt, Artificial Sequence
  Description of Artificial Sequence: Synthetic oligonucleotide
  Sense strand starting at position 2165 of SEQ ID NO: 320
cuaagcuccucucuggaaa

SEQ ID NO: 28115 - RNA, 19 nt, Artificial Sequence
  Description of Artificial Sequence: Synthetic oligonucleotide
  Antisense strand to SEQ ID NO: 28114
uuuccagagaggagcuuag

SEQ ID NO: 28116 - RNA, 19 nt, Artificial Sequence
  Description of Artificial Sequence: Synthetic oligonucleotide
  Sense strand starting at position 2151 of SEQ ID NO: 320
gcagaagucccuggcuaag

SEQ ID NO: 28117 - RNA, 19 nt, Artificial Sequence
  Description of Artificial Sequence: Synthetic oligonucleotide
  Antisense strand to SEQ ID NO: 28116
cuuagccagggacuucugc

SEQ ID NO: 28118 - RNA, 19 nt, Artificial Sequence
  Description of Artificial Sequence: Synthetic oligonucleotide
  Sense strand starting at position 2150 of SEQ ID NO: 320
ggcagaagucccuggcuaa

SEQ ID NO: 28119 - RNA, 19 nt, Artificial Sequence
  Description of Artificial Sequence: Synthetic oligonucleotide
  Antisense strand to SEQ ID NO: 28118
uuagccagggacuucugcc

SEQ ID NO: 28120 - RNA, 19 nt, Artificial Sequence
  Description of Artificial Sequence: Synthetic oligonucleotide
  Sense strand starting at position 1507 of SEQ ID NO: 320
gucagagcaccucaggaau

SEQ ID NO: 28121 - RNA, 19 nt, Artificial Sequence
  Description of Artificial Sequence: Synthetic oligonucleotide
  Antisense strand to SEQ ID NO: 28120
auuccugaggugcucugac

SEQ ID NO: 28122 - RNA, 19 nt, Artificial Sequence
  Description of Artificial Sequence: Synthetic oligonucleotide
  Sense strand starting at position 1416 of SEQ ID NO: 320
gccucuucucuagggauca

SEQ ID NO: 28123 - RNA, 19 nt, Artificial Sequence
  Description of Artificial Sequence: Synthetic oligonucleotide
  Antisense strand to SEQ ID NO: 28122
ugaucccuagagaagaggc

SEQ ID NO: 28124 - RNA, 19 nt, Artificial Sequence
  Description of Artificial Sequence: Synthetic oligonucleotide
  Sense strand starting at position 1414 of SEQ ID NO: 320
uagccucuucucuagggau

SEQ ID NO: 28125 - RNA, 19 nt, Artificial Sequence
  Description of Artificial Sequence: Synthetic oligonucleotide
  Antisense strand to SEQ ID NO: 28124
aucccuagagaagaggcua

SEQ ID NO: 28126 - RNA, 19 nt, Artificial Sequence
  Description of Artificial Sequence: Synthetic oligonucleotide
  Sense strand starting at position 1365 of SEQ ID NO: 320
ccaggaucaugauuccgau

SEQ ID NO: 28127 - RNA, 19 nt, Artificial Sequence
  Description of Artificial Sequence: Synthetic oligonucleotide
  Antisense strand to SEQ ID NO: 28126
aucggaaucaugauccugg

SEQ ID NO: 28128 - RNA, 19 nt, Artificial Sequence
  Description of Artificial Sequence: Synthetic oligonucleotide
  Sense strand starting at position 1213 of SEQ ID NO: 320
ggcucaauuugggaggaga

SEQ ID NO: 28129 - RNA, 19 nt, Artificial Sequence
  Description of Artificial Sequence: Synthetic oligonucleotide
  Antisense strand to SEQ ID NO: 28128
ucuccucccaaauugagcc

SEQ ID NO: 28130 - RNA, 19 nt, Artificial Sequence
  Description of Artificial Sequence: Synthetic oligonucleotide
  Sense strand starting at position 1145 of SEQ ID NO: 320
aggauaucugccuguaaau

SEQ ID NO: 28131 - RNA, 19 nt, Artificial Sequence
  Description of Artificial Sequence: Synthetic oligonucleotide
  Antisense strand to SEQ ID NO: 28130
auuuacaggcagauauccu

SEQ ID NO: 28132 - RNA, 19 nt, Artificial Sequence
  Description of Artificial Sequence: Synthetic oligonucleotide
  Sense strand starting at position 1144 of SEQ ID NO: 320
gaggauaucugccuguaaa

SEQ ID NO: 28133 - RNA, 19 nt, Artificial Sequence
  Description of Artificial Sequence: Synthetic oligonucleotide
  Antisense strand to SEQ ID NO: 28132
uuuacaggcagauauccuc

SEQ ID NO: 28134 - RNA, 19 nt, Artificial Sequence
  Description of Artificial Sequence: Synthetic oligonucleotide
  Sense strand starting at position 1054 of SEQ ID NO: 320
accugagccgucugauuuc

SEQ ID NO: 28135 - RNA, 19 nt, Artificial Sequence
  Description of Artificial Sequence: Synthetic oligonucleotide
  Antisense strand to SEQ ID NO: 28134
gaaaucagacggcucaggu

SEQ ID NO: 28136 - RNA, 19 nt, Artificial Sequence
  Description of Artificial Sequence: Synthetic oligonucleotide
  Sense strand starting at position 654 of SEQ ID NO: 320
ugucucaaauguucucauu

SEQ ID NO: 28137 - RNA, 19 nt, Artificial Sequence
  Description of Artificial Sequence: Synthetic oligonucleotide
  Antisense strand to SEQ ID NO: 28136
aaugagaacauuugagaca

SEQ ID NO: 28138 - RNA, 19 nt, Artificial Sequence
  Description of Artificial Sequence: Synthetic oligonucleotide
  Sense strand starting at position 565 of SEQ ID NO: 320
aaugauaaaugugcugaua

SEQ ID NO: 28139 - RNA, 19 nt, Artificial Sequence
  Description of Artificial Sequence: Synthetic oligonucleotide
  Antisense strand to SEQ ID NO: 28138
uaucagcacauuuaucauu

SEQ ID NO: 28140 - RNA, 19 nt, Artificial Sequence
  Description of Artificial Sequence: Synthetic oligonucleotide
  Sense strand starting at position 254 of SEQ ID NO: 320
ugugcuaugcacuaugaca

SEQ ID NO: 28141 - RNA, 19 nt, Artificial Sequence
  Description of Artificial Sequence: Synthetic oligonucleotide
  Antisense strand to SEQ ID NO: 28140
ugucauagugcauagcaca

SEQ ID NO: 28142 - RNA, 19 nt, Artificial Sequence
  Description of Artificial Sequence: Synthetic oligonucleotide
  Sense strand starting at position 222 of SEQ ID NO: 320
ucagguauuucuccacugu

SEQ ID NO: 28143 - RNA, 19 nt, Artificial Sequence
  Description of Artificial Sequence: Synthetic oligonucleotide
  Antisense strand to SEQ ID NO: 28142
acaguggagaaauaccuga

SEQ ID NO: 28144 - RNA, 19 nt, Artificial Sequence
  Description of Artificial Sequence: Synthetic oligonucleotide
  Sense strand starting at position 121 of SEQ ID NO: 320
uagucucugccuggaaauc

SEQ ID NO: 28145 - RNA, 19 nt, Artificial Sequence
  Description of Artificial Sequence: Synthetic oligonucleotide
  Antisense strand to SEQ ID NO: 28144
gauuuccaggcagagacua

SEQ ID NO: 28146 - RNA, 19 nt, Artificial Sequence
  Description of Artificial Sequence: Synthetic oligonucleotide
  Sense strand starting at position 120 of SEQ ID NO: 320
guagucucugccuggaaau

SEQ ID NO: 28147 - RNA, 19 nt, Artificial Sequence
  Description of Artificial Sequence: Synthetic oligonucleotide
  Antisense strand to SEQ ID NO: 28146
auuuccaggcagagacuac

SEQ ID NO: 28148 - RNA, 19 nt, Artificial Sequence
  Description of Artificial Sequence: Synthetic oligonucleotide
  Sense strand starting at position 119 of SEQ ID NO: 320
aguagucucugccuggaaa

SEQ ID NO: 28149 - RNA, 19 nt, Artificial Sequence
  Description of Artificial Sequence: Synthetic oligonucleotide
  Antisense strand to SEQ ID NO: 28148
uuuccaggcagagacuacu

SEQ ID NO: 28150 - RNA, 19 nt, Artificial Sequence
  Description of Artificial Sequence: Synthetic oligonucleotide
  Sense strand starting at position 3931 of SEQ ID NO: 321
ucaggaggcucacuaaagu

SEQ ID NO: 28151 - RNA, 19 nt, Artificial Sequence
  Description of Artificial Sequence: Synthetic oligonucleotide
  Antisense strand to SEQ ID NO: 28150
acuuuagugagccuccuga

SEQ ID NO: 28152 - RNA, 19 nt, Artificial Sequence
  Description of Artificial Sequence: Synthetic oligonucleotide
  Sense strand starting at position 3744 of SEQ ID NO: 321
ccgagucuugcugaagaca

SEQ ID NO: 28153 - RNA, 19 nt, Artificial Sequence
  Description of Artificial Sequence: Synthetic oligonucleotide
  Antisense strand to SEQ ID NO: 28152
ugucuucagcaagacucgg

SEQ ID NO: 28154 - RNA, 19 nt, Artificial Sequence
  Description of Artificial Sequence: Synthetic oligonucleotide
  Sense strand starting at position 3742 of SEQ ID NO: 321
aaccgagucuugcugaaga

SEQ ID NO: 28155 - RNA, 19 nt, Artificial Sequence
  Description of Artificial Sequence: Synthetic oligonucleotide
  Antisense strand to SEQ ID NO: 28154
ucuucagcaagacucgguu

SEQ ID NO: 28156 - RNA, 19 nt, Artificial Sequence
  Description of Artificial Sequence: Synthetic oligonucleotide
  Sense strand starting at position 3648 of SEQ ID NO: 321
gggaaugcauagccaagaa

SEQ ID NO: 28157 - RNA, 19 nt, Artificial Sequence
  Description of Artificial Sequence: Synthetic oligonucleotide
  Antisense strand to SEQ ID NO: 28156
uucuuggcuaugcauuccc

SEQ ID NO: 28158 - RNA, 19 nt, Artificial Sequence
  Description of Artificial Sequence: Synthetic oligonucleotide
  Sense strand starting at position 3616 of SEQ ID NO: 321
ugggcucaacucggaauau

SEQ ID NO: 28159 - RNA, 19 nt, Artificial Sequence
  Description of Artificial Sequence: Synthetic oligonucleotide
  Antisense strand to SEQ ID NO: 28158
auauuccgaguugagccca

SEQ ID NO: 28160 - RNA, 19 nt, Artificial Sequence
  Description of Artificial Sequence: Synthetic oligonucleotide
  Sense strand starting at position 3607 of SEQ ID NO: 321
gauagagauugggcucaac

SEQ ID NO: 28161 - RNA, 19 nt, Artificial Sequence
  Description of Artificial Sequence: Synthetic oligonucleotide
  Antisense strand to SEQ ID NO: 28160
guugagcccaaucucuauc

SEQ ID NO: 28162 - RNA, 19 nt, Artificial Sequence
  Description of Artificial Sequence: Synthetic oligonucleotide
  Sense strand starting at position 3534 of SEQ ID NO: 321
uaugauuaggaaggcuuua

SEQ ID NO: 28163 - RNA, 19 nt, Artificial Sequence
  Description of Artificial Sequence: Synthetic oligonucleotide
  Antisense strand to SEQ ID NO: 28162
uaaagccuuccuaaucaua

SEQ ID NO: 28164 - RNA, 19 nt, Artificial Sequence
  Description of Artificial Sequence: Synthetic oligonucleotide
  Sense strand starting at position 3524 of SEQ ID NO: 321
cuuguugagguaugauuag

SEQ ID NO: 28165 - RNA, 19 nt, Artificial Sequence
  Description of Artificial Sequence: Synthetic oligonucleotide
  Antisense strand to SEQ ID NO: 28164
cuaaucauaccucaacaag

SEQ ID NO: 28166 - RNA, 19 nt, Artificial Sequence
  Description of Artificial Sequence: Synthetic oligonucleotide
  Sense strand starting at position 3478 of SEQ ID NO: 321
uaaugugagauugguguca

SEQ ID NO: 28167 - RNA, 19 nt, Artificial Sequence
  Description of Artificial Sequence: Synthetic oligonucleotide
  Antisense strand to SEQ ID NO: 28166
ugacaccaaucucacauua

SEQ ID NO: 28168 - RNA, 19 nt, Artificial Sequence
  Description of Artificial Sequence: Synthetic oligonucleotide
  Sense strand starting at position 3471 of SEQ ID NO: 321
gugguaguaaugugagauu

SEQ ID NO: 28169 - RNA, 19 nt, Artificial Sequence
  Description of Artificial Sequence: Synthetic oligonucleotide
  Antisense strand to SEQ ID NO: 28168
aaucucacauuacuaccac

SEQ ID NO: 28170 - RNA, 19 nt, Artificial Sequence
  Description of Artificial Sequence: Synthetic oligonucleotide
  Sense strand starting at position 3405 of SEQ ID NO: 321
ugagcauucuauguaggga

SEQ ID NO: 28171 - RNA, 19 nt, Artificial Sequence
  Description of Artificial Sequence: Synthetic oligonucleotide
  Antisense strand to SEQ ID NO: 28170
ucccuacauagaaugcuca

SEQ ID NO: 28172 - RNA, 19 nt, Artificial Sequence
  Description of Artificial Sequence: Synthetic oligonucleotide
  Sense strand starting at position 3110 of SEQ ID NO: 321
gaaagauaagaauguugca

SEQ ID NO: 28173 - RNA, 19 nt, Artificial Sequence
  Description of Artificial Sequence: Synthetic oligonucleotide
  Antisense strand to SEQ ID NO: 28172
ugcaacauucuuaucuuuc

SEQ ID NO: 28174 - RNA, 19 nt, Artificial Sequence
  Description of Artificial Sequence: Synthetic oligonucleotide
  Sense strand starting at position 3107 of SEQ ID NO: 321
ggagaaagauaagaauguu

SEQ ID NO: 28175 - RNA, 19 nt, Artificial Sequence
  Description of Artificial Sequence: Synthetic oligonucleotide
  Antisense strand to SEQ ID NO: 28174
aacauucuuaucuuucucc

SEQ ID NO: 28176 - RNA, 19 nt, Artificial Sequence
  Description of Artificial Sequence: Synthetic oligonucleotide
  Sense strand starting at position 3083 of SEQ ID NO: 321
ggguuuaaugcuugaauuc

SEQ ID NO: 28177 - RNA, 19 nt, Artificial Sequence
  Description of Artificial Sequence: Synthetic oligonucleotide
  Antisense strand to SEQ ID NO: 28176
gaauucaagcauuaaaccc

SEQ ID NO: 28178 - RNA, 19 nt, Artificial Sequence
  Description of Artificial Sequence: Synthetic oligonucleotide
  Sense strand starting at position 3082 of SEQ ID NO: 321
aggguuuaaugcuugaauu

SEQ ID NO: 28179 - RNA, 19 nt, Artificial Sequence
  Description of Artificial Sequence: Synthetic oligonucleotide
  Antisense strand to SEQ ID NO: 28178
aauucaagcauuaaacccu

SEQ ID NO: 28180 - RNA, 19 nt, Artificial Sequence
  Description of Artificial Sequence: Synthetic oligonucleotide
  Sense strand starting at position 3040 of SEQ ID NO: 321
aguguacccuccuuuacaa

SEQ ID NO: 28181 - RNA, 19 nt, Artificial Sequence
  Description of Artificial Sequence: Synthetic oligonucleotide
  Antisense strand to SEQ ID NO: 28180
uuguaaaggaggguacacu

SEQ ID NO: 28182 - RNA, 19 nt, Artificial Sequence
  Description of Artificial Sequence: Synthetic oligonucleotide
  Sense strand starting at position 2909 of SEQ ID NO: 321
gauuuagggugagggaaau

SEQ ID NO: 28183 - RNA, 19 nt, Artificial Sequence
  Description of Artificial Sequence: Synthetic oligonucleotide
  Antisense strand to SEQ ID NO: 28182
auuucccucacccuaaauc

SEQ ID NO: 28184 - RNA, 19 nt, Artificial Sequence
  Description of Artificial Sequence: Synthetic oligonucleotide
  Sense strand starting at position 2836 of SEQ ID NO: 321
uguugaacgaagggucaua

SEQ ID NO: 28185 - RNA, 19 nt, Artificial Sequence
  Description of Artificial Sequence: Synthetic oligonucleotide
  Antisense strand to SEQ ID NO: 28184
uaugacccuucguucaaca

SEQ ID NO: 28186 - RNA, 19 nt, Artificial Sequence
  Description of Artificial Sequence: Synthetic oligonucleotide
  Sense strand starting at position 2825 of SEQ ID NO: 321
ugguaaagguuuguugaac

SEQ ID NO: 28187 - RNA, 19 nt, Artificial Sequence
  Description of Artificial Sequence: Synthetic oligonucleotide
  Antisense strand to SEQ ID NO: 28186
guucaacaaaccuuuacca

SEQ ID NO: 28188 - RNA, 19 nt, Artificial Sequence
  Description of Artificial Sequence: Synthetic oligonucleotide
  Sense strand starting at position 2824 of SEQ ID NO: 321
uugguaaagguuuguugaa

SEQ ID NO: 28189 - RNA, 19 nt, Artificial Sequence
  Description of Artificial Sequence: Synthetic oligonucleotide
  Antisense strand to SEQ ID NO: 28188
uucaacaaaccuuuaccaa

SEQ ID NO: 28190 - RNA, 19 nt, Artificial Sequence
  Description of Artificial Sequence: Synthetic oligonucleotide
  Sense strand starting at position 2697 of SEQ ID NO: 321
guaucaccuggugauacaa

SEQ ID NO: 28191 - RNA, 19 nt, Artificial Sequence
  Description of Artificial Sequence: Synthetic oligonucleotide
  Antisense strand to SEQ ID NO: 28190
uuguaucaccaggugauac

SEQ ID NO: 28192 - RNA, 19 nt, Artificial Sequence
  Description of Artificial Sequence: Synthetic oligonucleotide
  Sense strand starting at position 2675 of SEQ ID NO: 321
uauguaacuucugugagag

SEQ ID NO: 28193 - RNA, 19 nt, Artificial Sequence
  Description of Artificial Sequence: Synthetic oligonucleotide
  Antisense strand to SEQ ID NO: 28192
cucucacagaaguuacaua

SEQ ID NO: 28194 - RNA, 19 nt, Artificial Sequence
  Description of Artificial Sequence: Synthetic oligonucleotide
  Sense strand starting at position 2594 of SEQ ID NO: 321
acauguauucugcaaugug

SEQ ID NO: 28195 - RNA, 19 nt, Artificial Sequence
  Description of Artificial Sequence: Synthetic oligonucleotide
  Antisense strand to SEQ ID NO: 28194
cacauugcagaauacaugu

SEQ ID NO: 28196 - RNA, 19 nt, Artificial Sequence
  Description of Artificial Sequence: Synthetic oligonucleotide
  Sense strand starting at position 2580 of SEQ ID NO: 321
auaagugcucucuaacaug

SEQ ID NO: 28197 - RNA, 19 nt, Artificial Sequence
  Description of Artificial Sequence: Synthetic oligonucleotide
  Antisense strand to SEQ ID NO: 28196
cauguuagagagcacuuau

SEQ ID NO: 28198 - RNA, 19 nt, Artificial Sequence
  Description of Artificial Sequence: Synthetic oligonucleotide
  Sense strand starting at position 2576 of SEQ ID NO: 321
agacauaagugcucucuaa

SEQ ID NO: 28199 - RNA, 19 nt, Artificial Sequence
  Description of Artificial Sequence: Synthetic oligonucleotide
  Antisense strand to SEQ ID NO: 28198
uuagagagcacuuaugucu

SEQ ID NO: 28200 - RNA, 19 nt, Artificial Sequence
  Description of Artificial Sequence: Synthetic oligonucleotide
  Sense strand starting at position 2540 of SEQ ID NO: 321
cagucuauggacugaucaa

SEQ ID NO: 28201 - RNA, 19 nt, Artificial Sequence
  Description of Artificial Sequence: Synthetic oligonucleotide
  Antisense strand to SEQ ID NO: 28200
uugaucaguccauagacug

SEQ ID NO: 28202 - RNA, 19 nt, Artificial Sequence
  Description of Artificial Sequence: Synthetic oligonucleotide
  Sense strand starting at position 2499 of SEQ ID NO: 321
cucagaagggagugucuua

SEQ ID NO: 28203 - RNA, 19 nt, Artificial Sequence
  Description of Artificial Sequence: Synthetic oligonucleotide
  Antisense strand to SEQ ID NO: 28202
uaagacacucccuucugag

SEQ ID NO: 28204 - RNA, 19 nt, Artificial Sequence
  Description of Artificial Sequence: Synthetic oligonucleotide
  Sense strand starting at position 1750 of SEQ ID NO: 321
aguauugacucaccauguu

SEQ ID NO: 28205 - RNA, 19 nt, Artificial Sequence
  Description of Artificial Sequence: Synthetic oligonucleotide
  Antisense strand to SEQ ID NO: 28204
aacauggugagucaauacu

SEQ ID NO: 28206 - RNA, 19 nt, Artificial Sequence
  Description of Artificial Sequence: Synthetic oligonucleotide
  Sense strand starting at position 1600 of SEQ ID NO: 321
gagucuguugcccagaaug

SEQ ID NO: 28207 - RNA, 19 nt, Artificial Sequence
  Description of Artificial Sequence: Synthetic oligonucleotide
  Antisense strand to SEQ ID NO: 28206
cauucugggcaacagacuc

SEQ ID NO: 28208 - RNA, 19 nt, Artificial Sequence
  Description of Artificial Sequence: Synthetic oligonucleotide
  Sense strand starting at position 1060 of SEQ ID NO: 321
uuugaugguguccaaauaa

SEQ ID NO: 28209 - RNA, 19 nt, Artificial Sequence
  Description of Artificial Sequence: Synthetic oligonucleotide
  Antisense strand to SEQ ID NO: 28208
uuauuuggacaccaucaaa

SEQ ID NO: 28210 - RNA, 19 nt, Artificial Sequence
  Description of Artificial Sequence: Synthetic oligonucleotide
  Sense strand starting at position 1059 of SEQ ID NO: 321
guuugaugguguccaaaua

SEQ ID NO: 28211 - RNA, 19 nt, Artificial Sequence
  Description of Artificial Sequence: Synthetic oligonucleotide
  Antisense strand to SEQ ID NO: 28210
uauuuggacaccaucaaac

SEQ ID NO: 28212 - RNA, 19 nt, Artificial Sequence
  Description of Artificial Sequence: Synthetic oligonucleotide
  Sense strand starting at position 958 of SEQ ID NO: 321
ugcucucuucuugauguau

SEQ ID NO: 28213 - RNA, 19 nt, Artificial Sequence
  Description of Artificial Sequence: Synthetic oligonucleotide
  Antisense strand to SEQ ID NO: 28212
auacaucaagaagagagca

SEQ ID NO: 28214 - RNA, 19 nt, Artificial Sequence
  Description of Artificial Sequence: Synthetic oligonucleotide
  Sense strand starting at position 597 of SEQ ID NO: 321
agggaaaccuucucaguuc

SEQ ID NO: 28215 - RNA, 19 nt, Artificial Sequence
  Description of Artificial Sequence: Synthetic oligonucleotide
  Antisense strand to SEQ ID NO: 28214
gaacugagaagguuucccu

SEQ ID NO: 28216 - RNA, 19 nt, Artificial Sequence
  Description of Artificial Sequence: Synthetic oligonucleotide
  Sense strand starting at position 575 of SEQ ID NO: 321
ugacuuccuugauucgaaa

SEQ ID NO: 28217 - RNA, 19 nt, Artificial Sequence
  Description of Artificial Sequence: Synthetic oligonucleotide
  Antisense strand to SEQ ID NO: 28216
uuucgaaucaaggaaguca

SEQ ID NO: 28218 - RNA, 19 nt, Artificial Sequence
  Description of Artificial Sequence: Synthetic oligonucleotide
  Sense strand starting at position 394 of SEQ ID NO: 321
ugagucacccaggguuaua

SEQ ID NO: 28219 - RNA, 19 nt, Artificial Sequence
  Description of Artificial Sequence: Synthetic oligonucleotide
  Antisense strand to SEQ ID NO: 28218
uauaacccugggugacuca

SEQ ID NO: 28220 - RNA, 19 nt, Artificial Sequence
  Description of Artificial Sequence: Synthetic oligonucleotide
  Sense strand starting at position 393 of SEQ ID NO: 321
augagucacccaggguuau

SEQ ID NO: 28221 - RNA, 19 nt, Artificial Sequence
  Description of Artificial Sequence: Synthetic oligonucleotide
  Antisense strand to SEQ ID NO: 28220
auaacccugggugacucau

SEQ ID NO: 28222 - RNA, 19 nt, Artificial Sequence
  Description of Artificial Sequence: Synthetic oligonucleotide
  Sense strand starting at position 347 of SEQ ID NO: 321
uguuuccauguuuacagau

SEQ ID NO: 28223 - RNA, 19 nt, Artificial Sequence
  Description of Artificial Sequence: Synthetic oligonucleotide
  Antisense strand to SEQ ID NO: 28222
aucuguaaacauggaaaca

SEQ ID NO: 28224 - RNA, 19 nt, Artificial Sequence
  Description of Artificial Sequence: Synthetic oligonucleotide
  Sense strand starting at position 346 of SEQ ID NO: 321
uuguuuccauguuuacaga

SEQ ID NO: 28225 - RNA, 19 nt, Artificial Sequence
  Description of Artificial Sequence: Synthetic oligonucleotide
  Antisense strand to SEQ ID NO: 28224
ucuguaaacauggaaacaa

SEQ ID NO: 28226 - RNA, 19 nt, Artificial Sequence
  Description of Artificial Sequence: Synthetic oligonucleotide
  Sense strand starting at position 325 of SEQ ID NO: 321
ccuauaagauaggucuugu

SEQ ID NO: 28227 - RNA, 19 nt, Artificial Sequence
  Description of Artificial Sequence: Synthetic oligonucleotide
  Antisense strand to SEQ ID NO: 28226
acaagaccuaucuuauagg

SEQ ID NO: 28228 - RNA, 19 nt, Artificial Sequence
  Description of Artificial Sequence: Synthetic oligonucleotide
  Sense strand starting at position 14 of SEQ ID NO: 321
cugagaaagccuuggccaa

SEQ ID NO: 28229 - RNA, 19 nt, Artificial Sequence
  Description of Artificial Sequence: Synthetic oligonucleotide
  Antisense strand to SEQ ID NO: 28228
uuggccaaggcuuucucag

SEQ ID NO: 28230 - RNA, 19 nt, Artificial Sequence
  Description of Artificial Sequence: Synthetic oligonucleotide
  Sense strand starting at position 3812 of SEQ ID NO: 322
cuaaacucugguugauguu

SEQ ID NO: 28231 - RNA, 19 nt, Artificial Sequence
  Description of Artificial Sequence: Synthetic oligonucleotide
  Antisense strand to SEQ ID NO: 28230
aacaucaaccagaguuuag

SEQ ID NO: 28232 - RNA, 19 nt, Artificial Sequence
  Description of Artificial Sequence: Synthetic oligonucleotide
  Sense strand starting at position 3811 of SEQ ID NO: 322
ccuaaacucugguugaugu

SEQ ID NO: 28233 - RNA, 19 nt, Artificial Sequence
  Description of Artificial Sequence: Synthetic oligonucleotide
  Antisense strand to SEQ ID NO: 28232
acaucaaccagaguuuagg

SEQ ID NO: 28234 - RNA, 19 nt, Artificial Sequence
  Description of Artificial Sequence: Synthetic oligonucleotide
  Sense strand starting at position 3808 of SEQ ID NO: 322
agaccuaaacucugguuga

SEQ ID NO: 28235 - RNA, 19 nt, Artificial Sequence
  Description of Artificial Sequence: Synthetic oligonucleotide
  Antisense strand to SEQ ID NO: 28234
ucaaccagaguuuaggucu

SEQ ID NO: 28236 - RNA, 19 nt, Artificial Sequence
  Description of Artificial Sequence: Synthetic oligonucleotide
  Sense strand starting at position 3612 of SEQ ID NO: 322
gguggcuuccaggauauag

SEQ ID NO: 28237 - RNA, 19 nt, Artificial Sequence
  Description of Artificial Sequence: Synthetic oligonucleotide
  Antisense strand to SEQ ID NO: 28236
cuauauccuggaagccacc

SEQ ID NO: 28238 - RNA, 19 nt, Artificial Sequence
  Description of Artificial Sequence: Synthetic oligonucleotide
  Sense strand starting at position 3501 of SEQ ID NO: 322
acauguuagggaggcaaga

SEQ ID NO: 28239 - RNA, 19 nt, Artificial Sequence
  Description of Artificial Sequence: Synthetic oligonucleotide
  Antisense strand to SEQ ID NO: 28238
ucuugccucccuaacaugu

SEQ ID NO: 28240 - RNA, 19 nt, Artificial Sequence
  Description of Artificial Sequence: Synthetic oligonucleotide
  Sense strand starting at position 3382 of SEQ ID NO: 322
ugaaacaggucucauuuaa

SEQ ID NO: 28241 - RNA, 19 nt, Artificial Sequence
  Description of Artificial Sequence: Synthetic oligonucleotide
  Antisense strand to SEQ ID NO: 28240
uuaaaugagaccuguuuca

SEQ ID NO: 28242 - RNA, 19 nt, Artificial Sequence
  Description of Artificial Sequence: Synthetic oligonucleotide
  Sense strand starting at position 3303 of SEQ ID NO: 322
ggccuuuacuaaguagaag

SEQ ID NO: 28243 - RNA, 19 nt, Artificial Sequence
  Description of Artificial Sequence: Synthetic oligonucleotide
  Antisense strand to SEQ ID NO: 28242
cuucuacuuaguaaaggcc

SEQ ID NO: 28244 - RNA, 19 nt, Artificial Sequence
  Description of Artificial Sequence: Synthetic oligonucleotide
  Sense strand starting at position 3250 of SEQ ID NO: 322
gggaaugucuggagauagu

SEQ ID NO: 28245 - RNA, 19 nt, Artificial Sequence
  Description of Artificial Sequence: Synthetic oligonucleotide
  Antisense strand to SEQ ID NO: 28244
acuaucuccagacauuccc

SEQ ID NO: 28246 - RNA, 19 nt, Artificial Sequence
  Description of Artificial Sequence: Synthetic oligonucleotide
  Sense strand starting at position 3239 of SEQ ID NO: 322
aggagacauuugggaaugu

SEQ ID NO: 28247 - RNA, 19 nt, Artificial Sequence
  Description of Artificial Sequence: Synthetic oligonucleotide
  Antisense strand to SEQ ID NO: 28246
acauucccaaaugucuccu

SEQ ID NO: 28248 - RNA, 19 nt, Artificial Sequence
  Description of Artificial Sequence: Synthetic oligonucleotide
  Sense strand starting at position 3116 of SEQ ID NO: 322
ggcagaaauuaccuccucu

SEQ ID NO: 28249 - RNA, 19 nt, Artificial Sequence
  Description of Artificial Sequence: Synthetic oligonucleotide
  Antisense strand to SEQ ID NO: 28248
agaggagguaauuucugcc

SEQ ID NO: 28250 - RNA, 19 nt, Artificial Sequence
  Description of Artificial Sequence: Synthetic oligonucleotide
  Sense strand starting at position 3091 of SEQ ID NO: 322
gggugcgugccaagaaaug

SEQ ID NO: 28251 - RNA, 19 nt, Artificial Sequence
  Description of Artificial Sequence: Synthetic oligonucleotide
  Antisense strand to SEQ ID NO: 28250
cauuucuuggcacgcaccc

SEQ ID NO: 28252 - RNA, 19 nt, Artificial Sequence
  Description of Artificial Sequence: Synthetic oligonucleotide
  Sense strand starting at position 2977 of SEQ ID NO: 322
aggauuaguuggguuacua

SEQ ID NO: 28253 - RNA, 19 nt, Artificial Sequence
  Description of Artificial Sequence: Synthetic oligonucleotide
  Antisense strand to SEQ ID NO: 28252
uaguaacccaacuaauccu

SEQ ID NO: 28254 - RNA, 19 nt, Artificial Sequence
  Description of Artificial Sequence: Synthetic oligonucleotide
  Sense strand starting at position 2964 of SEQ ID NO: 322
auauuuaacuggcaggauu

SEQ ID NO: 28255 - RNA, 19 nt, Artificial Sequence
  Description of Artificial Sequence: Synthetic oligonucleotide
  Antisense strand to SEQ ID NO: 28254
aauccugccaguuaaauau

SEQ ID NO: 28256 - RNA, 19 nt, Artificial Sequence
  Description of Artificial Sequence: Synthetic oligonucleotide
  Sense strand starting at position 2897 of SEQ ID NO: 322
ccaaauauugcaugggcau

SEQ ID NO: 28257 - RNA, 19 nt, Artificial Sequence
  Description of Artificial Sequence: Synthetic oligonucleotide
  Antisense strand to SEQ ID NO: 28256
augcccaugcaauauuugg

SEQ ID NO: 28258 - RNA, 19 nt, Artificial Sequence
  Description of Artificial Sequence: Synthetic oligonucleotide
  Sense strand starting at position 2886 of SEQ ID NO: 322
auauguagggcccaaauau

SEQ ID NO: 28259 - RNA, 19 nt, Artificial Sequence
  Description of Artificial Sequence: Synthetic oligonucleotide
  Antisense strand to SEQ ID NO: 28258
auauuugggcccuacauau

SEQ ID NO: 28260 - RNA, 19 nt, Artificial Sequence
  Description of Artificial Sequence: Synthetic oligonucleotide
  Sense strand starting at position 2500 of SEQ ID NO: 322
gguugucagauuuggccaa

SEQ ID NO: 28261 - RNA, 19 nt, Artificial Sequence
  Description of Artificial Sequence: Synthetic oligonucleotide
  Antisense strand to SEQ ID NO: 28260
uuggccaaaucugacaacc

SEQ ID NO: 28262 - RNA, 19 nt, Artificial Sequence
  Description of Artificial Sequence: Synthetic oligonucleotide
  Sense strand starting at position 2493 of SEQ ID NO: 322
uagauaggguugucagauu

SEQ ID NO: 28263 - RNA, 19 nt, Artificial Sequence
  Description of Artificial Sequence: Synthetic oligonucleotide
  Antisense strand to SEQ ID NO: 28262
aaucugacaacccuaucua

SEQ ID NO: 28264 - RNA, 19 nt, Artificial Sequence
  Description of Artificial Sequence: Synthetic oligonucleotide
  Sense strand starting at position 2491 of SEQ ID NO: 322
uauagauaggguugucaga

SEQ ID NO: 28265 - RNA, 19 nt, Artificial Sequence
  Description of Artificial Sequence: Synthetic oligonucleotide
  Antisense strand to SEQ ID NO: 28264
ucugacaacccuaucuaua

SEQ ID NO: 28266 - RNA, 19 nt, Artificial Sequence
  Description of Artificial Sequence: Synthetic oligonucleotide
  Sense strand starting at position 2487 of SEQ ID NO: 322
ugauuauagauaggguugu

SEQ ID NO: 28267 - RNA, 19 nt, Artificial Sequence
  Description of Artificial Sequence: Synthetic oligonucleotide
  Antisense strand to SEQ ID NO: 28266
acaacccuaucuauaauca

SEQ ID NO: 28268 - RNA, 19 nt, Artificial Sequence
  Description of Artificial Sequence: Synthetic oligonucleotide
  Sense strand starting at position 2474 of SEQ ID NO: 322
ucagcuguuuauuugauua

SEQ ID NO: 28269 - RNA, 19 nt, Artificial Sequence
  Description of Artificial Sequence: Synthetic oligonucleotide
  Antisense strand to SEQ ID NO: 28268
uaaucaaauaaacagcuga

SEQ ID NO: 28270 - RNA, 19 nt, Artificial Sequence
  Description of Artificial Sequence: Synthetic oligonucleotide
  Sense strand starting at position 2473 of SEQ ID NO: 322
cucagcuguuuauuugauu

SEQ ID NO: 28271 - RNA, 19 nt, Artificial Sequence
  Description of Artificial Sequence: Synthetic oligonucleotide
  Antisense strand to SEQ ID NO: 28270
aaucaaauaaacagcugag

SEQ ID NO: 28272 - RNA, 19 nt, Artificial Sequence
  Description of Artificial Sequence: Synthetic oligonucleotide
  Sense strand starting at position 2471 of SEQ ID NO: 322
ugcucagcuguuuauuuga

SEQ ID NO: 28273 - RNA, 19 nt, Artificial Sequence
  Description of Artificial Sequence: Synthetic oligonucleotide
  Antisense strand to SEQ ID NO: 28272
ucaaauaaacagcugagca

SEQ ID NO: 28274 - RNA, 19 nt, Artificial Sequence
  Description of Artificial Sequence: Synthetic oligonucleotide
  Sense strand starting at position 2317 of SEQ ID NO: 322
gaagaaggcgcugauauug

SEQ ID NO: 28275 - RNA, 19 nt, Artificial Sequence
  Description of Artificial Sequence: Synthetic oligonucleotide
  Antisense strand to SEQ ID NO: 28274
caauaucagcgccuucuuc

SEQ ID NO: 28276 - RNA, 19 nt, Artificial Sequence
  Description of Artificial Sequence: Synthetic oligonucleotide
  Sense strand starting at position 2316 of SEQ ID NO: 322
ugaagaaggcgcugauauu

SEQ ID NO: 28277 - RNA, 19 nt, Artificial Sequence
  Description of Artificial Sequence: Synthetic oligonucleotide
  Antisense strand to SEQ ID NO: 28276
aauaucagcgccuucuuca

SEQ ID NO: 28278 - RNA, 19 nt, Artificial Sequence
  Description of Artificial Sequence: Synthetic oligonucleotide
  Sense strand starting at position 2266 of SEQ ID NO: 322
cgucuuaacggcucugcau

SEQ ID NO: 28279 - RNA, 19 nt, Artificial Sequence
  Description of Artificial Sequence: Synthetic oligonucleotide
  Antisense strand to SEQ ID NO: 28278
augcagagccguuaagacg

SEQ ID NO: 28280 - RNA, 19 nt, Artificial Sequence
  Description of Artificial Sequence: Synthetic oligonucleotide
  Sense strand starting at position 2215 of SEQ ID NO: 322
uagugaagucgaggaaacu

SEQ ID NO: 28281 - RNA, 19 nt, Artificial Sequence
  Description of Artificial Sequence: Synthetic oligonucleotide
  Antisense strand to SEQ ID NO: 28280
aguuuccucgacuucacua

SEQ ID NO: 28282 - RNA, 19 nt, Artificial Sequence
  Description of Artificial Sequence: Synthetic oligonucleotide
  Sense strand starting at position 2213 of SEQ ID NO: 322
gguagugaagucgaggaaa

SEQ ID NO: 28283 - RNA, 19 nt, Artificial Sequence
  Description of Artificial Sequence: Synthetic oligonucleotide
  Antisense strand to SEQ ID NO: 28282
uuuccucgacuucacuacc

SEQ ID NO: 28284 - RNA, 19 nt, Artificial Sequence
  Description of Artificial Sequence: Synthetic oligonucleotide
  Sense strand starting at position 2168 of SEQ ID NO: 322
aguuguggccguccggaaa

SEQ ID NO: 28285 - RNA, 19 nt, Artificial Sequence
  Description of Artificial Sequence: Synthetic oligonucleotide
  Antisense strand to SEQ ID NO: 28284
uuuccggacggccacaacu

SEQ ID NO: 28286 - RNA, 19 nt, Artificial Sequence
  Description of Artificial Sequence: Synthetic oligonucleotide
  Sense strand starting at position 2152 of SEQ ID NO: 322
ggaagaaggcuaggauagu

SEQ ID NO: 28287 - RNA, 19 nt, Artificial Sequence
  Description of Artificial Sequence: Synthetic oligonucleotide
  Antisense strand to SEQ ID NO: 28286
acuauccuagccuucuucc

SEQ ID NO: 28288 - RNA, 19 nt, Artificial Sequence
  Description of Artificial Sequence: Synthetic oligonucleotide
  Sense strand starting at position 2088 of SEQ ID NO: 322
ucgcgaaucgcgguccaga

SEQ ID NO: 28289 - RNA, 19 nt, Artificial Sequence
  Description of Artificial Sequence: Synthetic oligonucleotide
  Antisense strand to SEQ ID NO: 28288
ucuggaccgcgauucgcga

SEQ ID NO: 28290 - RNA, 19 nt, Artificial Sequence
  Description of Artificial Sequence: Synthetic oligonucleotide
  Sense strand starting at position 1044 of SEQ ID NO: 322
aggagacuauccuuaguca

SEQ ID NO: 28291 - RNA, 19 nt, Artificial Sequence
  Description of Artificial Sequence: Synthetic oligonucleotide
  Antisense strand to SEQ ID NO: 28290
ugacuaaggauagucuccu

SEQ ID NO: 28292 - RNA, 19 nt, Artificial Sequence
  Description of Artificial Sequence: Synthetic oligonucleotide
  Sense strand starting at position 1042 of SEQ ID NO: 322
gcaggagacuauccuuagu

SEQ ID NO: 28293 - RNA, 19 nt, Artificial Sequence
  Description of Artificial Sequence: Synthetic oligonucleotide
  Antisense strand to SEQ ID NO: 28292
acuaaggauagucuccugc

SEQ ID NO: 28294 - RNA, 19 nt, Artificial Sequence
  Description of Artificial Sequence: Synthetic oligonucleotide
  Sense strand starting at position 923 of SEQ ID NO: 322
ggugauucccgccagggaa

SEQ ID NO: 28295 - RNA, 19 nt, Artificial Sequence
  Description of Artificial Sequence: Synthetic oligonucleotide
  Antisense strand to SEQ ID NO: 28294
uucccuggcgggaaucacc

SEQ ID NO: 28296 - RNA, 19 nt, Artificial Sequence
  Description of Artificial Sequence: Synthetic oligonucleotide
  Sense strand starting at position 396 of SEQ ID NO: 322
aggccucaugcaggaaaga

SEQ ID NO: 28297 - RNA, 19 nt, Artificial Sequence
  Description of Artificial Sequence: Synthetic oligonucleotide
  Antisense strand to SEQ ID NO: 28296
ucuuuccugcaugaggccu

SEQ ID NO: 28298 - RNA, 19 nt, Artificial Sequence
  Description of Artificial Sequence: Synthetic oligonucleotide
  Sense strand starting at position 323 of SEQ ID NO: 322
gggaacaugugacuaaguu

SEQ ID NO: 28299 - RNA, 19 nt, Artificial Sequence
  Description of Artificial Sequence: Synthetic oligonucleotide
  Antisense strand to SEQ ID NO: 28298
aacuuagucacauguuccc

SEQ ID NO: 28300 - RNA, 19 nt, Artificial Sequence
  Description of Artificial Sequence: Synthetic oligonucleotide
  Sense strand starting at position 183 of SEQ ID NO: 322
ugcaguucaguaggaagaa

SEQ ID NO: 28301 - RNA, 19 nt, Artificial Sequence
  Description of Artificial Sequence: Synthetic oligonucleotide
  Antisense strand to SEQ ID NO: 28300
uucuuccuacugaacugca

SEQ ID NO: 28302 - RNA, 19 nt, Artificial Sequence
  Description of Artificial Sequence: Synthetic oligonucleotide
  Sense strand starting at position 118 of SEQ ID NO: 322
ugugaaaggcaugguuaug

SEQ ID NO: 28303 - RNA, 19 nt, Artificial Sequence
  Description of Artificial Sequence: Synthetic oligonucleotide
  Antisense strand to SEQ ID NO: 28302
cauaaccaugccuuucaca

SEQ ID NO: 28304 - RNA, 19 nt, Artificial Sequence
  Description of Artificial Sequence: Synthetic oligonucleotide
  Sense strand starting at position 74 of SEQ ID NO: 322
ucaaaugagugaguaaaug

SEQ ID NO: 28305 - RNA, 19 nt, Artificial Sequence
  Description of Artificial Sequence: Synthetic oligonucleotide
  Antisense strand to SEQ ID NO: 28304
cauuuacucacucauuuga

SEQ ID NO: 28306 - RNA, 19 nt, Artificial Sequence
  Description of Artificial Sequence: Synthetic oligonucleotide
  Sense strand starting at position 71 of SEQ ID NO: 322
uugucaaaugagugaguaa

SEQ ID NO: 28307 - RNA, 19 nt, Artificial Sequence
  Description of Artificial Sequence: Synthetic oligonucleotide
  Antisense strand to SEQ ID NO: 28306
uuacucacucauuugacaa

SEQ ID NO: 28308 - RNA, 19 nt, Artificial Sequence
  Description of Artificial Sequence: Synthetic oligonucleotide
  Sense strand starting at position 62 of SEQ ID NO: 322
caaucaguguugucaaaug

SEQ ID NO: 28309 - RNA, 19 nt, Artificial Sequence
  Description of Artificial Sequence: Synthetic oligonucleotide
  Antisense strand to SEQ ID NO: 28308
cauuugacaacacugauug

SEQ ID NO: 28310 - RNA, 19 nt, Artificial Sequence
  Description of Artificial Sequence: Synthetic oligonucleotide
  Sense strand starting at position 102 of SEQ ID NO: 323
gguagcuagcuggaguuaa

SEQ ID NO: 28311 - RNA, 19 nt, Artificial Sequence
  Description of Artificial Sequence: Synthetic oligonucleotide
  Antisense strand to SEQ ID NO: 28310
uuaacuccagcuagcuacc

SEQ ID NO: 28312 - RNA, 19 nt, Artificial Sequence
  Description of Artificial Sequence: Synthetic oligonucleotide
  Sense strand starting at position 110 of SEQ ID NO: 323
gcuggaguuaaauagugau

SEQ ID NO: 28313 - RNA, 19 nt, Artificial Sequence
  Description of Artificial Sequence: Synthetic oligonucleotide
  Antisense strand to SEQ ID NO: 28312
aucacuauuuaacuccagc

SEQ ID NO: 28314 - RNA, 19 nt, Artificial Sequence
  Description of Artificial Sequence: Synthetic oligonucleotide
  Sense strand starting at position 210 of SEQ ID NO: 323
ucccuaucaugguuuagaa

SEQ ID NO: 28315 - RNA, 19 nt, Artificial Sequence
  Description of Artificial Sequence: Synthetic oligonucleotide
  Antisense strand to SEQ ID NO: 28314
uucuaaaccaugauaggga

SEQ ID NO: 28316 - RNA, 19 nt, Artificial Sequence
  Description of Artificial Sequence: Synthetic oligonucleotide
  Sense strand starting at position 271 of SEQ ID NO: 323
cguuguuaugagcucuguu

SEQ ID NO: 28317 - RNA, 19 nt, Artificial Sequence
  Description of Artificial Sequence: Synthetic oligonucleotide
  Antisense strand to SEQ ID NO: 28316
aacagagcucauaacaacg

SEQ ID NO: 28318 - RNA, 19 nt, Artificial Sequence
  Description of Artificial Sequence: Synthetic oligonucleotide
  Sense strand starting at position 278 of SEQ ID NO: 323
augagcucuguugaacaga

SEQ ID NO: 28319 - RNA, 19 nt, Artificial Sequence
  Description of Artificial Sequence: Synthetic oligonucleotide
  Antisense strand to SEQ ID NO: 28318
ucuguucaacagagcucau

SEQ ID NO: 28320 - RNA, 19 nt, Artificial Sequence
  Description of Artificial Sequence: Synthetic oligonucleotide
  Sense strand starting at position 295 of SEQ ID NO: 323
gagcacuuuguauggauga

SEQ ID NO: 28321 - RNA, 19 nt, Artificial Sequence
  Description of Artificial Sequence: Synthetic oligonucleotide
  Antisense strand to SEQ ID NO: 28320
ucauccauacaaagugcuc

SEQ ID NO: 28322 - RNA, 19 nt, Artificial Sequence
  Description of Artificial Sequence: Synthetic oligonucleotide
  Sense strand starting at position 302 of SEQ ID NO: 323
uuguauggaugagcucaau

SEQ ID NO: 28323 - RNA, 19 nt, Artificial Sequence
  Description of Artificial Sequence: Synthetic oligonucleotide
  Antisense strand to SEQ ID NO: 28322
auugagcucauccauacaa

SEQ ID NO: 28324 - RNA, 19 nt, Artificial Sequence
  Description of Artificial Sequence: Synthetic oligonucleotide
  Sense strand starting at position 345 of SEQ ID NO: 323
agguucucaucccugagga

SEQ ID NO: 28325 - RNA, 19 nt, Artificial Sequence
  Description of Artificial Sequence: Synthetic oligonucleotide
  Antisense strand to SEQ ID NO: 28324
uccucagggaugagaaccu

SEQ ID NO: 28326 - RNA, 19 nt, Artificial Sequence
  Description of Artificial Sequence: Synthetic oligonucleotide
  Sense strand starting at position 346 of SEQ ID NO: 323
gguucucaucccugaggaa

SEQ ID NO: 28327 - RNA, 19 nt, Artificial Sequence
  Description of Artificial Sequence: Synthetic oligonucleotide
  Antisense strand to SEQ ID NO: 28326
uuccucagggaugagaacc

SEQ ID NO: 28328 - RNA, 19 nt, Artificial Sequence
  Description of Artificial Sequence: Synthetic oligonucleotide
  Sense strand starting at position 347 of SEQ ID NO: 323
guucucaucccugaggaau

SEQ ID NO: 28329 - RNA, 19 nt, Artificial Sequence
  Description of Artificial Sequence: Synthetic oligonucleotide
  Antisense strand to SEQ ID NO: 28328
auuccucagggaugagaac

SEQ ID NO: 28330 - RNA, 19 nt, Artificial Sequence
  Description of Artificial Sequence: Synthetic oligonucleotide
  Sense strand starting at position 376 of SEQ ID NO: 323
gggucacauagugauaggu

SEQ ID NO: 28331 - RNA, 19 nt, Artificial Sequence
  Description of Artificial Sequence: Synthetic oligonucleotide
  Antisense strand to SEQ ID NO: 28330
accuaucacuaugugaccc

SEQ ID NO: 28332 - RNA, 19 nt, Artificial Sequence
  Description of Artificial Sequence: Synthetic oligonucleotide
  Sense strand starting at position 391 of SEQ ID NO: 323
aggucaugggucuagguuu

SEQ ID NO: 28333 - RNA, 19 nt, Artificial Sequence
  Description of Artificial Sequence: Synthetic oligonucleotide
  Antisense strand to SEQ ID NO: 28332
aaaccuagacccaugaccu

SEQ ID NO: 28334 - RNA, 19 nt, Artificial Sequence
  Description of Artificial Sequence: Synthetic oligonucleotide
  Sense strand starting at position 1605 of SEQ ID NO: 323
ucaguuccuccugaucaga

SEQ ID NO: 28335 - RNA, 19 nt, Artificial Sequence
  Description of Artificial Sequence: Synthetic oligonucleotide
  Antisense strand to SEQ ID NO: 28334
ucugaucaggaggaacuga

SEQ ID NO: 28336 - RNA, 19 nt, Artificial Sequence
  Description of Artificial Sequence: Synthetic oligonucleotide
  Sense strand starting at position 1815 of SEQ ID NO: 323
uugaaauccuggcccaagu

SEQ ID NO: 28337 - RNA, 19 nt, Artificial Sequence
  Description of Artificial Sequence: Synthetic oligonucleotide
  Antisense strand to SEQ ID NO: 28336
acuugggccaggauuucaa

SEQ ID NO: 28338 - RNA, 19 nt, Artificial Sequence
  Description of Artificial Sequence: Synthetic oligonucleotide
  Sense strand starting at position 2035 of SEQ ID NO: 323
ggcccuguuccagaaggaa

SEQ ID NO: 28339 - RNA, 19 nt, Artificial Sequence
  Description of Artificial Sequence: Synthetic oligonucleotide
  Antisense strand to SEQ ID NO: 28338
uuccuucuggaacagggcc

SEQ ID NO: 28340 - RNA, 19 nt, Artificial Sequence
  Description of Artificial Sequence: Synthetic oligonucleotide
  Sense strand starting at position 2056 of SEQ ID NO: 323
gagucauggccagggacaa

SEQ ID NO: 28341 - RNA, 19 nt, Artificial Sequence
  Description of Artificial Sequence: Synthetic oligonucleotide
  Antisense strand to SEQ ID NO: 28340
uugucccuggccaugacuc

SEQ ID NO: 28342 - RNA, 19 nt, Artificial Sequence
  Description of Artificial Sequence: Synthetic oligonucleotide
  Sense strand starting at position 2168 of SEQ ID NO: 323
aggccauuagccuaagaaa

SEQ ID NO: 28343 - RNA, 19 nt, Artificial Sequence
  Description of Artificial Sequence: Synthetic oligonucleotide
  Antisense strand to SEQ ID NO: 28342
uuucuuaggcuaauggccu

SEQ ID NO: 28344 - RNA, 19 nt, Artificial Sequence
  Description of Artificial Sequence: Synthetic oligonucleotide
  Sense strand starting at position 2270 of SEQ ID NO: 323
cugagaugagaaggcuuau

SEQ ID NO: 28345 - RNA, 19 nt, Artificial Sequence
  Description of Artificial Sequence: Synthetic oligonucleotide
  Antisense strand to SEQ ID NO: 28344
auaagccuucucaucucag

SEQ ID NO: 28346 - RNA, 19 nt, Artificial Sequence
  Description of Artificial Sequence: Synthetic oligonucleotide
  Sense strand starting at position 2276 of SEQ ID NO: 323
ugagaaggcuuauugagca

SEQ ID NO: 28347 - RNA, 19 nt, Artificial Sequence
  Description of Artificial Sequence: Synthetic oligonucleotide
  Antisense strand to SEQ ID NO: 28346
ugcucaauaagccuucuca

SEQ ID NO: 28348 - RNA, 19 nt, Artificial Sequence
  Description of Artificial Sequence: Synthetic oligonucleotide
  Sense strand starting at position 2370 of SEQ ID NO: 323
ccuuuccugccagaaaugu

SEQ ID NO: 28349 - RNA, 19 nt, Artificial Sequence
  Description of Artificial Sequence: Synthetic oligonucleotide
  Antisense strand to SEQ ID NO: 28348
acauuucuggcaggaaagg

SEQ ID NO: 28350 - RNA, 19 nt, Artificial Sequence
  Description of Artificial Sequence: Synthetic oligonucleotide
  Sense strand starting at position 2441 of SEQ ID NO: 323
aggccagauuuggaauaag

SEQ ID NO: 28351 - RNA, 19 nt, Artificial Sequence
  Description of Artificial Sequence: Synthetic oligonucleotide
  Antisense strand to SEQ ID NO: 28350
cuuauuccaaaucuggccu

SEQ ID NO: 28352 - RNA, 19 nt, Artificial Sequence
  Description of Artificial Sequence: Synthetic oligonucleotide
  Sense strand starting at position 2533 of SEQ ID NO: 323
ccgguaauuugcucuguca

SEQ ID NO: 28353 - RNA, 19 nt, Artificial Sequence
  Description of Artificial Sequence: Synthetic oligonucleotide
  Antisense strand to SEQ ID NO: 28352
ugacagagcaaauuaccgg

SEQ ID NO: 28354 - RNA, 19 nt, Artificial Sequence
  Description of Artificial Sequence: Synthetic oligonucleotide
  Sense strand starting at position 2535 of SEQ ID NO: 323
gguaauuugcucugucaug

SEQ ID NO: 28355 - RNA, 19 nt, Artificial Sequence
  Description of Artificial Sequence: Synthetic oligonucleotide
  Antisense strand to SEQ ID NO: 28354
caugacagagcaaauuacc

SEQ ID NO: 28356 - RNA, 19 nt, Artificial Sequence
  Description of Artificial Sequence: Synthetic oligonucleotide
  Sense strand starting at position 2536 of SEQ ID NO: 323
guaauuugcucugucaugu

SEQ ID NO: 28357 - RNA, 19 nt, Artificial Sequence
  Description of Artificial Sequence: Synthetic oligonucleotide
  Antisense strand to SEQ ID NO: 28356
acaugacagagcaaauuac

SEQ ID NO: 28358 - RNA, 19 nt, Artificial Sequence
  Description of Artificial Sequence: Synthetic oligonucleotide
  Sense strand starting at position 2634 of SEQ ID NO: 323
gguuguucggaagagugau

SEQ ID NO: 28359 - RNA, 19 nt, Artificial Sequence
  Description of Artificial Sequence: Synthetic oligonucleotide
  Antisense strand to SEQ ID NO: 28358
aucacucuuccgaacaacc

SEQ ID NO: 28360 - RNA, 19 nt, Artificial Sequence
  Description of Artificial Sequence: Synthetic oligonucleotide
  Sense strand starting at position 2663 of SEQ ID NO: 323
augucaucugcuuagaaca

SEQ ID NO: 28361 - RNA, 19 nt, Artificial Sequence
  Description of Artificial Sequence: Synthetic oligonucleotide
  Antisense strand to SEQ ID NO: 28360
uguucuaagcagaugacau

SEQ ID NO: 28362 - RNA, 19 nt, Artificial Sequence
  Description of Artificial Sequence: Synthetic oligonucleotide
  Sense strand starting at position 2699 of SEQ ID NO: 323
gugaaugucagguaucacu

SEQ ID NO: 28363 - RNA, 19 nt, Artificial Sequence
  Description of Artificial Sequence: Synthetic oligonucleotide
  Antisense strand to SEQ ID NO: 28362
agugauaccugacauucac

SEQ ID NO: 28364 - RNA, 19 nt, Artificial Sequence
  Description of Artificial Sequence: Synthetic oligonucleotide
  Sense strand starting at position 2708 of SEQ ID NO: 323
agguaucacuauuccuuga

SEQ ID NO: 28365 - RNA, 19 nt, Artificial Sequence
  Description of Artificial Sequence: Synthetic oligonucleotide
  Antisense strand to SEQ ID NO: 28364
ucaaggaauagugauaccu

SEQ ID NO: 28366 - RNA, 19 nt, Artificial Sequence
  Description of Artificial Sequence: Synthetic oligonucleotide
  Sense strand starting at position 2710 of SEQ ID NO: 323
guaucacuauuccuugaag

SEQ ID NO: 28367 - RNA, 19 nt, Artificial Sequence
  Description of Artificial Sequence: Synthetic oligonucleotide
  Antisense strand to SEQ ID NO: 28366
cuucaaggaauagugauac

SEQ ID NO: 28368 - RNA, 19 nt, Artificial Sequence
  Description of Artificial Sequence: Synthetic oligonucleotide
  Sense strand starting at position 2738 of SEQ ID NO: 323
ccagaaaggccuuggaauc

SEQ ID NO: 28369 - RNA, 19 nt, Artificial Sequence
  Description of Artificial Sequence: Synthetic oligonucleotide
  Antisense strand to SEQ ID NO: 28368
gauuccaaggccuuucugg

SEQ ID NO: 28370 - RNA, 19 nt, Artificial Sequence
  Description of Artificial Sequence: Synthetic oligonucleotide
  Sense strand starting at position 2804 of SEQ ID NO: 323
uuggauuagucacuucucu

SEQ ID NO: 28371 - RNA, 19 nt, Artificial Sequence
  Description of Artificial Sequence: Synthetic oligonucleotide
  Antisense strand to SEQ ID NO: 28370
agagaagugacuaauccaa

SEQ ID NO: 28372 - RNA, 19 nt, Artificial Sequence
  Description of Artificial Sequence: Synthetic oligonucleotide
  Sense strand starting at position 2843 of SEQ ID NO: 323
ucuggucuacccgaaggau

SEQ ID NO: 28373 - RNA, 19 nt, Artificial Sequence
  Description of Artificial Sequence: Synthetic oligonucleotide
  Antisense strand to SEQ ID NO: 28372
auccuucggguagaccaga

SEQ ID NO: 28374 - RNA, 19 nt, Artificial Sequence
  Description of Artificial Sequence: Synthetic oligonucleotide
  Sense strand starting at position 2949 of SEQ ID NO: 323
accuguaaauagucccuua

SEQ ID NO: 28375 - RNA, 19 nt, Artificial Sequence
  Description of Artificial Sequence: Synthetic oligonucleotide
  Antisense strand to SEQ ID NO: 28374
uaagggacuauuuacaggu

SEQ ID NO: 28376 - RNA, 19 nt, Artificial Sequence
  Description of Artificial Sequence: Synthetic oligonucleotide
  Sense strand starting at position 3039 of SEQ ID NO: 323
auacacaaguguccuaaga

SEQ ID NO: 28377 - RNA, 19 nt, Artificial Sequence
  Description of Artificial Sequence: Synthetic oligonucleotide
  Antisense strand to SEQ ID NO: 28376
ucuuaggacacuuguguau

SEQ ID NO: 28378 - RNA, 19 nt, Artificial Sequence
  Description of Artificial Sequence: Synthetic oligonucleotide
  Sense strand starting at position 3312 of SEQ ID NO: 323
ggucauuuguuacagaaga

SEQ ID NO: 28379 - RNA, 19 nt, Artificial Sequence
  Description of Artificial Sequence: Synthetic oligonucleotide
  Antisense strand to SEQ ID NO: 28378
ucuucuguaacaaaugacc

SEQ ID NO: 28380 - RNA, 19 nt, Artificial Sequence
  Description of Artificial Sequence: Synthetic oligonucleotide
  Sense strand starting at position 3339 of SEQ ID NO: 323
acaaauauagugugcagaa

SEQ ID NO: 28381 - RNA, 19 nt, Artificial Sequence
  Description of Artificial Sequence: Synthetic oligonucleotide
  Antisense strand to SEQ ID NO: 28380
uucugcacacuauauuugu

SEQ ID NO: 28382 - RNA, 19 nt, Artificial Sequence
  Description of Artificial Sequence: Synthetic oligonucleotide
  Sense strand starting at position 3340 of SEQ ID NO: 323
caaauauagugugcagaag

SEQ ID NO: 28383 - RNA, 19 nt, Artificial Sequence
  Description of Artificial Sequence: Synthetic oligonucleotide
  Antisense strand to SEQ ID NO: 28382
cuucugcacacuauauuug

SEQ ID NO: 28384 - RNA, 19 nt, Artificial Sequence
  Description of Artificial Sequence: Synthetic oligonucleotide
  Sense strand starting at position 3529 of SEQ ID NO: 323
agggaugcccucugagaag

SEQ ID NO: 28385 - RNA, 19 nt, Artificial Sequence
  Description of Artificial Sequence: Synthetic oligonucleotide
  Antisense strand to SEQ ID NO: 28384
cuucucagagggcaucccu

SEQ ID NO: 28386 - RNA, 19 nt, Artificial Sequence
  Description of Artificial Sequence: Synthetic oligonucleotide
  Sense strand starting at position 3586 of SEQ ID NO: 323
cuucuaagccaaugacagu

SEQ ID NO: 28387 - RNA, 19 nt, Artificial Sequence
  Description of Artificial Sequence: Synthetic oligonucleotide
  Antisense strand to SEQ ID NO: 28386
acugucauuggcuuagaag

SEQ ID NO: 28388 - RNA, 19 nt, Artificial Sequence
  Description of Artificial Sequence: Synthetic oligonucleotide
  Sense strand starting at position 3608 of SEQ ID NO: 323
cguguuaagcacuuagcua

SEQ ID NO: 28389 - RNA, 19 nt, Artificial Sequence
  Description of Artificial Sequence: Synthetic oligonucleotide
  Antisense strand to SEQ ID NO: 28388
uagcuaagugcuuaacacg

SEQ ID NO: 28390 - RNA, 19 nt, Artificial Sequence
  Description of Artificial Sequence: Synthetic oligonucleotide
  Sense strand starting at position 3921 of SEQ ID NO: 325
guuauagaagccugaauga

SEQ ID NO: 28391 - RNA, 19 nt, Artificial Sequence
  Description of Artificial Sequence: Synthetic oligonucleotide
  Antisense strand to SEQ ID NO: 28390
ucauucaggcuucuauaac

SEQ ID NO: 28392 - RNA, 19 nt, Artificial Sequence
  Description of Artificial Sequence: Synthetic oligonucleotide
  Sense strand starting at position 3653 of SEQ ID NO: 325
cugcaagguaaugguauua

SEQ ID NO: 28393 - RNA, 19 nt, Artificial Sequence
  Description of Artificial Sequence: Synthetic oligonucleotide
  Antisense strand to SEQ ID NO: 28392
uaauaccauuaccuugcag

SEQ ID NO: 28394 - RNA, 19 nt, Artificial Sequence
  Description of Artificial Sequence: Synthetic oligonucleotide
  Sense strand starting at position 3512 of SEQ ID NO: 325
guagauccugcauaugguu

SEQ ID NO: 28395 - RNA, 19 nt, Artificial Sequence
  Description of Artificial Sequence: Synthetic oligonucleotide
  Antisense strand to SEQ ID NO: 28394
aaccauaugcaggaucuac

SEQ ID NO: 28396 - RNA, 19 nt, Artificial Sequence
  Description of Artificial Sequence: Synthetic oligonucleotide
  Sense strand starting at position 3498 of SEQ ID NO: 325
acacguucugucuaguaga

SEQ ID NO: 28397 - RNA, 19 nt, Artificial Sequence
  Description of Artificial Sequence: Synthetic oligonucleotide
  Antisense strand to SEQ ID NO: 28396
ucuacuagacagaacgugu

SEQ ID NO: 28398 - RNA, 19 nt, Artificial Sequence
  Description of Artificial Sequence: Synthetic oligonucleotide
  Sense strand starting at position 3417 of SEQ ID NO: 325
aguuaauggguacaguuaa

SEQ ID NO: 28399 - RNA, 19 nt, Artificial Sequence
  Description of Artificial Sequence: Synthetic oligonucleotide
  Antisense strand to SEQ ID NO: 28398
uuaacuguacccauuaacu

SEQ ID NO: 28400 - RNA, 19 nt, Artificial Sequence
  Description of Artificial Sequence: Synthetic oligonucleotide
  Sense strand starting at position 3415 of SEQ ID NO: 325
ugaguuaauggguacaguu

SEQ ID NO: 28401 - RNA, 19 nt, Artificial Sequence
  Description of Artificial Sequence: Synthetic oligonucleotide
  Antisense strand to SEQ ID NO: 28400
aacuguacccauuaacuca

SEQ ID NO: 28402 - RNA, 19 nt, Artificial Sequence
  Description of Artificial Sequence: Synthetic oligonucleotide
  Sense strand starting at position 3414 of SEQ ID NO: 325
uugaguuaauggguacagu

SEQ ID NO: 28403 - RNA, 19 nt, Artificial Sequence
  Description of Artificial Sequence: Synthetic oligonucleotide
  Antisense strand to SEQ ID NO: 28402
acuguacccauuaacucaa

SEQ ID NO: 28404 - RNA, 19 nt, Artificial Sequence
  Description of Artificial Sequence: Synthetic oligonucleotide
  Sense strand starting at position 3412 of SEQ ID NO: 325
ucuugaguuaauggguaca

SEQ ID NO: 28405 - RNA, 19 nt, Artificial Sequence
  Description of Artificial Sequence: Synthetic oligonucleotide
  Antisense strand to SEQ ID NO: 28404
uguacccauuaacucaaga

SEQ ID NO: 28406 - RNA, 19 nt, Artificial Sequence
  Description of Artificial Sequence: Synthetic oligonucleotide
  Sense strand starting at position 3373 of SEQ ID NO: 325
uucucuaacuagucaaagu

SEQ ID NO: 28407 - RNA, 19 nt, Artificial Sequence
  Description of Artificial Sequence: Synthetic oligonucleotide
  Antisense strand to SEQ ID NO: 28406
acuuugacuaguuagagaa

SEQ ID NO: 28408 - RNA, 19 nt, Artificial Sequence
  Description of Artificial Sequence: Synthetic oligonucleotide
  Sense strand starting at position 3369 of SEQ ID NO: 325
gugauucucuaacuaguca

SEQ ID NO: 28409 - RNA, 19 nt, Artificial Sequence
  Description of Artificial Sequence: Synthetic oligonucleotide
  Antisense strand to SEQ ID NO: 28408
ugacuaguuagagaaucac

SEQ ID NO: 28410 - RNA, 19 nt, Artificial Sequence
  Description of Artificial Sequence: Synthetic oligonucleotide
  Sense strand starting at position 3365 of SEQ ID NO: 325
cugugugauucucuaacua

SEQ ID NO: 28411 - RNA, 19 nt, Artificial Sequence
  Description of Artificial Sequence: Synthetic oligonucleotide
  Antisense strand to SEQ ID NO: 28410
uaguuagagaaucacacag

SEQ ID NO: 28412 - RNA, 19 nt, Artificial Sequence
  Description of Artificial Sequence: Synthetic oligonucleotide
  Sense strand starting at position 3361 of SEQ ID NO: 325
auuucugugugauucucua

SEQ ID NO: 28413 - RNA, 19 nt, Artificial Sequence
  Description of Artificial Sequence: Synthetic oligonucleotide
  Antisense strand to SEQ ID NO: 28412
uagagaaucacacagaaau

SEQ ID NO: 28414 - RNA, 19 nt, Artificial Sequence
  Description of Artificial Sequence: Synthetic oligonucleotide
  Sense strand starting at position 3312 of SEQ ID NO: 325
aguauuagucaccacguga

SEQ ID NO: 28415 - RNA, 19 nt, Artificial Sequence
  Description of Artificial Sequence: Synthetic oligonucleotide
  Antisense strand to SEQ ID NO: 28414
ucacguggugacuaauacu

SEQ ID NO: 28416 - RNA, 19 nt, Artificial Sequence
  Description of Artificial Sequence: Synthetic oligonucleotide
  Sense strand starting at position 2789 of SEQ ID NO: 325
uguguuugcccauagaaau

SEQ ID NO: 28417 - RNA, 19 nt, Artificial Sequence
  Description of Artificial Sequence: Synthetic oligonucleotide
  Antisense strand to SEQ ID NO: 28416
auuucuaugggcaaacaca

SEQ ID NO: 28418 - RNA, 19 nt, Artificial Sequence
  Description of Artificial Sequence: Synthetic oligonucleotide
  Sense strand starting at position 2735 of SEQ ID NO: 325
ggaucucacgucugagaaa

SEQ ID NO: 28419 - RNA, 19 nt, Artificial Sequence
  Description of Artificial Sequence: Synthetic oligonucleotide
  Antisense strand to SEQ ID NO: 28418
uuucucagacgugagaucc

SEQ ID NO: 28420 - RNA, 19 nt, Artificial Sequence
  Description of Artificial Sequence: Synthetic oligonucleotide
  Sense strand starting at position 2717 of SEQ ID NO: 325
guuauaguccuacaaauag

SEQ ID NO: 28421 - RNA, 19 nt, Artificial Sequence
  Description of Artificial Sequence: Synthetic oligonucleotide
  Antisense strand to SEQ ID NO: 28420
cuauuuguaggacuauaac

SEQ ID NO: 28422 - RNA, 19 nt, Artificial Sequence
  Description of Artificial Sequence: Synthetic oligonucleotide
  Sense strand starting at position 2437 of SEQ ID NO: 325
aggcccagaccaugaauau

SEQ ID NO: 28423 - RNA, 19 nt, Artificial Sequence
  Description of Artificial Sequence: Synthetic oligonucleotide
  Antisense strand to SEQ ID NO: 28422
auauucauggucugggccu

SEQ ID NO: 28424 - RNA, 19 nt, Artificial Sequence
  Description of Artificial Sequence: Synthetic oligonucleotide
  Sense strand starting at position 2386 of SEQ ID NO: 325
caggcaaucccauagugau

SEQ ID NO: 28425 - RNA, 19 nt, Artificial Sequence
  Description of Artificial Sequence: Synthetic oligonucleotide
  Antisense strand to SEQ ID NO: 28424
aucacuaugggauugccug

SEQ ID NO: 28426 - RNA, 19 nt, Artificial Sequence
  Description of Artificial Sequence: Synthetic oligonucleotide
  Sense strand starting at position 2352 of SEQ ID NO: 325
gcauuaugugaacacagcu

SEQ ID NO: 28427 - RNA, 19 nt, Artificial Sequence
  Description of Artificial Sequence: Synthetic oligonucleotide
  Antisense strand to SEQ ID NO: 28426
agcuguguucacauaaugc

SEQ ID NO: 28428 - RNA, 19 nt, Artificial Sequence
  Description of Artificial Sequence: Synthetic oligonucleotide
  Sense strand starting at position 2348 of SEQ ID NO: 325
ggaugcauuaugugaacac

SEQ ID NO: 28429 - RNA, 19 nt, Artificial Sequence
  Description of Artificial Sequence: Synthetic oligonucleotide
  Antisense strand to SEQ ID NO: 28428
guguucacauaaugcaucc

SEQ ID NO: 28430 - RNA, 19 nt, Artificial Sequence
  Description of Artificial Sequence: Synthetic oligonucleotide
  Sense strand starting at position 2264 of SEQ ID NO: 325
gcacgguguggucuugagu

SEQ ID NO: 28431 - RNA, 19 nt, Artificial Sequence
  Description of Artificial Sequence: Synthetic oligonucleotide
  Antisense strand to SEQ ID NO: 28430
acucaagaccacaccgugc

SEQ ID NO: 28432 - RNA, 19 nt, Artificial Sequence
  Description of Artificial Sequence: Synthetic oligonucleotide
  Sense strand starting at position 2245 of SEQ ID NO: 325
gguggcuuuacggagaagu

SEQ ID NO: 28433 - RNA, 19 nt, Artificial Sequence
  Description of Artificial Sequence: Synthetic oligonucleotide
  Antisense strand to SEQ ID NO: 28432
acuucuccguaaagccacc

SEQ ID NO: 28434 - RNA, 19 nt, Artificial Sequence
  Description of Artificial Sequence: Synthetic oligonucleotide
  Sense strand starting at position 1530 of SEQ ID NO: 325
caaagcuuuccacgguaga

SEQ ID NO: 28435 - RNA, 19 nt, Artificial Sequence
  Description of Artificial Sequence: Synthetic oligonucleotide
  Antisense strand to SEQ ID NO: 28434
ucuaccguggaaagcuuug

SEQ ID NO: 28436 - RNA, 19 nt, Artificial Sequence
  Description of Artificial Sequence: Synthetic oligonucleotide
  Sense strand starting at position 1347 of SEQ ID NO: 325
uguccuuguggauaagguu

SEQ ID NO: 28437 - RNA, 19 nt, Artificial Sequence
  Description of Artificial Sequence: Synthetic oligonucleotide
  Antisense strand to SEQ ID NO: 28436
aaccuuauccacaaggaca

SEQ ID NO: 28438 - RNA, 19 nt, Artificial Sequence
  Description of Artificial Sequence: Synthetic oligonucleotide
  Sense strand starting at position 1176 of SEQ ID NO: 325
ugguucucgggagaagauu

SEQ ID NO: 28439 - RNA, 19 nt, Artificial Sequence
  Description of Artificial Sequence: Synthetic oligonucleotide
  Antisense strand to SEQ ID NO: 28438
aaucuucucccgagaacca

SEQ ID NO: 28440 - RNA, 19 nt, Artificial Sequence
  Description of Artificial Sequence: Synthetic oligonucleotide
  Sense strand starting at position 1009 of SEQ ID NO: 325
gagguagagcccugacuaa

SEQ ID NO: 28441 - RNA, 19 nt, Artificial Sequence
  Description of Artificial Sequence: Synthetic oligonucleotide
  Antisense strand to SEQ ID NO: 28440
uuagucagggcucuaccuc

SEQ ID NO: 28442 - RNA, 19 nt, Artificial Sequence
  Description of Artificial Sequence: Synthetic oligonucleotide
  Sense strand starting at position 831 of SEQ ID NO: 325
ugacuauaugcaugagaca

SEQ ID NO: 28443 - RNA, 19 nt, Artificial Sequence
  Description of Artificial Sequence: Synthetic oligonucleotide
  Antisense strand to SEQ ID NO: 28442
ugucucaugcauauaguca

SEQ ID NO: 28444 - RNA, 19 nt, Artificial Sequence
  Description of Artificial Sequence: Synthetic oligonucleotide
  Sense strand starting at position 825 of SEQ ID NO: 325
gugauaugacuauaugcau

SEQ ID NO: 28445 - RNA, 19 nt, Artificial Sequence
  Description of Artificial Sequence: Synthetic oligonucleotide
  Antisense strand to SEQ ID NO: 28444
augcauauagucauaucac

SEQ ID NO: 28446 - RNA, 19 nt, Artificial Sequence
  Description of Artificial Sequence: Synthetic oligonucleotide
  Sense strand starting at position 753 of SEQ ID NO: 325
uagacauuggccugcauua

SEQ ID NO: 28447 - RNA, 19 nt, Artificial Sequence
  Description of Artificial Sequence: Synthetic oligonucleotide
  Antisense strand to SEQ ID NO: 28446
uaaugcaggccaaugucua

SEQ ID NO: 28448 - RNA, 19 nt, Artificial Sequence
  Description of Artificial Sequence: Synthetic oligonucleotide
  Sense strand starting at position 715 of SEQ ID NO: 325
ugacaauagcuguaaugua

SEQ ID NO: 28449 - RNA, 19 nt, Artificial Sequence
  Description of Artificial Sequence: Synthetic oligonucleotide
  Antisense strand to SEQ ID NO: 28448
uacauuacagcuauuguca

SEQ ID NO: 28450 - RNA, 19 nt, Artificial Sequence
  Description of Artificial Sequence: Synthetic oligonucleotide
  Sense strand starting at position 663 of SEQ ID NO: 325
gcuaauaaucauuguaaug

SEQ ID NO: 28451 - RNA, 19 nt, Artificial Sequence
  Description of Artificial Sequence: Synthetic oligonucleotide
  Antisense strand to SEQ ID NO: 28450
cauuacaaugauuauuagc

SEQ ID NO: 28452 - RNA, 19 nt, Artificial Sequence
  Description of Artificial Sequence: Synthetic oligonucleotide
  Sense strand starting at position 634 of SEQ ID NO: 325
ugcuacucauauguaagau

SEQ ID NO: 28453 - RNA, 19 nt, Artificial Sequence
  Description of Artificial Sequence: Synthetic oligonucleotide
  Antisense strand to SEQ ID NO: 28452
aucuuacauaugaguagca

SEQ ID NO: 28454 - RNA, 19 nt, Artificial Sequence
  Description of Artificial Sequence: Synthetic oligonucleotide
  Sense strand starting at position 620 of SEQ ID NO: 325
uaugaugaguccuuugcua

SEQ ID NO: 28455 - RNA, 19 nt, Artificial Sequence
  Description of Artificial Sequence: Synthetic oligonucleotide
  Antisense strand to SEQ ID NO: 28454
uagcaaaggacucaucaua

SEQ ID NO: 28456 - RNA, 19 nt, Artificial Sequence
  Description of Artificial Sequence: Synthetic oligonucleotide
  Sense strand starting at position 616 of SEQ ID NO: 325
uaguuaugaugaguccuuu

SEQ ID NO: 28457 - RNA, 19 nt, Artificial Sequence
  Description of Artificial Sequence: Synthetic oligonucleotide
  Antisense strand to SEQ ID NO: 28456
aaaggacucaucauaacua

SEQ ID NO: 28458 - RNA, 19 nt, Artificial Sequence
  Description of Artificial Sequence: Synthetic oligonucleotide
  Sense strand starting at position 614 of SEQ ID NO: 325
gguaguuaugaugaguccu

SEQ ID NO: 28459 - RNA, 19 nt, Artificial Sequence
  Description of Artificial Sequence: Synthetic oligonucleotide
  Antisense strand to SEQ ID NO: 28458
aggacucaucauaacuacc

SEQ ID NO: 28460 - RNA, 19 nt, Artificial Sequence
  Description of Artificial Sequence: Synthetic oligonucleotide
  Sense strand starting at position 450 of SEQ ID NO: 325
cugccuacugcaggaaaua

SEQ ID NO: 28461 - RNA, 19 nt, Artificial Sequence
  Description of Artificial Sequence: Synthetic oligonucleotide
  Antisense strand to SEQ ID NO: 28460
uauuuccugcaguaggcag

SEQ ID NO: 28462 - RNA, 19 nt, Artificial Sequence
  Description of Artificial Sequence: Synthetic oligonucleotide
  Sense strand starting at position 276 of SEQ ID NO: 325
gaucaauuaccuggcaggu

SEQ ID NO: 28463 - RNA, 19 nt, Artificial Sequence
  Description of Artificial Sequence: Synthetic oligonucleotide
  Antisense strand to SEQ ID NO: 28462
accugccagguaauugauc

SEQ ID NO: 28464 - RNA, 19 nt, Artificial Sequence
  Description of Artificial Sequence: Synthetic oligonucleotide
  Sense strand starting at position 231 of SEQ ID NO: 325
acugaaugcucacugugau

SEQ ID NO: 28465 - RNA, 19 nt, Artificial Sequence
  Description of Artificial Sequence: Synthetic oligonucleotide
  Antisense strand to SEQ ID NO: 28464
aucacagugagcauucagu

SEQ ID NO: 28466 - RNA, 19 nt, Artificial Sequence
  Description of Artificial Sequence: Synthetic oligonucleotide
  Sense strand starting at position 125 of SEQ ID NO: 325
gugaccucacacugcaauu

SEQ ID NO: 28467 - RNA, 19 nt, Artificial Sequence
  Description of Artificial Sequence: Synthetic oligonucleotide
  Antisense strand to SEQ ID NO: 28466
aauugcagugugaggucac

SEQ ID NO: 28468 - RNA, 19 nt, Artificial Sequence
  Description of Artificial Sequence: Synthetic oligonucleotide
  Sense strand starting at position 79 of SEQ ID NO: 325
acuaauccugucuguaaag

SEQ ID NO: 28469 - RNA, 19 nt, Artificial Sequence
  Description of Artificial Sequence: Synthetic oligonucleotide
  Antisense strand to SEQ ID NO: 28468
cuuuacagacaggauuagu

SEQ ID NO: 28470 - RNA, 19 nt, Artificial Sequence
  Description of Artificial Sequence: Synthetic oligonucleotide
  Sense strand starting at position 3952 of SEQ ID NO: 324
guuauagaagccugaauga

SEQ ID NO: 28471 - RNA, 19 nt, Artificial Sequence
  Description of Artificial Sequence: Synthetic oligonucleotide
  Antisense strand to SEQ ID NO: 28470
ucauucaggcuucuauaac

SEQ ID NO: 28472 - RNA, 19 nt, Artificial Sequence
  Description of Artificial Sequence: Synthetic oligonucleotide
  Sense strand starting at position 3684 of SEQ ID NO: 324
cugcaagguaaugguauua

SEQ ID NO: 28473 - RNA, 19 nt, Artificial Sequence
  Description of Artificial Sequence: Synthetic oligonucleotide
  Antisense strand to SEQ ID NO: 28472
uaauaccauuaccuugcag

SEQ ID NO: 28474 - RNA, 19 nt, Artificial Sequence
  Description of Artificial Sequence: Synthetic oligonucleotide
  Sense strand starting at position 3543 of SEQ ID NO: 324
guagauccugcauaugguu

SEQ ID NO: 28475 - RNA, 19 nt, Artificial Sequence
  Description of Artificial Sequence: Synthetic oligonucleotide
  Antisense strand to SEQ ID NO: 28474
aaccauaugcaggaucuac

SEQ ID NO: 28476 - RNA, 19 nt, Artificial Sequence
  Description of Artificial Sequence: Synthetic oligonucleotide
  Sense strand starting at position 3529 of SEQ ID NO: 324
acacguucugucuaguaga

SEQ ID NO: 28477 - RNA, 19 nt, Artificial Sequence
  Description of Artificial Sequence: Synthetic oligonucleotide
  Antisense strand to SEQ ID NO: 28476
ucuacuagacagaacgugu

SEQ ID NO: 28478 - RNA, 19 nt, Artificial Sequence
  Description of Artificial Sequence: Synthetic oligonucleotide
  Sense strand starting at position 3448 of SEQ ID NO: 324
aguuaauggguacaguuaa

SEQ ID NO: 28479 - RNA, 19 nt, Artificial Sequence
  Description of Artificial Sequence: Synthetic oligonucleotide
  Antisense strand to SEQ ID NO: 28478
uuaacuguacccauuaacu

SEQ ID NO: 28480 - RNA, 19 nt, Artificial Sequence
  Description of Artificial Sequence: Synthetic oligonucleotide
  Sense strand starting at position 3446 of SEQ ID NO: 324
ugaguuaauggguacaguu

SEQ ID NO: 28481 - RNA, 19 nt, Artificial Sequence
  Description of Artificial Sequence: Synthetic oligonucleotide
  Antisense strand to SEQ ID NO: 28480
aacuguacccauuaacuca

SEQ ID NO: 28482 - RNA, 19 nt, Artificial Sequence
  Description of Artificial Sequence: Synthetic oligonucleotide
  Sense strand starting at position 3445 of SEQ ID NO: 324
uugaguuaauggguacagu

SEQ ID NO: 28483 - RNA, 19 nt, Artificial Sequence
  Description of Artificial Sequence: Synthetic oligonucleotide
  Antisense strand to SEQ ID NO: 28482
acuguacccauuaacucaa

SEQ ID NO: 28484 - RNA, 19 nt, Artificial Sequence
  Description of Artificial Sequence: Synthetic oligonucleotide
  Sense strand starting at position 3443 of SEQ ID NO: 324
ucuugaguuaauggguaca

SEQ ID NO: 28485 - RNA, 19 nt, Artificial Sequence
  Description of Artificial Sequence: Synthetic oligonucleotide
  Antisense strand to SEQ ID NO: 28484
uguacccauuaacucaaga

SEQ ID NO: 28486 - RNA, 19 nt, Artificial Sequence
  Description of Artificial Sequence: Synthetic oligonucleotide
  Sense strand starting at position 3404 of SEQ ID NO: 324
uucucuaacuagucaaagu

SEQ ID NO: 28487 - RNA, 19 nt, Artificial Sequence
  Description of Artificial Sequence: Synthetic oligonucleotide
  Antisense strand to SEQ ID NO: 28486
acuuugacuaguuagagaa

SEQ ID NO: 28488 - RNA, 19 nt, Artificial Sequence
  Description of Artificial Sequence: Synthetic oligonucleotide
  Sense strand starting at position 3400 of SEQ ID NO: 324
gugauucucuaacuaguca

SEQ ID NO: 28489 - RNA, 19 nt, Artificial Sequence
  Description of Artificial Sequence: Synthetic oligonucleotide
  Antisense strand to SEQ ID NO: 28488
ugacuaguuagagaaucac

SEQ ID NO: 28490 - RNA, 19 nt, Artificial Sequence
  Description of Artificial Sequence: Synthetic oligonucleotide
  Sense strand starting at position 3396 of SEQ ID NO: 324
cugugugauucucuaacua

SEQ ID NO: 28491 - RNA, 19 nt, Artificial Sequence
  Description of Artificial Sequence: Synthetic oligonucleotide
  Antisense strand to SEQ ID NO: 28490
uaguuagagaaucacacag

SEQ ID NO: 28492 - RNA, 19 nt, Artificial Sequence
  Description of Artificial Sequence: Synthetic oligonucleotide
  Sense strand starting at position 3392 of SEQ ID NO: 324
auuucugugugauucucua

SEQ ID NO: 28493 - RNA, 19 nt, Artificial Sequence
  Description of Artificial Sequence: Synthetic oligonucleotide
  Antisense strand to SEQ ID NO: 28492
uagagaaucacacagaaau

SEQ ID NO: 28494 - RNA, 19 nt, Artificial Sequence
  Description of Artificial Sequence: Synthetic oligonucleotide
  Sense strand starting at position 3343 of SEQ ID NO: 324
aguauuagucaccacguga

SEQ ID NO: 28495 - RNA, 19 nt, Artificial Sequence
  Description of Artificial Sequence: Synthetic oligonucleotide
  Antisense strand to SEQ ID NO: 28494
ucacguggugacuaauacu

SEQ ID NO: 28496 - RNA, 19 nt, Artificial Sequence
  Description of Artificial Sequence: Synthetic oligonucleotide
  Sense strand starting at position 2820 of SEQ ID NO: 324
uguguuugcccauagaaau

SEQ ID NO: 28497 - RNA, 19 nt, Artificial Sequence
  Description of Artificial Sequence: Synthetic oligonucleotide
  Antisense strand to SEQ ID NO: 28496
auuucuaugggcaaacaca

SEQ ID NO: 28498 - RNA, 19 nt, Artificial Sequence
  Description of Artificial Sequence: Synthetic oligonucleotide
  Sense strand starting at position 2766 of SEQ ID NO: 324
ggaucucacgucugagaaa

SEQ ID NO: 28499 - RNA, 19 nt, Artificial Sequence
  Description of Artificial Sequence: Synthetic oligonucleotide
  Antisense strand to SEQ ID NO: 28498
uuucucagacgugagaucc

SEQ ID NO: 28500 - RNA, 19 nt, Artificial Sequence
  Description of Artificial Sequence: Synthetic oligonucleotide
  Sense strand starting at position 2748 of SEQ ID NO: 324
guuauaguccuacaaauag

SEQ ID NO: 28501 - RNA, 19 nt, Artificial Sequence
  Description of Artificial Sequence: Synthetic oligonucleotide
  Antisense strand to SEQ ID NO: 28500
cuauuuguaggacuauaac

SEQ ID NO: 28502 - RNA, 19 nt, Artificial Sequence
  Description of Artificial Sequence: Synthetic oligonucleotide
  Sense strand starting at position 2468 of SEQ ID NO: 324
aggcccagaccaugaauau

SEQ ID NO: 28503 - RNA, 19 nt, Artificial Sequence
  Description of Artificial Sequence: Synthetic oligonucleotide
  Antisense strand to SEQ ID NO: 28502
auauucauggucugggccu

SEQ ID NO: 28504 - RNA, 19 nt, Artificial Sequence
  Description of Artificial Sequence: Synthetic oligonucleotide
  Sense strand starting at position 2417 of SEQ ID NO: 324
caggcaaucccauagugau

SEQ ID NO: 28505 - RNA, 19 nt, Artificial Sequence
  Description of Artificial Sequence: Synthetic oligonucleotide
  Antisense strand to SEQ ID NO: 28504
aucacuaugggauugccug

SEQ ID NO: 28506 - RNA, 19 nt, Artificial Sequence
  Description of Artificial Sequence: Synthetic oligonucleotide
  Sense strand starting at position 2383 of SEQ ID NO: 324
gcauuaugugaacacagcu

SEQ ID NO: 28507 - RNA, 19 nt, Artificial Sequence
  Description of Artificial Sequence: Synthetic oligonucleotide
  Antisense strand to SEQ ID NO: 28506
agcuguguucacauaaugc

SEQ ID NO: 28508 - RNA, 19 nt, Artificial Sequence
  Description of Artificial Sequence: Synthetic oligonucleotide
  Sense strand starting at position 2379 of SEQ ID NO: 324
ggaugcauuaugugaacac

SEQ ID NO: 28509 - RNA, 19 nt, Artificial Sequence
  Description of Artificial Sequence: Synthetic oligonucleotide
  Antisense strand to SEQ ID NO: 28508
guguucacauaaugcaucc

SEQ ID NO: 28510 - RNA, 19 nt, Artificial Sequence
  Description of Artificial Sequence: Synthetic oligonucleotide
  Sense strand starting at position 2295 of SEQ ID NO: 324
gcacgguguggucuugagu

SEQ ID NO: 28511 - RNA, 19 nt, Artificial Sequence
  Description of Artificial Sequence: Synthetic oligonucleotide
  Antisense strand to SEQ ID NO: 28510
acucaagaccacaccgugc

SEQ ID NO: 28512 - RNA, 19 nt, Artificial Sequence
  Description of Artificial Sequence: Synthetic oligonucleotide
  Sense strand starting at position 2276 of SEQ ID NO: 324
gguggcuuuacggagaagu

SEQ ID NO: 28513 - RNA, 19 nt, Artificial Sequence
  Description of Artificial Sequence: Synthetic oligonucleotide
  Antisense strand to SEQ ID NO: 28512
acuucuccguaaagccacc

SEQ ID NO: 28514 - RNA, 19 nt, Artificial Sequence
  Description of Artificial Sequence: Synthetic oligonucleotide
  Sense strand starting at position 1561 of SEQ ID NO: 324
caaagcuuuccacgguaga

SEQ ID NO: 28515 - RNA, 19 nt, Artificial Sequence
  Description of Artificial Sequence: Synthetic oligonucleotide
  Antisense strand to SEQ ID NO: 28514
ucuaccguggaaagcuuug

SEQ ID NO: 28516 - RNA, 19 nt, Artificial Sequence
  Description of Artificial Sequence: Synthetic oligonucleotide
  Sense strand starting at position 1378 of SEQ ID NO: 324
uguccuuguggauaagguu

SEQ ID NO: 28517 - RNA, 19 nt, Artificial Sequence
  Description of Artificial Sequence: Synthetic oligonucleotide
  Antisense strand to SEQ ID NO: 28516
aaccuuauccacaaggaca

SEQ ID NO: 28518 - RNA, 19 nt, Artificial Sequence
  Description of Artificial Sequence: Synthetic oligonucleotide
  Sense strand starting at position 1207 of SEQ ID NO: 324
ugguucucgggagaagauu

SEQ ID NO: 28519 - RNA, 19 nt, Artificial Sequence
  Description of Artificial Sequence: Synthetic oligonucleotide
  Antisense strand to SEQ ID NO: 28518
aaucuucucccgagaacca

SEQ ID NO: 28520 - RNA, 19 nt, Artificial Sequence
  Description of Artificial Sequence: Synthetic oligonucleotide
  Sense strand starting at position 1040 of SEQ ID NO: 324
gagguagagcccugacuaa

SEQ ID NO: 28521 - RNA, 19 nt, Artificial Sequence
  Description of Artificial Sequence: Synthetic oligonucleotide
  Antisense strand to SEQ ID NO: 28520
uuagucagggcucuaccuc

SEQ ID NO: 28522 - RNA, 19 nt, Artificial Sequence
  Description of Artificial Sequence: Synthetic oligonucleotide
  Sense strand starting at position 862 of SEQ ID NO: 324
ugacuauaugcaugagaca

SEQ ID NO: 28523 - RNA, 19 nt, Artificial Sequence
  Description of Artificial Sequence: Synthetic oligonucleotide
  Antisense strand to SEQ ID NO: 28522
ugucucaugcauauaguca

SEQ ID NO: 28524 - RNA, 19 nt, Artificial Sequence
  Description of Artificial Sequence: Synthetic oligonucleotide
  Sense strand starting at position 856 of SEQ ID NO: 324
gugauaugacuauaugcau

SEQ ID NO: 28525 - RNA, 19 nt, Artificial Sequence
  Description of Artificial Sequence: Synthetic oligonucleotide
  Antisense strand to SEQ ID NO: 28524
augcauauagucauaucac

SEQ ID NO: 28526 - RNA, 19 nt, Artificial Sequence
  Description of Artificial Sequence: Synthetic oligonucleotide
  Sense strand starting at position 784 of SEQ ID NO: 324
uagacauuggccugcauua

SEQ ID NO: 28527 - RNA, 19 nt, Artificial Sequence
  Description of Artificial Sequence: Synthetic oligonucleotide
  Antisense strand to SEQ ID NO: 28526
uaaugcaggccaaugucua

SEQ ID NO: 28528 - RNA, 19 nt, Artificial Sequence
  Description of Artificial Sequence: Synthetic oligonucleotide
  Sense strand starting at position 746 of SEQ ID NO: 324
ugacaauagcuguaaugua

SEQ ID NO: 28529 - RNA, 19 nt, Artificial Sequence
  Description of Artificial Sequence: Synthetic oligonucleotide
  Antisense strand to SEQ ID NO: 28528
uacauuacagcuauuguca

SEQ ID NO: 28530 - RNA, 19 nt, Artificial Sequence
  Description of Artificial Sequence: Synthetic oligonucleotide
  Sense strand starting at position 694 of SEQ ID NO: 324
gcuaauaaucauuguaaug

SEQ ID NO: 28531 - RNA, 19 nt, Artificial Sequence
  Description of Artificial Sequence: Synthetic oligonucleotide
  Antisense strand to SEQ ID NO: 28530
cauuacaaugauuauuagc

SEQ ID NO: 28532 - RNA, 19 nt, Artificial Sequence
  Description of Artificial Sequence: Synthetic oligonucleotide
  Sense strand starting at position 665 of SEQ ID NO: 324
ugcuacucauauguaagau

SEQ ID NO: 28533 - RNA, 19 nt, Artificial Sequence
  Description of Artificial Sequence: Synthetic oligonucleotide
  Antisense strand to SEQ ID NO: 28532
aucuuacauaugaguagca

SEQ ID NO: 28534 - RNA, 19 nt, Artificial Sequence
  Description of Artificial Sequence: Synthetic oligonucleotide
  Sense strand starting at position 651 of SEQ ID NO: 324
uaugaugaguccuuugcua

SEQ ID NO: 28535 - RNA, 19 nt, Artificial Sequence
  Description of Artificial Sequence: Synthetic oligonucleotide
  Antisense strand to SEQ ID NO: 28534
uagcaaaggacucaucaua

SEQ ID NO: 28536 - RNA, 19 nt, Artificial Sequence
  Description of Artificial Sequence: Synthetic oligonucleotide
  Sense strand starting at position 647 of SEQ ID NO: 324
uaguuaugaugaguccuuu

SEQ ID NO: 28537 - RNA, 19 nt, Artificial Sequence
  Description of Artificial Sequence: Synthetic oligonucleotide
  Antisense strand to SEQ ID NO: 28536
aaaggacucaucauaacua

SEQ ID NO: 28538 - RNA, 19 nt, Artificial Sequence
  Description of Artificial Sequence: Synthetic oligonucleotide
  Sense strand starting at position 645 of SEQ ID NO: 324
gguaguuaugaugaguccu

SEQ ID NO: 28539 - RNA, 19 nt, Artificial Sequence
  Description of Artificial Sequence: Synthetic oligonucleotide
  Antisense strand to SEQ ID NO: 28538
aggacucaucauaacuacc

SEQ ID NO: 28540 - RNA, 19 nt, Artificial Sequence
  Description of Artificial Sequence: Synthetic oligonucleotide
  Sense strand starting at position 481 of SEQ ID NO: 324
cugccuacugcaggaaaua

SEQ ID NO: 28541 - RNA, 19 nt, Artificial Sequence
  Description of Artificial Sequence: Synthetic oligonucleotide
  Antisense strand to SEQ ID NO: 28540
uauuuccugcaguaggcag

SEQ ID NO: 28542 - RNA, 19 nt, Artificial Sequence
  Description of Artificial Sequence: Synthetic oligonucleotide
  Sense strand starting at position 307 of SEQ ID NO: 324
gaucaauuaccuggcaggu

SEQ ID NO: 28543 - RNA, 19 nt, Artificial Sequence
  Description of Artificial Sequence: Synthetic oligonucleotide
  Antisense strand to SEQ ID NO: 28542
accugccagguaauugauc

SEQ ID NO: 28544 - RNA, 19 nt, Artificial Sequence
  Description of Artificial Sequence: Synthetic oligonucleotide
  Sense strand starting at position 262 of SEQ ID NO: 324
acugaaugcucacugugau

SEQ ID NO: 28545 - RNA, 19 nt, Artificial Sequence
  Description of Artificial Sequence: Synthetic oligonucleotide
  Antisense strand to SEQ ID NO: 28544
aucacagugagcauucagu

SEQ ID NO: 28546 - RNA, 19 nt, Artificial Sequence
  Description of Artificial Sequence: Synthetic oligonucleotide
  Sense strand starting at position 156 of SEQ ID NO: 324
gugaccucacacugcaauu

SEQ ID NO: 28547 - RNA, 19 nt, Artificial Sequence
  Description of Artificial Sequence: Synthetic oligonucleotide
  Antisense strand to SEQ ID NO: 28546
aauugcagugugaggucac

SEQ ID NO: 28548 - RNA, 19 nt, Artificial Sequence
  Description of Artificial Sequence: Synthetic oligonucleotide
  Sense strand starting at position 110 of SEQ ID NO: 324
acuaauccugucuguaaag

SEQ ID NO: 28549 - RNA, 19 nt, Artificial Sequence
  Description of Artificial Sequence: Synthetic oligonucleotide
  Antisense strand to SEQ ID NO: 28548
cuuuacagacaggauuagu

SEQ ID NO: 28550 - RNA, 19 nt, Artificial Sequence
  Description of Artificial Sequence: Synthetic oligonucleotide
  Sense strand starting at position 3657 of SEQ ID NO: 326
gagaauaguugauuacuau

SEQ ID NO: 28551 - RNA, 19 nt, Artificial Sequence
  Description of Artificial Sequence: Synthetic oligonucleotide
  Antisense strand to SEQ ID NO: 28550
auaguaaucaacuauucuc

SEQ ID NO: 28552 - RNA, 19 nt, Artificial Sequence
  Description of Artificial Sequence: Synthetic oligonucleotide
  Sense strand starting at position 3647 of SEQ ID NO: 326
acauuuagaugagaauagu

SEQ ID NO: 28553 - RNA, 19 nt, Artificial Sequence
  Description of Artificial Sequence: Synthetic oligonucleotide
  Antisense strand to SEQ ID NO: 28552
acuauucucaucuaaaugu

SEQ ID NO: 28554 - RNA, 19 nt, Artificial Sequence
  Description of Artificial Sequence: Synthetic oligonucleotide
  Sense strand starting at position 3642 of SEQ ID NO: 326
augcaacauuuagaugaga

SEQ ID NO: 28555 - RNA, 19 nt, Artificial Sequence
  Description of Artificial Sequence: Synthetic oligonucleotide
  Antisense strand to SEQ ID NO: 28554
ucucaucuaaauguugcau

SEQ ID NO: 28556 - RNA, 19 nt, Artificial Sequence
  Description of Artificial Sequence: Synthetic oligonucleotide
  Sense strand starting at position 3629 of SEQ ID NO: 326
cuacguuaaccauaugcaa

SEQ ID NO: 28557 - RNA, 19 nt, Artificial Sequence
  Description of Artificial Sequence: Synthetic oligonucleotide
  Antisense strand to SEQ ID NO: 28556
uugcauaugguuaacguag

SEQ ID NO: 28558 - RNA, 19 nt, Artificial Sequence
  Description of Artificial Sequence: Synthetic oligonucleotide
  Sense strand starting at position 3601 of SEQ ID NO: 326
guuacugauugacuuguca

SEQ ID NO: 28559 - RNA, 19 nt, Artificial Sequence
  Description of Artificial Sequence: Synthetic oligonucleotide
  Antisense strand to SEQ ID NO: 28558
ugacaagucaaucaguaac

SEQ ID NO: 28560 - RNA, 19 nt, Artificial Sequence
  Description of Artificial Sequence: Synthetic oligonucleotide
  Sense strand starting at position 3597 of SEQ ID NO: 326
caguguuacugauugacuu

SEQ ID NO: 28561 - RNA, 19 nt, Artificial Sequence
  Description of Artificial Sequence: Synthetic oligonucleotide
  Antisense strand to SEQ ID NO: 28560
aagucaaucaguaacacug

SEQ ID NO: 28562 - RNA, 19 nt, Artificial Sequence
  Description of Artificial Sequence: Synthetic oligonucleotide
  Sense strand starting at position 3566 of SEQ ID NO: 326
gaaugaagugcuuaacggu

SEQ ID NO: 28563 - RNA, 19 nt, Artificial Sequence
  Description of Artificial Sequence: Synthetic oligonucleotide
  Antisense strand to SEQ ID NO: 28562
accguuaagcacuucauuc

SEQ ID NO: 28564 - RNA, 19 nt, Artificial Sequence
  Description of Artificial Sequence: Synthetic oligonucleotide
  Sense strand starting at position 3562 of SEQ ID NO: 326
aggugaaugaagugcuuaa

SEQ ID NO: 28565 - RNA, 19 nt, Artificial Sequence
  Description of Artificial Sequence: Synthetic oligonucleotide
  Antisense strand to SEQ ID NO: 28564
uuaagcacuucauucaccu

SEQ ID NO: 28566 - RNA, 19 nt, Artificial Sequence
  Description of Artificial Sequence: Synthetic oligonucleotide
  Sense strand starting at position 3553 of SEQ ID NO: 326
cucuguaacaggugaauga

SEQ ID NO: 28567 - RNA, 19 nt, Artificial Sequence
  Description of Artificial Sequence: Synthetic oligonucleotide
  Antisense strand to SEQ ID NO: 28566
ucauucaccuguuacagag

SEQ ID NO: 28568 - RNA, 19 nt, Artificial Sequence
  Description of Artificial Sequence: Synthetic oligonucleotide
  Sense strand starting at position 3449 of SEQ ID NO: 326
ugaguuaauguucggaaau

SEQ ID NO: 28569 - RNA, 19 nt, Artificial Sequence
  Description of Artificial Sequence: Synthetic oligonucleotide
  Antisense strand to SEQ ID NO: 28568
auuuccgaacauuaacuca

SEQ ID NO: 28570 - RNA, 19 nt, Artificial Sequence
  Description of Artificial Sequence: Synthetic oligonucleotide
  Sense strand starting at position 3440 of SEQ ID NO: 326
gaaagacugugaguuaaug

SEQ ID NO: 28571 - RNA, 19 nt, Artificial Sequence
  Description of Artificial Sequence: Synthetic oligonucleotide
  Antisense strand to SEQ ID NO: 28570
cauuaacucacagucuuuc

SEQ ID NO: 28572 - RNA, 19 nt, Artificial Sequence
  Description of Artificial Sequence: Synthetic oligonucleotide
  Sense strand starting at position 3437 of SEQ ID NO: 326
caugaaagacugugaguua

SEQ ID NO: 28573 - RNA, 19 nt, Artificial Sequence
  Description of Artificial Sequence: Synthetic oligonucleotide
  Antisense strand to SEQ ID NO: 28572
uaacucacagucuuucaug

SEQ ID NO: 28574 - RNA, 19 nt, Artificial Sequence
  Description of Artificial Sequence: Synthetic oligonucleotide
  Sense strand starting at position 3371 of SEQ ID NO: 326
ucaguauggugguugauuu

SEQ ID NO: 28575 - RNA, 19 nt, Artificial Sequence
  Description of Artificial Sequence: Synthetic oligonucleotide
  Antisense strand to SEQ ID NO: 28574
aaaucaaccaccauacuga

SEQ ID NO: 28576 - RNA, 19 nt, Artificial Sequence
  Description of Artificial Sequence: Synthetic oligonucleotide
  Sense strand starting at position 3294 of SEQ ID NO: 326
cuuaccaugugauuauauu

SEQ ID NO: 28577 - RNA, 19 nt, Artificial Sequence
  Description of Artificial Sequence: Synthetic oligonucleotide
  Antisense strand to SEQ ID NO: 28576
aauauaaucacaugguaag

SEQ ID NO: 28578 - RNA, 19 nt, Artificial Sequence
  Description of Artificial Sequence: Synthetic oligonucleotide
  Sense strand starting at position 3223 of SEQ ID NO: 326
ccugauggauucucauaua

SEQ ID NO: 28579 - RNA, 19 nt, Artificial Sequence
  Description of Artificial Sequence: Synthetic oligonucleotide
  Antisense strand to SEQ ID NO: 28578
uauaugagaauccaucagg

SEQ ID NO: 28580 - RNA, 19 nt, Artificial Sequence
  Description of Artificial Sequence: Synthetic oligonucleotide
  Sense strand starting at position 3204 of SEQ ID NO: 326
acauguaagaagugaugau

SEQ ID NO: 28581 - RNA, 19 nt, Artificial Sequence
  Description of Artificial Sequence: Synthetic oligonucleotide
  Antisense strand to SEQ ID NO: 28580
aucaucacuucuuacaugu

SEQ ID NO: 28582 - RNA, 19 nt, Artificial Sequence
  Description of Artificial Sequence: Synthetic oligonucleotide
  Sense strand starting at position 3180 of SEQ ID NO: 326
guauucugugcugacaaua

SEQ ID NO: 28583 - RNA, 19 nt, Artificial Sequence
  Description of Artificial Sequence: Synthetic oligonucleotide
  Antisense strand to SEQ ID NO: 28582
uauugucagcacagaauac

SEQ ID NO: 28584 - RNA, 19 nt, Artificial Sequence
  Description of Artificial Sequence: Synthetic oligonucleotide
  Sense strand starting at position 3148 of SEQ ID NO: 326
aguucuuucgacgucugua

SEQ ID NO: 28585 - RNA, 19 nt, Artificial Sequence
  Description of Artificial Sequence: Synthetic oligonucleotide
  Antisense strand to SEQ ID NO: 28584
uacagacgucgaaagaacu

SEQ ID NO: 28586 - RNA, 19 nt, Artificial Sequence
  Description of Artificial Sequence: Synthetic oligonucleotide
  Sense strand starting at position 3085 of SEQ ID NO: 326
gcuuaucuugaguaauaaa

SEQ ID NO: 28587 - RNA, 19 nt, Artificial Sequence
  Description of Artificial Sequence: Synthetic oligonucleotide
  Antisense strand to SEQ ID NO: 28586
uuuauuacucaagauaagc

SEQ ID NO: 28588 - RNA, 19 nt, Artificial Sequence
  Description of Artificial Sequence: Synthetic oligonucleotide
  Sense strand starting at position 3084 of SEQ ID NO: 326
ggcuuaucuugaguaauaa

SEQ ID NO: 28589 - RNA, 19 nt, Artificial Sequence
  Description of Artificial Sequence: Synthetic oligonucleotide
  Antisense strand to SEQ ID NO: 28588
uuauuacucaagauaagcc

SEQ ID NO: 28590 - RNA, 19 nt, Artificial Sequence
  Description of Artificial Sequence: Synthetic oligonucleotide
  Sense strand starting at position 3082 of SEQ ID NO: 326
uaggcuuaucuugaguaau

SEQ ID NO: 28591 - RNA, 19 nt, Artificial Sequence
  Description of Artificial Sequence: Synthetic oligonucleotide
  Antisense strand to SEQ ID NO: 28590
auuacucaagauaagccua

SEQ ID NO: 28592 - RNA, 19 nt, Artificial Sequence
  Description of Artificial Sequence: Synthetic oligonucleotide
  Sense strand starting at position 3011 of SEQ ID NO: 326
aauugaggauucucuuguu

SEQ ID NO: 28593 - RNA, 19 nt, Artificial Sequence
  Description of Artificial Sequence: Synthetic oligonucleotide
  Antisense strand to SEQ ID NO: 28592
aacaagagaauccucaauu

SEQ ID NO: 28594 - RNA, 19 nt, Artificial Sequence
  Description of Artificial Sequence: Synthetic oligonucleotide
  Sense strand starting at position 2830 of SEQ ID NO: 326
acagaagagugucucagau

SEQ ID NO: 28595 - RNA, 19 nt, Artificial Sequence
  Description of Artificial Sequence: Synthetic oligonucleotide
  Antisense strand to SEQ ID NO: 28594
aucugagacacucuucugu

SEQ ID NO: 28596 - RNA, 19 nt, Artificial Sequence
  Description of Artificial Sequence: Synthetic oligonucleotide
  Sense strand starting at position 2698 of SEQ ID NO: 326
ccuugcaguugauugacaa

SEQ ID NO: 28597 - RNA, 19 nt, Artificial Sequence
  Description of Artificial Sequence: Synthetic oligonucleotide
  Antisense strand to SEQ ID NO: 28596
uugucaaucaacugcaagg

SEQ ID NO: 28598 - RNA, 19 nt, Artificial Sequence
  Description of Artificial Sequence: Synthetic oligonucleotide
  Sense strand starting at position 2661 of SEQ ID NO: 326
gagcgaucaagugaguucu

SEQ ID NO: 28599 - RNA, 19 nt, Artificial Sequence
  Description of Artificial Sequence: Synthetic oligonucleotide
  Antisense strand to SEQ ID NO: 28598
agaacucacuugaucgcuc

SEQ ID NO: 28600 - RNA, 19 nt, Artificial Sequence
  Description of Artificial Sequence: Synthetic oligonucleotide
  Sense strand starting at position 2617 of SEQ ID NO: 326
agagauucucgguaguccu

SEQ ID NO: 28601 - RNA, 19 nt, Artificial Sequence
  Description of Artificial Sequence: Synthetic oligonucleotide
  Antisense strand to SEQ ID NO: 28600
aggacuaccgagaaucucu

SEQ ID NO: 28602 - RNA, 19 nt, Artificial Sequence
  Description of Artificial Sequence: Synthetic oligonucleotide
  Sense strand starting at position 2507 of SEQ ID NO: 326
ugaggaucccuuugaggcu

SEQ ID NO: 28603 - RNA, 19 nt, Artificial Sequence
  Description of Artificial Sequence: Synthetic oligonucleotide
  Antisense strand to SEQ ID NO: 28602
agccucaaagggauccuca

SEQ ID NO: 28604 - RNA, 19 nt, Artificial Sequence
  Description of Artificial Sequence: Synthetic oligonucleotide
  Sense strand starting at position 1143 of SEQ ID NO: 326
agugacucgcccuaaacua

SEQ ID NO: 28605 - RNA, 19 nt, Artificial Sequence
  Description of Artificial Sequence: Synthetic oligonucleotide
  Antisense strand to SEQ ID NO: 28604
uaguuuagggcgagucacu

SEQ ID NO: 28606 - RNA, 19 nt, Artificial Sequence
  Description of Artificial Sequence: Synthetic oligonucleotide
  Sense strand starting at position 1140 of SEQ ID NO: 326
ggaagugacucgcccuaaa

SEQ ID NO: 28607 - RNA, 19 nt, Artificial Sequence
  Description of Artificial Sequence: Synthetic oligonucleotide
  Antisense strand to SEQ ID NO: 28606
uuuagggcgagucacuucc

SEQ ID NO: 28608 - RNA, 19 nt, Artificial Sequence
  Description of Artificial Sequence: Synthetic oligonucleotide
  Sense strand starting at position 1053 of SEQ ID NO: 326
gaccucuccuugucgaaga

SEQ ID NO: 28609 - RNA, 19 nt, Artificial Sequence
  Description of Artificial Sequence: Synthetic oligonucleotide
  Antisense strand to SEQ ID NO: 28608
ucuucgacaaggagagguc

SEQ ID NO: 28610 - RNA, 19 nt, Artificial Sequence
  Description of Artificial Sequence: Synthetic oligonucleotide
  Sense strand starting at position 973 of SEQ ID NO: 326
acagauuuauuauagcgaa

SEQ ID NO: 28611 - RNA, 19 nt, Artificial Sequence
  Description of Artificial Sequence: Synthetic oligonucleotide
  Antisense strand to SEQ ID NO: 28610
uucgcuauaauaaaucugu

SEQ ID NO: 28612 - RNA, 19 nt, Artificial Sequence
  Description of Artificial Sequence: Synthetic oligonucleotide
  Sense strand starting at position 673 of SEQ ID NO: 326
gugcucuuguauuuaagac

SEQ ID NO: 28613 - RNA, 19 nt, Artificial Sequence
  Description of Artificial Sequence: Synthetic oligonucleotide
  Antisense strand to SEQ ID NO: 28612
gucuuaaauacaagagcac

SEQ ID NO: 28614 - RNA, 19 nt, Artificial Sequence
  Description of Artificial Sequence: Synthetic oligonucleotide
  Sense strand starting at position 655 of SEQ ID NO: 326
guuauuccaccuuagaaug

SEQ ID NO: 28615 - RNA, 19 nt, Artificial Sequence
  Description of Artificial Sequence: Synthetic oligonucleotide
  Antisense strand to SEQ ID NO: 28614
cauucuaagguggaauaac

SEQ ID NO: 28616 - RNA, 19 nt, Artificial Sequence
  Description of Artificial Sequence: Synthetic oligonucleotide
  Sense strand starting at position 564 of SEQ ID NO: 326
aggucauucuaaguucuac

SEQ ID NO: 28617 - RNA, 19 nt, Artificial Sequence
  Description of Artificial Sequence: Synthetic oligonucleotide
  Antisense strand to SEQ ID NO: 28616
guagaacuuagaaugaccu

SEQ ID NO: 28618 - RNA, 19 nt, Artificial Sequence
  Description of Artificial Sequence: Synthetic oligonucleotide
  Sense strand starting at position 538 of SEQ ID NO: 326
auucuuguccaauaaguug

SEQ ID NO: 28619 - RNA, 19 nt, Artificial Sequence
  Description of Artificial Sequence: Synthetic oligonucleotide
  Antisense strand to SEQ ID NO: 28618
caacuuauuggacaagaau

SEQ ID NO: 28620 - RNA, 19 nt, Artificial Sequence
  Description of Artificial Sequence: Synthetic oligonucleotide
  Sense strand starting at position 519 of SEQ ID NO: 326
gugggagacaaaugucaua

SEQ ID NO: 28621 - RNA, 19 nt, Artificial Sequence
  Description of Artificial Sequence: Synthetic oligonucleotide
  Antisense strand to SEQ ID NO: 28620
uaugacauuugucucccac

SEQ ID NO: 28622 - RNA, 19 nt, Artificial Sequence
  Description of Artificial Sequence: Synthetic oligonucleotide
  Sense strand starting at position 396 of SEQ ID NO: 326
aguuauuccguacagagga

SEQ ID NO: 28623 - RNA, 19 nt, Artificial Sequence
  Description of Artificial Sequence: Synthetic oligonucleotide
  Antisense strand to SEQ ID NO: 28622
uccucuguacggaauaacu

SEQ ID NO: 28624 - RNA, 19 nt, Artificial Sequence
  Description of Artificial Sequence: Synthetic oligonucleotide
  Sense strand starting at position 394 of SEQ ID NO: 326
caaguuauuccguacagag

SEQ ID NO: 28625 - RNA, 19 nt, Artificial Sequence
  Description of Artificial Sequence: Synthetic oligonucleotide
  Antisense strand to SEQ ID NO: 28624
cucuguacggaauaacuug

SEQ ID NO: 28626 - RNA, 19 nt, Artificial Sequence
  Description of Artificial Sequence: Synthetic oligonucleotide
  Sense strand starting at position 301 of SEQ ID NO: 326
guaugaagaucaguuucca

SEQ ID NO: 28627 - RNA, 19 nt, Artificial Sequence
  Description of Artificial Sequence: Synthetic oligonucleotide
  Antisense strand to SEQ ID NO: 28626
uggaaacugaucuucauac

SEQ ID NO: 28628 - RNA, 19 nt, Artificial Sequence
  Description of Artificial Sequence: Synthetic oligonucleotide
  Sense strand starting at position 254 of SEQ ID NO: 326
ccagcauaggcuuauacau

SEQ ID NO: 28629 - RNA, 19 nt, Artificial Sequence
  Description of Artificial Sequence: Synthetic oligonucleotide
  Antisense strand to SEQ ID NO: 28628
auguauaagccuaugcugg

SEQ ID NO: 28630 - RNA, 19 nt, Artificial Sequence
  Description of Artificial Sequence: Synthetic oligonucleotide
  Sense strand starting at position 3 of SEQ ID NO: 328
auacuuuguccugagugca

SEQ ID NO: 28631 - RNA, 19 nt, Artificial Sequence
  Description of Artificial Sequence: Synthetic oligonucleotide
  Antisense strand to SEQ ID NO: 28630
ugcacucaggacaaaguau

SEQ ID NO: 28632 - RNA, 19 nt, Artificial Sequence
  Description of Artificial Sequence: Synthetic oligonucleotide
  Sense strand starting at position 17 of SEQ ID NO: 328
gugcacacucaggaaacuu

SEQ ID NO: 28633 - RNA, 19 nt, Artificial Sequence
  Description of Artificial Sequence: Synthetic oligonucleotide
  Antisense strand to SEQ ID NO: 28632
aaguuuccugagugugcac

SEQ ID NO: 28634 - RNA, 19 nt, Artificial Sequence
  Description of Artificial Sequence: Synthetic oligonucleotide
  Sense strand starting at position 74 of SEQ ID NO: 328
agaagucguucuccaucaa

SEQ ID NO: 28635 - RNA, 19 nt, Artificial Sequence
  Description of Artificial Sequence: Synthetic oligonucleotide
  Antisense strand to SEQ ID NO: 28634
uugauggagaacgacuucu

SEQ ID NO: 28636 - RNA, 19 nt, Artificial Sequence
  Description of Artificial Sequence: Synthetic oligonucleotide
  Sense strand starting at position 147 of SEQ ID NO: 328
gacaaauccgaaggccuua

SEQ ID NO: 28637 - RNA, 19 nt, Artificial Sequence
  Description of Artificial Sequence: Synthetic oligonucleotide
  Antisense strand to SEQ ID NO: 28636
uaaggccuucggauuuguc

SEQ ID NO: 28638 - RNA, 19 nt, Artificial Sequence
  Description of Artificial Sequence: Synthetic oligonucleotide
  Sense strand starting at position 340 of SEQ ID NO: 328
ccuugauccugucaggaag

SEQ ID NO: 28639 - RNA, 19 nt, Artificial Sequence
  Description of Artificial Sequence: Synthetic oligonucleotide
  Antisense strand to SEQ ID NO: 28638
cuuccugacaggaucaagg

SEQ ID NO: 28640 - RNA, 19 nt, Artificial Sequence
  Description of Artificial Sequence: Synthetic oligonucleotide
  Sense strand starting at position 355 of SEQ ID NO: 328
gaagaaguucucuggcccu

SEQ ID NO: 28641 - RNA, 19 nt, Artificial Sequence
  Description of Artificial Sequence: Synthetic oligonucleotide
  Antisense strand to SEQ ID NO: 28640
agggccagagaacuucuuc

SEQ ID NO: 28642 - RNA, 19 nt, Artificial Sequence
  Description of Artificial Sequence: Synthetic oligonucleotide
  Sense strand starting at position 593 of SEQ ID NO: 328
gcugacaguucagagggaa

SEQ ID NO: 28643 - RNA, 19 nt, Artificial Sequence
  Description of Artificial Sequence: Synthetic oligonucleotide
  Antisense strand to SEQ ID NO: 28642
uucccucugaacugucagc

SEQ ID NO: 28644 - RNA, 19 nt, Artificial Sequence
  Description of Artificial Sequence: Synthetic oligonucleotide
  Sense strand starting at position 702 of SEQ ID NO: 328
gcgauugugcguucauccu

SEQ ID NO: 28645 - RNA, 19 nt, Artificial Sequence
  Description of Artificial Sequence: Synthetic oligonucleotide
  Antisense strand to SEQ ID NO: 28644
aggaugaacgcacaaucgc

SEQ ID NO: 28646 - RNA, 19 nt, Artificial Sequence
  Description of Artificial Sequence: Synthetic oligonucleotide
  Sense strand starting at position 2542 of SEQ ID NO: 328
uuguuuaggcaccggaaga

SEQ ID NO: 28647 - RNA, 19 nt, Artificial Sequence
  Description of Artificial Sequence: Synthetic oligonucleotide
  Antisense strand to SEQ ID NO: 28646
ucuuccggugccuaaacaa

SEQ ID NO: 28648 - RNA, 19 nt, Artificial Sequence
  Description of Artificial Sequence: Synthetic oligonucleotide
  Sense strand starting at position 2543 of SEQ ID NO: 328
uguuuaggcaccggaagau

SEQ ID NO: 28649 - RNA, 19 nt, Artificial Sequence
  Description of Artificial Sequence: Synthetic oligonucleotide
  Antisense strand to SEQ ID NO: 28648
aucuuccggugccuaaaca

SEQ ID NO: 28650 - RNA, 19 nt, Artificial Sequence
  Description of Artificial Sequence: Synthetic oligonucleotide
  Sense strand starting at position 2552 of SEQ ID NO: 328
accggaagauaacagauaa

SEQ ID NO: 28651 - RNA, 19 nt, Artificial Sequence
  Description of Artificial Sequence: Synthetic oligonucleotide
  Antisense strand to SEQ ID NO: 28650
uuaucuguuaucuuccggu

SEQ ID NO: 28652 - RNA, 19 nt, Artificial Sequence
  Description of Artificial Sequence: Synthetic oligonucleotide
  Sense strand starting at position 2589 of SEQ ID NO: 328
gguauagcugcagacagaa

SEQ ID NO: 28653 - RNA, 19 nt, Artificial Sequence
  Description of Artificial Sequence: Synthetic oligonucleotide
  Antisense strand to SEQ ID NO: 28652
uucugucugcagcuauacc

SEQ ID NO: 28654 - RNA, 19 nt, Artificial Sequence
  Description of Artificial Sequence: Synthetic oligonucleotide
  Sense strand starting at position 2603 of SEQ ID NO: 328
cagaauaucugugaggaug

SEQ ID NO: 28655 - RNA, 19 nt, Artificial Sequence
  Description of Artificial Sequence: Synthetic oligonucleotide
  Antisense strand to SEQ ID NO: 28654
cauccucacagauauucug

SEQ ID NO: 28656 - RNA, 19 nt, Artificial Sequence
  Description of Artificial Sequence: Synthetic oligonucleotide
  Sense strand starting at position 2605 of SEQ ID NO: 328
gaauaucugugaggaugac

SEQ ID NO: 28657 - RNA, 19 nt, Artificial Sequence
  Description of Artificial Sequence: Synthetic oligonucleotide
  Antisense strand to SEQ ID NO: 28656
gucauccucacagauauuc

SEQ ID NO: 28658 - RNA, 19 nt, Artificial Sequence
  Description of Artificial Sequence: Synthetic oligonucleotide
  Sense strand starting at position 2792 of SEQ ID NO: 328
ggugguucgcuccuauagu

SEQ ID NO: 28659 - RNA, 19 nt, Artificial Sequence
  Description of Artificial Sequence: Synthetic oligonucleotide
  Antisense strand to SEQ ID NO: 28658
acuauaggagcgaaccacc

SEQ ID NO: 28660 - RNA, 19 nt, Artificial Sequence
  Description of Artificial Sequence: Synthetic oligonucleotide
  Sense strand starting at position 2958 of SEQ ID NO: 328
agcuguuaugaguacuguu

SEQ ID NO: 28661 - RNA, 19 nt, Artificial Sequence
  Description of Artificial Sequence: Synthetic oligonucleotide
  Antisense strand to SEQ ID NO: 28660
aacaguacucauaacagcu

SEQ ID NO: 28662 - RNA, 19 nt, Artificial Sequence
  Description of Artificial Sequence: Synthetic oligonucleotide
  Sense strand starting at position 2968 of SEQ ID NO: 328
aguacuguugaaugugcua

SEQ ID NO: 28663 - RNA, 19 nt, Artificial Sequence
  Description of Artificial Sequence: Synthetic oligonucleotide
  Antisense strand to SEQ ID NO: 28662
uagcacauucaacaguacu

SEQ ID NO: 28664 - RNA, 19 nt, Artificial Sequence
  Description of Artificial Sequence: Synthetic oligonucleotide
  Sense strand starting at position 3090 of SEQ ID NO: 328
aagcuuagucuagguagca

SEQ ID NO: 28665 - RNA, 19 nt, Artificial Sequence
  Description of Artificial Sequence: Synthetic oligonucleotide
  Antisense strand to SEQ ID NO: 28664
ugcuaccuagacuaagcuu

SEQ ID NO: 28666 - RNA, 19 nt, Artificial Sequence
  Description of Artificial Sequence: Synthetic oligonucleotide
  Sense strand starting at position 3106 of SEQ ID NO: 328
gcaggagagaucuggauug

SEQ ID NO: 28667 - RNA, 19 nt, Artificial Sequence
  Description of Artificial Sequence: Synthetic oligonucleotide
  Antisense strand to SEQ ID NO: 28666
caauccagaucucuccugc

SEQ ID NO: 28668 - RNA, 19 nt, Artificial Sequence
  Description of Artificial Sequence: Synthetic oligonucleotide
  Sense strand starting at position 3111 of SEQ ID NO: 328
agagaucuggauugcuaac

SEQ ID NO: 28669 - RNA, 19 nt, Artificial Sequence
  Description of Artificial Sequence: Synthetic oligonucleotide
  Antisense strand to SEQ ID NO: 28668
guuagcaauccagaucucu

SEQ ID NO: 28670 - RNA, 19 nt, Artificial Sequence
  Description of Artificial Sequence: Synthetic oligonucleotide
  Sense strand starting at position 3113 of SEQ ID NO: 328
agaucuggauugcuaacaa

SEQ ID NO: 28671 - RNA, 19 nt, Artificial Sequence
  Description of Artificial Sequence: Synthetic oligonucleotide
  Antisense strand to SEQ ID NO: 28670
uuguuagcaauccagaucu

SEQ ID NO: 28672 - RNA, 19 nt, Artificial Sequence
  Description of Artificial Sequence: Synthetic oligonucleotide
  Sense strand starting at position 3148 of SEQ ID NO: 328
cuguuugcuuugguuaaau

SEQ ID NO: 28673 - RNA, 19 nt, Artificial Sequence
  Description of Artificial Sequence: Synthetic oligonucleotide
  Antisense strand to SEQ ID NO: 28672
auuuaaccaaagcaaacag

SEQ ID NO: 28674 - RNA, 19 nt, Artificial Sequence
  Description of Artificial Sequence: Synthetic oligonucleotide
  Sense strand starting at position 3150 of SEQ ID NO: 328
guuugcuuugguuaaauca

SEQ ID NO: 28675 - RNA, 19 nt, Artificial Sequence
  Description of Artificial Sequence: Synthetic oligonucleotide
  Antisense strand to SEQ ID NO: 28674
ugauuuaaccaaagcaaac

SEQ ID NO: 28676 - RNA, 19 nt, Artificial Sequence
  Description of Artificial Sequence: Synthetic oligonucleotide
  Sense strand starting at position 3314 of SEQ ID NO: 328
caagaaugguauuggauga

SEQ ID NO: 28677 - RNA, 19 nt, Artificial Sequence
  Description of Artificial Sequence: Synthetic oligonucleotide
  Antisense strand to SEQ ID NO: 28676
ucauccaauaccauucuug

SEQ ID NO: 28678 - RNA, 19 nt, Artificial Sequence
  Description of Artificial Sequence: Synthetic oligonucleotide
  Sense strand starting at position 3318 of SEQ ID NO: 328
aaugguauuggaugaguau

SEQ ID NO: 28679 - RNA, 19 nt, Artificial Sequence
  Description of Artificial Sequence: Synthetic oligonucleotide
  Antisense strand to SEQ ID NO: 28678
auacucauccaauaccauu

SEQ ID NO: 28680 - RNA, 19 nt, Artificial Sequence
  Description of Artificial Sequence: Synthetic oligonucleotide
  Sense strand starting at position 3319 of SEQ ID NO: 328
augguauuggaugaguauu

SEQ ID NO: 28681 - RNA, 19 nt, Artificial Sequence
  Description of Artificial Sequence: Synthetic oligonucleotide
  Antisense strand to SEQ ID NO: 28680
aauacucauccaauaccau

SEQ ID NO: 28682 - RNA, 19 nt, Artificial Sequence
  Description of Artificial Sequence: Synthetic oligonucleotide
  Sense strand starting at position 3321 of SEQ ID NO: 328
gguauuggaugaguauuac

SEQ ID NO: 28683 - RNA, 19 nt, Artificial Sequence
  Description of Artificial Sequence: Synthetic oligonucleotide
  Antisense strand to SEQ ID NO: 28682
guaauacucauccaauacc

SEQ ID NO: 28684 - RNA, 19 nt, Artificial Sequence
  Description of Artificial Sequence: Synthetic oligonucleotide
  Sense strand starting at position 3325 of SEQ ID NO: 328
uuggaugaguauuacagaa

SEQ ID NO: 28685 - RNA, 19 nt, Artificial Sequence
  Description of Artificial Sequence: Synthetic oligonucleotide
  Antisense strand to SEQ ID NO: 28684
uucuguaauacucauccaa

SEQ ID NO: 28686 - RNA, 19 nt, Artificial Sequence
  Description of Artificial Sequence: Synthetic oligonucleotide
  Sense strand starting at position 3327 of SEQ ID NO: 328
ggaugaguauuacagaaau

SEQ ID NO: 28687 - RNA, 19 nt, Artificial Sequence
  Description of Artificial Sequence: Synthetic oligonucleotide
  Antisense strand to SEQ ID NO: 28686
auuucuguaauacucaucc

SEQ ID NO: 28688 - RNA, 19 nt, Artificial Sequence
  Description of Artificial Sequence: Synthetic oligonucleotide
  Sense strand starting at position 3366 of SEQ ID NO: 328
cgcaguagauacuuauuga

SEQ ID NO: 28689 - RNA, 19 nt, Artificial Sequence
  Description of Artificial Sequence: Synthetic oligonucleotide
  Antisense strand to SEQ ID NO: 28688
ucaauaaguaucuacugcg

SEQ ID NO: 28690 - RNA, 19 nt, Artificial Sequence
  Description of Artificial Sequence: Synthetic oligonucleotide
  Sense strand starting at position 3367 of SEQ ID NO: 328
gcaguagauacuuauugag

SEQ ID NO: 28691 - RNA, 19 nt, Artificial Sequence
  Description of Artificial Sequence: Synthetic oligonucleotide
  Antisense strand to SEQ ID NO: 28690
cucaauaaguaucuacugc

SEQ ID NO: 28692 - RNA, 19 nt, Artificial Sequence
  Description of Artificial Sequence: Synthetic oligonucleotide
  Sense strand starting at position 3421 of SEQ ID NO: 328
gaaauagagcaaugagcaa

SEQ ID NO: 28693 - RNA, 19 nt, Artificial Sequence
  Description of Artificial Sequence: Synthetic oligonucleotide
  Antisense strand to SEQ ID NO: 28692
uugcucauugcucuauuuc

SEQ ID NO: 28694 - RNA, 19 nt, Artificial Sequence
  Description of Artificial Sequence: Synthetic oligonucleotide
  Sense strand starting at position 3461 of SEQ ID NO: 328
gcuugaguguugucaggga

SEQ ID NO: 28695 - RNA, 19 nt, Artificial Sequence
  Description of Artificial Sequence: Synthetic oligonucleotide
  Antisense strand to SEQ ID NO: 28694
ucccugacaacacucaagc

SEQ ID NO: 28696 - RNA, 19 nt, Artificial Sequence
  Description of Artificial Sequence: Synthetic oligonucleotide
  Sense strand starting at position 3465 of SEQ ID NO: 328
gaguguugucagggagaca

SEQ ID NO: 28697 - RNA, 19 nt, Artificial Sequence
  Description of Artificial Sequence: Synthetic oligonucleotide
  Antisense strand to SEQ ID NO: 28696
ugucucccugacaacacuc

SEQ ID NO: 28698 - RNA, 19 nt, Artificial Sequence
  Description of Artificial Sequence: Synthetic oligonucleotide
  Sense strand starting at position 3466 of SEQ ID NO: 328
aguguugucagggagacag

SEQ ID NO: 28699 - RNA, 19 nt, Artificial Sequence
  Description of Artificial Sequence: Synthetic oligonucleotide
  Antisense strand to SEQ ID NO: 28698
cugucucccugacaacacu

SEQ ID NO: 28700 - RNA, 19 nt, Artificial Sequence
  Description of Artificial Sequence: Synthetic oligonucleotide
  Sense strand starting at position 3565 of SEQ ID NO: 328
ugggcaaucgcuugaaguc

SEQ ID NO: 28701 - RNA, 19 nt, Artificial Sequence
  Description of Artificial Sequence: Synthetic oligonucleotide
  Antisense strand to SEQ ID NO: 28700
gacuucaagcgauugccca

SEQ ID NO: 28702 - RNA, 19 nt, Artificial Sequence
  Description of Artificial Sequence: Synthetic oligonucleotide
  Sense strand starting at position 3566 of SEQ ID NO: 328
gggcaaucgcuugaaguca

SEQ ID NO: 28703 - RNA, 19 nt, Artificial Sequence
  Description of Artificial Sequence: Synthetic oligonucleotide
  Antisense strand to SEQ ID NO: 28702
ugacuucaagcgauugccc

SEQ ID NO: 28704 - RNA, 19 nt, Artificial Sequence
  Description of Artificial Sequence: Synthetic oligonucleotide
  Sense strand starting at position 3957 of SEQ ID NO: 328
uacagugucggguagugau

SEQ ID NO: 28705 - RNA, 19 nt, Artificial Sequence
  Description of Artificial Sequence: Synthetic oligonucleotide
  Antisense strand to SEQ ID NO: 28704
aucacuacccgacacugua

SEQ ID NO: 28706 - RNA, 19 nt, Artificial Sequence
  Description of Artificial Sequence: Synthetic oligonucleotide
  Sense strand starting at position 3963 of SEQ ID NO: 328
gucggguagugauuagaga

SEQ ID NO: 28707 - RNA, 19 nt, Artificial Sequence
  Description of Artificial Sequence: Synthetic oligonucleotide
  Antisense strand to SEQ ID NO: 28706
ucucuaaucacuacccgac

SEQ ID NO: 28708 - RNA, 19 nt, Artificial Sequence
  Description of Artificial Sequence: Synthetic oligonucleotide
  Sense strand starting at position 3964 of SEQ ID NO: 328
ucggguagugauuagagau

SEQ ID NO: 28709 - RNA, 19 nt, Artificial Sequence
  Description of Artificial Sequence: Synthetic oligonucleotide
  Antisense strand to SEQ ID NO: 28708
aucucuaaucacuacccga

SEQ ID NO: 28710 - RNA, 19 nt, Artificial Sequence
  Description of Artificial Sequence: Synthetic oligonucleotide
  Sense strand starting at position 36 of SEQ ID NO: 327
agcuguauucucuaccauc

SEQ ID NO: 28711 - RNA, 19 nt, Artificial Sequence
  Description of Artificial Sequence: Synthetic oligonucleotide
  Antisense strand to SEQ ID NO: 28710
gaugguagagaauacagcu

SEQ ID NO: 28712 - RNA, 19 nt, Artificial Sequence
  Description of Artificial Sequence: Synthetic oligonucleotide
  Sense strand starting at position 149 of SEQ ID NO: 327
ccggcuuaauggucagagu

SEQ ID NO: 28713 - RNA, 19 nt, Artificial Sequence
  Description of Artificial Sequence: Synthetic oligonucleotide
  Antisense strand to SEQ ID NO: 28712
acucugaccauuaagccgg

SEQ ID NO: 28714 - RNA, 19 nt, Artificial Sequence
  Description of Artificial Sequence: Synthetic oligonucleotide
  Sense strand starting at position 150 of SEQ ID NO: 327
cggcuuaauggucagagua

SEQ ID NO: 28715 - RNA, 19 nt, Artificial Sequence
  Description of Artificial Sequence: Synthetic oligonucleotide
  Antisense strand to SEQ ID NO: 28714
uacucugaccauuaagccg

SEQ ID NO: 28716 - RNA, 19 nt, Artificial Sequence
  Description of Artificial Sequence: Synthetic oligonucleotide
  Sense strand starting at position 152 of SEQ ID NO: 327
gcuuaauggucagaguauu

SEQ ID NO: 28717 - RNA, 19 nt, Artificial Sequence
  Description of Artificial Sequence: Synthetic oligonucleotide
  Antisense strand to SEQ ID NO: 28716
aauacucugaccauuaagc

SEQ ID NO: 28718 - RNA, 19 nt, Artificial Sequence
  Description of Artificial Sequence: Synthetic oligonucleotide
  Sense strand starting at position 179 of SEQ ID NO: 327
ggauaaacguaacaauaag

SEQ ID NO: 28719 - RNA, 19 nt, Artificial Sequence
  Description of Artificial Sequence: Synthetic oligonucleotide
  Antisense strand to SEQ ID NO: 28718
cuuauuguuacguuuaucc

SEQ ID NO: 28720 - RNA, 19 nt, Artificial Sequence
  Description of Artificial Sequence: Synthetic oligonucleotide
  Sense strand starting at position 308 of SEQ ID NO: 327
ccaagugguuucuuccaac

SEQ ID NO: 28721 - RNA, 19 nt, Artificial Sequence
  Description of Artificial Sequence: Synthetic oligonucleotide
  Antisense strand to SEQ ID NO: 28720
guuggaagaaaccacuugg

SEQ ID NO: 28722 - RNA, 19 nt, Artificial Sequence
  Description of Artificial Sequence: Synthetic oligonucleotide
  Sense strand starting at position 414 of SEQ ID NO: 327
gcuaaauaugccuguauca

SEQ ID NO: 28723 - RNA, 19 nt, Artificial Sequence
  Description of Artificial Sequence: Synthetic oligonucleotide
  Antisense strand to SEQ ID NO: 28722
ugauacaggcauauuuagc

SEQ ID NO: 28724 - RNA, 19 nt, Artificial Sequence
  Description of Artificial Sequence: Synthetic oligonucleotide
  Sense strand starting at position 518 of SEQ ID NO: 327
ccuugccauguuugaauau

SEQ ID NO: 28725 - RNA, 19 nt, Artificial Sequence
  Description of Artificial Sequence: Synthetic oligonucleotide
  Antisense strand to SEQ ID NO: 28724
auauucaaacauggcaagg

SEQ ID NO: 28726 - RNA, 19 nt, Artificial Sequence
  Description of Artificial Sequence: Synthetic oligonucleotide
  Sense strand starting at position 608 of SEQ ID NO: 327
caguuuagagccugccaga

SEQ ID NO: 28727 - RNA, 19 nt, Artificial Sequence
  Description of Artificial Sequence: Synthetic oligonucleotide
  Antisense strand to SEQ ID NO: 28726
ucuggcaggcucuaaacug

SEQ ID NO: 28728 - RNA, 19 nt, Artificial Sequence
  Description of Artificial Sequence: Synthetic oligonucleotide
  Sense strand starting at position 664 of SEQ ID NO: 327
ugagcaacacccugaauaa

SEQ ID NO: 28729 - RNA, 19 nt, Artificial Sequence
  Description of Artificial Sequence: Synthetic oligonucleotide
  Antisense strand to SEQ ID NO: 28728
uuauucaggguguugcuca

SEQ ID NO: 28730 - RNA, 19 nt, Artificial Sequence
  Description of Artificial Sequence: Synthetic oligonucleotide
  Sense strand starting at position 739 of SEQ ID NO: 327
aagggcuuccuguggauga

SEQ ID NO: 28731 - RNA, 19 nt, Artificial Sequence
  Description of Artificial Sequence: Synthetic oligonucleotide
  Antisense strand to SEQ ID NO: 28730
ucauccacaggaagcccuu

SEQ ID NO: 28732 - RNA, 19 nt, Artificial Sequence
  Description of Artificial Sequence: Synthetic oligonucleotide
  Sense strand starting at position 740 of SEQ ID NO: 327
agggcuuccuguggaugaa

SEQ ID NO: 28733 - RNA, 19 nt, Artificial Sequence
  Description of Artificial Sequence: Synthetic oligonucleotide
  Antisense strand to SEQ ID NO: 28732
uucauccacaggaagcccu

SEQ ID NO: 28734 - RNA, 19 nt, Artificial Sequence
  Description of Artificial Sequence: Synthetic oligonucleotide
  Sense strand starting at position 741 of SEQ ID NO: 327
gggcuuccuguggaugaaa

SEQ ID NO: 28735 - RNA, 19 nt, Artificial Sequence
  Description of Artificial Sequence: Synthetic oligonucleotide
  Antisense strand to SEQ ID NO: 28734
uuucauccacaggaagccc

SEQ ID NO: 28736 - RNA, 19 nt, Artificial Sequence
  Description of Artificial Sequence: Synthetic oligonucleotide
  Sense strand starting at position 841 of SEQ ID NO: 327
guacaagacuccugagaag

SEQ ID NO: 28737 - RNA, 19 nt, Artificial Sequence
  Description of Artificial Sequence: Synthetic oligonucleotide
  Antisense strand to SEQ ID NO: 28736
cuucucaggagucuuguac

SEQ ID NO: 28738 - RNA, 19 nt, Artificial Sequence
  Description of Artificial Sequence: Synthetic oligonucleotide
  Sense strand starting at position 913 of SEQ ID NO: 327
gcgagaaucgcugcuuccu

SEQ ID NO: 28739 - RNA, 19 nt, Artificial Sequence
  Description of Artificial Sequence: Synthetic oligonucleotide
  Antisense strand to SEQ ID NO: 28738
aggaagcagcgauucucgc

SEQ ID NO: 28740 - RNA, 19 nt, Artificial Sequence
  Description of Artificial Sequence: Synthetic oligonucleotide
  Sense strand starting at position 921 of SEQ ID NO: 327
cgcugcuuccugccuuaua

SEQ ID NO: 28741 - RNA, 19 nt, Artificial Sequence
  Description of Artificial Sequence: Synthetic oligonucleotide
  Antisense strand to SEQ ID NO: 28740
uauaaggcaggaagcagcg

SEQ ID NO: 28742 - RNA, 19 nt, Artificial Sequence
  Description of Artificial Sequence: Synthetic oligonucleotide
  Sense strand starting at position 932 of SEQ ID NO: 327
gccuuauacuuuguccuga

SEQ ID NO: 28743 - RNA, 19 nt, Artificial Sequence
  Description of Artificial Sequence: Synthetic oligonucleotide
  Antisense strand to SEQ ID NO: 28742
ucaggacaaaguauaaggc

SEQ ID NO: 28744 - RNA, 19 nt, Artificial Sequence
  Description of Artificial Sequence: Synthetic oligonucleotide
  Sense strand starting at position 934 of SEQ ID NO: 327
cuuauacuuuguccugagu

SEQ ID NO: 28745 - RNA, 19 nt, Artificial Sequence
  Description of Artificial Sequence: Synthetic oligonucleotide
  Antisense strand to SEQ ID NO: 28744
acucaggacaaaguauaag

SEQ ID NO: 28746 - RNA, 19 nt, Artificial Sequence
  Description of Artificial Sequence: Synthetic oligonucleotide
  Sense strand starting at position 937 of SEQ ID NO: 327
auacuuuguccugagugca

SEQ ID NO: 28747 - RNA, 19 nt, Artificial Sequence
  Description of Artificial Sequence: Synthetic oligonucleotide
  Antisense strand to SEQ ID NO: 28746
ugcacucaggacaaaguau

SEQ ID NO: 28748 - RNA, 19 nt, Artificial Sequence
  Description of Artificial Sequence: Synthetic oligonucleotide
  Sense strand starting at position 951 of SEQ ID NO: 327
gugcacacucaggaaacuu

SEQ ID NO: 28749 - RNA, 19 nt, Artificial Sequence
  Description of Artificial Sequence: Synthetic oligonucleotide
  Antisense strand to SEQ ID NO: 28748
aaguuuccugagugugcac

SEQ ID NO: 28750 - RNA, 19 nt, Artificial Sequence
  Description of Artificial Sequence: Synthetic oligonucleotide
  Sense strand starting at position 1008 of SEQ ID NO: 327
agaagucguucuccaucaa

SEQ ID NO: 28751 - RNA, 19 nt, Artificial Sequence
  Description of Artificial Sequence: Synthetic oligonucleotide
  Antisense strand to SEQ ID NO: 28750
uugauggagaacgacuucu

SEQ ID NO: 28752 - RNA, 19 nt, Artificial Sequence
  Description of Artificial Sequence: Synthetic oligonucleotide
  Sense strand starting at position 1067 of SEQ ID NO: 327
agccaaaguuacuggacaa

SEQ ID NO: 28753 - RNA, 19 nt, Artificial Sequence
  Description of Artificial Sequence: Synthetic oligonucleotide
  Antisense strand to SEQ ID NO: 28752
uuguccaguaacuuuggcu

SEQ ID NO: 28754 - RNA, 19 nt, Artificial Sequence
  Description of Artificial Sequence: Synthetic oligonucleotide
  Sense strand starting at position 1081 of SEQ ID NO: 327
gacaaauccgaaggccuua

SEQ ID NO: 28755 - RNA, 19 nt, Artificial Sequence
  Description of Artificial Sequence: Synthetic oligonucleotide
  Antisense strand to SEQ ID NO: 28754
uaaggccuucggauuuguc

SEQ ID NO: 28756 - RNA, 19 nt, Artificial Sequence
  Description of Artificial Sequence: Synthetic oligonucleotide
  Sense strand starting at position 1274 of SEQ ID NO: 327
ccuugauccugucaggaag

SEQ ID NO: 28757 - RNA, 19 nt, Artificial Sequence
  Description of Artificial Sequence: Synthetic oligonucleotide
  Antisense strand to SEQ ID NO: 28756
cuuccugacaggaucaagg

SEQ ID NO: 28758 - RNA, 19 nt, Artificial Sequence
  Description of Artificial Sequence: Synthetic oligonucleotide
  Sense strand starting at position 1276 of SEQ ID NO: 327
uugauccugucaggaagaa

SEQ ID NO: 28759 - RNA, 19 nt, Artificial Sequence
  Description of Artificial Sequence: Synthetic oligonucleotide
  Antisense strand to SEQ ID NO: 28758
uucuuccugacaggaucaa

SEQ ID NO: 28760 - RNA, 19 nt, Artificial Sequence
  Description of Artificial Sequence: Synthetic oligonucleotide
  Sense strand starting at position 1289 of SEQ ID NO: 327
gaagaaguucucuggcccu

SEQ ID NO: 28761 - RNA, 19 nt, Artificial Sequence
  Description of Artificial Sequence: Synthetic oligonucleotide
  Antisense strand to SEQ ID NO: 28760
agggccagagaacuucuuc

SEQ ID NO: 28762 - RNA, 19 nt, Artificial Sequence
  Description of Artificial Sequence: Synthetic oligonucleotide
  Sense strand starting at position 1527 of SEQ ID NO: 327
gcugacaguucagagggaa

SEQ ID NO: 28763 - RNA, 19 nt, Artificial Sequence
  Description of Artificial Sequence: Synthetic oligonucleotide
  Antisense strand to SEQ ID NO: 28762
uucccucugaacugucagc

SEQ ID NO: 28764 - RNA, 19 nt, Artificial Sequence
  Description of Artificial Sequence: Synthetic oligonucleotide
  Sense strand starting at position 1634 of SEQ ID NO: 327
gggcgauugugcguucauc

SEQ ID NO: 28765 - RNA, 19 nt, Artificial Sequence
  Description of Artificial Sequence: Synthetic oligonucleotide
  Antisense strand to SEQ ID NO: 28764
gaugaacgcacaaucgccc

SEQ ID NO: 28766 - RNA, 19 nt, Artificial Sequence
  Description of Artificial Sequence: Synthetic oligonucleotide
  Sense strand starting at position 1636 of SEQ ID NO: 327
gcgauugugcguucauccu

SEQ ID NO: 28767 - RNA, 19 nt, Artificial Sequence
  Description of Artificial Sequence: Synthetic oligonucleotide
  Antisense strand to SEQ ID NO: 28766
aggaugaacgcacaaucgc

SEQ ID NO: 28768 - RNA, 19 nt, Artificial Sequence
  Description of Artificial Sequence: Synthetic oligonucleotide
  Sense strand starting at position 1728 of SEQ ID NO: 327
gcagaaugcuucgcacgca

SEQ ID NO: 28769 - RNA, 19 nt, Artificial Sequence
  Description of Artificial Sequence: Synthetic oligonucleotide
  Antisense strand to SEQ ID NO: 28768
ugcgugcgaagcauucugc

SEQ ID NO: 28770 - RNA, 19 nt, Artificial Sequence
  Description of Artificial Sequence: Synthetic oligonucleotide
  Sense strand starting at position 3476 of SEQ ID NO: 327
uuguuuaggcaccggaaga

SEQ ID NO: 28771 - RNA, 19 nt, Artificial Sequence
  Description of Artificial Sequence: Synthetic oligonucleotide
  Antisense strand to SEQ ID NO: 28770
ucuuccggugccuaaacaa

SEQ ID NO: 28772 - RNA, 19 nt, Artificial Sequence
  Description of Artificial Sequence: Synthetic oligonucleotide
  Sense strand starting at position 3477 of SEQ ID NO: 327
uguuuaggcaccggaagau

SEQ ID NO: 28773 - RNA, 19 nt, Artificial Sequence
  Description of Artificial Sequence: Synthetic oligonucleotide
  Antisense strand to SEQ ID NO: 28772
aucuuccggugccuaaaca

SEQ ID NO: 28774 - RNA, 19 nt, Artificial Sequence
  Description of Artificial Sequence: Synthetic oligonucleotide
  Sense strand starting at position 3486 of SEQ ID NO: 327
accggaagauaacagauaa

SEQ ID NO: 28775 - RNA, 19 nt, Artificial Sequence
  Description of Artificial Sequence: Synthetic oligonucleotide
  Antisense strand to SEQ ID NO: 28774
uuaucuguuaucuuccggu

SEQ ID NO: 28776 - RNA, 19 nt, Artificial Sequence
  Description of Artificial Sequence: Synthetic oligonucleotide
  Sense strand starting at position 3523 of SEQ ID NO: 327
gguauagcugcagacagaa

SEQ ID NO: 28777 - RNA, 19 nt, Artificial Sequence
  Description of Artificial Sequence: Synthetic oligonucleotide
  Antisense strand to SEQ ID NO: 28776
uucugucugcagcuauacc

SEQ ID NO: 28778 - RNA, 19 nt, Artificial Sequence
  Description of Artificial Sequence: Synthetic oligonucleotide
  Sense strand starting at position 3537 of SEQ ID NO: 327
cagaauaucugugaggaug

SEQ ID NO: 28779 - RNA, 19 nt, Artificial Sequence
  Description of Artificial Sequence: Synthetic oligonucleotide
  Antisense strand to SEQ ID NO: 28778
cauccucacagauauucug

SEQ ID NO: 28780 - RNA, 19 nt, Artificial Sequence
  Description of Artificial Sequence: Synthetic oligonucleotide
  Sense strand starting at position 3539 of SEQ ID NO: 327
gaauaucugugaggaugac

SEQ ID NO: 28781 - RNA, 19 nt, Artificial Sequence
  Description of Artificial Sequence: Synthetic oligonucleotide
  Antisense strand to SEQ ID NO: 28780
gucauccucacagauauuc

SEQ ID NO: 28782 - RNA, 19 nt, Artificial Sequence
  Description of Artificial Sequence: Synthetic oligonucleotide
  Sense strand starting at position 3726 of SEQ ID NO: 327
ggugguucgcuccuauagu

SEQ ID NO: 28783 - RNA, 19 nt, Artificial Sequence
  Description of Artificial Sequence: Synthetic oligonucleotide
  Antisense strand to SEQ ID NO: 28782
acuauaggagcgaaccacc

SEQ ID NO: 28784 - RNA, 19 nt, Artificial Sequence
  Description of Artificial Sequence: Synthetic oligonucleotide
  Sense strand starting at position 3892 of SEQ ID NO: 327
agcuguuaugaguacuguu

SEQ ID NO: 28785 - RNA, 19 nt, Artificial Sequence
  Description of Artificial Sequence: Synthetic oligonucleotide
  Antisense strand to SEQ ID NO: 28784
aacaguacucauaacagcu

SEQ ID NO: 28786 - RNA, 19 nt, Artificial Sequence
  Description of Artificial Sequence: Synthetic oligonucleotide
  Sense strand starting at position 3902 of SEQ ID NO: 327
aguacuguugaaugugcua

SEQ ID NO: 28787 - RNA, 19 nt, Artificial Sequence
  Description of Artificial Sequence: Synthetic oligonucleotide
  Antisense strand to SEQ ID NO: 28786
uagcacauucaacaguacu

SEQ ID NO: 28788 - RNA, 19 nt, Artificial Sequence
  Description of Artificial Sequence: Synthetic oligonucleotide
  Sense strand starting at position 3907 of SEQ ID NO: 327
uguugaaugugcuacagag

SEQ ID NO: 28789 - RNA, 19 nt, Artificial Sequence
  Description of Artificial Sequence: Synthetic oligonucleotide
  Antisense strand to SEQ ID NO: 28788
cucuguagcacauucaaca

SEQ ID NO: 28790 - RNA, 19 nt, Artificial Sequence
  Description of Artificial Sequence: Synthetic oligonucleotide
  Sense strand starting at position 62 of SEQ ID NO: 330
agacucaucuaggcaacau

SEQ ID NO: 28791 - RNA, 19 nt, Artificial Sequence
  Description of Artificial Sequence: Synthetic oligonucleotide
  Antisense strand to SEQ ID NO: 28790
auguugccuagaugagucu

SEQ ID NO: 28792 - RNA, 19 nt, Artificial Sequence
  Description of Artificial Sequence: Synthetic oligonucleotide
  Sense strand starting at position 273 of SEQ ID NO: 330
aaguguaagauguggcaau

SEQ ID NO: 28793 - RNA, 19 nt, Artificial Sequence
  Description of Artificial Sequence: Synthetic oligonucleotide
  Antisense strand to SEQ ID NO: 28792
auugccacaucuuacacuu

SEQ ID NO: 28794 - RNA, 19 nt, Artificial Sequence
  Description of Artificial Sequence: Synthetic oligonucleotide
  Sense strand starting at position 554 of SEQ ID NO: 330
gggcacuggccagggauau

SEQ ID NO: 28795 - RNA, 19 nt, Artificial Sequence
  Description of Artificial Sequence: Synthetic oligonucleotide
  Antisense strand to SEQ ID NO: 28794
auaucccuggccagugccc

SEQ ID NO: 28796 - RNA, 19 nt, Artificial Sequence
  Description of Artificial Sequence: Synthetic oligonucleotide
  Sense strand starting at position 597 of SEQ ID NO: 330
caccucaugguaggaaaua

SEQ ID NO: 28797 - RNA, 19 nt, Artificial Sequence
  Description of Artificial Sequence: Synthetic oligonucleotide
  Antisense strand to SEQ ID NO: 28796
uauuuccuaccaugaggug

SEQ ID NO: 28798 - RNA, 19 nt, Artificial Sequence
  Description of Artificial Sequence: Synthetic oligonucleotide
  Sense strand starting at position 598 of SEQ ID NO: 330
accucaugguaggaaauau

SEQ ID NO: 28799 - RNA, 19 nt, Artificial Sequence
  Description of Artificial Sequence: Synthetic oligonucleotide
  Antisense strand to SEQ ID NO: 28798
auauuuccuaccaugaggu

SEQ ID NO: 28800 - RNA, 19 nt, Artificial Sequence
  Description of Artificial Sequence: Synthetic oligonucleotide
  Sense strand starting at position 634 of SEQ ID NO: 330
gccugugaugagggucaaa

SEQ ID NO: 28801 - RNA, 19 nt, Artificial Sequence
  Description of Artificial Sequence: Synthetic oligonucleotide
  Antisense strand to SEQ ID NO: 28800
uuugacccucaucacaggc

SEQ ID NO: 28802 - RNA, 19 nt, Artificial Sequence
  Description of Artificial Sequence: Synthetic oligonucleotide
  Sense strand starting at position 858 of SEQ ID NO: 330
uccuuaugacaguauuauu

SEQ ID NO: 28803 - RNA, 19 nt, Artificial Sequence
  Description of Artificial Sequence: Synthetic oligonucleotide
  Antisense strand to SEQ ID NO: 28802
aauaauacugucauaagga

SEQ ID NO: 28804 - RNA, 19 nt, Artificial Sequence
  Description of Artificial Sequence: Synthetic oligonucleotide
  Sense strand starting at position 972 of SEQ ID NO: 330
ucccgaaaccucuaugcua

SEQ ID NO: 28805 - RNA, 19 nt, Artificial Sequence
  Description of Artificial Sequence: Synthetic oligonucleotide
  Antisense strand to SEQ ID NO: 28804
uagcauagagguuucggga

SEQ ID NO: 28806 - RNA, 19 nt, Artificial Sequence
  Description of Artificial Sequence: Synthetic oligonucleotide
  Sense strand starting at position 974 of SEQ ID NO: 330
ccgaaaccucuaugcuaga

SEQ ID NO: 28807 - RNA, 19 nt, Artificial Sequence
  Description of Artificial Sequence: Synthetic oligonucleotide
  Antisense strand to SEQ ID NO: 28806
ucuagcauagagguuucgg

SEQ ID NO: 28808 - RNA, 19 nt, Artificial Sequence
  Description of Artificial Sequence: Synthetic oligonucleotide
  Sense strand starting at position 975 of SEQ ID NO: 330
cgaaaccucuaugcuagaa

SEQ ID NO: 28809 - RNA, 19 nt, Artificial Sequence
  Description of Artificial Sequence: Synthetic oligonucleotide
  Antisense strand to SEQ ID NO: 28808
uucuagcauagagguuucg

SEQ ID NO: 28810 - RNA, 19 nt, Artificial Sequence
  Description of Artificial Sequence: Synthetic oligonucleotide
  Sense strand starting at position 1010 of SEQ ID NO: 330
gccuccuuccucgcaagua

SEQ ID NO: 28811 - RNA, 19 nt, Artificial Sequence
  Description of Artificial Sequence: Synthetic oligonucleotide
  Antisense strand to SEQ ID NO: 28810
uacuugcgaggaaggaggc

SEQ ID NO: 28812 - RNA, 19 nt, Artificial Sequence
  Description of Artificial Sequence: Synthetic oligonucleotide
  Sense strand starting at position 1298 of SEQ ID NO: 330
aauacuugccucugacguu

SEQ ID NO: 28813 - RNA, 19 nt, Artificial Sequence
  Description of Artificial Sequence: Synthetic oligonucleotide
  Antisense strand to SEQ ID NO: 28812
aacgucagaggcaaguauu

SEQ ID NO: 28814 - RNA, 19 nt, Artificial Sequence
  Description of Artificial Sequence: Synthetic oligonucleotide
  Sense strand starting at position 1342 of SEQ ID NO: 330
ucagucugauguucuccaa

SEQ ID NO: 28815 - RNA, 19 nt, Artificial Sequence
  Description of Artificial Sequence: Synthetic oligonucleotide
  Antisense strand to SEQ ID NO: 28814
uuggagaacaucagacuga

SEQ ID NO: 28816 - RNA, 19 nt, Artificial Sequence
  Description of Artificial Sequence: Synthetic oligonucleotide
  Sense strand starting at position 1345 of SEQ ID NO: 330
gucugauguucuccaauuc

SEQ ID NO: 28817 - RNA, 19 nt, Artificial Sequence
  Description of Artificial Sequence: Synthetic oligonucleotide
  Antisense strand to SEQ ID NO: 28816
gaauuggagaacaucagac

SEQ ID NO: 28818 - RNA, 19 nt, Artificial Sequence
  Description of Artificial Sequence: Synthetic oligonucleotide
  Sense strand starting at position 1381 of SEQ ID NO: 330
caaaguucucaagaugugu

SEQ ID NO: 28819 - RNA, 19 nt, Artificial Sequence
  Description of Artificial Sequence: Synthetic oligonucleotide
  Antisense strand to SEQ ID NO: 28818
acacaucuugagaacuuug

SEQ ID NO: 28820 - RNA, 19 nt, Artificial Sequence
  Description of Artificial Sequence: Synthetic oligonucleotide
  Sense strand starting at position 1385 of SEQ ID NO: 330
guucucaagaugugucuca

SEQ ID NO: 28821 - RNA, 19 nt, Artificial Sequence
  Description of Artificial Sequence: Synthetic oligonucleotide
  Antisense strand to SEQ ID NO: 28820
ugagacacaucuugagaac

SEQ ID NO: 28822 - RNA, 19 nt, Artificial Sequence
  Description of Artificial Sequence: Synthetic oligonucleotide
  Sense strand starting at position 1451 of SEQ ID NO: 330
cugaguauggcauggaauc

SEQ ID NO: 28823 - RNA, 19 nt, Artificial Sequence
  Description of Artificial Sequence: Synthetic oligonucleotide
  Antisense strand to SEQ ID NO: 28822
gauuccaugccauacucag

SEQ ID NO: 28824 - RNA, 19 nt, Artificial Sequence
  Description of Artificial Sequence: Synthetic oligonucleotide
  Sense strand starting at position 1462 of SEQ ID NO: 330
auggaaucgcuuuagcgaa

SEQ ID NO: 28825 - RNA, 19 nt, Artificial Sequence
  Description of Artificial Sequence: Synthetic oligonucleotide
  Antisense strand to SEQ ID NO: 28824
uucgcuaaagcgauuccau

SEQ ID NO: 28826 - RNA, 19 nt, Artificial Sequence
  Description of Artificial Sequence: Synthetic oligonucleotide
  Sense strand starting at position 1488 of SEQ ID NO: 330
cuaagagguguuugggauu

SEQ ID NO: 28827 - RNA, 19 nt, Artificial Sequence
  Description of Artificial Sequence: Synthetic oligonucleotide
  Antisense strand to SEQ ID NO: 28826
aaucccaaacaccucuuag

SEQ ID NO: 28828 - RNA, 19 nt, Artificial Sequence
  Description of Artificial Sequence: Synthetic oligonucleotide
  Sense strand starting at position 1623 of SEQ ID NO: 330
ccuggauguccucgaucau

SEQ ID NO: 28829 - RNA, 19 nt, Artificial Sequence
  Description of Artificial Sequence: Synthetic oligonucleotide
  Antisense strand to SEQ ID NO: 28828
augaucgaggacauccagg

SEQ ID NO: 28830 - RNA, 19 nt, Artificial Sequence
  Description of Artificial Sequence: Synthetic oligonucleotide
  Sense strand starting at position 1624 of SEQ ID NO: 330
cuggauguccucgaucaua

SEQ ID NO: 28831 - RNA, 19 nt, Artificial Sequence
  Description of Artificial Sequence: Synthetic oligonucleotide
  Antisense strand to SEQ ID NO: 28830
uaugaucgaggacauccag

SEQ ID NO: 28832 - RNA, 19 nt, Artificial Sequence
  Description of Artificial Sequence: Synthetic oligonucleotide
  Sense strand starting at position 1758 of SEQ ID NO: 330
cgaguagccaacuaagacu

SEQ ID NO: 28833 - RNA, 19 nt, Artificial Sequence
  Description of Artificial Sequence: Synthetic oligonucleotide
  Antisense strand to SEQ ID NO: 28832
agucuuaguuggcuacucg

SEQ ID NO: 28834 - RNA, 19 nt, Artificial Sequence
  Description of Artificial Sequence: Synthetic oligonucleotide
  Sense strand starting at position 2209 of SEQ ID NO: 330
caaggauucgcucuugcgu

SEQ ID NO: 28835 - RNA, 19 nt, Artificial Sequence
  Description of Artificial Sequence: Synthetic oligonucleotide
  Antisense strand to SEQ ID NO: 28834
acgcaagagcgaauccuug

SEQ ID NO: 28836 - RNA, 19 nt, Artificial Sequence
  Description of Artificial Sequence: Synthetic oligonucleotide
  Sense strand starting at position 2583 of SEQ ID NO: 330
cucagaaucguccuugcgu

SEQ ID NO: 28837 - RNA, 19 nt, Artificial Sequence
  Description of Artificial Sequence: Synthetic oligonucleotide
  Antisense strand to SEQ ID NO: 28836
acgcaaggacgauucugag

SEQ ID NO: 28838 - RNA, 19 nt, Artificial Sequence
  Description of Artificial Sequence: Synthetic oligonucleotide
  Sense strand starting at position 2814 of SEQ ID NO: 330
cgggcccuucgccagaauu

SEQ ID NO: 28839 - RNA, 19 nt, Artificial Sequence
  Description of Artificial Sequence: Synthetic oligonucleotide
  Antisense strand to SEQ ID NO: 28838
aauucuggcgaagggcccg

SEQ ID NO: 28840 - RNA, 19 nt, Artificial Sequence
  Description of Artificial Sequence: Synthetic oligonucleotide
  Sense strand starting at position 2909 of SEQ ID NO: 330
gugaucugucccgcccauu

SEQ ID NO: 28841 - RNA, 19 nt, Artificial Sequence
  Description of Artificial Sequence: Synthetic oligonucleotide
  Antisense strand to SEQ ID NO: 28840
aaugggcgggacagaucac

SEQ ID NO: 28842 - RNA, 19 nt, Artificial Sequence
  Description of Artificial Sequence: Synthetic oligonucleotide
  Sense strand starting at position 3018 of SEQ ID NO: 330
gcaguugacuguuccaaac

SEQ ID NO: 28843 - RNA, 19 nt, Artificial Sequence
  Description of Artificial Sequence: Synthetic oligonucleotide
  Antisense strand to SEQ ID NO: 28842
guuuggaacagucaacugc

SEQ ID NO: 28844 - RNA, 19 nt, Artificial Sequence
  Description of Artificial Sequence: Synthetic oligonucleotide
  Sense strand starting at position 3136 of SEQ ID NO: 330
gcagaaaucuaguccugua

SEQ ID NO: 28845 - RNA, 19 nt, Artificial Sequence
  Description of Artificial Sequence: Synthetic oligonucleotide
  Antisense strand to SEQ ID NO: 28844
uacaggacuagauuucugc

SEQ ID NO: 28846 - RNA, 19 nt, Artificial Sequence
  Description of Artificial Sequence: Synthetic oligonucleotide
  Sense strand starting at position 3198 of SEQ ID NO: 330
aaucguuucuguuuacuga

SEQ ID NO: 28847 - RNA, 19 nt, Artificial Sequence
  Description of Artificial Sequence: Synthetic oligonucleotide
  Antisense strand to SEQ ID NO: 28846
ucaguaaacagaaacgauu

SEQ ID NO: 28848 - RNA, 19 nt, Artificial Sequence
  Description of Artificial Sequence: Synthetic oligonucleotide
  Sense strand starting at position 3211 of SEQ ID NO: 330
uacugagcauuugcuaagu

SEQ ID NO: 28849 - RNA, 19 nt, Artificial Sequence
  Description of Artificial Sequence: Synthetic oligonucleotide
  Antisense strand to SEQ ID NO: 28848
acuuagcaaaugcucagua

SEQ ID NO: 28850 - RNA, 19 nt, Artificial Sequence
  Description of Artificial Sequence: Synthetic oligonucleotide
  Sense strand starting at position 3343 of SEQ ID NO: 330
cagggaaacgaauguuuaa

SEQ ID NO: 28851 - RNA, 19 nt, Artificial Sequence
  Description of Artificial Sequence: Synthetic oligonucleotide
  Antisense strand to SEQ ID NO: 28850
uuaaacauucguuucccug

SEQ ID NO: 28852 - RNA, 19 nt, Artificial Sequence
  Description of Artificial Sequence: Synthetic oligonucleotide
  Sense strand starting at position 3572 of SEQ ID NO: 330
uuacauuccaguggaagga

SEQ ID NO: 28853 - RNA, 19 nt, Artificial Sequence
  Description of Artificial Sequence: Synthetic oligonucleotide
  Antisense strand to SEQ ID NO: 28852
uccuuccacuggaauguaa

SEQ ID NO: 28854 - RNA, 19 nt, Artificial Sequence
  Description of Artificial Sequence: Synthetic oligonucleotide
  Sense strand starting at position 3587 of SEQ ID NO: 330
aggaucaggugauaaacua

SEQ ID NO: 28855 - RNA, 19 nt, Artificial Sequence
  Description of Artificial Sequence: Synthetic oligonucleotide
  Antisense strand to SEQ ID NO: 28854
uaguuuaucaccugauccu

SEQ ID NO: 28856 - RNA, 19 nt, Artificial Sequence
  Description of Artificial Sequence: Synthetic oligonucleotide
  Sense strand starting at position 3689 of SEQ ID NO: 330
ucuuuauauccgcaaggga

SEQ ID NO: 28857 - RNA, 19 nt, Artificial Sequence
  Description of Artificial Sequence: Synthetic oligonucleotide
  Antisense strand to SEQ ID NO: 28856
ucccuugcggauauaaaga

SEQ ID NO: 28858 - RNA, 19 nt, Artificial Sequence
  Description of Artificial Sequence: Synthetic oligonucleotide
  Sense strand starting at position 3698 of SEQ ID NO: 330
ccgcaagggaucuaucuca

SEQ ID NO: 28859 - RNA, 19 nt, Artificial Sequence
  Description of Artificial Sequence: Synthetic oligonucleotide
  Antisense strand to SEQ ID NO: 28858
ugagauagaucccuugcgg

SEQ ID NO: 28860 - RNA, 19 nt, Artificial Sequence
  Description of Artificial Sequence: Synthetic oligonucleotide
  Sense strand starting at position 3831 of SEQ ID NO: 330
uucgguaaacgggauuaaa

SEQ ID NO: 28861 - RNA, 19 nt, Artificial Sequence
  Description of Artificial Sequence: Synthetic oligonucleotide
  Antisense strand to SEQ ID NO: 28860
uuuaaucccguuuaccgaa

SEQ ID NO: 28862 - RNA, 19 nt, Artificial Sequence
  Description of Artificial Sequence: Synthetic oligonucleotide
  Sense strand starting at position 3850 of SEQ ID NO: 330
aguccuggauucucucaaa

SEQ ID NO: 28863 - RNA, 19 nt, Artificial Sequence
  Description of Artificial Sequence: Synthetic oligonucleotide
  Antisense strand to SEQ ID NO: 28862
uuugagagaauccaggacu

SEQ ID NO: 28864 - RNA, 19 nt, Artificial Sequence
  Description of Artificial Sequence: Synthetic oligonucleotide
  Sense strand starting at position 3908 of SEQ ID NO: 330
gauucuaggccuugggcaa

SEQ ID NO: 28865 - RNA, 19 nt, Artificial Sequence
  Description of Artificial Sequence: Synthetic oligonucleotide
  Antisense strand to SEQ ID NO: 28864
uugcccaaggccuagaauc

SEQ ID NO: 28866 - RNA, 19 nt, Artificial Sequence
  Description of Artificial Sequence: Synthetic oligonucleotide
  Sense strand starting at position 3968 of SEQ ID NO: 330
gcaggaguuggagaguuaa

SEQ ID NO: 28867 - RNA, 19 nt, Artificial Sequence
  Description of Artificial Sequence: Synthetic oligonucleotide
  Antisense strand to SEQ ID NO: 28866
uuaacucuccaacuccugc

SEQ ID NO: 28868 - RNA, 19 nt, Artificial Sequence
  Description of Artificial Sequence: Synthetic oligonucleotide
  Sense strand starting at position 3982 of SEQ ID NO: 330
guuaaagaaucccuaaggu

SEQ ID NO: 28869 - RNA, 19 nt, Artificial Sequence
  Description of Artificial Sequence: Synthetic oligonucleotide
  Antisense strand to SEQ ID NO: 28868
accuuagggauucuuuaac

SEQ ID NO: 28870 - RNA, 19 nt, Artificial Sequence
  Description of Artificial Sequence: Synthetic oligonucleotide
  Sense strand starting at position 209 of SEQ ID NO: 329
gggcacuggccagggauau

SEQ ID NO: 28871 - RNA, 19 nt, Artificial Sequence
  Description of Artificial Sequence: Synthetic oligonucleotide
  Antisense strand to SEQ ID NO: 28870
auaucccuggccagugccc

SEQ ID NO: 28872 - RNA, 19 nt, Artificial Sequence
  Description of Artificial Sequence: Synthetic oligonucleotide
  Sense strand starting at position 252 of SEQ ID NO: 329
caccucaugguaggaaaua

SEQ ID NO: 28873 - RNA, 19 nt, Artificial Sequence
  Description of Artificial Sequence: Synthetic oligonucleotide
  Antisense strand to SEQ ID NO: 28872
uauuuccuaccaugaggug

SEQ ID NO: 28874 - RNA, 19 nt, Artificial Sequence
  Description of Artificial Sequence: Synthetic oligonucleotide
  Sense strand starting at position 289 of SEQ ID NO: 329
gccugugaugagggucaaa

SEQ ID NO: 28875 - RNA, 19 nt, Artificial Sequence
  Description of Artificial Sequence: Synthetic oligonucleotide
  Antisense strand to SEQ ID NO: 28874
uuugacccucaucacaggc

SEQ ID NO: 28876 - RNA, 19 nt, Artificial Sequence
  Description of Artificial Sequence: Synthetic oligonucleotide
  Sense strand starting at position 513 of SEQ ID NO: 329
uccuuaugacaguauuauu

SEQ ID NO: 28877 - RNA, 19 nt, Artificial Sequence
  Description of Artificial Sequence: Synthetic oligonucleotide
  Antisense strand to SEQ ID NO: 28876
aauaauacugucauaagga

SEQ ID NO: 28878 - RNA, 19 nt, Artificial Sequence
  Description of Artificial Sequence: Synthetic oligonucleotide
  Sense strand starting at position 627 of SEQ ID NO: 329
ucccgaaaccucuaugcua

SEQ ID NO: 28879 - RNA, 19 nt, Artificial Sequence
  Description of Artificial Sequence: Synthetic oligonucleotide
  Antisense strand to SEQ ID NO: 28878
uagcauagagguuucggga

SEQ ID NO: 28880 - RNA, 19 nt, Artificial Sequence
  Description of Artificial Sequence: Synthetic oligonucleotide
  Sense strand starting at position 629 of SEQ ID NO: 329
ccgaaaccucuaugcuaga

SEQ ID NO: 28881 - RNA, 19 nt, Artificial Sequence
  Description of Artificial Sequence: Synthetic oligonucleotide
  Antisense strand to SEQ ID NO: 28880
ucuagcauagagguuucgg

SEQ ID NO: 28882 - RNA, 19 nt, Artificial Sequence
  Description of Artificial Sequence: Synthetic oligonucleotide
  Sense strand starting at position 630 of SEQ ID NO: 329
cgaaaccucuaugcuagaa

SEQ ID NO: 28883 - RNA, 19 nt, Artificial Sequence
  Description of Artificial Sequence: Synthetic oligonucleotide
  Antisense strand to SEQ ID NO: 28882
uucuagcauagagguuucg

SEQ ID NO: 28884 - RNA, 19 nt, Artificial Sequence
  Description of Artificial Sequence: Synthetic oligonucleotide
  Sense strand starting at position 665 of SEQ ID NO: 329
gccuccuuccucgcaagua

SEQ ID NO: 28885 - RNA, 19 nt, Artificial Sequence
  Description of Artificial Sequence: Synthetic oligonucleotide
  Antisense strand to SEQ ID NO: 28884
uacuugcgaggaaggaggc

SEQ ID NO: 28886 - RNA, 19 nt, Artificial Sequence
  Description of Artificial Sequence: Synthetic oligonucleotide
  Sense strand starting at position 953 of SEQ ID NO: 329
aauacuugccucugacguu

SEQ ID NO: 28887 - RNA, 19 nt, Artificial Sequence
  Description of Artificial Sequence: Synthetic oligonucleotide
  Antisense strand to SEQ ID NO: 28886
aacgucagaggcaaguauu

SEQ ID NO: 28888 - RNA, 19 nt, Artificial Sequence
  Description of Artificial Sequence: Synthetic oligonucleotide
  Sense strand starting at position 997 of SEQ ID NO: 329
ucagucugauguucuccaa

SEQ ID NO: 28889 - RNA, 19 nt, Artificial Sequence
  Description of Artificial Sequence: Synthetic oligonucleotide
  Antisense strand to SEQ ID NO: 28888
uuggagaacaucagacuga

SEQ ID NO: 28890 - RNA, 19 nt, Artificial Sequence
  Description of Artificial Sequence: Synthetic oligonucleotide
  Sense strand starting at position 1000 of SEQ ID NO: 329
gucugauguucuccaauuc

SEQ ID NO: 28891 - RNA, 19 nt, Artificial Sequence
  Description of Artificial Sequence: Synthetic oligonucleotide
  Antisense strand to SEQ ID NO: 28890
gaauuggagaacaucagac

SEQ ID NO: 28892 - RNA, 19 nt, Artificial Sequence
  Description of Artificial Sequence: Synthetic oligonucleotide
  Sense strand starting at position 1036 of SEQ ID NO: 329
caaaguucucaagaugugu

SEQ ID NO: 28893 - RNA, 19 nt, Artificial Sequence
  Description of Artificial Sequence: Synthetic oligonucleotide
  Antisense strand to SEQ ID NO: 28892
acacaucuugagaacuuug

SEQ ID NO: 28894 - RNA, 19 nt, Artificial Sequence
  Description of Artificial Sequence: Synthetic oligonucleotide
  Sense strand starting at position 1040 of SEQ ID NO: 329
guucucaagaugugucuca

SEQ ID NO: 28895 - RNA, 19 nt, Artificial Sequence
  Description of Artificial Sequence: Synthetic oligonucleotide
  Antisense strand to SEQ ID NO: 28894
ugagacacaucuugagaac

SEQ ID NO: 28896 - RNA, 19 nt, Artificial Sequence
  Description of Artificial Sequence: Synthetic oligonucleotide
  Sense strand starting at position 1106 of SEQ ID NO: 329
cugaguauggcauggaauc

SEQ ID NO: 28897 - RNA, 19 nt, Artificial Sequence
  Description of Artificial Sequence: Synthetic oligonucleotide
  Antisense strand to SEQ ID NO: 28896
gauuccaugccauacucag

SEQ ID NO: 28898 - RNA, 19 nt, Artificial Sequence
  Description of Artificial Sequence: Synthetic oligonucleotide
  Sense strand starting at position 1117 of SEQ ID NO: 329
auggaaucgcuuuagcgaa

SEQ ID NO: 28899 - RNA, 19 nt, Artificial Sequence
  Description of Artificial Sequence: Synthetic oligonucleotide
  Antisense strand to SEQ ID NO: 28898
uucgcuaaagcgauuccau

SEQ ID NO: 28900 - RNA, 19 nt, Artificial Sequence
  Description of Artificial Sequence: Synthetic oligonucleotide
  Sense strand starting at position 1143 of SEQ ID NO: 329
cuaagagguguuugggauu

SEQ ID NO: 28901 - RNA, 19 nt, Artificial Sequence
  Description of Artificial Sequence: Synthetic oligonucleotide
  Antisense strand to SEQ ID NO: 28900
aaucccaaacaccucuuag

SEQ ID NO: 28902 - RNA, 19 nt, Artificial Sequence
  Description of Artificial Sequence: Synthetic oligonucleotide
  Sense strand starting at position 1278 of SEQ ID NO: 329
ccuggauguccucgaucau

SEQ ID NO: 28903 - RNA, 19 nt, Artificial Sequence
  Description of Artificial Sequence: Synthetic oligonucleotide
  Antisense strand to SEQ ID NO: 28902
augaucgaggacauccagg

SEQ ID NO: 28904 - RNA, 19 nt, Artificial Sequence
  Description of Artificial Sequence: Synthetic oligonucleotide
  Sense strand starting at position 1279 of SEQ ID NO: 329
cuggauguccucgaucaua

SEQ ID NO: 28905 - RNA, 19 nt, Artificial Sequence
  Description of Artificial Sequence: Synthetic oligonucleotide
  Antisense strand to SEQ ID NO: 28904
uaugaucgaggacauccag

SEQ ID NO: 28906 - RNA, 19 nt, Artificial Sequence
  Description of Artificial Sequence: Synthetic oligonucleotide
  Sense strand starting at position 1413 of SEQ ID NO: 329
cgaguagccaacuaagacu

SEQ ID NO: 28907 - RNA, 19 nt, Artificial Sequence
  Description of Artificial Sequence: Synthetic oligonucleotide
  Antisense strand to SEQ ID NO: 28906
agucuuaguuggcuacucg

SEQ ID NO: 28908 - RNA, 19 nt, Artificial Sequence
  Description of Artificial Sequence: Synthetic oligonucleotide
  Sense strand starting at position 1864 of SEQ ID NO: 329
caaggauucgcucuugcgu

SEQ ID NO: 28909 - RNA, 19 nt, Artificial Sequence
  Description of Artificial Sequence: Synthetic oligonucleotide
  Antisense strand to SEQ ID NO: 28908
acgcaagagcgaauccuug

SEQ ID NO: 28910 - RNA, 19 nt, Artificial Sequence
  Description of Artificial Sequence: Synthetic oligonucleotide
  Sense strand starting at position 2238 of SEQ ID NO: 329
cucagaaucguccuugcgu

SEQ ID NO: 28911 - RNA, 19 nt, Artificial Sequence
  Description of Artificial Sequence: Synthetic oligonucleotide
  Antisense strand to SEQ ID NO: 28910
acgcaaggacgauucugag

SEQ ID NO: 28912 - RNA, 19 nt, Artificial Sequence
  Description of Artificial Sequence: Synthetic oligonucleotide
  Sense strand starting at position 2469 of SEQ ID NO: 329
cgggcccuucgccagaauu

SEQ ID NO: 28913 - RNA, 19 nt, Artificial Sequence
  Description of Artificial Sequence: Synthetic oligonucleotide
  Antisense strand to SEQ ID NO: 28912
aauucuggcgaagggcccg

SEQ ID NO: 28914 - RNA, 19 nt, Artificial Sequence
  Description of Artificial Sequence: Synthetic oligonucleotide
  Sense strand starting at position 2564 of SEQ ID NO: 329
gugaucugucccgcccauu

SEQ ID NO: 28915 - RNA, 19 nt, Artificial Sequence
  Description of Artificial Sequence: Synthetic oligonucleotide
  Antisense strand to SEQ ID NO: 28914
aaugggcgggacagaucac

SEQ ID NO: 28916 - RNA, 19 nt, Artificial Sequence
  Description of Artificial Sequence: Synthetic oligonucleotide
  Sense strand starting at position 2673 of SEQ ID NO: 329
gcaguugacuguuccaaac

SEQ ID NO: 28917 - RNA, 19 nt, Artificial Sequence
  Description of Artificial Sequence: Synthetic oligonucleotide
  Antisense strand to SEQ ID NO: 28916
guuuggaacagucaacugc

SEQ ID NO: 28918 - RNA, 19 nt, Artificial Sequence
  Description of Artificial Sequence: Synthetic oligonucleotide
  Sense strand starting at position 2791 of SEQ ID NO: 329
gcagaaaucuaguccugua

SEQ ID NO: 28919 - RNA, 19 nt, Artificial Sequence
  Description of Artificial Sequence: Synthetic oligonucleotide
  Antisense strand to SEQ ID NO: 28918
uacaggacuagauuucugc

SEQ ID NO: 28920 - RNA, 19 nt, Artificial Sequence
  Description of Artificial Sequence: Synthetic oligonucleotide
  Sense strand starting at position 2853 of SEQ ID NO: 329
aaucguuucuguuuacuga

SEQ ID NO: 28921 - RNA, 19 nt, Artificial Sequence
  Description of Artificial Sequence: Synthetic oligonucleotide
  Antisense strand to SEQ ID NO: 28920
ucaguaaacagaaacgauu

SEQ ID NO: 28922 - RNA, 19 nt, Artificial Sequence
  Description of Artificial Sequence: Synthetic oligonucleotide
  Sense strand starting at position 2866 of SEQ ID NO: 329
uacugagcauuugcuaagu

SEQ ID NO: 28923 - RNA, 19 nt, Artificial Sequence
  Description of Artificial Sequence: Synthetic oligonucleotide
  Antisense strand to SEQ ID NO: 28922
acuuagcaaaugcucagua

SEQ ID NO: 28924 - RNA, 19 nt, Artificial Sequence
  Description of Artificial Sequence: Synthetic oligonucleotide
  Sense strand starting at position 2998 of SEQ ID NO: 329
cagggaaacgaauguuuaa

SEQ ID NO: 28925 - RNA, 19 nt, Artificial Sequence
  Description of Artificial Sequence: Synthetic oligonucleotide
  Antisense strand to SEQ ID NO: 28924
uuaaacauucguuucccug

SEQ ID NO: 28926 - RNA, 19 nt, Artificial Sequence
  Description of Artificial Sequence: Synthetic oligonucleotide
  Sense strand starting at position 3227 of SEQ ID NO: 329
uuacauuccaguggaagga

SEQ ID NO: 28927 - RNA, 19 nt, Artificial Sequence
  Description of Artificial Sequence: Synthetic oligonucleotide
  Antisense strand to SEQ ID NO: 28926
uccuuccacuggaauguaa

SEQ ID NO: 28928 - RNA, 19 nt, Artificial Sequence
  Description of Artificial Sequence: Synthetic oligonucleotide
  Sense strand starting at position 3242 of SEQ ID NO: 329
aggaucaggugauaaacua

SEQ ID NO: 28929 - RNA, 19 nt, Artificial Sequence
  Description of Artificial Sequence: Synthetic oligonucleotide
  Antisense strand to SEQ ID NO: 28928
uaguuuaucaccugauccu

SEQ ID NO: 28930 - RNA, 19 nt, Artificial Sequence
  Description of Artificial Sequence: Synthetic oligonucleotide
  Sense strand starting at position 3344 of SEQ ID NO: 329
ucuuuauauccgcaaggga

SEQ ID NO: 28931 - RNA, 19 nt, Artificial Sequence
  Description of Artificial Sequence: Synthetic oligonucleotide
  Antisense strand to SEQ ID NO: 28930
ucccuugcggauauaaaga

SEQ ID NO: 28932 - RNA, 19 nt, Artificial Sequence
  Description of Artificial Sequence: Synthetic oligonucleotide
  Sense strand starting at position 3353 of SEQ ID NO: 329
ccgcaagggaucuaucuca

SEQ ID NO: 28933 - RNA, 19 nt, Artificial Sequence
  Description of Artificial Sequence: Synthetic oligonucleotide
  Antisense strand to SEQ ID NO: 28932
ugagauagaucccuugcgg

SEQ ID NO: 28934 - RNA, 19 nt, Artificial Sequence
  Description of Artificial Sequence: Synthetic oligonucleotide
  Sense strand starting at position 3486 of SEQ ID NO: 329
uucgguaaacgggauuaaa

SEQ ID NO: 28935 - RNA, 19 nt, Artificial Sequence
  Description of Artificial Sequence: Synthetic oligonucleotide
  Antisense strand to SEQ ID NO: 28934
uuuaaucccguuuaccgaa

SEQ ID NO: 28936 - RNA, 19 nt, Artificial Sequence
  Description of Artificial Sequence: Synthetic oligonucleotide
  Sense strand starting at position 3505 of SEQ ID NO: 329
aguccuggauucucucaaa

SEQ ID NO: 28937 - RNA, 19 nt, Artificial Sequence
  Description of Artificial Sequence: Synthetic oligonucleotide
  Antisense strand to SEQ ID NO: 28936
uuugagagaauccaggacu

SEQ ID NO: 28938 - RNA, 19 nt, Artificial Sequence
  Description of Artificial Sequence: Synthetic oligonucleotide
  Sense strand starting at position 3563 of SEQ ID NO: 329
gauucuaggccuugggcaa

SEQ ID NO: 28939 - RNA, 19 nt, Artificial Sequence
  Description of Artificial Sequence: Synthetic oligonucleotide
  Antisense strand to SEQ ID NO: 28938
uugcccaaggccuagaauc

SEQ ID NO: 28940 - RNA, 19 nt, Artificial Sequence
  Description of Artificial Sequence: Synthetic oligonucleotide
  Sense strand starting at position 3623 of SEQ ID NO: 329
gcaggaguuggagaguuaa

SEQ ID NO: 28941 - RNA, 19 nt, Artificial Sequence
  Description of Artificial Sequence: Synthetic oligonucleotide
  Antisense strand to SEQ ID NO: 28940
uuaacucuccaacuccugc

SEQ ID NO: 28942 - RNA, 19 nt, Artificial Sequence
  Description of Artificial Sequence: Synthetic oligonucleotide
  Sense strand starting at position 3637 of SEQ ID NO: 329
guuaaagaaucccuaaggu

SEQ ID NO: 28943 - RNA, 19 nt, Artificial Sequence
  Description of Artificial Sequence: Synthetic oligonucleotide
  Antisense strand to SEQ ID NO: 28942
accuuagggauucuuuaac

SEQ ID NO: 28944 - RNA, 19 nt, Artificial Sequence
  Description of Artificial Sequence: Synthetic oligonucleotide
  Sense strand starting at position 3751 of SEQ ID NO: 329
gggccaucucccgguagga

SEQ ID NO: 28945 - RNA, 19 nt, Artificial Sequence
  Description of Artificial Sequence: Synthetic oligonucleotide
  Antisense strand to SEQ ID NO: 28944
uccuaccgggagauggccc

SEQ ID NO: 28946 - RNA, 19 nt, Artificial Sequence
  Description of Artificial Sequence: Synthetic oligonucleotide
  Sense strand starting at position 3803 of SEQ ID NO: 329
cugguaucccaucaugcau

SEQ ID NO: 28947 - RNA, 19 nt, Artificial Sequence
  Description of Artificial Sequence: Synthetic oligonucleotide
  Antisense strand to SEQ ID NO: 28946
augcaugaugggauaccag

SEQ ID NO: 28948 - RNA, 19 nt, Artificial Sequence
  Description of Artificial Sequence: Synthetic oligonucleotide
  Sense strand starting at position 3959 of SEQ ID NO: 329
aauagauucgcccaguaga

SEQ ID NO: 28949 - RNA, 19 nt, Artificial Sequence
  Description of Artificial Sequence: Synthetic oligonucleotide
  Antisense strand to SEQ ID NO: 28948
ucuacugggcgaaucuauu

SEQ ID NO: 28950 - RNA, 19 nt, Artificial Sequence
  Description of Artificial Sequence: Synthetic oligonucleotide
  Sense strand starting at position 3962 of SEQ ID NO: 331
aucaaaugaccgugaguug

SEQ ID NO: 28951 - RNA, 19 nt, Artificial Sequence
  Description of Artificial Sequence: Synthetic oligonucleotide
  Antisense strand to SEQ ID NO: 28950
caacucacggucauuugau

SEQ ID NO: 28952 - RNA, 19 nt, Artificial Sequence
  Description of Artificial Sequence: Synthetic oligonucleotide
  Sense strand starting at position 3929 of SEQ ID NO: 331
ggcccuuggacuugagaag

SEQ ID NO: 28953 - RNA, 19 nt, Artificial Sequence
  Description of Artificial Sequence: Synthetic oligonucleotide
  Antisense strand to SEQ ID NO: 28952
cuucucaaguccaagggcc

SEQ ID NO: 28954 - RNA, 19 nt, Artificial Sequence
  Description of Artificial Sequence: Synthetic oligonucleotide
  Sense strand starting at position 3600 of SEQ ID NO: 331
agaugaucuaggugauguc

SEQ ID NO: 28955 - RNA, 19 nt, Artificial Sequence
  Description of Artificial Sequence: Synthetic oligonucleotide
  Antisense strand to SEQ ID NO: 28954
gacaucaccuagaucaucu

SEQ ID NO: 28956 - RNA, 19 nt, Artificial Sequence
  Description of Artificial Sequence: Synthetic oligonucleotide
  Sense strand starting at position 3598 of SEQ ID NO: 331
gcagaugaucuaggugaug

SEQ ID NO: 28957 - RNA, 19 nt, Artificial Sequence
  Description of Artificial Sequence: Synthetic oligonucleotide
  Antisense strand to SEQ ID NO: 28956
caucaccuagaucaucugc

SEQ ID NO: 28958 - RNA, 19 nt, Artificial Sequence
  Description of Artificial Sequence: Synthetic oligonucleotide
  Sense strand starting at position 3511 of SEQ ID NO: 331
ccuggucucccugaagagu

SEQ ID NO: 28959 - RNA, 19 nt, Artificial Sequence
  Description of Artificial Sequence: Synthetic oligonucleotide
  Antisense strand to SEQ ID NO: 28958
acucuucagggagaccagg

SEQ ID NO: 28960 - RNA, 19 nt, Artificial Sequence
  Description of Artificial Sequence: Synthetic oligonucleotide
  Sense strand starting at position 3322 of SEQ ID NO: 331
auguuagcagaauaacuuu

SEQ ID NO: 28961 - RNA, 19 nt, Artificial Sequence
  Description of Artificial Sequence: Synthetic oligonucleotide
  Antisense strand to SEQ ID NO: 28960
aaaguuauucugcuaacau

SEQ ID NO: 28962 - RNA, 19 nt, Artificial Sequence
  Description of Artificial Sequence: Synthetic oligonucleotide
  Sense strand starting at position 3316 of SEQ ID NO: 331
guaauuauguuagcagaau

SEQ ID NO: 28963 - RNA, 19 nt, Artificial Sequence
  Description of Artificial Sequence: Synthetic oligonucleotide
  Antisense strand to SEQ ID NO: 28962
auucugcuaacauaauuac

SEQ ID NO: 28964 - RNA, 19 nt, Artificial Sequence
  Description of Artificial Sequence: Synthetic oligonucleotide
  Sense strand starting at position 3309 of SEQ ID NO: 331
gggucauguaauuauguua

SEQ ID NO: 28965 - RNA, 19 nt, Artificial Sequence
  Description of Artificial Sequence: Synthetic oligonucleotide
  Antisense strand to SEQ ID NO: 28964
uaacauaauuacaugaccc

SEQ ID NO: 28966 - RNA, 19 nt, Artificial Sequence
  Description of Artificial Sequence: Synthetic oligonucleotide
  Sense strand starting at position 3249 of SEQ ID NO: 331
agguaucucugauucuaga

SEQ ID NO: 28967 - RNA, 19 nt, Artificial Sequence
  Description of Artificial Sequence: Synthetic oligonucleotide
  Antisense strand to SEQ ID NO: 28966
ucuagaaucagagauaccu

SEQ ID NO: 28968 - RNA, 19 nt, Artificial Sequence
  Description of Artificial Sequence: Synthetic oligonucleotide
  Sense strand starting at position 3114 of SEQ ID NO: 331
aguuuaacucuggauacgu

SEQ ID NO: 28969 - RNA, 19 nt, Artificial Sequence
  Description of Artificial Sequence: Synthetic oligonucleotide
  Antisense strand to SEQ ID NO: 28968
acguauccagaguuaaacu

SEQ ID NO: 28970 - RNA, 19 nt, Artificial Sequence
  Description of Artificial Sequence: Synthetic oligonucleotide
  Sense strand starting at position 3112 of SEQ ID NO: 331
ugaguuuaacucuggauac

SEQ ID NO: 28971 - RNA, 19 nt, Artificial Sequence
  Description of Artificial Sequence: Synthetic oligonucleotide
  Antisense strand to SEQ ID NO: 28970
guauccagaguuaaacuca

SEQ ID NO: 28972 - RNA, 19 nt, Artificial Sequence
  Description of Artificial Sequence: Synthetic oligonucleotide
  Sense strand starting at position 3109 of SEQ ID NO: 331
uagugaguuuaacucugga

SEQ ID NO: 28973 - RNA, 19 nt, Artificial Sequence
  Description of Artificial Sequence: Synthetic oligonucleotide
  Antisense strand to SEQ ID NO: 28972
uccagaguuaaacucacua

SEQ ID NO: 28974 - RNA, 19 nt, Artificial Sequence
  Description of Artificial Sequence: Synthetic oligonucleotide
  Sense strand starting at position 2909 of SEQ ID NO: 331
uucccaugucuuugacaag

SEQ ID NO: 28975 - RNA, 19 nt, Artificial Sequence
  Description of Artificial Sequence: Synthetic oligonucleotide
  Antisense strand to SEQ ID NO: 28974
cuugucaaagacaugggaa

SEQ ID NO: 28976 - RNA, 19 nt, Artificial Sequence
  Description of Artificial Sequence: Synthetic oligonucleotide
  Sense strand starting at position 2887 of SEQ ID NO: 331
gagagugaauagcuacuau

SEQ ID NO: 28977 - RNA, 19 nt, Artificial Sequence
  Description of Artificial Sequence: Synthetic oligonucleotide
  Antisense strand to SEQ ID NO: 28976
auaguagcuauucacucuc

SEQ ID NO: 28978 - RNA, 19 nt, Artificial Sequence
  Description of Artificial Sequence: Synthetic oligonucleotide
  Sense strand starting at position 2741 of SEQ ID NO: 331
gguuucucugccuauaaag

SEQ ID NO: 28979 - RNA, 19 nt, Artificial Sequence
  Description of Artificial Sequence: Synthetic oligonucleotide
  Antisense strand to SEQ ID NO: 28978
cuuuauaggcagagaaacc

SEQ ID NO: 28980 - RNA, 19 nt, Artificial Sequence
  Description of Artificial Sequence: Synthetic oligonucleotide
  Sense strand starting at position 2712 of SEQ ID NO: 331
gauccuguccuguagagau

SEQ ID NO: 28981 - RNA, 19 nt, Artificial Sequence
  Description of Artificial Sequence: Synthetic oligonucleotide
  Antisense strand to SEQ ID NO: 28980
aucucuacaggacaggauc

SEQ ID NO: 28982 - RNA, 19 nt, Artificial Sequence
  Description of Artificial Sequence: Synthetic oligonucleotide
  Sense strand starting at position 2584 of SEQ ID NO: 331
gaggucauucucugaauaa

SEQ ID NO: 28983 - RNA, 19 nt, Artificial Sequence
  Description of Artificial Sequence: Synthetic oligonucleotide
  Antisense strand to SEQ ID NO: 28982
uuauucagagaaugaccuc

SEQ ID NO: 28984 - RNA, 19 nt, Artificial Sequence
  Description of Artificial Sequence: Synthetic oligonucleotide
  Sense strand starting at position 2583 of SEQ ID NO: 331
ugaggucauucucugaaua

SEQ ID NO: 28985 - RNA, 19 nt, Artificial Sequence
  Description of Artificial Sequence: Synthetic oligonucleotide
  Antisense strand to SEQ ID NO: 28984
uauucagagaaugaccuca

SEQ ID NO: 28986 - RNA, 19 nt, Artificial Sequence
  Description of Artificial Sequence: Synthetic oligonucleotide
  Sense strand starting at position 2489 of SEQ ID NO: 331
ugauacuauguaggagagu

SEQ ID NO: 28987 - RNA, 19 nt, Artificial Sequence
  Description of Artificial Sequence: Synthetic oligonucleotide
  Antisense strand to SEQ ID NO: 28986
acucuccuacauaguauca

SEQ ID NO: 28988 - RNA, 19 nt, Artificial Sequence
  Description of Artificial Sequence: Synthetic oligonucleotide
  Sense strand starting at position 2475 of SEQ ID NO: 331
ugauucugauucuuugaua

SEQ ID NO: 28989 - RNA, 19 nt, Artificial Sequence
  Description of Artificial Sequence: Synthetic oligonucleotide
  Antisense strand to SEQ ID NO: 28988
uaucaaagaaucagaauca

SEQ ID NO: 28990 - RNA, 19 nt, Artificial Sequence
  Description of Artificial Sequence: Synthetic oligonucleotide
  Sense strand starting at position 2466 of SEQ ID NO: 331
ggugaagucugauucugau

SEQ ID NO: 28991 - RNA, 19 nt, Artificial Sequence
  Description of Artificial Sequence: Synthetic oligonucleotide
  Antisense strand to SEQ ID NO: 28990
aucagaaucagacuucacc

SEQ ID NO: 28992 - RNA, 19 nt, Artificial Sequence
  Description of Artificial Sequence: Synthetic oligonucleotide
  Sense strand starting at position 2454 of SEQ ID NO: 331
gaaucuucuguaggugaag

SEQ ID NO: 28993 - RNA, 19 nt, Artificial Sequence
  Description of Artificial Sequence: Synthetic oligonucleotide
  Antisense strand to SEQ ID NO: 28992
cuucaccuacagaagauuc

SEQ ID NO: 28994 - RNA, 19 nt, Artificial Sequence
  Description of Artificial Sequence: Synthetic oligonucleotide
  Sense strand starting at position 2452 of SEQ ID NO: 331
gggaaucuucuguagguga

SEQ ID NO: 28995 - RNA, 19 nt, Artificial Sequence
  Description of Artificial Sequence: Synthetic oligonucleotide
  Antisense strand to SEQ ID NO: 28994
ucaccuacagaagauuccc

SEQ ID NO: 28996 - RNA, 19 nt, Artificial Sequence
  Description of Artificial Sequence: Synthetic oligonucleotide
  Sense strand starting at position 2451 of SEQ ID NO: 331
ugggaaucuucuguaggug

SEQ ID NO: 28997 - RNA, 19 nt, Artificial Sequence
  Description of Artificial Sequence: Synthetic oligonucleotide
  Antisense strand to SEQ ID NO: 28996
caccuacagaagauuccca

SEQ ID NO: 28998 - RNA, 19 nt, Artificial Sequence
  Description of Artificial Sequence: Synthetic oligonucleotide
  Sense strand starting at position 2440 of SEQ ID NO: 331
guccuaaagccugggaauc

SEQ ID NO: 28999 - RNA, 19 nt, Artificial Sequence
  Description of Artificial Sequence: Synthetic oligonucleotide
  Antisense strand to SEQ ID NO: 28998
gauucccaggcuuuaggac

SEQ ID NO: 29000 - RNA, 19 nt, Artificial Sequence
  Description of Artificial Sequence: Synthetic oligonucleotide
  Sense strand starting at position 2439 of SEQ ID NO: 331
uguccuaaagccugggaau

SEQ ID NO: 29001 - RNA, 19 nt, Artificial Sequence
  Description of Artificial Sequence: Synthetic oligonucleotide
  Antisense strand to SEQ ID NO: 29000
auucccaggcuuuaggaca

SEQ ID NO: 29002 - RNA, 19 nt, Artificial Sequence
  Description of Artificial Sequence: Synthetic oligonucleotide
  Sense strand starting at position 2257 of SEQ ID NO: 331
agaugagucggagguaaau

SEQ ID NO: 29003 - RNA, 19 nt, Artificial Sequence
  Description of Artificial Sequence: Synthetic oligonucleotide
  Antisense strand to SEQ ID NO: 29002
auuuaccuccgacucaucu

SEQ ID NO: 29004 - RNA, 19 nt, Artificial Sequence
  Description of Artificial Sequence: Synthetic oligonucleotide
  Sense strand starting at position 2254 of SEQ ID NO: 331
accagaugagucggaggua

SEQ ID NO: 29005 - RNA, 19 nt, Artificial Sequence
  Description of Artificial Sequence: Synthetic oligonucleotide
  Antisense strand to SEQ ID NO: 29004
uaccuccgacucaucuggu

SEQ ID NO: 29006 - RNA, 19 nt, Artificial Sequence
  Description of Artificial Sequence: Synthetic oligonucleotide
  Sense strand starting at position 2227 of SEQ ID NO: 331
aggagagaugccggagcua

SEQ ID NO: 29007 - RNA, 19 nt, Artificial Sequence
  Description of Artificial Sequence: Synthetic oligonucleotide
  Antisense strand to SEQ ID NO: 29006
uagcuccggcaucucuccu

SEQ ID NO: 29008 - RNA, 19 nt, Artificial Sequence
  Description of Artificial Sequence: Synthetic oligonucleotide
  Sense strand starting at position 2022 of SEQ ID NO: 331
cuaaauaugucuccauggu

SEQ ID NO: 29009 - RNA, 19 nt, Artificial Sequence
  Description of Artificial Sequence: Synthetic oligonucleotide
  Antisense strand to SEQ ID NO: 29008
accauggagacauauuuag

SEQ ID NO: 29010 - RNA, 19 nt, Artificial Sequence
  Description of Artificial Sequence: Synthetic oligonucleotide
  Sense strand starting at position 2020 of SEQ ID NO: 331
gucuaaauaugucuccaug

SEQ ID NO: 29011 - RNA, 19 nt, Artificial Sequence
  Description of Artificial Sequence: Synthetic oligonucleotide
  Antisense strand to SEQ ID NO: 29010
cauggagacauauuuagac

SEQ ID NO: 29012 - RNA, 19 nt, Artificial Sequence
  Description of Artificial Sequence: Synthetic oligonucleotide
  Sense strand starting at position 2011 of SEQ ID NO: 331
ccugguccugucuaaauau

SEQ ID NO: 29013 - RNA, 19 nt, Artificial Sequence
  Description of Artificial Sequence: Synthetic oligonucleotide
  Antisense strand to SEQ ID NO: 29012
auauuuagacaggaccagg

SEQ ID NO: 29014 - RNA, 19 nt, Artificial Sequence
  Description of Artificial Sequence: Synthetic oligonucleotide
  Sense strand starting at position 1390 of SEQ ID NO: 331
gcuacauggguguaggaua

SEQ ID NO: 29015 - RNA, 19 nt, Artificial Sequence
  Description of Artificial Sequence: Synthetic oligonucleotide
  Antisense strand to SEQ ID NO: 29014
uauccuacacccauguagc

SEQ ID NO: 29016 - RNA, 19 nt, Artificial Sequence
  Description of Artificial Sequence: Synthetic oligonucleotide
  Sense strand starting at position 965 of SEQ ID NO: 331
gcaugaucucuaggagaua

SEQ ID NO: 29017 - RNA, 19 nt, Artificial Sequence
  Description of Artificial Sequence: Synthetic oligonucleotide
  Antisense strand to SEQ ID NO: 29016
uaucuccuagagaucaugc

SEQ ID NO: 29018 - RNA, 19 nt, Artificial Sequence
  Description of Artificial Sequence: Synthetic oligonucleotide
  Sense strand starting at position 962 of SEQ ID NO: 331
gaggcaugaucucuaggag

SEQ ID NO: 29019 - RNA, 19 nt, Artificial Sequence
  Description of Artificial Sequence: Synthetic oligonucleotide
  Antisense strand to SEQ ID NO: 29018
cuccuagagaucaugccuc

SEQ ID NO: 29020 - RNA, 19 nt, Artificial Sequence
  Description of Artificial Sequence: Synthetic oligonucleotide
  Sense strand starting at position 882 of SEQ ID NO: 331
gggcauccagcuuauccaa

SEQ ID NO: 29021 - RNA, 19 nt, Artificial Sequence
  Description of Artificial Sequence: Synthetic oligonucleotide
  Antisense strand to SEQ ID NO: 29020
uuggauaagcuggaugccc

SEQ ID NO: 29022 - RNA, 19 nt, Artificial Sequence
  Description of Artificial Sequence: Synthetic oligonucleotide
  Sense strand starting at position 613 of SEQ ID NO: 331
ggugucucacccugaaaug

SEQ ID NO: 29023 - RNA, 19 nt, Artificial Sequence
  Description of Artificial Sequence: Synthetic oligonucleotide
  Antisense strand to SEQ ID NO: 29022
cauuucagggugagacacc

SEQ ID NO: 29024 - RNA, 19 nt, Artificial Sequence
  Description of Artificial Sequence: Synthetic oligonucleotide
  Sense strand starting at position 208 of SEQ ID NO: 331
aggccagagagcugagaua

SEQ ID NO: 29025 - RNA, 19 nt, Artificial Sequence
  Description of Artificial Sequence: Synthetic oligonucleotide
  Antisense strand to SEQ ID NO: 29024
uaucucagcucucuggccu

SEQ ID NO: 29026 - RNA, 19 nt, Artificial Sequence
  Description of Artificial Sequence: Synthetic oligonucleotide
  Sense strand starting at position 183 of SEQ ID NO: 331
ggucauguuguugaggagu

SEQ ID NO: 29027 - RNA, 19 nt, Artificial Sequence
  Description of Artificial Sequence: Synthetic oligonucleotide
  Antisense strand to SEQ ID NO: 29026
acuccucaacaacaugacc

SEQ ID NO: 29028 - RNA, 19 nt, Artificial Sequence
  Description of Artificial Sequence: Synthetic oligonucleotide
  Sense strand starting at position 106 of SEQ ID NO: 331
cuuggaagucccugagauu

SEQ ID NO: 29029 - RNA, 19 nt, Artificial Sequence
  Description of Artificial Sequence: Synthetic oligonucleotide
  Antisense strand to SEQ ID NO: 29028
aaucucagggacuuccaag

SEQ ID NO: 29030 - RNA, 19 nt, Artificial Sequence
  Description of Artificial Sequence: Synthetic oligonucleotide
  Sense strand starting at position 155 of SEQ ID NO: 332
aucagaaaugaauguccuu

SEQ ID NO: 29031 - RNA, 19 nt, Artificial Sequence
  Description of Artificial Sequence: Synthetic oligonucleotide
  Antisense strand to SEQ ID NO: 29030
aaggacauucauuucugau

SEQ ID NO: 29032 - RNA, 19 nt, Artificial Sequence
  Description of Artificial Sequence: Synthetic oligonucleotide
  Sense strand starting at position 202 of SEQ ID NO: 332
uuuggaguucuaggcuaac

SEQ ID NO: 29033 - RNA, 19 nt, Artificial Sequence
  Description of Artificial Sequence: Synthetic oligonucleotide
  Antisense strand to SEQ ID NO: 29032
guuagccuagaacuccaaa

SEQ ID NO: 29034 - RNA, 19 nt, Artificial Sequence
  Description of Artificial Sequence: Synthetic oligonucleotide
  Sense strand starting at position 282 of SEQ ID NO: 332
gucucuugauaacugagua

SEQ ID NO: 29035 - RNA, 19 nt, Artificial Sequence
  Description of Artificial Sequence: Synthetic oligonucleotide
  Antisense strand to SEQ ID NO: 29034
uacucaguuaucaagagac

SEQ ID NO: 29036 - RNA, 19 nt, Artificial Sequence
  Description of Artificial Sequence: Synthetic oligonucleotide
  Sense strand starting at position 287 of SEQ ID NO: 332
uugauaacugaguauggca

SEQ ID NO: 29037 - RNA, 19 nt, Artificial Sequence
  Description of Artificial Sequence: Synthetic oligonucleotide
  Antisense strand to SEQ ID NO: 29036
ugccauacucaguuaucaa

SEQ ID NO: 29038 - RNA, 19 nt, Artificial Sequence
  Description of Artificial Sequence: Synthetic oligonucleotide
  Sense strand starting at position 302 of SEQ ID NO: 332
ggcaguuugagauggagau

SEQ ID NO: 29039 - RNA, 19 nt, Artificial Sequence
  Description of Artificial Sequence: Synthetic oligonucleotide
  Antisense strand to SEQ ID NO: 29038
aucuccaucucaaacugcc

SEQ ID NO: 29040 - RNA, 19 nt, Artificial Sequence
  Description of Artificial Sequence: Synthetic oligonucleotide
  Sense strand starting at position 303 of SEQ ID NO: 332
gcaguuugagauggagaua

SEQ ID NO: 29041 - RNA, 19 nt, Artificial Sequence
  Description of Artificial Sequence: Synthetic oligonucleotide
  Antisense strand to SEQ ID NO: 29040
uaucuccaucucaaacugc

SEQ ID NO: 29042 - RNA, 19 nt, Artificial Sequence
  Description of Artificial Sequence: Synthetic oligonucleotide
  Sense strand starting at position 315 of SEQ ID NO: 332
ggagauauaauguaagugu

SEQ ID NO: 29043 - RNA, 19 nt, Artificial Sequence
  Description of Artificial Sequence: Synthetic oligonucleotide
  Antisense strand to SEQ ID NO: 29042
acacuuacauuauaucucc

SEQ ID NO: 29044 - RNA, 19 nt, Artificial Sequence
  Description of Artificial Sequence: Synthetic oligonucleotide
  Sense strand starting at position 361 of SEQ ID NO: 332
guucuaugucucguucuuu

SEQ ID NO: 29045 - RNA, 19 nt, Artificial Sequence
  Description of Artificial Sequence: Synthetic oligonucleotide
  Antisense strand to SEQ ID NO: 29044
aaagaacgagacauagaac

SEQ ID NO: 29046 - RNA, 19 nt, Artificial Sequence
  Description of Artificial Sequence: Synthetic oligonucleotide
  Sense strand starting at position 507 of SEQ ID NO: 332
ugauguauuugggauaguu

SEQ ID NO: 29047 - RNA, 19 nt, Artificial Sequence
  Description of Artificial Sequence: Synthetic oligonucleotide
  Antisense strand to SEQ ID NO: 29046
aacuaucccaaauacauca

SEQ ID NO: 29048 - RNA, 19 nt, Artificial Sequence
  Description of Artificial Sequence: Synthetic oligonucleotide
  Sense strand starting at position 630 of SEQ ID NO: 332
gauugugcugguuaauaaa

SEQ ID NO: 29049 - RNA, 19 nt, Artificial Sequence
  Description of Artificial Sequence: Synthetic oligonucleotide
  Antisense strand to SEQ ID NO: 29048
uuuauuaaccagcacaauc

SEQ ID NO: 29050 - RNA, 19 nt, Artificial Sequence
  Description of Artificial Sequence: Synthetic oligonucleotide
  Sense strand starting at position 950 of SEQ ID NO: 332
ugaauaugcugcucagaag

SEQ ID NO: 29051 - RNA, 19 nt, Artificial Sequence
  Description of Artificial Sequence: Synthetic oligonucleotide
  Antisense strand to SEQ ID NO: 29050
cuucugagcagcauauuca

SEQ ID NO: 29052 - RNA, 19 nt, Artificial Sequence
  Description of Artificial Sequence: Synthetic oligonucleotide
  Sense strand starting at position 951 of SEQ ID NO: 332
gaauaugcugcucagaaga

SEQ ID NO: 29053 - RNA, 19 nt, Artificial Sequence
  Description of Artificial Sequence: Synthetic oligonucleotide
  Antisense strand to SEQ ID NO: 29052
ucuucugagcagcauauuc

SEQ ID NO: 29054 - RNA, 19 nt, Artificial Sequence
  Description of Artificial Sequence: Synthetic oligonucleotide
  Sense strand starting at position 961 of SEQ ID NO: 332
cucagaagaucugcacaca

SEQ ID NO: 29055 - RNA, 19 nt, Artificial Sequence
  Description of Artificial Sequence: Synthetic oligonucleotide
  Antisense strand to SEQ ID NO: 29054
ugugugcagaucuucugag

SEQ ID NO: 29056 - RNA, 19 nt, Artificial Sequence
  Description of Artificial Sequence: Synthetic oligonucleotide
  Sense strand starting at position 1080 of SEQ ID NO: 332
cuggucucuccaggaucau

SEQ ID NO: 29057 - RNA, 19 nt, Artificial Sequence
  Description of Artificial Sequence: Synthetic oligonucleotide
  Antisense strand to SEQ ID NO: 29056
augauccuggagagaccag

SEQ ID NO: 29058 - RNA, 19 nt, Artificial Sequence
  Description of Artificial Sequence: Synthetic oligonucleotide
  Sense strand starting at position 1190 of SEQ ID NO: 332
ucuacauucuaucugggaa

SEQ ID NO: 29059 - RNA, 19 nt, Artificial Sequence
  Description of Artificial Sequence: Synthetic oligonucleotide
  Antisense strand to SEQ ID NO: 29058
uucccagauagaauguaga

SEQ ID NO: 29060 - RNA, 19 nt, Artificial Sequence
  Description of Artificial Sequence: Synthetic oligonucleotide
  Sense strand starting at position 1396 of SEQ ID NO: 332
aguauauauucucugcauc

SEQ ID NO: 29061 - RNA, 19 nt, Artificial Sequence
  Description of Artificial Sequence: Synthetic oligonucleotide
  Antisense strand to SEQ ID NO: 29060
gaugcagagaauauauacu

SEQ ID NO: 29062 - RNA, 19 nt, Artificial Sequence
  Description of Artificial Sequence: Synthetic oligonucleotide
  Sense strand starting at position 1538 of SEQ ID NO: 332
gcgugaccuuaucugaaga

SEQ ID NO: 29063 - RNA, 19 nt, Artificial Sequence
  Description of Artificial Sequence: Synthetic oligonucleotide
  Antisense strand to SEQ ID NO: 29062
ucuucagauaaggucacgc

SEQ ID NO: 29064 - RNA, 19 nt, Artificial Sequence
  Description of Artificial Sequence: Synthetic oligonucleotide
  Sense strand starting at position 1611 of SEQ ID NO: 332
gaaguucuucucggaaaga

SEQ ID NO: 29065 - RNA, 19 nt, Artificial Sequence
  Description of Artificial Sequence: Synthetic oligonucleotide
  Antisense strand to SEQ ID NO: 29064
ucuuuccgagaagaacuuc

SEQ ID NO: 29066 - RNA, 19 nt, Artificial Sequence
  Description of Artificial Sequence: Synthetic oligonucleotide
  Sense strand starting at position 1640 of SEQ ID NO: 332
gguccuucccaucauaugu

SEQ ID NO: 29067 - RNA, 19 nt, Artificial Sequence
  Description of Artificial Sequence: Synthetic oligonucleotide
  Antisense strand to SEQ ID NO: 29066
acauaugaugggaaggacc

SEQ ID NO: 29068 - RNA, 19 nt, Artificial Sequence
  Description of Artificial Sequence: Synthetic oligonucleotide
  Sense strand starting at position 1766 of SEQ ID NO: 332
auaugcugugugcagaaua

SEQ ID NO: 29069 - RNA, 19 nt, Artificial Sequence
  Description of Artificial Sequence: Synthetic oligonucleotide
  Antisense strand to SEQ ID NO: 29068
uauucugcacacagcauau

SEQ ID NO: 29070 - RNA, 19 nt, Artificial Sequence
  Description of Artificial Sequence: Synthetic oligonucleotide
  Sense strand starting at position 2049 of SEQ ID NO: 332
gccucugucucauuaggaa

SEQ ID NO: 29071 - RNA, 19 nt, Artificial Sequence
  Description of Artificial Sequence: Synthetic oligonucleotide
  Antisense strand to SEQ ID NO: 29070
uuccuaaugagacagaggc

SEQ ID NO: 29072 - RNA, 19 nt, Artificial Sequence
  Description of Artificial Sequence: Synthetic oligonucleotide
  Sense strand starting at position 2141 of SEQ ID NO: 332
uguagagggauucgcugau

SEQ ID NO: 29073 - RNA, 19 nt, Artificial Sequence
  Description of Artificial Sequence: Synthetic oligonucleotide
  Antisense strand to SEQ ID NO: 29072
aucagcgaaucccucuaca

SEQ ID NO: 29074 - RNA, 19 nt, Artificial Sequence
  Description of Artificial Sequence: Synthetic oligonucleotide
  Sense strand starting at position 2145 of SEQ ID NO: 332
gagggauucgcugauacag

SEQ ID NO: 29075 - RNA, 19 nt, Artificial Sequence
  Description of Artificial Sequence: Synthetic oligonucleotide
  Antisense strand to SEQ ID NO: 29074
cuguaucagcgaaucccuc

SEQ ID NO: 29076 - RNA, 19 nt, Artificial Sequence
  Description of Artificial Sequence: Synthetic oligonucleotide
  Sense strand starting at position 2210 of SEQ ID NO: 332
aauguacacgcaugaaaua

SEQ ID NO: 29077 - RNA, 19 nt, Artificial Sequence
  Description of Artificial Sequence: Synthetic oligonucleotide
  Antisense strand to SEQ ID NO: 29076
uauuucaugcguguacauu

SEQ ID NO: 29078 - RNA, 19 nt, Artificial Sequence
  Description of Artificial Sequence: Synthetic oligonucleotide
  Sense strand starting at position 2211 of SEQ ID NO: 332
auguacacgcaugaaauaa

SEQ ID NO: 29079 - RNA, 19 nt, Artificial Sequence
  Description of Artificial Sequence: Synthetic oligonucleotide
  Antisense strand to SEQ ID NO: 29078
uuauuucaugcguguacau

SEQ ID NO: 29080 - RNA, 19 nt, Artificial Sequence
  Description of Artificial Sequence: Synthetic oligonucleotide
  Sense strand starting at position 2567 of SEQ ID NO: 332
agaagaaccuguccucauu

SEQ ID NO: 29081 - RNA, 19 nt, Artificial Sequence
  Description of Artificial Sequence: Synthetic oligonucleotide
  Antisense strand to SEQ ID NO: 29080
aaugaggacagguucuucu

SEQ ID NO: 29082 - RNA, 19 nt, Artificial Sequence
  Description of Artificial Sequence: Synthetic oligonucleotide
  Sense strand starting at position 2804 of SEQ ID NO: 332
gguggaacauugguuauau

SEQ ID NO: 29083 - RNA, 19 nt, Artificial Sequence
  Description of Artificial Sequence: Synthetic oligonucleotide
  Antisense strand to SEQ ID NO: 29082
auauaaccaauguuccacc

SEQ ID NO: 29084 - RNA, 19 nt, Artificial Sequence
  Description of Artificial Sequence: Synthetic oligonucleotide
  Sense strand starting at position 2805 of SEQ ID NO: 332
guggaacauugguuauaua

SEQ ID NO: 29085 - RNA, 19 nt, Artificial Sequence
  Description of Artificial Sequence: Synthetic oligonucleotide
  Antisense strand to SEQ ID NO: 29084
uauauaaccaauguuccac

SEQ ID NO: 29086 - RNA, 19 nt, Artificial Sequence
  Description of Artificial Sequence: Synthetic oligonucleotide
  Sense strand starting at position 2843 of SEQ ID NO: 332
uaauaugaaugguuuguga

SEQ ID NO: 29087 - RNA, 19 nt, Artificial Sequence
  Description of Artificial Sequence: Synthetic oligonucleotide
  Antisense strand to SEQ ID NO: 29086
ucacaaaccauucauauua

SEQ ID NO: 29088 - RNA, 19 nt, Artificial Sequence
  Description of Artificial Sequence: Synthetic oligonucleotide
  Sense strand starting at position 2845 of SEQ ID NO: 332
auaugaaugguuugugaac

SEQ ID NO: 29089 - RNA, 19 nt, Artificial Sequence
  Description of Artificial Sequence: Synthetic oligonucleotide
  Antisense strand to SEQ ID NO: 29088
guucacaaaccauucauau

SEQ ID NO: 29090 - RNA, 19 nt, Artificial Sequence
  Description of Artificial Sequence: Synthetic oligonucleotide
  Sense strand starting at position 2883 of SEQ ID NO: 332
ccuugaauccaguaggcaa

SEQ ID NO: 29091 - RNA, 19 nt, Artificial Sequence
  Description of Artificial Sequence: Synthetic oligonucleotide
  Antisense strand to SEQ ID NO: 29090
uugccuacuggauucaagg

SEQ ID NO: 29092 - RNA, 19 nt, Artificial Sequence
  Description of Artificial Sequence: Synthetic oligonucleotide
  Sense strand starting at position 2913 of SEQ ID NO: 332
gggaucagggcucauccua

SEQ ID NO: 29093 - RNA, 19 nt, Artificial Sequence
  Description of Artificial Sequence: Synthetic oligonucleotide
  Antisense strand to SEQ ID NO: 29092
uaggaugagcccugauccc

SEQ ID NO: 29094 - RNA, 19 nt, Artificial Sequence
  Description of Artificial Sequence: Synthetic oligonucleotide
  Sense strand starting at position 3041 of SEQ ID NO: 332
gggugauucccuugcagac

SEQ ID NO: 29095 - RNA, 19 nt, Artificial Sequence
  Description of Artificial Sequence: Synthetic oligonucleotide
  Antisense strand to SEQ ID NO: 29094
gucugcaagggaaucaccc

SEQ ID NO: 29096 - RNA, 19 nt, Artificial Sequence
  Description of Artificial Sequence: Synthetic oligonucleotide
  Sense strand starting at position 3205 of SEQ ID NO: 332
gacagaguacucugucaug

SEQ ID NO: 29097 - RNA, 19 nt, Artificial Sequence
  Description of Artificial Sequence: Synthetic oligonucleotide
  Antisense strand to SEQ ID NO: 29096
caugacagaguacucuguc

SEQ ID NO: 29098 - RNA, 19 nt, Artificial Sequence
  Description of Artificial Sequence: Synthetic oligonucleotide
  Sense strand starting at position 3349 of SEQ ID NO: 332
acacucucaugugcagaaa

SEQ ID NO: 29099 - RNA, 19 nt, Artificial Sequence
  Description of Artificial Sequence: Synthetic oligonucleotide
  Antisense strand to SEQ ID NO: 29098
uuucugcacaugagagugu

SEQ ID NO: 29100 - RNA, 19 nt, Artificial Sequence
  Description of Artificial Sequence: Synthetic oligonucleotide
  Sense strand starting at position 3352 of SEQ ID NO: 332
cucucaugugcagaaaguu

SEQ ID NO: 29101 - RNA, 19 nt, Artificial Sequence
  Description of Artificial Sequence: Synthetic oligonucleotide
  Antisense strand to SEQ ID NO: 29100
aacuuucugcacaugagag

SEQ ID NO: 29102 - RNA, 19 nt, Artificial Sequence
  Description of Artificial Sequence: Synthetic oligonucleotide
  Sense strand starting at position 3405 of SEQ ID NO: 332
cgguauuccguucuuucua

SEQ ID NO: 29103 - RNA, 19 nt, Artificial Sequence
  Description of Artificial Sequence: Synthetic oligonucleotide
  Antisense strand to SEQ ID NO: 29102
uagaaagaacggaauaccg

SEQ ID NO: 29104 - RNA, 19 nt, Artificial Sequence
  Description of Artificial Sequence: Synthetic oligonucleotide
  Sense strand starting at position 3517 of SEQ ID NO: 332
cucugcuuucuuuaggaaa

SEQ ID NO: 29105 - RNA, 19 nt, Artificial Sequence
  Description of Artificial Sequence: Synthetic oligonucleotide
  Antisense strand to SEQ ID NO: 29104
uuuccuaaagaaagcagag

SEQ ID NO: 29106 - RNA, 19 nt, Artificial Sequence
  Description of Artificial Sequence: Synthetic oligonucleotide
  Sense strand starting at position 3939 of SEQ ID NO: 332
ccaagcauccaugguagau

SEQ ID NO: 29107 - RNA, 19 nt, Artificial Sequence
  Description of Artificial Sequence: Synthetic oligonucleotide
  Antisense strand to SEQ ID NO: 29106
aucuaccauggaugcuugg

SEQ ID NO: 29108 - RNA, 19 nt, Artificial Sequence
  Description of Artificial Sequence: Synthetic oligonucleotide
  Sense strand starting at position 3943 of SEQ ID NO: 332
gcauccaugguagauauga

SEQ ID NO: 29109 - RNA, 19 nt, Artificial Sequence
  Description of Artificial Sequence: Synthetic oligonucleotide
  Antisense strand to SEQ ID NO: 29108
ucauaucuaccauggaugc

SEQ ID NO: 29110 - RNA, 19 nt, Artificial Sequence
  Description of Artificial Sequence: Synthetic oligonucleotide
  Sense strand starting at position 111 of SEQ ID NO: 333
ccgugauugacggcgcaua

SEQ ID NO: 29111 - RNA, 19 nt, Artificial Sequence
  Description of Artificial Sequence: Synthetic oligonucleotide
  Antisense strand to SEQ ID NO: 29110
uaugcgccgucaaucacgg

SEQ ID NO: 29112 - RNA, 19 nt, Artificial Sequence
  Description of Artificial Sequence: Synthetic oligonucleotide
  Sense strand starting at position 330 of SEQ ID NO: 333
ggcagugcuggcuucggaa

SEQ ID NO: 29113 - RNA, 19 nt, Artificial Sequence
  Description of Artificial Sequence: Synthetic oligonucleotide
  Antisense strand to SEQ ID NO: 29112
uuccgaagccagcacugcc

SEQ ID NO: 29114 - RNA, 19 nt, Artificial Sequence
  Description of Artificial Sequence: Synthetic oligonucleotide
  Sense strand starting at position 411 of SEQ ID NO: 333
gcaaaugccaccgaguaaa

SEQ ID NO: 29115 - RNA, 19 nt, Artificial Sequence
  Description of Artificial Sequence: Synthetic oligonucleotide
  Antisense strand to SEQ ID NO: 29114
uuuacucgguggcauuugc

SEQ ID NO: 29116 - RNA, 19 nt, Artificial Sequence
  Description of Artificial Sequence: Synthetic oligonucleotide
  Sense strand starting at position 606 of SEQ ID NO: 333
acccuaagugaccgggaaa

SEQ ID NO: 29117 - RNA, 19 nt, Artificial Sequence
  Description of Artificial Sequence: Synthetic oligonucleotide
  Antisense strand to SEQ ID NO: 29116
uuucccggucacuuagggu

SEQ ID NO: 29118 - RNA, 19 nt, Artificial Sequence
  Description of Artificial Sequence: Synthetic oligonucleotide
  Sense strand starting at position 1084 of SEQ ID NO: 333
gcgcacuugagauaaacuu

SEQ ID NO: 29119 - RNA, 19 nt, Artificial Sequence
  Description of Artificial Sequence: Synthetic oligonucleotide
  Antisense strand to SEQ ID NO: 29118
aaguuuaucucaagugcgc

SEQ ID NO: 29120 - RNA, 19 nt, Artificial Sequence
  Description of Artificial Sequence: Synthetic oligonucleotide
  Sense strand starting at position 1238 of SEQ ID NO: 333
ccgguauccgggcacaaga

SEQ ID NO: 29121 - RNA, 19 nt, Artificial Sequence
  Description of Artificial Sequence: Synthetic oligonucleotide
  Antisense strand to SEQ ID NO: 29120
ucuugugcccggauaccgg

SEQ ID NO: 29122 - RNA, 19 nt, Artificial Sequence
  Description of Artificial Sequence: Synthetic oligonucleotide
  Sense strand starting at position 1409 of SEQ ID NO: 333
aggagugauuacccgguau

SEQ ID NO: 29123 - RNA, 19 nt, Artificial Sequence
  Description of Artificial Sequence: Synthetic oligonucleotide
  Antisense strand to SEQ ID NO: 29122
auaccggguaaucacuccu

SEQ ID NO: 29124 - RNA, 19 nt, Artificial Sequence
  Description of Artificial Sequence: Synthetic oligonucleotide
  Sense strand starting at position 1413 of SEQ ID NO: 333
gugauuacccgguauugga

SEQ ID NO: 29125 - RNA, 19 nt, Artificial Sequence
  Description of Artificial Sequence: Synthetic oligonucleotide
  Antisense strand to SEQ ID NO: 29124
uccaauaccggguaaucac

SEQ ID NO: 29126 - RNA, 19 nt, Artificial Sequence
  Description of Artificial Sequence: Synthetic oligonucleotide
  Sense strand starting at position 2436 of SEQ ID NO: 333
aacgaaauguucucacugu

SEQ ID NO: 29127 - RNA, 19 nt, Artificial Sequence
  Description of Artificial Sequence: Synthetic oligonucleotide
  Antisense strand to SEQ ID NO: 29126
acagugagaacauuucguu

SEQ ID NO: 29128 - RNA, 19 nt, Artificial Sequence
  Description of Artificial Sequence: Synthetic oligonucleotide
  Sense strand starting at position 2474 of SEQ ID NO: 333
uauucuuugcaagggaguu

SEQ ID NO: 29129 - RNA, 19 nt, Artificial Sequence
  Description of Artificial Sequence: Synthetic oligonucleotide
  Antisense strand to SEQ ID NO: 29128
aacucccuugcaaagaaua

SEQ ID NO: 29130 - RNA, 19 nt, Artificial Sequence
  Description of Artificial Sequence: Synthetic oligonucleotide
  Sense strand starting at position 2475 of SEQ ID NO: 333
auucuuugcaagggaguuu

SEQ ID NO: 29131 - RNA, 19 nt, Artificial Sequence
  Description of Artificial Sequence: Synthetic oligonucleotide
  Antisense strand to SEQ ID NO: 29130
aaacucccuugcaaagaau

SEQ ID NO: 29132 - RNA, 19 nt, Artificial Sequence
  Description of Artificial Sequence: Synthetic oligonucleotide
  Sense strand starting at position 2499 of SEQ ID NO: 333
ucaaucuauugugcaagaa

SEQ ID NO: 29133 - RNA, 19 nt, Artificial Sequence
  Description of Artificial Sequence: Synthetic oligonucleotide
  Antisense strand to SEQ ID NO: 29132
uucuugcacaauagauuga

SEQ ID NO: 29134 - RNA, 19 nt, Artificial Sequence
  Description of Artificial Sequence: Synthetic oligonucleotide
  Sense strand starting at position 2522 of SEQ ID NO: 333
auccuuaagugagcaagau

SEQ ID NO: 29135 - RNA, 19 nt, Artificial Sequence
  Description of Artificial Sequence: Synthetic oligonucleotide
  Antisense strand to SEQ ID NO: 29134
aucuugcucacuuaaggau

SEQ ID NO: 29136 - RNA, 19 nt, Artificial Sequence
  Description of Artificial Sequence: Synthetic oligonucleotide
  Sense strand starting at position 2523 of SEQ ID NO: 333
uccuuaagugagcaagaua

SEQ ID NO: 29137 - RNA, 19 nt, Artificial Sequence
  Description of Artificial Sequence: Synthetic oligonucleotide
  Antisense strand to SEQ ID NO: 29136
uaucuugcucacuuaagga

SEQ ID NO: 29138 - RNA, 19 nt, Artificial Sequence
  Description of Artificial Sequence: Synthetic oligonucleotide
  Sense strand starting at position 2627 of SEQ ID NO: 333
gagugaaaguauccaugaa

SEQ ID NO: 29139 - RNA, 19 nt, Artificial Sequence
  Description of Artificial Sequence: Synthetic oligonucleotide
  Antisense strand to SEQ ID NO: 29138
uucauggauacuuucacuc

SEQ ID NO: 29140 - RNA, 19 nt, Artificial Sequence
  Description of Artificial Sequence: Synthetic oligonucleotide
  Sense strand starting at position 2819 of SEQ ID NO: 333
agugucuugcgagagauaa

SEQ ID NO: 29141 - RNA, 19 nt, Artificial Sequence
  Description of Artificial Sequence: Synthetic oligonucleotide
  Antisense strand to SEQ ID NO: 29140
uuaucucucgcaagacacu

SEQ ID NO: 29142 - RNA, 19 nt, Artificial Sequence
  Description of Artificial Sequence: Synthetic oligonucleotide
  Sense strand starting at position 2821 of SEQ ID NO: 333
ugucuugcgagagauaauc

SEQ ID NO: 29143 - RNA, 19 nt, Artificial Sequence
  Description of Artificial Sequence: Synthetic oligonucleotide
  Antisense strand to SEQ ID NO: 29142
gauuaucucucgcaagaca

SEQ ID NO: 29144 - RNA, 19 nt, Artificial Sequence
  Description of Artificial Sequence: Synthetic oligonucleotide
  Sense strand starting at position 3071 of SEQ ID NO: 333
aagcgugggauggaaauau

SEQ ID NO: 29145 - RNA, 19 nt, Artificial Sequence
  Description of Artificial Sequence: Synthetic oligonucleotide
  Antisense strand to SEQ ID NO: 29144
auauuuccaucccacgcuu

SEQ ID NO: 29146 - RNA, 19 nt, Artificial Sequence
  Description of Artificial Sequence: Synthetic oligonucleotide
  Sense strand starting at position 3083 of SEQ ID NO: 333
gaaauaucgagaggcauga

SEQ ID NO: 29147 - RNA, 19 nt, Artificial Sequence
  Description of Artificial Sequence: Synthetic oligonucleotide
  Antisense strand to SEQ ID NO: 29146
ucaugccucucgauauuuc

SEQ ID NO: 29148 - RNA, 19 nt, Artificial Sequence
  Description of Artificial Sequence: Synthetic oligonucleotide
  Sense strand starting at position 3087 of SEQ ID NO: 333
uaucgagaggcaugaaaga

SEQ ID NO: 29149 - RNA, 19 nt, Artificial Sequence
  Description of Artificial Sequence: Synthetic oligonucleotide
  Antisense strand to SEQ ID NO: 29148
ucuuucaugccucucgaua

SEQ ID NO: 29150 - RNA, 19 nt, Artificial Sequence
  Description of Artificial Sequence: Synthetic oligonucleotide
  Sense strand starting at position 3167 of SEQ ID NO: 333
aucaaugauuuguggaaua

SEQ ID NO: 29151 - RNA, 19 nt, Artificial Sequence
  Description of Artificial Sequence: Synthetic oligonucleotide
  Antisense strand to SEQ ID NO: 29150
uauuccacaaaucauugau

SEQ ID NO: 29152 - RNA, 19 nt, Artificial Sequence
  Description of Artificial Sequence: Synthetic oligonucleotide
  Sense strand starting at position 3227 of SEQ ID NO: 333
ugcucaacagaaugcauua

SEQ ID NO: 29153 - RNA, 19 nt, Artificial Sequence
  Description of Artificial Sequence: Synthetic oligonucleotide
  Antisense strand to SEQ ID NO: 29152
uaaugcauucuguugagca

SEQ ID NO: 29154 - RNA, 19 nt, Artificial Sequence
  Description of Artificial Sequence: Synthetic oligonucleotide
  Sense strand starting at position 3359 of SEQ ID NO: 333
ccuguaugaugauugucua

SEQ ID NO: 29155 - RNA, 19 nt, Artificial Sequence
  Description of Artificial Sequence: Synthetic oligonucleotide
  Antisense strand to SEQ ID NO: 29154
uagacaaucaucauacagg

SEQ ID NO: 29156 - RNA, 19 nt, Artificial Sequence
  Description of Artificial Sequence: Synthetic oligonucleotide
  Sense strand starting at position 3360 of SEQ ID NO: 333
cuguaugaugauugucuaa

SEQ ID NO: 29157 - RNA, 19 nt, Artificial Sequence
  Description of Artificial Sequence: Synthetic oligonucleotide
  Antisense strand to SEQ ID NO: 29156
uuagacaaucaucauacag

SEQ ID NO: 29158 - RNA, 19 nt, Artificial Sequence
  Description of Artificial Sequence: Synthetic oligonucleotide
  Sense strand starting at position 3362 of SEQ ID NO: 333
guaugaugauugucuaaga

SEQ ID NO: 29159 - RNA, 19 nt, Artificial Sequence
  Description of Artificial Sequence: Synthetic oligonucleotide
  Antisense strand to SEQ ID NO: 29158
ucuuagacaaucaucauac

SEQ ID NO: 29160 - RNA, 19 nt, Artificial Sequence
  Description of Artificial Sequence: Synthetic oligonucleotide
  Sense strand starting at position 3363 of SEQ ID NO: 333
uaugaugauugucuaagac

SEQ ID NO: 29161 - RNA, 19 nt, Artificial Sequence
  Description of Artificial Sequence: Synthetic oligonucleotide
  Antisense strand to SEQ ID NO: 29160
gucuuagacaaucaucaua

SEQ ID NO: 29162 - RNA, 19 nt, Artificial Sequence
  Description of Artificial Sequence: Synthetic oligonucleotide
  Sense strand starting at position 3383 of SEQ ID NO: 333
agcaucuuccgggaugcau

SEQ ID NO: 29163 - RNA, 19 nt, Artificial Sequence
  Description of Artificial Sequence: Synthetic oligonucleotide
  Antisense strand to SEQ ID NO: 29162
augcaucccggaagaugcu

SEQ ID NO: 29164 - RNA, 19 nt, Artificial Sequence
  Description of Artificial Sequence: Synthetic oligonucleotide
  Sense strand starting at position 3412 of SEQ ID NO: 333
ugccuuaaacuggaaguua

SEQ ID NO: 29165 - RNA, 19 nt, Artificial Sequence
  Description of Artificial Sequence: Synthetic oligonucleotide
  Antisense strand to SEQ ID NO: 29164
uaacuuccaguuuaaggca

SEQ ID NO: 29166 - RNA, 19 nt, Artificial Sequence
  Description of Artificial Sequence: Synthetic oligonucleotide
  Sense strand starting at position 3423 of SEQ ID NO: 333
ggaaguuaauuguccagaa

SEQ ID NO: 29167 - RNA, 19 nt, Artificial Sequence
  Description of Artificial Sequence: Synthetic oligonucleotide
  Antisense strand to SEQ ID NO: 29166
uucuggacaauuaacuucc

SEQ ID NO: 29168 - RNA, 19 nt, Artificial Sequence
  Description of Artificial Sequence: Synthetic oligonucleotide
  Sense strand starting at position 3424 of SEQ ID NO: 333
gaaguuaauuguccagaag

SEQ ID NO: 29169 - RNA, 19 nt, Artificial Sequence
  Description of Artificial Sequence: Synthetic oligonucleotide
  Antisense strand to SEQ ID NO: 29168
cuucuggacaauuaacuuc

SEQ ID NO: 29170 - RNA, 19 nt, Artificial Sequence
  Description of Artificial Sequence: Synthetic oligonucleotide
  Sense strand starting at position 3427 of SEQ ID NO: 333
guuaauuguccagaagcau

SEQ ID NO: 29171 - RNA, 19 nt, Artificial Sequence
  Description of Artificial Sequence: Synthetic oligonucleotide
  Antisense strand to SEQ ID NO: 29170
augcuucuggacaauuaac

SEQ ID NO: 29172 - RNA, 19 nt, Artificial Sequence
  Description of Artificial Sequence: Synthetic oligonucleotide
  Sense strand starting at position 3494 of SEQ ID NO: 333
ggauuugcccugugcccua

SEQ ID NO: 29173 - RNA, 19 nt, Artificial Sequence
  Description of Artificial Sequence: Synthetic oligonucleotide
  Antisense strand to SEQ ID NO: 29172
uagggcacagggcaaaucc

SEQ ID NO: 29174 - RNA, 19 nt, Artificial Sequence
  Description of Artificial Sequence: Synthetic oligonucleotide
  Sense strand starting at position 3559 of SEQ ID NO: 333
cuuagauacucagugauau

SEQ ID NO: 29175 - RNA, 19 nt, Artificial Sequence
  Description of Artificial Sequence: Synthetic oligonucleotide
  Antisense strand to SEQ ID NO: 29174
auaucacugaguaucuaag

SEQ ID NO: 29176 - RNA, 19 nt, Artificial Sequence
  Description of Artificial Sequence: Synthetic oligonucleotide
  Sense strand starting at position 3560 of SEQ ID NO: 333
uuagauacucagugauauu

SEQ ID NO: 29177 - RNA, 19 nt, Artificial Sequence
  Description of Artificial Sequence: Synthetic oligonucleotide
  Antisense strand to SEQ ID NO: 29176
aauaucacugaguaucuaa

SEQ ID NO: 29178 - RNA, 19 nt, Artificial Sequence
  Description of Artificial Sequence: Synthetic oligonucleotide
  Sense strand starting at position 3569 of SEQ ID NO: 333
cagugauauuugcuugugu

SEQ ID NO: 29179 - RNA, 19 nt, Artificial Sequence
  Description of Artificial Sequence: Synthetic oligonucleotide
  Antisense strand to SEQ ID NO: 29178
acacaagcaaauaucacug

SEQ ID NO: 29180 - RNA, 19 nt, Artificial Sequence
  Description of Artificial Sequence: Synthetic oligonucleotide
  Sense strand starting at position 3570 of SEQ ID NO: 333
agugauauuugcuuguguu

SEQ ID NO: 29181 - RNA, 19 nt, Artificial Sequence
  Description of Artificial Sequence: Synthetic oligonucleotide
  Antisense strand to SEQ ID NO: 29180
aacacaagcaaauaucacu

SEQ ID NO: 29182 - RNA, 19 nt, Artificial Sequence
  Description of Artificial Sequence: Synthetic oligonucleotide
  Sense strand starting at position 3571 of SEQ ID NO: 333
gugauauuugcuuguguua

SEQ ID NO: 29183 - RNA, 19 nt, Artificial Sequence
  Description of Artificial Sequence: Synthetic oligonucleotide
  Antisense strand to SEQ ID NO: 29182
uaacacaagcaaauaucac

SEQ ID NO: 29184 - RNA, 19 nt, Artificial Sequence
  Description of Artificial Sequence: Synthetic oligonucleotide
  Sense strand starting at position 3624 of SEQ ID NO: 333
gcuccucacuuccuggaau

SEQ ID NO: 29185 - RNA, 19 nt, Artificial Sequence
  Description of Artificial Sequence: Synthetic oligonucleotide
  Antisense strand to SEQ ID NO: 29184
auuccaggaagugaggagc

SEQ ID NO: 29186 - RNA, 19 nt, Artificial Sequence
  Description of Artificial Sequence: Synthetic oligonucleotide
  Sense strand starting at position 3627 of SEQ ID NO: 333
ccucacuuccuggaauagu

SEQ ID NO: 29187 - RNA, 19 nt, Artificial Sequence
  Description of Artificial Sequence: Synthetic oligonucleotide
  Antisense strand to SEQ ID NO: 29186
acuauuccaggaagugagg

SEQ ID NO: 29188 - RNA, 19 nt, Artificial Sequence
  Description of Artificial Sequence: Synthetic oligonucleotide
  Sense strand starting at position 3796 of SEQ ID NO: 333
cugauugguuacucuccau

SEQ ID NO: 29189 - RNA, 19 nt, Artificial Sequence
  Description of Artificial Sequence: Synthetic oligonucleotide
  Antisense strand to SEQ ID NO: 29188
auggagaguaaccaaucag

SEQ ID NO: 29190 - RNA, 19 nt, Artificial Sequence
  Description of Artificial Sequence: Synthetic oligonucleotide
  Sense strand starting at position 3343 of SEQ ID NO: 334
agcuuugccuguguggaga

SEQ ID NO: 29191 - RNA, 19 nt, Artificial Sequence
  Description of Artificial Sequence: Synthetic oligonucleotide
  Antisense strand to SEQ ID NO: 29190
ucuccacacaggcaaagcu

SEQ ID NO: 29192 - RNA, 19 nt, Artificial Sequence
  Description of Artificial Sequence: Synthetic oligonucleotide
  Sense strand starting at position 3341 of SEQ ID NO: 334
gcagcuuugccugugugga

SEQ ID NO: 29193 - RNA, 19 nt, Artificial Sequence
  Description of Artificial Sequence: Synthetic oligonucleotide
  Antisense strand to SEQ ID NO: 29192
uccacacaggcaaagcugc

SEQ ID NO: 29194 - RNA, 19 nt, Artificial Sequence
  Description of Artificial Sequence: Synthetic oligonucleotide
  Sense strand starting at position 2736 of SEQ ID NO: 334
guagacucauucuuagaaa

SEQ ID NO: 29195 - RNA, 19 nt, Artificial Sequence
  Description of Artificial Sequence: Synthetic oligonucleotide
  Antisense strand to SEQ ID NO: 29194
uuucuaagaaugagucuac

SEQ ID NO: 29196 - RNA, 19 nt, Artificial Sequence
  Description of Artificial Sequence: Synthetic oligonucleotide
  Sense strand starting at position 2723 of SEQ ID NO: 334
aguaaaguuacauguagac

SEQ ID NO: 29197 - RNA, 19 nt, Artificial Sequence
  Description of Artificial Sequence: Synthetic oligonucleotide
  Antisense strand to SEQ ID NO: 29196
gucuacauguaacuuuacu

SEQ ID NO: 29198 - RNA, 19 nt, Artificial Sequence
  Description of Artificial Sequence: Synthetic oligonucleotide
  Sense strand starting at position 2564 of SEQ ID NO: 334
cucauuagccaugggucau

SEQ ID NO: 29199 - RNA, 19 nt, Artificial Sequence
  Description of Artificial Sequence: Synthetic oligonucleotide
  Antisense strand to SEQ ID NO: 29198
augacccauggcuaaugag

SEQ ID NO: 29200 - RNA, 19 nt, Artificial Sequence
  Description of Artificial Sequence: Synthetic oligonucleotide
  Sense strand starting at position 2563 of SEQ ID NO: 334
ccucauuagccauggguca

SEQ ID NO: 29201 - RNA, 19 nt, Artificial Sequence
  Description of Artificial Sequence: Synthetic oligonucleotide
  Antisense strand to SEQ ID NO: 29200
ugacccauggcuaaugagg

SEQ ID NO: 29202 - RNA, 19 nt, Artificial Sequence
  Description of Artificial Sequence: Synthetic oligonucleotide
  Sense strand starting at position 2509 of SEQ ID NO: 334
ggagaucaccauuagccuu

SEQ ID NO: 29203 - RNA, 19 nt, Artificial Sequence
  Description of Artificial Sequence: Synthetic oligonucleotide
  Antisense strand to SEQ ID NO: 29202
aaggcuaauggugaucucc

SEQ ID NO: 29204 - RNA, 19 nt, Artificial Sequence
  Description of Artificial Sequence: Synthetic oligonucleotide
  Sense strand starting at position 2472 of SEQ ID NO: 334
ggaaguuucucauugugug

SEQ ID NO: 29205 - RNA, 19 nt, Artificial Sequence
  Description of Artificial Sequence: Synthetic oligonucleotide
  Antisense strand to SEQ ID NO: 29204
cacacaaugagaaacuucc

SEQ ID NO: 29206 - RNA, 19 nt, Artificial Sequence
  Description of Artificial Sequence: Synthetic oligonucleotide
  Sense strand starting at position 2469 of SEQ ID NO: 334
aguggaaguuucucauugu

SEQ ID NO: 29207 - RNA, 19 nt, Artificial Sequence
  Description of Artificial Sequence: Synthetic oligonucleotide
  Antisense strand to SEQ ID NO: 29206
acaaugagaaacuuccacu

SEQ ID NO: 29208 - RNA, 19 nt, Artificial Sequence
  Description of Artificial Sequence: Synthetic oligonucleotide
  Sense strand starting at position 2066 of SEQ ID NO: 334
ggugauaucacagaggccu

SEQ ID NO: 29209 - RNA, 19 nt, Artificial Sequence
  Description of Artificial Sequence: Synthetic oligonucleotide
  Antisense strand to SEQ ID NO: 29208
aggccucugugauaucacc

SEQ ID NO: 29210 - RNA, 19 nt, Artificial Sequence
  Description of Artificial Sequence: Synthetic oligonucleotide
  Sense strand starting at position 1774 of SEQ ID NO: 334
gagagcuauccuuaccgcu

SEQ ID NO: 29211 - RNA, 19 nt, Artificial Sequence
  Description of Artificial Sequence: Synthetic oligonucleotide
  Antisense strand to SEQ ID NO: 29210
agcgguaaggauagcucuc

SEQ ID NO: 29212 - RNA, 19 nt, Artificial Sequence
  Description of Artificial Sequence: Synthetic oligonucleotide
  Sense strand starting at position 1649 of SEQ ID NO: 334
ugggcagucacucagggau

SEQ ID NO: 29213 - RNA, 19 nt, Artificial Sequence
  Description of Artificial Sequence: Synthetic oligonucleotide
  Antisense strand to SEQ ID NO: 29212
aucccugagugacugccca

SEQ ID NO: 29214 - RNA, 19 nt, Artificial Sequence
  Description of Artificial Sequence: Synthetic oligonucleotide
  Sense strand starting at position 1638 of SEQ ID NO: 334
cuaacauaucaugggcagu

SEQ ID NO: 29215 - RNA, 19 nt, Artificial Sequence
  Description of Artificial Sequence: Synthetic oligonucleotide
  Antisense strand to SEQ ID NO: 29214
acugcccaugauauguuag

SEQ ID NO: 29216 - RNA, 19 nt, Artificial Sequence
  Description of Artificial Sequence: Synthetic oligonucleotide
  Sense strand starting at position 1626 of SEQ ID NO: 334
gccagagaguuacuaacau

SEQ ID NO: 29217 - RNA, 19 nt, Artificial Sequence
  Description of Artificial Sequence: Synthetic oligonucleotide
  Antisense strand to SEQ ID NO: 29216
auguuaguaacucucuggc

SEQ ID NO: 29218 - RNA, 19 nt, Artificial Sequence
  Description of Artificial Sequence: Synthetic oligonucleotide
  Sense strand starting at position 1620 of SEQ ID NO: 334
ggcauugccagagaguuac

SEQ ID NO: 29219 - RNA, 19 nt, Artificial Sequence
  Description of Artificial Sequence: Synthetic oligonucleotide
  Antisense strand to SEQ ID NO: 29218
guaacucucuggcaaugcc

SEQ ID NO: 29220 - RNA, 19 nt, Artificial Sequence
  Description of Artificial Sequence: Synthetic oligonucleotide
  Sense strand starting at position 1586 of SEQ ID NO: 334
ugaagaugaucguuauaua

SEQ ID NO: 29221 - RNA, 19 nt, Artificial Sequence
  Description of Artificial Sequence: Synthetic oligonucleotide
  Antisense strand to SEQ ID NO: 29220
uauauaacgaucaucuuca

SEQ ID NO: 29222 - RNA, 19 nt, Artificial Sequence
  Description of Artificial Sequence: Synthetic oligonucleotide
  Sense strand starting at position 1584 of SEQ ID NO: 334
agugaagaugaucguuaua

SEQ ID NO: 29223 - RNA, 19 nt, Artificial Sequence
  Description of Artificial Sequence: Synthetic oligonucleotide
  Antisense strand to SEQ ID NO: 29222
uauaacgaucaucuucacu

SEQ ID NO: 29224 - RNA, 19 nt, Artificial Sequence
  Description of Artificial Sequence: Synthetic oligonucleotide
  Sense strand starting at position 1583 of SEQ ID NO: 334
uagugaagaugaucguuau

SEQ ID NO: 29225 - RNA, 19 nt, Artificial Sequence
  Description of Artificial Sequence: Synthetic oligonucleotide
  Antisense strand to SEQ ID NO: 29224
auaacgaucaucuucacua

SEQ ID NO: 29226 - RNA, 19 nt, Artificial Sequence
  Description of Artificial Sequence: Synthetic oligonucleotide
  Sense strand starting at position 1548 of SEQ ID NO: 334
aagucauugccagagaauc

SEQ ID NO: 29227 - RNA, 19 nt, Artificial Sequence
  Description of Artificial Sequence: Synthetic oligonucleotide
  Antisense strand to SEQ ID NO: 29226
gauucucuggcaaugacuu

SEQ ID NO: 29228 - RNA, 19 nt, Artificial Sequence
  Description of Artificial Sequence: Synthetic oligonucleotide
  Sense strand starting at position 1543 of SEQ ID NO: 334
uguggaagucauugccaga

SEQ ID NO: 29229 - RNA, 19 nt, Artificial Sequence
  Description of Artificial Sequence: Synthetic oligonucleotide
  Antisense strand to SEQ ID NO: 29228
ucuggcaaugacuuccaca

SEQ ID NO: 29230 - RNA, 19 nt, Artificial Sequence
  Description of Artificial Sequence: Synthetic oligonucleotide
  Sense strand starting at position 1477 of SEQ ID NO: 334
uggagacaucaguguagag

SEQ ID NO: 29231 - RNA, 19 nt, Artificial Sequence
  Description of Artificial Sequence: Synthetic oligonucleotide
  Antisense strand to SEQ ID NO: 29230
cucuacacugaugucucca

SEQ ID NO: 29232 - RNA, 19 nt, Artificial Sequence
  Description of Artificial Sequence: Synthetic oligonucleotide
  Sense strand starting at position 1450 of SEQ ID NO: 334
gaaaucaucugagagugga

SEQ ID NO: 29233 - RNA, 19 nt, Artificial Sequence
  Description of Artificial Sequence: Synthetic oligonucleotide
  Antisense strand to SEQ ID NO: 29232
uccacucucagaugauuuc

SEQ ID NO: 29234 - RNA, 19 nt, Artificial Sequence
  Description of Artificial Sequence: Synthetic oligonucleotide
  Sense strand starting at position 1062 of SEQ ID NO: 334
gaaggucagagcugacaga

SEQ ID NO: 29235 - RNA, 19 nt, Artificial Sequence
  Description of Artificial Sequence: Synthetic oligonucleotide
  Antisense strand to SEQ ID NO: 29234
ucugucagcucugaccuuc

SEQ ID NO: 29236 - RNA, 19 nt, Artificial Sequence
  Description of Artificial Sequence: Synthetic oligonucleotide
  Sense strand starting at position 1033 of SEQ ID NO: 334
ugaagucuuccuugaucuc

SEQ ID NO: 29237 - RNA, 19 nt, Artificial Sequence
  Description of Artificial Sequence: Synthetic oligonucleotide
  Antisense strand to SEQ ID NO: 29236
gagaucaaggaagacuuca

SEQ ID NO: 29238 - RNA, 19 nt, Artificial Sequence
  Description of Artificial Sequence: Synthetic oligonucleotide
  Sense strand starting at position 971 of SEQ ID NO: 334
cugucccuccuguacaaau

SEQ ID NO: 29239 - RNA, 19 nt, Artificial Sequence
  Description of Artificial Sequence: Synthetic oligonucleotide
  Antisense strand to SEQ ID NO: 29238
auuuguacaggagggacag

SEQ ID NO: 29240 - RNA, 19 nt, Artificial Sequence
  Description of Artificial Sequence: Synthetic oligonucleotide
  Sense strand starting at position 900 of SEQ ID NO: 334
gcugguuagaauuggauac

SEQ ID NO: 29241 - RNA, 19 nt, Artificial Sequence
  Description of Artificial Sequence: Synthetic oligonucleotide
  Antisense strand to SEQ ID NO: 29240
guauccaauucuaaccagc

SEQ ID NO: 29242 - RNA, 19 nt, Artificial Sequence
  Description of Artificial Sequence: Synthetic oligonucleotide
  Sense strand starting at position 894 of SEQ ID NO: 334
gugacugcugguuagaauu

SEQ ID NO: 29243 - RNA, 19 nt, Artificial Sequence
  Description of Artificial Sequence: Synthetic oligonucleotide
  Antisense strand to SEQ ID NO: 29242
aauucuaaccagcagucac

SEQ ID NO: 29244 - RNA, 19 nt, Artificial Sequence
  Description of Artificial Sequence: Synthetic oligonucleotide
  Sense strand starting at position 893 of SEQ ID NO: 334
agugacugcugguuagaau

SEQ ID NO: 29245 - RNA, 19 nt, Artificial Sequence
  Description of Artificial Sequence: Synthetic oligonucleotide
  Antisense strand to SEQ ID NO: 29244
auucuaaccagcagucacu

SEQ ID NO: 29246 - RNA, 19 nt, Artificial Sequence
  Description of Artificial Sequence: Synthetic oligonucleotide
  Sense strand starting at position 880 of SEQ ID NO: 334
gugauucucccuuagugac

SEQ ID NO: 29247 - RNA, 19 nt, Artificial Sequence
  Description of Artificial Sequence: Synthetic oligonucleotide
  Antisense strand to SEQ ID NO: 29246
gucacuaagggagaaucac

SEQ ID NO: 29248 - RNA, 19 nt, Artificial Sequence
  Description of Artificial Sequence: Synthetic oligonucleotide
  Sense strand starting at position 878 of SEQ ID NO: 334
gagugauucucccuuagug

SEQ ID NO: 29249 - RNA, 19 nt, Artificial Sequence
  Description of Artificial Sequence: Synthetic oligonucleotide
  Antisense strand to SEQ ID NO: 29248
cacuaagggagaaucacuc

SEQ ID NO: 29250 - RNA, 19 nt, Artificial Sequence
  Description of Artificial Sequence: Synthetic oligonucleotide
  Sense strand starting at position 876 of SEQ ID NO: 334
cugagugauucucccuuag

SEQ ID NO: 29251 - RNA, 19 nt, Artificial Sequence
  Description of Artificial Sequence: Synthetic oligonucleotide
  Antisense strand to SEQ ID NO: 29250
cuaagggagaaucacucag

SEQ ID NO: 29252 - RNA, 19 nt, Artificial Sequence
  Description of Artificial Sequence: Synthetic oligonucleotide
  Sense strand starting at position 830 of SEQ ID NO: 334
uuauuaucccugggacccu

SEQ ID NO: 29253 - RNA, 19 nt, Artificial Sequence
  Description of Artificial Sequence: Synthetic oligonucleotide
  Antisense strand to SEQ ID NO: 29252
agggucccagggauaauaa

SEQ ID NO: 29254 - RNA, 19 nt, Artificial Sequence
  Description of Artificial Sequence: Synthetic oligonucleotide
  Sense strand starting at position 828 of SEQ ID NO: 334
gcuuauuaucccugggacc

SEQ ID NO: 29255 - RNA, 19 nt, Artificial Sequence
  Description of Artificial Sequence: Synthetic oligonucleotide
  Antisense strand to SEQ ID NO: 29254
ggucccagggauaauaagc

SEQ ID NO: 29256 - RNA, 19 nt, Artificial Sequence
  Description of Artificial Sequence: Synthetic oligonucleotide
  Sense strand starting at position 827 of SEQ ID NO: 334
ugcuuauuaucccugggac

SEQ ID NO: 29257 - RNA, 19 nt, Artificial Sequence
  Description of Artificial Sequence: Synthetic oligonucleotide
  Antisense strand to SEQ ID NO: 29256
gucccagggauaauaagca

SEQ ID NO: 29258 - RNA, 19 nt, Artificial Sequence
  Description of Artificial Sequence: Synthetic oligonucleotide
  Sense strand starting at position 819 of SEQ ID NO: 334
cccaguugugcuuauuauc

SEQ ID NO: 29259 - RNA, 19 nt, Artificial Sequence
  Description of Artificial Sequence: Synthetic oligonucleotide
  Antisense strand to SEQ ID NO: 29258
gauaauaagcacaacuggg

SEQ ID NO: 29260 - RNA, 19 nt, Artificial Sequence
  Description of Artificial Sequence: Synthetic oligonucleotide
  Sense strand starting at position 793 of SEQ ID NO: 334
acaguuucugugugucuga

SEQ ID NO: 29261 - RNA, 19 nt, Artificial Sequence
  Description of Artificial Sequence: Synthetic oligonucleotide
  Antisense strand to SEQ ID NO: 29260
ucagacacacagaaacugu

SEQ ID NO: 29262 - RNA, 19 nt, Artificial Sequence
  Description of Artificial Sequence: Synthetic oligonucleotide
  Sense strand starting at position 757 of SEQ ID NO: 334
ccauguacucugggugcua

SEQ ID NO: 29263 - RNA, 19 nt, Artificial Sequence
  Description of Artificial Sequence: Synthetic oligonucleotide
  Antisense strand to SEQ ID NO: 29262
uagcacccagaguacaugg

SEQ ID NO: 29264 - RNA, 19 nt, Artificial Sequence
  Description of Artificial Sequence: Synthetic oligonucleotide
  Sense strand starting at position 734 of SEQ ID NO: 334
guucgagugccuucguuga

SEQ ID NO: 29265 - RNA, 19 nt, Artificial Sequence
  Description of Artificial Sequence: Synthetic oligonucleotide
  Antisense strand to SEQ ID NO: 29264
ucaacgaaggcacucgaac

SEQ ID NO: 29266 - RNA, 19 nt, Artificial Sequence
  Description of Artificial Sequence: Synthetic oligonucleotide
  Sense strand starting at position 691 of SEQ ID NO: 334
gugucacuuucuccaggaa

SEQ ID NO: 29267 - RNA, 19 nt, Artificial Sequence
  Description of Artificial Sequence: Synthetic oligonucleotide
  Antisense strand to SEQ ID NO: 29266
uuccuggagaaagugacac

SEQ ID NO: 29268 - RNA, 19 nt, Artificial Sequence
  Description of Artificial Sequence: Synthetic oligonucleotide
  Sense strand starting at position 644 of SEQ ID NO: 334
uguuguggugacugagauc

SEQ ID NO: 29269 - RNA, 19 nt, Artificial Sequence
  Description of Artificial Sequence: Synthetic oligonucleotide
  Antisense strand to SEQ ID NO: 29268
gaucucagucaccacaaca

SEQ ID NO: 29270 - RNA, 19 nt, Artificial Sequence
  Description of Artificial Sequence: Synthetic oligonucleotide
  Sense strand starting at position 142 of SEQ ID NO: 335
aaacuuuggugauuccuga

SEQ ID NO: 29271 - RNA, 19 nt, Artificial Sequence
  Description of Artificial Sequence: Synthetic oligonucleotide
  Antisense strand to SEQ ID NO: 29270
ucaggaaucaccaaaguuu

SEQ ID NO: 29272 - RNA, 19 nt, Artificial Sequence
  Description of Artificial Sequence: Synthetic oligonucleotide
  Sense strand starting at position 169 of SEQ ID NO: 335
cccacuuguauguggaaga

SEQ ID NO: 29273 - RNA, 19 nt, Artificial Sequence
  Description of Artificial Sequence: Synthetic oligonucleotide
  Antisense strand to SEQ ID NO: 29272
ucuuccacauacaaguggg

SEQ ID NO: 29274 - RNA, 19 nt, Artificial Sequence
  Description of Artificial Sequence: Synthetic oligonucleotide
  Sense strand starting at position 190 of SEQ ID NO: 335
cuaguaggagggugucuaa

SEQ ID NO: 29275 - RNA, 19 nt, Artificial Sequence
  Description of Artificial Sequence: Synthetic oligonucleotide
  Antisense strand to SEQ ID NO: 29274
uuagacacccuccuacuag

SEQ ID NO: 29276 - RNA, 19 nt, Artificial Sequence
  Description of Artificial Sequence: Synthetic oligonucleotide
  Sense strand starting at position 258 of SEQ ID NO: 335
gggaacuacaugugaucca

SEQ ID NO: 29277 - RNA, 19 nt, Artificial Sequence
  Description of Artificial Sequence: Synthetic oligonucleotide
  Antisense strand to SEQ ID NO: 29276
uggaucacauguaguuccc

SEQ ID NO: 29278 - RNA, 19 nt, Artificial Sequence
  Description of Artificial Sequence: Synthetic oligonucleotide
  Sense strand starting at position 268 of SEQ ID NO: 335
ugugauccaguuugccuaa

SEQ ID NO: 29279 - RNA, 19 nt, Artificial Sequence
  Description of Artificial Sequence: Synthetic oligonucleotide
  Antisense strand to SEQ ID NO: 29278
uuaggcaaacuggaucaca

SEQ ID NO: 29280 - RNA, 19 nt, Artificial Sequence
  Description of Artificial Sequence: Synthetic oligonucleotide
  Sense strand starting at position 271 of SEQ ID NO: 335
gauccaguuugccuaaguu

SEQ ID NO: 29281 - RNA, 19 nt, Artificial Sequence
  Description of Artificial Sequence: Synthetic oligonucleotide
  Antisense strand to SEQ ID NO: 29280
aacuuaggcaaacuggauc

SEQ ID NO: 29282 - RNA, 19 nt, Artificial Sequence
  Description of Artificial Sequence: Synthetic oligonucleotide
  Sense strand starting at position 280 of SEQ ID NO: 335
ugccuaaguugucuaggga

SEQ ID NO: 29283 - RNA, 19 nt, Artificial Sequence
  Description of Artificial Sequence: Synthetic oligonucleotide
  Antisense strand to SEQ ID NO: 29282
ucccuagacaacuuaggca

SEQ ID NO: 29284 - RNA, 19 nt, Artificial Sequence
  Description of Artificial Sequence: Synthetic oligonucleotide
  Sense strand starting at position 281 of SEQ ID NO: 335
gccuaaguugucuagggac

SEQ ID NO: 29285 - RNA, 19 nt, Artificial Sequence
  Description of Artificial Sequence: Synthetic oligonucleotide
  Antisense strand to SEQ ID NO: 29284
gucccuagacaacuuaggc

SEQ ID NO: 29286 - RNA, 19 nt, Artificial Sequence
  Description of Artificial Sequence: Synthetic oligonucleotide
  Sense strand starting at position 432 of SEQ ID NO: 335
auggaagaguuacagagau

SEQ ID NO: 29287 - RNA, 19 nt, Artificial Sequence
  Description of Artificial Sequence: Synthetic oligonucleotide
  Antisense strand to SEQ ID NO: 29286
aucucuguaacucuuccau

SEQ ID NO: 29288 - RNA, 19 nt, Artificial Sequence
  Description of Artificial Sequence: Synthetic oligonucleotide
  Sense strand starting at position 445 of SEQ ID NO: 335
agagauucaggcuggagua

SEQ ID NO: 29289 - RNA, 19 nt, Artificial Sequence
  Description of Artificial Sequence: Synthetic oligonucleotide
  Antisense strand to SEQ ID NO: 29288
uacuccagccugaaucucu

SEQ ID NO: 29290 - RNA, 19 nt, Artificial Sequence
  Description of Artificial Sequence: Synthetic oligonucleotide
  Sense strand starting at position 497 of SEQ ID NO: 335
ugguaagguguggauagua

SEQ ID NO: 29291 - RNA, 19 nt, Artificial Sequence
  Description of Artificial Sequence: Synthetic oligonucleotide
  Antisense strand to SEQ ID NO: 29290
uacuauccacaccuuacca

SEQ ID NO: 29292 - RNA, 19 nt, Artificial Sequence
  Description of Artificial Sequence: Synthetic oligonucleotide
  Sense strand starting at position 544 of SEQ ID NO: 335
caaaguauggguuaccuuu

SEQ ID NO: 29293 - RNA, 19 nt, Artificial Sequence
  Description of Artificial Sequence: Synthetic oligonucleotide
  Antisense strand to SEQ ID NO: 29292
aaagguaacccauacuuug

SEQ ID NO: 29294 - RNA, 19 nt, Artificial Sequence
  Description of Artificial Sequence: Synthetic oligonucleotide
  Sense strand starting at position 546 of SEQ ID NO: 335
aaguauggguuaccuuuaa

SEQ ID NO: 29295 - RNA, 19 nt, Artificial Sequence
  Description of Artificial Sequence: Synthetic oligonucleotide
  Antisense strand to SEQ ID NO: 29294
uuaaagguaacccauacuu

SEQ ID NO: 29296 - RNA, 19 nt, Artificial Sequence
  Description of Artificial Sequence: Synthetic oligonucleotide
  Sense strand starting at position 618 of SEQ ID NO: 335
ggguuuacugaggaauguu

SEQ ID NO: 29297 - RNA, 19 nt, Artificial Sequence
  Description of Artificial Sequence: Synthetic oligonucleotide
  Antisense strand to SEQ ID NO: 29296
aacauuccucaguaaaccc

SEQ ID NO: 29298 - RNA, 19 nt, Artificial Sequence
  Description of Artificial Sequence: Synthetic oligonucleotide
  Sense strand starting at position 627 of SEQ ID NO: 335
gaggaauguucugaacgga

SEQ ID NO: 29299 - RNA, 19 nt, Artificial Sequence
  Description of Artificial Sequence: Synthetic oligonucleotide
  Antisense strand to SEQ ID NO: 29298
uccguucagaacauuccuc

SEQ ID NO: 29300 - RNA, 19 nt, Artificial Sequence
  Description of Artificial Sequence: Synthetic oligonucleotide
  Sense strand starting at position 668 of SEQ ID NO: 335
agggaaguacucuagguuc

SEQ ID NO: 29301 - RNA, 19 nt, Artificial Sequence
  Description of Artificial Sequence: Synthetic oligonucleotide
  Antisense strand to SEQ ID NO: 29300
gaaccuagaguacuucccu

SEQ ID NO: 29302 - RNA, 19 nt, Artificial Sequence
  Description of Artificial Sequence: Synthetic oligonucleotide
  Sense strand starting at position 694 of SEQ ID NO: 335
guggaaggcuggguagaau

SEQ ID NO: 29303 - RNA, 19 nt, Artificial Sequence
  Description of Artificial Sequence: Synthetic oligonucleotide
  Antisense strand to SEQ ID NO: 29302
auucuacccagccuuccac

SEQ ID NO: 29304 - RNA, 19 nt, Artificial Sequence
  Description of Artificial Sequence: Synthetic oligonucleotide
  Sense strand starting at position 713 of SEQ ID NO: 335
ucagaaaggcucuaaagcu

SEQ ID NO: 29305 - RNA, 19 nt, Artificial Sequence
  Description of Artificial Sequence: Synthetic oligonucleotide
  Antisense strand to SEQ ID NO: 29304
agcuuuagagccuuucuga

SEQ ID NO: 29306 - RNA, 19 nt, Artificial Sequence
  Description of Artificial Sequence: Synthetic oligonucleotide
  Sense strand starting at position 725 of SEQ ID NO: 335
uaaagcugugcuuauggaa

SEQ ID NO: 29307 - RNA, 19 nt, Artificial Sequence
  Description of Artificial Sequence: Synthetic oligonucleotide
  Antisense strand to SEQ ID NO: 29306
uuccauaagcacagcuuua

SEQ ID NO: 29308 - RNA, 19 nt, Artificial Sequence
  Description of Artificial Sequence: Synthetic oligonucleotide
  Sense strand starting at position 905 of SEQ ID NO: 335
aaggacaugucaucaaagu

SEQ ID NO: 29309 - RNA, 19 nt, Artificial Sequence
  Description of Artificial Sequence: Synthetic oligonucleotide
  Antisense strand to SEQ ID NO: 29308
acuuugaugacauguccuu

SEQ ID NO: 29310 - RNA, 19 nt, Artificial Sequence
  Description of Artificial Sequence: Synthetic oligonucleotide
  Sense strand starting at position 932 of SEQ ID NO: 335
acagcugagcucuggagaa

SEQ ID NO: 29311 - RNA, 19 nt, Artificial Sequence
  Description of Artificial Sequence: Synthetic oligonucleotide
  Antisense strand to SEQ ID NO: 29310
uucuccagagcucagcugu

SEQ ID NO: 29312 - RNA, 19 nt, Artificial Sequence
  Description of Artificial Sequence: Synthetic oligonucleotide
  Sense strand starting at position 934 of SEQ ID NO: 335
agcugagcucuggagaaag

SEQ ID NO: 29313 - RNA, 19 nt, Artificial Sequence
  Description of Artificial Sequence: Synthetic oligonucleotide
  Antisense strand to SEQ ID NO: 29312
cuuucuccagagcucagcu

SEQ ID NO: 29314 - RNA, 19 nt, Artificial Sequence
  Description of Artificial Sequence: Synthetic oligonucleotide
  Sense strand starting at position 1192 of SEQ ID NO: 335
agcugagucacgcaaagaa

SEQ ID NO: 29315 - RNA, 19 nt, Artificial Sequence
  Description of Artificial Sequence: Synthetic oligonucleotide
  Antisense strand to SEQ ID NO: 29314
uucuuugcgugacucagcu

SEQ ID NO: 29316 - RNA, 19 nt, Artificial Sequence
  Description of Artificial Sequence: Synthetic oligonucleotide
  Sense strand starting at position 2355 of SEQ ID NO: 335
gcuuguccauguccuuuaa

SEQ ID NO: 29317 - RNA, 19 nt, Artificial Sequence
  Description of Artificial Sequence: Synthetic oligonucleotide
  Antisense strand to SEQ ID NO: 29316
uuaaaggacauggacaagc

SEQ ID NO: 29318 - RNA, 19 nt, Artificial Sequence
  Description of Artificial Sequence: Synthetic oligonucleotide
  Sense strand starting at position 2553 of SEQ ID NO: 335
ggaggauauuaaggagaga

SEQ ID NO: 29319 - RNA, 19 nt, Artificial Sequence
  Description of Artificial Sequence: Synthetic oligonucleotide
  Antisense strand to SEQ ID NO: 29318
ucucuccuuaauauccucc

SEQ ID NO: 29320 - RNA, 19 nt, Artificial Sequence
  Description of Artificial Sequence: Synthetic oligonucleotide
  Sense strand starting at position 2596 of SEQ ID NO: 335
aagcuugugucagucacuu

SEQ ID NO: 29321 - RNA, 19 nt, Artificial Sequence
  Description of Artificial Sequence: Synthetic oligonucleotide
  Antisense strand to SEQ ID NO: 29320
aagugacugacacaagcuu

SEQ ID NO: 29322 - RNA, 19 nt, Artificial Sequence
  Description of Artificial Sequence: Synthetic oligonucleotide
  Sense strand starting at position 2637 of SEQ ID NO: 335
uucucaauccugcaagaug

SEQ ID NO: 29323 - RNA, 19 nt, Artificial Sequence
  Description of Artificial Sequence: Synthetic oligonucleotide
  Antisense strand to SEQ ID NO: 29322
caucuugcaggauugagaa

SEQ ID NO: 29324 - RNA, 19 nt, Artificial Sequence
  Description of Artificial Sequence: Synthetic oligonucleotide
  Sense strand starting at position 2735 of SEQ ID NO: 335
guaaauaugcucuagucua

SEQ ID NO: 29325 - RNA, 19 nt, Artificial Sequence
  Description of Artificial Sequence: Synthetic oligonucleotide
  Antisense strand to SEQ ID NO: 29324
uagacuagagcauauuuac

SEQ ID NO: 29326 - RNA, 19 nt, Artificial Sequence
  Description of Artificial Sequence: Synthetic oligonucleotide
  Sense strand starting at position 2965 of SEQ ID NO: 335
gcugcaaugagcugucaac

SEQ ID NO: 29327 - RNA, 19 nt, Artificial Sequence
  Description of Artificial Sequence: Synthetic oligonucleotide
  Antisense strand to SEQ ID NO: 29326
guugacagcucauugcagc

SEQ ID NO: 29328 - RNA, 19 nt, Artificial Sequence
  Description of Artificial Sequence: Synthetic oligonucleotide
  Sense strand starting at position 3142 of SEQ ID NO: 335
ggaagcaugcaagaauugu

SEQ ID NO: 29329 - RNA, 19 nt, Artificial Sequence
  Description of Artificial Sequence: Synthetic oligonucleotide
  Antisense strand to SEQ ID NO: 29328
acaauucuugcaugcuucc

SEQ ID NO: 29330 - RNA, 19 nt, Artificial Sequence
  Description of Artificial Sequence: Synthetic oligonucleotide
  Sense strand starting at position 3150 of SEQ ID NO: 335
gcaagaauuguacagagua

SEQ ID NO: 29331 - RNA, 19 nt, Artificial Sequence
  Description of Artificial Sequence: Synthetic oligonucleotide
  Antisense strand to SEQ ID NO: 29330
uacucuguacaauucuugc

SEQ ID NO: 29332 - RNA, 19 nt, Artificial Sequence
  Description of Artificial Sequence: Synthetic oligonucleotide
  Sense strand starting at position 3272 of SEQ ID NO: 335
ugaaguaaucuuuggaauu

SEQ ID NO: 29333 - RNA, 19 nt, Artificial Sequence
  Description of Artificial Sequence: Synthetic oligonucleotide
  Antisense strand to SEQ ID NO: 29332
aauuccaaagauuacuuca

SEQ ID NO: 29334 - RNA, 19 nt, Artificial Sequence
  Description of Artificial Sequence: Synthetic oligonucleotide
  Sense strand starting at position 3372 of SEQ ID NO: 335
agcauacaguaagauaaau

SEQ ID NO: 29335 - RNA, 19 nt, Artificial Sequence
  Description of Artificial Sequence: Synthetic oligonucleotide
  Antisense strand to SEQ ID NO: 29334
auuuaucuuacuguaugcu

SEQ ID NO: 29336 - RNA, 19 nt, Artificial Sequence
  Description of Artificial Sequence: Synthetic oligonucleotide
  Sense strand starting at position 3530 of SEQ ID NO: 335
aguuaaacugcuggauuag

SEQ ID NO: 29337 - RNA, 19 nt, Artificial Sequence
  Description of Artificial Sequence: Synthetic oligonucleotide
  Antisense strand to SEQ ID NO: 29336
cuaauccagcaguuuaacu

SEQ ID NO: 29338 - RNA, 19 nt, Artificial Sequence
  Description of Artificial Sequence: Synthetic oligonucleotide
  Sense strand starting at position 3531 of SEQ ID NO: 335
guuaaacugcuggauuagu

SEQ ID NO: 29339 - RNA, 19 nt, Artificial Sequence
  Description of Artificial Sequence: Synthetic oligonucleotide
  Antisense strand to SEQ ID NO: 29338
acuaauccagcaguuuaac

SEQ ID NO: 29340 - RNA, 19 nt, Artificial Sequence
  Description of Artificial Sequence: Synthetic oligonucleotide
  Sense strand starting at position 3542 of SEQ ID NO: 335
ggauuaguuucuucugucu

SEQ ID NO: 29341 - RNA, 19 nt, Artificial Sequence
  Description of Artificial Sequence: Synthetic oligonucleotide
  Antisense strand to SEQ ID NO: 29340
agacagaagaaacuaaucc

SEQ ID NO: 29342 - RNA, 19 nt, Artificial Sequence
  Description of Artificial Sequence: Synthetic oligonucleotide
  Sense strand starting at position 3545 of SEQ ID NO: 335
uuaguuucuucugucuaaa

SEQ ID NO: 29343 - RNA, 19 nt, Artificial Sequence
  Description of Artificial Sequence: Synthetic oligonucleotide
  Antisense strand to SEQ ID NO: 29342
uuuagacagaagaaacuaa

SEQ ID NO: 29344 - RNA, 19 nt, Artificial Sequence
  Description of Artificial Sequence: Synthetic oligonucleotide
  Sense strand starting at position 3582 of SEQ ID NO: 335
cugccuaugccuugaacuu

SEQ ID NO: 29345 - RNA, 19 nt, Artificial Sequence
  Description of Artificial Sequence: Synthetic oligonucleotide
  Antisense strand to SEQ ID NO: 29344
aaguucaaggcauaggcag

SEQ ID NO: 29346 - RNA, 19 nt, Artificial Sequence
  Description of Artificial Sequence: Synthetic oligonucleotide
  Sense strand starting at position 3583 of SEQ ID NO: 335
ugccuaugccuugaacuuu

SEQ ID NO: 29347 - RNA, 19 nt, Artificial Sequence
  Description of Artificial Sequence: Synthetic oligonucleotide
  Antisense strand to SEQ ID NO: 29346
aaaguucaaggcauaggca

SEQ ID NO: 29348 - RNA, 19 nt, Artificial Sequence
  Description of Artificial Sequence: Synthetic oligonucleotide
  Sense strand starting at position 3629 of SEQ ID NO: 335
cccaguuuacuuggacaaa

SEQ ID NO: 29349 - RNA, 19 nt, Artificial Sequence
  Description of Artificial Sequence: Synthetic oligonucleotide
  Antisense strand to SEQ ID NO: 29348
uuuguccaaguaaacuggg

SEQ ID NO: 29350 - RNA, 19 nt, Artificial Sequence
  Description of Artificial Sequence: Synthetic oligonucleotide
  Sense strand starting at position 62 of SEQ ID NO: 336
caggaugaucuacgugauc

SEQ ID NO: 29351 - RNA, 19 nt, Artificial Sequence
  Description of Artificial Sequence: Synthetic oligonucleotide
  Antisense strand to SEQ ID NO: 29350
gaucacguagaucauccug

SEQ ID NO: 29352 - RNA, 19 nt, Artificial Sequence
  Description of Artificial Sequence: Synthetic oligonucleotide
  Sense strand starting at position 64 of SEQ ID NO: 336
ggaugaucuacgugaucua

SEQ ID NO: 29353 - RNA, 19 nt, Artificial Sequence
  Description of Artificial Sequence: Synthetic oligonucleotide
  Antisense strand to SEQ ID NO: 29352
uagaucacguagaucaucc

SEQ ID NO: 29354 - RNA, 19 nt, Artificial Sequence
  Description of Artificial Sequence: Synthetic oligonucleotide
  Sense strand starting at position 65 of SEQ ID NO: 336
gaugaucuacgugaucuaa

SEQ ID NO: 29355 - RNA, 19 nt, Artificial Sequence
  Description of Artificial Sequence: Synthetic oligonucleotide
  Antisense strand to SEQ ID NO: 29354
uuagaucacguagaucauc

SEQ ID NO: 29356 - RNA, 19 nt, Artificial Sequence
  Description of Artificial Sequence: Synthetic oligonucleotide
  Sense strand starting at position 89 of SEQ ID NO: 336
gcauauuaugcauaaaguc

SEQ ID NO: 29357 - RNA, 19 nt, Artificial Sequence
  Description of Artificial Sequence: Synthetic oligonucleotide
  Antisense strand to SEQ ID NO: 29356
gacuuuaugcauaauaugc

SEQ ID NO: 29358 - RNA, 19 nt, Artificial Sequence
  Description of Artificial Sequence: Synthetic oligonucleotide
  Sense strand starting at position 119 of SEQ ID NO: 336
acgcaugaucuauagaaau

SEQ ID NO: 29359 - RNA, 19 nt, Artificial Sequence
  Description of Artificial Sequence: Synthetic oligonucleotide
  Antisense strand to SEQ ID NO: 29358
auuucuauagaucaugcgu

SEQ ID NO: 29360 - RNA, 19 nt, Artificial Sequence
  Description of Artificial Sequence: Synthetic oligonucleotide
  Sense strand starting at position 391 of SEQ ID NO: 336
ccagaacaucuggguuaac

SEQ ID NO: 29361 - RNA, 19 nt, Artificial Sequence
  Description of Artificial Sequence: Synthetic oligonucleotide
  Antisense strand to SEQ ID NO: 29360
guuaacccagauguucugg

SEQ ID NO: 29362 - RNA, 19 nt, Artificial Sequence
  Description of Artificial Sequence: Synthetic oligonucleotide
  Sense strand starting at position 392 of SEQ ID NO: 336
cagaacaucuggguuaacu

SEQ ID NO: 29363 - RNA, 19 nt, Artificial Sequence
  Description of Artificial Sequence: Synthetic oligonucleotide
  Antisense strand to SEQ ID NO: 29362
aguuaacccagauguucug

SEQ ID NO: 29364 - RNA, 19 nt, Artificial Sequence
  Description of Artificial Sequence: Synthetic oligonucleotide
  Sense strand starting at position 484 of SEQ ID NO: 336
guccgaccacuguaaagau

SEQ ID NO: 29365 - RNA, 19 nt, Artificial Sequence
  Description of Artificial Sequence: Synthetic oligonucleotide
  Antisense strand to SEQ ID NO: 29364
aucuuuacaguggucggac

SEQ ID NO: 29366 - RNA, 19 nt, Artificial Sequence
  Description of Artificial Sequence: Synthetic oligonucleotide
  Sense strand starting at position 536 of SEQ ID NO: 336
cuucuagaauguuuauaag

SEQ ID NO: 29367 - RNA, 19 nt, Artificial Sequence
  Description of Artificial Sequence: Synthetic oligonucleotide
  Antisense strand to SEQ ID NO: 29366
cuuauaaacauucuagaag

SEQ ID NO: 29368 - RNA, 19 nt, Artificial Sequence
  Description of Artificial Sequence: Synthetic oligonucleotide
  Sense strand starting at position 572 of SEQ ID NO: 336
aggguaucuagacggugaa

SEQ ID NO: 29369 - RNA, 19 nt, Artificial Sequence
  Description of Artificial Sequence: Synthetic oligonucleotide
  Antisense strand to SEQ ID NO: 29368
uucaccgucuagauacccu

SEQ ID NO: 29370 - RNA, 19 nt, Artificial Sequence
  Description of Artificial Sequence: Synthetic oligonucleotide
  Sense strand starting at position 575 of SEQ ID NO: 336
guaucuagacggugaacaa

SEQ ID NO: 29371 - RNA, 19 nt, Artificial Sequence
  Description of Artificial Sequence: Synthetic oligonucleotide
  Antisense strand to SEQ ID NO: 29370
uuguucaccgucuagauac

SEQ ID NO: 29372 - RNA, 19 nt, Artificial Sequence
  Description of Artificial Sequence: Synthetic oligonucleotide
  Sense strand starting at position 633 of SEQ ID NO: 336
aagccacgucuuuagaaca

SEQ ID NO: 29373 - RNA, 19 nt, Artificial Sequence
  Description of Artificial Sequence: Synthetic oligonucleotide
  Antisense strand to SEQ ID NO: 29372
uguucuaaagacguggcuu

SEQ ID NO: 29374 - RNA, 19 nt, Artificial Sequence
  Description of Artificial Sequence: Synthetic oligonucleotide
  Sense strand starting at position 696 of SEQ ID NO: 336
gagacacgagccugaaauu

SEQ ID NO: 29375 - RNA, 19 nt, Artificial Sequence
  Description of Artificial Sequence: Synthetic oligonucleotide
  Antisense strand to SEQ ID NO: 29374
aauuucaggcucgugucuc

SEQ ID NO: 29376 - RNA, 19 nt, Artificial Sequence
  Description of Artificial Sequence: Synthetic oligonucleotide
  Sense strand starting at position 736 of SEQ ID NO: 336
aauggauucguguaacuau

SEQ ID NO: 29377 - RNA, 19 nt, Artificial Sequence
  Description of Artificial Sequence: Synthetic oligonucleotide
  Antisense strand to SEQ ID NO: 29376
auaguuacacgaauccauu

SEQ ID NO: 29378 - RNA, 19 nt, Artificial Sequence
  Description of Artificial Sequence: Synthetic oligonucleotide
  Sense strand starting at position 739 of SEQ ID NO: 336
ggauucguguaacuauaaa

SEQ ID NO: 29379 - RNA, 19 nt, Artificial Sequence
  Description of Artificial Sequence: Synthetic oligonucleotide
  Antisense strand to SEQ ID NO: 29378
uuuauaguuacacgaaucc

SEQ ID NO: 29380 - RNA, 19 nt, Artificial Sequence
  Description of Artificial Sequence: Synthetic oligonucleotide
  Sense strand starting at position 903 of SEQ ID NO: 336
gaaggauuucugcgccacu

SEQ ID NO: 29381 - RNA, 19 nt, Artificial Sequence
  Description of Artificial Sequence: Synthetic oligonucleotide
  Antisense strand to SEQ ID NO: 29380
aguggcgcagaaauccuuc

SEQ ID NO: 29382 - RNA, 19 nt, Artificial Sequence
  Description of Artificial Sequence: Synthetic oligonucleotide
  Sense strand starting at position 906 of SEQ ID NO: 336
ggauuucugcgccacucga

SEQ ID NO: 29383 - RNA, 19 nt, Artificial Sequence
  Description of Artificial Sequence: Synthetic oligonucleotide
  Antisense strand to SEQ ID NO: 29382
ucgaguggcgcagaaaucc

SEQ ID NO: 29384 - RNA, 19 nt, Artificial Sequence
  Description of Artificial Sequence: Synthetic oligonucleotide
  Sense strand starting at position 1778 of SEQ ID NO: 336
ggaucucuaggcuggaaga

SEQ ID NO: 29385 - RNA, 19 nt, Artificial Sequence
  Description of Artificial Sequence: Synthetic oligonucleotide
  Antisense strand to SEQ ID NO: 29384
ucuuccagccuagagaucc

SEQ ID NO: 29386 - RNA, 19 nt, Artificial Sequence
  Description of Artificial Sequence: Synthetic oligonucleotide
  Sense strand starting at position 1951 of SEQ ID NO: 336
ccgcgaucgcggaauggau

SEQ ID NO: 29387 - RNA, 19 nt, Artificial Sequence
  Description of Artificial Sequence: Synthetic oligonucleotide
  Antisense strand to SEQ ID NO: 29386
auccauuccgcgaucgcgg

SEQ ID NO: 29388 - RNA, 19 nt, Artificial Sequence
  Description of Artificial Sequence: Synthetic oligonucleotide
  Sense strand starting at position 2163 of SEQ ID NO: 336
gggacuuggauauggguau

SEQ ID NO: 29389 - RNA, 19 nt, Artificial Sequence
  Description of Artificial Sequence: Synthetic oligonucleotide
  Antisense strand to SEQ ID NO: 29388
auacccauauccaaguccc

SEQ ID NO: 29390 - RNA, 19 nt, Artificial Sequence
  Description of Artificial Sequence: Synthetic oligonucleotide
  Sense strand starting at position 2169 of SEQ ID NO: 336
uggauauggguauggaauu

SEQ ID NO: 29391 - RNA, 19 nt, Artificial Sequence
  Description of Artificial Sequence: Synthetic oligonucleotide
  Antisense strand to SEQ ID NO: 29390
aauuccauacccauaucca

SEQ ID NO: 29392 - RNA, 19 nt, Artificial Sequence
  Description of Artificial Sequence: Synthetic oligonucleotide
  Sense strand starting at position 2302 of SEQ ID NO: 336
gagggaucggguuggaaua

SEQ ID NO: 29393 - RNA, 19 nt, Artificial Sequence
  Description of Artificial Sequence: Synthetic oligonucleotide
  Antisense strand to SEQ ID NO: 29392
uauuccaacccgaucccuc

SEQ ID NO: 29394 - RNA, 19 nt, Artificial Sequence
  Description of Artificial Sequence: Synthetic oligonucleotide
  Sense strand starting at position 2303 of SEQ ID NO: 336
agggaucggguuggaauaa

SEQ ID NO: 29395 - RNA, 19 nt, Artificial Sequence
  Description of Artificial Sequence: Synthetic oligonucleotide
  Antisense strand to SEQ ID NO: 29394
uuauuccaacccgaucccu

SEQ ID NO: 29396 - RNA, 19 nt, Artificial Sequence
  Description of Artificial Sequence: Synthetic oligonucleotide
  Sense strand starting at position 2324 of SEQ ID NO: 336
uuggaaggugccugagaga

SEQ ID NO: 29397 - RNA, 19 nt, Artificial Sequence
  Description of Artificial Sequence: Synthetic oligonucleotide
  Antisense strand to SEQ ID NO: 29396
ucucucaggcaccuuccaa

SEQ ID NO: 29398 - RNA, 19 nt, Artificial Sequence
  Description of Artificial Sequence: Synthetic oligonucleotide
  Sense strand starting at position 2378 of SEQ ID NO: 336
agaugcauuugucauuuga

SEQ ID NO: 29399 - RNA, 19 nt, Artificial Sequence
  Description of Artificial Sequence: Synthetic oligonucleotide
  Antisense strand to SEQ ID NO: 29398
ucaaaugacaaaugcaucu

SEQ ID NO: 29400 - RNA, 19 nt, Artificial Sequence
  Description of Artificial Sequence: Synthetic oligonucleotide
  Sense strand starting at position 2433 of SEQ ID NO: 336
cacuuuccuggauaugagu

SEQ ID NO: 29401 - RNA, 19 nt, Artificial Sequence
  Description of Artificial Sequence: Synthetic oligonucleotide
  Antisense strand to SEQ ID NO: 29400
acucauauccaggaaagug

SEQ ID NO: 29402 - RNA, 19 nt, Artificial Sequence
  Description of Artificial Sequence: Synthetic oligonucleotide
  Sense strand starting at position 2441 of SEQ ID NO: 336
uggauaugaguuugaucag

SEQ ID NO: 29403 - RNA, 19 nt, Artificial Sequence
  Description of Artificial Sequence: Synthetic oligonucleotide
  Antisense strand to SEQ ID NO: 29402
cugaucaaacucauaucca

SEQ ID NO: 29404 - RNA, 19 nt, Artificial Sequence
  Description of Artificial Sequence: Synthetic oligonucleotide
  Sense strand starting at position 2444 of SEQ ID NO: 336
auaugaguuugaucagcaa

SEQ ID NO: 29405 - RNA, 19 nt, Artificial Sequence
  Description of Artificial Sequence: Synthetic oligonucleotide
  Antisense strand to SEQ ID NO: 29404
uugcugaucaaacucauau

SEQ ID NO: 29406 - RNA, 19 nt, Artificial Sequence
  Description of Artificial Sequence: Synthetic oligonucleotide
  Sense strand starting at position 2448 of SEQ ID NO: 336
gaguuugaucagcaaacua

SEQ ID NO: 29407 - RNA, 19 nt, Artificial Sequence
  Description of Artificial Sequence: Synthetic oligonucleotide
  Antisense strand to SEQ ID NO: 29406
uaguuugcugaucaaacuc

SEQ ID NO: 29408 - RNA, 19 nt, Artificial Sequence
  Description of Artificial Sequence: Synthetic oligonucleotide
  Sense strand starting at position 2680 of SEQ ID NO: 336
ggcguuagcauuguuauuc

SEQ ID NO: 29409 - RNA, 19 nt, Artificial Sequence
  Description of Artificial Sequence: Synthetic oligonucleotide
  Antisense strand to SEQ ID NO: 29408
gaauaacaaugcuaacgcc

SEQ ID NO: 29410 - RNA, 19 nt, Artificial Sequence
  Description of Artificial Sequence: Synthetic oligonucleotide
  Sense strand starting at position 2793 of SEQ ID NO: 336
gaaauuauuguguacaggu

SEQ ID NO: 29411 - RNA, 19 nt, Artificial Sequence
  Description of Artificial Sequence: Synthetic oligonucleotide
  Antisense strand to SEQ ID NO: 29410
accuguacacaauaauuuc

SEQ ID NO: 29412 - RNA, 19 nt, Artificial Sequence
  Description of Artificial Sequence: Synthetic oligonucleotide
  Sense strand starting at position 2885 of SEQ ID NO: 336
gcgauuggugaucauacua

SEQ ID NO: 29413 - RNA, 19 nt, Artificial Sequence
  Description of Artificial Sequence: Synthetic oligonucleotide
  Antisense strand to SEQ ID NO: 29412
uaguaugaucaccaaucgc

SEQ ID NO: 29414 - RNA, 19 nt, Artificial Sequence
  Description of Artificial Sequence: Synthetic oligonucleotide
  Sense strand starting at position 2942 of SEQ ID NO: 336
agcuguaaucggcaaagaa

SEQ ID NO: 29415 - RNA, 19 nt, Artificial Sequence
  Description of Artificial Sequence: Synthetic oligonucleotide
  Antisense strand to SEQ ID NO: 29414
uucuuugccgauuacagcu

SEQ ID NO: 29416 - RNA, 19 nt, Artificial Sequence
  Description of Artificial Sequence: Synthetic oligonucleotide
  Sense strand starting at position 3046 of SEQ ID NO: 336
ggaggaggauaguuuggua

SEQ ID NO: 29417 - RNA, 19 nt, Artificial Sequence
  Description of Artificial Sequence: Synthetic oligonucleotide
  Antisense strand to SEQ ID NO: 29416
uaccaaacuauccuccucc

SEQ ID NO: 29418 - RNA, 19 nt, Artificial Sequence
  Description of Artificial Sequence: Synthetic oligonucleotide
  Sense strand starting at position 3240 of SEQ ID NO: 336
gugucaguucuguucguga

SEQ ID NO: 29419 - RNA, 19 nt, Artificial Sequence
  Description of Artificial Sequence: Synthetic oligonucleotide
  Antisense strand to SEQ ID NO: 29418
ucacgaacagaacugacac

SEQ ID NO: 29420 - RNA, 19 nt, Artificial Sequence
  Description of Artificial Sequence: Synthetic oligonucleotide
  Sense strand starting at position 3283 of SEQ ID NO: 336
ucauauaauguugaggcaa

SEQ ID NO: 29421 - RNA, 19 nt, Artificial Sequence
  Description of Artificial Sequence: Synthetic oligonucleotide
  Antisense strand to SEQ ID NO: 29420
uugccucaacauuauauga

SEQ ID NO: 29422 - RNA, 19 nt, Artificial Sequence
  Description of Artificial Sequence: Synthetic oligonucleotide
  Sense strand starting at position 3389 of SEQ ID NO: 336
augacuuuagaggguggua

SEQ ID NO: 29423 - RNA, 19 nt, Artificial Sequence
  Description of Artificial Sequence: Synthetic oligonucleotide
  Antisense strand to SEQ ID NO: 29422
uaccacccucuaaagucau

SEQ ID NO: 29424 - RNA, 19 nt, Artificial Sequence
  Description of Artificial Sequence: Synthetic oligonucleotide
  Sense strand starting at position 3422 of SEQ ID NO: 336
agcagugauggguggagau

SEQ ID NO: 29425 - RNA, 19 nt, Artificial Sequence
  Description of Artificial Sequence: Synthetic oligonucleotide
  Antisense strand to SEQ ID NO: 29424
aucuccacccaucacugcu

SEQ ID NO: 29426 - RNA, 19 nt, Artificial Sequence
  Description of Artificial Sequence: Synthetic oligonucleotide
  Sense strand starting at position 3423 of SEQ ID NO: 336
gcagugauggguggagaua

SEQ ID NO: 29427 - RNA, 19 nt, Artificial Sequence
  Description of Artificial Sequence: Synthetic oligonucleotide
  Antisense strand to SEQ ID NO: 29426
uaucuccacccaucacugc

SEQ ID NO: 29428 - RNA, 19 nt, Artificial Sequence
  Description of Artificial Sequence: Synthetic oligonucleotide
  Sense strand starting at position 3604 of SEQ ID NO: 336
ugaaauuacuagcuaauag

SEQ ID NO: 29429 - RNA, 19 nt, Artificial Sequence
  Description of Artificial Sequence: Synthetic oligonucleotide
  Antisense strand to SEQ ID NO: 29428
cuauuagcuaguaauuuca

SEQ ID NO: 29430 - RNA, 19 nt, Artificial Sequence
  Description of Artificial Sequence: Synthetic oligonucleotide
  Sense strand starting at position 281 of SEQ ID NO: 337
cugcccuuccugcgaugaa

SEQ ID NO: 29431 - RNA, 19 nt, Artificial Sequence
  Description of Artificial Sequence: Synthetic oligonucleotide
  Antisense strand to SEQ ID NO: 29430
uucaucgcaggaagggcag

SEQ ID NO: 29432 - RNA, 19 nt, Artificial Sequence
  Description of Artificial Sequence: Synthetic oligonucleotide
  Sense strand starting at position 284 of SEQ ID NO: 337
cccuuccugcgaugaacaa

SEQ ID NO: 29433 - RNA, 19 nt, Artificial Sequence
  Description of Artificial Sequence: Synthetic oligonucleotide
  Antisense strand to SEQ ID NO: 29432
uuguucaucgcaggaaggg

SEQ ID NO: 29434 - RNA, 19 nt, Artificial Sequence
  Description of Artificial Sequence: Synthetic oligonucleotide
  Sense strand starting at position 364 of SEQ ID NO: 337
gcgcuaaggcucuucggau

SEQ ID NO: 29435 - RNA, 19 nt, Artificial Sequence
  Description of Artificial Sequence: Synthetic oligonucleotide
  Antisense strand to SEQ ID NO: 29434
auccgaagagccuuagcgc

SEQ ID NO: 29436 - RNA, 19 nt, Artificial Sequence
  Description of Artificial Sequence: Synthetic oligonucleotide
  Sense strand starting at position 365 of SEQ ID NO: 337
cgcuaaggcucuucggaua

SEQ ID NO: 29437 - RNA, 19 nt, Artificial Sequence
  Description of Artificial Sequence: Synthetic oligonucleotide
  Antisense strand to SEQ ID NO: 29436
uauccgaagagccuuagcg

SEQ ID NO: 29438 - RNA, 19 nt, Artificial Sequence
  Description of Artificial Sequence: Synthetic oligonucleotide
  Sense strand starting at position 387 of SEQ ID NO: 337
cuggacuugucagcucaca

SEQ ID NO: 29439 - RNA, 19 nt, Artificial Sequence
  Description of Artificial Sequence: Synthetic oligonucleotide
  Antisense strand to SEQ ID NO: 29438
ugugagcugacaaguccag

SEQ ID NO: 29440 - RNA, 19 nt, Artificial Sequence
  Description of Artificial Sequence: Synthetic oligonucleotide
  Sense strand starting at position 969 of SEQ ID NO: 337
cuuguaguucucgaaucuc

SEQ ID NO: 29441 - RNA, 19 nt, Artificial Sequence
  Description of Artificial Sequence: Synthetic oligonucleotide
  Antisense strand to SEQ ID NO: 29440
gagauucgagaacuacaag

SEQ ID NO: 29442 - RNA, 19 nt, Artificial Sequence
  Description of Artificial Sequence: Synthetic oligonucleotide
  Sense strand starting at position 1049 of SEQ ID NO: 337
cggcucaguucugagggaa

SEQ ID NO: 29443 - RNA, 19 nt, Artificial Sequence
  Description of Artificial Sequence: Synthetic oligonucleotide
  Antisense strand to SEQ ID NO: 29442
uucccucagaacugagccg

SEQ ID NO: 29444 - RNA, 19 nt, Artificial Sequence
  Description of Artificial Sequence: Synthetic oligonucleotide
  Sense strand starting at position 1414 of SEQ ID NO: 337
ggcagaaucugucccaagu

SEQ ID NO: 29445 - RNA, 19 nt, Artificial Sequence
  Description of Artificial Sequence: Synthetic oligonucleotide
  Antisense strand to SEQ ID NO: 29444
acuugggacagauucugcc

SEQ ID NO: 29446 - RNA, 19 nt, Artificial Sequence
  Description of Artificial Sequence: Synthetic oligonucleotide
  Sense strand starting at position 1429 of SEQ ID NO: 337
aaguaugaucuacagguuu

SEQ ID NO: 29447 - RNA, 19 nt, Artificial Sequence
  Description of Artificial Sequence: Synthetic oligonucleotide
  Antisense strand to SEQ ID NO: 29446
aaaccuguagaucauacuu

SEQ ID NO: 29448 - RNA, 19 nt, Artificial Sequence
  Description of Artificial Sequence: Synthetic oligonucleotide
  Sense strand starting at position 1490 of SEQ ID NO: 337
agcucuaccuccucuguua

SEQ ID NO: 29449 - RNA, 19 nt, Artificial Sequence
  Description of Artificial Sequence: Synthetic oligonucleotide
  Antisense strand to SEQ ID NO: 29448
uaacagaggagguagagcu

SEQ ID NO: 29450 - RNA, 19 nt, Artificial Sequence
  Description of Artificial Sequence: Synthetic oligonucleotide
  Sense strand starting at position 1504 of SEQ ID NO: 337
uguuaaccucuuuagagca

SEQ ID NO: 29451 - RNA, 19 nt, Artificial Sequence
  Description of Artificial Sequence: Synthetic oligonucleotide
  Antisense strand to SEQ ID NO: 29450
ugcucuaaagagguuaaca

SEQ ID NO: 29452 - RNA, 19 nt, Artificial Sequence
  Description of Artificial Sequence: Synthetic oligonucleotide
  Sense strand starting at position 1604 of SEQ ID NO: 337
gguguaguaggaugaggaa

SEQ ID NO: 29453 - RNA, 19 nt, Artificial Sequence
  Description of Artificial Sequence: Synthetic oligonucleotide
  Antisense strand to SEQ ID NO: 29452
uuccucauccuacuacacc

SEQ ID NO: 29454 - RNA, 19 nt, Artificial Sequence
  Description of Artificial Sequence: Synthetic oligonucleotide
  Sense strand starting at position 1704 of SEQ ID NO: 337
ugaugccugugcuccaaau

SEQ ID NO: 29455 - RNA, 19 nt, Artificial Sequence
  Description of Artificial Sequence: Synthetic oligonucleotide
  Antisense strand to SEQ ID NO: 29454
auuuggagcacaggcauca

SEQ ID NO: 29456 - RNA, 19 nt, Artificial Sequence
  Description of Artificial Sequence: Synthetic oligonucleotide
  Sense strand starting at position 1706 of SEQ ID NO: 337
augccugugcuccaaaugu

SEQ ID NO: 29457 - RNA, 19 nt, Artificial Sequence
  Description of Artificial Sequence: Synthetic oligonucleotide
  Antisense strand to SEQ ID NO: 29456
acauuuggagcacaggcau

SEQ ID NO: 29458 - RNA, 19 nt, Artificial Sequence
  Description of Artificial Sequence: Synthetic oligonucleotide
  Sense strand starting at position 1952 of SEQ ID NO: 337
gaggaaaggccgugucuau

SEQ ID NO: 29459 - RNA, 19 nt, Artificial Sequence
  Description of Artificial Sequence: Synthetic oligonucleotide
  Antisense strand to SEQ ID NO: 29458
auagacacggccuuuccuc

SEQ ID NO: 29460 - RNA, 19 nt, Artificial Sequence
  Description of Artificial Sequence: Synthetic oligonucleotide
  Sense strand starting at position 1965 of SEQ ID NO: 337
gucuauuaggucugugaga

SEQ ID NO: 29461 - RNA, 19 nt, Artificial Sequence
  Description of Artificial Sequence: Synthetic oligonucleotide
  Antisense strand to SEQ ID NO: 29460
ucucacagaccuaauagac

SEQ ID NO: 29462 - RNA, 19 nt, Artificial Sequence
  Description of Artificial Sequence: Synthetic oligonucleotide
  Sense strand starting at position 1966 of SEQ ID NO: 337
ucuauuaggucugugagau

SEQ ID NO: 29463 - RNA, 19 nt, Artificial Sequence
  Description of Artificial Sequence: Synthetic oligonucleotide
  Antisense strand to SEQ ID NO: 29462
aucucacagaccuaauaga

SEQ ID NO: 29464 - RNA, 19 nt, Artificial Sequence
  Description of Artificial Sequence: Synthetic oligonucleotide
  Sense strand starting at position 1967 of SEQ ID NO: 337
cuauuaggucugugagauc

SEQ ID NO: 29465 - RNA, 19 nt, Artificial Sequence
  Description of Artificial Sequence: Synthetic oligonucleotide
  Antisense strand to SEQ ID NO: 29464
gaucucacagaccuaauag

SEQ ID NO: 29466 - RNA, 19 nt, Artificial Sequence
  Description of Artificial Sequence: Synthetic oligonucleotide
  Sense strand starting at position 2121 of SEQ ID NO: 337
ugggcaagucucuaauugu

SEQ ID NO: 29467 - RNA, 19 nt, Artificial Sequence
  Description of Artificial Sequence: Synthetic oligonucleotide
  Antisense strand to SEQ ID NO: 29466
acaauuagagacuugccca

SEQ ID NO: 29468 - RNA, 19 nt, Artificial Sequence
  Description of Artificial Sequence: Synthetic oligonucleotide
  Sense strand starting at position 2142 of SEQ ID NO: 337
cuugguuucccugacuauu

SEQ ID NO: 29469 - RNA, 19 nt, Artificial Sequence
  Description of Artificial Sequence: Synthetic oligonucleotide
  Antisense strand to SEQ ID NO: 29468
aauagucagggaaaccaag

SEQ ID NO: 29470 - RNA, 19 nt, Artificial Sequence
  Description of Artificial Sequence: Synthetic oligonucleotide
  Sense strand starting at position 2144 of SEQ ID NO: 337
ugguuucccugacuauuaa

SEQ ID NO: 29471 - RNA, 19 nt, Artificial Sequence
  Description of Artificial Sequence: Synthetic oligonucleotide
  Antisense strand to SEQ ID NO: 29470
uuaauagucagggaaacca

SEQ ID NO: 29472 - RNA, 19 nt, Artificial Sequence
  Description of Artificial Sequence: Synthetic oligonucleotide
  Sense strand starting at position 2145 of SEQ ID NO: 337
gguuucccugacuauuaau

SEQ ID NO: 29473 - RNA, 19 nt, Artificial Sequence
  Description of Artificial Sequence: Synthetic oligonucleotide
  Antisense strand to SEQ ID NO: 29472
auuaauagucagggaaacc

SEQ ID NO: 29474 - RNA, 19 nt, Artificial Sequence
  Description of Artificial Sequence: Synthetic oligonucleotide
  Sense strand starting at position 2199 of SEQ ID NO: 337
gggcccuuaucacuuacua

SEQ ID NO: 29475 - RNA, 19 nt, Artificial Sequence
  Description of Artificial Sequence: Synthetic oligonucleotide
  Antisense strand to SEQ ID NO: 29474
uaguaagugauaagggccc

SEQ ID NO: 29476 - RNA, 19 nt, Artificial Sequence
  Description of Artificial Sequence: Synthetic oligonucleotide
  Sense strand starting at position 2211 of SEQ ID NO: 337
cuuacuacaucauugguca

SEQ ID NO: 29477 - RNA, 19 nt, Artificial Sequence
  Description of Artificial Sequence: Synthetic oligonucleotide
  Antisense strand to SEQ ID NO: 29476
ugaccaaugauguaguaag

SEQ ID NO: 29478 - RNA, 19 nt, Artificial Sequence
  Description of Artificial Sequence: Synthetic oligonucleotide
  Sense strand starting at position 2212 of SEQ ID NO: 337
uuacuacaucauuggucau

SEQ ID NO: 29479 - RNA, 19 nt, Artificial Sequence
  Description of Artificial Sequence: Synthetic oligonucleotide
  Antisense strand to SEQ ID NO: 29478
augaccaaugauguaguaa

SEQ ID NO: 29480 - RNA, 19 nt, Artificial Sequence
  Description of Artificial Sequence: Synthetic oligonucleotide
  Sense strand starting at position 2244 of SEQ ID NO: 337
aaaggcaagugucaucuuu

SEQ ID NO: 29481 - RNA, 19 nt, Artificial Sequence
  Description of Artificial Sequence: Synthetic oligonucleotide
  Antisense strand to SEQ ID NO: 29480
aaagaugacacuugccuuu

SEQ ID NO: 29482 - RNA, 19 nt, Artificial Sequence
  Description of Artificial Sequence: Synthetic oligonucleotide
  Sense strand starting at position 2285 of SEQ ID NO: 337
gauguaacaguuuguacca

SEQ ID NO: 29483 - RNA, 19 nt, Artificial Sequence
  Description of Artificial Sequence: Synthetic oligonucleotide
  Antisense strand to SEQ ID NO: 29482
ugguacaaacuguuacauc

SEQ ID NO: 29484 - RNA, 19 nt, Artificial Sequence
  Description of Artificial Sequence: Synthetic oligonucleotide
  Sense strand starting at position 2427 of SEQ ID NO: 337
ucagcuguagacgaagaua

SEQ ID NO: 29485 - RNA, 19 nt, Artificial Sequence
  Description of Artificial Sequence: Synthetic oligonucleotide
  Antisense strand to SEQ ID NO: 29484
uaucuucgucuacagcuga

SEQ ID NO: 29486 - RNA, 19 nt, Artificial Sequence
  Description of Artificial Sequence: Synthetic oligonucleotide
  Sense strand starting at position 2564 of SEQ ID NO: 337
cccugaacuguuggugaaa

SEQ ID NO: 29487 - RNA, 19 nt, Artificial Sequence
  Description of Artificial Sequence: Synthetic oligonucleotide
  Antisense strand to SEQ ID NO: 29486
uuucaccaacaguucaggg

SEQ ID NO: 29488 - RNA, 19 nt, Artificial Sequence
  Description of Artificial Sequence: Synthetic oligonucleotide
  Sense strand starting at position 2565 of SEQ ID NO: 337
ccugaacuguuggugaaau

SEQ ID NO: 29489 - RNA, 19 nt, Artificial Sequence
  Description of Artificial Sequence: Synthetic oligonucleotide
  Antisense strand to SEQ ID NO: 29488
auuucaccaacaguucagg

SEQ ID NO: 29490 - RNA, 19 nt, Artificial Sequence
  Description of Artificial Sequence: Synthetic oligonucleotide
  Sense strand starting at position 2566 of SEQ ID NO: 337
cugaacuguuggugaaauu

SEQ ID NO: 29491 - RNA, 19 nt, Artificial Sequence
  Description of Artificial Sequence: Synthetic oligonucleotide
  Antisense strand to SEQ ID NO: 29490
aauuucaccaacaguucag

SEQ ID NO: 29492 - RNA, 19 nt, Artificial Sequence
  Description of Artificial Sequence: Synthetic oligonucleotide
  Sense strand starting at position 2567 of SEQ ID NO: 337
ugaacuguuggugaaauuc

SEQ ID NO: 29493 - RNA, 19 nt, Artificial Sequence
  Description of Artificial Sequence: Synthetic oligonucleotide
  Antisense strand to SEQ ID NO: 29492
gaauuucaccaacaguuca

SEQ ID NO: 29494 - RNA, 19 nt, Artificial Sequence
  Description of Artificial Sequence: Synthetic oligonucleotide
  Sense strand starting at position 2633 of SEQ ID NO: 337
ccgcauauuucuuaagaaa

SEQ ID NO: 29495 - RNA, 19 nt, Artificial Sequence
  Description of Artificial Sequence: Synthetic oligonucleotide
  Antisense strand to SEQ ID NO: 29494
uuucuuaagaaauaugcgg

SEQ ID NO: 29496 - RNA, 19 nt, Artificial Sequence
  Description of Artificial Sequence: Synthetic oligonucleotide
  Sense strand starting at position 3433 of SEQ ID NO: 337
agccuuaugccuggcuaau

SEQ ID NO: 29497 - RNA, 19 nt, Artificial Sequence
  Description of Artificial Sequence: Synthetic oligonucleotide
  Antisense strand to SEQ ID NO: 29496
auuagccaggcauaaggcu

SEQ ID NO: 29498 - RNA, 19 nt, Artificial Sequence
  Description of Artificial Sequence: Synthetic oligonucleotide
  Sense strand starting at position 3735 of SEQ ID NO: 337
uuagaaauauguucucaga

SEQ ID NO: 29499 - RNA, 19 nt, Artificial Sequence
  Description of Artificial Sequence: Synthetic oligonucleotide
  Antisense strand to SEQ ID NO: 29498
ucugagaacauauuucuaa

SEQ ID NO: 29500 - RNA, 19 nt, Artificial Sequence
  Description of Artificial Sequence: Synthetic oligonucleotide
  Sense strand starting at position 3834 of SEQ ID NO: 337
uugacugguugacuuuaca

SEQ ID NO: 29501 - RNA, 19 nt, Artificial Sequence
  Description of Artificial Sequence: Synthetic oligonucleotide
  Antisense strand to SEQ ID NO: 29500
uguaaagucaaccagucaa

SEQ ID NO: 29502 - RNA, 19 nt, Artificial Sequence
  Description of Artificial Sequence: Synthetic oligonucleotide
  Sense strand starting at position 3856 of SEQ ID NO: 337
gugcaacagugauaggcau

SEQ ID NO: 29503 - RNA, 19 nt, Artificial Sequence
  Description of Artificial Sequence: Synthetic oligonucleotide
  Antisense strand to SEQ ID NO: 29502
augccuaucacuguugcac

SEQ ID NO: 29504 - RNA, 19 nt, Artificial Sequence
  Description of Artificial Sequence: Synthetic oligonucleotide
  Sense strand starting at position 3919 of SEQ ID NO: 337
gacagcuuguaguucucua

SEQ ID NO: 29505 - RNA, 19 nt, Artificial Sequence
  Description of Artificial Sequence: Synthetic oligonucleotide
  Antisense strand to SEQ ID NO: 29504
uagagaacuacaagcuguc

SEQ ID NO: 29506 - RNA, 19 nt, Artificial Sequence
  Description of Artificial Sequence: Synthetic oligonucleotide
  Sense strand starting at position 3923 of SEQ ID NO: 337
gcuuguaguucucuaaucu

SEQ ID NO: 29507 - RNA, 19 nt, Artificial Sequence
  Description of Artificial Sequence: Synthetic oligonucleotide
  Antisense strand to SEQ ID NO: 29506
agauuagagaacuacaagc

SEQ ID NO: 29508 - RNA, 19 nt, Artificial Sequence
  Description of Artificial Sequence: Synthetic oligonucleotide
  Sense strand starting at position 3924 of SEQ ID NO: 337
cuuguaguucucuaaucuc

SEQ ID NO: 29509 - RNA, 19 nt, Artificial Sequence
  Description of Artificial Sequence: Synthetic oligonucleotide
  Antisense strand to SEQ ID NO: 29508
gagauuagagaacuacaag

SEQ ID NO: 29510 - RNA, 19 nt, Artificial Sequence
  Description of Artificial Sequence: Synthetic oligonucleotide
  Sense strand starting at position 3857 of SEQ ID NO: 338
aguugauguagagaauugu

SEQ ID NO: 29511 - RNA, 19 nt, Artificial Sequence
  Description of Artificial Sequence: Synthetic oligonucleotide
  Antisense strand to SEQ ID NO: 29510
acaauucucuacaucaacu

SEQ ID NO: 29512 - RNA, 19 nt, Artificial Sequence
  Description of Artificial Sequence: Synthetic oligonucleotide
  Sense strand starting at position 3731 of SEQ ID NO: 338
uuguucguuccacagcaaa

SEQ ID NO: 29513 - RNA, 19 nt, Artificial Sequence
  Description of Artificial Sequence: Synthetic oligonucleotide
  Antisense strand to SEQ ID NO: 29512
uuugcuguggaacgaacaa

SEQ ID NO: 29514 - RNA, 19 nt, Artificial Sequence
  Description of Artificial Sequence: Synthetic oligonucleotide
  Sense strand starting at position 3724 of SEQ ID NO: 338
agaaaucuuguucguucca

SEQ ID NO: 29515 - RNA, 19 nt, Artificial Sequence
  Description of Artificial Sequence: Synthetic oligonucleotide
  Antisense strand to SEQ ID NO: 29514
uggaacgaacaagauuucu

SEQ ID NO: 29516 - RNA, 19 nt, Artificial Sequence
  Description of Artificial Sequence: Synthetic oligonucleotide
  Sense strand starting at position 3722 of SEQ ID NO: 338
gaagaaaucuuguucguuc

SEQ ID NO: 29517 - RNA, 19 nt, Artificial Sequence
  Description of Artificial Sequence: Synthetic oligonucleotide
  Antisense strand to SEQ ID NO: 29516
gaacgaacaagauuucuuc

SEQ ID NO: 29518 - RNA, 19 nt, Artificial Sequence
  Description of Artificial Sequence: Synthetic oligonucleotide
  Sense strand starting at position 3710 of SEQ ID NO: 338
gguaauuucuuagaagaaa

SEQ ID NO: 29519 - RNA, 19 nt, Artificial Sequence
  Description of Artificial Sequence: Synthetic oligonucleotide
  Antisense strand to SEQ ID NO: 29518
uuucuucuaagaaauuacc

SEQ ID NO: 29520 - RNA, 19 nt, Artificial Sequence
  Description of Artificial Sequence: Synthetic oligonucleotide
  Sense strand starting at position 3662 of SEQ ID NO: 338
auauucuugcugggaauua

SEQ ID NO: 29521 - RNA, 19 nt, Artificial Sequence
  Description of Artificial Sequence: Synthetic oligonucleotide
  Antisense strand to SEQ ID NO: 29520
uaauucccagcaagaauau

SEQ ID NO: 29522 - RNA, 19 nt, Artificial Sequence
  Description of Artificial Sequence: Synthetic oligonucleotide
  Sense strand starting at position 3659 of SEQ ID NO: 338
auaauauucuugcugggaa

SEQ ID NO: 29523 - RNA, 19 nt, Artificial Sequence
  Description of Artificial Sequence: Synthetic oligonucleotide
  Antisense strand to SEQ ID NO: 29522
uucccagcaagaauauuau

SEQ ID NO: 29524 - RNA, 19 nt, Artificial Sequence
  Description of Artificial Sequence: Synthetic oligonucleotide
  Sense strand starting at position 3310 of SEQ ID NO: 338
aagcauuucccucguguca

SEQ ID NO: 29525 - RNA, 19 nt, Artificial Sequence
  Description of Artificial Sequence: Synthetic oligonucleotide
  Antisense strand to SEQ ID NO: 29524
ugacacgagggaaaugcuu

SEQ ID NO: 29526 - RNA, 19 nt, Artificial Sequence
  Description of Artificial Sequence: Synthetic oligonucleotide
  Sense strand starting at position 3308 of SEQ ID NO: 338
guaagcauuucccucgugu

SEQ ID NO: 29527 - RNA, 19 nt, Artificial Sequence
  Description of Artificial Sequence: Synthetic oligonucleotide
  Antisense strand to SEQ ID NO: 29526
acacgagggaaaugcuuac

SEQ ID NO: 29528 - RNA, 19 nt, Artificial Sequence
  Description of Artificial Sequence: Synthetic oligonucleotide
  Sense strand starting at position 3136 of SEQ ID NO: 338
uuggauuaugaucguguaa

SEQ ID NO: 29529 - RNA, 19 nt, Artificial Sequence
  Description of Artificial Sequence: Synthetic oligonucleotide
  Antisense strand to SEQ ID NO: 29528
uuacacgaucauaauccaa

SEQ ID NO: 29530 - RNA, 19 nt, Artificial Sequence
  Description of Artificial Sequence: Synthetic oligonucleotide
  Sense strand starting at position 3135 of SEQ ID NO: 338
uuuggauuaugaucgugua

SEQ ID NO: 29531 - RNA, 19 nt, Artificial Sequence
  Description of Artificial Sequence: Synthetic oligonucleotide
  Antisense strand to SEQ ID NO: 29530
uacacgaucauaauccaaa

SEQ ID NO: 29532 - RNA, 19 nt, Artificial Sequence
  Description of Artificial Sequence: Synthetic oligonucleotide
  Sense strand starting at position 3100 of SEQ ID NO: 338
guuacaaaucacugucuuu

SEQ ID NO: 29533 - RNA, 19 nt, Artificial Sequence
  Description of Artificial Sequence: Synthetic oligonucleotide
  Antisense strand to SEQ ID NO: 29532
aaagacagugauuuguaac

SEQ ID NO: 29534 - RNA, 19 nt, Artificial Sequence
  Description of Artificial Sequence: Synthetic oligonucleotide
  Sense strand starting at position 3054 of SEQ ID NO: 338
augacacuuguuugaauca

SEQ ID NO: 29535 - RNA, 19 nt, Artificial Sequence
  Description of Artificial Sequence: Synthetic oligonucleotide
  Antisense strand to SEQ ID NO: 29534
ugauucaaacaagugucau

SEQ ID NO: 29536 - RNA, 19 nt, Artificial Sequence
  Description of Artificial Sequence: Synthetic oligonucleotide
  Sense strand starting at position 3053 of SEQ ID NO: 338
gaugacacuuguuugaauc

SEQ ID NO: 29537 - RNA, 19 nt, Artificial Sequence
  Description of Artificial Sequence: Synthetic oligonucleotide
  Antisense strand to SEQ ID NO: 29536
gauucaaacaagugucauc

SEQ ID NO: 29538 - RNA, 19 nt, Artificial Sequence
  Description of Artificial Sequence: Synthetic oligonucleotide
  Sense strand starting at position 3052 of SEQ ID NO: 338
ugaugacacuuguuugaau

SEQ ID NO: 29539 - RNA, 19 nt, Artificial Sequence
  Description of Artificial Sequence: Synthetic oligonucleotide
  Antisense strand to SEQ ID NO: 29538
auucaaacaagugucauca

SEQ ID NO: 29540 - RNA, 19 nt, Artificial Sequence
  Description of Artificial Sequence: Synthetic oligonucleotide
  Sense strand starting at position 3050 of SEQ ID NO: 338
ggugaugacacuuguuuga

SEQ ID NO: 29541 - RNA, 19 nt, Artificial Sequence
  Description of Artificial Sequence: Synthetic oligonucleotide
  Antisense strand to SEQ ID NO: 29540
ucaaacaagugucaucacc

SEQ ID NO: 29542 - RNA, 19 nt, Artificial Sequence
  Description of Artificial Sequence: Synthetic oligonucleotide
  Sense strand starting at position 2661 of SEQ ID NO: 338
caaguaagugcggaggaua

SEQ ID NO: 29543 - RNA, 19 nt, Artificial Sequence
  Description of Artificial Sequence: Synthetic oligonucleotide
  Antisense strand to SEQ ID NO: 29542
uauccuccgcacuuacuug

SEQ ID NO: 29544 - RNA, 19 nt, Artificial Sequence
  Description of Artificial Sequence: Synthetic oligonucleotide
  Sense strand starting at position 2291 of SEQ ID NO: 338
gucccuacccuuuggagaa

SEQ ID NO: 29545 - RNA, 19 nt, Artificial Sequence
  Description of Artificial Sequence: Synthetic oligonucleotide
  Antisense strand to SEQ ID NO: 29544
uucuccaaaggguagggac

SEQ ID NO: 29546 - RNA, 19 nt, Artificial Sequence
  Description of Artificial Sequence: Synthetic oligonucleotide
  Sense strand starting at position 1482 of SEQ ID NO: 338
cuuacauccgucugaaaga

SEQ ID NO: 29547 - RNA, 19 nt, Artificial Sequence
  Description of Artificial Sequence: Synthetic oligonucleotide
  Antisense strand to SEQ ID NO: 29546
ucuuucagacggauguaag

SEQ ID NO: 29548 - RNA, 19 nt, Artificial Sequence
  Description of Artificial Sequence: Synthetic oligonucleotide
  Sense strand starting at position 1455 of SEQ ID NO: 338
gucucaagaucgcuugaca

SEQ ID NO: 29549 - RNA, 19 nt, Artificial Sequence
  Description of Artificial Sequence: Synthetic oligonucleotide
  Antisense strand to SEQ ID NO: 29548
ugucaagcgaucuugagac

SEQ ID NO: 29550 - RNA, 19 nt, Artificial Sequence
  Description of Artificial Sequence: Synthetic oligonucleotide
  Sense strand starting at position 1445 of SEQ ID NO: 338
guagucuccugucucaaga

SEQ ID NO: 29551 - RNA, 19 nt, Artificial Sequence
  Description of Artificial Sequence: Synthetic oligonucleotide
  Antisense strand to SEQ ID NO: 29550
ucuugagacaggagacuac

SEQ ID NO: 29552 - RNA, 19 nt, Artificial Sequence
  Description of Artificial Sequence: Synthetic oligonucleotide
  Sense strand starting at position 1368 of SEQ ID NO: 338
auacccuauguaugugaua

SEQ ID NO: 29553 - RNA, 19 nt, Artificial Sequence
  Description of Artificial Sequence: Synthetic oligonucleotide
  Antisense strand to SEQ ID NO: 29552
uaucacauacauaggguau

SEQ ID NO: 29554 - RNA, 19 nt, Artificial Sequence
  Description of Artificial Sequence: Synthetic oligonucleotide
  Sense strand starting at position 1307 of SEQ ID NO: 338
uaacaauguguuuguaggu

SEQ ID NO: 29555 - RNA, 19 nt, Artificial Sequence
  Description of Artificial Sequence: Synthetic oligonucleotide
  Antisense strand to SEQ ID NO: 29554
accuacaaacacauuguua

SEQ ID NO: 29556 - RNA, 19 nt, Artificial Sequence
  Description of Artificial Sequence: Synthetic oligonucleotide
  Sense strand starting at position 1291 of SEQ ID NO: 338
aucuuucggcccuaauuaa

SEQ ID NO: 29557 - RNA, 19 nt, Artificial Sequence
  Description of Artificial Sequence: Synthetic oligonucleotide
  Antisense strand to SEQ ID NO: 29556
uuaauuagggccgaaagau

SEQ ID NO: 29558 - RNA, 19 nt, Artificial Sequence
  Description of Artificial Sequence: Synthetic oligonucleotide
  Sense strand starting at position 1175 of SEQ ID NO: 338
cugucaaaugaauguccuu

SEQ ID NO: 29559 - RNA, 19 nt, Artificial Sequence
  Description of Artificial Sequence: Synthetic oligonucleotide
  Antisense strand to SEQ ID NO: 29558
aaggacauucauuugacag

SEQ ID NO: 29560 - RNA, 19 nt, Artificial Sequence
  Description of Artificial Sequence: Synthetic oligonucleotide
  Sense strand starting at position 1164 of SEQ ID NO: 338
ugggacauuuacugucaaa

SEQ ID NO: 29561 - RNA, 19 nt, Artificial Sequence
  Description of Artificial Sequence: Synthetic oligonucleotide
  Antisense strand to SEQ ID NO: 29560
uuugacaguaaauguccca

SEQ ID NO: 29562 - RNA, 19 nt, Artificial Sequence
  Description of Artificial Sequence: Synthetic oligonucleotide
  Sense strand starting at position 1108 of SEQ ID NO: 338
acucuucugcaguagcaau

SEQ ID NO: 29563 - RNA, 19 nt, Artificial Sequence
  Description of Artificial Sequence: Synthetic oligonucleotide
  Antisense strand to SEQ ID NO: 29562
auugcuacugcagaagagu

SEQ ID NO: 29564 - RNA, 19 nt, Artificial Sequence
  Description of Artificial Sequence: Synthetic oligonucleotide
  Sense strand starting at position 723 of SEQ ID NO: 338
accauuugguacuauauau

SEQ ID NO: 29565 - RNA, 19 nt, Artificial Sequence
  Description of Artificial Sequence: Synthetic oligonucleotide
  Antisense strand to SEQ ID NO: 29564
auauauaguaccaaauggu

SEQ ID NO: 29566 - RNA, 19 nt, Artificial Sequence
  Description of Artificial Sequence: Synthetic oligonucleotide
  Sense strand starting at position 666 of SEQ ID NO: 338
cucucuguaggauggugaa

SEQ ID NO: 29567 - RNA, 19 nt, Artificial Sequence
  Description of Artificial Sequence: Synthetic oligonucleotide
  Antisense strand to SEQ ID NO: 29566
uucaccauccuacagagag

SEQ ID NO: 29568 - RNA, 19 nt, Artificial Sequence
  Description of Artificial Sequence: Synthetic oligonucleotide
  Sense strand starting at position 584 of SEQ ID NO: 338
gcuucugcuuaagugacaa

SEQ ID NO: 29569 - RNA, 19 nt, Artificial Sequence
  Description of Artificial Sequence: Synthetic oligonucleotide
  Antisense strand to SEQ ID NO: 29568
uugucacuuaagcagaagc

SEQ ID NO: 29570 - RNA, 19 nt, Artificial Sequence
  Description of Artificial Sequence: Synthetic oligonucleotide
  Sense strand starting at position 581 of SEQ ID NO: 338
uuugcuucugcuuaaguga

SEQ ID NO: 29571 - RNA, 19 nt, Artificial Sequence
  Description of Artificial Sequence: Synthetic oligonucleotide
  Antisense strand to SEQ ID NO: 29570
ucacuuaagcagaagcaaa

SEQ ID NO: 29572 - RNA, 19 nt, Artificial Sequence
  Description of Artificial Sequence: Synthetic oligonucleotide
  Sense strand starting at position 514 of SEQ ID NO: 338
augagauacuauguaaucu

SEQ ID NO: 29573 - RNA, 19 nt, Artificial Sequence
  Description of Artificial Sequence: Synthetic oligonucleotide
  Antisense strand to SEQ ID NO: 29572
agauuacauaguaucucau

SEQ ID NO: 29574 - RNA, 19 nt, Artificial Sequence
  Description of Artificial Sequence: Synthetic oligonucleotide
  Sense strand starting at position 407 of SEQ ID NO: 338
uuagaaugguauguuacau

SEQ ID NO: 29575 - RNA, 19 nt, Artificial Sequence
  Description of Artificial Sequence: Synthetic oligonucleotide
  Antisense strand to SEQ ID NO: 29574
auguaacauaccauucuaa

SEQ ID NO: 29576 - RNA, 19 nt, Artificial Sequence
  Description of Artificial Sequence: Synthetic oligonucleotide
  Sense strand starting at position 406 of SEQ ID NO: 338
guuagaaugguauguuaca

SEQ ID NO: 29577 - RNA, 19 nt, Artificial Sequence
  Description of Artificial Sequence: Synthetic oligonucleotide
  Antisense strand to SEQ ID NO: 29576
uguaacauaccauucuaac

SEQ ID NO: 29578 - RNA, 19 nt, Artificial Sequence
  Description of Artificial Sequence: Synthetic oligonucleotide
  Sense strand starting at position 402 of SEQ ID NO: 338
uccaguuagaaugguaugu

SEQ ID NO: 29579 - RNA, 19 nt, Artificial Sequence
  Description of Artificial Sequence: Synthetic oligonucleotide
  Antisense strand to SEQ ID NO: 29578
acauaccauucuaacugga

SEQ ID NO: 29580 - RNA, 19 nt, Artificial Sequence
  Description of Artificial Sequence: Synthetic oligonucleotide
  Sense strand starting at position 331 of SEQ ID NO: 338
ccgcaauguacuuagagaa

SEQ ID NO: 29581 - RNA, 19 nt, Artificial Sequence
  Description of Artificial Sequence: Synthetic oligonucleotide
  Antisense strand to SEQ ID NO: 29580
uucucuaaguacauugcgg

SEQ ID NO: 29582 - RNA, 19 nt, Artificial Sequence
  Description of Artificial Sequence: Synthetic oligonucleotide
  Sense strand starting at position 330 of SEQ ID NO: 338
accgcaauguacuuagaga

SEQ ID NO: 29583 - RNA, 19 nt, Artificial Sequence
  Description of Artificial Sequence: Synthetic oligonucleotide
  Antisense strand to SEQ ID NO: 29582
ucucuaaguacauugcggu

SEQ ID NO: 29584 - RNA, 19 nt, Artificial Sequence
  Description of Artificial Sequence: Synthetic oligonucleotide
  Sense strand starting at position 63 of SEQ ID NO: 338
uaucucuaggguugugaaa

SEQ ID NO: 29585 - RNA, 19 nt, Artificial Sequence
  Description of Artificial Sequence: Synthetic oligonucleotide
  Antisense strand to SEQ ID NO: 29584
uuucacaacccuagagaua

SEQ ID NO: 29586 - RNA, 19 nt, Artificial Sequence
  Description of Artificial Sequence: Synthetic oligonucleotide
  Sense strand starting at position 59 of SEQ ID NO: 338
ugaguaucucuaggguugu

SEQ ID NO: 29587 - RNA, 19 nt, Artificial Sequence
  Description of Artificial Sequence: Synthetic oligonucleotide
  Antisense strand to SEQ ID NO: 29586
acaacccuagagauacuca

SEQ ID NO: 29588 - RNA, 19 nt, Artificial Sequence
  Description of Artificial Sequence: Synthetic oligonucleotide
  Sense strand starting at position 45 of SEQ ID NO: 338
guuucuucaguggaugagu

SEQ ID NO: 29589 - RNA, 19 nt, Artificial Sequence
  Description of Artificial Sequence: Synthetic oligonucleotide
  Antisense strand to SEQ ID NO: 29588
acucauccacugaagaaac

SEQ ID NO: 29590 - RNA, 19 nt, Artificial Sequence
  Description of Artificial Sequence: Synthetic oligonucleotide
  Sense strand starting at position 123 of SEQ ID NO: 340
acuugcaguugcuuauuua

SEQ ID NO: 29591 - RNA, 19 nt, Artificial Sequence
  Description of Artificial Sequence: Synthetic oligonucleotide
  Antisense strand to SEQ ID NO: 29590
uaaauaagcaacugcaagu

SEQ ID NO: 29592 - RNA, 19 nt, Artificial Sequence
  Description of Artificial Sequence: Synthetic oligonucleotide
  Sense strand starting at position 124 of SEQ ID NO: 340
cuugcaguugcuuauuuau

SEQ ID NO: 29593 - RNA, 19 nt, Artificial Sequence
  Description of Artificial Sequence: Synthetic oligonucleotide
  Antisense strand to SEQ ID NO: 29592
auaaauaagcaacugcaag

SEQ ID NO: 29594 - RNA, 19 nt, Artificial Sequence
  Description of Artificial Sequence: Synthetic oligonucleotide
  Sense strand starting at position 230 of SEQ ID NO: 340
guaauaguccaccaaacgu

SEQ ID NO: 29595 - RNA, 19 nt, Artificial Sequence
  Description of Artificial Sequence: Synthetic oligonucleotide
  Antisense strand to SEQ ID NO: 29594
acguuugguggacuauuac

SEQ ID NO: 29596 - RNA, 19 nt, Artificial Sequence
  Description of Artificial Sequence: Synthetic oligonucleotide
  Sense strand starting at position 314 of SEQ ID NO: 340
ugggauugcaguugacaaa

SEQ ID NO: 29597 - RNA, 19 nt, Artificial Sequence
  Description of Artificial Sequence: Synthetic oligonucleotide
  Antisense strand to SEQ ID NO: 29596
uuugucaacugcaauccca

SEQ ID NO: 29598 - RNA, 19 nt, Artificial Sequence
  Description of Artificial Sequence: Synthetic oligonucleotide
  Sense strand starting at position 566 of SEQ ID NO: 340
uuccuaagaggcuaguuau

SEQ ID NO: 29599 - RNA, 19 nt, Artificial Sequence
  Description of Artificial Sequence: Synthetic oligonucleotide
  Antisense strand to SEQ ID NO: 29598
auaacuagccucuuaggaa

SEQ ID NO: 29600 - RNA, 19 nt, Artificial Sequence
  Description of Artificial Sequence: Synthetic oligonucleotide
  Sense strand starting at position 685 of SEQ ID NO: 340
uuugaaauauugcuucuga

SEQ ID NO: 29601 - RNA, 19 nt, Artificial Sequence
  Description of Artificial Sequence: Synthetic oligonucleotide
  Antisense strand to SEQ ID NO: 29600
ucagaagcaauauuucaaa

SEQ ID NO: 29602 - RNA, 19 nt, Artificial Sequence
  Description of Artificial Sequence: Synthetic oligonucleotide
  Sense strand starting at position 686 of SEQ ID NO: 340
uugaaauauugcuucugau

SEQ ID NO: 29603 - RNA, 19 nt, Artificial Sequence
  Description of Artificial Sequence: Synthetic oligonucleotide
  Antisense strand to SEQ ID NO: 29602
aucagaagcaauauuucaa

SEQ ID NO: 29604 - RNA, 19 nt, Artificial Sequence
  Description of Artificial Sequence: Synthetic oligonucleotide
  Sense strand starting at position 748 of SEQ ID NO: 340
uccagaaucccuggcucaa

SEQ ID NO: 29605 - RNA, 19 nt, Artificial Sequence
  Description of Artificial Sequence: Synthetic oligonucleotide
  Antisense strand to SEQ ID NO: 29604
uugagccagggauucugga

SEQ ID NO: 29606 - RNA, 19 nt, Artificial Sequence
  Description of Artificial Sequence: Synthetic oligonucleotide
  Sense strand starting at position 790 of SEQ ID NO: 340
acauaaccaugucuuguua

SEQ ID NO: 29607 - RNA, 19 nt, Artificial Sequence
  Description of Artificial Sequence: Synthetic oligonucleotide
  Antisense strand to SEQ ID NO: 29606
uaacaagacaugguuaugu

SEQ ID NO: 29608 - RNA, 19 nt, Artificial Sequence
  Description of Artificial Sequence: Synthetic oligonucleotide
  Sense strand starting at position 828 of SEQ ID NO: 340
augacuuacggguaagcau

SEQ ID NO: 29609 - RNA, 19 nt, Artificial Sequence
  Description of Artificial Sequence: Synthetic oligonucleotide
  Antisense strand to SEQ ID NO: 29608
augcuuacccguaagucau

SEQ ID NO: 29610 - RNA, 19 nt, Artificial Sequence
  Description of Artificial Sequence: Synthetic oligonucleotide
  Sense strand starting at position 947 of SEQ ID NO: 340
guuaauuacaaggguugga

SEQ ID NO: 29611 - RNA, 19 nt, Artificial Sequence
  Description of Artificial Sequence: Synthetic oligonucleotide
  Antisense strand to SEQ ID NO: 29610
uccaacccuuguaauuaac

SEQ ID NO: 29612 - RNA, 19 nt, Artificial Sequence
  Description of Artificial Sequence: Synthetic oligonucleotide
  Sense strand starting at position 976 of SEQ ID NO: 340
gaccuugaggccuauuguu

SEQ ID NO: 29613 - RNA, 19 nt, Artificial Sequence
  Description of Artificial Sequence: Synthetic oligonucleotide
  Antisense strand to SEQ ID NO: 29612
aacaauaggccucaagguc

SEQ ID NO: 29614 - RNA, 19 nt, Artificial Sequence
  Description of Artificial Sequence: Synthetic oligonucleotide
  Sense strand starting at position 989 of SEQ ID NO: 340
auuguugguuacuuggaua

SEQ ID NO: 29615 - RNA, 19 nt, Artificial Sequence
  Description of Artificial Sequence: Synthetic oligonucleotide
  Antisense strand to SEQ ID NO: 29614
uauccaaguaaccaacaau

SEQ ID NO: 29616 - RNA, 19 nt, Artificial Sequence
  Description of Artificial Sequence: Synthetic oligonucleotide
  Sense strand starting at position 1002 of SEQ ID NO: 340
uggauaauuucccacuaug

SEQ ID NO: 29617 - RNA, 19 nt, Artificial Sequence
  Description of Artificial Sequence: Synthetic oligonucleotide
  Antisense strand to SEQ ID NO: 29616
cauagugggaaauuaucca

SEQ ID NO: 29618 - RNA, 19 nt, Artificial Sequence
  Description of Artificial Sequence: Synthetic oligonucleotide
  Sense strand starting at position 1017 of SEQ ID NO: 340
uauggcuauucucugggau

SEQ ID NO: 29619 - RNA, 19 nt, Artificial Sequence
  Description of Artificial Sequence: Synthetic oligonucleotide
  Antisense strand to SEQ ID NO: 29618
aucccagagaauagccaua

SEQ ID NO: 29620 - RNA, 19 nt, Artificial Sequence
  Description of Artificial Sequence: Synthetic oligonucleotide
  Sense strand starting at position 1018 of SEQ ID NO: 340
auggcuauucucugggaua

SEQ ID NO: 29621 - RNA, 19 nt, Artificial Sequence
  Description of Artificial Sequence: Synthetic oligonucleotide
  Antisense strand to SEQ ID NO: 29620
uaucccagagaauagccau

SEQ ID NO: 29622 - RNA, 19 nt, Artificial Sequence
  Description of Artificial Sequence: Synthetic oligonucleotide
  Sense strand starting at position 1047 of SEQ ID NO: 340
cuuagucaagcauaagaca

SEQ ID NO: 29623 - RNA, 19 nt, Artificial Sequence
  Description of Artificial Sequence: Synthetic oligonucleotide
  Antisense strand to SEQ ID NO: 29622
ugucuuaugcuugacuaag

SEQ ID NO: 29624 - RNA, 19 nt, Artificial Sequence
  Description of Artificial Sequence: Synthetic oligonucleotide
  Sense strand starting at position 1103 of SEQ ID NO: 340
cucgauccuagagauuagu

SEQ ID NO: 29625 - RNA, 19 nt, Artificial Sequence
  Description of Artificial Sequence: Synthetic oligonucleotide
  Antisense strand to SEQ ID NO: 29624
acuaaucucuaggaucgag

SEQ ID NO: 29626 - RNA, 19 nt, Artificial Sequence
  Description of Artificial Sequence: Synthetic oligonucleotide
  Sense strand starting at position 1389 of SEQ ID NO: 340
cugugauuccucugaaaga

SEQ ID NO: 29627 - RNA, 19 nt, Artificial Sequence
  Description of Artificial Sequence: Synthetic oligonucleotide
  Antisense strand to SEQ ID NO: 29626
ucuuucagaggaaucacag

SEQ ID NO: 29628 - RNA, 19 nt, Artificial Sequence
  Description of Artificial Sequence: Synthetic oligonucleotide
  Sense strand starting at position 1579 of SEQ ID NO: 340
aauaccugaugugugaauu

SEQ ID NO: 29629 - RNA, 19 nt, Artificial Sequence
  Description of Artificial Sequence: Synthetic oligonucleotide
  Antisense strand to SEQ ID NO: 29628
aauucacacaucagguauu

SEQ ID NO: 29630 - RNA, 19 nt, Artificial Sequence
  Description of Artificial Sequence: Synthetic oligonucleotide
  Sense strand starting at position 1663 of SEQ ID NO: 340
caguuagggcuuuauaaac

SEQ ID NO: 29631 - RNA, 19 nt, Artificial Sequence
  Description of Artificial Sequence: Synthetic oligonucleotide
  Antisense strand to SEQ ID NO: 29630
guuuauaaagcccuaacug

SEQ ID NO: 29632 - RNA, 19 nt, Artificial Sequence
  Description of Artificial Sequence: Synthetic oligonucleotide
  Sense strand starting at position 2028 of SEQ ID NO: 340
ccacccaucgugggacaua

SEQ ID NO: 29633 - RNA, 19 nt, Artificial Sequence
  Description of Artificial Sequence: Synthetic oligonucleotide
  Antisense strand to SEQ ID NO: 29632
uaugucccacgaugggugg

SEQ ID NO: 29634 - RNA, 19 nt, Artificial Sequence
  Description of Artificial Sequence: Synthetic oligonucleotide
  Sense strand starting at position 2160 of SEQ ID NO: 340
caaacuugacaguggaacu

SEQ ID NO: 29635 - RNA, 19 nt, Artificial Sequence
  Description of Artificial Sequence: Synthetic oligonucleotide
  Antisense strand to SEQ ID NO: 29634
aguuccacugucaaguuug

SEQ ID NO: 29636 - RNA, 19 nt, Artificial Sequence
  Description of Artificial Sequence: Synthetic oligonucleotide
  Sense strand starting at position 2180 of SEQ ID NO: 340
gggccaaagugaccauuaa

SEQ ID NO: 29637 - RNA, 19 nt, Artificial Sequence
  Description of Artificial Sequence: Synthetic oligonucleotide
  Antisense strand to SEQ ID NO: 29636
uuaauggucacuuuggccc

SEQ ID NO: 29638 - RNA, 19 nt, Artificial Sequence
  Description of Artificial Sequence: Synthetic oligonucleotide
  Sense strand starting at position 2181 of SEQ ID NO: 340
ggccaaagugaccauuaau

SEQ ID NO: 29639 - RNA, 19 nt, Artificial Sequence
  Description of Artificial Sequence: Synthetic oligonucleotide
  Antisense strand to SEQ ID NO: 29638
auuaauggucacuuuggcc

SEQ ID NO: 29640 - RNA, 19 nt, Artificial Sequence
  Description of Artificial Sequence: Synthetic oligonucleotide
  Sense strand starting at position 2191 of SEQ ID NO: 340
accauuaauuugccgggua

SEQ ID NO: 29641 - RNA, 19 nt, Artificial Sequence
  Description of Artificial Sequence: Synthetic oligonucleotide
  Antisense strand to SEQ ID NO: 29640
uacccggcaaauuaauggu

SEQ ID NO: 29642 - RNA, 19 nt, Artificial Sequence
  Description of Artificial Sequence: Synthetic oligonucleotide
  Sense strand starting at position 2297 of SEQ ID NO: 340
guaaacacacauuguagaa

SEQ ID NO: 29643 - RNA, 19 nt, Artificial Sequence
  Description of Artificial Sequence: Synthetic oligonucleotide
  Antisense strand to SEQ ID NO: 29642
uucuacaauguguguuuac

SEQ ID NO: 29644 - RNA, 19 nt, Artificial Sequence
  Description of Artificial Sequence: Synthetic oligonucleotide
  Sense strand starting at position 2437 of SEQ ID NO: 340
gguaguaucuucccauaca

SEQ ID NO: 29645 - RNA, 19 nt, Artificial Sequence
  Description of Artificial Sequence: Synthetic oligonucleotide
  Antisense strand to SEQ ID NO: 29644
uguaugggaagauacuacc

SEQ ID NO: 29646 - RNA, 19 nt, Artificial Sequence
  Description of Artificial Sequence: Synthetic oligonucleotide
  Sense strand starting at position 2593 of SEQ ID NO: 340
acacauauuccuuguugac

SEQ ID NO: 29647 - RNA, 19 nt, Artificial Sequence
  Description of Artificial Sequence: Synthetic oligonucleotide
  Antisense strand to SEQ ID NO: 29646
gucaacaaggaauaugugu

SEQ ID NO: 29648 - RNA, 19 nt, Artificial Sequence
  Description of Artificial Sequence: Synthetic oligonucleotide
  Sense strand starting at position 2799 of SEQ ID NO: 340
uuguuaugauaccuaucuu

SEQ ID NO: 29649 - RNA, 19 nt, Artificial Sequence
  Description of Artificial Sequence: Synthetic oligonucleotide
  Antisense strand to SEQ ID NO: 29648
aagauagguaucauaacaa

SEQ ID NO: 29650 - RNA, 19 nt, Artificial Sequence
  Description of Artificial Sequence: Synthetic oligonucleotide
  Sense strand starting at position 2815 of SEQ ID NO: 340
cuuguauugcaguugugua

SEQ ID NO: 29651 - RNA, 19 nt, Artificial Sequence
  Description of Artificial Sequence: Synthetic oligonucleotide
  Antisense strand to SEQ ID NO: 29650
uacacaacugcaauacaag

SEQ ID NO: 29652 - RNA, 19 nt, Artificial Sequence
  Description of Artificial Sequence: Synthetic oligonucleotide
  Sense strand starting at position 3017 of SEQ ID NO: 340
uugagagugcaauguugaa

SEQ ID NO: 29653 - RNA, 19 nt, Artificial Sequence
  Description of Artificial Sequence: Synthetic oligonucleotide
  Antisense strand to SEQ ID NO: 29652
uucaacauugcacucucaa

SEQ ID NO: 29654 - RNA, 19 nt, Artificial Sequence
  Description of Artificial Sequence: Synthetic oligonucleotide
  Sense strand starting at position 3032 of SEQ ID NO: 340
ugaaauugguagcuacaaa

SEQ ID NO: 29655 - RNA, 19 nt, Artificial Sequence
  Description of Artificial Sequence: Synthetic oligonucleotide
  Antisense strand to SEQ ID NO: 29654
uuuguagcuaccaauuuca

SEQ ID NO: 29656 - RNA, 19 nt, Artificial Sequence
  Description of Artificial Sequence: Synthetic oligonucleotide
  Sense strand starting at position 3043 of SEQ ID NO: 340
gcuacaaauuaguuguaaa

SEQ ID NO: 29657 - RNA, 19 nt, Artificial Sequence
  Description of Artificial Sequence: Synthetic oligonucleotide
  Antisense strand to SEQ ID NO: 29656
uuuacaacuaauuuguagc

SEQ ID NO: 29658 - RNA, 19 nt, Artificial Sequence
  Description of Artificial Sequence: Synthetic oligonucleotide
  Sense strand starting at position 3198 of SEQ ID NO: 340
ggcucaauagagugacucu

SEQ ID NO: 29659 - RNA, 19 nt, Artificial Sequence
  Description of Artificial Sequence: Synthetic oligonucleotide
  Antisense strand to SEQ ID NO: 29658
agagucacucuauugagcc

SEQ ID NO: 29660 - RNA, 19 nt, Artificial Sequence
  Description of Artificial Sequence: Synthetic oligonucleotide
  Sense strand starting at position 3450 of SEQ ID NO: 340
gcacaacaguaccuugaau

SEQ ID NO: 29661 - RNA, 19 nt, Artificial Sequence
  Description of Artificial Sequence: Synthetic oligonucleotide
  Antisense strand to SEQ ID NO: 29660
auucaagguacuguugugc

SEQ ID NO: 29662 - RNA, 19 nt, Artificial Sequence
  Description of Artificial Sequence: Synthetic oligonucleotide
  Sense strand starting at position 3578 of SEQ ID NO: 340
guaugauaucagcacacug

SEQ ID NO: 29663 - RNA, 19 nt, Artificial Sequence
  Description of Artificial Sequence: Synthetic oligonucleotide
  Antisense strand to SEQ ID NO: 29662
cagugugcugauaucauac

SEQ ID NO: 29664 - RNA, 19 nt, Artificial Sequence
  Description of Artificial Sequence: Synthetic oligonucleotide
  Sense strand starting at position 3632 of SEQ ID NO: 340
cccaaauagcugggcuaau

SEQ ID NO: 29665 - RNA, 19 nt, Artificial Sequence
  Description of Artificial Sequence: Synthetic oligonucleotide
  Antisense strand to SEQ ID NO: 29664
auuagcccagcuauuuggg

SEQ ID NO: 29666 - RNA, 19 nt, Artificial Sequence
  Description of Artificial Sequence: Synthetic oligonucleotide
  Sense strand starting at position 3633 of SEQ ID NO: 340
ccaaauagcugggcuaauu

SEQ ID NO: 29667 - RNA, 19 nt, Artificial Sequence
  Description of Artificial Sequence: Synthetic oligonucleotide
  Antisense strand to SEQ ID NO: 29666
aauuagcccagcuauuugg

SEQ ID NO: 29668 - RNA, 19 nt, Artificial Sequence
  Description of Artificial Sequence: Synthetic oligonucleotide
  Sense strand starting at position 3870 of SEQ ID NO: 340
cccaauaauuugggagaca

SEQ ID NO: 29669 - RNA, 19 nt, Artificial Sequence
  Description of Artificial Sequence: Synthetic oligonucleotide
  Antisense strand to SEQ ID NO: 29668
ugucucccaaauuauuggg

SEQ ID NO: 29670 - RNA, 19 nt, Artificial Sequence
  Description of Artificial Sequence: Synthetic oligonucleotide
  Sense strand starting at position 128 of SEQ ID NO: 339
agcuaaauugcuuaagcua

SEQ ID NO: 29671 - RNA, 19 nt, Artificial Sequence
  Description of Artificial Sequence: Synthetic oligonucleotide
  Antisense strand to SEQ ID NO: 29670
uagcuuaagcaauuuagcu

SEQ ID NO: 29672 - RNA, 19 nt, Artificial Sequence
  Description of Artificial Sequence: Synthetic oligonucleotide
  Sense strand starting at position 251 of SEQ ID NO: 339
gucacaaugccuuggaaua

SEQ ID NO: 29673 - RNA, 19 nt, Artificial Sequence
  Description of Artificial Sequence: Synthetic oligonucleotide
  Antisense strand to SEQ ID NO: 29672
uauuccaaggcauugugac

SEQ ID NO: 29674 - RNA, 19 nt, Artificial Sequence
  Description of Artificial Sequence: Synthetic oligonucleotide
  Sense strand starting at position 252 of SEQ ID NO: 339
ucacaaugccuuggaauaa

SEQ ID NO: 29675 - RNA, 19 nt, Artificial Sequence
  Description of Artificial Sequence: Synthetic oligonucleotide
  Antisense strand to SEQ ID NO: 29674
uuauuccaaggcauuguga

SEQ ID NO: 29676 - RNA, 19 nt, Artificial Sequence
  Description of Artificial Sequence: Synthetic oligonucleotide
  Sense strand starting at position 313 of SEQ ID NO: 339
uaagauguuugaguuacau

SEQ ID NO: 29677 - RNA, 19 nt, Artificial Sequence
  Description of Artificial Sequence: Synthetic oligonucleotide
  Antisense strand to SEQ ID NO: 29676
auguaacucaaacaucuua

SEQ ID NO: 29678 - RNA, 19 nt, Artificial Sequence
  Description of Artificial Sequence: Synthetic oligonucleotide
  Sense strand starting at position 407 of SEQ ID NO: 339
uaaauaaaugguugccuga

SEQ ID NO: 29679 - RNA, 19 nt, Artificial Sequence
  Description of Artificial Sequence: Synthetic oligonucleotide
  Antisense strand to SEQ ID NO: 29678
ucaggcaaccauuuauuua

SEQ ID NO: 29680 - RNA, 19 nt, Artificial Sequence
  Description of Artificial Sequence: Synthetic oligonucleotide
  Sense strand starting at position 409 of SEQ ID NO: 339
aauaaaugguugccugaag

SEQ ID NO: 29681 - RNA, 19 nt, Artificial Sequence
  Description of Artificial Sequence: Synthetic oligonucleotide
  Antisense strand to SEQ ID NO: 29680
cuucaggcaaccauuuauu

SEQ ID NO: 29682 - RNA, 19 nt, Artificial Sequence
  Description of Artificial Sequence: Synthetic oligonucleotide
  Sense strand starting at position 410 of SEQ ID NO: 339
auaaaugguugccugaaga

SEQ ID NO: 29683 - RNA, 19 nt, Artificial Sequence
  Description of Artificial Sequence: Synthetic oligonucleotide
  Antisense strand to SEQ ID NO: 29682
ucuucaggcaaccauuuau

SEQ ID NO: 29684 - RNA, 19 nt, Artificial Sequence
  Description of Artificial Sequence: Synthetic oligonucleotide
  Sense strand starting at position 420 of SEQ ID NO: 339
gccugaagacuuuaguaga

SEQ ID NO: 29685 - RNA, 19 nt, Artificial Sequence
  Description of Artificial Sequence: Synthetic oligonucleotide
  Antisense strand to SEQ ID NO: 29684
ucuacuaaagucuucaggc

SEQ ID NO: 29686 - RNA, 19 nt, Artificial Sequence
  Description of Artificial Sequence: Synthetic oligonucleotide
  Sense strand starting at position 811 of SEQ ID NO: 339
ggguacuguccauauggua

SEQ ID NO: 29687 - RNA, 19 nt, Artificial Sequence
  Description of Artificial Sequence: Synthetic oligonucleotide
  Antisense strand to SEQ ID NO: 29686
uaccauauggacaguaccc

SEQ ID NO: 29688 - RNA, 19 nt, Artificial Sequence
  Description of Artificial Sequence: Synthetic oligonucleotide
  Sense strand starting at position 992 of SEQ ID NO: 339
uguaguaagagacggaaau

SEQ ID NO: 29689 - RNA, 19 nt, Artificial Sequence
  Description of Artificial Sequence: Synthetic oligonucleotide
  Antisense strand to SEQ ID NO: 29688
auuuccgucucuuacuaca

SEQ ID NO: 29690 - RNA, 19 nt, Artificial Sequence
  Description of Artificial Sequence: Synthetic oligonucleotide
  Sense strand starting at position 993 of SEQ ID NO: 339
guaguaagagacggaaaua

SEQ ID NO: 29691 - RNA, 19 nt, Artificial Sequence
  Description of Artificial Sequence: Synthetic oligonucleotide
  Antisense strand to SEQ ID NO: 29690
uauuuccgucucuuacuac

SEQ ID NO: 29692 - RNA, 19 nt, Artificial Sequence
  Description of Artificial Sequence: Synthetic oligonucleotide
  Sense strand starting at position 1053 of SEQ ID NO: 339
aggugaacugccgaucuuu

SEQ ID NO: 29693 - RNA, 19 nt, Artificial Sequence
  Description of Artificial Sequence: Synthetic oligonucleotide
  Antisense strand to SEQ ID NO: 29692
aaagaucggcaguucaccu

SEQ ID NO: 29694 - RNA, 19 nt, Artificial Sequence
  Description of Artificial Sequence: Synthetic oligonucleotide
  Sense strand starting at position 1063 of SEQ ID NO: 339
ccgaucuuucaguaggagu

SEQ ID NO: 29695 - RNA, 19 nt, Artificial Sequence
  Description of Artificial Sequence: Synthetic oligonucleotide
  Antisense strand to SEQ ID NO: 29694
acuccuacugaaagaucgg

SEQ ID NO: 29696 - RNA, 19 nt, Artificial Sequence
  Description of Artificial Sequence: Synthetic oligonucleotide
  Sense strand starting at position 1320 of SEQ ID NO: 339
ccaagacugugauccuaua

SEQ ID NO: 29697 - RNA, 19 nt, Artificial Sequence
  Description of Artificial Sequence: Synthetic oligonucleotide
  Antisense strand to SEQ ID NO: 29696
uauaggaucacagucuugg

SEQ ID NO: 29698 - RNA, 19 nt, Artificial Sequence
  Description of Artificial Sequence: Synthetic oligonucleotide
  Sense strand starting at position 1328 of SEQ ID NO: 339
gugauccuauaaguaaguu

SEQ ID NO: 29699 - RNA, 19 nt, Artificial Sequence
  Description of Artificial Sequence: Synthetic oligonucleotide
  Antisense strand to SEQ ID NO: 29698
aacuuacuuauaggaucac

SEQ ID NO: 29700 - RNA, 19 nt, Artificial Sequence
  Description of Artificial Sequence: Synthetic oligonucleotide
  Sense strand starting at position 1571 of SEQ ID NO: 339
agucuaagcuacucucaga

SEQ ID NO: 29701 - RNA, 19 nt, Artificial Sequence
  Description of Artificial Sequence: Synthetic oligonucleotide
  Antisense strand to SEQ ID NO: 29700
ucugagaguagcuuagacu

SEQ ID NO: 29702 - RNA, 19 nt, Artificial Sequence
  Description of Artificial Sequence: Synthetic oligonucleotide
  Sense strand starting at position 1582 of SEQ ID NO: 339
cucucagacgaguauccuu

SEQ ID NO: 29703 - RNA, 19 nt, Artificial Sequence
  Description of Artificial Sequence: Synthetic oligonucleotide
  Antisense strand to SEQ ID NO: 29702
aaggauacucgucugagag

SEQ ID NO: 29704 - RNA, 19 nt, Artificial Sequence
  Description of Artificial Sequence: Synthetic oligonucleotide
  Sense strand starting at position 1721 of SEQ ID NO: 339
ccagcuauaccagacguuu

SEQ ID NO: 29705 - RNA, 19 nt, Artificial Sequence
  Description of Artificial Sequence: Synthetic oligonucleotide
  Antisense strand to SEQ ID NO: 29704
aaacgucugguauagcugg

SEQ ID NO: 29706 - RNA, 19 nt, Artificial Sequence
  Description of Artificial Sequence: Synthetic oligonucleotide
  Sense strand starting at position 1980 of SEQ ID NO: 339
ggccucucuaacuacgaga

SEQ ID NO: 29707 - RNA, 19 nt, Artificial Sequence
  Description of Artificial Sequence: Synthetic oligonucleotide
  Antisense strand to SEQ ID NO: 29706
ucucguaguuagagaggcc

SEQ ID NO: 29708 - RNA, 19 nt, Artificial Sequence
  Description of Artificial Sequence: Synthetic oligonucleotide
  Sense strand starting at position 2188 of SEQ ID NO: 339
gcugucucucgucagauuu

SEQ ID NO: 29709 - RNA, 19 nt, Artificial Sequence
  Description of Artificial Sequence: Synthetic oligonucleotide
  Antisense strand to SEQ ID NO: 29708
aaaucugacgagagacagc

SEQ ID NO: 29710 - RNA, 19 nt, Artificial Sequence
  Description of Artificial Sequence: Synthetic oligonucleotide
  Sense strand starting at position 2204 of SEQ ID NO: 339
uuuagaauuucuuaggaca

SEQ ID NO: 29711 - RNA, 19 nt, Artificial Sequence
  Description of Artificial Sequence: Synthetic oligonucleotide
  Antisense strand to SEQ ID NO: 29710
uguccuaagaaauucuaaa

SEQ ID NO: 29712 - RNA, 19 nt, Artificial Sequence
  Description of Artificial Sequence: Synthetic oligonucleotide
  Sense strand starting at position 2207 of SEQ ID NO: 339
agaauuucuuaggacaacu

SEQ ID NO: 29713 - RNA, 19 nt, Artificial Sequence
  Description of Artificial Sequence: Synthetic oligonucleotide
  Antisense strand to SEQ ID NO: 29712
aguuguccuaagaaauucu

SEQ ID NO: 29714 - RNA, 19 nt, Artificial Sequence
  Description of Artificial Sequence: Synthetic oligonucleotide
  Sense strand starting at position 2311 of SEQ ID NO: 339
gcuaaugaguuaccauauu

SEQ ID NO: 29715 - RNA, 19 nt, Artificial Sequence
  Description of Artificial Sequence: Synthetic oligonucleotide
  Antisense strand to SEQ ID NO: 29714
aauaugguaacucauuagc

SEQ ID NO: 29716 - RNA, 19 nt, Artificial Sequence
  Description of Artificial Sequence: Synthetic oligonucleotide
  Sense strand starting at position 2376 of SEQ ID NO: 339
ccaagagaguugccaaaga

SEQ ID NO: 29717 - RNA, 19 nt, Artificial Sequence
  Description of Artificial Sequence: Synthetic oligonucleotide
  Antisense strand to SEQ ID NO: 29716
ucuuuggcaacucucuugg

SEQ ID NO: 29718 - RNA, 19 nt, Artificial Sequence
  Description of Artificial Sequence: Synthetic oligonucleotide
  Sense strand starting at position 2411 of SEQ ID NO: 339
cuagcuuugaggcauguca

SEQ ID NO: 29719 - RNA, 19 nt, Artificial Sequence
  Description of Artificial Sequence: Synthetic oligonucleotide
  Antisense strand to SEQ ID NO: 29718
ugacaugccucaaagcuag

SEQ ID NO: 29720 - RNA, 19 nt, Artificial Sequence
  Description of Artificial Sequence: Synthetic oligonucleotide
  Sense strand starting at position 2457 of SEQ ID NO: 339
ucugcuuaucuuuauguau

SEQ ID NO: 29721 - RNA, 19 nt, Artificial Sequence
  Description of Artificial Sequence: Synthetic oligonucleotide
  Antisense strand to SEQ ID NO: 29720
auacauaaagauaagcaga

SEQ ID NO: 29722 - RNA, 19 nt, Artificial Sequence
  Description of Artificial Sequence: Synthetic oligonucleotide
  Sense strand starting at position 2496 of SEQ ID NO: 339
uuagauuguggugaaaguu

SEQ ID NO: 29723 - RNA, 19 nt, Artificial Sequence
  Description of Artificial Sequence: Synthetic oligonucleotide
  Antisense strand to SEQ ID NO: 29722
aacuuucaccacaaucuaa

SEQ ID NO: 29724 - RNA, 19 nt, Artificial Sequence
  Description of Artificial Sequence: Synthetic oligonucleotide
  Sense strand starting at position 2636 of SEQ ID NO: 339
uuucuaucacuugauguga

SEQ ID NO: 29725 - RNA, 19 nt, Artificial Sequence
  Description of Artificial Sequence: Synthetic oligonucleotide
  Antisense strand to SEQ ID NO: 29724
ucacaucaagugauagaaa

SEQ ID NO: 29726 - RNA, 19 nt, Artificial Sequence
  Description of Artificial Sequence: Synthetic oligonucleotide
  Sense strand starting at position 2892 of SEQ ID NO: 339
uccuuuaauggauguagag

SEQ ID NO: 29727 - RNA, 19 nt, Artificial Sequence
  Description of Artificial Sequence: Synthetic oligonucleotide
  Antisense strand to SEQ ID NO: 29726
cucuacauccauuaaagga

SEQ ID NO: 29728 - RNA, 19 nt, Artificial Sequence
  Description of Artificial Sequence: Synthetic oligonucleotide
  Sense strand starting at position 2894 of SEQ ID NO: 339
cuuuaauggauguagaguu

SEQ ID NO: 29729 - RNA, 19 nt, Artificial Sequence
  Description of Artificial Sequence: Synthetic oligonucleotide
  Antisense strand to SEQ ID NO: 29728
aacucuacauccauuaaag

SEQ ID NO: 29730 - RNA, 19 nt, Artificial Sequence
  Description of Artificial Sequence: Synthetic oligonucleotide
  Sense strand starting at position 2934 of SEQ ID NO: 339
ggaaguagacccuagguuu

SEQ ID NO: 29731 - RNA, 19 nt, Artificial Sequence
  Description of Artificial Sequence: Synthetic oligonucleotide
  Antisense strand to SEQ ID NO: 29730
aaaccuagggucuacuucc

SEQ ID NO: 29732 - RNA, 19 nt, Artificial Sequence
  Description of Artificial Sequence: Synthetic oligonucleotide
  Sense strand starting at position 2952 of SEQ ID NO: 339
ucagaacuccuagguuaau

SEQ ID NO: 29733 - RNA, 19 nt, Artificial Sequence
  Description of Artificial Sequence: Synthetic oligonucleotide
  Antisense strand to SEQ ID NO: 29732
auuaaccuaggaguucuga

SEQ ID NO: 29734 - RNA, 19 nt, Artificial Sequence
  Description of Artificial Sequence: Synthetic oligonucleotide
  Sense strand starting at position 2955 of SEQ ID NO: 339
gaacuccuagguuaauagu

SEQ ID NO: 29735 - RNA, 19 nt, Artificial Sequence
  Description of Artificial Sequence: Synthetic oligonucleotide
  Antisense strand to SEQ ID NO: 29734
acuauuaaccuaggaguuc

SEQ ID NO: 29736 - RNA, 19 nt, Artificial Sequence
  Description of Artificial Sequence: Synthetic oligonucleotide
  Sense strand starting at position 3145 of SEQ ID NO: 339
guacccaauauguagaguu

SEQ ID NO: 29737 - RNA, 19 nt, Artificial Sequence
  Description of Artificial Sequence: Synthetic oligonucleotide
  Antisense strand to SEQ ID NO: 29736
aacucuacauauuggguac

SEQ ID NO: 29738 - RNA, 19 nt, Artificial Sequence
  Description of Artificial Sequence: Synthetic oligonucleotide
  Sense strand starting at position 3303 of SEQ ID NO: 339
cccagaguagcugaaacua

SEQ ID NO: 29739 - RNA, 19 nt, Artificial Sequence
  Description of Artificial Sequence: Synthetic oligonucleotide
  Antisense strand to SEQ ID NO: 29738
uaguuucagcuacucuggg

SEQ ID NO: 29740 - RNA, 19 nt, Artificial Sequence
  Description of Artificial Sequence: Synthetic oligonucleotide
  Sense strand starting at position 3392 of SEQ ID NO: 339
gcuguucuccaacaacuga

SEQ ID NO: 29741 - RNA, 19 nt, Artificial Sequence
  Description of Artificial Sequence: Synthetic oligonucleotide
  Antisense strand to SEQ ID NO: 29740
ucaguuguuggagaacagc

SEQ ID NO: 29742 - RNA, 19 nt, Artificial Sequence
  Description of Artificial Sequence: Synthetic oligonucleotide
  Sense strand starting at position 3431 of SEQ ID NO: 339
ugggccucuuaaccaauau

SEQ ID NO: 29743 - RNA, 19 nt, Artificial Sequence
  Description of Artificial Sequence: Synthetic oligonucleotide
  Antisense strand to SEQ ID NO: 29742
auauugguuaagaggccca

SEQ ID NO: 29744 - RNA, 19 nt, Artificial Sequence
  Description of Artificial Sequence: Synthetic oligonucleotide
  Sense strand starting at position 3668 of SEQ ID NO: 339
ucauaugacugaguaguau

SEQ ID NO: 29745 - RNA, 19 nt, Artificial Sequence
  Description of Artificial Sequence: Synthetic oligonucleotide
  Antisense strand to SEQ ID NO: 29744
auacuacucagucauauga

SEQ ID NO: 29746 - RNA, 19 nt, Artificial Sequence
  Description of Artificial Sequence: Synthetic oligonucleotide
  Sense strand starting at position 3768 of SEQ ID NO: 339
uugcgaauugugcugcgau

SEQ ID NO: 29747 - RNA, 19 nt, Artificial Sequence
  Description of Artificial Sequence: Synthetic oligonucleotide
  Antisense strand to SEQ ID NO: 29746
aucgcagcacaauucgcaa

SEQ ID NO: 29748 - RNA, 19 nt, Artificial Sequence
  Description of Artificial Sequence: Synthetic oligonucleotide
  Sense strand starting at position 3770 of SEQ ID NO: 339
gcgaauugugcugcgauaa

SEQ ID NO: 29749 - RNA, 19 nt, Artificial Sequence
  Description of Artificial Sequence: Synthetic oligonucleotide
  Antisense strand to SEQ ID NO: 29748
uuaucgcagcacaauucgc

SEQ ID NO: 29750 - RNA, 19 nt, Artificial Sequence
  Description of Artificial Sequence: Synthetic oligonucleotide
  Sense strand starting at position 3969 of SEQ ID NO: 341
cugggacuuggccauauua

SEQ ID NO: 29751 - RNA, 19 nt, Artificial Sequence
  Description of Artificial Sequence: Synthetic oligonucleotide
  Antisense strand to SEQ ID NO: 29750
uaauauggccaagucccag

SEQ ID NO: 29752 - RNA, 19 nt, Artificial Sequence
  Description of Artificial Sequence: Synthetic oligonucleotide
  Sense strand starting at position 3891 of SEQ ID NO: 341
ucacgucuccuugaagcau

SEQ ID NO: 29753 - RNA, 19 nt, Artificial Sequence
  Description of Artificial Sequence: Synthetic oligonucleotide
  Antisense strand to SEQ ID NO: 29752
augcuucaaggagacguga

SEQ ID NO: 29754 - RNA, 19 nt, Artificial Sequence
  Description of Artificial Sequence: Synthetic oligonucleotide
  Sense strand starting at position 3834 of SEQ ID NO: 341
guaugaccauuccuuaaag

SEQ ID NO: 29755 - RNA, 19 nt, Artificial Sequence
  Description of Artificial Sequence: Synthetic oligonucleotide
  Antisense strand to SEQ ID NO: 29754
cuuuaaggaauggucauac

SEQ ID NO: 29756 - RNA, 19 nt, Artificial Sequence
  Description of Artificial Sequence: Synthetic oligonucleotide
  Sense strand starting at position 3817 of SEQ ID NO: 341
uggauagcauucuccaagu

SEQ ID NO: 29757 - RNA, 19 nt, Artificial Sequence
  Description of Artificial Sequence: Synthetic oligonucleotide
  Antisense strand to SEQ ID NO: 29756
acuuggagaaugcuaucca

SEQ ID NO: 29758 - RNA, 19 nt, Artificial Sequence
  Description of Artificial Sequence: Synthetic oligonucleotide
  Sense strand starting at position 3809 of SEQ ID NO: 341
aacaguucuggauagcauu

SEQ ID NO: 29759 - RNA, 19 nt, Artificial Sequence
  Description of Artificial Sequence: Synthetic oligonucleotide
  Antisense strand to SEQ ID NO: 29758
aaugcuauccagaacuguu

SEQ ID NO: 29760 - RNA, 19 nt, Artificial Sequence
  Description of Artificial Sequence: Synthetic oligonucleotide
  Sense strand starting at position 3765 of SEQ ID NO: 341
guuaauagcaucuggaaga

SEQ ID NO: 29761 - RNA, 19 nt, Artificial Sequence
  Description of Artificial Sequence: Synthetic oligonucleotide
  Antisense strand to SEQ ID NO: 29760
ucuuccagaugcuauuaac

SEQ ID NO: 29762 - RNA, 19 nt, Artificial Sequence
  Description of Artificial Sequence: Synthetic oligonucleotide
  Sense strand starting at position 3511 of SEQ ID NO: 341
aguauuaggaggugauuag

SEQ ID NO: 29763 - RNA, 19 nt, Artificial Sequence
  Description of Artificial Sequence: Synthetic oligonucleotide
  Antisense strand to SEQ ID NO: 29762
cuaaucaccuccuaauacu

SEQ ID NO: 29764 - RNA, 19 nt, Artificial Sequence
  Description of Artificial Sequence: Synthetic oligonucleotide
  Sense strand starting at position 3509 of SEQ ID NO: 341
auaguauuaggaggugauu

SEQ ID NO: 29765 - RNA, 19 nt, Artificial Sequence
  Description of Artificial Sequence: Synthetic oligonucleotide
  Antisense strand to SEQ ID NO: 29764
aaucaccuccuaauacuau

SEQ ID NO: 29766 - RNA, 19 nt, Artificial Sequence
  Description of Artificial Sequence: Synthetic oligonucleotide
  Sense strand starting at position 3493 of SEQ ID NO: 341
ucuaacccucaaggugaua

SEQ ID NO: 29767 - RNA, 19 nt, Artificial Sequence
  Description of Artificial Sequence: Synthetic oligonucleotide
  Antisense strand to SEQ ID NO: 29766
uaucaccuugaggguuaga

SEQ ID NO: 29768 - RNA, 19 nt, Artificial Sequence
  Description of Artificial Sequence: Synthetic oligonucleotide
  Sense strand starting at position 3409 of SEQ ID NO: 341
guggaucuuggcuaaguca

SEQ ID NO: 29769 - RNA, 19 nt, Artificial Sequence
  Description of Artificial Sequence: Synthetic oligonucleotide
  Antisense strand to SEQ ID NO: 29768
ugacuuagccaagauccac

SEQ ID NO: 29770 - RNA, 19 nt, Artificial Sequence
  Description of Artificial Sequence: Synthetic oligonucleotide
  Sense strand starting at position 3384 of SEQ ID NO: 341
agcucugucguguccacau

SEQ ID NO: 29771 - RNA, 19 nt, Artificial Sequence
  Description of Artificial Sequence: Synthetic oligonucleotide
  Antisense strand to SEQ ID NO: 29770
auguggacacgacagagcu

SEQ ID NO: 29772 - RNA, 19 nt, Artificial Sequence
  Description of Artificial Sequence: Synthetic oligonucleotide
  Sense strand starting at position 3354 of SEQ ID NO: 341
aggauagagugcuagaaag

SEQ ID NO: 29773 - RNA, 19 nt, Artificial Sequence
  Description of Artificial Sequence: Synthetic oligonucleotide
  Antisense strand to SEQ ID NO: 29772
cuuucuagcacucuauccu

SEQ ID NO: 29774 - RNA, 19 nt, Artificial Sequence
  Description of Artificial Sequence: Synthetic oligonucleotide
  Sense strand starting at position 3295 of SEQ ID NO: 341
gcagauuccuagcuuaaga

SEQ ID NO: 29775 - RNA, 19 nt, Artificial Sequence
  Description of Artificial Sequence: Synthetic oligonucleotide
  Antisense strand to SEQ ID NO: 29774
ucuuaagcuaggaaucugc

SEQ ID NO: 29776 - RNA, 19 nt, Artificial Sequence
  Description of Artificial Sequence: Synthetic oligonucleotide
  Sense strand starting at position 3064 of SEQ ID NO: 341
gagagauccugcuucuaua

SEQ ID NO: 29777 - RNA, 19 nt, Artificial Sequence
  Description of Artificial Sequence: Synthetic oligonucleotide
  Antisense strand to SEQ ID NO: 29776
uauagaagcaggaucucuc

SEQ ID NO: 29778 - RNA, 19 nt, Artificial Sequence
  Description of Artificial Sequence: Synthetic oligonucleotide
  Sense strand starting at position 2933 of SEQ ID NO: 341
caugcuaagcgucaguuaa

SEQ ID NO: 29779 - RNA, 19 nt, Artificial Sequence
  Description of Artificial Sequence: Synthetic oligonucleotide
  Antisense strand to SEQ ID NO: 29778
uuaacugacgcuuagcaug

SEQ ID NO: 29780 - RNA, 19 nt, Artificial Sequence
  Description of Artificial Sequence: Synthetic oligonucleotide
  Sense strand starting at position 2932 of SEQ ID NO: 341
ccaugcuaagcgucaguua

SEQ ID NO: 29781 - RNA, 19 nt, Artificial Sequence
  Description of Artificial Sequence: Synthetic oligonucleotide
  Antisense strand to SEQ ID NO: 29780
uaacugacgcuuagcaugg

SEQ ID NO: 29782 - RNA, 19 nt, Artificial Sequence
  Description of Artificial Sequence: Synthetic oligonucleotide
  Sense strand starting at position 2871 of SEQ ID NO: 341
agaugaaauuaugcaucca

SEQ ID NO: 29783 - RNA, 19 nt, Artificial Sequence
  Description of Artificial Sequence: Synthetic oligonucleotide
  Antisense strand to SEQ ID NO: 29782
uggaugcauaauuucaucu

SEQ ID NO: 29784 - RNA, 19 nt, Artificial Sequence
  Description of Artificial Sequence: Synthetic oligonucleotide
  Sense strand starting at position 2860 of SEQ ID NO: 341
uugugagggucagaugaaa

SEQ ID NO: 29785 - RNA, 19 nt, Artificial Sequence
  Description of Artificial Sequence: Synthetic oligonucleotide
  Antisense strand to SEQ ID NO: 29784
uuucaucugacccucacaa

SEQ ID NO: 29786 - RNA, 19 nt, Artificial Sequence
  Description of Artificial Sequence: Synthetic oligonucleotide
  Sense strand starting at position 2855 of SEQ ID NO: 341
gacuguugugagggucaga

SEQ ID NO: 29787 - RNA, 19 nt, Artificial Sequence
  Description of Artificial Sequence: Synthetic oligonucleotide
  Antisense strand to SEQ ID NO: 29786
ucugacccucacaacaguc

SEQ ID NO: 29788 - RNA, 19 nt, Artificial Sequence
  Description of Artificial Sequence: Synthetic oligonucleotide
  Sense strand starting at position 2773 of SEQ ID NO: 341
gggcaaauucccuaaguuu

SEQ ID NO: 29789 - RNA, 19 nt, Artificial Sequence
  Description of Artificial Sequence: Synthetic oligonucleotide
  Antisense strand to SEQ ID NO: 29788
aaacuuagggaauuugccc

SEQ ID NO: 29790 - RNA, 19 nt, Artificial Sequence
  Description of Artificial Sequence: Synthetic oligonucleotide
  Sense strand starting at position 2772 of SEQ ID NO: 341
ugggcaaauucccuaaguu

SEQ ID NO: 29791 - RNA, 19 nt, Artificial Sequence
  Description of Artificial Sequence: Synthetic oligonucleotide
  Antisense strand to SEQ ID NO: 29790
aacuuagggaauuugccca

SEQ ID NO: 29792 - RNA, 19 nt, Artificial Sequence
  Description of Artificial Sequence: Synthetic oligonucleotide
  Sense strand starting at position 2763 of SEQ ID NO: 341
augggcucuugggcaaauu

SEQ ID NO: 29793 - RNA, 19 nt, Artificial Sequence
  Description of Artificial Sequence: Synthetic oligonucleotide
  Antisense strand to SEQ ID NO: 29792
aauuugcccaagagcccau

SEQ ID NO: 29794 - RNA, 19 nt, Artificial Sequence
  Description of Artificial Sequence: Synthetic oligonucleotide
  Sense strand starting at position 2689 of SEQ ID NO: 341
acccuuggcuaaugggaaa

SEQ ID NO: 29795 - RNA, 19 nt, Artificial Sequence
  Description of Artificial Sequence: Synthetic oligonucleotide
  Antisense strand to SEQ ID NO: 29794
uuucccauuagccaagggu

SEQ ID NO: 29796 - RNA, 19 nt, Artificial Sequence
  Description of Artificial Sequence: Synthetic oligonucleotide
  Sense strand starting at position 2663 of SEQ ID NO: 341
gugggauucucguuccuug

SEQ ID NO: 29797 - RNA, 19 nt, Artificial Sequence
  Description of Artificial Sequence: Synthetic oligonucleotide
  Antisense strand to SEQ ID NO: 29796
caaggaacgagaaucccac

SEQ ID NO: 29798 - RNA, 19 nt, Artificial Sequence
  Description of Artificial Sequence: Synthetic oligonucleotide
  Sense strand starting at position 2611 of SEQ ID NO: 341
uagugaacaccauguugaa

SEQ ID NO: 29799 - RNA, 19 nt, Artificial Sequence
  Description of Artificial Sequence: Synthetic oligonucleotide
  Antisense strand to SEQ ID NO: 29798
uucaacaugguguucacua

SEQ ID NO: 29800 - RNA, 19 nt, Artificial Sequence
  Description of Artificial Sequence: Synthetic oligonucleotide
  Sense strand starting at position 2601 of SEQ ID NO: 341
gcaauagcauuagugaaca

SEQ ID NO: 29801 - RNA, 19 nt, Artificial Sequence
  Description of Artificial Sequence: Synthetic oligonucleotide
  Antisense strand to SEQ ID NO: 29800
uguucacuaaugcuauugc

SEQ ID NO: 29802 - RNA, 19 nt, Artificial Sequence
  Description of Artificial Sequence: Synthetic oligonucleotide
  Sense strand starting at position 2599 of SEQ ID NO: 341
cugcaauagcauuagugaa

SEQ ID NO: 29803 - RNA, 19 nt, Artificial Sequence
  Description of Artificial Sequence: Synthetic oligonucleotide
  Antisense strand to SEQ ID NO: 29802
uucacuaaugcuauugcag

SEQ ID NO: 29804 - RNA, 19 nt, Artificial Sequence
  Description of Artificial Sequence: Synthetic oligonucleotide
  Sense strand starting at position 2587 of SEQ ID NO: 341
gcgugcacauuucugcaau

SEQ ID NO: 29805 - RNA, 19 nt, Artificial Sequence
  Description of Artificial Sequence: Synthetic oligonucleotide
  Antisense strand to SEQ ID NO: 29804
auugcagaaaugugcacgc

SEQ ID NO: 29806 - RNA, 19 nt, Artificial Sequence
  Description of Artificial Sequence: Synthetic oligonucleotide
  Sense strand starting at position 2578 of SEQ ID NO: 341
gugaaugcugcgugcacau

SEQ ID NO: 29807 - RNA, 19 nt, Artificial Sequence
  Description of Artificial Sequence: Synthetic oligonucleotide
  Antisense strand to SEQ ID NO: 29806
augugcacgcagcauucac

SEQ ID NO: 29808 - RNA, 19 nt, Artificial Sequence
  Description of Artificial Sequence: Synthetic oligonucleotide
  Sense strand starting at position 2577 of SEQ ID NO: 341
ugugaaugcugcgugcaca

SEQ ID NO: 29809 - RNA, 19 nt, Artificial Sequence
  Description of Artificial Sequence: Synthetic oligonucleotide
  Antisense strand to SEQ ID NO: 29808
ugugcacgcagcauucaca

SEQ ID NO: 29810 - RNA, 19 nt, Artificial Sequence
  Description of Artificial Sequence: Synthetic oligonucleotide
  Sense strand starting at position 2482 of SEQ ID NO: 341
cccaaaguaugcuuuaaug

SEQ ID NO: 29811 - RNA, 19 nt, Artificial Sequence
  Description of Artificial Sequence: Synthetic oligonucleotide
  Antisense strand to SEQ ID NO: 29810
cauuaaagcauacuuuggg

SEQ ID NO: 29812 - RNA, 19 nt, Artificial Sequence
  Description of Artificial Sequence: Synthetic oligonucleotide
  Sense strand starting at position 2480 of SEQ ID NO: 341
agcccaaaguaugcuuuaa

SEQ ID NO: 29813 - RNA, 19 nt, Artificial Sequence
  Description of Artificial Sequence: Synthetic oligonucleotide
  Antisense strand to SEQ ID NO: 29812
uuaaagcauacuuugggcu

SEQ ID NO: 29814 - RNA, 19 nt, Artificial Sequence
  Description of Artificial Sequence: Synthetic oligonucleotide
  Sense strand starting at position 2416 of SEQ ID NO: 341
cugcaauguggucaaauag

SEQ ID NO: 29815 - RNA, 19 nt, Artificial Sequence
  Description of Artificial Sequence: Synthetic oligonucleotide
  Antisense strand to SEQ ID NO: 29814
cuauuugaccacauugcag

SEQ ID NO: 29816 - RNA, 19 nt, Artificial Sequence
  Description of Artificial Sequence: Synthetic oligonucleotide
  Sense strand starting at position 2415 of SEQ ID NO: 341
ucugcaauguggucaaaua

SEQ ID NO: 29817 - RNA, 19 nt, Artificial Sequence
  Description of Artificial Sequence: Synthetic oligonucleotide
  Antisense strand to SEQ ID NO: 29816
uauuugaccacauugcaga

SEQ ID NO: 29818 - RNA, 19 nt, Artificial Sequence
  Description of Artificial Sequence: Synthetic oligonucleotide
  Sense strand starting at position 2406 of SEQ ID NO: 341
guguguaccucugcaaugu

SEQ ID NO: 29819 - RNA, 19 nt, Artificial Sequence
  Description of Artificial Sequence: Synthetic oligonucleotide
  Antisense strand to SEQ ID NO: 29818
acauugcagagguacacac

SEQ ID NO: 29820 - RNA, 19 nt, Artificial Sequence
  Description of Artificial Sequence: Synthetic oligonucleotide
  Sense strand starting at position 2404 of SEQ ID NO: 341
acguguguaccucugcaau

SEQ ID NO: 29821 - RNA, 19 nt, Artificial Sequence
  Description of Artificial Sequence: Synthetic oligonucleotide
  Antisense strand to SEQ ID NO: 29820
auugcagagguacacacgu

SEQ ID NO: 29822 - RNA, 19 nt, Artificial Sequence
  Description of Artificial Sequence: Synthetic oligonucleotide
  Sense strand starting at position 2240 of SEQ ID NO: 341
accaguguuucagggagaa

SEQ ID NO: 29823 - RNA, 19 nt, Artificial Sequence
  Description of Artificial Sequence: Synthetic oligonucleotide
  Antisense strand to SEQ ID NO: 29822
uucucccugaaacacuggu

SEQ ID NO: 29824 - RNA, 19 nt, Artificial Sequence
  Description of Artificial Sequence: Synthetic oligonucleotide
  Sense strand starting at position 2197 of SEQ ID NO: 341
aaaucagggugacauuuaa

SEQ ID NO: 29825 - RNA, 19 nt, Artificial Sequence
  Description of Artificial Sequence: Synthetic oligonucleotide
  Antisense strand to SEQ ID NO: 29824
uuaaaugucacccugauuu

SEQ ID NO: 29826 - RNA, 19 nt, Artificial Sequence
  Description of Artificial Sequence: Synthetic oligonucleotide
  Sense strand starting at position 2192 of SEQ ID NO: 341
guaggaaaucagggugaca

SEQ ID NO: 29827 - RNA, 19 nt, Artificial Sequence
  Description of Artificial Sequence: Synthetic oligonucleotide
  Antisense strand to SEQ ID NO: 29826
ugucacccugauuuccuac

SEQ ID NO: 29828 - RNA, 19 nt, Artificial Sequence
  Description of Artificial Sequence: Synthetic oligonucleotide
  Sense strand starting at position 2184 of SEQ ID NO: 341
gggaauauguaggaaauca

SEQ ID NO: 29829 - RNA, 19 nt, Artificial Sequence
  Description of Artificial Sequence: Synthetic oligonucleotide
  Antisense strand to SEQ ID NO: 29828
ugauuuccuacauauuccc

SEQ ID NO: 29830 - RNA, 19 nt, Artificial Sequence
  Description of Artificial Sequence: Synthetic oligonucleotide
  Sense strand starting at position 30 of SEQ ID NO: 342
uguggcaaugucuaguaaa

SEQ ID NO: 29831 - RNA, 19 nt, Artificial Sequence
  Description of Artificial Sequence: Synthetic oligonucleotide
  Antisense strand to SEQ ID NO: 29830
uuuacuagacauugccaca

SEQ ID NO: 29832 - RNA, 19 nt, Artificial Sequence
  Description of Artificial Sequence: Synthetic oligonucleotide
  Sense strand starting at position 50 of SEQ ID NO: 342
uugagaauguacccaguaa

SEQ ID NO: 29833 - RNA, 19 nt, Artificial Sequence
  Description of Artificial Sequence: Synthetic oligonucleotide
  Antisense strand to SEQ ID NO: 29832
uuacuggguacauucucaa

SEQ ID NO: 29834 - RNA, 19 nt, Artificial Sequence
  Description of Artificial Sequence: Synthetic oligonucleotide
  Sense strand starting at position 183 of SEQ ID NO: 342
ugugcaucucuguaagaau

SEQ ID NO: 29835 - RNA, 19 nt, Artificial Sequence
  Description of Artificial Sequence: Synthetic oligonucleotide
  Antisense strand to SEQ ID NO: 29834
auucuuacagagaugcaca

SEQ ID NO: 29836 - RNA, 19 nt, Artificial Sequence
  Description of Artificial Sequence: Synthetic oligonucleotide
  Sense strand starting at position 270 of SEQ ID NO: 342
auucuuauauuggcaugaa

SEQ ID NO: 29837 - RNA, 19 nt, Artificial Sequence
  Description of Artificial Sequence: Synthetic oligonucleotide
  Antisense strand to SEQ ID NO: 29836
uucaugccaauauaagaau

SEQ ID NO: 29838 - RNA, 19 nt, Artificial Sequence
  Description of Artificial Sequence: Synthetic oligonucleotide
  Sense strand starting at position 273 of SEQ ID NO: 342
cuuauauuggcaugaauag

SEQ ID NO: 29839 - RNA, 19 nt, Artificial Sequence
  Description of Artificial Sequence: Synthetic oligonucleotide
  Antisense strand to SEQ ID NO: 29838
cuauucaugccaauauaag

SEQ ID NO: 29840 - RNA, 19 nt, Artificial Sequence
  Description of Artificial Sequence: Synthetic oligonucleotide
  Sense strand starting at position 274 of SEQ ID NO: 342
uuauauuggcaugaauagu

SEQ ID NO: 29841 - RNA, 19 nt, Artificial Sequence
  Description of Artificial Sequence: Synthetic oligonucleotide
  Antisense strand to SEQ ID NO: 29840
acuauucaugccaauauaa

SEQ ID NO: 29842 - RNA, 19 nt, Artificial Sequence
  Description of Artificial Sequence: Synthetic oligonucleotide
  Sense strand starting at position 280 of SEQ ID NO: 342
uggcaugaauaguucuaaa

SEQ ID NO: 29843 - RNA, 19 nt, Artificial Sequence
  Description of Artificial Sequence: Synthetic oligonucleotide
  Antisense strand to SEQ ID NO: 29842
uuuagaacuauucaugcca

SEQ ID NO: 29844 - RNA, 19 nt, Artificial Sequence
  Description of Artificial Sequence: Synthetic oligonucleotide
  Sense strand starting at position 425 of SEQ ID NO: 342
guuguccauggagaaguaa

SEQ ID NO: 29845 - RNA, 19 nt, Artificial Sequence
  Description of Artificial Sequence: Synthetic oligonucleotide
  Antisense strand to SEQ ID NO: 29844
uuacuucuccauggacaac

SEQ ID NO: 29846 - RNA, 19 nt, Artificial Sequence
  Description of Artificial Sequence: Synthetic oligonucleotide
  Sense strand starting at position 566 of SEQ ID NO: 342
ucaauauuggcaggguaaa

SEQ ID NO: 29847 - RNA, 19 nt, Artificial Sequence
  Description of Artificial Sequence: Synthetic oligonucleotide
  Antisense strand to SEQ ID NO: 29846
uuuacccugccaauauuga

SEQ ID NO: 29848 - RNA, 19 nt, Artificial Sequence
  Description of Artificial Sequence: Synthetic oligonucleotide
  Sense strand starting at position 567 of SEQ ID NO: 342
caauauuggcaggguaaag

SEQ ID NO: 29849 - RNA, 19 nt, Artificial Sequence
  Description of Artificial Sequence: Synthetic oligonucleotide
  Antisense strand to SEQ ID NO: 29848
cuuuacccugccaauauug

SEQ ID NO: 29850 - RNA, 19 nt, Artificial Sequence
  Description of Artificial Sequence: Synthetic oligonucleotide
  Sense strand starting at position 600 of SEQ ID NO: 342
uucucaaguugauuguaau

SEQ ID NO: 29851 - RNA, 19 nt, Artificial Sequence
  Description of Artificial Sequence: Synthetic oligonucleotide
  Antisense strand to SEQ ID NO: 29850
auuacaaucaacuugagaa

SEQ ID NO: 29852 - RNA, 19 nt, Artificial Sequence
  Description of Artificial Sequence: Synthetic oligonucleotide
  Sense strand starting at position 601 of SEQ ID NO: 342
ucucaaguugauuguaauc

SEQ ID NO: 29853 - RNA, 19 nt, Artificial Sequence
  Description of Artificial Sequence: Synthetic oligonucleotide
  Antisense strand to SEQ ID NO: 29852
gauuacaaucaacuugaga

SEQ ID NO: 29854 - RNA, 19 nt, Artificial Sequence
  Description of Artificial Sequence: Synthetic oligonucleotide
  Sense strand starting at position 610 of SEQ ID NO: 342
gauuguaaucguugagaga

SEQ ID NO: 29855 - RNA, 19 nt, Artificial Sequence
  Description of Artificial Sequence: Synthetic oligonucleotide
  Antisense strand to SEQ ID NO: 29854
ucucucaacgauuacaauc

SEQ ID NO: 29856 - RNA, 19 nt, Artificial Sequence
  Description of Artificial Sequence: Synthetic oligonucleotide
  Sense strand starting at position 611 of SEQ ID NO: 342
auuguaaucguugagagaa

SEQ ID NO: 29857 - RNA, 19 nt, Artificial Sequence
  Description of Artificial Sequence: Synthetic oligonucleotide
  Antisense strand to SEQ ID NO: 29856
uucucucaacgauuacaau

SEQ ID NO: 29858 - RNA, 19 nt, Artificial Sequence
  Description of Artificial Sequence: Synthetic oligonucleotide
  Sense strand starting at position 802 of SEQ ID NO: 342
uugggucucuuaccacaaa

SEQ ID NO: 29859 - RNA, 19 nt, Artificial Sequence
  Description of Artificial Sequence: Synthetic oligonucleotide
  Antisense strand to SEQ ID NO: 29858
uuugugguaagagacccaa

SEQ ID NO: 29860 - RNA, 19 nt, Artificial Sequence
  Description of Artificial Sequence: Synthetic oligonucleotide
  Sense strand starting at position 848 of SEQ ID NO: 342
acuaacuuggcaugugauu

SEQ ID NO: 29861 - RNA, 19 nt, Artificial Sequence
  Description of Artificial Sequence: Synthetic oligonucleotide
  Antisense strand to SEQ ID NO: 29860
aaucacaugccaaguuagu

SEQ ID NO: 29862 - RNA, 19 nt, Artificial Sequence
  Description of Artificial Sequence: Synthetic oligonucleotide
  Sense strand starting at position 944 of SEQ ID NO: 342
caaguauggcucgcuguca

SEQ ID NO: 29863 - RNA, 19 nt, Artificial Sequence
  Description of Artificial Sequence: Synthetic oligonucleotide
  Antisense strand to SEQ ID NO: 29862
ugacagcgagccauacuug

SEQ ID NO: 29864 - RNA, 19 nt, Artificial Sequence
  Description of Artificial Sequence: Synthetic oligonucleotide
  Sense strand starting at position 1097 of SEQ ID NO: 342
cucaacucugcugacagau

SEQ ID NO: 29865 - RNA, 19 nt, Artificial Sequence
  Description of Artificial Sequence: Synthetic oligonucleotide
  Antisense strand to SEQ ID NO: 29864
aucugucagcagaguugag

SEQ ID NO: 29866 - RNA, 19 nt, Artificial Sequence
  Description of Artificial Sequence: Synthetic oligonucleotide
  Sense strand starting at position 1106 of SEQ ID NO: 342
gcugacagauucuuuaacu

SEQ ID NO: 29867 - RNA, 19 nt, Artificial Sequence
  Description of Artificial Sequence: Synthetic oligonucleotide
  Antisense strand to SEQ ID NO: 29866
aguuaaagaaucugucagc

SEQ ID NO: 29868 - RNA, 19 nt, Artificial Sequence
  Description of Artificial Sequence: Synthetic oligonucleotide
  Sense strand starting at position 1186 of SEQ ID NO: 342
cucugaucugggugguaca

SEQ ID NO: 29869 - RNA, 19 nt, Artificial Sequence
  Description of Artificial Sequence: Synthetic oligonucleotide
  Antisense strand to SEQ ID NO: 29868
uguaccacccagaucagag

SEQ ID NO: 29870 - RNA, 19 nt, Artificial Sequence
  Description of Artificial Sequence: Synthetic oligonucleotide
  Sense strand starting at position 1464 of SEQ ID NO: 342
ugcugugugcgggugaaau

SEQ ID NO: 29871 - RNA, 19 nt, Artificial Sequence
  Description of Artificial Sequence: Synthetic oligonucleotide
  Antisense strand to SEQ ID NO: 29870
auuucacccgcacacagca

SEQ ID NO: 29872 - RNA, 19 nt, Artificial Sequence
  Description of Artificial Sequence: Synthetic oligonucleotide
  Sense strand starting at position 2097 of SEQ ID NO: 342
ggugguuacggcuaaccaa

SEQ ID NO: 29873 - RNA, 19 nt, Artificial Sequence
  Description of Artificial Sequence: Synthetic oligonucleotide
  Antisense strand to SEQ ID NO: 29872
uugguuagccguaaccacc

SEQ ID NO: 29874 - RNA, 19 nt, Artificial Sequence
  Description of Artificial Sequence: Synthetic oligonucleotide
  Sense strand starting at position 2239 of SEQ ID NO: 342
gauugaugauugccaccuu

SEQ ID NO: 29875 - RNA, 19 nt, Artificial Sequence
  Description of Artificial Sequence: Synthetic oligonucleotide
  Antisense strand to SEQ ID NO: 29874
aagguggcaaucaucaauc

SEQ ID NO: 29876 - RNA, 19 nt, Artificial Sequence
  Description of Artificial Sequence: Synthetic oligonucleotide
  Sense strand starting at position 2379 of SEQ ID NO: 342
cugauuaccgaggagaugu

SEQ ID NO: 29877 - RNA, 19 nt, Artificial Sequence
  Description of Artificial Sequence: Synthetic oligonucleotide
  Antisense strand to SEQ ID NO: 29876
acaucuccucgguaaucag

SEQ ID NO: 29878 - RNA, 19 nt, Artificial Sequence
  Description of Artificial Sequence: Synthetic oligonucleotide
  Sense strand starting at position 2425 of SEQ ID NO: 342
cagguauuacauuagcaag

SEQ ID NO: 29879 - RNA, 19 nt, Artificial Sequence
  Description of Artificial Sequence: Synthetic oligonucleotide
  Antisense strand to SEQ ID NO: 29878
cuugcuaauguaauaccug

SEQ ID NO: 29880 - RNA, 19 nt, Artificial Sequence
  Description of Artificial Sequence: Synthetic oligonucleotide
  Sense strand starting at position 2427 of SEQ ID NO: 342
gguauuacauuagcaagga

SEQ ID NO: 29881 - RNA, 19 nt, Artificial Sequence
  Description of Artificial Sequence: Synthetic oligonucleotide
  Antisense strand to SEQ ID NO: 29880
uccuugcuaauguaauacc

SEQ ID NO: 29882 - RNA, 19 nt, Artificial Sequence
  Description of Artificial Sequence: Synthetic oligonucleotide
  Sense strand starting at position 2431 of SEQ ID NO: 342
uuacauuagcaaggauuga

SEQ ID NO: 29883 - RNA, 19 nt, Artificial Sequence
  Description of Artificial Sequence: Synthetic oligonucleotide
  Antisense strand to SEQ ID NO: 29882
ucaauccuugcuaauguaa

SEQ ID NO: 29884 - RNA, 19 nt, Artificial Sequence
  Description of Artificial Sequence: Synthetic oligonucleotide
  Sense strand starting at position 2639 of SEQ ID NO: 342
uucuaagugcuggagcaaa

SEQ ID NO: 29885 - RNA, 19 nt, Artificial Sequence
  Description of Artificial Sequence: Synthetic oligonucleotide
  Antisense strand to SEQ ID NO: 29884
uuugcuccagcacuuagaa

SEQ ID NO: 29886 - RNA, 19 nt, Artificial Sequence
  Description of Artificial Sequence: Synthetic oligonucleotide
  Sense strand starting at position 2705 of SEQ ID NO: 342
ccuguuuggguccacuauu

SEQ ID NO: 29887 - RNA, 19 nt, Artificial Sequence
  Description of Artificial Sequence: Synthetic oligonucleotide
  Antisense strand to SEQ ID NO: 29886
aauaguggacccaaacagg

SEQ ID NO: 29888 - RNA, 19 nt, Artificial Sequence
  Description of Artificial Sequence: Synthetic oligonucleotide
  Sense strand starting at position 2815 of SEQ ID NO: 342
aacuguaaaucguuaacag

SEQ ID NO: 29889 - RNA, 19 nt, Artificial Sequence
  Description of Artificial Sequence: Synthetic oligonucleotide
  Antisense strand to SEQ ID NO: 29888
cuguuaacgauuuacaguu

SEQ ID NO: 29890 - RNA, 19 nt, Artificial Sequence
  Description of Artificial Sequence: Synthetic oligonucleotide
  Sense strand starting at position 3365 of SEQ ID NO: 342
gagcaauugcgcccagcuu

SEQ ID NO: 29891 - RNA, 19 nt, Artificial Sequence
  Description of Artificial Sequence: Synthetic oligonucleotide
  Antisense strand to SEQ ID NO: 29890
aagcugggcgcaauugcuc

SEQ ID NO: 29892 - RNA, 19 nt, Artificial Sequence
  Description of Artificial Sequence: Synthetic oligonucleotide
  Sense strand starting at position 3404 of SEQ ID NO: 342
acguuuauacuuuagcaau

SEQ ID NO: 29893 - RNA, 19 nt, Artificial Sequence
  Description of Artificial Sequence: Synthetic oligonucleotide
  Antisense strand to SEQ ID NO: 29892
auugcuaaaguauaaacgu

SEQ ID NO: 29894 - RNA, 19 nt, Artificial Sequence
  Description of Artificial Sequence: Synthetic oligonucleotide
  Sense strand starting at position 3415 of SEQ ID NO: 342
uuagcaaucagaggaaagu

SEQ ID NO: 29895 - RNA, 19 nt, Artificial Sequence
  Description of Artificial Sequence: Synthetic oligonucleotide
  Antisense strand to SEQ ID NO: 29894
acuuuccucugauugcuaa

SEQ ID NO: 29896 - RNA, 19 nt, Artificial Sequence
  Description of Artificial Sequence: Synthetic oligonucleotide
  Sense strand starting at position 3467 of SEQ ID NO: 342
ugcugauucgauuauuauu

SEQ ID NO: 29897 - RNA, 19 nt, Artificial Sequence
  Description of Artificial Sequence: Synthetic oligonucleotide
  Antisense strand to SEQ ID NO: 29896
aauaauaaucgaaucagca

SEQ ID NO: 29898 - RNA, 19 nt, Artificial Sequence
  Description of Artificial Sequence: Synthetic oligonucleotide
  Sense strand starting at position 3524 of SEQ ID NO: 342
ugauguaguacugguauuu

SEQ ID NO: 29899 - RNA, 19 nt, Artificial Sequence
  Description of Artificial Sequence: Synthetic oligonucleotide
  Antisense strand to SEQ ID NO: 29898
aaauaccaguacuacauca

SEQ ID NO: 29900 - RNA, 19 nt, Artificial Sequence
  Description of Artificial Sequence: Synthetic oligonucleotide
  Sense strand starting at position 3546 of SEQ ID NO: 342
auuugugucacaugguaug

SEQ ID NO: 29901 - RNA, 19 nt, Artificial Sequence
  Description of Artificial Sequence: Synthetic oligonucleotide
  Antisense strand to SEQ ID NO: 29900
cauaccaugugacacaaau

SEQ ID NO: 29902 - RNA, 19 nt, Artificial Sequence
  Description of Artificial Sequence: Synthetic oligonucleotide
  Sense strand starting at position 3735 of SEQ ID NO: 342
gugaugaguugguuuggga

SEQ ID NO: 29903 - RNA, 19 nt, Artificial Sequence
  Description of Artificial Sequence: Synthetic oligonucleotide
  Antisense strand to SEQ ID NO: 29902
ucccaaaccaacucaucac

SEQ ID NO: 29904 - RNA, 19 nt, Artificial Sequence
  Description of Artificial Sequence: Synthetic oligonucleotide
  Sense strand starting at position 3888 of SEQ ID NO: 342
agaauuguccagugagcaa

SEQ ID NO: 29905 - RNA, 19 nt, Artificial Sequence
  Description of Artificial Sequence: Synthetic oligonucleotide
  Antisense strand to SEQ ID NO: 29904
uugcucacuggacaauucu

SEQ ID NO: 29906 - RNA, 19 nt, Artificial Sequence
  Description of Artificial Sequence: Synthetic oligonucleotide
  Sense strand starting at position 3936 of SEQ ID NO: 342
gagauaccaguuugggauu

SEQ ID NO: 29907 - RNA, 19 nt, Artificial Sequence
  Description of Artificial Sequence: Synthetic oligonucleotide
  Antisense strand to SEQ ID NO: 29906
aaucccaaacugguaucuc

SEQ ID NO: 29908 - RNA, 19 nt, Artificial Sequence
  Description of Artificial Sequence: Synthetic oligonucleotide
  Sense strand starting at position 3955 of SEQ ID NO: 342
cuacauucuuuauugggaa

SEQ ID NO: 29909 - RNA, 19 nt, Artificial Sequence
  Description of Artificial Sequence: Synthetic oligonucleotide
  Antisense strand to SEQ ID NO: 29908
uucccaauaaagaauguag

SEQ ID NO: 29910 - RNA, 19 nt, Artificial Sequence
  Description of Artificial Sequence: Synthetic oligonucleotide
  Sense strand starting at position 3962 of SEQ ID NO: 343
gggccuaacugcgauauau

SEQ ID NO: 29911 - RNA, 19 nt, Artificial Sequence
  Description of Artificial Sequence: Synthetic oligonucleotide
  Antisense strand to SEQ ID NO: 29910
auauaucgcaguuaggccc

SEQ ID NO: 29912 - RNA, 19 nt, Artificial Sequence
  Description of Artificial Sequence: Synthetic oligonucleotide
  Sense strand starting at position 3892 of SEQ ID NO: 343
cggccauggacugguucua

SEQ ID NO: 29913 - RNA, 19 nt, Artificial Sequence
  Description of Artificial Sequence: Synthetic oligonucleotide
  Antisense strand to SEQ ID NO: 29912
uagaaccaguccauggccg

SEQ ID NO: 29914 - RNA, 19 nt, Artificial Sequence
  Description of Artificial Sequence: Synthetic oligonucleotide
  Sense strand starting at position 3854 of SEQ ID NO: 343
agagacugaucucaguaac

SEQ ID NO: 29915 - RNA, 19 nt, Artificial Sequence
  Description of Artificial Sequence: Synthetic oligonucleotide
  Antisense strand to SEQ ID NO: 29914
guuacugagaucagucucu

SEQ ID NO: 29916 - RNA, 19 nt, Artificial Sequence
  Description of Artificial Sequence: Synthetic oligonucleotide
  Sense strand starting at position 3851 of SEQ ID NO: 343
acaagagacugaucucagu

SEQ ID NO: 29917 - RNA, 19 nt, Artificial Sequence
  Description of Artificial Sequence: Synthetic oligonucleotide
  Antisense strand to SEQ ID NO: 29916
acugagaucagucucuugu

SEQ ID NO: 29918 - RNA, 19 nt, Artificial Sequence
  Description of Artificial Sequence: Synthetic oligonucleotide
  Sense strand starting at position 3838 of SEQ ID NO: 343
uagcuuuggugggacaaga

SEQ ID NO: 29919 - RNA, 19 nt, Artificial Sequence
  Description of Artificial Sequence: Synthetic oligonucleotide
  Antisense strand to SEQ ID NO: 29918
ucuugucccaccaaagcua

SEQ ID NO: 29920 - RNA, 19 nt, Artificial Sequence
  Description of Artificial Sequence: Synthetic oligonucleotide
  Sense strand starting at position 3836 of SEQ ID NO: 343
uauagcuuuggugggacaa

SEQ ID NO: 29921 - RNA, 19 nt, Artificial Sequence
  Description of Artificial Sequence: Synthetic oligonucleotide
  Antisense strand to SEQ ID NO: 29920
uugucccaccaaagcuaua

SEQ ID NO: 29922 - RNA, 19 nt, Artificial Sequence
  Description of Artificial Sequence: Synthetic oligonucleotide
  Sense strand starting at position 3833 of SEQ ID NO: 343
aauuauagcuuugguggga

SEQ ID NO: 29923 - RNA, 19 nt, Artificial Sequence
  Description of Artificial Sequence: Synthetic oligonucleotide
  Antisense strand to SEQ ID NO: 29922
ucccaccaaagcuauaauu

SEQ ID NO: 29924 - RNA, 19 nt, Artificial Sequence
  Description of Artificial Sequence: Synthetic oligonucleotide
  Sense strand starting at position 3738 of SEQ ID NO: 343
caauuuguauaauguggua

SEQ ID NO: 29925 - RNA, 19 nt, Artificial Sequence
  Description of Artificial Sequence: Synthetic oligonucleotide
  Antisense strand to SEQ ID NO: 29924
uaccacauuauacaaauug

SEQ ID NO: 29926 - RNA, 19 nt, Artificial Sequence
  Description of Artificial Sequence: Synthetic oligonucleotide
  Sense strand starting at position 3664 of SEQ ID NO: 343
ucuaacugccgcgaggauu

SEQ ID NO: 29927 - RNA, 19 nt, Artificial Sequence
  Description of Artificial Sequence: Synthetic oligonucleotide
  Antisense strand to SEQ ID NO: 29926
aauccucgcggcaguuaga

SEQ ID NO: 29928 - RNA, 19 nt, Artificial Sequence
  Description of Artificial Sequence: Synthetic oligonucleotide
  Sense strand starting at position 3623 of SEQ ID NO: 343
gguuaagucuugcaccucu

SEQ ID NO: 29929 - RNA, 19 nt, Artificial Sequence
  Description of Artificial Sequence: Synthetic oligonucleotide
  Antisense strand to SEQ ID NO: 29928
agaggugcaagacuuaacc

SEQ ID NO: 29930 - RNA, 19 nt, Artificial Sequence
  Description of Artificial Sequence: Synthetic oligonucleotide
  Sense strand starting at position 3621 of SEQ ID NO: 343
aggguuaagucuugcaccu

SEQ ID NO: 29931 - RNA, 19 nt, Artificial Sequence
  Description of Artificial Sequence: Synthetic oligonucleotide
  Antisense strand to SEQ ID NO: 29930
aggugcaagacuuaacccu

SEQ ID NO: 29932 - RNA, 19 nt, Artificial Sequence
  Description of Artificial Sequence: Synthetic oligonucleotide
  Sense strand starting at position 3563 of SEQ ID NO: 343
cauuguuugugucaauaag

SEQ ID NO: 29933 - RNA, 19 nt, Artificial Sequence
  Description of Artificial Sequence: Synthetic oligonucleotide
  Antisense strand to SEQ ID NO: 29932
cuuauugacacaaacaaug

SEQ ID NO: 29934 - RNA, 19 nt, Artificial Sequence
  Description of Artificial Sequence: Synthetic oligonucleotide
  Sense strand starting at position 3561 of SEQ ID NO: 343
ugcauuguuugugucaaua

SEQ ID NO: 29935 - RNA, 19 nt, Artificial Sequence
  Description of Artificial Sequence: Synthetic oligonucleotide
  Antisense strand to SEQ ID NO: 29934
uauugacacaaacaaugca

SEQ ID NO: 29936 - RNA, 19 nt, Artificial Sequence
  Description of Artificial Sequence: Synthetic oligonucleotide
  Sense strand starting at position 3560 of SEQ ID NO: 343
augcauuguuugugucaau

SEQ ID NO: 29937 - RNA, 19 nt, Artificial Sequence
  Description of Artificial Sequence: Synthetic oligonucleotide
  Antisense strand to SEQ ID NO: 29936
auugacacaaacaaugcau

SEQ ID NO: 29938 - RNA, 19 nt, Artificial Sequence
  Description of Artificial Sequence: Synthetic oligonucleotide
  Sense strand starting at position 3559 of SEQ ID NO: 343
aaugcauuguuugugucaa

SEQ ID NO: 29939 - RNA, 19 nt, Artificial Sequence
  Description of Artificial Sequence: Synthetic oligonucleotide
  Antisense strand to SEQ ID NO: 29938
uugacacaaacaaugcauu

SEQ ID NO: 29940 - RNA, 19 nt, Artificial Sequence
  Description of Artificial Sequence: Synthetic oligonucleotide
  Sense strand starting at position 3558 of SEQ ID NO: 343
gaaugcauuguuuguguca

SEQ ID NO: 29941 - RNA, 19 nt, Artificial Sequence
  Description of Artificial Sequence: Synthetic oligonucleotide
  Antisense strand to SEQ ID NO: 29940
ugacacaaacaaugcauuc

SEQ ID NO: 29942 - RNA, 19 nt, Artificial Sequence
  Description of Artificial Sequence: Synthetic oligonucleotide
  Sense strand starting at position 3554 of SEQ ID NO: 343
gacagaaugcauuguuugu

SEQ ID NO: 29943 - RNA, 19 nt, Artificial Sequence
  Description of Artificial Sequence: Synthetic oligonucleotide
  Antisense strand to SEQ ID NO: 29942
acaaacaaugcauucuguc

SEQ ID NO: 29944 - RNA, 19 nt, Artificial Sequence
  Description of Artificial Sequence: Synthetic oligonucleotide
  Sense strand starting at position 3530 of SEQ ID NO: 343
cgucaaagcagagaucaca

SEQ ID NO: 29945 - RNA, 19 nt, Artificial Sequence
  Description of Artificial Sequence: Synthetic oligonucleotide
  Antisense strand to SEQ ID NO: 29944
ugugaucucugcuuugacg

SEQ ID NO: 29946 - RNA, 19 nt, Artificial Sequence
  Description of Artificial Sequence: Synthetic oligonucleotide
  Sense strand starting at position 3521 of SEQ ID NO: 343
cagcauuaacgucaaagca

SEQ ID NO: 29947 - RNA, 19 nt, Artificial Sequence
  Description of Artificial Sequence: Synthetic oligonucleotide
  Antisense strand to SEQ ID NO: 29946
ugcuuugacguuaaugcug

SEQ ID NO: 29948 - RNA, 19 nt, Artificial Sequence
  Description of Artificial Sequence: Synthetic oligonucleotide
  Sense strand starting at position 3466 of SEQ ID NO: 343
ucaaacaugccauguuaug

SEQ ID NO: 29949 - RNA, 19 nt, Artificial Sequence
  Description of Artificial Sequence: Synthetic oligonucleotide
  Antisense strand to SEQ ID NO: 29948
cauaacauggcauguuuga

SEQ ID NO: 29950 - RNA, 19 nt, Artificial Sequence
  Description of Artificial Sequence: Synthetic oligonucleotide
  Sense strand starting at position 3464 of SEQ ID NO: 343
cgucaaacaugccauguua

SEQ ID NO: 29951 - RNA, 19 nt, Artificial Sequence
  Description of Artificial Sequence: Synthetic oligonucleotide
  Antisense strand to SEQ ID NO: 29950
uaacauggcauguuugacg

SEQ ID NO: 29952 - RNA, 19 nt, Artificial Sequence
  Description of Artificial Sequence: Synthetic oligonucleotide
  Sense strand starting at position 3437 of SEQ ID NO: 343
aggguuuccagcuaugaug

SEQ ID NO: 29953 - RNA, 19 nt, Artificial Sequence
  Description of Artificial Sequence: Synthetic oligonucleotide
  Antisense strand to SEQ ID NO: 29952
caucauagcuggaaacccu

SEQ ID NO: 29954 - RNA, 19 nt, Artificial Sequence
  Description of Artificial Sequence: Synthetic oligonucleotide
  Sense strand starting at position 3341 of SEQ ID NO: 343
ggcuaacaacuguaaacua

SEQ ID NO: 29955 - RNA, 19 nt, Artificial Sequence
  Description of Artificial Sequence: Synthetic oligonucleotide
  Antisense strand to SEQ ID NO: 29954
uaguuuacaguuguuagcc

SEQ ID NO: 29956 - RNA, 19 nt, Artificial Sequence
  Description of Artificial Sequence: Synthetic oligonucleotide
  Sense strand starting at position 2197 of SEQ ID NO: 343
cugagaaaucuggguccac

SEQ ID NO: 29957 - RNA, 19 nt, Artificial Sequence
  Description of Artificial Sequence: Synthetic oligonucleotide
  Antisense strand to SEQ ID NO: 29956
guggacccagauuucucag

SEQ ID NO: 29958 - RNA, 19 nt, Artificial Sequence
  Description of Artificial Sequence: Synthetic oligonucleotide
  Sense strand starting at position 2186 of SEQ ID NO: 343
cguguuaagaccugagaaa

SEQ ID NO: 29959 - RNA, 19 nt, Artificial Sequence
  Description of Artificial Sequence: Synthetic oligonucleotide
  Antisense strand to SEQ ID NO: 29958
uuucucaggucuuaacacg

SEQ ID NO: 29960 - RNA, 19 nt, Artificial Sequence
  Description of Artificial Sequence: Synthetic oligonucleotide
  Sense strand starting at position 1546 of SEQ ID NO: 343
gggaaaucacccgagucgu

SEQ ID NO: 29961 - RNA, 19 nt, Artificial Sequence
  Description of Artificial Sequence: Synthetic oligonucleotide
  Antisense strand to SEQ ID NO: 29960
acgacucgggugauuuccc

SEQ ID NO: 29962 - RNA, 19 nt, Artificial Sequence
  Description of Artificial Sequence: Synthetic oligonucleotide
  Sense strand starting at position 1500 of SEQ ID NO: 343
auaggaucucgggaguuac

SEQ ID NO: 29963 - RNA, 19 nt, Artificial Sequence
  Description of Artificial Sequence: Synthetic oligonucleotide
  Antisense strand to SEQ ID NO: 29962
guaacucccgagauccuau

SEQ ID NO: 29964 - RNA, 19 nt, Artificial Sequence
  Description of Artificial Sequence: Synthetic oligonucleotide
  Sense strand starting at position 1118 of SEQ ID NO: 343
ggcuccuuucuggaaacca

SEQ ID NO: 29965 - RNA, 19 nt, Artificial Sequence
  Description of Artificial Sequence: Synthetic oligonucleotide
  Antisense strand to SEQ ID NO: 29964
ugguuuccagaaaggagcc

SEQ ID NO: 29966 - RNA, 19 nt, Artificial Sequence
  Description of Artificial Sequence: Synthetic oligonucleotide
  Sense strand starting at position 1115 of SEQ ID NO: 343
agaggcuccuuucuggaaa

SEQ ID NO: 29967 - RNA, 19 nt, Artificial Sequence
  Description of Artificial Sequence: Synthetic oligonucleotide
  Antisense strand to SEQ ID NO: 29966
uuuccagaaaggagccucu

SEQ ID NO: 29968 - RNA, 19 nt, Artificial Sequence
  Description of Artificial Sequence: Synthetic oligonucleotide
  Sense strand starting at position 827 of SEQ ID NO: 343
ggcugauaaucucuaucac

SEQ ID NO: 29969 - RNA, 19 nt, Artificial Sequence
  Description of Artificial Sequence: Synthetic oligonucleotide
  Antisense strand to SEQ ID NO: 29968
gugauagagauuaucagcc

SEQ ID NO: 29970 - RNA, 19 nt, Artificial Sequence
  Description of Artificial Sequence: Synthetic oligonucleotide
  Sense strand starting at position 818 of SEQ ID NO: 343
gcccucaugggcugauaau

SEQ ID NO: 29971 - RNA, 19 nt, Artificial Sequence
  Description of Artificial Sequence: Synthetic oligonucleotide
  Antisense strand to SEQ ID NO: 29970
auuaucagcccaugagggc

SEQ ID NO: 29972 - RNA, 19 nt, Artificial Sequence
  Description of Artificial Sequence: Synthetic oligonucleotide
  Sense strand starting at position 794 of SEQ ID NO: 343
agguguuuccucuggguuu

SEQ ID NO: 29973 - RNA, 19 nt, Artificial Sequence
  Description of Artificial Sequence: Synthetic oligonucleotide
  Antisense strand to SEQ ID NO: 29972
aaacccagaggaaacaccu

SEQ ID NO: 29974 - RNA, 19 nt, Artificial Sequence
  Description of Artificial Sequence: Synthetic oligonucleotide
  Sense strand starting at position 792 of SEQ ID NO: 343
gcagguguuuccucugggu

SEQ ID NO: 29975 - RNA, 19 nt, Artificial Sequence
  Description of Artificial Sequence: Synthetic oligonucleotide
  Antisense strand to SEQ ID NO: 29974
acccagaggaaacaccugc

SEQ ID NO: 29976 - RNA, 19 nt, Artificial Sequence
  Description of Artificial Sequence: Synthetic oligonucleotide
  Sense strand starting at position 628 of SEQ ID NO: 343
uccuguucucuaggccaga

SEQ ID NO: 29977 - RNA, 19 nt, Artificial Sequence
  Description of Artificial Sequence: Synthetic oligonucleotide
  Antisense strand to SEQ ID NO: 29976
ucuggccuagagaacagga

SEQ ID NO: 29978 - RNA, 19 nt, Artificial Sequence
  Description of Artificial Sequence: Synthetic oligonucleotide
  Sense strand starting at position 500 of SEQ ID NO: 343
gugugaggauuagaauaag

SEQ ID NO: 29979 - RNA, 19 nt, Artificial Sequence
  Description of Artificial Sequence: Synthetic oligonucleotide
  Antisense strand to SEQ ID NO: 29978
cuuauucuaauccucacac

SEQ ID NO: 29980 - RNA, 19 nt, Artificial Sequence
  Description of Artificial Sequence: Synthetic oligonucleotide
  Sense strand starting at position 3861 of SEQ ID NO: 344
caggguuucggcuaaaguu

SEQ ID NO: 29981 - RNA, 19 nt, Artificial Sequence
  Description of Artificial Sequence: Synthetic oligonucleotide
  Antisense strand to SEQ ID NO: 29980
aacuuuagccgaaacccug

SEQ ID NO: 29982 - RNA, 19 nt, Artificial Sequence
  Description of Artificial Sequence: Synthetic oligonucleotide
  Sense strand starting at position 3842 of SEQ ID NO: 344
agcacaugcuucugugaca

SEQ ID NO: 29983 - RNA, 19 nt, Artificial Sequence
  Description of Artificial Sequence: Synthetic oligonucleotide
  Antisense strand to SEQ ID NO: 29982
ugucacagaagcaugugcu

SEQ ID NO: 29984 - RNA, 19 nt, Artificial Sequence
  Description of Artificial Sequence: Synthetic oligonucleotide
  Sense strand starting at position 3774 of SEQ ID NO: 344
ccugcaaacggaugguuaa

SEQ ID NO: 29985 - RNA, 19 nt, Artificial Sequence
  Description of Artificial Sequence: Synthetic oligonucleotide
  Antisense strand to SEQ ID NO: 29984
uuaaccauccguuugcagg

SEQ ID NO: 29986 - RNA, 19 nt, Artificial Sequence
  Description of Artificial Sequence: Synthetic oligonucleotide
  Sense strand starting at position 3763 of SEQ ID NO: 344
caggcaugcugccugcaaa

SEQ ID NO: 29987 - RNA, 19 nt, Artificial Sequence
  Description of Artificial Sequence: Synthetic oligonucleotide
  Antisense strand to SEQ ID NO: 29986
uuugcaggcagcaugccug

SEQ ID NO: 29988 - RNA, 19 nt, Artificial Sequence
  Description of Artificial Sequence: Synthetic oligonucleotide
  Sense strand starting at position 3741 of SEQ ID NO: 344
ggaggauggcggugacuuu

SEQ ID NO: 29989 - RNA, 19 nt, Artificial Sequence
  Description of Artificial Sequence: Synthetic oligonucleotide
  Antisense strand to SEQ ID NO: 29988
aaagucaccgccauccucc

SEQ ID NO: 29990 - RNA, 19 nt, Artificial Sequence
  Description of Artificial Sequence: Synthetic oligonucleotide
  Sense strand starting at position 3698 of SEQ ID NO: 344
ugcagcuuuccucagugua

SEQ ID NO: 29991 - RNA, 19 nt, Artificial Sequence
  Description of Artificial Sequence: Synthetic oligonucleotide
  Antisense strand to SEQ ID NO: 29990
uacacugaggaaagcugca

SEQ ID NO: 29992 - RNA, 19 nt, Artificial Sequence
  Description of Artificial Sequence: Synthetic oligonucleotide
  Sense strand starting at position 3485 of SEQ ID NO: 344
acauucuguuccgaaggau

SEQ ID NO: 29993 - RNA, 19 nt, Artificial Sequence
  Description of Artificial Sequence: Synthetic oligonucleotide
  Antisense strand to SEQ ID NO: 29992
auccuucggaacagaaugu

SEQ ID NO: 29994 - RNA, 19 nt, Artificial Sequence
  Description of Artificial Sequence: Synthetic oligonucleotide
  Sense strand starting at position 3484 of SEQ ID NO: 344
gacauucuguuccgaagga

SEQ ID NO: 29995 - RNA, 19 nt, Artificial Sequence
  Description of Artificial Sequence: Synthetic oligonucleotide
  Antisense strand to SEQ ID NO: 29994
uccuucggaacagaauguc

SEQ ID NO: 29996 - RNA, 19 nt, Artificial Sequence
  Description of Artificial Sequence: Synthetic oligonucleotide
  Sense strand starting at position 3482 of SEQ ID NO: 344
aagacauucuguuccgaag

SEQ ID NO: 29997 - RNA, 19 nt, Artificial Sequence
  Description of Artificial Sequence: Synthetic oligonucleotide
  Antisense strand to SEQ ID NO: 29996
cuucggaacagaaugucuu

SEQ ID NO: 29998 - RNA, 19 nt, Artificial Sequence
  Description of Artificial Sequence: Synthetic oligonucleotide
  Sense strand starting at position 3480 of SEQ ID NO: 344
ccaagacauucuguuccga

SEQ ID NO: 29999 - RNA, 19 nt, Artificial Sequence
  Description of Artificial Sequence: Synthetic oligonucleotide
  Antisense strand to SEQ ID NO: 29998
ucggaacagaaugucuugg

SEQ ID NO: 30000 - RNA, 19 nt, Artificial Sequence
  Description of Artificial Sequence: Synthetic oligonucleotide
  Sense strand starting at position 3459 of SEQ ID NO: 344
gaacgaauggucggcuuua

SEQ ID NO: 30001 - RNA, 19 nt, Artificial Sequence
  Description of Artificial Sequence: Synthetic oligonucleotide
  Antisense strand to SEQ ID NO: 30000
uaaagccgaccauucguuc

SEQ ID NO: 30002 - RNA, 19 nt, Artificial Sequence
  Description of Artificial Sequence: Synthetic oligonucleotide
  Sense strand starting at position 3442 of SEQ ID NO: 344
ucuccuaucuaagaguaga

SEQ ID NO: 30003 - RNA, 19 nt, Artificial Sequence
  Description of Artificial Sequence: Synthetic oligonucleotide
  Antisense strand to SEQ ID NO: 30002
ucuacucuuagauaggaga

SEQ ID NO: 30004 - RNA, 19 nt, Artificial Sequence
  Description of Artificial Sequence: Synthetic oligonucleotide
  Sense strand starting at position 3289 of SEQ ID NO: 344
cuguaucaugaauaaguuu

SEQ ID NO: 30005 - RNA, 19 nt, Artificial Sequence
  Description of Artificial Sequence: Synthetic oligonucleotide
  Antisense strand to SEQ ID NO: 30004
aaacuuauucaugauacag

SEQ ID NO: 30006 - RNA, 19 nt, Artificial Sequence
  Description of Artificial Sequence: Synthetic oligonucleotide
  Sense strand starting at position 2864 of SEQ ID NO: 344
cugacucccugggaaugau

SEQ ID NO: 30007 - RNA, 19 nt, Artificial Sequence
  Description of Artificial Sequence: Synthetic oligonucleotide
  Antisense strand to SEQ ID NO: 30006
aucauucccagggagucag

SEQ ID NO: 30008 - RNA, 19 nt, Artificial Sequence
  Description of Artificial Sequence: Synthetic oligonucleotide
  Sense strand starting at position 2862 of SEQ ID NO: 344
gccugacucccugggaaug

SEQ ID NO: 30009 - RNA, 19 nt, Artificial Sequence
  Description of Artificial Sequence: Synthetic oligonucleotide
  Antisense strand to SEQ ID NO: 30008
cauucccagggagucaggc

SEQ ID NO: 30010 - RNA, 19 nt, Artificial Sequence
  Description of Artificial Sequence: Synthetic oligonucleotide
  Sense strand starting at position 2472 of SEQ ID NO: 344
ugaagacaguaauuguauu

SEQ ID NO: 30011 - RNA, 19 nt, Artificial Sequence
  Description of Artificial Sequence: Synthetic oligonucleotide
  Antisense strand to SEQ ID NO: 30010
aauacaauuacugucuuca

SEQ ID NO: 30012 - RNA, 19 nt, Artificial Sequence
  Description of Artificial Sequence: Synthetic oligonucleotide
  Sense strand starting at position 2469 of SEQ ID NO: 344
gcuugaagacaguaauugu

SEQ ID NO: 30013 - RNA, 19 nt, Artificial Sequence
  Description of Artificial Sequence: Synthetic oligonucleotide
  Antisense strand to SEQ ID NO: 30012
acaauuacugucuucaagc

SEQ ID NO: 30014 - RNA, 19 nt, Artificial Sequence
  Description of Artificial Sequence: Synthetic oligonucleotide
  Sense strand starting at position 2466 of SEQ ID NO: 344
cuggcuugaagacaguaau

SEQ ID NO: 30015 - RNA, 19 nt, Artificial Sequence
  Description of Artificial Sequence: Synthetic oligonucleotide
  Antisense strand to SEQ ID NO: 30014
auuacugucuucaagccag

SEQ ID NO: 30016 - RNA, 19 nt, Artificial Sequence
  Description of Artificial Sequence: Synthetic oligonucleotide
  Sense strand starting at position 2461 of SEQ ID NO: 344
augugcuggcuugaagaca

SEQ ID NO: 30017 - RNA, 19 nt, Artificial Sequence
  Description of Artificial Sequence: Synthetic oligonucleotide
  Antisense strand to SEQ ID NO: 30016
ugucuucaagccagcacau

SEQ ID NO: 30018 - RNA, 19 nt, Artificial Sequence
  Description of Artificial Sequence: Synthetic oligonucleotide
  Sense strand starting at position 2447 of SEQ ID NO: 344
gcucaaaugucuccaugug

SEQ ID NO: 30019 - RNA, 19 nt, Artificial Sequence
  Description of Artificial Sequence: Synthetic oligonucleotide
  Antisense strand to SEQ ID NO: 30018
cacauggagacauuugagc

SEQ ID NO: 30020 - RNA, 19 nt, Artificial Sequence
  Description of Artificial Sequence: Synthetic oligonucleotide
  Sense strand starting at position 1507 of SEQ ID NO: 344
aaugcuuugugggcugaca

SEQ ID NO: 30021 - RNA, 19 nt, Artificial Sequence
  Description of Artificial Sequence: Synthetic oligonucleotide
  Antisense strand to SEQ ID NO: 30020
ugucagcccacaaagcauu

SEQ ID NO: 30022 - RNA, 19 nt, Artificial Sequence
  Description of Artificial Sequence: Synthetic oligonucleotide
  Sense strand starting at position 565 of SEQ ID NO: 344
cugacugucggcugagauu

SEQ ID NO: 30023 - RNA, 19 nt, Artificial Sequence
  Description of Artificial Sequence: Synthetic oligonucleotide
  Antisense strand to SEQ ID NO: 30022
aaucucagccgacagucag

SEQ ID NO: 30024 - RNA, 19 nt, Artificial Sequence
  Description of Artificial Sequence: Synthetic oligonucleotide
  Sense strand starting at position 511 of SEQ ID NO: 344
ccgagagcuucuuaggcau

SEQ ID NO: 30025 - RNA, 19 nt, Artificial Sequence
  Description of Artificial Sequence: Synthetic oligonucleotide
  Antisense strand to SEQ ID NO: 30024
augccuaagaagcucucgg

SEQ ID NO: 30026 - RNA, 19 nt, Artificial Sequence
  Description of Artificial Sequence: Synthetic oligonucleotide
  Sense strand starting at position 399 of SEQ ID NO: 344
cuaugagucguauguagau

SEQ ID NO: 30027 - RNA, 19 nt, Artificial Sequence
  Description of Artificial Sequence: Synthetic oligonucleotide
  Antisense strand to SEQ ID NO: 30026
aucuacauacgacucauag

SEQ ID NO: 30028 - RNA, 19 nt, Artificial Sequence
  Description of Artificial Sequence: Synthetic oligonucleotide
  Sense strand starting at position 397 of SEQ ID NO: 344
gccuaugagucguauguag

SEQ ID NO: 30029 - RNA, 19 nt, Artificial Sequence
  Description of Artificial Sequence: Synthetic oligonucleotide
  Antisense strand to SEQ ID NO: 30028
cuacauacgacucauaggc

SEQ ID NO: 30030 - RNA, 19 nt, Artificial Sequence
  Description of Artificial Sequence: Synthetic oligonucleotide
  Sense strand starting at position 395 of SEQ ID NO: 344
gugccuaugagucguaugu

SEQ ID NO: 30031 - RNA, 19 nt, Artificial Sequence
  Description of Artificial Sequence: Synthetic oligonucleotide
  Antisense strand to SEQ ID NO: 30030
acauacgacucauaggcac

SEQ ID NO: 30032 - RNA, 19 nt, Artificial Sequence
  Description of Artificial Sequence: Synthetic oligonucleotide
  Sense strand starting at position 274 of SEQ ID NO: 344
uuggguucacucuggcaga

SEQ ID NO: 30033 - RNA, 19 nt, Artificial Sequence
  Description of Artificial Sequence: Synthetic oligonucleotide
  Antisense strand to SEQ ID NO: 30032
ucugccagagugaacccaa

SEQ ID NO: 30034 - RNA, 19 nt, Artificial Sequence
  Description of Artificial Sequence: Synthetic oligonucleotide
  Sense strand starting at position 3971 of SEQ ID NO: 345
uggaauauguaagauacca

SEQ ID NO: 30035 - RNA, 19 nt, Artificial Sequence
  Description of Artificial Sequence: Synthetic oligonucleotide
  Antisense strand to SEQ ID NO: 30034
ugguaucuuacauauucca

SEQ ID NO: 30036 - RNA, 19 nt, Artificial Sequence
  Description of Artificial Sequence: Synthetic oligonucleotide
  Sense strand starting at position 3947 of SEQ ID NO: 345
uguggcgacugcucaaaga

SEQ ID NO: 30037 - RNA, 19 nt, Artificial Sequence
  Description of Artificial Sequence: Synthetic oligonucleotide
  Antisense strand to SEQ ID NO: 30036
ucuuugagcagucgccaca

SEQ ID NO: 30038 - RNA, 19 nt, Artificial Sequence
  Description of Artificial Sequence: Synthetic oligonucleotide
  Sense strand starting at position 3860 of SEQ ID NO: 345
ugugauccucucugaggca

SEQ ID NO: 30039 - RNA, 19 nt, Artificial Sequence
  Description of Artificial Sequence: Synthetic oligonucleotide
  Antisense strand to SEQ ID NO: 30038
ugccucagagaggaucaca

SEQ ID NO: 30040 - RNA, 19 nt, Artificial Sequence
  Description of Artificial Sequence: Synthetic oligonucleotide
  Sense strand starting at position 3779 of SEQ ID NO: 345
uugaccugucuauagcuaa

SEQ ID NO: 30041 - RNA, 19 nt, Artificial Sequence
  Description of Artificial Sequence: Synthetic oligonucleotide
  Antisense strand to SEQ ID NO: 30040
uuagcuauagacaggucaa

SEQ ID NO: 30042 - RNA, 19 nt, Artificial Sequence
  Description of Artificial Sequence: Synthetic oligonucleotide
  Sense strand starting at position 3510 of SEQ ID NO: 345
acugcuggagccuaucaau

SEQ ID NO: 30043 - RNA, 19 nt, Artificial Sequence
  Description of Artificial Sequence: Synthetic oligonucleotide
  Antisense strand to SEQ ID NO: 30042
auugauaggcuccagcagu

SEQ ID NO: 30044 - RNA, 19 nt, Artificial Sequence
  Description of Artificial Sequence: Synthetic oligonucleotide
  Sense strand starting at position 3431 of SEQ ID NO: 345
ccaaauagcagugaugagu

SEQ ID NO: 30045 - RNA, 19 nt, Artificial Sequence
  Description of Artificial Sequence: Synthetic oligonucleotide
  Antisense strand to SEQ ID NO: 30044
acucaucacugcuauuugg

SEQ ID NO: 30046 - RNA, 19 nt, Artificial Sequence
  Description of Artificial Sequence: Synthetic oligonucleotide
  Sense strand starting at position 3378 of SEQ ID NO: 345
ugugaauucccuugggcag

SEQ ID NO: 30047 - RNA, 19 nt, Artificial Sequence
  Description of Artificial Sequence: Synthetic oligonucleotide
  Antisense strand to SEQ ID NO: 30046
cugcccaagggaauucaca

SEQ ID NO: 30048 - RNA, 19 nt, Artificial Sequence
  Description of Artificial Sequence: Synthetic oligonucleotide
  Sense strand starting at position 3339 of SEQ ID NO: 345
augugcucuccuuaaggaa

SEQ ID NO: 30049 - RNA, 19 nt, Artificial Sequence
  Description of Artificial Sequence: Synthetic oligonucleotide
  Antisense strand to SEQ ID NO: 30048
uuccuuaaggagagcacau

SEQ ID NO: 30050 - RNA, 19 nt, Artificial Sequence
  Description of Artificial Sequence: Synthetic oligonucleotide
  Sense strand starting at position 3333 of SEQ ID NO: 345
cagagaaugugcucuccuu

SEQ ID NO: 30051 - RNA, 19 nt, Artificial Sequence
  Description of Artificial Sequence: Synthetic oligonucleotide
  Antisense strand to SEQ ID NO: 30050
aaggagagcacauucucug

SEQ ID NO: 30052 - RNA, 19 nt, Artificial Sequence
  Description of Artificial Sequence: Synthetic oligonucleotide
  Sense strand starting at position 3293 of SEQ ID NO: 345
ccaugcuugagguggguaa

SEQ ID NO: 30053 - RNA, 19 nt, Artificial Sequence
  Description of Artificial Sequence: Synthetic oligonucleotide
  Antisense strand to SEQ ID NO: 30052
uuacccaccucaagcaugg

SEQ ID NO: 30054 - RNA, 19 nt, Artificial Sequence
  Description of Artificial Sequence: Synthetic oligonucleotide
  Sense strand starting at position 3284 of SEQ ID NO: 345
auaggagucccaugcuuga

SEQ ID NO: 30055 - RNA, 19 nt, Artificial Sequence
  Description of Artificial Sequence: Synthetic oligonucleotide
  Antisense strand to SEQ ID NO: 30054
ucaagcaugggacuccuau

SEQ ID NO: 30056 - RNA, 19 nt, Artificial Sequence
  Description of Artificial Sequence: Synthetic oligonucleotide
  Sense strand starting at position 3271 of SEQ ID NO: 345
gcaugucucccauauagga

SEQ ID NO: 30057 - RNA, 19 nt, Artificial Sequence
  Description of Artificial Sequence: Synthetic oligonucleotide
  Antisense strand to SEQ ID NO: 30056
uccuauaugggagacaugc

SEQ ID NO: 30058 - RNA, 19 nt, Artificial Sequence
  Description of Artificial Sequence: Synthetic oligonucleotide
  Sense strand starting at position 3267 of SEQ ID NO: 345
agcagcaugucucccauau

SEQ ID NO: 30059 - RNA, 19 nt, Artificial Sequence
  Description of Artificial Sequence: Synthetic oligonucleotide
  Antisense strand to SEQ ID NO: 30058
auaugggagacaugcugcu

SEQ ID NO: 30060 - RNA, 19 nt, Artificial Sequence
  Description of Artificial Sequence: Synthetic oligonucleotide
  Sense strand starting at position 3208 of SEQ ID NO: 345
auccuuugugccugaccaa

SEQ ID NO: 30061 - RNA, 19 nt, Artificial Sequence
  Description of Artificial Sequence: Synthetic oligonucleotide
  Antisense strand to SEQ ID NO: 30060
uuggucaggcacaaaggau

SEQ ID NO: 30062 - RNA, 19 nt, Artificial Sequence
  Description of Artificial Sequence: Synthetic oligonucleotide
  Sense strand starting at position 3178 of SEQ ID NO: 345
cugccauuuccugggcauu

SEQ ID NO: 30063 - RNA, 19 nt, Artificial Sequence
  Description of Artificial Sequence: Synthetic oligonucleotide
  Antisense strand to SEQ ID NO: 30062
aaugcccaggaaauggcag

SEQ ID NO: 30064 - RNA, 19 nt, Artificial Sequence
  Description of Artificial Sequence: Synthetic oligonucleotide
  Sense strand starting at position 3168 of SEQ ID NO: 345
uggguugucucugccauuu

SEQ ID NO: 30065 - RNA, 19 nt, Artificial Sequence
  Description of Artificial Sequence: Synthetic oligonucleotide
  Antisense strand to SEQ ID NO: 30064
aaauggcagagacaaccca

SEQ ID NO: 30066 - RNA, 19 nt, Artificial Sequence
  Description of Artificial Sequence: Synthetic oligonucleotide
  Sense strand starting at position 2876 of SEQ ID NO: 345
agaguagacagugguaaug

SEQ ID NO: 30067 - RNA, 19 nt, Artificial Sequence
  Description of Artificial Sequence: Synthetic oligonucleotide
  Antisense strand to SEQ ID NO: 30066
cauuaccacugucuacucu

SEQ ID NO: 30068 - RNA, 19 nt, Artificial Sequence
  Description of Artificial Sequence: Synthetic oligonucleotide
  Sense strand starting at position 2875 of SEQ ID NO: 345
uagaguagacagugguaau

SEQ ID NO: 30069 - RNA, 19 nt, Artificial Sequence
  Description of Artificial Sequence: Synthetic oligonucleotide
  Antisense strand to SEQ ID NO: 30068
auuaccacugucuacucua

SEQ ID NO: 30070 - RNA, 19 nt, Artificial Sequence
  Description of Artificial Sequence: Synthetic oligonucleotide
  Sense strand starting at position 2789 of SEQ ID NO: 345
gguaaagaguaauuccgaa

SEQ ID NO: 30071 - RNA, 19 nt, Artificial Sequence
  Description of Artificial Sequence: Synthetic oligonucleotide
  Antisense strand to SEQ ID NO: 30070
uucggaauuacucuuuacc

SEQ ID NO: 30072 - RNA, 19 nt, Artificial Sequence
  Description of Artificial Sequence: Synthetic oligonucleotide
  Sense strand starting at position 2548 of SEQ ID NO: 345
agaacagcaucugauacaa

SEQ ID NO: 30073 - RNA, 19 nt, Artificial Sequence
  Description of Artificial Sequence: Synthetic oligonucleotide
  Antisense strand to SEQ ID NO: 30072
uuguaucagaugcuguucu

SEQ ID NO: 30074 - RNA, 19 nt, Artificial Sequence
  Description of Artificial Sequence: Synthetic oligonucleotide
  Sense strand starting at position 2270 of SEQ ID NO: 345
ucuacaaugccagacaguu

SEQ ID NO: 30075 - RNA, 19 nt, Artificial Sequence
  Description of Artificial Sequence: Synthetic oligonucleotide
  Antisense strand to SEQ ID NO: 30074
aacugucuggcauuguaga

SEQ ID NO: 30076 - RNA, 19 nt, Artificial Sequence
  Description of Artificial Sequence: Synthetic oligonucleotide
  Sense strand starting at position 2231 of SEQ ID NO: 345
gaaaguaagcaacagucuu

SEQ ID NO: 30077 - RNA, 19 nt, Artificial Sequence
  Description of Artificial Sequence: Synthetic oligonucleotide
  Antisense strand to SEQ ID NO: 30076
aagacuguugcuuacuuuc

SEQ ID NO: 30078 - RNA, 19 nt, Artificial Sequence
  Description of Artificial Sequence: Synthetic oligonucleotide
  Sense strand starting at position 2200 of SEQ ID NO: 345
ggaagauaccagugucauu

SEQ ID NO: 30079 - RNA, 19 nt, Artificial Sequence
  Description of Artificial Sequence: Synthetic oligonucleotide
  Antisense strand to SEQ ID NO: 30078
aaugacacugguaucuucc

SEQ ID NO: 30080 - RNA, 19 nt, Artificial Sequence
  Description of Artificial Sequence: Synthetic oligonucleotide
  Sense strand starting at position 2151 of SEQ ID NO: 345
ugcccuauugagcacuuua

SEQ ID NO: 30081 - RNA, 19 nt, Artificial Sequence
  Description of Artificial Sequence: Synthetic oligonucleotide
  Antisense strand to SEQ ID NO: 30080
uaaagugcucaauagggca

SEQ ID NO: 30082 - RNA, 19 nt, Artificial Sequence
  Description of Artificial Sequence: Synthetic oligonucleotide
  Sense strand starting at position 2139 of SEQ ID NO: 345
gagugaguccagugcccua

SEQ ID NO: 30083 - RNA, 19 nt, Artificial Sequence
  Description of Artificial Sequence: Synthetic oligonucleotide
  Antisense strand to SEQ ID NO: 30082
uagggcacuggacucacuc

SEQ ID NO: 30084 - RNA, 19 nt, Artificial Sequence
  Description of Artificial Sequence: Synthetic oligonucleotide
  Sense strand starting at position 2106 of SEQ ID NO: 345
ggaagacacuucgagcaaa

SEQ ID NO: 30085 - RNA, 19 nt, Artificial Sequence
  Description of Artificial Sequence: Synthetic oligonucleotide
  Antisense strand to SEQ ID NO: 30084
uuugcucgaagugucuucc

SEQ ID NO: 30086 - RNA, 19 nt, Artificial Sequence
  Description of Artificial Sequence: Synthetic oligonucleotide
  Sense strand starting at position 1990 of SEQ ID NO: 345
ggugguggcuuugucagaa

SEQ ID NO: 30087 - RNA, 19 nt, Artificial Sequence
  Description of Artificial Sequence: Synthetic oligonucleotide
  Antisense strand to SEQ ID NO: 30086
uucugacaaagccaccacc

SEQ ID NO: 30088 - RNA, 19 nt, Artificial Sequence
  Description of Artificial Sequence: Synthetic oligonucleotide
  Sense strand starting at position 964 of SEQ ID NO: 345
uggguaauuguaggagaag

SEQ ID NO: 30089 - RNA, 19 nt, Artificial Sequence
  Description of Artificial Sequence: Synthetic oligonucleotide
  Antisense strand to SEQ ID NO: 30088
cuucuccuacaauuaccca

SEQ ID NO: 30090 - RNA, 19 nt, Artificial Sequence
  Description of Artificial Sequence: Synthetic oligonucleotide
  Sense strand starting at position 963 of SEQ ID NO: 345
guggguaauuguaggagaa

SEQ ID NO: 30091 - RNA, 19 nt, Artificial Sequence
  Description of Artificial Sequence: Synthetic oligonucleotide
  Antisense strand to SEQ ID NO: 30090
uucuccuacaauuacccac

SEQ ID NO: 30092 - RNA, 19 nt, Artificial Sequence
  Description of Artificial Sequence: Synthetic oligonucleotide
  Sense strand starting at position 627 of SEQ ID NO: 345
ugcugggaucguggaugua

SEQ ID NO: 30093 - RNA, 19 nt, Artificial Sequence
  Description of Artificial Sequence: Synthetic oligonucleotide
  Antisense strand to SEQ ID NO: 30092
uacauccacgaucccagca

SEQ ID NO: 30094 - RNA, 19 nt, Artificial Sequence
  Description of Artificial Sequence: Synthetic oligonucleotide
  Sense strand starting at position 581 of SEQ ID NO: 345
ucaccucaucuauacggua

SEQ ID NO: 30095 - RNA, 19 nt, Artificial Sequence
  Description of Artificial Sequence: Synthetic oligonucleotide
  Antisense strand to SEQ ID NO: 30094
uaccguauagaugagguga

SEQ ID NO: 30096 - RNA, 19 nt, Artificial Sequence
  Description of Artificial Sequence: Synthetic oligonucleotide
  Sense strand starting at position 527 of SEQ ID NO: 345
cccagaaaucccugagagc

SEQ ID NO: 30097 - RNA, 19 nt, Artificial Sequence
  Description of Artificial Sequence: Synthetic oligonucleotide
  Antisense strand to SEQ ID NO: 30096
gcucucagggauuucuggg

SEQ ID NO: 30098 - RNA, 19 nt, Artificial Sequence
  Description of Artificial Sequence: Synthetic oligonucleotide
  Sense strand starting at position 183 of SEQ ID NO: 345
ucaauuauugcuuaggaac

SEQ ID NO: 30099 - RNA, 19 nt, Artificial Sequence
  Description of Artificial Sequence: Synthetic oligonucleotide
  Antisense strand to SEQ ID NO: 30098
guuccuaagcaauaauuga

SEQ ID NO: 30100 - RNA, 19 nt, Artificial Sequence
  Description of Artificial Sequence: Synthetic oligonucleotide
  Sense strand starting at position 182 of SEQ ID NO: 345
aucaauuauugcuuaggaa

SEQ ID NO: 30101 - RNA, 19 nt, Artificial Sequence
  Description of Artificial Sequence: Synthetic oligonucleotide
  Antisense strand to SEQ ID NO: 30100
uuccuaagcaauaauugau

SEQ ID NO: 30102 - RNA, 19 nt, Artificial Sequence
  Description of Artificial Sequence: Synthetic oligonucleotide
  Sense strand starting at position 140 of SEQ ID NO: 345
cugagugagcucugaguuc

SEQ ID NO: 30103 - RNA, 19 nt, Artificial Sequence
  Description of Artificial Sequence: Synthetic oligonucleotide
  Antisense strand to SEQ ID NO: 30102
gaacucagagcucacucag

SEQ ID NO: 30104 - RNA, 19 nt, Artificial Sequence
  Description of Artificial Sequence: Synthetic oligonucleotide
  Sense strand starting at position 81 of SEQ ID NO: 345
augugaucccagugaccca

SEQ ID NO: 30105 - RNA, 19 nt, Artificial Sequence
  Description of Artificial Sequence: Synthetic oligonucleotide
  Antisense strand to SEQ ID NO: 30104
ugggucacugggaucacau

SEQ ID NO: 30106 - RNA, 19 nt, Artificial Sequence
  Description of Artificial Sequence: Synthetic oligonucleotide
  Sense strand starting at position 68 of SEQ ID NO: 345
gaauccucacgcuauguga

SEQ ID NO: 30107 - RNA, 19 nt, Artificial Sequence
  Description of Artificial Sequence: Synthetic oligonucleotide
  Antisense strand to SEQ ID NO: 30106
ucacauagcgugaggauuc

SEQ ID NO: 30108 - RNA, 19 nt, Artificial Sequence
  Description of Artificial Sequence: Synthetic oligonucleotide
  Sense strand starting at position 66 of SEQ ID NO: 345
gcgaauccucacgcuaugu

SEQ ID NO: 30109 - RNA, 19 nt, Artificial Sequence
  Description of Artificial Sequence: Synthetic oligonucleotide
  Antisense strand to SEQ ID NO: 30108
acauagcgugaggauucgc

SEQ ID NO: 30110 - RNA, 19 nt, Artificial Sequence
  Description of Artificial Sequence: Synthetic oligonucleotide
  Sense strand starting at position 11 of SEQ ID NO: 345
ccucucagcguggaacauu

SEQ ID NO: 30111 - RNA, 19 nt, Artificial Sequence
  Description of Artificial Sequence: Synthetic oligonucleotide
  Antisense strand to SEQ ID NO: 30110
aauguuccacgcugagagg

SEQ ID NO: 30112 - RNA, 19 nt, Artificial Sequence
  Description of Artificial Sequence: Synthetic oligonucleotide
  Sense strand starting at position 10 of SEQ ID NO: 345
gccucucagcguggaacau

SEQ ID NO: 30113 - RNA, 19 nt, Artificial Sequence
  Description of Artificial Sequence: Synthetic oligonucleotide
  Antisense strand to SEQ ID NO: 30112
auguuccacgcugagaggc

SEQ ID NO: 30114 - RNA, 19 nt, Artificial Sequence
  Description of Artificial Sequence: Synthetic oligonucleotide
  Sense strand starting at position 3742 of SEQ ID NO: 346
uccaaucaagucuaguuua

SEQ ID NO: 30115 - RNA, 19 nt, Artificial Sequence
  Description of Artificial Sequence: Synthetic oligonucleotide
  Antisense strand to SEQ ID NO: 30114
uaaacuagacuugauugga

SEQ ID NO: 30116 - RNA, 19 nt, Artificial Sequence
  Description of Artificial Sequence: Synthetic oligonucleotide
  Sense strand starting at position 3391 of SEQ ID NO: 346
cuauuacuuuggucaaguu

SEQ ID NO: 30117 - RNA, 19 nt, Artificial Sequence
  Description of Artificial Sequence: Synthetic oligonucleotide
  Antisense strand to SEQ ID NO: 30116
aacuugaccaaaguaauag

SEQ ID NO: 30118 - RNA, 19 nt, Artificial Sequence
  Description of Artificial Sequence: Synthetic oligonucleotide
  Sense strand starting at position 3390 of SEQ ID NO: 346
acuauuacuuuggucaagu

SEQ ID NO: 30119 - RNA, 19 nt, Artificial Sequence
  Description of Artificial Sequence: Synthetic oligonucleotide
  Antisense strand to SEQ ID NO: 30118
acuugaccaaaguaauagu

SEQ ID NO: 30120 - RNA, 19 nt, Artificial Sequence
  Description of Artificial Sequence: Synthetic oligonucleotide
  Sense strand starting at position 3299 of SEQ ID NO: 346
auaaaucuccucuguaagu

SEQ ID NO: 30121 - RNA, 19 nt, Artificial Sequence
  Description of Artificial Sequence: Synthetic oligonucleotide
  Antisense strand to SEQ ID NO: 30120
acuuacagaggagauuuau

SEQ ID NO: 30122 - RNA, 19 nt, Artificial Sequence
  Description of Artificial Sequence: Synthetic oligonucleotide
  Sense strand starting at position 3266 of SEQ ID NO: 346
uguagcccucaugaguuau

SEQ ID NO: 30123 - RNA, 19 nt, Artificial Sequence
  Description of Artificial Sequence: Synthetic oligonucleotide
  Antisense strand to SEQ ID NO: 30122
auaacucaugagggcuaca

SEQ ID NO: 30124 - RNA, 19 nt, Artificial Sequence
  Description of Artificial Sequence: Synthetic oligonucleotide
  Sense strand starting at position 3037 of SEQ ID NO: 346
auguucuacucucugaaag

SEQ ID NO: 30125 - RNA, 19 nt, Artificial Sequence
  Description of Artificial Sequence: Synthetic oligonucleotide
  Antisense strand to SEQ ID NO: 30124
cuuucagagaguagaacau

SEQ ID NO: 30126 - RNA, 19 nt, Artificial Sequence
  Description of Artificial Sequence: Synthetic oligonucleotide
  Sense strand starting at position 3007 of SEQ ID NO: 346
gguguaacagcucagaauu

SEQ ID NO: 30127 - RNA, 19 nt, Artificial Sequence
  Description of Artificial Sequence: Synthetic oligonucleotide
  Antisense strand to SEQ ID NO: 30126
aauucugagcuguuacacc

SEQ ID NO: 30128 - RNA, 19 nt, Artificial Sequence
  Description of Artificial Sequence: Synthetic oligonucleotide
  Sense strand starting at position 2903 of SEQ ID NO: 346
agagaucucugaguagcuu

SEQ ID NO: 30129 - RNA, 19 nt, Artificial Sequence
  Description of Artificial Sequence: Synthetic oligonucleotide
  Antisense strand to SEQ ID NO: 30128
aagcuacucagagaucucu

SEQ ID NO: 30130 - RNA, 19 nt, Artificial Sequence
  Description of Artificial Sequence: Synthetic oligonucleotide
  Sense strand starting at position 2900 of SEQ ID NO: 346
uacagagaucucugaguag

SEQ ID NO: 30131 - RNA, 19 nt, Artificial Sequence
  Description of Artificial Sequence: Synthetic oligonucleotide
  Antisense strand to SEQ ID NO: 30130
cuacucagagaucucugua

SEQ ID NO: 30132 - RNA, 19 nt, Artificial Sequence
  Description of Artificial Sequence: Synthetic oligonucleotide
  Sense strand starting at position 2791 of SEQ ID NO: 346
uaguuaugccuuuaggcaa

SEQ ID NO: 30133 - RNA, 19 nt, Artificial Sequence
  Description of Artificial Sequence: Synthetic oligonucleotide
  Antisense strand to SEQ ID NO: 30132
uugccuaaaggcauaacua

SEQ ID NO: 30134 - RNA, 19 nt, Artificial Sequence
  Description of Artificial Sequence: Synthetic oligonucleotide
  Sense strand starting at position 2766 of SEQ ID NO: 346
accauaauacguggcacau

SEQ ID NO: 30135 - RNA, 19 nt, Artificial Sequence
  Description of Artificial Sequence: Synthetic oligonucleotide
  Antisense strand to SEQ ID NO: 30134
augugccacguauuauggu

SEQ ID NO: 30136 - RNA, 19 nt, Artificial Sequence
  Description of Artificial Sequence: Synthetic oligonucleotide
  Sense strand starting at position 2597 of SEQ ID NO: 346
ccuuauggcaccugagaug

SEQ ID NO: 30137 - RNA, 19 nt, Artificial Sequence
  Description of Artificial Sequence: Synthetic oligonucleotide
  Antisense strand to SEQ ID NO: 30136
caucucaggugccauaagg

SEQ ID NO: 30138 - RNA, 19 nt, Artificial Sequence
  Description of Artificial Sequence: Synthetic oligonucleotide
  Sense strand starting at position 2544 of SEQ ID NO: 346
acaugacaugcugaugcau

SEQ ID NO: 30139 - RNA, 19 nt, Artificial Sequence
  Description of Artificial Sequence: Synthetic oligonucleotide
  Antisense strand to SEQ ID NO: 30138
augcaucagcaugucaugu

SEQ ID NO: 30140 - RNA, 19 nt, Artificial Sequence
  Description of Artificial Sequence: Synthetic oligonucleotide
  Sense strand starting at position 2512 of SEQ ID NO: 346
aucugcacuggugaauauu

SEQ ID NO: 30141 - RNA, 19 nt, Artificial Sequence
  Description of Artificial Sequence: Synthetic oligonucleotide
  Antisense strand to SEQ ID NO: 30140
aauauucaccagugcagau

SEQ ID NO: 30142 - RNA, 19 nt, Artificial Sequence
  Description of Artificial Sequence: Synthetic oligonucleotide
  Sense strand starting at position 2508 of SEQ ID NO: 346
caccaucugcacuggugaa

SEQ ID NO: 30143 - RNA, 19 nt, Artificial Sequence
  Description of Artificial Sequence: Synthetic oligonucleotide
  Antisense strand to SEQ ID NO: 30142
uucaccagugcagauggug

SEQ ID NO: 30144 - RNA, 19 nt, Artificial Sequence
  Description of Artificial Sequence: Synthetic oligonucleotide
  Sense strand starting at position 2394 of SEQ ID NO: 346
uguccagugguauggacaa

SEQ ID NO: 30145 - RNA, 19 nt, Artificial Sequence
  Description of Artificial Sequence: Synthetic oligonucleotide
  Antisense strand to SEQ ID NO: 30144
uuguccauaccacuggaca

SEQ ID NO: 30146 - RNA, 19 nt, Artificial Sequence
  Description of Artificial Sequence: Synthetic oligonucleotide
  Sense strand starting at position 2311 of SEQ ID NO: 346
caaagcugaugaguuagaa

SEQ ID NO: 30147 - RNA, 19 nt, Artificial Sequence
  Description of Artificial Sequence: Synthetic oligonucleotide
  Antisense strand to SEQ ID NO: 30146
uucuaacucaucagcuuug

SEQ ID NO: 30148 - RNA, 19 nt, Artificial Sequence
  Description of Artificial Sequence: Synthetic oligonucleotide
  Sense strand starting at position 2231 of SEQ ID NO: 346
gaauccugauuguucugaa

SEQ ID NO: 30149 - RNA, 19 nt, Artificial Sequence
  Description of Artificial Sequence: Synthetic oligonucleotide
  Antisense strand to SEQ ID NO: 30148
uucagaacaaucaggauuc

SEQ ID NO: 30150 - RNA, 19 nt, Artificial Sequence
  Description of Artificial Sequence: Synthetic oligonucleotide
  Sense strand starting at position 2228 of SEQ ID NO: 346
acagaauccugauuguucu

SEQ ID NO: 30151 - RNA, 19 nt, Artificial Sequence
  Description of Artificial Sequence: Synthetic oligonucleotide
  Antisense strand to SEQ ID NO: 30150
agaacaaucaggauucugu

SEQ ID NO: 30152 - RNA, 19 nt, Artificial Sequence
  Description of Artificial Sequence: Synthetic oligonucleotide
  Sense strand starting at position 2157 of SEQ ID NO: 346
uauuauggauuugagacuu

SEQ ID NO: 30153 - RNA, 19 nt, Artificial Sequence
  Description of Artificial Sequence: Synthetic oligonucleotide
  Antisense strand to SEQ ID NO: 30152
aagucucaaauccauaaua

SEQ ID NO: 30154 - RNA, 19 nt, Artificial Sequence
  Description of Artificial Sequence: Synthetic oligonucleotide
  Sense strand starting at position 2134 of SEQ ID NO: 346
uuggauccuuaagagauuu

SEQ ID NO: 30155 - RNA, 19 nt, Artificial Sequence
  Description of Artificial Sequence: Synthetic oligonucleotide
  Antisense strand to SEQ ID NO: 30154
aaaucucuuaaggauccaa

SEQ ID NO: 30156 - RNA, 19 nt, Artificial Sequence
  Description of Artificial Sequence: Synthetic oligonucleotide
  Sense strand starting at position 2130 of SEQ ID NO: 346
ggucuuggauccuuaagag

SEQ ID NO: 30157 - RNA, 19 nt, Artificial Sequence
  Description of Artificial Sequence: Synthetic oligonucleotide
  Antisense strand to SEQ ID NO: 30156
cucuuaaggauccaagacc

SEQ ID NO: 30158 - RNA, 19 nt, Artificial Sequence
  Description of Artificial Sequence: Synthetic oligonucleotide
  Sense strand starting at position 2120 of SEQ ID NO: 346
ccuccuaucuggucuugga

SEQ ID NO: 30159 - RNA, 19 nt, Artificial Sequence
  Description of Artificial Sequence: Synthetic oligonucleotide
  Antisense strand to SEQ ID NO: 30158
uccaagaccagauaggagg

SEQ ID NO: 30160 - RNA, 19 nt, Artificial Sequence
  Description of Artificial Sequence: Synthetic oligonucleotide
  Sense strand starting at position 1823 of SEQ ID NO: 346
gugauucuugagcauccuu

SEQ ID NO: 30161 - RNA, 19 nt, Artificial Sequence
  Description of Artificial Sequence: Synthetic oligonucleotide
  Antisense strand to SEQ ID NO: 30160
aaggaugcucaagaaucac

SEQ ID NO: 30162 - RNA, 19 nt, Artificial Sequence
  Description of Artificial Sequence: Synthetic oligonucleotide
  Sense strand starting at position 1754 of SEQ ID NO: 346
uguaaccacuggucacaau

SEQ ID NO: 30163 - RNA, 19 nt, Artificial Sequence
  Description of Artificial Sequence: Synthetic oligonucleotide
  Antisense strand to SEQ ID NO: 30162
auugugaccagugguuaca

SEQ ID NO: 30164 - RNA, 19 nt, Artificial Sequence
  Description of Artificial Sequence: Synthetic oligonucleotide
  Sense strand starting at position 1719 of SEQ ID NO: 346
cuccuuacugauugaguac

SEQ ID NO: 30165 - RNA, 19 nt, Artificial Sequence
  Description of Artificial Sequence: Synthetic oligonucleotide
  Antisense strand to SEQ ID NO: 30164
guacucaaucaguaaggag

SEQ ID NO: 30166 - RNA, 19 nt, Artificial Sequence
  Description of Artificial Sequence: Synthetic oligonucleotide
  Sense strand starting at position 1612 of SEQ ID NO: 346
auuggauuguuccaaauuu

SEQ ID NO: 30167 - RNA, 19 nt, Artificial Sequence
  Description of Artificial Sequence: Synthetic oligonucleotide
  Antisense strand to SEQ ID NO: 30166
aaauuuggaacaauccaau

SEQ ID NO: 30168 - RNA, 19 nt, Artificial Sequence
  Description of Artificial Sequence: Synthetic oligonucleotide
  Sense strand starting at position 1609 of SEQ ID NO: 346
auuauuggauuguuccaaa

SEQ ID NO: 30169 - RNA, 19 nt, Artificial Sequence
  Description of Artificial Sequence: Synthetic oligonucleotide
  Antisense strand to SEQ ID NO: 30168
uuuggaacaauccaauaau

SEQ ID NO: 30170 - RNA, 19 nt, Artificial Sequence
  Description of Artificial Sequence: Synthetic oligonucleotide
  Sense strand starting at position 1607 of SEQ ID NO: 346
uuauuauuggauuguucca

SEQ ID NO: 30171 - RNA, 19 nt, Artificial Sequence
  Description of Artificial Sequence: Synthetic oligonucleotide
  Antisense strand to SEQ ID NO: 30170
uggaacaauccaauaauaa

SEQ ID NO: 30172 - RNA, 19 nt, Artificial Sequence
  Description of Artificial Sequence: Synthetic oligonucleotide
  Sense strand starting at position 1540 of SEQ ID NO: 346
gauaaugaugccuggacau

SEQ ID NO: 30173 - RNA, 19 nt, Artificial Sequence
  Description of Artificial Sequence: Synthetic oligonucleotide
  Antisense strand to SEQ ID NO: 30172
auguccaggcaucauuauc

SEQ ID NO: 30174 - RNA, 19 nt, Artificial Sequence
  Description of Artificial Sequence: Synthetic oligonucleotide
  Sense strand starting at position 1539 of SEQ ID NO: 346
agauaaugaugccuggaca

SEQ ID NO: 30175 - RNA, 19 nt, Artificial Sequence
  Description of Artificial Sequence: Synthetic oligonucleotide
  Antisense strand to SEQ ID NO: 30174
uguccaggcaucauuaucu

SEQ ID NO: 30176 - RNA, 19 nt, Artificial Sequence
  Description of Artificial Sequence: Synthetic oligonucleotide
  Sense strand starting at position 1513 of SEQ ID NO: 346
gccuuaguuccucauauua

SEQ ID NO: 30177 - RNA, 19 nt, Artificial Sequence
  Description of Artificial Sequence: Synthetic oligonucleotide
  Antisense strand to SEQ ID NO: 30176
uaauaugaggaacuaaggc

SEQ ID NO: 30178 - RNA, 19 nt, Artificial Sequence
  Description of Artificial Sequence: Synthetic oligonucleotide
  Sense strand starting at position 1387 of SEQ ID NO: 346
cugaaauuggcacaucuau

SEQ ID NO: 30179 - RNA, 19 nt, Artificial Sequence
  Description of Artificial Sequence: Synthetic oligonucleotide
  Antisense strand to SEQ ID NO: 30178
auagaugugccaauuucag

SEQ ID NO: 30180 - RNA, 19 nt, Artificial Sequence
  Description of Artificial Sequence: Synthetic oligonucleotide
  Sense strand starting at position 896 of SEQ ID NO: 346
aggcucagauauguuacau

SEQ ID NO: 30181 - RNA, 19 nt, Artificial Sequence
  Description of Artificial Sequence: Synthetic oligonucleotide
  Antisense strand to SEQ ID NO: 30180
auguaacauaucugagccu

SEQ ID NO: 30182 - RNA, 19 nt, Artificial Sequence
  Description of Artificial Sequence: Synthetic oligonucleotide
  Sense strand starting at position 798 of SEQ ID NO: 346
uaugguaaguauguuagau

SEQ ID NO: 30183 - RNA, 19 nt, Artificial Sequence
  Description of Artificial Sequence: Synthetic oligonucleotide
  Antisense strand to SEQ ID NO: 30182
aucuaacauacuuaccaua

SEQ ID NO: 30184 - RNA, 19 nt, Artificial Sequence
  Description of Artificial Sequence: Synthetic oligonucleotide
  Sense strand starting at position 794 of SEQ ID NO: 346
agacuaugguaaguauguu

SEQ ID NO: 30185 - RNA, 19 nt, Artificial Sequence
  Description of Artificial Sequence: Synthetic oligonucleotide
  Antisense strand to SEQ ID NO: 30184
aacauacuuaccauagucu

SEQ ID NO: 30186 - RNA, 19 nt, Artificial Sequence
  Description of Artificial Sequence: Synthetic oligonucleotide
  Sense strand starting at position 629 of SEQ ID NO: 346
gccaucacaguaggaauaa

SEQ ID NO: 30187 - RNA, 19 nt, Artificial Sequence
  Description of Artificial Sequence: Synthetic oligonucleotide
  Antisense strand to SEQ ID NO: 30186
uuauuccuacugugauggc

SEQ ID NO: 30188 - RNA, 19 nt, Artificial Sequence
  Description of Artificial Sequence: Synthetic oligonucleotide
  Sense strand starting at position 627 of SEQ ID NO: 346
uagccaucacaguaggaau

SEQ ID NO: 30189 - RNA, 19 nt, Artificial Sequence
  Description of Artificial Sequence: Synthetic oligonucleotide
  Antisense strand to SEQ ID NO: 30188
auuccuacugugauggcua

SEQ ID NO: 30190 - RNA, 19 nt, Artificial Sequence
  Description of Artificial Sequence: Synthetic oligonucleotide
  Sense strand starting at position 268 of SEQ ID NO: 346
cagcuuccugaaugguaau

SEQ ID NO: 30191 - RNA, 19 nt, Artificial Sequence
  Description of Artificial Sequence: Synthetic oligonucleotide
  Antisense strand to SEQ ID NO: 30190
auuaccauucaggaagcug

SEQ ID NO: 30192 - RNA, 19 nt, Artificial Sequence
  Description of Artificial Sequence: Synthetic oligonucleotide
  Sense strand starting at position 194 of SEQ ID NO: 346
ugagacacauaguuauacu

SEQ ID NO: 30193 - RNA, 19 nt, Artificial Sequence
  Description of Artificial Sequence: Synthetic oligonucleotide
  Antisense strand to SEQ ID NO: 30192
aguauaacuaugugucuca

SEQ ID NO: 30194 - RNA, 19 nt, Artificial Sequence
  Description of Artificial Sequence: Synthetic oligonucleotide
  Sense strand starting at position 109 of SEQ ID NO: 347
ccacaucugguaugagaga

SEQ ID NO: 30195 - RNA, 19 nt, Artificial Sequence
  Description of Artificial Sequence: Synthetic oligonucleotide
  Antisense strand to SEQ ID NO: 30194
ucucucauaccagaugugg

SEQ ID NO: 30196 - RNA, 19 nt, Artificial Sequence
  Description of Artificial Sequence: Synthetic oligonucleotide
  Sense strand starting at position 110 of SEQ ID NO: 347
cacaucugguaugagagaa

SEQ ID NO: 30197 - RNA, 19 nt, Artificial Sequence
  Description of Artificial Sequence: Synthetic oligonucleotide
  Antisense strand to SEQ ID NO: 30196
uucucucauaccagaugug

SEQ ID NO: 30198 - RNA, 19 nt, Artificial Sequence
  Description of Artificial Sequence: Synthetic oligonucleotide
  Sense strand starting at position 161 of SEQ ID NO: 347
cugucauccagugagucga

SEQ ID NO: 30199 - RNA, 19 nt, Artificial Sequence
  Description of Artificial Sequence: Synthetic oligonucleotide
  Antisense strand to SEQ ID NO: 30198
ucgacucacuggaugacag

SEQ ID NO: 30200 - RNA, 19 nt, Artificial Sequence
  Description of Artificial Sequence: Synthetic oligonucleotide
  Sense strand starting at position 174 of SEQ ID NO: 347
agucgagaccagggauguu

SEQ ID NO: 30201 - RNA, 19 nt, Artificial Sequence
  Description of Artificial Sequence: Synthetic oligonucleotide
  Antisense strand to SEQ ID NO: 30200
aacaucccuggucucgacu

SEQ ID NO: 30202 - RNA, 19 nt, Artificial Sequence
  Description of Artificial Sequence: Synthetic oligonucleotide
  Sense strand starting at position 192 of SEQ ID NO: 347
ugcugaauccugcagcaca

SEQ ID NO: 30203 - RNA, 19 nt, Artificial Sequence
  Description of Artificial Sequence: Synthetic oligonucleotide
  Antisense strand to SEQ ID NO: 30202
ugugcugcaggauucagca

SEQ ID NO: 30204 - RNA, 19 nt, Artificial Sequence
  Description of Artificial Sequence: Synthetic oligonucleotide
  Sense strand starting at position 258 of SEQ ID NO: 347
ugaaaucuguaaucccagu

SEQ ID NO: 30205 - RNA, 19 nt, Artificial Sequence
  Description of Artificial Sequence: Synthetic oligonucleotide
  Antisense strand to SEQ ID NO: 30204
acugggauuacagauuuca

SEQ ID NO: 30206 - RNA, 19 nt, Artificial Sequence
  Description of Artificial Sequence: Synthetic oligonucleotide
  Sense strand starting at position 489 of SEQ ID NO: 347
cgcacucugcccuggacaa

SEQ ID NO: 30207 - RNA, 19 nt, Artificial Sequence
  Description of Artificial Sequence: Synthetic oligonucleotide
  Antisense strand to SEQ ID NO: 30206
uuguccagggcagagugcg

SEQ ID NO: 30208 - RNA, 19 nt, Artificial Sequence
  Description of Artificial Sequence: Synthetic oligonucleotide
  Sense strand starting at position 508 of SEQ ID NO: 347
caggaaaccugucucagga

SEQ ID NO: 30209 - RNA, 19 nt, Artificial Sequence
  Description of Artificial Sequence: Synthetic oligonucleotide
  Antisense strand to SEQ ID NO: 30208
uccugagacagguuuccug

SEQ ID NO: 30210 - RNA, 19 nt, Artificial Sequence
  Description of Artificial Sequence: Synthetic oligonucleotide
  Sense strand starting at position 537 of SEQ ID NO: 347
gauuauccagccugaaugu

SEQ ID NO: 30211 - RNA, 19 nt, Artificial Sequence
  Description of Artificial Sequence: Synthetic oligonucleotide
  Antisense strand to SEQ ID NO: 30210
acauucaggcuggauaauc

SEQ ID NO: 30212 - RNA, 19 nt, Artificial Sequence
  Description of Artificial Sequence: Synthetic oligonucleotide
  Sense strand starting at position 559 of SEQ ID NO: 347
uagugcugagauuaagauu

SEQ ID NO: 30213 - RNA, 19 nt, Artificial Sequence
  Description of Artificial Sequence: Synthetic oligonucleotide
  Antisense strand to SEQ ID NO: 30212
aaucuuaaucucagcacua

SEQ ID NO: 30214 - RNA, 19 nt, Artificial Sequence
  Description of Artificial Sequence: Synthetic oligonucleotide
  Sense strand starting at position 628 of SEQ ID NO: 347
cgugcacugacauggguaa

SEQ ID NO: 30215 - RNA, 19 nt, Artificial Sequence
  Description of Artificial Sequence: Synthetic oligonucleotide
  Antisense strand to SEQ ID NO: 30214
uuacccaugucagugcacg

SEQ ID NO: 30216 - RNA, 19 nt, Artificial Sequence
  Description of Artificial Sequence: Synthetic oligonucleotide
  Sense strand starting at position 629 of SEQ ID NO: 347
gugcacugacauggguaaa

SEQ ID NO: 30217 - RNA, 19 nt, Artificial Sequence
  Description of Artificial Sequence: Synthetic oligonucleotide
  Antisense strand to SEQ ID NO: 30216
uuuacccaugucagugcac

SEQ ID NO: 30218 - RNA, 19 nt, Artificial Sequence
  Description of Artificial Sequence: Synthetic oligonucleotide
  Sense strand starting at position 760 of SEQ ID NO: 347
ugagacugcgcucaugaau

SEQ ID NO: 30219 - RNA, 19 nt, Artificial Sequence
  Description of Artificial Sequence: Synthetic oligonucleotide
  Antisense strand to SEQ ID NO: 30218
auucaugagcgcagucuca

SEQ ID NO: 30220 - RNA, 19 nt, Artificial Sequence
  Description of Artificial Sequence: Synthetic oligonucleotide
  Sense strand starting at position 871 of SEQ ID NO: 347
acuagacagcucugacuga

SEQ ID NO: 30221 - RNA, 19 nt, Artificial Sequence
  Description of Artificial Sequence: Synthetic oligonucleotide
  Antisense strand to SEQ ID NO: 30220
ucagucagagcugucuagu

SEQ ID NO: 30222 - RNA, 19 nt, Artificial Sequence
  Description of Artificial Sequence: Synthetic oligonucleotide
  Sense strand starting at position 917 of SEQ ID NO: 347
ggcggugaaacacauugau

SEQ ID NO: 30223 - RNA, 19 nt, Artificial Sequence
  Description of Artificial Sequence: Synthetic oligonucleotide
  Antisense strand to SEQ ID NO: 30222
aucaauguguuucaccgcc

SEQ ID NO: 30224 - RNA, 19 nt, Artificial Sequence
  Description of Artificial Sequence: Synthetic oligonucleotide
  Sense strand starting at position 957 of SEQ ID NO: 347
ggccucuucuaucuuggaa

SEQ ID NO: 30225 - RNA, 19 nt, Artificial Sequence
  Description of Artificial Sequence: Synthetic oligonucleotide
  Antisense strand to SEQ ID NO: 30224
uuccaagauagaagaggcc

SEQ ID NO: 30226 - RNA, 19 nt, Artificial Sequence
  Description of Artificial Sequence: Synthetic oligonucleotide
  Sense strand starting at position 1168 of SEQ ID NO: 347
aguacucacucccuuagua

SEQ ID NO: 30227 - RNA, 19 nt, Artificial Sequence
  Description of Artificial Sequence: Synthetic oligonucleotide
  Antisense strand to SEQ ID NO: 30226
uacuaagggagugaguacu

SEQ ID NO: 30228 - RNA, 19 nt, Artificial Sequence
  Description of Artificial Sequence: Synthetic oligonucleotide
  Sense strand starting at position 1178 of SEQ ID NO: 347
cccuuaguaaccgggcaaa

SEQ ID NO: 30229 - RNA, 19 nt, Artificial Sequence
  Description of Artificial Sequence: Synthetic oligonucleotide
  Antisense strand to SEQ ID NO: 30228
uuugcccgguuacuaaggg

SEQ ID NO: 30230 - RNA, 19 nt, Artificial Sequence
  Description of Artificial Sequence: Synthetic oligonucleotide
  Sense strand starting at position 1181 of SEQ ID NO: 347
uuaguaaccgggcaaagua

SEQ ID NO: 30231 - RNA, 19 nt, Artificial Sequence
  Description of Artificial Sequence: Synthetic oligonucleotide
  Antisense strand to SEQ ID NO: 30230
uacuuugcccgguuacuaa

SEQ ID NO: 30232 - RNA, 19 nt, Artificial Sequence
  Description of Artificial Sequence: Synthetic oligonucleotide
  Sense strand starting at position 1217 of SEQ ID NO: 347
caacauacuucgcugggaa

SEQ ID NO: 30233 - RNA, 19 nt, Artificial Sequence
  Description of Artificial Sequence: Synthetic oligonucleotide
  Antisense strand to SEQ ID NO: 30232
uucccagcgaaguauguug

SEQ ID NO: 30234 - RNA, 19 nt, Artificial Sequence
  Description of Artificial Sequence: Synthetic oligonucleotide
  Sense strand starting at position 1218 of SEQ ID NO: 347
aacauacuucgcugggaau

SEQ ID NO: 30235 - RNA, 19 nt, Artificial Sequence
  Description of Artificial Sequence: Synthetic oligonucleotide
  Antisense strand to SEQ ID NO: 30234
auucccagcgaaguauguu

SEQ ID NO: 30236 - RNA, 19 nt, Artificial Sequence
  Description of Artificial Sequence: Synthetic oligonucleotide
  Sense strand starting at position 1220 of SEQ ID NO: 347
cauacuucgcugggaauga

SEQ ID NO: 30237 - RNA, 19 nt, Artificial Sequence
  Description of Artificial Sequence: Synthetic oligonucleotide
  Antisense strand to SEQ ID NO: 30236
ucauucccagcgaaguaug

SEQ ID NO: 30238 - RNA, 19 nt, Artificial Sequence
  Description of Artificial Sequence: Synthetic oligonucleotide
  Sense strand starting at position 1273 of SEQ ID NO: 347
ucacgaaggacuugguaua

SEQ ID NO: 30239 - RNA, 19 nt, Artificial Sequence
  Description of Artificial Sequence: Synthetic oligonucleotide
  Antisense strand to SEQ ID NO: 30238
uauaccaaguccuucguga

SEQ ID NO: 30240 - RNA, 19 nt, Artificial Sequence
  Description of Artificial Sequence: Synthetic oligonucleotide
  Sense strand starting at position 1274 of SEQ ID NO: 347
cacgaaggacuugguauaa

SEQ ID NO: 30241 - RNA, 19 nt, Artificial Sequence
  Description of Artificial Sequence: Synthetic oligonucleotide
  Antisense strand to SEQ ID NO: 30240
uuauaccaaguccuucgug

SEQ ID NO: 30242 - RNA, 19 nt, Artificial Sequence
  Description of Artificial Sequence: Synthetic oligonucleotide
  Sense strand starting at position 1341 of SEQ ID NO: 347
agaagaaaguuuccguauu

SEQ ID NO: 30243 - RNA, 19 nt, Artificial Sequence
  Description of Artificial Sequence: Synthetic oligonucleotide
  Antisense strand to SEQ ID NO: 30242
aauacggaaacuuucuucu

SEQ ID NO: 30244 - RNA, 19 nt, Artificial Sequence
  Description of Artificial Sequence: Synthetic oligonucleotide
  Sense strand starting at position 1387 of SEQ ID NO: 347
ggccgaaagucaucgagua

SEQ ID NO: 30245 - RNA, 19 nt, Artificial Sequence
  Description of Artificial Sequence: Synthetic oligonucleotide
  Antisense strand to SEQ ID NO: 30244
uacucgaugacuuucggcc

SEQ ID NO: 30246 - RNA, 19 nt, Artificial Sequence
  Description of Artificial Sequence: Synthetic oligonucleotide
  Sense strand starting at position 1388 of SEQ ID NO: 347
gccgaaagucaucgaguaa

SEQ ID NO: 30247 - RNA, 19 nt, Artificial Sequence
  Description of Artificial Sequence: Synthetic oligonucleotide
  Antisense strand to SEQ ID NO: 30246
uuacucgaugacuuucggc

SEQ ID NO: 30248 - RNA, 19 nt, Artificial Sequence
  Description of Artificial Sequence: Synthetic oligonucleotide
  Sense strand starting at position 1389 of SEQ ID NO: 347
ccgaaagucaucgaguaac

SEQ ID NO: 30249 - RNA, 19 nt, Artificial Sequence
  Description of Artificial Sequence: Synthetic oligonucleotide
  Antisense strand to SEQ ID NO: 30248
guuacucgaugacuuucgg

SEQ ID NO: 30250 - RNA, 19 nt, Artificial Sequence
  Description of Artificial Sequence: Synthetic oligonucleotide
  Sense strand starting at position 1813 of SEQ ID NO: 347
gcaguucuccaaggugaug

SEQ ID NO: 30251 - RNA, 19 nt, Artificial Sequence
  Description of Artificial Sequence: Synthetic oligonucleotide
  Antisense strand to SEQ ID NO: 30250
caucaccuuggagaacugc

SEQ ID NO: 30252 - RNA, 19 nt, Artificial Sequence
  Description of Artificial Sequence: Synthetic oligonucleotide
  Sense strand starting at position 2094 of SEQ ID NO: 347
gccgcaauuggcuacauaa

SEQ ID NO: 30253 - RNA, 19 nt, Artificial Sequence
  Description of Artificial Sequence: Synthetic oligonucleotide
  Antisense strand to SEQ ID NO: 30252
uuauguagccaauugcggc

SEQ ID NO: 30254 - RNA, 19 nt, Artificial Sequence
  Description of Artificial Sequence: Synthetic oligonucleotide
  Sense strand starting at position 2536 of SEQ ID NO: 347
ugcguauuaacgccagacu

SEQ ID NO: 30255 - RNA, 19 nt, Artificial Sequence
  Description of Artificial Sequence: Synthetic oligonucleotide
  Antisense strand to SEQ ID NO: 30254
agucuggcguuaauacgca

SEQ ID NO: 30256 - RNA, 19 nt, Artificial Sequence
  Description of Artificial Sequence: Synthetic oligonucleotide
  Sense strand starting at position 2539 of SEQ ID NO: 347
guauuaacgccagacuccu

SEQ ID NO: 30257 - RNA, 19 nt, Artificial Sequence
  Description of Artificial Sequence: Synthetic oligonucleotide
  Antisense strand to SEQ ID NO: 30256
aggagucuggcguuaauac

SEQ ID NO: 30258 - RNA, 19 nt, Artificial Sequence
  Description of Artificial Sequence: Synthetic oligonucleotide
  Sense strand starting at position 2547 of SEQ ID NO: 347
gccagacuccugcaaaguc

SEQ ID NO: 30259 - RNA, 19 nt, Artificial Sequence
  Description of Artificial Sequence: Synthetic oligonucleotide
  Antisense strand to SEQ ID NO: 30258
gacuuugcaggagucuggc

SEQ ID NO: 30260 - RNA, 19 nt, Artificial Sequence
  Description of Artificial Sequence: Synthetic oligonucleotide
  Sense strand starting at position 2661 of SEQ ID NO: 347
gccuaaguaccucaagguu

SEQ ID NO: 30261 - RNA, 19 nt, Artificial Sequence
  Description of Artificial Sequence: Synthetic oligonucleotide
  Antisense strand to SEQ ID NO: 30260
aaccuugagguacuuaggc

SEQ ID NO: 30262 - RNA, 19 nt, Artificial Sequence
  Description of Artificial Sequence: Synthetic oligonucleotide
  Sense strand starting at position 2713 of SEQ ID NO: 347
cggugaucuacgugugaag

SEQ ID NO: 30263 - RNA, 19 nt, Artificial Sequence
  Description of Artificial Sequence: Synthetic oligonucleotide
  Antisense strand to SEQ ID NO: 30262
cuucacacguagaucaccg

SEQ ID NO: 30264 - RNA, 19 nt, Artificial Sequence
  Description of Artificial Sequence: Synthetic oligonucleotide
  Sense strand starting at position 2715 of SEQ ID NO: 347
gugaucuacgugugaagga

SEQ ID NO: 30265 - RNA, 19 nt, Artificial Sequence
  Description of Artificial Sequence: Synthetic oligonucleotide
  Antisense strand to SEQ ID NO: 30264
uccuucacacguagaucac

SEQ ID NO: 30266 - RNA, 19 nt, Artificial Sequence
  Description of Artificial Sequence: Synthetic oligonucleotide
  Sense strand starting at position 2782 of SEQ ID NO: 347
gcguuuguaacgucuugac

SEQ ID NO: 30267 - RNA, 19 nt, Artificial Sequence
  Description of Artificial Sequence: Synthetic oligonucleotide
  Antisense strand to SEQ ID NO: 30266
gucaagacguuacaaacgc

SEQ ID NO: 30268 - RNA, 19 nt, Artificial Sequence
  Description of Artificial Sequence: Synthetic oligonucleotide
  Sense strand starting at position 3034 of SEQ ID NO: 347
gccugagugguugcagguu

SEQ ID NO: 30269 - RNA, 19 nt, Artificial Sequence
  Description of Artificial Sequence: Synthetic oligonucleotide
  Antisense strand to SEQ ID NO: 30268
aaccugcaaccacucaggc

SEQ ID NO: 30270 - RNA, 19 nt, Artificial Sequence
  Description of Artificial Sequence: Synthetic oligonucleotide
  Sense strand starting at position 3209 of SEQ ID NO: 347
ccgccuguuauggguaaca

SEQ ID NO: 30271 - RNA, 19 nt, Artificial Sequence
  Description of Artificial Sequence: Synthetic oligonucleotide
  Antisense strand to SEQ ID NO: 30270
uguuacccauaacaggcgg

SEQ ID NO: 30272 - RNA, 19 nt, Artificial Sequence
  Description of Artificial Sequence: Synthetic oligonucleotide
  Sense strand starting at position 3233 of SEQ ID NO: 347
ugguuacagcuuuacucau

SEQ ID NO: 30273 - RNA, 19 nt, Artificial Sequence
  Description of Artificial Sequence: Synthetic oligonucleotide
  Antisense strand to SEQ ID NO: 30272
augaguaaagcuguaacca

SEQ ID NO: 30274 - RNA, 19 nt, Artificial Sequence
  Description of Artificial Sequence: Synthetic oligonucleotide
  Sense strand starting at position 328 of SEQ ID NO: 348
uucccagaucagugacuga

SEQ ID NO: 30275 - RNA, 19 nt, Artificial Sequence
  Description of Artificial Sequence: Synthetic oligonucleotide
  Antisense strand to SEQ ID NO: 30274
ucagucacugaucugggaa

SEQ ID NO: 30276 - RNA, 19 nt, Artificial Sequence
  Description of Artificial Sequence: Synthetic oligonucleotide
  Sense strand starting at position 332 of SEQ ID NO: 348
cagaucagugacugaaugu

SEQ ID NO: 30277 - RNA, 19 nt, Artificial Sequence
  Description of Artificial Sequence: Synthetic oligonucleotide
  Antisense strand to SEQ ID NO: 30276
acauucagucacugaucug

SEQ ID NO: 30278 - RNA, 19 nt, Artificial Sequence
  Description of Artificial Sequence: Synthetic oligonucleotide
  Sense strand starting at position 427 of SEQ ID NO: 348
uugguuacuccaggcugua

SEQ ID NO: 30279 - RNA, 19 nt, Artificial Sequence
  Description of Artificial Sequence: Synthetic oligonucleotide
  Antisense strand to SEQ ID NO: 30278
uacagccuggaguaaccaa

SEQ ID NO: 30280 - RNA, 19 nt, Artificial Sequence
  Description of Artificial Sequence: Synthetic oligonucleotide
  Sense strand starting at position 728 of SEQ ID NO: 348
aaagcuuagcucugugguu

SEQ ID NO: 30281 - RNA, 19 nt, Artificial Sequence
  Description of Artificial Sequence: Synthetic oligonucleotide
  Antisense strand to SEQ ID NO: 30280
aaccacagagcuaagcuuu

SEQ ID NO: 30282 - RNA, 19 nt, Artificial Sequence
  Description of Artificial Sequence: Synthetic oligonucleotide
  Sense strand starting at position 733 of SEQ ID NO: 348
uuagcucugugguucuuaa

SEQ ID NO: 30283 - RNA, 19 nt, Artificial Sequence
  Description of Artificial Sequence: Synthetic oligonucleotide
  Antisense strand to SEQ ID NO: 30282
uuaagaaccacagagcuaa

SEQ ID NO: 30284 - RNA, 19 nt, Artificial Sequence
  Description of Artificial Sequence: Synthetic oligonucleotide
  Sense strand starting at position 756 of SEQ ID NO: 348
uuggguuaccuuugagaau

SEQ ID NO: 30285 - RNA, 19 nt, Artificial Sequence
  Description of Artificial Sequence: Synthetic oligonucleotide
  Antisense strand to SEQ ID NO: 30284
auucucaaagguaacccaa

SEQ ID NO: 30286 - RNA, 19 nt, Artificial Sequence
  Description of Artificial Sequence: Synthetic oligonucleotide
  Sense strand starting at position 757 of SEQ ID NO: 348
uggguuaccuuugagaauc

SEQ ID NO: 30287 - RNA, 19 nt, Artificial Sequence
  Description of Artificial Sequence: Synthetic oligonucleotide
  Antisense strand to SEQ ID NO: 30286
gauucucaaagguaaccca

SEQ ID NO: 30288 - RNA, 19 nt, Artificial Sequence
  Description of Artificial Sequence: Synthetic oligonucleotide
  Sense strand starting at position 834 of SEQ ID NO: 348
cucagugguucgccaagaa

SEQ ID NO: 30289 - RNA, 19 nt, Artificial Sequence
  Description of Artificial Sequence: Synthetic oligonucleotide
  Antisense strand to SEQ ID NO: 30288
uucuuggcgaaccacugag

SEQ ID NO: 30290 - RNA, 19 nt, Artificial Sequence
  Description of Artificial Sequence: Synthetic oligonucleotide
  Sense strand starting at position 838 of SEQ ID NO: 348
gugguucgccaagaaauaa

SEQ ID NO: 30291 - RNA, 19 nt, Artificial Sequence
  Description of Artificial Sequence: Synthetic oligonucleotide
  Antisense strand to SEQ ID NO: 30290
uuauuucuuggcgaaccac

SEQ ID NO: 30292 - RNA, 19 nt, Artificial Sequence
  Description of Artificial Sequence: Synthetic oligonucleotide
  Sense strand starting at position 1476 of SEQ ID NO: 348
ccugguagcgcuucaugua

SEQ ID NO: 30293 - RNA, 19 nt, Artificial Sequence
  Description of Artificial Sequence: Synthetic oligonucleotide
  Antisense strand to SEQ ID NO: 30292
uacaugaagcgcuaccagg

SEQ ID NO: 30294 - RNA, 19 nt, Artificial Sequence
  Description of Artificial Sequence: Synthetic oligonucleotide
  Sense strand starting at position 2061 of SEQ ID NO: 348
cuuuccuccugagcaagau

SEQ ID NO: 30295 - RNA, 19 nt, Artificial Sequence
  Description of Artificial Sequence: Synthetic oligonucleotide
  Antisense strand to SEQ ID NO: 30294
aucuugcucaggaggaaag

SEQ ID NO: 30296 - RNA, 19 nt, Artificial Sequence
  Description of Artificial Sequence: Synthetic oligonucleotide
  Sense strand starting at position 2338 of SEQ ID NO: 348
gcaggagucgucaguuagg

SEQ ID NO: 30297 - RNA, 19 nt, Artificial Sequence
  Description of Artificial Sequence: Synthetic oligonucleotide
  Antisense strand to SEQ ID NO: 30296
ccuaacugacgacuccugc

SEQ ID NO: 30298 - RNA, 19 nt, Artificial Sequence
  Description of Artificial Sequence: Synthetic oligonucleotide
  Sense strand starting at position 2467 of SEQ ID NO: 348
cuguuacucuggcuuuaac

SEQ ID NO: 30299 - RNA, 19 nt, Artificial Sequence
  Description of Artificial Sequence: Synthetic oligonucleotide
  Antisense strand to SEQ ID NO: 30298
guuaaagccagaguaacag

SEQ ID NO: 30300 - RNA, 19 nt, Artificial Sequence
  Description of Artificial Sequence: Synthetic oligonucleotide
  Sense strand starting at position 2546 of SEQ ID NO: 348
cucagagauucguuugcac

SEQ ID NO: 30301 - RNA, 19 nt, Artificial Sequence
  Description of Artificial Sequence: Synthetic oligonucleotide
  Antisense strand to SEQ ID NO: 30300
gugcaaacgaaucucugag

SEQ ID NO: 30302 - RNA, 19 nt, Artificial Sequence
  Description of Artificial Sequence: Synthetic oligonucleotide
  Sense strand starting at position 2548 of SEQ ID NO: 348
cagagauucguuugcacau

SEQ ID NO: 30303 - RNA, 19 nt, Artificial Sequence
  Description of Artificial Sequence: Synthetic oligonucleotide
  Antisense strand to SEQ ID NO: 30302
augugcaaacgaaucucug

SEQ ID NO: 30304 - RNA, 19 nt, Artificial Sequence
  Description of Artificial Sequence: Synthetic oligonucleotide
  Sense strand starting at position 2549 of SEQ ID NO: 348
agagauucguuugcacaua

SEQ ID NO: 30305 - RNA, 19 nt, Artificial Sequence
  Description of Artificial Sequence: Synthetic oligonucleotide
  Antisense strand to SEQ ID NO: 30304
uaugugcaaacgaaucucu

SEQ ID NO: 30306 - RNA, 19 nt, Artificial Sequence
  Description of Artificial Sequence: Synthetic oligonucleotide
  Sense strand starting at position 2586 of SEQ ID NO: 348
uuacguugugcagaaguau

SEQ ID NO: 30307 - RNA, 19 nt, Artificial Sequence
  Description of Artificial Sequence: Synthetic oligonucleotide
  Antisense strand to SEQ ID NO: 30306
auacuucugcacaacguaa

SEQ ID NO: 30308 - RNA, 19 nt, Artificial Sequence
  Description of Artificial Sequence: Synthetic oligonucleotide
  Sense strand starting at position 2683 of SEQ ID NO: 348
uccaguuacuuugugcaga

SEQ ID NO: 30309 - RNA, 19 nt, Artificial Sequence
  Description of Artificial Sequence: Synthetic oligonucleotide
  Antisense strand to SEQ ID NO: 30308
ucugcacaaaguaacugga

SEQ ID NO: 30310 - RNA, 19 nt, Artificial Sequence
  Description of Artificial Sequence: Synthetic oligonucleotide
  Sense strand starting at position 2685 of SEQ ID NO: 348
caguuacuuugugcagaag

SEQ ID NO: 30311 - RNA, 19 nt, Artificial Sequence
  Description of Artificial Sequence: Synthetic oligonucleotide
  Antisense strand to SEQ ID NO: 30310
cuucugcacaaaguaacug

SEQ ID NO: 30312 - RNA, 19 nt, Artificial Sequence
  Description of Artificial Sequence: Synthetic oligonucleotide
  Sense strand starting at position 2688 of SEQ ID NO: 348
uuacuuugugcagaaguau

SEQ ID NO: 30313 - RNA, 19 nt, Artificial Sequence
  Description of Artificial Sequence: Synthetic oligonucleotide
  Antisense strand to SEQ ID NO: 30312
auacuucugcacaaaguaa

SEQ ID NO: 30314 - RNA, 19 nt, Artificial Sequence
  Description of Artificial Sequence: Synthetic oligonucleotide
  Sense strand starting at position 3116 of SEQ ID NO: 348
ccaguuacauuguacagaa

SEQ ID NO: 30315 - RNA, 19 nt, Artificial Sequence
  Description of Artificial Sequence: Synthetic oligonucleotide
  Antisense strand to SEQ ID NO: 30314
uucuguacaauguaacugg

SEQ ID NO: 30316 - RNA, 19 nt, Artificial Sequence
  Description of Artificial Sequence: Synthetic oligonucleotide
  Sense strand starting at position 3313 of SEQ ID NO: 348
cggcuuccacgucaggauu

SEQ ID NO: 30317 - RNA, 19 nt, Artificial Sequence
  Description of Artificial Sequence: Synthetic oligonucleotide
  Antisense strand to SEQ ID NO: 30316
aauccugacguggaagccg

SEQ ID NO: 30318 - RNA, 19 nt, Artificial Sequence
  Description of Artificial Sequence: Synthetic oligonucleotide
  Sense strand starting at position 3324 of SEQ ID NO: 348
ucaggauucccacgaauuc

SEQ ID NO: 30319 - RNA, 19 nt, Artificial Sequence
  Description of Artificial Sequence: Synthetic oligonucleotide
  Antisense strand to SEQ ID NO: 30318
gaauucgugggaauccuga

SEQ ID NO: 30320 - RNA, 19 nt, Artificial Sequence
  Description of Artificial Sequence: Synthetic oligonucleotide
  Sense strand starting at position 3443 of SEQ ID NO: 348
cagaccgucugcucugaaa

SEQ ID NO: 30321 - RNA, 19 nt, Artificial Sequence
  Description of Artificial Sequence: Synthetic oligonucleotide
  Antisense strand to SEQ ID NO: 30320
uuucagagcagacggucug

SEQ ID NO: 30322 - RNA, 19 nt, Artificial Sequence
  Description of Artificial Sequence: Synthetic oligonucleotide
  Sense strand starting at position 3465 of SEQ ID NO: 348
ugaaguuacuaguccaauc

SEQ ID NO: 30323 - RNA, 19 nt, Artificial Sequence
  Description of Artificial Sequence: Synthetic oligonucleotide
  Antisense strand to SEQ ID NO: 30322
gauuggacuaguaacuuca

SEQ ID NO: 30324 - RNA, 19 nt, Artificial Sequence
  Description of Artificial Sequence: Synthetic oligonucleotide
  Sense strand starting at position 3479 of SEQ ID NO: 348
caaucauuagcacgggauu

SEQ ID NO: 30325 - RNA, 19 nt, Artificial Sequence
  Description of Artificial Sequence: Synthetic oligonucleotide
  Antisense strand to SEQ ID NO: 30324
aaucccgugcuaaugauug

SEQ ID NO: 30326 - RNA, 19 nt, Artificial Sequence
  Description of Artificial Sequence: Synthetic oligonucleotide
  Sense strand starting at position 3494 of SEQ ID NO: 348
gauuguguuaauggcaguu

SEQ ID NO: 30327 - RNA, 19 nt, Artificial Sequence
  Description of Artificial Sequence: Synthetic oligonucleotide
  Antisense strand to SEQ ID NO: 30326
aacugccauuaacacaauc

SEQ ID NO: 30328 - RNA, 19 nt, Artificial Sequence
  Description of Artificial Sequence: Synthetic oligonucleotide
  Sense strand starting at position 3592 of SEQ ID NO: 348
ucuguuccuugacuuacau

SEQ ID NO: 30329 - RNA, 19 nt, Artificial Sequence
  Description of Artificial Sequence: Synthetic oligonucleotide
  Antisense strand to SEQ ID NO: 30328
auguaagucaaggaacaga

SEQ ID NO: 30330 - RNA, 19 nt, Artificial Sequence
  Description of Artificial Sequence: Synthetic oligonucleotide
  Sense strand starting at position 3601 of SEQ ID NO: 348
ugacuuacauuagggacau

SEQ ID NO: 30331 - RNA, 19 nt, Artificial Sequence
  Description of Artificial Sequence: Synthetic oligonucleotide
  Antisense strand to SEQ ID NO: 30330
augucccuaauguaaguca

SEQ ID NO: 30332 - RNA, 19 nt, Artificial Sequence
  Description of Artificial Sequence: Synthetic oligonucleotide
  Sense strand starting at position 3602 of SEQ ID NO: 348
gacuuacauuagggacauu

SEQ ID NO: 30333 - RNA, 19 nt, Artificial Sequence
  Description of Artificial Sequence: Synthetic oligonucleotide
  Antisense strand to SEQ ID NO: 30332
aaugucccuaauguaaguc

SEQ ID NO: 30334 - RNA, 19 nt, Artificial Sequence
  Description of Artificial Sequence: Synthetic oligonucleotide
  Sense strand starting at position 3709 of SEQ ID NO: 348
gggaaaugguuauauguag

SEQ ID NO: 30335 - RNA, 19 nt, Artificial Sequence
  Description of Artificial Sequence: Synthetic oligonucleotide
  Antisense strand to SEQ ID NO: 30334
cuacauauaaccauuuccc

SEQ ID NO: 30336 - RNA, 19 nt, Artificial Sequence
  Description of Artificial Sequence: Synthetic oligonucleotide
  Sense strand starting at position 3716 of SEQ ID NO: 348
gguuauauguaguucuaug

SEQ ID NO: 30337 - RNA, 19 nt, Artificial Sequence
  Description of Artificial Sequence: Synthetic oligonucleotide
  Antisense strand to SEQ ID NO: 30336
cauagaacuacauauaacc

SEQ ID NO: 30338 - RNA, 19 nt, Artificial Sequence
  Description of Artificial Sequence: Synthetic oligonucleotide
  Sense strand starting at position 3721 of SEQ ID NO: 348
uauguaguucuaugggaca

SEQ ID NO: 30339 - RNA, 19 nt, Artificial Sequence
  Description of Artificial Sequence: Synthetic oligonucleotide
  Antisense strand to SEQ ID NO: 30338
ugucccauagaacuacaua

SEQ ID NO: 30340 - RNA, 19 nt, Artificial Sequence
  Description of Artificial Sequence: Synthetic oligonucleotide
  Sense strand starting at position 3723 of SEQ ID NO: 348
uguaguucuaugggacaug

SEQ ID NO: 30341 - RNA, 19 nt, Artificial Sequence
  Description of Artificial Sequence: Synthetic oligonucleotide
  Antisense strand to SEQ ID NO: 30340
caugucccauagaacuaca

SEQ ID NO: 30342 - RNA, 19 nt, Artificial Sequence
  Description of Artificial Sequence: Synthetic oligonucleotide
  Sense strand starting at position 3823 of SEQ ID NO: 348
uuaugauucugaggguuag

SEQ ID NO: 30343 - RNA, 19 nt, Artificial Sequence
  Description of Artificial Sequence: Synthetic oligonucleotide
  Antisense strand to SEQ ID NO: 30342
cuaacccucagaaucauaa

SEQ ID NO: 30344 - RNA, 19 nt, Artificial Sequence
  Description of Artificial Sequence: Synthetic oligonucleotide
  Sense strand starting at position 3860 of SEQ ID NO: 348
guuggauucugauggagag

SEQ ID NO: 30345 - RNA, 19 nt, Artificial Sequence
  Description of Artificial Sequence: Synthetic oligonucleotide
  Antisense strand to SEQ ID NO: 30344
cucuccaucagaauccaac

SEQ ID NO: 30346 - RNA, 19 nt, Artificial Sequence
  Description of Artificial Sequence: Synthetic oligonucleotide
  Sense strand starting at position 3908 of SEQ ID NO: 348
uccugauauaguugggaua

SEQ ID NO: 30347 - RNA, 19 nt, Artificial Sequence
  Description of Artificial Sequence: Synthetic oligonucleotide
  Antisense strand to SEQ ID NO: 30346
uaucccaacuauaucagga

SEQ ID NO: 30348 - RNA, 19 nt, Artificial Sequence
  Description of Artificial Sequence: Synthetic oligonucleotide
  Sense strand starting at position 3909 of SEQ ID NO: 348
ccugauauaguugggauaa

SEQ ID NO: 30349 - RNA, 19 nt, Artificial Sequence
  Description of Artificial Sequence: Synthetic oligonucleotide
  Antisense strand to SEQ ID NO: 30348
uuaucccaacuauaucagg

SEQ ID NO: 30350 - RNA, 19 nt, Artificial Sequence
  Description of Artificial Sequence: Synthetic oligonucleotide
  Sense strand starting at position 3910 of SEQ ID NO: 348
cugauauaguugggauaau

SEQ ID NO: 30351 - RNA, 19 nt, Artificial Sequence
  Description of Artificial Sequence: Synthetic oligonucleotide
  Antisense strand to SEQ ID NO: 30350
auuaucccaacuauaucag

SEQ ID NO: 30352 - RNA, 19 nt, Artificial Sequence
  Description of Artificial Sequence: Synthetic oligonucleotide
  Sense strand starting at position 3911 of SEQ ID NO: 348
ugauauaguugggauaauu

SEQ ID NO: 30353 - RNA, 19 nt, Artificial Sequence
  Description of Artificial Sequence: Synthetic oligonucleotide
  Antisense strand to SEQ ID NO: 30352
aauuaucccaacuauauca

SEQ ID NO: 30354 - RNA, 19 nt, Artificial Sequence
  Description of Artificial Sequence: Synthetic oligonucleotide
  Sense strand starting at position 49 of SEQ ID NO: 349
acagcauacuguuuagaac

SEQ ID NO: 30355 - RNA, 19 nt, Artificial Sequence
  Description of Artificial Sequence: Synthetic oligonucleotide
  Antisense strand to SEQ ID NO: 30354
guucuaaacaguaugcugu

SEQ ID NO: 30356 - RNA, 19 nt, Artificial Sequence
  Description of Artificial Sequence: Synthetic oligonucleotide
  Sense strand starting at position 70 of SEQ ID NO: 349
acucaacaguuugcaagau

SEQ ID NO: 30357 - RNA, 19 nt, Artificial Sequence
  Description of Artificial Sequence: Synthetic oligonucleotide
  Antisense strand to SEQ ID NO: 30356
aucuugcaaacuguugagu

SEQ ID NO: 30358 - RNA, 19 nt, Artificial Sequence
  Description of Artificial Sequence: Synthetic oligonucleotide
  Sense strand starting at position 104 of SEQ ID NO: 349
cucauaauuggauguaaua

SEQ ID NO: 30359 - RNA, 19 nt, Artificial Sequence
  Description of Artificial Sequence: Synthetic oligonucleotide
  Antisense strand to SEQ ID NO: 30358
uauuacauccaauuaugag

SEQ ID NO: 30360 - RNA, 19 nt, Artificial Sequence
  Description of Artificial Sequence: Synthetic oligonucleotide
  Sense strand starting at position 275 of SEQ ID NO: 349
gagacaagccagugguuau

SEQ ID NO: 30361 - RNA, 19 nt, Artificial Sequence
  Description of Artificial Sequence: Synthetic oligonucleotide
  Antisense strand to SEQ ID NO: 30360
auaaccacuggcuugucuc

SEQ ID NO: 30362 - RNA, 19 nt, Artificial Sequence
  Description of Artificial Sequence: Synthetic oligonucleotide
  Sense strand starting at position 276 of SEQ ID NO: 349
agacaagccagugguuaua

SEQ ID NO: 30363 - RNA, 19 nt, Artificial Sequence
  Description of Artificial Sequence: Synthetic oligonucleotide
  Antisense strand to SEQ ID NO: 30362
uauaaccacuggcuugucu

SEQ ID NO: 30364 - RNA, 19 nt, Artificial Sequence
  Description of Artificial Sequence: Synthetic oligonucleotide
  Sense strand starting at position 395 of SEQ ID NO: 349
acccacaaugcuuaggauu

SEQ ID NO: 30365 - RNA, 19 nt, Artificial Sequence
  Description of Artificial Sequence: Synthetic oligonucleotide
  Antisense strand to SEQ ID NO: 30364
aauccuaagcauugugggu

SEQ ID NO: 30366 - RNA, 19 nt, Artificial Sequence
  Description of Artificial Sequence: Synthetic oligonucleotide
  Sense strand starting at position 571 of SEQ ID NO: 349
gcagucaguauacagaaga

SEQ ID NO: 30367 - RNA, 19 nt, Artificial Sequence
  Description of Artificial Sequence: Synthetic oligonucleotide
  Antisense strand to SEQ ID NO: 30366
ucuucuguauacugacugc

SEQ ID NO: 30368 - RNA, 19 nt, Artificial Sequence
  Description of Artificial Sequence: Synthetic oligonucleotide
  Sense strand starting at position 678 of SEQ ID NO: 349
ggagguggugcucaucaga

SEQ ID NO: 30369 - RNA, 19 nt, Artificial Sequence
  Description of Artificial Sequence: Synthetic oligonucleotide
  Antisense strand to SEQ ID NO: 30368
ucugaugagcaccaccucc

SEQ ID NO: 30370 - RNA, 19 nt, Artificial Sequence
  Description of Artificial Sequence: Synthetic oligonucleotide
  Sense strand starting at position 1119 of SEQ ID NO: 349
aucuaagaucagugaggca

SEQ ID NO: 30371 - RNA, 19 nt, Artificial Sequence
  Description of Artificial Sequence: Synthetic oligonucleotide
  Antisense strand to SEQ ID NO: 30370
ugccucacugaucuuagau

SEQ ID NO: 30372 - RNA, 19 nt, Artificial Sequence
  Description of Artificial Sequence: Synthetic oligonucleotide
  Sense strand starting at position 1158 of SEQ ID NO: 349
agggauugcuguucaagag

SEQ ID NO: 30373 - RNA, 19 nt, Artificial Sequence
  Description of Artificial Sequence: Synthetic oligonucleotide
  Antisense strand to SEQ ID NO: 30372
cucuugaacagcaaucccu

SEQ ID NO: 30374 - RNA, 19 nt, Artificial Sequence
  Description of Artificial Sequence: Synthetic oligonucleotide
  Sense strand starting at position 1159 of SEQ ID NO: 349
gggauugcuguucaagaga

SEQ ID NO: 30375 - RNA, 19 nt, Artificial Sequence
  Description of Artificial Sequence: Synthetic oligonucleotide
  Antisense strand to SEQ ID NO: 30374
ucucuugaacagcaauccc

SEQ ID NO: 30376 - RNA, 19 nt, Artificial Sequence
  Description of Artificial Sequence: Synthetic oligonucleotide
  Sense strand starting at position 1295 of SEQ ID NO: 349
cuguuaacuccguaauaca

SEQ ID NO: 30377 - RNA, 19 nt, Artificial Sequence
  Description of Artificial Sequence: Synthetic oligonucleotide
  Antisense strand to SEQ ID NO: 30376
uguauuacggaguuaacag

SEQ ID NO: 30378 - RNA, 19 nt, Artificial Sequence
  Description of Artificial Sequence: Synthetic oligonucleotide
  Sense strand starting at position 1305 of SEQ ID NO: 349
cguaauacagauugaaaca

SEQ ID NO: 30379 - RNA, 19 nt, Artificial Sequence
  Description of Artificial Sequence: Synthetic oligonucleotide
  Antisense strand to SEQ ID NO: 30378
uguuucaaucuguauuacg

SEQ ID NO: 30380 - RNA, 19 nt, Artificial Sequence
  Description of Artificial Sequence: Synthetic oligonucleotide
  Sense strand starting at position 1325 of SEQ ID NO: 349
uuaaauuaccgcuacuaag

SEQ ID NO: 30381 - RNA, 19 nt, Artificial Sequence
  Description of Artificial Sequence: Synthetic oligonucleotide
  Antisense strand to SEQ ID NO: 30380
cuuaguagcgguaauuuaa

SEQ ID NO: 30382 - RNA, 19 nt, Artificial Sequence
  Description of Artificial Sequence: Synthetic oligonucleotide
  Sense strand starting at position 1395 of SEQ ID NO: 349
aacguuauucgugcagcua

SEQ ID NO: 30383 - RNA, 19 nt, Artificial Sequence
  Description of Artificial Sequence: Synthetic oligonucleotide
  Antisense strand to SEQ ID NO: 30382
uagcugcacgaauaacguu

SEQ ID NO: 30384 - RNA, 19 nt, Artificial Sequence
  Description of Artificial Sequence: Synthetic oligonucleotide
  Sense strand starting at position 1398 of SEQ ID NO: 349
guuauucgugcagcuacau

SEQ ID NO: 30385 - RNA, 19 nt, Artificial Sequence
  Description of Artificial Sequence: Synthetic oligonucleotide
  Antisense strand to SEQ ID NO: 30384
auguagcugcacgaauaac

SEQ ID NO: 30386 - RNA, 19 nt, Artificial Sequence
  Description of Artificial Sequence: Synthetic oligonucleotide
  Sense strand starting at position 1543 of SEQ ID NO: 349
gccaguuugaguuugugca

SEQ ID NO: 30387 - RNA, 19 nt, Artificial Sequence
  Description of Artificial Sequence: Synthetic oligonucleotide
  Antisense strand to SEQ ID NO: 30386
ugcacaaacucaaacuggc

SEQ ID NO: 30388 - RNA, 19 nt, Artificial Sequence
  Description of Artificial Sequence: Synthetic oligonucleotide
  Sense strand starting at position 1923 of SEQ ID NO: 349
ucucauugaucggcacaaa

SEQ ID NO: 30389 - RNA, 19 nt, Artificial Sequence
  Description of Artificial Sequence: Synthetic oligonucleotide
  Antisense strand to SEQ ID NO: 30388
uuugugccgaucaaugaga

SEQ ID NO: 30390 - RNA, 19 nt, Artificial Sequence
  Description of Artificial Sequence: Synthetic oligonucleotide
  Sense strand starting at position 2189 of SEQ ID NO: 349
aggugaggucguuaaacug

SEQ ID NO: 30391 - RNA, 19 nt, Artificial Sequence
  Description of Artificial Sequence: Synthetic oligonucleotide
  Antisense strand to SEQ ID NO: 30390
caguuuaacgaccucaccu

SEQ ID NO: 30392 - RNA, 19 nt, Artificial Sequence
  Description of Artificial Sequence: Synthetic oligonucleotide
  Sense strand starting at position 2513 of SEQ ID NO: 349
gauggcuugcguuuccuua

SEQ ID NO: 30393 - RNA, 19 nt, Artificial Sequence
  Description of Artificial Sequence: Synthetic oligonucleotide
  Antisense strand to SEQ ID NO: 30392
uaaggaaacgcaagccauc

SEQ ID NO: 30394 - RNA, 19 nt, Artificial Sequence
  Description of Artificial Sequence: Synthetic oligonucleotide
  Sense strand starting at position 2514 of SEQ ID NO: 349
auggcuugcguuuccuuaa

SEQ ID NO: 30395 - RNA, 19 nt, Artificial Sequence
  Description of Artificial Sequence: Synthetic oligonucleotide
  Antisense strand to SEQ ID NO: 30394
uuaaggaaacgcaagccau

SEQ ID NO: 30396 - RNA, 19 nt, Artificial Sequence
  Description of Artificial Sequence: Synthetic oligonucleotide
  Sense strand starting at position 2915 of SEQ ID NO: 349
cgcuguccugagucuuagu

SEQ ID NO: 30397 - RNA, 19 nt, Artificial Sequence
  Description of Artificial Sequence: Synthetic oligonucleotide
  Antisense strand to SEQ ID NO: 30396
acuaagacucaggacagcg

SEQ ID NO: 30398 - RNA, 19 nt, Artificial Sequence
  Description of Artificial Sequence: Synthetic oligonucleotide
  Sense strand starting at position 2920 of SEQ ID NO: 349
uccugagucuuaguuagag

SEQ ID NO: 30399 - RNA, 19 nt, Artificial Sequence
  Description of Artificial Sequence: Synthetic oligonucleotide
  Antisense strand to SEQ ID NO: 30398
cucuaacuaagacucagga

SEQ ID NO: 30400 - RNA, 19 nt, Artificial Sequence
  Description of Artificial Sequence: Synthetic oligonucleotide
  Sense strand starting at position 2922 of SEQ ID NO: 349
cugagucuuaguuagagau

SEQ ID NO: 30401 - RNA, 19 nt, Artificial Sequence
  Description of Artificial Sequence: Synthetic oligonucleotide
  Antisense strand to SEQ ID NO: 30400
aucucuaacuaagacucag

SEQ ID NO: 30402 - RNA, 19 nt, Artificial Sequence
  Description of Artificial Sequence: Synthetic oligonucleotide
  Sense strand starting at position 2926 of SEQ ID NO: 349
gucuuaguuagagaugaug

SEQ ID NO: 30403 - RNA, 19 nt, Artificial Sequence
  Description of Artificial Sequence: Synthetic oligonucleotide
  Antisense strand to SEQ ID NO: 30402
caucaucucuaacuaagac

SEQ ID NO: 30404 - RNA, 19 nt, Artificial Sequence
  Description of Artificial Sequence: Synthetic oligonucleotide
  Sense strand starting at position 2988 of SEQ ID NO: 349
cuuaucauaccguggaaau

SEQ ID NO: 30405 - RNA, 19 nt, Artificial Sequence
  Description of Artificial Sequence: Synthetic oligonucleotide
  Antisense strand to SEQ ID NO: 30404
auuuccacgguaugauaag

SEQ ID NO: 30406 - RNA, 19 nt, Artificial Sequence
  Description of Artificial Sequence: Synthetic oligonucleotide
  Sense strand starting at position 2989 of SEQ ID NO: 349
uuaucauaccguggaaauu

SEQ ID NO: 30407 - RNA, 19 nt, Artificial Sequence
  Description of Artificial Sequence: Synthetic oligonucleotide
  Antisense strand to SEQ ID NO: 30406
aauuuccacgguaugauaa

SEQ ID NO: 30408 - RNA, 19 nt, Artificial Sequence
  Description of Artificial Sequence: Synthetic oligonucleotide
  Sense strand starting at position 2990 of SEQ ID NO: 349
uaucauaccguggaaauua

SEQ ID NO: 30409 - RNA, 19 nt, Artificial Sequence
  Description of Artificial Sequence: Synthetic oligonucleotide
  Antisense strand to SEQ ID NO: 30408
uaauuuccacgguaugaua

SEQ ID NO: 30410 - RNA, 19 nt, Artificial Sequence
  Description of Artificial Sequence: Synthetic oligonucleotide
  Sense strand starting at position 3037 of SEQ ID NO: 349
ccuguucgucagagacguu

SEQ ID NO: 30411 - RNA, 19 nt, Artificial Sequence
  Description of Artificial Sequence: Synthetic oligonucleotide
  Antisense strand to SEQ ID NO: 30410
aacgucucugacgaacagg

SEQ ID NO: 30412 - RNA, 19 nt, Artificial Sequence
  Description of Artificial Sequence: Synthetic oligonucleotide
  Sense strand starting at position 3044 of SEQ ID NO: 349
gucagagacguuuaagguu

SEQ ID NO: 30413 - RNA, 19 nt, Artificial Sequence
  Description of Artificial Sequence: Synthetic oligonucleotide
  Antisense strand to SEQ ID NO: 30412
aaccuuaaacgucucugac

SEQ ID NO: 30414 - RNA, 19 nt, Artificial Sequence
  Description of Artificial Sequence: Synthetic oligonucleotide
  Sense strand starting at position 3176 of SEQ ID NO: 349
cuguuuggccaugaaauag

SEQ ID NO: 30415 - RNA, 19 nt, Artificial Sequence
  Description of Artificial Sequence: Synthetic oligonucleotide
  Antisense strand to SEQ ID NO: 30414
cuauuucauggccaaacag

SEQ ID NO: 30416 - RNA, 19 nt, Artificial Sequence
  Description of Artificial Sequence: Synthetic oligonucleotide
  Sense strand starting at position 3471 of SEQ ID NO: 349
agaacuggaucuguuaaau

SEQ ID NO: 30417 - RNA, 19 nt, Artificial Sequence
  Description of Artificial Sequence: Synthetic oligonucleotide
  Antisense strand to SEQ ID NO: 30416
auuuaacagauccaguucu

SEQ ID NO: 30418 - RNA, 19 nt, Artificial Sequence
  Description of Artificial Sequence: Synthetic oligonucleotide
  Sense strand starting at position 3580 of SEQ ID NO: 349
cuuagaagacaugguguua

SEQ ID NO: 30419 - RNA, 19 nt, Artificial Sequence
  Description of Artificial Sequence: Synthetic oligonucleotide
  Antisense strand to SEQ ID NO: 30418
uaacaccaugucuucuaag

SEQ ID NO: 30420 - RNA, 19 nt, Artificial Sequence
  Description of Artificial Sequence: Synthetic oligonucleotide
  Sense strand starting at position 3591 of SEQ ID NO: 349
ugguguuaacuagagugaa

SEQ ID NO: 30421 - RNA, 19 nt, Artificial Sequence
  Description of Artificial Sequence: Synthetic oligonucleotide
  Antisense strand to SEQ ID NO: 30420
uucacucuaguuaacacca

SEQ ID NO: 30422 - RNA, 19 nt, Artificial Sequence
  Description of Artificial Sequence: Synthetic oligonucleotide
  Sense strand starting at position 3608 of SEQ ID NO: 349
aagagauacugaguuguag

SEQ ID NO: 30423 - RNA, 19 nt, Artificial Sequence
  Description of Artificial Sequence: Synthetic oligonucleotide
  Antisense strand to SEQ ID NO: 30422
cuacaacucaguaucucuu

SEQ ID NO: 30424 - RNA, 19 nt, Artificial Sequence
  Description of Artificial Sequence: Synthetic oligonucleotide
  Sense strand starting at position 3610 of SEQ ID NO: 349
gagauacugaguuguagug

SEQ ID NO: 30425 - RNA, 19 nt, Artificial Sequence
  Description of Artificial Sequence: Synthetic oligonucleotide
  Antisense strand to SEQ ID NO: 30424
cacuacaacucaguaucuc

SEQ ID NO: 30426 - RNA, 19 nt, Artificial Sequence
  Description of Artificial Sequence: Synthetic oligonucleotide
  Sense strand starting at position 3639 of SEQ ID NO: 349
auuggugggccagggaaau

SEQ ID NO: 30427 - RNA, 19 nt, Artificial Sequence
  Description of Artificial Sequence: Synthetic oligonucleotide
  Antisense strand to SEQ ID NO: 30426
auuucccuggcccaccaau

SEQ ID NO: 30428 - RNA, 19 nt, Artificial Sequence
  Description of Artificial Sequence: Synthetic oligonucleotide
  Sense strand starting at position 3662 of SEQ ID NO: 349
gaggccuucugacuccaga

SEQ ID NO: 30429 - RNA, 19 nt, Artificial Sequence
  Description of Artificial Sequence: Synthetic oligonucleotide
  Antisense strand to SEQ ID NO: 30428
ucuggagucagaaggccuc

SEQ ID NO: 30430 - RNA, 19 nt, Artificial Sequence
  Description of Artificial Sequence: Synthetic oligonucleotide
  Sense strand starting at position 3729 of SEQ ID NO: 349
auuccauagccuggacaua

SEQ ID NO: 30431 - RNA, 19 nt, Artificial Sequence
  Description of Artificial Sequence: Synthetic oligonucleotide
  Antisense strand to SEQ ID NO: 30430
uauguccaggcuauggaau

SEQ ID NO: 30432 - RNA, 19 nt, Artificial Sequence
  Description of Artificial Sequence: Synthetic oligonucleotide
  Sense strand starting at position 3730 of SEQ ID NO: 349
uuccauagccuggacauaa

SEQ ID NO: 30433 - RNA, 19 nt, Artificial Sequence
  Description of Artificial Sequence: Synthetic oligonucleotide
  Antisense strand to SEQ ID NO: 30432
uuauguccaggcuauggaa

SEQ ID NO: 30434 - RNA, 19 nt, Artificial Sequence
  Description of Artificial Sequence: Synthetic oligonucleotide
  Sense strand starting at position 3962 of SEQ ID NO: 350
gucaaugagucaucuagag

SEQ ID NO: 30435 - RNA, 19 nt, Artificial Sequence
  Description of Artificial Sequence: Synthetic oligonucleotide
  Antisense strand to SEQ ID NO: 30434
cucuagaugacucauugac

SEQ ID NO: 30436 - RNA, 19 nt, Artificial Sequence
  Description of Artificial Sequence: Synthetic oligonucleotide
  Sense strand starting at position 3956 of SEQ ID NO: 350
aggugagucaaugagucau

SEQ ID NO: 30437 - RNA, 19 nt, Artificial Sequence
  Description of Artificial Sequence: Synthetic oligonucleotide
  Antisense strand to SEQ ID NO: 30436
augacucauugacucaccu

SEQ ID NO: 30438 - RNA, 19 nt, Artificial Sequence
  Description of Artificial Sequence: Synthetic oligonucleotide
  Sense strand starting at position 3825 of SEQ ID NO: 350
uagaguucucaggaagcuu

SEQ ID NO: 30439 - RNA, 19 nt, Artificial Sequence
  Description of Artificial Sequence: Synthetic oligonucleotide
  Antisense strand to SEQ ID NO: 30438
aagcuuccugagaacucua

SEQ ID NO: 30440 - RNA, 19 nt, Artificial Sequence
  Description of Artificial Sequence: Synthetic oligonucleotide
  Sense strand starting at position 3821 of SEQ ID NO: 350
gugcuagaguucucaggaa

SEQ ID NO: 30441 - RNA, 19 nt, Artificial Sequence
  Description of Artificial Sequence: Synthetic oligonucleotide
  Antisense strand to SEQ ID NO: 30440
uuccugagaacucuagcac

SEQ ID NO: 30442 - RNA, 19 nt, Artificial Sequence
  Description of Artificial Sequence: Synthetic oligonucleotide
  Sense strand starting at position 3730 of SEQ ID NO: 350
caguuacaccgaugugaac

SEQ ID NO: 30443 - RNA, 19 nt, Artificial Sequence
  Description of Artificial Sequence: Synthetic oligonucleotide
  Antisense strand to SEQ ID NO: 30442
guucacaucgguguaacug

SEQ ID NO: 30444 - RNA, 19 nt, Artificial Sequence
  Description of Artificial Sequence: Synthetic oligonucleotide
  Sense strand starting at position 3728 of SEQ ID NO: 350
ggcaguuacaccgauguga

SEQ ID NO: 30445 - RNA, 19 nt, Artificial Sequence
  Description of Artificial Sequence: Synthetic oligonucleotide
  Antisense strand to SEQ ID NO: 30444
ucacaucgguguaacugcc

SEQ ID NO: 30446 - RNA, 19 nt, Artificial Sequence
  Description of Artificial Sequence: Synthetic oligonucleotide
  Sense strand starting at position 3701 of SEQ ID NO: 350
gaaaccuguugggcaguua

SEQ ID NO: 30447 - RNA, 19 nt, Artificial Sequence
  Description of Artificial Sequence: Synthetic oligonucleotide
  Antisense strand to SEQ ID NO: 30446
uaacugcccaacagguuuc

SEQ ID NO: 30448 - RNA, 19 nt, Artificial Sequence
  Description of Artificial Sequence: Synthetic oligonucleotide
  Sense strand starting at position 3655 of SEQ ID NO: 350
uucuccugucuugauaagu

SEQ ID NO: 30449 - RNA, 19 nt, Artificial Sequence
  Description of Artificial Sequence: Synthetic oligonucleotide
  Antisense strand to SEQ ID NO: 30448
acuuaucaagacaggagaa

SEQ ID NO: 30450 - RNA, 19 nt, Artificial Sequence
  Description of Artificial Sequence: Synthetic oligonucleotide
  Sense strand starting at position 3350 of SEQ ID NO: 350
uaaauuggugcucaaggua

SEQ ID NO: 30451 - RNA, 19 nt, Artificial Sequence
  Description of Artificial Sequence: Synthetic oligonucleotide
  Antisense strand to SEQ ID NO: 30450
uaccuugagcaccaauuua

SEQ ID NO: 30452 - RNA, 19 nt, Artificial Sequence
  Description of Artificial Sequence: Synthetic oligonucleotide
  Sense strand starting at position 3217 of SEQ ID NO: 350
agcagacuucccuaguaag

SEQ ID NO: 30453 - RNA, 19 nt, Artificial Sequence
  Description of Artificial Sequence: Synthetic oligonucleotide
  Antisense strand to SEQ ID NO: 30452
cuuacuagggaagucugcu

SEQ ID NO: 30454 - RNA, 19 nt, Artificial Sequence
  Description of Artificial Sequence: Synthetic oligonucleotide
  Sense strand starting at position 3215 of SEQ ID NO: 350
ggagcagacuucccuagua

SEQ ID NO: 30455 - RNA, 19 nt, Artificial Sequence
  Description of Artificial Sequence: Synthetic oligonucleotide
  Antisense strand to SEQ ID NO: 30454
uacuagggaagucugcucc

SEQ ID NO: 30456 - RNA, 19 nt, Artificial Sequence
  Description of Artificial Sequence: Synthetic oligonucleotide
  Sense strand starting at position 2530 of SEQ ID NO: 350
gugaaugccaaaugagcua

SEQ ID NO: 30457 - RNA, 19 nt, Artificial Sequence
  Description of Artificial Sequence: Synthetic oligonucleotide
  Antisense strand to SEQ ID NO: 30456
uagcucauuuggcauucac

SEQ ID NO: 30458 - RNA, 19 nt, Artificial Sequence
  Description of Artificial Sequence: Synthetic oligonucleotide
  Sense strand starting at position 2523 of SEQ ID NO: 350
gauuacugugaaugccaaa

SEQ ID NO: 30459 - RNA, 19 nt, Artificial Sequence
  Description of Artificial Sequence: Synthetic oligonucleotide
  Antisense strand to SEQ ID NO: 30458
uuuggcauucacaguaauc

SEQ ID NO: 30460 - RNA, 19 nt, Artificial Sequence
  Description of Artificial Sequence: Synthetic oligonucleotide
  Sense strand starting at position 2519 of SEQ ID NO: 350
guaagauuacugugaaugc

SEQ ID NO: 30461 - RNA, 19 nt, Artificial Sequence
  Description of Artificial Sequence: Synthetic oligonucleotide
  Antisense strand to SEQ ID NO: 30460
gcauucacaguaaucuuac

SEQ ID NO: 30462 - RNA, 19 nt, Artificial Sequence
  Description of Artificial Sequence: Synthetic oligonucleotide
  Sense strand starting at position 2516 of SEQ ID NO: 350
ccuguaagauuacugugaa

SEQ ID NO: 30463 - RNA, 19 nt, Artificial Sequence
  Description of Artificial Sequence: Synthetic oligonucleotide
  Antisense strand to SEQ ID NO: 30462
uucacaguaaucuuacagg

SEQ ID NO: 30464 - RNA, 19 nt, Artificial Sequence
  Description of Artificial Sequence: Synthetic oligonucleotide
  Sense strand starting at position 2508 of SEQ ID NO: 350
guagguacccuguaagauu

SEQ ID NO: 30465 - RNA, 19 nt, Artificial Sequence
  Description of Artificial Sequence: Synthetic oligonucleotide
  Antisense strand to SEQ ID NO: 30464
aaucuuacaggguaccuac

SEQ ID NO: 30466 - RNA, 19 nt, Artificial Sequence
  Description of Artificial Sequence: Synthetic oligonucleotide
  Sense strand starting at position 2435 of SEQ ID NO: 350
uuaguaacugugcaaucuu

SEQ ID NO: 30467 - RNA, 19 nt, Artificial Sequence
  Description of Artificial Sequence: Synthetic oligonucleotide
  Antisense strand to SEQ ID NO: 30466
aagauugcacaguuacuaa

SEQ ID NO: 30468 - RNA, 19 nt, Artificial Sequence
  Description of Artificial Sequence: Synthetic oligonucleotide
  Sense strand starting at position 2206 of SEQ ID NO: 350
guaugugucauuugguaau

SEQ ID NO: 30469 - RNA, 19 nt, Artificial Sequence
  Description of Artificial Sequence: Synthetic oligonucleotide
  Antisense strand to SEQ ID NO: 30468
auuaccaaaugacacauac

SEQ ID NO: 30470 - RNA, 19 nt, Artificial Sequence
  Description of Artificial Sequence: Synthetic oligonucleotide
  Sense strand starting at position 2204 of SEQ ID NO: 350
caguaugugucauuuggua

SEQ ID NO: 30471 - RNA, 19 nt, Artificial Sequence
  Description of Artificial Sequence: Synthetic oligonucleotide
  Antisense strand to SEQ ID NO: 30470
uaccaaaugacacauacug

SEQ ID NO: 30472 - RNA, 19 nt, Artificial Sequence
  Description of Artificial Sequence: Synthetic oligonucleotide
  Sense strand starting at position 2200 of SEQ ID NO: 350
cucacaguaugugucauuu

SEQ ID NO: 30473 - RNA, 19 nt, Artificial Sequence
  Description of Artificial Sequence: Synthetic oligonucleotide
  Antisense strand to SEQ ID NO: 30472
aaaugacacauacugugag

SEQ ID NO: 30474 - RNA, 19 nt, Artificial Sequence
  Description of Artificial Sequence: Synthetic oligonucleotide
  Sense strand starting at position 2142 of SEQ ID NO: 350
cuuugugguuaaguaaaca

SEQ ID NO: 30475 - RNA, 19 nt, Artificial Sequence
  Description of Artificial Sequence: Synthetic oligonucleotide
  Antisense strand to SEQ ID NO: 30474
uguuuacuuaaccacaaag

SEQ ID NO: 30476 - RNA, 19 nt, Artificial Sequence
  Description of Artificial Sequence: Synthetic oligonucleotide
  Sense strand starting at position 2115 of SEQ ID NO: 350
acucaaauuugggaguaaa

SEQ ID NO: 30477 - RNA, 19 nt, Artificial Sequence
  Description of Artificial Sequence: Synthetic oligonucleotide
  Antisense strand to SEQ ID NO: 30476
uuuacucccaaauuugagu

SEQ ID NO: 30478 - RNA, 19 nt, Artificial Sequence
  Description of Artificial Sequence: Synthetic oligonucleotide
  Sense strand starting at position 2114 of SEQ ID NO: 350
cacucaaauuugggaguaa

SEQ ID NO: 30479 - RNA, 19 nt, Artificial Sequence
  Description of Artificial Sequence: Synthetic oligonucleotide
  Antisense strand to SEQ ID NO: 30478
uuacucccaaauuugagug

SEQ ID NO: 30480 - RNA, 19 nt, Artificial Sequence
  Description of Artificial Sequence: Synthetic oligonucleotide
  Sense strand starting at position 1845 of SEQ ID NO: 350
gaugaacuccugugacaag

SEQ ID NO: 30481 - RNA, 19 nt, Artificial Sequence
  Description of Artificial Sequence: Synthetic oligonucleotide
  Antisense strand to SEQ ID NO: 30480
cuugucacaggaguucauc

SEQ ID NO: 30482 - RNA, 19 nt, Artificial Sequence
  Description of Artificial Sequence: Synthetic oligonucleotide
  Sense strand starting at position 1713 of SEQ ID NO: 350
acucaaggaugucuaggua

SEQ ID NO: 30483 - RNA, 19 nt, Artificial Sequence
  Description of Artificial Sequence: Synthetic oligonucleotide
  Antisense strand to SEQ ID NO: 30482
uaccuagacauccuugagu

SEQ ID NO: 30484 - RNA, 19 nt, Artificial Sequence
  Description of Artificial Sequence: Synthetic oligonucleotide
  Sense strand starting at position 1667 of SEQ ID NO: 350
uggaaucuugugcauggga

SEQ ID NO: 30485 - RNA, 19 nt, Artificial Sequence
  Description of Artificial Sequence: Synthetic oligonucleotide
  Antisense strand to SEQ ID NO: 30484
ucccaugcacaagauucca

SEQ ID NO: 30486 - RNA, 19 nt, Artificial Sequence
  Description of Artificial Sequence: Synthetic oligonucleotide
  Sense strand starting at position 1495 of SEQ ID NO: 350
aggcauaguuaucccauca

SEQ ID NO: 30487 - RNA, 19 nt, Artificial Sequence
  Description of Artificial Sequence: Synthetic oligonucleotide
  Antisense strand to SEQ ID NO: 30486
ugaugggauaacuaugccu

SEQ ID NO: 30488 - RNA, 19 nt, Artificial Sequence
  Description of Artificial Sequence: Synthetic oligonucleotide
  Sense strand starting at position 1488 of SEQ ID NO: 350
aucugcaaggcauaguuau

SEQ ID NO: 30489 - RNA, 19 nt, Artificial Sequence
  Description of Artificial Sequence: Synthetic oligonucleotide
  Antisense strand to SEQ ID NO: 30488
auaacuaugccuugcagau

SEQ ID NO: 30490 - RNA, 19 nt, Artificial Sequence
  Description of Artificial Sequence: Synthetic oligonucleotide
  Sense strand starting at position 1481 of SEQ ID NO: 350
cagucauaucugcaaggca

SEQ ID NO: 30491 - RNA, 19 nt, Artificial Sequence
  Description of Artificial Sequence: Synthetic oligonucleotide
  Antisense strand to SEQ ID NO: 30490
ugccuugcagauaugacug

SEQ ID NO: 30492 - RNA, 19 nt, Artificial Sequence
  Description of Artificial Sequence: Synthetic oligonucleotide
  Sense strand starting at position 1377 of SEQ ID NO: 350
gucucucaguagucaauuu

SEQ ID NO: 30493 - RNA, 19 nt, Artificial Sequence
  Description of Artificial Sequence: Synthetic oligonucleotide
  Antisense strand to SEQ ID NO: 30492
aaauugacuacugagagac

SEQ ID NO: 30494 - RNA, 19 nt, Artificial Sequence
  Description of Artificial Sequence: Synthetic oligonucleotide
  Sense strand starting at position 1374 of SEQ ID NO: 350
ucagucucucaguagucaa

SEQ ID NO: 30495 - RNA, 19 nt, Artificial Sequence
  Description of Artificial Sequence: Synthetic oligonucleotide
  Antisense strand to SEQ ID NO: 30494
uugacuacugagagacuga

SEQ ID NO: 30496 - RNA, 19 nt, Artificial Sequence
  Description of Artificial Sequence: Synthetic oligonucleotide
  Sense strand starting at position 1158 of SEQ ID NO: 350
uucucuuuaccagauguua

SEQ ID NO: 30497 - RNA, 19 nt, Artificial Sequence
  Description of Artificial Sequence: Synthetic oligonucleotide
  Antisense strand to SEQ ID NO: 30496
uaacaucugguaaagagaa

SEQ ID NO: 30498 - RNA, 19 nt, Artificial Sequence
  Description of Artificial Sequence: Synthetic oligonucleotide
  Sense strand starting at position 1153 of SEQ ID NO: 350
gucuauucucuuuaccaga

SEQ ID NO: 30499 - RNA, 19 nt, Artificial Sequence
  Description of Artificial Sequence: Synthetic oligonucleotide
  Antisense strand to SEQ ID NO: 30498
ucugguaaagagaauagac

SEQ ID NO: 30500 - RNA, 19 nt, Artificial Sequence
  Description of Artificial Sequence: Synthetic oligonucleotide
  Sense strand starting at position 1152 of SEQ ID NO: 350
agucuauucucuuuaccag

SEQ ID NO: 30501 - RNA, 19 nt, Artificial Sequence
  Description of Artificial Sequence: Synthetic oligonucleotide
  Antisense strand to SEQ ID NO: 30500
cugguaaagagaauagacu

SEQ ID NO: 30502 - RNA, 19 nt, Artificial Sequence
  Description of Artificial Sequence: Synthetic oligonucleotide
  Sense strand starting at position 1147 of SEQ ID NO: 350
gauggagucuauucucuuu

SEQ ID NO: 30503 - RNA, 19 nt, Artificial Sequence
  Description of Artificial Sequence: Synthetic oligonucleotide
  Antisense strand to SEQ ID NO: 30502
aaagagaauagacuccauc

SEQ ID NO: 30504 - RNA, 19 nt, Artificial Sequence
  Description of Artificial Sequence: Synthetic oligonucleotide
  Sense strand starting at position 877 of SEQ ID NO: 350
ucaguuauguauguagaca

SEQ ID NO: 30505 - RNA, 19 nt, Artificial Sequence
  Description of Artificial Sequence: Synthetic oligonucleotide
  Antisense strand to SEQ ID NO: 30504
ugucuacauacauaacuga

SEQ ID NO: 30506 - RNA, 19 nt, Artificial Sequence
  Description of Artificial Sequence: Synthetic oligonucleotide
  Sense strand starting at position 788 of SEQ ID NO: 350
guaggauuaaaggguccau

SEQ ID NO: 30507 - RNA, 19 nt, Artificial Sequence
  Description of Artificial Sequence: Synthetic oligonucleotide
  Antisense strand to SEQ ID NO: 30506
auggacccuuuaauccuac

SEQ ID NO: 30508 - RNA, 19 nt, Artificial Sequence
  Description of Artificial Sequence: Synthetic oligonucleotide
  Sense strand starting at position 779 of SEQ ID NO: 350
gguccacauguaggauuaa

SEQ ID NO: 30509 - RNA, 19 nt, Artificial Sequence
  Description of Artificial Sequence: Synthetic oligonucleotide
  Antisense strand to SEQ ID NO: 30508
uuaauccuacauguggacc

SEQ ID NO: 30510 - RNA, 19 nt, Artificial Sequence
  Description of Artificial Sequence: Synthetic oligonucleotide
  Sense strand starting at position 754 of SEQ ID NO: 350
gcuauaaagcaagaguucu

SEQ ID NO: 30511 - RNA, 19 nt, Artificial Sequence
  Description of Artificial Sequence: Synthetic oligonucleotide
  Antisense strand to SEQ ID NO: 30510
agaacucuugcuuuauagc

SEQ ID NO: 30512 - RNA, 19 nt, Artificial Sequence
  Description of Artificial Sequence: Synthetic oligonucleotide
  Sense strand starting at position 125 of SEQ ID NO: 350
ugaauuauugcacaaugua

SEQ ID NO: 30513 - RNA, 19 nt, Artificial Sequence
  Description of Artificial Sequence: Synthetic oligonucleotide
  Antisense strand to SEQ ID NO: 30512
uacauugugcaauaauuca

SEQ ID NO: 30514 - RNA, 19 nt, Artificial Sequence
  Description of Artificial Sequence: Synthetic oligonucleotide
  Sense strand starting at position 3644 of SEQ ID NO: 351
ugagacagauauuagaaau

SEQ ID NO: 30515 - RNA, 19 nt, Artificial Sequence
  Description of Artificial Sequence: Synthetic oligonucleotide
  Antisense strand to SEQ ID NO: 30514
auuucuaauaucugucuca

SEQ ID NO: 30516 - RNA, 19 nt, Artificial Sequence
  Description of Artificial Sequence: Synthetic oligonucleotide
  Sense strand starting at position 3632 of SEQ ID NO: 351
gccaucgucaaaugagaca

SEQ ID NO: 30517 - RNA, 19 nt, Artificial Sequence
  Description of Artificial Sequence: Synthetic oligonucleotide
  Antisense strand to SEQ ID NO: 30516
ugucucauuugacgauggc

SEQ ID NO: 30518 - RNA, 19 nt, Artificial Sequence
  Description of Artificial Sequence: Synthetic oligonucleotide
  Sense strand starting at position 3628 of SEQ ID NO: 351
ugaagccaucgucaaauga

SEQ ID NO: 30519 - RNA, 19 nt, Artificial Sequence
  Description of Artificial Sequence: Synthetic oligonucleotide
  Antisense strand to SEQ ID NO: 30518
ucauuugacgauggcuuca

SEQ ID NO: 30520 - RNA, 19 nt, Artificial Sequence
  Description of Artificial Sequence: Synthetic oligonucleotide
  Sense strand starting at position 3625 of SEQ ID NO: 351
cacugaagccaucgucaaa

SEQ ID NO: 30521 - RNA, 19 nt, Artificial Sequence
  Description of Artificial Sequence: Synthetic oligonucleotide
  Antisense strand to SEQ ID NO: 30520
uuugacgauggcuucagug

SEQ ID NO: 30522 - RNA, 19 nt, Artificial Sequence
  Description of Artificial Sequence: Synthetic oligonucleotide
  Sense strand starting at position 3613 of SEQ ID NO: 351
cccagauggcuccacugaa

SEQ ID NO: 30523 - RNA, 19 nt, Artificial Sequence
  Description of Artificial Sequence: Synthetic oligonucleotide
  Antisense strand to SEQ ID NO: 30522
uucaguggagccaucuggg

SEQ ID NO: 30524 - RNA, 19 nt, Artificial Sequence
  Description of Artificial Sequence: Synthetic oligonucleotide
  Sense strand starting at position 3564 of SEQ ID NO: 351
aguacucugugguccuaaa

SEQ ID NO: 30525 - RNA, 19 nt, Artificial Sequence
  Description of Artificial Sequence: Synthetic oligonucleotide
  Antisense strand to SEQ ID NO: 30524
uuuaggaccacagaguacu

SEQ ID NO: 30526 - RNA, 19 nt, Artificial Sequence
  Description of Artificial Sequence: Synthetic oligonucleotide
  Sense strand starting at position 3271 of SEQ ID NO: 351
cagugauggcuugggagau

SEQ ID NO: 30527 - RNA, 19 nt, Artificial Sequence
  Description of Artificial Sequence: Synthetic oligonucleotide
  Antisense strand to SEQ ID NO: 30526
aucucccaagccaucacug

SEQ ID NO: 30528 - RNA, 19 nt, Artificial Sequence
  Description of Artificial Sequence: Synthetic oligonucleotide
  Sense strand starting at position 3107 of SEQ ID NO: 351
aaugauuuguauggaugag

SEQ ID NO: 30529 - RNA, 19 nt, Artificial Sequence
  Description of Artificial Sequence: Synthetic oligonucleotide
  Antisense strand to SEQ ID NO: 30528
cucauccauacaaaucauu

SEQ ID NO: 30530 - RNA, 19 nt, Artificial Sequence
  Description of Artificial Sequence: Synthetic oligonucleotide
  Sense strand starting at position 2955 of SEQ ID NO: 351
cuggacuaauucuuguauu

SEQ ID NO: 30531 - RNA, 19 nt, Artificial Sequence
  Description of Artificial Sequence: Synthetic oligonucleotide
  Antisense strand to SEQ ID NO: 30530
aauacaagaauuaguccag

SEQ ID NO: 30532 - RNA, 19 nt, Artificial Sequence
  Description of Artificial Sequence: Synthetic oligonucleotide
  Sense strand starting at position 2352 of SEQ ID NO: 351
aagucuucuccugagagua

SEQ ID NO: 30533 - RNA, 19 nt, Artificial Sequence
  Description of Artificial Sequence: Synthetic oligonucleotide
  Antisense strand to SEQ ID NO: 30532
uacucucaggagaagacuu

SEQ ID NO: 30534 - RNA, 19 nt, Artificial Sequence
  Description of Artificial Sequence: Synthetic oligonucleotide
  Sense strand starting at position 2317 of SEQ ID NO: 351
gacagaauguccucucaag

SEQ ID NO: 30535 - RNA, 19 nt, Artificial Sequence
  Description of Artificial Sequence: Synthetic oligonucleotide
  Antisense strand to SEQ ID NO: 30534
cuugagaggacauucuguc

SEQ ID NO: 30536 - RNA, 19 nt, Artificial Sequence
  Description of Artificial Sequence: Synthetic oligonucleotide
  Sense strand starting at position 2283 of SEQ ID NO: 351
aaggacugaugauagaaua

SEQ ID NO: 30537 - RNA, 19 nt, Artificial Sequence
  Description of Artificial Sequence: Synthetic oligonucleotide
  Antisense strand to SEQ ID NO: 30536
uauucuaucaucaguccuu

SEQ ID NO: 30538 - RNA, 19 nt, Artificial Sequence
  Description of Artificial Sequence: Synthetic oligonucleotide
  Sense strand starting at position 2058 of SEQ ID NO: 351
guuguuagaagucauagau

SEQ ID NO: 30539 - RNA, 19 nt, Artificial Sequence
  Description of Artificial Sequence: Synthetic oligonucleotide
  Antisense strand to SEQ ID NO: 30538
aucuaugacuucuaacaac

SEQ ID NO: 30540 - RNA, 19 nt, Artificial Sequence
  Description of Artificial Sequence: Synthetic oligonucleotide
  Sense strand starting at position 2050 of SEQ ID NO: 351
cagaauggguuguuagaag

SEQ ID NO: 30541 - RNA, 19 nt, Artificial Sequence
  Description of Artificial Sequence: Synthetic oligonucleotide
  Antisense strand to SEQ ID NO: 30540
cuucuaacaacccauucug

SEQ ID NO: 30542 - RNA, 19 nt, Artificial Sequence
  Description of Artificial Sequence: Synthetic oligonucleotide
  Sense strand starting at position 2048 of SEQ ID NO: 351
cacagaauggguuguuaga

SEQ ID NO: 30543 - RNA, 19 nt, Artificial Sequence
  Description of Artificial Sequence: Synthetic oligonucleotide
  Antisense strand to SEQ ID NO: 30542
ucuaacaacccauucugug

SEQ ID NO: 30544 - RNA, 19 nt, Artificial Sequence
  Description of Artificial Sequence: Synthetic oligonucleotide
  Sense strand starting at position 1780 of SEQ ID NO: 351
aaggcaaguuucucaggga

SEQ ID NO: 30545 - RNA, 19 nt, Artificial Sequence
  Description of Artificial Sequence: Synthetic oligonucleotide
  Antisense strand to SEQ ID NO: 30544
ucccugagaaacuugccuu

SEQ ID NO: 30546 - RNA, 19 nt, Artificial Sequence
  Description of Artificial Sequence: Synthetic oligonucleotide
  Sense strand starting at position 1716 of SEQ ID NO: 351
uggucuggcgggcagaaau

SEQ ID NO: 30547 - RNA, 19 nt, Artificial Sequence
  Description of Artificial Sequence: Synthetic oligonucleotide
  Antisense strand to SEQ ID NO: 30546
auuucugcccgccagacca

SEQ ID NO: 30548 - RNA, 19 nt, Artificial Sequence
  Description of Artificial Sequence: Synthetic oligonucleotide
  Sense strand starting at position 1685 of SEQ ID NO: 351
cugaaugcccauggaagaa

SEQ ID NO: 30549 - RNA, 19 nt, Artificial Sequence
  Description of Artificial Sequence: Synthetic oligonucleotide
  Antisense strand to SEQ ID NO: 30548
uucuuccaugggcauucag

SEQ ID NO: 30550 - RNA, 19 nt, Artificial Sequence
  Description of Artificial Sequence: Synthetic oligonucleotide
  Sense strand starting at position 1684 of SEQ ID NO: 351
ccugaaugcccauggaaga

SEQ ID NO: 30551 - RNA, 19 nt, Artificial Sequence
  Description of Artificial Sequence: Synthetic oligonucleotide
  Antisense strand to SEQ ID NO: 30550
ucuuccaugggcauucagg

SEQ ID NO: 30552 - RNA, 19 nt, Artificial Sequence
  Description of Artificial Sequence: Synthetic oligonucleotide
  Sense strand starting at position 1645 of SEQ ID NO: 351
auuccuccauuugaggaau

SEQ ID NO: 30553 - RNA, 19 nt, Artificial Sequence
  Description of Artificial Sequence: Synthetic oligonucleotide
  Antisense strand to SEQ ID NO: 30552
auuccucaaauggaggaau

SEQ ID NO: 30554 - RNA, 19 nt, Artificial Sequence
  Description of Artificial Sequence: Synthetic oligonucleotide
  Sense strand starting at position 1605 of SEQ ID NO: 351
agaucuaaacuuugguaac

SEQ ID NO: 30555 - RNA, 19 nt, Artificial Sequence
  Description of Artificial Sequence: Synthetic oligonucleotide
  Antisense strand to SEQ ID NO: 30554
guuaccaaaguuuagaucu

SEQ ID NO: 30556 - RNA, 19 nt, Artificial Sequence
  Description of Artificial Sequence: Synthetic oligonucleotide
  Sense strand starting at position 1578 of SEQ ID NO: 351
ucaggccaauccuugaaga

SEQ ID NO: 30557 - RNA, 19 nt, Artificial Sequence
  Description of Artificial Sequence: Synthetic oligonucleotide
  Antisense strand to SEQ ID NO: 30556
ucuucaaggauuggccuga

SEQ ID NO: 30558 - RNA, 19 nt, Artificial Sequence
  Description of Artificial Sequence: Synthetic oligonucleotide
  Sense strand starting at position 1199 of SEQ ID NO: 351
gugguagagcaguacacau

SEQ ID NO: 30559 - RNA, 19 nt, Artificial Sequence
  Description of Artificial Sequence: Synthetic oligonucleotide
  Antisense strand to SEQ ID NO: 30558
auguguacugcucuaccac

SEQ ID NO: 30560 - RNA, 19 nt, Artificial Sequence
  Description of Artificial Sequence: Synthetic oligonucleotide
  Sense strand starting at position 1193 of SEQ ID NO: 351
gaaugugugguagagcagu

SEQ ID NO: 30561 - RNA, 19 nt, Artificial Sequence
  Description of Artificial Sequence: Synthetic oligonucleotide
  Antisense strand to SEQ ID NO: 30560
acugcucuaccacacauuc

SEQ ID NO: 30562 - RNA, 19 nt, Artificial Sequence
  Description of Artificial Sequence: Synthetic oligonucleotide
  Sense strand starting at position 1186 of SEQ ID NO: 351
auuagaagaauguguggua

SEQ ID NO: 30563 - RNA, 19 nt, Artificial Sequence
  Description of Artificial Sequence: Synthetic oligonucleotide
  Antisense strand to SEQ ID NO: 30562
uaccacacauucuucuaau

SEQ ID NO: 30564 - RNA, 19 nt, Artificial Sequence
  Description of Artificial Sequence: Synthetic oligonucleotide
  Sense strand starting at position 1154 of SEQ ID NO: 351
ggaacaaauuaugacaaga

SEQ ID NO: 30565 - RNA, 19 nt, Artificial Sequence
  Description of Artificial Sequence: Synthetic oligonucleotide
  Antisense strand to SEQ ID NO: 30564
ucuugucauaauuuguucc

SEQ ID NO: 30566 - RNA, 19 nt, Artificial Sequence
  Description of Artificial Sequence: Synthetic oligonucleotide
  Sense strand starting at position 997 of SEQ ID NO: 351
gaagcucuugucugagauc

SEQ ID NO: 30567 - RNA, 19 nt, Artificial Sequence
  Description of Artificial Sequence: Synthetic oligonucleotide
  Antisense strand to SEQ ID NO: 30566
gaucucagacaagagcuuc

SEQ ID NO: 30568 - RNA, 19 nt, Artificial Sequence
  Description of Artificial Sequence: Synthetic oligonucleotide
  Sense strand starting at position 996 of SEQ ID NO: 351
ugaagcucuugucugagau

SEQ ID NO: 30569 - RNA, 19 nt, Artificial Sequence
  Description of Artificial Sequence: Synthetic oligonucleotide
  Antisense strand to SEQ ID NO: 30568
aucucagacaagagcuuca

SEQ ID NO: 30570 - RNA, 19 nt, Artificial Sequence
  Description of Artificial Sequence: Synthetic oligonucleotide
  Sense strand starting at position 955 of SEQ ID NO: 351
ccagacuuguuaguagaca

SEQ ID NO: 30571 - RNA, 19 nt, Artificial Sequence
  Description of Artificial Sequence: Synthetic oligonucleotide
  Antisense strand to SEQ ID NO: 30570
ugucuacuaacaagucugg

SEQ ID NO: 30572 - RNA, 19 nt, Artificial Sequence
  Description of Artificial Sequence: Synthetic oligonucleotide
  Sense strand starting at position 952 of SEQ ID NO: 351
gaaccagacuuguuaguag

SEQ ID NO: 30573 - RNA, 19 nt, Artificial Sequence
  Description of Artificial Sequence: Synthetic oligonucleotide
  Antisense strand to SEQ ID NO: 30572
cuacuaacaagucugguuc

SEQ ID NO: 30574 - RNA, 19 nt, Artificial Sequence
  Description of Artificial Sequence: Synthetic oligonucleotide
  Sense strand starting at position 890 of SEQ ID NO: 351
cucauuugcagcugugaag

SEQ ID NO: 30575 - RNA, 19 nt, Artificial Sequence
  Description of Artificial Sequence: Synthetic oligonucleotide
  Antisense strand to SEQ ID NO: 30574
cuucacagcugcaaaugag

SEQ ID NO: 30576 - RNA, 19 nt, Artificial Sequence
  Description of Artificial Sequence: Synthetic oligonucleotide
  Sense strand starting at position 850 of SEQ ID NO: 351
acagaucucccacgacacu

SEQ ID NO: 30577 - RNA, 19 nt, Artificial Sequence
  Description of Artificial Sequence: Synthetic oligonucleotide
  Antisense strand to SEQ ID NO: 30576
agugucgugggagaucugu

SEQ ID NO: 30578 - RNA, 19 nt, Artificial Sequence
  Description of Artificial Sequence: Synthetic oligonucleotide
  Sense strand starting at position 821 of SEQ ID NO: 351
agcucugagcuccacaaau

SEQ ID NO: 30579 - RNA, 19 nt, Artificial Sequence
  Description of Artificial Sequence: Synthetic oligonucleotide
  Antisense strand to SEQ ID NO: 30578
auuuguggagcucagagcu

SEQ ID NO: 30580 - RNA, 19 nt, Artificial Sequence
  Description of Artificial Sequence: Synthetic oligonucleotide
  Sense strand starting at position 709 of SEQ ID NO: 351
aaagcuuugccagagguuu

SEQ ID NO: 30581 - RNA, 19 nt, Artificial Sequence
  Description of Artificial Sequence: Synthetic oligonucleotide
  Antisense strand to SEQ ID NO: 30580
aaaccucuggcaaagcuuu

SEQ ID NO: 30582 - RNA, 19 nt, Artificial Sequence
  Description of Artificial Sequence: Synthetic oligonucleotide
  Sense strand starting at position 685 of SEQ ID NO: 351
uguggugacgguuagauga

SEQ ID NO: 30583 - RNA, 19 nt, Artificial Sequence
  Description of Artificial Sequence: Synthetic oligonucleotide
  Antisense strand to SEQ ID NO: 30582
ucaucuaaccgucaccaca

SEQ ID NO: 30584 - RNA, 19 nt, Artificial Sequence
  Description of Artificial Sequence: Synthetic oligonucleotide
  Sense strand starting at position 682 of SEQ ID NO: 351
gaauguggugacgguuaga

SEQ ID NO: 30585 - RNA, 19 nt, Artificial Sequence
  Description of Artificial Sequence: Synthetic oligonucleotide
  Antisense strand to SEQ ID NO: 30584
ucuaaccgucaccacauuc

SEQ ID NO: 30586 - RNA, 19 nt, Artificial Sequence
  Description of Artificial Sequence: Synthetic oligonucleotide
  Sense strand starting at position 585 of SEQ ID NO: 351
guggacuccuggguucaaa

SEQ ID NO: 30587 - RNA, 19 nt, Artificial Sequence
  Description of Artificial Sequence: Synthetic oligonucleotide
  Antisense strand to SEQ ID NO: 30586
uuugaacccaggaguccac

SEQ ID NO: 30588 - RNA, 19 nt, Artificial Sequence
  Description of Artificial Sequence: Synthetic oligonucleotide
  Sense strand starting at position 584 of SEQ ID NO: 351
uguggacuccuggguucaa

SEQ ID NO: 30589 - RNA, 19 nt, Artificial Sequence
  Description of Artificial Sequence: Synthetic oligonucleotide
  Antisense strand to SEQ ID NO: 30588
uugaacccaggaguccaca

SEQ ID NO: 30590 - RNA, 19 nt, Artificial Sequence
  Description of Artificial Sequence: Synthetic oligonucleotide
  Sense strand starting at position 444 of SEQ ID NO: 351
uuggcauccucaucuuuga

SEQ ID NO: 30591 - RNA, 19 nt, Artificial Sequence
  Description of Artificial Sequence: Synthetic oligonucleotide
  Antisense strand to SEQ ID NO: 30590
ucaaagaugaggaugccaa

SEQ ID NO: 30592 - RNA, 19 nt, Artificial Sequence
  Description of Artificial Sequence: Synthetic oligonucleotide
  Sense strand starting at position 336 of SEQ ID NO: 351
ucgugagaagucugggaau

SEQ ID NO: 30593 - RNA, 19 nt, Artificial Sequence
  Description of Artificial Sequence: Synthetic oligonucleotide
  Antisense strand to SEQ ID NO: 30592
auucccagacuucucacga

SEQ ID NO: 30594 - RNA, 19 nt, Artificial Sequence
  Description of Artificial Sequence: Synthetic oligonucleotide
  Sense strand starting at position 97 of SEQ ID NO: 352
gaggaugucuccugagcaa

SEQ ID NO: 30595 - RNA, 19 nt, Artificial Sequence
  Description of Artificial Sequence: Synthetic oligonucleotide
  Antisense strand to SEQ ID NO: 30594
uugcucaggagacauccuc

SEQ ID NO: 30596 - RNA, 19 nt, Artificial Sequence
  Description of Artificial Sequence: Synthetic oligonucleotide
  Sense strand starting at position 277 of SEQ ID NO: 352
gagcaacucuaugagaaag

SEQ ID NO: 30597 - RNA, 19 nt, Artificial Sequence
  Description of Artificial Sequence: Synthetic oligonucleotide
  Antisense strand to SEQ ID NO: 30596
cuuucucauagaguugcuc

SEQ ID NO: 30598 - RNA, 19 nt, Artificial Sequence
  Description of Artificial Sequence: Synthetic oligonucleotide
  Sense strand starting at position 436 of SEQ ID NO: 352
ggaguacucaccuguugug

SEQ ID NO: 30599 - RNA, 19 nt, Artificial Sequence
  Description of Artificial Sequence: Synthetic oligonucleotide
  Antisense strand to SEQ ID NO: 30598
cacaacaggugaguacucc

SEQ ID NO: 30600 - RNA, 19 nt, Artificial Sequence
  Description of Artificial Sequence: Synthetic oligonucleotide
  Sense strand starting at position 439 of SEQ ID NO: 352
guacucaccuguugugacu

SEQ ID NO: 30601 - RNA, 19 nt, Artificial Sequence
  Description of Artificial Sequence: Synthetic oligonucleotide
  Antisense strand to SEQ ID NO: 30600
agucacaacaggugaguac

SEQ ID NO: 30602 - RNA, 19 nt, Artificial Sequence
  Description of Artificial Sequence: Synthetic oligonucleotide
  Sense strand starting at position 452 of SEQ ID NO: 352
gugacugucuucgguucau

SEQ ID NO: 30603 - RNA, 19 nt, Artificial Sequence
  Description of Artificial Sequence: Synthetic oligonucleotide
  Antisense strand to SEQ ID NO: 30602
augaaccgaagacagucac

SEQ ID NO: 30604 - RNA, 19 nt, Artificial Sequence
  Description of Artificial Sequence: Synthetic oligonucleotide
  Sense strand starting at position 738 of SEQ ID NO: 352
uuccaaaguccuugcuaug

SEQ ID NO: 30605 - RNA, 19 nt, Artificial Sequence
  Description of Artificial Sequence: Synthetic oligonucleotide
  Antisense strand to SEQ ID NO: 30604
cauagcaaggacuuuggaa

SEQ ID NO: 30606 - RNA, 19 nt, Artificial Sequence
  Description of Artificial Sequence: Synthetic oligonucleotide
  Sense strand starting at position 843 of SEQ ID NO: 352
gggacuucucagugagcua

SEQ ID NO: 30607 - RNA, 19 nt, Artificial Sequence
  Description of Artificial Sequence: Synthetic oligonucleotide
  Antisense strand to SEQ ID NO: 30606
uagcucacugagaaguccc

SEQ ID NO: 30608 - RNA, 19 nt, Artificial Sequence
  Description of Artificial Sequence: Synthetic oligonucleotide
  Sense strand starting at position 844 of SEQ ID NO: 352
ggacuucucagugagcuaa

SEQ ID NO: 30609 - RNA, 19 nt, Artificial Sequence
  Description of Artificial Sequence: Synthetic oligonucleotide
  Antisense strand to SEQ ID NO: 30608
uuagcucacugagaagucc

SEQ ID NO: 30610 - RNA, 19 nt, Artificial Sequence
  Description of Artificial Sequence: Synthetic oligonucleotide
  Sense strand starting at position 883 of SEQ ID NO: 352
ccagguaugggugagcaaa

SEQ ID NO: 30611 - RNA, 19 nt, Artificial Sequence
  Description of Artificial Sequence: Synthetic oligonucleotide
  Antisense strand to SEQ ID NO: 30610
uuugcucacccauaccugg

SEQ ID NO: 30612 - RNA, 19 nt, Artificial Sequence
  Description of Artificial Sequence: Synthetic oligonucleotide
  Sense strand starting at position 1060 of SEQ ID NO: 352
caguguccuggugagagaa

SEQ ID NO: 30613 - RNA, 19 nt, Artificial Sequence
  Description of Artificial Sequence: Synthetic oligonucleotide
  Antisense strand to SEQ ID NO: 30612
uucucucaccaggacacug

SEQ ID NO: 30614 - RNA, 19 nt, Artificial Sequence
  Description of Artificial Sequence: Synthetic oligonucleotide
  Sense strand starting at position 1205 of SEQ ID NO: 352
gagagauugcgcgcuccgu

SEQ ID NO: 30615 - RNA, 19 nt, Artificial Sequence
  Description of Artificial Sequence: Synthetic oligonucleotide
  Antisense strand to SEQ ID NO: 30614
acggagcgcgcaaucucuc

SEQ ID NO: 30616 - RNA, 19 nt, Artificial Sequence
  Description of Artificial Sequence: Synthetic oligonucleotide
  Sense strand starting at position 1281 of SEQ ID NO: 352
gccagauauucaggcggau

SEQ ID NO: 30617 - RNA, 19 nt, Artificial Sequence
  Description of Artificial Sequence: Synthetic oligonucleotide
  Antisense strand to SEQ ID NO: 30616
auccgccugaauaucuggc

SEQ ID NO: 30618 - RNA, 19 nt, Artificial Sequence
  Description of Artificial Sequence: Synthetic oligonucleotide
  Sense strand starting at position 1358 of SEQ ID NO: 352
gggagaauuccucgaagcc

SEQ ID NO: 30619 - RNA, 19 nt, Artificial Sequence
  Description of Artificial Sequence: Synthetic oligonucleotide
  Antisense strand to SEQ ID NO: 30618
ggcuucgaggaauucuccc

SEQ ID NO: 30620 - RNA, 19 nt, Artificial Sequence
  Description of Artificial Sequence: Synthetic oligonucleotide
  Sense strand starting at position 1359 of SEQ ID NO: 352
ggagaauuccucgaagcca

SEQ ID NO: 30621 - RNA, 19 nt, Artificial Sequence
  Description of Artificial Sequence: Synthetic oligonucleotide
  Antisense strand to SEQ ID NO: 30620
uggcuucgaggaauucucc

SEQ ID NO: 30622 - RNA, 19 nt, Artificial Sequence
  Description of Artificial Sequence: Synthetic oligonucleotide
  Sense strand starting at position 2308 of SEQ ID NO: 352
agaugagugacucguucga

SEQ ID NO: 30623 - RNA, 19 nt, Artificial Sequence
  Description of Artificial Sequence: Synthetic oligonucleotide
  Antisense strand to SEQ ID NO: 30622
ucgaacgagucacucaucu

SEQ ID NO: 30624 - RNA, 19 nt, Artificial Sequence
  Description of Artificial Sequence: Synthetic oligonucleotide
  Sense strand starting at position 2312 of SEQ ID NO: 352
gagugacucguucgagguc

SEQ ID NO: 30625 - RNA, 19 nt, Artificial Sequence
  Description of Artificial Sequence: Synthetic oligonucleotide
  Antisense strand to SEQ ID NO: 30624
gaccucgaacgagucacuc

SEQ ID NO: 30626 - RNA, 19 nt, Artificial Sequence
  Description of Artificial Sequence: Synthetic oligonucleotide
  Sense strand starting at position 2923 of SEQ ID NO: 352
cugugaucauggcauugca

SEQ ID NO: 30627 - RNA, 19 nt, Artificial Sequence
  Description of Artificial Sequence: Synthetic oligonucleotide
  Antisense strand to SEQ ID NO: 30626
ugcaaugccaugaucacag

SEQ ID NO: 30628 - RNA, 19 nt, Artificial Sequence
  Description of Artificial Sequence: Synthetic oligonucleotide
  Sense strand starting at position 3001 of SEQ ID NO: 352
caggucacguaucccaaua

SEQ ID NO: 30629 - RNA, 19 nt, Artificial Sequence
  Description of Artificial Sequence: Synthetic oligonucleotide
  Antisense strand to SEQ ID NO: 30628
uauugggauacgugaccug

SEQ ID NO: 30630 - RNA, 19 nt, Artificial Sequence
  Description of Artificial Sequence: Synthetic oligonucleotide
  Sense strand starting at position 3003 of SEQ ID NO: 352
ggucacguaucccaauaaa

SEQ ID NO: 30631 - RNA, 19 nt, Artificial Sequence
  Description of Artificial Sequence: Synthetic oligonucleotide
  Antisense strand to SEQ ID NO: 30630
uuuauugggauacgugacc

SEQ ID NO: 30632 - RNA, 19 nt, Artificial Sequence
  Description of Artificial Sequence: Synthetic oligonucleotide
  Sense strand starting at position 3154 of SEQ ID NO: 352
cccuuacuagccgaaugua

SEQ ID NO: 30633 - RNA, 19 nt, Artificial Sequence
  Description of Artificial Sequence: Synthetic oligonucleotide
  Antisense strand to SEQ ID NO: 30632
uacauucggcuaguaaggg

SEQ ID NO: 30634 - RNA, 19 nt, Artificial Sequence
  Description of Artificial Sequence: Synthetic oligonucleotide
  Sense strand starting at position 3157 of SEQ ID NO: 352
uuacuagccgaauguacau

SEQ ID NO: 30635 - RNA, 19 nt, Artificial Sequence
  Description of Artificial Sequence: Synthetic oligonucleotide
  Antisense strand to SEQ ID NO: 30634
auguacauucggcuaguaa

SEQ ID NO: 30636 - RNA, 19 nt, Artificial Sequence
  Description of Artificial Sequence: Synthetic oligonucleotide
  Sense strand starting at position 3220 of SEQ ID NO: 352
acccucuaggcaugaguuu

SEQ ID NO: 30637 - RNA, 19 nt, Artificial Sequence
  Description of Artificial Sequence: Synthetic oligonucleotide
  Antisense strand to SEQ ID NO: 30636
aaacucaugccuagagggu

SEQ ID NO: 30638 - RNA, 19 nt, Artificial Sequence
  Description of Artificial Sequence: Synthetic oligonucleotide
  Sense strand starting at position 3848 of SEQ ID NO: 353
ucaccagggucuucugaaa

SEQ ID NO: 30639 - RNA, 19 nt, Artificial Sequence
  Description of Artificial Sequence: Synthetic oligonucleotide
  Antisense strand to SEQ ID NO: 30638
uuucagaagacccugguga

SEQ ID NO: 30640 - RNA, 19 nt, Artificial Sequence
  Description of Artificial Sequence: Synthetic oligonucleotide
  Sense strand starting at position 3765 of SEQ ID NO: 353
aggcuagcaugaguauaua

SEQ ID NO: 30641 - RNA, 19 nt, Artificial Sequence
  Description of Artificial Sequence: Synthetic oligonucleotide
  Antisense strand to SEQ ID NO: 30640
uauauacucaugcuagccu

SEQ ID NO: 30642 - RNA, 19 nt, Artificial Sequence
  Description of Artificial Sequence: Synthetic oligonucleotide
  Sense strand starting at position 3763 of SEQ ID NO: 353
aaaggcuagcaugaguaua

SEQ ID NO: 30643 - RNA, 19 nt, Artificial Sequence
  Description of Artificial Sequence: Synthetic oligonucleotide
  Antisense strand to SEQ ID NO: 30642
uauacucaugcuagccuuu

SEQ ID NO: 30644 - RNA, 19 nt, Artificial Sequence
  Description of Artificial Sequence: Synthetic oligonucleotide
  Sense strand starting at position 3381 of SEQ ID NO: 353
ccuggcuaacuuugauauu

SEQ ID NO: 30645 - RNA, 19 nt, Artificial Sequence
  Description of Artificial Sequence: Synthetic oligonucleotide
  Antisense strand to SEQ ID NO: 30644
aauaucaaaguuagccagg

SEQ ID NO: 30646 - RNA, 19 nt, Artificial Sequence
  Description of Artificial Sequence: Synthetic oligonucleotide
  Sense strand starting at position 3179 of SEQ ID NO: 353
aggcauggccugcaaauaa

SEQ ID NO: 30647 - RNA, 19 nt, Artificial Sequence
  Description of Artificial Sequence: Synthetic oligonucleotide
  Antisense strand to SEQ ID NO: 30646
uuauuugcaggccaugccu

SEQ ID NO: 30648 - RNA, 19 nt, Artificial Sequence
  Description of Artificial Sequence: Synthetic oligonucleotide
  Sense strand starting at position 2957 of SEQ ID NO: 353
aaaugugucugggcuauuu

SEQ ID NO: 30649 - RNA, 19 nt, Artificial Sequence
  Description of Artificial Sequence: Synthetic oligonucleotide
  Antisense strand to SEQ ID NO: 30648
aaauagcccagacacauuu

SEQ ID NO: 30650 - RNA, 19 nt, Artificial Sequence
  Description of Artificial Sequence: Synthetic oligonucleotide
  Sense strand starting at position 2954 of SEQ ID NO: 353
uauaaaugugucugggcua

SEQ ID NO: 30651 - RNA, 19 nt, Artificial Sequence
  Description of Artificial Sequence: Synthetic oligonucleotide
  Antisense strand to SEQ ID NO: 30650
uagcccagacacauuuaua

SEQ ID NO: 30652 - RNA, 19 nt, Artificial Sequence
  Description of Artificial Sequence: Synthetic oligonucleotide
  Sense strand starting at position 2931 of SEQ ID NO: 353
uugugcuuuguagauauca

SEQ ID NO: 30653 - RNA, 19 nt, Artificial Sequence
  Description of Artificial Sequence: Synthetic oligonucleotide
  Antisense strand to SEQ ID NO: 30652
ugauaucuacaaagcacaa

SEQ ID NO: 30654 - RNA, 19 nt, Artificial Sequence
  Description of Artificial Sequence: Synthetic oligonucleotide
  Sense strand starting at position 2858 of SEQ ID NO: 353
gagucuuugccggacacau

SEQ ID NO: 30655 - RNA, 19 nt, Artificial Sequence
  Description of Artificial Sequence: Synthetic oligonucleotide
  Antisense strand to SEQ ID NO: 30654
auguguccggcaaagacuc

SEQ ID NO: 30656 - RNA, 19 nt, Artificial Sequence
  Description of Artificial Sequence: Synthetic oligonucleotide
  Sense strand starting at position 2857 of SEQ ID NO: 353
ugagucuuugccggacaca

SEQ ID NO: 30657 - RNA, 19 nt, Artificial Sequence
  Description of Artificial Sequence: Synthetic oligonucleotide
  Antisense strand to SEQ ID NO: 30656
uguguccggcaaagacuca

SEQ ID NO: 30658 - RNA, 19 nt, Artificial Sequence
  Description of Artificial Sequence: Synthetic oligonucleotide
  Sense strand starting at position 2767 of SEQ ID NO: 353
agugaaguuaauggaguau

SEQ ID NO: 30659 - RNA, 19 nt, Artificial Sequence
  Description of Artificial Sequence: Synthetic oligonucleotide
  Antisense strand to SEQ ID NO: 30658
auacuccauuaacuucacu

SEQ ID NO: 30660 - RNA, 19 nt, Artificial Sequence
  Description of Artificial Sequence: Synthetic oligonucleotide
  Sense strand starting at position 2757 of SEQ ID NO: 353
acuugugagcagugaaguu

SEQ ID NO: 30661 - RNA, 19 nt, Artificial Sequence
  Description of Artificial Sequence: Synthetic oligonucleotide
  Antisense strand to SEQ ID NO: 30660
aacuucacugcucacaagu

SEQ ID NO: 30662 - RNA, 19 nt, Artificial Sequence
  Description of Artificial Sequence: Synthetic oligonucleotide
  Sense strand starting at position 2645 of SEQ ID NO: 353
agaugagaaucucauacag

SEQ ID NO: 30663 - RNA, 19 nt, Artificial Sequence
  Description of Artificial Sequence: Synthetic oligonucleotide
  Antisense strand to SEQ ID NO: 30662
cuguaugagauucucaucu

SEQ ID NO: 30664 - RNA, 19 nt, Artificial Sequence
  Description of Artificial Sequence: Synthetic oligonucleotide
  Sense strand starting at position 2636 of SEQ ID NO: 353
uauguagugagaugagaau

SEQ ID NO: 30665 - RNA, 19 nt, Artificial Sequence
  Description of Artificial Sequence: Synthetic oligonucleotide
  Antisense strand to SEQ ID NO: 30664
auucucaucucacuacaua

SEQ ID NO: 30666 - RNA, 19 nt, Artificial Sequence
  Description of Artificial Sequence: Synthetic oligonucleotide
  Sense strand starting at position 2570 of SEQ ID NO: 353
uuuaauuauggaggugaua

SEQ ID NO: 30667 - RNA, 19 nt, Artificial Sequence
  Description of Artificial Sequence: Synthetic oligonucleotide
  Antisense strand to SEQ ID NO: 30666
uaucaccuccauaauuaaa

SEQ ID NO: 30668 - RNA, 19 nt, Artificial Sequence
  Description of Artificial Sequence: Synthetic oligonucleotide
  Sense strand starting at position 2508 of SEQ ID NO: 353
gugguaggugcuuagugaa

SEQ ID NO: 30669 - RNA, 19 nt, Artificial Sequence
  Description of Artificial Sequence: Synthetic oligonucleotide
  Antisense strand to SEQ ID NO: 30668
uucacuaagcaccuaccac

SEQ ID NO: 30670 - RNA, 19 nt, Artificial Sequence
  Description of Artificial Sequence: Synthetic oligonucleotide
  Sense strand starting at position 2452 of SEQ ID NO: 353
guguuaguuccauacaguu

SEQ ID NO: 30671 - RNA, 19 nt, Artificial Sequence
  Description of Artificial Sequence: Synthetic oligonucleotide
  Antisense strand to SEQ ID NO: 30670
aacuguauggaacuaacac

SEQ ID NO: 30672 - RNA, 19 nt, Artificial Sequence
  Description of Artificial Sequence: Synthetic oligonucleotide
  Sense strand starting at position 2441 of SEQ ID NO: 353
uuugacuuggaguguuagu

SEQ ID NO: 30673 - RNA, 19 nt, Artificial Sequence
  Description of Artificial Sequence: Synthetic oligonucleotide
  Antisense strand to SEQ ID NO: 30672
acuaacacuccaagucaaa

SEQ ID NO: 30674 - RNA, 19 nt, Artificial Sequence
  Description of Artificial Sequence: Synthetic oligonucleotide
  Sense strand starting at position 2436 of SEQ ID NO: 353
caauguuugacuuggagug

SEQ ID NO: 30675 - RNA, 19 nt, Artificial Sequence
  Description of Artificial Sequence: Synthetic oligonucleotide
  Antisense strand to SEQ ID NO: 30674
cacuccaagucaaacauug

SEQ ID NO: 30676 - RNA, 19 nt, Artificial Sequence
  Description of Artificial Sequence: Synthetic oligonucleotide
  Sense strand starting at position 2340 of SEQ ID NO: 353
guauacacucucuggauaa

SEQ ID NO: 30677 - RNA, 19 nt, Artificial Sequence
  Description of Artificial Sequence: Synthetic oligonucleotide
  Antisense strand to SEQ ID NO: 30676
uuauccagagaguguauac

SEQ ID NO: 30678 - RNA, 19 nt, Artificial Sequence
  Description of Artificial Sequence: Synthetic oligonucleotide
  Sense strand starting at position 2339 of SEQ ID NO: 353
uguauacacucucuggaua

SEQ ID NO: 30679 - RNA, 19 nt, Artificial Sequence
  Description of Artificial Sequence: Synthetic oligonucleotide
  Antisense strand to SEQ ID NO: 30678
uauccagagaguguauaca

SEQ ID NO: 30680 - RNA, 19 nt, Artificial Sequence
  Description of Artificial Sequence: Synthetic oligonucleotide
  Sense strand starting at position 2306 of SEQ ID NO: 353
auauaaaucuugguguacu

SEQ ID NO: 30681 - RNA, 19 nt, Artificial Sequence
  Description of Artificial Sequence: Synthetic oligonucleotide
  Antisense strand to SEQ ID NO: 30680
aguacaccaagauuuauau

SEQ ID NO: 30682 - RNA, 19 nt, Artificial Sequence
  Description of Artificial Sequence: Synthetic oligonucleotide
  Sense strand starting at position 2226 of SEQ ID NO: 353
aagaauaugcagugguuga

SEQ ID NO: 30683 - RNA, 19 nt, Artificial Sequence
  Description of Artificial Sequence: Synthetic oligonucleotide
  Antisense strand to SEQ ID NO: 30682
ucaaccacugcauauucuu

SEQ ID NO: 30684 - RNA, 19 nt, Artificial Sequence
  Description of Artificial Sequence: Synthetic oligonucleotide
  Sense strand starting at position 1286 of SEQ ID NO: 353
agguauaugcuagggaaac

SEQ ID NO: 30685 - RNA, 19 nt, Artificial Sequence
  Description of Artificial Sequence: Synthetic oligonucleotide
  Antisense strand to SEQ ID NO: 30684
guuucccuagcauauaccu

SEQ ID NO: 30686 - RNA, 19 nt, Artificial Sequence
  Description of Artificial Sequence: Synthetic oligonucleotide
  Sense strand starting at position 1275 of SEQ ID NO: 353
ucucacuuuccagguauau

SEQ ID NO: 30687 - RNA, 19 nt, Artificial Sequence
  Description of Artificial Sequence: Synthetic oligonucleotide
  Antisense strand to SEQ ID NO: 30686
auauaccuggaaagugaga

SEQ ID NO: 30688 - RNA, 19 nt, Artificial Sequence
  Description of Artificial Sequence: Synthetic oligonucleotide
  Sense strand starting at position 1240 of SEQ ID NO: 353
agucauggauagucagaau

SEQ ID NO: 30689 - RNA, 19 nt, Artificial Sequence
  Description of Artificial Sequence: Synthetic oligonucleotide
  Antisense strand to SEQ ID NO: 30688
auucugacuauccaugacu

SEQ ID NO: 30690 - RNA, 19 nt, Artificial Sequence
  Description of Artificial Sequence: Synthetic oligonucleotide
  Sense strand starting at position 1235 of SEQ ID NO: 353
ccuggagucauggauaguc

SEQ ID NO: 30691 - RNA, 19 nt, Artificial Sequence
  Description of Artificial Sequence: Synthetic oligonucleotide
  Antisense strand to SEQ ID NO: 30690
gacuauccaugacuccagg

SEQ ID NO: 30692 - RNA, 19 nt, Artificial Sequence
  Description of Artificial Sequence: Synthetic oligonucleotide
  Sense strand starting at position 699 of SEQ ID NO: 353
gagucaggcuguuuccuaa

SEQ ID NO: 30693 - RNA, 19 nt, Artificial Sequence
  Description of Artificial Sequence: Synthetic oligonucleotide
  Antisense strand to SEQ ID NO: 30692
uuaggaaacagccugacuc

SEQ ID NO: 30694 - RNA, 19 nt, Artificial Sequence
  Description of Artificial Sequence: Synthetic oligonucleotide
  Sense strand starting at position 599 of SEQ ID NO: 353
agcagaaguguuuggagaa

SEQ ID NO: 30695 - RNA, 19 nt, Artificial Sequence
  Description of Artificial Sequence: Synthetic oligonucleotide
  Antisense strand to SEQ ID NO: 30694
uucuccaaacacuucugcu

SEQ ID NO: 30696 - RNA, 19 nt, Artificial Sequence
  Description of Artificial Sequence: Synthetic oligonucleotide
  Sense strand starting at position 567 of SEQ ID NO: 353
cccugcaaucaaugagaga

SEQ ID NO: 30697 - RNA, 19 nt, Artificial Sequence
  Description of Artificial Sequence: Synthetic oligonucleotide
  Antisense strand to SEQ ID NO: 30696
ucucucauugauugcaggg

SEQ ID NO: 30698 - RNA, 19 nt, Artificial Sequence
  Description of Artificial Sequence: Synthetic oligonucleotide
  Sense strand starting at position 433 of SEQ ID NO: 353
gguuacaauugaguauaua

SEQ ID NO: 30699 - RNA, 19 nt, Artificial Sequence
  Description of Artificial Sequence: Synthetic oligonucleotide
  Antisense strand to SEQ ID NO: 30698
uauauacucaauuguaacc

SEQ ID NO: 30700 - RNA, 19 nt, Artificial Sequence
  Description of Artificial Sequence: Synthetic oligonucleotide
  Sense strand starting at position 430 of SEQ ID NO: 353
auggguuacaauugaguau

SEQ ID NO: 30701 - RNA, 19 nt, Artificial Sequence
  Description of Artificial Sequence: Synthetic oligonucleotide
  Antisense strand to SEQ ID NO: 30700
auacucaauuguaacccau

SEQ ID NO: 30702 - RNA, 19 nt, Artificial Sequence
  Description of Artificial Sequence: Synthetic oligonucleotide
  Sense strand starting at position 414 of SEQ ID NO: 353
gguugaauuaaaugcaaug

SEQ ID NO: 30703 - RNA, 19 nt, Artificial Sequence
  Description of Artificial Sequence: Synthetic oligonucleotide
  Antisense strand to SEQ ID NO: 30702
cauugcauuuaauucaacc

SEQ ID NO: 30704 - RNA, 19 nt, Artificial Sequence
  Description of Artificial Sequence: Synthetic oligonucleotide
  Sense strand starting at position 384 of SEQ ID NO: 353
guguaagagaacugggauu

SEQ ID NO: 30705 - RNA, 19 nt, Artificial Sequence
  Description of Artificial Sequence: Synthetic oligonucleotide
  Antisense strand to SEQ ID NO: 30704
aaucccaguucucuuacac

SEQ ID NO: 30706 - RNA, 19 nt, Artificial Sequence
  Description of Artificial Sequence: Synthetic oligonucleotide
  Sense strand starting at position 371 of SEQ ID NO: 353
gagcaaggaccugguguaa

SEQ ID NO: 30707 - RNA, 19 nt, Artificial Sequence
  Description of Artificial Sequence: Synthetic oligonucleotide
  Antisense strand to SEQ ID NO: 30706
uuacaccagguccuugcuc

SEQ ID NO: 30708 - RNA, 19 nt, Artificial Sequence
  Description of Artificial Sequence: Synthetic oligonucleotide
  Sense strand starting at position 358 of SEQ ID NO: 353
gaaugcugugggugagcaa

SEQ ID NO: 30709 - RNA, 19 nt, Artificial Sequence
  Description of Artificial Sequence: Synthetic oligonucleotide
  Antisense strand to SEQ ID NO: 30708
uugcucacccacagcauuc

SEQ ID NO: 30710 - RNA, 19 nt, Artificial Sequence
  Description of Artificial Sequence: Synthetic oligonucleotide
  Sense strand starting at position 354 of SEQ ID NO: 353
augugaaugcuguggguga

SEQ ID NO: 30711 - RNA, 19 nt, Artificial Sequence
  Description of Artificial Sequence: Synthetic oligonucleotide
  Antisense strand to SEQ ID NO: 30710
ucacccacagcauucacau

SEQ ID NO: 30712 - RNA, 19 nt, Artificial Sequence
  Description of Artificial Sequence: Synthetic oligonucleotide
  Sense strand starting at position 330 of SEQ ID NO: 353
agggcaaacuggucaaaga

SEQ ID NO: 30713 - RNA, 19 nt, Artificial Sequence
  Description of Artificial Sequence: Synthetic oligonucleotide
  Antisense strand to SEQ ID NO: 30712
ucuuugaccaguuugcccu

SEQ ID NO: 30714 - RNA, 19 nt, Artificial Sequence
  Description of Artificial Sequence: Synthetic oligonucleotide
  Sense strand starting at position 253 of SEQ ID NO: 353
ugguuuggucagggauuca

SEQ ID NO: 30715 - RNA, 19 nt, Artificial Sequence
  Description of Artificial Sequence: Synthetic oligonucleotide
  Antisense strand to SEQ ID NO: 30714
ugaaucccugaccaaacca

SEQ ID NO: 30716 - RNA, 19 nt, Artificial Sequence
  Description of Artificial Sequence: Synthetic oligonucleotide
  Sense strand starting at position 217 of SEQ ID NO: 353
ggaagugugcaggguuuga

SEQ ID NO: 30717 - RNA, 19 nt, Artificial Sequence
  Description of Artificial Sequence: Synthetic oligonucleotide
  Antisense strand to SEQ ID NO: 30716
ucaaacccugcacacuucc

SEQ ID NO: 30718 - RNA, 19 nt, Artificial Sequence
  Description of Artificial Sequence: Synthetic oligonucleotide
  Sense strand starting at position 288 of SEQ ID NO: 354
gguggugggaagugaaaua

SEQ ID NO: 30719 - RNA, 19 nt, Artificial Sequence
  Description of Artificial Sequence: Synthetic oligonucleotide
  Antisense strand to SEQ ID NO: 30718
uauuucacuucccaccacc

SEQ ID NO: 30720 - RNA, 19 nt, Artificial Sequence
  Description of Artificial Sequence: Synthetic oligonucleotide
  Sense strand starting at position 316 of SEQ ID NO: 354
cuaaccuugucuuugcaga

SEQ ID NO: 30721 - RNA, 19 nt, Artificial Sequence
  Description of Artificial Sequence: Synthetic oligonucleotide
  Antisense strand to SEQ ID NO: 30720
ucugcaaagacaagguuag

SEQ ID NO: 30722 - RNA, 19 nt, Artificial Sequence
  Description of Artificial Sequence: Synthetic oligonucleotide
  Sense strand starting at position 417 of SEQ ID NO: 354
cuugauauuguaugauuag

SEQ ID NO: 30723 - RNA, 19 nt, Artificial Sequence
  Description of Artificial Sequence: Synthetic oligonucleotide
  Antisense strand to SEQ ID NO: 30722
cuaaucauacaauaucaag

SEQ ID NO: 30724 - RNA, 19 nt, Artificial Sequence
  Description of Artificial Sequence: Synthetic oligonucleotide
  Sense strand starting at position 423 of SEQ ID NO: 354
auuguaugauuagugcaca

SEQ ID NO: 30725 - RNA, 19 nt, Artificial Sequence
  Description of Artificial Sequence: Synthetic oligonucleotide
  Antisense strand to SEQ ID NO: 30724
ugugcacuaaucauacaau

SEQ ID NO: 30726 - RNA, 19 nt, Artificial Sequence
  Description of Artificial Sequence: Synthetic oligonucleotide
  Sense strand starting at position 426 of SEQ ID NO: 354
guaugauuagugcacagaa

SEQ ID NO: 30727 - RNA, 19 nt, Artificial Sequence
  Description of Artificial Sequence: Synthetic oligonucleotide
  Antisense strand to SEQ ID NO: 30726
uucugugcacuaaucauac

SEQ ID NO: 30728 - RNA, 19 nt, Artificial Sequence
  Description of Artificial Sequence: Synthetic oligonucleotide
  Sense strand starting at position 428 of SEQ ID NO: 354
augauuagugcacagaauu

SEQ ID NO: 30729 - RNA, 19 nt, Artificial Sequence
  Description of Artificial Sequence: Synthetic oligonucleotide
  Antisense strand to SEQ ID NO: 30728
aauucugugcacuaaucau

SEQ ID NO: 30730 - RNA, 19 nt, Artificial Sequence
  Description of Artificial Sequence: Synthetic oligonucleotide
  Sense strand starting at position 596 of SEQ ID NO: 354
gggucuauguagagggaaa

SEQ ID NO: 30731 - RNA, 19 nt, Artificial Sequence
  Description of Artificial Sequence: Synthetic oligonucleotide
  Antisense strand to SEQ ID NO: 30730
uuucccucuacauagaccc

SEQ ID NO: 30732 - RNA, 19 nt, Artificial Sequence
  Description of Artificial Sequence: Synthetic oligonucleotide
  Sense strand starting at position 616 of SEQ ID NO: 354
gagagcaaguuauuaaaca

SEQ ID NO: 30733 - RNA, 19 nt, Artificial Sequence
  Description of Artificial Sequence: Synthetic oligonucleotide
  Antisense strand to SEQ ID NO: 30732
uguuuaauaacuugcucuc

SEQ ID NO: 30734 - RNA, 19 nt, Artificial Sequence
  Description of Artificial Sequence: Synthetic oligonucleotide
  Sense strand starting at position 776 of SEQ ID NO: 354
ugugcaugccaugaagaca

SEQ ID NO: 30735 - RNA, 19 nt, Artificial Sequence
  Description of Artificial Sequence: Synthetic oligonucleotide
  Antisense strand to SEQ ID NO: 30734
ugucuucauggcaugcaca

SEQ ID NO: 30736 - RNA, 19 nt, Artificial Sequence
  Description of Artificial Sequence: Synthetic oligonucleotide
  Sense strand starting at position 807 of SEQ ID NO: 354
aaaggaguacagugaguau

SEQ ID NO: 30737 - RNA, 19 nt, Artificial Sequence
  Description of Artificial Sequence: Synthetic oligonucleotide
  Antisense strand to SEQ ID NO: 30736
auacucacuguacuccuuu

SEQ ID NO: 30738 - RNA, 19 nt, Artificial Sequence
  Description of Artificial Sequence: Synthetic oligonucleotide
  Sense strand starting at position 810 of SEQ ID NO: 354
ggaguacagugaguaugaa

SEQ ID NO: 30739 - RNA, 19 nt, Artificial Sequence
  Description of Artificial Sequence: Synthetic oligonucleotide
  Antisense strand to SEQ ID NO: 30738
uucauacucacuguacucc

SEQ ID NO: 30740 - RNA, 19 nt, Artificial Sequence
  Description of Artificial Sequence: Synthetic oligonucleotide
  Sense strand starting at position 940 of SEQ ID NO: 354
gggagaaagccacacguua

SEQ ID NO: 30741 - RNA, 19 nt, Artificial Sequence
  Description of Artificial Sequence: Synthetic oligonucleotide
  Antisense strand to SEQ ID NO: 30740
uaacguguggcuuucuccc

SEQ ID NO: 30742 - RNA, 19 nt, Artificial Sequence
  Description of Artificial Sequence: Synthetic oligonucleotide
  Sense strand starting at position 990 of SEQ ID NO: 354
ggcccuugaggagaaguuu

SEQ ID NO: 30743 - RNA, 19 nt, Artificial Sequence
  Description of Artificial Sequence: Synthetic oligonucleotide
  Antisense strand to SEQ ID NO: 30742
aaacuucuccucaagggcc

SEQ ID NO: 30744 - RNA, 19 nt, Artificial Sequence
  Description of Artificial Sequence: Synthetic oligonucleotide
  Sense strand starting at position 1089 of SEQ ID NO: 354
ugaaauaugaggugugaug

SEQ ID NO: 30745 - RNA, 19 nt, Artificial Sequence
  Description of Artificial Sequence: Synthetic oligonucleotide
  Antisense strand to SEQ ID NO: 30744
caucacaccucauauuuca

SEQ ID NO: 30746 - RNA, 19 nt, Artificial Sequence
  Description of Artificial Sequence: Synthetic oligonucleotide
  Sense strand starting at position 1228 of SEQ ID NO: 354
ccuugagacucuucccagu

SEQ ID NO: 30747 - RNA, 19 nt, Artificial Sequence
  Description of Artificial Sequence: Synthetic oligonucleotide
  Antisense strand to SEQ ID NO: 30746
acugggaagagucucaagg

SEQ ID NO: 30748 - RNA, 19 nt, Artificial Sequence
  Description of Artificial Sequence: Synthetic oligonucleotide
  Sense strand starting at position 1241 of SEQ ID NO: 354
cccaguucgguggacuaga

SEQ ID NO: 30749 - RNA, 19 nt, Artificial Sequence
  Description of Artificial Sequence: Synthetic oligonucleotide
  Antisense strand to SEQ ID NO: 30748
ucuaguccaccgaacuggg

SEQ ID NO: 30750 - RNA, 19 nt, Artificial Sequence
  Description of Artificial Sequence: Synthetic oligonucleotide
  Sense strand starting at position 1271 of SEQ ID NO: 354
ucuggaaaucaccggcaaa

SEQ ID NO: 30751 - RNA, 19 nt, Artificial Sequence
  Description of Artificial Sequence: Synthetic oligonucleotide
  Antisense strand to SEQ ID NO: 30750
uuugccggugauuuccaga

SEQ ID NO: 30752 - RNA, 19 nt, Artificial Sequence
  Description of Artificial Sequence: Synthetic oligonucleotide
  Sense strand starting at position 1316 of SEQ ID NO: 354
agauguagacucggaauau

SEQ ID NO: 30753 - RNA, 19 nt, Artificial Sequence
  Description of Artificial Sequence: Synthetic oligonucleotide
  Antisense strand to SEQ ID NO: 30752
auauuccgagucuacaucu

SEQ ID NO: 30754 - RNA, 19 nt, Artificial Sequence
  Description of Artificial Sequence: Synthetic oligonucleotide
  Sense strand starting at position 1325 of SEQ ID NO: 354
cucggaauaucuccucuaa

SEQ ID NO: 30755 - RNA, 19 nt, Artificial Sequence
  Description of Artificial Sequence: Synthetic oligonucleotide
  Antisense strand to SEQ ID NO: 30754
uuagaggagauauuccgag

SEQ ID NO: 30756 - RNA, 19 nt, Artificial Sequence
  Description of Artificial Sequence: Synthetic oligonucleotide
  Sense strand starting at position 1327 of SEQ ID NO: 354
cggaauaucuccucuaacu

SEQ ID NO: 30757 - RNA, 19 nt, Artificial Sequence
  Description of Artificial Sequence: Synthetic oligonucleotide
  Antisense strand to SEQ ID NO: 30756
aguuagaggagauauuccg

SEQ ID NO: 30758 - RNA, 19 nt, Artificial Sequence
  Description of Artificial Sequence: Synthetic oligonucleotide
  Sense strand starting at position 1421 of SEQ ID NO: 354
agccaugaaucugcaaauc

SEQ ID NO: 30759 - RNA, 19 nt, Artificial Sequence
  Description of Artificial Sequence: Synthetic oligonucleotide
  Antisense strand to SEQ ID NO: 30758
gauuugcagauucauggcu

SEQ ID NO: 30760 - RNA, 19 nt, Artificial Sequence
  Description of Artificial Sequence: Synthetic oligonucleotide
  Sense strand starting at position 1470 of SEQ ID NO: 354
ccagguacuauugguaaag

SEQ ID NO: 30761 - RNA, 19 nt, Artificial Sequence
  Description of Artificial Sequence: Synthetic oligonucleotide
  Antisense strand to SEQ ID NO: 30760
cuuuaccaauaguaccugg

SEQ ID NO: 30762 - RNA, 19 nt, Artificial Sequence
  Description of Artificial Sequence: Synthetic oligonucleotide
  Sense strand starting at position 1578 of SEQ ID NO: 354
ggagacaauuaggaagaau

SEQ ID NO: 30763 - RNA, 19 nt, Artificial Sequence
  Description of Artificial Sequence: Synthetic oligonucleotide
  Antisense strand to SEQ ID NO: 30762
auucuuccuaauugucucc

SEQ ID NO: 30764 - RNA, 19 nt, Artificial Sequence
  Description of Artificial Sequence: Synthetic oligonucleotide
  Sense strand starting at position 1644 of SEQ ID NO: 354
caggaagucugacacauuu

SEQ ID NO: 30765 - RNA, 19 nt, Artificial Sequence
  Description of Artificial Sequence: Synthetic oligonucleotide
  Antisense strand to SEQ ID NO: 30764
aaaugugucagacuuccug

SEQ ID NO: 30766 - RNA, 19 nt, Artificial Sequence
  Description of Artificial Sequence: Synthetic oligonucleotide
  Sense strand starting at position 1819 of SEQ ID NO: 354
gagugacucuuaccauguu

SEQ ID NO: 30767 - RNA, 19 nt, Artificial Sequence
  Description of Artificial Sequence: Synthetic oligonucleotide
  Antisense strand to SEQ ID NO: 30766
aacaugguaagagucacuc

SEQ ID NO: 30768 - RNA, 19 nt, Artificial Sequence
  Description of Artificial Sequence: Synthetic oligonucleotide
  Sense strand starting at position 2221 of SEQ ID NO: 354
ccacaucuauaggauaaga

SEQ ID NO: 30769 - RNA, 19 nt, Artificial Sequence
  Description of Artificial Sequence: Synthetic oligonucleotide
  Antisense strand to SEQ ID NO: 30768
ucuuauccuauagaugugg

SEQ ID NO: 30770 - RNA, 19 nt, Artificial Sequence
  Description of Artificial Sequence: Synthetic oligonucleotide
  Sense strand starting at position 2627 of SEQ ID NO: 354
auagcaauauuugagggaa

SEQ ID NO: 30771 - RNA, 19 nt, Artificial Sequence
  Description of Artificial Sequence: Synthetic oligonucleotide
  Antisense strand to SEQ ID NO: 30770
uucccucaaauauugcuau

SEQ ID NO: 30772 - RNA, 19 nt, Artificial Sequence
  Description of Artificial Sequence: Synthetic oligonucleotide
  Sense strand starting at position 3025 of SEQ ID NO: 354
aucacauauuugcagagau

SEQ ID NO: 30773 - RNA, 19 nt, Artificial Sequence
  Description of Artificial Sequence: Synthetic oligonucleotide
  Antisense strand to SEQ ID NO: 30772
aucucugcaaauaugugau

SEQ ID NO: 30774 - RNA, 19 nt, Artificial Sequence
  Description of Artificial Sequence: Synthetic oligonucleotide
  Sense strand starting at position 3035 of SEQ ID NO: 354
ugcagagaucuauguauca

SEQ ID NO: 30775 - RNA, 19 nt, Artificial Sequence
  Description of Artificial Sequence: Synthetic oligonucleotide
  Antisense strand to SEQ ID NO: 30774
ugauacauagaucucugca

SEQ ID NO: 30776 - RNA, 19 nt, Artificial Sequence
  Description of Artificial Sequence: Synthetic oligonucleotide
  Sense strand starting at position 3046 of SEQ ID NO: 354
auguaucaugcagaaaugu

SEQ ID NO: 30777 - RNA, 19 nt, Artificial Sequence
  Description of Artificial Sequence: Synthetic oligonucleotide
  Antisense strand to SEQ ID NO: 30776
acauuucugcaugauacau

SEQ ID NO: 30778 - RNA, 19 nt, Artificial Sequence
  Description of Artificial Sequence: Synthetic oligonucleotide
  Sense strand starting at position 3072 of SEQ ID NO: 354
aucgauuccgaguaaagag

SEQ ID NO: 30779 - RNA, 19 nt, Artificial Sequence
  Description of Artificial Sequence: Synthetic oligonucleotide
  Antisense strand to SEQ ID NO: 30778
cucuuuacucggaaucgau

SEQ ID NO: 30780 - RNA, 19 nt, Artificial Sequence
  Description of Artificial Sequence: Synthetic oligonucleotide
  Sense strand starting at position 3128 of SEQ ID NO: 354
augcaaagugaguagugua

SEQ ID NO: 30781 - RNA, 19 nt, Artificial Sequence
  Description of Artificial Sequence: Synthetic oligonucleotide
  Antisense strand to SEQ ID NO: 30780
uacacuacucacuuugcau

SEQ ID NO: 30782 - RNA, 19 nt, Artificial Sequence
  Description of Artificial Sequence: Synthetic oligonucleotide
  Sense strand starting at position 3279 of SEQ ID NO: 354
auguauguaucucuuaaca

SEQ ID NO: 30783 - RNA, 19 nt, Artificial Sequence
  Description of Artificial Sequence: Synthetic oligonucleotide
  Antisense strand to SEQ ID NO: 30782
uguuaagagauacauacau

SEQ ID NO: 30784 - RNA, 19 nt, Artificial Sequence
  Description of Artificial Sequence: Synthetic oligonucleotide
  Sense strand starting at position 3368 of SEQ ID NO: 354
gacuuaacauuggcuguca

SEQ ID NO: 30785 - RNA, 19 nt, Artificial Sequence
  Description of Artificial Sequence: Synthetic oligonucleotide
  Antisense strand to SEQ ID NO: 30784
ugacagccaauguuaaguc

SEQ ID NO: 30786 - RNA, 19 nt, Artificial Sequence
  Description of Artificial Sequence: Synthetic oligonucleotide
  Sense strand starting at position 3370 of SEQ ID NO: 354
cuuaacauuggcugucaca

SEQ ID NO: 30787 - RNA, 19 nt, Artificial Sequence
  Description of Artificial Sequence: Synthetic oligonucleotide
  Antisense strand to SEQ ID NO: 30786
ugugacagccaauguuaag

SEQ ID NO: 30788 - RNA, 19 nt, Artificial Sequence
  Description of Artificial Sequence: Synthetic oligonucleotide
  Sense strand starting at position 3377 of SEQ ID NO: 354
uuggcugucacagacauga

SEQ ID NO: 30789 - RNA, 19 nt, Artificial Sequence
  Description of Artificial Sequence: Synthetic oligonucleotide
  Antisense strand to SEQ ID NO: 30788
ucaugucugugacagccaa

SEQ ID NO: 30790 - RNA, 19 nt, Artificial Sequence
  Description of Artificial Sequence: Synthetic oligonucleotide
  Sense strand starting at position 3379 of SEQ ID NO: 354
ggcugucacagacaugaac

SEQ ID NO: 30791 - RNA, 19 nt, Artificial Sequence
  Description of Artificial Sequence: Synthetic oligonucleotide
  Antisense strand to SEQ ID NO: 30790
guucaugucugugacagcc

SEQ ID NO: 30792 - RNA, 19 nt, Artificial Sequence
  Description of Artificial Sequence: Synthetic oligonucleotide
  Sense strand starting at position 3497 of SEQ ID NO: 354
auaagugaguucuugcaag

SEQ ID NO: 30793 - RNA, 19 nt, Artificial Sequence
  Description of Artificial Sequence: Synthetic oligonucleotide
  Antisense strand to SEQ ID NO: 30792
cuugcaagaacucacuuau

SEQ ID NO: 30794 - RNA, 19 nt, Artificial Sequence
  Description of Artificial Sequence: Synthetic oligonucleotide
  Sense strand starting at position 3525 of SEQ ID NO: 354
guugaauugcuacaaacua

SEQ ID NO: 30795 - RNA, 19 nt, Artificial Sequence
  Description of Artificial Sequence: Synthetic oligonucleotide
  Antisense strand to SEQ ID NO: 30794
uaguuuguagcaauucaac

SEQ ID NO: 30796 - RNA, 19 nt, Artificial Sequence
  Description of Artificial Sequence: Synthetic oligonucleotide
  Sense strand starting at position 3921 of SEQ ID NO: 354
cccggccacucaucaaauu

SEQ ID NO: 30797 - RNA, 19 nt, Artificial Sequence
  Description of Artificial Sequence: Synthetic oligonucleotide
  Antisense strand to SEQ ID NO: 30796
aauuugaugaguggccggg

SEQ ID NO: 30798 - RNA, 19 nt, Artificial Sequence
  Description of Artificial Sequence: Synthetic oligonucleotide
  Sense strand starting at position 3950 of SEQ ID NO: 355
guuuaacugcaugagaaau

SEQ ID NO: 30799 - RNA, 19 nt, Artificial Sequence
  Description of Artificial Sequence: Synthetic oligonucleotide
  Antisense strand to SEQ ID NO: 30798
auuucucaugcaguuaaac

SEQ ID NO: 30800 - RNA, 19 nt, Artificial Sequence
  Description of Artificial Sequence: Synthetic oligonucleotide
  Sense strand starting at position 3947 of SEQ ID NO: 355
gcaguuuaacugcaugaga

SEQ ID NO: 30801 - RNA, 19 nt, Artificial Sequence
  Description of Artificial Sequence: Synthetic oligonucleotide
  Antisense strand to SEQ ID NO: 30800
ucucaugcaguuaaacugc

SEQ ID NO: 30802 - RNA, 19 nt, Artificial Sequence
  Description of Artificial Sequence: Synthetic oligonucleotide
  Sense strand starting at position 3925 of SEQ ID NO: 355
agaagagcagccugaucua

SEQ ID NO: 30803 - RNA, 19 nt, Artificial Sequence
  Description of Artificial Sequence: Synthetic oligonucleotide
  Antisense strand to SEQ ID NO: 30802
uagaucaggcugcucuucu

SEQ ID NO: 30804 - RNA, 19 nt, Artificial Sequence
  Description of Artificial Sequence: Synthetic oligonucleotide
  Sense strand starting at position 3862 of SEQ ID NO: 355
aucaucuuacccuguggua

SEQ ID NO: 30805 - RNA, 19 nt, Artificial Sequence
  Description of Artificial Sequence: Synthetic oligonucleotide
  Antisense strand to SEQ ID NO: 30804
uaccacaggguaagaugau

SEQ ID NO: 30806 - RNA, 19 nt, Artificial Sequence
  Description of Artificial Sequence: Synthetic oligonucleotide
  Sense strand starting at position 3755 of SEQ ID NO: 355
uuccuaauaguuggguuaa

SEQ ID NO: 30807 - RNA, 19 nt, Artificial Sequence
  Description of Artificial Sequence: Synthetic oligonucleotide
  Antisense strand to SEQ ID NO: 30806
uuaacccaacuauuaggaa

SEQ ID NO: 30808 - RNA, 19 nt, Artificial Sequence
  Description of Artificial Sequence: Synthetic oligonucleotide
  Sense strand starting at position 3691 of SEQ ID NO: 355
accacauuauguguuuauu

SEQ ID NO: 30809 - RNA, 19 nt, Artificial Sequence
  Description of Artificial Sequence: Synthetic oligonucleotide
  Antisense strand to SEQ ID NO: 30808
aauaaacacauaauguggu

SEQ ID NO: 30810 - RNA, 19 nt, Artificial Sequence
  Description of Artificial Sequence: Synthetic oligonucleotide
  Sense strand starting at position 3630 of SEQ ID NO: 355
gcucaucuugugcuguuaa

SEQ ID NO: 30811 - RNA, 19 nt, Artificial Sequence
  Description of Artificial Sequence: Synthetic oligonucleotide
  Antisense strand to SEQ ID NO: 30810
uuaacagcacaagaugagc

SEQ ID NO: 30812 - RNA, 19 nt, Artificial Sequence
  Description of Artificial Sequence: Synthetic oligonucleotide
  Sense strand starting at position 3606 of SEQ ID NO: 355
ucauaagcacuagguguua

SEQ ID NO: 30813 - RNA, 19 nt, Artificial Sequence
  Description of Artificial Sequence: Synthetic oligonucleotide
  Antisense strand to SEQ ID NO: 30812
uaacaccuagugcuuauga

SEQ ID NO: 30814 - RNA, 19 nt, Artificial Sequence
  Description of Artificial Sequence: Synthetic oligonucleotide
  Sense strand starting at position 3542 of SEQ ID NO: 355
ggcaauuucuaugaacuau

SEQ ID NO: 30815 - RNA, 19 nt, Artificial Sequence
  Description of Artificial Sequence: Synthetic oligonucleotide
  Antisense strand to SEQ ID NO: 30814
auaguucauagaaauugcc

SEQ ID NO: 30816 - RNA, 19 nt, Artificial Sequence
  Description of Artificial Sequence: Synthetic oligonucleotide
  Sense strand starting at position 3521 of SEQ ID NO: 355
cuaucauggccacagauau

SEQ ID NO: 30817 - RNA, 19 nt, Artificial Sequence
  Description of Artificial Sequence: Synthetic oligonucleotide
  Antisense strand to SEQ ID NO: 30816
auaucuguggccaugauag

SEQ ID NO: 30818 - RNA, 19 nt, Artificial Sequence
  Description of Artificial Sequence: Synthetic oligonucleotide
  Sense strand starting at position 3519 of SEQ ID NO: 355
uccuaucauggccacagau

SEQ ID NO: 30819 - RNA, 19 nt, Artificial Sequence
  Description of Artificial Sequence: Synthetic oligonucleotide
  Antisense strand to SEQ ID NO: 30818
aucuguggccaugauagga

SEQ ID NO: 30820 - RNA, 19 nt, Artificial Sequence
  Description of Artificial Sequence: Synthetic oligonucleotide
  Sense strand starting at position 3518 of SEQ ID NO: 355
uuccuaucauggccacaga

SEQ ID NO: 30821 - RNA, 19 nt, Artificial Sequence
  Description of Artificial Sequence: Synthetic oligonucleotide
  Antisense strand to SEQ ID NO: 30820
ucuguggccaugauaggaa

SEQ ID NO: 30822 - RNA, 19 nt, Artificial Sequence
  Description of Artificial Sequence: Synthetic oligonucleotide
  Sense strand starting at position 3499 of SEQ ID NO: 355
agucauucucaaugagcuc

SEQ ID NO: 30823 - RNA, 19 nt, Artificial Sequence
  Description of Artificial Sequence: Synthetic oligonucleotide
  Antisense strand to SEQ ID NO: 30822
gagcucauugagaaugacu

SEQ ID NO: 30824 - RNA, 19 nt, Artificial Sequence
  Description of Artificial Sequence: Synthetic oligonucleotide
  Sense strand starting at position 3288 of SEQ ID NO: 355
ccugaaagucagggcugua

SEQ ID NO: 30825 - RNA, 19 nt, Artificial Sequence
  Description of Artificial Sequence: Synthetic oligonucleotide
  Antisense strand to SEQ ID NO: 30824
uacagcccugacuuucagg

SEQ ID NO: 30826 - RNA, 19 nt, Artificial Sequence
  Description of Artificial Sequence: Synthetic oligonucleotide
  Sense strand starting at position 3068 of SEQ ID NO: 355
ugggcaugaauuugugcua

SEQ ID NO: 30827 - RNA, 19 nt, Artificial Sequence
  Description of Artificial Sequence: Synthetic oligonucleotide
  Antisense strand to SEQ ID NO: 30826
uagcacaaauucaugccca

SEQ ID NO: 30828 - RNA, 19 nt, Artificial Sequence
  Description of Artificial Sequence: Synthetic oligonucleotide
  Sense strand starting at position 2945 of SEQ ID NO: 355
gguuaauauguguaaauac

SEQ ID NO: 30829 - RNA, 19 nt, Artificial Sequence
  Description of Artificial Sequence: Synthetic oligonucleotide
  Antisense strand to SEQ ID NO: 30828
guauuuacacauauuaacc

SEQ ID NO: 30830 - RNA, 19 nt, Artificial Sequence
  Description of Artificial Sequence: Synthetic oligonucleotide
  Sense strand starting at position 2935 of SEQ ID NO: 355
gacccuggcugguuaauau

SEQ ID NO: 30831 - RNA, 19 nt, Artificial Sequence
  Description of Artificial Sequence: Synthetic oligonucleotide
  Antisense strand to SEQ ID NO: 30830
auauuaaccagccaggguc

SEQ ID NO: 30832 - RNA, 19 nt, Artificial Sequence
  Description of Artificial Sequence: Synthetic oligonucleotide
  Sense strand starting at position 2922 of SEQ ID NO: 355
gugacuuaucagugacccu

SEQ ID NO: 30833 - RNA, 19 nt, Artificial Sequence
  Description of Artificial Sequence: Synthetic oligonucleotide
  Antisense strand to SEQ ID NO: 30832
agggucacugauaagucac

SEQ ID NO: 30834 - RNA, 19 nt, Artificial Sequence
  Description of Artificial Sequence: Synthetic oligonucleotide
  Sense strand starting at position 2877 of SEQ ID NO: 355
agcauuugucaauguuuga

SEQ ID NO: 30835 - RNA, 19 nt, Artificial Sequence
  Description of Artificial Sequence: Synthetic oligonucleotide
  Antisense strand to SEQ ID NO: 30834
ucaaacauugacaaaugcu

SEQ ID NO: 30836 - RNA, 19 nt, Artificial Sequence
  Description of Artificial Sequence: Synthetic oligonucleotide
  Sense strand starting at position 2753 of SEQ ID NO: 355
augguauacgauugugaua

SEQ ID NO: 30837 - RNA, 19 nt, Artificial Sequence
  Description of Artificial Sequence: Synthetic oligonucleotide
  Antisense strand to SEQ ID NO: 30836
uaucacaaucguauaccau

SEQ ID NO: 30838 - RNA, 19 nt, Artificial Sequence
  Description of Artificial Sequence: Synthetic oligonucleotide
  Sense strand starting at position 2747 of SEQ ID NO: 355
uguggaaugguauacgauu

SEQ ID NO: 30839 - RNA, 19 nt, Artificial Sequence
  Description of Artificial Sequence: Synthetic oligonucleotide
  Antisense strand to SEQ ID NO: 30838
aaucguauaccauuccaca

SEQ ID NO: 30840 - RNA, 19 nt, Artificial Sequence
  Description of Artificial Sequence: Synthetic oligonucleotide
  Sense strand starting at position 2742 of SEQ ID NO: 355
uacaguguggaaugguaua

SEQ ID NO: 30841 - RNA, 19 nt, Artificial Sequence
  Description of Artificial Sequence: Synthetic oligonucleotide
  Antisense strand to SEQ ID NO: 30840
uauaccauuccacacugua

SEQ ID NO: 30842 - RNA, 19 nt, Artificial Sequence
  Description of Artificial Sequence: Synthetic oligonucleotide
  Sense strand starting at position 2735 of SEQ ID NO: 355
aauucuguacaguguggaa

SEQ ID NO: 30843 - RNA, 19 nt, Artificial Sequence
  Description of Artificial Sequence: Synthetic oligonucleotide
  Antisense strand to SEQ ID NO: 30842
uuccacacuguacagaauu

SEQ ID NO: 30844 - RNA, 19 nt, Artificial Sequence
  Description of Artificial Sequence: Synthetic oligonucleotide
  Sense strand starting at position 2479 of SEQ ID NO: 355
ugauaccagugucuuacua

SEQ ID NO: 30845 - RNA, 19 nt, Artificial Sequence
  Description of Artificial Sequence: Synthetic oligonucleotide
  Antisense strand to SEQ ID NO: 30844
uaguaagacacugguauca

SEQ ID NO: 30846 - RNA, 19 nt, Artificial Sequence
  Description of Artificial Sequence: Synthetic oligonucleotide
  Sense strand starting at position 2430 of SEQ ID NO: 355
ugcauuuaaucuguauagu

SEQ ID NO: 30847 - RNA, 19 nt, Artificial Sequence
  Description of Artificial Sequence: Synthetic oligonucleotide
  Antisense strand to SEQ ID NO: 30846
acuauacagauuaaaugca

SEQ ID NO: 30848 - RNA, 19 nt, Artificial Sequence
  Description of Artificial Sequence: Synthetic oligonucleotide
  Sense strand starting at position 2199 of SEQ ID NO: 355
uuugaauguccucaaaguu

SEQ ID NO: 30849 - RNA, 19 nt, Artificial Sequence
  Description of Artificial Sequence: Synthetic oligonucleotide
  Antisense strand to SEQ ID NO: 30848
aacuuugaggacauucaaa

SEQ ID NO: 30850 - RNA, 19 nt, Artificial Sequence
  Description of Artificial Sequence: Synthetic oligonucleotide
  Sense strand starting at position 2000 of SEQ ID NO: 355
guguauggcauugaaagaa

SEQ ID NO: 30851 - RNA, 19 nt, Artificial Sequence
  Description of Artificial Sequence: Synthetic oligonucleotide
  Antisense strand to SEQ ID NO: 30850
uucuuucaaugccauacac

SEQ ID NO: 30852 - RNA, 19 nt, Artificial Sequence
  Description of Artificial Sequence: Synthetic oligonucleotide
  Sense strand starting at position 1999 of SEQ ID NO: 355
gguguauggcauugaaaga

SEQ ID NO: 30853 - RNA, 19 nt, Artificial Sequence
  Description of Artificial Sequence: Synthetic oligonucleotide
  Antisense strand to SEQ ID NO: 30852
ucuuucaaugccauacacc

SEQ ID NO: 30854 - RNA, 19 nt, Artificial Sequence
  Description of Artificial Sequence: Synthetic oligonucleotide
  Sense strand starting at position 1640 of SEQ ID NO: 355
uguucuuaccgucugcauu

SEQ ID NO: 30855 - RNA, 19 nt, Artificial Sequence
  Description of Artificial Sequence: Synthetic oligonucleotide
  Antisense strand to SEQ ID NO: 30854
aaugcagacgguaagaaca

SEQ ID NO: 30856 - RNA, 19 nt, Artificial Sequence
  Description of Artificial Sequence: Synthetic oligonucleotide
  Sense strand starting at position 1336 of SEQ ID NO: 355
uugcgugucauuuguaaca

SEQ ID NO: 30857 - RNA, 19 nt, Artificial Sequence
  Description of Artificial Sequence: Synthetic oligonucleotide
  Antisense strand to SEQ ID NO: 30856
uguuacaaaugacacgcaa

SEQ ID NO: 30858 - RNA, 19 nt, Artificial Sequence
  Description of Artificial Sequence: Synthetic oligonucleotide
  Sense strand starting at position 825 of SEQ ID NO: 355
uggagagagguaugcucaa

SEQ ID NO: 30859 - RNA, 19 nt, Artificial Sequence
  Description of Artificial Sequence: Synthetic oligonucleotide
  Antisense strand to SEQ ID NO: 30858
uugagcauaccucucucca

SEQ ID NO: 30860 - RNA, 19 nt, Artificial Sequence
  Description of Artificial Sequence: Synthetic oligonucleotide
  Sense strand starting at position 656 of SEQ ID NO: 355
gggcaaguaguguaaggaa

SEQ ID NO: 30861 - RNA, 19 nt, Artificial Sequence
  Description of Artificial Sequence: Synthetic oligonucleotide
  Antisense strand to SEQ ID NO: 30860
uuccuuacacuacuugccc

SEQ ID NO: 30862 - RNA, 19 nt, Artificial Sequence
  Description of Artificial Sequence: Synthetic oligonucleotide
  Sense strand starting at position 198 of SEQ ID NO: 355
gcaagagccuaggaaauuu

SEQ ID NO: 30863 - RNA, 19 nt, Artificial Sequence
  Description of Artificial Sequence: Synthetic oligonucleotide
  Antisense strand to SEQ ID NO: 30862
aaauuuccuaggcucuugc

SEQ ID NO: 30864 - RNA, 19 nt, Artificial Sequence
  Description of Artificial Sequence: Synthetic oligonucleotide
  Sense strand starting at position 120 of SEQ ID NO: 355
guaucucuggauuguagga

SEQ ID NO: 30865 - RNA, 19 nt, Artificial Sequence
  Description of Artificial Sequence: Synthetic oligonucleotide
  Antisense strand to SEQ ID NO: 30864
uccuacaauccagagauac

SEQ ID NO: 30866 - RNA, 19 nt, Artificial Sequence
  Description of Artificial Sequence: Synthetic oligonucleotide
  Sense strand starting at position 117 of SEQ ID NO: 355
uguguaucucuggauugua

SEQ ID NO: 30867 - RNA, 19 nt, Artificial Sequence
  Description of Artificial Sequence: Synthetic oligonucleotide
  Antisense strand to SEQ ID NO: 30866
uacaauccagagauacaca

SEQ ID NO: 30868 - RNA, 19 nt, Artificial Sequence
  Description of Artificial Sequence: Synthetic oligonucleotide
  Sense strand starting at position 29 of SEQ ID NO: 355
gucauugaacuguggacau

SEQ ID NO: 30869 - RNA, 19 nt, Artificial Sequence
  Description of Artificial Sequence: Synthetic oligonucleotide
  Antisense strand to SEQ ID NO: 30868
auguccacaguucaaugac

SEQ ID NO: 30870 - RNA, 19 nt, Artificial Sequence
  Description of Artificial Sequence: Synthetic oligonucleotide
  Sense strand starting at position 21 of SEQ ID NO: 355
ucauaauggucauugaacu

SEQ ID NO: 30871 - RNA, 19 nt, Artificial Sequence
  Description of Artificial Sequence: Synthetic oligonucleotide
  Antisense strand to SEQ ID NO: 30870
aguucaaugaccauuauga

SEQ ID NO: 30872 - RNA, 19 nt, Artificial Sequence
  Description of Artificial Sequence: Synthetic oligonucleotide
  Sense strand starting at position 18 of SEQ ID NO: 355
uggucauaauggucauuga

SEQ ID NO: 30873 - RNA, 19 nt, Artificial Sequence
  Description of Artificial Sequence: Synthetic oligonucleotide
  Antisense strand to SEQ ID NO: 30872
ucaaugaccauuaugacca

SEQ ID NO: 30874 - RNA, 19 nt, Artificial Sequence
  Description of Artificial Sequence: Synthetic oligonucleotide
  Sense strand starting at position 9 of SEQ ID NO: 355
gcaugaaauuggucauaau

SEQ ID NO: 30875 - RNA, 19 nt, Artificial Sequence
  Description of Artificial Sequence: Synthetic oligonucleotide
  Antisense strand to SEQ ID NO: 30874
auuaugaccaauuucaugc

SEQ ID NO: 30876 - RNA, 19 nt, Artificial Sequence
  Description of Artificial Sequence: Synthetic oligonucleotide
  Sense strand starting at position 7 of SEQ ID NO: 355
acgcaugaaauuggucaua

SEQ ID NO: 30877 - RNA, 19 nt, Artificial Sequence
  Description of Artificial Sequence: Synthetic oligonucleotide
  Antisense strand to SEQ ID NO: 30876
uaugaccaauuucaugcgu

SEQ ID NO: 30878 - RNA, 19 nt, Artificial Sequence
  Description of Artificial Sequence: Synthetic oligonucleotide
  Sense strand starting at position 3960 of SEQ ID NO: 356
gacgguucugagggaacua

SEQ ID NO: 30879 - RNA, 19 nt, Artificial Sequence
  Description of Artificial Sequence: Synthetic oligonucleotide
  Antisense strand to SEQ ID NO: 30878
uaguucccucagaaccguc

SEQ ID NO: 30880 - RNA, 19 nt, Artificial Sequence
  Description of Artificial Sequence: Synthetic oligonucleotide
  Sense strand starting at position 3789 of SEQ ID NO: 356
uuguaaguagccugauaau

SEQ ID NO: 30881 - RNA, 19 nt, Artificial Sequence
  Description of Artificial Sequence: Synthetic oligonucleotide
  Antisense strand to SEQ ID NO: 30880
auuaucaggcuacuuacaa

SEQ ID NO: 30882 - RNA, 19 nt, Artificial Sequence
  Description of Artificial Sequence: Synthetic oligonucleotide
  Sense strand starting at position 3725 of SEQ ID NO: 356
gcauaauggugaucaagga

SEQ ID NO: 30883 - RNA, 19 nt, Artificial Sequence
  Description of Artificial Sequence: Synthetic oligonucleotide
  Antisense strand to SEQ ID NO: 30882
uccuugaucaccauuaugc

SEQ ID NO: 30884 - RNA, 19 nt, Artificial Sequence
  Description of Artificial Sequence: Synthetic oligonucleotide
  Sense strand starting at position 3585 of SEQ ID NO: 356
ggaggauaauaccaacgaa

SEQ ID NO: 30885 - RNA, 19 nt, Artificial Sequence
  Description of Artificial Sequence: Synthetic oligonucleotide
  Antisense strand to SEQ ID NO: 30884
uucguugguauuauccucc

SEQ ID NO: 30886 - RNA, 19 nt, Artificial Sequence
  Description of Artificial Sequence: Synthetic oligonucleotide
  Sense strand starting at position 3576 of SEQ ID NO: 356
uagcuaucaggaggauaau

SEQ ID NO: 30887 - RNA, 19 nt, Artificial Sequence
  Description of Artificial Sequence: Synthetic oligonucleotide
  Antisense strand to SEQ ID NO: 30886
auuauccuccugauagcua

SEQ ID NO: 30888 - RNA, 19 nt, Artificial Sequence
  Description of Artificial Sequence: Synthetic oligonucleotide
  Sense strand starting at position 3537 of SEQ ID NO: 356
uaagauucuugagaggaca

SEQ ID NO: 30889 - RNA, 19 nt, Artificial Sequence
  Description of Artificial Sequence: Synthetic oligonucleotide
  Antisense strand to SEQ ID NO: 30888
uguccucucaagaaucuua

SEQ ID NO: 30890 - RNA, 19 nt, Artificial Sequence
  Description of Artificial Sequence: Synthetic oligonucleotide
  Sense strand starting at position 3534 of SEQ ID NO: 356
auuuaagauucuugagagg

SEQ ID NO: 30891 - RNA, 19 nt, Artificial Sequence
  Description of Artificial Sequence: Synthetic oligonucleotide
  Antisense strand to SEQ ID NO: 30890
ccucucaagaaucuuaaau

SEQ ID NO: 30892 - RNA, 19 nt, Artificial Sequence
  Description of Artificial Sequence: Synthetic oligonucleotide
  Sense strand starting at position 3520 of SEQ ID NO: 356
agcugcauaugagaauuua

SEQ ID NO: 30893 - RNA, 19 nt, Artificial Sequence
  Description of Artificial Sequence: Synthetic oligonucleotide
  Antisense strand to SEQ ID NO: 30892
uaaauucucauaugcagcu

SEQ ID NO: 30894 - RNA, 19 nt, Artificial Sequence
  Description of Artificial Sequence: Synthetic oligonucleotide
  Sense strand starting at position 3438 of SEQ ID NO: 356
gucaaauuaguuggaaucu

SEQ ID NO: 30895 - RNA, 19 nt, Artificial Sequence
  Description of Artificial Sequence: Synthetic oligonucleotide
  Antisense strand to SEQ ID NO: 30894
agauuccaacuaauuugac

SEQ ID NO: 30896 - RNA, 19 nt, Artificial Sequence
  Description of Artificial Sequence: Synthetic oligonucleotide
  Sense strand starting at position 3437 of SEQ ID NO: 356
cgucaaauuaguuggaauc

SEQ ID NO: 30897 - RNA, 19 nt, Artificial Sequence
  Description of Artificial Sequence: Synthetic oligonucleotide
  Antisense strand to SEQ ID NO: 30896
gauuccaacuaauuugacg

SEQ ID NO: 30898 - RNA, 19 nt, Artificial Sequence
  Description of Artificial Sequence: Synthetic oligonucleotide
  Sense strand starting at position 3436 of SEQ ID NO: 356
acgucaaauuaguuggaau

SEQ ID NO: 30899 - RNA, 19 nt, Artificial Sequence
  Description of Artificial Sequence: Synthetic oligonucleotide
  Antisense strand to SEQ ID NO: 30898
auuccaacuaauuugacgu

SEQ ID NO: 30900 - RNA, 19 nt, Artificial Sequence
  Description of Artificial Sequence: Synthetic oligonucleotide
  Sense strand starting at position 3379 of SEQ ID NO: 356
cuuggagccugaucauaag

SEQ ID NO: 30901 - RNA, 19 nt, Artificial Sequence
  Description of Artificial Sequence: Synthetic oligonucleotide
  Antisense strand to SEQ ID NO: 30900
cuuaugaucaggcuccaag

SEQ ID NO: 30902 - RNA, 19 nt, Artificial Sequence
  Description of Artificial Sequence: Synthetic oligonucleotide
  Sense strand starting at position 3022 of SEQ ID NO: 356
ucccaaaggucaguugagu

SEQ ID NO: 30903 - RNA, 19 nt, Artificial Sequence
  Description of Artificial Sequence: Synthetic oligonucleotide
  Antisense strand to SEQ ID NO: 30902
acucaacugaccuuuggga

SEQ ID NO: 30904 - RNA, 19 nt, Artificial Sequence
  Description of Artificial Sequence: Synthetic oligonucleotide
  Sense strand starting at position 2999 of SEQ ID NO: 356
ucuggaauuauacggauau

SEQ ID NO: 30905 - RNA, 19 nt, Artificial Sequence
  Description of Artificial Sequence: Synthetic oligonucleotide
  Antisense strand to SEQ ID NO: 30904
auauccguauaauuccaga

SEQ ID NO: 30906 - RNA, 19 nt, Artificial Sequence
  Description of Artificial Sequence: Synthetic oligonucleotide
  Sense strand starting at position 2735 of SEQ ID NO: 356
gagggaagcuaugagaaau

SEQ ID NO: 30907 - RNA, 19 nt, Artificial Sequence
  Description of Artificial Sequence: Synthetic oligonucleotide
  Antisense strand to SEQ ID NO: 30906
auuucucauagcuucccuc

SEQ ID NO: 30908 - RNA, 19 nt, Artificial Sequence
  Description of Artificial Sequence: Synthetic oligonucleotide
  Sense strand starting at position 2469 of SEQ ID NO: 356
ggaucaugucuccauaauc

SEQ ID NO: 30909 - RNA, 19 nt, Artificial Sequence
  Description of Artificial Sequence: Synthetic oligonucleotide
  Antisense strand to SEQ ID NO: 30908
gauuauggagacaugaucc

SEQ ID NO: 30910 - RNA, 19 nt, Artificial Sequence
  Description of Artificial Sequence: Synthetic oligonucleotide
  Sense strand starting at position 2468 of SEQ ID NO: 356
aggaucaugucuccauaau

SEQ ID NO: 30911 - RNA, 19 nt, Artificial Sequence
  Description of Artificial Sequence: Synthetic oligonucleotide
  Antisense strand to SEQ ID NO: 30910
auuauggagacaugauccu

SEQ ID NO: 30912 - RNA, 19 nt, Artificial Sequence
  Description of Artificial Sequence: Synthetic oligonucleotide
  Sense strand starting at position 2397 of SEQ ID NO: 356
uauagaaauggccauaugu

SEQ ID NO: 30913 - RNA, 19 nt, Artificial Sequence
  Description of Artificial Sequence: Synthetic oligonucleotide
  Antisense strand to SEQ ID NO: 30912
acauauggccauuucuaua

SEQ ID NO: 30914 - RNA, 19 nt, Artificial Sequence
  Description of Artificial Sequence: Synthetic oligonucleotide
  Sense strand starting at position 2379 of SEQ ID NO: 356
uguagcagaguuuauaauu

SEQ ID NO: 30915 - RNA, 19 nt, Artificial Sequence
  Description of Artificial Sequence: Synthetic oligonucleotide
  Antisense strand to SEQ ID NO: 30914
aauuauaaacucugcuaca

SEQ ID NO: 30916 - RNA, 19 nt, Artificial Sequence
  Description of Artificial Sequence: Synthetic oligonucleotide
  Sense strand starting at position 2374 of SEQ ID NO: 356
cagcauguagcagaguuua

SEQ ID NO: 30917 - RNA, 19 nt, Artificial Sequence
  Description of Artificial Sequence: Synthetic oligonucleotide
  Antisense strand to SEQ ID NO: 30916
uaaacucugcuacaugcug

SEQ ID NO: 30918 - RNA, 19 nt, Artificial Sequence
  Description of Artificial Sequence: Synthetic oligonucleotide
  Sense strand starting at position 2266 of SEQ ID NO: 356
agggaagucuuuccagauc

SEQ ID NO: 30919 - RNA, 19 nt, Artificial Sequence
  Description of Artificial Sequence: Synthetic oligonucleotide
  Antisense strand to SEQ ID NO: 30918
gaucuggaaagacuucccu

SEQ ID NO: 30920 - RNA, 19 nt, Artificial Sequence
  Description of Artificial Sequence: Synthetic oligonucleotide
  Sense strand starting at position 2152 of SEQ ID NO: 356
aaggucucugcacaaaguu

SEQ ID NO: 30921 - RNA, 19 nt, Artificial Sequence
  Description of Artificial Sequence: Synthetic oligonucleotide
  Antisense strand to SEQ ID NO: 30920
aacuuugugcagagaccuu

SEQ ID NO: 30922 - RNA, 19 nt, Artificial Sequence
  Description of Artificial Sequence: Synthetic oligonucleotide
  Sense strand starting at position 2148 of SEQ ID NO: 356
gacuaaggucucugcacaa

SEQ ID NO: 30923 - RNA, 19 nt, Artificial Sequence
  Description of Artificial Sequence: Synthetic oligonucleotide
  Antisense strand to SEQ ID NO: 30922
uugugcagagaccuuaguc

SEQ ID NO: 30924 - RNA, 19 nt, Artificial Sequence
  Description of Artificial Sequence: Synthetic oligonucleotide
  Sense strand starting at position 2147 of SEQ ID NO: 356
ugacuaaggucucugcaca

SEQ ID NO: 30925 - RNA, 19 nt, Artificial Sequence
  Description of Artificial Sequence: Synthetic oligonucleotide
  Antisense strand to SEQ ID NO: 30924
ugugcagagaccuuaguca

SEQ ID NO: 30926 - RNA, 19 nt, Artificial Sequence
  Description of Artificial Sequence: Synthetic oligonucleotide
  Sense strand starting at position 2082 of SEQ ID NO: 356
ucauuugcucuguacugua

SEQ ID NO: 30927 - RNA, 19 nt, Artificial Sequence
  Description of Artificial Sequence: Synthetic oligonucleotide
  Antisense strand to SEQ ID NO: 30926
uacaguacagagcaaauga

SEQ ID NO: 30928 - RNA, 19 nt, Artificial Sequence
  Description of Artificial Sequence: Synthetic oligonucleotide
  Sense strand starting at position 1766 of SEQ ID NO: 356
gguucuaagccuuagcuca

SEQ ID NO: 30929 - RNA, 19 nt, Artificial Sequence
  Description of Artificial Sequence: Synthetic oligonucleotide
  Antisense strand to SEQ ID NO: 30928
ugagcuaaggcuuagaacc

SEQ ID NO: 30930 - RNA, 19 nt, Artificial Sequence
  Description of Artificial Sequence: Synthetic oligonucleotide
  Sense strand starting at position 1688 of SEQ ID NO: 356
guaagaugacaguguguac

SEQ ID NO: 30931 - RNA, 19 nt, Artificial Sequence
  Description of Artificial Sequence: Synthetic oligonucleotide
  Antisense strand to SEQ ID NO: 30930
guacacacugucaucuuac

SEQ ID NO: 30932 - RNA, 19 nt, Artificial Sequence
  Description of Artificial Sequence: Synthetic oligonucleotide
  Sense strand starting at position 1682 of SEQ ID NO: 356
guaaguguaagaugacagu

SEQ ID NO: 30933 - RNA, 19 nt, Artificial Sequence
  Description of Artificial Sequence: Synthetic oligonucleotide
  Antisense strand to SEQ ID NO: 30932
acugucaucuuacacuuac

SEQ ID NO: 30934 - RNA, 19 nt, Artificial Sequence
  Description of Artificial Sequence: Synthetic oligonucleotide
  Sense strand starting at position 1671 of SEQ ID NO: 356
ugucuuaaacaguaagugu

SEQ ID NO: 30935 - RNA, 19 nt, Artificial Sequence
  Description of Artificial Sequence: Synthetic oligonucleotide
  Antisense strand to SEQ ID NO: 30934
acacuuacuguuuaagaca

SEQ ID NO: 30936 - RNA, 19 nt, Artificial Sequence
  Description of Artificial Sequence: Synthetic oligonucleotide
  Sense strand starting at position 1458 of SEQ ID NO: 356
gucauaucccaggauuccu

SEQ ID NO: 30937 - RNA, 19 nt, Artificial Sequence
  Description of Artificial Sequence: Synthetic oligonucleotide
  Antisense strand to SEQ ID NO: 30936
aggaauccugggauaugac

SEQ ID NO: 30938 - RNA, 19 nt, Artificial Sequence
  Description of Artificial Sequence: Synthetic oligonucleotide
  Sense strand starting at position 1428 of SEQ ID NO: 356
ggauuagguuggcuacaau

SEQ ID NO: 30939 - RNA, 19 nt, Artificial Sequence
  Description of Artificial Sequence: Synthetic oligonucleotide
  Antisense strand to SEQ ID NO: 30938
auuguagccaaccuaaucc

SEQ ID NO: 30940 - RNA, 19 nt, Artificial Sequence
  Description of Artificial Sequence: Synthetic oligonucleotide
  Sense strand starting at position 1427 of SEQ ID NO: 356
uggauuagguuggcuacaa

SEQ ID NO: 30941 - RNA, 19 nt, Artificial Sequence
  Description of Artificial Sequence: Synthetic oligonucleotide
  Antisense strand to SEQ ID NO: 30940
uuguagccaaccuaaucca

SEQ ID NO: 30942 - RNA, 19 nt, Artificial Sequence
  Description of Artificial Sequence: Synthetic oligonucleotide
  Sense strand starting at position 1406 of SEQ ID NO: 356
ucaguugcacauugagaga

SEQ ID NO: 30943 - RNA, 19 nt, Artificial Sequence
  Description of Artificial Sequence: Synthetic oligonucleotide
  Antisense strand to SEQ ID NO: 30942
ucucucaaugugcaacuga

SEQ ID NO: 30944 - RNA, 19 nt, Artificial Sequence
  Description of Artificial Sequence: Synthetic oligonucleotide
  Sense strand starting at position 1323 of SEQ ID NO: 356
gcuuuacaucuuuauguuu

SEQ ID NO: 30945 - RNA, 19 nt, Artificial Sequence
  Description of Artificial Sequence: Synthetic oligonucleotide
  Antisense strand to SEQ ID NO: 30944
aaacauaaagauguaaagc

SEQ ID NO: 30946 - RNA, 19 nt, Artificial Sequence
  Description of Artificial Sequence: Synthetic oligonucleotide
  Sense strand starting at position 1302 of SEQ ID NO: 356
gacuaugagugaucuuaau

SEQ ID NO: 30947 - RNA, 19 nt, Artificial Sequence
  Description of Artificial Sequence: Synthetic oligonucleotide
  Antisense strand to SEQ ID NO: 30946
auuaagaucacucauaguc

SEQ ID NO: 30948 - RNA, 19 nt, Artificial Sequence
  Description of Artificial Sequence: Synthetic oligonucleotide
  Sense strand starting at position 1299 of SEQ ID NO: 356
aaagacuaugagugaucuu

SEQ ID NO: 30949 - RNA, 19 nt, Artificial Sequence
  Description of Artificial Sequence: Synthetic oligonucleotide
  Antisense strand to SEQ ID NO: 30948
aagaucacucauagucuuu

SEQ ID NO: 30950 - RNA, 19 nt, Artificial Sequence
  Description of Artificial Sequence: Synthetic oligonucleotide
  Sense strand starting at position 1295 of SEQ ID NO: 356
guggaaagacuaugaguga

SEQ ID NO: 30951 - RNA, 19 nt, Artificial Sequence
  Description of Artificial Sequence: Synthetic oligonucleotide
  Antisense strand to SEQ ID NO: 30950
ucacucauagucuuuccac

SEQ ID NO: 30952 - RNA, 19 nt, Artificial Sequence
  Description of Artificial Sequence: Synthetic oligonucleotide
  Sense strand starting at position 128 of SEQ ID NO: 356
cagagaaucucaucaggug

SEQ ID NO: 30953 - RNA, 19 nt, Artificial Sequence
  Description of Artificial Sequence: Synthetic oligonucleotide
  Antisense strand to SEQ ID NO: 30952
caccugaugagauucucug

SEQ ID NO: 30954 - RNA, 19 nt, Artificial Sequence
  Description of Artificial Sequence: Synthetic oligonucleotide
  Sense strand starting at position 71 of SEQ ID NO: 356
gagucaaagccugggacau

SEQ ID NO: 30955 - RNA, 19 nt, Artificial Sequence
  Description of Artificial Sequence: Synthetic oligonucleotide
  Antisense strand to SEQ ID NO: 30954
augucccaggcuuugacuc

SEQ ID NO: 30956 - RNA, 19 nt, Artificial Sequence
  Description of Artificial Sequence: Synthetic oligonucleotide
  Sense strand starting at position 28 of SEQ ID NO: 356
aaguaagugaccuggagua

SEQ ID NO: 30957 - RNA, 19 nt, Artificial Sequence
  Description of Artificial Sequence: Synthetic oligonucleotide
  Antisense strand to SEQ ID NO: 30956
uacuccaggucacuuacuu

SEQ ID NO: 30958 - RNA, 19 nt, Artificial Sequence
  Description of Artificial Sequence: Synthetic oligonucleotide
  Sense strand starting at position 3964 of SEQ ID NO: 357
auaaguugcuauguaaauc

SEQ ID NO: 30959 - RNA, 19 nt, Artificial Sequence
  Description of Artificial Sequence: Synthetic oligonucleotide
  Antisense strand to SEQ ID NO: 30958
gauuuacauagcaacuuau

SEQ ID NO: 30960 - RNA, 19 nt, Artificial Sequence
  Description of Artificial Sequence: Synthetic oligonucleotide
  Sense strand starting at position 3903 of SEQ ID NO: 357
ugaguagaaugucuacauu

SEQ ID NO: 30961 - RNA, 19 nt, Artificial Sequence
  Description of Artificial Sequence: Synthetic oligonucleotide
  Antisense strand to SEQ ID NO: 30960
aauguagacauucuacuca

SEQ ID NO: 30962 - RNA, 19 nt, Artificial Sequence
  Description of Artificial Sequence: Synthetic oligonucleotide
  Sense strand starting at position 3895 of SEQ ID NO: 357
uuguuuccugaguagaaug

SEQ ID NO: 30963 - RNA, 19 nt, Artificial Sequence
  Description of Artificial Sequence: Synthetic oligonucleotide
  Antisense strand to SEQ ID NO: 30962
cauucuacucaggaaacaa

SEQ ID NO: 30964 - RNA, 19 nt, Artificial Sequence
  Description of Artificial Sequence: Synthetic oligonucleotide
  Sense strand starting at position 3054 of SEQ ID NO: 357
ugaguagaauaucuacauu

SEQ ID NO: 30965 - RNA, 19 nt, Artificial Sequence
  Description of Artificial Sequence: Synthetic oligonucleotide
  Antisense strand to SEQ ID NO: 30964
aauguagauauucuacuca

SEQ ID NO: 30966 - RNA, 19 nt, Artificial Sequence
  Description of Artificial Sequence: Synthetic oligonucleotide
  Sense strand starting at position 3046 of SEQ ID NO: 357
uuguuuccugaguagaaua

SEQ ID NO: 30967 - RNA, 19 nt, Artificial Sequence
  Description of Artificial Sequence: Synthetic oligonucleotide
  Antisense strand to SEQ ID NO: 30966
uauucuacucaggaaacaa

SEQ ID NO: 30968 - RNA, 19 nt, Artificial Sequence
  Description of Artificial Sequence: Synthetic oligonucleotide
  Sense strand starting at position 3045 of SEQ ID NO: 357
cuuguuuccugaguagaau

SEQ ID NO: 30969 - RNA, 19 nt, Artificial Sequence
  Description of Artificial Sequence: Synthetic oligonucleotide
  Antisense strand to SEQ ID NO: 30968
auucuacucaggaaacaag

SEQ ID NO: 30970 - RNA, 19 nt, Artificial Sequence
  Description of Artificial Sequence: Synthetic oligonucleotide
  Sense strand starting at position 2950 of SEQ ID NO: 357
cugaacgguggucagaauu

SEQ ID NO: 30971 - RNA, 19 nt, Artificial Sequence
  Description of Artificial Sequence: Synthetic oligonucleotide
  Antisense strand to SEQ ID NO: 30970
aauucugaccaccguucag

SEQ ID NO: 30972 - RNA, 19 nt, Artificial Sequence
  Description of Artificial Sequence: Synthetic oligonucleotide
  Sense strand starting at position 2949 of SEQ ID NO: 357
acugaacgguggucagaau

SEQ ID NO: 30973 - RNA, 19 nt, Artificial Sequence
  Description of Artificial Sequence: Synthetic oligonucleotide
  Antisense strand to SEQ ID NO: 30972
auucugaccaccguucagu

SEQ ID NO: 30974 - RNA, 19 nt, Artificial Sequence
  Description of Artificial Sequence: Synthetic oligonucleotide
  Sense strand starting at position 2854 of SEQ ID NO: 357
auugccaggcccuaagaua

SEQ ID NO: 30975 - RNA, 19 nt, Artificial Sequence
  Description of Artificial Sequence: Synthetic oligonucleotide
  Antisense strand to SEQ ID NO: 30974
uaucuuagggccuggcaau

SEQ ID NO: 30976 - RNA, 19 nt, Artificial Sequence
  Description of Artificial Sequence: Synthetic oligonucleotide
  Sense strand starting at position 2763 of SEQ ID NO: 357
ucugaaggcaguugaaaua

SEQ ID NO: 30977 - RNA, 19 nt, Artificial Sequence
  Description of Artificial Sequence: Synthetic oligonucleotide
  Antisense strand to SEQ ID NO: 30976
uauuucaacugccuucaga

SEQ ID NO: 30978 - RNA, 19 nt, Artificial Sequence
  Description of Artificial Sequence: Synthetic oligonucleotide
  Sense strand starting at position 2693 of SEQ ID NO: 357
ugaaguguucacuggagaa

SEQ ID NO: 30979 - RNA, 19 nt, Artificial Sequence
  Description of Artificial Sequence: Synthetic oligonucleotide
  Antisense strand to SEQ ID NO: 30978
uucuccagugaacacuuca

SEQ ID NO: 30980 - RNA, 19 nt, Artificial Sequence
  Description of Artificial Sequence: Synthetic oligonucleotide
  Sense strand starting at position 2636 of SEQ ID NO: 357
gcuugcguucgguuagaga

SEQ ID NO: 30981 - RNA, 19 nt, Artificial Sequence
  Description of Artificial Sequence: Synthetic oligonucleotide
  Antisense strand to SEQ ID NO: 30980
ucucuaaccgaacgcaagc

SEQ ID NO: 30982 - RNA, 19 nt, Artificial Sequence
  Description of Artificial Sequence: Synthetic oligonucleotide
  Sense strand starting at position 2632 of SEQ ID NO: 357
ccuugcuugcguucgguua

SEQ ID NO: 30983 - RNA, 19 nt, Artificial Sequence
  Description of Artificial Sequence: Synthetic oligonucleotide
  Antisense strand to SEQ ID NO: 30982
uaaccgaacgcaagcaagg

SEQ ID NO: 30984 - RNA, 19 nt, Artificial Sequence
  Description of Artificial Sequence: Synthetic oligonucleotide
  Sense strand starting at position 2604 of SEQ ID NO: 357
aguucauggccugagagca

SEQ ID NO: 30985 - RNA, 19 nt, Artificial Sequence
  Description of Artificial Sequence: Synthetic oligonucleotide
  Antisense strand to SEQ ID NO: 30984
ugcucucaggccaugaacu

SEQ ID NO: 30986 - RNA, 19 nt, Artificial Sequence
  Description of Artificial Sequence: Synthetic oligonucleotide
  Sense strand starting at position 2587 of SEQ ID NO: 357
gcaugaagcuccucauuag

SEQ ID NO: 30987 - RNA, 19 nt, Artificial Sequence
  Description of Artificial Sequence: Synthetic oligonucleotide
  Antisense strand to SEQ ID NO: 30986
cuaaugaggagcuucaugc

SEQ ID NO: 30988 - RNA, 19 nt, Artificial Sequence
  Description of Artificial Sequence: Synthetic oligonucleotide
  Sense strand starting at position 2525 of SEQ ID NO: 357
aaagcaugucuggaagucu

SEQ ID NO: 30989 - RNA, 19 nt, Artificial Sequence
  Description of Artificial Sequence: Synthetic oligonucleotide
  Antisense strand to SEQ ID NO: 30988
agacuuccagacaugcuuu

SEQ ID NO: 30990 - RNA, 19 nt, Artificial Sequence
  Description of Artificial Sequence: Synthetic oligonucleotide
  Sense strand starting at position 2468 of SEQ ID NO: 357
gguggcucuggaggaaaua

SEQ ID NO: 30991 - RNA, 19 nt, Artificial Sequence
  Description of Artificial Sequence: Synthetic oligonucleotide
  Antisense strand to SEQ ID NO: 30990
uauuuccuccagagccacc

SEQ ID NO: 30992 - RNA, 19 nt, Artificial Sequence
  Description of Artificial Sequence: Synthetic oligonucleotide
  Sense strand starting at position 2409 of SEQ ID NO: 357
gugggcuugaccuggaagu

SEQ ID NO: 30993 - RNA, 19 nt, Artificial Sequence
  Description of Artificial Sequence: Synthetic oligonucleotide
  Antisense strand to SEQ ID NO: 30992
acuuccaggucaagcccac

SEQ ID NO: 30994 - RNA, 19 nt, Artificial Sequence
  Description of Artificial Sequence: Synthetic oligonucleotide
  Sense strand starting at position 2392 of SEQ ID NO: 357
guuaaagugguccaugagu

SEQ ID NO: 30995 - RNA, 19 nt, Artificial Sequence
  Description of Artificial Sequence: Synthetic oligonucleotide
  Antisense strand to SEQ ID NO: 30994
acucauggaccacuuuaac

SEQ ID NO: 30996 - RNA, 19 nt, Artificial Sequence
  Description of Artificial Sequence: Synthetic oligonucleotide
  Sense strand starting at position 2390 of SEQ ID NO: 357
cuguuaaagugguccauga

SEQ ID NO: 30997 - RNA, 19 nt, Artificial Sequence
  Description of Artificial Sequence: Synthetic oligonucleotide
  Antisense strand to SEQ ID NO: 30996
ucauggaccacuuuaacag

SEQ ID NO: 30998 - RNA, 19 nt, Artificial Sequence
  Description of Artificial Sequence: Synthetic oligonucleotide
  Sense strand starting at position 2378 of SEQ ID NO: 357
agccaacugucacuguuaa

SEQ ID NO: 30999 - RNA, 19 nt, Artificial Sequence
  Description of Artificial Sequence: Synthetic oligonucleotide
  Antisense strand to SEQ ID NO: 30998
uuaacagugacaguuggcu

SEQ ID NO: 31000 - RNA, 19 nt, Artificial Sequence
  Description of Artificial Sequence: Synthetic oligonucleotide
  Sense strand starting at position 2319 of SEQ ID NO: 357
ggcaaugcagauuaucaga

SEQ ID NO: 31001 - RNA, 19 nt, Artificial Sequence
  Description of Artificial Sequence: Synthetic oligonucleotide
  Antisense strand to SEQ ID NO: 31000
ucugauaaucugcauugcc

SEQ ID NO: 31002 - RNA, 19 nt, Artificial Sequence
  Description of Artificial Sequence: Synthetic oligonucleotide
  Sense strand starting at position 2247 of SEQ ID NO: 357
gauguagcugcauaauaag

SEQ ID NO: 31003 - RNA, 19 nt, Artificial Sequence
  Description of Artificial Sequence: Synthetic oligonucleotide
  Antisense strand to SEQ ID NO: 31002
cuuauuaugcagcuacauc

SEQ ID NO: 31004 - RNA, 19 nt, Artificial Sequence
  Description of Artificial Sequence: Synthetic oligonucleotide
  Sense strand starting at position 2216 of SEQ ID NO: 357
ugaucaugaucagaagaca

SEQ ID NO: 31005 - RNA, 19 nt, Artificial Sequence
  Description of Artificial Sequence: Synthetic oligonucleotide
  Antisense strand to SEQ ID NO: 31004
ugucuucugaucaugauca

SEQ ID NO: 31006 - RNA, 19 nt, Artificial Sequence
  Description of Artificial Sequence: Synthetic oligonucleotide
  Sense strand starting at position 2211 of SEQ ID NO: 357
gcucuugaucaugaucaga

SEQ ID NO: 31007 - RNA, 19 nt, Artificial Sequence
  Description of Artificial Sequence: Synthetic oligonucleotide
  Antisense strand to SEQ ID NO: 31006
ucugaucaugaucaagagc

SEQ ID NO: 31008 - RNA, 19 nt, Artificial Sequence
  Description of Artificial Sequence: Synthetic oligonucleotide
  Sense strand starting at position 2207 of SEQ ID NO: 357
cucugcucuugaucaugau

SEQ ID NO: 31009 - RNA, 19 nt, Artificial Sequence
  Description of Artificial Sequence: Synthetic oligonucleotide
  Antisense strand to SEQ ID NO: 31008
aucaugaucaagagcagag

SEQ ID NO: 31010 - RNA, 19 nt, Artificial Sequence
  Description of Artificial Sequence: Synthetic oligonucleotide
  Sense strand starting at position 2163 of SEQ ID NO: 357
acuucuaccucucugugau

SEQ ID NO: 31011 - RNA, 19 nt, Artificial Sequence
  Description of Artificial Sequence: Synthetic oligonucleotide
  Antisense strand to SEQ ID NO: 31010
aucacagagagguagaagu

SEQ ID NO: 31012 - RNA, 19 nt, Artificial Sequence
  Description of Artificial Sequence: Synthetic oligonucleotide
  Sense strand starting at position 2112 of SEQ ID NO: 357
aagugaugguagucacuca

SEQ ID NO: 31013 - RNA, 19 nt, Artificial Sequence
  Description of Artificial Sequence: Synthetic oligonucleotide
  Antisense strand to SEQ ID NO: 31012
ugagugacuaccaucacuu

SEQ ID NO: 31014 - RNA, 19 nt, Artificial Sequence
  Description of Artificial Sequence: Synthetic oligonucleotide
  Sense strand starting at position 2084 of SEQ ID NO: 357
uuggcuugucaauaaucua

SEQ ID NO: 31015 - RNA, 19 nt, Artificial Sequence
  Description of Artificial Sequence: Synthetic oligonucleotide
  Antisense strand to SEQ ID NO: 31014
uagauuauugacaagccaa

SEQ ID NO: 31016 - RNA, 19 nt, Artificial Sequence
  Description of Artificial Sequence: Synthetic oligonucleotide
  Sense strand starting at position 2080 of SEQ ID NO: 357
auacuuggcuugucaauaa

SEQ ID NO: 31017 - RNA, 19 nt, Artificial Sequence
  Description of Artificial Sequence: Synthetic oligonucleotide
  Antisense strand to SEQ ID NO: 31016
uuauugacaagccaaguau

SEQ ID NO: 31018 - RNA, 19 nt, Artificial Sequence
  Description of Artificial Sequence: Synthetic oligonucleotide
  Sense strand starting at position 1532 of SEQ ID NO: 357
ggcauauuccaagggcauc

SEQ ID NO: 31019 - RNA, 19 nt, Artificial Sequence
  Description of Artificial Sequence: Synthetic oligonucleotide
  Antisense strand to SEQ ID NO: 31018
gaugcccuuggaauaugcc

SEQ ID NO: 31020 - RNA, 19 nt, Artificial Sequence
  Description of Artificial Sequence: Synthetic oligonucleotide
  Sense strand starting at position 1524 of SEQ ID NO: 357
gccugaaaggcauauucca

SEQ ID NO: 31021 - RNA, 19 nt, Artificial Sequence
  Description of Artificial Sequence: Synthetic oligonucleotide
  Antisense strand to SEQ ID NO: 31020
uggaauaugccuuucaggc

SEQ ID NO: 31022 - RNA, 19 nt, Artificial Sequence
  Description of Artificial Sequence: Synthetic oligonucleotide
  Sense strand starting at position 1503 of SEQ ID NO: 357
agaauucucugccuggaac

SEQ ID NO: 31023 - RNA, 19 nt, Artificial Sequence
  Description of Artificial Sequence: Synthetic oligonucleotide
  Antisense strand to SEQ ID NO: 31022
guuccaggcagagaauucu

SEQ ID NO: 31024 - RNA, 19 nt, Artificial Sequence
  Description of Artificial Sequence: Synthetic oligonucleotide
  Sense strand starting at position 992 of SEQ ID NO: 357
ggcaaauuaucagcuuaga

SEQ ID NO: 31025 - RNA, 19 nt, Artificial Sequence
  Description of Artificial Sequence: Synthetic oligonucleotide
  Antisense strand to SEQ ID NO: 31024
ucuaagcugauaauuugcc

SEQ ID NO: 31026 - RNA, 19 nt, Artificial Sequence
  Description of Artificial Sequence: Synthetic oligonucleotide
  Sense strand starting at position 982 of SEQ ID NO: 357
gguguucccaggcaaauua

SEQ ID NO: 31027 - RNA, 19 nt, Artificial Sequence
  Description of Artificial Sequence: Synthetic oligonucleotide
  Antisense strand to SEQ ID NO: 31026
uaauuugccugggaacacc

SEQ ID NO: 31028 - RNA, 19 nt, Artificial Sequence
  Description of Artificial Sequence: Synthetic oligonucleotide
  Sense strand starting at position 931 of SEQ ID NO: 357
guuaaaugauggucagagu

SEQ ID NO: 31029 - RNA, 19 nt, Artificial Sequence
  Description of Artificial Sequence: Synthetic oligonucleotide
  Antisense strand to SEQ ID NO: 31028
acucugaccaucauuuaac

SEQ ID NO: 31030 - RNA, 19 nt, Artificial Sequence
  Description of Artificial Sequence: Synthetic oligonucleotide
  Sense strand starting at position 929 of SEQ ID NO: 357
agguuaaaugauggucaga

SEQ ID NO: 31031 - RNA, 19 nt, Artificial Sequence
  Description of Artificial Sequence: Synthetic oligonucleotide
  Antisense strand to SEQ ID NO: 31030
ucugaccaucauuuaaccu

SEQ ID NO: 31032 - RNA, 19 nt, Artificial Sequence
  Description of Artificial Sequence: Synthetic oligonucleotide
  Sense strand starting at position 777 of SEQ ID NO: 357
agacaaucauuccaaagag

SEQ ID NO: 31033 - RNA, 19 nt, Artificial Sequence
  Description of Artificial Sequence: Synthetic oligonucleotide
  Antisense strand to SEQ ID NO: 31032
cucuuuggaaugauugucu

SEQ ID NO: 31034 - RNA, 19 nt, Artificial Sequence
  Description of Artificial Sequence: Synthetic oligonucleotide
  Sense strand starting at position 113 of SEQ ID NO: 357
gagaguugggcucaccuuu

SEQ ID NO: 31035 - RNA, 19 nt, Artificial Sequence
  Description of Artificial Sequence: Synthetic oligonucleotide
  Antisense strand to SEQ ID NO: 31034
aaaggugagcccaacucuc

SEQ ID NO: 31036 - RNA, 19 nt, Artificial Sequence
  Description of Artificial Sequence: Synthetic oligonucleotide
  Sense strand starting at position 83 of SEQ ID NO: 357
guuauaguacuaggaacaa

SEQ ID NO: 31037 - RNA, 19 nt, Artificial Sequence
  Description of Artificial Sequence: Synthetic oligonucleotide
  Antisense strand to SEQ ID NO: 31036
uuguuccuaguacuauaac

SEQ ID NO: 31038 - RNA, 19 nt, Artificial Sequence
  Description of Artificial Sequence: Synthetic oligonucleotide
  Sense strand starting at position 3924 of SEQ ID NO: 358
augaguguguggagaaaug

SEQ ID NO: 31039 - RNA, 19 nt, Artificial Sequence
  Description of Artificial Sequence: Synthetic oligonucleotide
  Antisense strand to SEQ ID NO: 31038
cauuucuccacacacucau

SEQ ID NO: 31040 - RNA, 19 nt, Artificial Sequence
  Description of Artificial Sequence: Synthetic oligonucleotide
  Sense strand starting at position 3874 of SEQ ID NO: 358
ucaccaucagauugguaaa

SEQ ID NO: 31041 - RNA, 19 nt, Artificial Sequence
  Description of Artificial Sequence: Synthetic oligonucleotide
  Antisense strand to SEQ ID NO: 31040
uuuaccaaucugaugguga

SEQ ID NO: 31042 - RNA, 19 nt, Artificial Sequence
  Description of Artificial Sequence: Synthetic oligonucleotide
  Sense strand starting at position 3817 of SEQ ID NO: 358
aggagucuaaugugaccaa

SEQ ID NO: 31043 - RNA, 19 nt, Artificial Sequence
  Description of Artificial Sequence: Synthetic oligonucleotide
  Antisense strand to SEQ ID NO: 31042
uuggucacauuagacuccu

SEQ ID NO: 31044 - RNA, 19 nt, Artificial Sequence
  Description of Artificial Sequence: Synthetic oligonucleotide
  Sense strand starting at position 3781 of SEQ ID NO: 358
agaaauauuucgcagaaga

SEQ ID NO: 31045 - RNA, 19 nt, Artificial Sequence
  Description of Artificial Sequence: Synthetic oligonucleotide
  Antisense strand to SEQ ID NO: 31044
ucuucugcgaaauauuucu

SEQ ID NO: 31046 - RNA, 19 nt, Artificial Sequence
  Description of Artificial Sequence: Synthetic oligonucleotide
  Sense strand starting at position 3779 of SEQ ID NO: 358
gaagaaauauuucgcagaa

SEQ ID NO: 31047 - RNA, 19 nt, Artificial Sequence
  Description of Artificial Sequence: Synthetic oligonucleotide
  Antisense strand to SEQ ID NO: 31046
uucugcgaaauauuucuuc

SEQ ID NO: 31048 - RNA, 19 nt, Artificial Sequence
  Description of Artificial Sequence: Synthetic oligonucleotide
  Sense strand starting at position 3757 of SEQ ID NO: 358
ugauauaaaugaucagcuu

SEQ ID NO: 31049 - RNA, 19 nt, Artificial Sequence
  Description of Artificial Sequence: Synthetic oligonucleotide
  Antisense strand to SEQ ID NO: 31048
aagcugaucauuuauauca

SEQ ID NO: 31050 - RNA, 19 nt, Artificial Sequence
  Description of Artificial Sequence: Synthetic oligonucleotide
  Sense strand starting at position 3519 of SEQ ID NO: 358
ccuauaguuugaguaugga

SEQ ID NO: 31051 - RNA, 19 nt, Artificial Sequence
  Description of Artificial Sequence: Synthetic oligonucleotide
  Antisense strand to SEQ ID NO: 31050
uccauacucaaacuauagg

SEQ ID NO: 31052 - RNA, 19 nt, Artificial Sequence
  Description of Artificial Sequence: Synthetic oligonucleotide
  Sense strand starting at position 3516 of SEQ ID NO: 358
auuccuauaguuugaguau

SEQ ID NO: 31053 - RNA, 19 nt, Artificial Sequence
  Description of Artificial Sequence: Synthetic oligonucleotide
  Antisense strand to SEQ ID NO: 31052
auacucaaacuauaggaau

SEQ ID NO: 31054 - RNA, 19 nt, Artificial Sequence
  Description of Artificial Sequence: Synthetic oligonucleotide
  Sense strand starting at position 3361 of SEQ ID NO: 358
ggcaaauugcuugaaucug

SEQ ID NO: 31055 - RNA, 19 nt, Artificial Sequence
  Description of Artificial Sequence: Synthetic oligonucleotide
  Antisense strand to SEQ ID NO: 31054
cagauucaagcaauuugcc

SEQ ID NO: 31056 - RNA, 19 nt, Artificial Sequence
  Description of Artificial Sequence: Synthetic oligonucleotide
  Sense strand starting at position 3360 of SEQ ID NO: 358
aggcaaauugcuugaaucu

SEQ ID NO: 31057 - RNA, 19 nt, Artificial Sequence
  Description of Artificial Sequence: Synthetic oligonucleotide
  Antisense strand to SEQ ID NO: 31056
agauucaagcaauuugccu

SEQ ID NO: 31058 - RNA, 19 nt, Artificial Sequence
  Description of Artificial Sequence: Synthetic oligonucleotide
  Sense strand starting at position 3114 of SEQ ID NO: 358
ugaacuacaguuggauuaa

SEQ ID NO: 31059 - RNA, 19 nt, Artificial Sequence
  Description of Artificial Sequence: Synthetic oligonucleotide
  Antisense strand to SEQ ID NO: 31058
uuaauccaacuguaguuca

SEQ ID NO: 31060 - RNA, 19 nt, Artificial Sequence
  Description of Artificial Sequence: Synthetic oligonucleotide
  Sense strand starting at position 3096 of SEQ ID NO: 358
gagcgucauccacaauaau

SEQ ID NO: 31061 - RNA, 19 nt, Artificial Sequence
  Description of Artificial Sequence: Synthetic oligonucleotide
  Antisense strand to SEQ ID NO: 31060
auuauuguggaugacgcuc

SEQ ID NO: 31062 - RNA, 19 nt, Artificial Sequence
  Description of Artificial Sequence: Synthetic oligonucleotide
  Sense strand starting at position 3079 of SEQ ID NO: 358
uuaccucaugguuguauga

SEQ ID NO: 31063 - RNA, 19 nt, Artificial Sequence
  Description of Artificial Sequence: Synthetic oligonucleotide
  Antisense strand to SEQ ID NO: 31062
ucauacaaccaugagguaa

SEQ ID NO: 31064 - RNA, 19 nt, Artificial Sequence
  Description of Artificial Sequence: Synthetic oligonucleotide
  Sense strand starting at position 3007 of SEQ ID NO: 358
gaaaguugccaaggaaaug

SEQ ID NO: 31065 - RNA, 19 nt, Artificial Sequence
  Description of Artificial Sequence: Synthetic oligonucleotide
  Antisense strand to SEQ ID NO: 31064
cauuuccuuggcaacuuuc

SEQ ID NO: 31066 - RNA, 19 nt, Artificial Sequence
  Description of Artificial Sequence: Synthetic oligonucleotide
  Sense strand starting at position 2991 of SEQ ID NO: 358
uggauauuaucugucagaa

SEQ ID NO: 31067 - RNA, 19 nt, Artificial Sequence
  Description of Artificial Sequence: Synthetic oligonucleotide
  Antisense strand to SEQ ID NO: 31066
uucugacagauaauaucca

SEQ ID NO: 31068 - RNA, 19 nt, Artificial Sequence
  Description of Artificial Sequence: Synthetic oligonucleotide
  Sense strand starting at position 2924 of SEQ ID NO: 358
uuaggucacagugaguaaa

SEQ ID NO: 31069 - RNA, 19 nt, Artificial Sequence
  Description of Artificial Sequence: Synthetic oligonucleotide
  Antisense strand to SEQ ID NO: 31068
uuuacucacugugaccuaa

SEQ ID NO: 31070 - RNA, 19 nt, Artificial Sequence
  Description of Artificial Sequence: Synthetic oligonucleotide
  Sense strand starting at position 2913 of SEQ ID NO: 358
guuauaauucuuuagguca

SEQ ID NO: 31071 - RNA, 19 nt, Artificial Sequence
  Description of Artificial Sequence: Synthetic oligonucleotide
  Antisense strand to SEQ ID NO: 31070
ugaccuaaagaauuauaac

SEQ ID NO: 31072 - RNA, 19 nt, Artificial Sequence
  Description of Artificial Sequence: Synthetic oligonucleotide
  Sense strand starting at position 2912 of SEQ ID NO: 358
gguuauaauucuuuagguc

SEQ ID NO: 31073 - RNA, 19 nt, Artificial Sequence
  Description of Artificial Sequence: Synthetic oligonucleotide
  Antisense strand to SEQ ID NO: 31072
gaccuaaagaauuauaacc

SEQ ID NO: 31074 - RNA, 19 nt, Artificial Sequence
  Description of Artificial Sequence: Synthetic oligonucleotide
  Sense strand starting at position 2911 of SEQ ID NO: 358
ggguuauaauucuuuaggu

SEQ ID NO: 31075 - RNA, 19 nt, Artificial Sequence
  Description of Artificial Sequence: Synthetic oligonucleotide
  Antisense strand to SEQ ID NO: 31074
accuaaagaauuauaaccc

SEQ ID NO: 31076 - RNA, 19 nt, Artificial Sequence
  Description of Artificial Sequence: Synthetic oligonucleotide
  Sense strand starting at position 2802 of SEQ ID NO: 358
acagaaauuugugacacaa

SEQ ID NO: 31077 - RNA, 19 nt, Artificial Sequence
  Description of Artificial Sequence: Synthetic oligonucleotide
  Antisense strand to SEQ ID NO: 31076
uugugucacaaauuucugu

SEQ ID NO: 31078 - RNA, 19 nt, Artificial Sequence
  Description of Artificial Sequence: Synthetic oligonucleotide
  Sense strand starting at position 2728 of SEQ ID NO: 358
cauuauaggugguuaagaa

SEQ ID NO: 31079 - RNA, 19 nt, Artificial Sequence
  Description of Artificial Sequence: Synthetic oligonucleotide
  Antisense strand to SEQ ID NO: 31078
uucuuaaccaccuauaaug

SEQ ID NO: 31080 - RNA, 19 nt, Artificial Sequence
  Description of Artificial Sequence: Synthetic oligonucleotide
  Sense strand starting at position 2724 of SEQ ID NO: 358
uuaacauuauaggugguua

SEQ ID NO: 31081 - RNA, 19 nt, Artificial Sequence
  Description of Artificial Sequence: Synthetic oligonucleotide
  Antisense strand to SEQ ID NO: 31080
uaaccaccuauaauguuaa

SEQ ID NO: 31082 - RNA, 19 nt, Artificial Sequence
  Description of Artificial Sequence: Synthetic oligonucleotide
  Sense strand starting at position 2583 of SEQ ID NO: 358
uccuauguucggcauacau

SEQ ID NO: 31083 - RNA, 19 nt, Artificial Sequence
  Description of Artificial Sequence: Synthetic oligonucleotide
  Antisense strand to SEQ ID NO: 31082
auguaugccgaacauagga

SEQ ID NO: 31084 - RNA, 19 nt, Artificial Sequence
  Description of Artificial Sequence: Synthetic oligonucleotide
  Sense strand starting at position 2355 of SEQ ID NO: 358
guauacugucccuaacaag

SEQ ID NO: 31085 - RNA, 19 nt, Artificial Sequence
  Description of Artificial Sequence: Synthetic oligonucleotide
  Antisense strand to SEQ ID NO: 31084
cuuguuagggacaguauac

SEQ ID NO: 31086 - RNA, 19 nt, Artificial Sequence
  Description of Artificial Sequence: Synthetic oligonucleotide
  Sense strand starting at position 2354 of SEQ ID NO: 358
gguauacugucccuaacaa

SEQ ID NO: 31087 - RNA, 19 nt, Artificial Sequence
  Description of Artificial Sequence: Synthetic oligonucleotide
  Antisense strand to SEQ ID NO: 31086
uuguuagggacaguauacc

SEQ ID NO: 31088 - RNA, 19 nt, Artificial Sequence
  Description of Artificial Sequence: Synthetic oligonucleotide
  Sense strand starting at position 2243 of SEQ ID NO: 358
uuucucaucucagugaaag

SEQ ID NO: 31089 - RNA, 19 nt, Artificial Sequence
  Description of Artificial Sequence: Synthetic oligonucleotide
  Antisense strand to SEQ ID NO: 31088
cuuucacugagaugagaaa

SEQ ID NO: 31090 - RNA, 19 nt, Artificial Sequence
  Description of Artificial Sequence: Synthetic oligonucleotide
  Sense strand starting at position 1887 of SEQ ID NO: 358
ggacuucuuugacucuuau

SEQ ID NO: 31091 - RNA, 19 nt, Artificial Sequence
  Description of Artificial Sequence: Synthetic oligonucleotide
  Antisense strand to SEQ ID NO: 31090
auaagagucaaagaagucc

SEQ ID NO: 31092 - RNA, 19 nt, Artificial Sequence
  Description of Artificial Sequence: Synthetic oligonucleotide
  Sense strand starting at position 1884 of SEQ ID NO: 358
uugggacuucuuugacucu

SEQ ID NO: 31093 - RNA, 19 nt, Artificial Sequence
  Description of Artificial Sequence: Synthetic oligonucleotide
  Antisense strand to SEQ ID NO: 31092
agagucaaagaagucccaa

SEQ ID NO: 31094 - RNA, 19 nt, Artificial Sequence
  Description of Artificial Sequence: Synthetic oligonucleotide
  Sense strand starting at position 1322 of SEQ ID NO: 358
gucuaucagauguguggau

SEQ ID NO: 31095 - RNA, 19 nt, Artificial Sequence
  Description of Artificial Sequence: Synthetic oligonucleotide
  Antisense strand to SEQ ID NO: 31094
auccacacaucugauagac

SEQ ID NO: 31096 - RNA, 19 nt, Artificial Sequence
  Description of Artificial Sequence: Synthetic oligonucleotide
  Sense strand starting at position 1309 of SEQ ID NO: 358
gguagacuugagggucuau

SEQ ID NO: 31097 - RNA, 19 nt, Artificial Sequence
  Description of Artificial Sequence: Synthetic oligonucleotide
  Antisense strand to SEQ ID NO: 31096
auagacccucaagucuacc

SEQ ID NO: 31098 - RNA, 19 nt, Artificial Sequence
  Description of Artificial Sequence: Synthetic oligonucleotide
  Sense strand starting at position 1159 of SEQ ID NO: 358
cacucuuagcucgccgauu

SEQ ID NO: 31099 - RNA, 19 nt, Artificial Sequence
  Description of Artificial Sequence: Synthetic oligonucleotide
  Antisense strand to SEQ ID NO: 31098
aaucggcgagcuaagagug

SEQ ID NO: 31100 - RNA, 19 nt, Artificial Sequence
  Description of Artificial Sequence: Synthetic oligonucleotide
  Sense strand starting at position 1103 of SEQ ID NO: 358
augggcucugucgaugaaa

SEQ ID NO: 31101 - RNA, 19 nt, Artificial Sequence
  Description of Artificial Sequence: Synthetic oligonucleotide
  Antisense strand to SEQ ID NO: 31100
uuucaucgacagagcccau

SEQ ID NO: 31102 - RNA, 19 nt, Artificial Sequence
  Description of Artificial Sequence: Synthetic oligonucleotide
  Sense strand starting at position 992 of SEQ ID NO: 358
cuuguaucacucugacaag

SEQ ID NO: 31103 - RNA, 19 nt, Artificial Sequence
  Description of Artificial Sequence: Synthetic oligonucleotide
  Antisense strand to SEQ ID NO: 31102
cuugucagagugauacaag

SEQ ID NO: 31104 - RNA, 19 nt, Artificial Sequence
  Description of Artificial Sequence: Synthetic oligonucleotide
  Sense strand starting at position 953 of SEQ ID NO: 358
gugcaucuucuacacauau

SEQ ID NO: 31105 - RNA, 19 nt, Artificial Sequence
  Description of Artificial Sequence: Synthetic oligonucleotide
  Antisense strand to SEQ ID NO: 31104
auauguguagaagaugcac

SEQ ID NO: 31106 - RNA, 19 nt, Artificial Sequence
  Description of Artificial Sequence: Synthetic oligonucleotide
  Sense strand starting at position 756 of SEQ ID NO: 358
uuuggcagcucauuagaau

SEQ ID NO: 31107 - RNA, 19 nt, Artificial Sequence
  Description of Artificial Sequence: Synthetic oligonucleotide
  Antisense strand to SEQ ID NO: 31106
auucuaaugagcugccaaa

SEQ ID NO: 31108 - RNA, 19 nt, Artificial Sequence
  Description of Artificial Sequence: Synthetic oligonucleotide
  Sense strand starting at position 492 of SEQ ID NO: 358
augcuuauuugcucacuga

SEQ ID NO: 31109 - RNA, 19 nt, Artificial Sequence
  Description of Artificial Sequence: Synthetic oligonucleotide
  Antisense strand to SEQ ID NO: 31108
ucagugagcaaauaagcau

SEQ ID NO: 31110 - RNA, 19 nt, Artificial Sequence
  Description of Artificial Sequence: Synthetic oligonucleotide
  Sense strand starting at position 212 of SEQ ID NO: 358
ugagaucugugguuuccag

SEQ ID NO: 31111 - RNA, 19 nt, Artificial Sequence
  Description of Artificial Sequence: Synthetic oligonucleotide
  Antisense strand to SEQ ID NO: 31110
cuggaaaccacagaucuca

SEQ ID NO: 31112 - RNA, 19 nt, Artificial Sequence
  Description of Artificial Sequence: Synthetic oligonucleotide
  Sense strand starting at position 121 of SEQ ID NO: 358
augcgacccaaaugugaaa

SEQ ID NO: 31113 - RNA, 19 nt, Artificial Sequence
  Description of Artificial Sequence: Synthetic oligonucleotide
  Antisense strand to SEQ ID NO: 31112
uuucacauuugggucgcau

SEQ ID NO: 31114 - RNA, 19 nt, Artificial Sequence
  Description of Artificial Sequence: Synthetic oligonucleotide
  Sense strand starting at position 98 of SEQ ID NO: 358
cauuauuuccgccgcaaug

SEQ ID NO: 31115 - RNA, 19 nt, Artificial Sequence
  Description of Artificial Sequence: Synthetic oligonucleotide
  Antisense strand to SEQ ID NO: 31114
cauugcggcggaaauaaug

SEQ ID NO: 31116 - RNA, 19 nt, Artificial Sequence
  Description of Artificial Sequence: Synthetic oligonucleotide
  Sense strand starting at position 46 of SEQ ID NO: 358
gggcgcuuuaaauaagauc

SEQ ID NO: 31117 - RNA, 19 nt, Artificial Sequence
  Description of Artificial Sequence: Synthetic oligonucleotide
  Antisense strand to SEQ ID NO: 31116
gaucuuauuuaaagcgccc

SEQ ID NO: 31118 - RNA, 19 nt, Artificial Sequence
  Description of Artificial Sequence: Synthetic oligonucleotide
  Sense strand starting at position 143 of SEQ ID NO: 359
ucaugaccucagggucaua

SEQ ID NO: 31119 - RNA, 19 nt, Artificial Sequence
  Description of Artificial Sequence: Synthetic oligonucleotide
  Antisense strand to SEQ ID NO: 31118
uaugacccugaggucauga

SEQ ID NO: 31120 - RNA, 19 nt, Artificial Sequence
  Description of Artificial Sequence: Synthetic oligonucleotide
  Sense strand starting at position 280 of SEQ ID NO: 359
ccuagaauccugggccacu

SEQ ID NO: 31121 - RNA, 19 nt, Artificial Sequence
  Description of Artificial Sequence: Synthetic oligonucleotide
  Antisense strand to SEQ ID NO: 31120
aguggcccaggauucuagg

SEQ ID NO: 31122 - RNA, 19 nt, Artificial Sequence
  Description of Artificial Sequence: Synthetic oligonucleotide
  Sense strand starting at position 281 of SEQ ID NO: 359
cuagaauccugggccacua

SEQ ID NO: 31123 - RNA, 19 nt, Artificial Sequence
  Description of Artificial Sequence: Synthetic oligonucleotide
  Antisense strand to SEQ ID NO: 31122
uaguggcccaggauucuag

SEQ ID NO: 31124 - RNA, 19 nt, Artificial Sequence
  Description of Artificial Sequence: Synthetic oligonucleotide
  Sense strand starting at position 397 of SEQ ID NO: 359
aaauguugaguccaccuga

SEQ ID NO: 31125 - RNA, 19 nt, Artificial Sequence
  Description of Artificial Sequence: Synthetic oligonucleotide
  Antisense strand to SEQ ID NO: 31124
ucagguggacucaacauuu

SEQ ID NO: 31126 - RNA, 19 nt, Artificial Sequence
  Description of Artificial Sequence: Synthetic oligonucleotide
  Sense strand starting at position 419 of SEQ ID NO: 359
uugacugugucuuccugaa

SEQ ID NO: 31127 - RNA, 19 nt, Artificial Sequence
  Description of Artificial Sequence: Synthetic oligonucleotide
  Antisense strand to SEQ ID NO: 31126
uucaggaagacacagucaa

SEQ ID NO: 31128 - RNA, 19 nt, Artificial Sequence
  Description of Artificial Sequence: Synthetic oligonucleotide
  Sense strand starting at position 423 of SEQ ID NO: 359
cugugucuuccugaaggac

SEQ ID NO: 31129 - RNA, 19 nt, Artificial Sequence
  Description of Artificial Sequence: Synthetic oligonucleotide
  Antisense strand to SEQ ID NO: 31128
guccuucaggaagacacag

SEQ ID NO: 31130 - RNA, 19 nt, Artificial Sequence
  Description of Artificial Sequence: Synthetic oligonucleotide
  Sense strand starting at position 455 of SEQ ID NO: 359
gggacucgguaacugaauu

SEQ ID NO: 31131 - RNA, 19 nt, Artificial Sequence
  Description of Artificial Sequence: Synthetic oligonucleotide
  Antisense strand to SEQ ID NO: 31130
aauucaguuaccgaguccc

SEQ ID NO: 31132 - RNA, 19 nt, Artificial Sequence
  Description of Artificial Sequence: Synthetic oligonucleotide
  Sense strand starting at position 569 of SEQ ID NO: 359
aguguacccuccucuaauu

SEQ ID NO: 31133 - RNA, 19 nt, Artificial Sequence
  Description of Artificial Sequence: Synthetic oligonucleotide
  Antisense strand to SEQ ID NO: 31132
aauuagaggaggguacacu

SEQ ID NO: 31134 - RNA, 19 nt, Artificial Sequence
  Description of Artificial Sequence: Synthetic oligonucleotide
  Sense strand starting at position 800 of SEQ ID NO: 359
uggcgcacgucuguaauuu

SEQ ID NO: 31135 - RNA, 19 nt, Artificial Sequence
  Description of Artificial Sequence: Synthetic oligonucleotide
  Antisense strand to SEQ ID NO: 31134
aaauuacagacgugcgcca

SEQ ID NO: 31136 - RNA, 19 nt, Artificial Sequence
  Description of Artificial Sequence: Synthetic oligonucleotide
  Sense strand starting at position 990 of SEQ ID NO: 359
aaauuaaaugcgggaucca

SEQ ID NO: 31137 - RNA, 19 nt, Artificial Sequence
  Description of Artificial Sequence: Synthetic oligonucleotide
  Antisense strand to SEQ ID NO: 31136
uggaucccgcauuuaauuu

SEQ ID NO: 31138 - RNA, 19 nt, Artificial Sequence
  Description of Artificial Sequence: Synthetic oligonucleotide
  Sense strand starting at position 1103 of SEQ ID NO: 359
ggcugacagcuuuagguuu

SEQ ID NO: 31139 - RNA, 19 nt, Artificial Sequence
  Description of Artificial Sequence: Synthetic oligonucleotide
  Antisense strand to SEQ ID NO: 31138
aaaccuaaagcugucagcc

SEQ ID NO: 31140 - RNA, 19 nt, Artificial Sequence
  Description of Artificial Sequence: Synthetic oligonucleotide
  Sense strand starting at position 1124 of SEQ ID NO: 359
uguggagcuuccucauauu

SEQ ID NO: 31141 - RNA, 19 nt, Artificial Sequence
  Description of Artificial Sequence: Synthetic oligonucleotide
  Antisense strand to SEQ ID NO: 31140
aauaugaggaagcuccaca

SEQ ID NO: 31142 - RNA, 19 nt, Artificial Sequence
  Description of Artificial Sequence: Synthetic oligonucleotide
  Sense strand starting at position 1376 of SEQ ID NO: 359
acaauuggaggaugcaauu

SEQ ID NO: 31143 - RNA, 19 nt, Artificial Sequence
  Description of Artificial Sequence: Synthetic oligonucleotide
  Antisense strand to SEQ ID NO: 31142
aauugcauccuccaauugu

SEQ ID NO: 31144 - RNA, 19 nt, Artificial Sequence
  Description of Artificial Sequence: Synthetic oligonucleotide
  Sense strand starting at position 1482 of SEQ ID NO: 359
acccaagacuuccuggauu

SEQ ID NO: 31145 - RNA, 19 nt, Artificial Sequence
  Description of Artificial Sequence: Synthetic oligonucleotide
  Antisense strand to SEQ ID NO: 31144
aauccaggaagucuugggu

SEQ ID NO: 31146 - RNA, 19 nt, Artificial Sequence
  Description of Artificial Sequence: Synthetic oligonucleotide
  Sense strand starting at position 1552 of SEQ ID NO: 359
gccuguccugucugauuua

SEQ ID NO: 31147 - RNA, 19 nt, Artificial Sequence
  Description of Artificial Sequence: Synthetic oligonucleotide
  Antisense strand to SEQ ID NO: 31146
uaaaucagacaggacaggc

SEQ ID NO: 31148 - RNA, 19 nt, Artificial Sequence
  Description of Artificial Sequence: Synthetic oligonucleotide
  Sense strand starting at position 1565 of SEQ ID NO: 359
gauuuagacugucagagcu

SEQ ID NO: 31149 - RNA, 19 nt, Artificial Sequence
  Description of Artificial Sequence: Synthetic oligonucleotide
  Antisense strand to SEQ ID NO: 31148
agcucugacagucuaaauc

SEQ ID NO: 31150 - RNA, 19 nt, Artificial Sequence
  Description of Artificial Sequence: Synthetic oligonucleotide
  Sense strand starting at position 1600 of SEQ ID NO: 359
agucaaguuccagaugacu

SEQ ID NO: 31151 - RNA, 19 nt, Artificial Sequence
  Description of Artificial Sequence: Synthetic oligonucleotide
  Antisense strand to SEQ ID NO: 31150
agucaucuggaacuugacu

SEQ ID NO: 31152 - RNA, 19 nt, Artificial Sequence
  Description of Artificial Sequence: Synthetic oligonucleotide
  Sense strand starting at position 1606 of SEQ ID NO: 359
guuccagaugacuguguau

SEQ ID NO: 31153 - RNA, 19 nt, Artificial Sequence
  Description of Artificial Sequence: Synthetic oligonucleotide
  Antisense strand to SEQ ID NO: 31152
auacacagucaucuggaac

SEQ ID NO: 31154 - RNA, 19 nt, Artificial Sequence
  Description of Artificial Sequence: Synthetic oligonucleotide
  Sense strand starting at position 1608 of SEQ ID NO: 359
uccagaugacuguguaugu

SEQ ID NO: 31155 - RNA, 19 nt, Artificial Sequence
  Description of Artificial Sequence: Synthetic oligonucleotide
  Antisense strand to SEQ ID NO: 31154
acauacacagucaucugga

SEQ ID NO: 31156 - RNA, 19 nt, Artificial Sequence
  Description of Artificial Sequence: Synthetic oligonucleotide
  Sense strand starting at position 1923 of SEQ ID NO: 359
cuguuaacgccugcuguga

SEQ ID NO: 31157 - RNA, 19 nt, Artificial Sequence
  Description of Artificial Sequence: Synthetic oligonucleotide
  Antisense strand to SEQ ID NO: 31156
ucacagcaggcguuaacag

SEQ ID NO: 31158 - RNA, 19 nt, Artificial Sequence
  Description of Artificial Sequence: Synthetic oligonucleotide
  Sense strand starting at position 2008 of SEQ ID NO: 359
ggugaagcuuaccucaagu

SEQ ID NO: 31159 - RNA, 19 nt, Artificial Sequence
  Description of Artificial Sequence: Synthetic oligonucleotide
  Antisense strand to SEQ ID NO: 31158
acuugagguaagcuucacc

SEQ ID NO: 31160 - RNA, 19 nt, Artificial Sequence
  Description of Artificial Sequence: Synthetic oligonucleotide
  Sense strand starting at position 2026 of SEQ ID NO: 359
ugggagggugcuugaaguu

SEQ ID NO: 31161 - RNA, 19 nt, Artificial Sequence
  Description of Artificial Sequence: Synthetic oligonucleotide
  Antisense strand to SEQ ID NO: 31160
aacuucaagcacccuccca

SEQ ID NO: 31162 - RNA, 19 nt, Artificial Sequence
  Description of Artificial Sequence: Synthetic oligonucleotide
  Sense strand starting at position 2119 of SEQ ID NO: 359
ugaauccuauauggagaga

SEQ ID NO: 31163 - RNA, 19 nt, Artificial Sequence
  Description of Artificial Sequence: Synthetic oligonucleotide
  Antisense strand to SEQ ID NO: 31162
ucucuccauauaggauuca

SEQ ID NO: 31164 - RNA, 19 nt, Artificial Sequence
  Description of Artificial Sequence: Synthetic oligonucleotide
  Sense strand starting at position 2247 of SEQ ID NO: 359
uggauaagcggcuaacagu

SEQ ID NO: 31165 - RNA, 19 nt, Artificial Sequence
  Description of Artificial Sequence: Synthetic oligonucleotide
  Antisense strand to SEQ ID NO: 31164
acuguuagccgcuuaucca

SEQ ID NO: 31166 - RNA, 19 nt, Artificial Sequence
  Description of Artificial Sequence: Synthetic oligonucleotide
  Sense strand starting at position 2257 of SEQ ID NO: 359
gcuaacaguguugaaggaa

SEQ ID NO: 31167 - RNA, 19 nt, Artificial Sequence
  Description of Artificial Sequence: Synthetic oligonucleotide
  Antisense strand to SEQ ID NO: 31166
uuccuucaacacuguuagc

SEQ ID NO: 31168 - RNA, 19 nt, Artificial Sequence
  Description of Artificial Sequence: Synthetic oligonucleotide
  Sense strand starting at position 2279 of SEQ ID NO: 359
aggaguagcugagagaaca

SEQ ID NO: 31169 - RNA, 19 nt, Artificial Sequence
  Description of Artificial Sequence: Synthetic oligonucleotide
  Antisense strand to SEQ ID NO: 31168
uguucucucagcuacuccu

SEQ ID NO: 31170 - RNA, 19 nt, Artificial Sequence
  Description of Artificial Sequence: Synthetic oligonucleotide
  Sense strand starting at position 2357 of SEQ ID NO: 359
gcaaguugacaccaaaguu

SEQ ID NO: 31171 - RNA, 19 nt, Artificial Sequence
  Description of Artificial Sequence: Synthetic oligonucleotide
  Antisense strand to SEQ ID NO: 31170
aacuuuggugucaacuugc

SEQ ID NO: 31172 - RNA, 19 nt, Artificial Sequence
  Description of Artificial Sequence: Synthetic oligonucleotide
  Sense strand starting at position 2739 of SEQ ID NO: 359
cgaucuguaugccuagauu

SEQ ID NO: 31173 - RNA, 19 nt, Artificial Sequence
  Description of Artificial Sequence: Synthetic oligonucleotide
  Antisense strand to SEQ ID NO: 31172
aaucuaggcauacagaucg

SEQ ID NO: 31174 - RNA, 19 nt, Artificial Sequence
  Description of Artificial Sequence: Synthetic oligonucleotide
  Sense strand starting at position 3162 of SEQ ID NO: 359
uggacagagcgcuggauuu

SEQ ID NO: 31175 - RNA, 19 nt, Artificial Sequence
  Description of Artificial Sequence: Synthetic oligonucleotide
  Antisense strand to SEQ ID NO: 31174
aaauccagcgcucugucca

SEQ ID NO: 31176 - RNA, 19 nt, Artificial Sequence
  Description of Artificial Sequence: Synthetic oligonucleotide
  Sense strand starting at position 3229 of SEQ ID NO: 359
augugauucuggccuuguu

SEQ ID NO: 31177 - RNA, 19 nt, Artificial Sequence
  Description of Artificial Sequence: Synthetic oligonucleotide
  Antisense strand to SEQ ID NO: 31176
aacaaggccagaaucacau

SEQ ID NO: 31178 - RNA, 19 nt, Artificial Sequence
  Description of Artificial Sequence: Synthetic oligonucleotide
  Sense strand starting at position 3418 of SEQ ID NO: 359
cgggucuaaugguuaucau

SEQ ID NO: 31179 - RNA, 19 nt, Artificial Sequence
  Description of Artificial Sequence: Synthetic oligonucleotide
  Antisense strand to SEQ ID NO: 31178
augauaaccauuagacccg

SEQ ID NO: 31180 - RNA, 19 nt, Artificial Sequence
  Description of Artificial Sequence: Synthetic oligonucleotide
  Sense strand starting at position 3419 of SEQ ID NO: 359
gggucuaaugguuaucauc

SEQ ID NO: 31181 - RNA, 19 nt, Artificial Sequence
  Description of Artificial Sequence: Synthetic oligonucleotide
  Antisense strand to SEQ ID NO: 31180
gaugauaaccauuagaccc

SEQ ID NO: 31182 - RNA, 19 nt, Artificial Sequence
  Description of Artificial Sequence: Synthetic oligonucleotide
  Sense strand starting at position 3421 of SEQ ID NO: 359
gucuaaugguuaucaucuc

SEQ ID NO: 31183 - RNA, 19 nt, Artificial Sequence
  Description of Artificial Sequence: Synthetic oligonucleotide
  Antisense strand to SEQ ID NO: 31182
gagaugauaaccauuagac

SEQ ID NO: 31184 - RNA, 19 nt, Artificial Sequence
  Description of Artificial Sequence: Synthetic oligonucleotide
  Sense strand starting at position 3510 of SEQ ID NO: 359
uguccuuaaccuugagaag

SEQ ID NO: 31185 - RNA, 19 nt, Artificial Sequence
  Description of Artificial Sequence: Synthetic oligonucleotide
  Antisense strand to SEQ ID NO: 31184
cuucucaagguuaaggaca

SEQ ID NO: 31186 - RNA, 19 nt, Artificial Sequence
  Description of Artificial Sequence: Synthetic oligonucleotide
  Sense strand starting at position 3511 of SEQ ID NO: 359
guccuuaaccuugagaagu

SEQ ID NO: 31187 - RNA, 19 nt, Artificial Sequence
  Description of Artificial Sequence: Synthetic oligonucleotide
  Antisense strand to SEQ ID NO: 31186
acuucucaagguuaaggac

SEQ ID NO: 31188 - RNA, 19 nt, Artificial Sequence
  Description of Artificial Sequence: Synthetic oligonucleotide
  Sense strand starting at position 3522 of SEQ ID NO: 359
ugagaaguggugcacaaga

SEQ ID NO: 31189 - RNA, 19 nt, Artificial Sequence
  Description of Artificial Sequence: Synthetic oligonucleotide
  Antisense strand to SEQ ID NO: 31188
ucuugugcaccacuucuca

SEQ ID NO: 31190 - RNA, 19 nt, Artificial Sequence
  Description of Artificial Sequence: Synthetic oligonucleotide
  Sense strand starting at position 3559 of SEQ ID NO: 359
gguaaacuuccucacacga

SEQ ID NO: 31191 - RNA, 19 nt, Artificial Sequence
  Description of Artificial Sequence: Synthetic oligonucleotide
  Antisense strand to SEQ ID NO: 31190
ucgugugaggaaguuuacc

SEQ ID NO: 31192 - RNA, 19 nt, Artificial Sequence
  Description of Artificial Sequence: Synthetic oligonucleotide
  Sense strand starting at position 3608 of SEQ ID NO: 359
cccacuaaugaaugugaau

SEQ ID NO: 31193 - RNA, 19 nt, Artificial Sequence
  Description of Artificial Sequence: Synthetic oligonucleotide
  Antisense strand to SEQ ID NO: 31192
auucacauucauuaguggg

SEQ ID NO: 31194 - RNA, 19 nt, Artificial Sequence
  Description of Artificial Sequence: Synthetic oligonucleotide
  Sense strand starting at position 3750 of SEQ ID NO: 359
ucuuguggucccugacaaa

SEQ ID NO: 31195 - RNA, 19 nt, Artificial Sequence
  Description of Artificial Sequence: Synthetic oligonucleotide
  Antisense strand to SEQ ID NO: 31194
uuugucagggaccacaaga

SEQ ID NO: 31196 - RNA, 19 nt, Artificial Sequence
  Description of Artificial Sequence: Synthetic oligonucleotide
  Sense strand starting at position 3785 of SEQ ID NO: 359
cugcuauuuguaggcugau

SEQ ID NO: 31197 - RNA, 19 nt, Artificial Sequence
  Description of Artificial Sequence: Synthetic oligonucleotide
  Antisense strand to SEQ ID NO: 31196
aucagccuacaaauagcag

SEQ ID NO: 31198 - RNA, 19 nt, Artificial Sequence
  Description of Artificial Sequence: Synthetic oligonucleotide
  Sense strand starting at position 25 of SEQ ID NO: 360
ucguuucugggcuaggaua

SEQ ID NO: 31199 - RNA, 19 nt, Artificial Sequence
  Description of Artificial Sequence: Synthetic oligonucleotide
  Antisense strand to SEQ ID NO: 31198
uauccuagcccagaaacga

SEQ ID NO: 31200 - RNA, 19 nt, Artificial Sequence
  Description of Artificial Sequence: Synthetic oligonucleotide
  Sense strand starting at position 725 of SEQ ID NO: 360
gugaguuaccaggagcgau

SEQ ID NO: 31201 - RNA, 19 nt, Artificial Sequence
  Description of Artificial Sequence: Synthetic oligonucleotide
  Antisense strand to SEQ ID NO: 31200
aucgcuccugguaacucac

SEQ ID NO: 31202 - RNA, 19 nt, Artificial Sequence
  Description of Artificial Sequence: Synthetic oligonucleotide
  Sense strand starting at position 884 of SEQ ID NO: 360
ccucauuaccugggcuaga

SEQ ID NO: 31203 - RNA, 19 nt, Artificial Sequence
  Description of Artificial Sequence: Synthetic oligonucleotide
  Antisense strand to SEQ ID NO: 31202
ucuagcccagguaaugagg

SEQ ID NO: 31204 - RNA, 19 nt, Artificial Sequence
  Description of Artificial Sequence: Synthetic oligonucleotide
  Sense strand starting at position 885 of SEQ ID NO: 360
cucauuaccugggcuagaa

SEQ ID NO: 31205 - RNA, 19 nt, Artificial Sequence
  Description of Artificial Sequence: Synthetic oligonucleotide
  Antisense strand to SEQ ID NO: 31204
uucuagcccagguaaugag

SEQ ID NO: 31206 - RNA, 19 nt, Artificial Sequence
  Description of Artificial Sequence: Synthetic oligonucleotide
  Sense strand starting at position 1004 of SEQ ID NO: 360
gugacuuaaccaggcacau

SEQ ID NO: 31207 - RNA, 19 nt, Artificial Sequence
  Description of Artificial Sequence: Synthetic oligonucleotide
  Antisense strand to SEQ ID NO: 31206
augugccugguuaagucac

SEQ ID NO: 31208 - RNA, 19 nt, Artificial Sequence
  Description of Artificial Sequence: Synthetic oligonucleotide
  Sense strand starting at position 1302 of SEQ ID NO: 360
aggccaugaccuugacuga

SEQ ID NO: 31209 - RNA, 19 nt, Artificial Sequence
  Description of Artificial Sequence: Synthetic oligonucleotide
  Antisense strand to SEQ ID NO: 31208
ucagucaaggucauggccu

SEQ ID NO: 31210 - RNA, 19 nt, Artificial Sequence
  Description of Artificial Sequence: Synthetic oligonucleotide
  Sense strand starting at position 1858 of SEQ ID NO: 360
uguccuuucccucagaaag

SEQ ID NO: 31211 - RNA, 19 nt, Artificial Sequence
  Description of Artificial Sequence: Synthetic oligonucleotide
  Antisense strand to SEQ ID NO: 31210
cuuucugagggaaaggaca

SEQ ID NO: 31212 - RNA, 19 nt, Artificial Sequence
  Description of Artificial Sequence: Synthetic oligonucleotide
  Sense strand starting at position 2175 of SEQ ID NO: 360
uuccuaucuugauugguaa

SEQ ID NO: 31213 - RNA, 19 nt, Artificial Sequence
  Description of Artificial Sequence: Synthetic oligonucleotide
  Antisense strand to SEQ ID NO: 31212
uuaccaaucaagauaggaa

SEQ ID NO: 31214 - RNA, 19 nt, Artificial Sequence
  Description of Artificial Sequence: Synthetic oligonucleotide
  Sense strand starting at position 2176 of SEQ ID NO: 360
uccuaucuugauugguaaa

SEQ ID NO: 31215 - RNA, 19 nt, Artificial Sequence
  Description of Artificial Sequence: Synthetic oligonucleotide
  Antisense strand to SEQ ID NO: 31214
uuuaccaaucaagauagga

SEQ ID NO: 31216 - RNA, 19 nt, Artificial Sequence
  Description of Artificial Sequence: Synthetic oligonucleotide
  Sense strand starting at position 2178 of SEQ ID NO: 360
cuaucuugauugguaaagu

SEQ ID NO: 31217 - RNA, 19 nt, Artificial Sequence
  Description of Artificial Sequence: Synthetic oligonucleotide
  Antisense strand to SEQ ID NO: 31216
acuuuaccaaucaagauag

SEQ ID NO: 31218 - RNA, 19 nt, Artificial Sequence
  Description of Artificial Sequence: Synthetic oligonucleotide
  Sense strand starting at position 2194 of SEQ ID NO: 360
aguccaucucuaggcaaau

SEQ ID NO: 31219 - RNA, 19 nt, Artificial Sequence
  Description of Artificial Sequence: Synthetic oligonucleotide
  Antisense strand to SEQ ID NO: 31218
auuugccuagagauggacu

SEQ ID NO: 31220 - RNA, 19 nt, Artificial Sequence
  Description of Artificial Sequence: Synthetic oligonucleotide
  Sense strand starting at position 2195 of SEQ ID NO: 360
guccaucucuaggcaaaua

SEQ ID NO: 31221 - RNA, 19 nt, Artificial Sequence
  Description of Artificial Sequence: Synthetic oligonucleotide
  Antisense strand to SEQ ID NO: 31220
uauuugccuagagauggac

SEQ ID NO: 31222 - RNA, 19 nt, Artificial Sequence
  Description of Artificial Sequence: Synthetic oligonucleotide
  Sense strand starting at position 2211 of SEQ ID NO: 360
auacaaguucucgauggau

SEQ ID NO: 31223 - RNA, 19 nt, Artificial Sequence
  Description of Artificial Sequence: Synthetic oligonucleotide
  Antisense strand to SEQ ID NO: 31222
auccaucgagaacuuguau

SEQ ID NO: 31224 - RNA, 19 nt, Artificial Sequence
  Description of Artificial Sequence: Synthetic oligonucleotide
  Sense strand starting at position 2213 of SEQ ID NO: 360
acaaguucucgauggaugu

SEQ ID NO: 31225 - RNA, 19 nt, Artificial Sequence
  Description of Artificial Sequence: Synthetic oligonucleotide
  Antisense strand to SEQ ID NO: 31224
acauccaucgagaacuugu

SEQ ID NO: 31226 - RNA, 19 nt, Artificial Sequence
  Description of Artificial Sequence: Synthetic oligonucleotide
  Sense strand starting at position 2214 of SEQ ID NO: 360
caaguucucgauggaugua

SEQ ID NO: 31227 - RNA, 19 nt, Artificial Sequence
  Description of Artificial Sequence: Synthetic oligonucleotide
  Antisense strand to SEQ ID NO: 31226
uacauccaucgagaacuug

SEQ ID NO: 31228 - RNA, 19 nt, Artificial Sequence
  Description of Artificial Sequence: Synthetic oligonucleotide
  Sense strand starting at position 2217 of SEQ ID NO: 360
guucucgauggauguaaga

SEQ ID NO: 31229 - RNA, 19 nt, Artificial Sequence
  Description of Artificial Sequence: Synthetic oligonucleotide
  Antisense strand to SEQ ID NO: 31228
ucuuacauccaucgagaac

SEQ ID NO: 31230 - RNA, 19 nt, Artificial Sequence
  Description of Artificial Sequence: Synthetic oligonucleotide
  Sense strand starting at position 2230 of SEQ ID NO: 360
guaagaacauuugcuguuu

SEQ ID NO: 31231 - RNA, 19 nt, Artificial Sequence
  Description of Artificial Sequence: Synthetic oligonucleotide
  Antisense strand to SEQ ID NO: 31230
aaacagcaaauguucuuac

SEQ ID NO: 31232 - RNA, 19 nt, Artificial Sequence
  Description of Artificial Sequence: Synthetic oligonucleotide
  Sense strand starting at position 2322 of SEQ ID NO: 360
gagacagauuccuugggcu

SEQ ID NO: 31233 - RNA, 19 nt, Artificial Sequence
  Description of Artificial Sequence: Synthetic oligonucleotide
  Antisense strand to SEQ ID NO: 31232
agcccaaggaaucugucuc

SEQ ID NO: 31234 - RNA, 19 nt, Artificial Sequence
  Description of Artificial Sequence: Synthetic oligonucleotide
  Sense strand starting at position 2324 of SEQ ID NO: 360
gacagauuccuugggcuuu

SEQ ID NO: 31235 - RNA, 19 nt, Artificial Sequence
  Description of Artificial Sequence: Synthetic oligonucleotide
  Antisense strand to SEQ ID NO: 31234
aaagcccaaggaaucuguc

SEQ ID NO: 31236 - RNA, 19 nt, Artificial Sequence
  Description of Artificial Sequence: Synthetic oligonucleotide
  Sense strand starting at position 2379 of SEQ ID NO: 360
cguugagucagucacucaa

SEQ ID NO: 31237 - RNA, 19 nt, Artificial Sequence
  Description of Artificial Sequence: Synthetic oligonucleotide
  Antisense strand to SEQ ID NO: 31236
uugagugacugacucaacg

SEQ ID NO: 31238 - RNA, 19 nt, Artificial Sequence
  Description of Artificial Sequence: Synthetic oligonucleotide
  Sense strand starting at position 2381 of SEQ ID NO: 360
uugagucagucacucaaca

SEQ ID NO: 31239 - RNA, 19 nt, Artificial Sequence
  Description of Artificial Sequence: Synthetic oligonucleotide
  Antisense strand to SEQ ID NO: 31238
uguugagugacugacucaa

SEQ ID NO: 31240 - RNA, 19 nt, Artificial Sequence
  Description of Artificial Sequence: Synthetic oligonucleotide
  Sense strand starting at position 2461 of SEQ ID NO: 360
aucugaacuuggccugaau

SEQ ID NO: 31241 - RNA, 19 nt, Artificial Sequence
  Description of Artificial Sequence: Synthetic oligonucleotide
  Antisense strand to SEQ ID NO: 31240
auucaggccaaguucagau

SEQ ID NO: 31242 - RNA, 19 nt, Artificial Sequence
  Description of Artificial Sequence: Synthetic oligonucleotide
  Sense strand starting at position 2480 of SEQ ID NO: 360
uuggaucauugugugaaau

SEQ ID NO: 31243 - RNA, 19 nt, Artificial Sequence
  Description of Artificial Sequence: Synthetic oligonucleotide
  Antisense strand to SEQ ID NO: 31242
auuucacacaaugauccaa

SEQ ID NO: 31244 - RNA, 19 nt, Artificial Sequence
  Description of Artificial Sequence: Synthetic oligonucleotide
  Sense strand starting at position 2481 of SEQ ID NO: 360
uggaucauugugugaaaua

SEQ ID NO: 31245 - RNA, 19 nt, Artificial Sequence
  Description of Artificial Sequence: Synthetic oligonucleotide
  Antisense strand to SEQ ID NO: 31244
uauuucacacaaugaucca

SEQ ID NO: 31246 - RNA, 19 nt, Artificial Sequence
  Description of Artificial Sequence: Synthetic oligonucleotide
  Sense strand starting at position 2491 of SEQ ID NO: 360
ugugaaauacuguagcuca

SEQ ID NO: 31247 - RNA, 19 nt, Artificial Sequence
  Description of Artificial Sequence: Synthetic oligonucleotide
  Antisense strand to SEQ ID NO: 31246
ugagcuacaguauuucaca

SEQ ID NO: 31248 - RNA, 19 nt, Artificial Sequence
  Description of Artificial Sequence: Synthetic oligonucleotide
  Sense strand starting at position 2588 of SEQ ID NO: 360
agacauaaacuucgucuaa

SEQ ID NO: 31249 - RNA, 19 nt, Artificial Sequence
  Description of Artificial Sequence: Synthetic oligonucleotide
  Antisense strand to SEQ ID NO: 31248
uuagacgaaguuuaugucu

SEQ ID NO: 31250 - RNA, 19 nt, Artificial Sequence
  Description of Artificial Sequence: Synthetic oligonucleotide
  Sense strand starting at position 2657 of SEQ ID NO: 360
gccgaaaggacuuggguaa

SEQ ID NO: 31251 - RNA, 19 nt, Artificial Sequence
  Description of Artificial Sequence: Synthetic oligonucleotide
  Antisense strand to SEQ ID NO: 31250
uuacccaaguccuuucggc

SEQ ID NO: 31252 - RNA, 19 nt, Artificial Sequence
  Description of Artificial Sequence: Synthetic oligonucleotide
  Sense strand starting at position 2658 of SEQ ID NO: 360
ccgaaaggacuuggguaaa

SEQ ID NO: 31253 - RNA, 19 nt, Artificial Sequence
  Description of Artificial Sequence: Synthetic oligonucleotide
  Antisense strand to SEQ ID NO: 31252
uuuacccaaguccuuucgg

SEQ ID NO: 31254 - RNA, 19 nt, Artificial Sequence
  Description of Artificial Sequence: Synthetic oligonucleotide
  Sense strand starting at position 2683 of SEQ ID NO: 360
ggcauacccuucuuugaua

SEQ ID NO: 31255 - RNA, 19 nt, Artificial Sequence
  Description of Artificial Sequence: Synthetic oligonucleotide
  Antisense strand to SEQ ID NO: 31254
uaucaaagaaggguaugcc

SEQ ID NO: 31256 - RNA, 19 nt, Artificial Sequence
  Description of Artificial Sequence: Synthetic oligonucleotide
  Sense strand starting at position 2784 of SEQ ID NO: 360
acaaguuaagcugauucca

SEQ ID NO: 31257 - RNA, 19 nt, Artificial Sequence
  Description of Artificial Sequence: Synthetic oligonucleotide
  Antisense strand to SEQ ID NO: 31256
uggaaucagcuuaacuugu

SEQ ID NO: 31258 - RNA, 19 nt, Artificial Sequence
  Description of Artificial Sequence: Synthetic oligonucleotide
  Sense strand starting at position 2826 of SEQ ID NO: 360
guacaagaauagccaauaa

SEQ ID NO: 31259 - RNA, 19 nt, Artificial Sequence
  Description of Artificial Sequence: Synthetic oligonucleotide
  Antisense strand to SEQ ID NO: 31258
uuauuggcuauucuuguac

SEQ ID NO: 31260 - RNA, 19 nt, Artificial Sequence
  Description of Artificial Sequence: Synthetic oligonucleotide
  Sense strand starting at position 2933 of SEQ ID NO: 360
aagugaguccugcaaauca

SEQ ID NO: 31261 - RNA, 19 nt, Artificial Sequence
  Description of Artificial Sequence: Synthetic oligonucleotide
  Antisense strand to SEQ ID NO: 31260
ugauuugcaggacucacuu

SEQ ID NO: 31262 - RNA, 19 nt, Artificial Sequence
  Description of Artificial Sequence: Synthetic oligonucleotide
  Sense strand starting at position 3064 of SEQ ID NO: 360
guaggugguagguagagau

SEQ ID NO: 31263 - RNA, 19 nt, Artificial Sequence
  Description of Artificial Sequence: Synthetic oligonucleotide
  Antisense strand to SEQ ID NO: 31262
aucucuaccuaccaccuac

SEQ ID NO: 31264 - RNA, 19 nt, Artificial Sequence
  Description of Artificial Sequence: Synthetic oligonucleotide
  Sense strand starting at position 3130 of SEQ ID NO: 360
aucagugaagguugucauu

SEQ ID NO: 31265 - RNA, 19 nt, Artificial Sequence
  Description of Artificial Sequence: Synthetic oligonucleotide
  Antisense strand to SEQ ID NO: 31264
aaugacaaccuucacugau

SEQ ID NO: 31266 - RNA, 19 nt, Artificial Sequence
  Description of Artificial Sequence: Synthetic oligonucleotide
  Sense strand starting at position 3413 of SEQ ID NO: 360
auaggugagaauggcaaau

SEQ ID NO: 31267 - RNA, 19 nt, Artificial Sequence
  Description of Artificial Sequence: Synthetic oligonucleotide
  Antisense strand to SEQ ID NO: 31266
auuugccauucucaccuau

SEQ ID NO: 31268 - RNA, 19 nt, Artificial Sequence
  Description of Artificial Sequence: Synthetic oligonucleotide
  Sense strand starting at position 3499 of SEQ ID NO: 360
ggugaaaucccucggagua

SEQ ID NO: 31269 - RNA, 19 nt, Artificial Sequence
  Description of Artificial Sequence: Synthetic oligonucleotide
  Antisense strand to SEQ ID NO: 31268
uacuccgagggauuucacc

SEQ ID NO: 31270 - RNA, 19 nt, Artificial Sequence
  Description of Artificial Sequence: Synthetic oligonucleotide
  Sense strand starting at position 3650 of SEQ ID NO: 360
ugacauugucaugauugca

SEQ ID NO: 31271 - RNA, 19 nt, Artificial Sequence
  Description of Artificial Sequence: Synthetic oligonucleotide
  Antisense strand to SEQ ID NO: 31270
ugcaaucaugacaauguca

SEQ ID NO: 31272 - RNA, 19 nt, Artificial Sequence
  Description of Artificial Sequence: Synthetic oligonucleotide
  Sense strand starting at position 3703 of SEQ ID NO: 360
ggacaaauaugucuucucu

SEQ ID NO: 31273 - RNA, 19 nt, Artificial Sequence
  Description of Artificial Sequence: Synthetic oligonucleotide
  Antisense strand to SEQ ID NO: 31272
agagaagacauauuugucc

SEQ ID NO: 31274 - RNA, 19 nt, Artificial Sequence
  Description of Artificial Sequence: Synthetic oligonucleotide
  Sense strand starting at position 3713 of SEQ ID NO: 360
gucuucucugccuucguua

SEQ ID NO: 31275 - RNA, 19 nt, Artificial Sequence
  Description of Artificial Sequence: Synthetic oligonucleotide
  Antisense strand to SEQ ID NO: 31274
uaacgaaggcagagaagac

SEQ ID NO: 31276 - RNA, 19 nt, Artificial Sequence
  Description of Artificial Sequence: Synthetic oligonucleotide
  Sense strand starting at position 3718 of SEQ ID NO: 360
cucugccuucguuaaagga

SEQ ID NO: 31277 - RNA, 19 nt, Artificial Sequence
  Description of Artificial Sequence: Synthetic oligonucleotide
  Antisense strand to SEQ ID NO: 31276
uccuuuaacgaaggcagag

SEQ ID NO: 31278 - RNA, 19 nt, Artificial Sequence
  Description of Artificial Sequence: Synthetic oligonucleotide
  Sense strand starting at position 6 of SEQ ID NO: 361
uggagcaucugauuggaau

SEQ ID NO: 31279 - RNA, 19 nt, Artificial Sequence
  Description of Artificial Sequence: Synthetic oligonucleotide
  Antisense strand to SEQ ID NO: 31278
auuccaaucagaugcucca

SEQ ID NO: 31280 - RNA, 19 nt, Artificial Sequence
  Description of Artificial Sequence: Synthetic oligonucleotide
  Sense strand starting at position 7 of SEQ ID NO: 361
ggagcaucugauuggaauc

SEQ ID NO: 31281 - RNA, 19 nt, Artificial Sequence
  Description of Artificial Sequence: Synthetic oligonucleotide
  Antisense strand to SEQ ID NO: 31280
gauuccaaucagaugcucc

SEQ ID NO: 31282 - RNA, 19 nt, Artificial Sequence
  Description of Artificial Sequence: Synthetic oligonucleotide
  Sense strand starting at position 619 of SEQ ID NO: 361
uuaggauguagugagagua

SEQ ID NO: 31283 - RNA, 19 nt, Artificial Sequence
  Description of Artificial Sequence: Synthetic oligonucleotide
  Antisense strand to SEQ ID NO: 31282
uacucucacuacauccuaa

SEQ ID NO: 31284 - RNA, 19 nt, Artificial Sequence
  Description of Artificial Sequence: Synthetic oligonucleotide
  Sense strand starting at position 674 of SEQ ID NO: 361
gagagcaauguacaaaguu

SEQ ID NO: 31285 - RNA, 19 nt, Artificial Sequence
  Description of Artificial Sequence: Synthetic oligonucleotide
  Antisense strand to SEQ ID NO: 31284
aacuuuguacauugcucuc

SEQ ID NO: 31286 - RNA, 19 nt, Artificial Sequence
  Description of Artificial Sequence: Synthetic oligonucleotide
  Sense strand starting at position 726 of SEQ ID NO: 361
ugagguggagaaugucauu

SEQ ID NO: 31287 - RNA, 19 nt, Artificial Sequence
  Description of Artificial Sequence: Synthetic oligonucleotide
  Antisense strand to SEQ ID NO: 31286
aaugacauucuccaccuca

SEQ ID NO: 31288 - RNA, 19 nt, Artificial Sequence
  Description of Artificial Sequence: Synthetic oligonucleotide
  Sense strand starting at position 748 of SEQ ID NO: 361
caaggaaaguaaucgagua

SEQ ID NO: 31289 - RNA, 19 nt, Artificial Sequence
  Description of Artificial Sequence: Synthetic oligonucleotide
  Antisense strand to SEQ ID NO: 31288
uacucgauuacuuuccuug

SEQ ID NO: 31290 - RNA, 19 nt, Artificial Sequence
  Description of Artificial Sequence: Synthetic oligonucleotide
  Sense strand starting at position 822 of SEQ ID NO: 361
agaguaaggauauguguag

SEQ ID NO: 31291 - RNA, 19 nt, Artificial Sequence
  Description of Artificial Sequence: Synthetic oligonucleotide
  Antisense strand to SEQ ID NO: 31290
cuacacauauccuuacucu

SEQ ID NO: 31292 - RNA, 19 nt, Artificial Sequence
  Description of Artificial Sequence: Synthetic oligonucleotide
  Sense strand starting at position 826 of SEQ ID NO: 361
uaaggauauguguagguga

SEQ ID NO: 31293 - RNA, 19 nt, Artificial Sequence
  Description of Artificial Sequence: Synthetic oligonucleotide
  Antisense strand to SEQ ID NO: 31292
ucaccuacacauauccuua

SEQ ID NO: 31294 - RNA, 19 nt, Artificial Sequence
  Description of Artificial Sequence: Synthetic oligonucleotide
  Sense strand starting at position 873 of SEQ ID NO: 361
agcuuuagaacuuggagca

SEQ ID NO: 31295 - RNA, 19 nt, Artificial Sequence
  Description of Artificial Sequence: Synthetic oligonucleotide
  Antisense strand to SEQ ID NO: 31294
ugcuccaaguucuaaagcu

SEQ ID NO: 31296 - RNA, 19 nt, Artificial Sequence
  Description of Artificial Sequence: Synthetic oligonucleotide
  Sense strand starting at position 981 of SEQ ID NO: 361
agagcaaauucugucuacu

SEQ ID NO: 31297 - RNA, 19 nt, Artificial Sequence
  Description of Artificial Sequence: Synthetic oligonucleotide
  Antisense strand to SEQ ID NO: 31296
aguagacagaauuugcucu

SEQ ID NO: 31298 - RNA, 19 nt, Artificial Sequence
  Description of Artificial Sequence: Synthetic oligonucleotide
  Sense strand starting at position 1171 of SEQ ID NO: 361
ccucgaauuccuuaauguc

SEQ ID NO: 31299 - RNA, 19 nt, Artificial Sequence
  Description of Artificial Sequence: Synthetic oligonucleotide
  Antisense strand to SEQ ID NO: 31298
gacauuaaggaauucgagg

SEQ ID NO: 31300 - RNA, 19 nt, Artificial Sequence
  Description of Artificial Sequence: Synthetic oligonucleotide
  Sense strand starting at position 2189 of SEQ ID NO: 361
guuguaagccaguaacaau

SEQ ID NO: 31301 - RNA, 19 nt, Artificial Sequence
  Description of Artificial Sequence: Synthetic oligonucleotide
  Antisense strand to SEQ ID NO: 31300
auuguuacuggcuuacaac

SEQ ID NO: 31302 - RNA, 19 nt, Artificial Sequence
  Description of Artificial Sequence: Synthetic oligonucleotide
  Sense strand starting at position 2225 of SEQ ID NO: 361
cuguaaggaccucaguuua

SEQ ID NO: 31303 - RNA, 19 nt, Artificial Sequence
  Description of Artificial Sequence: Synthetic oligonucleotide
  Antisense strand to SEQ ID NO: 31302
uaaacugagguccuuacag

SEQ ID NO: 31304 - RNA, 19 nt, Artificial Sequence
  Description of Artificial Sequence: Synthetic oligonucleotide
  Sense strand starting at position 2249 of SEQ ID NO: 361
gugagcauuucguuaauca

SEQ ID NO: 31305 - RNA, 19 nt, Artificial Sequence
  Description of Artificial Sequence: Synthetic oligonucleotide
  Antisense strand to SEQ ID NO: 31304
ugauuaacgaaaugcucac

SEQ ID NO: 31306 - RNA, 19 nt, Artificial Sequence
  Description of Artificial Sequence: Synthetic oligonucleotide
  Sense strand starting at position 2253 of SEQ ID NO: 361
gcauuucguuaaucaggua

SEQ ID NO: 31307 - RNA, 19 nt, Artificial Sequence
  Description of Artificial Sequence: Synthetic oligonucleotide
  Antisense strand to SEQ ID NO: 31306
uaccugauuaacgaaaugc

SEQ ID NO: 31308 - RNA, 19 nt, Artificial Sequence
  Description of Artificial Sequence: Synthetic oligonucleotide
  Sense strand starting at position 2297 of SEQ ID NO: 361
uagugauagccucaccaga

SEQ ID NO: 31309 - RNA, 19 nt, Artificial Sequence
  Description of Artificial Sequence: Synthetic oligonucleotide
  Antisense strand to SEQ ID NO: 31308
ucuggugaggcuaucacua

SEQ ID NO: 31310 - RNA, 19 nt, Artificial Sequence
  Description of Artificial Sequence: Synthetic oligonucleotide
  Sense strand starting at position 2351 of SEQ ID NO: 361
gcagguauacgugacuaua

SEQ ID NO: 31311 - RNA, 19 nt, Artificial Sequence
  Description of Artificial Sequence: Synthetic oligonucleotide
  Antisense strand to SEQ ID NO: 31310
uauagucacguauaccugc

SEQ ID NO: 31312 - RNA, 19 nt, Artificial Sequence
  Description of Artificial Sequence: Synthetic oligonucleotide
  Sense strand starting at position 2353 of SEQ ID NO: 361
agguauacgugacuauaag

SEQ ID NO: 31313 - RNA, 19 nt, Artificial Sequence
  Description of Artificial Sequence: Synthetic oligonucleotide
  Antisense strand to SEQ ID NO: 31312
cuuauagucacguauaccu

SEQ ID NO: 31314 - RNA, 19 nt, Artificial Sequence
  Description of Artificial Sequence: Synthetic oligonucleotide
  Sense strand starting at position 2354 of SEQ ID NO: 361
gguauacgugacuauaagu

SEQ ID NO: 31315 - RNA, 19 nt, Artificial Sequence
  Description of Artificial Sequence: Synthetic oligonucleotide
  Antisense strand to SEQ ID NO: 31314
acuuauagucacguauacc

SEQ ID NO: 31316 - RNA, 19 nt, Artificial Sequence
  Description of Artificial Sequence: Synthetic oligonucleotide
  Sense strand starting at position 2596 of SEQ ID NO: 361
ggucuaagccacuagggau

SEQ ID NO: 31317 - RNA, 19 nt, Artificial Sequence
  Description of Artificial Sequence: Synthetic oligonucleotide
  Antisense strand to SEQ ID NO: 31316
aucccuaguggcuuagacc

SEQ ID NO: 31318 - RNA, 19 nt, Artificial Sequence
  Description of Artificial Sequence: Synthetic oligonucleotide
  Sense strand starting at position 2669 of SEQ ID NO: 361
cuugauagauccuugagcu

SEQ ID NO: 31319 - RNA, 19 nt, Artificial Sequence
  Description of Artificial Sequence: Synthetic oligonucleotide
  Antisense strand to SEQ ID NO: 31318
agcucaaggaucuaucaag

SEQ ID NO: 31320 - RNA, 19 nt, Artificial Sequence
  Description of Artificial Sequence: Synthetic oligonucleotide
  Sense strand starting at position 2670 of SEQ ID NO: 361
uugauagauccuugagcuu

SEQ ID NO: 31321 - RNA, 19 nt, Artificial Sequence
  Description of Artificial Sequence: Synthetic oligonucleotide
  Antisense strand to SEQ ID NO: 31320
aagcucaaggaucuaucaa

SEQ ID NO: 31322 - RNA, 19 nt, Artificial Sequence
  Description of Artificial Sequence: Synthetic oligonucleotide
  Sense strand starting at position 2715 of SEQ ID NO: 361
guugguuguacugaauaga

SEQ ID NO: 31323 - RNA, 19 nt, Artificial Sequence
  Description of Artificial Sequence: Synthetic oligonucleotide
  Antisense strand to SEQ ID NO: 31322
ucuauucaguacaaccaac

SEQ ID NO: 31324 - RNA, 19 nt, Artificial Sequence
  Description of Artificial Sequence: Synthetic oligonucleotide
  Sense strand starting at position 2847 of SEQ ID NO: 361
gggagaggcugcucugaua

SEQ ID NO: 31325 - RNA, 19 nt, Artificial Sequence
  Description of Artificial Sequence: Synthetic oligonucleotide
  Antisense strand to SEQ ID NO: 31324
uaucagagcagccucuccc

SEQ ID NO: 31326 - RNA, 19 nt, Artificial Sequence
  Description of Artificial Sequence: Synthetic oligonucleotide
  Sense strand starting at position 2911 of SEQ ID NO: 361
ccaugaugucuguaccaca

SEQ ID NO: 31327 - RNA, 19 nt, Artificial Sequence
  Description of Artificial Sequence: Synthetic oligonucleotide
  Antisense strand to SEQ ID NO: 31326
ugugguacagacaucaugg

SEQ ID NO: 31328 - RNA, 19 nt, Artificial Sequence
  Description of Artificial Sequence: Synthetic oligonucleotide
  Sense strand starting at position 2977 of SEQ ID NO: 361
uucugauuucuccgcagac

SEQ ID NO: 31329 - RNA, 19 nt, Artificial Sequence
  Description of Artificial Sequence: Synthetic oligonucleotide
  Antisense strand to SEQ ID NO: 31328
gucugcggagaaaucagaa

SEQ ID NO: 31330 - RNA, 19 nt, Artificial Sequence
  Description of Artificial Sequence: Synthetic oligonucleotide
  Sense strand starting at position 2978 of SEQ ID NO: 361
ucugauuucuccgcagaca

SEQ ID NO: 31331 - RNA, 19 nt, Artificial Sequence
  Description of Artificial Sequence: Synthetic oligonucleotide
  Antisense strand to SEQ ID NO: 31330
ugucugcggagaaaucaga

SEQ ID NO: 31332 - RNA, 19 nt, Artificial Sequence
  Description of Artificial Sequence: Synthetic oligonucleotide
  Sense strand starting at position 3168 of SEQ ID NO: 361
agagcaaaggccugauaug

SEQ ID NO: 31333 - RNA, 19 nt, Artificial Sequence
  Description of Artificial Sequence: Synthetic oligonucleotide
  Antisense strand to SEQ ID NO: 31332
cauaucaggccuuugcucu

SEQ ID NO: 31334 - RNA, 19 nt, Artificial Sequence
  Description of Artificial Sequence: Synthetic oligonucleotide
  Sense strand starting at position 3204 of SEQ ID NO: 361
aacggaaugguaugaaucu

SEQ ID NO: 31335 - RNA, 19 nt, Artificial Sequence
  Description of Artificial Sequence: Synthetic oligonucleotide
  Antisense strand to SEQ ID NO: 31334
agauucauaccauuccguu

SEQ ID NO: 31336 - RNA, 19 nt, Artificial Sequence
  Description of Artificial Sequence: Synthetic oligonucleotide
  Sense strand starting at position 3583 of SEQ ID NO: 361
ggaaauaacuugucuuucu

SEQ ID NO: 31337 - RNA, 19 nt, Artificial Sequence
  Description of Artificial Sequence: Synthetic oligonucleotide
  Antisense strand to SEQ ID NO: 31336
agaaagacaaguuauuucc

SEQ ID NO: 31338 - RNA, 19 nt, Artificial Sequence
  Description of Artificial Sequence: Synthetic oligonucleotide
  Sense strand starting at position 3651 of SEQ ID NO: 361
gauucuguggagcagaguu

SEQ ID NO: 31339 - RNA, 19 nt, Artificial Sequence
  Description of Artificial Sequence: Synthetic oligonucleotide
  Antisense strand to SEQ ID NO: 31338
aacucugcuccacagaauc

SEQ ID NO: 31340 - RNA, 19 nt, Artificial Sequence
  Description of Artificial Sequence: Synthetic oligonucleotide
  Sense strand starting at position 3709 of SEQ ID NO: 361
cagaaucuguacuuugagu

SEQ ID NO: 31341 - RNA, 19 nt, Artificial Sequence
  Description of Artificial Sequence: Synthetic oligonucleotide
  Antisense strand to SEQ ID NO: 31340
acucaaaguacagauucug

SEQ ID NO: 31342 - RNA, 19 nt, Artificial Sequence
  Description of Artificial Sequence: Synthetic oligonucleotide
  Sense strand starting at position 3715 of SEQ ID NO: 361
cuguacuuugaguaaguau

SEQ ID NO: 31343 - RNA, 19 nt, Artificial Sequence
  Description of Artificial Sequence: Synthetic oligonucleotide
  Antisense strand to SEQ ID NO: 31342
auacuuacucaaaguacag

SEQ ID NO: 31344 - RNA, 19 nt, Artificial Sequence
  Description of Artificial Sequence: Synthetic oligonucleotide
  Sense strand starting at position 3722 of SEQ ID NO: 361
uugaguaaguauucuccau

SEQ ID NO: 31345 - RNA, 19 nt, Artificial Sequence
  Description of Artificial Sequence: Synthetic oligonucleotide
  Antisense strand to SEQ ID NO: 31344
auggagaauacuuacucaa

SEQ ID NO: 31346 - RNA, 19 nt, Artificial Sequence
  Description of Artificial Sequence: Synthetic oligonucleotide
  Sense strand starting at position 3724 of SEQ ID NO: 361
gaguaaguauucuccauga

SEQ ID NO: 31347 - RNA, 19 nt, Artificial Sequence
  Description of Artificial Sequence: Synthetic oligonucleotide
  Antisense strand to SEQ ID NO: 31346
ucauggagaauacuuacuc

SEQ ID NO: 31348 - RNA, 19 nt, Artificial Sequence
  Description of Artificial Sequence: Synthetic oligonucleotide
  Sense strand starting at position 3726 of SEQ ID NO: 361
guaaguauucuccaugacu

SEQ ID NO: 31349 - RNA, 19 nt, Artificial Sequence
  Description of Artificial Sequence: Synthetic oligonucleotide
  Antisense strand to SEQ ID NO: 31348
agucauggagaauacuuac

SEQ ID NO: 31350 - RNA, 19 nt, Artificial Sequence
  Description of Artificial Sequence: Synthetic oligonucleotide
  Sense strand starting at position 3729 of SEQ ID NO: 361
aguauucuccaugacucau

SEQ ID NO: 31351 - RNA, 19 nt, Artificial Sequence
  Description of Artificial Sequence: Synthetic oligonucleotide
  Antisense strand to SEQ ID NO: 31350
augagucauggagaauacu

SEQ ID NO: 31352 - RNA, 19 nt, Artificial Sequence
  Description of Artificial Sequence: Synthetic oligonucleotide
  Sense strand starting at position 3760 of SEQ ID NO: 361
ucaagaagcccugguauag

SEQ ID NO: 31353 - RNA, 19 nt, Artificial Sequence
  Description of Artificial Sequence: Synthetic oligonucleotide
  Antisense strand to SEQ ID NO: 31352
cuauaccagggcuucuuga

SEQ ID NO: 31354 - RNA, 19 nt, Artificial Sequence
  Description of Artificial Sequence: Synthetic oligonucleotide
  Sense strand starting at position 3782 of SEQ ID NO: 361
gaacacuugcuggguacaa

SEQ ID NO: 31355 - RNA, 19 nt, Artificial Sequence
  Description of Artificial Sequence: Synthetic oligonucleotide
  Antisense strand to SEQ ID NO: 31354
uuguacccagcaaguguuc

SEQ ID NO: 31356 - RNA, 19 nt, Artificial Sequence
  Description of Artificial Sequence: Synthetic oligonucleotide
  Sense strand starting at position 3910 of SEQ ID NO: 361
gcuugcaaagguuauggau

SEQ ID NO: 31357 - RNA, 19 nt, Artificial Sequence
  Description of Artificial Sequence: Synthetic oligonucleotide
  Antisense strand to SEQ ID NO: 31356
auccauaaccuuugcaagc

SEQ ID NO: 31358 - RNA, 19 nt, Artificial Sequence
  Description of Artificial Sequence: Synthetic oligonucleotide
  Sense strand starting at position 3935 of SEQ ID NO: 362
ggugucaaagagugauaua

SEQ ID NO: 31359 - RNA, 19 nt, Artificial Sequence
  Description of Artificial Sequence: Synthetic oligonucleotide
  Antisense strand to SEQ ID NO: 31358
uauaucacucuuugacacc

SEQ ID NO: 31360 - RNA, 19 nt, Artificial Sequence
  Description of Artificial Sequence: Synthetic oligonucleotide
  Sense strand starting at position 3932 of SEQ ID NO: 362
uauggugucaaagagugau

SEQ ID NO: 31361 - RNA, 19 nt, Artificial Sequence
  Description of Artificial Sequence: Synthetic oligonucleotide
  Antisense strand to SEQ ID NO: 31360
aucacucuuugacaccaua

SEQ ID NO: 31362 - RNA, 19 nt, Artificial Sequence
  Description of Artificial Sequence: Synthetic oligonucleotide
  Sense strand starting at position 3859 of SEQ ID NO: 362
aauuaaagcggguauaauu

SEQ ID NO: 31363 - RNA, 19 nt, Artificial Sequence
  Description of Artificial Sequence: Synthetic oligonucleotide
  Antisense strand to SEQ ID NO: 31362
aauuauacccgcuuuaauu

SEQ ID NO: 31364 - RNA, 19 nt, Artificial Sequence
  Description of Artificial Sequence: Synthetic oligonucleotide
  Sense strand starting at position 3757 of SEQ ID NO: 362
uuuaaauucuuggcagaga

SEQ ID NO: 31365 - RNA, 19 nt, Artificial Sequence
  Description of Artificial Sequence: Synthetic oligonucleotide
  Antisense strand to SEQ ID NO: 31364
ucucugccaagaauuuaaa

SEQ ID NO: 31366 - RNA, 19 nt, Artificial Sequence
  Description of Artificial Sequence: Synthetic oligonucleotide
  Sense strand starting at position 3609 of SEQ ID NO: 362
ggaugcucaguguauaaac

SEQ ID NO: 31367 - RNA, 19 nt, Artificial Sequence
  Description of Artificial Sequence: Synthetic oligonucleotide
  Antisense strand to SEQ ID NO: 31366
guuuauacacugagcaucc

SEQ ID NO: 31368 - RNA, 19 nt, Artificial Sequence
  Description of Artificial Sequence: Synthetic oligonucleotide
  Sense strand starting at position 3555 of SEQ ID NO: 362
gggagcagaacuuguauua

SEQ ID NO: 31369 - RNA, 19 nt, Artificial Sequence
  Description of Artificial Sequence: Synthetic oligonucleotide
  Antisense strand to SEQ ID NO: 31368
uaauacaaguucugcuccc

SEQ ID NO: 31370 - RNA, 19 nt, Artificial Sequence
  Description of Artificial Sequence: Synthetic oligonucleotide
  Sense strand starting at position 3462 of SEQ ID NO: 362
uguugaccuuauguuacau

SEQ ID NO: 31371 - RNA, 19 nt, Artificial Sequence
  Description of Artificial Sequence: Synthetic oligonucleotide
  Antisense strand to SEQ ID NO: 31370
auguaacauaaggucaaca

SEQ ID NO: 31372 - RNA, 19 nt, Artificial Sequence
  Description of Artificial Sequence: Synthetic oligonucleotide
  Sense strand starting at position 3459 of SEQ ID NO: 362
cuauguugaccuuauguua

SEQ ID NO: 31373 - RNA, 19 nt, Artificial Sequence
  Description of Artificial Sequence: Synthetic oligonucleotide
  Antisense strand to SEQ ID NO: 31372
uaacauaaggucaacauag

SEQ ID NO: 31374 - RNA, 19 nt, Artificial Sequence
  Description of Artificial Sequence: Synthetic oligonucleotide
  Sense strand starting at position 3272 of SEQ ID NO: 362
augagaaacuaugauauca

SEQ ID NO: 31375 - RNA, 19 nt, Artificial Sequence
  Description of Artificial Sequence: Synthetic oligonucleotide
  Antisense strand to SEQ ID NO: 31374
ugauaucauaguuucucau

SEQ ID NO: 31376 - RNA, 19 nt, Artificial Sequence
  Description of Artificial Sequence: Synthetic oligonucleotide
  Sense strand starting at position 3119 of SEQ ID NO: 362
ugaucaaagcucugaugug

SEQ ID NO: 31377 - RNA, 19 nt, Artificial Sequence
  Description of Artificial Sequence: Synthetic oligonucleotide
  Antisense strand to SEQ ID NO: 31376
cacaucagagcuuugauca

SEQ ID NO: 31378 - RNA, 19 nt, Artificial Sequence
  Description of Artificial Sequence: Synthetic oligonucleotide
  Sense strand starting at position 3111 of SEQ ID NO: 362
cagagcugugaucaaagcu

SEQ ID NO: 31379 - RNA, 19 nt, Artificial Sequence
  Description of Artificial Sequence: Synthetic oligonucleotide
  Antisense strand to SEQ ID NO: 31378
agcuuugaucacagcucug

SEQ ID NO: 31380 - RNA, 19 nt, Artificial Sequence
  Description of Artificial Sequence: Synthetic oligonucleotide
  Sense strand starting at position 3067 of SEQ ID NO: 362
guggacaugacuuguguua

SEQ ID NO: 31381 - RNA, 19 nt, Artificial Sequence
  Description of Artificial Sequence: Synthetic oligonucleotide
  Antisense strand to SEQ ID NO: 31380
uaacacaagucauguccac

SEQ ID NO: 31382 - RNA, 19 nt, Artificial Sequence
  Description of Artificial Sequence: Synthetic oligonucleotide
  Sense strand starting at position 3019 of SEQ ID NO: 362
ggaccagcacucuguaaca

SEQ ID NO: 31383 - RNA, 19 nt, Artificial Sequence
  Description of Artificial Sequence: Synthetic oligonucleotide
  Antisense strand to SEQ ID NO: 31382
uguuacagagugcuggucc

SEQ ID NO: 31384 - RNA, 19 nt, Artificial Sequence
  Description of Artificial Sequence: Synthetic oligonucleotide
  Sense strand starting at position 2874 of SEQ ID NO: 362
guaggauugugaguaaacc

SEQ ID NO: 31385 - RNA, 19 nt, Artificial Sequence
  Description of Artificial Sequence: Synthetic oligonucleotide
  Antisense strand to SEQ ID NO: 31384
gguuuacucacaauccuac

SEQ ID NO: 31386 - RNA, 19 nt, Artificial Sequence
  Description of Artificial Sequence: Synthetic oligonucleotide
  Sense strand starting at position 2863 of SEQ ID NO: 362
aggauugauuuguaggauu

SEQ ID NO: 31387 - RNA, 19 nt, Artificial Sequence
  Description of Artificial Sequence: Synthetic oligonucleotide
  Antisense strand to SEQ ID NO: 31386
aauccuacaaaucaauccu

SEQ ID NO: 31388 - RNA, 19 nt, Artificial Sequence
  Description of Artificial Sequence: Synthetic oligonucleotide
  Sense strand starting at position 2784 of SEQ ID NO: 362
uuaggugaagaguggauaa

SEQ ID NO: 31389 - RNA, 19 nt, Artificial Sequence
  Description of Artificial Sequence: Synthetic oligonucleotide
  Antisense strand to SEQ ID NO: 31388
uuauccacucuucaccuaa

SEQ ID NO: 31390 - RNA, 19 nt, Artificial Sequence
  Description of Artificial Sequence: Synthetic oligonucleotide
  Sense strand starting at position 2762 of SEQ ID NO: 362
ggauucggauggguagaaa

SEQ ID NO: 31391 - RNA, 19 nt, Artificial Sequence
  Description of Artificial Sequence: Synthetic oligonucleotide
  Antisense strand to SEQ ID NO: 31390
uuucuacccauccgaaucc

SEQ ID NO: 31392 - RNA, 19 nt, Artificial Sequence
  Description of Artificial Sequence: Synthetic oligonucleotide
  Sense strand starting at position 2761 of SEQ ID NO: 362
aggauucggauggguagaa

SEQ ID NO: 31393 - RNA, 19 nt, Artificial Sequence
  Description of Artificial Sequence: Synthetic oligonucleotide
  Antisense strand to SEQ ID NO: 31392
uucuacccauccgaauccu

SEQ ID NO: 31394 - RNA, 19 nt, Artificial Sequence
  Description of Artificial Sequence: Synthetic oligonucleotide
  Sense strand starting at position 2760 of SEQ ID NO: 362
aaggauucggauggguaga

SEQ ID NO: 31395 - RNA, 19 nt, Artificial Sequence
  Description of Artificial Sequence: Synthetic oligonucleotide
  Antisense strand to SEQ ID NO: 31394
ucuacccauccgaauccuu

SEQ ID NO: 31396 - RNA, 19 nt, Artificial Sequence
  Description of Artificial Sequence: Synthetic oligonucleotide
  Sense strand starting at position 2759 of SEQ ID NO: 362
gaaggauucggauggguag

SEQ ID NO: 31397 - RNA, 19 nt, Artificial Sequence
  Description of Artificial Sequence: Synthetic oligonucleotide
  Antisense strand to SEQ ID NO: 31396
cuacccauccgaauccuuc

SEQ ID NO: 31398 - RNA, 19 nt, Artificial Sequence
  Description of Artificial Sequence: Synthetic oligonucleotide
  Sense strand starting at position 2270 of SEQ ID NO: 362
ccgggaauucgggagucaa

SEQ ID NO: 31399 - RNA, 19 nt, Artificial Sequence
  Description of Artificial Sequence: Synthetic oligonucleotide
  Antisense strand to SEQ ID NO: 31398
uugacucccgaauucccgg

SEQ ID NO: 31400 - RNA, 19 nt, Artificial Sequence
  Description of Artificial Sequence: Synthetic oligonucleotide
  Sense strand starting at position 2258 of SEQ ID NO: 362
ugguaauaguuuccgggaa

SEQ ID NO: 31401 - RNA, 19 nt, Artificial Sequence
  Description of Artificial Sequence: Synthetic oligonucleotide
  Antisense strand to SEQ ID NO: 31400
uucccggaaacuauuacca

SEQ ID NO: 31402 - RNA, 19 nt, Artificial Sequence
  Description of Artificial Sequence: Synthetic oligonucleotide
  Sense strand starting at position 2202 of SEQ ID NO: 362
cuggcucgccgucauauuu

SEQ ID NO: 31403 - RNA, 19 nt, Artificial Sequence
  Description of Artificial Sequence: Synthetic oligonucleotide
  Antisense strand to SEQ ID NO: 31402
aaauaugacggcgagccag

SEQ ID NO: 31404 - RNA, 19 nt, Artificial Sequence
  Description of Artificial Sequence: Synthetic oligonucleotide
  Sense strand starting at position 2201 of SEQ ID NO: 362
acuggcucgccgucauauu

SEQ ID NO: 31405 - RNA, 19 nt, Artificial Sequence
  Description of Artificial Sequence: Synthetic oligonucleotide
  Antisense strand to SEQ ID NO: 31404
aauaugacggcgagccagu

SEQ ID NO: 31406 - RNA, 19 nt, Artificial Sequence
  Description of Artificial Sequence: Synthetic oligonucleotide
  Sense strand starting at position 913 of SEQ ID NO: 362
aucuauauugguugggaac

SEQ ID NO: 31407 - RNA, 19 nt, Artificial Sequence
  Description of Artificial Sequence: Synthetic oligonucleotide
  Antisense strand to SEQ ID NO: 31406
guucccaaccaauauagau

SEQ ID NO: 31408 - RNA, 19 nt, Artificial Sequence
  Description of Artificial Sequence: Synthetic oligonucleotide
  Sense strand starting at position 912 of SEQ ID NO: 362
uaucuauauugguugggaa

SEQ ID NO: 31409 - RNA, 19 nt, Artificial Sequence
  Description of Artificial Sequence: Synthetic oligonucleotide
  Antisense strand to SEQ ID NO: 31408
uucccaaccaauauagaua

SEQ ID NO: 31410 - RNA, 19 nt, Artificial Sequence
  Description of Artificial Sequence: Synthetic oligonucleotide
  Sense strand starting at position 911 of SEQ ID NO: 362
cuaucuauauugguuggga

SEQ ID NO: 31411 - RNA, 19 nt, Artificial Sequence
  Description of Artificial Sequence: Synthetic oligonucleotide
  Antisense strand to SEQ ID NO: 31410
ucccaaccaauauagauag

SEQ ID NO: 31412 - RNA, 19 nt, Artificial Sequence
  Description of Artificial Sequence: Synthetic oligonucleotide
  Sense strand starting at position 326 of SEQ ID NO: 362
auguauuucuuagcggguu

SEQ ID NO: 31413 - RNA, 19 nt, Artificial Sequence
  Description of Artificial Sequence: Synthetic oligonucleotide
  Antisense strand to SEQ ID NO: 31412
aacccgcuaagaaauacau

SEQ ID NO: 31414 - RNA, 19 nt, Artificial Sequence
  Description of Artificial Sequence: Synthetic oligonucleotide
  Sense strand starting at position 315 of SEQ ID NO: 362
gcacaauaagcauguauuu

SEQ ID NO: 31415 - RNA, 19 nt, Artificial Sequence
  Description of Artificial Sequence: Synthetic oligonucleotide
  Antisense strand to SEQ ID NO: 31414
aaauacaugcuuauugugc

SEQ ID NO: 31416 - RNA, 19 nt, Artificial Sequence
  Description of Artificial Sequence: Synthetic oligonucleotide
  Sense strand starting at position 303 of SEQ ID NO: 362
ucuguucguaucgcacaau

SEQ ID NO: 31417 - RNA, 19 nt, Artificial Sequence
  Description of Artificial Sequence: Synthetic oligonucleotide
  Antisense strand to SEQ ID NO: 31416
auugugcgauacgaacaga

SEQ ID NO: 31418 - RNA, 19 nt, Artificial Sequence
  Description of Artificial Sequence: Synthetic oligonucleotide
  Sense strand starting at position 155 of SEQ ID NO: 362
uugaaugaaugcuccuaag

SEQ ID NO: 31419 - RNA, 19 nt, Artificial Sequence
  Description of Artificial Sequence: Synthetic oligonucleotide
  Antisense strand to SEQ ID NO: 31418
cuuaggagcauucauucaa

SEQ ID NO: 31420 - RNA, 19 nt, Artificial Sequence
  Description of Artificial Sequence: Synthetic oligonucleotide
  Sense strand starting at position 145 of SEQ ID NO: 362
cccauauucguugaaugaa

SEQ ID NO: 31421 - RNA, 19 nt, Artificial Sequence
  Description of Artificial Sequence: Synthetic oligonucleotide
  Antisense strand to SEQ ID NO: 31420
uucauucaacgaauauggg

SEQ ID NO: 31422 - RNA, 19 nt, Artificial Sequence
  Description of Artificial Sequence: Synthetic oligonucleotide
  Sense strand starting at position 144 of SEQ ID NO: 362
acccauauucguugaauga

SEQ ID NO: 31423 - RNA, 19 nt, Artificial Sequence
  Description of Artificial Sequence: Synthetic oligonucleotide
  Antisense strand to SEQ ID NO: 31422
ucauucaacgaauaugggu

SEQ ID NO: 31424 - RNA, 19 nt, Artificial Sequence
  Description of Artificial Sequence: Synthetic oligonucleotide
  Sense strand starting at position 143 of SEQ ID NO: 362
gacccauauucguugaaug

SEQ ID NO: 31425 - RNA, 19 nt, Artificial Sequence
  Description of Artificial Sequence: Synthetic oligonucleotide
  Antisense strand to SEQ ID NO: 31424
cauucaacgaauauggguc

SEQ ID NO: 31426 - RNA, 19 nt, Artificial Sequence
  Description of Artificial Sequence: Synthetic oligonucleotide
  Sense strand starting at position 142 of SEQ ID NO: 362
agacccauauucguugaau

SEQ ID NO: 31427 - RNA, 19 nt, Artificial Sequence
  Description of Artificial Sequence: Synthetic oligonucleotide
  Antisense strand to SEQ ID NO: 31426
auucaacgaauaugggucu

SEQ ID NO: 31428 - RNA, 19 nt, Artificial Sequence
  Description of Artificial Sequence: Synthetic oligonucleotide
  Sense strand starting at position 137 of SEQ ID NO: 362
auacaagacccauauucgu

SEQ ID NO: 31429 - RNA, 19 nt, Artificial Sequence
  Description of Artificial Sequence: Synthetic oligonucleotide
  Antisense strand to SEQ ID NO: 31428
acgaauaugggucuuguau

SEQ ID NO: 31430 - RNA, 19 nt, Artificial Sequence
  Description of Artificial Sequence: Synthetic oligonucleotide
  Sense strand starting at position 120 of SEQ ID NO: 362
guguaauagcaccagacau

SEQ ID NO: 31431 - RNA, 19 nt, Artificial Sequence
  Description of Artificial Sequence: Synthetic oligonucleotide
  Antisense strand to SEQ ID NO: 31430
augucuggugcuauuacac

SEQ ID NO: 31432 - RNA, 19 nt, Artificial Sequence
  Description of Artificial Sequence: Synthetic oligonucleotide
  Sense strand starting at position 93 of SEQ ID NO: 362
auaggaaugguuuguuauu

SEQ ID NO: 31433 - RNA, 19 nt, Artificial Sequence
  Description of Artificial Sequence: Synthetic oligonucleotide
  Antisense strand to SEQ ID NO: 31432
aauaacaaaccauuccuau

SEQ ID NO: 31434 - RNA, 19 nt, Artificial Sequence
  Description of Artificial Sequence: Synthetic oligonucleotide
  Sense strand starting at position 5 of SEQ ID NO: 362
agcacuuaucauugagcaa

SEQ ID NO: 31435 - RNA, 19 nt, Artificial Sequence
  Description of Artificial Sequence: Synthetic oligonucleotide
  Antisense strand to SEQ ID NO: 31434
uugcucaaugauaagugcu

SEQ ID NO: 31436 - RNA, 19 nt, Artificial Sequence
  Description of Artificial Sequence: Synthetic oligonucleotide
  Sense strand starting at position 4 of SEQ ID NO: 362
gagcacuuaucauugagca

SEQ ID NO: 31437 - RNA, 19 nt, Artificial Sequence
  Description of Artificial Sequence: Synthetic oligonucleotide
  Antisense strand to SEQ ID NO: 31436
ugcucaaugauaagugcuc

SEQ ID NO: 31438 - RNA, 19 nt, Artificial Sequence
  Description of Artificial Sequence: Synthetic oligonucleotide
  Sense strand starting at position 266 of SEQ ID NO: 363
uuaagagauuuagacacau

SEQ ID NO: 31439 - RNA, 19 nt, Artificial Sequence
  Description of Artificial Sequence: Synthetic oligonucleotide
  Antisense strand to SEQ ID NO: 31438
augugucuaaaucucuuaa

SEQ ID NO: 31440 - RNA, 19 nt, Artificial Sequence
  Description of Artificial Sequence: Synthetic oligonucleotide
  Sense strand starting at position 304 of SEQ ID NO: 363
cucgccuuagucuaggaaa

SEQ ID NO: 31441 - RNA, 19 nt, Artificial Sequence
  Description of Artificial Sequence: Synthetic oligonucleotide
  Antisense strand to SEQ ID NO: 31440
uuuccuagacuaaggcgag

SEQ ID NO: 31442 - RNA, 19 nt, Artificial Sequence
  Description of Artificial Sequence: Synthetic oligonucleotide
  Sense strand starting at position 334 of SEQ ID NO: 363
aauagaaugguuuggaagu

SEQ ID NO: 31443 - RNA, 19 nt, Artificial Sequence
  Description of Artificial Sequence: Synthetic oligonucleotide
  Antisense strand to SEQ ID NO: 31442
acuuccaaaccauucuauu

SEQ ID NO: 31444 - RNA, 19 nt, Artificial Sequence
  Description of Artificial Sequence: Synthetic oligonucleotide
  Sense strand starting at position 370 of SEQ ID NO: 363
aggagaauuucuuaaucuc

SEQ ID NO: 31445 - RNA, 19 nt, Artificial Sequence
  Description of Artificial Sequence: Synthetic oligonucleotide
  Antisense strand to SEQ ID NO: 31444
gagauuaagaaauucuccu

SEQ ID NO: 31446 - RNA, 19 nt, Artificial Sequence
  Description of Artificial Sequence: Synthetic oligonucleotide
  Sense strand starting at position 392 of SEQ ID NO: 363
gcaagacaguauucucauc

SEQ ID NO: 31447 - RNA, 19 nt, Artificial Sequence
  Description of Artificial Sequence: Synthetic oligonucleotide
  Antisense strand to SEQ ID NO: 31446
gaugagaauacugucuugc

SEQ ID NO: 31448 - RNA, 19 nt, Artificial Sequence
  Description of Artificial Sequence: Synthetic oligonucleotide
  Sense strand starting at position 505 of SEQ ID NO: 363
guaagugcuuaauuuguau

SEQ ID NO: 31449 - RNA, 19 nt, Artificial Sequence
  Description of Artificial Sequence: Synthetic oligonucleotide
  Antisense strand to SEQ ID NO: 31448
auacaaauuaagcacuuac

SEQ ID NO: 31450 - RNA, 19 nt, Artificial Sequence
  Description of Artificial Sequence: Synthetic oligonucleotide
  Sense strand starting at position 548 of SEQ ID NO: 363
gguguuauaacccagguuu

SEQ ID NO: 31451 - RNA, 19 nt, Artificial Sequence
  Description of Artificial Sequence: Synthetic oligonucleotide
  Antisense strand to SEQ ID NO: 31450
aaaccuggguuauaacacc

SEQ ID NO: 31452 - RNA, 19 nt, Artificial Sequence
  Description of Artificial Sequence: Synthetic oligonucleotide
  Sense strand starting at position 550 of SEQ ID NO: 363
uguuauaacccagguuuac

SEQ ID NO: 31453 - RNA, 19 nt, Artificial Sequence
  Description of Artificial Sequence: Synthetic oligonucleotide
  Antisense strand to SEQ ID NO: 31452
guaaaccuggguuauaaca

SEQ ID NO: 31454 - RNA, 19 nt, Artificial Sequence
  Description of Artificial Sequence: Synthetic oligonucleotide
  Sense strand starting at position 804 of SEQ ID NO: 363
aggucauaccaauguccua

SEQ ID NO: 31455 - RNA, 19 nt, Artificial Sequence
  Description of Artificial Sequence: Synthetic oligonucleotide
  Antisense strand to SEQ ID NO: 31454
uaggacauugguaugaccu

SEQ ID NO: 31456 - RNA, 19 nt, Artificial Sequence
  Description of Artificial Sequence: Synthetic oligonucleotide
  Sense strand starting at position 981 of SEQ ID NO: 363
gugugacuaccacauguuu

SEQ ID NO: 31457 - RNA, 19 nt, Artificial Sequence
  Description of Artificial Sequence: Synthetic oligonucleotide
  Antisense strand to SEQ ID NO: 31456
aaacaugugguagucacac

SEQ ID NO: 31458 - RNA, 19 nt, Artificial Sequence
  Description of Artificial Sequence: Synthetic oligonucleotide
  Sense strand starting at position 987 of SEQ ID NO: 363
cuaccacauguuuguugau

SEQ ID NO: 31459 - RNA, 19 nt, Artificial Sequence
  Description of Artificial Sequence: Synthetic oligonucleotide
  Antisense strand to SEQ ID NO: 31458
aucaacaaacaugugguag

SEQ ID NO: 31460 - RNA, 19 nt, Artificial Sequence
  Description of Artificial Sequence: Synthetic oligonucleotide
  Sense strand starting at position 1021 of SEQ ID NO: 363
cagaguggugagcauuaaa

SEQ ID NO: 31461 - RNA, 19 nt, Artificial Sequence
  Description of Artificial Sequence: Synthetic oligonucleotide
  Antisense strand to SEQ ID NO: 31460
uuuaaugcucaccacucug

SEQ ID NO: 31462 - RNA, 19 nt, Artificial Sequence
  Description of Artificial Sequence: Synthetic oligonucleotide
  Sense strand starting at position 1252 of SEQ ID NO: 363
agcaaucagauguguuaag

SEQ ID NO: 31463 - RNA, 19 nt, Artificial Sequence
  Description of Artificial Sequence: Synthetic oligonucleotide
  Antisense strand to SEQ ID NO: 31462
cuuaacacaucugauugcu

SEQ ID NO: 31464 - RNA, 19 nt, Artificial Sequence
  Description of Artificial Sequence: Synthetic oligonucleotide
  Sense strand starting at position 1264 of SEQ ID NO: 363
uguuaagguuccuuugaug

SEQ ID NO: 31465 - RNA, 19 nt, Artificial Sequence
  Description of Artificial Sequence: Synthetic oligonucleotide
  Antisense strand to SEQ ID NO: 31464
caucaaaggaaccuuaaca

SEQ ID NO: 31466 - RNA, 19 nt, Artificial Sequence
  Description of Artificial Sequence: Synthetic oligonucleotide
  Sense strand starting at position 1440 of SEQ ID NO: 363
ggucucaaagaaugccuaa

SEQ ID NO: 31467 - RNA, 19 nt, Artificial Sequence
  Description of Artificial Sequence: Synthetic oligonucleotide
  Antisense strand to SEQ ID NO: 31466
uuaggcauucuuugagacc

SEQ ID NO: 31468 - RNA, 19 nt, Artificial Sequence
  Description of Artificial Sequence: Synthetic oligonucleotide
  Sense strand starting at position 1459 of SEQ ID NO: 363
gggaguacagugugucuga

SEQ ID NO: 31469 - RNA, 19 nt, Artificial Sequence
  Description of Artificial Sequence: Synthetic oligonucleotide
  Antisense strand to SEQ ID NO: 31468
ucagacacacuguacuccc

SEQ ID NO: 31470 - RNA, 19 nt, Artificial Sequence
  Description of Artificial Sequence: Synthetic oligonucleotide
  Sense strand starting at position 1466 of SEQ ID NO: 363
cagugugucugagcauaaa

SEQ ID NO: 31471 - RNA, 19 nt, Artificial Sequence
  Description of Artificial Sequence: Synthetic oligonucleotide
  Antisense strand to SEQ ID NO: 31470
uuuaugcucagacacacug

SEQ ID NO: 31472 - RNA, 19 nt, Artificial Sequence
  Description of Artificial Sequence: Synthetic oligonucleotide
  Sense strand starting at position 1696 of SEQ ID NO: 363
augcuauuggaauggaaau

SEQ ID NO: 31473 - RNA, 19 nt, Artificial Sequence
  Description of Artificial Sequence: Synthetic oligonucleotide
  Antisense strand to SEQ ID NO: 31472
auuuccauuccaauagcau

SEQ ID NO: 31474 - RNA, 19 nt, Artificial Sequence
  Description of Artificial Sequence: Synthetic oligonucleotide
  Sense strand starting at position 1709 of SEQ ID NO: 363
ggaaauaccugcuuuccag

SEQ ID NO: 31475 - RNA, 19 nt, Artificial Sequence
  Description of Artificial Sequence: Synthetic oligonucleotide
  Antisense strand to SEQ ID NO: 31474
cuggaaagcagguauuucc

SEQ ID NO: 31476 - RNA, 19 nt, Artificial Sequence
  Description of Artificial Sequence: Synthetic oligonucleotide
  Sense strand starting at position 1739 of SEQ ID NO: 363
ggcuucuaggguugaacua

SEQ ID NO: 31477 - RNA, 19 nt, Artificial Sequence
  Description of Artificial Sequence: Synthetic oligonucleotide
  Antisense strand to SEQ ID NO: 31476
uaguucaacccuagaagcc

SEQ ID NO: 31478 - RNA, 19 nt, Artificial Sequence
  Description of Artificial Sequence: Synthetic oligonucleotide
  Sense strand starting at position 1819 of SEQ ID NO: 363
gguggaaaguaccuugaau

SEQ ID NO: 31479 - RNA, 19 nt, Artificial Sequence
  Description of Artificial Sequence: Synthetic oligonucleotide
  Antisense strand to SEQ ID NO: 31478
auucaagguacuuuccacc

SEQ ID NO: 31480 - RNA, 19 nt, Artificial Sequence
  Description of Artificial Sequence: Synthetic oligonucleotide
  Sense strand starting at position 1950 of SEQ ID NO: 363
uugagagccuggcuagaaa

SEQ ID NO: 31481 - RNA, 19 nt, Artificial Sequence
  Description of Artificial Sequence: Synthetic oligonucleotide
  Antisense strand to SEQ ID NO: 31480
uuucuagccaggcucucaa

SEQ ID NO: 31482 - RNA, 19 nt, Artificial Sequence
  Description of Artificial Sequence: Synthetic oligonucleotide
  Sense strand starting at position 2117 of SEQ ID NO: 363
cacggaaacugagaacaau

SEQ ID NO: 31483 - RNA, 19 nt, Artificial Sequence
  Description of Artificial Sequence: Synthetic oligonucleotide
  Antisense strand to SEQ ID NO: 31482
auuguucucaguuuccgug

SEQ ID NO: 31484 - RNA, 19 nt, Artificial Sequence
  Description of Artificial Sequence: Synthetic oligonucleotide
  Sense strand starting at position 2226 of SEQ ID NO: 363
aagggacccugauagagaa

SEQ ID NO: 31485 - RNA, 19 nt, Artificial Sequence
  Description of Artificial Sequence: Synthetic oligonucleotide
  Antisense strand to SEQ ID NO: 31484
uucucuaucagggucccuu

SEQ ID NO: 31486 - RNA, 19 nt, Artificial Sequence
  Description of Artificial Sequence: Synthetic oligonucleotide
  Sense strand starting at position 2236 of SEQ ID NO: 363
gauagagaaugucugcuuu

SEQ ID NO: 31487 - RNA, 19 nt, Artificial Sequence
  Description of Artificial Sequence: Synthetic oligonucleotide
  Antisense strand to SEQ ID NO: 31486
aaagcagacauucucuauc

SEQ ID NO: 31488 - RNA, 19 nt, Artificial Sequence
  Description of Artificial Sequence: Synthetic oligonucleotide
  Sense strand starting at position 2341 of SEQ ID NO: 363
gccugaagucugggaaauc

SEQ ID NO: 31489 - RNA, 19 nt, Artificial Sequence
  Description of Artificial Sequence: Synthetic oligonucleotide
  Antisense strand to SEQ ID NO: 31488
gauuucccagacuucaggc

SEQ ID NO: 31490 - RNA, 19 nt, Artificial Sequence
  Description of Artificial Sequence: Synthetic oligonucleotide
  Sense strand starting at position 2368 of SEQ ID NO: 363
guagccuuugugcugcaua

SEQ ID NO: 31491 - RNA, 19 nt, Artificial Sequence
  Description of Artificial Sequence: Synthetic oligonucleotide
  Antisense strand to SEQ ID NO: 31490
uaugcagcacaaaggcuac

SEQ ID NO: 31492 - RNA, 19 nt, Artificial Sequence
  Description of Artificial Sequence: Synthetic oligonucleotide
  Sense strand starting at position 2441 of SEQ ID NO: 363
gaaguuugacaucagccua

SEQ ID NO: 31493 - RNA, 19 nt, Artificial Sequence
  Description of Artificial Sequence: Synthetic oligonucleotide
  Antisense strand to SEQ ID NO: 31492
uaggcugaugucaaacuuc

SEQ ID NO: 31494 - RNA, 19 nt, Artificial Sequence
  Description of Artificial Sequence: Synthetic oligonucleotide
  Sense strand starting at position 2482 of SEQ ID NO: 363
guaagauuacuuggcccaa

SEQ ID NO: 31495 - RNA, 19 nt, Artificial Sequence
  Description of Artificial Sequence: Synthetic oligonucleotide
  Antisense strand to SEQ ID NO: 31494
uugggccaaguaaucuuac

SEQ ID NO: 31496 - RNA, 19 nt, Artificial Sequence
  Description of Artificial Sequence: Synthetic oligonucleotide
  Sense strand starting at position 2912 of SEQ ID NO: 363
ccaggaaagugguuaaauu

SEQ ID NO: 31497 - RNA, 19 nt, Artificial Sequence
  Description of Artificial Sequence: Synthetic oligonucleotide
  Antisense strand to SEQ ID NO: 31496
aauuuaaccacuuuccugg

SEQ ID NO: 31498 - RNA, 19 nt, Artificial Sequence
  Description of Artificial Sequence: Synthetic oligonucleotide
  Sense strand starting at position 3124 of SEQ ID NO: 363
ucguaugauuaacuuacuu

SEQ ID NO: 31499 - RNA, 19 nt, Artificial Sequence
  Description of Artificial Sequence: Synthetic oligonucleotide
  Antisense strand to SEQ ID NO: 31498
aaguaaguuaaucauacga

SEQ ID NO: 31500 - RNA, 19 nt, Artificial Sequence
  Description of Artificial Sequence: Synthetic oligonucleotide
  Sense strand starting at position 3150 of SEQ ID NO: 363
gguugcucccaugauaugu

SEQ ID NO: 31501 - RNA, 19 nt, Artificial Sequence
  Description of Artificial Sequence: Synthetic oligonucleotide
  Antisense strand to SEQ ID NO: 31500
acauaucaugggagcaacc

SEQ ID NO: 31502 - RNA, 19 nt, Artificial Sequence
  Description of Artificial Sequence: Synthetic oligonucleotide
  Sense strand starting at position 3222 of SEQ ID NO: 363
aucauaucaugucuaggaa

SEQ ID NO: 31503 - RNA, 19 nt, Artificial Sequence
  Description of Artificial Sequence: Synthetic oligonucleotide
  Antisense strand to SEQ ID NO: 31502
uuccuagacaugauaugau

SEQ ID NO: 31504 - RNA, 19 nt, Artificial Sequence
  Description of Artificial Sequence: Synthetic oligonucleotide
  Sense strand starting at position 3270 of SEQ ID NO: 363
uuaguuauuugcccaccca

SEQ ID NO: 31505 - RNA, 19 nt, Artificial Sequence
  Description of Artificial Sequence: Synthetic oligonucleotide
  Antisense strand to SEQ ID NO: 31504
ugggugggcaaauaacuaa

SEQ ID NO: 31506 - RNA, 19 nt, Artificial Sequence
  Description of Artificial Sequence: Synthetic oligonucleotide
  Sense strand starting at position 3303 of SEQ ID NO: 363
gccacaguuccugauauaa

SEQ ID NO: 31507 - RNA, 19 nt, Artificial Sequence
  Description of Artificial Sequence: Synthetic oligonucleotide
  Antisense strand to SEQ ID NO: 31506
uuauaucaggaacuguggc

SEQ ID NO: 31508 - RNA, 19 nt, Artificial Sequence
  Description of Artificial Sequence: Synthetic oligonucleotide
  Sense strand starting at position 3729 of SEQ ID NO: 363
caauguuugaggugauagg

SEQ ID NO: 31509 - RNA, 19 nt, Artificial Sequence
  Description of Artificial Sequence: Synthetic oligonucleotide
  Antisense strand to SEQ ID NO: 31508
ccuaucaccucaaacauug

SEQ ID NO: 31510 - RNA, 19 nt, Artificial Sequence
  Description of Artificial Sequence: Synthetic oligonucleotide
  Sense strand starting at position 3736 of SEQ ID NO: 363
ugaggugauagguauccua

SEQ ID NO: 31511 - RNA, 19 nt, Artificial Sequence
  Description of Artificial Sequence: Synthetic oligonucleotide
  Antisense strand to SEQ ID NO: 31510
uaggauaccuaucaccuca

SEQ ID NO: 31512 - RNA, 19 nt, Artificial Sequence
  Description of Artificial Sequence: Synthetic oligonucleotide
  Sense strand starting at position 3739 of SEQ ID NO: 363
ggugauagguauccuaauu

SEQ ID NO: 31513 - RNA, 19 nt, Artificial Sequence
  Description of Artificial Sequence: Synthetic oligonucleotide
  Antisense strand to SEQ ID NO: 31512
aauuaggauaccuaucacc

SEQ ID NO: 31514 - RNA, 19 nt, Artificial Sequence
  Description of Artificial Sequence: Synthetic oligonucleotide
  Sense strand starting at position 3947 of SEQ ID NO: 363
uuuggaacuguguguuaua

SEQ ID NO: 31515 - RNA, 19 nt, Artificial Sequence
  Description of Artificial Sequence: Synthetic oligonucleotide
  Antisense strand to SEQ ID NO: 31514
uauaacacacaguuccaaa

SEQ ID NO: 31516 - RNA, 19 nt, Artificial Sequence
  Description of Artificial Sequence: Synthetic oligonucleotide
  Sense strand starting at position 3948 of SEQ ID NO: 363
uuggaacuguguguuauau

SEQ ID NO: 31517 - RNA, 19 nt, Artificial Sequence
  Description of Artificial Sequence: Synthetic oligonucleotide
  Antisense strand to SEQ ID NO: 31516
auauaacacacaguuccaa

SEQ ID NO: 31518 - RNA, 19 nt, Artificial Sequence
  Description of Artificial Sequence: Synthetic oligonucleotide
  Sense strand starting at position 3614 of SEQ ID NO: 364
gggagaucuggcugaggcu

SEQ ID NO: 31519 - RNA, 19 nt, Artificial Sequence
  Description of Artificial Sequence: Synthetic oligonucleotide
  Antisense strand to SEQ ID NO: 31518
agccucagccagaucuccc

SEQ ID NO: 31520 - RNA, 19 nt, Artificial Sequence
  Description of Artificial Sequence: Synthetic oligonucleotide
  Sense strand starting at position 3538 of SEQ ID NO: 364
uuuacaugcuagguaguaa

SEQ ID NO: 31521 - RNA, 19 nt, Artificial Sequence
  Description of Artificial Sequence: Synthetic oligonucleotide
  Antisense strand to SEQ ID NO: 31520
uuacuaccuagcauguaaa

SEQ ID NO: 31522 - RNA, 19 nt, Artificial Sequence
  Description of Artificial Sequence: Synthetic oligonucleotide
  Sense strand starting at position 3460 of SEQ ID NO: 364
aggaguuggucaccacaac

SEQ ID NO: 31523 - RNA, 19 nt, Artificial Sequence
  Description of Artificial Sequence: Synthetic oligonucleotide
  Antisense strand to SEQ ID NO: 31522
guuguggugaccaacuccu

SEQ ID NO: 31524 - RNA, 19 nt, Artificial Sequence
  Description of Artificial Sequence: Synthetic oligonucleotide
  Sense strand starting at position 3458 of SEQ ID NO: 364
ccaggaguuggucaccaca

SEQ ID NO: 31525 - RNA, 19 nt, Artificial Sequence
  Description of Artificial Sequence: Synthetic oligonucleotide
  Antisense strand to SEQ ID NO: 31524
uguggugaccaacuccugg

SEQ ID NO: 31526 - RNA, 19 nt, Artificial Sequence
  Description of Artificial Sequence: Synthetic oligonucleotide
  Sense strand starting at position 3279 of SEQ ID NO: 364
gauguuaagugacuugcua

SEQ ID NO: 31527 - RNA, 19 nt, Artificial Sequence
  Description of Artificial Sequence: Synthetic oligonucleotide
  Antisense strand to SEQ ID NO: 31526
uagcaagucacuuaacauc

SEQ ID NO: 31528 - RNA, 19 nt, Artificial Sequence
  Description of Artificial Sequence: Synthetic oligonucleotide
  Sense strand starting at position 3275 of SEQ ID NO: 364
cuuagauguuaagugacuu

SEQ ID NO: 31529 - RNA, 19 nt, Artificial Sequence
  Description of Artificial Sequence: Synthetic oligonucleotide
  Antisense strand to SEQ ID NO: 31528
aagucacuuaacaucuaag

SEQ ID NO: 31530 - RNA, 19 nt, Artificial Sequence
  Description of Artificial Sequence: Synthetic oligonucleotide
  Sense strand starting at position 3171 of SEQ ID NO: 364
uggauagugcuccaugcuu

SEQ ID NO: 31531 - RNA, 19 nt, Artificial Sequence
  Description of Artificial Sequence: Synthetic oligonucleotide
  Antisense strand to SEQ ID NO: 31530
aagcauggagcacuaucca

SEQ ID NO: 31532 - RNA, 19 nt, Artificial Sequence
  Description of Artificial Sequence: Synthetic oligonucleotide
  Sense strand starting at position 3067 of SEQ ID NO: 364
gggacaagugggugacuaa

SEQ ID NO: 31533 - RNA, 19 nt, Artificial Sequence
  Description of Artificial Sequence: Synthetic oligonucleotide
  Antisense strand to SEQ ID NO: 31532
uuagucacccacuuguccc

SEQ ID NO: 31534 - RNA, 19 nt, Artificial Sequence
  Description of Artificial Sequence: Synthetic oligonucleotide
  Sense strand starting at position 3027 of SEQ ID NO: 364
uuuguauuagcugaggaug

SEQ ID NO: 31535 - RNA, 19 nt, Artificial Sequence
  Description of Artificial Sequence: Synthetic oligonucleotide
  Antisense strand to SEQ ID NO: 31534
cauccucagcuaauacaaa

SEQ ID NO: 31536 - RNA, 19 nt, Artificial Sequence
  Description of Artificial Sequence: Synthetic oligonucleotide
  Sense strand starting at position 3026 of SEQ ID NO: 364
guuuguauuagcugaggau

SEQ ID NO: 31537 - RNA, 19 nt, Artificial Sequence
  Description of Artificial Sequence: Synthetic oligonucleotide
  Antisense strand to SEQ ID NO: 31536
auccucagcuaauacaaac

SEQ ID NO: 31538 - RNA, 19 nt, Artificial Sequence
  Description of Artificial Sequence: Synthetic oligonucleotide
  Sense strand starting at position 2490 of SEQ ID NO: 364
aaauguuuagauuguggaa

SEQ ID NO: 31539 - RNA, 19 nt, Artificial Sequence
  Description of Artificial Sequence: Synthetic oligonucleotide
  Antisense strand to SEQ ID NO: 31538
uuccacaaucuaaacauuu

SEQ ID NO: 31540 - RNA, 19 nt, Artificial Sequence
  Description of Artificial Sequence: Synthetic oligonucleotide
  Sense strand starting at position 2466 of SEQ ID NO: 364
gcagguucugaaugaaagc

SEQ ID NO: 31541 - RNA, 19 nt, Artificial Sequence
  Description of Artificial Sequence: Synthetic oligonucleotide
  Antisense strand to SEQ ID NO: 31540
gcuuucauucagaaccugc

SEQ ID NO: 31542 - RNA, 19 nt, Artificial Sequence
  Description of Artificial Sequence: Synthetic oligonucleotide
  Sense strand starting at position 2370 of SEQ ID NO: 364
gaguuuguuguuuaaagaa

SEQ ID NO: 31543 - RNA, 19 nt, Artificial Sequence
  Description of Artificial Sequence: Synthetic oligonucleotide
  Antisense strand to SEQ ID NO: 31542
uucuuuaaacaacaaacuc

SEQ ID NO: 31544 - RNA, 19 nt, Artificial Sequence
  Description of Artificial Sequence: Synthetic oligonucleotide
  Sense strand starting at position 2369 of SEQ ID NO: 364
ugaguuuguuguuuaaaga

SEQ ID NO: 31545 - RNA, 19 nt, Artificial Sequence
  Description of Artificial Sequence: Synthetic oligonucleotide
  Antisense strand to SEQ ID NO: 31544
ucuuuaaacaacaaacuca

SEQ ID NO: 31546 - RNA, 19 nt, Artificial Sequence
  Description of Artificial Sequence: Synthetic oligonucleotide
  Sense strand starting at position 2368 of SEQ ID NO: 364
augaguuuguuguuuaaag

SEQ ID NO: 31547 - RNA, 19 nt, Artificial Sequence
  Description of Artificial Sequence: Synthetic oligonucleotide
  Antisense strand to SEQ ID NO: 31546
cuuuaaacaacaaacucau

SEQ ID NO: 31548 - RNA, 19 nt, Artificial Sequence
  Description of Artificial Sequence: Synthetic oligonucleotide
  Sense strand starting at position 2353 of SEQ ID NO: 364
gcagauauuccguaaauga

SEQ ID NO: 31549 - RNA, 19 nt, Artificial Sequence
  Description of Artificial Sequence: Synthetic oligonucleotide
  Antisense strand to SEQ ID NO: 31548
ucauuuacggaauaucugc

SEQ ID NO: 31550 - RNA, 19 nt, Artificial Sequence
  Description of Artificial Sequence: Synthetic oligonucleotide
  Sense strand starting at position 2352 of SEQ ID NO: 364
agcagauauuccguaaaug

SEQ ID NO: 31551 - RNA, 19 nt, Artificial Sequence
  Description of Artificial Sequence: Synthetic oligonucleotide
  Antisense strand to SEQ ID NO: 31550
cauuuacggaauaucugcu

SEQ ID NO: 31552 - RNA, 19 nt, Artificial Sequence
  Description of Artificial Sequence: Synthetic oligonucleotide
  Sense strand starting at position 2349 of SEQ ID NO: 364
cauagcagauauuccguaa

SEQ ID NO: 31553 - RNA, 19 nt, Artificial Sequence
  Description of Artificial Sequence: Synthetic oligonucleotide
  Antisense strand to SEQ ID NO: 31552
uuacggaauaucugcuaug

SEQ ID NO: 31554 - RNA, 19 nt, Artificial Sequence
  Description of Artificial Sequence: Synthetic oligonucleotide
  Sense strand starting at position 2233 of SEQ ID NO: 364
ugguuuaaucacugaccag

SEQ ID NO: 31555 - RNA, 19 nt, Artificial Sequence
  Description of Artificial Sequence: Synthetic oligonucleotide
  Antisense strand to SEQ ID NO: 31554
cuggucagugauuaaacca

SEQ ID NO: 31556 - RNA, 19 nt, Artificial Sequence
  Description of Artificial Sequence: Synthetic oligonucleotide
  Sense strand starting at position 2232 of SEQ ID NO: 364
cugguuuaaucacugacca

SEQ ID NO: 31557 - RNA, 19 nt, Artificial Sequence
  Description of Artificial Sequence: Synthetic oligonucleotide
  Antisense strand to SEQ ID NO: 31556
uggucagugauuaaaccag

SEQ ID NO: 31558 - RNA, 19 nt, Artificial Sequence
  Description of Artificial Sequence: Synthetic oligonucleotide
  Sense strand starting at position 2224 of SEQ ID NO: 364
gcugaauccugguuuaauc

SEQ ID NO: 31559 - RNA, 19 nt, Artificial Sequence
  Description of Artificial Sequence: Synthetic oligonucleotide
  Antisense strand to SEQ ID NO: 31558
gauuaaaccaggauucagc

SEQ ID NO: 31560 - RNA, 19 nt, Artificial Sequence
  Description of Artificial Sequence: Synthetic oligonucleotide
  Sense strand starting at position 2194 of SEQ ID NO: 364
gcccaaggccuggaaucau

SEQ ID NO: 31561 - RNA, 19 nt, Artificial Sequence
  Description of Artificial Sequence: Synthetic oligonucleotide
  Antisense strand to SEQ ID NO: 31560
augauuccaggccuugggc

SEQ ID NO: 31562 - RNA, 19 nt, Artificial Sequence
  Description of Artificial Sequence: Synthetic oligonucleotide
  Sense strand starting at position 2088 of SEQ ID NO: 364
uggauaauaccaggcucua

SEQ ID NO: 31563 - RNA, 19 nt, Artificial Sequence
  Description of Artificial Sequence: Synthetic oligonucleotide
  Antisense strand to SEQ ID NO: 31562
uagagccugguauuaucca

SEQ ID NO: 31564 - RNA, 19 nt, Artificial Sequence
  Description of Artificial Sequence: Synthetic oligonucleotide
  Sense strand starting at position 1841 of SEQ ID NO: 364
ugcucuuaccuguaccaua

SEQ ID NO: 31565 - RNA, 19 nt, Artificial Sequence
  Description of Artificial Sequence: Synthetic oligonucleotide
  Antisense strand to SEQ ID NO: 31564
uaugguacagguaagagca

SEQ ID NO: 31566 - RNA, 19 nt, Artificial Sequence
  Description of Artificial Sequence: Synthetic oligonucleotide
  Sense strand starting at position 1737 of SEQ ID NO: 364
cugugcucucaggagagaa

SEQ ID NO: 31567 - RNA, 19 nt, Artificial Sequence
  Description of Artificial Sequence: Synthetic oligonucleotide
  Antisense strand to SEQ ID NO: 31566
uucucuccugagagcacag

SEQ ID NO: 31568 - RNA, 19 nt, Artificial Sequence
  Description of Artificial Sequence: Synthetic oligonucleotide
  Sense strand starting at position 1543 of SEQ ID NO: 364
gucucuuaguucucuauua

SEQ ID NO: 31569 - RNA, 19 nt, Artificial Sequence
  Description of Artificial Sequence: Synthetic oligonucleotide
  Antisense strand to SEQ ID NO: 31568
uaauagagaacuaagagac

SEQ ID NO: 31570 - RNA, 19 nt, Artificial Sequence
  Description of Artificial Sequence: Synthetic oligonucleotide
  Sense strand starting at position 1335 of SEQ ID NO: 364
uuguuucugaaaugggaga

SEQ ID NO: 31571 - RNA, 19 nt, Artificial Sequence
  Description of Artificial Sequence: Synthetic oligonucleotide
  Antisense strand to SEQ ID NO: 31570
ucucccauuucagaaacaa

SEQ ID NO: 31572 - RNA, 19 nt, Artificial Sequence
  Description of Artificial Sequence: Synthetic oligonucleotide
  Sense strand starting at position 1327 of SEQ ID NO: 364
gacuccaguuguuucugaa

SEQ ID NO: 31573 - RNA, 19 nt, Artificial Sequence
  Description of Artificial Sequence: Synthetic oligonucleotide
  Antisense strand to SEQ ID NO: 31572
uucagaaacaacuggaguc

SEQ ID NO: 31574 - RNA, 19 nt, Artificial Sequence
  Description of Artificial Sequence: Synthetic oligonucleotide
  Sense strand starting at position 1221 of SEQ ID NO: 364
gcuguucuugaucaagaac

SEQ ID NO: 31575 - RNA, 19 nt, Artificial Sequence
  Description of Artificial Sequence: Synthetic oligonucleotide
  Antisense strand to SEQ ID NO: 31574
guucuugaucaagaacagc

SEQ ID NO: 31576 - RNA, 19 nt, Artificial Sequence
  Description of Artificial Sequence: Synthetic oligonucleotide
  Sense strand starting at position 1220 of SEQ ID NO: 364
agcuguucuugaucaagaa

SEQ ID NO: 31577 - RNA, 19 nt, Artificial Sequence
  Description of Artificial Sequence: Synthetic oligonucleotide
  Antisense strand to SEQ ID NO: 31576
uucuugaucaagaacagcu

SEQ ID NO: 31578 - RNA, 19 nt, Artificial Sequence
  Description of Artificial Sequence: Synthetic oligonucleotide
  Sense strand starting at position 1218 of SEQ ID NO: 364
caagcuguucuugaucaag

SEQ ID NO: 31579 - RNA, 19 nt, Artificial Sequence
  Description of Artificial Sequence: Synthetic oligonucleotide
  Antisense strand to SEQ ID NO: 31578
cuugaucaagaacagcuug

SEQ ID NO: 31580 - RNA, 19 nt, Artificial Sequence
  Description of Artificial Sequence: Synthetic oligonucleotide
  Sense strand starting at position 1214 of SEQ ID NO: 364
ugaucaagcuguucuugau

SEQ ID NO: 31581 - RNA, 19 nt, Artificial Sequence
  Description of Artificial Sequence: Synthetic oligonucleotide
  Antisense strand to SEQ ID NO: 31580
aucaagaacagcuugauca

SEQ ID NO: 31582 - RNA, 19 nt, Artificial Sequence
  Description of Artificial Sequence: Synthetic oligonucleotide
  Sense strand starting at position 1179 of SEQ ID NO: 364
acuguucuugauggagauu

SEQ ID NO: 31583 - RNA, 19 nt, Artificial Sequence
  Description of Artificial Sequence: Synthetic oligonucleotide
  Antisense strand to SEQ ID NO: 31582
aaucuccaucaagaacagu

SEQ ID NO: 31584 - RNA, 19 nt, Artificial Sequence
  Description of Artificial Sequence: Synthetic oligonucleotide
  Sense strand starting at position 1148 of SEQ ID NO: 364
guccuuaaugcuugaugga

SEQ ID NO: 31585 - RNA, 19 nt, Artificial Sequence
  Description of Artificial Sequence: Synthetic oligonucleotide
  Antisense strand to SEQ ID NO: 31584
uccaucaagcauuaaggac

SEQ ID NO: 31586 - RNA, 19 nt, Artificial Sequence
  Description of Artificial Sequence: Synthetic oligonucleotide
  Sense strand starting at position 1044 of SEQ ID NO: 364
cacaguugugaaggucaca

SEQ ID NO: 31587 - RNA, 19 nt, Artificial Sequence
  Description of Artificial Sequence: Synthetic oligonucleotide
  Antisense strand to SEQ ID NO: 31586
ugugaccuucacaacugug

SEQ ID NO: 31588 - RNA, 19 nt, Artificial Sequence
  Description of Artificial Sequence: Synthetic oligonucleotide
  Sense strand starting at position 214 of SEQ ID NO: 364
agguccugucaggauguuu

SEQ ID NO: 31589 - RNA, 19 nt, Artificial Sequence
  Description of Artificial Sequence: Synthetic oligonucleotide
  Antisense strand to SEQ ID NO: 31588
aaacauccugacaggaccu

SEQ ID NO: 31590 - RNA, 19 nt, Artificial Sequence
  Description of Artificial Sequence: Synthetic oligonucleotide
  Sense strand starting at position 102 of SEQ ID NO: 364
cguguuuguuauuuaaaga

SEQ ID NO: 31591 - RNA, 19 nt, Artificial Sequence
  Description of Artificial Sequence: Synthetic oligonucleotide
  Antisense strand to SEQ ID NO: 31590
ucuuuaaauaacaaacacg

SEQ ID NO: 31592 - RNA, 19 nt, Artificial Sequence
  Description of Artificial Sequence: Synthetic oligonucleotide
  Sense strand starting at position 101 of SEQ ID NO: 364
gcguguuuguuauuuaaag

SEQ ID NO: 31593 - RNA, 19 nt, Artificial Sequence
  Description of Artificial Sequence: Synthetic oligonucleotide
  Antisense strand to SEQ ID NO: 31592
cuuuaaauaacaaacacgc

SEQ ID NO: 31594 - RNA, 19 nt, Artificial Sequence
  Description of Artificial Sequence: Synthetic oligonucleotide
  Sense strand starting at position 97 of SEQ ID NO: 364
aauagcguguuuguuauuu

SEQ ID NO: 31595 - RNA, 19 nt, Artificial Sequence
  Description of Artificial Sequence: Synthetic oligonucleotide
  Antisense strand to SEQ ID NO: 31594
aaauaacaaacacgcuauu

SEQ ID NO: 31596 - RNA, 19 nt, Artificial Sequence
  Description of Artificial Sequence: Synthetic oligonucleotide
  Sense strand starting at position 93 of SEQ ID NO: 364
uuugaauagcguguuuguu

SEQ ID NO: 31597 - RNA, 19 nt, Artificial Sequence
  Description of Artificial Sequence: Synthetic oligonucleotide
  Antisense strand to SEQ ID NO: 31596
aacaaacacgcuauucaaa

SEQ ID NO: 31598 - RNA, 19 nt, Artificial Sequence
  Description of Artificial Sequence: Synthetic oligonucleotide
  Sense strand starting at position 3689 of SEQ ID NO: 365
gaaaccagguguccucuua

SEQ ID NO: 31599 - RNA, 19 nt, Artificial Sequence
  Description of Artificial Sequence: Synthetic oligonucleotide
  Antisense strand to SEQ ID NO: 31598
uaagaggacaccugguuuc

SEQ ID NO: 31600 - RNA, 19 nt, Artificial Sequence
  Description of Artificial Sequence: Synthetic oligonucleotide
  Sense strand starting at position 3473 of SEQ ID NO: 365
uucugauggcucuaauuac

SEQ ID NO: 31601 - RNA, 19 nt, Artificial Sequence
  Description of Artificial Sequence: Synthetic oligonucleotide
  Antisense strand to SEQ ID NO: 31600
guaauuagagccaucagaa

SEQ ID NO: 31602 - RNA, 19 nt, Artificial Sequence
  Description of Artificial Sequence: Synthetic oligonucleotide
  Sense strand starting at position 3470 of SEQ ID NO: 365
ccauucugauggcucuaau

SEQ ID NO: 31603 - RNA, 19 nt, Artificial Sequence
  Description of Artificial Sequence: Synthetic oligonucleotide
  Antisense strand to SEQ ID NO: 31602
auuagagccaucagaaugg

SEQ ID NO: 31604 - RNA, 19 nt, Artificial Sequence
  Description of Artificial Sequence: Synthetic oligonucleotide
  Sense strand starting at position 3173 of SEQ ID NO: 365
cuugucaguccuuaauauu

SEQ ID NO: 31605 - RNA, 19 nt, Artificial Sequence
  Description of Artificial Sequence: Synthetic oligonucleotide
  Antisense strand to SEQ ID NO: 31604
aauauuaaggacugacaag

SEQ ID NO: 31606 - RNA, 19 nt, Artificial Sequence
  Description of Artificial Sequence: Synthetic oligonucleotide
  Sense strand starting at position 3156 of SEQ ID NO: 365
aggucuuuacugcagaacu

SEQ ID NO: 31607 - RNA, 19 nt, Artificial Sequence
  Description of Artificial Sequence: Synthetic oligonucleotide
  Antisense strand to SEQ ID NO: 31606
aguucugcaguaaagaccu

SEQ ID NO: 31608 - RNA, 19 nt, Artificial Sequence
  Description of Artificial Sequence: Synthetic oligonucleotide
  Sense strand starting at position 2911 of SEQ ID NO: 365
gucaaaggaguaugugaca

SEQ ID NO: 31609 - RNA, 19 nt, Artificial Sequence
  Description of Artificial Sequence: Synthetic oligonucleotide
  Antisense strand to SEQ ID NO: 31608
ugucacauacuccuuugac

SEQ ID NO: 31610 - RNA, 19 nt, Artificial Sequence
  Description of Artificial Sequence: Synthetic oligonucleotide
  Sense strand starting at position 2899 of SEQ ID NO: 365
uucuuagauugggucaaag

SEQ ID NO: 31611 - RNA, 19 nt, Artificial Sequence
  Description of Artificial Sequence: Synthetic oligonucleotide
  Antisense strand to SEQ ID NO: 31610
cuuugacccaaucuaagaa

SEQ ID NO: 31612 - RNA, 19 nt, Artificial Sequence
  Description of Artificial Sequence: Synthetic oligonucleotide
  Sense strand starting at position 2784 of SEQ ID NO: 365
augucagagguaggauuaa

SEQ ID NO: 31613 - RNA, 19 nt, Artificial Sequence
  Description of Artificial Sequence: Synthetic oligonucleotide
  Antisense strand to SEQ ID NO: 31612
uuaauccuaccucugacau

SEQ ID NO: 31614 - RNA, 19 nt, Artificial Sequence
  Description of Artificial Sequence: Synthetic oligonucleotide
  Sense strand starting at position 2780 of SEQ ID NO: 365
agacaugucagagguagga

SEQ ID NO: 31615 - RNA, 19 nt, Artificial Sequence
  Description of Artificial Sequence: Synthetic oligonucleotide
  Antisense strand to SEQ ID NO: 31614
uccuaccucugacaugucu

SEQ ID NO: 31616 - RNA, 19 nt, Artificial Sequence
  Description of Artificial Sequence: Synthetic oligonucleotide
  Sense strand starting at position 2629 of SEQ ID NO: 365
ugagaucuugagcaagucu

SEQ ID NO: 31617 - RNA, 19 nt, Artificial Sequence
  Description of Artificial Sequence: Synthetic oligonucleotide
  Antisense strand to SEQ ID NO: 31616
agacuugcucaagaucuca

SEQ ID NO: 31618 - RNA, 19 nt, Artificial Sequence
  Description of Artificial Sequence: Synthetic oligonucleotide
  Sense strand starting at position 2382 of SEQ ID NO: 365
uuuggaaugucuuucugaa

SEQ ID NO: 31619 - RNA, 19 nt, Artificial Sequence
  Description of Artificial Sequence: Synthetic oligonucleotide
  Antisense strand to SEQ ID NO: 31618
uucagaaagacauuccaaa

SEQ ID NO: 31620 - RNA, 19 nt, Artificial Sequence
  Description of Artificial Sequence: Synthetic oligonucleotide
  Sense strand starting at position 2377 of SEQ ID NO: 365
gagacuuuggaaugucuuu

SEQ ID NO: 31621 - RNA, 19 nt, Artificial Sequence
  Description of Artificial Sequence: Synthetic oligonucleotide
  Antisense strand to SEQ ID NO: 31620
aaagacauuccaaagucuc

SEQ ID NO: 31622 - RNA, 19 nt, Artificial Sequence
  Description of Artificial Sequence: Synthetic oligonucleotide
  Sense strand starting at position 2223 of SEQ ID NO: 365
aaaggacagugcuucucaa

SEQ ID NO: 31623 - RNA, 19 nt, Artificial Sequence
  Description of Artificial Sequence: Synthetic oligonucleotide
  Antisense strand to SEQ ID NO: 31622
uugagaagcacuguccuuu

SEQ ID NO: 31624 - RNA, 19 nt, Artificial Sequence
  Description of Artificial Sequence: Synthetic oligonucleotide
  Sense strand starting at position 2175 of SEQ ID NO: 365
ugagcagugguggauucua

SEQ ID NO: 31625 - RNA, 19 nt, Artificial Sequence
  Description of Artificial Sequence: Synthetic oligonucleotide
  Antisense strand to SEQ ID NO: 31624
uagaauccaccacugcuca

SEQ ID NO: 31626 - RNA, 19 nt, Artificial Sequence
  Description of Artificial Sequence: Synthetic oligonucleotide
  Sense strand starting at position 1765 of SEQ ID NO: 365
gguuacuagagagguauau

SEQ ID NO: 31627 - RNA, 19 nt, Artificial Sequence
  Description of Artificial Sequence: Synthetic oligonucleotide
  Antisense strand to SEQ ID NO: 31626
auauaccucucuaguaacc

SEQ ID NO: 31628 - RNA, 19 nt, Artificial Sequence
  Description of Artificial Sequence: Synthetic oligonucleotide
  Sense strand starting at position 1742 of SEQ ID NO: 365
agagaaguugccggagauu

SEQ ID NO: 31629 - RNA, 19 nt, Artificial Sequence
  Description of Artificial Sequence: Synthetic oligonucleotide
  Antisense strand to SEQ ID NO: 31628
aaucuccggcaacuucucu

SEQ ID NO: 31630 - RNA, 19 nt, Artificial Sequence
  Description of Artificial Sequence: Synthetic oligonucleotide
  Sense strand starting at position 1727 of SEQ ID NO: 365
cuaaauauuugugaaagag

SEQ ID NO: 31631 - RNA, 19 nt, Artificial Sequence
  Description of Artificial Sequence: Synthetic oligonucleotide
  Antisense strand to SEQ ID NO: 31630
cucuuucacaaauauuuag

SEQ ID NO: 31632 - RNA, 19 nt, Artificial Sequence
  Description of Artificial Sequence: Synthetic oligonucleotide
  Sense strand starting at position 1623 of SEQ ID NO: 365
cucagagauuuagauaaug

SEQ ID NO: 31633 - RNA, 19 nt, Artificial Sequence
  Description of Artificial Sequence: Synthetic oligonucleotide
  Antisense strand to SEQ ID NO: 31632
cauuaucuaaaucucugag

SEQ ID NO: 31634 - RNA, 19 nt, Artificial Sequence
  Description of Artificial Sequence: Synthetic oligonucleotide
  Sense strand starting at position 1533 of SEQ ID NO: 365
ugucaucucgcauagaaag

SEQ ID NO: 31635 - RNA, 19 nt, Artificial Sequence
  Description of Artificial Sequence: Synthetic oligonucleotide
  Antisense strand to SEQ ID NO: 31634
cuuucuaugcgagaugaca

SEQ ID NO: 31636 - RNA, 19 nt, Artificial Sequence
  Description of Artificial Sequence: Synthetic oligonucleotide
  Sense strand starting at position 1462 of SEQ ID NO: 365
ggguucuuuccucacuuua

SEQ ID NO: 31637 - RNA, 19 nt, Artificial Sequence
  Description of Artificial Sequence: Synthetic oligonucleotide
  Antisense strand to SEQ ID NO: 31636
uaaagugaggaaagaaccc

SEQ ID NO: 31638 - RNA, 19 nt, Artificial Sequence
  Description of Artificial Sequence: Synthetic oligonucleotide
  Sense strand starting at position 1415 of SEQ ID NO: 365
aaagaacugugucuucuag

SEQ ID NO: 31639 - RNA, 19 nt, Artificial Sequence
  Description of Artificial Sequence: Synthetic oligonucleotide
  Antisense strand to SEQ ID NO: 31638
cuagaagacacaguucuuu

SEQ ID NO: 31640 - RNA, 19 nt, Artificial Sequence
  Description of Artificial Sequence: Synthetic oligonucleotide
  Sense strand starting at position 1260 of SEQ ID NO: 365
cuaugcauccuuuagagau

SEQ ID NO: 31641 - RNA, 19 nt, Artificial Sequence
  Description of Artificial Sequence: Synthetic oligonucleotide
  Antisense strand to SEQ ID NO: 31640
aucucuaaaggaugcauag

SEQ ID NO: 31642 - RNA, 19 nt, Artificial Sequence
  Description of Artificial Sequence: Synthetic oligonucleotide
  Sense strand starting at position 1187 of SEQ ID NO: 365
uuuguacaccaaggauaau

SEQ ID NO: 31643 - RNA, 19 nt, Artificial Sequence
  Description of Artificial Sequence: Synthetic oligonucleotide
  Antisense strand to SEQ ID NO: 31642
auuauccuugguguacaaa

SEQ ID NO: 31644 - RNA, 19 nt, Artificial Sequence
  Description of Artificial Sequence: Synthetic oligonucleotide
  Sense strand starting at position 1169 of SEQ ID NO: 365
auuuaucaguggucauguu

SEQ ID NO: 31645 - RNA, 19 nt, Artificial Sequence
  Description of Artificial Sequence: Synthetic oligonucleotide
  Antisense strand to SEQ ID NO: 31644
aacaugaccacugauaaau

SEQ ID NO: 31646 - RNA, 19 nt, Artificial Sequence
  Description of Artificial Sequence: Synthetic oligonucleotide
  Sense strand starting at position 1109 of SEQ ID NO: 365
uggaaauuacugcaguauc

SEQ ID NO: 31647 - RNA, 19 nt, Artificial Sequence
  Description of Artificial Sequence: Synthetic oligonucleotide
  Antisense strand to SEQ ID NO: 31646
gauacugcaguaauuucca

SEQ ID NO: 31648 - RNA, 19 nt, Artificial Sequence
  Description of Artificial Sequence: Synthetic oligonucleotide
  Sense strand starting at position 1097 of SEQ ID NO: 365
acagcacaugauuggaaau

SEQ ID NO: 31649 - RNA, 19 nt, Artificial Sequence
  Description of Artificial Sequence: Synthetic oligonucleotide
  Antisense strand to SEQ ID NO: 31648
auuuccaaucaugugcugu

SEQ ID NO: 31650 - RNA, 19 nt, Artificial Sequence
  Description of Artificial Sequence: Synthetic oligonucleotide
  Sense strand starting at position 1091 of SEQ ID NO: 365
uuaguuacagcacaugauu

SEQ ID NO: 31651 - RNA, 19 nt, Artificial Sequence
  Description of Artificial Sequence: Synthetic oligonucleotide
  Antisense strand to SEQ ID NO: 31650
aaucaugugcuguaacuaa

SEQ ID NO: 31652 - RNA, 19 nt, Artificial Sequence
  Description of Artificial Sequence: Synthetic oligonucleotide
  Sense strand starting at position 980 of SEQ ID NO: 365
cucacaggucuuggaagaa

SEQ ID NO: 31653 - RNA, 19 nt, Artificial Sequence
  Description of Artificial Sequence: Synthetic oligonucleotide
  Antisense strand to SEQ ID NO: 31652
uucuuccaagaccugugag

SEQ ID NO: 31654 - RNA, 19 nt, Artificial Sequence
  Description of Artificial Sequence: Synthetic oligonucleotide
  Sense strand starting at position 913 of SEQ ID NO: 365
uuagauggguggguguaau

SEQ ID NO: 31655 - RNA, 19 nt, Artificial Sequence
  Description of Artificial Sequence: Synthetic oligonucleotide
  Antisense strand to SEQ ID NO: 31654
auuacacccacccaucuaa

SEQ ID NO: 31656 - RNA, 19 nt, Artificial Sequence
  Description of Artificial Sequence: Synthetic oligonucleotide
  Sense strand starting at position 912 of SEQ ID NO: 365
cuuagauggguggguguaa

SEQ ID NO: 31657 - RNA, 19 nt, Artificial Sequence
  Description of Artificial Sequence: Synthetic oligonucleotide
  Antisense strand to SEQ ID NO: 31656
uuacacccacccaucuaag

SEQ ID NO: 31658 - RNA, 19 nt, Artificial Sequence
  Description of Artificial Sequence: Synthetic oligonucleotide
  Sense strand starting at position 663 of SEQ ID NO: 365
gacuguuugcuagacaaau

SEQ ID NO: 31659 - RNA, 19 nt, Artificial Sequence
  Description of Artificial Sequence: Synthetic oligonucleotide
  Antisense strand to SEQ ID NO: 31658
auuugucuagcaaacaguc

SEQ ID NO: 31660 - RNA, 19 nt, Artificial Sequence
  Description of Artificial Sequence: Synthetic oligonucleotide
  Sense strand starting at position 660 of SEQ ID NO: 365
uaggacuguuugcuagaca

SEQ ID NO: 31661 - RNA, 19 nt, Artificial Sequence
  Description of Artificial Sequence: Synthetic oligonucleotide
  Antisense strand to SEQ ID NO: 31660
ugucuagcaaacaguccua

SEQ ID NO: 31662 - RNA, 19 nt, Artificial Sequence
  Description of Artificial Sequence: Synthetic oligonucleotide
  Sense strand starting at position 648 of SEQ ID NO: 365
guuccuuaagaguaggacu

SEQ ID NO: 31663 - RNA, 19 nt, Artificial Sequence
  Description of Artificial Sequence: Synthetic oligonucleotide
  Antisense strand to SEQ ID NO: 31662
aguccuacucuuaaggaac

SEQ ID NO: 31664 - RNA, 19 nt, Artificial Sequence
  Description of Artificial Sequence: Synthetic oligonucleotide
  Sense strand starting at position 642 of SEQ ID NO: 365
augggaguuccuuaagagu

SEQ ID NO: 31665 - RNA, 19 nt, Artificial Sequence
  Description of Artificial Sequence: Synthetic oligonucleotide
  Antisense strand to SEQ ID NO: 31664
acucuuaaggaacucccau

SEQ ID NO: 31666 - RNA, 19 nt, Artificial Sequence
  Description of Artificial Sequence: Synthetic oligonucleotide
  Sense strand starting at position 632 of SEQ ID NO: 365
cuuaucucccaugggaguu

SEQ ID NO: 31667 - RNA, 19 nt, Artificial Sequence
  Description of Artificial Sequence: Synthetic oligonucleotide
  Antisense strand to SEQ ID NO: 31666
aacucccaugggagauaag

SEQ ID NO: 31668 - RNA, 19 nt, Artificial Sequence
  Description of Artificial Sequence: Synthetic oligonucleotide
  Sense strand starting at position 631 of SEQ ID NO: 365
ucuuaucucccaugggagu

SEQ ID NO: 31669 - RNA, 19 nt, Artificial Sequence
  Description of Artificial Sequence: Synthetic oligonucleotide
  Antisense strand to SEQ ID NO: 31668
acucccaugggagauaaga

SEQ ID NO: 31670 - RNA, 19 nt, Artificial Sequence
  Description of Artificial Sequence: Synthetic oligonucleotide
  Sense strand starting at position 380 of SEQ ID NO: 365
uuggaaucauuccucauga

SEQ ID NO: 31671 - RNA, 19 nt, Artificial Sequence
  Description of Artificial Sequence: Synthetic oligonucleotide
  Antisense strand to SEQ ID NO: 31670
ucaugaggaaugauuccaa

SEQ ID NO: 31672 - RNA, 19 nt, Artificial Sequence
  Description of Artificial Sequence: Synthetic oligonucleotide
  Sense strand starting at position 305 of SEQ ID NO: 365
caguuugugccucuuguca

SEQ ID NO: 31673 - RNA, 19 nt, Artificial Sequence
  Description of Artificial Sequence: Synthetic oligonucleotide
  Antisense strand to SEQ ID NO: 31672
ugacaagaggcacaaacug

SEQ ID NO: 31674 - RNA, 19 nt, Artificial Sequence
  Description of Artificial Sequence: Synthetic oligonucleotide
  Sense strand starting at position 83 of SEQ ID NO: 365
auugcacuguauuuguaua

SEQ ID NO: 31675 - RNA, 19 nt, Artificial Sequence
  Description of Artificial Sequence: Synthetic oligonucleotide
  Antisense strand to SEQ ID NO: 31674
uauacaaauacagugcaau

SEQ ID NO: 31676 - RNA, 19 nt, Artificial Sequence
  Description of Artificial Sequence: Synthetic oligonucleotide
  Sense strand starting at position 78 of SEQ ID NO: 365
agcacauugcacuguauuu

SEQ ID NO: 31677 - RNA, 19 nt, Artificial Sequence
  Description of Artificial Sequence: Synthetic oligonucleotide
  Antisense strand to SEQ ID NO: 31676
aaauacagugcaaugugcu

SEQ ID NO: 31678 - RNA, 19 nt, Artificial Sequence
  Description of Artificial Sequence: Synthetic oligonucleotide
  Sense strand starting at position 3912 of SEQ ID NO: 366
uaaagagugcuaugaugaa

SEQ ID NO: 31679 - RNA, 19 nt, Artificial Sequence
  Description of Artificial Sequence: Synthetic oligonucleotide
  Antisense strand to SEQ ID NO: 31678
uucaucauagcacucuuua

SEQ ID NO: 31680 - RNA, 19 nt, Artificial Sequence
  Description of Artificial Sequence: Synthetic oligonucleotide
  Sense strand starting at position 3521 of SEQ ID NO: 366
agguaaauugcaugugaca

SEQ ID NO: 31681 - RNA, 19 nt, Artificial Sequence
  Description of Artificial Sequence: Synthetic oligonucleotide
  Antisense strand to SEQ ID NO: 31680
ugucacaugcaauuuaccu

SEQ ID NO: 31682 - RNA, 19 nt, Artificial Sequence
  Description of Artificial Sequence: Synthetic oligonucleotide
  Sense strand starting at position 3457 of SEQ ID NO: 366
gcuguagaacaucauucuu

SEQ ID NO: 31683 - RNA, 19 nt, Artificial Sequence
  Description of Artificial Sequence: Synthetic oligonucleotide
  Antisense strand to SEQ ID NO: 31682
aagaaugauguucuacagc

SEQ ID NO: 31684 - RNA, 19 nt, Artificial Sequence
  Description of Artificial Sequence: Synthetic oligonucleotide
  Sense strand starting at position 3427 of SEQ ID NO: 366
gggcucuaagaguaaaguu

SEQ ID NO: 31685 - RNA, 19 nt, Artificial Sequence
  Description of Artificial Sequence: Synthetic oligonucleotide
  Antisense strand to SEQ ID NO: 31684
aacuuuacucuuagagccc

SEQ ID NO: 31686 - RNA, 19 nt, Artificial Sequence
  Description of Artificial Sequence: Synthetic oligonucleotide
  Sense strand starting at position 3421 of SEQ ID NO: 366
gcuuaugggcucuaagagu

SEQ ID NO: 31687 - RNA, 19 nt, Artificial Sequence
  Description of Artificial Sequence: Synthetic oligonucleotide
  Antisense strand to SEQ ID NO: 31686
acucuuagagcccauaagc

SEQ ID NO: 31688 - RNA, 19 nt, Artificial Sequence
  Description of Artificial Sequence: Synthetic oligonucleotide
  Sense strand starting at position 3389 of SEQ ID NO: 366
gauuaaaguuaacuaguag

SEQ ID NO: 31689 - RNA, 19 nt, Artificial Sequence
  Description of Artificial Sequence: Synthetic oligonucleotide
  Antisense strand to SEQ ID NO: 31688
cuacuaguuaacuuuaauc

SEQ ID NO: 31690 - RNA, 19 nt, Artificial Sequence
  Description of Artificial Sequence: Synthetic oligonucleotide
  Sense strand starting at position 3356 of SEQ ID NO: 366
ugagaauuauaagauugga

SEQ ID NO: 31691 - RNA, 19 nt, Artificial Sequence
  Description of Artificial Sequence: Synthetic oligonucleotide
  Antisense strand to SEQ ID NO: 31690
uccaaucuuauaauucuca

SEQ ID NO: 31692 - RNA, 19 nt, Artificial Sequence
  Description of Artificial Sequence: Synthetic oligonucleotide
  Sense strand starting at position 3219 of SEQ ID NO: 366
cuucuaagugaguaguucu

SEQ ID NO: 31693 - RNA, 19 nt, Artificial Sequence
  Description of Artificial Sequence: Synthetic oligonucleotide
  Antisense strand to SEQ ID NO: 31692
agaacuacucacuuagaag

SEQ ID NO: 31694 - RNA, 19 nt, Artificial Sequence
  Description of Artificial Sequence: Synthetic oligonucleotide
  Sense strand starting at position 3214 of SEQ ID NO: 366
aaagccuucuaagugagua

SEQ ID NO: 31695 - RNA, 19 nt, Artificial Sequence
  Description of Artificial Sequence: Synthetic oligonucleotide
  Antisense strand to SEQ ID NO: 31694
uacucacuuagaaggcuuu

SEQ ID NO: 31696 - RNA, 19 nt, Artificial Sequence
  Description of Artificial Sequence: Synthetic oligonucleotide
  Sense strand starting at position 3128 of SEQ ID NO: 366
ugcagucguauuugccaaa

SEQ ID NO: 31697 - RNA, 19 nt, Artificial Sequence
  Description of Artificial Sequence: Synthetic oligonucleotide
  Antisense strand to SEQ ID NO: 31696
uuuggcaaauacgacugca

SEQ ID NO: 31698 - RNA, 19 nt, Artificial Sequence
  Description of Artificial Sequence: Synthetic oligonucleotide
  Sense strand starting at position 3121 of SEQ ID NO: 366
acuacugugcagucguauu

SEQ ID NO: 31699 - RNA, 19 nt, Artificial Sequence
  Description of Artificial Sequence: Synthetic oligonucleotide
  Antisense strand to SEQ ID NO: 31698
aauacgacugcacaguagu

SEQ ID NO: 31700 - RNA, 19 nt, Artificial Sequence
  Description of Artificial Sequence: Synthetic oligonucleotide
  Sense strand starting at position 3075 of SEQ ID NO: 366
ugaacuuggccagacgaau

SEQ ID NO: 31701 - RNA, 19 nt, Artificial Sequence
  Description of Artificial Sequence: Synthetic oligonucleotide
  Antisense strand to SEQ ID NO: 31700
auucgucuggccaaguuca

SEQ ID NO: 31702 - RNA, 19 nt, Artificial Sequence
  Description of Artificial Sequence: Synthetic oligonucleotide
  Sense strand starting at position 3023 of SEQ ID NO: 366
guauauugaucaccaucau

SEQ ID NO: 31703 - RNA, 19 nt, Artificial Sequence
  Description of Artificial Sequence: Synthetic oligonucleotide
  Antisense strand to SEQ ID NO: 31702
augauggugaucaauauac

SEQ ID NO: 31704 - RNA, 19 nt, Artificial Sequence
  Description of Artificial Sequence: Synthetic oligonucleotide
  Sense strand starting at position 2833 of SEQ ID NO: 366
guuucugaccaucagauau

SEQ ID NO: 31705 - RNA, 19 nt, Artificial Sequence
  Description of Artificial Sequence: Synthetic oligonucleotide
  Antisense strand to SEQ ID NO: 31704
auaucugauggucagaaac

SEQ ID NO: 31706 - RNA, 19 nt, Artificial Sequence
  Description of Artificial Sequence: Synthetic oligonucleotide
  Sense strand starting at position 2701 of SEQ ID NO: 366
ucauuucacugggaagggu

SEQ ID NO: 31707 - RNA, 19 nt, Artificial Sequence
  Description of Artificial Sequence: Synthetic oligonucleotide
  Antisense strand to SEQ ID NO: 31706
acccuucccagugaaauga

SEQ ID NO: 31708 - RNA, 19 nt, Artificial Sequence
  Description of Artificial Sequence: Synthetic oligonucleotide
  Sense strand starting at position 2558 of SEQ ID NO: 366
gacugaacaucugcagaga

SEQ ID NO: 31709 - RNA, 19 nt, Artificial Sequence
  Description of Artificial Sequence: Synthetic oligonucleotide
  Antisense strand to SEQ ID NO: 31708
ucucugcagauguucaguc

SEQ ID NO: 31710 - RNA, 19 nt, Artificial Sequence
  Description of Artificial Sequence: Synthetic oligonucleotide
  Sense strand starting at position 2440 of SEQ ID NO: 366
gcacauaagagguguucua

SEQ ID NO: 31711 - RNA, 19 nt, Artificial Sequence
  Description of Artificial Sequence: Synthetic oligonucleotide
  Antisense strand to SEQ ID NO: 31710
uagaacaccucuuaugugc

SEQ ID NO: 31712 - RNA, 19 nt, Artificial Sequence
  Description of Artificial Sequence: Synthetic oligonucleotide
  Sense strand starting at position 2431 of SEQ ID NO: 366
uugggucuggcacauaaga

SEQ ID NO: 31713 - RNA, 19 nt, Artificial Sequence
  Description of Artificial Sequence: Synthetic oligonucleotide
  Antisense strand to SEQ ID NO: 31712
ucuuaugugccagacccaa

SEQ ID NO: 31714 - RNA, 19 nt, Artificial Sequence
  Description of Artificial Sequence: Synthetic oligonucleotide
  Sense strand starting at position 2396 of SEQ ID NO: 366
gaucuugcucaugacugua

SEQ ID NO: 31715 - RNA, 19 nt, Artificial Sequence
  Description of Artificial Sequence: Synthetic oligonucleotide
  Antisense strand to SEQ ID NO: 31714
uacagucaugagcaagauc

SEQ ID NO: 31716 - RNA, 19 nt, Artificial Sequence
  Description of Artificial Sequence: Synthetic oligonucleotide
  Sense strand starting at position 2393 of SEQ ID NO: 366
ggugaucuugcucaugacu

SEQ ID NO: 31717 - RNA, 19 nt, Artificial Sequence
  Description of Artificial Sequence: Synthetic oligonucleotide
  Antisense strand to SEQ ID NO: 31716
agucaugagcaagaucacc

SEQ ID NO: 31718 - RNA, 19 nt, Artificial Sequence
  Description of Artificial Sequence: Synthetic oligonucleotide
  Sense strand starting at position 1788 of SEQ ID NO: 366
gaaaccagguguccucuua

SEQ ID NO: 31719 - RNA, 19 nt, Artificial Sequence
  Description of Artificial Sequence: Synthetic oligonucleotide
  Antisense strand to SEQ ID NO: 31718
uaagaggacaccugguuuc

SEQ ID NO: 31720 - RNA, 19 nt, Artificial Sequence
  Description of Artificial Sequence: Synthetic oligonucleotide
  Sense strand starting at position 1572 of SEQ ID NO: 366
uucugauggcucuaauuac

SEQ ID NO: 31721 - RNA, 19 nt, Artificial Sequence
  Description of Artificial Sequence: Synthetic oligonucleotide
  Antisense strand to SEQ ID NO: 31720
guaauuagagccaucagaa

SEQ ID NO: 31722 - RNA, 19 nt, Artificial Sequence
  Description of Artificial Sequence: Synthetic oligonucleotide
  Sense strand starting at position 1569 of SEQ ID NO: 366
ccauucugauggcucuaau

SEQ ID NO: 31723 - RNA, 19 nt, Artificial Sequence
  Description of Artificial Sequence: Synthetic oligonucleotide
  Antisense strand to SEQ ID NO: 31722
auuagagccaucagaaugg

SEQ ID NO: 31724 - RNA, 19 nt, Artificial Sequence
  Description of Artificial Sequence: Synthetic oligonucleotide
  Sense strand starting at position 1528 of SEQ ID NO: 366
agaggcuucuggcugaacu

SEQ ID NO: 31725 - RNA, 19 nt, Artificial Sequence
  Description of Artificial Sequence: Synthetic oligonucleotide
  Antisense strand to SEQ ID NO: 31724
aguucagccagaagccucu

SEQ ID NO: 31726 - RNA, 19 nt, Artificial Sequence
  Description of Artificial Sequence: Synthetic oligonucleotide
  Sense strand starting at position 1272 of SEQ ID NO: 366
cuugucaguccuuaauauu

SEQ ID NO: 31727 - RNA, 19 nt, Artificial Sequence
  Description of Artificial Sequence: Synthetic oligonucleotide
  Antisense strand to SEQ ID NO: 31726
aauauuaaggacugacaag

SEQ ID NO: 31728 - RNA, 19 nt, Artificial Sequence
  Description of Artificial Sequence: Synthetic oligonucleotide
  Sense strand starting at position 1271 of SEQ ID NO: 366
acuugucaguccuuaauau

SEQ ID NO: 31729 - RNA, 19 nt, Artificial Sequence
  Description of Artificial Sequence: Synthetic oligonucleotide
  Antisense strand to SEQ ID NO: 31728
auauuaaggacugacaagu

SEQ ID NO: 31730 - RNA, 19 nt, Artificial Sequence
  Description of Artificial Sequence: Synthetic oligonucleotide
  Sense strand starting at position 1255 of SEQ ID NO: 366
aggucuuuacugcagaacu

SEQ ID NO: 31731 - RNA, 19 nt, Artificial Sequence
  Description of Artificial Sequence: Synthetic oligonucleotide
  Antisense strand to SEQ ID NO: 31730
aguucugcaguaaagaccu

SEQ ID NO: 31732 - RNA, 19 nt, Artificial Sequence
  Description of Artificial Sequence: Synthetic oligonucleotide
  Sense strand starting at position 1010 of SEQ ID NO: 366
gucaaaggaguaugugaca

SEQ ID NO: 31733 - RNA, 19 nt, Artificial Sequence
  Description of Artificial Sequence: Synthetic oligonucleotide
  Antisense strand to SEQ ID NO: 31732
ugucacauacuccuuugac

SEQ ID NO: 31734 - RNA, 19 nt, Artificial Sequence
  Description of Artificial Sequence: Synthetic oligonucleotide
  Sense strand starting at position 998 of SEQ ID NO: 366
uucuuagauugggucaaag

SEQ ID NO: 31735 - RNA, 19 nt, Artificial Sequence
  Description of Artificial Sequence: Synthetic oligonucleotide
  Antisense strand to SEQ ID NO: 31734
cuuugacccaaucuaagaa

SEQ ID NO: 31736 - RNA, 19 nt, Artificial Sequence
  Description of Artificial Sequence: Synthetic oligonucleotide
  Sense strand starting at position 883 of SEQ ID NO: 366
augucagagguaggauuaa

SEQ ID NO: 31737 - RNA, 19 nt, Artificial Sequence
  Description of Artificial Sequence: Synthetic oligonucleotide
  Antisense strand to SEQ ID NO: 31736
uuaauccuaccucugacau

SEQ ID NO: 31738 - RNA, 19 nt, Artificial Sequence
  Description of Artificial Sequence: Synthetic oligonucleotide
  Sense strand starting at position 879 of SEQ ID NO: 366
agacaugucagagguagga

SEQ ID NO: 31739 - RNA, 19 nt, Artificial Sequence
  Description of Artificial Sequence: Synthetic oligonucleotide
  Antisense strand to SEQ ID NO: 31738
uccuaccucugacaugucu

SEQ ID NO: 31740 - RNA, 19 nt, Artificial Sequence
  Description of Artificial Sequence: Synthetic oligonucleotide
  Sense strand starting at position 728 of SEQ ID NO: 366
ugagaucuugagcaagucu

SEQ ID NO: 31741 - RNA, 19 nt, Artificial Sequence
  Description of Artificial Sequence: Synthetic oligonucleotide
  Antisense strand to SEQ ID NO: 31740
agacuugcucaagaucuca

SEQ ID NO: 31742 - RNA, 19 nt, Artificial Sequence
  Description of Artificial Sequence: Synthetic oligonucleotide
  Sense strand starting at position 727 of SEQ ID NO: 366
gugagaucuugagcaaguc

SEQ ID NO: 31743 - RNA, 19 nt, Artificial Sequence
  Description of Artificial Sequence: Synthetic oligonucleotide
  Antisense strand to SEQ ID NO: 31742
gacuugcucaagaucucac

SEQ ID NO: 31744 - RNA, 19 nt, Artificial Sequence
  Description of Artificial Sequence: Synthetic oligonucleotide
  Sense strand starting at position 650 of SEQ ID NO: 366
ugauuugguuaguacagga

SEQ ID NO: 31745 - RNA, 19 nt, Artificial Sequence
  Description of Artificial Sequence: Synthetic oligonucleotide
  Antisense strand to SEQ ID NO: 31744
uccuguacuaaccaaauca

SEQ ID NO: 31746 - RNA, 19 nt, Artificial Sequence
  Description of Artificial Sequence: Synthetic oligonucleotide
  Sense strand starting at position 575 of SEQ ID NO: 366
agacuucucugucucgaga

SEQ ID NO: 31747 - RNA, 19 nt, Artificial Sequence
  Description of Artificial Sequence: Synthetic oligonucleotide
  Antisense strand to SEQ ID NO: 31746
ucucgagacagagaagucu

SEQ ID NO: 31748 - RNA, 19 nt, Artificial Sequence
  Description of Artificial Sequence: Synthetic oligonucleotide
  Sense strand starting at position 481 of SEQ ID NO: 366
uuuggaaugucuuucugaa

SEQ ID NO: 31749 - RNA, 19 nt, Artificial Sequence
  Description of Artificial Sequence: Synthetic oligonucleotide
  Antisense strand to SEQ ID NO: 31748
uucagaaagacauuccaaa

SEQ ID NO: 31750 - RNA, 19 nt, Artificial Sequence
  Description of Artificial Sequence: Synthetic oligonucleotide
  Sense strand starting at position 476 of SEQ ID NO: 366
gagacuuuggaaugucuuu

SEQ ID NO: 31751 - RNA, 19 nt, Artificial Sequence
  Description of Artificial Sequence: Synthetic oligonucleotide
  Antisense strand to SEQ ID NO: 31750
aaagacauuccaaagucuc

SEQ ID NO: 31752 - RNA, 19 nt, Artificial Sequence
  Description of Artificial Sequence: Synthetic oligonucleotide
  Sense strand starting at position 322 of SEQ ID NO: 366
aaaggacagugcuucucaa

SEQ ID NO: 31753 - RNA, 19 nt, Artificial Sequence
  Description of Artificial Sequence: Synthetic oligonucleotide
  Antisense strand to SEQ ID NO: 31752
uugagaagcacuguccuuu

SEQ ID NO: 31754 - RNA, 19 nt, Artificial Sequence
  Description of Artificial Sequence: Synthetic oligonucleotide
  Sense strand starting at position 292 of SEQ ID NO: 366
aggguaauuuggcaaugau

SEQ ID NO: 31755 - RNA, 19 nt, Artificial Sequence
  Description of Artificial Sequence: Synthetic oligonucleotide
  Antisense strand to SEQ ID NO: 31754
aucauugccaaauuacccu

SEQ ID NO: 31756 - RNA, 19 nt, Artificial Sequence
  Description of Artificial Sequence: Synthetic oligonucleotide
  Sense strand starting at position 274 of SEQ ID NO: 366
ugagcagugguggauucua

SEQ ID NO: 31757 - RNA, 19 nt, Artificial Sequence
  Description of Artificial Sequence: Synthetic oligonucleotide
  Antisense strand to SEQ ID NO: 31756
uagaauccaccacugcuca

SEQ ID NO: 31758 - RNA, 19 nt, Artificial Sequence
  Description of Artificial Sequence: Synthetic oligonucleotide
  Sense strand starting at position 3957 of SEQ ID NO: 367
guguuuagaaguggcauga

SEQ ID NO: 31759 - RNA, 19 nt, Artificial Sequence
  Description of Artificial Sequence: Synthetic oligonucleotide
  Antisense strand to SEQ ID NO: 31758
ucaugccacuucuaaacac

SEQ ID NO: 31760 - RNA, 19 nt, Artificial Sequence
  Description of Artificial Sequence: Synthetic oligonucleotide
  Sense strand starting at position 3950 of SEQ ID NO: 367
ccuggcaguguuuagaagu

SEQ ID NO: 31761 - RNA, 19 nt, Artificial Sequence
  Description of Artificial Sequence: Synthetic oligonucleotide
  Antisense strand to SEQ ID NO: 31760
acuucuaaacacugccagg

SEQ ID NO: 31762 - RNA, 19 nt, Artificial Sequence
  Description of Artificial Sequence: Synthetic oligonucleotide
  Sense strand starting at position 3872 of SEQ ID NO: 367
gugucauccucauauuuga

SEQ ID NO: 31763 - RNA, 19 nt, Artificial Sequence
  Description of Artificial Sequence: Synthetic oligonucleotide
  Antisense strand to SEQ ID NO: 31762
ucaaauaugaggaugacac

SEQ ID NO: 31764 - RNA, 19 nt, Artificial Sequence
  Description of Artificial Sequence: Synthetic oligonucleotide
  Sense strand starting at position 3825 of SEQ ID NO: 367
cauuguggaguuuagaagu

SEQ ID NO: 31765 - RNA, 19 nt, Artificial Sequence
  Description of Artificial Sequence: Synthetic oligonucleotide
  Antisense strand to SEQ ID NO: 31764
acuucuaaacuccacaaug

SEQ ID NO: 31766 - RNA, 19 nt, Artificial Sequence
  Description of Artificial Sequence: Synthetic oligonucleotide
  Sense strand starting at position 3820 of SEQ ID NO: 367
ucgaacauuguggaguuua

SEQ ID NO: 31767 - RNA, 19 nt, Artificial Sequence
  Description of Artificial Sequence: Synthetic oligonucleotide
  Antisense strand to SEQ ID NO: 31766
uaaacuccacaauguucga

SEQ ID NO: 31768 - RNA, 19 nt, Artificial Sequence
  Description of Artificial Sequence: Synthetic oligonucleotide
  Sense strand starting at position 3755 of SEQ ID NO: 367
gagccaauccuacagugau

SEQ ID NO: 31769 - RNA, 19 nt, Artificial Sequence
  Description of Artificial Sequence: Synthetic oligonucleotide
  Antisense strand to SEQ ID NO: 31768
aucacuguaggauuggcuc

SEQ ID NO: 31770 - RNA, 19 nt, Artificial Sequence
  Description of Artificial Sequence: Synthetic oligonucleotide
  Sense strand starting at position 3612 of SEQ ID NO: 367
auauucuuuccugaagguu

SEQ ID NO: 31771 - RNA, 19 nt, Artificial Sequence
  Description of Artificial Sequence: Synthetic oligonucleotide
  Antisense strand to SEQ ID NO: 31770
aaccuucaggaaagaauau

SEQ ID NO: 31772 - RNA, 19 nt, Artificial Sequence
  Description of Artificial Sequence: Synthetic oligonucleotide
  Sense strand starting at position 3588 of SEQ ID NO: 367
ggguauuuguuauauccua

SEQ ID NO: 31773 - RNA, 19 nt, Artificial Sequence
  Description of Artificial Sequence: Synthetic oligonucleotide
  Antisense strand to SEQ ID NO: 31772
uaggauauaacaaauaccc

SEQ ID NO: 31774 - RNA, 19 nt, Artificial Sequence
  Description of Artificial Sequence: Synthetic oligonucleotide
  Sense strand starting at position 3555 of SEQ ID NO: 367
ggaauuauacuuuggucua

SEQ ID NO: 31775 - RNA, 19 nt, Artificial Sequence
  Description of Artificial Sequence: Synthetic oligonucleotide
  Antisense strand to SEQ ID NO: 31774
uagaccaaaguauaauucc

SEQ ID NO: 31776 - RNA, 19 nt, Artificial Sequence
  Description of Artificial Sequence: Synthetic oligonucleotide
  Sense strand starting at position 3527 of SEQ ID NO: 367
uuaccucguuaagugaaau

SEQ ID NO: 31777 - RNA, 19 nt, Artificial Sequence
  Description of Artificial Sequence: Synthetic oligonucleotide
  Antisense strand to SEQ ID NO: 31776
auuucacuuaacgagguaa

SEQ ID NO: 31778 - RNA, 19 nt, Artificial Sequence
  Description of Artificial Sequence: Synthetic oligonucleotide
  Sense strand starting at position 3524 of SEQ ID NO: 367
gccuuaccucguuaaguga

SEQ ID NO: 31779 - RNA, 19 nt, Artificial Sequence
  Description of Artificial Sequence: Synthetic oligonucleotide
  Antisense strand to SEQ ID NO: 31778
ucacuuaacgagguaaggc

SEQ ID NO: 31780 - RNA, 19 nt, Artificial Sequence
  Description of Artificial Sequence: Synthetic oligonucleotide
  Sense strand starting at position 3449 of SEQ ID NO: 367
agaacaugcuucccuguaa

SEQ ID NO: 31781 - RNA, 19 nt, Artificial Sequence
  Description of Artificial Sequence: Synthetic oligonucleotide
  Antisense strand to SEQ ID NO: 31780
uuacagggaagcauguucu

SEQ ID NO: 31782 - RNA, 19 nt, Artificial Sequence
  Description of Artificial Sequence: Synthetic oligonucleotide
  Sense strand starting at position 3339 of SEQ ID NO: 367
uaugguacuggucagagua

SEQ ID NO: 31783 - RNA, 19 nt, Artificial Sequence
  Description of Artificial Sequence: Synthetic oligonucleotide
  Antisense strand to SEQ ID NO: 31782
uacucugaccaguaccaua

SEQ ID NO: 31784 - RNA, 19 nt, Artificial Sequence
  Description of Artificial Sequence: Synthetic oligonucleotide
  Sense strand starting at position 3336 of SEQ ID NO: 367
cuauaugguacuggucaga

SEQ ID NO: 31785 - RNA, 19 nt, Artificial Sequence
  Description of Artificial Sequence: Synthetic oligonucleotide
  Antisense strand to SEQ ID NO: 31784
ucugaccaguaccauauag

SEQ ID NO: 31786 - RNA, 19 nt, Artificial Sequence
  Description of Artificial Sequence: Synthetic oligonucleotide
  Sense strand starting at position 3281 of SEQ ID NO: 367
guaucaggauuacuuaaag

SEQ ID NO: 31787 - RNA, 19 nt, Artificial Sequence
  Description of Artificial Sequence: Synthetic oligonucleotide
  Antisense strand to SEQ ID NO: 31786
cuuuaaguaauccugauac

SEQ ID NO: 31788 - RNA, 19 nt, Artificial Sequence
  Description of Artificial Sequence: Synthetic oligonucleotide
  Sense strand starting at position 3273 of SEQ ID NO: 367
gggacuggguaucaggauu

SEQ ID NO: 31789 - RNA, 19 nt, Artificial Sequence
  Description of Artificial Sequence: Synthetic oligonucleotide
  Antisense strand to SEQ ID NO: 31788
aauccugauacccaguccc

SEQ ID NO: 31790 - RNA, 19 nt, Artificial Sequence
  Description of Artificial Sequence: Synthetic oligonucleotide
  Sense strand starting at position 3188 of SEQ ID NO: 367
ucuaucauugauggguaua

SEQ ID NO: 31791 - RNA, 19 nt, Artificial Sequence
  Description of Artificial Sequence: Synthetic oligonucleotide
  Antisense strand to SEQ ID NO: 31790
uauacccaucaaugauaga

SEQ ID NO: 31792 - RNA, 19 nt, Artificial Sequence
  Description of Artificial Sequence: Synthetic oligonucleotide
  Sense strand starting at position 2708 of SEQ ID NO: 367
uagccugagguuugcaaga

SEQ ID NO: 31793 - RNA, 19 nt, Artificial Sequence
  Description of Artificial Sequence: Synthetic oligonucleotide
  Antisense strand to SEQ ID NO: 31792
ucuugcaaaccucaggcua

SEQ ID NO: 31794 - RNA, 19 nt, Artificial Sequence
  Description of Artificial Sequence: Synthetic oligonucleotide
  Sense strand starting at position 2702 of SEQ ID NO: 367
aauaaauagccugagguuu

SEQ ID NO: 31795 - RNA, 19 nt, Artificial Sequence
  Description of Artificial Sequence: Synthetic oligonucleotide
  Antisense strand to SEQ ID NO: 31794
aaaccucaggcuauuuauu

SEQ ID NO: 31796 - RNA, 19 nt, Artificial Sequence
  Description of Artificial Sequence: Synthetic oligonucleotide
  Sense strand starting at position 2701 of SEQ ID NO: 367
gaauaaauagccugagguu

SEQ ID NO: 31797 - RNA, 19 nt, Artificial Sequence
  Description of Artificial Sequence: Synthetic oligonucleotide
  Antisense strand to SEQ ID NO: 31796
aaccucaggcuauuuauuc

SEQ ID NO: 31798 - RNA, 19 nt, Artificial Sequence
  Description of Artificial Sequence: Synthetic oligonucleotide
  Sense strand starting at position 2675 of SEQ ID NO: 367
gaggaaggcuuguuacaaa

SEQ ID NO: 31799 - RNA, 19 nt, Artificial Sequence
  Description of Artificial Sequence: Synthetic oligonucleotide
  Antisense strand to SEQ ID NO: 31798
uuuguaacaagccuuccuc

SEQ ID NO: 31800 - RNA, 19 nt, Artificial Sequence
  Description of Artificial Sequence: Synthetic oligonucleotide
  Sense strand starting at position 2469 of SEQ ID NO: 367
ucuccuuauuuacgaaaga

SEQ ID NO: 31801 - RNA, 19 nt, Artificial Sequence
  Description of Artificial Sequence: Synthetic oligonucleotide
  Antisense strand to SEQ ID NO: 31800
ucuuucguaaauaaggaga

SEQ ID NO: 31802 - RNA, 19 nt, Artificial Sequence
  Description of Artificial Sequence: Synthetic oligonucleotide
  Sense strand starting at position 2413 of SEQ ID NO: 367
gggagugaacauuguucau

SEQ ID NO: 31803 - RNA, 19 nt, Artificial Sequence
  Description of Artificial Sequence: Synthetic oligonucleotide
  Antisense strand to SEQ ID NO: 31802
augaacaauguucacuccc

SEQ ID NO: 31804 - RNA, 19 nt, Artificial Sequence
  Description of Artificial Sequence: Synthetic oligonucleotide
  Sense strand starting at position 2345 of SEQ ID NO: 367
cgucaucuccuagaacacu

SEQ ID NO: 31805 - RNA, 19 nt, Artificial Sequence
  Description of Artificial Sequence: Synthetic oligonucleotide
  Antisense strand to SEQ ID NO: 31804
aguguucuaggagaugacg

SEQ ID NO: 31806 - RNA, 19 nt, Artificial Sequence
  Description of Artificial Sequence: Synthetic oligonucleotide
  Sense strand starting at position 2323 of SEQ ID NO: 367
ggaaauaacuaaggaggaa

SEQ ID NO: 31807 - RNA, 19 nt, Artificial Sequence
  Description of Artificial Sequence: Synthetic oligonucleotide
  Antisense strand to SEQ ID NO: 31806
uuccuccuuaguuauuucc

SEQ ID NO: 31808 - RNA, 19 nt, Artificial Sequence
  Description of Artificial Sequence: Synthetic oligonucleotide
  Sense strand starting at position 2075 of SEQ ID NO: 367
auaucuccucgcuacguaa

SEQ ID NO: 31809 - RNA, 19 nt, Artificial Sequence
  Description of Artificial Sequence: Synthetic oligonucleotide
  Antisense strand to SEQ ID NO: 31808
uuacguagcgaggagauau

SEQ ID NO: 31810 - RNA, 19 nt, Artificial Sequence
  Description of Artificial Sequence: Synthetic oligonucleotide
  Sense strand starting at position 2074 of SEQ ID NO: 367
aauaucuccucgcuacgua

SEQ ID NO: 31811 - RNA, 19 nt, Artificial Sequence
  Description of Artificial Sequence: Synthetic oligonucleotide
  Antisense strand to SEQ ID NO: 31810
uacguagcgaggagauauu

SEQ ID NO: 31812 - RNA, 19 nt, Artificial Sequence
  Description of Artificial Sequence: Synthetic oligonucleotide
  Sense strand starting at position 897 of SEQ ID NO: 367
agaacuuacgauugcagaa

SEQ ID NO: 31813 - RNA, 19 nt, Artificial Sequence
  Description of Artificial Sequence: Synthetic oligonucleotide
  Antisense strand to SEQ ID NO: 31812
uucugcaaucguaaguucu

SEQ ID NO: 31814 - RNA, 19 nt, Artificial Sequence
  Description of Artificial Sequence: Synthetic oligonucleotide
  Sense strand starting at position 798 of SEQ ID NO: 367
uuaguaacgcuagagaacu

SEQ ID NO: 31815 - RNA, 19 nt, Artificial Sequence
  Description of Artificial Sequence: Synthetic oligonucleotide
  Antisense strand to SEQ ID NO: 31814
aguucucuagcguuacuaa

SEQ ID NO: 31816 - RNA, 19 nt, Artificial Sequence
  Description of Artificial Sequence: Synthetic oligonucleotide
  Sense strand starting at position 730 of SEQ ID NO: 367
ccuacucagggugguaaau

SEQ ID NO: 31817 - RNA, 19 nt, Artificial Sequence
  Description of Artificial Sequence: Synthetic oligonucleotide
  Antisense strand to SEQ ID NO: 31816
auuuaccacccugaguagg

SEQ ID NO: 31818 - RNA, 19 nt, Artificial Sequence
  Description of Artificial Sequence: Synthetic oligonucleotide
  Sense strand starting at position 729 of SEQ ID NO: 367
accuacucagggugguaaa

SEQ ID NO: 31819 - RNA, 19 nt, Artificial Sequence
  Description of Artificial Sequence: Synthetic oligonucleotide
  Antisense strand to SEQ ID NO: 31818
uuuaccacccugaguaggu

SEQ ID NO: 31820 - RNA, 19 nt, Artificial Sequence
  Description of Artificial Sequence: Synthetic oligonucleotide
  Sense strand starting at position 727 of SEQ ID NO: 367
ggaccuacucaggguggua

SEQ ID NO: 31821 - RNA, 19 nt, Artificial Sequence
  Description of Artificial Sequence: Synthetic oligonucleotide
  Antisense strand to SEQ ID NO: 31820
uaccacccugaguaggucc

SEQ ID NO: 31822 - RNA, 19 nt, Artificial Sequence
  Description of Artificial Sequence: Synthetic oligonucleotide
  Sense strand starting at position 680 of SEQ ID NO: 367
guucaagagguacaguguu

SEQ ID NO: 31823 - RNA, 19 nt, Artificial Sequence
  Description of Artificial Sequence: Synthetic oligonucleotide
  Antisense strand to SEQ ID NO: 31822
aacacuguaccucuugaac

SEQ ID NO: 31824 - RNA, 19 nt, Artificial Sequence
  Description of Artificial Sequence: Synthetic oligonucleotide
  Sense strand starting at position 585 of SEQ ID NO: 367
uaucauuuacgcuaugugu

SEQ ID NO: 31825 - RNA, 19 nt, Artificial Sequence
  Description of Artificial Sequence: Synthetic oligonucleotide
  Antisense strand to SEQ ID NO: 31824
acacauagcguaaaugaua

SEQ ID NO: 31826 - RNA, 19 nt, Artificial Sequence
  Description of Artificial Sequence: Synthetic oligonucleotide
  Sense strand starting at position 482 of SEQ ID NO: 367
guacaaguauaacagauuu

SEQ ID NO: 31827 - RNA, 19 nt, Artificial Sequence
  Description of Artificial Sequence: Synthetic oligonucleotide
  Antisense strand to SEQ ID NO: 31826
aaaucuguuauacuuguac

SEQ ID NO: 31828 - RNA, 19 nt, Artificial Sequence
  Description of Artificial Sequence: Synthetic oligonucleotide
  Sense strand starting at position 444 of SEQ ID NO: 367
augcaugugccagaauauc

SEQ ID NO: 31829 - RNA, 19 nt, Artificial Sequence
  Description of Artificial Sequence: Synthetic oligonucleotide
  Antisense strand to SEQ ID NO: 31828
gauauucuggcacaugcau

SEQ ID NO: 31830 - RNA, 19 nt, Artificial Sequence
  Description of Artificial Sequence: Synthetic oligonucleotide
  Sense strand starting at position 439 of SEQ ID NO: 367
acuguaugcaugugccaga

SEQ ID NO: 31831 - RNA, 19 nt, Artificial Sequence
  Description of Artificial Sequence: Synthetic oligonucleotide
  Antisense strand to SEQ ID NO: 31830
ucuggcacaugcauacagu

SEQ ID NO: 31832 - RNA, 19 nt, Artificial Sequence
  Description of Artificial Sequence: Synthetic oligonucleotide
  Sense strand starting at position 401 of SEQ ID NO: 367
gguacuggcuauccaauua

SEQ ID NO: 31833 - RNA, 19 nt, Artificial Sequence
  Description of Artificial Sequence: Synthetic oligonucleotide
  Antisense strand to SEQ ID NO: 31832
uaauuggauagccaguacc

SEQ ID NO: 31834 - RNA, 19 nt, Artificial Sequence
  Description of Artificial Sequence: Synthetic oligonucleotide
  Sense strand starting at position 398 of SEQ ID NO: 367
ugagguacuggcuauccaa

SEQ ID NO: 31835 - RNA, 19 nt, Artificial Sequence
  Description of Artificial Sequence: Synthetic oligonucleotide
  Antisense strand to SEQ ID NO: 31834
uuggauagccaguaccuca

SEQ ID NO: 31836 - RNA, 19 nt, Artificial Sequence
  Description of Artificial Sequence: Synthetic oligonucleotide
  Sense strand starting at position 386 of SEQ ID NO: 367
acaccaaguguuugaggua

SEQ ID NO: 31837 - RNA, 19 nt, Artificial Sequence
  Description of Artificial Sequence: Synthetic oligonucleotide
  Antisense strand to SEQ ID NO: 31836
uaccucaaacacuuggugu

SEQ ID NO: 31838 - RNA, 19 nt, Artificial Sequence
  Description of Artificial Sequence: Synthetic oligonucleotide
  Sense strand starting at position 70 of SEQ ID NO: 368
ccagcuugccuggaggaga

SEQ ID NO: 31839 - RNA, 19 nt, Artificial Sequence
  Description of Artificial Sequence: Synthetic oligonucleotide
  Antisense strand to SEQ ID NO: 31838
ucuccuccaggcaagcugg

SEQ ID NO: 31840 - RNA, 19 nt, Artificial Sequence
  Description of Artificial Sequence: Synthetic oligonucleotide
  Sense strand starting at position 103 of SEQ ID NO: 368
ucaauuaaucccuguuugu

SEQ ID NO: 31841 - RNA, 19 nt, Artificial Sequence
  Description of Artificial Sequence: Synthetic oligonucleotide
  Antisense strand to SEQ ID NO: 31840
acaaacagggauuaauuga

SEQ ID NO: 31842 - RNA, 19 nt, Artificial Sequence
  Description of Artificial Sequence: Synthetic oligonucleotide
  Sense strand starting at position 165 of SEQ ID NO: 368
cuauuugggcccugugaug

SEQ ID NO: 31843 - RNA, 19 nt, Artificial Sequence
  Description of Artificial Sequence: Synthetic oligonucleotide
  Antisense strand to SEQ ID NO: 31842
caucacagggcccaaauag

SEQ ID NO: 31844 - RNA, 19 nt, Artificial Sequence
  Description of Artificial Sequence: Synthetic oligonucleotide
  Sense strand starting at position 300 of SEQ ID NO: 368
aggagaagcucucucagcu

SEQ ID NO: 31845 - RNA, 19 nt, Artificial Sequence
  Description of Artificial Sequence: Synthetic oligonucleotide
  Antisense strand to SEQ ID NO: 31844
agcugagagagcuucuccu

SEQ ID NO: 31846 - RNA, 19 nt, Artificial Sequence
  Description of Artificial Sequence: Synthetic oligonucleotide
  Sense strand starting at position 307 of SEQ ID NO: 368
gcucucucagcucagagaa

SEQ ID NO: 31847 - RNA, 19 nt, Artificial Sequence
  Description of Artificial Sequence: Synthetic oligonucleotide
  Antisense strand to SEQ ID NO: 31846
uucucugagcugagagagc

SEQ ID NO: 31848 - RNA, 19 nt, Artificial Sequence
  Description of Artificial Sequence: Synthetic oligonucleotide
  Sense strand starting at position 397 of SEQ ID NO: 368
gaaggcugggcucaaauau

SEQ ID NO: 31849 - RNA, 19 nt, Artificial Sequence
  Description of Artificial Sequence: Synthetic oligonucleotide
  Antisense strand to SEQ ID NO: 31848
auauuugagcccagccuuc

SEQ ID NO: 31850 - RNA, 19 nt, Artificial Sequence
  Description of Artificial Sequence: Synthetic oligonucleotide
  Sense strand starting at position 1137 of SEQ ID NO: 368
gacgacuuggcugacaaca

SEQ ID NO: 31851 - RNA, 19 nt, Artificial Sequence
  Description of Artificial Sequence: Synthetic oligonucleotide
  Antisense strand to SEQ ID NO: 31850
uguugucagccaagucguc

SEQ ID NO: 31852 - RNA, 19 nt, Artificial Sequence
  Description of Artificial Sequence: Synthetic oligonucleotide
  Sense strand starting at position 1618 of SEQ ID NO: 368
ggacacuggcgaugaaaua

SEQ ID NO: 31853 - RNA, 19 nt, Artificial Sequence
  Description of Artificial Sequence: Synthetic oligonucleotide
  Antisense strand to SEQ ID NO: 31852
uauuucaucgccagugucc

SEQ ID NO: 31854 - RNA, 19 nt, Artificial Sequence
  Description of Artificial Sequence: Synthetic oligonucleotide
  Sense strand starting at position 2179 of SEQ ID NO: 368
guaagaaauucuuuccuug

SEQ ID NO: 31855 - RNA, 19 nt, Artificial Sequence
  Description of Artificial Sequence: Synthetic oligonucleotide
  Antisense strand to SEQ ID NO: 31854
caaggaaagaauuucuuac

SEQ ID NO: 31856 - RNA, 19 nt, Artificial Sequence
  Description of Artificial Sequence: Synthetic oligonucleotide
  Sense strand starting at position 2511 of SEQ ID NO: 368
acuguuaggcguaggguua

SEQ ID NO: 31857 - RNA, 19 nt, Artificial Sequence
  Description of Artificial Sequence: Synthetic oligonucleotide
  Antisense strand to SEQ ID NO: 31856
uaacccuacgccuaacagu

SEQ ID NO: 31858 - RNA, 19 nt, Artificial Sequence
  Description of Artificial Sequence: Synthetic oligonucleotide
  Sense strand starting at position 2594 of SEQ ID NO: 368
guuucucccuucucagauu

SEQ ID NO: 31859 - RNA, 19 nt, Artificial Sequence
  Description of Artificial Sequence: Synthetic oligonucleotide
  Antisense strand to SEQ ID NO: 31858
aaucugagaagggagaaac

SEQ ID NO: 31860 - RNA, 19 nt, Artificial Sequence
  Description of Artificial Sequence: Synthetic oligonucleotide
  Sense strand starting at position 2855 of SEQ ID NO: 368
cccuuucuugcagacagaa

SEQ ID NO: 31861 - RNA, 19 nt, Artificial Sequence
  Description of Artificial Sequence: Synthetic oligonucleotide
  Antisense strand to SEQ ID NO: 31860
uucugucugcaagaaaggg

SEQ ID NO: 31862 - RNA, 19 nt, Artificial Sequence
  Description of Artificial Sequence: Synthetic oligonucleotide
  Sense strand starting at position 2917 of SEQ ID NO: 368
cuuaguuauuaugugagca

SEQ ID NO: 31863 - RNA, 19 nt, Artificial Sequence
  Description of Artificial Sequence: Synthetic oligonucleotide
  Antisense strand to SEQ ID NO: 31862
ugcucacauaauaacuaag

SEQ ID NO: 31864 - RNA, 19 nt, Artificial Sequence
  Description of Artificial Sequence: Synthetic oligonucleotide
  Sense strand starting at position 2918 of SEQ ID NO: 368
uuaguuauuaugugagcag

SEQ ID NO: 31865 - RNA, 19 nt, Artificial Sequence
  Description of Artificial Sequence: Synthetic oligonucleotide
  Antisense strand to SEQ ID NO: 31864
cugcucacauaauaacuaa

SEQ ID NO: 31866 - RNA, 19 nt, Artificial Sequence
  Description of Artificial Sequence: Synthetic oligonucleotide
  Sense strand starting at position 2921 of SEQ ID NO: 368
guuauuaugugagcaggaa

SEQ ID NO: 31867 - RNA, 19 nt, Artificial Sequence
  Description of Artificial Sequence: Synthetic oligonucleotide
  Antisense strand to SEQ ID NO: 31866
uuccugcucacauaauaac

SEQ ID NO: 31868 - RNA, 19 nt, Artificial Sequence
  Description of Artificial Sequence: Synthetic oligonucleotide
  Sense strand starting at position 2922 of SEQ ID NO: 368
uuauuaugugagcaggaau

SEQ ID NO: 31869 - RNA, 19 nt, Artificial Sequence
  Description of Artificial Sequence: Synthetic oligonucleotide
  Antisense strand to SEQ ID NO: 31868
auuccugcucacauaauaa

SEQ ID NO: 31870 - RNA, 19 nt, Artificial Sequence
  Description of Artificial Sequence: Synthetic oligonucleotide
  Sense strand starting at position 2991 of SEQ ID NO: 368
cauggugcagguugugaaa

SEQ ID NO: 31871 - RNA, 19 nt, Artificial Sequence
  Description of Artificial Sequence: Synthetic oligonucleotide
  Antisense strand to SEQ ID NO: 31870
uuucacaaccugcaccaug

SEQ ID NO: 31872 - RNA, 19 nt, Artificial Sequence
  Description of Artificial Sequence: Synthetic oligonucleotide
  Sense strand starting at position 3003 of SEQ ID NO: 368
ugugaaacugagugggaau

SEQ ID NO: 31873 - RNA, 19 nt, Artificial Sequence
  Description of Artificial Sequence: Synthetic oligonucleotide
  Antisense strand to SEQ ID NO: 31872
auucccacucaguuucaca

SEQ ID NO: 31874 - RNA, 19 nt, Artificial Sequence
  Description of Artificial Sequence: Synthetic oligonucleotide
  Sense strand starting at position 3014 of SEQ ID NO: 368
gugggaaugugcuuucuug

SEQ ID NO: 31875 - RNA, 19 nt, Artificial Sequence
  Description of Artificial Sequence: Synthetic oligonucleotide
  Antisense strand to SEQ ID NO: 31874
caagaaagcacauucccac

SEQ ID NO: 31876 - RNA, 19 nt, Artificial Sequence
  Description of Artificial Sequence: Synthetic oligonucleotide
  Sense strand starting at position 3144 of SEQ ID NO: 368
guaucucuaucagugaaac

SEQ ID NO: 31877 - RNA, 19 nt, Artificial Sequence
  Description of Artificial Sequence: Synthetic oligonucleotide
  Antisense strand to SEQ ID NO: 31876
guuucacugauagagauac

SEQ ID NO: 31878 - RNA, 19 nt, Artificial Sequence
  Description of Artificial Sequence: Synthetic oligonucleotide
  Sense strand starting at position 3156 of SEQ ID NO: 368
gugaaacuucugggaccaa

SEQ ID NO: 31879 - RNA, 19 nt, Artificial Sequence
  Description of Artificial Sequence: Synthetic oligonucleotide
  Antisense strand to SEQ ID NO: 31878
uuggucccagaaguuucac

SEQ ID NO: 31880 - RNA, 19 nt, Artificial Sequence
  Description of Artificial Sequence: Synthetic oligonucleotide
  Sense strand starting at position 3157 of SEQ ID NO: 368
ugaaacuucugggaccaau

SEQ ID NO: 31881 - RNA, 19 nt, Artificial Sequence
  Description of Artificial Sequence: Synthetic oligonucleotide
  Antisense strand to SEQ ID NO: 31880
auuggucccagaaguuuca

SEQ ID NO: 31882 - RNA, 19 nt, Artificial Sequence
  Description of Artificial Sequence: Synthetic oligonucleotide
  Sense strand starting at position 3190 of SEQ ID NO: 368
accugcuaucucgagauau

SEQ ID NO: 31883 - RNA, 19 nt, Artificial Sequence
  Description of Artificial Sequence: Synthetic oligonucleotide
  Antisense strand to SEQ ID NO: 31882
auaucucgagauagcaggu

SEQ ID NO: 31884 - RNA, 19 nt, Artificial Sequence
  Description of Artificial Sequence: Synthetic oligonucleotide
  Sense strand starting at position 3192 of SEQ ID NO: 368
cugcuaucucgagauauuc

SEQ ID NO: 31885 - RNA, 19 nt, Artificial Sequence
  Description of Artificial Sequence: Synthetic oligonucleotide
  Antisense strand to SEQ ID NO: 31884
gaauaucucgagauagcag

SEQ ID NO: 31886 - RNA, 19 nt, Artificial Sequence
  Description of Artificial Sequence: Synthetic oligonucleotide
  Sense strand starting at position 3200 of SEQ ID NO: 368
ucgagauauucccuaccau

SEQ ID NO: 31887 - RNA, 19 nt, Artificial Sequence
  Description of Artificial Sequence: Synthetic oligonucleotide
  Antisense strand to SEQ ID NO: 31886
augguagggaauaucucga

SEQ ID NO: 31888 - RNA, 19 nt, Artificial Sequence
  Description of Artificial Sequence: Synthetic oligonucleotide
  Sense strand starting at position 3201 of SEQ ID NO: 368
cgagauauucccuaccauc

SEQ ID NO: 31889 - RNA, 19 nt, Artificial Sequence
  Description of Artificial Sequence: Synthetic oligonucleotide
  Antisense strand to SEQ ID NO: 31888
gaugguagggaauaucucg

SEQ ID NO: 31890 - RNA, 19 nt, Artificial Sequence
  Description of Artificial Sequence: Synthetic oligonucleotide
  Sense strand starting at position 3209 of SEQ ID NO: 368
ucccuaccaucuguagaua

SEQ ID NO: 31891 - RNA, 19 nt, Artificial Sequence
  Description of Artificial Sequence: Synthetic oligonucleotide
  Antisense strand to SEQ ID NO: 31890
uaucuacagaugguaggga

SEQ ID NO: 31892 - RNA, 19 nt, Artificial Sequence
  Description of Artificial Sequence: Synthetic oligonucleotide
  Sense strand starting at position 3424 of SEQ ID NO: 368
aagugcauugcuuggauua

SEQ ID NO: 31893 - RNA, 19 nt, Artificial Sequence
  Description of Artificial Sequence: Synthetic oligonucleotide
  Antisense strand to SEQ ID NO: 31892
uaauccaagcaaugcacuu

SEQ ID NO: 31894 - RNA, 19 nt, Artificial Sequence
  Description of Artificial Sequence: Synthetic oligonucleotide
  Sense strand starting at position 3425 of SEQ ID NO: 368
agugcauugcuuggauuaa

SEQ ID NO: 31895 - RNA, 19 nt, Artificial Sequence
  Description of Artificial Sequence: Synthetic oligonucleotide
  Antisense strand to SEQ ID NO: 31894
uuaauccaagcaaugcacu

SEQ ID NO: 31896 - RNA, 19 nt, Artificial Sequence
  Description of Artificial Sequence: Synthetic oligonucleotide
  Sense strand starting at position 3437 of SEQ ID NO: 368
ggauuaacuuagucuuacu

SEQ ID NO: 31897 - RNA, 19 nt, Artificial Sequence
  Description of Artificial Sequence: Synthetic oligonucleotide
  Antisense strand to SEQ ID NO: 31896
aguaagacuaaguuaaucc

SEQ ID NO: 31898 - RNA, 19 nt, Artificial Sequence
  Description of Artificial Sequence: Synthetic oligonucleotide
  Sense strand starting at position 3730 of SEQ ID NO: 368
aggucauggucuccaggua

SEQ ID NO: 31899 - RNA, 19 nt, Artificial Sequence
  Description of Artificial Sequence: Synthetic oligonucleotide
  Antisense strand to SEQ ID NO: 31898
uaccuggagaccaugaccu

SEQ ID NO: 31900 - RNA, 19 nt, Artificial Sequence
  Description of Artificial Sequence: Synthetic oligonucleotide
  Sense strand starting at position 3731 of SEQ ID NO: 368
ggucauggucuccagguau

SEQ ID NO: 31901 - RNA, 19 nt, Artificial Sequence
  Description of Artificial Sequence: Synthetic oligonucleotide
  Antisense strand to SEQ ID NO: 31900
auaccuggagaccaugacc

SEQ ID NO: 31902 - RNA, 19 nt, Artificial Sequence
  Description of Artificial Sequence: Synthetic oligonucleotide
  Sense strand starting at position 3742 of SEQ ID NO: 368
ccagguauugggugaggaa

SEQ ID NO: 31903 - RNA, 19 nt, Artificial Sequence
  Description of Artificial Sequence: Synthetic oligonucleotide
  Antisense strand to SEQ ID NO: 31902
uuccucacccaauaccugg

SEQ ID NO: 31904 - RNA, 19 nt, Artificial Sequence
  Description of Artificial Sequence: Synthetic oligonucleotide
  Sense strand starting at position 3756 of SEQ ID NO: 368
aggaauaacucauuaggcu

SEQ ID NO: 31905 - RNA, 19 nt, Artificial Sequence
  Description of Artificial Sequence: Synthetic oligonucleotide
  Antisense strand to SEQ ID NO: 31904
agccuaaugaguuauuccu

SEQ ID NO: 31906 - RNA, 19 nt, Artificial Sequence
  Description of Artificial Sequence: Synthetic oligonucleotide
  Sense strand starting at position 3783 of SEQ ID NO: 368
uggacucuccuuugaccaa

SEQ ID NO: 31907 - RNA, 19 nt, Artificial Sequence
  Description of Artificial Sequence: Synthetic oligonucleotide
  Antisense strand to SEQ ID NO: 31906
uuggucaaaggagagucca

SEQ ID NO: 31908 - RNA, 19 nt, Artificial Sequence
  Description of Artificial Sequence: Synthetic oligonucleotide
  Sense strand starting at position 3802 of SEQ ID NO: 368
ggagcagugccugcucuuu

SEQ ID NO: 31909 - RNA, 19 nt, Artificial Sequence
  Description of Artificial Sequence: Synthetic oligonucleotide
  Antisense strand to SEQ ID NO: 31908
aaagagcaggcacugcucc

SEQ ID NO: 31910 - RNA, 19 nt, Artificial Sequence
  Description of Artificial Sequence: Synthetic oligonucleotide
  Sense strand starting at position 3827 of SEQ ID NO: 368
gagaaaugcuguccaucaa

SEQ ID NO: 31911 - RNA, 19 nt, Artificial Sequence
  Description of Artificial Sequence: Synthetic oligonucleotide
  Antisense strand to SEQ ID NO: 31910
uugauggacagcauuucuc

SEQ ID NO: 31912 - RNA, 19 nt, Artificial Sequence
  Description of Artificial Sequence: Synthetic oligonucleotide
  Sense strand starting at position 3828 of SEQ ID NO: 368
agaaaugcuguccaucaag

SEQ ID NO: 31913 - RNA, 19 nt, Artificial Sequence
  Description of Artificial Sequence: Synthetic oligonucleotide
  Antisense strand to SEQ ID NO: 31912
cuugauggacagcauuucu

SEQ ID NO: 31914 - RNA, 19 nt, Artificial Sequence
  Description of Artificial Sequence: Synthetic oligonucleotide
  Sense strand starting at position 3859 of SEQ ID NO: 368
cccucaaaugccugguuaa

SEQ ID NO: 31915 - RNA, 19 nt, Artificial Sequence
  Description of Artificial Sequence: Synthetic oligonucleotide
  Antisense strand to SEQ ID NO: 31914
uuaaccaggcauuugaggg

SEQ ID NO: 31916 - RNA, 19 nt, Artificial Sequence
  Description of Artificial Sequence: Synthetic oligonucleotide
  Sense strand starting at position 3860 of SEQ ID NO: 368
ccucaaaugccugguuaau

SEQ ID NO: 31917 - RNA, 19 nt, Artificial Sequence
  Description of Artificial Sequence: Synthetic oligonucleotide
  Antisense strand to SEQ ID NO: 31916
auuaaccaggcauuugagg

SEQ ID NO: 31918 - RNA, 19 nt, Artificial Sequence
  Description of Artificial Sequence: Synthetic oligonucleotide
  Sense strand starting at position 336 of SEQ ID NO: 369
gaaguagcucuauauguag

SEQ ID NO: 31919 - RNA, 19 nt, Artificial Sequence
  Description of Artificial Sequence: Synthetic oligonucleotide
  Antisense strand to SEQ ID NO: 31918
cuacauauagagcuacuuc

SEQ ID NO: 31920 - RNA, 19 nt, Artificial Sequence
  Description of Artificial Sequence: Synthetic oligonucleotide
  Sense strand starting at position 431 of SEQ ID NO: 369
ggacuccuuucuccauaag

SEQ ID NO: 31921 - RNA, 19 nt, Artificial Sequence
  Description of Artificial Sequence: Synthetic oligonucleotide
  Antisense strand to SEQ ID NO: 31920
cuuauggagaaaggagucc

SEQ ID NO: 31922 - RNA, 19 nt, Artificial Sequence
  Description of Artificial Sequence: Synthetic oligonucleotide
  Sense strand starting at position 454 of SEQ ID NO: 369
cuccuaaugcuguagagag

SEQ ID NO: 31923 - RNA, 19 nt, Artificial Sequence
  Description of Artificial Sequence: Synthetic oligonucleotide
  Antisense strand to SEQ ID NO: 31922
cucucuacagcauuaggag

SEQ ID NO: 31924 - RNA, 19 nt, Artificial Sequence
  Description of Artificial Sequence: Synthetic oligonucleotide
  Sense strand starting at position 480 of SEQ ID NO: 369
cccuguaaccuccaggagu

SEQ ID NO: 31925 - RNA, 19 nt, Artificial Sequence
  Description of Artificial Sequence: Synthetic oligonucleotide
  Antisense strand to SEQ ID NO: 31924
acuccuggagguuacaggg

SEQ ID NO: 31926 - RNA, 19 nt, Artificial Sequence
  Description of Artificial Sequence: Synthetic oligonucleotide
  Sense strand starting at position 499 of SEQ ID NO: 369
cccugaggccuaugcauuu

SEQ ID NO: 31927 - RNA, 19 nt, Artificial Sequence
  Description of Artificial Sequence: Synthetic oligonucleotide
  Antisense strand to SEQ ID NO: 31926
aaaugcauaggccucaggg

SEQ ID NO: 31928 - RNA, 19 nt, Artificial Sequence
  Description of Artificial Sequence: Synthetic oligonucleotide
  Sense strand starting at position 624 of SEQ ID NO: 369
ugguuuauccuggaauauu

SEQ ID NO: 31929 - RNA, 19 nt, Artificial Sequence
  Description of Artificial Sequence: Synthetic oligonucleotide
  Antisense strand to SEQ ID NO: 31928
aauauuccaggauaaacca

SEQ ID NO: 31930 - RNA, 19 nt, Artificial Sequence
  Description of Artificial Sequence: Synthetic oligonucleotide
  Sense strand starting at position 793 of SEQ ID NO: 369
ccaacauguguacauguga

SEQ ID NO: 31931 - RNA, 19 nt, Artificial Sequence
  Description of Artificial Sequence: Synthetic oligonucleotide
  Antisense strand to SEQ ID NO: 31930
ucacauguacacauguugg

SEQ ID NO: 31932 - RNA, 19 nt, Artificial Sequence
  Description of Artificial Sequence: Synthetic oligonucleotide
  Sense strand starting at position 801 of SEQ ID NO: 369
uguacaugugaaggaaagu

SEQ ID NO: 31933 - RNA, 19 nt, Artificial Sequence
  Description of Artificial Sequence: Synthetic oligonucleotide
  Antisense strand to SEQ ID NO: 31932
acuuuccuucacauguaca

SEQ ID NO: 31934 - RNA, 19 nt, Artificial Sequence
  Description of Artificial Sequence: Synthetic oligonucleotide
  Sense strand starting at position 853 of SEQ ID NO: 369
ugauauagccaguaaguga

SEQ ID NO: 31935 - RNA, 19 nt, Artificial Sequence
  Description of Artificial Sequence: Synthetic oligonucleotide
  Antisense strand to SEQ ID NO: 31934
ucacuuacuggcuauauca

SEQ ID NO: 31936 - RNA, 19 nt, Artificial Sequence
  Description of Artificial Sequence: Synthetic oligonucleotide
  Sense strand starting at position 1030 of SEQ ID NO: 369
agauguggucaguaccuua

SEQ ID NO: 31937 - RNA, 19 nt, Artificial Sequence
  Description of Artificial Sequence: Synthetic oligonucleotide
  Antisense strand to SEQ ID NO: 31936
uaagguacugaccacaucu

SEQ ID NO: 31938 - RNA, 19 nt, Artificial Sequence
  Description of Artificial Sequence: Synthetic oligonucleotide
  Sense strand starting at position 1093 of SEQ ID NO: 369
ggugauguacuagaucauc

SEQ ID NO: 31939 - RNA, 19 nt, Artificial Sequence
  Description of Artificial Sequence: Synthetic oligonucleotide
  Antisense strand to SEQ ID NO: 31938
gaugaucuaguacaucacc

SEQ ID NO: 31940 - RNA, 19 nt, Artificial Sequence
  Description of Artificial Sequence: Synthetic oligonucleotide
  Sense strand starting at position 1122 of SEQ ID NO: 369
aguggaugugauugauuag

SEQ ID NO: 31941 - RNA, 19 nt, Artificial Sequence
  Description of Artificial Sequence: Synthetic oligonucleotide
  Antisense strand to SEQ ID NO: 31940
cuaaucaaucacauccacu

SEQ ID NO: 31942 - RNA, 19 nt, Artificial Sequence
  Description of Artificial Sequence: Synthetic oligonucleotide
  Sense strand starting at position 1350 of SEQ ID NO: 369
ccagauuaacuagguuaau

SEQ ID NO: 31943 - RNA, 19 nt, Artificial Sequence
  Description of Artificial Sequence: Synthetic oligonucleotide
  Antisense strand to SEQ ID NO: 31942
auuaaccuaguuaaucugg

SEQ ID NO: 31944 - RNA, 19 nt, Artificial Sequence
  Description of Artificial Sequence: Synthetic oligonucleotide
  Sense strand starting at position 1359 of SEQ ID NO: 369
cuagguuaaucucuagauu

SEQ ID NO: 31945 - RNA, 19 nt, Artificial Sequence
  Description of Artificial Sequence: Synthetic oligonucleotide
  Antisense strand to SEQ ID NO: 31944
aaucuagagauuaaccuag

SEQ ID NO: 31946 - RNA, 19 nt, Artificial Sequence
  Description of Artificial Sequence: Synthetic oligonucleotide
  Sense strand starting at position 1362 of SEQ ID NO: 369
gguuaaucucuagauuacu

SEQ ID NO: 31947 - RNA, 19 nt, Artificial Sequence
  Description of Artificial Sequence: Synthetic oligonucleotide
  Antisense strand to SEQ ID NO: 31946
aguaaucuagagauuaacc

SEQ ID NO: 31948 - RNA, 19 nt, Artificial Sequence
  Description of Artificial Sequence: Synthetic oligonucleotide
  Sense strand starting at position 1373 of SEQ ID NO: 369
agauuacucuaagcaauga

SEQ ID NO: 31949 - RNA, 19 nt, Artificial Sequence
  Description of Artificial Sequence: Synthetic oligonucleotide
  Antisense strand to SEQ ID NO: 31948
ucauugcuuagaguaaucu

SEQ ID NO: 31950 - RNA, 19 nt, Artificial Sequence
  Description of Artificial Sequence: Synthetic oligonucleotide
  Sense strand starting at position 1458 of SEQ ID NO: 369
aaugaaaggugauugucuu

SEQ ID NO: 31951 - RNA, 19 nt, Artificial Sequence
  Description of Artificial Sequence: Synthetic oligonucleotide
  Antisense strand to SEQ ID NO: 31950
aagacaaucaccuuucauu

SEQ ID NO: 31952 - RNA, 19 nt, Artificial Sequence
  Description of Artificial Sequence: Synthetic oligonucleotide
  Sense strand starting at position 1648 of SEQ ID NO: 369
uacaaauguguauggauua

SEQ ID NO: 31953 - RNA, 19 nt, Artificial Sequence
  Description of Artificial Sequence: Synthetic oligonucleotide
  Antisense strand to SEQ ID NO: 31952
uaauccauacacauuugua

SEQ ID NO: 31954 - RNA, 19 nt, Artificial Sequence
  Description of Artificial Sequence: Synthetic oligonucleotide
  Sense strand starting at position 1711 of SEQ ID NO: 369
ggaagaagcucauccuuga

SEQ ID NO: 31955 - RNA, 19 nt, Artificial Sequence
  Description of Artificial Sequence: Synthetic oligonucleotide
  Antisense strand to SEQ ID NO: 31954
ucaaggaugagcuucuucc

SEQ ID NO: 31956 - RNA, 19 nt, Artificial Sequence
  Description of Artificial Sequence: Synthetic oligonucleotide
  Sense strand starting at position 1759 of SEQ ID NO: 369
gggagaaaguucuccuaau

SEQ ID NO: 31957 - RNA, 19 nt, Artificial Sequence
  Description of Artificial Sequence: Synthetic oligonucleotide
  Antisense strand to SEQ ID NO: 31956
auuaggagaacuuucuccc

SEQ ID NO: 31958 - RNA, 19 nt, Artificial Sequence
  Description of Artificial Sequence: Synthetic oligonucleotide
  Sense strand starting at position 1760 of SEQ ID NO: 369
ggagaaaguucuccuaauc

SEQ ID NO: 31959 - RNA, 19 nt, Artificial Sequence
  Description of Artificial Sequence: Synthetic oligonucleotide
  Antisense strand to SEQ ID NO: 31958
gauuaggagaacuuucucc

SEQ ID NO: 31960 - RNA, 19 nt, Artificial Sequence
  Description of Artificial Sequence: Synthetic oligonucleotide
  Sense strand starting at position 2036 of SEQ ID NO: 369
gcuggacuugcugaaauca

SEQ ID NO: 31961 - RNA, 19 nt, Artificial Sequence
  Description of Artificial Sequence: Synthetic oligonucleotide
  Antisense strand to SEQ ID NO: 31960
ugauuucagcaaguccagc

SEQ ID NO: 31962 - RNA, 19 nt, Artificial Sequence
  Description of Artificial Sequence: Synthetic oligonucleotide
  Sense strand starting at position 2055 of SEQ ID NO: 369
gcauguuccagaggaaagg

SEQ ID NO: 31963 - RNA, 19 nt, Artificial Sequence
  Description of Artificial Sequence: Synthetic oligonucleotide
  Antisense strand to SEQ ID NO: 31962
ccuuuccucuggaacaugc

SEQ ID NO: 31964 - RNA, 19 nt, Artificial Sequence
  Description of Artificial Sequence: Synthetic oligonucleotide
  Sense strand starting at position 2236 of SEQ ID NO: 369
gccaucucucaguagaaga

SEQ ID NO: 31965 - RNA, 19 nt, Artificial Sequence
  Description of Artificial Sequence: Synthetic oligonucleotide
  Antisense strand to SEQ ID NO: 31964
ucuucuacugagagauggc

SEQ ID NO: 31966 - RNA, 19 nt, Artificial Sequence
  Description of Artificial Sequence: Synthetic oligonucleotide
  Sense strand starting at position 2278 of SEQ ID NO: 369
gaugguuugcaagggaaau

SEQ ID NO: 31967 - RNA, 19 nt, Artificial Sequence
  Description of Artificial Sequence: Synthetic oligonucleotide
  Antisense strand to SEQ ID NO: 31966
auuucccuugcaaaccauc

SEQ ID NO: 31968 - RNA, 19 nt, Artificial Sequence
  Description of Artificial Sequence: Synthetic oligonucleotide
  Sense strand starting at position 2279 of SEQ ID NO: 369
augguuugcaagggaaaua

SEQ ID NO: 31969 - RNA, 19 nt, Artificial Sequence
  Description of Artificial Sequence: Synthetic oligonucleotide
  Antisense strand to SEQ ID NO: 31968
uauuucccuugcaaaccau

SEQ ID NO: 31970 - RNA, 19 nt, Artificial Sequence
  Description of Artificial Sequence: Synthetic oligonucleotide
  Sense strand starting at position 2401 of SEQ ID NO: 369
aacauaauccagggucaug

SEQ ID NO: 31971 - RNA, 19 nt, Artificial Sequence
  Description of Artificial Sequence: Synthetic oligonucleotide
  Antisense strand to SEQ ID NO: 31970
caugacccuggauuauguu

SEQ ID NO: 31972 - RNA, 19 nt, Artificial Sequence
  Description of Artificial Sequence: Synthetic oligonucleotide
  Sense strand starting at position 2627 of SEQ ID NO: 369
gacagagauuaagcaguaa

SEQ ID NO: 31973 - RNA, 19 nt, Artificial Sequence
  Description of Artificial Sequence: Synthetic oligonucleotide
  Antisense strand to SEQ ID NO: 31972
uuacugcuuaaucucuguc

SEQ ID NO: 31974 - RNA, 19 nt, Artificial Sequence
  Description of Artificial Sequence: Synthetic oligonucleotide
  Sense strand starting at position 2710 of SEQ ID NO: 369
acuccagauugaucaagca

SEQ ID NO: 31975 - RNA, 19 nt, Artificial Sequence
  Description of Artificial Sequence: Synthetic oligonucleotide
  Antisense strand to SEQ ID NO: 31974
ugcuugaucaaucuggagu

SEQ ID NO: 31976 - RNA, 19 nt, Artificial Sequence
  Description of Artificial Sequence: Synthetic oligonucleotide
  Sense strand starting at position 2777 of SEQ ID NO: 369
guuccucuacaguaauaau

SEQ ID NO: 31977 - RNA, 19 nt, Artificial Sequence
  Description of Artificial Sequence: Synthetic oligonucleotide
  Antisense strand to SEQ ID NO: 31976
auuauuacuguagaggaac

SEQ ID NO: 31978 - RNA, 19 nt, Artificial Sequence
  Description of Artificial Sequence: Synthetic oligonucleotide
  Sense strand starting at position 2815 of SEQ ID NO: 369
ucagguaacucagcagaaa

SEQ ID NO: 31979 - RNA, 19 nt, Artificial Sequence
  Description of Artificial Sequence: Synthetic oligonucleotide
  Antisense strand to SEQ ID NO: 31978
uuucugcugaguuaccuga

SEQ ID NO: 31980 - RNA, 19 nt, Artificial Sequence
  Description of Artificial Sequence: Synthetic oligonucleotide
  Sense strand starting at position 3016 of SEQ ID NO: 369
uguggaaaccacuguuaag

SEQ ID NO: 31981 - RNA, 19 nt, Artificial Sequence
  Description of Artificial Sequence: Synthetic oligonucleotide
  Antisense strand to SEQ ID NO: 31980
cuuaacagugguuuccaca

SEQ ID NO: 31982 - RNA, 19 nt, Artificial Sequence
  Description of Artificial Sequence: Synthetic oligonucleotide
  Sense strand starting at position 3236 of SEQ ID NO: 369
aggaaaugguuacuauguu

SEQ ID NO: 31983 - RNA, 19 nt, Artificial Sequence
  Description of Artificial Sequence: Synthetic oligonucleotide
  Antisense strand to SEQ ID NO: 31982
aacauaguaaccauuuccu

SEQ ID NO: 31984 - RNA, 19 nt, Artificial Sequence
  Description of Artificial Sequence: Synthetic oligonucleotide
  Sense strand starting at position 3352 of SEQ ID NO: 369
ugcauaugcagacaaguga

SEQ ID NO: 31985 - RNA, 19 nt, Artificial Sequence
  Description of Artificial Sequence: Synthetic oligonucleotide
  Antisense strand to SEQ ID NO: 31984
ucacuugucugcauaugca

SEQ ID NO: 31986 - RNA, 19 nt, Artificial Sequence
  Description of Artificial Sequence: Synthetic oligonucleotide
  Sense strand starting at position 3367 of SEQ ID NO: 369
gugaaacagcauuacuuau

SEQ ID NO: 31987 - RNA, 19 nt, Artificial Sequence
  Description of Artificial Sequence: Synthetic oligonucleotide
  Antisense strand to SEQ ID NO: 31986
auaaguaaugcuguuucac

SEQ ID NO: 31988 - RNA, 19 nt, Artificial Sequence
  Description of Artificial Sequence: Synthetic oligonucleotide
  Sense strand starting at position 3450 of SEQ ID NO: 369
cuucuugauguugaaaggu

SEQ ID NO: 31989 - RNA, 19 nt, Artificial Sequence
  Description of Artificial Sequence: Synthetic oligonucleotide
  Antisense strand to SEQ ID NO: 31988
accuuucaacaucaagaag

SEQ ID NO: 31990 - RNA, 19 nt, Artificial Sequence
  Description of Artificial Sequence: Synthetic oligonucleotide
  Sense strand starting at position 3475 of SEQ ID NO: 369
acuagaugauaugcaagua

SEQ ID NO: 31991 - RNA, 19 nt, Artificial Sequence
  Description of Artificial Sequence: Synthetic oligonucleotide
  Antisense strand to SEQ ID NO: 31990
uacuugcauaucaucuagu

SEQ ID NO: 31992 - RNA, 19 nt, Artificial Sequence
  Description of Artificial Sequence: Synthetic oligonucleotide
  Sense strand starting at position 3524 of SEQ ID NO: 369
caugaaugaguuuguaaau

SEQ ID NO: 31993 - RNA, 19 nt, Artificial Sequence
  Description of Artificial Sequence: Synthetic oligonucleotide
  Antisense strand to SEQ ID NO: 31992
auuuacaaacucauucaug

SEQ ID NO: 31994 - RNA, 19 nt, Artificial Sequence
  Description of Artificial Sequence: Synthetic oligonucleotide
  Sense strand starting at position 3525 of SEQ ID NO: 369
augaaugaguuuguaaaug

SEQ ID NO: 31995 - RNA, 19 nt, Artificial Sequence
  Description of Artificial Sequence: Synthetic oligonucleotide
  Antisense strand to SEQ ID NO: 31994
cauuuacaaacucauucau

SEQ ID NO: 31996 - RNA, 19 nt, Artificial Sequence
  Description of Artificial Sequence: Synthetic oligonucleotide
  Sense strand starting at position 3699 of SEQ ID NO: 369
gagcuagaugugcacaaca

SEQ ID NO: 31997 - RNA, 19 nt, Artificial Sequence
  Description of Artificial Sequence: Synthetic oligonucleotide
  Antisense strand to SEQ ID NO: 31996
uguugugcacaucuagcuc

SEQ ID NO: 31998 - RNA, 19 nt, Artificial Sequence
  Description of Artificial Sequence: Synthetic oligonucleotide
  Sense strand starting at position 184 of SEQ ID NO: 370
auuagcugauaucuguuaa

SEQ ID NO: 31999 - RNA, 19 nt, Artificial Sequence
  Description of Artificial Sequence: Synthetic oligonucleotide
  Antisense strand to SEQ ID NO: 31998
uuaacagauaucagcuaau

SEQ ID NO: 32000 - RNA, 19 nt, Artificial Sequence
  Description of Artificial Sequence: Synthetic oligonucleotide
  Sense strand starting at position 410 of SEQ ID NO: 370
aaagaaguguauccuagag

SEQ ID NO: 32001 - RNA, 19 nt, Artificial Sequence
  Description of Artificial Sequence: Synthetic oligonucleotide
  Antisense strand to SEQ ID NO: 32000
cucuaggauacacuucuuu

SEQ ID NO: 32002 - RNA, 19 nt, Artificial Sequence
  Description of Artificial Sequence: Synthetic oligonucleotide
  Sense strand starting at position 414 of SEQ ID NO: 370
aaguguauccuagagcuac

SEQ ID NO: 32003 - RNA, 19 nt, Artificial Sequence
  Description of Artificial Sequence: Synthetic oligonucleotide
  Antisense strand to SEQ ID NO: 32002
guagcucuaggauacacuu

SEQ ID NO: 32004 - RNA, 19 nt, Artificial Sequence
  Description of Artificial Sequence: Synthetic oligonucleotide
  Sense strand starting at position 713 of SEQ ID NO: 370
aggcauaaacauuguagaa

SEQ ID NO: 32005 - RNA, 19 nt, Artificial Sequence
  Description of Artificial Sequence: Synthetic oligonucleotide
  Antisense strand to SEQ ID NO: 32004
uucuacaauguuuaugccu

SEQ ID NO: 32006 - RNA, 19 nt, Artificial Sequence
  Description of Artificial Sequence: Synthetic oligonucleotide
  Sense strand starting at position 875 of SEQ ID NO: 370
ucugacuagugguuacaau

SEQ ID NO: 32007 - RNA, 19 nt, Artificial Sequence
  Description of Artificial Sequence: Synthetic oligonucleotide
  Antisense strand to SEQ ID NO: 32006
auuguaaccacuagucaga

SEQ ID NO: 32008 - RNA, 19 nt, Artificial Sequence
  Description of Artificial Sequence: Synthetic oligonucleotide
  Sense strand starting at position 876 of SEQ ID NO: 370
cugacuagugguuacaauc

SEQ ID NO: 32009 - RNA, 19 nt, Artificial Sequence
  Description of Artificial Sequence: Synthetic oligonucleotide
  Antisense strand to SEQ ID NO: 32008
gauuguaaccacuagucag

SEQ ID NO: 32010 - RNA, 19 nt, Artificial Sequence
  Description of Artificial Sequence: Synthetic oligonucleotide
  Sense strand starting at position 884 of SEQ ID NO: 370
ugguuacaaucuccaugaa

SEQ ID NO: 32011 - RNA, 19 nt, Artificial Sequence
  Description of Artificial Sequence: Synthetic oligonucleotide
  Antisense strand to SEQ ID NO: 32010
uucauggagauuguaacca

SEQ ID NO: 32012 - RNA, 19 nt, Artificial Sequence
  Description of Artificial Sequence: Synthetic oligonucleotide
  Sense strand starting at position 915 of SEQ ID NO: 370
ggagccauagcuugaaaug

SEQ ID NO: 32013 - RNA, 19 nt, Artificial Sequence
  Description of Artificial Sequence: Synthetic oligonucleotide
  Antisense strand to SEQ ID NO: 32012
cauuucaagcuauggcucc

SEQ ID NO: 32014 - RNA, 19 nt, Artificial Sequence
  Description of Artificial Sequence: Synthetic oligonucleotide
  Sense strand starting at position 947 of SEQ ID NO: 370
gagagaucacagugcauug

SEQ ID NO: 32015 - RNA, 19 nt, Artificial Sequence
  Description of Artificial Sequence: Synthetic oligonucleotide
  Antisense strand to SEQ ID NO: 32014
caaugcacugugaucucuc

SEQ ID NO: 32016 - RNA, 19 nt, Artificial Sequence
  Description of Artificial Sequence: Synthetic oligonucleotide
  Sense strand starting at position 949 of SEQ ID NO: 370
gagaucacagugcauugau

SEQ ID NO: 32017 - RNA, 19 nt, Artificial Sequence
  Description of Artificial Sequence: Synthetic oligonucleotide
  Antisense strand to SEQ ID NO: 32016
aucaaugcacugugaucuc

SEQ ID NO: 32018 - RNA, 19 nt, Artificial Sequence
  Description of Artificial Sequence: Synthetic oligonucleotide
  Sense strand starting at position 1105 of SEQ ID NO: 370
agagcaauuguuuguauuu

SEQ ID NO: 32019 - RNA, 19 nt, Artificial Sequence
  Description of Artificial Sequence: Synthetic oligonucleotide
  Antisense strand to SEQ ID NO: 32018
aaauacaaacaauugcucu

SEQ ID NO: 32020 - RNA, 19 nt, Artificial Sequence
  Description of Artificial Sequence: Synthetic oligonucleotide
  Sense strand starting at position 1227 of SEQ ID NO: 370
acuguuaugccauaaguaa

SEQ ID NO: 32021 - RNA, 19 nt, Artificial Sequence
  Description of Artificial Sequence: Synthetic oligonucleotide
  Antisense strand to SEQ ID NO: 32020
uuacuuauggcauaacagu

SEQ ID NO: 32022 - RNA, 19 nt, Artificial Sequence
  Description of Artificial Sequence: Synthetic oligonucleotide
  Sense strand starting at position 1387 of SEQ ID NO: 370
gggaguuuauagagaugag

SEQ ID NO: 32023 - RNA, 19 nt, Artificial Sequence
  Description of Artificial Sequence: Synthetic oligonucleotide
  Antisense strand to SEQ ID NO: 32022
cucaucucuauaaacuccc

SEQ ID NO: 32024 - RNA, 19 nt, Artificial Sequence
  Description of Artificial Sequence: Synthetic oligonucleotide
  Sense strand starting at position 1390 of SEQ ID NO: 370
aguuuauagagaugaggcu

SEQ ID NO: 32025 - RNA, 19 nt, Artificial Sequence
  Description of Artificial Sequence: Synthetic oligonucleotide
  Antisense strand to SEQ ID NO: 32024
agccucaucucuauaaacu

SEQ ID NO: 32026 - RNA, 19 nt, Artificial Sequence
  Description of Artificial Sequence: Synthetic oligonucleotide
  Sense strand starting at position 1412 of SEQ ID NO: 370
caaugauaacgaugaguca

SEQ ID NO: 32027 - RNA, 19 nt, Artificial Sequence
  Description of Artificial Sequence: Synthetic oligonucleotide
  Antisense strand to SEQ ID NO: 32026
ugacucaucguuaucauug

SEQ ID NO: 32028 - RNA, 19 nt, Artificial Sequence
  Description of Artificial Sequence: Synthetic oligonucleotide
  Sense strand starting at position 1419 of SEQ ID NO: 370
aacgaugagucauccauca

SEQ ID NO: 32029 - RNA, 19 nt, Artificial Sequence
  Description of Artificial Sequence: Synthetic oligonucleotide
  Antisense strand to SEQ ID NO: 32028
ugauggaugacucaucguu

SEQ ID NO: 32030 - RNA, 19 nt, Artificial Sequence
  Description of Artificial Sequence: Synthetic oligonucleotide
  Sense strand starting at position 1424 of SEQ ID NO: 370
ugagucauccaucacucua

SEQ ID NO: 32031 - RNA, 19 nt, Artificial Sequence
  Description of Artificial Sequence: Synthetic oligonucleotide
  Antisense strand to SEQ ID NO: 32030
uagagugauggaugacuca

SEQ ID NO: 32032 - RNA, 19 nt, Artificial Sequence
  Description of Artificial Sequence: Synthetic oligonucleotide
  Sense strand starting at position 1515 of SEQ ID NO: 370
agaagaaauugcuuguaag

SEQ ID NO: 32033 - RNA, 19 nt, Artificial Sequence
  Description of Artificial Sequence: Synthetic oligonucleotide
  Antisense strand to SEQ ID NO: 32032
cuuacaagcaauuucuucu

SEQ ID NO: 32034 - RNA, 19 nt, Artificial Sequence
  Description of Artificial Sequence: Synthetic oligonucleotide
  Sense strand starting at position 1516 of SEQ ID NO: 370
gaagaaauugcuuguaagu

SEQ ID NO: 32035 - RNA, 19 nt, Artificial Sequence
  Description of Artificial Sequence: Synthetic oligonucleotide
  Antisense strand to SEQ ID NO: 32034
acuuacaagcaauuucuuc

SEQ ID NO: 32036 - RNA, 19 nt, Artificial Sequence
  Description of Artificial Sequence: Synthetic oligonucleotide
  Sense strand starting at position 1592 of SEQ ID NO: 370
ugcugauuccucugagaag

SEQ ID NO: 32037 - RNA, 19 nt, Artificial Sequence
  Description of Artificial Sequence: Synthetic oligonucleotide
  Antisense strand to SEQ ID NO: 32036
cuucucagaggaaucagca

SEQ ID NO: 32038 - RNA, 19 nt, Artificial Sequence
  Description of Artificial Sequence: Synthetic oligonucleotide
  Sense strand starting at position 1616 of SEQ ID NO: 370
gccucagaccuuuggaaac

SEQ ID NO: 32039 - RNA, 19 nt, Artificial Sequence
  Description of Artificial Sequence: Synthetic oligonucleotide
  Antisense strand to SEQ ID NO: 32038
guuuccaaaggucugaggc

SEQ ID NO: 32040 - RNA, 19 nt, Artificial Sequence
  Description of Artificial Sequence: Synthetic oligonucleotide
  Sense strand starting at position 1734 of SEQ ID NO: 370
gauccuguugaguacagua

SEQ ID NO: 32041 - RNA, 19 nt, Artificial Sequence
  Description of Artificial Sequence: Synthetic oligonucleotide
  Antisense strand to SEQ ID NO: 32040
uacuguacucaacaggauc

SEQ ID NO: 32042 - RNA, 19 nt, Artificial Sequence
  Description of Artificial Sequence: Synthetic oligonucleotide
  Sense strand starting at position 1932 of SEQ ID NO: 370
gucuaaccuucuguggaaa

SEQ ID NO: 32043 - RNA, 19 nt, Artificial Sequence
  Description of Artificial Sequence: Synthetic oligonucleotide
  Antisense strand to SEQ ID NO: 32042
uuuccacagaagguuagac

SEQ ID NO: 32044 - RNA, 19 nt, Artificial Sequence
  Description of Artificial Sequence: Synthetic oligonucleotide
  Sense strand starting at position 2021 of SEQ ID NO: 370
aaaggaagugcauguuaac

SEQ ID NO: 32045 - RNA, 19 nt, Artificial Sequence
  Description of Artificial Sequence: Synthetic oligonucleotide
  Antisense strand to SEQ ID NO: 32044
guuaacaugcacuuccuuu

SEQ ID NO: 32046 - RNA, 19 nt, Artificial Sequence
  Description of Artificial Sequence: Synthetic oligonucleotide
  Sense strand starting at position 2027 of SEQ ID NO: 370
agugcauguuaacugauuu

SEQ ID NO: 32047 - RNA, 19 nt, Artificial Sequence
  Description of Artificial Sequence: Synthetic oligonucleotide
  Antisense strand to SEQ ID NO: 32046
aaaucaguuaacaugcacu

SEQ ID NO: 32048 - RNA, 19 nt, Artificial Sequence
  Description of Artificial Sequence: Synthetic oligonucleotide
  Sense strand starting at position 2298 of SEQ ID NO: 370
agggaacuaugagaggaau

SEQ ID NO: 32049 - RNA, 19 nt, Artificial Sequence
  Description of Artificial Sequence: Synthetic oligonucleotide
  Antisense strand to SEQ ID NO: 32048
auuccucucauaguucccu

SEQ ID NO: 32050 - RNA, 19 nt, Artificial Sequence
  Description of Artificial Sequence: Synthetic oligonucleotide
  Sense strand starting at position 2347 of SEQ ID NO: 370
ggaguaggcuuccuaaaga

SEQ ID NO: 32051 - RNA, 19 nt, Artificial Sequence
  Description of Artificial Sequence: Synthetic oligonucleotide
  Antisense strand to SEQ ID NO: 32050
ucuuuaggaagccuacucc

SEQ ID NO: 32052 - RNA, 19 nt, Artificial Sequence
  Description of Artificial Sequence: Synthetic oligonucleotide
  Sense strand starting at position 2455 of SEQ ID NO: 370
ugacauaugguaggagcuu

SEQ ID NO: 32053 - RNA, 19 nt, Artificial Sequence
  Description of Artificial Sequence: Synthetic oligonucleotide
  Antisense strand to SEQ ID NO: 32052
aagcuccuaccauauguca

SEQ ID NO: 32054 - RNA, 19 nt, Artificial Sequence
  Description of Artificial Sequence: Synthetic oligonucleotide
  Sense strand starting at position 2524 of SEQ ID NO: 370
acaaguacaugauuaugua

SEQ ID NO: 32055 - RNA, 19 nt, Artificial Sequence
  Description of Artificial Sequence: Synthetic oligonucleotide
  Antisense strand to SEQ ID NO: 32054
uacauaaucauguacuugu

SEQ ID NO: 32056 - RNA, 19 nt, Artificial Sequence
  Description of Artificial Sequence: Synthetic oligonucleotide
  Sense strand starting at position 2921 of SEQ ID NO: 370
gugacuccugggcaugaga

SEQ ID NO: 32057 - RNA, 19 nt, Artificial Sequence
  Description of Artificial Sequence: Synthetic oligonucleotide
  Antisense strand to SEQ ID NO: 32056
ucucaugcccaggagucac

SEQ ID NO: 32058 - RNA, 19 nt, Artificial Sequence
  Description of Artificial Sequence: Synthetic oligonucleotide
  Sense strand starting at position 2923 of SEQ ID NO: 370
gacuccugggcaugagaga

SEQ ID NO: 32059 - RNA, 19 nt, Artificial Sequence
  Description of Artificial Sequence: Synthetic oligonucleotide
  Antisense strand to SEQ ID NO: 32058
ucucucaugcccaggaguc

SEQ ID NO: 32060 - RNA, 19 nt, Artificial Sequence
  Description of Artificial Sequence: Synthetic oligonucleotide
  Sense strand starting at position 2968 of SEQ ID NO: 370
ggaguugagcuagauguaa

SEQ ID NO: 32061 - RNA, 19 nt, Artificial Sequence
  Description of Artificial Sequence: Synthetic oligonucleotide
  Antisense strand to SEQ ID NO: 32060
uuacaucuagcucaacucc

SEQ ID NO: 32062 - RNA, 19 nt, Artificial Sequence
  Description of Artificial Sequence: Synthetic oligonucleotide
  Sense strand starting at position 2970 of SEQ ID NO: 370
aguugagcuagauguaaca

SEQ ID NO: 32063 - RNA, 19 nt, Artificial Sequence
  Description of Artificial Sequence: Synthetic oligonucleotide
  Antisense strand to SEQ ID NO: 32062
uguuacaucuagcucaacu

SEQ ID NO: 32064 - RNA, 19 nt, Artificial Sequence
  Description of Artificial Sequence: Synthetic oligonucleotide
  Sense strand starting at position 3025 of SEQ ID NO: 370
caagaauaagagugauugu

SEQ ID NO: 32065 - RNA, 19 nt, Artificial Sequence
  Description of Artificial Sequence: Synthetic oligonucleotide
  Antisense strand to SEQ ID NO: 32064
acaaucacucuuauucuug

SEQ ID NO: 32066 - RNA, 19 nt, Artificial Sequence
  Description of Artificial Sequence: Synthetic oligonucleotide
  Sense strand starting at position 3028 of SEQ ID NO: 370
gaauaagagugauugugua

SEQ ID NO: 32067 - RNA, 19 nt, Artificial Sequence
  Description of Artificial Sequence: Synthetic oligonucleotide
  Antisense strand to SEQ ID NO: 32066
uacacaaucacucuuauuc

SEQ ID NO: 32068 - RNA, 19 nt, Artificial Sequence
  Description of Artificial Sequence: Synthetic oligonucleotide
  Sense strand starting at position 3056 of SEQ ID NO: 370
ugggagauguugucuggga

SEQ ID NO: 32069 - RNA, 19 nt, Artificial Sequence
  Description of Artificial Sequence: Synthetic oligonucleotide
  Antisense strand to SEQ ID NO: 32068
ucccagacaacaucuccca

SEQ ID NO: 32070 - RNA, 19 nt, Artificial Sequence
  Description of Artificial Sequence: Synthetic oligonucleotide
  Sense strand starting at position 3057 of SEQ ID NO: 370
gggagauguugucugggaa

SEQ ID NO: 32071 - RNA, 19 nt, Artificial Sequence
  Description of Artificial Sequence: Synthetic oligonucleotide
  Antisense strand to SEQ ID NO: 32070
uucccagacaacaucuccc

SEQ ID NO: 32072 - RNA, 19 nt, Artificial Sequence
  Description of Artificial Sequence: Synthetic oligonucleotide
  Sense strand starting at position 3058 of SEQ ID NO: 370
ggagauguugucugggaau

SEQ ID NO: 32073 - RNA, 19 nt, Artificial Sequence
  Description of Artificial Sequence: Synthetic oligonucleotide
  Antisense strand to SEQ ID NO: 32072
auucccagacaacaucucc

SEQ ID NO: 32074 - RNA, 19 nt, Artificial Sequence
  Description of Artificial Sequence: Synthetic oligonucleotide
  Sense strand starting at position 3465 of SEQ ID NO: 370
cauauucuugcaggaaagu

SEQ ID NO: 32075 - RNA, 19 nt, Artificial Sequence
  Description of Artificial Sequence: Synthetic oligonucleotide
  Antisense strand to SEQ ID NO: 32074
acuuuccugcaagaauaug

SEQ ID NO: 32076 - RNA, 19 nt, Artificial Sequence
  Description of Artificial Sequence: Synthetic oligonucleotide
  Sense strand starting at position 3466 of SEQ ID NO: 370
auauucuugcaggaaagua

SEQ ID NO: 32077 - RNA, 19 nt, Artificial Sequence
  Description of Artificial Sequence: Synthetic oligonucleotide
  Antisense strand to SEQ ID NO: 32076
uacuuuccugcaagaauau

SEQ ID NO: 32078 - RNA, 19 nt, Artificial Sequence
  Description of Artificial Sequence: Synthetic oligonucleotide
  Sense strand starting at position 3916 of SEQ ID NO: 371
guggucauacgugaggaca

SEQ ID NO: 32079 - RNA, 19 nt, Artificial Sequence
  Description of Artificial Sequence: Synthetic oligonucleotide
  Antisense strand to SEQ ID NO: 32078
uguccucacguaugaccac

SEQ ID NO: 32080 - RNA, 19 nt, Artificial Sequence
  Description of Artificial Sequence: Synthetic oligonucleotide
  Sense strand starting at position 3640 of SEQ ID NO: 371
ccacucaacgugggaauaa

SEQ ID NO: 32081 - RNA, 19 nt, Artificial Sequence
  Description of Artificial Sequence: Synthetic oligonucleotide
  Antisense strand to SEQ ID NO: 32080
uuauucccacguugagugg

SEQ ID NO: 32082 - RNA, 19 nt, Artificial Sequence
  Description of Artificial Sequence: Synthetic oligonucleotide
  Sense strand starting at position 3639 of SEQ ID NO: 371
cccacucaacgugggaaua

SEQ ID NO: 32083 - RNA, 19 nt, Artificial Sequence
  Description of Artificial Sequence: Synthetic oligonucleotide
  Antisense strand to SEQ ID NO: 32082
uauucccacguugaguggg

SEQ ID NO: 32084 - RNA, 19 nt, Artificial Sequence
  Description of Artificial Sequence: Synthetic oligonucleotide
  Sense strand starting at position 3638 of SEQ ID NO: 371
gcccacucaacgugggaau

SEQ ID NO: 32085 - RNA, 19 nt, Artificial Sequence
  Description of Artificial Sequence: Synthetic oligonucleotide
  Antisense strand to SEQ ID NO: 32084
auucccacguugagugggc

SEQ ID NO: 32086 - RNA, 19 nt, Artificial Sequence
  Description of Artificial Sequence: Synthetic oligonucleotide
  Sense strand starting at position 3589 of SEQ ID NO: 371
agcaguuuccuggaucuca

SEQ ID NO: 32087 - RNA, 19 nt, Artificial Sequence
  Description of Artificial Sequence: Synthetic oligonucleotide
  Antisense strand to SEQ ID NO: 32086
ugagauccaggaaacugcu

SEQ ID NO: 32088 - RNA, 19 nt, Artificial Sequence
  Description of Artificial Sequence: Synthetic oligonucleotide
  Sense strand starting at position 3419 of SEQ ID NO: 371
ugaagaguuggguaaaguu

SEQ ID NO: 32089 - RNA, 19 nt, Artificial Sequence
  Description of Artificial Sequence: Synthetic oligonucleotide
  Antisense strand to SEQ ID NO: 32088
aacuuuacccaacucuuca

SEQ ID NO: 32090 - RNA, 19 nt, Artificial Sequence
  Description of Artificial Sequence: Synthetic oligonucleotide
  Sense strand starting at position 3416 of SEQ ID NO: 371
cgcugaagaguuggguaaa

SEQ ID NO: 32091 - RNA, 19 nt, Artificial Sequence
  Description of Artificial Sequence: Synthetic oligonucleotide
  Antisense strand to SEQ ID NO: 32090
uuuacccaacucuucagcg

SEQ ID NO: 32092 - RNA, 19 nt, Artificial Sequence
  Description of Artificial Sequence: Synthetic oligonucleotide
  Sense strand starting at position 3372 of SEQ ID NO: 371
ggagcucucagccauaugu

SEQ ID NO: 32093 - RNA, 19 nt, Artificial Sequence
  Description of Artificial Sequence: Synthetic oligonucleotide
  Antisense strand to SEQ ID NO: 32092
acauauggcugagagcucc

SEQ ID NO: 32094 - RNA, 19 nt, Artificial Sequence
  Description of Artificial Sequence: Synthetic oligonucleotide
  Sense strand starting at position 3173 of SEQ ID NO: 371
uuaagugacucagccaaga

SEQ ID NO: 32095 - RNA, 19 nt, Artificial Sequence
  Description of Artificial Sequence: Synthetic oligonucleotide
  Antisense strand to SEQ ID NO: 32094
ucuuggcugagucacuuaa

SEQ ID NO: 32096 - RNA, 19 nt, Artificial Sequence
  Description of Artificial Sequence: Synthetic oligonucleotide
  Sense strand starting at position 3162 of SEQ ID NO: 371
gguuauugucauuaaguga

SEQ ID NO: 32097 - RNA, 19 nt, Artificial Sequence
  Description of Artificial Sequence: Synthetic oligonucleotide
  Antisense strand to SEQ ID NO: 32096
ucacuuaaugacaauaacc

SEQ ID NO: 32098 - RNA, 19 nt, Artificial Sequence
  Description of Artificial Sequence: Synthetic oligonucleotide
  Sense strand starting at position 3161 of SEQ ID NO: 371
ggguuauugucauuaagug

SEQ ID NO: 32099 - RNA, 19 nt, Artificial Sequence
  Description of Artificial Sequence: Synthetic oligonucleotide
  Antisense strand to SEQ ID NO: 32098
cacuuaaugacaauaaccc

SEQ ID NO: 32100 - RNA, 19 nt, Artificial Sequence
  Description of Artificial Sequence: Synthetic oligonucleotide
  Sense strand starting at position 3120 of SEQ ID NO: 371
gacguuaugaugugaacac

SEQ ID NO: 32101 - RNA, 19 nt, Artificial Sequence
  Description of Artificial Sequence: Synthetic oligonucleotide
  Antisense strand to SEQ ID NO: 32100
guguucacaucauaacguc

SEQ ID NO: 32102 - RNA, 19 nt, Artificial Sequence
  Description of Artificial Sequence: Synthetic oligonucleotide
  Sense strand starting at position 3108 of SEQ ID NO: 371
ggagagucuggugacguua

SEQ ID NO: 32103 - RNA, 19 nt, Artificial Sequence
  Description of Artificial Sequence: Synthetic oligonucleotide
  Antisense strand to SEQ ID NO: 32102
uaacgucaccagacucucc

SEQ ID NO: 32104 - RNA, 19 nt, Artificial Sequence
  Description of Artificial Sequence: Synthetic oligonucleotide
  Sense strand starting at position 3080 of SEQ ID NO: 371
agauaaugcguguacaaug

SEQ ID NO: 32105 - RNA, 19 nt, Artificial Sequence
  Description of Artificial Sequence: Synthetic oligonucleotide
  Antisense strand to SEQ ID NO: 32104
cauuguacacgcauuaucu

SEQ ID NO: 32106 - RNA, 19 nt, Artificial Sequence
  Description of Artificial Sequence: Synthetic oligonucleotide
  Sense strand starting at position 3078 of SEQ ID NO: 371
ugagauaaugcguguacaa

SEQ ID NO: 32107 - RNA, 19 nt, Artificial Sequence
  Description of Artificial Sequence: Synthetic oligonucleotide
  Antisense strand to SEQ ID NO: 32106
uuguacacgcauuaucuca

SEQ ID NO: 32108 - RNA, 19 nt, Artificial Sequence
  Description of Artificial Sequence: Synthetic oligonucleotide
  Sense strand starting at position 3077 of SEQ ID NO: 371
augagauaaugcguguaca

SEQ ID NO: 32109 - RNA, 19 nt, Artificial Sequence
  Description of Artificial Sequence: Synthetic oligonucleotide
  Antisense strand to SEQ ID NO: 32108
uguacacgcauuaucucau

SEQ ID NO: 32110 - RNA, 19 nt, Artificial Sequence
  Description of Artificial Sequence: Synthetic oligonucleotide
  Sense strand starting at position 2928 of SEQ ID NO: 371
aguaaaccaugguuugaau

SEQ ID NO: 32111 - RNA, 19 nt, Artificial Sequence
  Description of Artificial Sequence: Synthetic oligonucleotide
  Antisense strand to SEQ ID NO: 32110
auucaaaccaugguuuacu

SEQ ID NO: 32112 - RNA, 19 nt, Artificial Sequence
  Description of Artificial Sequence: Synthetic oligonucleotide
  Sense strand starting at position 2926 of SEQ ID NO: 371
uuaguaaaccaugguuuga

SEQ ID NO: 32113 - RNA, 19 nt, Artificial Sequence
  Description of Artificial Sequence: Synthetic oligonucleotide
  Antisense strand to SEQ ID NO: 32112
ucaaaccaugguuuacuaa

SEQ ID NO: 32114 - RNA, 19 nt, Artificial Sequence
  Description of Artificial Sequence: Synthetic oligonucleotide
  Sense strand starting at position 2923 of SEQ ID NO: 371
aguuuaguaaaccaugguu

SEQ ID NO: 32115 - RNA, 19 nt, Artificial Sequence
  Description of Artificial Sequence: Synthetic oligonucleotide
  Antisense strand to SEQ ID NO: 32114
aaccaugguuuacuaaacu

SEQ ID NO: 32116 - RNA, 19 nt, Artificial Sequence
  Description of Artificial Sequence: Synthetic oligonucleotide
  Sense strand starting at position 2915 of SEQ ID NO: 371
agcuuuggaguuuaguaaa

SEQ ID NO: 32117 - RNA, 19 nt, Artificial Sequence
  Description of Artificial Sequence: Synthetic oligonucleotide
  Antisense strand to SEQ ID NO: 32116
uuuacuaaacuccaaagcu

SEQ ID NO: 32118 - RNA, 19 nt, Artificial Sequence
  Description of Artificial Sequence: Synthetic oligonucleotide
  Sense strand starting at position 2902 of SEQ ID NO: 371
guagaagggcuccagcuuu

SEQ ID NO: 32119 - RNA, 19 nt, Artificial Sequence
  Description of Artificial Sequence: Synthetic oligonucleotide
  Antisense strand to SEQ ID NO: 32118
aaagcuggagcccuucuac

SEQ ID NO: 32120 - RNA, 19 nt, Artificial Sequence
  Description of Artificial Sequence: Synthetic oligonucleotide
  Sense strand starting at position 2871 of SEQ ID NO: 371
aguaauaaucccuguucua

SEQ ID NO: 32121 - RNA, 19 nt, Artificial Sequence
  Description of Artificial Sequence: Synthetic oligonucleotide
  Antisense strand to SEQ ID NO: 32120
uagaacagggauuauuacu

SEQ ID NO: 32122 - RNA, 19 nt, Artificial Sequence
  Description of Artificial Sequence: Synthetic oligonucleotide
  Sense strand starting at position 2852 of SEQ ID NO: 371
ucaugucaacagcagagau

SEQ ID NO: 32123 - RNA, 19 nt, Artificial Sequence
  Description of Artificial Sequence: Synthetic oligonucleotide
  Antisense strand to SEQ ID NO: 32122
aucucugcuguugacauga

SEQ ID NO: 32124 - RNA, 19 nt, Artificial Sequence
  Description of Artificial Sequence: Synthetic oligonucleotide
  Sense strand starting at position 2765 of SEQ ID NO: 371
aaagaaauguguuugcauc

SEQ ID NO: 32125 - RNA, 19 nt, Artificial Sequence
  Description of Artificial Sequence: Synthetic oligonucleotide
  Antisense strand to SEQ ID NO: 32124
gaugcaaacacauuucuuu

SEQ ID NO: 32126 - RNA, 19 nt, Artificial Sequence
  Description of Artificial Sequence: Synthetic oligonucleotide
  Sense strand starting at position 2760 of SEQ ID NO: 371
gugguaaagaaauguguuu

SEQ ID NO: 32127 - RNA, 19 nt, Artificial Sequence
  Description of Artificial Sequence: Synthetic oligonucleotide
  Antisense strand to SEQ ID NO: 32126
aaacacauuucuuuaccac

SEQ ID NO: 32128 - RNA, 19 nt, Artificial Sequence
  Description of Artificial Sequence: Synthetic oligonucleotide
  Sense strand starting at position 2691 of SEQ ID NO: 371
gaguuaaccguugagauua

SEQ ID NO: 32129 - RNA, 19 nt, Artificial Sequence
  Description of Artificial Sequence: Synthetic oligonucleotide
  Antisense strand to SEQ ID NO: 32128
uaaucucaacgguuaacuc

SEQ ID NO: 32130 - RNA, 19 nt, Artificial Sequence
  Description of Artificial Sequence: Synthetic oligonucleotide
  Sense strand starting at position 2690 of SEQ ID NO: 371
ggaguuaaccguugagauu

SEQ ID NO: 32131 - RNA, 19 nt, Artificial Sequence
  Description of Artificial Sequence: Synthetic oligonucleotide
  Antisense strand to SEQ ID NO: 32130
aaucucaacgguuaacucc

SEQ ID NO: 32132 - RNA, 19 nt, Artificial Sequence
  Description of Artificial Sequence: Synthetic oligonucleotide
  Sense strand starting at position 2350 of SEQ ID NO: 371
ugcccuagcccagaauuaa

SEQ ID NO: 32133 - RNA, 19 nt, Artificial Sequence
  Description of Artificial Sequence: Synthetic oligonucleotide
  Antisense strand to SEQ ID NO: 32132
uuaauucugggcuagggca

SEQ ID NO: 32134 - RNA, 19 nt, Artificial Sequence
  Description of Artificial Sequence: Synthetic oligonucleotide
  Sense strand starting at position 2293 of SEQ ID NO: 371
gcugcaguauaacugagaa

SEQ ID NO: 32135 - RNA, 19 nt, Artificial Sequence
  Description of Artificial Sequence: Synthetic oligonucleotide
  Antisense strand to SEQ ID NO: 32134
uucucaguuauacugcagc

SEQ ID NO: 32136 - RNA, 19 nt, Artificial Sequence
  Description of Artificial Sequence: Synthetic oligonucleotide
  Sense strand starting at position 2181 of SEQ ID NO: 371
guccucacuuuguuaaauc

SEQ ID NO: 32137 - RNA, 19 nt, Artificial Sequence
  Description of Artificial Sequence: Synthetic oligonucleotide
  Antisense strand to SEQ ID NO: 32136
gauuuaacaaagugaggac

SEQ ID NO: 32138 - RNA, 19 nt, Artificial Sequence
  Description of Artificial Sequence: Synthetic oligonucleotide
  Sense strand starting at position 2180 of SEQ ID NO: 371
aguccucacuuuguuaaau

SEQ ID NO: 32139 - RNA, 19 nt, Artificial Sequence
  Description of Artificial Sequence: Synthetic oligonucleotide
  Antisense strand to SEQ ID NO: 32138
auuuaacaaagugaggacu

SEQ ID NO: 32140 - RNA, 19 nt, Artificial Sequence
  Description of Artificial Sequence: Synthetic oligonucleotide
  Sense strand starting at position 1524 of SEQ ID NO: 371
ggaacauuccagcggagac

SEQ ID NO: 32141 - RNA, 19 nt, Artificial Sequence
  Description of Artificial Sequence: Synthetic oligonucleotide
  Antisense strand to SEQ ID NO: 32140
gucuccgcuggaauguucc

SEQ ID NO: 32142 - RNA, 19 nt, Artificial Sequence
  Description of Artificial Sequence: Synthetic oligonucleotide
  Sense strand starting at position 1455 of SEQ ID NO: 371
uccucuaagcauugaaaga

SEQ ID NO: 32143 - RNA, 19 nt, Artificial Sequence
  Description of Artificial Sequence: Synthetic oligonucleotide
  Antisense strand to SEQ ID NO: 32142
ucuuucaaugcuuagagga

SEQ ID NO: 32144 - RNA, 19 nt, Artificial Sequence
  Description of Artificial Sequence: Synthetic oligonucleotide
  Sense strand starting at position 888 of SEQ ID NO: 371
ugccucuaagcuuagcaaa

SEQ ID NO: 32145 - RNA, 19 nt, Artificial Sequence
  Description of Artificial Sequence: Synthetic oligonucleotide
  Antisense strand to SEQ ID NO: 32144
uuugcuaagcuuagaggca

SEQ ID NO: 32146 - RNA, 19 nt, Artificial Sequence
  Description of Artificial Sequence: Synthetic oligonucleotide
  Sense strand starting at position 882 of SEQ ID NO: 371
ggagaaugccucuaagcuu

SEQ ID NO: 32147 - RNA, 19 nt, Artificial Sequence
  Description of Artificial Sequence: Synthetic oligonucleotide
  Antisense strand to SEQ ID NO: 32146
aagcuuagaggcauucucc

SEQ ID NO: 32148 - RNA, 19 nt, Artificial Sequence
  Description of Artificial Sequence: Synthetic oligonucleotide
  Sense strand starting at position 567 of SEQ ID NO: 371
acgguacucagagauccuu

SEQ ID NO: 32149 - RNA, 19 nt, Artificial Sequence
  Description of Artificial Sequence: Synthetic oligonucleotide
  Antisense strand to SEQ ID NO: 32148
aaggaucucugaguaccgu

SEQ ID NO: 32150 - RNA, 19 nt, Artificial Sequence
  Description of Artificial Sequence: Synthetic oligonucleotide
  Sense strand starting at position 513 of SEQ ID NO: 371
ggugguuaauguuuaauau

SEQ ID NO: 32151 - RNA, 19 nt, Artificial Sequence
  Description of Artificial Sequence: Synthetic oligonucleotide
  Antisense strand to SEQ ID NO: 32150
auauuaaacauuaaccacc

SEQ ID NO: 32152 - RNA, 19 nt, Artificial Sequence
  Description of Artificial Sequence: Synthetic oligonucleotide
  Sense strand starting at position 384 of SEQ ID NO: 371
uucugugccaucuggaaag

SEQ ID NO: 32153 - RNA, 19 nt, Artificial Sequence
  Description of Artificial Sequence: Synthetic oligonucleotide
  Antisense strand to SEQ ID NO: 32152
cuuuccagauggcacagaa

SEQ ID NO: 32154 - RNA, 19 nt, Artificial Sequence
  Description of Artificial Sequence: Synthetic oligonucleotide
  Sense strand starting at position 224 of SEQ ID NO: 371
cgagaaagucaauggcaca

SEQ ID NO: 32155 - RNA, 19 nt, Artificial Sequence
  Description of Artificial Sequence: Synthetic oligonucleotide
  Antisense strand to SEQ ID NO: 32154
ugugccauugacuuucucg

SEQ ID NO: 32156 - RNA, 19 nt, Artificial Sequence
  Description of Artificial Sequence: Synthetic oligonucleotide
  Sense strand starting at position 164 of SEQ ID NO: 371
ucagucacucaacaguuau

SEQ ID NO: 32157 - RNA, 19 nt, Artificial Sequence
  Description of Artificial Sequence: Synthetic oligonucleotide
  Antisense strand to SEQ ID NO: 32156
auaacuguugagugacuga

SEQ ID NO: 32158 - RNA, 19 nt, Artificial Sequence
  Description of Artificial Sequence: Synthetic oligonucleotide
  Sense strand starting at position 3949 of SEQ ID NO: 372
aggaaugaauuaugaccua

SEQ ID NO: 32159 - RNA, 19 nt, Artificial Sequence
  Description of Artificial Sequence: Synthetic oligonucleotide
  Antisense strand to SEQ ID NO: 32158
uaggucauaauucauuccu

SEQ ID NO: 32160 - RNA, 19 nt, Artificial Sequence
  Description of Artificial Sequence: Synthetic oligonucleotide
  Sense strand starting at position 3761 of SEQ ID NO: 372
gcguuagaaauagaaguca

SEQ ID NO: 32161 - RNA, 19 nt, Artificial Sequence
  Description of Artificial Sequence: Synthetic oligonucleotide
  Antisense strand to SEQ ID NO: 32160
ugacuucuauuucuaacgc

SEQ ID NO: 32162 - RNA, 19 nt, Artificial Sequence
  Description of Artificial Sequence: Synthetic oligonucleotide
  Sense strand starting at position 3759 of SEQ ID NO: 372
gugcguuagaaauagaagu

SEQ ID NO: 32163 - RNA, 19 nt, Artificial Sequence
  Description of Artificial Sequence: Synthetic oligonucleotide
  Antisense strand to SEQ ID NO: 32162
acuucuauuucuaacgcac

SEQ ID NO: 32164 - RNA, 19 nt, Artificial Sequence
  Description of Artificial Sequence: Synthetic oligonucleotide
  Sense strand starting at position 3681 of SEQ ID NO: 372
uguuguauuuccgaagaug

SEQ ID NO: 32165 - RNA, 19 nt, Artificial Sequence
  Description of Artificial Sequence: Synthetic oligonucleotide
  Antisense strand to SEQ ID NO: 32164
caucuucggaaauacaaca

SEQ ID NO: 32166 - RNA, 19 nt, Artificial Sequence
  Description of Artificial Sequence: Synthetic oligonucleotide
  Sense strand starting at position 3679 of SEQ ID NO: 372
guuguuguauuuccgaaga

SEQ ID NO: 32167 - RNA, 19 nt, Artificial Sequence
  Description of Artificial Sequence: Synthetic oligonucleotide
  Antisense strand to SEQ ID NO: 32166
ucuucggaaauacaacaac

SEQ ID NO: 32168 - RNA, 19 nt, Artificial Sequence
  Description of Artificial Sequence: Synthetic oligonucleotide
  Sense strand starting at position 3632 of SEQ ID NO: 372
cgauaaacuugcccacuuu

SEQ ID NO: 32169 - RNA, 19 nt, Artificial Sequence
  Description of Artificial Sequence: Synthetic oligonucleotide
  Antisense strand to SEQ ID NO: 32168
aaagugggcaaguuuaucg

SEQ ID NO: 32170 - RNA, 19 nt, Artificial Sequence
  Description of Artificial Sequence: Synthetic oligonucleotide
  Sense strand starting at position 3618 of SEQ ID NO: 372
guauaugaaucucucgaua

SEQ ID NO: 32171 - RNA, 19 nt, Artificial Sequence
  Description of Artificial Sequence: Synthetic oligonucleotide
  Antisense strand to SEQ ID NO: 32170
uaucgagagauucauauac

SEQ ID NO: 32172 - RNA, 19 nt, Artificial Sequence
  Description of Artificial Sequence: Synthetic oligonucleotide
  Sense strand starting at position 3546 of SEQ ID NO: 372
cgcgccaggccucaaauua

SEQ ID NO: 32173 - RNA, 19 nt, Artificial Sequence
  Description of Artificial Sequence: Synthetic oligonucleotide
  Antisense strand to SEQ ID NO: 32172
uaauuugaggccuggcgcg

SEQ ID NO: 32174 - RNA, 19 nt, Artificial Sequence
  Description of Artificial Sequence: Synthetic oligonucleotide
  Sense strand starting at position 3378 of SEQ ID NO: 372
ucccaaauaguuggaucua

SEQ ID NO: 32175 - RNA, 19 nt, Artificial Sequence
  Description of Artificial Sequence: Synthetic oligonucleotide
  Antisense strand to SEQ ID NO: 32174
uagauccaacuauuuggga

SEQ ID NO: 32176 - RNA, 19 nt, Artificial Sequence
  Description of Artificial Sequence: Synthetic oligonucleotide
  Sense strand starting at position 3358 of SEQ ID NO: 372
gcgauucucgugccucauu

SEQ ID NO: 32177 - RNA, 19 nt, Artificial Sequence
  Description of Artificial Sequence: Synthetic oligonucleotide
  Antisense strand to SEQ ID NO: 32176
aaugaggcacgagaaucgc

SEQ ID NO: 32178 - RNA, 19 nt, Artificial Sequence
  Description of Artificial Sequence: Synthetic oligonucleotide
  Sense strand starting at position 3155 of SEQ ID NO: 372
uguugaccucuagggagaa

SEQ ID NO: 32179 - RNA, 19 nt, Artificial Sequence
  Description of Artificial Sequence: Synthetic oligonucleotide
  Antisense strand to SEQ ID NO: 32178
uucucccuagaggucaaca

SEQ ID NO: 32180 - RNA, 19 nt, Artificial Sequence
  Description of Artificial Sequence: Synthetic oligonucleotide
  Sense strand starting at position 3019 of SEQ ID NO: 372
ggcuguaccuaaucagagu

SEQ ID NO: 32181 - RNA, 19 nt, Artificial Sequence
  Description of Artificial Sequence: Synthetic oligonucleotide
  Antisense strand to SEQ ID NO: 32180
acucugauuagguacagcc

SEQ ID NO: 32182 - RNA, 19 nt, Artificial Sequence
  Description of Artificial Sequence: Synthetic oligonucleotide
  Sense strand starting at position 3012 of SEQ ID NO: 372
guccuaaggcuguaccuaa

SEQ ID NO: 32183 - RNA, 19 nt, Artificial Sequence
  Description of Artificial Sequence: Synthetic oligonucleotide
  Antisense strand to SEQ ID NO: 32182
uuagguacagccuuaggac

SEQ ID NO: 32184 - RNA, 19 nt, Artificial Sequence
  Description of Artificial Sequence: Synthetic oligonucleotide
  Sense strand starting at position 2979 of SEQ ID NO: 372
cuacguacuguuugaacaa

SEQ ID NO: 32185 - RNA, 19 nt, Artificial Sequence
  Description of Artificial Sequence: Synthetic oligonucleotide
  Antisense strand to SEQ ID NO: 32184
uuguucaaacaguacguag

SEQ ID NO: 32186 - RNA, 19 nt, Artificial Sequence
  Description of Artificial Sequence: Synthetic oligonucleotide
  Sense strand starting at position 2906 of SEQ ID NO: 372
uacauagucucagcugaag

SEQ ID NO: 32187 - RNA, 19 nt, Artificial Sequence
  Description of Artificial Sequence: Synthetic oligonucleotide
  Antisense strand to SEQ ID NO: 32186
cuucagcugagacuaugua

SEQ ID NO: 32188 - RNA, 19 nt, Artificial Sequence
  Description of Artificial Sequence: Synthetic oligonucleotide
  Sense strand starting at position 2682 of SEQ ID NO: 372
uuuguucucacgggacaaa

SEQ ID NO: 32189 - RNA, 19 nt, Artificial Sequence
  Description of Artificial Sequence: Synthetic oligonucleotide
  Antisense strand to SEQ ID NO: 32188
uuugucccgugagaacaaa

SEQ ID NO: 32190 - RNA, 19 nt, Artificial Sequence
  Description of Artificial Sequence: Synthetic oligonucleotide
  Sense strand starting at position 2681 of SEQ ID NO: 372
cuuuguucucacgggacaa

SEQ ID NO: 32191 - RNA, 19 nt, Artificial Sequence
  Description of Artificial Sequence: Synthetic oligonucleotide
  Antisense strand to SEQ ID NO: 32190
uugucccgugagaacaaag

SEQ ID NO: 32192 - RNA, 19 nt, Artificial Sequence
  Description of Artificial Sequence: Synthetic oligonucleotide
  Sense strand starting at position 2639 of SEQ ID NO: 372
auugguuuccucuacacau

SEQ ID NO: 32193 - RNA, 19 nt, Artificial Sequence
  Description of Artificial Sequence: Synthetic oligonucleotide
  Antisense strand to SEQ ID NO: 32192
auguguagaggaaaccaau

SEQ ID NO: 32194 - RNA, 19 nt, Artificial Sequence
  Description of Artificial Sequence: Synthetic oligonucleotide
  Sense strand starting at position 2636 of SEQ ID NO: 372
uguauugguuuccucuaca

SEQ ID NO: 32195 - RNA, 19 nt, Artificial Sequence
  Description of Artificial Sequence: Synthetic oligonucleotide
  Antisense strand to SEQ ID NO: 32194
uguagaggaaaccaauaca

SEQ ID NO: 32196 - RNA, 19 nt, Artificial Sequence
  Description of Artificial Sequence: Synthetic oligonucleotide
  Sense strand starting at position 2573 of SEQ ID NO: 372
gggucugcaucuuuauaaa

SEQ ID NO: 32197 - RNA, 19 nt, Artificial Sequence
  Description of Artificial Sequence: Synthetic oligonucleotide
  Antisense strand to SEQ ID NO: 32196
uuuauaaagaugcagaccc

SEQ ID NO: 32198 - RNA, 19 nt, Artificial Sequence
  Description of Artificial Sequence: Synthetic oligonucleotide
  Sense strand starting at position 2355 of SEQ ID NO: 372
cucuaagucuugucccacu

SEQ ID NO: 32199 - RNA, 19 nt, Artificial Sequence
  Description of Artificial Sequence: Synthetic oligonucleotide
  Antisense strand to SEQ ID NO: 32198
agugggacaagacuuagag

SEQ ID NO: 32200 - RNA, 19 nt, Artificial Sequence
  Description of Artificial Sequence: Synthetic oligonucleotide
  Sense strand starting at position 2278 of SEQ ID NO: 372
gagaguggacaucgccaaa

SEQ ID NO: 32201 - RNA, 19 nt, Artificial Sequence
  Description of Artificial Sequence: Synthetic oligonucleotide
  Antisense strand to SEQ ID NO: 32200
uuuggcgauguccacucuc

SEQ ID NO: 32202 - RNA, 19 nt, Artificial Sequence
  Description of Artificial Sequence: Synthetic oligonucleotide
  Sense strand starting at position 2248 of SEQ ID NO: 372
ccagaaacuuaugaaugaa

SEQ ID NO: 32203 - RNA, 19 nt, Artificial Sequence
  Description of Artificial Sequence: Synthetic oligonucleotide
  Antisense strand to SEQ ID NO: 32202
uucauucauaaguuucugg

SEQ ID NO: 32204 - RNA, 19 nt, Artificial Sequence
  Description of Artificial Sequence: Synthetic oligonucleotide
  Sense strand starting at position 2239 of SEQ ID NO: 372
gccuguaggccagaaacuu

SEQ ID NO: 32205 - RNA, 19 nt, Artificial Sequence
  Description of Artificial Sequence: Synthetic oligonucleotide
  Antisense strand to SEQ ID NO: 32204
aaguuucuggccuacaggc

SEQ ID NO: 32206 - RNA, 19 nt, Artificial Sequence
  Description of Artificial Sequence: Synthetic oligonucleotide
  Sense strand starting at position 1426 of SEQ ID NO: 372
caagaaagcguuggaagau

SEQ ID NO: 32207 - RNA, 19 nt, Artificial Sequence
  Description of Artificial Sequence: Synthetic oligonucleotide
  Antisense strand to SEQ ID NO: 32206
aucuuccaacgcuuucuug

SEQ ID NO: 32208 - RNA, 19 nt, Artificial Sequence
  Description of Artificial Sequence: Synthetic oligonucleotide
  Sense strand starting at position 1425 of SEQ ID NO: 372
gcaagaaagcguuggaaga

SEQ ID NO: 32209 - RNA, 19 nt, Artificial Sequence
  Description of Artificial Sequence: Synthetic oligonucleotide
  Antisense strand to SEQ ID NO: 32208
ucuuccaacgcuuucuugc

SEQ ID NO: 32210 - RNA, 19 nt, Artificial Sequence
  Description of Artificial Sequence: Synthetic oligonucleotide
  Sense strand starting at position 1138 of SEQ ID NO: 372
cugcgaugguggaguaaag

SEQ ID NO: 32211 - RNA, 19 nt, Artificial Sequence
  Description of Artificial Sequence: Synthetic oligonucleotide
  Antisense strand to SEQ ID NO: 32210
cuuuacuccaccaucgcag

SEQ ID NO: 32212 - RNA, 19 nt, Artificial Sequence
  Description of Artificial Sequence: Synthetic oligonucleotide
  Sense strand starting at position 1060 of SEQ ID NO: 372
cgcagcuucggagauuuga

SEQ ID NO: 32213 - RNA, 19 nt, Artificial Sequence
  Description of Artificial Sequence: Synthetic oligonucleotide
  Antisense strand to SEQ ID NO: 32212
ucaaaucuccgaagcugcg

SEQ ID NO: 32214 - RNA, 19 nt, Artificial Sequence
  Description of Artificial Sequence: Synthetic oligonucleotide
  Sense strand starting at position 988 of SEQ ID NO: 372
gugcaaguuugguucccaa

SEQ ID NO: 32215 - RNA, 19 nt, Artificial Sequence
  Description of Artificial Sequence: Synthetic oligonucleotide
  Antisense strand to SEQ ID NO: 32214
uugggaaccaaacuugcac

SEQ ID NO: 32216 - RNA, 19 nt, Artificial Sequence
  Description of Artificial Sequence: Synthetic oligonucleotide
  Sense strand starting at position 805 of SEQ ID NO: 372
ccauuaacacguggaauuc

SEQ ID NO: 32217 - RNA, 19 nt, Artificial Sequence
  Description of Artificial Sequence: Synthetic oligonucleotide
  Antisense strand to SEQ ID NO: 32216
gaauuccacguguuaaugg

SEQ ID NO: 32218 - RNA, 19 nt, Artificial Sequence
  Description of Artificial Sequence: Synthetic oligonucleotide
  Sense strand starting at position 553 of SEQ ID NO: 372
guguuuccucgucaaagaa

SEQ ID NO: 32219 - RNA, 19 nt, Artificial Sequence
  Description of Artificial Sequence: Synthetic oligonucleotide
  Antisense strand to SEQ ID NO: 32218
uucuuugacgaggaaacac

SEQ ID NO: 32220 - RNA, 19 nt, Artificial Sequence
  Description of Artificial Sequence: Synthetic oligonucleotide
  Sense strand starting at position 552 of SEQ ID NO: 372
aguguuuccucgucaaaga

SEQ ID NO: 32221 - RNA, 19 nt, Artificial Sequence
  Description of Artificial Sequence: Synthetic oligonucleotide
  Antisense strand to SEQ ID NO: 32220
ucuuugacgaggaaacacu

SEQ ID NO: 32222 - RNA, 19 nt, Artificial Sequence
  Description of Artificial Sequence: Synthetic oligonucleotide
  Sense strand starting at position 549 of SEQ ID NO: 372
cauaguguuuccucgucaa

SEQ ID NO: 32223 - RNA, 19 nt, Artificial Sequence
  Description of Artificial Sequence: Synthetic oligonucleotide
  Antisense strand to SEQ ID NO: 32222
uugacgaggaaacacuaug

SEQ ID NO: 32224 - RNA, 19 nt, Artificial Sequence
  Description of Artificial Sequence: Synthetic oligonucleotide
  Sense strand starting at position 494 of SEQ ID NO: 372
ugauauuguuacucguauc

SEQ ID NO: 32225 - RNA, 19 nt, Artificial Sequence
  Description of Artificial Sequence: Synthetic oligonucleotide
  Antisense strand to SEQ ID NO: 32224
gauacgaguaacaauauca

SEQ ID NO: 32226 - RNA, 19 nt, Artificial Sequence
  Description of Artificial Sequence: Synthetic oligonucleotide
  Sense strand starting at position 493 of SEQ ID NO: 372
uugauauuguuacucguau

SEQ ID NO: 32227 - RNA, 19 nt, Artificial Sequence
  Description of Artificial Sequence: Synthetic oligonucleotide
  Antisense strand to SEQ ID NO: 32226
auacgaguaacaauaucaa

SEQ ID NO: 32228 - RNA, 19 nt, Artificial Sequence
  Description of Artificial Sequence: Synthetic oligonucleotide
  Sense strand starting at position 470 of SEQ ID NO: 372
ccaggcaccugagucuuaa

SEQ ID NO: 32229 - RNA, 19 nt, Artificial Sequence
  Description of Artificial Sequence: Synthetic oligonucleotide
  Antisense strand to SEQ ID NO: 32228
uuaagacucaggugccugg

SEQ ID NO: 32230 - RNA, 19 nt, Artificial Sequence
  Description of Artificial Sequence: Synthetic oligonucleotide
  Sense strand starting at position 372 of SEQ ID NO: 372
guuuguuguggugguagga

SEQ ID NO: 32231 - RNA, 19 nt, Artificial Sequence
  Description of Artificial Sequence: Synthetic oligonucleotide
  Antisense strand to SEQ ID NO: 32230
uccuaccaccacaacaaac

SEQ ID NO: 32232 - RNA, 19 nt, Artificial Sequence
  Description of Artificial Sequence: Synthetic oligonucleotide
  Sense strand starting at position 299 of SEQ ID NO: 372
aauuacugagucuggcaau

SEQ ID NO: 32233 - RNA, 19 nt, Artificial Sequence
  Description of Artificial Sequence: Synthetic oligonucleotide
  Antisense strand to SEQ ID NO: 32232
auugccagacucaguaauu

SEQ ID NO: 32234 - RNA, 19 nt, Artificial Sequence
  Description of Artificial Sequence: Synthetic oligonucleotide
  Sense strand starting at position 112 of SEQ ID NO: 372
aaaugugacucugauacag

SEQ ID NO: 32235 - RNA, 19 nt, Artificial Sequence
  Description of Artificial Sequence: Synthetic oligonucleotide
  Antisense strand to SEQ ID NO: 32234
cuguaucagagucacauuu

SEQ ID NO: 32236 - RNA, 19 nt, Artificial Sequence
  Description of Artificial Sequence: Synthetic oligonucleotide
  Sense strand starting at position 108 of SEQ ID NO: 372
ucauaaaugugacucugau

SEQ ID NO: 32237 - RNA, 19 nt, Artificial Sequence
  Description of Artificial Sequence: Synthetic oligonucleotide
  Antisense strand to SEQ ID NO: 32236
aucagagucacauuuauga

SEQ ID NO: 32238 - RNA, 19 nt, Artificial Sequence
  Description of Artificial Sequence: Synthetic oligonucleotide
  Sense strand starting at position 3882 of SEQ ID NO: 373
ggugguagcuauagagaag

SEQ ID NO: 32239 - RNA, 19 nt, Artificial Sequence
  Description of Artificial Sequence: Synthetic oligonucleotide
  Antisense strand to SEQ ID NO: 32238
cuucucuauagcuaccacc

SEQ ID NO: 32240 - RNA, 19 nt, Artificial Sequence
  Description of Artificial Sequence: Synthetic oligonucleotide
  Sense strand starting at position 3766 of SEQ ID NO: 373
agcuaaagacuuuggacuu

SEQ ID NO: 32241 - RNA, 19 nt, Artificial Sequence
  Description of Artificial Sequence: Synthetic oligonucleotide
  Antisense strand to SEQ ID NO: 32240
aaguccaaagucuuuagcu

SEQ ID NO: 32242 - RNA, 19 nt, Artificial Sequence
  Description of Artificial Sequence: Synthetic oligonucleotide
  Sense strand starting at position 3740 of SEQ ID NO: 373
caaguuggucagggucuua

SEQ ID NO: 32243 - RNA, 19 nt, Artificial Sequence
  Description of Artificial Sequence: Synthetic oligonucleotide
  Antisense strand to SEQ ID NO: 32242
uaagacccugaccaacuug

SEQ ID NO: 32244 - RNA, 19 nt, Artificial Sequence
  Description of Artificial Sequence: Synthetic oligonucleotide
  Sense strand starting at position 3680 of SEQ ID NO: 373
ggauaugcuuagguuagag

SEQ ID NO: 32245 - RNA, 19 nt, Artificial Sequence
  Description of Artificial Sequence: Synthetic oligonucleotide
  Antisense strand to SEQ ID NO: 32244
cucuaaccuaagcauaucc

SEQ ID NO: 32246 - RNA, 19 nt, Artificial Sequence
  Description of Artificial Sequence: Synthetic oligonucleotide
  Sense strand starting at position 3677 of SEQ ID NO: 373
auuggauaugcuuagguua

SEQ ID NO: 32247 - RNA, 19 nt, Artificial Sequence
  Description of Artificial Sequence: Synthetic oligonucleotide
  Antisense strand to SEQ ID NO: 32246
uaaccuaagcauauccaau

SEQ ID NO: 32248 - RNA, 19 nt, Artificial Sequence
  Description of Artificial Sequence: Synthetic oligonucleotide
  Sense strand starting at position 3614 of SEQ ID NO: 373
uguuauuaucuuugacuug

SEQ ID NO: 32249 - RNA, 19 nt, Artificial Sequence
  Description of Artificial Sequence: Synthetic oligonucleotide
  Antisense strand to SEQ ID NO: 32248
caagucaaagauaauaaca

SEQ ID NO: 32250 - RNA, 19 nt, Artificial Sequence
  Description of Artificial Sequence: Synthetic oligonucleotide
  Sense strand starting at position 3593 of SEQ ID NO: 373
cacuccgaugcuuacagau

SEQ ID NO: 32251 - RNA, 19 nt, Artificial Sequence
  Description of Artificial Sequence: Synthetic oligonucleotide
  Antisense strand to SEQ ID NO: 32250
aucuguaagcaucggagug

SEQ ID NO: 32252 - RNA, 19 nt, Artificial Sequence
  Description of Artificial Sequence: Synthetic oligonucleotide
  Sense strand starting at position 3534 of SEQ ID NO: 373
acgcuauacugucccagaa

SEQ ID NO: 32253 - RNA, 19 nt, Artificial Sequence
  Description of Artificial Sequence: Synthetic oligonucleotide
  Antisense strand to SEQ ID NO: 32252
uucugggacaguauagcgu

SEQ ID NO: 32254 - RNA, 19 nt, Artificial Sequence
  Description of Artificial Sequence: Synthetic oligonucleotide
  Sense strand starting at position 3436 of SEQ ID NO: 373
ucagaaagauuagaaacuu

SEQ ID NO: 32255 - RNA, 19 nt, Artificial Sequence
  Description of Artificial Sequence: Synthetic oligonucleotide
  Antisense strand to SEQ ID NO: 32254
aaguuucuaaucuuucuga

SEQ ID NO: 32256 - RNA, 19 nt, Artificial Sequence
  Description of Artificial Sequence: Synthetic oligonucleotide
  Sense strand starting at position 3427 of SEQ ID NO: 373
gaaacugggucagaaagau

SEQ ID NO: 32257 - RNA, 19 nt, Artificial Sequence
  Description of Artificial Sequence: Synthetic oligonucleotide
  Antisense strand to SEQ ID NO: 32256
aucuuucugacccaguuuc

SEQ ID NO: 32258 - RNA, 19 nt, Artificial Sequence
  Description of Artificial Sequence: Synthetic oligonucleotide
  Sense strand starting at position 3353 of SEQ ID NO: 373
uuacauacauuaucgaguu

SEQ ID NO: 32259 - RNA, 19 nt, Artificial Sequence
  Description of Artificial Sequence: Synthetic oligonucleotide
  Antisense strand to SEQ ID NO: 32258
aacucgauaauguauguaa

SEQ ID NO: 32260 - RNA, 19 nt, Artificial Sequence
  Description of Artificial Sequence: Synthetic oligonucleotide
  Sense strand starting at position 3026 of SEQ ID NO: 373
aucuaacuacuguguuaaa

SEQ ID NO: 32261 - RNA, 19 nt, Artificial Sequence
  Description of Artificial Sequence: Synthetic oligonucleotide
  Antisense strand to SEQ ID NO: 32260
uuuaacacaguaguuagau

SEQ ID NO: 32262 - RNA, 19 nt, Artificial Sequence
  Description of Artificial Sequence: Synthetic oligonucleotide
  Sense strand starting at position 2964 of SEQ ID NO: 373
uaugaaugugcucagaggu

SEQ ID NO: 32263 - RNA, 19 nt, Artificial Sequence
  Description of Artificial Sequence: Synthetic oligonucleotide
  Antisense strand to SEQ ID NO: 32262
accucugagcacauucaua

SEQ ID NO: 32264 - RNA, 19 nt, Artificial Sequence
  Description of Artificial Sequence: Synthetic oligonucleotide
  Sense strand starting at position 2963 of SEQ ID NO: 373
guaugaaugugcucagagg

SEQ ID NO: 32265 - RNA, 19 nt, Artificial Sequence
  Description of Artificial Sequence: Synthetic oligonucleotide
  Antisense strand to SEQ ID NO: 32264
ccucugagcacauucauac

SEQ ID NO: 32266 - RNA, 19 nt, Artificial Sequence
  Description of Artificial Sequence: Synthetic oligonucleotide
  Sense strand starting at position 2961 of SEQ ID NO: 373
uuguaugaaugugcucaga

SEQ ID NO: 32267 - RNA, 19 nt, Artificial Sequence
  Description of Artificial Sequence: Synthetic oligonucleotide
  Antisense strand to SEQ ID NO: 32266
ucugagcacauucauacaa

SEQ ID NO: 32268 - RNA, 19 nt, Artificial Sequence
  Description of Artificial Sequence: Synthetic oligonucleotide
  Sense strand starting at position 2954 of SEQ ID NO: 373
gagugaauuguaugaaugu

SEQ ID NO: 32269 - RNA, 19 nt, Artificial Sequence
  Description of Artificial Sequence: Synthetic oligonucleotide
  Antisense strand to SEQ ID NO: 32268
acauucauacaauucacuc

SEQ ID NO: 32270 - RNA, 19 nt, Artificial Sequence
  Description of Artificial Sequence: Synthetic oligonucleotide
  Sense strand starting at position 2950 of SEQ ID NO: 373
acuugagugaauuguauga

SEQ ID NO: 32271 - RNA, 19 nt, Artificial Sequence
  Description of Artificial Sequence: Synthetic oligonucleotide
  Antisense strand to SEQ ID NO: 32270
ucauacaauucacucaagu

SEQ ID NO: 32272 - RNA, 19 nt, Artificial Sequence
  Description of Artificial Sequence: Synthetic oligonucleotide
  Sense strand starting at position 2945 of SEQ ID NO: 373
uaaugacuugagugaauug

SEQ ID NO: 32273 - RNA, 19 nt, Artificial Sequence
  Description of Artificial Sequence: Synthetic oligonucleotide
  Antisense strand to SEQ ID NO: 32272
caauucacucaagucauua

SEQ ID NO: 32274 - RNA, 19 nt, Artificial Sequence
  Description of Artificial Sequence: Synthetic oligonucleotide
  Sense strand starting at position 2873 of SEQ ID NO: 373
ggaugugcccgaggucaua

SEQ ID NO: 32275 - RNA, 19 nt, Artificial Sequence
  Description of Artificial Sequence: Synthetic oligonucleotide
  Antisense strand to SEQ ID NO: 32274
uaugaccucgggcacaucc

SEQ ID NO: 32276 - RNA, 19 nt, Artificial Sequence
  Description of Artificial Sequence: Synthetic oligonucleotide
  Sense strand starting at position 2757 of SEQ ID NO: 373
gcuuuaaagaugugaggac

SEQ ID NO: 32277 - RNA, 19 nt, Artificial Sequence
  Description of Artificial Sequence: Synthetic oligonucleotide
  Antisense strand to SEQ ID NO: 32276
guccucacaucuuuaaagc

SEQ ID NO: 32278 - RNA, 19 nt, Artificial Sequence
  Description of Artificial Sequence: Synthetic oligonucleotide
  Sense strand starting at position 2693 of SEQ ID NO: 373
ccugccuaucuggaagaua

SEQ ID NO: 32279 - RNA, 19 nt, Artificial Sequence
  Description of Artificial Sequence: Synthetic oligonucleotide
  Antisense strand to SEQ ID NO: 32278
uaucuuccagauaggcagg

SEQ ID NO: 32280 - RNA, 19 nt, Artificial Sequence
  Description of Artificial Sequence: Synthetic oligonucleotide
  Sense strand starting at position 2582 of SEQ ID NO: 373
aaggaaguaacguguguuu

SEQ ID NO: 32281 - RNA, 19 nt, Artificial Sequence
  Description of Artificial Sequence: Synthetic oligonucleotide
  Antisense strand to SEQ ID NO: 32280
aaacacacguuacuuccuu

SEQ ID NO: 32282 - RNA, 19 nt, Artificial Sequence
  Description of Artificial Sequence: Synthetic oligonucleotide
  Sense strand starting at position 2522 of SEQ ID NO: 373
gccagagcuacuuagggua

SEQ ID NO: 32283 - RNA, 19 nt, Artificial Sequence
  Description of Artificial Sequence: Synthetic oligonucleotide
  Antisense strand to SEQ ID NO: 32282
uacccuaaguagcucuggc

SEQ ID NO: 32284 - RNA, 19 nt, Artificial Sequence
  Description of Artificial Sequence: Synthetic oligonucleotide
  Sense strand starting at position 2396 of SEQ ID NO: 373
ugcagaacucggugcagaa

SEQ ID NO: 32285 - RNA, 19 nt, Artificial Sequence
  Description of Artificial Sequence: Synthetic oligonucleotide
  Antisense strand to SEQ ID NO: 32284
uucugcaccgaguucugca

SEQ ID NO: 32286 - RNA, 19 nt, Artificial Sequence
  Description of Artificial Sequence: Synthetic oligonucleotide
  Sense strand starting at position 2375 of SEQ ID NO: 373
acacgagagucguauuuau

SEQ ID NO: 32287 - RNA, 19 nt, Artificial Sequence
  Description of Artificial Sequence: Synthetic oligonucleotide
  Antisense strand to SEQ ID NO: 32286
auaaauacgacucucgugu

SEQ ID NO: 32288 - RNA, 19 nt, Artificial Sequence
  Description of Artificial Sequence: Synthetic oligonucleotide
  Sense strand starting at position 2373 of SEQ ID NO: 373
cuacacgagagucguauuu

SEQ ID NO: 32289 - RNA, 19 nt, Artificial Sequence
  Description of Artificial Sequence: Synthetic oligonucleotide
  Antisense strand to SEQ ID NO: 32288
aaauacgacucucguguag

SEQ ID NO: 32290 - RNA, 19 nt, Artificial Sequence
  Description of Artificial Sequence: Synthetic oligonucleotide
  Sense strand starting at position 2143 of SEQ ID NO: 373
cgcgauuugaaggguacga

SEQ ID NO: 32291 - RNA, 19 nt, Artificial Sequence
  Description of Artificial Sequence: Synthetic oligonucleotide
  Antisense strand to SEQ ID NO: 32290
ucguacccuucaaaucgcg

SEQ ID NO: 32292 - RNA, 19 nt, Artificial Sequence
  Description of Artificial Sequence: Synthetic oligonucleotide
  Sense strand starting at position 2115 of SEQ ID NO: 373
cagcuaucacgagagucua

SEQ ID NO: 32293 - RNA, 19 nt, Artificial Sequence
  Description of Artificial Sequence: Synthetic oligonucleotide
  Antisense strand to SEQ ID NO: 32292
uagacucucgugauagcug

SEQ ID NO: 32294 - RNA, 19 nt, Artificial Sequence
  Description of Artificial Sequence: Synthetic oligonucleotide
  Sense strand starting at position 2105 of SEQ ID NO: 373
gggaaagucucagcuauca

SEQ ID NO: 32295 - RNA, 19 nt, Artificial Sequence
  Description of Artificial Sequence: Synthetic oligonucleotide
  Antisense strand to SEQ ID NO: 32294
ugauagcugagacuuuccc

SEQ ID NO: 32296 - RNA, 19 nt, Artificial Sequence
  Description of Artificial Sequence: Synthetic oligonucleotide
  Sense strand starting at position 1249 of SEQ ID NO: 373
gaaggagcaagaugguauu

SEQ ID NO: 32297 - RNA, 19 nt, Artificial Sequence
  Description of Artificial Sequence: Synthetic oligonucleotide
  Antisense strand to SEQ ID NO: 32296
aauaccaucuugcuccuuc

SEQ ID NO: 32298 - RNA, 19 nt, Artificial Sequence
  Description of Artificial Sequence: Synthetic oligonucleotide
  Sense strand starting at position 1233 of SEQ ID NO: 373
uggcauaaaggguagugaa

SEQ ID NO: 32299 - RNA, 19 nt, Artificial Sequence
  Description of Artificial Sequence: Synthetic oligonucleotide
  Antisense strand to SEQ ID NO: 32298
uucacuacccuuuaugcca

SEQ ID NO: 32300 - RNA, 19 nt, Artificial Sequence
  Description of Artificial Sequence: Synthetic oligonucleotide
  Sense strand starting at position 1222 of SEQ ID NO: 373
ucugauguuccuggcauaa

SEQ ID NO: 32301 - RNA, 19 nt, Artificial Sequence
  Description of Artificial Sequence: Synthetic oligonucleotide
  Antisense strand to SEQ ID NO: 32300
uuaugccaggaacaucaga

SEQ ID NO: 32302 - RNA, 19 nt, Artificial Sequence
  Description of Artificial Sequence: Synthetic oligonucleotide
  Sense strand starting at position 1073 of SEQ ID NO: 373
ugugcucagcccuggagau

SEQ ID NO: 32303 - RNA, 19 nt, Artificial Sequence
  Description of Artificial Sequence: Synthetic oligonucleotide
  Antisense strand to SEQ ID NO: 32302
aucuccagggcugagcaca

SEQ ID NO: 32304 - RNA, 19 nt, Artificial Sequence
  Description of Artificial Sequence: Synthetic oligonucleotide
  Sense strand starting at position 1063 of SEQ ID NO: 373
gacagauaucugugcucag

SEQ ID NO: 32305 - RNA, 19 nt, Artificial Sequence
  Description of Artificial Sequence: Synthetic oligonucleotide
  Antisense strand to SEQ ID NO: 32304
cugagcacagauaucuguc

SEQ ID NO: 32306 - RNA, 19 nt, Artificial Sequence
  Description of Artificial Sequence: Synthetic oligonucleotide
  Sense strand starting at position 1038 of SEQ ID NO: 373
cccucaaucuuagauagga

SEQ ID NO: 32307 - RNA, 19 nt, Artificial Sequence
  Description of Artificial Sequence: Synthetic oligonucleotide
  Antisense strand to SEQ ID NO: 32306
uccuaucuaagauugaggg

SEQ ID NO: 32308 - RNA, 19 nt, Artificial Sequence
  Description of Artificial Sequence: Synthetic oligonucleotide
  Sense strand starting at position 1003 of SEQ ID NO: 373
gagucuagacgcugggaaa

SEQ ID NO: 32309 - RNA, 19 nt, Artificial Sequence
  Description of Artificial Sequence: Synthetic oligonucleotide
  Antisense strand to SEQ ID NO: 32308
uuucccagcgucuagacuc

SEQ ID NO: 32310 - RNA, 19 nt, Artificial Sequence
  Description of Artificial Sequence: Synthetic oligonucleotide
  Sense strand starting at position 979 of SEQ ID NO: 373
ucugauaaccuguggcaac

SEQ ID NO: 32311 - RNA, 19 nt, Artificial Sequence
  Description of Artificial Sequence: Synthetic oligonucleotide
  Antisense strand to SEQ ID NO: 32310
guugccacagguuaucaga

SEQ ID NO: 32312 - RNA, 19 nt, Artificial Sequence
  Description of Artificial Sequence: Synthetic oligonucleotide
  Sense strand starting at position 785 of SEQ ID NO: 373
gcaugagcuuccuuguuug

SEQ ID NO: 32313 - RNA, 19 nt, Artificial Sequence
  Description of Artificial Sequence: Synthetic oligonucleotide
  Antisense strand to SEQ ID NO: 32312
caaacaaggaagcucaugc

SEQ ID NO: 32314 - RNA, 19 nt, Artificial Sequence
  Description of Artificial Sequence: Synthetic oligonucleotide
  Sense strand starting at position 524 of SEQ ID NO: 373
cccauugggacuggugaga

SEQ ID NO: 32315 - RNA, 19 nt, Artificial Sequence
  Description of Artificial Sequence: Synthetic oligonucleotide
  Antisense strand to SEQ ID NO: 32314
ucucaccagucccaauggg

SEQ ID NO: 32316 - RNA, 19 nt, Artificial Sequence
  Description of Artificial Sequence: Synthetic oligonucleotide
  Sense strand starting at position 484 of SEQ ID NO: 373
gagauugggacuuggcauu

SEQ ID NO: 32317 - RNA, 19 nt, Artificial Sequence
  Description of Artificial Sequence: Synthetic oligonucleotide
  Antisense strand to SEQ ID NO: 32316
aaugccaagucccaaucuc

SEQ ID NO: 32318 - RNA, 19 nt, Artificial Sequence
  Description of Artificial Sequence: Synthetic oligonucleotide
  Sense strand starting at position 3657 of SEQ ID NO: 374
ccaguauauugacuuauag

SEQ ID NO: 32319 - RNA, 19 nt, Artificial Sequence
  Description of Artificial Sequence: Synthetic oligonucleotide
  Antisense strand to SEQ ID NO: 32318
cuauaagucaauauacugg

SEQ ID NO: 32320 - RNA, 19 nt, Artificial Sequence
  Description of Artificial Sequence: Synthetic oligonucleotide
  Sense strand starting at position 3615 of SEQ ID NO: 374
ugucuacugccacagcuau

SEQ ID NO: 32321 - RNA, 19 nt, Artificial Sequence
  Description of Artificial Sequence: Synthetic oligonucleotide
  Antisense strand to SEQ ID NO: 32320
auagcuguggcaguagaca

SEQ ID NO: 32322 - RNA, 19 nt, Artificial Sequence
  Description of Artificial Sequence: Synthetic oligonucleotide
  Sense strand starting at position 3179 of SEQ ID NO: 374
uuugucuucucugcuagua

SEQ ID NO: 32323 - RNA, 19 nt, Artificial Sequence
  Description of Artificial Sequence: Synthetic oligonucleotide
  Antisense strand to SEQ ID NO: 32322
uacuagcagagaagacaaa

SEQ ID NO: 32324 - RNA, 19 nt, Artificial Sequence
  Description of Artificial Sequence: Synthetic oligonucleotide
  Sense strand starting at position 3178 of SEQ ID NO: 374
auuugucuucucugcuagu

SEQ ID NO: 32325 - RNA, 19 nt, Artificial Sequence
  Description of Artificial Sequence: Synthetic oligonucleotide
  Antisense strand to SEQ ID NO: 32324
acuagcagagaagacaaau

SEQ ID NO: 32326 - RNA, 19 nt, Artificial Sequence
  Description of Artificial Sequence: Synthetic oligonucleotide
  Sense strand starting at position 3158 of SEQ ID NO: 374
cuaucuucgcaguaucuau

SEQ ID NO: 32327 - RNA, 19 nt, Artificial Sequence
  Description of Artificial Sequence: Synthetic oligonucleotide
  Antisense strand to SEQ ID NO: 32326
auagauacugcgaagauag

SEQ ID NO: 32328 - RNA, 19 nt, Artificial Sequence
  Description of Artificial Sequence: Synthetic oligonucleotide
  Sense strand starting at position 3069 of SEQ ID NO: 374
agacauuacgucuggccaa

SEQ ID NO: 32329 - RNA, 19 nt, Artificial Sequence
  Description of Artificial Sequence: Synthetic oligonucleotide
  Antisense strand to SEQ ID NO: 32328
uuggccagacguaaugucu

SEQ ID NO: 32330 - RNA, 19 nt, Artificial Sequence
  Description of Artificial Sequence: Synthetic oligonucleotide
  Sense strand starting at position 3056 of SEQ ID NO: 374
auuacaaggugugagacau

SEQ ID NO: 32331 - RNA, 19 nt, Artificial Sequence
  Description of Artificial Sequence: Synthetic oligonucleotide
  Antisense strand to SEQ ID NO: 32330
augucucacaccuuguaau

SEQ ID NO: 32332 - RNA, 19 nt, Artificial Sequence
  Description of Artificial Sequence: Synthetic oligonucleotide
  Sense strand starting at position 2812 of SEQ ID NO: 374
agacguucuugcucuguca

SEQ ID NO: 32333 - RNA, 19 nt, Artificial Sequence
  Description of Artificial Sequence: Synthetic oligonucleotide
  Antisense strand to SEQ ID NO: 32332
ugacagagcaagaacgucu

SEQ ID NO: 32334 - RNA, 19 nt, Artificial Sequence
  Description of Artificial Sequence: Synthetic oligonucleotide
  Sense strand starting at position 2654 of SEQ ID NO: 374
ugaugugagaacugaguau

SEQ ID NO: 32335 - RNA, 19 nt, Artificial Sequence
  Description of Artificial Sequence: Synthetic oligonucleotide
  Antisense strand to SEQ ID NO: 32334
auacucaguucucacauca

SEQ ID NO: 32336 - RNA, 19 nt, Artificial Sequence
  Description of Artificial Sequence: Synthetic oligonucleotide
  Sense strand starting at position 2639 of SEQ ID NO: 374
guauucaguccgccgugau

SEQ ID NO: 32337 - RNA, 19 nt, Artificial Sequence
  Description of Artificial Sequence: Synthetic oligonucleotide
  Antisense strand to SEQ ID NO: 32336
aucacggcggacugaauac

SEQ ID NO: 32338 - RNA, 19 nt, Artificial Sequence
  Description of Artificial Sequence: Synthetic oligonucleotide
  Sense strand starting at position 2565 of SEQ ID NO: 374
acggaagcuucucugaaag

SEQ ID NO: 32339 - RNA, 19 nt, Artificial Sequence
  Description of Artificial Sequence: Synthetic oligonucleotide
  Antisense strand to SEQ ID NO: 32338
cuuucagagaagcuuccgu

SEQ ID NO: 32340 - RNA, 19 nt, Artificial Sequence
  Description of Artificial Sequence: Synthetic oligonucleotide
  Sense strand starting at position 2564 of SEQ ID NO: 374
gacggaagcuucucugaaa

SEQ ID NO: 32341 - RNA, 19 nt, Artificial Sequence
  Description of Artificial Sequence: Synthetic oligonucleotide
  Antisense strand to SEQ ID NO: 32340
uuucagagaagcuuccguc

SEQ ID NO: 32342 - RNA, 19 nt, Artificial Sequence
  Description of Artificial Sequence: Synthetic oligonucleotide
  Sense strand starting at position 2156 of SEQ ID NO: 374
uacugugaacgauaguaug

SEQ ID NO: 32343 - RNA, 19 nt, Artificial Sequence
  Description of Artificial Sequence: Synthetic oligonucleotide
  Antisense strand to SEQ ID NO: 32342
cauacuaucguucacagua

SEQ ID NO: 32344 - RNA, 19 nt, Artificial Sequence
  Description of Artificial Sequence: Synthetic oligonucleotide
  Sense strand starting at position 2153 of SEQ ID NO: 374
uaauacugugaacgauagu

SEQ ID NO: 32345 - RNA, 19 nt, Artificial Sequence
  Description of Artificial Sequence: Synthetic oligonucleotide
  Antisense strand to SEQ ID NO: 32344
acuaucguucacaguauua

SEQ ID NO: 32346 - RNA, 19 nt, Artificial Sequence
  Description of Artificial Sequence: Synthetic oligonucleotide
  Sense strand starting at position 2149 of SEQ ID NO: 374
guaauaauacugugaacga

SEQ ID NO: 32347 - RNA, 19 nt, Artificial Sequence
  Description of Artificial Sequence: Synthetic oligonucleotide
  Antisense strand to SEQ ID NO: 32346
ucguucacaguauuauuac

SEQ ID NO: 32348 - RNA, 19 nt, Artificial Sequence
  Description of Artificial Sequence: Synthetic oligonucleotide
  Sense strand starting at position 2132 of SEQ ID NO: 374
uccuaaugguuguauuugu

SEQ ID NO: 32349 - RNA, 19 nt, Artificial Sequence
  Description of Artificial Sequence: Synthetic oligonucleotide
  Antisense strand to SEQ ID NO: 32348
acaaauacaaccauuagga

SEQ ID NO: 32350 - RNA, 19 nt, Artificial Sequence
  Description of Artificial Sequence: Synthetic oligonucleotide
  Sense strand starting at position 2130 of SEQ ID NO: 374
uuuccuaaugguuguauuu

SEQ ID NO: 32351 - RNA, 19 nt, Artificial Sequence
  Description of Artificial Sequence: Synthetic oligonucleotide
  Antisense strand to SEQ ID NO: 32350
aaauacaaccauuaggaaa

SEQ ID NO: 32352 - RNA, 19 nt, Artificial Sequence
  Description of Artificial Sequence: Synthetic oligonucleotide
  Sense strand starting at position 2113 of SEQ ID NO: 374
ggcuaugcucugcauguuu

SEQ ID NO: 32353 - RNA, 19 nt, Artificial Sequence
  Description of Artificial Sequence: Synthetic oligonucleotide
  Antisense strand to SEQ ID NO: 32352
aaacaugcagagcauagcc

SEQ ID NO: 32354 - RNA, 19 nt, Artificial Sequence
  Description of Artificial Sequence: Synthetic oligonucleotide
  Sense strand starting at position 2112 of SEQ ID NO: 374
gggcuaugcucugcauguu

SEQ ID NO: 32355 - RNA, 19 nt, Artificial Sequence
  Description of Artificial Sequence: Synthetic oligonucleotide
  Antisense strand to SEQ ID NO: 32354
aacaugcagagcauagccc

SEQ ID NO: 32356 - RNA, 19 nt, Artificial Sequence
  Description of Artificial Sequence: Synthetic oligonucleotide
  Sense strand starting at position 1100 of SEQ ID NO: 374
ucgggagguaguuagguaa

SEQ ID NO: 32357 - RNA, 19 nt, Artificial Sequence
  Description of Artificial Sequence: Synthetic oligonucleotide
  Antisense strand to SEQ ID NO: 32356
uuaccuaacuaccucccga

SEQ ID NO: 32358 - RNA, 19 nt, Artificial Sequence
  Description of Artificial Sequence: Synthetic oligonucleotide
  Sense strand starting at position 975 of SEQ ID NO: 374
cuuauaccgcgaugacgua

SEQ ID NO: 32359 - RNA, 19 nt, Artificial Sequence
  Description of Artificial Sequence: Synthetic oligonucleotide
  Antisense strand to SEQ ID NO: 32358
uacgucaucgcgguauaag

SEQ ID NO: 32360 - RNA, 19 nt, Artificial Sequence
  Description of Artificial Sequence: Synthetic oligonucleotide
  Sense strand starting at position 960 of SEQ ID NO: 374
aguuaagucucacuccuua

SEQ ID NO: 32361 - RNA, 19 nt, Artificial Sequence
  Description of Artificial Sequence: Synthetic oligonucleotide
  Antisense strand to SEQ ID NO: 32360
uaaggagugagacuuaacu

SEQ ID NO: 32362 - RNA, 19 nt, Artificial Sequence
  Description of Artificial Sequence: Synthetic oligonucleotide
  Sense strand starting at position 951 of SEQ ID NO: 374
acuuguaggaguuaagucu

SEQ ID NO: 32363 - RNA, 19 nt, Artificial Sequence
  Description of Artificial Sequence: Synthetic oligonucleotide
  Antisense strand to SEQ ID NO: 32362
agacuuaacuccuacaagu

SEQ ID NO: 32364 - RNA, 19 nt, Artificial Sequence
  Description of Artificial Sequence: Synthetic oligonucleotide
  Sense strand starting at position 947 of SEQ ID NO: 374
ccugacuuguaggaguuaa

SEQ ID NO: 32365 - RNA, 19 nt, Artificial Sequence
  Description of Artificial Sequence: Synthetic oligonucleotide
  Antisense strand to SEQ ID NO: 32364
uuaacuccuacaagucagg

SEQ ID NO: 32366 - RNA, 19 nt, Artificial Sequence
  Description of Artificial Sequence: Synthetic oligonucleotide
  Sense strand starting at position 946 of SEQ ID NO: 374
cccugacuuguaggaguua

SEQ ID NO: 32367 - RNA, 19 nt, Artificial Sequence
  Description of Artificial Sequence: Synthetic oligonucleotide
  Antisense strand to SEQ ID NO: 32366
uaacuccuacaagucaggg

SEQ ID NO: 32368 - RNA, 19 nt, Artificial Sequence
  Description of Artificial Sequence: Synthetic oligonucleotide
  Sense strand starting at position 824 of SEQ ID NO: 374
cggucaugaacacaaguaa

SEQ ID NO: 32369 - RNA, 19 nt, Artificial Sequence
  Description of Artificial Sequence: Synthetic oligonucleotide
  Antisense strand to SEQ ID NO: 32368
uuacuuguguucaugaccg

SEQ ID NO: 32370 - RNA, 19 nt, Artificial Sequence
  Description of Artificial Sequence: Synthetic oligonucleotide
  Sense strand starting at position 772 of SEQ ID NO: 374
acaaacuaauccugggauu

SEQ ID NO: 32371 - RNA, 19 nt, Artificial Sequence
  Description of Artificial Sequence: Synthetic oligonucleotide
  Antisense strand to SEQ ID NO: 32370
aaucccaggauuaguuugu

SEQ ID NO: 32372 - RNA, 19 nt, Artificial Sequence
  Description of Artificial Sequence: Synthetic oligonucleotide
  Sense strand starting at position 681 of SEQ ID NO: 374
cucauucuaguauagucaa

SEQ ID NO: 32373 - RNA, 19 nt, Artificial Sequence
  Description of Artificial Sequence: Synthetic oligonucleotide
  Antisense strand to SEQ ID NO: 32372
uugacuauacuagaaugag

SEQ ID NO: 32374 - RNA, 19 nt, Artificial Sequence
  Description of Artificial Sequence: Synthetic oligonucleotide
  Sense strand starting at position 624 of SEQ ID NO: 374
auaaacagucugggaaagu

SEQ ID NO: 32375 - RNA, 19 nt, Artificial Sequence
  Description of Artificial Sequence: Synthetic oligonucleotide
  Antisense strand to SEQ ID NO: 32374
acuuucccagacuguuuau

SEQ ID NO: 32376 - RNA, 19 nt, Artificial Sequence
  Description of Artificial Sequence: Synthetic oligonucleotide
  Sense strand starting at position 603 of SEQ ID NO: 374
ugcaguaagucauaaagga

SEQ ID NO: 32377 - RNA, 19 nt, Artificial Sequence
  Description of Artificial Sequence: Synthetic oligonucleotide
  Antisense strand to SEQ ID NO: 32376
uccuuuaugacuuacugca

SEQ ID NO: 32378 - RNA, 19 nt, Artificial Sequence
  Description of Artificial Sequence: Synthetic oligonucleotide
  Sense strand starting at position 577 of SEQ ID NO: 374
gaaucaaccuagggagauu

SEQ ID NO: 32379 - RNA, 19 nt, Artificial Sequence
  Description of Artificial Sequence: Synthetic oligonucleotide
  Antisense strand to SEQ ID NO: 32378
aaucucccuagguugauuc

SEQ ID NO: 32380 - RNA, 19 nt, Artificial Sequence
  Description of Artificial Sequence: Synthetic oligonucleotide
  Sense strand starting at position 526 of SEQ ID NO: 374
ggcauaaacugauccucuu

SEQ ID NO: 32381 - RNA, 19 nt, Artificial Sequence
  Description of Artificial Sequence: Synthetic oligonucleotide
  Antisense strand to SEQ ID NO: 32380
aagaggaucaguuuaugcc

SEQ ID NO: 32382 - RNA, 19 nt, Artificial Sequence
  Description of Artificial Sequence: Synthetic oligonucleotide
  Sense strand starting at position 468 of SEQ ID NO: 374
ugcuuaaagaucgaagucu

SEQ ID NO: 32383 - RNA, 19 nt, Artificial Sequence
  Description of Artificial Sequence: Synthetic oligonucleotide
  Antisense strand to SEQ ID NO: 32382
agacuucgaucuuuaagca

SEQ ID NO: 32384 - RNA, 19 nt, Artificial Sequence
  Description of Artificial Sequence: Synthetic oligonucleotide
  Sense strand starting at position 392 of SEQ ID NO: 374
uuaguaacgucuuugagac

SEQ ID NO: 32385 - RNA, 19 nt, Artificial Sequence
  Description of Artificial Sequence: Synthetic oligonucleotide
  Antisense strand to SEQ ID NO: 32384
gucucaaagacguuacuaa

SEQ ID NO: 32386 - RNA, 19 nt, Artificial Sequence
  Description of Artificial Sequence: Synthetic oligonucleotide
  Sense strand starting at position 368 of SEQ ID NO: 374
cugggagugcaauauccau

SEQ ID NO: 32387 - RNA, 19 nt, Artificial Sequence
  Description of Artificial Sequence: Synthetic oligonucleotide
  Antisense strand to SEQ ID NO: 32386
auggauauugcacucccag

SEQ ID NO: 32388 - RNA, 19 nt, Artificial Sequence
  Description of Artificial Sequence: Synthetic oligonucleotide
  Sense strand starting at position 162 of SEQ ID NO: 374
aauugugaucucugcuuga

SEQ ID NO: 32389 - RNA, 19 nt, Artificial Sequence
  Description of Artificial Sequence: Synthetic oligonucleotide
  Antisense strand to SEQ ID NO: 32388
ucaagcagagaucacaauu

SEQ ID NO: 32390 - RNA, 19 nt, Artificial Sequence
  Description of Artificial Sequence: Synthetic oligonucleotide
  Sense strand starting at position 108 of SEQ ID NO: 374
auugcagucgcggaaggau

SEQ ID NO: 32391 - RNA, 19 nt, Artificial Sequence
  Description of Artificial Sequence: Synthetic oligonucleotide
  Antisense strand to SEQ ID NO: 32390
auccuuccgcgacugcaau

SEQ ID NO: 32392 - RNA, 19 nt, Artificial Sequence
  Description of Artificial Sequence: Synthetic oligonucleotide
  Sense strand starting at position 27 of SEQ ID NO: 374
cgacaugaauuaucuuuac

SEQ ID NO: 32393 - RNA, 19 nt, Artificial Sequence
  Description of Artificial Sequence: Synthetic oligonucleotide
  Antisense strand to SEQ ID NO: 32392
guaaagauaauucaugucg

SEQ ID NO: 32394 - RNA, 19 nt, Artificial Sequence
  Description of Artificial Sequence: Synthetic oligonucleotide
  Sense strand starting at position 21 of SEQ ID NO: 374
uuguuucgacaugaauuau

SEQ ID NO: 32395 - RNA, 19 nt, Artificial Sequence
  Description of Artificial Sequence: Synthetic oligonucleotide
  Antisense strand to SEQ ID NO: 32394
auaauucaugucgaaacaa

SEQ ID NO: 32396 - RNA, 19 nt, Artificial Sequence
  Description of Artificial Sequence: Synthetic oligonucleotide
  Sense strand starting at position 13 of SEQ ID NO: 374
gaaagcacuuguuucgaca

SEQ ID NO: 32397 - RNA, 19 nt, Artificial Sequence
  Description of Artificial Sequence: Synthetic oligonucleotide
  Antisense strand to SEQ ID NO: 32396
ugucgaaacaagugcuuuc

SEQ ID NO: 32398 - RNA, 19 nt, Artificial Sequence
  Description of Artificial Sequence: Synthetic oligonucleotide
  Sense strand starting at position 17 of SEQ ID NO: 375
gacagaucugggugacgau

SEQ ID NO: 32399 - RNA, 19 nt, Artificial Sequence
  Description of Artificial Sequence: Synthetic oligonucleotide
  Antisense strand to SEQ ID NO: 32398
aucgucacccagaucuguc

SEQ ID NO: 32400 - RNA, 19 nt, Artificial Sequence
  Description of Artificial Sequence: Synthetic oligonucleotide
  Sense strand starting at position 39 of SEQ ID NO: 375
ugcuuauugcaacagugaa

SEQ ID NO: 32401 - RNA, 19 nt, Artificial Sequence
  Description of Artificial Sequence: Synthetic oligonucleotide
  Antisense strand to SEQ ID NO: 32400
uucacuguugcaauaagca

SEQ ID NO: 32402 - RNA, 19 nt, Artificial Sequence
  Description of Artificial Sequence: Synthetic oligonucleotide
  Sense strand starting at position 71 of SEQ ID NO: 375
gaaugugcccuguauguaa

SEQ ID NO: 32403 - RNA, 19 nt, Artificial Sequence
  Description of Artificial Sequence: Synthetic oligonucleotide
  Antisense strand to SEQ ID NO: 32402
uuacauacagggcacauuc

SEQ ID NO: 32404 - RNA, 19 nt, Artificial Sequence
  Description of Artificial Sequence: Synthetic oligonucleotide
  Sense strand starting at position 143 of SEQ ID NO: 375
guuugcucacaucauugau

SEQ ID NO: 32405 - RNA, 19 nt, Artificial Sequence
  Description of Artificial Sequence: Synthetic oligonucleotide
  Antisense strand to SEQ ID NO: 32404
aucaaugaugugagcaaac

SEQ ID NO: 32406 - RNA, 19 nt, Artificial Sequence
  Description of Artificial Sequence: Synthetic oligonucleotide
  Sense strand starting at position 352 of SEQ ID NO: 375
uuggaaaguccauguuuag

SEQ ID NO: 32407 - RNA, 19 nt, Artificial Sequence
  Description of Artificial Sequence: Synthetic oligonucleotide
  Antisense strand to SEQ ID NO: 32406
cuaaacauggacuuuccaa

SEQ ID NO: 32408 - RNA, 19 nt, Artificial Sequence
  Description of Artificial Sequence: Synthetic oligonucleotide
  Sense strand starting at position 499 of SEQ ID NO: 375
gucugaauguuuccaccaa

SEQ ID NO: 32409 - RNA, 19 nt, Artificial Sequence
  Description of Artificial Sequence: Synthetic oligonucleotide
  Antisense strand to SEQ ID NO: 32408
uugguggaaacauucagac

SEQ ID NO: 32410 - RNA, 19 nt, Artificial Sequence
  Description of Artificial Sequence: Synthetic oligonucleotide
  Sense strand starting at position 662 of SEQ ID NO: 375
uuagcuaggccuuaaauca

SEQ ID NO: 32411 - RNA, 19 nt, Artificial Sequence
  Description of Artificial Sequence: Synthetic oligonucleotide
  Antisense strand to SEQ ID NO: 32410
ugauuuaaggccuagcuaa

SEQ ID NO: 32412 - RNA, 19 nt, Artificial Sequence
  Description of Artificial Sequence: Synthetic oligonucleotide
  Sense strand starting at position 670 of SEQ ID NO: 375
gccuuaaaucaaggcaaca

SEQ ID NO: 32413 - RNA, 19 nt, Artificial Sequence
  Description of Artificial Sequence: Synthetic oligonucleotide
  Antisense strand to SEQ ID NO: 32412
uguugccuugauuuaaggc

SEQ ID NO: 32414 - RNA, 19 nt, Artificial Sequence
  Description of Artificial Sequence: Synthetic oligonucleotide
  Sense strand starting at position 686 of SEQ ID NO: 375
acaauugagcagcacaauu

SEQ ID NO: 32415 - RNA, 19 nt, Artificial Sequence
  Description of Artificial Sequence: Synthetic oligonucleotide
  Antisense strand to SEQ ID NO: 32414
aauugugcugcucaauugu

SEQ ID NO: 32416 - RNA, 19 nt, Artificial Sequence
  Description of Artificial Sequence: Synthetic oligonucleotide
  Sense strand starting at position 780 of SEQ ID NO: 375
uuucuuugaacggaguaga

SEQ ID NO: 32417 - RNA, 19 nt, Artificial Sequence
  Description of Artificial Sequence: Synthetic oligonucleotide
  Antisense strand to SEQ ID NO: 32416
ucuacuccguucaaagaaa

SEQ ID NO: 32418 - RNA, 19 nt, Artificial Sequence
  Description of Artificial Sequence: Synthetic oligonucleotide
  Sense strand starting at position 783 of SEQ ID NO: 375
cuuugaacggaguagaguu

SEQ ID NO: 32419 - RNA, 19 nt, Artificial Sequence
  Description of Artificial Sequence: Synthetic oligonucleotide
  Antisense strand to SEQ ID NO: 32418
aacucuacuccguucaaag

SEQ ID NO: 32420 - RNA, 19 nt, Artificial Sequence
  Description of Artificial Sequence: Synthetic oligonucleotide
  Sense strand starting at position 790 of SEQ ID NO: 375
cggaguagaguuuacucau

SEQ ID NO: 32421 - RNA, 19 nt, Artificial Sequence
  Description of Artificial Sequence: Synthetic oligonucleotide
  Antisense strand to SEQ ID NO: 32420
augaguaaacucuacuccg

SEQ ID NO: 32422 - RNA, 19 nt, Artificial Sequence
  Description of Artificial Sequence: Synthetic oligonucleotide
  Sense strand starting at position 793 of SEQ ID NO: 375
aguagaguuuacucauaac

SEQ ID NO: 32423 - RNA, 19 nt, Artificial Sequence
  Description of Artificial Sequence: Synthetic oligonucleotide
  Antisense strand to SEQ ID NO: 32422
guuaugaguaaacucuacu

SEQ ID NO: 32424 - RNA, 19 nt, Artificial Sequence
  Description of Artificial Sequence: Synthetic oligonucleotide
  Sense strand starting at position 838 of SEQ ID NO: 375
ccagcuaaagauuaacagu

SEQ ID NO: 32425 - RNA, 19 nt, Artificial Sequence
  Description of Artificial Sequence: Synthetic oligonucleotide
  Antisense strand to SEQ ID NO: 32424
acuguuaaucuuuagcugg

SEQ ID NO: 32426 - RNA, 19 nt, Artificial Sequence
  Description of Artificial Sequence: Synthetic oligonucleotide
  Sense strand starting at position 882 of SEQ ID NO: 375
cauucuagguauucgagaa

SEQ ID NO: 32427 - RNA, 19 nt, Artificial Sequence
  Description of Artificial Sequence: Synthetic oligonucleotide
  Antisense strand to SEQ ID NO: 32426
uucucgaauaccuagaaug

SEQ ID NO: 32428 - RNA, 19 nt, Artificial Sequence
  Description of Artificial Sequence: Synthetic oligonucleotide
  Sense strand starting at position 883 of SEQ ID NO: 375
auucuagguauucgagaau

SEQ ID NO: 32429 - RNA, 19 nt, Artificial Sequence
  Description of Artificial Sequence: Synthetic oligonucleotide
  Antisense strand to SEQ ID NO: 32428
auucucgaauaccuagaau

SEQ ID NO: 32430 - RNA, 19 nt, Artificial Sequence
  Description of Artificial Sequence: Synthetic oligonucleotide
  Sense strand starting at position 886 of SEQ ID NO: 375
cuagguauucgagaauguu

SEQ ID NO: 32431 - RNA, 19 nt, Artificial Sequence
  Description of Artificial Sequence: Synthetic oligonucleotide
  Antisense strand to SEQ ID NO: 32430
aacauucucgaauaccuag

SEQ ID NO: 32432 - RNA, 19 nt, Artificial Sequence
  Description of Artificial Sequence: Synthetic oligonucleotide
  Sense strand starting at position 908 of SEQ ID NO: 375
cucucuucucaauggagaa

SEQ ID NO: 32433 - RNA, 19 nt, Artificial Sequence
  Description of Artificial Sequence: Synthetic oligonucleotide
  Antisense strand to SEQ ID NO: 32432
uucuccauugagaagagag

SEQ ID NO: 32434 - RNA, 19 nt, Artificial Sequence
  Description of Artificial Sequence: Synthetic oligonucleotide
  Sense strand starting at position 949 of SEQ ID NO: 375
agaugaguauauccaguaa

SEQ ID NO: 32435 - RNA, 19 nt, Artificial Sequence
  Description of Artificial Sequence: Synthetic oligonucleotide
  Antisense strand to SEQ ID NO: 32434
uuacuggauauacucaucu

SEQ ID NO: 32436 - RNA, 19 nt, Artificial Sequence
  Description of Artificial Sequence: Synthetic oligonucleotide
  Sense strand starting at position 953 of SEQ ID NO: 375
gaguauauccaguaauguc

SEQ ID NO: 32437 - RNA, 19 nt, Artificial Sequence
  Description of Artificial Sequence: Synthetic oligonucleotide
  Antisense strand to SEQ ID NO: 32436
gacauuacuggauauacuc

SEQ ID NO: 32438 - RNA, 19 nt, Artificial Sequence
  Description of Artificial Sequence: Synthetic oligonucleotide
  Sense strand starting at position 961 of SEQ ID NO: 375
ccaguaaugucuccacacu

SEQ ID NO: 32439 - RNA, 19 nt, Artificial Sequence
  Description of Artificial Sequence: Synthetic oligonucleotide
  Antisense strand to SEQ ID NO: 32438
aguguggagacauuacugg

SEQ ID NO: 32440 - RNA, 19 nt, Artificial Sequence
  Description of Artificial Sequence: Synthetic oligonucleotide
  Sense strand starting at position 1041 of SEQ ID NO: 375
cgcacuucuccagacaugu

SEQ ID NO: 32441 - RNA, 19 nt, Artificial Sequence
  Description of Artificial Sequence: Synthetic oligonucleotide
  Antisense strand to SEQ ID NO: 32440
acaugucuggagaagugcg

SEQ ID NO: 32442 - RNA, 19 nt, Artificial Sequence
  Description of Artificial Sequence: Synthetic oligonucleotide
  Sense strand starting at position 1054 of SEQ ID NO: 375
acauguuugcuucgauuuc

SEQ ID NO: 32443 - RNA, 19 nt, Artificial Sequence
  Description of Artificial Sequence: Synthetic oligonucleotide
  Antisense strand to SEQ ID NO: 32442
gaaaucgaagcaaacaugu

SEQ ID NO: 32444 - RNA, 19 nt, Artificial Sequence
  Description of Artificial Sequence: Synthetic oligonucleotide
  Sense strand starting at position 1183 of SEQ ID NO: 375
aaugcuggugcugaauuaa

SEQ ID NO: 32445 - RNA, 19 nt, Artificial Sequence
  Description of Artificial Sequence: Synthetic oligonucleotide
  Antisense strand to SEQ ID NO: 32444
uuaauucagcaccagcauu

SEQ ID NO: 32446 - RNA, 19 nt, Artificial Sequence
  Description of Artificial Sequence: Synthetic oligonucleotide
  Sense strand starting at position 1435 of SEQ ID NO: 375
caacguaauccugaaacga

SEQ ID NO: 32447 - RNA, 19 nt, Artificial Sequence
  Description of Artificial Sequence: Synthetic oligonucleotide
  Antisense strand to SEQ ID NO: 32446
ucguuucaggauuacguug

SEQ ID NO: 32448 - RNA, 19 nt, Artificial Sequence
  Description of Artificial Sequence: Synthetic oligonucleotide
  Sense strand starting at position 2945 of SEQ ID NO: 375
uuucuuaggugucuaauua

SEQ ID NO: 32449 - RNA, 19 nt, Artificial Sequence
  Description of Artificial Sequence: Synthetic oligonucleotide
  Antisense strand to SEQ ID NO: 32448
uaauuagacaccuaagaaa

SEQ ID NO: 32450 - RNA, 19 nt, Artificial Sequence
  Description of Artificial Sequence: Synthetic oligonucleotide
  Sense strand starting at position 2946 of SEQ ID NO: 375
uucuuaggugucuaauuac

SEQ ID NO: 32451 - RNA, 19 nt, Artificial Sequence
  Description of Artificial Sequence: Synthetic oligonucleotide
  Antisense strand to SEQ ID NO: 32450
guaauuagacaccuaagaa

SEQ ID NO: 32452 - RNA, 19 nt, Artificial Sequence
  Description of Artificial Sequence: Synthetic oligonucleotide
  Sense strand starting at position 2963 of SEQ ID NO: 375
acagcacuucgugugucau

SEQ ID NO: 32453 - RNA, 19 nt, Artificial Sequence
  Description of Artificial Sequence: Synthetic oligonucleotide
  Antisense strand to SEQ ID NO: 32452
augacacacgaagugcugu

SEQ ID NO: 32454 - RNA, 19 nt, Artificial Sequence
  Description of Artificial Sequence: Synthetic oligonucleotide
  Sense strand starting at position 2969 of SEQ ID NO: 375
cuucgugugucauuuccca

SEQ ID NO: 32455 - RNA, 19 nt, Artificial Sequence
  Description of Artificial Sequence: Synthetic oligonucleotide
  Antisense strand to SEQ ID NO: 32454
ugggaaaugacacacgaag

SEQ ID NO: 32456 - RNA, 19 nt, Artificial Sequence
  Description of Artificial Sequence: Synthetic oligonucleotide
  Sense strand starting at position 3281 of SEQ ID NO: 375
aaaggcaaaucgcugaaua

SEQ ID NO: 32457 - RNA, 19 nt, Artificial Sequence
  Description of Artificial Sequence: Synthetic oligonucleotide
  Antisense strand to SEQ ID NO: 32456
uauucagcgauuugccuuu

SEQ ID NO: 32458 - RNA, 19 nt, Artificial Sequence
  Description of Artificial Sequence: Synthetic oligonucleotide
  Sense strand starting at position 3282 of SEQ ID NO: 375
aaggcaaaucgcugaauag

SEQ ID NO: 32459 - RNA, 19 nt, Artificial Sequence
  Description of Artificial Sequence: Synthetic oligonucleotide
  Antisense strand to SEQ ID NO: 32458
cuauucagcgauuugccuu

SEQ ID NO: 32460 - RNA, 19 nt, Artificial Sequence
  Description of Artificial Sequence: Synthetic oligonucleotide
  Sense strand starting at position 3413 of SEQ ID NO: 375
aaacuaggucauugcaguu

SEQ ID NO: 32461 - RNA, 19 nt, Artificial Sequence
  Description of Artificial Sequence: Synthetic oligonucleotide
  Antisense strand to SEQ ID NO: 32460
aacugcaaugaccuaguuu

SEQ ID NO: 32462 - RNA, 19 nt, Artificial Sequence
  Description of Artificial Sequence: Synthetic oligonucleotide
  Sense strand starting at position 3517 of SEQ ID NO: 375
ggcgguuguguuucuaugu

SEQ ID NO: 32463 - RNA, 19 nt, Artificial Sequence
  Description of Artificial Sequence: Synthetic oligonucleotide
  Antisense strand to SEQ ID NO: 32462
acauagaaacacaaccgcc

SEQ ID NO: 32464 - RNA, 19 nt, Artificial Sequence
  Description of Artificial Sequence: Synthetic oligonucleotide
  Sense strand starting at position 3648 of SEQ ID NO: 375
caugaaauagugugaaucu

SEQ ID NO: 32465 - RNA, 19 nt, Artificial Sequence
  Description of Artificial Sequence: Synthetic oligonucleotide
  Antisense strand to SEQ ID NO: 32464
agauucacacuauuucaug

SEQ ID NO: 32466 - RNA, 19 nt, Artificial Sequence
  Description of Artificial Sequence: Synthetic oligonucleotide
  Sense strand starting at position 3668 of SEQ ID NO: 375
uuaugaaaucuacaacguc

SEQ ID NO: 32467 - RNA, 19 nt, Artificial Sequence
  Description of Artificial Sequence: Synthetic oligonucleotide
  Antisense strand to SEQ ID NO: 32466
gacguuguagauuucauaa

SEQ ID NO: 32468 - RNA, 19 nt, Artificial Sequence
  Description of Artificial Sequence: Synthetic oligonucleotide
  Sense strand starting at position 3688 of SEQ ID NO: 375
acacuugccuggcuuaaga

SEQ ID NO: 32469 - RNA, 19 nt, Artificial Sequence
  Description of Artificial Sequence: Synthetic oligonucleotide
  Antisense strand to SEQ ID NO: 32468
ucuuaagccaggcaagugu

SEQ ID NO: 32470 - RNA, 19 nt, Artificial Sequence
  Description of Artificial Sequence: Synthetic oligonucleotide
  Sense strand starting at position 3699 of SEQ ID NO: 375
gcuuaagaacagcauuauu

SEQ ID NO: 32471 - RNA, 19 nt, Artificial Sequence
  Description of Artificial Sequence: Synthetic oligonucleotide
  Antisense strand to SEQ ID NO: 32470
aauaaugcuguucuuaagc

SEQ ID NO: 32472 - RNA, 19 nt, Artificial Sequence
  Description of Artificial Sequence: Synthetic oligonucleotide
  Sense strand starting at position 3724 of SEQ ID NO: 375
gcggucuugacaugaauga

SEQ ID NO: 32473 - RNA, 19 nt, Artificial Sequence
  Description of Artificial Sequence: Synthetic oligonucleotide
  Antisense strand to SEQ ID NO: 32472
ucauucaugucaagaccgc

SEQ ID NO: 32474 - RNA, 19 nt, Artificial Sequence
  Description of Artificial Sequence: Synthetic oligonucleotide
  Sense strand starting at position 3725 of SEQ ID NO: 375
cggucuugacaugaaugau

SEQ ID NO: 32475 - RNA, 19 nt, Artificial Sequence
  Description of Artificial Sequence: Synthetic oligonucleotide
  Antisense strand to SEQ ID NO: 32474
aucauucaugucaagaccg

SEQ ID NO: 32476 - RNA, 19 nt, Artificial Sequence
  Description of Artificial Sequence: Synthetic oligonucleotide
  Sense strand starting at position 3728 of SEQ ID NO: 375
ucuugacaugaaugauacu

SEQ ID NO: 32477 - RNA, 19 nt, Artificial Sequence
  Description of Artificial Sequence: Synthetic oligonucleotide
  Antisense strand to SEQ ID NO: 32476
aguaucauucaugucaaga

SEQ ID NO: 32478 - RNA, 19 nt, Artificial Sequence
  Description of Artificial Sequence: Synthetic oligonucleotide
  Sense strand starting at position 277 of SEQ ID NO: 376
acgucagugagucagucau

SEQ ID NO: 32479 - RNA, 19 nt, Artificial Sequence
  Description of Artificial Sequence: Synthetic oligonucleotide
  Antisense strand to SEQ ID NO: 32478
augacugacucacugacgu

SEQ ID NO: 32480 - RNA, 19 nt, Artificial Sequence
  Description of Artificial Sequence: Synthetic oligonucleotide
  Sense strand starting at position 279 of SEQ ID NO: 376
gucagugagucagucauag

SEQ ID NO: 32481 - RNA, 19 nt, Artificial Sequence
  Description of Artificial Sequence: Synthetic oligonucleotide
  Antisense strand to SEQ ID NO: 32480
cuaugacugacucacugac

SEQ ID NO: 32482 - RNA, 19 nt, Artificial Sequence
  Description of Artificial Sequence: Synthetic oligonucleotide
  Sense strand starting at position 285 of SEQ ID NO: 376
gagucagucauaggguuug

SEQ ID NO: 32483 - RNA, 19 nt, Artificial Sequence
  Description of Artificial Sequence: Synthetic oligonucleotide
  Antisense strand to SEQ ID NO: 32482
caaacccuaugacugacuc

SEQ ID NO: 32484 - RNA, 19 nt, Artificial Sequence
  Description of Artificial Sequence: Synthetic oligonucleotide
  Sense strand starting at position 580 of SEQ ID NO: 376
ugggacuuggcaugaaaug

SEQ ID NO: 32485 - RNA, 19 nt, Artificial Sequence
  Description of Artificial Sequence: Synthetic oligonucleotide
  Antisense strand to SEQ ID NO: 32484
cauuucaugccaaguccca

SEQ ID NO: 32486 - RNA, 19 nt, Artificial Sequence
  Description of Artificial Sequence: Synthetic oligonucleotide
  Sense strand starting at position 642 of SEQ ID NO: 376
acauuagggucucugaaac

SEQ ID NO: 32487 - RNA, 19 nt, Artificial Sequence
  Description of Artificial Sequence: Synthetic oligonucleotide
  Antisense strand to SEQ ID NO: 32486
guuucagagacccuaaugu

SEQ ID NO: 32488 - RNA, 19 nt, Artificial Sequence
  Description of Artificial Sequence: Synthetic oligonucleotide
  Sense strand starting at position 686 of SEQ ID NO: 376
aagacaggucagggugaau

SEQ ID NO: 32489 - RNA, 19 nt, Artificial Sequence
  Description of Artificial Sequence: Synthetic oligonucleotide
  Antisense strand to SEQ ID NO: 32488
auucacccugaccugucuu

SEQ ID NO: 32490 - RNA, 19 nt, Artificial Sequence
  Description of Artificial Sequence: Synthetic oligonucleotide
  Sense strand starting at position 769 of SEQ ID NO: 376
cggccacucuucuuuaaag

SEQ ID NO: 32491 - RNA, 19 nt, Artificial Sequence
  Description of Artificial Sequence: Synthetic oligonucleotide
  Antisense strand to SEQ ID NO: 32490
cuuuaaagaagaguggccg

SEQ ID NO: 32492 - RNA, 19 nt, Artificial Sequence
  Description of Artificial Sequence: Synthetic oligonucleotide
  Sense strand starting at position 944 of SEQ ID NO: 376
ccaaguggugcucagaacu

SEQ ID NO: 32493 - RNA, 19 nt, Artificial Sequence
  Description of Artificial Sequence: Synthetic oligonucleotide
  Antisense strand to SEQ ID NO: 32492
aguucugagcaccacuugg

SEQ ID NO: 32494 - RNA, 19 nt, Artificial Sequence
  Description of Artificial Sequence: Synthetic oligonucleotide
  Sense strand starting at position 1032 of SEQ ID NO: 376
agaucauacuaggacuuga

SEQ ID NO: 32495 - RNA, 19 nt, Artificial Sequence
  Description of Artificial Sequence: Synthetic oligonucleotide
  Antisense strand to SEQ ID NO: 32494
ucaaguccuaguaugaucu

SEQ ID NO: 32496 - RNA, 19 nt, Artificial Sequence
  Description of Artificial Sequence: Synthetic oligonucleotide
  Sense strand starting at position 1246 of SEQ ID NO: 376
gagagaauggcaugggcaa

SEQ ID NO: 32497 - RNA, 19 nt, Artificial Sequence
  Description of Artificial Sequence: Synthetic oligonucleotide
  Antisense strand to SEQ ID NO: 32496
uugcccaugccauucucuc

SEQ ID NO: 32498 - RNA, 19 nt, Artificial Sequence
  Description of Artificial Sequence: Synthetic oligonucleotide
  Sense strand starting at position 1247 of SEQ ID NO: 376
agagaauggcaugggcaau

SEQ ID NO: 32499 - RNA, 19 nt, Artificial Sequence
  Description of Artificial Sequence: Synthetic oligonucleotide
  Antisense strand to SEQ ID NO: 32498
auugcccaugccauucucu

SEQ ID NO: 32500 - RNA, 19 nt, Artificial Sequence
  Description of Artificial Sequence: Synthetic oligonucleotide
  Sense strand starting at position 1248 of SEQ ID NO: 376
gagaauggcaugggcaauu

SEQ ID NO: 32501 - RNA, 19 nt, Artificial Sequence
  Description of Artificial Sequence: Synthetic oligonucleotide
  Antisense strand to SEQ ID NO: 32500
aauugcccaugccauucuc

SEQ ID NO: 32502 - RNA, 19 nt, Artificial Sequence
  Description of Artificial Sequence: Synthetic oligonucleotide
  Sense strand starting at position 1259 of SEQ ID NO: 376
gggcaauucuggcuagaag

SEQ ID NO: 32503 - RNA, 19 nt, Artificial Sequence
  Description of Artificial Sequence: Synthetic oligonucleotide
  Antisense strand to SEQ ID NO: 32502
cuucuagccagaauugccc

SEQ ID NO: 32504 - RNA, 19 nt, Artificial Sequence
  Description of Artificial Sequence: Synthetic oligonucleotide
  Sense strand starting at position 1260 of SEQ ID NO: 376
ggcaauucuggcuagaagc

SEQ ID NO: 32505 - RNA, 19 nt, Artificial Sequence
  Description of Artificial Sequence: Synthetic oligonucleotide
  Antisense strand to SEQ ID NO: 32504
gcuucuagccagaauugcc

SEQ ID NO: 32506 - RNA, 19 nt, Artificial Sequence
  Description of Artificial Sequence: Synthetic oligonucleotide
  Sense strand starting at position 1558 of SEQ ID NO: 376
cugggaccucucugggaau

SEQ ID NO: 32507 - RNA, 19 nt, Artificial Sequence
  Description of Artificial Sequence: Synthetic oligonucleotide
  Antisense strand to SEQ ID NO: 32506
auucccagagaggucccag

SEQ ID NO: 32508 - RNA, 19 nt, Artificial Sequence
  Description of Artificial Sequence: Synthetic oligonucleotide
  Sense strand starting at position 3103 of SEQ ID NO: 376
uguaguuauuucucagcac

SEQ ID NO: 32509 - RNA, 19 nt, Artificial Sequence
  Description of Artificial Sequence: Synthetic oligonucleotide
  Antisense strand to SEQ ID NO: 32508
gugcugagaaauaacuaca

SEQ ID NO: 32510 - RNA, 19 nt, Artificial Sequence
  Description of Artificial Sequence: Synthetic oligonucleotide
  Sense strand starting at position 3148 of SEQ ID NO: 376
guaauuuauuguccugugu

SEQ ID NO: 32511 - RNA, 19 nt, Artificial Sequence
  Description of Artificial Sequence: Synthetic oligonucleotide
  Antisense strand to SEQ ID NO: 32510
acacaggacaauaaauuac

SEQ ID NO: 32512 - RNA, 19 nt, Artificial Sequence
  Description of Artificial Sequence: Synthetic oligonucleotide
  Sense strand starting at position 3152 of SEQ ID NO: 376
uuuauuguccuguguauuu

SEQ ID NO: 32513 - RNA, 19 nt, Artificial Sequence
  Description of Artificial Sequence: Synthetic oligonucleotide
  Antisense strand to SEQ ID NO: 32512
aaauacacaggacaauaaa

SEQ ID NO: 32514 - RNA, 19 nt, Artificial Sequence
  Description of Artificial Sequence: Synthetic oligonucleotide
  Sense strand starting at position 3297 of SEQ ID NO: 376
cuauguuucucuguaggag

SEQ ID NO: 32515 - RNA, 19 nt, Artificial Sequence
  Description of Artificial Sequence: Synthetic oligonucleotide
  Antisense strand to SEQ ID NO: 32514
cuccuacagagaaacauag

SEQ ID NO: 32516 - RNA, 19 nt, Artificial Sequence
  Description of Artificial Sequence: Synthetic oligonucleotide
  Sense strand starting at position 3330 of SEQ ID NO: 376
gguuauaugggauaauguu

SEQ ID NO: 32517 - RNA, 19 nt, Artificial Sequence
  Description of Artificial Sequence: Synthetic oligonucleotide
  Antisense strand to SEQ ID NO: 32516
aacauuaucccauauaacc

SEQ ID NO: 32518 - RNA, 19 nt, Artificial Sequence
  Description of Artificial Sequence: Synthetic oligonucleotide
  Sense strand starting at position 3337 of SEQ ID NO: 376
ugggauaauguugggugua

SEQ ID NO: 32519 - RNA, 19 nt, Artificial Sequence
  Description of Artificial Sequence: Synthetic oligonucleotide
  Antisense strand to SEQ ID NO: 32518
uacacccaacauuauccca

SEQ ID NO: 32520 - RNA, 19 nt, Artificial Sequence
  Description of Artificial Sequence: Synthetic oligonucleotide
  Sense strand starting at position 3339 of SEQ ID NO: 376
ggauaauguuggguguaau

SEQ ID NO: 32521 - RNA, 19 nt, Artificial Sequence
  Description of Artificial Sequence: Synthetic oligonucleotide
  Antisense strand to SEQ ID NO: 32520
auuacacccaacauuaucc

SEQ ID NO: 32522 - RNA, 19 nt, Artificial Sequence
  Description of Artificial Sequence: Synthetic oligonucleotide
  Sense strand starting at position 3340 of SEQ ID NO: 376
gauaauguuggguguaauc

SEQ ID NO: 32523 - RNA, 19 nt, Artificial Sequence
  Description of Artificial Sequence: Synthetic oligonucleotide
  Antisense strand to SEQ ID NO: 32522
gauuacacccaacauuauc

SEQ ID NO: 32524 - RNA, 19 nt, Artificial Sequence
  Description of Artificial Sequence: Synthetic oligonucleotide
  Sense strand starting at position 3349 of SEQ ID NO: 376
ggguguaauccugaccuuu

SEQ ID NO: 32525 - RNA, 19 nt, Artificial Sequence
  Description of Artificial Sequence: Synthetic oligonucleotide
  Antisense strand to SEQ ID NO: 32524
aaaggucaggauuacaccc

SEQ ID NO: 32526 - RNA, 19 nt, Artificial Sequence
  Description of Artificial Sequence: Synthetic oligonucleotide
  Sense strand starting at position 3351 of SEQ ID NO: 376
guguaauccugaccuuucu

SEQ ID NO: 32527 - RNA, 19 nt, Artificial Sequence
  Description of Artificial Sequence: Synthetic oligonucleotide
  Antisense strand to SEQ ID NO: 32526
agaaaggucaggauuacac

SEQ ID NO: 32528 - RNA, 19 nt, Artificial Sequence
  Description of Artificial Sequence: Synthetic oligonucleotide
  Sense strand starting at position 3357 of SEQ ID NO: 376
uccugaccuuucuuuggau

SEQ ID NO: 32529 - RNA, 19 nt, Artificial Sequence
  Description of Artificial Sequence: Synthetic oligonucleotide
  Antisense strand to SEQ ID NO: 32528
auccaaagaaaggucagga

SEQ ID NO: 32530 - RNA, 19 nt, Artificial Sequence
  Description of Artificial Sequence: Synthetic oligonucleotide
  Sense strand starting at position 3358 of SEQ ID NO: 376
ccugaccuuucuuuggaua

SEQ ID NO: 32531 - RNA, 19 nt, Artificial Sequence
  Description of Artificial Sequence: Synthetic oligonucleotide
  Antisense strand to SEQ ID NO: 32530
uauccaaagaaaggucagg

SEQ ID NO: 32532 - RNA, 19 nt, Artificial Sequence
  Description of Artificial Sequence: Synthetic oligonucleotide
  Sense strand starting at position 3359 of SEQ ID NO: 376
cugaccuuucuuuggauaa

SEQ ID NO: 32533 - RNA, 19 nt, Artificial Sequence
  Description of Artificial Sequence: Synthetic oligonucleotide
  Antisense strand to SEQ ID NO: 32532
uuauccaaagaaaggucag

SEQ ID NO: 32534 - RNA, 19 nt, Artificial Sequence
  Description of Artificial Sequence: Synthetic oligonucleotide
  Sense strand starting at position 3392 of SEQ ID NO: 376
ccucgaaucuuugcuccaa

SEQ ID NO: 32535 - RNA, 19 nt, Artificial Sequence
  Description of Artificial Sequence: Synthetic oligonucleotide
  Antisense strand to SEQ ID NO: 32534
uuggagcaaagauucgagg

SEQ ID NO: 32536 - RNA, 19 nt, Artificial Sequence
  Description of Artificial Sequence: Synthetic oligonucleotide
  Sense strand starting at position 3393 of SEQ ID NO: 376
cucgaaucuuugcuccaaa

SEQ ID NO: 32537 - RNA, 19 nt, Artificial Sequence
  Description of Artificial Sequence: Synthetic oligonucleotide
  Antisense strand to SEQ ID NO: 32536
uuuggagcaaagauucgag

SEQ ID NO: 32538 - RNA, 19 nt, Artificial Sequence
  Description of Artificial Sequence: Synthetic oligonucleotide
  Sense strand starting at position 3394 of SEQ ID NO: 376
ucgaaucuuugcuccaaag

SEQ ID NO: 32539 - RNA, 19 nt, Artificial Sequence
  Description of Artificial Sequence: Synthetic oligonucleotide
  Antisense strand to SEQ ID NO: 32538
cuuuggagcaaagauucga

SEQ ID NO: 32540 - RNA, 19 nt, Artificial Sequence
  Description of Artificial Sequence: Synthetic oligonucleotide
  Sense strand starting at position 3457 of SEQ ID NO: 376
agaacugccugauuccaua

SEQ ID NO: 32541 - RNA, 19 nt, Artificial Sequence
  Description of Artificial Sequence: Synthetic oligonucleotide
  Antisense strand to SEQ ID NO: 32540
uauggaaucaggcaguucu

SEQ ID NO: 32542 - RNA, 19 nt, Artificial Sequence
  Description of Artificial Sequence: Synthetic oligonucleotide
  Sense strand starting at position 3476 of SEQ ID NO: 376
gugaaaucaguauagccca

SEQ ID NO: 32543 - RNA, 19 nt, Artificial Sequence
  Description of Artificial Sequence: Synthetic oligonucleotide
  Antisense strand to SEQ ID NO: 32542
ugggcuauacugauuucac

SEQ ID NO: 32544 - RNA, 19 nt, Artificial Sequence
  Description of Artificial Sequence: Synthetic oligonucleotide
  Sense strand starting at position 3546 of SEQ ID NO: 376
uggaauugguggaggaaug

SEQ ID NO: 32545 - RNA, 19 nt, Artificial Sequence
  Description of Artificial Sequence: Synthetic oligonucleotide
  Antisense strand to SEQ ID NO: 32544
cauuccuccaccaauucca

SEQ ID NO: 32546 - RNA, 19 nt, Artificial Sequence
  Description of Artificial Sequence: Synthetic oligonucleotide
  Sense strand starting at position 3736 of SEQ ID NO: 376
aggauauuugggcgugucu

SEQ ID NO: 32547 - RNA, 19 nt, Artificial Sequence
  Description of Artificial Sequence: Synthetic oligonucleotide
  Antisense strand to SEQ ID NO: 32546
agacacgcccaaauauccu

SEQ ID NO: 32548 - RNA, 19 nt, Artificial Sequence
  Description of Artificial Sequence: Synthetic oligonucleotide
  Sense strand starting at position 3738 of SEQ ID NO: 376
gauauuugggcgugucugu

SEQ ID NO: 32549 - RNA, 19 nt, Artificial Sequence
  Description of Artificial Sequence: Synthetic oligonucleotide
  Antisense strand to SEQ ID NO: 32548
acagacacgcccaaauauc

SEQ ID NO: 32550 - RNA, 19 nt, Artificial Sequence
  Description of Artificial Sequence: Synthetic oligonucleotide
  Sense strand starting at position 3756 of SEQ ID NO: 376
uguggcuccgagaguguau

SEQ ID NO: 32551 - RNA, 19 nt, Artificial Sequence
  Description of Artificial Sequence: Synthetic oligonucleotide
  Antisense strand to SEQ ID NO: 32550
auacacucucggagccaca

SEQ ID NO: 32552 - RNA, 19 nt, Artificial Sequence
  Description of Artificial Sequence: Synthetic oligonucleotide
  Sense strand starting at position 3763 of SEQ ID NO: 376
ccgagaguguaucuuucua

SEQ ID NO: 32553 - RNA, 19 nt, Artificial Sequence
  Description of Artificial Sequence: Synthetic oligonucleotide
  Antisense strand to SEQ ID NO: 32552
uagaaagauacacucucgg

SEQ ID NO: 32554 - RNA, 19 nt, Artificial Sequence
  Description of Artificial Sequence: Synthetic oligonucleotide
  Sense strand starting at position 3880 of SEQ ID NO: 376
ggaagcauuuauugaacau

SEQ ID NO: 32555 - RNA, 19 nt, Artificial Sequence
  Description of Artificial Sequence: Synthetic oligonucleotide
  Antisense strand to SEQ ID NO: 32554
auguucaauaaaugcuucc

SEQ ID NO: 32556 - RNA, 19 nt, Artificial Sequence
  Description of Artificial Sequence: Synthetic oligonucleotide
  Sense strand starting at position 3906 of SEQ ID NO: 376
gguacaaggcacugucaaa

SEQ ID NO: 32557 - RNA, 19 nt, Artificial Sequence
  Description of Artificial Sequence: Synthetic oligonucleotide
  Antisense strand to SEQ ID NO: 32556
uuugacagugccuuguacc

SEQ ID NO: 32558 - RNA, 19 nt, Artificial Sequence
  Description of Artificial Sequence: Synthetic oligonucleotide
  Sense strand starting at position 3982 of SEQ ID NO: 377
cuagucuuggacuauacga

SEQ ID NO: 32559 - RNA, 19 nt, Artificial Sequence
  Description of Artificial Sequence: Synthetic oligonucleotide
  Antisense strand to SEQ ID NO: 32558
ucguauaguccaagacuag

SEQ ID NO: 32560 - RNA, 19 nt, Artificial Sequence
  Description of Artificial Sequence: Synthetic oligonucleotide
  Sense strand starting at position 3974 of SEQ ID NO: 377
gaugaaaccuagucuugga

SEQ ID NO: 32561 - RNA, 19 nt, Artificial Sequence
  Description of Artificial Sequence: Synthetic oligonucleotide
  Antisense strand to SEQ ID NO: 32560
uccaagacuagguuucauc

SEQ ID NO: 32562 - RNA, 19 nt, Artificial Sequence
  Description of Artificial Sequence: Synthetic oligonucleotide
  Sense strand starting at position 3945 of SEQ ID NO: 377
gaaauaaacuuggcaguua

SEQ ID NO: 32563 - RNA, 19 nt, Artificial Sequence
  Description of Artificial Sequence: Synthetic oligonucleotide
  Antisense strand to SEQ ID NO: 32562
uaacugccaaguuuauuuc

SEQ ID NO: 32564 - RNA, 19 nt, Artificial Sequence
  Description of Artificial Sequence: Synthetic oligonucleotide
  Sense strand starting at position 3927 of SEQ ID NO: 377
gguauaguucagggugaag

SEQ ID NO: 32565 - RNA, 19 nt, Artificial Sequence
  Description of Artificial Sequence: Synthetic oligonucleotide
  Antisense strand to SEQ ID NO: 32564
cuucacccugaacuauacc

SEQ ID NO: 32566 - RNA, 19 nt, Artificial Sequence
  Description of Artificial Sequence: Synthetic oligonucleotide
  Sense strand starting at position 3873 of SEQ ID NO: 377
guccaagauaugcaaguga

SEQ ID NO: 32567 - RNA, 19 nt, Artificial Sequence
  Description of Artificial Sequence: Synthetic oligonucleotide
  Antisense strand to SEQ ID NO: 32566
ucacuugcauaucuuggac

SEQ ID NO: 32568 - RNA, 19 nt, Artificial Sequence
  Description of Artificial Sequence: Synthetic oligonucleotide
  Sense strand starting at position 3854 of SEQ ID NO: 377
ggucguuaacaauaaucaa

SEQ ID NO: 32569 - RNA, 19 nt, Artificial Sequence
  Description of Artificial Sequence: Synthetic oligonucleotide
  Antisense strand to SEQ ID NO: 32568
uugauuauuguuaacgacc

SEQ ID NO: 32570 - RNA, 19 nt, Artificial Sequence
  Description of Artificial Sequence: Synthetic oligonucleotide
  Sense strand starting at position 3848 of SEQ ID NO: 377
ucgggaggucguuaacaau

SEQ ID NO: 32571 - RNA, 19 nt, Artificial Sequence
  Description of Artificial Sequence: Synthetic oligonucleotide
  Antisense strand to SEQ ID NO: 32570
auuguuaacgaccucccga

SEQ ID NO: 32572 - RNA, 19 nt, Artificial Sequence
  Description of Artificial Sequence: Synthetic oligonucleotide
  Sense strand starting at position 3841 of SEQ ID NO: 377
gucauuaucgggaggucgu

SEQ ID NO: 32573 - RNA, 19 nt, Artificial Sequence
  Description of Artificial Sequence: Synthetic oligonucleotide
  Antisense strand to SEQ ID NO: 32572
acgaccucccgauaaugac

SEQ ID NO: 32574 - RNA, 19 nt, Artificial Sequence
  Description of Artificial Sequence: Synthetic oligonucleotide
  Sense strand starting at position 3411 of SEQ ID NO: 377
aguugugaccgugauagau

SEQ ID NO: 32575 - RNA, 19 nt, Artificial Sequence
  Description of Artificial Sequence: Synthetic oligonucleotide
  Antisense strand to SEQ ID NO: 32574
aucuaucacggucacaacu

SEQ ID NO: 32576 - RNA, 19 nt, Artificial Sequence
  Description of Artificial Sequence: Synthetic oligonucleotide
  Sense strand starting at position 3288 of SEQ ID NO: 377
aggagauggccugguacua

SEQ ID NO: 32577 - RNA, 19 nt, Artificial Sequence
  Description of Artificial Sequence: Synthetic oligonucleotide
  Antisense strand to SEQ ID NO: 32576
uaguaccaggccaucuccu

SEQ ID NO: 32578 - RNA, 19 nt, Artificial Sequence
  Description of Artificial Sequence: Synthetic oligonucleotide
  Sense strand starting at position 3182 of SEQ ID NO: 377
aagggaagucugugaggua

SEQ ID NO: 32579 - RNA, 19 nt, Artificial Sequence
  Description of Artificial Sequence: Synthetic oligonucleotide
  Antisense strand to SEQ ID NO: 32578
uaccucacagacuucccuu

SEQ ID NO: 32580 - RNA, 19 nt, Artificial Sequence
  Description of Artificial Sequence: Synthetic oligonucleotide
  Sense strand starting at position 3165 of SEQ ID NO: 377
gugguagugccacauagaa

SEQ ID NO: 32581 - RNA, 19 nt, Artificial Sequence
  Description of Artificial Sequence: Synthetic oligonucleotide
  Antisense strand to SEQ ID NO: 32580
uucuauguggcacuaccac

SEQ ID NO: 32582 - RNA, 19 nt, Artificial Sequence
  Description of Artificial Sequence: Synthetic oligonucleotide
  Sense strand starting at position 3005 of SEQ ID NO: 377
gcacuuuauguuuaggaga

SEQ ID NO: 32583 - RNA, 19 nt, Artificial Sequence
  Description of Artificial Sequence: Synthetic oligonucleotide
  Antisense strand to SEQ ID NO: 32582
ucuccuaaacauaaagugc

SEQ ID NO: 32584 - RNA, 19 nt, Artificial Sequence
  Description of Artificial Sequence: Synthetic oligonucleotide
  Sense strand starting at position 2931 of SEQ ID NO: 377
ggaguaauaugaucuaucu

SEQ ID NO: 32585 - RNA, 19 nt, Artificial Sequence
  Description of Artificial Sequence: Synthetic oligonucleotide
  Antisense strand to SEQ ID NO: 32584
agauagaucauauuacucc

SEQ ID NO: 32586 - RNA, 19 nt, Artificial Sequence
  Description of Artificial Sequence: Synthetic oligonucleotide
  Sense strand starting at position 2868 of SEQ ID NO: 377
ggguaagaaguuuaguguu

SEQ ID NO: 32587 - RNA, 19 nt, Artificial Sequence
  Description of Artificial Sequence: Synthetic oligonucleotide
  Antisense strand to SEQ ID NO: 32586
aacacuaaacuucuuaccc

SEQ ID NO: 32588 - RNA, 19 nt, Artificial Sequence
  Description of Artificial Sequence: Synthetic oligonucleotide
  Sense strand starting at position 2828 of SEQ ID NO: 377
gagaguuaggcagaagcca

SEQ ID NO: 32589 - RNA, 19 nt, Artificial Sequence
  Description of Artificial Sequence: Synthetic oligonucleotide
  Antisense strand to SEQ ID NO: 32588
uggcuucugccuaacucuc

SEQ ID NO: 32590 - RNA, 19 nt, Artificial Sequence
  Description of Artificial Sequence: Synthetic oligonucleotide
  Sense strand starting at position 2817 of SEQ ID NO: 377
agaugaagguggagaguua

SEQ ID NO: 32591 - RNA, 19 nt, Artificial Sequence
  Description of Artificial Sequence: Synthetic oligonucleotide
  Antisense strand to SEQ ID NO: 32590
uaacucuccaccuucaucu

SEQ ID NO: 32592 - RNA, 19 nt, Artificial Sequence
  Description of Artificial Sequence: Synthetic oligonucleotide
  Sense strand starting at position 2486 of SEQ ID NO: 377
gaaucauagugagcaagau

SEQ ID NO: 32593 - RNA, 19 nt, Artificial Sequence
  Description of Artificial Sequence: Synthetic oligonucleotide
  Antisense strand to SEQ ID NO: 32592
aucuugcucacuaugauuc

SEQ ID NO: 32594 - RNA, 19 nt, Artificial Sequence
  Description of Artificial Sequence: Synthetic oligonucleotide
  Sense strand starting at position 2422 of SEQ ID NO: 377
gaaggcaguguauacuauu

SEQ ID NO: 32595 - RNA, 19 nt, Artificial Sequence
  Description of Artificial Sequence: Synthetic oligonucleotide
  Antisense strand to SEQ ID NO: 32594
aauaguauacacugccuuc

SEQ ID NO: 32596 - RNA, 19 nt, Artificial Sequence
  Description of Artificial Sequence: Synthetic oligonucleotide
  Sense strand starting at position 2387 of SEQ ID NO: 377
uguggcuguguuaguagaa

SEQ ID NO: 32597 - RNA, 19 nt, Artificial Sequence
  Description of Artificial Sequence: Synthetic oligonucleotide
  Antisense strand to SEQ ID NO: 32596
uucuacuaacacagccaca

SEQ ID NO: 32598 - RNA, 19 nt, Artificial Sequence
  Description of Artificial Sequence: Synthetic oligonucleotide
  Sense strand starting at position 2277 of SEQ ID NO: 377
ugggcacuccauggauaaa

SEQ ID NO: 32599 - RNA, 19 nt, Artificial Sequence
  Description of Artificial Sequence: Synthetic oligonucleotide
  Antisense strand to SEQ ID NO: 32598
uuuauccauggagugccca

SEQ ID NO: 32600 - RNA, 19 nt, Artificial Sequence
  Description of Artificial Sequence: Synthetic oligonucleotide
  Sense strand starting at position 2276 of SEQ ID NO: 377
uugggcacuccauggauaa

SEQ ID NO: 32601 - RNA, 19 nt, Artificial Sequence
  Description of Artificial Sequence: Synthetic oligonucleotide
  Antisense strand to SEQ ID NO: 32600
uuauccauggagugcccaa

SEQ ID NO: 32602 - RNA, 19 nt, Artificial Sequence
  Description of Artificial Sequence: Synthetic oligonucleotide
  Sense strand starting at position 2130 of SEQ ID NO: 377
gaaugaagcccguggauga

SEQ ID NO: 32603 - RNA, 19 nt, Artificial Sequence
  Description of Artificial Sequence: Synthetic oligonucleotide
  Antisense strand to SEQ ID NO: 32602
ucauccacgggcuucauuc

SEQ ID NO: 32604 - RNA, 19 nt, Artificial Sequence
  Description of Artificial Sequence: Synthetic oligonucleotide
  Sense strand starting at position 1878 of SEQ ID NO: 377
gaacaaaccgucggaaacu

SEQ ID NO: 32605 - RNA, 19 nt, Artificial Sequence
  Description of Artificial Sequence: Synthetic oligonucleotide
  Antisense strand to SEQ ID NO: 32604
aguuuccgacgguuuguuc

SEQ ID NO: 32606 - RNA, 19 nt, Artificial Sequence
  Description of Artificial Sequence: Synthetic oligonucleotide
  Sense strand starting at position 1508 of SEQ ID NO: 377
gcgguuugaagucaggaaa

SEQ ID NO: 32607 - RNA, 19 nt, Artificial Sequence
  Description of Artificial Sequence: Synthetic oligonucleotide
  Antisense strand to SEQ ID NO: 32606
uuuccugacuucaaaccgc

SEQ ID NO: 32608 - RNA, 19 nt, Artificial Sequence
  Description of Artificial Sequence: Synthetic oligonucleotide
  Sense strand starting at position 1326 of SEQ ID NO: 377
uguggccuugucuaaggaa

SEQ ID NO: 32609 - RNA, 19 nt, Artificial Sequence
  Description of Artificial Sequence: Synthetic oligonucleotide
  Antisense strand to SEQ ID NO: 32608
uuccuuagacaaggccaca

SEQ ID NO: 32610 - RNA, 19 nt, Artificial Sequence
  Description of Artificial Sequence: Synthetic oligonucleotide
  Sense strand starting at position 959 of SEQ ID NO: 377
acagaauuguugccugaaa

SEQ ID NO: 32611 - RNA, 19 nt, Artificial Sequence
  Description of Artificial Sequence: Synthetic oligonucleotide
  Antisense strand to SEQ ID NO: 32610
uuucaggcaacaauucugu

SEQ ID NO: 32612 - RNA, 19 nt, Artificial Sequence
  Description of Artificial Sequence: Synthetic oligonucleotide
  Sense strand starting at position 860 of SEQ ID NO: 377
acauuuagaucauacgaag

SEQ ID NO: 32613 - RNA, 19 nt, Artificial Sequence
  Description of Artificial Sequence: Synthetic oligonucleotide
  Antisense strand to SEQ ID NO: 32612
cuucguaugaucuaaaugu

SEQ ID NO: 32614 - RNA, 19 nt, Artificial Sequence
  Description of Artificial Sequence: Synthetic oligonucleotide
  Sense strand starting at position 704 of SEQ ID NO: 377
caauguggugaguagagau

SEQ ID NO: 32615 - RNA, 19 nt, Artificial Sequence
  Description of Artificial Sequence: Synthetic oligonucleotide
  Antisense strand to SEQ ID NO: 32614
aucucuacucaccacauug

SEQ ID NO: 32616 - RNA, 19 nt, Artificial Sequence
  Description of Artificial Sequence: Synthetic oligonucleotide
  Sense strand starting at position 701 of SEQ ID NO: 377
aggcaauguggugaguaga

SEQ ID NO: 32617 - RNA, 19 nt, Artificial Sequence
  Description of Artificial Sequence: Synthetic oligonucleotide
  Antisense strand to SEQ ID NO: 32616
ucuacucaccacauugccu

SEQ ID NO: 32618 - RNA, 19 nt, Artificial Sequence
  Description of Artificial Sequence: Synthetic oligonucleotide
  Sense strand starting at position 675 of SEQ ID NO: 377
agugucaauuucuacauuu

SEQ ID NO: 32619 - RNA, 19 nt, Artificial Sequence
  Description of Artificial Sequence: Synthetic oligonucleotide
  Antisense strand to SEQ ID NO: 32618
aaauguagaaauugacacu

SEQ ID NO: 32620 - RNA, 19 nt, Artificial Sequence
  Description of Artificial Sequence: Synthetic oligonucleotide
  Sense strand starting at position 651 of SEQ ID NO: 377
uugaauacuuaagugauga

SEQ ID NO: 32621 - RNA, 19 nt, Artificial Sequence
  Description of Artificial Sequence: Synthetic oligonucleotide
  Antisense strand to SEQ ID NO: 32620
ucaucacuuaaguauucaa

SEQ ID NO: 32622 - RNA, 19 nt, Artificial Sequence
  Description of Artificial Sequence: Synthetic oligonucleotide
  Sense strand starting at position 632 of SEQ ID NO: 377
uugucugugaguucugcuu

SEQ ID NO: 32623 - RNA, 19 nt, Artificial Sequence
  Description of Artificial Sequence: Synthetic oligonucleotide
  Antisense strand to SEQ ID NO: 32622
aagcagaacucacagacaa

SEQ ID NO: 32624 - RNA, 19 nt, Artificial Sequence
  Description of Artificial Sequence: Synthetic oligonucleotide
  Sense strand starting at position 576 of SEQ ID NO: 377
caugcuguacacugagaua

SEQ ID NO: 32625 - RNA, 19 nt, Artificial Sequence
  Description of Artificial Sequence: Synthetic oligonucleotide
  Antisense strand to SEQ ID NO: 32624
uaucucaguguacagcaug

SEQ ID NO: 32626 - RNA, 19 nt, Artificial Sequence
  Description of Artificial Sequence: Synthetic oligonucleotide
  Sense strand starting at position 552 of SEQ ID NO: 377
cugguuuacggucaaagaa

SEQ ID NO: 32627 - RNA, 19 nt, Artificial Sequence
  Description of Artificial Sequence: Synthetic oligonucleotide
  Antisense strand to SEQ ID NO: 32626
uucuuugaccguaaaccag

SEQ ID NO: 32628 - RNA, 19 nt, Artificial Sequence
  Description of Artificial Sequence: Synthetic oligonucleotide
  Sense strand starting at position 352 of SEQ ID NO: 377
agacaaagaugggaaagau

SEQ ID NO: 32629 - RNA, 19 nt, Artificial Sequence
  Description of Artificial Sequence: Synthetic oligonucleotide
  Antisense strand to SEQ ID NO: 32628
aucuuucccaucuuugucu

SEQ ID NO: 32630 - RNA, 19 nt, Artificial Sequence
  Description of Artificial Sequence: Synthetic oligonucleotide
  Sense strand starting at position 226 of SEQ ID NO: 377
ugggauaacugacuuccau

SEQ ID NO: 32631 - RNA, 19 nt, Artificial Sequence
  Description of Artificial Sequence: Synthetic oligonucleotide
  Antisense strand to SEQ ID NO: 32630
auggaagucaguuauccca

SEQ ID NO: 32632 - RNA, 19 nt, Artificial Sequence
  Description of Artificial Sequence: Synthetic oligonucleotide
  Sense strand starting at position 214 of SEQ ID NO: 377
aguuuagguaagugggaua

SEQ ID NO: 32633 - RNA, 19 nt, Artificial Sequence
  Description of Artificial Sequence: Synthetic oligonucleotide
  Antisense strand to SEQ ID NO: 32632
uaucccacuuaccuaaacu

SEQ ID NO: 32634 - RNA, 19 nt, Artificial Sequence
  Description of Artificial Sequence: Synthetic oligonucleotide
  Sense strand starting at position 189 of SEQ ID NO: 377
gcaucagcugaagauuaaa

SEQ ID NO: 32635 - RNA, 19 nt, Artificial Sequence
  Description of Artificial Sequence: Synthetic oligonucleotide
  Antisense strand to SEQ ID NO: 32634
uuuaaucuucagcugaugc

SEQ ID NO: 32636 - RNA, 19 nt, Artificial Sequence
  Description of Artificial Sequence: Synthetic oligonucleotide
  Sense strand starting at position 93 of SEQ ID NO: 377
aauuaaugugguggaaaug

SEQ ID NO: 32637 - RNA, 19 nt, Artificial Sequence
  Description of Artificial Sequence: Synthetic oligonucleotide
  Antisense strand to SEQ ID NO: 32636
cauuuccaccacauuaauu

SEQ ID NO: 32638 - RNA, 19 nt, Artificial Sequence
  Description of Artificial Sequence: Synthetic oligonucleotide
  Sense strand starting at position 3672 of SEQ ID NO: 378
aguugugaccgugauagau

SEQ ID NO: 32639 - RNA, 19 nt, Artificial Sequence
  Description of Artificial Sequence: Synthetic oligonucleotide
  Antisense strand to SEQ ID NO: 32638
aucuaucacggucacaacu

SEQ ID NO: 32640 - RNA, 19 nt, Artificial Sequence
  Description of Artificial Sequence: Synthetic oligonucleotide
  Sense strand starting at position 3549 of SEQ ID NO: 378
aggagauggccugguacua

SEQ ID NO: 32641 - RNA, 19 nt, Artificial Sequence
  Description of Artificial Sequence: Synthetic oligonucleotide
  Antisense strand to SEQ ID NO: 32640
uaguaccaggccaucuccu

SEQ ID NO: 32642 - RNA, 19 nt, Artificial Sequence
  Description of Artificial Sequence: Synthetic oligonucleotide
  Sense strand starting at position 3443 of SEQ ID NO: 378
aagggaagucugugaggua

SEQ ID NO: 32643 - RNA, 19 nt, Artificial Sequence
  Description of Artificial Sequence: Synthetic oligonucleotide
  Antisense strand to SEQ ID NO: 32642
uaccucacagacuucccuu

SEQ ID NO: 32644 - RNA, 19 nt, Artificial Sequence
  Description of Artificial Sequence: Synthetic oligonucleotide
  Sense strand starting at position 3426 of SEQ ID NO: 378
gugguagugccacauagaa

SEQ ID NO: 32645 - RNA, 19 nt, Artificial Sequence
  Description of Artificial Sequence: Synthetic oligonucleotide
  Antisense strand to SEQ ID NO: 32644
uucuauguggcacuaccac

SEQ ID NO: 32646 - RNA, 19 nt, Artificial Sequence
  Description of Artificial Sequence: Synthetic oligonucleotide
  Sense strand starting at position 3266 of SEQ ID NO: 378
gcacuuuauguuuaggaga

SEQ ID NO: 32647 - RNA, 19 nt, Artificial Sequence
  Description of Artificial Sequence: Synthetic oligonucleotide
  Antisense strand to SEQ ID NO: 32646
ucuccuaaacauaaagugc

SEQ ID NO: 32648 - RNA, 19 nt, Artificial Sequence
  Description of Artificial Sequence: Synthetic oligonucleotide
  Sense strand starting at position 3192 of SEQ ID NO: 378
ggaguaauaugaucuaucu

SEQ ID NO: 32649 - RNA, 19 nt, Artificial Sequence
  Description of Artificial Sequence: Synthetic oligonucleotide
  Antisense strand to SEQ ID NO: 32648
agauagaucauauuacucc

SEQ ID NO: 32650 - RNA, 19 nt, Artificial Sequence
  Description of Artificial Sequence: Synthetic oligonucleotide
  Sense strand starting at position 3145 of SEQ ID NO: 378
guuuguucugaguacaauu

SEQ ID NO: 32651 - RNA, 19 nt, Artificial Sequence
  Description of Artificial Sequence: Synthetic oligonucleotide
  Antisense strand to SEQ ID NO: 32650
aauuguacucagaacaaac

SEQ ID NO: 32652 - RNA, 19 nt, Artificial Sequence
  Description of Artificial Sequence: Synthetic oligonucleotide
  Sense strand starting at position 3129 of SEQ ID NO: 378
ggguaagaaguuuaguguu

SEQ ID NO: 32653 - RNA, 19 nt, Artificial Sequence
  Description of Artificial Sequence: Synthetic oligonucleotide
  Antisense strand to SEQ ID NO: 32652
aacacuaaacuucuuaccc

SEQ ID NO: 32654 - RNA, 19 nt, Artificial Sequence
  Description of Artificial Sequence: Synthetic oligonucleotide
  Sense strand starting at position 3089 of SEQ ID NO: 378
gagaguuaggcagaagcca

SEQ ID NO: 32655 - RNA, 19 nt, Artificial Sequence
  Description of Artificial Sequence: Synthetic oligonucleotide
  Antisense strand to SEQ ID NO: 32654
uggcuucugccuaacucuc

SEQ ID NO: 32656 - RNA, 19 nt, Artificial Sequence
  Description of Artificial Sequence: Synthetic oligonucleotide
  Sense strand starting at position 3078 of SEQ ID NO: 378
agaugaagguggagaguua

SEQ ID NO: 32657 - RNA, 19 nt, Artificial Sequence
  Description of Artificial Sequence: Synthetic oligonucleotide
  Antisense strand to SEQ ID NO: 32656
uaacucuccaccuucaucu

SEQ ID NO: 32658 - RNA, 19 nt, Artificial Sequence
  Description of Artificial Sequence: Synthetic oligonucleotide
  Sense strand starting at position 2747 of SEQ ID NO: 378
gaaucauagugagcaagau

SEQ ID NO: 32659 - RNA, 19 nt, Artificial Sequence
  Description of Artificial Sequence: Synthetic oligonucleotide
  Antisense strand to SEQ ID NO: 32658
aucuugcucacuaugauuc

SEQ ID NO: 32660 - RNA, 19 nt, Artificial Sequence
  Description of Artificial Sequence: Synthetic oligonucleotide
  Sense strand starting at position 2683 of SEQ ID NO: 378
gaaggcaguguauacuauu

SEQ ID NO: 32661 - RNA, 19 nt, Artificial Sequence
  Description of Artificial Sequence: Synthetic oligonucleotide
  Antisense strand to SEQ ID NO: 32660
aauaguauacacugccuuc

SEQ ID NO: 32662 - RNA, 19 nt, Artificial Sequence
  Description of Artificial Sequence: Synthetic oligonucleotide
  Sense strand starting at position 2648 of SEQ ID NO: 378
uguggcuguguuaguagaa

SEQ ID NO: 32663 - RNA, 19 nt, Artificial Sequence
  Description of Artificial Sequence: Synthetic oligonucleotide
  Antisense strand to SEQ ID NO: 32662
uucuacuaacacagccaca

SEQ ID NO: 32664 - RNA, 19 nt, Artificial Sequence
  Description of Artificial Sequence: Synthetic oligonucleotide
  Sense strand starting at position 2629 of SEQ ID NO: 378
aauguaauugcugauuguu

SEQ ID NO: 32665 - RNA, 19 nt, Artificial Sequence
  Description of Artificial Sequence: Synthetic oligonucleotide
  Antisense strand to SEQ ID NO: 32664
aacaaucagcaauuacauu

SEQ ID NO: 32666 - RNA, 19 nt, Artificial Sequence
  Description of Artificial Sequence: Synthetic oligonucleotide
  Sense strand starting at position 2538 of SEQ ID NO: 378
ugggcacuccauggauaaa

SEQ ID NO: 32667 - RNA, 19 nt, Artificial Sequence
  Description of Artificial Sequence: Synthetic oligonucleotide
  Antisense strand to SEQ ID NO: 32666
uuuauccauggagugccca

SEQ ID NO: 32668 - RNA, 19 nt, Artificial Sequence
  Description of Artificial Sequence: Synthetic oligonucleotide
  Sense strand starting at position 2537 of SEQ ID NO: 378
uugggcacuccauggauaa

SEQ ID NO: 32669 - RNA, 19 nt, Artificial Sequence
  Description of Artificial Sequence: Synthetic oligonucleotide
  Antisense strand to SEQ ID NO: 32668
uuauccauggagugcccaa

SEQ ID NO: 32670 - RNA, 19 nt, Artificial Sequence
  Description of Artificial Sequence: Synthetic oligonucleotide
  Sense strand starting at position 2391 of SEQ ID NO: 378
gaaugaagcccguggauga

SEQ ID NO: 32671 - RNA, 19 nt, Artificial Sequence
  Description of Artificial Sequence: Synthetic oligonucleotide
  Antisense strand to SEQ ID NO: 32670
ucauccacgggcuucauuc

SEQ ID NO: 32672 - RNA, 19 nt, Artificial Sequence
  Description of Artificial Sequence: Synthetic oligonucleotide
  Sense strand starting at position 2139 of SEQ ID NO: 378
gaacaaaccgucggaaacu

SEQ ID NO: 32673 - RNA, 19 nt, Artificial Sequence
  Description of Artificial Sequence: Synthetic oligonucleotide
  Antisense strand to SEQ ID NO: 32672
aguuuccgacgguuuguuc

SEQ ID NO: 32674 - RNA, 19 nt, Artificial Sequence
  Description of Artificial Sequence: Synthetic oligonucleotide
  Sense strand starting at position 2097 of SEQ ID NO: 378
gauccagaauucguuccua

SEQ ID NO: 32675 - RNA, 19 nt, Artificial Sequence
  Description of Artificial Sequence: Synthetic oligonucleotide
  Antisense strand to SEQ ID NO: 32674
uaggaacgaauucuggauc

SEQ ID NO: 32676 - RNA, 19 nt, Artificial Sequence
  Description of Artificial Sequence: Synthetic oligonucleotide
  Sense strand starting at position 1769 of SEQ ID NO: 378
gcgguuugaagucaggaaa

SEQ ID NO: 32677 - RNA, 19 nt, Artificial Sequence
  Description of Artificial Sequence: Synthetic oligonucleotide
  Antisense strand to SEQ ID NO: 32676
uuuccugacuucaaaccgc

SEQ ID NO: 32678 - RNA, 19 nt, Artificial Sequence
  Description of Artificial Sequence: Synthetic oligonucleotide
  Sense strand starting at position 1587 of SEQ ID NO: 378
uguggccuugucuaaggaa

SEQ ID NO: 32679 - RNA, 19 nt, Artificial Sequence
  Description of Artificial Sequence: Synthetic oligonucleotide
  Antisense strand to SEQ ID NO: 32678
uuccuuagacaaggccaca

SEQ ID NO: 32680 - RNA, 19 nt, Artificial Sequence
  Description of Artificial Sequence: Synthetic oligonucleotide
  Sense strand starting at position 1220 of SEQ ID NO: 378
acagaauuguugccugaaa

SEQ ID NO: 32681 - RNA, 19 nt, Artificial Sequence
  Description of Artificial Sequence: Synthetic oligonucleotide
  Antisense strand to SEQ ID NO: 32680
uuucaggcaacaauucugu

SEQ ID NO: 32682 - RNA, 19 nt, Artificial Sequence
  Description of Artificial Sequence: Synthetic oligonucleotide
  Sense strand starting at position 1121 of SEQ ID NO: 378
acauuuagaucauacgaag

SEQ ID NO: 32683 - RNA, 19 nt, Artificial Sequence
  Description of Artificial Sequence: Synthetic oligonucleotide
  Antisense strand to SEQ ID NO: 32682
cuucguaugaucuaaaugu

SEQ ID NO: 32684 - RNA, 19 nt, Artificial Sequence
  Description of Artificial Sequence: Synthetic oligonucleotide
  Sense strand starting at position 1116 of SEQ ID NO: 378
guccuacauuuagaucaua

SEQ ID NO: 32685 - RNA, 19 nt, Artificial Sequence
  Description of Artificial Sequence: Synthetic oligonucleotide
  Antisense strand to SEQ ID NO: 32684
uaugaucuaaauguaggac

SEQ ID NO: 32686 - RNA, 19 nt, Artificial Sequence
  Description of Artificial Sequence: Synthetic oligonucleotide
  Sense strand starting at position 1088 of SEQ ID NO: 378
guauuacagucuuccaaau

SEQ ID NO: 32687 - RNA, 19 nt, Artificial Sequence
  Description of Artificial Sequence: Synthetic oligonucleotide
  Antisense strand to SEQ ID NO: 32686
auuuggaagacuguaauac

SEQ ID NO: 32688 - RNA, 19 nt, Artificial Sequence
  Description of Artificial Sequence: Synthetic oligonucleotide
  Sense strand starting at position 965 of SEQ ID NO: 378
caauguggugaguagagau

SEQ ID NO: 32689 - RNA, 19 nt, Artificial Sequence
  Description of Artificial Sequence: Synthetic oligonucleotide
  Antisense strand to SEQ ID NO: 32688
aucucuacucaccacauug

SEQ ID NO: 32690 - RNA, 19 nt, Artificial Sequence
  Description of Artificial Sequence: Synthetic oligonucleotide
  Sense strand starting at position 962 of SEQ ID NO: 378
aggcaauguggugaguaga

SEQ ID NO: 32691 - RNA, 19 nt, Artificial Sequence
  Description of Artificial Sequence: Synthetic oligonucleotide
  Antisense strand to SEQ ID NO: 32690
ucuacucaccacauugccu

SEQ ID NO: 32692 - RNA, 19 nt, Artificial Sequence
  Description of Artificial Sequence: Synthetic oligonucleotide
  Sense strand starting at position 936 of SEQ ID NO: 378
agugucaauuucuacauuu

SEQ ID NO: 32693 - RNA, 19 nt, Artificial Sequence
  Description of Artificial Sequence: Synthetic oligonucleotide
  Antisense strand to SEQ ID NO: 32692
aaauguagaaauugacacu

SEQ ID NO: 32694 - RNA, 19 nt, Artificial Sequence
  Description of Artificial Sequence: Synthetic oligonucleotide
  Sense strand starting at position 926 of SEQ ID NO: 378
gaugaucuccagugucaau

SEQ ID NO: 32695 - RNA, 19 nt, Artificial Sequence
  Description of Artificial Sequence: Synthetic oligonucleotide
  Antisense strand to SEQ ID NO: 32694
auugacacuggagaucauc

SEQ ID NO: 32696 - RNA, 19 nt, Artificial Sequence
  Description of Artificial Sequence: Synthetic oligonucleotide
  Sense strand starting at position 912 of SEQ ID NO: 378
uugaauacuuaagugauga

SEQ ID NO: 32697 - RNA, 19 nt, Artificial Sequence
  Description of Artificial Sequence: Synthetic oligonucleotide
  Antisense strand to SEQ ID NO: 32696
ucaucacuuaaguauucaa

SEQ ID NO: 32698 - RNA, 19 nt, Artificial Sequence
  Description of Artificial Sequence: Synthetic oligonucleotide
  Sense strand starting at position 893 of SEQ ID NO: 378
uugucugugaguucugcuu

SEQ ID NO: 32699 - RNA, 19 nt, Artificial Sequence
  Description of Artificial Sequence: Synthetic oligonucleotide
  Antisense strand to SEQ ID NO: 32698
aagcagaacucacagacaa

SEQ ID NO: 32700 - RNA, 19 nt, Artificial Sequence
  Description of Artificial Sequence: Synthetic oligonucleotide
  Sense strand starting at position 850 of SEQ ID NO: 378
gagauauggugcuuuauua

SEQ ID NO: 32701 - RNA, 19 nt, Artificial Sequence
  Description of Artificial Sequence: Synthetic oligonucleotide
  Antisense strand to SEQ ID NO: 32700
uaauaaagcaccauaucuc

SEQ ID NO: 32702 - RNA, 19 nt, Artificial Sequence
  Description of Artificial Sequence: Synthetic oligonucleotide
  Sense strand starting at position 837 of SEQ ID NO: 378
caugcuguacacugagaua

SEQ ID NO: 32703 - RNA, 19 nt, Artificial Sequence
  Description of Artificial Sequence: Synthetic oligonucleotide
  Antisense strand to SEQ ID NO: 32702
uaucucaguguacagcaug

SEQ ID NO: 32704 - RNA, 19 nt, Artificial Sequence
  Description of Artificial Sequence: Synthetic oligonucleotide
  Sense strand starting at position 813 of SEQ ID NO: 378
cugguuuacggucaaagaa

SEQ ID NO: 32705 - RNA, 19 nt, Artificial Sequence
  Description of Artificial Sequence: Synthetic oligonucleotide
  Antisense strand to SEQ ID NO: 32704
uucuuugaccguaaaccag

SEQ ID NO: 32706 - RNA, 19 nt, Artificial Sequence
  Description of Artificial Sequence: Synthetic oligonucleotide
  Sense strand starting at position 613 of SEQ ID NO: 378
agacaaagaugggaaagau

SEQ ID NO: 32707 - RNA, 19 nt, Artificial Sequence
  Description of Artificial Sequence: Synthetic oligonucleotide
  Antisense strand to SEQ ID NO: 32706
aucuuucccaucuuugucu

SEQ ID NO: 32708 - RNA, 19 nt, Artificial Sequence
  Description of Artificial Sequence: Synthetic oligonucleotide
  Sense strand starting at position 487 of SEQ ID NO: 378
ugggauaacugacuuccau

SEQ ID NO: 32709 - RNA, 19 nt, Artificial Sequence
  Description of Artificial Sequence: Synthetic oligonucleotide
  Antisense strand to SEQ ID NO: 32708
auggaagucaguuauccca

SEQ ID NO: 32710 - RNA, 19 nt, Artificial Sequence
  Description of Artificial Sequence: Synthetic oligonucleotide
  Sense strand starting at position 475 of SEQ ID NO: 378
aguuuagguaagugggaua

SEQ ID NO: 32711 - RNA, 19 nt, Artificial Sequence
  Description of Artificial Sequence: Synthetic oligonucleotide
  Antisense strand to SEQ ID NO: 32710
uaucccacuuaccuaaacu

SEQ ID NO: 32712 - RNA, 19 nt, Artificial Sequence
  Description of Artificial Sequence: Synthetic oligonucleotide
  Sense strand starting at position 450 of SEQ ID NO: 378
gcaucagcugaagauuaaa

SEQ ID NO: 32713 - RNA, 19 nt, Artificial Sequence
  Description of Artificial Sequence: Synthetic oligonucleotide
  Antisense strand to SEQ ID NO: 32712
uuuaaucuucagcugaugc

SEQ ID NO: 32714 - RNA, 19 nt, Artificial Sequence
  Description of Artificial Sequence: Synthetic oligonucleotide
  Sense strand starting at position 354 of SEQ ID NO: 378
aauuaaugugguggaaaug

SEQ ID NO: 32715 - RNA, 19 nt, Artificial Sequence
  Description of Artificial Sequence: Synthetic oligonucleotide
  Antisense strand to SEQ ID NO: 32714
cauuuccaccacauuaauu

SEQ ID NO: 32716 - RNA, 19 nt, Artificial Sequence
  Description of Artificial Sequence: Synthetic oligonucleotide
  Sense strand starting at position 112 of SEQ ID NO: 378
cuacaaugacuguguuacu

SEQ ID NO: 32717 - RNA, 19 nt, Artificial Sequence
  Description of Artificial Sequence: Synthetic oligonucleotide
  Antisense strand to SEQ ID NO: 32716
aguaacacagucauuguag

SEQ ID NO: 32718 - RNA, 19 nt, Artificial Sequence
  Description of Artificial Sequence: Synthetic oligonucleotide
  Sense strand starting at position 3951 of SEQ ID NO: 379
uccagauauuagcuccuga

SEQ ID NO: 32719 - RNA, 19 nt, Artificial Sequence
  Description of Artificial Sequence: Synthetic oligonucleotide
  Antisense strand to SEQ ID NO: 32718
ucaggagcuaauaucugga

SEQ ID NO: 32720 - RNA, 19 nt, Artificial Sequence
  Description of Artificial Sequence: Synthetic oligonucleotide
  Sense strand starting at position 3821 of SEQ ID NO: 379
gguucauuggaggauguca

SEQ ID NO: 32721 - RNA, 19 nt, Artificial Sequence
  Description of Artificial Sequence: Synthetic oligonucleotide
  Antisense strand to SEQ ID NO: 32720
ugacauccuccaaugaacc

SEQ ID NO: 32722 - RNA, 19 nt, Artificial Sequence
  Description of Artificial Sequence: Synthetic oligonucleotide
  Sense strand starting at position 3759 of SEQ ID NO: 379
gaagcaauuguagaucauu

SEQ ID NO: 32723 - RNA, 19 nt, Artificial Sequence
  Description of Artificial Sequence: Synthetic oligonucleotide
  Antisense strand to SEQ ID NO: 32722
aaugaucuacaauugcuuc

SEQ ID NO: 32724 - RNA, 19 nt, Artificial Sequence
  Description of Artificial Sequence: Synthetic oligonucleotide
  Sense strand starting at position 3646 of SEQ ID NO: 379
gugguaagauaagucauua

SEQ ID NO: 32725 - RNA, 19 nt, Artificial Sequence
  Description of Artificial Sequence: Synthetic oligonucleotide
  Antisense strand to SEQ ID NO: 32724
uaaugacuuaucuuaccac

SEQ ID NO: 32726 - RNA, 19 nt, Artificial Sequence
  Description of Artificial Sequence: Synthetic oligonucleotide
  Sense strand starting at position 3444 of SEQ ID NO: 379
cgaguuaauacauggauag

SEQ ID NO: 32727 - RNA, 19 nt, Artificial Sequence
  Description of Artificial Sequence: Synthetic oligonucleotide
  Antisense strand to SEQ ID NO: 32726
cuauccauguauuaacucg

SEQ ID NO: 32728 - RNA, 19 nt, Artificial Sequence
  Description of Artificial Sequence: Synthetic oligonucleotide
  Sense strand starting at position 3346 of SEQ ID NO: 379
agaucuguguccucauauc

SEQ ID NO: 32729 - RNA, 19 nt, Artificial Sequence
  Description of Artificial Sequence: Synthetic oligonucleotide
  Antisense strand to SEQ ID NO: 32728
gauaugaggacacagaucu

SEQ ID NO: 32730 - RNA, 19 nt, Artificial Sequence
  Description of Artificial Sequence: Synthetic oligonucleotide
  Sense strand starting at position 3344 of SEQ ID NO: 379
auagaucuguguccucaua

SEQ ID NO: 32731 - RNA, 19 nt, Artificial Sequence
  Description of Artificial Sequence: Synthetic oligonucleotide
  Antisense strand to SEQ ID NO: 32730
uaugaggacacagaucuau

SEQ ID NO: 32732 - RNA, 19 nt, Artificial Sequence
  Description of Artificial Sequence: Synthetic oligonucleotide
  Sense strand starting at position 3182 of SEQ ID NO: 379
cccguaguauucuccugaa

SEQ ID NO: 32733 - RNA, 19 nt, Artificial Sequence
  Description of Artificial Sequence: Synthetic oligonucleotide
  Antisense strand to SEQ ID NO: 32732
uucaggagaauacuacggg

SEQ ID NO: 32734 - RNA, 19 nt, Artificial Sequence
  Description of Artificial Sequence: Synthetic oligonucleotide
  Sense strand starting at position 3136 of SEQ ID NO: 379
aacuguuaguuugugaaau

SEQ ID NO: 32735 - RNA, 19 nt, Artificial Sequence
  Description of Artificial Sequence: Synthetic oligonucleotide
  Antisense strand to SEQ ID NO: 32734
auuucacaaacuaacaguu

SEQ ID NO: 32736 - RNA, 19 nt, Artificial Sequence
  Description of Artificial Sequence: Synthetic oligonucleotide
  Sense strand starting at position 3112 of SEQ ID NO: 379
cgauaugaucuguagccau

SEQ ID NO: 32737 - RNA, 19 nt, Artificial Sequence
  Description of Artificial Sequence: Synthetic oligonucleotide
  Antisense strand to SEQ ID NO: 32736
auggcuacagaucauaucg

SEQ ID NO: 32738 - RNA, 19 nt, Artificial Sequence
  Description of Artificial Sequence: Synthetic oligonucleotide
  Sense strand starting at position 3111 of SEQ ID NO: 379
ccgauaugaucuguagcca

SEQ ID NO: 32739 - RNA, 19 nt, Artificial Sequence
  Description of Artificial Sequence: Synthetic oligonucleotide
  Antisense strand to SEQ ID NO: 32738
uggcuacagaucauaucgg

SEQ ID NO: 32740 - RNA, 19 nt, Artificial Sequence
  Description of Artificial Sequence: Synthetic oligonucleotide
  Sense strand starting at position 3096 of SEQ ID NO: 379
gugugugguucauuuccga

SEQ ID NO: 32741 - RNA, 19 nt, Artificial Sequence
  Description of Artificial Sequence: Synthetic oligonucleotide
  Antisense strand to SEQ ID NO: 32740
ucggaaaugaaccacacac

SEQ ID NO: 32742 - RNA, 19 nt, Artificial Sequence
  Description of Artificial Sequence: Synthetic oligonucleotide
  Sense strand starting at position 3092 of SEQ ID NO: 379
agaagugugugguucauuu

SEQ ID NO: 32743 - RNA, 19 nt, Artificial Sequence
  Description of Artificial Sequence: Synthetic oligonucleotide
  Antisense strand to SEQ ID NO: 32742
aaaugaaccacacacuucu

SEQ ID NO: 32744 - RNA, 19 nt, Artificial Sequence
  Description of Artificial Sequence: Synthetic oligonucleotide
  Sense strand starting at position 3087 of SEQ ID NO: 379
gauacagaagugugugguu

SEQ ID NO: 32745 - RNA, 19 nt, Artificial Sequence
  Description of Artificial Sequence: Synthetic oligonucleotide
  Antisense strand to SEQ ID NO: 32744
aaccacacacuucuguauc

SEQ ID NO: 32746 - RNA, 19 nt, Artificial Sequence
  Description of Artificial Sequence: Synthetic oligonucleotide
  Sense strand starting at position 3008 of SEQ ID NO: 379
gcaacuuuguguuugacau

SEQ ID NO: 32747 - RNA, 19 nt, Artificial Sequence
  Description of Artificial Sequence: Synthetic oligonucleotide
  Antisense strand to SEQ ID NO: 32746
augucaaacacaaaguugc

SEQ ID NO: 32748 - RNA, 19 nt, Artificial Sequence
  Description of Artificial Sequence: Synthetic oligonucleotide
  Sense strand starting at position 2879 of SEQ ID NO: 379
ucagaagucucaguggugu

SEQ ID NO: 32749 - RNA, 19 nt, Artificial Sequence
  Description of Artificial Sequence: Synthetic oligonucleotide
  Antisense strand to SEQ ID NO: 32748
acaccacugagacuucuga

SEQ ID NO: 32750 - RNA, 19 nt, Artificial Sequence
  Description of Artificial Sequence: Synthetic oligonucleotide
  Sense strand starting at position 2867 of SEQ ID NO: 379
uuuaaaugguacucagaag

SEQ ID NO: 32751 - RNA, 19 nt, Artificial Sequence
  Description of Artificial Sequence: Synthetic oligonucleotide
  Antisense strand to SEQ ID NO: 32750
cuucugaguaccauuuaaa

SEQ ID NO: 32752 - RNA, 19 nt, Artificial Sequence
  Description of Artificial Sequence: Synthetic oligonucleotide
  Sense strand starting at position 2801 of SEQ ID NO: 379
ugggaaaguugcccuaaca

SEQ ID NO: 32753 - RNA, 19 nt, Artificial Sequence
  Description of Artificial Sequence: Synthetic oligonucleotide
  Antisense strand to SEQ ID NO: 32752
uguuagggcaacuuuccca

SEQ ID NO: 32754 - RNA, 19 nt, Artificial Sequence
  Description of Artificial Sequence: Synthetic oligonucleotide
  Sense strand starting at position 2792 of SEQ ID NO: 379
agauguaaaugggaaaguu

SEQ ID NO: 32755 - RNA, 19 nt, Artificial Sequence
  Description of Artificial Sequence: Synthetic oligonucleotide
  Antisense strand to SEQ ID NO: 32754
aacuuucccauuuacaucu

SEQ ID NO: 32756 - RNA, 19 nt, Artificial Sequence
  Description of Artificial Sequence: Synthetic oligonucleotide
  Sense strand starting at position 2610 of SEQ ID NO: 379
gcaucaauugguuaaugaa

SEQ ID NO: 32757 - RNA, 19 nt, Artificial Sequence
  Description of Artificial Sequence: Synthetic oligonucleotide
  Antisense strand to SEQ ID NO: 32756
uucauuaaccaauugaugc

SEQ ID NO: 32758 - RNA, 19 nt, Artificial Sequence
  Description of Artificial Sequence: Synthetic oligonucleotide
  Sense strand starting at position 2609 of SEQ ID NO: 379
agcaucaauugguuaauga

SEQ ID NO: 32759 - RNA, 19 nt, Artificial Sequence
  Description of Artificial Sequence: Synthetic oligonucleotide
  Antisense strand to SEQ ID NO: 32758
ucauuaaccaauugaugcu

SEQ ID NO: 32760 - RNA, 19 nt, Artificial Sequence
  Description of Artificial Sequence: Synthetic oligonucleotide
  Sense strand starting at position 2421 of SEQ ID NO: 379
cuuagugauccggagaagc

SEQ ID NO: 32761 - RNA, 19 nt, Artificial Sequence
  Description of Artificial Sequence: Synthetic oligonucleotide
  Antisense strand to SEQ ID NO: 32760
gcuucuccggaucacuaag

SEQ ID NO: 32762 - RNA, 19 nt, Artificial Sequence
  Description of Artificial Sequence: Synthetic oligonucleotide
  Sense strand starting at position 2419 of SEQ ID NO: 379
gacuuagugauccggagaa

SEQ ID NO: 32763 - RNA, 19 nt, Artificial Sequence
  Description of Artificial Sequence: Synthetic oligonucleotide
  Antisense strand to SEQ ID NO: 32762
uucuccggaucacuaaguc

SEQ ID NO: 32764 - RNA, 19 nt, Artificial Sequence
  Description of Artificial Sequence: Synthetic oligonucleotide
  Sense strand starting at position 2325 of SEQ ID NO: 379
ugcuuuggccgggauggaa

SEQ ID NO: 32765 - RNA, 19 nt, Artificial Sequence
  Description of Artificial Sequence: Synthetic oligonucleotide
  Antisense strand to SEQ ID NO: 32764
uuccaucccggccaaagca

SEQ ID NO: 32766 - RNA, 19 nt, Artificial Sequence
  Description of Artificial Sequence: Synthetic oligonucleotide
  Sense strand starting at position 2324 of SEQ ID NO: 379
cugcuuuggccgggaugga

SEQ ID NO: 32767 - RNA, 19 nt, Artificial Sequence
  Description of Artificial Sequence: Synthetic oligonucleotide
  Antisense strand to SEQ ID NO: 32766
uccaucccggccaaagcag

SEQ ID NO: 32768 - RNA, 19 nt, Artificial Sequence
  Description of Artificial Sequence: Synthetic oligonucleotide
  Sense strand starting at position 1429 of SEQ ID NO: 379
gaugaacugcucuagagcu

SEQ ID NO: 32769 - RNA, 19 nt, Artificial Sequence
  Description of Artificial Sequence: Synthetic oligonucleotide
  Antisense strand to SEQ ID NO: 32768
agcucuagagcaguucauc

SEQ ID NO: 32770 - RNA, 19 nt, Artificial Sequence
  Description of Artificial Sequence: Synthetic oligonucleotide
  Sense strand starting at position 1280 of SEQ ID NO: 379
cggugugcuccuuugugca

SEQ ID NO: 32771 - RNA, 19 nt, Artificial Sequence
  Description of Artificial Sequence: Synthetic oligonucleotide
  Antisense strand to SEQ ID NO: 32770
ugcacaaaggagcacaccg

SEQ ID NO: 32772 - RNA, 19 nt, Artificial Sequence
  Description of Artificial Sequence: Synthetic oligonucleotide
  Sense strand starting at position 1009 of SEQ ID NO: 379
uucuuagaucuguaaagcu

SEQ ID NO: 32773 - RNA, 19 nt, Artificial Sequence
  Description of Artificial Sequence: Synthetic oligonucleotide
  Antisense strand to SEQ ID NO: 32772
agcuuuacagaucuaagaa

SEQ ID NO: 32774 - RNA, 19 nt, Artificial Sequence
  Description of Artificial Sequence: Synthetic oligonucleotide
  Sense strand starting at position 1003 of SEQ ID NO: 379
aucuauuucuuagaucugu

SEQ ID NO: 32775 - RNA, 19 nt, Artificial Sequence
  Description of Artificial Sequence: Synthetic oligonucleotide
  Antisense strand to SEQ ID NO: 32774
acagaucuaagaaauagau

SEQ ID NO: 32776 - RNA, 19 nt, Artificial Sequence
  Description of Artificial Sequence: Synthetic oligonucleotide
  Sense strand starting at position 891 of SEQ ID NO: 379
uagagccgucucuagaagu

SEQ ID NO: 32777 - RNA, 19 nt, Artificial Sequence
  Description of Artificial Sequence: Synthetic oligonucleotide
  Antisense strand to SEQ ID NO: 32776
acuucuagagacggcucua

SEQ ID NO: 32778 - RNA, 19 nt, Artificial Sequence
  Description of Artificial Sequence: Synthetic oligonucleotide
  Sense strand starting at position 827 of SEQ ID NO: 379
guucuaauucuagaagcga

SEQ ID NO: 32779 - RNA, 19 nt, Artificial Sequence
  Description of Artificial Sequence: Synthetic oligonucleotide
  Antisense strand to SEQ ID NO: 32778
ucgcuucuagaauuagaac

SEQ ID NO: 32780 - RNA, 19 nt, Artificial Sequence
  Description of Artificial Sequence: Synthetic oligonucleotide
  Sense strand starting at position 811 of SEQ ID NO: 379
gaaguuguagcucaagguu

SEQ ID NO: 32781 - RNA, 19 nt, Artificial Sequence
  Description of Artificial Sequence: Synthetic oligonucleotide
  Antisense strand to SEQ ID NO: 32780
aaccuugagcuacaacuuc

SEQ ID NO: 32782 - RNA, 19 nt, Artificial Sequence
  Description of Artificial Sequence: Synthetic oligonucleotide
  Sense strand starting at position 321 of SEQ ID NO: 379
cuaugcaaauuauucgaaa

SEQ ID NO: 32783 - RNA, 19 nt, Artificial Sequence
  Description of Artificial Sequence: Synthetic oligonucleotide
  Antisense strand to SEQ ID NO: 32782
uuucgaauaauuugcauag

SEQ ID NO: 32784 - RNA, 19 nt, Artificial Sequence
  Description of Artificial Sequence: Synthetic oligonucleotide
  Sense strand starting at position 252 of SEQ ID NO: 379
cuagguacuccuuagccau

SEQ ID NO: 32785 - RNA, 19 nt, Artificial Sequence
  Description of Artificial Sequence: Synthetic oligonucleotide
  Antisense strand to SEQ ID NO: 32784
auggcuaaggaguaccuag

SEQ ID NO: 32786 - RNA, 19 nt, Artificial Sequence
  Description of Artificial Sequence: Synthetic oligonucleotide
  Sense strand starting at position 202 of SEQ ID NO: 379
accagagucuuaggaauuu

SEQ ID NO: 32787 - RNA, 19 nt, Artificial Sequence
  Description of Artificial Sequence: Synthetic oligonucleotide
  Antisense strand to SEQ ID NO: 32786
aaauuccuaagacucuggu

SEQ ID NO: 32788 - RNA, 19 nt, Artificial Sequence
  Description of Artificial Sequence: Synthetic oligonucleotide
  Sense strand starting at position 200 of SEQ ID NO: 379
aaaccagagucuuaggaau

SEQ ID NO: 32789 - RNA, 19 nt, Artificial Sequence
  Description of Artificial Sequence: Synthetic oligonucleotide
  Antisense strand to SEQ ID NO: 32788
auuccuaagacucugguuu

SEQ ID NO: 32790 - RNA, 19 nt, Artificial Sequence
  Description of Artificial Sequence: Synthetic oligonucleotide
  Sense strand starting at position 180 of SEQ ID NO: 379
guuaaccuccuuugaggua

SEQ ID NO: 32791 - RNA, 19 nt, Artificial Sequence
  Description of Artificial Sequence: Synthetic oligonucleotide
  Antisense strand to SEQ ID NO: 32790
uaccucaaaggagguuaac

SEQ ID NO: 32792 - RNA, 19 nt, Artificial Sequence
  Description of Artificial Sequence: Synthetic oligonucleotide
  Sense strand starting at position 94 of SEQ ID NO: 379
aaagcuauuguagaaagca

SEQ ID NO: 32793 - RNA, 19 nt, Artificial Sequence
  Description of Artificial Sequence: Synthetic oligonucleotide
  Antisense strand to SEQ ID NO: 32792
ugcuuucuacaauagcuuu

SEQ ID NO: 32794 - RNA, 19 nt, Artificial Sequence
  Description of Artificial Sequence: Synthetic oligonucleotide
  Sense strand starting at position 11 of SEQ ID NO: 379
cuuuguuggaugugaacuu

SEQ ID NO: 32795 - RNA, 19 nt, Artificial Sequence
  Description of Artificial Sequence: Synthetic oligonucleotide
  Antisense strand to SEQ ID NO: 32794
aaguucacauccaacaaag

SEQ ID NO: 32796 - RNA, 19 nt, Artificial Sequence
  Description of Artificial Sequence: Synthetic oligonucleotide
  Sense strand starting at position 9 of SEQ ID NO: 379
aacuuuguuggaugugaac

SEQ ID NO: 32797 - RNA, 19 nt, Artificial Sequence
  Description of Artificial Sequence: Synthetic oligonucleotide
  Antisense strand to SEQ ID NO: 32796
guucacauccaacaaaguu

SEQ ID NO: 32798 - RNA, 19 nt, Artificial Sequence
  Description of Artificial Sequence: Synthetic oligonucleotide
  Sense strand starting at position 3794 of SEQ ID NO: 380
gcggcacuacgauauauuu

SEQ ID NO: 32799 - RNA, 19 nt, Artificial Sequence
  Description of Artificial Sequence: Synthetic oligonucleotide
  Antisense strand to SEQ ID NO: 32798
aaauauaucguagugccgc

SEQ ID NO: 32800 - RNA, 19 nt, Artificial Sequence
  Description of Artificial Sequence: Synthetic oligonucleotide
  Sense strand starting at position 3695 of SEQ ID NO: 380
agaagucgccguguuugga

SEQ ID NO: 32801 - RNA, 19 nt, Artificial Sequence
  Description of Artificial Sequence: Synthetic oligonucleotide
  Antisense strand to SEQ ID NO: 32800
uccaaacacggcgacuucu

SEQ ID NO: 32802 - RNA, 19 nt, Artificial Sequence
  Description of Artificial Sequence: Synthetic oligonucleotide
  Sense strand starting at position 3693 of SEQ ID NO: 380
ugagaagucgccguguuug

SEQ ID NO: 32803 - RNA, 19 nt, Artificial Sequence
  Description of Artificial Sequence: Synthetic oligonucleotide
  Antisense strand to SEQ ID NO: 32802
caaacacggcgacuucuca

SEQ ID NO: 32804 - RNA, 19 nt, Artificial Sequence
  Description of Artificial Sequence: Synthetic oligonucleotide
  Sense strand starting at position 3567 of SEQ ID NO: 380
ugugauacacaaugucaaa

SEQ ID NO: 32805 - RNA, 19 nt, Artificial Sequence
  Description of Artificial Sequence: Synthetic oligonucleotide
  Antisense strand to SEQ ID NO: 32804
uuugacauuguguaucaca

SEQ ID NO: 32806 - RNA, 19 nt, Artificial Sequence
  Description of Artificial Sequence: Synthetic oligonucleotide
  Sense strand starting at position 3536 of SEQ ID NO: 380
gcccgugauuuacuaguuu

SEQ ID NO: 32807 - RNA, 19 nt, Artificial Sequence
  Description of Artificial Sequence: Synthetic oligonucleotide
  Antisense strand to SEQ ID NO: 32806
aaacuaguaaaucacgggc

SEQ ID NO: 32808 - RNA, 19 nt, Artificial Sequence
  Description of Artificial Sequence: Synthetic oligonucleotide
  Sense strand starting at position 3326 of SEQ ID NO: 380
ggaucuccaucagucagau

SEQ ID NO: 32809 - RNA, 19 nt, Artificial Sequence
  Description of Artificial Sequence: Synthetic oligonucleotide
  Antisense strand to SEQ ID NO: 32808
aucugacugauggagaucc

SEQ ID NO: 32810 - RNA, 19 nt, Artificial Sequence
  Description of Artificial Sequence: Synthetic oligonucleotide
  Sense strand starting at position 3240 of SEQ ID NO: 380
caaauauuugaaugucgcu

SEQ ID NO: 32811 - RNA, 19 nt, Artificial Sequence
  Description of Artificial Sequence: Synthetic oligonucleotide
  Antisense strand to SEQ ID NO: 32810
agcgacauucaaauauuug

SEQ ID NO: 32812 - RNA, 19 nt, Artificial Sequence
  Description of Artificial Sequence: Synthetic oligonucleotide
  Sense strand starting at position 3221 of SEQ ID NO: 380
ucuguugcuccauaugcaa

SEQ ID NO: 32813 - RNA, 19 nt, Artificial Sequence
  Description of Artificial Sequence: Synthetic oligonucleotide
  Antisense strand to SEQ ID NO: 32812
uugcauauggagcaacaga

SEQ ID NO: 32814 - RNA, 19 nt, Artificial Sequence
  Description of Artificial Sequence: Synthetic oligonucleotide
  Sense strand starting at position 3188 of SEQ ID NO: 380
ccuggaaaguccuuucucu

SEQ ID NO: 32815 - RNA, 19 nt, Artificial Sequence
  Description of Artificial Sequence: Synthetic oligonucleotide
  Antisense strand to SEQ ID NO: 32814
agagaaaggacuuuccagg

SEQ ID NO: 32816 - RNA, 19 nt, Artificial Sequence
  Description of Artificial Sequence: Synthetic oligonucleotide
  Sense strand starting at position 3038 of SEQ ID NO: 380
ggcuaugggagugauaauc

SEQ ID NO: 32817 - RNA, 19 nt, Artificial Sequence
  Description of Artificial Sequence: Synthetic oligonucleotide
  Antisense strand to SEQ ID NO: 32816
gauuaucacucccauagcc

SEQ ID NO: 32818 - RNA, 19 nt, Artificial Sequence
  Description of Artificial Sequence: Synthetic oligonucleotide
  Sense strand starting at position 3037 of SEQ ID NO: 380
aggcuaugggagugauaau

SEQ ID NO: 32819 - RNA, 19 nt, Artificial Sequence
  Description of Artificial Sequence: Synthetic oligonucleotide
  Antisense strand to SEQ ID NO: 32818
auuaucacucccauagccu

SEQ ID NO: 32820 - RNA, 19 nt, Artificial Sequence
  Description of Artificial Sequence: Synthetic oligonucleotide
  Sense strand starting at position 3031 of SEQ ID NO: 380
uguuauaggcuaugggagu

SEQ ID NO: 32821 - RNA, 19 nt, Artificial Sequence
  Description of Artificial Sequence: Synthetic oligonucleotide
  Antisense strand to SEQ ID NO: 32820
acucccauagccuauaaca

SEQ ID NO: 32822 - RNA, 19 nt, Artificial Sequence
  Description of Artificial Sequence: Synthetic oligonucleotide
  Sense strand starting at position 3029 of SEQ ID NO: 380
cauguuauaggcuauggga

SEQ ID NO: 32823 - RNA, 19 nt, Artificial Sequence
  Description of Artificial Sequence: Synthetic oligonucleotide
  Antisense strand to SEQ ID NO: 32822
ucccauagccuauaacaug

SEQ ID NO: 32824 - RNA, 19 nt, Artificial Sequence
  Description of Artificial Sequence: Synthetic oligonucleotide
  Sense strand starting at position 3016 of SEQ ID NO: 380
guguuuaagcgugcauguu

SEQ ID NO: 32825 - RNA, 19 nt, Artificial Sequence
  Description of Artificial Sequence: Synthetic oligonucleotide
  Antisense strand to SEQ ID NO: 32824
aacaugcacgcuuaaacac

SEQ ID NO: 32826 - RNA, 19 nt, Artificial Sequence
  Description of Artificial Sequence: Synthetic oligonucleotide
  Sense strand starting at position 2949 of SEQ ID NO: 380
uggccugauuguuuggauu

SEQ ID NO: 32827 - RNA, 19 nt, Artificial Sequence
  Description of Artificial Sequence: Synthetic oligonucleotide
  Antisense strand to SEQ ID NO: 32826
aauccaaacaaucaggcca

SEQ ID NO: 32828 - RNA, 19 nt, Artificial Sequence
  Description of Artificial Sequence: Synthetic oligonucleotide
  Sense strand starting at position 2824 of SEQ ID NO: 380
uggauugcucaagaguugu

SEQ ID NO: 32829 - RNA, 19 nt, Artificial Sequence
  Description of Artificial Sequence: Synthetic oligonucleotide
  Antisense strand to SEQ ID NO: 32828
acaacucuugagcaaucca

SEQ ID NO: 32830 - RNA, 19 nt, Artificial Sequence
  Description of Artificial Sequence: Synthetic oligonucleotide
  Sense strand starting at position 2819 of SEQ ID NO: 380
aggguuggauugcucaaga

SEQ ID NO: 32831 - RNA, 19 nt, Artificial Sequence
  Description of Artificial Sequence: Synthetic oligonucleotide
  Antisense strand to SEQ ID NO: 32830
ucuugagcaauccaacccu

SEQ ID NO: 32832 - RNA, 19 nt, Artificial Sequence
  Description of Artificial Sequence: Synthetic oligonucleotide
  Sense strand starting at position 2294 of SEQ ID NO: 380
ugacccucugacugauuga

SEQ ID NO: 32833 - RNA, 19 nt, Artificial Sequence
  Description of Artificial Sequence: Synthetic oligonucleotide
  Antisense strand to SEQ ID NO: 32832
ucaaucagucagaggguca

SEQ ID NO: 32834 - RNA, 19 nt, Artificial Sequence
  Description of Artificial Sequence: Synthetic oligonucleotide
  Sense strand starting at position 2210 of SEQ ID NO: 380
ucaggucggcuguaggauu

SEQ ID NO: 32835 - RNA, 19 nt, Artificial Sequence
  Description of Artificial Sequence: Synthetic oligonucleotide
  Antisense strand to SEQ ID NO: 32834
aauccuacagccgaccuga

SEQ ID NO: 32836 - RNA, 19 nt, Artificial Sequence
  Description of Artificial Sequence: Synthetic oligonucleotide
  Sense strand starting at position 2119 of SEQ ID NO: 380
ccggcugcgaacuauacaa

SEQ ID NO: 32837 - RNA, 19 nt, Artificial Sequence
  Description of Artificial Sequence: Synthetic oligonucleotide
  Antisense strand to SEQ ID NO: 32836
uuguauaguucgcagccgg

SEQ ID NO: 32838 - RNA, 19 nt, Artificial Sequence
  Description of Artificial Sequence: Synthetic oligonucleotide
  Sense strand starting at position 2058 of SEQ ID NO: 380
ggaguugugguccaggcuu

SEQ ID NO: 32839 - RNA, 19 nt, Artificial Sequence
  Description of Artificial Sequence: Synthetic oligonucleotide
  Antisense strand to SEQ ID NO: 32838
aagccuggaccacaacucc

SEQ ID NO: 32840 - RNA, 19 nt, Artificial Sequence
  Description of Artificial Sequence: Synthetic oligonucleotide
  Sense strand starting at position 1277 of SEQ ID NO: 380
aaaggugacaucugagcga

SEQ ID NO: 32841 - RNA, 19 nt, Artificial Sequence
  Description of Artificial Sequence: Synthetic oligonucleotide
  Antisense strand to SEQ ID NO: 32840
ucgcucagaugucaccuuu

SEQ ID NO: 32842 - RNA, 19 nt, Artificial Sequence
  Description of Artificial Sequence: Synthetic oligonucleotide
  Sense strand starting at position 1248 of SEQ ID NO: 380
uccauaaguggucauguca

SEQ ID NO: 32843 - RNA, 19 nt, Artificial Sequence
  Description of Artificial Sequence: Synthetic oligonucleotide
  Antisense strand to SEQ ID NO: 32842
ugacaugaccacuuaugga

SEQ ID NO: 32844 - RNA, 19 nt, Artificial Sequence
  Description of Artificial Sequence: Synthetic oligonucleotide
  Sense strand starting at position 1228 of SEQ ID NO: 380
agugaaagggucugcaauu

SEQ ID NO: 32845 - RNA, 19 nt, Artificial Sequence
  Description of Artificial Sequence: Synthetic oligonucleotide
  Antisense strand to SEQ ID NO: 32844
aauugcagacccuuucacu

SEQ ID NO: 32846 - RNA, 19 nt, Artificial Sequence
  Description of Artificial Sequence: Synthetic oligonucleotide
  Sense strand starting at position 1136 of SEQ ID NO: 380
ugaguuguccgacagagac

SEQ ID NO: 32847 - RNA, 19 nt, Artificial Sequence
  Description of Artificial Sequence: Synthetic oligonucleotide
  Antisense strand to SEQ ID NO: 32846
gucucugucggacaacuca

SEQ ID NO: 32848 - RNA, 19 nt, Artificial Sequence
  Description of Artificial Sequence: Synthetic oligonucleotide
  Sense strand starting at position 1133 of SEQ ID NO: 380
agcugaguuguccgacaga

SEQ ID NO: 32849 - RNA, 19 nt, Artificial Sequence
  Description of Artificial Sequence: Synthetic oligonucleotide
  Antisense strand to SEQ ID NO: 32848
ucugucggacaacucagcu

SEQ ID NO: 32850 - RNA, 19 nt, Artificial Sequence
  Description of Artificial Sequence: Synthetic oligonucleotide
  Sense strand starting at position 1131 of SEQ ID NO: 380
agagcugaguuguccgaca

SEQ ID NO: 32851 - RNA, 19 nt, Artificial Sequence
  Description of Artificial Sequence: Synthetic oligonucleotide
  Antisense strand to SEQ ID NO: 32850
ugucggacaacucagcucu

SEQ ID NO: 32852 - RNA, 19 nt, Artificial Sequence
  Description of Artificial Sequence: Synthetic oligonucleotide
  Sense strand starting at position 627 of SEQ ID NO: 380
guuaacuaaccaugucauu

SEQ ID NO: 32853 - RNA, 19 nt, Artificial Sequence
  Description of Artificial Sequence: Synthetic oligonucleotide
  Antisense strand to SEQ ID NO: 32852
aaugacaugguuaguuaac

SEQ ID NO: 32854 - RNA, 19 nt, Artificial Sequence
  Description of Artificial Sequence: Synthetic oligonucleotide
  Sense strand starting at position 617 of SEQ ID NO: 380
cugagcucugguuaacuaa

SEQ ID NO: 32855 - RNA, 19 nt, Artificial Sequence
  Description of Artificial Sequence: Synthetic oligonucleotide
  Antisense strand to SEQ ID NO: 32854
uuaguuaaccagagcucag

SEQ ID NO: 32856 - RNA, 19 nt, Artificial Sequence
  Description of Artificial Sequence: Synthetic oligonucleotide
  Sense strand starting at position 613 of SEQ ID NO: 380
cuaucugagcucugguuaa

SEQ ID NO: 32857 - RNA, 19 nt, Artificial Sequence
  Description of Artificial Sequence: Synthetic oligonucleotide
  Antisense strand to SEQ ID NO: 32856
uuaaccagagcucagauag

SEQ ID NO: 32858 - RNA, 19 nt, Artificial Sequence
  Description of Artificial Sequence: Synthetic oligonucleotide
  Sense strand starting at position 206 of SEQ ID NO: 380
gcagaaacaggcugggauu

SEQ ID NO: 32859 - RNA, 19 nt, Artificial Sequence
  Description of Artificial Sequence: Synthetic oligonucleotide
  Antisense strand to SEQ ID NO: 32858
aaucccagccuguuucugc

SEQ ID NO: 32860 - RNA, 19 nt, Artificial Sequence
  Description of Artificial Sequence: Synthetic oligonucleotide
  Sense strand starting at position 174 of SEQ ID NO: 380
ccugcauuucuccggacau

SEQ ID NO: 32861 - RNA, 19 nt, Artificial Sequence
  Description of Artificial Sequence: Synthetic oligonucleotide
  Antisense strand to SEQ ID NO: 32860
auguccggagaaaugcagg

SEQ ID NO: 32862 - RNA, 19 nt, Artificial Sequence
  Description of Artificial Sequence: Synthetic oligonucleotide
  Sense strand starting at position 173 of SEQ ID NO: 380
uccugcauuucuccggaca

SEQ ID NO: 32863 - RNA, 19 nt, Artificial Sequence
  Description of Artificial Sequence: Synthetic oligonucleotide
  Antisense strand to SEQ ID NO: 32862
uguccggagaaaugcagga

SEQ ID NO: 32864 - RNA, 19 nt, Artificial Sequence
  Description of Artificial Sequence: Synthetic oligonucleotide
  Sense strand starting at position 112 of SEQ ID NO: 380
caugcuggauaguuaauaa

SEQ ID NO: 32865 - RNA, 19 nt, Artificial Sequence
  Description of Artificial Sequence: Synthetic oligonucleotide
  Antisense strand to SEQ ID NO: 32864
uuauuaacuauccagcaug

SEQ ID NO: 32866 - RNA, 19 nt, Artificial Sequence
  Description of Artificial Sequence: Synthetic oligonucleotide
  Sense strand starting at position 109 of SEQ ID NO: 380
cuacaugcuggauaguuaa

SEQ ID NO: 32867 - RNA, 19 nt, Artificial Sequence
  Description of Artificial Sequence: Synthetic oligonucleotide
  Antisense strand to SEQ ID NO: 32866
uuaacuauccagcauguag

SEQ ID NO: 32868 - RNA, 19 nt, Artificial Sequence
  Description of Artificial Sequence: Synthetic oligonucleotide
  Sense strand starting at position 107 of SEQ ID NO: 380
gacuacaugcuggauaguu

SEQ ID NO: 32869 - RNA, 19 nt, Artificial Sequence
  Description of Artificial Sequence: Synthetic oligonucleotide
  Antisense strand to SEQ ID NO: 32868
aacuauccagcauguaguc

SEQ ID NO: 32870 - RNA, 19 nt, Artificial Sequence
  Description of Artificial Sequence: Synthetic oligonucleotide
  Sense strand starting at position 106 of SEQ ID NO: 380
agacuacaugcuggauagu

SEQ ID NO: 32871 - RNA, 19 nt, Artificial Sequence
  Description of Artificial Sequence: Synthetic oligonucleotide
  Antisense strand to SEQ ID NO: 32870
acuauccagcauguagucu

SEQ ID NO: 32872 - RNA, 19 nt, Artificial Sequence
  Description of Artificial Sequence: Synthetic oligonucleotide
  Sense strand starting at position 74 of SEQ ID NO: 380
gugagcagaccaugcauuu

SEQ ID NO: 32873 - RNA, 19 nt, Artificial Sequence
  Description of Artificial Sequence: Synthetic oligonucleotide
  Antisense strand to SEQ ID NO: 32872
aaaugcauggucugcucac

SEQ ID NO: 32874 - RNA, 19 nt, Artificial Sequence
  Description of Artificial Sequence: Synthetic oligonucleotide
  Sense strand starting at position 67 of SEQ ID NO: 380
cuaauaugugagcagacca

SEQ ID NO: 32875 - RNA, 19 nt, Artificial Sequence
  Description of Artificial Sequence: Synthetic oligonucleotide
  Antisense strand to SEQ ID NO: 32874
uggucugcucacauauuag

SEQ ID NO: 32876 - RNA, 19 nt, Artificial Sequence
  Description of Artificial Sequence: Synthetic oligonucleotide
  Sense strand starting at position 14 of SEQ ID NO: 380
gcaaaugaauggcuuaaua

SEQ ID NO: 32877 - RNA, 19 nt, Artificial Sequence
  Description of Artificial Sequence: Synthetic oligonucleotide
  Antisense strand to SEQ ID NO: 32876
uauuaagccauucauuugc

SEQ ID NO: 32878 - RNA, 19 nt, Artificial Sequence
  Description of Artificial Sequence: Synthetic oligonucleotide
  Sense strand starting at position 83 of SEQ ID NO: 381
ggugauauuugaguuuguc

SEQ ID NO: 32879 - RNA, 19 nt, Artificial Sequence
  Description of Artificial Sequence: Synthetic oligonucleotide
  Antisense strand to SEQ ID NO: 32878
gacaaacucaaauaucacc

SEQ ID NO: 32880 - RNA, 19 nt, Artificial Sequence
  Description of Artificial Sequence: Synthetic oligonucleotide
  Sense strand starting at position 92 of SEQ ID NO: 381
ugaguuugucuaggaagaa

SEQ ID NO: 32881 - RNA, 19 nt, Artificial Sequence
  Description of Artificial Sequence: Synthetic oligonucleotide
  Antisense strand to SEQ ID NO: 32880
uucuuccuagacaaacuca

SEQ ID NO: 32882 - RNA, 19 nt, Artificial Sequence
  Description of Artificial Sequence: Synthetic oligonucleotide
  Sense strand starting at position 251 of SEQ ID NO: 381
ugagcuaaaggcuguguga

SEQ ID NO: 32883 - RNA, 19 nt, Artificial Sequence
  Description of Artificial Sequence: Synthetic oligonucleotide
  Antisense strand to SEQ ID NO: 32882
ucacacagccuuuagcuca

SEQ ID NO: 32884 - RNA, 19 nt, Artificial Sequence
  Description of Artificial Sequence: Synthetic oligonucleotide
  Sense strand starting at position 264 of SEQ ID NO: 381
gugugagggcugcacagau

SEQ ID NO: 32885 - RNA, 19 nt, Artificial Sequence
  Description of Artificial Sequence: Synthetic oligonucleotide
  Antisense strand to SEQ ID NO: 32884
aucugugcagcccucacac

SEQ ID NO: 32886 - RNA, 19 nt, Artificial Sequence
  Description of Artificial Sequence: Synthetic oligonucleotide
  Sense strand starting at position 448 of SEQ ID NO: 381
guggaauuccuacagccca

SEQ ID NO: 32887 - RNA, 19 nt, Artificial Sequence
  Description of Artificial Sequence: Synthetic oligonucleotide
  Antisense strand to SEQ ID NO: 32886
ugggcuguaggaauuccac

SEQ ID NO: 32888 - RNA, 19 nt, Artificial Sequence
  Description of Artificial Sequence: Synthetic oligonucleotide
  Sense strand starting at position 470 of SEQ ID NO: 381
ggcuccagucaucagcaua

SEQ ID NO: 32889 - RNA, 19 nt, Artificial Sequence
  Description of Artificial Sequence: Synthetic oligonucleotide
  Antisense strand to SEQ ID NO: 32888
uaugcugaugacuggagcc

SEQ ID NO: 32890 - RNA, 19 nt, Artificial Sequence
  Description of Artificial Sequence: Synthetic oligonucleotide
  Sense strand starting at position 524 of SEQ ID NO: 381
cacugauguccaggguuac

SEQ ID NO: 32891 - RNA, 19 nt, Artificial Sequence
  Description of Artificial Sequence: Synthetic oligonucleotide
  Antisense strand to SEQ ID NO: 32890
guaacccuggacaucagug

SEQ ID NO: 32892 - RNA, 19 nt, Artificial Sequence
  Description of Artificial Sequence: Synthetic oligonucleotide
  Sense strand starting at position 687 of SEQ ID NO: 381
ccacuugagccuugccgaa

SEQ ID NO: 32893 - RNA, 19 nt, Artificial Sequence
  Description of Artificial Sequence: Synthetic oligonucleotide
  Antisense strand to SEQ ID NO: 32892
uucggcaaggcucaagugg

SEQ ID NO: 32894 - RNA, 19 nt, Artificial Sequence
  Description of Artificial Sequence: Synthetic oligonucleotide
  Sense strand starting at position 860 of SEQ ID NO: 381
cggagggagugguauuuga

SEQ ID NO: 32895 - RNA, 19 nt, Artificial Sequence
  Description of Artificial Sequence: Synthetic oligonucleotide
  Antisense strand to SEQ ID NO: 32894
ucaaauaccacucccuccg

SEQ ID NO: 32896 - RNA, 19 nt, Artificial Sequence
  Description of Artificial Sequence: Synthetic oligonucleotide
  Sense strand starting at position 870 of SEQ ID NO: 381
gguauuugaucugagcuug

SEQ ID NO: 32897 - RNA, 19 nt, Artificial Sequence
  Description of Artificial Sequence: Synthetic oligonucleotide
  Antisense strand to SEQ ID NO: 32896
caagcucagaucaaauacc

SEQ ID NO: 32898 - RNA, 19 nt, Artificial Sequence
  Description of Artificial Sequence: Synthetic oligonucleotide
  Sense strand starting at position 957 of SEQ ID NO: 381
gcuuaagaucccugagggu

SEQ ID NO: 32899 - RNA, 19 nt, Artificial Sequence
  Description of Artificial Sequence: Synthetic oligonucleotide
  Antisense strand to SEQ ID NO: 32898
acccucagggaucuuaagc

SEQ ID NO: 32900 - RNA, 19 nt, Artificial Sequence
  Description of Artificial Sequence: Synthetic oligonucleotide
  Sense strand starting at position 1042 of SEQ ID NO: 381
cucaauacgauauggaagu

SEQ ID NO: 32901 - RNA, 19 nt, Artificial Sequence
  Description of Artificial Sequence: Synthetic oligonucleotide
  Antisense strand to SEQ ID NO: 32900
acuuccauaucguauugag

SEQ ID NO: 32902 - RNA, 19 nt, Artificial Sequence
  Description of Artificial Sequence: Synthetic oligonucleotide
  Sense strand starting at position 1079 of SEQ ID NO: 381
ggcacugaauaccauaaga

SEQ ID NO: 32903 - RNA, 19 nt, Artificial Sequence
  Description of Artificial Sequence: Synthetic oligonucleotide
  Antisense strand to SEQ ID NO: 32902
ucuuaugguauucagugcc

SEQ ID NO: 32904 - RNA, 19 nt, Artificial Sequence
  Description of Artificial Sequence: Synthetic oligonucleotide
  Sense strand starting at position 1537 of SEQ ID NO: 381
uuggacagguuacuuaaua

SEQ ID NO: 32905 - RNA, 19 nt, Artificial Sequence
  Description of Artificial Sequence: Synthetic oligonucleotide
  Antisense strand to SEQ ID NO: 32904
uauuaaguaaccuguccaa

SEQ ID NO: 32906 - RNA, 19 nt, Artificial Sequence
  Description of Artificial Sequence: Synthetic oligonucleotide
  Sense strand starting at position 1538 of SEQ ID NO: 381
uggacagguuacuuaauau

SEQ ID NO: 32907 - RNA, 19 nt, Artificial Sequence
  Description of Artificial Sequence: Synthetic oligonucleotide
  Antisense strand to SEQ ID NO: 32906
auauuaaguaaccugucca

SEQ ID NO: 32908 - RNA, 19 nt, Artificial Sequence
  Description of Artificial Sequence: Synthetic oligonucleotide
  Sense strand starting at position 1545 of SEQ ID NO: 381
guuacuuaauaucucuagu

SEQ ID NO: 32909 - RNA, 19 nt, Artificial Sequence
  Description of Artificial Sequence: Synthetic oligonucleotide
  Antisense strand to SEQ ID NO: 32908
acuagagauauuaaguaac

SEQ ID NO: 32910 - RNA, 19 nt, Artificial Sequence
  Description of Artificial Sequence: Synthetic oligonucleotide
  Sense strand starting at position 1611 of SEQ ID NO: 381
guuuguugugcagauuaaa

SEQ ID NO: 32911 - RNA, 19 nt, Artificial Sequence
  Description of Artificial Sequence: Synthetic oligonucleotide
  Antisense strand to SEQ ID NO: 32910
uuuaaucugcacaacaaac

SEQ ID NO: 32912 - RNA, 19 nt, Artificial Sequence
  Description of Artificial Sequence: Synthetic oligonucleotide
  Sense strand starting at position 1658 of SEQ ID NO: 381
acggcaggcacucaauauu

SEQ ID NO: 32913 - RNA, 19 nt, Artificial Sequence
  Description of Artificial Sequence: Synthetic oligonucleotide
  Antisense strand to SEQ ID NO: 32912
aauauugagugccugccgu

SEQ ID NO: 32914 - RNA, 19 nt, Artificial Sequence
  Description of Artificial Sequence: Synthetic oligonucleotide
  Sense strand starting at position 1745 of SEQ ID NO: 381
ucuggcuucccauguagaa

SEQ ID NO: 32915 - RNA, 19 nt, Artificial Sequence
  Description of Artificial Sequence: Synthetic oligonucleotide
  Antisense strand to SEQ ID NO: 32914
uucuacaugggaagccaga

SEQ ID NO: 32916 - RNA, 19 nt, Artificial Sequence
  Description of Artificial Sequence: Synthetic oligonucleotide
  Sense strand starting at position 2014 of SEQ ID NO: 381
caaguuaaugguggcauga

SEQ ID NO: 32917 - RNA, 19 nt, Artificial Sequence
  Description of Artificial Sequence: Synthetic oligonucleotide
  Antisense strand to SEQ ID NO: 32916
ucaugccaccauuaacuug

SEQ ID NO: 32918 - RNA, 19 nt, Artificial Sequence
  Description of Artificial Sequence: Synthetic oligonucleotide
  Sense strand starting at position 2221 of SEQ ID NO: 381
cggguagaucugggaucaa

SEQ ID NO: 32919 - RNA, 19 nt, Artificial Sequence
  Description of Artificial Sequence: Synthetic oligonucleotide
  Antisense strand to SEQ ID NO: 32918
uugaucccagaucuacccg

SEQ ID NO: 32920 - RNA, 19 nt, Artificial Sequence
  Description of Artificial Sequence: Synthetic oligonucleotide
  Sense strand starting at position 2551 of SEQ ID NO: 381
gcaagaaugcagcaggaau

SEQ ID NO: 32921 - RNA, 19 nt, Artificial Sequence
  Description of Artificial Sequence: Synthetic oligonucleotide
  Antisense strand to SEQ ID NO: 32920
auuccugcugcauucuugc

SEQ ID NO: 32922 - RNA, 19 nt, Artificial Sequence
  Description of Artificial Sequence: Synthetic oligonucleotide
  Sense strand starting at position 2630 of SEQ ID NO: 381
guaacuuccggccgagaau

SEQ ID NO: 32923 - RNA, 19 nt, Artificial Sequence
  Description of Artificial Sequence: Synthetic oligonucleotide
  Antisense strand to SEQ ID NO: 32922
auucucggccggaaguuac

SEQ ID NO: 32924 - RNA, 19 nt, Artificial Sequence
  Description of Artificial Sequence: Synthetic oligonucleotide
  Sense strand starting at position 2631 of SEQ ID NO: 381
uaacuuccggccgagaaua

SEQ ID NO: 32925 - RNA, 19 nt, Artificial Sequence
  Description of Artificial Sequence: Synthetic oligonucleotide
  Antisense strand to SEQ ID NO: 32924
uauucucggccggaaguua

SEQ ID NO: 32926 - RNA, 19 nt, Artificial Sequence
  Description of Artificial Sequence: Synthetic oligonucleotide
  Sense strand starting at position 2675 of SEQ ID NO: 381
ccaagccuugcuugaacau

SEQ ID NO: 32927 - RNA, 19 nt, Artificial Sequence
  Description of Artificial Sequence: Synthetic oligonucleotide
  Antisense strand to SEQ ID NO: 32926
auguucaagcaaggcuugg

SEQ ID NO: 32928 - RNA, 19 nt, Artificial Sequence
  Description of Artificial Sequence: Synthetic oligonucleotide
  Sense strand starting at position 2743 of SEQ ID NO: 381
gggacuuuguguccaacag

SEQ ID NO: 32929 - RNA, 19 nt, Artificial Sequence
  Description of Artificial Sequence: Synthetic oligonucleotide
  Antisense strand to SEQ ID NO: 32928
cuguuggacacaaaguccc

SEQ ID NO: 32930 - RNA, 19 nt, Artificial Sequence
  Description of Artificial Sequence: Synthetic oligonucleotide
  Sense strand starting at position 2775 of SEQ ID NO: 381
ucuucucaucuagagucuu

SEQ ID NO: 32931 - RNA, 19 nt, Artificial Sequence
  Description of Artificial Sequence: Synthetic oligonucleotide
  Antisense strand to SEQ ID NO: 32930
aagacucuagaugagaaga

SEQ ID NO: 32932 - RNA, 19 nt, Artificial Sequence
  Description of Artificial Sequence: Synthetic oligonucleotide
  Sense strand starting at position 2892 of SEQ ID NO: 381
cugcucucccagugaggau

SEQ ID NO: 32933 - RNA, 19 nt, Artificial Sequence
  Description of Artificial Sequence: Synthetic oligonucleotide
  Antisense strand to SEQ ID NO: 32932
auccucacugggagagcag

SEQ ID NO: 32934 - RNA, 19 nt, Artificial Sequence
  Description of Artificial Sequence: Synthetic oligonucleotide
  Sense strand starting at position 2967 of SEQ ID NO: 381
gugguagcccgggaaagua

SEQ ID NO: 32935 - RNA, 19 nt, Artificial Sequence
  Description of Artificial Sequence: Synthetic oligonucleotide
  Antisense strand to SEQ ID NO: 32934
uacuuucccgggcuaccac

SEQ ID NO: 32936 - RNA, 19 nt, Artificial Sequence
  Description of Artificial Sequence: Synthetic oligonucleotide
  Sense strand starting at position 3010 of SEQ ID NO: 381
agguuccuggauugcgaaa

SEQ ID NO: 32937 - RNA, 19 nt, Artificial Sequence
  Description of Artificial Sequence: Synthetic oligonucleotide
  Antisense strand to SEQ ID NO: 32936
uuucgcaauccaggaaccu

SEQ ID NO: 32938 - RNA, 19 nt, Artificial Sequence
  Description of Artificial Sequence: Synthetic oligonucleotide
  Sense strand starting at position 3023 of SEQ ID NO: 381
gcgaaacuggagcaagaau

SEQ ID NO: 32939 - RNA, 19 nt, Artificial Sequence
  Description of Artificial Sequence: Synthetic oligonucleotide
  Antisense strand to SEQ ID NO: 32938
auucuugcuccaguuucgc

SEQ ID NO: 32940 - RNA, 19 nt, Artificial Sequence
  Description of Artificial Sequence: Synthetic oligonucleotide
  Sense strand starting at position 3057 of SEQ ID NO: 381
ugcugagaggauuaaacgu

SEQ ID NO: 32941 - RNA, 19 nt, Artificial Sequence
  Description of Artificial Sequence: Synthetic oligonucleotide
  Antisense strand to SEQ ID NO: 32940
acguuuaauccucucagca

SEQ ID NO: 32942 - RNA, 19 nt, Artificial Sequence
  Description of Artificial Sequence: Synthetic oligonucleotide
  Sense strand starting at position 3063 of SEQ ID NO: 381
gaggauuaaacgugauagu

SEQ ID NO: 32943 - RNA, 19 nt, Artificial Sequence
  Description of Artificial Sequence: Synthetic oligonucleotide
  Antisense strand to SEQ ID NO: 32942
acuaucacguuuaauccuc

SEQ ID NO: 32944 - RNA, 19 nt, Artificial Sequence
  Description of Artificial Sequence: Synthetic oligonucleotide
  Sense strand starting at position 3064 of SEQ ID NO: 381
aggauuaaacgugauagug

SEQ ID NO: 32945 - RNA, 19 nt, Artificial Sequence
  Description of Artificial Sequence: Synthetic oligonucleotide
  Antisense strand to SEQ ID NO: 32944
cacuaucacguuuaauccu

SEQ ID NO: 32946 - RNA, 19 nt, Artificial Sequence
  Description of Artificial Sequence: Synthetic oligonucleotide
  Sense strand starting at position 3073 of SEQ ID NO: 381
cgugauaguguaugagaag

SEQ ID NO: 32947 - RNA, 19 nt, Artificial Sequence
  Description of Artificial Sequence: Synthetic oligonucleotide
  Antisense strand to SEQ ID NO: 32946
cuucucauacacuaucacg

SEQ ID NO: 32948 - RNA, 19 nt, Artificial Sequence
  Description of Artificial Sequence: Synthetic oligonucleotide
  Sense strand starting at position 3085 of SEQ ID NO: 381
ugagaagucuuagccagug

SEQ ID NO: 32949 - RNA, 19 nt, Artificial Sequence
  Description of Artificial Sequence: Synthetic oligonucleotide
  Antisense strand to SEQ ID NO: 32948
cacuggcuaagacuucuca

SEQ ID NO: 32950 - RNA, 19 nt, Artificial Sequence
  Description of Artificial Sequence: Synthetic oligonucleotide
  Sense strand starting at position 3134 of SEQ ID NO: 381
uucuauuuauccuagagga

SEQ ID NO: 32951 - RNA, 19 nt, Artificial Sequence
  Description of Artificial Sequence: Synthetic oligonucleotide
  Antisense strand to SEQ ID NO: 32950
uccucuaggauaaauagaa

SEQ ID NO: 32952 - RNA, 19 nt, Artificial Sequence
  Description of Artificial Sequence: Synthetic oligonucleotide
  Sense strand starting at position 3290 of SEQ ID NO: 381
gagggauuggcuuaccugu

SEQ ID NO: 32953 - RNA, 19 nt, Artificial Sequence
  Description of Artificial Sequence: Synthetic oligonucleotide
  Antisense strand to SEQ ID NO: 32952
acagguaagccaaucccuc

SEQ ID NO: 32954 - RNA, 19 nt, Artificial Sequence
  Description of Artificial Sequence: Synthetic oligonucleotide
  Sense strand starting at position 3738 of SEQ ID NO: 381
acaccuauuguguguauga

SEQ ID NO: 32955 - RNA, 19 nt, Artificial Sequence
  Description of Artificial Sequence: Synthetic oligonucleotide
  Antisense strand to SEQ ID NO: 32954
ucauacacacaauaggugu

SEQ ID NO: 32956 - RNA, 19 nt, Artificial Sequence
  Description of Artificial Sequence: Synthetic oligonucleotide
  Sense strand starting at position 3740 of SEQ ID NO: 381
accuauuguguguaugaga

SEQ ID NO: 32957 - RNA, 19 nt, Artificial Sequence
  Description of Artificial Sequence: Synthetic oligonucleotide
  Antisense strand to SEQ ID NO: 32956
ucucauacacacaauaggu

SEQ ID NO: 32958 - RNA, 19 nt, Artificial Sequence
  Description of Artificial Sequence: Synthetic oligonucleotide
  Sense strand starting at position 1925 of SEQ ID NO: 382
gucccugagccugagaaga

SEQ ID NO: 32959 - RNA, 19 nt, Artificial Sequence
  Description of Artificial Sequence: Synthetic oligonucleotide
  Antisense strand to SEQ ID NO: 32958
ucuucucaggcucagggac

SEQ ID NO: 32960 - RNA, 19 nt, Artificial Sequence
  Description of Artificial Sequence: Synthetic oligonucleotide
  Sense strand starting at position 1927 of SEQ ID NO: 382
cccugagccugagaagaaa

SEQ ID NO: 32961 - RNA, 19 nt, Artificial Sequence
  Description of Artificial Sequence: Synthetic oligonucleotide
  Antisense strand to SEQ ID NO: 32960
uuucuucucaggcucaggg

SEQ ID NO: 32962 - RNA, 19 nt, Artificial Sequence
  Description of Artificial Sequence: Synthetic oligonucleotide
  Sense strand starting at position 1953 of SEQ ID NO: 382
cggcgcucgccagaaguau

SEQ ID NO: 32963 - RNA, 19 nt, Artificial Sequence
  Description of Artificial Sequence: Synthetic oligonucleotide
  Antisense strand to SEQ ID NO: 32962
auacuucuggcgagcgccg

SEQ ID NO: 32964 - RNA, 19 nt, Artificial Sequence
  Description of Artificial Sequence: Synthetic oligonucleotide
  Sense strand starting at position 1982 of SEQ ID NO: 382
uguguugacgccuaaugau

SEQ ID NO: 32965 - RNA, 19 nt, Artificial Sequence
  Description of Artificial Sequence: Synthetic oligonucleotide
  Antisense strand to SEQ ID NO: 32964
aucauuaggcgucaacaca

SEQ ID NO: 32966 - RNA, 19 nt, Artificial Sequence
  Description of Artificial Sequence: Synthetic oligonucleotide
  Sense strand starting at position 1988 of SEQ ID NO: 382
gacgccuaaugaugauaua

SEQ ID NO: 32967 - RNA, 19 nt, Artificial Sequence
  Description of Artificial Sequence: Synthetic oligonucleotide
  Antisense strand to SEQ ID NO: 32966
uauaucaucauuaggcguc

SEQ ID NO: 32968 - RNA, 19 nt, Artificial Sequence
  Description of Artificial Sequence: Synthetic oligonucleotide
  Sense strand starting at position 1989 of SEQ ID NO: 382
acgccuaaugaugauauaa

SEQ ID NO: 32969 - RNA, 19 nt, Artificial Sequence
  Description of Artificial Sequence: Synthetic oligonucleotide
  Antisense strand to SEQ ID NO: 32968
uuauaucaucauuaggcgu

SEQ ID NO: 32970 - RNA, 19 nt, Artificial Sequence
  Description of Artificial Sequence: Synthetic oligonucleotide
  Sense strand starting at position 1991 of SEQ ID NO: 382
gccuaaugaugauauaaua

SEQ ID NO: 32971 - RNA, 19 nt, Artificial Sequence
  Description of Artificial Sequence: Synthetic oligonucleotide
  Antisense strand to SEQ ID NO: 32970
uauuauaucaucauuaggc

SEQ ID NO: 32972 - RNA, 19 nt, Artificial Sequence
  Description of Artificial Sequence: Synthetic oligonucleotide
  Sense strand starting at position 2075 of SEQ ID NO: 382
gcgggaugaugacgcauaa

SEQ ID NO: 32973 - RNA, 19 nt, Artificial Sequence
  Description of Artificial Sequence: Synthetic oligonucleotide
  Antisense strand to SEQ ID NO: 32972
uuaugcgucaucaucccgc

SEQ ID NO: 32974 - RNA, 19 nt, Artificial Sequence
  Description of Artificial Sequence: Synthetic oligonucleotide
  Sense strand starting at position 2751 of SEQ ID NO: 382
ccugcuucguccuccuaaa

SEQ ID NO: 32975 - RNA, 19 nt, Artificial Sequence
  Description of Artificial Sequence: Synthetic oligonucleotide
  Antisense strand to SEQ ID NO: 32974
uuuaggaggacgaagcagg

SEQ ID NO: 32976 - RNA, 19 nt, Artificial Sequence
  Description of Artificial Sequence: Synthetic oligonucleotide
  Sense strand starting at position 1319 of SEQ ID NO: 383
ucaguuuagucuuccguac

SEQ ID NO: 32977 - RNA, 19 nt, Artificial Sequence
  Description of Artificial Sequence: Synthetic oligonucleotide
  Antisense strand to SEQ ID NO: 32976
guacggaagacuaaacuga

SEQ ID NO: 32978 - RNA, 19 nt, Artificial Sequence
  Description of Artificial Sequence: Synthetic oligonucleotide
  Sense strand starting at position 1321 of SEQ ID NO: 383
aguuuagucuuccguacaa

SEQ ID NO: 32979 - RNA, 19 nt, Artificial Sequence
  Description of Artificial Sequence: Synthetic oligonucleotide
  Antisense strand to SEQ ID NO: 32978
uuguacggaagacuaaacu

SEQ ID NO: 32980 - RNA, 19 nt, Artificial Sequence
  Description of Artificial Sequence: Synthetic oligonucleotide
  Sense strand starting at position 1908 of SEQ ID NO: 383
uccuguauuggcgcguaau

SEQ ID NO: 32981 - RNA, 19 nt, Artificial Sequence
  Description of Artificial Sequence: Synthetic oligonucleotide
  Antisense strand to SEQ ID NO: 32980
auuacgcgccaauacagga

SEQ ID NO: 32982 - RNA, 19 nt, Artificial Sequence
  Description of Artificial Sequence: Synthetic oligonucleotide
  Sense strand starting at position 1909 of SEQ ID NO: 383
ccuguauuggcgcguaaug

SEQ ID NO: 32983 - RNA, 19 nt, Artificial Sequence
  Description of Artificial Sequence: Synthetic oligonucleotide
  Antisense strand to SEQ ID NO: 32982
cauuacgcgccaauacagg

SEQ ID NO: 32984 - RNA, 19 nt, Artificial Sequence
  Description of Artificial Sequence: Synthetic oligonucleotide
  Sense strand starting at position 1910 of SEQ ID NO: 383
cuguauuggcgcguaauga

SEQ ID NO: 32985 - RNA, 19 nt, Artificial Sequence
  Description of Artificial Sequence: Synthetic oligonucleotide
  Antisense strand to SEQ ID NO: 32984
ucauuacgcgccaauacag

SEQ ID NO: 32986 - RNA, 19 nt, Artificial Sequence
  Description of Artificial Sequence: Synthetic oligonucleotide
  Sense strand starting at position 1911 of SEQ ID NO: 383
uguauuggcgcguaaugau

SEQ ID NO: 32987 - RNA, 19 nt, Artificial Sequence
  Description of Artificial Sequence: Synthetic oligonucleotide
  Antisense strand to SEQ ID NO: 32986
aucauuacgcgccaauaca

SEQ ID NO: 32988 - RNA, 19 nt, Artificial Sequence
  Description of Artificial Sequence: Synthetic oligonucleotide
  Sense strand starting at position 1918 of SEQ ID NO: 383
gcgcguaaugaugauauaa

SEQ ID NO: 32989 - RNA, 19 nt, Artificial Sequence
  Description of Artificial Sequence: Synthetic oligonucleotide
  Antisense strand to SEQ ID NO: 32988
uuauaucaucauuacgcgc

SEQ ID NO: 32990 - RNA, 19 nt, Artificial Sequence
  Description of Artificial Sequence: Synthetic oligonucleotide
  Sense strand starting at position 1920 of SEQ ID NO: 383
gcguaaugaugauauaaua

SEQ ID NO: 32991 - RNA, 19 nt, Artificial Sequence
  Description of Artificial Sequence: Synthetic oligonucleotide
  Antisense strand to SEQ ID NO: 32990
uauuauaucaucauuacgc

SEQ ID NO: 32992 - RNA, 19 nt, Artificial Sequence
  Description of Artificial Sequence: Synthetic oligonucleotide
  Sense strand starting at position 1999 of SEQ ID NO: 383
gugucugcgcgggaugaua

SEQ ID NO: 32993 - RNA, 19 nt, Artificial Sequence
  Description of Artificial Sequence: Synthetic oligonucleotide
  Antisense strand to SEQ ID NO: 32992
uaucaucccgcgcagacac

SEQ ID NO: 32994 - RNA, 19 nt, Artificial Sequence
  Description of Artificial Sequence: Synthetic oligonucleotide
  Sense strand starting at position 2007 of SEQ ID NO: 383
gcgggaugauaacgcauaa

SEQ ID NO: 32995 - RNA, 19 nt, Artificial Sequence
  Description of Artificial Sequence: Synthetic oligonucleotide
  Antisense strand to SEQ ID NO: 32994
uuaugcguuaucaucccgc

SEQ ID NO: 32996 - RNA, 19 nt, Artificial Sequence
  Description of Artificial Sequence: Synthetic oligonucleotide
  Sense strand starting at position 2093 of SEQ ID NO: 383
cgggcugugacgcaggaau

SEQ ID NO: 32997 - RNA, 19 nt, Artificial Sequence
  Description of Artificial Sequence: Synthetic oligonucleotide
  Antisense strand to SEQ ID NO: 32996
auuccugcgucacagcccg

SEQ ID NO: 32998 - RNA, 19 nt, Artificial Sequence
  Description of Artificial Sequence: Synthetic oligonucleotide
  Sense strand starting at position 3960 of SEQ ID NO: 384
agccaacagugucaagauu

SEQ ID NO: 32999 - RNA, 19 nt, Artificial Sequence
  Description of Artificial Sequence: Synthetic oligonucleotide
  Antisense strand to SEQ ID NO: 32998
aaucuugacacuguuggcu

SEQ ID NO: 33000 - RNA, 19 nt, Artificial Sequence
  Description of Artificial Sequence: Synthetic oligonucleotide
  Sense strand starting at position 3935 of SEQ ID NO: 384
acuauuggauucuagaaga

SEQ ID NO: 33001 - RNA, 19 nt, Artificial Sequence
  Description of Artificial Sequence: Synthetic oligonucleotide
  Antisense strand to SEQ ID NO: 33000
ucuucuagaauccaauagu

SEQ ID NO: 33002 - RNA, 19 nt, Artificial Sequence
  Description of Artificial Sequence: Synthetic oligonucleotide
  Sense strand starting at position 3930 of SEQ ID NO: 384
uugugacuauuggauucua

SEQ ID NO: 33003 - RNA, 19 nt, Artificial Sequence
  Description of Artificial Sequence: Synthetic oligonucleotide
  Antisense strand to SEQ ID NO: 33002
uagaauccaauagucacaa

SEQ ID NO: 33004 - RNA, 19 nt, Artificial Sequence
  Description of Artificial Sequence: Synthetic oligonucleotide
  Sense strand starting at position 3925 of SEQ ID NO: 384
gagccuugugacuauugga

SEQ ID NO: 33005 - RNA, 19 nt, Artificial Sequence
  Description of Artificial Sequence: Synthetic oligonucleotide
  Antisense strand to SEQ ID NO: 33004
uccaauagucacaaggcuc

SEQ ID NO: 33006 - RNA, 19 nt, Artificial Sequence
  Description of Artificial Sequence: Synthetic oligonucleotide
  Sense strand starting at position 3735 of SEQ ID NO: 384
guuccaugaggucagaacu

SEQ ID NO: 33007 - RNA, 19 nt, Artificial Sequence
  Description of Artificial Sequence: Synthetic oligonucleotide
  Antisense strand to SEQ ID NO: 33006
aguucugaccucauggaac

SEQ ID NO: 33008 - RNA, 19 nt, Artificial Sequence
  Description of Artificial Sequence: Synthetic oligonucleotide
  Sense strand starting at position 3608 of SEQ ID NO: 384
gcuauucugcuugagguga

SEQ ID NO: 33009 - RNA, 19 nt, Artificial Sequence
  Description of Artificial Sequence: Synthetic oligonucleotide
  Antisense strand to SEQ ID NO: 33008
ucaccucaagcagaauagc

SEQ ID NO: 33010 - RNA, 19 nt, Artificial Sequence
  Description of Artificial Sequence: Synthetic oligonucleotide
  Sense strand starting at position 3606 of SEQ ID NO: 384
gagcuauucugcuugaggu

SEQ ID NO: 33011 - RNA, 19 nt, Artificial Sequence
  Description of Artificial Sequence: Synthetic oligonucleotide
  Antisense strand to SEQ ID NO: 33010
accucaagcagaauagcuc

SEQ ID NO: 33012 - RNA, 19 nt, Artificial Sequence
  Description of Artificial Sequence: Synthetic oligonucleotide
  Sense strand starting at position 3558 of SEQ ID NO: 384
caguuaggaugcuauagga

SEQ ID NO: 33013 - RNA, 19 nt, Artificial Sequence
  Description of Artificial Sequence: Synthetic oligonucleotide
  Antisense strand to SEQ ID NO: 33012
uccuauagcauccuaacug

SEQ ID NO: 33014 - RNA, 19 nt, Artificial Sequence
  Description of Artificial Sequence: Synthetic oligonucleotide
  Sense strand starting at position 3534 of SEQ ID NO: 384
gguguaaugcggcagggaa

SEQ ID NO: 33015 - RNA, 19 nt, Artificial Sequence
  Description of Artificial Sequence: Synthetic oligonucleotide
  Antisense strand to SEQ ID NO: 33014
uucccugccgcauuacacc

SEQ ID NO: 33016 - RNA, 19 nt, Artificial Sequence
  Description of Artificial Sequence: Synthetic oligonucleotide
  Sense strand starting at position 3486 of SEQ ID NO: 384
gggcacauaagaugaguau

SEQ ID NO: 33017 - RNA, 19 nt, Artificial Sequence
  Description of Artificial Sequence: Synthetic oligonucleotide
  Antisense strand to SEQ ID NO: 33016
auacucaucuuaugugccc

SEQ ID NO: 33018 - RNA, 19 nt, Artificial Sequence
  Description of Artificial Sequence: Synthetic oligonucleotide
  Sense strand starting at position 3479 of SEQ ID NO: 384
gggcucugggcacauaaga

SEQ ID NO: 33019 - RNA, 19 nt, Artificial Sequence
  Description of Artificial Sequence: Synthetic oligonucleotide
  Antisense strand to SEQ ID NO: 33018
ucuuaugugcccagagccc

SEQ ID NO: 33020 - RNA, 19 nt, Artificial Sequence
  Description of Artificial Sequence: Synthetic oligonucleotide
  Sense strand starting at position 3454 of SEQ ID NO: 384
ucucuuaugugccaaauga

SEQ ID NO: 33021 - RNA, 19 nt, Artificial Sequence
  Description of Artificial Sequence: Synthetic oligonucleotide
  Antisense strand to SEQ ID NO: 33020
ucauuuggcacauaagaga

SEQ ID NO: 33022 - RNA, 19 nt, Artificial Sequence
  Description of Artificial Sequence: Synthetic oligonucleotide
  Sense strand starting at position 3415 of SEQ ID NO: 384
gggugaagucaagaggucu

SEQ ID NO: 33023 - RNA, 19 nt, Artificial Sequence
  Description of Artificial Sequence: Synthetic oligonucleotide
  Antisense strand to SEQ ID NO: 33022
agaccucuugacuucaccc

SEQ ID NO: 33024 - RNA, 19 nt, Artificial Sequence
  Description of Artificial Sequence: Synthetic oligonucleotide
  Sense strand starting at position 3357 of SEQ ID NO: 384
uguuuacuggcggauuaga

SEQ ID NO: 33025 - RNA, 19 nt, Artificial Sequence
  Description of Artificial Sequence: Synthetic oligonucleotide
  Antisense strand to SEQ ID NO: 33024
ucuaauccgccaguaaaca

SEQ ID NO: 33026 - RNA, 19 nt, Artificial Sequence
  Description of Artificial Sequence: Synthetic oligonucleotide
  Sense strand starting at position 3228 of SEQ ID NO: 384
gccuuuaggugugcagcaa

SEQ ID NO: 33027 - RNA, 19 nt, Artificial Sequence
  Description of Artificial Sequence: Synthetic oligonucleotide
  Antisense strand to SEQ ID NO: 33026
uugcugcacaccuaaaggc

SEQ ID NO: 33028 - RNA, 19 nt, Artificial Sequence
  Description of Artificial Sequence: Synthetic oligonucleotide
  Sense strand starting at position 3187 of SEQ ID NO: 384
aaaugaaacugccaagugu

SEQ ID NO: 33029 - RNA, 19 nt, Artificial Sequence
  Description of Artificial Sequence: Synthetic oligonucleotide
  Antisense strand to SEQ ID NO: 33028
acacuuggcaguuucauuu

SEQ ID NO: 33030 - RNA, 19 nt, Artificial Sequence
  Description of Artificial Sequence: Synthetic oligonucleotide
  Sense strand starting at position 2988 of SEQ ID NO: 384
caguuuccuucuggaagac

SEQ ID NO: 33031 - RNA, 19 nt, Artificial Sequence
  Description of Artificial Sequence: Synthetic oligonucleotide
  Antisense strand to SEQ ID NO: 33030
gucuuccagaaggaaacug

SEQ ID NO: 33032 - RNA, 19 nt, Artificial Sequence
  Description of Artificial Sequence: Synthetic oligonucleotide
  Sense strand starting at position 2987 of SEQ ID NO: 384
acaguuuccuucuggaaga

SEQ ID NO: 33033 - RNA, 19 nt, Artificial Sequence
  Description of Artificial Sequence: Synthetic oligonucleotide
  Antisense strand to SEQ ID NO: 33032
ucuuccagaaggaaacugu

SEQ ID NO: 33034 - RNA, 19 nt, Artificial Sequence
  Description of Artificial Sequence: Synthetic oligonucleotide
  Sense strand starting at position 2984 of SEQ ID NO: 384
agaacaguuuccuucugga

SEQ ID NO: 33035 - RNA, 19 nt, Artificial Sequence
  Description of Artificial Sequence: Synthetic oligonucleotide
  Antisense strand to SEQ ID NO: 33034
uccagaaggaaacuguucu

SEQ ID NO: 33036 - RNA, 19 nt, Artificial Sequence
  Description of Artificial Sequence: Synthetic oligonucleotide
  Sense strand starting at position 2968 of SEQ ID NO: 384
gugaguuguugagaauaga

SEQ ID NO: 33037 - RNA, 19 nt, Artificial Sequence
  Description of Artificial Sequence: Synthetic oligonucleotide
  Antisense strand to SEQ ID NO: 33036
ucuauucucaacaacucac

SEQ ID NO: 33038 - RNA, 19 nt, Artificial Sequence
  Description of Artificial Sequence: Synthetic oligonucleotide
  Sense strand starting at position 2964 of SEQ ID NO: 384
gacugugaguuguugagaa

SEQ ID NO: 33039 - RNA, 19 nt, Artificial Sequence
  Description of Artificial Sequence: Synthetic oligonucleotide
  Antisense strand to SEQ ID NO: 33038
uucucaacaacucacaguc

SEQ ID NO: 33040 - RNA, 19 nt, Artificial Sequence
  Description of Artificial Sequence: Synthetic oligonucleotide
  Sense strand starting at position 2926 of SEQ ID NO: 384
caguguacaugugcuucua

SEQ ID NO: 33041 - RNA, 19 nt, Artificial Sequence
  Description of Artificial Sequence: Synthetic oligonucleotide
  Antisense strand to SEQ ID NO: 33040
uagaagcacauguacacug

SEQ ID NO: 33042 - RNA, 19 nt, Artificial Sequence
  Description of Artificial Sequence: Synthetic oligonucleotide
  Sense strand starting at position 2635 of SEQ ID NO: 384
gcgagccaugauuagaacu

SEQ ID NO: 33043 - RNA, 19 nt, Artificial Sequence
  Description of Artificial Sequence: Synthetic oligonucleotide
  Antisense strand to SEQ ID NO: 33042
aguucuaaucauggcucgc

SEQ ID NO: 33044 - RNA, 19 nt, Artificial Sequence
  Description of Artificial Sequence: Synthetic oligonucleotide
  Sense strand starting at position 2382 of SEQ ID NO: 384
uaccuuuccggacaaaguu

SEQ ID NO: 33045 - RNA, 19 nt, Artificial Sequence
  Description of Artificial Sequence: Synthetic oligonucleotide
  Antisense strand to SEQ ID NO: 33044
aacuuuguccggaaaggua

SEQ ID NO: 33046 - RNA, 19 nt, Artificial Sequence
  Description of Artificial Sequence: Synthetic oligonucleotide
  Sense strand starting at position 2379 of SEQ ID NO: 384
acuuaccuuuccggacaaa

SEQ ID NO: 33047 - RNA, 19 nt, Artificial Sequence
  Description of Artificial Sequence: Synthetic oligonucleotide
  Antisense strand to SEQ ID NO: 33046
uuuguccggaaagguaagu

SEQ ID NO: 33048 - RNA, 19 nt, Artificial Sequence
  Description of Artificial Sequence: Synthetic oligonucleotide
  Sense strand starting at position 2377 of SEQ ID NO: 384
ucacuuaccuuuccggaca

SEQ ID NO: 33049 - RNA, 19 nt, Artificial Sequence
  Description of Artificial Sequence: Synthetic oligonucleotide
  Antisense strand to SEQ ID NO: 33048
uguccggaaagguaaguga

SEQ ID NO: 33050 - RNA, 19 nt, Artificial Sequence
  Description of Artificial Sequence: Synthetic oligonucleotide
  Sense strand starting at position 2363 of SEQ ID NO: 384
uccagugggacuugucacu

SEQ ID NO: 33051 - RNA, 19 nt, Artificial Sequence
  Description of Artificial Sequence: Synthetic oligonucleotide
  Antisense strand to SEQ ID NO: 33050
agugacaagucccacugga

SEQ ID NO: 33052 - RNA, 19 nt, Artificial Sequence
  Description of Artificial Sequence: Synthetic oligonucleotide
  Sense strand starting at position 2220 of SEQ ID NO: 384
gugccugccugucucuaaa

SEQ ID NO: 33053 - RNA, 19 nt, Artificial Sequence
  Description of Artificial Sequence: Synthetic oligonucleotide
  Antisense strand to SEQ ID NO: 33052
uuuagagacaggcaggcac

SEQ ID NO: 33054 - RNA, 19 nt, Artificial Sequence
  Description of Artificial Sequence: Synthetic oligonucleotide
  Sense strand starting at position 2115 of SEQ ID NO: 384
cuuccuguuucguuucuaa

SEQ ID NO: 33055 - RNA, 19 nt, Artificial Sequence
  Description of Artificial Sequence: Synthetic oligonucleotide
  Antisense strand to SEQ ID NO: 33054
uuagaaacgaaacaggaag

SEQ ID NO: 33056 - RNA, 19 nt, Artificial Sequence
  Description of Artificial Sequence: Synthetic oligonucleotide
  Sense strand starting at position 1659 of SEQ ID NO: 384
uuaagagccguuccgcuua

SEQ ID NO: 33057 - RNA, 19 nt, Artificial Sequence
  Description of Artificial Sequence: Synthetic oligonucleotide
  Antisense strand to SEQ ID NO: 33056
uaagcggaacggcucuuaa

SEQ ID NO: 33058 - RNA, 19 nt, Artificial Sequence
  Description of Artificial Sequence: Synthetic oligonucleotide
  Sense strand starting at position 1425 of SEQ ID NO: 384
gggccaaagugaucccaga

SEQ ID NO: 33059 - RNA, 19 nt, Artificial Sequence
  Description of Artificial Sequence: Synthetic oligonucleotide
  Antisense strand to SEQ ID NO: 33058
ucugggaucacuuuggccc

SEQ ID NO: 33060 - RNA, 19 nt, Artificial Sequence
  Description of Artificial Sequence: Synthetic oligonucleotide
  Sense strand starting at position 1334 of SEQ ID NO: 384
uugcccuucccagaaugaa

SEQ ID NO: 33061 - RNA, 19 nt, Artificial Sequence
  Description of Artificial Sequence: Synthetic oligonucleotide
  Antisense strand to SEQ ID NO: 33060
uucauucugggaagggcaa

SEQ ID NO: 33062 - RNA, 19 nt, Artificial Sequence
  Description of Artificial Sequence: Synthetic oligonucleotide
  Sense strand starting at position 1305 of SEQ ID NO: 384
guccuuuggucccuggaga

SEQ ID NO: 33063 - RNA, 19 nt, Artificial Sequence
  Description of Artificial Sequence: Synthetic oligonucleotide
  Antisense strand to SEQ ID NO: 33062
ucuccagggaccaaaggac

SEQ ID NO: 33064 - RNA, 19 nt, Artificial Sequence
  Description of Artificial Sequence: Synthetic oligonucleotide
  Sense strand starting at position 945 of SEQ ID NO: 384
uccugauggugucccucaa

SEQ ID NO: 33065 - RNA, 19 nt, Artificial Sequence
  Description of Artificial Sequence: Synthetic oligonucleotide
  Antisense strand to SEQ ID NO: 33064
uugagggacaccaucagga

SEQ ID NO: 33066 - RNA, 19 nt, Artificial Sequence
  Description of Artificial Sequence: Synthetic oligonucleotide
  Sense strand starting at position 533 of SEQ ID NO: 384
gggaaugccacgcgaacau

SEQ ID NO: 33067 - RNA, 19 nt, Artificial Sequence
  Description of Artificial Sequence: Synthetic oligonucleotide
  Antisense strand to SEQ ID NO: 33066
auguucgcguggcauuccc

SEQ ID NO: 33068 - RNA, 19 nt, Artificial Sequence
  Description of Artificial Sequence: Synthetic oligonucleotide
  Sense strand starting at position 118 of SEQ ID NO: 384
uggagagcuucuuccauuc

SEQ ID NO: 33069 - RNA, 19 nt, Artificial Sequence
  Description of Artificial Sequence: Synthetic oligonucleotide
  Antisense strand to SEQ ID NO: 33068
gaauggaagaagcucucca

SEQ ID NO: 33070 - RNA, 19 nt, Artificial Sequence
  Description of Artificial Sequence: Synthetic oligonucleotide
  Sense strand starting at position 95 of SEQ ID NO: 384
ggaagaacuucuucuggca

SEQ ID NO: 33071 - RNA, 19 nt, Artificial Sequence
  Description of Artificial Sequence: Synthetic oligonucleotide
  Antisense strand to SEQ ID NO: 33070
ugccagaagaaguucuucc

SEQ ID NO: 33072 - RNA, 19 nt, Artificial Sequence
  Description of Artificial Sequence: Synthetic oligonucleotide
  Sense strand starting at position 84 of SEQ ID NO: 384
cgauaaguuugggaagaac

SEQ ID NO: 33073 - RNA, 19 nt, Artificial Sequence
  Description of Artificial Sequence: Synthetic oligonucleotide
  Antisense strand to SEQ ID NO: 33072
guucuucccaaacuuaucg

SEQ ID NO: 33074 - RNA, 19 nt, Artificial Sequence
  Description of Artificial Sequence: Synthetic oligonucleotide
  Sense strand starting at position 83 of SEQ ID NO: 384
ccgauaaguuugggaagaa

SEQ ID NO: 33075 - RNA, 19 nt, Artificial Sequence
  Description of Artificial Sequence: Synthetic oligonucleotide
  Antisense strand to SEQ ID NO: 33074
uucuucccaaacuuaucgg

SEQ ID NO: 33076 - RNA, 19 nt, Artificial Sequence
  Description of Artificial Sequence: Synthetic oligonucleotide
  Sense strand starting at position 82 of SEQ ID NO: 384
cccgauaaguuugggaaga

SEQ ID NO: 33077 - RNA, 19 nt, Artificial Sequence
  Description of Artificial Sequence: Synthetic oligonucleotide
  Antisense strand to SEQ ID NO: 33076
ucuucccaaacuuaucggg

SEQ ID NO: 33078 - RNA, 19 nt, Artificial Sequence
  Description of Artificial Sequence: Synthetic oligonucleotide
  Sense strand starting at position 3924 of SEQ ID NO: 385
uaaauuauuuggcaaaggu

SEQ ID NO: 33079 - RNA, 19 nt, Artificial Sequence
  Description of Artificial Sequence: Synthetic oligonucleotide
  Antisense strand to SEQ ID NO: 33078
accuuugccaaauaauuua

SEQ ID NO: 33080 - RNA, 19 nt, Artificial Sequence
  Description of Artificial Sequence: Synthetic oligonucleotide
  Sense strand starting at position 3740 of SEQ ID NO: 385
uacacagaguuguauuaag

SEQ ID NO: 33081 - RNA, 19 nt, Artificial Sequence
  Description of Artificial Sequence: Synthetic oligonucleotide
  Antisense strand to SEQ ID NO: 33080
cuuaauacaacucugugua

SEQ ID NO: 33082 - RNA, 19 nt, Artificial Sequence
  Description of Artificial Sequence: Synthetic oligonucleotide
  Sense strand starting at position 3738 of SEQ ID NO: 385
uguacacagaguuguauua

SEQ ID NO: 33083 - RNA, 19 nt, Artificial Sequence
  Description of Artificial Sequence: Synthetic oligonucleotide
  Antisense strand to SEQ ID NO: 33082
uaauacaacucuguguaca

SEQ ID NO: 33084 - RNA, 19 nt, Artificial Sequence
  Description of Artificial Sequence: Synthetic oligonucleotide
  Sense strand starting at position 3693 of SEQ ID NO: 385
augcuuauugcugaacaac

SEQ ID NO: 33085 - RNA, 19 nt, Artificial Sequence
  Description of Artificial Sequence: Synthetic oligonucleotide
  Antisense strand to SEQ ID NO: 33084
guuguucagcaauaagcau

SEQ ID NO: 33086 - RNA, 19 nt, Artificial Sequence
  Description of Artificial Sequence: Synthetic oligonucleotide
  Sense strand starting at position 3624 of SEQ ID NO: 385
gaggaagaaucuuaaauug

SEQ ID NO: 33087 - RNA, 19 nt, Artificial Sequence
  Description of Artificial Sequence: Synthetic oligonucleotide
  Antisense strand to SEQ ID NO: 33086
caauuuaagauucuuccuc

SEQ ID NO: 33088 - RNA, 19 nt, Artificial Sequence
  Description of Artificial Sequence: Synthetic oligonucleotide
  Sense strand starting at position 3608 of SEQ ID NO: 385
agagauaaauuguaaagag

SEQ ID NO: 33089 - RNA, 19 nt, Artificial Sequence
  Description of Artificial Sequence: Synthetic oligonucleotide
  Antisense strand to SEQ ID NO: 33088
cucuuuacaauuuaucucu

SEQ ID NO: 33090 - RNA, 19 nt, Artificial Sequence
  Description of Artificial Sequence: Synthetic oligonucleotide
  Sense strand starting at position 3595 of SEQ ID NO: 385
ugguuucuugcuuagagau

SEQ ID NO: 33091 - RNA, 19 nt, Artificial Sequence
  Description of Artificial Sequence: Synthetic oligonucleotide
  Antisense strand to SEQ ID NO: 33090
aucucuaagcaagaaacca

SEQ ID NO: 33092 - RNA, 19 nt, Artificial Sequence
  Description of Artificial Sequence: Synthetic oligonucleotide
  Sense strand starting at position 3594 of SEQ ID NO: 385
augguuucuugcuuagaga

SEQ ID NO: 33093 - RNA, 19 nt, Artificial Sequence
  Description of Artificial Sequence: Synthetic oligonucleotide
  Antisense strand to SEQ ID NO: 33092
ucucuaagcaagaaaccau

SEQ ID NO: 33094 - RNA, 19 nt, Artificial Sequence
  Description of Artificial Sequence: Synthetic oligonucleotide
  Sense strand starting at position 3593 of SEQ ID NO: 385
uaugguuucuugcuuagag

SEQ ID NO: 33095 - RNA, 19 nt, Artificial Sequence
  Description of Artificial Sequence: Synthetic oligonucleotide
  Antisense strand to SEQ ID NO: 33094
cucuaagcaagaaaccaua

SEQ ID NO: 33096 - RNA, 19 nt, Artificial Sequence
  Description of Artificial Sequence: Synthetic oligonucleotide
  Sense strand starting at position 3589 of SEQ ID NO: 385
uuauuaugguuucuugcuu

SEQ ID NO: 33097 - RNA, 19 nt, Artificial Sequence
  Description of Artificial Sequence: Synthetic oligonucleotide
  Antisense strand to SEQ ID NO: 33096
aagcaagaaaccauaauaa

SEQ ID NO: 33098 - RNA, 19 nt, Artificial Sequence
  Description of Artificial Sequence: Synthetic oligonucleotide
  Sense strand starting at position 3566 of SEQ ID NO: 385
uuaugaggauugccuucua
